United States Patent Application Publication US 2026/0103690 A1 - sequence listing, part 36

SEQ ID NO: 167621 - protein, 342 aa, unidentified
MQITTIGLDIAKNVFQVHGTDSSEQVVVRKQLRRSQILAFFKALPPCLVGVEACATAHYWARELTKLGHRVRLMPAKDVKAYVKRNKNDAADAEAICEAVRRPTMRFVQIKSAEQQGRLMLHRTRDLLMRQRTQVINALRAHLAELGIVAAQGRDGIKELLTLIASEQDARLPVDAHTSLVVLAAGLSALQTMIRAIEKRIVVQHRSSEASMRLATIPGIGIIGATAIAATVPDPKVFRSGRDLAAWIGLVPREGSTGGKQKLGPISKRGDRYLRRILVVGACAVLRYARQQPAKYPWLTQLLARKPFKVVAVALANKMARIAWALLAKGGTYRAPALAAAA

SEQ ID NO: 167622 - protein, 353 aa, unidentified
MNSLTDLREVVDVVIGVDTHVHTHSAAVIDAATGGVLDEITVEATAQGYGELVEFANNHPMLRAWAIEGTGGHGAGLSRHLLDSSEIVIELDRPKRAARRNGAKSDPLDAIRAAREAMARPRLGTPRTGGERQALSVLLAARRSAINASTEAQLQVFSLVIAAPEPIRLRFRGQKLAAMLNTAANLRMHASYNIETTSTVVALRTLARRAHAMLKEARELQKALVAIIRTWRPDLLEEFGVGPIVAATVLCAWSHPGRIHSEAAFAMLAGVAPIPANSGQVTTRYRLNRYGDRQLNNALHTVVQSRIQYQQATRDYVARRIAEGKTSREIKRCLARYVARDLYRLLENTPTAA

SEQ ID NO: 167623 - protein, 340 aa, unidentified
MHITTIGLDIAKNVFQVHGIDAAENVVVRKQLRRGQVMKFFTALQPCLVGMEACATAHHWARELTKLGHEVRLMPAKDVKAYVKRNKNDAADAEAICEAVRRPTMRFVRAKSAEQQGRLMQHRTRDLLLRQQTQAINALRAHLAELGIAAAKGREGLKQLLKIIADEKDARLPIDARASLIVLAAQLQALHTMIGSIEKRIVVQHRANEASKRLECIHGIGVIGASAITATVNDPSAFRSGRDFAAWIGLVPRQDSTGGKQKLGPISKQGDRYLRRILVVGAVSVLRRAKLNPEKYPWLTQLLARRPFKVVAIALANKMARIAWALLANGSHYRPRLATT

SEQ ID NO: 167624 - protein, 343 aa, unidentified
MNYYAALDVSLRSVHLCVMDEKGEIQAEGQVDSEAEAIDAFLRKLGLEIMLVGLEAGTLTQYLTYGLRDAGYQVVCMEARQVKVALSAMRNKTDKNDARGIAQLLRTGWYSPVHVKSIESHQIRALLSSRKAVLTKCVDLENEIRGLFKVFGIKLPPRLGHGSFDRAVRETIETDRALCHALLPLLDARLVLYHTFRELDNRTRNMAHQDPVCQRLMSTPGVGFVTSLTFKAAVDDPTRFKHSRTVAAHFGLTPRRFQSGEMDNPGHISRAGDPDVRCTLYVAANAMMTRSSRWSPLKVWGMQLAKKRGHKRAVVAVARKLAVILHRMWLDGTTYRWGTEGAP

SEQ ID NO: 167625 - protein, 340 aa, unidentified
MRLYTGFDLHSSNMYLGICDENGKRVFKKKLPNDSEIVLSTLKPFKSDIAGIAVESTYNWYWLVDLLMADGYRVHLANPAKIQRYSGLKYADDQHDAFWLAEMLRLGILPVGYIYPKEERPIRDLLRKRGHLVRLRTSLILSLQNIISRNNGFKLKVGDVKALKTDRVAPYLMDNEDLALAGRVSKESIDFLSRQIKAIESVVLKKVKLREPYQRLLTLPGIGKVLALTIMLETGLITRFAKAGNYVSYCRKVSSQWISNDKTKGKGNKKSGNKYLAWAFSEAAEIARRHSQESRAFYNKKMQKTNIPVAHNALSHKLAKAAFYMIRDGVPFMPEKCFVS

SEQ ID NO: 167626 - protein, 349 aa, unidentified
MKIIGCDFHPGYQQIAVLDLATGEMVEKALSHERKEEVRAFYAGLEGPARVGIEASGQSQWFERMLAELGHEVWIGDAAKIRASCERKQKTDRRDAELLLKLLAEDRFPRIWVPTAAERDGRQLLLHRHKLVRMRTQVKNQLRALALNQGVQRKKKLWSAAGRKQLESLPLLPWASRRRAELLQLLDQLEASIAELDRAVAEQAYVRPAARRLMTHPGVGPVTALAFTLTIGPAERFQRGKQIASYLGLIPSEYSSGAGKQRLGHISKQGSPFLRGLLVEAAQSAVQHEPEMHRAYQRLAQRKCRALAKVAMARKLAVRLYWMLRLQVNYAQLIQGSHAGQPGTFRGRG

SEQ ID NO: 167627 - protein, 346 aa, unidentified
MNKHDVCGVEVSAAQLLAGLERKGAARTRREFPNTPQGHKALVHWLAAPGRTVRVVMEATGLYGLDLALQLDAETGVELMIANPRAVRHFAHALMKRSKNDPMDTDVLVEFARRMPFQPWVRPSESALALHALAHRLESLTEMHAAEKNRLHAAQLSPALPAAVVRDLQRSLRSLERALDRLTRQALQIIRADSDLNLRYPLLLSACGIGPTSAVQILAQLAVLAPDLGVRQWVAYAGLDPRQFSSGTSVHKKTRISKTGNRHLRRALYMPALVAIRHQPQLRAFYRGLVARGKAKMQALVAVMRKLLHAIFGMFKHQQPFDGARLFSLPDETSQPQPTFSTTEAP

SEQ ID NO: 167628 - protein, 370 aa, unidentified
MGHDSTVYVGLDVHKDSITAACIGADAAATPVDLGTLGTQQYAIDRLIKKLSGRGPLRFVYEAGPCGFWLQRYLHSVGQECLVAAPSLIPRRPGVHIKTDRLDARNLALALRAGTLTAIHIPTPEEEAFRDVVRAWQQSKRDITAAKQRLKAFLLRNDIRYEGRSSWSTAHRRWLARLVLPSPAQQIVFQELIDAVLERERRRDRLEQQLDALAPTWSGYALASALLAFRGIQKTVAYTVVAETVSFARFSHPSRYMAWLGFVPSEHSSGASRHQGPITRSGNRWARTLLVEAAWAYRYSPKVSPIIERRAQHLDPQIRALAWKAQLRLTHKYRRLVARGKHANVAVTAVARELAGFLWDAARLIEQPHA

SEQ ID NO: 167629 - protein, 367 aa, unidentified
MGIDVHKDTYSLCCFDFFRNELSDEMTIKATTKAVIKYLEAIKKKHREEILFACGYEAGPTGYGLCRGLQKAGYGCVVMAPTTMSNPEGKRRVKTDRIDARAIARILAYKSYSQVHLPSEEMEALKEYTRARDAKKRMFKKAKQELLSFLLRNGKSYPESGNYWTEKFFKWIKTVQFSEKWMQEAFSEYLAEVYSLKAKIELMDMKIREIAELEIIKDKVDKLVCFSGIDVTTAVETVVEIHDFTRFATAAQFVSYLGLCPGEDSSGKTKNMLPLTKAGNKRVRALFCESAKAIKRTNPYGQKSKRILERQKNASPEIVAYADKATKRIRTKMRHLEERGKNYNVSSAAGARDLACFVWGMMNGKIA

SEQ ID NO: 167630 - protein, 375 aa, unidentified
MNDHSEAFVAFDTSKLRNAVAIAEAGRAGEVRFFGEIENTGAATAKLVKKLAAKYQRLTFCYEAGPTGYEVYRQIKSLGHECIVVAPSLIPKKPGDRVKTNRRDALSLAKLLRAGELTAVWVPDRGHEAMRDLTRARETTMMDLRSKRQQISAFLLRQGLHYSEGKKTWTKTHMNWLASQKLEYAEQRLVFEEMMLAVRQAQERLERLEQAIRVAVPDWSLAEVVTALMAMRGIDLISAATFLAEIGDLSRFQHPSELMGYLGLVPSEHSTGDKINRGPITKAGNRRARRMLVECAWSYQYPPRVGQEKQEKVAAAPRAVREIAWKAQCRLHGRYRALVRRGKLKTVAVTAVARELAGFIWAVSRAITTARAVAK

SEQ ID NO: 167631 - protein, 346 aa, unidentified
MIFVGMDVSSKEFMVHAIRGNKKVVANTMAIRPDRSGMDVFLNSLGREKKYLVMEAGNQLKWIGLHLKTRKDVELHVVHPNEIKWINQSSKKTDKVDAKKMAALARIDGLPGKVYIPEGAVRKLMELISARECLMKKRVDLINSLRGMMKQEGFGFPEKFFQSKNWQTILKTLPLGETQKIIVENMMFAIEQMKVAEDSLMDEICKVEDPRIELLESIPSLGRLSARVLLSAIGEVDRFENKKDLAKYGALAPKIYQSGDVSRTGKTDNAGRKEVRRVLVQCAHTIGRMSKNKDAVPLYNFGQKILKKRNKKVATIALARKLLCVAYGVLKNGEFYDPSCLMPKAA

SEQ ID NO: 167632 - protein, 352 aa, unidentified
MRFYTEQHQYYCGIDLHTKNMYVCILDQAGKILVHKNIPTSPQALLQILEPFQPDVAVTVECIFTWYWIADLCREENIPFILGHALYMKAIHGAKTKNDKIDSRKIAVLLRGGMIPMAYVYPAEMRSTRDLLRRRMHFMYKRSELLSHIQNTRSQYNLPEFNKSISRKRNRAGISEQFEDISVRKSIELNLTLIKQYDILLNDVELYLTRHAKEHDPNNLYLLHTIPGVGKILAMVLLYEINDINRFERVQNFTSYSRLIKPQKTSAGKVTGSGNRKIGNAYLKWAFSEATLLLIREKQEIKDFHLKLKNKHGKARALAIISHKIGRAVYYMLKNKQAFDMKYFLKIKDRAA

SEQ ID NO: 167633 - protein, 363 aa, unidentified
MKKSTKAARREMKIDWDDVSAVGIDLGDRFSQVFCVDAAGKGLGERRVPTMAAAFEKEFGGIAPKQIAIETGTHSPWVSRLLARLGHHVTVANSRKLRLVYENRRKNDRVDAEYLARLVRLDRKLLCPVEHRSERAQEHVAMVRAREVAVAIRTKLINHVRGAVKSMGMRLPKCSAEAFVKRAAGAVPSQLKPALEPLLALITLSNEQIAKYDRRVERLLEDEYREAKVLTQIVGVGALTAVTFVVTIGERKRFAQSRTVGAWVGLTPGQRASGKQDPQQRITKEGDEYLRSLLVNCAHYVLGRFGPDCDLRRHGLAIAARGGANAKKRAVVAVARKLAVLMHRLWCTQGVYEPLRNATAVAA

SEQ ID NO: 167634 - protein, 384 aa, unidentified
MDVHTSNYTLCSLDPGYGVEKDNYFAEVQFTNNFVTNVVNYVSNLKKKLKDCEFVCGYEAGCLGYSTYKDLTKVGIKCVLMAPSTMAVQKGGKKVKNDRRDARVIAQCLAYQTYKEVYVLSEHDEAVRGYLRMRDSHNKALKRIKQQIIAFCTGHGLFSPTKSNWTIAYLTWLKGLKFNDPVEQEILNEYLSCLTFLSDKIKAMDVRIEELASEKQYCENVKKLRCIKGIETNVALTLLAEIGDFNRFSKPTDFAAYLGLIPGEQSSGDKVRGTGITKAGNSTLRRKLTESAKGYWRGRIGIKSATFKKLEKELPKEVTEYALKANTRLQRKFFNMTHVKGKNMNVAASACAREMACFVWGLITNHYEKAPAVPKTDEELLDLN

SEQ ID NO: 167635 - protein, 391 aa, unidentified
MVCVGIDVAKDKHDCCILDSDGMVRADCFTIPNNMDGFKQLLQTIRNCTKKSDKIKVGLEATGHYSYNILGFLLDNGLPTYVINPLHTNLYRKSLSLRKTKTDRVDARTIATMLLSDVDLKSYTDIAYHNEELKSLTRYRFDKVQERAKLKQSVSRLATILFPELEGLVSSIHGTSIYALLSEYPGAKQISEAHLTRLANILVKTSRGHYRKDKATHIRDAARTSIGSVMPAKSLELKHTIKLIQELTSEINEIEDAIRKIMDELKPPILSIPGMGFHSAAMILAEVGDFSNFNSPDKVLAYAGCSPSTYQSGKLTNCYAHMEKRGSRYLRYALYTATKYVCYWNPVFTEYLTKKQAEGKHYNVALSHATKKLVRLIYALQKSGKAYLAVT

SEQ ID NO: 167636 - protein, 474 aa, unidentified
MFVSLKFSLRASEFALLYYLTNKAITMDKKQMELLQLKVLRPCGAAIDVGSIMMMVAYSDRNGNQHLMEVDAFTEDLRGLADKLKAAGVVQVAMESTGMYWVVVYEILEEQGFKVTLVNARHFKNVDGQKTDVKDCQWLHQLHAHGLLRASHIAKENFRELRSYLHERNTLQVQKSDTLNRIHKILTQMNVKVQHLISDIEGVAGMKLLRGIASGIHDPKKLLLLINVDRLKADKEELLKSLDGIYKRQFIVILQNYLKAYDFFKNQMQSYELLIEEVLKKLLVESASANVPVIKPKRTAARKNQYGINIQEYLKHIIGVDVTKMDGLDEISVLEIISVTGLDMHKWPTAEHFTSWLNLSPRPKKSGGKTIGYEKRFTHNKATQSFRVAAQTMWQNRGALGHLYRRLSARKAAKKATKAVARKLAIIFYNMIKNQTEYDKDRLRVNTERLQARKLAYLKKEARKYGYVLQNETT

SEQ ID NO: 167637 - protein, 327 aa, unidentified
MVSGRGKELCNRSLTRKKFAEFLGKQNPSLVAFEACAGAHYWARAAKRHGHSARIIPAKAVAPFRQGHKTDSNDALAVAEAACRPNIKDAPMKTVEQQGLQSIQRSRYLLIQECIALSNHMRGILLEFGVTVPQGFASLIRTLPEVLEDGDNDLPDLYRPTLHRLYGRMLELRIDIEAMTKEIDNLVKQHPVCSKLTALEGVGPIGALSLYAALGSGAAFTRSREFAAYLGLTPRQHSSGGKTNIVGLNKKIGNRRLRSVLIQGALAYVYRMKEPRTSKDRWLKDLIERAGPRRAAVALANKNVRTAWALVTQGTEYQHREQLEMAA

SEQ ID NO: 167638 - protein, 312 aa, unidentified
MTEIIIGADISKDHIDLHRLPDGKRLHVSNDRKGFAAIVKWIDSATLDRLVYEPTGPYHKAFECFMMTKGLRLSKVNPRFARRFCEAAGRLAKTDRIDAELLARYGQLLQPRILQTQTHIPSDLKEFHVARQALVKDRTAAKNRSKNLVNPLLKKQNAARLRQIESQLKAVTEAIMTLVSNDQTLKARYDILVSIPGLSQITAFALLIEMPELGELDEKAAAALSGLAPMTRQSGRWTGRAFVTGGRAIVRHALYMPAIVAIRFNRDMKAKYESLCKAGKPPKVAITAIMRKLIILANALLRDNRKWHIKQS

SEQ ID NO: 167639 - protein, 348 aa, unidentified
MRTYNTQHTHYCGVDLHARSLFVNVLDHAGATRFEQDIPASPAAFLDAVKPFRDGLVVGCECMFAWYWLADLCERESIPFVLGHALAMKAIHGGKAKNDRLDAQKIAGLLKGGFFPMAYVYPRAKRETRDLLRRRSFFVRQRAQLIAHIQNTNSQYNLPPFSKKLTYKGNRTAAIAERFEHPSTKLSISADLAMIENYDTQIAALELHLVKSAKVDDPATFQFLRTVPGIGPILGLVMLYEIDSIRRFAEVGNFLSYARLVACTHESAGKVKGVGGRKIGNAHLKWAFSEAASLMLRSFPAAKSWMQRQSKKRGAKKAHAILEAKIGRTVYHLWRKQVAFDGKKFLAS

SEQ ID NO: 167640 - protein, 370 aa, unidentified
MSQSSTLFIGMDVHKESIAVAYVAQDHGAEVTYLGTIGTRQCDIDQLIRKMQSKAKHLIFIYEAGPCGYWLYRYFTKKGYDCWVVAPSLIPKKAGDRVKTDRRDAVQLARLARSGDLTAVYVPKVEDEAIRDLTRAREDTLSDLKDAKFRLKAFLLRHDIRYTGRANWNPPHLRWLSEVVCQTPAQQIVFQEDVRAVSEHTERLQRLEQELQAQVKSWRLHPVVEALQALRGVQLTVAVTMVAELGDLSRFDTPRELMKFLGLTPSEYSSGERRHQGSITKAGNIHARQALVEGAWAYRYPAKVSRHLQLRLENQPKRIQDISWKAQVRLCTRYRRLVAKGKHANVVTGAIARELAGFMWAIAKEVPVTA

SEQ ID NO: 167641 - protein, 343 aa, unidentified
MKLYVGMDVSLKETSICVVDDSGEIVSEGTVISEPEAIAEFIKTKAVGAKRIGLETGPTTTWLWHELRALGLPVICIDARHAKAALSMQINKSDRNDAVGLARIMQCGWYKEVQVKSVTCHEIRAVLNSRAQLVKIKRDLENQIRGLLKNLGLRIGKAGGNVFSHRVEELVADQSLLQEAVRPLLVVRESVRREIADLHRKLLDLAREDEDIGRSMTVPGIGPITALAFHSAIDDPTRFRRSRSVGAYVGLTPRRYASGEVDWSGRISKCGDRMVRTYLFEAAGVLLTRVPQWCKLKAWGHRLWKRIGFKKAKVAVARRLAVILHRMWHDGTDFIWSSKEAAV

SEQ ID NO: 167642 - protein, 424 aa, unidentified
MKVTYKTCCGVDVHKSFLVATIVKTTGGIEPSYQKKRFSTFNNSILEFKQWLLDNNCRDICMESTGKYWVPVFNLLEDEINVVIANPKWVKAVKGNKDDTKDSKWIGDLFRLGLVKGSYIPCKIVRILREYTRYRYQLVSCRSSEKNRYQNALTVCNVALDSVVSDIFGKSSTSIIDYLLEQSGTSINHEEIASKLLRSLKSKEDAVIESVEGYQMTDAQKYRMRLVRAHMDYITAEINDVDKMIENMISSNPDFENAVQFLCTIPGVKRDSAITIISEIGTDMSQFSSSKRLCCWAGLTPGSNESAGKKKSVRITRAGVYLKPALVQCAHAAVKSDKSPYYKKKYESLMKRRGKKIAIVAVARMILTAIYQMLSTGESWNPSDLYKIGIPEALLEKQKAKAIKQAMKLLQREGLYPPPEPIAS

SEQ ID NO: 167643 - protein, 359 aa, unidentified
MVPIGVDVHKRRCKVVEFSDSKVKVRKPMENTREEWLELLAELPPDAEIALEVSTAGYFAMSVLEEAGWGERAHWVHTAGIDSPRKQKYDRLDAERLARKLAVHHLDPLPEAWFPPAEIRELRLRSRQRCWLARLRTQAKNRLQSLLEMHGLQPPGNDPFGRRGRDWLDQQKLPAALSESVPQMLRLVEVLGKELETSEGYLEGVESQFPELSLLRTIPGIGPLLAPVIWSEIGCLKRFTSASALVNHTGLVPSLYESAEVSVQGHITRQGPRWLRWALITAANVAIQHRNPLARRYYRLRRNKKKPNVAKTAIACSLARCIYGVLKHRSPFREERWGRKVGALEQEACGSAGSTKTVL

SEQ ID NO: 167644 - protein, 408 aa, unidentified
MNPLFVGIDVSSRNNVAYLMKPDGSKYSSFSVQNNLGGAKLLSERIVSALGSMQLSDVVIGLEATSIYGDSLVYALREDGRLGKFQRKIHVLNPKQVRKFKEAYPDLPKNDWVDAFVIADHLRFGRIAREVYMDDYRYKALQTLTRARFEVIQNLTREKQRFANYLFLKCSGMAQDKDIANSSSTTIALMERFETVDDLANSDLEELTAFVTETGRGRFADPAATAKAVRAAAKGSYRLPKTVNDTVNQAMSVSIASMRALKEQVKVLDKAIEQQFEIIPNTLTSIPGIGKVYSAGIIAEIGDIHRFDSQASVAKFAGLVWHKNQSGEFEAEHSRMIKSGNRYLRYYLLEAANSVRRCDSEFRRYYDLKFKEVNKYQHKRALALTARKLVRLVFRLLEGNRLYIPPES

SEQ ID NO: 167645 - protein, 432 aa, unidentified
MDSIPPSSETCFGQLTHYAGFDWAKDRHQIAVVDREGRLLLELSFEDTAEGWADLREKLRSFPKLGVAIETCCGPAVERLLEAGLTVYPLNPKAAQRYRDRKAPSGGKSDSLDARSFADALRTDGHGWRILQPQDPQTQELRLLCRDEIRLIQQRTALVNQLQEALHEYYPTALQAFDDWTLLSAWEFIIAFPTPYALVQAGKRKWEKFLHVHKLYRAQTAPRRLELFGHAGEFVSPNPAVTKAKSFLAVALAKQLRILEAQLDAYRDRIRKLFGEHPDHDIFGSLPGAGEKLAPRLLAGLGRNRAEFDSPEALQCYAGTAPVSFQSGKMHKVYLRRACNRWLRATVHLWANESRQLCAWAQAYYQQKKKHGMSHAAALRCLGQRWLKILWRMWQDSTPYDEGLHMRNQVGHGSWVIALIPPKGTATGSGRG

SEQ ID NO: 167646 - protein, 311 aa, unidentified
MTDDTIGIDISKATLDIHRLNDGKTMSFSNCPAGFKALSRFCAKTAVARVVYEATGAYHGGLERALGAHLPLVKVNPLQARRFAQAQGVRAKTDAVDAKMLAEMGNAFALEPDEPASGIQHDLKELRAFRSGLIKDRTSIINRLKTQTLSITSRQSKARLAQVDKQIAEISAELDRLISSCDTLAHSMKILRSIPGIGAVSAATILIEMPEIGRLDRKQVASLTGLAPMARQSGQWRGKSFIQGGRKIVRDALYMPALVAMRHNPDLKAKYQALIKAGKPPKVALTALMRKLIELANALVKVDRNWVKRGA

SEQ ID NO: 167647 - protein, 338 aa, unidentified
MSKYSGIDLHANNCVVVVSDDEDRVCCERRVPNELSKVLALLDPFRADLVSIAVESTFNWYWLVDGLRAAGFDVKLVNTAAIAQYDGLKYSGDEHDARHLAHLLRLKLLHFGFAFEPEWRAVRDLARKRAQLVRTRTIHVLALETIYARQTGGRISGNTAKLLGIEDVARWGWSDDVTLAAQANVLAVQAMARGIEIIERRLHERVKLAPEYLVLKTVPGIGEILSTVIMLETGPIERFTSAGNYASYARCVGSGRFSNSKKKGEGNRKNGNTYLAWAFVEAAHYALRYSEAAKRFYERKRARSNTALATKALAHKLARACFHMLKGQIVFDEKRCFA

SEQ ID NO: 167648 - protein, 401 aa, unidentified
MNRKLWAGLDVGVETTRLCVLNDSGEVLQEASCPSCLESVHHELKWLRRRRFARVGIEAGTGTTLARGLRSLGYTVEMYETRQLSKFLRARRNKTDAGDASGIAEAGRIGTSIVSRVHLKSLDCQALLTRLIVRKHLIRERVGAANLLCRQLELYGGRVSKCPRSKQIRIHVEAEIRNLFGKTTTGPARDLRQLLDHCERLITYQYAFDRELKRFAAENEICSLLMGIPGVGTLCALTFYATISEPNRFTRASDVGCYLGLTPKVHQSGLSKRMGRISRMGNRAMRTLLVNASVQFMKRSAPEDELRKWATGVEQRSGRGQARVALARKLAVVMLAMWKRRAPYSATVAFENGASRSITRVESDSEKPQAQISASIVLGPTPLRQLERTTDSAREHADLIP

SEQ ID NO: 167649 - protein, 458 aa, unidentified
MEKIYFGLDVGGRFHRLCFLDEDKNPLGRELTISDDLEGFEALGEEMEKLRERYPEAAFHGGAEATGIYWRNIFSFFRRCLPWVKLSLLNPLQTRRFRELELNRVKTDSTDARSIARFVATFEPPAAPDLPAEYLDLCELCRFRKLKVAEHARYLNHLHRYLKQAFPELCGKVKRGAGLRYLALLMHFPTAYEVRRAEVSEIASLTFGKKDSRLGEKFAREAKELAVRSCASQEGPGIGFALRSIAANLLRIREELSALEEKIAELYQAFPATPLFTIPGISPLQAAVMEAEIKSVGRFPSAKHLVGYVGAYPELRESGDSRLGKPRMTRKGNRYLNQAVYLSVLAAISPRSPDNTIKHFYWSKVAEGKERMVALGSAMRKLTHIIYGVLMSGKPYDPAYEYPEEGFEVRFVDREKGCFIEEKDLSFCEKVMPIRYKRATAPRPYKAAARGRVALNQE

SEQ ID NO: 167650 - protein, 359 aa, unidentified
MTIVAHTHPFVIGVDTHARNHSLAILAAPTGEVIDDAQFPATAAGLTRAVSWVARRTSGDLDVLWVIEGVGTYGARLARAAADAGYAVVEAARMSARANRGVGKSDPLDARRIAQAVLPLDVTALRRPRADSGVRAAVRVLVASRDHMSAERTAAVNALTALLRVSDLGIDARRPLTSGQIATVAAWRTRQEDLATATARAEAIRLAKRVSALEEELRTNTKRVTELLTQSPARELLSQPGIGPVTAAVALTAWSHPGRLRSEAAFASLAGVNPIPASSGNTVRHRINQGGDRRLNRALHMAVVTRMRMDPRTRAYVERRTTEGRTPREIRRCLKRYLARQIYRHLNTAATVQNAPSTA

SEQ ID NO: 167651 - protein, 386 aa, unidentified
MQTSNTSTPIGGNIGTIFVAIELSQRNWLVVMRSPDRDRIAHYKLAAGDHDGLLALIETVRARAARALGSAPAVVSCYEAGYDGFWLHRRLTAAGITNFVFDPASIAVEQRGRRAKTDRIDGEVILRTLMAHWRGEPRVVRIVRVPSPEQEDERRSSRERQRLVQEQTAHINRIKALLRLLGLAAGNPRRRDWPAWLEGLRDWQGEPVPPRLTDELKREHARLRLVGDELAALAAAPAATPMPPAVAQMAERKELLLRLKALGPVFAATLTHEMFYKDFGNRREVAAYCGLSPTPWRSGGINREQGISKAGNPRARHKAIELAWLWLRHQPDSALSQWFRQRTSDANGRTRRIAIVALARKLIVALWRYLTTGLVPEGAVIKAVKA

SEQ ID NO: 167652 - protein, 415 aa, unidentified
MVANLKMIERRKTGEMNAVGIDVSKGKSTVVVMRPFGEVVAEPFEVSHTDAELSELACFLGKLPGETRIVMEYTGNYWQPIAKVLYNAGLFVCVVNALLIYKYGNNSIRKGKTDKLDAVKIANYCLDRWANLERYTPADQIRQILKTCRRQYDQYIKLKVNLKNNLISLLDGTFPGVNTLFKSAPRDTDGHEKWVDFAENFWHRECVCMKSEKAFTNQYRKWCAKTGYRFSVEKAVAIYAHASSQVNTLPMSDAIKLLVTHAAVQLNTIIKTISTIQHEMLTLASQLPEYPIVMRMFGVGPVLGPQLMAEIGDVRRFDRKQSLVAFAGVDAPPCQSGAFDSKKRHISKRGSPRLRKTLFQVMSTLIQHAPADDPVFQFLDRKRAEGKPYYVYMTAAANKFLRIYYGTVTAYLEKL

SEQ ID NO: 167653 - protein, 331 aa, unidentified
MTIPTVMANRSPFNHVIAFEVSKETLVVHALPADEQCSVPNTPEAVRRLLKAEMKRNGREKLGSLLVVCEATGGYERHVLDAAIELGLSVHRAHGSRVRYFARYRGLIAKTDPIDARMLAEFGRETNGLRLYVPPPAESETLKALQGRRSELQAMIMAESNRLEHALNKTVLKSLKTNIKALKVAMKAIEAEIAELVRSNEVLKAKTSLMRSVTGVGPVTATTLLAYLPEIGQLTKGQVARLSGLAPINDDSSKKIGRRHIEPGRQAIKRCLFMAAGVAMKSNAVLKVFADRLRSAGHPFKYVVTAVMRKLVVILNAVLRDGEPWKGLKTA

SEQ ID NO: 167654 - protein, 402 aa, unidentified
MNAVGIDVSKGKSMVAIMRPFGEIVSAPFEIKHTASGINSLVELINSVEGESRIVMEHTGRYYEVLAHQLSEANLFVSAINPKLIKDFDNDSLRKVKSDKADAVKIARYTLDKWQNLKQYNVMDELRNQLKTMNRQFGFYIKHKTAMKNNLIGILDQTYPGVNTYFDSPARSDGSQKWVDFASTYWHVDCVRKMSLNSFIDHYQNWCKRKKYNFSQSKAEEIYGKAKELVPVLPKDAITKLIIKQAVDQLNSASTTVESLRTLMNETASKLPEYPVVMAMKGVGTSLGPQLIAEIGDVSRFTHKSAITAFAGVDPGVNESGSYEQKSVPTSKRGSSDLRKTLFQVMDVLIKTHPQDDPVYQFLDKKRAQGKPYYVYMTAGANKFLRIYYGRVKEYLSSLPES

SEQ ID NO: 167655 - protein, 359 aa, unidentified
MQTQNNKLSFKNQDFYIGIDVHKKQWTICVSHLNRIVHKKTAIDPVAKTLATFLKRRYPDGNYHAVYEAGFSGFHAARELNKLGVNCMVTHPADIPTKQKERINKNDRVDARKLSRSLNNHDLDGIYIPDKVSEEYRYLARYRDCLIKDQTRMKNRIKSALYQFGFKVPLAFEDRRWSGQFIDWLATLRFDTGYAQYAFEDQITQLKQMRLRLTQTLKKMKTMVSEAAPMSPVYPYLLSVPGIGPITAVALLTEIIDIYRFEKPEQLVSFIGLAPSVVSSDDKETIHGLTPRRNKHLRSMLVEAAWTAAAKDPALTMKFGQLCRRMARNKAIIRIAKMLVNRIYYVWKNKKTYVEGVVK

SEQ ID NO: 167656 - protein, 451 aa, unidentified
MNKKRNKIAKLPVIEPNAAGIDIGATQIFVAVPPDRDTESVRCFATFTVDLEKLADWLEACGIRTAAMESTGVYWIPLFQILEKRKIKPVLVNAQHLNNVPGRKKTDVEDCQWIQHLHAVGLLRGSFRPDDEICKLRSLWRHRDNLIQLATVHLQHMQKALDQMNLQIHHVISDLSGVTGLAIMDAILAGERDPSKLAQLRDWRIRASAETIMKSLVGDYREEHLFVLRQSLQSYRHFQRLIQEVDIEVKRMMQQLPTKVDPQERPLSKEKNPRKTPWRNEPPALREDLYRAFGVDLTQVPGINTLTAQILLTETGPDFSRFPTSGDFCSWLRICPDPKITGGKVISSKTRPSKNRAAAALRMAAQGLHRSQSFLGDYFRRMKARLGTPKALTAAAHKLARIIYHMVSNRQEFDSTVFHDQELSNRHRKRLRLQTQARELGFELVELKAEA

SEQ ID NO: 167657 - protein, 297 aa, unidentified
MQTVTTIGFDIAKSVFQVHGVDAAGQVVVRRQLKRRQVMAFFEKLPPCLVGIEACASSHYWSRQLQALGHGVRLMPPAYVRPYVKRQKNDRADAEAICEAVTRANMRFVPTKTPEQQSGLMLHRARHLFIRQQTSVINAIRAHLAEFGITAPVGRRGVEDLLRVVADPSDKRVPEVVRACLGALGNQLLNLKKQILNFDRMIMAWHRSNQTSKRLNCIPGVGPLLATALVASVADPKTFRSGRNFSAWIGLVPERSSAVSANRVTATCAACSWPAPSPSSAMPRSTAPSIDPGSPHY

SEQ ID NO: 167658 - protein, 401 aa, unidentified
MHDGFGVFIGLDVGKEGHHAVALNRDGKRLHDATLPNTEAGLRKLFDKLGRHGRILAVVDQPASIGALPVAVARACGHQVAYLPGLVMRRLADLHPGTAKTDARDAYVIADAARTLPHTLRRVDTGDEALAELEVMVGYDDDLAGEVTRVGNRIRGLLTQIHPPLERVLGPKLQHPAVLEAISRCGGPTGLRRAGRAKLTEIVKARAPRMGARLVEQIFTALDAQTVVVPGTTAAETVLPRLADSLRDLLRQRDQVAEQVEGMLDAHPLAPVLTSMPGIGVRTAARILLEVGDGSSFPTAGHLAAYAGLAPVTRRSGTSIRGEHPPKGGNKQLKRAFFLSAFAALADPLSRAYYDRKRAEGKKHNAALICLARRRVDVLHAMLRTQRPYQPTPADEPRLAA

SEQ ID NO: 167659 - protein, 406 aa, unidentified
MLFVGDDWSEAHHDVEWMDATGRRLAKARLPEGVAGMARLHAMIGEQLGEDAEAAEVAVGIETDRGLWVAALVAAGYTVYGINPLQVARYRERHSVSGAKSDAADAHTLADMVRTDSHQLRPVAADSAGAGAVKVVTRAHKTLIWERTRHTLRLRHALRDYFPAALEAFEDLDAADALELLAKAPDPASAARLTITQNQCRAYPGPAPQRRGDRRADPGRAARAAFGSAGGHHRGLRGHDPRRCGGAADSRRAGQGPARQVDAHFGQHPDAEIISSQPGLGLLLGARVLAEFGDDPDRYTDAKSRENYAGTSPITRASGKKKIVLARYVHNDRLIDALMTQAFSALNGSLGARVYYDQLKGRGTEHNAALRQLANRLVGILHGCLKTRTCYDEATAWSHRLDTAAA

SEQ ID NO: 167660 - protein, 340 aa, unidentified
MSIVGGLDVHRAQITYDYLDLETGEVEVGRVVPATRGELREWLSRFGGKEATFATEGCTGWRFVVEELRRAGVEAHLAEPADTATLRGRKKRAKTDRADARHLRSLLVENRLPESWIPPGHVLEVRARGRVYVAVMDQRRAWQQRIQAQLFHQGVEKRAGLLTAEGRAHLGGAELSPAGRQMVEVALRIIDALGAEADLLRGDLKGFARRQAGCRALVDELFGVGELTAAIIWAEMGDTRRFSSSDQAVRHTGLDITVWESDGKRSPGRLSRQGPAALRWALFEAALAAARPTSPDHGYFLDVGERLGTKRAYLSVARKLARRVHHILRGLGDTAWEEVT

SEQ ID NO: 167661 - protein, 342 aa, unidentified
MDIVTVGIDLAKNVFAVHGVDDNGKPALVKPKVSREHLLSLIAQLPPCVIGMEACSGAHHWARQFRQHGHTVKLMAPKFVTPYRMSGKRGKNDAADAAAICEAVTRPHMRFVPIKTIEQQGQLMVHRARQGFVEQRTATLNRIRGLLSELGIVLPLKAATVRRQALARLEELPGWANTVIGDLLSEVDRLDERIAQYDRHIALMARQSTQAQQLMQLAGIGETTATALISTVGGGHDFASGRSFSAWLGLVPGQYSSGGKQRLGRITKAGDSYLRSLLVMGARAVLAAAMNTRTPKQDSVSRWARSLAERRGYWRAVVAIAAKNARMCWAVLQRGEGFKMPA

SEQ ID NO: 167662 - protein, 371 aa, unidentified
MKKNSTVKQSPKRAAAREEGPLVMGMDLGDKTSRYCVLGGKGEVVGEGSVATTKKGMLQQFGRMRRCRIAIEVGTHSAWVSRLLKSLGYEVIVANPRQVQLISASSRKNDRMDAEILARLVRVDAKLLRPIQHRSEQGQIALMKIRVRAGLVEARTKLVNMARGFTKAQGDRLPTCDTDSMGVEKLEGLTAELQEGLRPLLETVEALTAQIQAMDTVIEQIARTQYPETELLRQVSGVGILIALTFVLTVEDHRRFQKSRDVGCYVGLRPKQSESGQSQPQLRITKEGDRYLRKLLVQGAHCIVSRRGPDTDLKRWGLKLGGRGGKNAKKRAIVAVARKLGILLHRLWVTGEVYEPLRNSQARHLRRPVAA

SEQ ID NO: 167663 - protein, 351 aa, unidentified
MSTQGTACPKLFIGMDIHKNSWKLHFCTDLTIGSGKTFPPKPEDLCRYVQNYYPKHLVTIAYEVGCCGYTAARQFMEYGWDTYVVNPADIPRPAKLGVVKTDKIDARNIATQLRAGNLKKLTIPSVDRECLRSLTRRRTNLVKDFRKIKLQIKSILLYYNVEIPEKFDNANWSKDFLQFLKNLKWNYLTIDKAFVSLMKHIDFLDGQIKDVSTSIRAYCRKYYHKDYTLLRSVPGIGPLTAAYILAEVGDLRRFNSFKQFTAYIGILPNLYSSGENTRALGVNPRANRTIRSLIIESSWVAIRIDPALQQYYRKHVGLNPKACIFKVARKLLSRIHSVIKTETEYALGVIQ

SEQ ID NO: 167664 - protein, 320 aa, unidentified
MQDVLNIGIDVAKAELVIAVVDHPEWSATISNRADQIKRWLNRLPTGSRIAVESTGEYHRALVTLAQEGGFSTYVLNARDVYFYAKALGKRGKTDRTDAQVISRYLREHHAHLHCFKAGGPVEQEIDHLLRRRAVVVVQRDSLVHSLRNLPCLDKPVRRLIKEFDNLLAAMDQEVTALINRQVDLAAASTQLQTVPGIGLQGAALLTCLFQRIEFNNADAVVAFSGLDPRPMDSGQKRGRRRLSKRGPALLRRQLYMMAFSASRTRAFKPVYQALRERGLSSTAAFVILGRKLLRIAFALWRTKSDFEVERWAKNACIEL

SEQ ID NO: 167665 - protein, 343 aa, unidentified
MFKIFRKNCCGLDVHKTWIYACIGITDANGRTVYKQARFSSFTKGLNELAEWLAKYNCKDVCLESSGKFWIPVFNILEKTCFVTLAHPKYTKPQKGNKTDRKDAKWICDLFMCDMIKPSFIPGLEIRQLRDLMRYRTKLTNMKTSEKNRALNCLTVSNLKLDDVFSDVFGKSSTSIIQYLLEHPGESFDVRPFIHARCKTPVEEIQAAVEGAISVPQAIKLRQCLNHINEIEKHREEINLEIQALAEPFSPVLELLRTIPGLDTQPITAIAILSEIGPDMSVFPTSKHFISWAGCCPRNDRSARRTKSTRISRAGQSLKPLLVQIANALLRSKEHPEFKKSLS

SEQ ID NO: 167666 - protein, 371 aa, unidentified
MVYSGVDLHRRLIVICTVDENGTVLARSRMKTDPALVSEYFRRWPDQHRAVVECTTGWYWFSDLLRLLGVDVVLADAKYLKAISYAKVKTDAVDALTLAQLLRMGYIPEAHQLPPEYRAMRDLLRQRMVMEHKRTNIIQRVTSILAQFNITRLPLSPYQSGFADFLNQCQIPEEYRMTLMMYHQQCLQATEHRKQLEKHFKTLLRPTPAVQLLMSVPGIGDITGSIIAMETGDIHRFADAKHYCSYCRLVPGAKDSGGKHSHRSGSKDGNQYLKFAFTESAIKAMRFYPEIKHFAARLERRSTKAIARTVVAKELAKISYYVLSRQQEFKTFKGIEINKLRNWPRTRPAVRDAVQRHKPVHITGGSTPPSV

SEQ ID NO: 167667 - protein, 330 aa, unidentified
MPTYYLGIDVAKQTLDVVLLLDPESLKKRQKTVPNTPAGYQVLVAWYQHQTGTTPEACQVILEATGPYHEAVAWALHEAGFPVSVVNPKVIKDFAKGLGIKAKNDGLDALILARFGYLIKPARWQPPPPEYRRLTVLLRRLEALETDRQREFNRLEKARVSQPTDADVVASLERAVQFLEAEQERVLALIDEHINQYPEFGQDRYYLLSIPGIGPVLSVLRVALLQHGQRFHSAAQLVSYLGVIPTEHQSGTSVHEKPHLSKTGPARLRGKLYMAACVAIRHNPDVRAFYDRLLAKGKSKMAALGAAMRKLAQICVGVIKNQTTYQPPVA

SEQ ID NO: 167668 - protein, 347 aa, unidentified
MVHAGLDLSRKRLDVHLMAEDGARLRGFAVSPDTDGLRGLVRQVSDSYPELVRAAIESMNGARFIHDQLELLGWEVEIADAQKVKGLAPLACKTDRIDAWVLAELSRRDLVPAIYLPDPGVRAERERARWRLHLVRHRTMLKNRIHQTLITFGHACPVSDLFGSRGRVLLASLKLPEPWQGNLAVAVQLIDDLDRQIEACERELRQLGADHPYIPLLCTVPGIAWVLAYTIASEIGDINRFTSPVKLNGYTGLCPKVRQSGSRDERGPLSRNGPKYLRWALIEAAHHAARTSFYRRRYETTSRRLGRQRGSKVAMVDIARKLTEAIWYMLTRNQPFAPAGATCVPAA

SEQ ID NO: 167669 - protein, 415 aa, unidentified
MALKIVYKICCGIDVHKTFVVACIASTNDKGVTSYESHRFSTYTSGLKTLLQWLLDRNCKDVCMESTGKYWIPVYNILESDCSIVLAHPKYVKAIRGKKTDKKDAKWIADLFKHDLVAGSFMPPADIRQLRDLMRYRFKLTCFKSSEKNRLQNCLTVSNIQLGNVVSDTFGKSAQAILDKLLENPADTSFDLEPLVYKSLKKKLPELRDAIDGYITPEQAGKLKVIKAHYENLESRKAELEELILALAAPYQQELAILQTAPGISSDFTAIGIISEIGTNMEAFPSAKHLCSWAGLTPTNNESAGKKKSVRVSKAGCYIKPLLVQCANAVVTSKKHPEIRNRYLRLKKRRGHKKAIIAIARMLLTALYHMLKNGENYNAELYRKSDLPPVNREITVEQALMIARNQGYKIKSATA

SEQ ID NO: 167670 - protein, 406 aa, unidentified
MEVVHERCCGLDVHKASLTACVLSSTKRETRTFGTMTDELLRLADWLQEEGVTHVAMESTGVYWKPIYNVLEGADLKLLVVNARHVKAVPGRKTDVKDAEWLADLLRHGLLRASFIPDRAQRELRELVRYRRGLIDQRGDVARRIQKVLEGANIKLGDVASDVLGVSGIAMLKALVAGEADPIALAALAKKGLKRKRSELERALLGSVGAHQRYLLRHQLNQVEFLDRQIADLSQEIEVRMRPFEVAIAHIDAVWGLGRRSAEAILAEIGTDMSRFPSEKHISSWARLCPGNDESAGKRRSGWTGKGNRWVKSALVEAAWSAVRNKNSYYAALYHRLGQRRGKKRAIVAVAHSLLVTIYFMLRDGTVFQDLGADYFDQRDHDHIVRRSVRRLESLGYHVTLSEGAA

SEQ ID NO: 167671 - protein, 350 aa, unidentified
MMIIGVDYHPSFQTIAFLMEETGEYDEQRVNHDGEAERFYRDLKQRGIRVRVGMEATGYARWFERLLAELDFELWIGDPAEIKAKRVRKPKTDREDARLLLRLMREDRFPRIWVPSPENRDLRQLLWHRHRMVQMRTRIMNQLQALAMNEGKRWKSKLWSQPGRTEFEKLVLGPWASRRRSELLELLDRLNPSIEELTTAAEQEVHKRPEALRLMTHPGVGPITALAFVLIIGTPERFARGKQIGKYMGMIPTEDSSADKQRLGHITKQGSSLLRFLLVEAAQAAARINEHWRRRYIHLTMRRHKSIAKVAMGRRMGIRLYWMWRNGCEYSPSFEFGSYVGQLGNGHGGK

SEQ ID NO: 167672 - protein, 363 aa, unidentified
MAVKARTLVGLDVHAAQTHAAIVDPATGEVRVVKLRMPPADVAGFLAGLGSDVLAVYEAGPTGFGLARAARERGVDVRVVSPGSIPKGSGDRVKTDRRDAIRLVRLLAAGELTFAFVPTIEDEHFRDLLRTIEDVRGDLMRARHRLGKFLLRRGERYPGPGRAWTAKHLNWLRALGFEDACSQATFADYLASVELLIVRRATLATTLEDAAPRSSHAPVIARLRCFRGIDTLSAAGVCAEVGTFSRFPRPTLLSGFLGIVPSERTSDARRRQGSITKAGPSHARRLLTEAAHHYRRQPAIGEVLARRQAGQDPRVIEIAWRAQQRLHQRWQRLYHERRKPSGIVAIAVARELSSFLWEAAVLD

SEQ ID NO: 167673 - protein, 401 aa, unidentified
MATMRDNATRVKRFRELKATLRTNRQRLLVGLDVAQAEHVVQMRLAHTRIVGPPLTIPNSTRGFTQLWTRIQQAQRATGCAEVVCGLEPTGTYHEAVATFLEGQGADVVLISSSVAYWNRRTQDGTWDKHDRKDAANCAELVEQGKILFYSRPDGPLAELRRLVKCLRRARAELAACKARWRTTLRPALGPMGEPLPNRLRAELSAVLQAWEPAALGRPARAKGRLPLGLATACADLGAQVTAVQARIAALEAACMPVAERLPAYPLLRTIPGVGPTVGAILLAEIGDIAWFTQFSQLRKLAGLDIVRVQSGQFAGQARISKCGRGLLRWALYHAAMGLARTATGRARLAALKAKRQGDRYAGFKAIVELAAKVLRIVWGVWRSGTPYDPTRTGGVCRQPR

SEQ ID NO: 167674 - protein, 388 aa, unidentified
MSMYTAATSTIHHSEQTPTLMMAMELGETGWLLGFASGFGQKPLRRKIATRDQAGLLRQVSWARHRLGLSDDARVVTCYEAGRDGFWLHRFLEAQGFESLVVDSSSIEVNRKKRRAKTDRVDLAALLDLLARHLARSAKPVWSVVRVPSIEAEDRRHLYRELRLAKKDRTRVSHRMKGLLANHGQTLNLRGDLSSQLAAMRQWDGSPLPPGLRARLARYVGEYAFFTQRIQELETERRRILREERDPALDKVLQLYSLKAVGMESAWMCGTEFFGWRDFRNGKQVGSMAGLTPTPFDSGSRKREQGIGKDGSRWIRGGAIELAWGWLRFQPESELSRWYERRFGSGGKRLRKIGIVALARKLLIALWRFLETGVVPEGALLKTDLRLR

SEQ ID NO: 167675 - protein, 322 aa, unidentified
MQYIGIDVSKATFVVAYSSDKGGEIRTFNNTTAGIKQFIGTLPKDGSIHCVMEATGNYSALLLYMLNVAGITVSMENPLKVKNFARAMLSTVKTDKIDARLIALYGEKMNPQPFKVQGEAILRLRQKRTVIRQLTKQITAMSNLRGSLACLPVPDKGATHTVDETIKFLEKRRDRLQSELTDLVEVEFSRQLALLTTIKGIGITLATALIITTGGFTYFQNAKQVSRYLGICPTYEQSGTSVNIKGHINRNGDAYTRGLLYIAAWPASRFNAQCKETYTRLRQNGKPGKLAMIAVANKLVRQAFAVVAHDKEYIDGFVSNRP

SEQ ID NO: 167676 - protein, 387 aa, unidentified
MQKPHDNSKASPAAFMQDNTLIAVIELSLSNWLVAGLIPGVSREPLKKLEPNPEDLLKLLHGWRGEAIKAGRPITRIAVAYETGRDSFWLARWLRERGIDAHVIHATSVAVSREHRRAKTDRLDTAMLKRGFLGWLRGERGHCTVAIVPTMEEEDAKRPHREREGLVHEQTRAVNRMKSALIQFGVRNFNPKLRKASVKLETVRTPEGKSLPPNTIAALRRDMERLKIIKEQIKAIEQARLQQFEQKPEALANRMVYLLVRIYGLGLETADLLAHELLSRTLRDRKAVARYAGLTGSPDESGSKRREKGLSRSGNARVRKIMIQLAWRMVKFQPDSALVQWFKQRTESTKGSRKPMIVALARKLIIALWRYANDGVIPEGFRLHSAA

SEQ ID NO: 167677 - protein, 387 aa, unidentified
MPQSNDLSRSLTALDQDSTLIAVIEMSQSSWLVGAIVPGISRQPLKKLVVEERELLRLLHRWRDEATKAGRMINRITVAYEAGRDGFWLARWLQGQGIEAHVIHPTSVAVSREHRRAKTDRLDTELLKRAFLGWLRGERGHCSMAMIPTPQEEDAKRPNREREGLVGERTRIVNRMKSTLARLGIRGFKPTLRKAPERLTGLLTPEGVPLPPNTLAELRRDMARLRFVMGQIREIEAARLQQLEQHPEQGPHAMVRLLAQVIGVGIETADMLVHEILSRTLRDRKAVARYAGLTGAPDESGARRREKGLARAGNARVRRGMIQLAWRFLMFQKDSALAQWYRARTADARGTTRKTMIVALARKLLIALWQLVTTGEIPQGVVLRAAA

SEQ ID NO: 167678 - protein, 408 aa, unidentified
MNPLYVGIDVSSKSNVVYFMLPDGSKHSNFSVANSHTGSSQLVKRILSAMTSCSLDTVLIGLEATSVYGDNLVYFLREDAALARFNSKIHVLNPKQVSKFKEAYNDLPKNDLINSFVIADCLRFGRINKEVYIGDYRYKALQNLTRARYFAVSNFIKEKQRFMNILFKKYSTMTQEKVFSDTFSTTALAVYDEFESAEALADMDLHELTAFIMEKGKNRFPNPNAVAKAIQKAARSSYRLPKTVNDSVNQVLSISITSIKALEAQIKEFDKAIATQMELLPNVLISIPGIGPVFSAGIMAEIGDINRFHNQAQLAKYAGLAWKQHQSGDFEAQTTRLINSGNRFLKYYLCEAAFSLVRCDKEYSDFYHLKYKEVNRYQHKRVFALTARKFVRLAFRLLKDNRLYTSAE

SEQ ID NO: 167679 - protein, 413 aa, unidentified
MADETIHWFAGVDWGSAKHQVCLLDGAGNVVGEREFAHGGAGLAALCEWVVSMAGDPGTVAVAIEVPHGPVVDAVLDRGFAVYAINPKQLDRLRDRISVAGAKDDRRDARVAAAGLRTDRPLFRRVLAGDPSVVELREWSRLAEELQQERVRLGHRVRQQLWRYYPQLLALSDDVTAEWVLALWTLAPTPAQAARLREATLARLLRQHRIRKLDAPAVRGILRQPAITVAPGVTEAAVLHLRSLVARLRLANQEFHQAARKLEALCTALSQTQPGAQDSGPRDAAILSSLPGVGPVTLAALLTEAAGPISRRDYTALRTLSGVAPVTKRSGKSCIVIMRYAAQLRLRNAVFHWARVAVLNDPKCRSRYAALRARGHSYGRALRSVADRLLGIACVLLQRQVLFNPNHGAPTQP

SEQ ID NO: 167680 - protein, 315 aa, unidentified
MTQTNTTTAGIDTSKLKLDIAVHGRTERWQFANALPGWRTLANSLAKAGVTRVGIEATGGYERGVVEHLRAAGFIVLVLQPIQVKAFGRVHLRRAKNDALDAELIAACTAAIDDPRIAPDPRLAEMAQNLTFLEQLEEDIARFKTRLEHIEEPGLRRLVNSDIVRLKARKAAQICSLAKRLRAHSDLAKRFDLVLSIPGIGERTALALIIRMPELGLISREEAAALAGLAPFDDDSGKHRGQRHIAGGRGRLRRSLFAAALPAAFRWNKALIALYARLIAKGKAHNAALIACARKLLIYANTVVQRGTPWTEKAA

SEQ ID NO: 167681 - protein, 371 aa, unidentified
MDQSSKTLYVGLDVHKDSIAVAYAPEDRGGEVVSLGAIGTRQCDIDKLIRRLESKGATPVFVYEAGPCGYGLYRYLAGKGFTCHVVAPSLIPRKPGDRVKTDRRDAMTLARSMRSGDLTSIYVPGIEDEALRDLSRGRDDAMQDLKRSKRPLTSFLLRQDIRYEGRATWNAAHLRWLAEVVCPTPPPLIVFQEYLRAVTEQHERRQRLEHELHEAVHGWRLYPMVQAIQALRGVELTGAIILMTELGDLTRFENPRQLMSYLGLTPSEYSSGARRRQGGITKVGNSHARRALVEGAWAYRYPAKVSRHLQLRLETLPAEVQAISWKAQVRLCKRYRQLTARGKHVNQVVVAIAREMAAFAWAIARLVPLAA

SEQ ID NO: 167682 - protein, 407 aa, unidentified
MEVVYRCCCGIDVHKKVIVACLVNGGGQELREFGTTTSEIKSLANWLTESGCEMIAMESTGVFWKPLYNLFELMDLNAIIVNAAHMKALPGRKTDVKDAEWIADLLRHGLLKASYIPGREQRELREITRYRKSLTEERCREVNRLQKILEGANIKLDSVVKDITGKSARKLLQRIIDDDIPDSEEVSKLVHGRMRPKLDQIVASIEGITTPLQRKLLAQIIDHIDDLNRRISELDKLVQEYMTEYVAAIEAIDEIPGIAGRSAEVILAEIGTDMSRFPSAAHLCSWAGVCPGNYQSAGRRKHGKTTKGNKALKTILTQCAKSAKTVKSSYFSVQYQRIAARRGKNRATLAVAHSMLIAIYHILKNKTAFHDLGSDYYDAFNRDRKINSYLKRLKSLGWEPDAIPSSA

SEQ ID NO: 167683 - protein, 429 aa, unidentified
MAESIMVACDLHDRTMLLLMAQGRGAAEKLSLPNTKAGRLKLRKLLRTRSTEAGGAQVVFAYEASGLGFGLYDELTAAGFTCYVLAPTKIARSSQQKRNKTDEKDAALILQVLRGHVLAGNALPEVWVPKPATRDDRELVRARLDLADKLSSVKTQVRCLLKRWQVARPPAVGKGWTKLHLAWLRGLTKDKVLSVGARQTLESLLRQLTFLQEEEERLDKALDRLVNDPRYTEQVYALARLSGVGVLTALVFLTEIGDLWRFHNRRQVGAYLGLVPVARESGEQSDRKGHITRQGPSHVRRVLCQAVWARVRSDKEDSSDVLAYQRIVAKNPQHKKIAVVAVMRRLAVRMWHAGRNATLAAARRRAQSSLGPDLRSGLPRPACGSRSPDGKAATPRQRRTKSPAGDRPPEAPPLGPQRSLRPAAPALTK

SEQ ID NO: 167684 - protein, 355 aa, unidentified
MRAKKTGSLEDLAVVGIDIGKDSFHLVGFDRSGQLVMRRQIKRLALNATFEQLPRCIVGMEACLSAHFVSRTLRGMGFEPRIIPAIYVKPFNKGQMNDYNDAEAIAEAALRPNLRTVSEKNQDQLDLQALHRVRARLVSRRTATINQIRAFLIEQGITVRPGLRALKNSFETILEQRRDEISLRMRGILIGLYGDWMWLDKRTDDVSGEIEEISRTEENCANIMTIPGIGPMISTAMVAAVGIGEAFDKGRDFAAWVGLVPRQFSTGGRTILGRITKRGSRYLRMLFVQAAKVIMMRPHRWPNFSFGAWLTAAVARMPRNKAAVALANKLARTAWSLLRHGTRFDAPQDAAMDAI

SEQ ID NO: 167685 - protein, 311 aa, unidentified
MEEIIIDKGCGLDVHKETVVGCVMGSGIKKEIRTFSTMTGDLFRLKGWLSEKGITHVAMESTGPYWKPVFNVLEDSFEVILVNARHIKNVPGRKTDVKDSEWICKLLRSGLLAASFVPPQGIRELRDLTRYRRKLTQTISSEKNRIQKVLEDANVKISSVLSDTFGVSGMEMIEAIMEGNLSVEQISELAKGRLKSKKAEIKESLVGNFRDHHRFMIQASLGQIGSLEKTIADLDQEIDRKLEGYHQEYELLQTIPGVKEQGAASIIAEIGVDMDTFPSEGHLSSWAGMSPGNNESAGKKKVARRPMAIRI

SEQ ID NO: 167686 - protein, 418 aa, unidentified
MKKHSKSSQRSEPTLKRTKARGPVQRDAKEVMAEVLGKLTGKLHAPAVSTSAKEKRRGNTVGPNRDRLTVGVDLGDRWSQYCILGLEGETLAEGQLRTTQEDVGEFFQAMTAARVVVEGGTHSAWVQDVITEWGHEVLVANPRLMEGSKRRKRKSDRIDANKLARLGRVDPQSWYPIRHRSREVRQDLVVLRARDALVSVRTELINTTRGLVKSMGTRLPPCSSPSFAEKVKDAIPVEVREALLPLVQLVETVNDCIARYDEKIEELGRNKYGHTTLLRQVKGVGPITSLGYVLTLEDPQRFASSREVGPYLGLVPKQEDSGDSQPQLGISKAGDRMLRRLLVGSSQYMLGAFGPDTDLRRYGLRLCERGGKNAKKRAVVAVARKLAVLLHHLWVTGDVYEPLHHSGAETGTAQAAAA

SEQ ID NO: 167687 - protein, 367 aa, unidentified
MEKSSKVFVGMDVHKESIDVTLAEVGGEVRRLGAIGGDRGSLLKMVRKQQSKGGERVFVYEAGPCGFWVYREITALGERCMVVSPALVPKRAGDHVKTDRRDSERLASLARAGELEAIHVPDIRDEAIRDLVRGRDDAVIAQRRVRQQLKALLLRNDVRYVGRTSWTGAHRRWLSELKLPEPAQRIVFEEYVDAITVATERIERLTRAIETEVLTWRFAPVVGALQAMRGIQFVHAVTLIAELGDLTRFHSARSLMGYLGLVPREDSSGEHRRQGSITKAGNSYARRALIEAAWAYRHPARVTRIIATRQTGLPKAACDIAWRAQLRLSAKYRRLNARHLNHNKIVVALARELSGFVWAIGQSVKPL

SEQ ID NO: 167688 - protein, 391 aa, unidentified
MVCVGIDVAKDKHDCCILDSEGTTLVDCFTIPNNMDGFKSLLQTIQDCSQKSDKIKVGLEATGHYSYNILGFLLDNDLPIYVMNPLHTNLYRKSLSLRKTKTDRVDAKTIATMLLSDVDLKSYTDTAYHNEELKSLTRYRFDKVQERAKLKQSVSRLVTILFPELEQLVSSIHGTSIYALLSEYPGAKQISEAHLTRLANILVKTSRGHYRKDKATHIRDAARTSIGSVMPAKSLELKHAIKLIQELTSEINEIEDAIRKIMDELKPPILSIPGMGFHSAAMILAEVGDFSNFNSPDKVLAYAGCSPSTYQSGKLTNCYAHMEKRGSRYLRYALYTATKYVCYWNPVFTEYLTKKQAEGKHYNVALSHATKKLVRLIYALQKSGKAYLAVT

SEQ ID NO: 167689 - protein, 425 aa, unidentified
MHKSQYSKQLEKRKRIGDHTLVIGMDIGSDFNAACFMDKEGNVLGRYPVIYNSRKGFEYFQAMIMKTRREHKLDDILIGMEPTGHYWRKIAFFAKEQGYEVRFVRTTAVKHQRELDESSSAKSDIKDAYTIGNIVREGKYIDTVIEESVFRQLRMLAHARERILRYIVGSTHGLQAVLNDYFPELRHLFWSMKAKGLWMLLETYPFPEDVRHAGLSAITALLSKGRGKKRHIQEQAARVYQAAVESVGLKSITKADRTRLATYLEEIKRSDERRKVLEREMKELLKEIPLAEYILSLPGMGRVGCAVFLGELGNPEHFNNPRQIIKYAGYDPKENDSGLRVGGKIISKKGRWLMRKCLFFMVLRLVHRSSFFKACYEQKMKGSHRPLEKTEALCAVILKLIRVLFALMRDRRMFTEELPRCQKAA

SEQ ID NO: 167690 - protein, 458 aa, unidentified
MSKKHVSLEVVNPNAAGIDIGSRSHWVAVGQDAQDVREFGVYTEDYQELSMWLKKHQVTTIAMESTGTYWQNVFSYLVAEGFDVILVNGRQTKNIKGKKTDIKDCQWIQKLHTLGLLSSSFLPDSTTDVIRTYSRHRQNILKQSGATVQKMQKYLRLMNLRLDVVVNDIVGLTGKKIISAFIAGERSGKELAKHRHYNIRKPEEEIAKALQYNGREDYFFALKQEWKTYLHLQKQIDETDKEIKKLLKDIIKNDDNKKNQTAKKKDHKRKNKNAIRNTDMNKIGVQYFEGIDLMAIEGVNDATVMAFISEIGIEGIKKFKTAKEFTAWLRLAPNNKISGGKVLSHHLPKGSNRLKIALRQSANVIGNLKEGHLNDFFRRINYKKGRATAIGATARKLAVIIWNMLAKGEQYQPPTEYLFLDQKRKLRLVSRIKKNIAKFDIKPQDVGFDKLLNTSTEI

SEQ ID NO: 167691 - protein, 337 aa, unidentified
MDYFAGLDISMDETHVCVLDREGVVVRESRTESTAQAIAGELAKAPSCHRIVFETGRMAPILFHGLNQLGLPVVCVESRQAYQALKSLATHKTDRNDARGLAHLARTGFFKPVHVKSLQAHALRSLIIARKKLVGQRVTLENQIRGLAVVFGIRLPRALAAAFIDQALKASEGIAGLSAAMRGLITARTAVMTAVAAIDADIRRMTRASAACRRLMTIPGVGQLTALAFVAAIDDPSRIRRSRDVGAYLGLVPRRYQSGEVDYVGSISKCGDRRVRTLLYEAANVMLTRYKGQLKLKDWAFAIARRSTMRKARVALARRLGIIMHAMLRDETEFVLA

SEQ ID NO: 167692 - protein, 461 aa, unidentified
MAKKAKKVKTAKGAELRIVNPDAAGIDIADGIMQVCVPADRSKDNNRAFGAYTSDLHAISAWLRECGIKTVAMESTGVYWIPLFCRLQEDGLDVVLTNARDVKNITERKTDESDAEWLMLLHQYGLLKASFQPHNDAKRMRTLTRHRDTLSREASSIVLRMQKAMQQMNIKLTLVLSDITGKSGIRIIEAILAGERDPKRLADLADIQCKTPKEEIAKALEGNWEEDLMFVLRQNYDTFKHYCTQLGECDAELEKLMENYRAEVAKVEDTSYSPAKKRRDDKRTRHTVGFDVERKAYEMWGVNVFEIPGISHLTALELMSELGHDFTRKFPSSKQFCCWCNISPNTKISGGKRISSHVPHRRNNVGLIFRSIASSLANAKNQLGNFYRRIRSRAGGKAAVIATAHKVAEIFFAMVANQTTYNPERVGIDEKVLLEKRITRYKRELERITGTHIEIGNACVP

SEQ ID NO: 167693 - protein, 400 aa, unidentified
MDERQRFRWFLGIDVSKETFDGCCIPSHGERLFNLSASMDRKGFEELIKQLCTLSIPQESVLVGMESTACYHINLYSFLVSLGYTVMVINPLLISNFVKLQLRKTKTDKKDAYVIAQFLLLNRDSLSQSVLSSDISDLRDLSRQRESLVDQMSSTKSEIKRLLTITFPELEHISGIFTKSMLRLLCQYPSAASIKQAKRSKIAKILIPGSYGKQTPASVDRILKAAQVSVGTSSATKEIILRQKASLLVQLEEHLQELTDILIELCQGKIHGDMDILTSMKGIGEKTAVNFLIEIGGDIKQFESHKKVIAMAGLDPALYQSGKIDRKGRISKRGNRHLRRVIWLMTTKVIQFNERFKQYYLKRIKDGLPYKKAVLATAHKLIRVMFAMLRNKTLFDSRMN

SEQ ID NO: 167694 - protein, 274 aa, unidentified
MKQIKRIGIDLAKSVFQVHGVDAHENVVLRKPLKRAKLRAFFAQCPACQIGMEACGSAHYWARELGKLGHTVHLIAPQFVTPYRKNDKNDGNDAEAICEALGRPTMRYVPIKDEEQQAVLCVHRARSLLVEERTALANQLRGLLAEYGLIIPQGVARLRAALPGILEDAENGVPMLAREVFADLTEQLRGLDTHIAAYDRRITHLARTMTAAKRLMQVEGIGPLTATALVASVGDARLLKNGRQFAAWLGLVPRQHSTGGKSRLGRGAASATRL

SEQ ID NO: 167695 - protein, 347 aa, unidentified
MAIVETTRPITGGVDTHLDVHVAAALDPNGGVLGIESFPTTAAGCAELADWLASFGPLTQVGVEGTGAYGAGLARHLRTRDVAVFEVDRPNRQLRRSRGKSDVVDAVEAGRAVLSGRATGVAKTADGHMEAMRVLLVAKRSAREERIRCLNQIRHLSFCAPDELRQRLAGVPRSQLATVAAGLRPRSGSDLVVFSTKVAIRSLGRRVLASEADTAAIDELLEALVAVTAPGLLELYGVGVDTAAILLAAAGDNPERLRSEAAWAHLCGVAPLEATSGKVVHRHRLNRGGNRQANHALWRIVFTRMRGDDRTRAYVERRLAEGRSKPEIMRVLKRYVAREVYKHLPRP

SEQ ID NO: 167696 - protein, 407 aa, unidentified
MEVVYRCCCGIDVHKKMIVACLDDGGKRELREFGTTTSAIKELANWLTVSGCEMIAMESTGVFWKPLYNLFELMDLDAIIVNAAHMKALPGRKTDVKDAEWIADLLRHGLLKASYIPSREQRELRELTRYRKSLIEERCRETNRLQKILEGANIKLDSVVKDINGKSSRKLLEKIIANEMPDSDEVSRMIHSRMRPKLDQLMEAIDGITTPLQRRLLAQIIDHIDDLNRRVAVLDEMVKGYMAEYEAAIAAIDEISGIARRSAEVILAEIGTDMSRFPSAAHLCSWAGVCPGNHQSAGKRKQGKTTKGSKTLKSILTQCAKSAKTSKSSYFSAQYQRISARRGKNRATIAVAHSMLIAIYHVLKNNVPFHDLGSNYYDTFNREHKIKSYLKRLQALGWQPDAGGLSA

SEQ ID NO: 167697 - protein, 456 aa, unidentified
MKIPQSTIRLLTWRLVKILLNREVSTMKSNTQNAKIEAITEKTLVLGIDVGSETHYARAFDYRGIEYSKKPFKFSNTEAGFVTFKEWILDLKEKHEKDKVVPGMEPTGHYWFNLGKFLQDNEMKPVLVNPHHVKKSKELDDNNPTKNDRKDPKVIAGLVREGRYMIPYLPDGVYADLRTASNIRFQLQAELTRIQNRISRWFNIYFPEYKTVYGRPDAKSGMLILKQAPLPEDILTLGIDGVNQIWRDAKMRAVGKARAKTLIEAAEHSVGSKEGAISARMEIRMLLEDYESRNIRLQEIMTLIEELVNQIPMAEKLLEIKGVGIKTVSGFLAEVGDISRFNNPKELQKLAGLALVENSSGKHKGRTTISRRGRKRLRYLLFEVAMSLVAKNPEFRELHTYYTTRRLNPLKKMQSLMAVAAKLIRVFYVMLTKGVDYDPKKMVGDIKRPAVYLQAA

SEQ ID NO: 167698 - protein, 343 aa, unidentified
MQILKQVLGVDVAQKELVVTLGRLKSDLSIDLYSRSIFRNTTPGIGSLIKWVKKLTQVDIPVQYVMEATGVYHQKFAYYLDENGFEVSIVMPKKISSYMRTLENKTTTDKTSSDAIAQFGLERKMDHWHRPDGIYKMLQQLTRERDQIVSERAMVKNMLHAENSEAEPNAGSLSRLKARIQFLNKQEYQVKKDIELIVKSDSGLQKRIQKICSIPGIGILTTVTVLAETNGFNLVRNKKQITSYAGFDVKEKQSGTSVNKKPRISKMGNKALRKAMHLPSLSAIKHDEKFKEIYVRLVSKHGVKMKAIVAVQRKLLELMYLLYKNDTVYQKDYESKKRVADTL

SEQ ID NO: 167699 - protein, 495 aa, unidentified
MKSGEKVLRRRHTAGGRIAPGGSRSRTLNLAKVTESTPDRLAALVPKSERTPAREAPCISVTYDGATMHHKSKKPMKEWKEITHYAGFDWARDHHLVVIVDQQGQIVADFQFDHSVEGWKSFHEKTAPFGNLAVAIETSQGVVVDQLLQGGYAVYPVNPAAAVSYRQRKAPSGTKTDQLDGWSLAVALRVDGHGWKALQPMDELSLQLRLLCRDEVALIEQRTQLVNQLKQALVEYYPAALEAFDDWVNRSTWDFVIQFPTPEGLVQAGKRKWEKFLHTHRLWRSETAEKRLAIFSQADQFKASAPITKAKRQLALSLCKLLRTLQQQLDEYQNQIQELFKRHPDHDLFGSLPGAKTILAPRLLAAIGSNPDRYTTVEVLQCFAGSAPISFASGQIHKAKVRWACDKFLRHSVHLWANCFRKASAWGQAYYQKKRQDGMSHACALRCLAQRLLKIVFRMITDKKPYDAELHARNQLKHGSWVLALVEKPAVKTGA

SEQ ID NO: 167700 - protein, 346 aa, unidentified
MQYYTERHRHTCGVDLHGRNLYLCVLDPDRKIVLHRRVDCDEEKVLRALAPYREDLVVGVECMFKWYWLADICDEHGIPFALGHALEMKAVHGRKSGNDRLDAERIARLLGSGMFPVGYVYPKKMRSSRDVMRRRSYLVNQRSSLITHIQITNLQYNLPELGKISKPKNREGIIEQFQDPAVRASVEADMAVIDILDVVIARLERVIIRAARGHDPVAFTLLKSVHGIGDIIGLTLLYEIHDINRFDSLGGYLSYCRLIKCTKTSDGKPKGTGKRKQGNQHLKWAFSEAAALFLRANPEGQKLHSRLLKKHCKAKALGILAAKLARSVYFMLHRNTPFDMERFVRA

SEQ ID NO: 167701 - protein, 369 aa, unidentified
MISVGVDVSKEESTVCVMKPYGEIISKPFELSHTEKDLSELANMLLRLDGEVRVIMEVTGVYHLPILMYLKEQGFFVSVVNPYEMKKYRSQGLRRVKTDKQDAITICKGLDYWYQLKNYEANGAIYEELKLLGRQYRNYMKMHIEGVQNLAHLLDCVMPGIKLLLGGWNESSGKNKLSDFASEYWHFDNITKKSERQFSANYIKWAKKNGYHQNQDKAEKIYLLAKSGITTISSGNPTTKMLMQEAVKVLKEVDNTLKKILTQMQLLAKSLPEYAVVRAMGGVGEVLAAKLIAEIGDVRRFHHGKSLIAYDGIDSPPYQSGQFTAQNRRISKHGSAYLRKVGYEVMQSLKTHDAPTDDCVYQFILKKRT

SEQ ID NO: 167702 - protein, 361 aa, unidentified
MSQTMTWVGLDVHARSTHAAAISTLTGELTRARFGPGVDEPVAWLAKLEAPVRACYEAGPTGYGLYRAAAAEGLAVQVIAPGKTPRGPSDRVKTDKKYAELLARLLLAGGLTAVVVPPPEVEAARDLMRGHDACRRDLMNARHRVSKLLLRHGRVYDGATTWNRVHRTWLSRQQFSEPATEMAFADLVAQVDGLTARKAAIALRLSELALDERWWPQVARLRAFRGIDTLTALALHLELGADWKRFERAPQLAAWLGLTPSLSQSGESSRQGQITKTGSIFARRLLVESAWHYSREPRVGATLRNRQEDQPAHVLAISNRAQQRLYRVHQRMRARGKPANVAVVACARELSCFLWAAVTAD

SEQ ID NO: 167703 - protein, 362 aa, unidentified
MAKAMTLVGLDVHARQTHAAVLDQATGELDVSKLRMAPEEVVSFLQRLEPPVRAVYAAGPTGFGLARVARECGIDVRVAAPGSIPKGAGDRVKTDRRDAVRLARLLAAGELSFAFVPSVADECFRDLVRCIEDVRGDLMRARHRLSKFLLRRGERYPGPGGAWTAKHLAWLRARAFADACSQATFVDYLAAIELLAGRRGTLLETLERAIPESGHASVVARLRCFRGIDTLSAAGLAAEVGDFARFPRPALLAGFLGIVPSERTTDSKRRQGSITKAGPGHARRLLVEAAHHYRYPPRVGATLARRQHGQDARVLEIAWRAQRRLHQRWQHLHQQRRKPAGVVAIACARELAAFLWEAATLD

SEQ ID NO: 167704 - protein, 347 aa, unidentified
MVIIGCDFHPGFQQIAMVETDTGEVRELHLSHKQEAEQFYGSLRGREVLVGIEACGYTQWFEQMLDQMGHRFQIGDAAAIRASYVRKQKTDRRDAGHILRLLMEGRFPALWVPTAADRDVRQLIVHRHKRVELRTRVKNQLHALALNQGLRLRWKLWTRAGLEQLKALELQPYGSARRADLLRQLEEMDAEIARLDKTVGKEAAARPAAVRLMSHPGVGPVTALAFVLTIGDVERFSRSRQVASYLGLIPSERSSGGKQRLGHISKQGNPLLRFLLVEAGHIAVRGDAELRRVYTRLQHRHSTGVAKVAVARKLAVRLYWMLRKQIDYAQLRVGPYAGKPVSFCGRK

SEQ ID NO: 167705 - protein, 412 aa, unidentified
MEVVSPIIAGLDVHERTVVVCLRVQKEKRVQRSLRTFGTTTPALLELQRWLVENQCPCAVIESTGVYWKPVFNILEGSVEVILANAHQVKTLPGRKTDMRDAEWLAELGAHGLVKASFIPPEPIRELRELTRYRKSLIRQRTAEVNRIQKILETANIKLGSVACDVLGASGRAMLQALIAGERDAVVLAGLAKGTLRKKIDQLIPSLTGRFLQRHAFLLRQMLDHVEFIDGQIATIDGEVERACAPFEIPLQLLQSTPGVGSRTAQVIVAEIGCDMNQFPTEHHLASWAAICPGNNESAGKRRTGKTRNGNPWLRAALVEAAWAASRARGTYLQSQFRHLAYARGKGTRKAIVAVAHSILIAAWHILKKNVPYNDLGPEHLRRTNPEKIKRHLVRKLEALGYRVSLEEGTAA

SEQ ID NO: 167706 - protein, 337 aa, unidentified
MEMAVTPVVGVDVSKKKLDIVLLVSGKAKSKTLSNTLEGYQELVEWLVKQKVSPDSAHVCLEATGVYSEPLALWLHDAGIMVSVINPGCIKGFGQSENIRNKNDQIDAGLIARFCAAKRPPVWVPPPKEQRELKGLSDRLLALKDIRQQEKNRMEAHDFAGQADLVKNVDEHVKWLDQKITELEKEIDDHIDRHPGLKHDADLMRSIPGIGSTTIAKVLGHIGDIRRFGSAKALAAFIGVSPKQKSSGTSVRGRTSMSKIGNNDLRSALYMPGMVAKRYNNLLKTFAERLSANGMAPKAVTGAVMRKLVHLIYGVVCSGKPFDPNFLNSGLAKQDGI

SEQ ID NO: 167707 - protein, 338 aa, unidentified
MLNLIIGLDIAKNIFQVYGTNHRGVAIIKRKLRRNSVLKFFATLEPALIGIEACHSAHYWARELTKLGHTVHLLPTQYVKPFVVGGKNDANDAAAIGMAVTRRDIHCVPIKSAEQQSLQSLHRIREGAIQERTAKSNQIRSLFSEEGIIFPIGLSSLKKGLLEIIEDGESVITPILRKLGRMYLEQLSCLQAWIGELNEMIDRYFKENDVCQRLATIFGVGPVIATAIVSRVGDPRLFKNGRHFAAWLGLTPRQYSSGGKTRLAGITKRGDGYIRKLLVQGVRAVIYHINRRHDNYGDWIKKLMQRRPVNIVAIALANKIARISWVILTGEEKFRVTS

SEQ ID NO: 167708 - protein, 366 aa, unidentified
MKKNSTVASSRKRILKGQKLTIGMDLGDRFSYYCVLDEAGEVMIEQKLPTTRQAMKQVFGRMPRSRVALETGAHSPWVSRLLAELGHEVIVAHARNVRLIGESSRKDDRLDARMLARLARLDPRLLSPVRHRSAKAQIDLTVIRARAALVGARTALVNAARGLAKSYGERLRKCGTQQVNQDLAAGLSPELGAALEPLLAEVASLNQRIAEYDRRIEQIATKEHPEVALLKQVKGVGTLIALTYVLTVDDPHRFRRSRDVGCYLGLRPGRRNSGKSEPQLHISKEGDRYLRTLLVQGAHYILGPFGQDSDLRRWGLKLAERGGKNAKKRAVVAVARKLAVLLHKLWVSGEVYEPLRNSHHVVSAVA

SEQ ID NO: 167709 - protein, 324 aa, unidentified
MQTQSIGVDVGKTELVASIRDSDGNSAMPALFPNSILGLKKFLVYLKTNNISSDDPILFESTGPYHWRACRTLADEGYFIKVANPLHTKQIARLSIRKRKTDKVDSQNLAFLASQNYGYRFVETEEMAKKKAMVRHYWKLRQSATDHLRHDRYMKEYRGINDESVSRFMIKRCETLKKIIVKEWSKGNDVKYLDSIPGITPFLAATLLAELLPLERFKTIDQIVAFSGLDPSVKQTGGKAGHHGHISKRGSPTLREALFLAAFGSFQREPMKSIYVRYKARGLHHNTILCILGRKILRIAVSLLKKRRVFDESKLCTADDLTGT

SEQ ID NO: 167710 - protein, 338 aa, unidentified
MKLYGAIDLHSTNNVTVVINEQDQVVYQKRLPNDLSLIAQQLSSYRASLEGIVVESTYNWYWLVDGLMEKGYRLHLANTAAIQQYNGLKYTDDHSDARWLAHLLRLGVLPEGYIYPKQERALRDLLRKRGQLVHQRTANLLSIQSLISRTTGNSISATIIKALDIQHVDGVLPNPDLVLALKANLAVMNSADAQIEILEKAVQDRVKLRPQFRFLKTVPGIGPILALTIMLETGEIERFASVGNYASYCRCVGSKKISNGKRKGSGNTKNGNKYLAWAFVEAANFAIRFNSKIKSFYQKKKSKRNAIVAIKAVAHKLCRACYYIIKDQVTFDITKAFA

SEQ ID NO: 167711 - protein, 350 aa, unidentified
MMHAGLDLSRRKIDVCLLSDEGEVAGQFAAPADADGLRGLNRRVMDLGVPVRGVIESMTGARFVHDTLEQLGWDVLIADAQKVKGLAPLACKTDKIDARVLAVLSQRDLVPAIWLPDPRVRKEREQARFRMHLVKHKSMLKSRIHATLMTFGRPCAVTDLFGVAGRNMLAGLDVPDPWRGTIDASVLLIDDLERQIAVINAQLRAGGADHPYVPLLMSAPGIGWVLAFTIAAEIGEIERFSSPTKLVGYTGLCPRVYQSGEKDRRGPLTKAGPKYLRWAMLEATMHALRHEAYAERYQRNKRRLGKQRGAKVAQVDIARRLTEAIWHMLTRREPFNPTPAAGGAAFRLAA

SEQ ID NO: 167712 - protein, 408 aa, unidentified
MQRYYLGVDWADEFHQVWVSDTEGKKVAEITIEQSVKGLSEFGRWLHERKAEGIELWASIEKPHGRIVDFLLDHGVVVYPVNPKALDRARDRFRMSQSKSDSFDAYVLAEFLRTDHVHLRALEPDSEQAQELKMLTRDHHRLGRHKTRLLNQIEVTLKEYYPRPLEVFSDLESKIALDFLTQYPTPRALSELTRRKWNRFAKREHHLGEERCKELWEKLSQPQLKIPEHVVRAKAQLLLVLVIQLKSLAEAVKNYSDKVERFFASMPAANLVKTLPGGKSGTTVPMLWAELGDAKNRWESFRHLQAEAGAVPVTKASGKSRAVQFRYACNKLMRYASYWLSFNSLNRCEWANKYYRDQRAKGHSHPQALRALGAKWLKIIFVMWRDHKPYDENYHLANIARQTMRQAA

SEQ ID NO: 167713 - protein, 324 aa, unidentified
MAHFQDVVGIDVSKETLDVFVLSHQQQRAVANAAAGHCDLVNWLKSLGVRIAVMEASGGYERTIAGVLRRAGFDVRIVDPRRVRHFAKAAGRLAKNDQIDARMIAEFGAVFAVAERCEIAADPARERLAGLLGARQALIEHQTALRNQISAAPRGAARLALSAALKPIAGAIKKLDRLIAAAIAAHPPFAALAARLDTVPGLGLVTIAAIIAWLPELGRLDRRALAALVGVAPFDDDSGKRVGQRYVQGGRCKLRNVFYMAAMGGATRHNPVLNAYYTALINRGKLPKVAIIACLRKLLTILNTMVAQNKDWDPSHAATSAIAA

SEQ ID NO: 167714 - protein, 370 aa, unidentified
MAEPTTLFVGLDVHKESIAVAHASADRASDIVYVGQVGTREADIDKLVRRLHSQASELVVAYEAGPCGYGLYRTLTRKGITCLVVAPSLIPKKPGERVKTDRRDAAQLARLLRAGDLKSVYVPTVDDEAVRDLSRAREAAIGVLKDAKLRLKSFLLRLGLHYSGRATWNDAHLRYLAKVVCPTPAQQIVFQESLRAVSEQTERVRRLEDELVEIAATWRLHPIVEAFQAMRGVQQHTAVTLAAELGDLTRFDSPRQLAAFVGLIPSEYSTGESRRLGPITKAGNGHARRALVEAAWAYRYPAKVSAHLQLRLEHCAKPIQDIAWKAQVRLCKRYRRLVARGKNSNVVVTAIAREILAFLWAIAQEVPVTH

SEQ ID NO: 167715 - protein, 367 aa, unidentified
MRKSSKVFVGMDVHKESIDITLAEEGGEVRRFGQIGGDRPALMRAVRKLTAHGRELVFVYEAGPCGFWIHRALTALGHACMVVSPALVPRRAGDHVKTDRRDSERLASLARAGELEAIHVPDVRDEAIRDLVRARDDAVIAQRRARQQLKALLLRNDVRYVGKTSWTGAHRRWLAQLKLPEPAQQIAFEEYLDAIVVATSRIERLTRTIESAAAAWRFAPVVAALQAMRGIQFVHAVTVIAELGDLTRFASPRALMGYLGLVPRENSSGEHRHQGSITKAGNSYARRAMIEAAWAYRYPARVTRIIATRQTGLPKAACDIAWRAQLRLSAKYRRLSARHLHHNKIVVALARELSGFVWAIGQSIKPN

SEQ ID NO: 167716 - protein, 313 aa, unidentified
MTISSAAGVDVGRDWLDVAIAPSGRHFRVANTPAAVAGIPNRLRRAGVERVVIEATGAPAARLVRTLAEAAMPLGVVDPRRIKALRLAEGRRAKTDRLDAGLIARFALIMTDAVRPAPSPAALELRALSTRRRQLVEMIAAEKTRLKQAFEPILMASHRLAIRLLGEERERIEAMIETRTSATPEDRRKVELLRTLPGVGPAISATLLADLPELGTLDQKAIASLAGLAPQIQQSGTQPGRAHIQGGRPCVRAALYMAALSAVRHDPGFKAQYQSMRKAGKPAKVALIAIARKIVVAANALIKRNQPWNPNYT

SEQ ID NO: 167717 - protein, 342 aa, unidentified
MDSTTIAVDLAKSVFEVAISRRAGQVETRHRFSRGQFSRFLAEQAPATVVMEACGTAHFWGREAGVRGHRVVLIPPHAVRPYVQRNKTDGADAKGLLEALRNEDMRPVPVKSIDQHVLAGLHRLRSTWMATRTARLNTLRGLLRELGLSIPVGARQVLPRVCELVSDADSGLPGALRPALAAAVREIRELEGRVREVERMREAISRESELLARLRTVPGVGLLTATALVAFVGEVQRFPSGRHFASYLGLTPREHSSGLQRRLGAISKRGDPYLRMLLIHGARAVLLHAKKLTAQKDRLRAWALAREQARGHNKAAVALANKLARIVWAVWRNGAAYGSHHA

SEQ ID NO: 167718 - protein, 407 aa, unidentified
MNAVGIDVSKGKSMMAALRPMGEVALPPKEYPHTEVGLERMALDILALGEDTRALMEATGRYHEPVAAALHEYGIRVTVINPLFIKQSGGGSIRKVKTDKADAMKIAKYALDNWVDLREYTPMDAIREQLKLCSRQYNLYMKNVVALQNNLTSLTDKTFPGVNELFSSPDRADGSQKWIDFVTTFWHCECINLVSEAAFTERYRKWCKRKGYHFSERKAAELYMDSMGHITTLLRNSNTKLLITTAARELASAKATLAVLRAEMTRLARQLPEYETVRAIYGVGETTAVQLMAEIGDVRRFPRRSSIVSFAGVDPAVDDSGKHISKSNPTTKRGSPHLRKTLYQIVCTYLRKAPFDEPVYQFLDKKRAEGKPYFVYMTAAQNKFLRIYYARVKECLIAADAKELSKD

SEQ ID NO: 167719 - protein, 395 aa, unidentified
MPELWAGVDVGKEHHHCVVINARGERLLSRRVLNDETALLELIADVLAISTDALWAVDLNHGGAALLIGLLINHDQPMTYLTGLAVHRASGSYRGEGKTDAKDAFVIADQARMRNDLGQLRPGDEIAVDVRTLTTRRADVVADRTRQINRLHAQLLEIFPALERALDLTNQGPVVLLTGFQTPDAIRRAGRDRIETWLATRKVRNAAALAQTAVEAAAAQNISLPGEKLAAAMVVRLAKGVTALDEEIRELDALIEERFRQHRHAEVILSLPGLGVRLGADIIAATGGDLAAFGSADRLAGFAGLAPAPRDSGRISGNLRRPRRFNRTLLRAFYLSALASLRACPASRTYYRRKRHEGKNHKQALLSLARRRVNVLWAMIRDGAHYQATPVTAAA

SEQ ID NO: 167720 - protein, 409 aa, unidentified
MLFIGDDWAEDHHDIEVQDETGRRLTTTRLSEGIEGIAKLHALVARHGGGEIEPGQVVVGIETDRGPWVQALIAAGYRVYAVNPKQAARFKERYGASRAKSDKGDAHALADMVRIDRDQVRPIAGDSDKAQAIRVVARAHQTLIWERTRTFQRLRSTLREYFPGALTAYAGLELTSTDAMQLLIKAPTPEEAAKLTKAQISTVLARQRRRNRDQKAAAIQASLREPQLALPAPVAAAYGAAVVAQASLLIALNEQIQALEVQVTAHFLTHPDAEIYLSMPGIGEITGARVLAEFGDDPTRYTSAKARKNYAGTSPVTRASGKQHSVHARYVRNDRLADALHKQAFSALNTSPGARRYYDRQRARDVGYNPALRQLGNRLVGILHGCLKHRTLYDEGTGWSHQAALVAAA

SEQ ID NO: 167721 - protein, 341 aa, unidentified
MKKLYAGFDLHSSSSYLGIMDEEGKRIFARKLPNDPEQIVETLRPHAKRIAGVAVESTYNWYWLVDTLIEHGYKAHLANPSAMQQYKGRKHKDDRHDAFWLAEMLRLKILPEGYIYPKQTRGVRDLLRKRGHLVQLRTSLIISLQHTVTRTCAVKVSVNDVKRVREDRVLCLLQGDEAVLLSGSISKEAIDYLGKQIRKIERAVEGKIKLLPEYGYLLTLPGVGTILALTIMLETGAISRFPKVGDYVSYCRKVSSEWVSNDKKKGKGNEKNGNRYLAWAYSEAAELARRYDPRARAFYQRKVAQSSERMVAHQALAHKLARAAYCIMRDQVPFDPEKLFG

SEQ ID NO: 167722 - protein, 406 aa, unidentified
MTPQVCRIVDLPVYYELETNNGNRDYRIQIGGHYMNYNTVYVGMDVHKESFTLCSCKYEDEKASHYQRTPASYKNVLRYLAFLRTIYGEDTRFVCGYEAGCLGYSLYHQLENFNVECVILAPTTMLEQRSKRRIKTDKRDAEIIARSLAQHNYSPVHIPTETDNQTKEFIRMRDDHKAELKKIKQQILSFCLRQGYQYDGSGNWTAKHVKWLRSLKPAGLYKEILDEYLLTYTILTDKLNRLDQRIEELASKEEYKESVSKLTCFLGIKIHTALSVIVEVGDFQRFVSARKFAGYLGLVPGQHSSGDDRNGLGITKAGNTHVRRLLVESAQSYTRGKIGYKSRVLRSRQAGNSPQVINYADRANERLRRRYYKMVLKDGKKYNIAKTAIARELACFIWGMMTDNIY

SEQ ID NO: 167723 - protein, 465 aa, unidentified
MAARKKKRMSAQVVEDEDYQLHYEKVAGIDVAKESAAVCIRLPAAEGKTHRTSHLREVIATVPAITELAWELKTLGVQMVSMESTSDYWRIWFIVLEEAGLAVQLVNSSQARSLPGRPKTDKEDARWIARLTEMGLLRPSFVPPPEIRALRLLTRHISDLTADRTRYWQRLEKLLEDALCKLTSVVSKLAGHQTARAVIEAMIGGERDPRALAALGKGNMRDEKLPALAAALTGMRFGPEHAGVAASLLAAIDLLEEELRVAEDAVAAKLAAIPASWGVDADGATGPDAGREEGAPVLPAVDRLDEIPGLGRESAAALIAEIGLDMSRFPTPEALVSWAGLTPTARQSGPRKGRGKKGRGNTYAKHIAVLAAYAAANTDTFLGERFRRLASRPGGGGRKKAGCAVGRSILVIVWHLLSDRASRYRDLGPDWHARHTDRNRKARSARRQLEALGYDVIITLREDAA

SEQ ID NO: 167724 - protein, 478 aa, unidentified
MQPSQGRFFLYPAQRLLIHFKKYIRFGWLGFAYSRLTCKAVNFGSEMDNPSTIFVWGLVFMNNVNPVVGVDVAKDFCYYCVLSPDGKKYLEPFKAFNTKEGLDFVLEKLKKVEKAFKNRPVIVLESTGHYSARLVHLFGKNEFEVFLVNPLQSHSIKNSSIRKVKNDKADAEELARLYFVCDLQQHRPFDDSIANLKVLSRAYFSLSEQRISMLNQLTAAVDQVLPGFTRIFNISSKTCVELLARYSSPDALLSSPKEDVASLIRSCSRRSLKYALDKYQLLIQCAKDAKETGITLSALYDVICIYAQNLKYLNDKLTELDEMIQRLAITIPEVSLISSIPGFGKRLSSVIVSEVGDISRFNNAKQLVAYCGIDPSVKQSGNFVGTKNKFTKRGSAYIRKALYIAATISVRKDSKSRCVNPVIYDYYQKKIKSKPKKQALGAVMNKLVRIIFSVLKNKHPFVMITPEEQIKLYRSKAA

SEQ ID NO: 167725 - protein, 347 aa, unidentified
MKRTTIGLDIAKRVFQAHAVDPASGEVTRRKLQRAEVLQWFAQRQPSLIVMEACGSAQHWAREFGKLGHEVKLIAPQFVRPFVKTNKNDVADAQAIWTAAQQPEMRAVAVKTEEQQAVLALHAIRERLKKARTAAVNQLHGLMGEFGIELPKGWRTMLPRAAAALGQPDSGVPALLRPQLQRQLEEVRRLTEQMTEVERQIAAWKRCQEECERIAAIPGIGLLTATAAVATMGEANTFRSGRQFAAYLGLVPRQSGTGGRVQLLGISKRGDKYLRMLLIQGARSVLARSRASKDPNTWLGRLVQRRPRNVAAVALANKMARQVWAILAHNRTYEPNYRVPQPSATLA

SEQ ID NO: 167726 - protein, 345 aa, unidentified
MPIVGGLDIHRKQLTFDYLDTVTGEVQRGQVSPADRAHLRAWLARFAGRDDVAFALEGCTGWRYVAEELAAAGIAAHVAEPADTAFARGRKRHAKTDKTDARHLRQLLADGRLPECWIPPAQILECRALLEAYHDLRREHTAWVERIHAVFFHQGAPRLGEGVLRTERSLAALRAAAAVHLSPAGQLQVATALDMLTAVEARMDTLRAQLREAARRLTGARVLADRLYGVGPLAALAMTCWLGGAGRFSSSRKAVRFAGLDVTVYSSDGKRSPGHLSRQGPEILRWVAYEAGKTHGRASAPGHDYYAAVKDRTDGKIAALSQARKLIRQACHILAELGDDALTVT

SEQ ID NO: 167727 - protein, 455 aa, unidentified
MSRPQAVSRAQVIDDQEHERVHDRVAAVDVAKDAGMVCTRMPHPSRPGARQAVVWTVQARIGAVRALGRQLKNDGIEIVTLESTSDYWRIWFFVLEAAGLVVQLVSAAQARHLPGRPKTDKLDAMWLARLTEWGLLRPSFVPPQPIRDLRDYTRARTRLIHERTRCWQRLEKLLEGALIKVSAVASKLTTLSAQDMIKALIAGERDPRVLASLARARMKARHDDLVAALDGMFDAHHGELAQMLLDHIAFLDTQITALAARAAQLTAAMPAAWGIDADGTTGPAAGTGPDSAVLPAPARLAEIPGISEDLARAIIAETGLDMTRFPDAAHLVSWAGLCPSARQSGPRTRTGKKGQGDTWLRNALGQAVPGAARTPTFLGERYARIARRRGTAKAKVAVARSILVITWHLLADPEARFTDLGPGYYQSRTNLDRKLRNHIRQIQALGFDVALTKTP

SEQ ID NO: 167728 - protein, 259 aa, unidentified
MKQEIVYVGIDVAKAHLDVAWEKQFHRLPNDVAGTKQLLCLLKVIAGQVQVIWEASGGYERSVMQTLQRGGIKASVVQASRVRQFARAIGILAKTDCIDAAVLCAFGKAMQPQVTAPSNPQQERLREMESHRRHLSRLLVAEQNRRAQLTDPTVLALTERLVGQIQKQIERIDLLIKELIEGSPGLSSKAQKLMALTGVGRRTAALLLAQMPELGQLNRREAAALAGLAPSIATVASCVADAPSLAAVGPCAPASTWQR

SEQ ID NO: 167729 - protein, 344 aa, unidentified
MNYYIGLDVSMKETSYCVLDCKGTILKEGNTLTDPDSIAKALSPFPALKIGLESGSLSHWLLRELLRRKLPACCIDARTMASVASCQINKTDRNDARAIAKAIRAGYYREVTLKAQDCIEINNLLVARSCLVKQRVTTKNSIRGLLKSYGMRLKSVGKHTFVDEVNKSLEKLGSVTCLAIKQLLSLYITQTHQLAEMNDWVEQVAKSDPVVVNLMSIPGVGPLTALSFRASIADPHRFNQSTSVAAYLGLTPRQYSSGETQIQGRVSKSGHGMSRSYLVEAANVMLTRSKKWSVLKAWAMKVARLRGVRKATVALARKLAVLMHRMMITGESFQFKEAREPVAI

SEQ ID NO: 167730 - protein, 425 aa, unidentified
MSKKRIYRATPVKQVRLEPLVKAAGEGRVIVGIDIAKEDMFAAFEVDGIVVLTVRWRHPEQTLGFAELLTVLKARGPVEVAMEPSGTYGDALHALLEQYQLPVFRVSPKRSHDAAEMFDGVPSYHDAKSAALLCKLHRDGISERWSARSDHERRLSATVRLLGNYEEEFRRNSNRLESLLARYWPELTQHLKLRLATLAELLATFGGPAAVAAHAADAEALMRRVGGPYLARTKIEAVLASARQTLGVPQLEEERDLVMRVATEARRSQKLAKDVKRRLEELSQSHGATKYLCPVVGKTTAAVVVASLGDPRNYSSAAAFLKATGLNLKEKSSGKQKGGLHITKRGPGVVRLFLYLAALRLVQRHPVVNAWYQKKVQRQGGLAKPKAVIPIMRKLVLAAWFVARGDTFDVNKLFDVSRLKISPAH

SEQ ID NO: 167731 - protein, 408 aa, unidentified
MKDSRKRYIGLDVHKYYLIALGVDEDLHVVLPARRVELSHLDSWMKKTLTKQDAVVLEMTTNTWQLYDELCEHAGSVTVVHPPHVALITRSLVMNDKIAASILARLLAKGLLVGVWVPPQEVRELRGLVAQRKKMTGLATQAKNRLHAVLQRHHLLPPVGNPFQEAQNAWWLALSLGKLEQVNVQSDLETLRFAESQRDCLTSMMEEIASQQEQVTRLLQVPGFGVVTAVTVWAAIGDIHRFEDAQHLVGYAGLGTKVHDSGMTSRSGRITKAGRRDLRVVLIEAAQVAANTHPHWKAELARLQPRLGRNKAIVAIARKLLVTVWYILAQHKTDRFAQPEAIAQKFLKFAYQLGKENRPAGQSAAQFVRQHLDALHLGNELTSIAWGTKKPIPLPPSANKVSDVPNTK

SEQ ID NO: 167732 - protein, 364 aa, unidentified
MDVHLRSTTVCALDAETGEAVTRRFRGNPWGEVAEWMSGFPGPSLAAYESGYLGFAPQRELSGLGVDCVVAAVSKVPRSAADLSSKNDRNDAARMAKAILSHDISPVWVPSPEIEGLRDLAAAHDAATARLAAARQRLLAFLARRGYAYGGTTPAGNPRRYWTYGFLRWLDGIHPADDGGIRALAALRSEVEAADETREALLAEYRAAVAAGPLSAEVEALQSIKGCGFALAAAFASEVGDFSRFRSGRQVTSYFGLAPKQRSSADSVRLGGISGAGNALVRRLAVEGSWSYVQASHQPKLMPKGSGVPLGVRIHGRKGSERLLRRREEMLARGMPQAKANAATAAELVRWLWALGAMCREATE

SEQ ID NO: 167733 - protein, 317 aa, unidentified
MAMQTGRLIVGADVAKAELVIHHDSNDEVIKLKNSKADIKRWLKQQPLNTAIAVEATNVYHLDLVELAHGLGFSVYVVDGFQLSNYRKSVGGRVKTDPSDARLLSRFLRNEGEDLRPWSPPPAVYGKLQSLLRRRAALVSARTAMTQSWANETLLKAAFEAFVTSIDRLDLLMQKKMKEVLREAGLHEQVARCQAVEGIGFLTATALVMAFVRGEFKSSDSYIAFLGMDLRVSDSGQKAGRRRLTKRGCSEIRRLLHNAAMAASKSTAWKGIYEQHRKSGKATTQALVILARKLARVAFALMKNQDEYVTKASKPAC

SEQ ID NO: 167734 - protein, 335 aa, unidentified
MQIYGIDLVKEKFDVSFLRLSSKSNVVTPVHHVVRNTQNGIKAFLKGLPSDSVLVAEHTGVYGERLLKMCTEMNVKIAYVGGHVIHTYKSGPDRGKTDEQDCNVLRDFGERFTDKLVYTTFPEEDIYELRQLSRQRTMLVEERKRIMTADKTEDCRPYRSEAVKRSMQHIIDLLDEEIKDMERDMLTVIRKHDKISNSYDIITSVNGVGLVTAVELIVKTRNFTTITTAKQYSAYAGTAPYEKSSGKMNQGAHVSKWGNRRSKTLLYICAECARMHNKEMKLYYERRTIIDKKAHHYVLNAIANKLLRLIFSLINKNEKYNPCYIQRDPRSININ

SEQ ID NO: 167735 - protein, 340 aa, unidentified
MLAAIDIHKAVCQAAVLDPGTGALVEQRFAASREALIGWTRKWEGKLDAVALEATTGWRWVEHELQALGIEVRLTDPGQASALQGRRRRPKNDRLDARWLVMLLAREMLPHAWLAPEEIQRLRDQTRLRKALADDHTRWAQRLHAVLVHEGWPCSRGSLLTDSGRRWVAAIRLHPGARARVEAMLSVMASIAHQIDLIDCELRRLAKRDERLRALQTIFGIGPILACTILAEIGDAKRFRRARQVVRAAGLDPVVKDSGDKQRRGHLAKQGPPTLRWALVEAAQHACRKNSPDHQLYRRHHGHAGANPATLTVARKIGKRAFHVLNALETPAAEAQTAAA

SEQ ID NO: 167736 - protein, 353 aa, unidentified
MSKPPQQRPVRTATGLIPCGIEVSHHTLHVALGPYAPRSFDNTPAGHQAILRAIDQAGGPGRVRVVLEATGRYSLDLALTLHGARVPVMVANPRAVRHFAVALMERSKTDPLDAQVLREYAARMPFQKWQPPSATALKLVAIARRWGAVTEMITAEKNRLHAASLSGALSGYVRLEVTRSLQNLQRSVARLQRAAEALISDDAELFERYQLLRSIPGFGPTSAVHVLAELSLLAPDLDIRQWVATAGLDPRHCDSGTSVHRPARISKLGNAHLRHALYMPALVAIQHQPHLRGFYLHLLERGKAKMQAVVAVMRKLLHAIYGMFHHHQTFDGSKLYALPETTSAALEPAVACA

SEQ ID NO: 167737 - protein, 391 aa, unidentified
MYYCGIDVGKNSHTVLVMDERGEVTRSAQRIENDRGGLNQLLGLLSSYAGQILIGLEATGHYWLALFEALTRQDYPLVVLNPMQVRAYRKIDIRKRKTDRQDAYWIADFVRFAQPSSSSLDIPVYLQLRELSRFRFRLTQQIGDCKRKIICILDRVFPEYERLFSDVFLQSSRQLLQEAVTAEDFAGLDLAELERVLNRVSRGRFGSEQARAIQEAARESIGVSFLTDAVHIEMSCLLKQIGLLEQQQKTVERKLEEMMACLPQYITTIPGIGLATGAMLLAEIGAIHRFESLEKLVAYAGIDASVYQTGLFEGDKMHMSKRGSHYLRYALWQAASASLLHNPEMKSYYDKKRGEGKPHGVAMGAVCHKLLSRIYVILKECRPYVIYPQNN

SEQ ID NO: 167738 - protein, 343 aa, unidentified
MLNIGLDLHKRETQVCIVDETGTVQLERRLPTTRAAFTALFGGQPPARLLLEAGTESEWVAQHLEALGHEVIVADPNYAPMYSTRHRAVKTDRRDARGLAEANRLGAYRVVHRPSARQRQVRAELAVRDTLVRTRTRYINHLRAQLRQQGLRLPSGHADQVLRRLARVALPPGLATTVAPLVALLEPLQQELAAADARVAALARTDPAVRHLDAVPAIGPVTAAAFVATLDDVTRFQSAHQVEAYLGLVPRERSSGEQQHRGAISKRGNTRVRWLLVEAAWRIRRSRHPAHGPLQAWAARIEARRGKRVAVVALARRLAGILYALWRDGSPYGQRPGRVVSAA

SEQ ID NO: 167739 - protein, 295 aa, unidentified
MDMHVGLDVSQRTTSICIIDASGQRTWQGTAPTEPAAIVHMLRAHWAGEAPVGMETGPLAVWLYHAMRQQGVNIDCIHARHVHAALTVQLNKTDRNDAFGIAQLVRSGWYRATHVRSLECHQVRLMLTVREKLISLRTATNNQIRGLLKTFGVVLGAGKNRVFETSVQDADPLRDGIKPVIGILLDTWRHLTTKIRELDRSIQRQVNRDSVCRLLMTVPGVGVITAASFRTAVDDPSRFKHVSDIGPFLGLTPRKYQSGEVDRNGTISKQGNRQHDLCFTRRLWRCSKDMEKKQI

SEQ ID NO: 167740 - protein, 367 aa, unidentified
MKESTRFVGLDDSKASIEVAIAESGRDGEVRRYGAIPNTPEALKKLVRSLGRPKHLYFVYEAGPGGYGIYRELWALGASCMVAAPSKTPRRAGAQIKNDRRDADTLARLHRAGELTPVWVPDEATEAMRDLTRSREDSKYAQTRARQRLQSFLLRHGKRYAGKSHWSKTHLAWIIAQKFQHASQQICLEEYLGAVEEATARVDRLDGQVRELVADWSQAPLVKALTAHRGVSILTAATVVAEIGDLTRFGKAREVMGFVGLVPSLDASGQRHRTGAITKTGNGHVRRVLTEAAWAFRHPARRTAHLRRRLEGQSQAVQDLAWKTQVRLCGKYRRMVGRGKQYNKVITAIARELMGFLWATARLAQAN

SEQ ID NO: 167741 - protein, 378 aa, unidentified
MASQQGTVEMIVIGADTHKRSHTLAAVDEATGRALGDVTVAATGRSFGELLRWARGVGGERVWALEDCRHVLGSLERFLLARGERVVRVPPKLMAGARDSTREPGKSDRIDAVAVARAAIREGLGTLPVAQLAGAELDIRLLVDHRERLVKQRTALINDLRWQLHDLWPELKIPLRALTGPRWQQRLIRRLARAEQTTRVRVARDKLSRIRDLTRAITSLEQELATLVTAVAPVLAADPGCGTLIAAKLIGEIAGIARFANDAKLARLSGAAPIPASSGRTDRHRLDPGGNRQLNCALYRLALTKARHDPETQAFLERKQAEGKTRREARRALKRHLVRRVYRLLQPPPSGASGRPPVITPAGTTIACNTPAGRINLT

SEQ ID NO: 167742 - protein, 368 aa, unidentified
MIVIGVDTHKRSHMLVALDAATGAPRGQLRIPATDDGTLQAMRFATELDEVRVWAVEDCRHVSGRLERGLLASGDRVVRVAPGLTETSRRAVREPGKSDPIDATAIARAALREGIDTLPVAHLDEQALEIRTLNDYRDQIVKERSRLACRLRWHLVQIAPDLEAGLAPASLDHPRVRERVARRLARLPRSPQVRVAKLILKRIGQITVEERELRAEIKTLIEAHCPALLAEHGCGPVTAAIIIGHTAGAKRFPTDACFARHAGTAPIPASSGNTQRHRLHRGGNRQLNRAIHIIALSRARTDPATRAYLDRKHTEGKSKREAIRCLKRHIARHIWRTLYAAEAAPRTTVRSRGDTVAVGAPAVMPCTR

SEQ ID NO: 167743 - protein, 422 aa, unidentified
MFKVAVRSPGDKPWTRKTEILTFRTFYGVLRAMARELRRRGVTHVVMEASGVYTEPVYYALCEEDFTEVAVVNPAHAKALKGHKTDAKDCARLAELFECGLLQGSYIPAAGLKEMRDLSRYRMKTVQARTSEIQRLAKALESAGIKLGSVASEITGKGPVAMIEALISGERRGAVMADLAKGRARTAGKLADLSMALEGRFTDHHALMCRLHLDRITALDAAVADLEARIAATAADWQREIDLLKTIPGFGDIVAWAWIAEIGPAPHQWFASHHKLASWVSLAPGNNVSAGKRKYGRTGDAGTYIKPMLIQAAWAAIQVRGRLQARYNRLVRRLGGPKNPAAKKKAIVAIAHTLLKIAYTVLKTGTGYQEPGADFYTRRESPGHRQAWLERQIQKLHPGCTVTITISPSPDPAPEAALPPGA

SEQ ID NO: 167744 - protein, 346 aa, unidentified
MGKSITDLSSVTTVGLDLAKHVFQVHGVDASGRVVVAKAIRRNKLLEFFASLPPCLVGLEASGSAHHWARELIKLGHDARIMPPAYVKPYIRRQKNDAADAAAICEAVTRPSMRFVGVRSLENQAALMRHKAREMLVSQRTQLLNGLRGHLTEVGVIAPQGLRFARELAELIEACDETIPFEVCEALAPLVVQLRNLDEAIARLDRIIAKLAQKDETARRLMSIPGFGPITASAMAATIQDTSSFAGPREFAAFLGLTPKQNSSGGKQRLGRISKMGNRNLRKLLVVGAHAVLFHRKPHTDPLRMWAKKLIEKKPFKLVAVALANKMARIAFAILRGKTVYREIPA

SEQ ID NO: 167745 - protein, 317 aa, unidentified
MSRVSFEQVILRGCGLDVHKDVVVATISGEGLSTETRSYKTFSSSLTELKEWLLSNGITHAAMESTGVYWKPVYKILECPRMKVWVVNARHIKYVPGHKTDKKDSAWICKLLLAGLLKPSYIPEREQRELRDLTRYRNKLIQHVSSNKNRIVRILEDCNIKLSSVMSHLDGVVATKLIDILIDKGHVTMDDIACVYHKRLEASPELLYQACEGFIEPHHTYMLQTIRQDIEQTESIISNLTSRIKEVLSPYENVIDLLRKIPGLDRKTVEDLIAEIGVDMEVFPTEKHLASWAGICPGNNESAGKKKVEEPLMATNS

SEQ ID NO: 167746 - protein, 673 aa, unidentified
MQMTLGIDVACRAAHQASLAGESGRFAWSGRKFRTTAADLQQLWDSVPAGAEVTVVMEPARNAWVPLAAWFRRHGATVIMVPPEQSADLRDYYSKHVKSDRLDSRLLARVPLLHPDGLRPAEGLGPADPLRRAVQLRGSLVKRRSVIVARLDCYLELLGPAWHAAFGGDLALYTPLRFLAAGYADPHAVRRLGRTRLARLIWRWSHGAWAEDHAGRILAAAAETLQLWDTGLSYPDLADDIAAEARLALALCTEVRDLDTKIASLLRELDPAGIMTSVPGVGAVNAAQILARLGDPARFQSLAGARSFSGLVPALAASGTSGRHGPPTKQGDASLREALFLAADHARRADPTLAARYYRLMVHEGKHHNSALCHIAPTLLTRIIACWRAGTPTRSATPTVPRCRPPRAALSLPSDTASPTSCAPGAGPATPRRGRAGDTRSRQALRHQPAPAPRYDAQPNHLTPIKNSTAWSSPPGCPGKGGRNHLEAELRRLGISQKNGKPNHPQTQGKVERFQQTLKKWLRAQPVQPATVGELQALLGAFTSVCNTRRPHRSLPHQATPATAYTARPKARPGDRSADTHDRVRADRVDADGKLTLRVGGRLHHIGIGRTHARTRVLMLVQDLHVRVINAATGELLRELTIDTARNYQPTGRPPGPPPGTPRPPRQRKNPEP

SEQ ID NO: 167747 - protein, 348 aa, unidentified
MIIIGVDFHPEFQQIAWVDSDSGEFQEKRLVHREDAETFYRALAGQKVRVGMEASGHARWFERLVAELQFELWIGDAAEIRTKRVRKQKTDRQDAQLILRLLLENRFPQIWVPSWENRDLRQLLWHRHRMVQARTRIMNQLQAVALNEGLRSKKRLWREPGRQQLESFRLAPWASRRRGDLLELLDRLNPTIAELSQAIEQEVEKWPEAQRLKTHPGVGPLTALAFVLIIGNAERFHCGKQIASYLGLVPLEESSGNRRRLGHITKQGSSLLRFLLVEAAQVTARSLPEWRSQYLHLTMRRGRKIAKVAMARKLAVALYWMMRRGWDYEQVKKFGSHAGQPGHRDGVK

SEQ ID NO: 167748 - protein, 342 aa, unidentified
MEHVSIIGIDLAKRVFQAHGAAADGSVVFRKKLSRGQFLAFLAAQPRCTVAMEACATAHGWGREIGELGHEVRLIPPIYVKPFVKRQKNDAADAEAIAEAASRPTMRFVAVKSEDQQARSMIFRTRDLLVRQRTQLINALRGHLAEHGVVAPQGTAHVKRLADVIGDEAAALPATVRQVGRLYLEQIDVLSGRIDALGKKLRAEAGQAAATRRLQTMPGVGPITAVAIESFAPPMETFRRGRDFAAWVGLVPRQNSTGGKQRLGRTAKMGQRDIRRLLIIGAMAVVNSAARHGAPEGSWLERMLAKKPKMLVAIALANKMARGVWAMMTRQEDYRNPAVVAA

SEQ ID NO: 167749 - protein, 346 aa, unidentified
MKILALDLGKYKTVGCAYESESGAHQFKRGLTTAAGLAGMVQAVKPDRVVIEICSIAGWVCDLMWGLGIEVQVANTSDDAWRWRKVKQKDDRRDALKAARLSAVNQLREVYIPGPEVRQWRALITYRQQLIRRRTKIKNHIRDLLLREGQLLGRGSSCWSQVGIAALAAQARPFSECGPAELWRGELQLELEQLKEIQRQVATVTAQLDKLGAGDARVQLLRTVPGVGARLAEAIVALLDQPQRFRKASQVSGYIGMVPKAMDSGETERRGHITRQGSRLVRSLLVEVAWAGLRHNAWVRQTYQRLSGGKKARKKIAIVAVGRKLLVKCWAMLRDNRPWEWQPQIT

SEQ ID NO: 167750 - protein, 337 aa, unidentified
MDYFAGLDISMDETHVCVLDREGVVVRESKTESTAQAIAGELAKAPSCRRIVFETGRMAPILFHGLNQLSLPVVCVESRQAYQALKSLATHKTDRNDARGLAHLARTGFFKPVHVKSLQAHALRSLIIARKKLVGQRVTLENQIRGLAVVFGVRLPRALTNAFIDNALKASEGIAGLSVAMRGLSAARTAVMTAVAAIDADMRRMTRASAACRRLMTIPGVGQLTALAFVAAIDDPSRIRRSRDIGAYFGLVPRRYQSGEVDYTGGISKCGDRRVRTLPYEAANVMLTRYKGQLKLKDWAFAIAKRSTMRKARVALARRLAIIMHAMLRDGTDFIST

SEQ ID NO: 167751 - protein, 424 aa, unidentified
MKKNHPSKIDQEEVIYERCAGIDVHKKIITVCLRIGRNTQVREFGTLTCELREMAAWLKENDVQMVAMESTGSYWKPLYNVFEQEGISAMVVNAGHMKTVPGRKTDVKDAEWIAKLLSQGLLKASFIPDREQREFRELTRFRKSQMEERARTLNRLQKMLEGANIKLSSWVSDIDGKSATQLLELVIGKEKFTAQEVEKLRHFNMKASSEELFKSLEGVMTPIQRELFTHIVNVIKEQTAQIEKTEELILGYMTQAYQEAADAIDAIPGIGQISAQQIIAEIGIDMSRFPDAAHLCNWAGICPGNNESANKRKSGKTNYANKALKSTLTQCAQGAKKNKNSFFYAQYQRLVVRRGKNKATLAVAHSLLIAIYHILSGKAFCDLGADYYNRFNKEKKINSYVRQLSKLGVSVPDDAIRVALEQIA

SEQ ID NO: 167752 - protein, 345 aa, unidentified
MTITTVGLDIAKQVIQVHAVDVRGKPIIRKQLKRHQVLPFFANLPPCLIGIEACGGAHDWARRLMALGHTVKLMAPQFVKPYVKANKHDAADAEAICEAVSRPSMRFVSVKAQEQQALLALHRARQGFVTARTAQANQLRGLLAEFGLVVPKGLAALKRRIPDILEDAENGLPGAFRELLQRLGDHLTELNRQVEDLTQRIEAEHRANPLSRRLAQIPGIGPLIATALLAAIGDIQGFANGRQLAAWLGLVPKQSSTGGKTRILGISKRGDTYLRTLLIHGARSALRAAQRREEPGATWLTRLADRRHPNIAAVALANKNARIAFALLAHDRDYQPGYRPVQATT

SEQ ID NO: 167753 - protein, 450 aa, unidentified
MSRKRNRVAQLPVIEPNAAGIDVGATQVFVAVPADRDPESIRSFDTFTVELEKLADWLQQCRIQTVAMESTGVYWIPLFQILEKRNIAVCLVNARHIKNVPGRKTDVEDCQWIQHLHSVGLLRGSFRPDDEICALRSLWRHRENLIQLATVHLQHMQKALDQMNLQIHHVISDLAGTTGLAIVDAILAGERDPHELAKLRDWRVKASEETIAKSLVGDYREEHLYVLRQSLECYRIYQKMIQDLDVKVKHRMGRLPPRVDPAVKPLAKERNPRKTPRRTEPLDLRLELYRAFGVDLTQVPGINALTAQALLTEVGTTFARFPTAAAFCSWLRLCPEPKVSGGQVLSSKTRPTKNRAALALRLAAQALHKSQTFLGDYFRRMKARLGPPKAITAVAHKLARIVYHMITRQQEYDTTIFQEQERRVQDRKHNRLYVQARELGFRLVPVEAVP

SEQ ID NO: 167754 - protein, 339 aa, unidentified
MQVTTIGIDLAKNIFQVHGITESDEVAFNRPLRRAQVLPFFARLDPCLVGMEACCTSHYWARELTRLGHEVRLIPPMYVKPYVKRGKSDAIDAEAICEAVTRPTMRFVEAKSVEQQALLSLHRARNLMVRQRTQLVNALRSMLAEFGVYIAKGLARIISFSQGVLAGTKLELPEIAQDVVHNLCGQLDVLHGQMHWYETRLRLASKRDPRIKLLQTIPGVGPVTASAIAASIGSGHQFQNGREFAAWLGLTPTNRSSGGKERLGRITKMGDQYLRQLLVVGMTSLVRQTKSHPERANKWLTSLLERKPARLATVAMANKTARIVWAVLTKNEPYMPRTT

SEQ ID NO: 167755 - protein, 355 aa, unidentified
MNQEKYIGMDVHQATISVAVMDSSGKLIMECILETKAATILEFLDGLRGSLSLTFEEGTSAAWLHDLLKPHVSRLVVCDPRKNALLKDGSKSDRIDARKLAELLRGNQLHAVYHGEHGVRTLKELARSYLTLTQDVSRVMTRIKALYRSWAIPCSGTTVYAPRYRAEWLAKIPQPGVRLRAERFYQQLDLLQPVRQEARRDLLRESRKHPAVKLLRQIPAIGPIRAAMLVALLQTPHRFRSKRQLWAYSGFAIETHDSGEYRYEQGKLRRNRERITVRGLNGNHNHDLKNLFKGAALSASTRPGPLYDFYGALLEKGMRPTMARLTLARKIAAITLTIWKKGVSFDAKKLHRQAA

SEQ ID NO: 167756 - protein, 362 aa, unidentified
MTAQPIVAHCHPFVVGVDTHARNHVFAIIDASNGALLDTQSFPVTSAGINRAISWVSRRTDGNADTLWVIEGAATYGAILAGTVAAHGFPVSEAPRMSKKQNRRVGKSDALDAHRMAMASLPLPVDKLRHPRLNEGIRQGLRILVTARSSMTKDRTRSMNALNALVRSNELGIDARKKLTGTQIAEVSRWREREEELSLRIARSEAMRLAKHVMDLVQQLTANEQQLDELVRVSEAALLLDETGFKAITVAKCFVAWSHEGRVRDEAAFACLAGVNPIPASSGNTTRHRLNRGGDRSLNAALHLAAVTRMTHDEETRIYVEKRRAEGKTDREIRRCIKRYLVRRIFKIFSASAIVGEVSVAA

SEQ ID NO: 167757 - protein, 339 aa, unidentified
MNFYFIGLDIAKDTFVASIFHRPKESILTKENLSNDKCGYDELILWLKEHGITRSNCQVCLEATGVYSQGVSYYLLAQGYKVSVECPLKVKRAFHPAGHKSDPVDSRQIAEYAYRFQDELIPWQPKGELLEKIRQLLTLREQFTRQKCATKCSMKAYTLERVQLQLIKDAQEETLKGLERQIARIDKELDKLIKEDPHIKNRLDSLKSIPGFGMLLATHLLVMTDNFNRIEDYRPLAAFIGIVPYEYSSGTSVYRRPHIRHYGPMAGRKLLRLAAQSVATHDASFRRYYLRKLAEGKAKALVLNNIANKLLKVACAIVRDNTRYIKEHRSIHPMYVKST

SEQ ID NO: 167758 - protein, 316 aa, unidentified
MVDKCFIGVDVSKGWVDIAVHGVTAVQRIDNTAEAIGGWARAVDAESVGLIAFEPTGGYERTLRRCLVEAGLPFARVHPNEIAAFRGRRGGKAKTDRLDAILLAAFAAVELSGRGLTAVDGDAVLAEMVARRRQLVAMLQAERCRAATAHGAWVKDSLATLTATLAAALAALDAAIASHVAATPALADAAACLRTLKGTGPVTAATLLGELPELGRLSGKEIAALVGLAPCTRESGKQRGRARTGHGRAGVRQVLFNAARSAIRWNPVMRNFYERLVGERRRPGKVALVAVMRKMLVTLNAMARERKPWKHACQPA

SEQ ID NO: 167759 - protein, 352 aa, unidentified
MDRYVGLDVHARTCTFAVMSPSGKRLKSMVVDTNGRALVEAVKGICGDVHLCLEEGTQSAWLHEMLSPYSTELVVTVPEKKRGPKDDLLDAWARADDIRTGRMQTRVYKAPKHLSGLRSAACAYRLATRDVVRTKNRLKAVLRSRGIRSDAGVYEPASRDKWLTQLPSGSRQLAEWLGQELDGLVPLRDEAQEWLVKEAKSHPIIRKLRTGPGMGPIRTAQLVAIVGTPHRFRTRRQFWSYSGLAVVTRSSSDWVESKAGGWVRAQTYQTRGLTRQRHPELKAIFKGAATSVIQQLPEDPLHEHYQRMLDSGIKPNLAKLTVARRVAAIVLAMWKHQEEYDPHRHVVVTDKA

SEQ ID NO: 167760 - protein, 284 aa, unidentified
MVERNGAGLEQLTARLKQLAPSIVALEATGGFETVAAAAVGSAGLPVVIVNPAQVRAFARALGQRAKTDPIDAAVIAHFAAATRPDPRPLPDEATRLLSDLVTRRRQIVDMIGAERQREKRATSQHLRKSIARLIKALEQELNSVDTDIDDAVRSSPAWREAEDLLASVPGVGPIIARTLMAELPELGRLNRRQIAALAGLAPYTRQSGQWRGKSFIGGGRQAVRNVLFMGAMTARRHNPTLKAFFDRLVANGKPKLVALIALARKLLTILNAMLRTKTPWQPA

SEQ ID NO: 167761 - protein, 412 aa, unidentified
MRAVALDVHRDFCEVAIVEDGRPRSAGRIQTRPEALELFARSLDPRDWVTLEVTGNAWAIAAILEPHVARVIVVSPTDTGIRQARAKTDRLDARTLAKLLWAGELDGVWTPDERVRAMRRRLARRAQLVRARSRVKNEIHAVLMRCLKDRPPASDLFGIKGRRWLADQQLALCERETVDAGVRQVDFLDTEIAHVERLIAADALGWPEVKRLMTVPGVNVIVAATFMAAVGDIRRFGDRRKLTAYLGLDPRVRQSGAGPANHGHISKQGSNSARHALVEACWSTVRQPGAIAAFYQRVRSRRGHSIAIVASARKLACLFWCLLTRGEDYAYAQPSLTQKKMRRLELAAGAPRWQGGRHVWSTNDAMRQAERALAEQAELAYRRSVADWHATRPATAGASATQGHASQEPSKS

SEQ ID NO: 167762 - protein, 410 aa, unidentified
MDVIVERQSALDVHKEQVTACVRVPGAAGERVQQVEQFTTTVRGLLVLRDWLTAHGVTHVVMEATGEYWKPVWHVLEDDFELMLVNARHVKQVPGRKTDVSDAAWLCQLAEAGLLRASFVPPKPIRDLRQLTRYRRAQIAERKREAQRLHKALEETGIKLDCVATDILGRSGRAMLDALVAGTTDPELLADLARGKLRKKIPALREALEGRFQPLHALLIGAILAHLDFLDEQIERLSDAIEEQIRPFWPAVELLRTIPGVQQRTAELLIAEIGTDMSVFPTAGHPASWAGQCPGNDQSAGKRRSGHTRKGSKHLNAALKDAAMGAIRTNGSYLQSLYRRKKSQLGHGRALGAVKHSIICACWHMLSTGELYRDLGSDYLARRDPERQTRRLVAQLQRLGHTVTLTNAAA

SEQ ID NO: 167763 - protein, 423 aa, unidentified
MIAKNAKLIQPNTMVVGVDIAKTTHWAMVMYEGMPVGKAFAIQNTREGFQNLLFTLNALKQKLGAHSIVVGMEPTGHYFKPLAYFLANTGMCKVVLVNPYHVNRSKEFDDNSPTKNDKKDARVIARLVSQGNYFFASLSYGAWAELRISNVDRLQLIKKRWQLKNQLTAILDQFFPEFTDVFKDILGKGARHVLTHYPFPTDILEVEEQTLCNGLKEATSNRVGQKRAQKLRKAALHSIGIKEGLQGARIQVVHLVEQLGVIQRQIRDVEIMMAEQLEETGLAEYLTSIPGVGVVSAAAFLSEVGNPDDYENYKQVQKKAGLNLKENSSGQHKGKTTISKRGRPSLRQLMYQIALVSVARNPEMKAFYRYMTTRQENPLAGKQALIAVAVKMIKVMLAVCKKREYYDGSKVGNGHQEAGLQAA

SEQ ID NO: 167764 - protein, 341 aa, unidentified
MSIVGAFDVHRRQLTYEYLDAVTGELKRGRVAPADREHLREWLARLPGQDGAHFALEGCTGWRYVVEELLAAGIEPHLAEPADTAALRGRKRHAKTDKTDARHLRVHLLAGDLPECWIPPAHVLEARGTVRLYKDLLDERGAWHQRIAATLFHQGVPVTASMSTVEGRAAVSGMDLSPAGRQAVETGLRQVDRLTGELEPLRRQLDMISRRQPGCAALRATQFGVGAVTAVAIWAELGDVRRFASSSDVVRHTGLDITVYSSDGKRSAGHLSRQGPQLLRWALYESAKCAARPAAPDYGYYTATRDRRTGGLATLSVARKLARRCYHTLRELGEEALAPAA

SEQ ID NO: 167765 - protein, 343 aa, unidentified
MDHFAGLDVSVKETNICIVDETGRIVREVRVASEPEALLQVLGNPIYRFKRVGLEAGPLSQWLFSALAEAGLPVICVETRHMRAVLQAQINKTDRNDARGMAQMMRAGLYRPVHVKTLRSQKLRVLLTHRKLLQSKAIAIDNDLRGTLRNFGLKVGMVGMVRFEARIRELVESLPDLAELVEPLLIVRRTLREQMGILHRRLLAIVRNDDVCRRLMTIPGVGPVVALTYRTTVDVPARFRNSKAVGAVFGLTPSRYQSGEINRPGAISRCGDEMMRVMLYEAAHIMLVRLAKWSWLKAWAMQIARHRGMKKAIVALARRLAVIMHRIWVDGTEFRWTREVAAA

SEQ ID NO: 167766 - protein, 349 aa, unidentified
MNRTTYGLDIAKNVMQLHWVDNETGEIGRKKLGRAKLSDFFARLQPARVVMEACGSAHHWARVLGALGHQVELLPARQVRPFVRNNKDDAADARAIWLAAQQSDIRRVPQKSVEQQAALALHRTRQHWVSVRTATINALRGALYEFGVTLPGGKRVGLKALATHRAEIDAKVPATIQRLIDGQLATLKDIGCRIDKLEAEIGMQLEQLDNAATLREVPGIGLLGATAFAATLGDGKAWKSGREFSASLGLVPAHRGTGGKARVGHLSKRGDPYLRTLLIHGARSVIAHAKNKPKWLEQLLARRPMNVAVVALANKMARTAWALVAHGRDYEREWKSTPPKGCTAQASAA

SEQ ID NO: 167767 - protein, 384 aa, unidentified
METLLKYSVGTDLSKGTFDACISVIDSQQKVTIKSTRKFDNTISGIEDFISWSKKLRKHDIPIVFTMEATGIYYERLALALYEEEFCVSVVLPNKAKKYMQSLGYKSKNDKIDAKGLSRMGAEQQLSSWMPFSKNIYQLRLLTRQNEDLQQQRTILINRKEAYSFCQYQNQIIDRQLESMLDLIEQQIKQIKSAILSVIEEDALLKEKILKINKVKGLGILTIATIVAETNGFYLFKNQRQLVSYAGYDIVENQSGSRNGKTKISKKGNSHIRRVLHMPAFNVVRYEQGTFKNLYDRVYLRTNKKMKAYVAVQRKLLMLIYTLWNTNTEFDPSYHISSGNDEPKLLFSLGFEKAVKKVVPAQSTRTTQDKLPCNESPEVLFSLL

SEQ ID NO: 167768 - protein, 421 aa, unidentified
MENTLARKLKQVPQGYLIIGVDPHKKKHAAVAITHDFTVQAKSKFDNTREGLEMMLRQARMEMTKSGCRGVMFAIETGGHYWRNVAYFLDEKGIPFRFINQYTLKRRREGKDLNHRKNDYRDAEVAAQLLCTGEFVESVIPQGIYAELRTAHNGYRRLVKERTRITNLLKGLLDGLFPEFVRVFKDPCGLTALSVLSTCPVPSVIAGMTEEEFVATIEARHRGRLMRKKLRALHHTAEASIGIAAGAQSLSMEISFLVEKLNLIERHIGIIERTLIRLVDATDEGKYLLSIRGLNYIAVAGLLAELGCFKAYRSAKQMIKMTGSNPTESESAGKKGSRTPMSKQGRPVLRYCAWTAVIPMLRFNPDFRAWAKRRRERPVHANPLGGREIVGAALNRLLRLSFALVKNQTYYRSPQLVQVTG

SEQ ID NO: 167769 - protein, 342 aa, unidentified
MQVTTIGLDIAKNVFQVHGIDAAEKVVVRKQLRRSQVPEFFKALPPCLIGMEACATAHYWARELTKLGHKVRLMPARDVKAYVKRNKNDAADAEAICEAVRRPTMRFVQVKSAEQQSQLMLHRTRDLLMRQRTQVINALRAHMAELGITAAQGNAGLRELLAIIADAADERLPAEAHSSLIVLAAELQAMRTLIASIEKRIIAQHRSDEASKRLRSIPGIGLVGATAIVATITDPKAFRSGRDMAAWIGLVPRQDSTGGKQKLGPISKQGDRYLRRILVVGAHAVLKLARQKPEKYPWLTQLLARKPFKVVAVALANKMARIAWALLVKGGRYRARALVAAA

SEQ ID NO: 167770 - protein, 371 aa, unidentified
MEQSSKTVYVGLDVHKESIAVAYAPEDRGAEVVSLGPIGTRQCDIDKLIRRLEAKGATPVFVYEAGPCGYGLYRYLTGKGFACHVVAPSLIPRKAGDRVKTDRRDAMTLARLMRSGDLSAIYVPGIEDEALRDLSRGRDDAMQDLKRSKRRLKSFLLRQDIRYEGRATWNAAHLRWLSEVVCPTPPQQIVFQEYLRAVTEQHERRQRMEHELHEAVQGWRLYPMVQAIQALRGVELTGAVILMTELGDITRFENPRQLMSYLGLTPSEYSSGERRRQGGITKAGNSHARRALVEGAWAYRYPAKVSRHLQLRLETLPTEVQAISWKAQVRLCKRYRQLTARGKHVNQVVVAIARELAAFAWAIARLVPLTA

SEQ ID NO: 167771 - protein, 347 aa, unidentified
MRFYTRQHRHYCGIDLHARTMYVCILGHDGEILLERNLACDPRVFLRTVEPYREDLVVGVECIFTWYWLADLCAREHIVFVLGHALYMKAIHGGKAKNDRIDAHKIAVLLRGGMLPRAYVYPPAMRSTRDLLRRRLYLVRKRGQLLAHIQNTHHQCNLPEPTRKILYKANREGVADKFTDPSVRKSVEVDFDLVAHYDQLIRKLELFLVRRAKQHDPQAFQRLCSLPGVGKILALTLLYEIHDIRRFPRVQDFASYARLVKCSKESAGKRLGTGGRKIGNVHLKWAFSEAAVLFLRNNPKGQALMARLRRKHGKPKALSILAHKLGRAVYHLLQREIVFDMSKFLAA

SEQ ID NO: 167772 - protein, 415 aa, unidentified
MMRLVEQGLNKSMLLEGREALIAMKTQPLCGSKLDSSDVQETNTWRKFNPQCSTNLILHHLHQEAEMNRPKLFIGIDVASETFTSSIGQFEEERGWKIVAKPTTFENDYDTFSQFRYWLETNQALPANCIICMEATGVYGEALAYFLVSNGYQVVIEAPLKVKRAFDPEGHKSDPVDSRQIAEYAYRFFDQLRYWEPKEVAIEQIKTLLTLREQLVVQKTAHKNANRAIKRKVVRNMLAEGIHDRVIKGLEEEIKEIEKEIKRLVDEDPASKELQTLLETIPGIGKTLATFLVVTMHSAPEPYNPKALAAYIGICPYEDSSGSSRHKKATSRHYGPSAMRRLIHLAAMSVRQHCPLYTHYFARKVAEGKEKQLVINNIANKLLKMVCAVARTKTPYIAGYRSIHPQRLKNALKTS

SEQ ID NO: 167773 - protein, 373 aa, unidentified
MLYLGIDQHANQLTIDLGTENGDLVLHRQVKTEWKPLRKFLGELESLARKEGGYMAIVEVCGFNDYLMDLLKEYGCDQVVLVQPDGRKKCKTDRRDARTLRESLWINRARLREGKRPAKLRVVRVASEDDAMDRQLTTLRSQLTTQRTRLINRVKTILRKRNLQHDCPTKGIQTKKARKWLWALTLPEMDRFEMNVLLREWDLIDEQLDQVDKKIQERYRQSDVASVVGTIPGMGYFNGLSIACRIGDVEDFPRGGSLANYWGLTPGARNSGEKNTPLGITKAGSSHARYVLGQVVVHVLRRDRWMRQWYQKIKRRRGSKIGRVAVMRRLATIICSMVKYDMPYMTGGPEKFEEYLRKHKGFFGETHITAGRV

SEQ ID NO: 167774 - protein, 419 aa, unidentified
MSYRIAGIDVHKKMLAVAVADVEVDGDFQFERQKVGTTPIDLRRLADWLVEHEVDEVVMESTAQYWRPVWEALEQHWRPQRRARDSAPRLAGTLHLAQAQSNRGPGGRKRDFPDAERLVKRLVAQELTLSFVPDAEQRLWRTVMRRKYQVTRNRVQLQNRLEALLEEAHIKVSSLVSDLLGISARRMLQALADGETDPTALATLATARLRATPEQLCDAFQACRTLHPVYRRLLKLTLEELHVIEDHLGQLDQQMADLLTAHHDAVQRLAEVPGLGVDSAQQIIAEVGATAATFPSSKHLASWMGACPGNEESAGVNYSHRCPQANRQMRRVLNQAANAAVKPKGTIFATVYRRLVPRLGHAQAIGAIIHRLCRLIWKILHQRVRYEEREPAVGEEAKKVRARKMIRELRRLGYRVEPL

SEQ ID NO: 167775 - protein, 346 aa, unidentified
METYIGLDVSLASTAICAVSAQGKIVKETTAASEPDDLIATLKAMPGEVVAVGLEAGPLSQWLYRHLTDAGFATVLMETRQVKGALKAMPIKTDRRDAEGIARLLQMGWYRPVHCKSMSAQEMRALLSARKAVLQAAINLELSIRGVLRNFGLKMGRVAKGRFEARVQELAEGNPMLEAAANPILAARRALRQELAGLEKVLRNHAKEDPVCHTLMTMPGVGPVVALTVKAAIDDPERFRSSKDVGPWVGLTPRREQSGERDIVGQISRAGDIGLRTALYQAATVMLHRGSKTWLTAWALNVAKRRGKKRATVALARRIGVVLHRMWRDGTDFRFTREDAAVAATA

SEQ ID NO: 167776 - protein, 365 aa, unidentified
MTIMTEPDLRFTVGVDTHKDVHVAATLDGRGGVCATASFATTAAGYQQLGTWAGSFGEIAAFGIEGTSSWGAGLSRHLEAAGFTVIEVNCTNRQHRRRHGKSDTADAIGAARLVQAGEATARPKAGTGAVEAIRVLRVTRESAKKARTQAINQLRSLLATGPTDLRAELADLRGPALVARAAELSADIDRSTPLGATTVALGHLARRYQALTVEIDALQKDLDVLVTAAAPPCLLAEHGVGIDSAAALLIAAGDNPERLHSAAAFASLCGTSPVDASSGKQQHHRLNRGGNRDANSALWRIVLAKMRWDEETQIYIAKKIGEGKTKKGAMRCLKRHLARRYWKMLTQDPNPETDDQAPEQPTITP

SEQ ID NO: 167777 - protein, 348 aa, unidentified
MDKDRIVAGLDVHKDTIYLCVMDNTEAVIFAKVYGTLTPDLELMCSEMVSHGVTEAAMESTSTYWVPVWNALCESMSLKLVNPYFIKQLPGRKSDVKDAQWIAECLLKNLIRGSFVPDKRVQDMRKYNRRIFDLNEDLTYNSNKQDAALQRCGFRLSNYVSRVNGKSYQKCVRAIITGITDPEELVKLIHGKTLRKYGRNIIKDAVTGDFHQADICLLKQYAELIEVIERQIEECRNALIAMCQEHFPKQFKRLQSIPGVKERAASAIIAETGADMKPFEKATNLVGWCGLKPRNDISNNKVKSNRTTHGNRFLRQILIEISWVASRTRNCFFSNFSYVQCTQRIRTR

SEQ ID NO: 167778 - protein, 415 aa, unidentified
MDEGKMKCAGIDWAKDENALCVIDEVGRVLSERRFAHEEDGLAELCGSLVEHGVGRVAIERPEGVLVERVLEAGVVVIPIHPNQLKAARPRFRASGYRAKSDSFDAFCLAELARTDNHRFRALTPDSDQTKALRALTRSREDLVGRRVALANRLRVELEAFWPGAAIMFKEIDSAISLAFLKRYPSPKEASKLAEKRLLGFLQRNRYCGRKSASELLGRLRKKAPQGRAGEAEMEARREAVLALVAALETLVGRIKRLEGRIAQAVRAHPDGEVFLSLFLGSKSTLTAACLLAEIGDRRERYPTNEAMAADAGMSPVAIESGKRKVAGFRRACDKRLRKALATLAESTRHHNRWAKDIYRRARERGCDYAHAIRILGRAWVRVIFRMWQDGMPYDPARHGGFKRLRSAEGLPQGV

SEQ ID NO: 167779 - protein, 359 aa, unidentified
MYFSGLDAHLRYVTVAVLDRLGGVALETTVPTREPDRLLAVLAPFRPLEVVVETCPFWPWLYDLLVPAGIGFHLAHAKALRAIATAPQKSDAVDARLLARMLLSGLIPEAYPRSADQRELLRLLRHRTALVRFRTRLAGRIHSQLHQQRLSLPRENLLRRATRAWLEATAWPRLTVEQRAIVTTHSELIDHLTPLIRALERRIAAAAAGDATAPLLATIPGIGPYRSLLLAAELVPISRFPRAEHLVSYAGLAPVTRSSGGHTHHGSIPPAANRWVRGVLVSAIPSHVRYAPTSPVTVAYEQLKARLGWRVARVAAARKLARVVYVMLTRRTPWHGVPAAGDVRDEVQNSHVAPTTSFC

SEQ ID NO: 167780 - protein, 386 aa, unidentified
MNVGADKPLTAIRTDLGAIFVSLELSRSSWLITSLSPGGGEKMSKHSVHGGDFAGLMERLAQLQEKARLRTGQSFRIIVVQEAGLDGFWIHRALQSEGIESHVVDAASIATSRRRRRAKTDKIDGETLVRALLAYKRGEPRVCAMVKAPTPGEEDRRHLCRERKALTAERVRHVNRIKGLLFSQGISGYQPLRRDRRQRLEELQTGDGRAFPQHLKALVNRELDRLELLLRQIKTVEAARDALLAVGQTAKPAPAAMLLDIRGIGPEFAAVLWSEGLFRHFENRRQIAAYAGLAPTPWQSGAVDREQGVSKAGNPRLRTTLIQLAWLWLRNQPRSALSVWFHERVSRHGGRLRKTTIVALARKLLIALWKYVTAGVVIDGVTMKVA

SEQ ID NO: 167781 - protein, 409 aa, unidentified
MNENGKRYIGLDVHKYYLIALGVNPELEVVLPARRVELTHLEAWMKKTLTRQDVVVLEMSTNTWQIYDELVAHAGSVTVVHPPHVALITRSQVMNDKIASSILARLLAKGLLVGIWVPPQEVRELRGLVAQRQKMTRLATQAKNRLHAVIQRHHLAAPEGNPFRKSHNEWWLALPLGRLEKMNLQSDLETLQFAEKQQERLTEEMTGIVAENEEIGRLLHLAGFGVITAVTVYAAIGDIRRFAEAKNLVGYAGLGARVHDSGMMTHTGKITKAGRRDLRVALVEAAHVVAHSHPHWQAELARLQPRLGYNKAIVAIARKLLISVWHVLSRKVSDRFAEPEKVSQKMLRFAYEVGKAKRAGKTAAQFARERMDTLGLGRELTSIPWGSKKPIPLPPSQLLEKKVSDVPNR

SEQ ID NO: 167782 - protein, 452 aa, unidentified
MVKKKKSGRKKAIKYLHVLQPNSAGIDIGATEIYIAVPEDRSSKPVRRFDTFTDDLHDAAKWLKECDIESIAMESTGVYWIPIFQILDIYGFEVILVNARHVKNVPGRKTDVIDCQWLQYLHSVGLLRGSFRPAQDICAVRSLLRHRNNLVKAASSHIQHLQKSLTQMNLQIHNVISDITGVTGLAIIDAILAGERNPKILAELRDPRIKADKKTIIKSLTGDFRSEHIFTLKQTLQSYRNYRQLIQDCDGEIENHLNEFESSINLDDAPPIPPSTPKRKPKGNELNFDLRKHMYRLLGTDLTQIDGISSLTAHVIFTEIGPDLSKFKNVKHFCSWLGLCPNNKISGGKILSSHTRPGTNRVAQALRISANSLWNSKSYLGNYFRRMRSRHGAPKAITATAHKLARVVYHLVKNQKLFDDTIFAEQEINHQKRFEKRIITQAKSLGFKLIPA

SEQ ID NO: 167783 - protein, 326 aa, unidentified
MGSYVGVDLHRQRSVVVVLNEDGERVSWSRIDNTPANLAREVTSAGVDVDVAMEATWGWYWAADVIAETGVRLHLAHPLAIAGYANRRVKNDVADATLLADLLRMGRLPEAWISTPAVRELREEVRYRHKLVRLQTGLKCQVHQVLGKEGAIPATKGIWWTGGQAWLDQLELGDAYMNRIGSLRDLIELNGREIRQADARIHRRLRGDPGYEAIQQIAGVGCVLAAVFVAEIGDVHRFADPRRLCSWAGLTPRLRESDTHSHRGHITKQGSRLLRWAAIEAVSGAACDRRCNSIKARVGARRGHNNWPRRRGQTSPHARLLRVARR

SEQ ID NO: 167784 - protein, 444 aa, unidentified
MKRRCIGLDVHRDFAQVAIWQDGLVRQAGRIAATPEALRLFADSLAPSDEVALEATGNTHAIVRLLEGRVARVVVSNPQKTRAIAEAKVKTDKVDAAILAQLLAADYLPAVWVADEDTQARRRQVARRAHLVRQRTRLKNQIQAILHRNLVPRCPAADLFGHKGRRWLAGQELPADERRAAEALLRQLDFHAHELGLIDAELARVALGCEDTRRLMTIPGVDVTVAMSITAAVGDFSRFGTPNKLVRYVGLNPRVKQSGGQPAAHGRITKQGRAHARGMLVEAAWVAVKTPGPLRAFFERVRARRGMQIAVVATARKLAVLCWHMITRGEDYAFARPSLTAKKLRALELKAGLPARRGRKGTAAAYSLKDVRAREKALAEQAERSYRQLVADWQAKAPAAKRMGAAAANEARLSRPSDGATAARQDSAPDPALRSGVDHAHHEG

SEQ ID NO: 167785 - protein, 341 aa, unidentified
MAEVCTIGLDLAKHVFQAHGADASGAVLFRKKLRRAQVLSFFATQPPGTVAMEACGSAHHWAREIGKLGHAVRLIPPAYVKPFVKRQKNDAADAQAICEAAQRPTMRFVAPKSEQAQAAALVFRARDLLVRQRTQIIHALRGHLAEFGIVVAQGPAHVSSLVRAVEDPAEPVPEIARAILSVLIEMLHTLDGRISLLDREIAQRAKEDVTARRLMTIPGVGPITATALTALAPPAETFKRGRDFAAWIGLTPLQHSTGGKQKLGATSKMGERTLRRLLIIGASAVLRWAARHGAPAGSWLSRMLARKPPMLVRVALANKMARMVWALMAKGGVYRAPAVSV

SEQ ID NO: 167786 - protein, 356 aa, unidentified
MNEGSWVGLDVHARSVVAGVIDAGSGEVRSLRVPPGCDATVAWLTTLPAPVRVVYEAGPTGYRLARGCAEAGISCVVAAPSRIRPAADRVKTDRRDAERLARLLRLGEITPIRVPGPEEEAARDLVRAREDARGDLMRARHRLSKLLLRHGAVYDATAWTRTHDAWLRKQRFQSGPLAIVFDECYSRMLDAKTRRDALDKAITELAATPPYVEVVERLVCLRGVSTLTAFALTVELGDWNRFRPESLGPFLGLTPSENSSGERRRQGAITKAGNSHARRLLIEAAWHHRPPPRLSVTLERRRTGKPLALRAQADRSARRLHGRWHALEARGKPRTIVVVAVARELAGHLWALATME

SEQ ID NO: 167787 - protein, 337 aa, unidentified
MKFSGIDLHSNNSVVVVSDEEDRIVYQKRLPNDLGQIRAVLEPHRDQLAGVVVESTYNWYFLVDGLMDAGYRVHLANTTAIKKYEGLKYSGDFADAAYLAQLLRLGLLPEGYIYPRAERAGRDLGRKRMQLVRCQTMQILAIENILARQTGGRMSSERVKRLTAKQVEGLGLVPDVALALEANRAVSEALQQQIAVLEKRLKQRVKLRPEYRLLKTVPGIGETLATTIMLETGTITRFASVGNFSSYCRCVDSRRESNGKKKGEGNAKNGNKYLAWAFVEAANFTLRYCPEAKRFYERKKRKSNRIVALKAIAHKLARACYHMLREQKPFDVQRCFM

SEQ ID NO: 167788 - protein, 408 aa, unidentified
MDVLYPRCAGLDLGKDSLMACVRIHGHPVKQECRSFGTTTRELLALAEWLTSYGVTHVAMEATGTYWKGVWHVLEPEFTLLLANAGHIKGVPGRKSDVNDAMWIADLLAHGLMRGSFVPPTPIQEVRDLTRTRKQLVREIAQHTQRIQKTLDSANLKITGLISDVLGVTGRSVLRALIAGETDPERLAELARGTLKAKRPALRDALTGCVTAHHQRLLKLHLTLIEQLEAAVADLDRQLGEALAPFHEAVKRLDAIPGINTTVAQAVLGEIGLDMTRFPTHEALVSWACLCRRLDESAGKRRSTRTRKGACWLKTVLVQAAWAAVRTKDSYLRAQFLRLRARRGPKKAIVAVAASMLTGIYYVLRDGVEYRDLGANYFQTLDRSKVTKNLVRRLQNLGYCVELHKAAA

SEQ ID NO: 167789 - protein, 488 aa, unidentified
MAKRNGSSTQAQQGKSYRRRKAKARSKVEANKGAEIRKVVGLPVTNPHAAGIDIGSWSHWVCVGTDESAIREFPAHTDGLHALAAFLYEQQVTTVAMESTGVYWIPLYELLEGGGFEVLLVDPSYTKQVRGRPKTARRDCQWIYRLHSVGLLAAAFRPDEKTCQLRSYLRQRANLVRYAAQHTQHMQKALEQMNLKLTEIISDITGRTGERILQAILRGVRDPQKLAKLRHERCKASEEEIAQALTGTYRDEHLFALRQAYQAWQFYRKQRDEIDVQIAQQLARMKQDRALPPLKPRSHPKSYYANEPRFDVRTALYYVVGIDLTEIEGIAEMTALTIISEIGPGVAKFTTVKRFCSWLGLCPQIKKTGGRIRSSQTRPGVNRVAVALRMAVNGLYASKGALGAYLRHKKAHLGAPKAITATAHKLARLVYLALKHGLTYVRQTQEQYQVKVREQQLKWLKKKARQLGMNVVEKALRPEQAALVAASE

SEQ ID NO: 167790 - protein, 316 aa, unidentified
MSILAIDVGKEKLALRYGDNPEKSQYIEIENHPRALKEILSTWALSPQNTRVIMESTGDYHYTPAQFFLQNKFPVRLLNPILTNVYTKASIRKLKTDRVDTVKIMELGLKGEGEDLNLESFINPKKELLRLSHFLTQLRSQLKLKTQSLERKNILGSESIQELLTLIDQMSESIERIDSSALKEIDEQAKKIDSIPGFSIKLSQVIATECGDIKRFKEASSLVAYAGLDPKIIQSGRMNHRGKLTKCGSPFLRYALFLAARTAWRYDPDLFAYYQKKRGEGRSFTEVMCMISRKLLHRIYAVVSQNRLYQVNPISS

SEQ ID NO: 167791 - protein, 422 aa, unidentified
MLSESVDEEQIIARVAAVDVGKAELVCCVRVPGEGDAKRRLQEVSTHSTMTRSLADLANHLVDLRIERVVMEATSDYWRPVFYLLEAHGLEPWLVNARDVRHLPGRPKTDVLDAVWLCKVAERQMLRPSFVPPRPIRQLRDFTRYRIDLVGVRTAEKNRVEKLLEDACIKLSVVASDIFGVSGRAMMAAMIAGERDPKVLAEMARTRMRVKIPQLVEAFTGHFDDHHRFLLAQMLARIDGINADIAVLDAQIETLLTPFAQAVERLDEIPGIGPVAAAVIIAEIGLDMTRFPTAGHLCSWAKFSPGVKSSAGKNKGNGSTGHGNRYLARVLGEAAVMAGRSDTFLGERYRRIARRRGKKKAIVAVGRSMLVIIWHLLADPETRFNDLGADHFTRHVNTDAKKRNHIRQLEALGYTVTLKPAA

SEQ ID NO: 167792 - protein, 461 aa, unidentified
MAKKAKKVKSAKGAELRIVNPDAAGVDIADGIMQVCIPADRSKDNNRAFGAYTSDLHAISAWLRECGIKTVAMESTGVYWIPLFCRLQEDGLDVVLTNARDVKNITERKTDESDAEWLMLLHQYGLLKASFQPHNEAKRMRTLTRHRDTLSREASSMVLRMQKAMQQMNIKLTLVLSDITGKSGIRIIEAILAGERDPKKLAELADIQCKTPKEEIAKALEGNWEEDLMFVLRQNYDTFKHYCTQLGECDAELEKLMENYRAEVAKVEDTSYSPAKKRRDYKKTRHTVSFDVERKAYEMWGVNVFEIPGISHLTALELMSELGHDFTRKFPSSKQFCCWCNISPNTKISGGKRISSHVPHRRNNVGLIFRSIASSLANAKNQLGNFYRRIRSRAGGKAAVIATAHKVAEIFFAMVANQTTYNPERVGIDEKVLLEKRITRYKRELERITGTHIEIGNACVP

SEQ ID NO: 167793 - protein, 348 aa, unidentified
MTLTIVETRAVTGGVDTHADVHVAAALDPIGGLLGVREFPATAAGYAGLLAWLGGFGTVCLVGIEGTGSYGAGLARHIAAAGVRVVEVDRSDRQDRRRQGKSDPLDAVSAARAAQSGRAAGAPKGRDGQVEAIRALMVAKRSARSERTQTINQARALIVTGPDDLRARFARHTPADLAAELASLRPRPGATVGYATRIALRELGRRARFLDGQLGRLDEFIVPLVTVRAPGLLALYGVGPDTAAMLLVAAGDHPGRLRSEAAWAHLCATAPLSASSGKVTRYRLNPGGDRQANHALYRIVITRLSSHPPTRAYASRRTKEGLSKPEIIRCLKRYVAREVYPHLRPPAG

SEQ ID NO: 167794 - protein, 430 aa, unidentified
MKSNTQNAKIEAITEKTLVLGIDVGSETHYARAFDYRGIEYSKKPFKFSNTEAGFVTFKEWILDLKERHEKDKVVPGMEPTGHYWFNLGKFLQDNEMKPVLVNPHHVKKSKELDDNNPTKNDRKDPKVIAGLVREGRYMIPYLPEGVYADLRTASNIRFQLQAELTRIQNRISRWFNIYFPEYKTVYGKPDAKSGMLILKAAPLPEDILTLGIDGVNQIWRDAKLRAVGKARAKTLIEAAGHSVGSKEGAVSARMEIRMLLEDYESRNMRLQEVMVLIEELVKGIPMAEKLLEIKGVGIRTVSGFLAEVGDISRFNNPKELQKLAGLALVENSSGKHKGETTISRRGRKRLRYLLFEAAMSLVAKNPEFRELHNYYTTRRLNPLKKMQSLMAIAAKLIRVFYAMLTKGVDYDPKKMVSDIKRPAVYLQAA

SEQ ID NO: 167795 - protein, 343 aa, unidentified
MDHFAGLDVSVKETSVCIVDDTGRIVREVKVASEPEALLPVLTNPAYHFKRIGLEAGPLSQWLFSALAEAGLPVICVETRHMRAVLKAQINKTDRNDARGIAQMMRVGLYRPVHVKTLRSQKLRMLLTHRKLLQSKAIAIDNDLRGTLRNFGLKVGVAGTGKFEARIKEIVENMNDLAALVEPLLIVRRVLREQLGILHRRLLAIVRDDEVCRRLMTVPGVGPVVALTYRATVDVPTRFRNSKSVGAAFGLTPSKYQSGEINRTGAISRCGDEMMRMMLYEAAQVMLTRTNKWSWLKAWAMKIARHRGMKKAVVALARRLAVIMHRIWVDGTEFQWTREVAVA

SEQ ID NO: 167796 - protein, 334 aa, unidentified
MEQITTAGIDLAKRVFALHGVDRVGRVGLRKTVRREQLMQTVAALPPCLIGMEACSGAHEWARRFQELGHTVRLMAPVFVTPYRKSGKNDGNDAEAICEAVSRPNMRFVPVKSAEQQAILALHRVRQGWIEERTATINRLRAVLTEFGVVLPNRAQYVRRGAMAAAEGLPALARRALEDLRSHLGTLDERIAAYDRELQAQARQSEAAQRLMQIRGIGPITAVAIVATVGNARDFRSGRQFAAWLGLTPRQHSSGGKQRLGHISRRGDAYLRCLLVQGARSVLLTATRHSDRLSRWVLSVQARRGYHKALVATAAKNARIAWALLSKNQTLRAA

SEQ ID NO: 167797 - protein, 369 aa, unidentified
MPHVTSIGLDVHARSVAAAAFNPFTGEVVHRDFGTDAAEIAEWALGFEEPRACYESGPTGFRMARELRALGLDCAVAAVSRMQRPAADARRKNDRRDAEFIARMLATHNIVEVPLPDAAAEAARDLDRALDDATADYLRARQRLNMFLIRIGRVWDERNADGTRKKAWTRAHWRWISETRLEGPQRDVLEHYVTAARCAESDRRQLERKVVALAGTDRWRPAVEALSCIKGIDTLTAFRLAAEAGSFSRFRSAPAFASWCGLTPSERSSGETERRGGITKAGNRLVRTALIESAWHYSMCTPRPKVPAPGADVPAAIRSRADECTARLCRRREALSAAGKNACKANAAVARELACWVWEIGCRAEGTLG

SEQ ID NO: 167798 - protein, 371 aa, unidentified
MNKFIKYVGLDVHKETIAVSVAEAPGGELRYLGDIANTPEALDKQVKQLRKGGADLSFCYEAGPCGYGIHRQLTDLGWDCQVVAPSLIPKKAGDRIKTDRRDSLMLARLHRAGELTAVWVPDSAQEALRDLTRAREDMKHLQRQAKQRLLAFLLRHGKRYDGKSNWTLAHYRWMEAVKFDHPVQQIVFQEYIDTVKAMSKRVAAFDKQIESAAGESVFWPVIEGLMALRGINLLTATTVVAEIGDLRRFASAPQLMAYLGLVPSEHSSGGTKSRGGITKTGNGHVRRVLVEAAWTYRHPARKTTVLQKRAERTSEAVQEIAWKAQTRLCGRYRLFEAKGKIKVLACTAIARELVGFIWAIGQALPQPAANA

SEQ ID NO: 167799 - protein, 339 aa, unidentified
MKVSTLGIDLAKNVFQLHGVGCNGQTVLKKKLTRDKFLPFLMQLEPCLIGMETCASSHHFARVLRQYGHEVKLIPPQYVKPYVKTNKTDAADAEAICEAVARPNMRFVQIKTAEQQAILVLHTERNILIRERTACANSMRAILAEFGIIMPRTLSQLYKKIPEILEEYDNELSAFVRCSVARQLEHLQGVEDQITLIEQELSRWAKTQPACQRVMKVPGVGLMTATYLVASVGNGQQFHSAKQFAAWLGLVPREFSSGGKQRLGRISKRGDRYFRYLLVHGARAVAAVIERHKDNMPWLYRLLNKKAYNVAVVAQANKTARILWSMLVHHTEYRTLSVV

SEQ ID NO: 167800 - protein, 389 aa, unidentified
MIFVGIDVAKDKHDCAILNQDKVLLDLFSIANNRDGFETLMQRIRSCTTPNDNIKVGLEAPGHYSCNILGFLLDNGLHTFVLNPLHTNFYRKGHSLRKTKTDRTDARAIAAMLMSDVDLKSYTDTAYHNEELKSLTRYRFDKVQERAKLKQSVSRLVSILFPELEKLVPTLHMTSVYTLLAEFPGASSIASAHLTRLKHLLYDASKGHYGRDMALSIRDAAISSIGSVIPAKSLELKHTIHLIQVLSAEIDEIEDAINTIMGTLDSPITTIPGIKNRMGAMILAEIGDITRFDNPDQILAYAGLSPSIYQSGQLTSSYAHMEKRGSRYLRYALFNATVYVCQWDPAFKAYLTKKRAEGKHYYVAVSHACKKLVRVIYRMQLTGEAYRSA

SEQ ID NO: 167801 - protein, 324 aa, unidentified
MNDTVVGIDVSKKTLDTSYAQGQRKQARIFENSSDGWKQVLSWLKAKGSQPAHVGMEATGRYSLGAALMRHDAGHTVSIINPAQIRDFARSKLGRNKTAKADAALIREYTTLFRPQPWTPPSPAMRRLCELQTVRAGLVANRTEWKNRLGSGLGDSTAIQVAKAVIDALSSQLKVIDQAIAETIEQDGDLRGRRDLLLSVIGVGDTLAALLLAEMPEPGVLRHSAEMIAYAGLNPSHHRSGTSIDRPTRISKIGNATLRSALYMPALSAMRFNPVVAALAARLKSAGRLKPKQIVVAAMRKLLVLCFGVLKTGTPFDPAIAMPT

SEQ ID NO: 167802 - protein, 316 aa, unidentified
MVADFQYIGIDISKLRLDVHIHPMNKRFSIDNDRSGLRQLITKLKCMTIKSVGLEATGGYERLAADTLVAAGFTVYYLHPSQVRDFARSMKARAKTDAIDAAIIARYVEMAADILIPHEPDEARDCLAELNAYRRMLIAERNSHKSLLDTTGGAVVRRLIQKRLKDIAAEIRILEHEIKVHVAEDPRLAEPFARLMSLPGVGPVLAATLLSDLPELGHIGAKRIASLVGLAPHARQSGQTDRGGRCGGGRKSIRDVLYMATLSAIKAKMPHLEPFYRRLSQAGKPFKKVMVAVMRKFLTIINAIIRDKTEFRSKSA

SEQ ID NO: 167803 - protein, 373 aa, unidentified
MTKNLRYLGLDVHAETIAVAVAEPGGEVRNLGIIPNEPSAVAKLIRKLGGREQLRACYEAGPCGYVLYWQLTKLGVACDVVAPTLVPIKPGDRVKTDRRDAEKLARCHRAGDLTAVWVPDDAHEALRDLVRAREAAKADQLRARHRVSKFLLRHGMRAPGDVKPWTQRHRRWLDTVTFVPVAQQTTLADYIHEVDHAGARLERLETALDVAIAAAPPAMQAIMRALQCLRGVRQLTAATIVSEIGPLSRFAHPRQLMGYSGTVPSEYSSGSSVHRGAITKTGNAHLRRVLVEAAWAYRFPPKCGDALRTRQRGQPPGIIDIAWKAQQRLHTRYRRLLGRGKPVPHVITAVARELAGFIWAIGIAAEREVAIAA

SEQ ID NO: 167804 - protein, 348 aa, unidentified
MTVYIGVDFHARQQTISYLTTEDGAIQHLVLLHDNPAAVRAFYAQFAGQRVVVGFESSGYAAWFEELLEELGCEIWIGHATYIRQFAKRRQKNDRRDADLILELLHTGDFPRIHRYSRSTREMLQQLRYRQRLVKMRTMAMNMLLFMASSRGVSLRTQLQSKRGQAKLQQLPLPATLGTQRDELLSLLQTLDEKISTIERWLAKETKADEAVQRLQTHPGIGLLTSICVRYTLEDAKRFANTRKVSAFAGFDPMQDQSDERNRMGPISKQGSRWLRFYLVEAGQVAIRKDADLQRVYQRISRRGGQAKAKVAVARRLLVRAFIMLRDEIDYAEFQRRGVAARSARGSA

SEQ ID NO: 167805 - protein, 343 aa, unidentified
MGEVSTIGLDIAKSVFQIHGVDVDGAVVMRRRITRAKLLDFFASLPACLVGIEACPTAHYWSRRLQALGHTVRLLPPSYVKAYLKRGKNDANDAAASCEAVTRAAMRFVATKSEQQQSGLMLHRSRQLLVCQRTMLSNAIRGHMAELGIISAKGRNGTAELLKIIANEDDDRIPAAARFSLGILARQYAAIREEILAIEKRIHAWHRSSEESRRLEEIPGVGPIVATALVAEVGDWKVFSSGRSLAAWIGLVPRQHSTGGKERLGRISKQGNRHLRWLLVAGAMAVIRYARQHGTKRLWLARLMDRRPIKVAAVALANKIAWMAWAMMVRGERFKEPKLLPAV

SEQ ID NO: 167806 - protein, 425 aa, unidentified
MNIDGTDEPCFAAFVAIDWGDKKHAWSLQPADSDRRERGEIEHSPEAVAEWAAMLSARFANQPVALAVEQSRGALVFMLSKYEQLHVYPIHPRAASQFRAALVPSGAKDDPSDAELLLDLLVHHRARLRRLQPDSEQTRLIQHLVEGRRKLVNERTRQTNRLTANLKLYFPQLLDWFDAVDSPLACALLQRWPTLEALQKARPDTVRSFFTAHNCRSQELIQRRLEQIRQAVPAVRDKALIEASLAMTKVLVELIATLREGIASYDRQIAQAVATHPDFAIFDSFPGAGPALAPRLLAAFGSQRDRYRSAADLQTFSGIAPVTERSGKSKWVHVRWACPRFLRQTFHEWAAHSIGFCDWARAYYQQQRDRGKDHHAAVRALAFKWIRIAFRCWKDAVPYDDARYMQSLRRRGSPLMAALAKPVLP

SEQ ID NO: 167807 - protein, 354 aa, unidentified
MNNITFSNSSFFVGIDTHLKNWRVTIRNSGLELKTFSMNPSPDELYKYLTTHYPEGTYFIVYEAGFCGFWPQRKFNELGINCIIVNPADVPSSGKEKVVKTDPNDSRKLARELENGSLKAIYVPDINHEQLRSLMRLRFRLVQNQTRIKNRIKMLLYNYGIIIPKEHITNSRWSGYFIHWLKSIKLNSTAGQFTLDNLLLQLDQTREHLKQVLKQLREESKHENISSVISSLVSVPGVAFITAMSLYTELIDIKRFNSFDHLASFVGLVPSVYSSGETDYTRGISFRHNKFLRPLIVEAAWTAVKTDPALTFKYKELIKTMAKQKAIIRIAKKLLRRIRHVWINQDRYVKALVA

SEQ ID NO: 167808 - protein, 348 aa, unidentified
MEHICRIGMDTSKHFFQLHGVNTAEEPVVRKKLRRKDMIVFFEKLAPTVVAIEACGGSHHWARLLSSFGHQVKLIAPQLVKPYVKRGKNDAADAEALCEAMSRPTMRFVPVKTVEQQAAVMLVGVRDRLIRNRTQLANSIRGYASEYGLTAAKGMAHLDPLIERIQADESLPVLARELFAAQAKEYQQLQAQIDEVDVKLKAWYHADECGRRLAQIPGVGPIGAALLMMKTPAPEMFRSGRQFAAWIGLTPKDHSTGGKVRLGVITRAGDEALRSVLVVGATALLRFVANGKSKSALSPWLGQLLKRKPAKLVAVALANKLARIAWKLMVTGQSYVRKSTPTTVAGAA

SEQ ID NO: 167809 - protein, 407 aa, unidentified
MNSEYAVVIGLDVGKTGHHACALDPDGIKLFDKPLPQDETQLRELFTSLQVHGQVLMVVDQPNTIGALPIAVARDAGCTVAYLPGLAMRKAADLYPGRSKTDARDAFIIADTARTMPHTLRQVDRDNEVLSALKVLAGFDEDLAHETTRSLNRIRSLLTQIHPALERVFAGGSLSTALVLDLLEKFAGPTGLKTAGRAKVLRFARSHSRRDPEALVDRIFMALGEQTVVVPATAAVELVIQRVAGQVKELKAQRATVAREVEAMLEDFPLASVLMSMPGIGIKTAAQILLNIGDGSAFETPGHLAAYAGIAPVTRRSGTSIRGEFPARSGNKRLKNALFYSAWVASHSDPISKTYYDRKRAEGKRHNAAVICLARRRCNVIFAMLRDGTYYQPPTTVPTPEPAALAA

SEQ ID NO: 167810 - protein, 400 aa, unidentified
MMTPDDIDVWVGLDVGKSAHHAHALDHDGNTLYDKPLKQDEKAIRTMLGKLSKHGRVLLVVDQPNTIGSLPLTVARNMGIAVAYLPGTAMRRTAQLLPGDTKTDRRDAHVIAWAALKLPETLRDAGPDDETLAALKLLAGHDEDLAHESTRHVNRLRSLLLQTHPAFERALKGERITRDATLALLERYGGPMGVKRAGIEDVKDWAKSNGLRAGRIIDDMFKAIGEQTVTVPGTLMAETIIPSIAHDIKTIRDRRREVGRQVEKLLEDHPLLTVLTSMPGIGVRTASNILLGIGGDIANFKSSAHLAAYAGISPVTGQSGTSIKGERPSRRGNKRLKNALWQTAFVASTKHPPSVAYYKRKREQDKHHNAAIICLARRRCDVIYSMLKNGTLYQEPALVA

SEQ ID NO: 167811 - protein, 380 aa, unidentified
MTCKERGRVAKLTRAMQYVNNTELSSAEETRCQFNGSKADIKLGIDVHQHFYTVVMQVGGCNPKPPQRFAKEVFLHWAAKLKQSCGGQVHAVYEACGFGFGLQRELSALGIECEVVCPQKLDEQNRRVKTDGLDAKALCLKLDRFVQGNRSAVALVRVPSEEEEQLRAIHRQREQLVKTRKQLEAQGRSLMVNHGIEPVQQWWSRNSGIAALNVPKWMKELLKNSQPILLALEEKIHALTVQLQAAAQDRQPRGFGALTSVVIDREIANWHRFSNRRQVGSYTGLCPGEYSSGNTRLQSCVTKHGNPRLRAALVEAAWRLVRFQPNYKPIVKWNATLRKGALATGAARKKAIVAVARQLAVDLWRIRTGRVSAQELGLIN

SEQ ID NO: 167812 - protein, 417 aa, unidentified
MTEPAAYTVYVGIDWATTSHEVCVLSPERAVVATRRVAHTAAGLDELVALLTTFGSATAVAIGIEMPRGALIEALLAHGYPVYAINPKQSDRFRDRHTVAGAKDDRLDAFVIADALRTDRPCFRRVQPDEATVLQIREYSRIDAELRDEQSRLTNRLREQLYRYFPQALTLCPAVDEPWVWALLAMASTPAAAARLRRPRLAACLKTYRIRRLTADDVHAALATRAMVESAGTIAAASAHVALLLPRLTLVHAQQRTCAAALTHLLETLSAAHDTDPSAPTPSDVQILRSLPGVGLKTVAALFAEAADAIATRDLAALRAHAGIAPVTKRSGTRCVVVMRRACSGRLRTALYHASRVSAQCDAGAKQMYAALRARGHSHGRACRSVADRMLRILMAMLRTGTTYVTPTPAAPVMQPA

SEQ ID NO: 167813 - protein, 315 aa, unidentified
MTTVPVFAGIDVSKQWLDVGQFPDGAHRRVRNDEEGFGTLLEMLQALEPELVVLEATGGLESHVSAFLTAHGLPVAVVNPRQVREFARATGRLAKTDTIDAQVLARFAEAVRPQVRWLPDAEARELRELVSRRQQLLEMLTMEKNHRQNVSSVVKPGLEAHIAWLSDEIAAVEKHVEQVIKASPVWRERDELYRSVPGVGPVLSSTLLAGLPELGHLNRKEIAALVGVAPLNRDSGLFRGRRSVWGGRAAIRAVLYMAALVATRRNSHIRAFHQRLIAAGKPGKVAVVACMRKLLTTLNAIARSSTPWLENLQSS

SEQ ID NO: 167814 - protein, 360 aa, unidentified
MFRLRVEDRRSLGIKVPLWSKVSTRSINCLEQSQGRYGPYCKEENKLTESGICVGIDISKSHLDIFIPGEEGAFRVEYTDAGLAELLEKLSQNDVALVVMEATGKLEAVCATTLANKKIPVAVVNPRQVRDFARSTGRLAKTDAIDAEMISRFGEAIEPAAKEVRNEDEERFDELLTRRRQVLAMTITEKNRLTMLRDRKVRRRVIAHIRWLERELKDVDGEMSDAIKESPIWRVKDALLRSVPGVGEVTSKVLLGELPELGKLNSKEIASLVGVAPMNRDSGKMRGKRTTIGGRSIVRTALYMAALSATKHNPELRSFYQRLVEAGKPKKVALTATMRKLVILLNAIVARGTGWQPECP

SEQ ID NO: 167815 - protein, 344 aa, unidentified
MHIASIGIDLGKTTFHLVALGERNKVLVRKKFSRAQLLAYTANLQKSLIGVEAGAGAHFMGAALREQGHQVRLIPAQFIKPYRKSNKNDFIDAEAIAEGVTKQNMRFVQIKTEEQLDLQAMHRVRDRLVQSRTALINQIRGFLLERGITFAADPIHLRKNLPAVIEDAEQNLSSRLRLLLERLWQEWKQLEIDVKAITEEIERISKENALCRCLLQIPGFGPLVSSATVAAIGNGAAFRRGRDFAAWVGIVPRQYSTGGKQKLLGISKRGNVYLRRMLIHGARAVLFRVKYDTGGFGQWVHRLAQRAPRNKVVVAIANKLARMAWAVLSSGKPYRHQPLQYAAA

SEQ ID NO: 167816 - protein, 315 aa, unidentified
MHYLGFDVSKRKLDVILTNLRDKTSYFTLKNDRENILKWLNSAKLPKELISGCESTAGYHLILQRIMVESGFTFKLLNPILTKQFTRATIRKRKTDKTDSLIIAKLLAQGEGKIVKKNSLNMDSKIEQRVLGKLITYKHRLSLMGQSLSLHENISGFVSKAVAKLEKQVQEEIDEYLKKLTRKYRRHKIINLLTTIPGIGFKLALIIYSEINDINNFNHPKKLVAFAGLDPKIRQSGHSINNTGSITKRGSTRLRYALYVASNVARMHDPDLKAYYQKKRKEGKKHTVATLATARKLLNRIFAIWKNRTPYIIKN

SEQ ID NO: 167817 - protein, 400 aa, unidentified
MKGFLHMKLIGIDIGKNKHFFCIMDQQTGEIISQPVSFSNDKEGFDFLIQKIKSYPKDSILIGMEDTGHYHFALLKYLLDLQYTVALINPKTTDFNRKMQGGITKNDKLDTINICDVLDTPERKKQYRITKVNSFDLYEQKQLTRHHHNLKEEENVYKNRLQKCIDIVFPEFNKLFNSKYGTVYMNILKTFGSAENVANTDIRTIRKCFEIEGRGNRISLTPERLKECAGSSIGISSSAEVIQIKHLTAQIELIEEQLTEIDKKIEEFSIQNNSPILSIPGISHFSGTSILAELGDISNYSKPSQIIKFAGVAPLHYESSQFNAQHTSITKKGSKYLRKTLYQIILPVIRHNQVFYKYYQLKISQGKGHRCAQGHCVRKLLRIIYHLLKTNQQFDPQLLR

SEQ ID NO: 167818 - protein, 470 aa, unidentified
MRYYAGLDWSENLQDWAVMDETGRHCKHGKIPLTPAGIAELVEGLGRFLDPDTGEFPPLAIETGRGVLVSSLQSEGVTVHPVNPFVAKQYATRKNVKGKKNDKADAFSLASALRYDLADHRAAPCFTDQGRALTQMGRAHQDVLWKSLRHTNEVRSLLQEFWPHANTVFKPTDIAGKPEVRAVLAAWPDPTMAQHVTKTRLRKVLKDAGRSRYVERDVDLWFDALRVPALHSPPMLEHAYGDHLRVLLATLDTTAALEVALRHQAITAMHAHPLAALVDTVPGLGGITAARIIGEIGDDPRRFTSVKTLRAFAGTSPETRSSSTSSSTKRRHVKNNRVNHSAFLWAFNSLTASPGARAYYDNRRDGRTMQGQPLKDKHAAALRNISNVLIGAWWHCASTGEAWDERKVWPRFATTAQVPEPDERPDDALDADDDLRRLLDAEQAVDTLLHPSSHTNNDDQDADEPEDPFS

SEQ ID NO: 167819 - protein, 405 aa, unidentified
MDLKYARCAGLDVHKDTVVASIRLAGGKATVQTRTFGTTTSALLDLGEWLAGMEVTHVAMEATGVYWKPVWHILAPSFQLTLANSAHIKNVPGRKTDVKDAEWIAQLHAHGLVEASFVPPEPIQELRALTRDRRQYHRESAQHVQRIQKILQDANIKLDSVLSDVMGASGRAMLDAIVRGETDPRALARLADRRVRASPDELAEALRGVVTDRHRAALRRHLATFDHLLLSIAEIDDEVAALTEPFCRAVELLDTIPGVDVKTAEVLVAEIGSDMSRFPTAAHLVSWAGLAPRNDESAGKRRSTRVGKGGQWLKATLVQAAWAATRTKNSHLQSLFLRLRGRRGAKKAIIAVAAEMLRSAWHMLSRDQPYTPPTAASAADPEKLARRLVEKIRKLGFQVELSTAA

SEQ ID NO: 167820 - protein, 339 aa, unidentified
MTVKTIGLDLAKDVFQVHGISENGRVIFNKAIKRAKLLAFFETLPPCTVGMEACGSAHHWGRTLRKLGHDVRLMPANYVKPYVKRGKTDAVDAEAICEAVRRPTMRFVEIKTEDQQAVLSIHRTRDLAVRQRTQMANMIRSLLREFGHILPIGIEAVTAFAKRHLDGDQPDMPDIANGMLGMQCYQFIGLNERIAGYTKMIEQHAMLSTDARRLMRMPGIGPITASAIVATIGDAKQFRTGRDLAAWLGLTPLNKSSGGKERLGKITKQGDRYIRKLLVVGMTSRAVMAKRSPENVDLWTAKIIADKPFRLATTAMANKAARAIWAMLTKKQEYRQPAF

SEQ ID NO: 167821 - protein, 402 aa, unidentified
MRVVHERCAGLDVHKSSVVACALLPEGKQLRTFGTMTWQLEQLADWLRSLEVPVVAMESSGVYWKPVFNVLEAAGFELLVANARHIKAVPGRKTDVKDAEWIGDLLRHGLLKPSFIPGREERELRELTRYRRTLIEERAHEVQRLQKVLEGANIKLEDIISNVVGLNGRRFLGALIAGDYDPQAVAATANYGLQRKRELLAQGLRGSIGSHQRFLLDQLLSHIDFLEQRITALDRELKQRSLPFEAAIAHLDQIPGVGTRAAEEILAEIGTDMSRFPTHRHLASWAKVCPGNNESAGKRRSGYAGKGNRWLRSILVECAWCASRKKDSYFKAQYHRLAARRGRKRALLAVGHSLLTLIYHLLREGVLYQDLWLQLLRPTRPLTDRSPSSPQAGAPRLSSSAH

SEQ ID NO: 167822 - protein, 341 aa, unidentified
MQLKRVGVDIAKSVFQVHGVDSHEQVKVRKQIRRQDFLHFFRQLAPCLVAMEACGGAHYWARELIKLGHEVRLIAPQFVKPYVKSGKNDANDAEAICEAASRPTMRFVAIKMAEQQAGQALHRVRSRQVGARTALVNELRGLLAEFGIISPTHGVSACRRLVAEALEDGDNGLPGAFRALLAQLSEELRQLDAHVATLDQQIRQQCAADERIRRLMAIEGVGPISASAIVASVGDARQFPSGRAFAAWLGLVPSQHSSGGKARLGGITKRGDTYLRTVLIHGARAVVNTRKEKTDRRSRWVQDLVTRRNKNIATVALANKNARIIWSVLSSGEAYRAAVTS

SEQ ID NO: 167823 - protein, 342 aa, unidentified
MELSVLGIDLAKQVFELYGINARGQEVLSRRVTRKRLLASVAQVPACLVVMEACGTAHYWAREIEKLGHRVKLLRAKDVKAYVQGDKDDRHDAAAIAEAGTRAHLRAVAINSVEQQDLQSLHRIRELLVKQRTALANQLRGLLAEYGVVMGKSLGVLRRRVPEVLEDADNGLTAGFRASVAEMYERLREFDERVVVYDRRIGAAARADARCERLLEVEGLGPMSASALVAAVGDARQFDSGRQLAACLGVAPAHRGTGGSNRVLGLSKRQGNRYVRTLLIHGARSVVRHAANKTDPRSRWINRLVARSGVNVAAVAVANKNARIAWALLTRAERYRAAEATA

SEQ ID NO: 167824 - protein, 362 aa, unidentified
MTATRKPRIVRLASPALRLDATEVAHVGVDVHKASYHVAVVTNLRGLVATWTQPASPDLLVDRLHPIRTQVAQVVYEAGPTGFALVRRLRAGGYSAEVIAPSKIPTMPGPEAKSDRLDGRKLAVFAQKGLLRPVRVPTEQEEADRQVVRLREQLARELRVTQQQIKAFLLQHGAAEPAGLAHWTAAAVEALRRLDLNAELRFCLDVMLDERQHALEQVARATRRLEALARADRHCATVAALRTVPGVGPVTATTFRVELHEPGRFRDGGQVARMIGLAPQVLQSGPTRREGRLLKSGNARLRTVLVEAAWRWVAGDAAAKARYRRLVATTGNGKKAIVGMARRLAILLWRLSLSGEPYRAAA

SEQ ID NO: 167825 - protein, 389 aa, unidentified
MKIFVGIDIAKLNHFAAAISSDGEIILEPFKFTNDADGFQLLVSKLESFDKNSIIIGLESTAHYGDNLVRYLVAEFYQVCVLNPIKTCQMRKNNVRKTKTDKVDTFVIAKTLMMQDDLRFITFFDLDMMDLKALGRFRQKTIKQRTRLKIQLTTYVDQVFPEIQYFFKSGLHQHAVYAWLKEAPSPNEIASMHMTHLANLLKVNSHGHFTKEQAKELRVLAQKSVGANDSAISIQITQTIQQIELLDSQLEKIEAEMTDIMKFNDSVIMTIPGIGYINGGMILGEIGDIHRFSNPNKLLAFAGLDPSVYQSGNFQAKTTRMSKRGSRVLRYALVNAAWNVVRNNATFKAYYDAKRAEGRSHYNALGHCAGKLVRVIWKMLTDEVEFNLE

SEQ ID NO: 167826 - protein, 361 aa, unidentified
MSNGSTEQMKMTAGMDLGDKYSHLCLIDQQSGELIEESRLRTTPEAMRRRFDSERSLHVAIEVGTHSPWVSRLLTECGHEVLIANPRKTRLIYGQRHKTDKLDAEKLARLARADPELLYPVEHRGCDSQAHLAVVHSREALVRSRTQMINHVRGTVKSFGYRLPKCSTPSFHKKVPGQLPSELAEVLGPIVETVGSLNEKIKEYDRRIEELAAERYTETELLRQVSGVGSLTALTFVLTLEDPQRFAQSRSVGAYLGLAPGTDQSGEKDPQKRISGEGDELLRRLLVSSAHYILGPFAPDSDLKRHGEKIAQRGGKNAKKRAVVAVARKLSVLLHRLWVSGEVYEALRNARRLGVQGEEVA

SEQ ID NO: 167827 - protein, 340 aa, unidentified
MSVYVGIDVHRKRSQVAVINEGGEVLANRNVPNGAQPVLGVIGGLPPGTPVAFEAAFGWGWLVELLEDYGFAPHLVHPLRCKAIASARLKNDKVDAAILAQLLRADLLPEAWIAPPPVRQLRALLRHRAQLVRLRTQLRNRIHAVLADYGHDRPGGCWSGPGRAWLASLPLPAVSREVIDDDLALIDALQVRIDRLDWEVHQQARRDPRVKVLTQLPGVGPFTALVLLAEIGEVSRFGSARKLASWAGLTPNVRGSDRVAHYGHISKQGSAWLRWILCEAAQTAKRHPDFAASYQAMARRRGKKIATTAVARKVLTRAYHLLAAASGGTPTSPEGSPGPG

SEQ ID NO: 167828 - protein, 375 aa, unidentified
MAQNDLVVAGIDIAKDKVDVCIRSLALRRTFASTAEGRRELASWLRRKKVKEGSWMMAQNGLVVAGIDIAKDKADVSIRALSQRQTFPSTAAGRRQLISWLRKHKVTKAVMEASGGYERQWAKALRDAGIEVRIVDPKRVRSFAQSAGRLAKNDGIDSDTIGWFAEIFGEAPSQAHDAARETLQQMVNARQGLLDIRTMLSNKGEQDVPEPVQKSHARLLKTVAVELAKLEAAITALVKATPHFAKRAEIIESVPGLAATTAAGLIAAMPELGEVSNEAIAALLGVAPYDDDSGKRQGERQIKGGRRKVRNLFYMASLGAATRHNSMLKTFYHRLIAKGKKAKVALVACMRKLIVILNTMIARGEKWDASRYPVS

SEQ ID NO: 167829 - protein, 400 aa, unidentified
MNIIGIDVSQGESHATLITEEAEKVAFKFKHNKSGFQILNSYIRSNTIIIFETTGVYSAQLTAYLKSKKVKFYELNPLEAKLRMASLRRNKTDKNDSFKLALLGATQLTEIKNHCNKQSALPYDSLRILSLRYKQLIKCRTRILNFLRSSLELTFPELNQIFKKAYAVLALQVFRMYCHPDLLAGLTLKEMTNRVYQFVSRRIHKDVIQSYCAQVWLAAKDSYPAVSADSLEIEIISEYCDEIENYNKEIAYIQSKLIKTAVGLDDFKVISSIPGTGQLNSALLLGFTGDIARFDNYKQLNAFLGLALNRYQSGKYGKGDTINRRGSSQGRAVETDMIRSMLRNQGKIQNHLVDYYYKLKKPPFNKHDKVALIACANHLNRTIINLVHTHQLHNYSKAIH

SEQ ID NO: 167830 - protein, 460 aa, unidentified
MPVRRKITAKSNTQLPTLHPHAAGIDIGATQIQVAVPCDADRKPVRTFSSFTDDLLKLRDWLKACGVQTVAMESTGVYWISLYQILEAAGLEVCLVNARHCKNLPGRKTDVSDCQWLQYLHSVGLLRPSFRPPEQICAARSLLRHRSALVRYAADHVRHLHKALTQMNIQIHNVISDITGTTGLLILQAILAGERDPQRLAARKDHRIKASRDLIARSLQGDWRAEHLFVLRQALDTWQHYQQLILQCDQQIQNVLAQFDSKIDPASQPLPPATLQHKKPQRNEPRFEARTELYRLCGVDLTQIPGVQINTALVLFTELGPDFVERFPTAKAFASWLGLCPDNRITGGKIISVKTRDVKSRSAEALRLCAQSLWRAKNYLGDCFRRWKARLGTPKAITAMAHKLARILWHMIKYRQAYDPSVWVKAEEKLRHKKIKRLQQSAAALGFKLLAPHQLARSVS

SEQ ID NO: 167831 - protein, 310 aa, unidentified
MKPIYIGVDISKERLDVHEPGKPHAAYPNDKTGIARLVKALANLGVDTHVICEPTGGYERTLAHALWEAGLAVSLVNPRQIRDFARSRGLLAKTDKLDAKVLSDYGEANTPAATPKPDPASEELAELVDRLGQLNVMRTQERNRLDKNPPSETVRKSVREMLRLLDARIEKLKGQIAERIEQDARLKAKVERMKEIKGVGEVTAASMLAYMPELGTLGRNQAAALAGLAPINRDSGRMHGQRHIHGGRAKARKALYMAAVNMCTFNHICRAKYLRLVERGKSKKLAITAIMRHLIVLLNSALKYPTLVLN

SEQ ID NO: 167832 - protein, 425 aa, unidentified
MQYALPLVLPDVPAGGVCAGIDWATADHAVCVIDMAGRITGRFSAAHDKAGIATIITRLRRSKVTEVAIERGDGPLVDALLAAGLTVVVITSRQVKNLRSRFGAAGAKDDRFDAFVLADTLRTDRARLRPLVPDTPATISLRMAVRARRDLVAHRVAAGNQLRAHLAVAFPAGTRLFHDRPISLAFLARFGSQDSAAGLDEQAIGAWLATITVRGRPAPASELHARLHAAPPGATGADGAAQAGITAALTATLTALSAQIKTLETQIAGQLAAHPDRHIFTSLPRPGTVRAARLLAEIGDCRSRFPDPESLAGLAGVAPVTRQSGTRTAHHFRWAVNRQLRDAICDFAADSRHASPWAAAIYDDARARGKDHPHAVRITARAWSYVIWRCWHDGTAYDPAKHNALQAILARQDAQAAGTARQEDR

SEQ ID NO: 167833 - protein, 458 aa, unidentified
MEEPQEVPADEEHERVWERVAAVDIAKASGVVCTRVPDEDRPGRRKTHVWTVQATSKTIIELGDYLRARQIQVVTLESTSDYWRIWFVILEAAGLKVQLVNARSVRNVPGRAKTDKKDAVWLAKLTEKGLLQPSFIPPYEIRRLRELTRLRTSLVHDKSRYWARLEKLLERAQIKISAVLSTLDTDTARAMIEALIAGQRNPRVLADLAIGKARAKRAELTLALDGRWEDHHSIQARILLDNIDALNQQTEQLTGTIGELISQIPAAWGVDADGSTGPHAGTGPDSPVLPAVAQLDAITGCGIIAAQAIIAEIGLDMTVFGTPGRLVSWAKRCPQTRQSGKKTSSGKAGKGNPWLNGILGEIAASAARTDTFLGERYRRLARRRGKRKAMVAISRSILVIIFCLLSDRSARFCDLGPDFYDTQLNRDRKIRNHIRQLQALGISPDDLAALMTKNPPAA

SEQ ID NO: 167834 - protein, 360 aa, unidentified
MSKMSKPAGRKKTAMDKPDRTMGIDVGDRYSHLCLLDEDGEVVERDRVRSTEAAFRRHFEGVPRLRIALECGTYSPWMRRLLKQLGHQVVIANARKIPTITESESKNDGRDAEQLALMAAFNPKLLSPLEHRSLARQQDLNLIQARAVLVKARTMIVNALRGLVKSAGGRLPACSSKSFPHRAAGAVPPALAAVAGPLIEQIARLNVQIVAMDRQIEELAAKYPEIGTLRSAPGVGPLVAAAYVLTLDRPNAVPSSRSAGAFLGLRPGQSQSGESDPQRRITRTGNTYLRCLLEQSAQYVLGRFGPDSALRRWGLRLAASGGKRAKKRAIVAVARKLAVLLHSMWRSGQRFEPFLQPAQA

SEQ ID NO: 167835 - protein, 457 aa, unidentified
MTRRKHSRPARDIAPVHPHAAAVDIGATLHVAAVRPGSDPEPVRTFGTFTTDLHRLADWFEQCGVETVAMESTGVYWIPLYEILDQRGFEVVVVNARDAKHVPGRKTDVSDAAWLQRLHEYGLLRASFRPKGEIATLRSYLRQRERLLEGAAAHIQHMQKALTEMNLQLHHVVADVTGVTGLRILRALVAGERDPDTLAAYSDPRCKAPAETLRAALVGNYREEHVFALAQALELYDIYQAKVAACDQRIEAVLERLKAANPPPAAALPPARPRRRQANEPGFAVREALHAILGADPTQIDGIGPSLALTLVGECGTDLSAWPSAKHFTSWLSLAPHNKISGGKVLSARTRRSGSRAAALLRLAAVAVGRTATALGAFYRRLAARVGKAKAVTATARKIGVLFYNMLRHGMDYADPGASAYEARYRQRVLSNLRRRAKSLGYVLQKADPASAAIAVS

SEQ ID NO: 167836 - protein, 353 aa, unidentified
MMRILALDLGKYKTVACEYEAESGRHRFATVLTTPKALHDLIVDREPQRVVIEICSIAGWVGDLVRSLGIELQVANTSDERWQWRKVKQKNDRRDALKAAQLSAVNQLCPVHVPELTMRQWRALIAYRSKLVQRRTKVKNHIRDLLLREGQLLPRGRTAWTQAGLATLAAMAQPFAVLESEQLWRGELGIELAQLTELQQQIMTVHAKLDELAAADARVQLLRTIPGVGPRLAEAIVTMFDDVTRFITAGQVGAYIGMVPKHFDSGETARSGRITRHGNRLVRSLLVEIAWASLRHNPWARQTFQRISGGKKSRRKIAIVAVGRKLLVRCWGMLRHQTPWHWQTSLATQSSDG

SEQ ID NO: 167837 - protein, 404 aa, unidentified
MNNVAGIDVSKGKSMVSVLRPFGEVVAKPFSVGHTGSELKELADYLKSLDGETRVVMEHTGRYYEPVARFLHDQGIFVSAVNPKLIKDYGNNTLRKVKTDKADARKIARYGLDNWVELRQHTPMDTIRMQLKTLNRQQGLYSKTKTMMKNNLIALLDQTYPGVNSLFDSPVREDGSQKWVDFATAFWHVDCVRNMSLTAFTERYRKWCRRHGYNFSQGKAIEIHTSTQDLIAMLPKDTLTKTMIRQAIDALNAVSASLERLKAEMRTLAAQLPEYPVVMAMRGVGDSLGPQLMAELGDVTRFTHRNAITAFAGVDPGADQSGTHEAKSTRASKSGPPELRKALFLVMDCLLKTMPADDPVYCFMDKKRAEGKPYLVYMTAGANKFLRIYYGRVKEYLALRENVD

SEQ ID NO: 167838 - protein, 454 aa, unidentified
MSRPQVIDDQEHERVHERVAAVDVAKDTGMVCTRTPHPARPGARRATVWTVKARMGAVRALGRQLKRDGIEVVTLESTSDYWRIWFFVLEACGLAVQLVHAAQAKNLPGRPKTDKLDAMWLARLTELGLLRASFVPPKAIRDLRDYTRARTRLVQERTRCWQRLEKLLEAALVKVSSVASKLTTISAQDMIKAMIAGQRDPQVLAALARTRMKAKHDDLVQALDGMFDDHHGELAGLLLDQIAFLDHRIEVLGARAAELTAAMPAAWGVEPDGTTGPDAGATAGAPVLNAVARLAEIPGISENLARSVIAEVGLDMTRFPTAGHLVSWAGLCPSARQSGPRSRPGKKGQGDTWLRGSLGQAATGASRTATFLGERYSRIVRRRGKAKAQVAVARSILVIIWHLLNNPKPGSPTSATATTRPVPTPTVSSVTTSGRSRPSASRSPSPRPPDPYRP

SEQ ID NO: 167839 - protein, 368 aa, unidentified
MSKLAKVDRFFKNVNLTSDDEVFVGVDVHKKSYHVALFLNDTPAIDFRMCAAPKQLNKKLEPMACSIKDIVYETGPTGYGLARELIKNNLPASVVATSRIPRRCGVEDKTDRLDSRKLAEYSAKGLLCPIRIPTPKQEADRQLYRMRHRQALQFAKVKVQIKSFLLMHGIKEPEGLGNWTIASVSDLRDMRLIDTLRLSLDELLSDYDYFNNRINVLNKILTANLDKGVLGQRMALLKTHPGVGPVIACQFATELYHYRDFSSTRQLYKYLGLSPRINQSGEKSSTGSINKAANGRLRNNLIQGAWIWVRTDIEAKKCFYRICDNCGGIRQKAIVAMARKMSGHLWAMLMNDQPYDKNKAKCRHNNER

SEQ ID NO: 167840 - protein, 345 aa, unidentified
MERYIGIDVHRDSTTICVVSATGKRVRREIVETNGQVLVRYLKLLRGTLHVCIEESSWSEWLHEVLSPHVAKLVVYQSQWTPGAKSDAIDAHGLAEKLRLGQVGPGVFKSPHRYRKLREWARVYQALTQDVARAKNRLKSQLQRRGVRCVGTSVYDPRQRDSWLRQLPVSMRPTTQLLGLELDGLVELRTQAEAALLEESHRHRVTKILETAPGLGPIRTALLIATVITPHRFRSKRQFWSYCGFGVVTRSSADWIQTESGWIKARAVQTRGLNRNHNPTLKGIFKGAAITVIHQTQADHPLKEAYARLLDGGTRPPLARLTIARKIAATVLAMWKTEEVYRAGS

SEQ ID NO: 167841 - protein, 429 aa, unidentified
MNYTQNKKIMQVKVSTLVVGVDIAKNKHAARAFNFRGIEYDKAIFFENNEAGFKKLLRWIKKVSEKENKTDVIVGMEPTGHYWLPLEEYLRRKTDFLRVVVNPAHVKKSKSLDDNSPTKTDKKDAKVIAKLVIDGRYSIPHMPEKEYADLRVAMTHRERLVKDIINLSNKIQQLIDKYFPEYTTVFKKWNGKASIAVLKELFLPKLILEKTEEEIVEIFRKGANRAVGIKRARKLKKAALNSIGIKEGGEFTQFELRNLLEQYELLNKQKELLEEKVEELLENMEEAKYMESINGVGLITVAGFIAEVGNIKDYDHPKQIQKLAGLNLKEHSSGKHLGQTRITKRGRPKLRALLYRVMMPMLANNQEFKQLHEYYTTRRDNPLKPKQSMIALACKLIRIFYALGQKHVKYDGEKLMNDIERNLDLQEVA

SEQ ID NO: 167842 - protein, 366 aa, unidentified
MKKISTVQAFSNEILKDQKLTIGVDLGDRSSAYCVLNEAGEIILEHKLPTTPEAMKQVFGSMPQCRMAMETETHSPWVSRLLTALGHEVIVAHAQKVRLITKSWRKDDRMDARTLARLMRIDPQLLSPVKHRSAQAQLHLTEIRARAVLVSARTALVNAVRGLVKSYGERLRKCSTEQITRDATSGLSTGLREALDPLLREVDALNERIQEYDRRIEMMAKKTYPETALLKQIKGVGDLISTTYVLTIEDPHRFRKSRDAGCFVGLQPGRRNSGESEPQMRISKEGDEYLRTLLVQGAHYILGPFGEDSDLRRWGRKLSARGGKIAKKRAVVAVARKLAVLLHRLWVSGEVYKPLHNSQKAMTVAA

SEQ ID NO: 167843 - protein, 438 aa, unidentified
MSDLDQAAVNREFAAHIGIDWADQKHFWTMRTADGKTQRGELDNTPEAVQVWAAELEQRFGGRPVAVALEQARGAVIAMLCKYAHLVLFPIHPNTLANYRKAFRPSGAKSDPRDADLALELLVSHADKLRRLEPDTVETRKLQFLTEERRRLVNQQTSETQRLIGWLKQVFPQILPWFEDPACAMVGELLLRWPTLPALQKATPKTLRTFFHRQNCRSAERIEERIAQIRQAVAATHDAALLETGILCIQNSVHVLEQMREGIARFDHQIAETYRQHPDRAIMESFPGAGPALEPRLIAAVGSRRERFESAQSVACFVGIAPVKEASGQQRWVHWRWACPKFFRQTFHEWAGCSIRTCQWAREHYDQQRDKGKGHHAAIRSVAFKWIRIFYRCWRDRVPYSEQTYLKAKAARAPKPHPAVSMQWESCGGFAKLSKLPS

SEQ ID NO: 167844 - protein, 344 aa, unidentified
MYFIGIDHHKQASVMTIVDEAGRELKHGRMLNLRDNVKRFLEGYHPFTAVLEAGRSSYVMADLLRELGGEVKMANALQVKAIAHARIKTDKRDSRMLAELLRGNLIPEIYQRGERNRRAQRVMRLRAHWVAKQTEVKNKIRALLAHQREEIQLEVEKREERLFSGKGVEFLKTLPLEDPDKMVLDDLIQGYEEARAHIQKTDGLVGHLYGEIEEASRIDTVPGFATTLSVLVAVEIADIKRFPTVGDLHSYAGVIPSTYASGERLHHGRITKQGSAWLRWAAVEAVYPAIKKDLGLRVLYNRLAKRKGPNVAKVAVARRLLTIIYRVLSEKRDYIPDKMTRSAA

SEQ ID NO: 167845 - protein, 439 aa, unidentified
MNKRRDRVCGADVHKDLIVATITGDDVLPIQKNFGTTKAELRKFRNWLVANKCEQVAFEATGVYWMPIYDALSKTIDTIVANPLQIKTIPNDKSDSKDSNRIAILCLNGQIKRSRVFTDEDRNLRMMTRARSGYVKTGTQFRNRIHKYLSSNGVKLSSTMDDIFCKSGRYILDGLAKEKPLEEILKGIPSGKIRKKKDEIREALENGLNDTNRMLLKDALEILDHIESKMEKVSLEILKGVQQKSKDLAIVMSIPGIGFTSGAAILSEIGDYRDFKTPDQLAKWCGLIPGENESAGKKKKCGITKKGSKHIRVMLVQAAQTISNMNKTALSRFFKRLAKKKERNVAIIAVARKLICLIYHLLINQELYQEGECRKRGSSHDKSCHAPSLQEEQLTDKVAAIVDAFYHLDESRRKNALMRELGDIVMANPGKNRPSGGGE

SEQ ID NO: 167846 - protein, 355 aa, unidentified
MNATTVAVDLAKNVFELALADAHWKIVERARLTRAQFERWFDNRSVRLVVMEACGSAHHWARTLRARGIEVRLLPAQYVRAYVKRNKTDAADAQALLEAARANDIRPVAVKSIEQQALQALHRTRSGWMSTRTRRINTLRGFCREFGLVVPEGAATGLACMARYIADDRSGLPELLRPSMRLMLEEIRLMEARIGQLEQQLRALAKQSPACQVLQSVPGIGLLTSTAMVAAVADPRSFDSGRRYSSFLGLTPREYSSGNTRYLGRISKRGDRYIRMLLTHGARSVLRAATVAHRAGRPVDRLKSWALAVRARTNHNKAACALANKLARIAWAVWVKQENYRPTRVTSGSTEALST

SEQ ID NO: 167847 - protein, 343 aa, unidentified
MQNSTVVAVDVAKTIFEVAVSDRPGHVCRRDRPTRAHFLAFFLAYPGATVVMEACGSAHYWGRELMKRGHQVVLLPAHQVRPYVRGNKTDRTDTKAILEAYRNADIRPVPVKSINQQSLTTLHRLRSGWMAQRTARLNAMRGLLREMGVFIPVGSREVVPAVWEQLGDADSEIPSVLRPLFAEACQEVRDIEARIKMVERELEALAAQLPPVILLMTIPGIGLLTATAFVAFVGDIRRFPSGRHLASYLGLTPREFSSGLKRRLGRISKRGDGYLRTMLIHGARSVLIHARKQQPDRLRSWAHDLGQTHVHNKAAVAVANKLARIIWAVWTREMTYQLMPKAA

SEQ ID NO: 167848 - protein, 379 aa, unidentified
MGMGATKAPFMDGAPLIIGARSRRAEEELTMTKTSISKTPIAVLGIDLGKNSCSLAGLDTTGAVVLRRRMTREVLIAFVAKLPTCVVAMEACCGAHFLGRTFEDQGHEVRLMAPEYVQPYVKAQKTDDRDAEAIAEAATRPTMRLVTLKSEAQLDLQILHRARQRLVTARTRLTNQLRAVLLERGIILPKRRTTLRQRLDDLMSGEMPISARAIRLLEDLRDEWANLDRRIRAYDDELAALTRDNDRARALATIPGIGVINATALLAAVGDASSFARGRDLAAWLGLTPRQHSTGGKTRLLGISKRGNRYLRVQLIHGARAAMTHFVKQDTATGEWLRRLLARAHPNVAIVALAAKLARIAWAVLKHGRTFERQVAVAA

SEQ ID NO: 167849 - protein, 388 aa, unidentified
MDMIDAVSNAPIQTTISAIFFSMELSRSQWLITSLSPGGGERMSKHVMPAGDVGGLLEQLDAIRSKAEAKTGRVFPFVSIQEAGLDGFWIHRVLDREGIESHVVDPASIATSRRRRRAKTDRLDGETLLRTLLAFKRGDPRVCSMVVVPTPEEEDRRRNSRERKALVHERVSLVNRLKGLLFSQGVTGYEPLKSDRRERFAELVTGDGRPIGEHLRAAAERILDRIELILAQLKTIERVRDSLVAQQPADDQSPACPAQLMTLRGVGPDFAEVLWSEGLYRHFDNRRQLASYAGLSPSPWQSGSINSEQGISKAGNPRLRSIMVQLSWFWLLHQPDSALSRWFHDRVKLDGGRRKKLTIVALARKLLIALWKFARHGVVIEGAVFKSA

SEQ ID NO: 167850 - protein, 356 aa, unidentified
MIYVGIDVHKHKCHSALMNENGTILDELTFQNTTQGLSELIQRIQPLGEAKAVLESTGNLWIKTYDALEAATIQTTLSNPLKTGAIAEARIKTDKIDARTLAHLLRTNLVAASYVPNKETRMRRSLLRHRANLVKTRTEIKNRIHSLLDKYDLKSEFSDIFGKQGLEWLRGLQLPTIDKTILNSDLALLDSLETQIQNMNIEIAKLACNQEDAKLLMTMPGIDYYSAMIISSEIGDVKRFSTAEKLASWAGLAPSIRQSGSQTKRGHITKQGSRMLRWILVQSAQISHRSDPRFQHMYQRIAARRGNNKAIIAVAREMLTVAYYMLTRREEYRDMDMERYKEKLKRLERTANRGLQ

SEQ ID NO: 167851 - protein, 365 aa, unidentified
MASMPQPAQPDHNTSPTDEVILGVDTHKDNHVAAVITALGAVAASRSFPTTMAGYHQLLAWAHTFGTLRRAGVEGTGSYGAALTRHLQAAGITVIEVNQPDKATHRRRGKTDTIDAQAAARAVLSGRATATAKTGDGPVEMLPMFKLAKSSAIKSRTQAINQLKAVLVAANATLREELSGLSTPILIRQCAQLPASAPNDATSAATWTLRLLACRILELTGEIDDLNQQLARAVNRHTSKLLARPGVGPDCAAALLITAGDNPERLGSEASYAALCGASPVEMSSGKTARLRLNRGGDRQANAALYRIALSRLRWDPPTRAYLARRIAQGKTRREALRCLKRYIAREIYQIITTPRPHSITARHP

SEQ ID NO: 167852 - protein, 354 aa, unidentified
MIIIGADYHPAFQQIAFVDTETGELQERRLEHPEVAEKFYRELAAQAKKVRVGMEASGHARWFERLLAELNFELWIGDAAEIRRKRERKQKTDRQDAQHILRLILKDDFPQIWVPSGENRDLRQLLWHRHRMVQARTRIMNQLQAVALNEGLRCKKRLWREKGREQLESFRLAPWASRRRHDLLELLDRLNPTIAELSQAIEQEVEKCPEAQRLMTHPGVGPLTALTFVLIIGGAYRFQCGKQIASYLGLVPLEDSSGNRRRLGHITKQGNSLLRFLLVEAAQVTVRSLPEWRSKYVHLTMRRGRKIAKVAMARKLAVRLYWMMRKGWNYEQVKKFGSHAGQPGNRHGVKSNIE

SEQ ID NO: 167853 - protein, 410 aa, unidentified
MLELFVGDDWAEEHHDVELMDPAGRRLGRARLPEGVTGMARLHAMIAAQLGEGVEDAVVKVGIETDRGPWAQALIAAGYEVFAVNPLQAARYRERHSVSGAKSDKADAHTLADMVRTDSHQLRPVAADSPRAEAIKVVARTHKTLIWERTRHTQRLRHALREYFPAALEAFEDLAASDTLELLSKAPDPAAAVRLSISQISAALRRAGRRKIEEKAAVIQTALRAEHLRQPEVVAAAYAASVQSTVAVLKVLVEQVKTLQGQVESHFGRHPVAEIILSQPGLGPILGARVLGEFGDAADRYVSAKSRKNYAGTSPITRASGKKKLVLARFVHNDRLIDALAAQAFAALSASPGARAYYDRIRARGVGHRAALRQLANRLVGILHGCLTTGTVYDETTAWPADATDSPAAA

SEQ ID NO: 167854 - protein, 332 aa, unidentified
MCLISEQGELIGQFAAPADRDGLYGLTRRVAVYDQPVRGVAESMNGARFVHDELVTHGWEVLIADAQRVKGLAPLACKTDKIDARVLAELSVRDLVPAIWLPTPELRREREISRWRLHLVKHRTTLKNRVHSTLIAFGHQVPMADLFGVAGRRLLAGLDIPEPWRGHVDASLQLIDDLELRIGRIEAGLRRSGADHRYVPLLMTAPGFGWITSFTVACEIGDIGRFSSPVKLTGYTGLCPRVSQSGDMDRRGPLSKHGPRYLRWGLMEAAIHAAAHPLYRERYQRTKRRLGRQRGAKVAQIDLARKLTEAIWYMLTRNQPFAPAGATVRLAA

SEQ ID NO: 167855 - protein, 437 aa, unidentified
MGKEDEETTMSGKETVQAEPEFVAFVGIDWADQKHVWCLQKANSTQREAGELEHRPEAVEAWVGELCRRFGYGPIAVAVEQVKGALVYMLRKYECLHLYPVPSTMSASMREALYPSGAKDDPRDADVLLELLVLHRDKLRRLKPDNEATRRVQNLVEERRKLVEEKTAQLNRLTGYLKVYFPQMLEWFAKLDSKLVCDFLERWPSLEELQKVPSAELKKFFRHRRGRHGELTEWRMHGIGQATPAIRDRAVIEAKQTVVQVIAQLLRTLLEGIATLERKIAEAAEVHPDFFIFQSLPGAGAALAPRLLAAFGSQRDRYSRAEEVQKYSGIAPVTERSGKKKWVHFRWACSKFLRQSFHEWAGHSIAQSVWARAYYQRQRERGKEHHAAVRALAFKWIRIVFRCWQDRVAYDETRYLTVLAKRGSHLTSAFVDVAVSM

SEQ ID NO: 167856 - protein, 365 aa, unidentified
MQKISTMRTSGTNIFQGKLTIGLDLGDRSSAYCVLNEAGEIVLEHKLATTPEAMKQVFASMPRCRIAMETGTHSPWVSRLLTALGQEVIVGHAQKVRLITKSRRKDDRLDARTLARLARIDPELLSPVKHRSAQAQLHLTEIRARAALVSTRTALVNAARGLVKSYGERLRKCHTQQVGREITGELSMGLREALKPLLQEVESLNERIQEYDRRIEKMAKETYPETALLKQVKGVGDVIATAYVLTIEDPHRFRKSRDAGCFVGLQPGRRNSGESEPQMRISKEGDEYLRTLLVQGAHYILGPFGEDSDLRRWGQKLSARGGKNAKKRAVVAVARKLAVLLHRLWVSGEVYEPLRNSQKAMSTAA

SEQ ID NO: 167857 - protein, 379 aa, unidentified
MRGPVPVLSAVPARAFHPLLLGTNEGMAMITMAETRCRVTGGVDTHRDVHVVCALDERGAELGVESFPTNPAGYRQVLRWLRRFGEVERIGVEGTGSYGAGLTRYLHAQGVEVIEISCPNRQRRRSHGKSDPVDAIAAAKAAFSGDATTAPKTRTGNVEAIRALRTADRSARHARIKALNQMRALLLTGPEELREQFRGTTPWRMVRTAARLRQGDPATAGGATKYTLRLLARRVLELEAELKELKSILKPLVAATAPELVAQHGVGTETAGALLVAAGDNPERLRDERAFAHYCGTAPIDASSGTVVRKRLNRGGNRHANEALWRIVLVRMVSDPATRHYVERRTKEGLSKREAIRCLKRYVARELYPLLAQTAPCNR

SEQ ID NO: 167858 - protein, 309 aa, unidentified
MDVFVGIDVSKDRLDVHILPQDETFFVERNGRGLSTLVERLRPVLPSLIVVEATGGFESTTAAALASAGLPLVIVNPAQIRHYAQALGKRAKTDPIDAMVIARFAADIRPEVRTLPDEMTQFLADLVARRRQIVEMLQGERQREKRATIKRVKKSLARLIAALEKELAELDQEIDDTVRGSPAWREKEDLLASVPGVGPQTARTLLAELPELGSLDRKTVASLAGLAPYTRQSGRWKGKSMIAGGRKTVRSALFIAAMVACRYNPVLKAFYDRLLKAGKSKVLAITAVARKLLTILNAILRDKKPWQHA

SEQ ID NO: 167859 - protein, 340 aa, unidentified
MTITTIGIDLAKNVFAVHGVDQNGKTVLVKSRVTRAALPGLIAGLPPCVIGMEACSGAHYWARLFRQYGNEPRLMAAKFVSPYRMAGKSGKNDAADAQAICEAVRRPHMRFVPVKDESRQAMQCLHRPRQGFIEEKIATYNRLRGLISEFGFIAPQGTDALRHIVSAQKNSLPLQVQQCVDDLLEHVDRIEANITEYDQILPRIAKTDHRSQRLMKLKGVGPTTTCALVACIGNAHDFKNGRQLAAWLGLIPSQYSSGRKSKPGRITKAGDSYLRTLLVQGARSVLIGAEKRTDSFSRWVCSLVERRGYWRAVVAIAAKNARLCWASLHYGDDFRLYSAS

SEQ ID NO: 167860 - protein, 412 aa, unidentified
MDIVHYRCAGLDVSKRDAKVCVRVQAPDRARATSTVTTWGSVTNQILALRDHLITEHVTLVVMEATSDYWRPFYYVLEDGPFEVLLVNARHVKNLPGRKTDVSDAAWLAQLGAHGLVRGSFVPPEPIRQLRDLTRTRTAVVRERGREIQRLEKFLEDSGIKLSSVASDLTGVSGRAMLDALVAGERDPVVLADMAKRRLRSKLPELTEALTGRFNDHHAFLVKVHLNLIDEHSKAIEEITARIEEAMAPFASARDLLVTIPGVSTKVADVIIAETGADMTRFPTAGHLASWAGVCPGSNESAGRVKSTRTRPGNPYLKGALGIAAMVAARSKDTYFSAKYRRIASRRGPIKAVVALEHATLVAVWNMLATGETYHDPGGDYFTRRDPERAKRRALEQLQHLGYTVTLEPSAA

SEQ ID NO: 167861 - protein, 347 aa, unidentified
MSISMIGLDTAKSVFQIHAVNEAGKVEIKRKLRRSELIAFFEKQESCTVVMEACGAAHHWARMLTGLGHTVKLIAAEAVKPFVKKGKKNDAADAAAICEAASRPDAKFVPAKSVEQQGILALHAARSLLVKQQTMLANAMRSLATEFGVTVPKGIRKLDELMTLVDTDENIPKQAKQAITGLHDYCNDLSEGIETFEAEIVAHARTDETARRLATIPGIGPITASLIVATVVDISLFKTARQFAAWLGLVPRQNSTGGKTRLGRITKTGNREIRKLLVLGATSMLYRADGWNSAVGGWLRTILERRPVRLVTVALANKMARIAWAVMTRKEVYRSKGGVAVAPQATA

SEQ ID NO: 167862 - protein, 320 aa, unidentified
MSALSVTVGIDVAKAHVDVCVLGTHSDVQRFANDVDGHCALTAALLPLGAGLVVMEATGGYEAALACALQASGLPVAVLNPRQARDFARSMGRLAKTDAVDARMLAEMAAVLVHREDLARFVRPVADECQQWLAALVTRRRQLLAMLGSERQRLQITPRKLHPSIEAIIAAIKAQLDDLEAQMMDHVREHFSGLDGLLQSTSGIGPVASATLIAQLPELGRLNRREIAALVGVAPMSNDSGNRKGRRRVQGGRFEIRRVLYMATLTAARYNPVIRAFYERLKAAGKLPKVALVACMRKLLTMLNAMVRTGKPWDASLHRA

SEQ ID NO: 167863 - protein, 405 aa, unidentified
MTGADGVVLARRSPQVSVHDLGPCLDRALAQARAAGYAGLSVACEPTGSRWMAVQDLCAARGLPFVCVQPLVSHLAREQEDLTGDKTDEGDSGLIARLARELHCYEPERLEGAWAELRDEGRRRAQLITGATAAKQLIRDKLGLAAPALLETACEPFDSATWLASLEVVLERCGGDAATVTAMGYEAFAAAVAAVLPGWGGKRVGGTCRQLFSALGDSRGVARMRRAAMRRVRGALADLKYARSRRGQAEADMIALLSELGADAGRICEIPGLSPVTLAAILAETGDLHKYESSSSVVKHAGLSPARNESGSFRGQAKISRRGRPVLRLAAWRATWAVLRHCAVLAAKHAALTSRDDDSRLTPEQARVACAASLLRWIWSLTVHGTRWDARIAAGDLGHHRAMAA

SEQ ID NO: 167864 - protein, 414 aa, unidentified
MTNSLDKFSVLIGLDWASKKHDVCIQKSNTATRQFKVIKHSPEDIDDWLCSLHNEVKGPIAIAVELSSGPIVYALQKYSYVTVFPIHAATLARYRQAMFPSGAKDDPSDAELALDLMLKYPEKIKPLKPSSDASRTLNLLVEQRRVLVEDKRRAVNRLINALKQYYPLPLAMFSHRGSDLFCEFLLTWPTFKQLKRAREKTIRAFFSKRGGNAVANTDKRIKAINDAMALTEDSSVIEPYSLLSVSLCNQIILLNKSIKAYDVKIDGLFNQMPDADIFTSLPGTGPCLAPRLLAAFGEDRSRFSSAQEIQNYAGLSPVTERSGNKEWIHWRWQCSTFIRQTFVEWSAKSVHQSYWAGLYYEKQRAKGKAHQAAVRALAFKWARVVFKCWQTKTPYSEARYLKALKERNSSLLST

SEQ ID NO: 167865 - protein, 329 aa, unidentified
MSALVCGLDVHKDSTYATILSPEGKIVNQTRMENERVLPYLSHFKVSKVGMESSNQIAPLFRQLTAKGYDVVVSHPKKTRYIAEAKIKSDRVDSKAIAELVRLDALPLAYFPTGEIAKLREKVRRRAFLVRERVKLRVKVKSVLTYEGLKWPSEHGLFTKKGVEWLHELKIDSVESYLRILESLDEEIKLLSKELVGVAEDDEEVKLLMTIPGIGYYTAVLMKSEIGDISRFPFPERLCSYAGLVPSTHASGKTVWHGGITKEGSRWLRWVMVEAAQTHVHKYDTAITKAYNRIAEKRGKKIATVAAARRLLMCSYSVLKNKKPYYDQT

SEQ ID NO: 167866 - protein, 313 aa, unidentified
MKEEKTFIGIDVSKEKLDVGVRPRVDFMTFANTEDGISLMTGFVKSKQPELIVLEATGGLEMAALRSLVVAKLPAVCVNPRQVRDFAKAMGVLAKTDKIDAHVIARFADSVRPEIRPLKTEETEMLDAFNTRRSQIIIMLTAEKNRLTTASKWTKKDIERSIKGLEKALAKINREVENLIKKSPHWRHMDKILQSVPGVGPVMSLTILADLPEIGTMNRRQIAALVGVAPLNRDSGKYKGRRAIWGGRARIRSVLYMCVISGICHNPKIKAFYNRLINSGKKHKVAITACMRKLMIILNTMIKNDTCWNESGC

SEQ ID NO: 167867 - protein, 348 aa, unidentified
MTVYIGVDFHARQQTISYLTTEEGTIQHLVLLHDHPVTVRAFYAQFAGQRVVVGFESSGYAAWFEELLEELGCELWIGHATYIRQFAKRRQKNDRRDADLILELLHTGDFPRIHRYSRTTREMLQQLRYRQRLVKMRTMAMNMLLFMASSRGVSLRTQLQSKRGQAKLQQLALPATLGTQRDELLSLLQTLNEKISTIERWLEQQTKADLAVQRLQTHPGIGLLTSICLRYTLEDAGRFANTRKVSAFAGFDPMQDQSDERNRMGAISKQGSRWLRFYLVEAGQVAIRKDADLQRVYQRVARRGGHAKAKVAVARRLLVRAFIMLRDEIDYAEFQRRGVAARSSRGTA

SEQ ID NO: 167868 - protein, 425 aa, unidentified
MGFITPQHLTDSLPYHWFVGIDWGSQTHQVCVLDRTRRCVAEREVHHDGLSLAQFATWLSELSAGEPTQVAVAIEMPHGAMVEMLVERGFAVFAINPKQLARFRERHSVAGAKDDRRDARVLADSLRTDLPSFRAVRLSAPELLVLRELSRAEESLLQEFRRTANRLRDHLHRFFPQMLQLCPAADEAWLWDLLELAPTPAHAQLLSEKQVHQVLKAYRLRRRQAPKVLTCLQAPALPVAPGVAEAAQVHCALLVPCLRVLAEQLRSCAQQVNTLLSILTRPTAETGPSDVAIVQSLPGGGRKITTWLFAEAAGPLAERDYEALRTQSGVAPVTRQSGKRRQVVMRRACNNRLRHALYHMARVAMQCDAEFSSVYQALRAKGQRHGQALRNIADRILRILIAMLRDRTLYNPAQRPFLTCAQMSR

SEQ ID NO: 167869 - protein, 337 aa, unidentified
MDYFAGLDVSLEKTHICVLDRDGTVVHEATAPSSTAAITAALTAAPACTRVVFETGRMAPMLYHGLVELGVAIICIESRQAYQALKTLATHKTDRNDARGLAQLARTGFFKPVHVKSLPAHAVRALIMARKKLVGQRVTLENQIRGLAVVFGVRLPRGFSPVFVEQVLDMSDGIAGLAGAMRGLVAARQAVLGAIAAIDADMKKLVRASDACRRLMTIPGVGQLTALAFTAAIDDPSRFRRSRDLGAYLGLVPRRHQSGEIDYVGGISKVGDRRVRTLLYEAANVMLTRYKGELKLKDWALAIARRSTMRKARIALARRLAIIMHAMLRHGTEFQPA

SEQ ID NO: 167870 - protein, 398 aa, unidentified
MSRIWAGIDSGKGHHHGLVLDADGRTLLSRRVANDEPELLKLIGDVLDLADGRTVTWAIDMTGGEPALLLALLINHGQEVLYMPGRLVNRASDGYRGEGKTDARDAYVIADQARMRRDLRPIRPGDEAAVELKLLTGRRADLVEDCTRAVNRLRGTLLSMFPALERALEVTNTGPLRLLTGYQTPAAIRRAGILRLTTGLANRKVHNARSLAEAAVEAAERQHTAVSGEKTIAKLVHTLAEEVMALNEQVSEMDKLIEGRFREHELADIVLSVPGIGAVFGAEFLAAVGGSLDEFDSPDALAAFADVAPAPRDSGKVSGNLHRPITYHRRLQRVFYTSALVSVRYDPNSRKFYDRKRAEGKKHVQAVLALARRRVNVIWALIRDRRCYEVTPSVTEAA

SEQ ID NO: 167871 - protein, 342 aa, unidentified
MQISTIGLDIAKNVFQVHGIDAAEKVVVRKRLRRRQVLEFFKALPRCLIGMEACATAHYWARELTKLGHRVRLMPAKDVKAYVKRNKNDAADAEAICEAVRRPTMRFVRIKSAEQQGQLMQHRTRDVLIRQRTQIINALRAHLAELGLVAAQGNAGVNELRAIVTDEQDTRLPIDARASVIVLAAQLEALESVIGAIEKRIKMQHRSSEASQRVEAIPGIGVIGASAIVATVADPTIFRSGRDFAAWIGLVPRQDSTGGKQKLGPISKQGDRYLRRILVVGAIAVLRRAQENPGKYPWLTQLLARRPFKVVAVALANKMARMAWALLAHGGTYRAPELAETA

SEQ ID NO: 167872 - protein, 401 aa, unidentified
MVSDFRKGRYNLMKIYVGIDIAKLNHFAAAISSDGEIITQPFKFTNDADGFQLLVSKLESFDKNSLIIGLESTAHYGDNLVRYLVTELYQVCVLNPIKTCQMRKNNVRKTKTDKVDTYVIAKTLMMQDNLRFVSFFDLDMMDLKALGRFRQKTIKQRTRLKIQLTTYVDQVFPEIQYFFKSGLHQHAVYALLKEAPSPKEIASMHMTHLANLLKVNSHGHFTKEQAKELRVLAQKSVGANDSPISIQITQTIQQIELLDSQLEKIEAQMTDIIKFNDSVIMTIPGIGYINGGMILGEIGDIHRFSNPNKLLAFAGLDPSVYQSGNFQAKTTRMSKRGSRVLRYALVNAAWNVVRNNATFKAYYDAKRAEGRSHYNVLGHCAGKLVRVIWKMLTDEVEFNLE

SEQ ID NO: 167873 - protein, 391 aa, unidentified
MALYVGIDVSKEKFDACGIDGGGEKVFSITCPMSREGFEKLVRQWPKEAPLLIGMESTASYHIALFSYLTAKGYRVVIINPLLIANFAKLSLRKTKTDKKDAFVIAQFLLLRKEALAAHTEPPRLVELKDLARREERIADQITALKNDMKRILSVTFPELETIAGISTKSMLRLLAQLPSAHAMREAGCDAIAAILVQRSRGRRPAASVQTLMDAATMSVGVASPAKDLILKQEAALLIHLEEQTQEITKAIKNLSNEKMKHDAEILASMKGVGEKTAFNFLIEMGGDIRAFENDKKLIAAAGLDPTVYESGKYRGQSKISKRGNRHLRRAIWLMTTRTIISNQVFRAYYFKRRDEGLIYKMAVLATAHKLIRVMFSMLVNERRFEIERRK

SEQ ID NO: 167874 - protein, 365 aa, unidentified
MQKISTMRTSGKNIFQGQLTIGVDLGDRSSAYCVLNEAGEIVLEHKLATTPVAMKQVFGSMPRCRIAMETGTHSPWVSRLLTALGHEVIVGHAQKVRLITKSRRKDDRLDARTLARLARIDPALLSPVQHRSAQAQLHLAEIRARAGLVSARTALVNAARGLVKSYGERLRKCGTQQFRREMASGLSAELREALKPLLQEIESLNEGIREYDRRIEKMAKEKYPETALLKQVKGVGDLIATAYVLTIEDPHRFRKSRDAGCFVGLQPGRRNSGESEPQMHISKEGDEYLRTLLVQGAHYILGPFGKDSDLRRWGQKLAARGGKNAKKRAVVAVARKLAVLLHRLWVSGEVYEPLRNSQKAMSAAA

SEQ ID NO: 167875 - protein, 342 aa, unidentified
MAVTQLAQGGRTMKYIGLDIHKKNTQACVMNEKGKVLTNVRFPSNPKEINRFLDGIEASGPASIVMEATGFCMYIYDIIEARGHDVKVAHPLKIKALTAGRAKTDKNDAEMLAELLRLNAIPESYIPPKELRELTRFRQSLVRNSTTIKNQIHAILAMRGIVVPHVLRSSFSKKHIKWLRSLQISQLDDYLDIVELVESKITKADEDIGRICQGDEDVQRLKTIPGIGDVTATSFVAEIGDIRRFSSSEKLASYAGLAPLVRQSGEREWTGPISKHWNATLRYLLIEAAYSHIRFAKDSKLTRFFERKSQAKGTKKAIVATARKMLEVIYYMQKRGEAYHAH

SEQ ID NO: 167876 - protein, 341 aa, unidentified
MEEITTIGLDLAKNIFQVHGSDSDGRVLLRKKLRREQLLPFFAKQPACMVAMEACSSSHHWGREIGALGHTVRLIPPAYVKPFVKRQKNDASDAEAICEAVLRPTMRFVAVKSEQSQAAAIVFRTRDLLVRQRTQIINALRGHLAEFGIVVAQGPAHVSKLVMIVQDPGRSLPDMARPVLGVLVDMLSTLDERIKVLDKEIARRAKEDEVAHRLMTIPGIGPVIATALTALAPAASTFKRGRDFAAWLGLTPLQHSTGGKQRLGRTSKMGERTLRRLLIIGASTVVRWAAKKGSDAGTWLASMLKRKPPMLIRFALANKMARIVWALMAKGGIYRAPVVAV

SEQ ID NO: 167877 - protein, 398 aa, unidentified
MSSEKYIGLDVHQATISVAVLDSRGKLVMESIVETKAATILDFFAGLRGTLSVTFEEGTWAAWLYDLLKPHVDKLVVCNPRKNALLKDGNKSDRIDARKLAELLRLDNLKPVYHGETGVRMLRELARSYLTIVKDLSRVMNRLKALYRSWAIPCAGRDVYYTRHRAEWLGKIREAGVRRRAEQLYQQLDMLQHLRQQTRGELLAESRKHTITVRLRQIPSLGPIRSALAVALIQTPHRFRTKRQLWAYSGLALETRTTGEHRYVKGQLRRSKKQISIRGLNKDHNHDLKGLFKAAATRASVQPGLFQDFYQRSLAKGIKPTMVRLTPGAQDCSHYADSMEEGRKLRRDETKIASRLSVSGQEPSISSDLSGGGRWFLRCSGSRVSIPIACRRTSAAGT

SEQ ID NO: 167878 - protein, 483 aa, unidentified
MKNKQPEKTEEAPCRPTQGHWHEMNRKQRREMMRKIQSDDLRLEVVHPDAAGIDIGNESHYVAVPPTRDSESVRRFGCTTAELKEMADWLKQCGIRTVAMQSTGVYWIAVYDILEEAGLEVYLVNARETKNLPGRKSDVQESQWLMKLHTYGLLRNSFRPSQEIRTLRTYWRQRNDLVRAAGRHIQRIQKAMTQMNLQLANVLSDVSGMTGQAIIKAILGGERDPQKLAEFRDPRVKASKEEIARSLEGHWQEDLLFVLQQEQSGYEFCQKQMAECDQRIEQYLKQREDRSAGDNLPEEKRKERLRKKKKGNAPQFDLRAELFRMTGADLTQIDGVDVMTAMTILSEVGWDMTKWKTEHHFVSWLRLCPDNKISGDKIIGKGRLPTNNRATSALRMAASTLRLSNTYLGAQFRRLRTRLGAPIAIKAMAAKLARLVYRVLRYGMQFVDKGAEFYEAQHRTLQINYLKWRAAKMGLQIIEAPAA

SEQ ID NO: 167879 - protein, 347 aa, unidentified
MRFYTQTHQYVCGVDLHTKTMYLCILNHAGEIVLHSNLPAKPNPFLKAIKPFRGDLVVGAECMFSWYWLADLCLREKIKFILGHALYMKAIHGGKAKSDKIDSEKIARLIKGGNFPLAYVYPYELRPTRDLLRRRRMLVRMRSEVLAHIKLTHYQYNAEFFQKNINKQGNRAGIETLFSDPDVRKNIEVDLSVADHLQQEITQLENYIVRKTKAFDPRTYYRLQTVPGIGKVLALTILYEIGDIDRFPSVQSFASYARLVKCSQESAGKLYGYGGGKIGNPHLKWAFSEAMCLFLRESDRAKAYVAKLEKKHGKGKAMAILTHKLGRAVYFVIKRKDAFDEKYFFNA

SEQ ID NO: 167880 - protein, 341 aa, unidentified
MNHYAGIDVSLKYSSVCVVDTGGKIIRESTVASEPEALIAWFSSLGFEIARIGLEAGPQSQWLYAAMRQAGLAVELLETRHVRDAFKAMPVKTDRKDAQGIAQLMRLGWFRPVHCKSIEAQETRAILSARKLVQSKLHDVEMSLRGTLRGFGLKVGRTTPNRFAARISELVEGHPTLQVIATSLLAVHAVLLREFKGFEKRVRIMARSDERARLLMSAPGVGALVALTYAAAIDDPGRFTSSKQAGAHFGMTPKKHQSGETDITGRISKIGDKGVRTALYEAAHVILTKPVKGSALKSWAAKIAKRAGMNKAKVALARKLAVIMHRMLADRTPFNPAAAAA

SEQ ID NO: 167881 - protein, 330 aa, unidentified
MKFKWFIGVDISKKTLDATLYDKVCLKKSKHIKVSNNLKGFRKFIKWVEKQGSLLDELLICMEHTGVYGNDLAVFLDQKHIAYSMVPPLHIKRSLGLTRGKNDKVDSFQISRFCYLHREELRLSKYPSVTIQKLRSLINERERLVKMQTTEKQVLKELKAQSSGSTIERLKARLSHFAKDINSIEREIEQIINADADIQKNYILTRSVTGIGLVNAVLFIIYSNNFHGFADARKYACYSGVAPFENSSGTSIRGKTRVSHLANKRLKANLSNGARSAVQNDPELRLYYKRKANEGKEHGIIMNAIKFKLITRVFAVVNRGTPFVKMRQAG

SEQ ID NO: 167882 - protein, 421 aa, unidentified
MTQPYVNTEGDVLVAIDVAKKQNAVLIRLPDGTRKKLTVTNNLADYRELSNYLKKLEVPCKIGFEATGNYHRALAYYLQQRGFDLELISSVAAARTREAMFNSWDKNDPKDAQVILHMLQTGLTQTYHDPLVHRINDIQELSKTYCQVSLRKTRVQHSIMTHYLPLYFPEASKYFHTSRAEWFTSLLMTFPNPASVLKYSREGFIKAAQAVSGRKVNKAAWLKDFYETARESIGLPVPEDSEAIRMFRLVLQEHQDLCRMRRAIEARAELYLKDNADYLRLRTIPGIGAVIALIILAEAGDLRRFSHYKKFLKYCGLNLSTQQSGAYRGMSKLSKHGNSRLRYAFWIAGTSAIRMRENTFRKKFENYIKTDPQNPDLKRKAYTAVAAKIARVAYGLVKAGCDYRCYHEPSIPSGIILSMGR

SEQ ID NO: 167883 - protein, 423 aa, unidentified
MKLAAEQPFTALVGVDWSDKKHDFCLQGAGTQQREQGVVPHRPEAIDQWARVLHQRFGGPIAVCLEIAKGPLVHALQRYPFLVLFPVNPATLAKYREAFVPSRAKDDPSDAEIALELLVYHRDKLQALKAQSAPMRALSTLVEQRRNLVGDKTRITNRLCSTLKEYFPQALDWFEHRDTMLFCDFLQRWPSLKHVKRARQTTLRSFFFAHNLRRSELIEERIGAIRCASALTDDVAVIGPCQLLVQALVSQLRVTLQAIEAFDAKITELAKRLPDYALFAALPGAGAILAPRLLVAFGEQRERYASAAQLQQYAGVAPVLERSGNKCWVHWRMACPTFLRQTFVEWAGSTIPRSFWASAYYQRQRDKGCSHQAALRALAYKWIRIVYRCWQTRTTYDESAYLQALKRRGSPLLAAVSAAPRSA

SEQ ID NO: 167884 - protein, 314 aa, unidentified
MKMAMLSFCGIDVSKDRLDVVVLPEGWFFSVSNDTAGWAELVVRLRPLTVSAIGLEPSGGYERGIIRALLAAGMSVRRINPNKLRQFARARGVLAKNDRLDARLIAEYVAIMPTRVVQRDAAVERLAEIVTMRRQLCDEHVAAENQAAHLEDAMLRRLSKRRQTRLEADIRLLDKRLAEMVAANVALAQRYELLTSMPGVGPVLAFTLIALLPELGKMTRKQIAALVGLAPYDFDSGKLKGHRSIYGGRMPVRNVLYMAALSASRYSPALKAFHNRLADADKKSKVIIVAVMRKMITTLNAMLRDNAAWQLQSA

SEQ ID NO: 167885 - protein, 405 aa, unidentified
MKVIIERSCGMDVHKDSITACIITPEGKDTQTFSTKTVFLIKLIDWIKEHGCTHVAMESTGVFWKPIVNLLEAESIKFLVVNAQHMKAVPGRKTDVKDAEWIAELLRHGLLTSSYIPDRNQRELRELVRYRRSLIEERARQHNRIQKVLEGANIKLSSVISDIMGVSSREMLHAIADGEDDPEKLASFARRTMKRKKNDLELALRGYVNPHQRLMIKTILAHVEFLNEQVEKLDREVAHRLTSFQEDVERLDSIPGIATRMAEQILSEIGTDIEKQFPSAAHLCSWAGLVPGHNESAGKKKSSKSKKGNKYLKSALTEAAHSVRGSKNYLGALYRRTAARKGKKRAAISVAHAMLRIAYYLLTRKEMYVDLGEDYFEKQKEHFIVRHSVRRLEKLGYTVTITEAS

SEQ ID NO: 167886 - protein, 407 aa, unidentified
MLFVGDDWAEDHHDVCLQDAQGRVLAARRLPEGVAGITRLHELVAGHLDGDDPSQVVVAIETDRGPWVRALVAAGYRVYAVNPKQAARHREVVAVSGKKDGTFDAATLADMGRTRRHQLREVAAGSDEAEAVKVAARAHQKLVWERTRHALRMRSALREYFPAALEAYGPLTLTGTDTLELLAKAPEPAAAARLTIAQISAALKRARRRDVAGKARQIRAALREQHLGQPEIVTEACAAGVRASAAVIAVLNEQVKVMEARVESFFRRHPDAGVYLSQPGIGVITGARMLGEFGDAPGRYADVKARRNYAATSPLTIASGKKKTVHARFIRNDHLVNAMHDQAFAAISASPGARAYYDELRSREIDHTDALRRVANRQAGILHGCLKTGTGYDEHTAWGHRSQPAAA

SEQ ID NO: 167887 - protein, 343 aa, unidentified
MGEVSTIGIDIAKSVFQVHGVDDAGAVVMRKRVGRSKVLQFFGSLSPCLVGIEACPSAHYWSRELQALGHTVKLMPPTYVKAYLKRSKNDANDAAAICEAVTRPSMRFVPIKTQEQQTGLMLHRTRQLLVRQRTMLSNAIRGHMAELGIISAKGRNGTAELLQIVGDVADDRIPPVARFCLDLLARQYLTLNAEVYAVDKRIHAWHRACEESRRLEEIPGVGPIVATALVAEIGDWRAFRSGRSLAAWIGLVPKQHSTGGKERLGSITKQGNRYLRWLLVTGAMAVIRYARAHGTKRPWLTRIMDRRPAKVAAVALANKIARMAWAIMVRAERYKEPKLLLAA

SEQ ID NO: 167888 - protein, 267 aa, unidentified
MKMVTVGLDIAKQTFQAHGVDCKGRVVLRKRLRRAEVCSFFAGVEPCLIGLEASGGAHYWFRVLSRVGHTVRLIAPQFVKPYVKSQKNDANDAEAICEAVSRPSMRFVPAKKIEQQDLQCLHRVRSRLIGCRTQLVNQIRGLLAEYGIVIPQHVAQLRRHLPALLEDDGNELTISTRVLFHSLYEELVELETNISSADQRIERAFRENAECQRIGAVEGIGPVTATAVVAAISDGHAFRNGRQFAAWLGNPVEGERNSGLKPNAIPL

SEQ ID NO: 167889 - protein, 397 aa, unidentified
MTSGFNVFCGLDVGKDTHHATGLTADGMRVHDAALPNTEAGLRTVFDQLAQHGSVLIVVDQPASIGALPVAVARDCGCEVAYLPGLAMRRIADLYPGQSKTDARDASVIAEAARTMPHTLRQVDVGDEAVAELQVLVGFDDDLASEATRVSNRIRGLLTQIHPALERVLGPKVQHTAVLEVLSHLGGPEGIRTSGRRKLQTIATRHAPRKGADLAEAIWTALDEQTVTVPGTRTAETVLSKLAESLKTVLAQRETTANDVERILDAHPLAKVLTSMPGIGVRTAARILLDVGDGSAFPTPGHLAAYAGLAPVTRRSGSSIRGERPPKGGNKQLKRAFFLAAFAALSDPVSRAYYDRKRAQGKRHNAALICLARRRCDVLFAMLRDKTYYQRPTPHVT

SEQ ID NO: 167890 - protein, 370 aa, unidentified
MKHTRFVGLDVHKDQISVAVAESGRGGAVEYLGQITNDPAAISKLCTRLARPGATLSFCYEAGPCGYGLHRQLTSLGHRCEVVAPSLIPTKSGDRVKTDRRDATMLARLHRAGELTSVWVPDAAHEAMRDLIRLRSTVRQIVTRARQHLQGFLLRHGRSQGAARAWSVAYRRWLSTLAFDHPAQQIAFQDYVDAVSDAERRLKRVEEQIQRLLADWTLRPVVDALQALRGIALINAVVLVSEVGDFTRFATPRQLMAYFGLVPGERSTGRTVRRGGITKTGNSHARRALVEGAWAYRMKPRVGRHKVDRIEALPKPVREIAWKAQVRLCARYRRLTALGKTANVVTVAIAREMVGFVWAIACTVQSSKAA

SEQ ID NO: 167891 - protein, 382 aa, unidentified
MNSTTKFAATIGLDWADQKHDLWIQPADGSKAEHRQLEHTPEALHEWVAKLRERFGNRPVAIGIETSRGAVISALMAYDFIVFFPINPKALKDYRAAFAVSGAKTDRVDASLLEEFVRLHGDKLHALEPDTELTRKLAGLVQNRRLLVDERTRLVNQLHAALKTYYPLAQSLLGAQMNTSMAAGFLARWPELQSLKKATVQTLRAFFYKHNSRGAQLMEERLEAVQKAKALTTDPAIIEPARALVCALAAMLKPLHKVIAFLDKQIELAMDQHPDAAIFRSFPSAGPALAPRLLVAFGTNRARFASAAEVAQFYGLAPVVEQSGNSKTVRMRYRCPKFGRQTFHENAAVPSARSLGLIVITPNKKPGTMTNTIWLVALWPSS

SEQ ID NO: 167892 - protein, 345 aa, unidentified
MSNNIHFSCICGIDIAKKVMQVFKVTSDGVVTNTSVSRKDFLEHFRNIPPALIGMEACATSQHWGRELQGLGHTVKLLSPKAVKPYVKGLKNDRNDAEGIYRALIMGVREVSIKSTAVRDLSLLQTMRAKRQRDKVATINHIRGILAEYGLVMGKSVRAFLSNAGTLIARLKESETTSQLVISELEKLLKEVKEIVSRIEELESSIKKIASENKNYDLFRSAPGVGPITAAMMVVLLCNPTVFKNGRDFAAYLGLAPMSFGSGGRNQVTGIPSKYRCHNEARSLLVQCAHSITRLKYKSDWVVSILSRKPKKVAIIAIANKLARQLWVMAKKGDKFEKRLVLAAV

SEQ ID NO: 167893 - protein, 400 aa, unidentified
MRERKARVWTGIDAGKGHHWAAVVDETGATLWSRKVDNDEAAILTALGEILDLADEVRWAVDISGTSSALLLALLAAHGQRAVYVPGRTVNRMSGAYRGEAKTDARDAYVIAETARHRNDFAAIDVPAQLAADLALLTGHRSDLVADRTRMINRLRDVLTGIFPALERAFDYSSQKGALVLLTGCQTPGAIRRRGRARLTAWLANRSVRSADSVAATALRAARAQQAALPGEEIAAQIVADLAGQILALDDRLKRIDKQIRETFCSHPQAEIIESMPGMGPTLGAEFVVAAGDLSAYVDAGHLASAAGLVPVPRDSGRRTGNLHRPKRYSRRLRRVFYLSAQTSIIRDGPNRDFYLKKRGEGCKHVQAVIALARRRASVLWALLRDGRVFTSAPPVTQAA

SEQ ID NO: 167894 - protein, 405 aa, unidentified
MIAGQERSVTGGVDTHGDVHVAAVLDSVSGRLLSTGEFAADSVGYRCLLAWLAGFGSVDAVGVESTGAYGAGLTRYLTGMNVLVVEVDRPDRKARRFDGKSDTVDAEAAARAVLSGRASGTPKSRDGLVEAIRAIEVVCHGAVRDRTRAINQFKALLITAPAPLRERLANESLSRQLELARRFRDHDCPVESQTRFALKHLAAKIKFLNEQIDELETRMSLLVGQAAPALAGVFGVGPHVAAKLLTTIGDNPQRITSEAAFAKLCGVCPIPASSGKTIRHRLNRGGDRRANNALYTIVVVRMRYDQRTRDYVQRRTTEGKTRSEIIRCLKRFVAREIYQVITNPPTDIPNGTHLREIRTRQQISLTTVASALDTAPIRLSRLERGLDHDNDLAKRAHQWLTPNAL

SEQ ID NO: 167895 - protein, 348 aa, unidentified
MYYAGIDYHKHYSIVSIPNCEGSIVREQRVEHAFPELFGGLFKECPEPVAVVYESTINWSWLYEILQQLASVSSITLANPFKVRLIAEAEIKTDKISARALATLLRLNVVPACHIPDAQTRRRKEVLRQRSYWVKTRSAVRCRVHKILGNQHDLSMPQVSDRFGRKERTAMDKAILREPDKSLLSQNLEVLDALDDQIAADEKLIRQDGKTDRAVKILSSMPGIALILANVIATETDGIERFGDSPRYTSYAGLSPTVHSSGGKTHTGRMRQQCNHWLKWAYIEAAWVAVGCSAYFGGLYRHHRNRGKQANTAITIVARRMCHIAYLLLTEDRMYKELPFSPAALAKG

SEQ ID NO: 167896 - protein, 422 aa, unidentified
MSYCPVAGIDVSKRFSDMCILSPDNKIFAQEKIYHDETSINRANALLQKTERLFFSKPVIVMESTSHYHLILFQFFSEHGYDVIVVNPLQSNSMKDFSIRKRKTNRVDAFKLAMMYRTKTLRPSQIPQTATRALRQLCRHRAELLNDVSSYKNRLTALLDQTFPGYDKVFSDVGGVTSCAVLVRFPTPTILLVEEESELVEVIAAASKSGYSFAKKKAGLLISAAQKAQTLGIHSCADETLIVCTIQMLRTLSESVFQIEKAIDNLLAQVKEVRNNVSLLQSIPGIGSHSAALLLGEIGDFTLFKKPKQLAAYFGLDPSERQSGTFRGTKNKLSKRGSPYARAALHMGVVNAICKHGKKTAPNPVLLSYYEKKCKNKPAKVAQAASMHKLVFIIFAVLRDQKPFELKTPEQHAFEQGFVKAA

SEQ ID NO: 167897 - protein, 461 aa, unidentified
MRETLGTGEPEYAAYVALDWADREHAWVLEEAGGGKRESGKLKQTPESIEAWAAGLATRFGGRPIAVGLEQSRGALIYALQAYGHLELYPIHPSTSANYRKAIFPGGRKNDPVDADLLLDLLTRHRDRLRRMRPDHEETRKLQLLTEKRRQLVDEQTSETNRVTDLLKSYFPQALRWLDDLSSPLAVAFLQRWPTLQQVQAEEADCVRKFFYEHGSRSKERIELRLKEIQEARPLIEDRAIIEPAILMVQALLEVIAALRRGIKTLQDACAAVFASHPDAEIFASFPGAGPVLAPRLLAAFGSQRDRWENVVEFQSYTGIPPITEGSGKSLDIHFRWRCAKFLRQSFHEFAEQSIQQSEWAGAFFHHQRDVNHLDHQAAVRSLAYKWIRIMYCCWKKRTPYQESFHQERLLTRPRSSENPTTVAAVQKKSGAPTNGRPGSNRVHFQFKKVAGFCKLSAATS

SEQ ID NO: 167898 - protein, 391 aa, unidentified
MLPTRLREQNESDKILIKGDSMSVRRILAKTIDTDLEYEAIGIDLAKNCVSAALLTTDGEVVCIDRLDYSELEKSAQALSSTTFAMEPCTEMNYLVQKLEAWGHRCLVIGGKNVQNYIENHFSGQKTDLNDAQALAFLAQDTQLRTIKAKDVEQQKYASLTTLREQYIKQYRQTIVSLKGICQAWGLNISKGISGKARLKDLIENHAAFPEELKESLVDMVTHAQTAQKALNKITKTLEELAKSDKVCQLIQTIPGLGSICSCRLRATVGDIKRFKSPKDFPAYYGLVPRSIATGHNERKGKITHRGDRTMRSLMVQAAGSLVNMATKGKLKSKQLTKWILKKQKEKMPWGKLVCAVAAKLLRIVRAVLISNKPYNSKIAGVAKCSLPKGS

SEQ ID NO: 167899 - protein, 392 aa, unidentified
MFYLGIDIAKVNHVASLINEDGSILVKAIKFTNSNEGLQKLIDSISDYDQSQIYCAMEATGTYWLSLFSALTDKGFNVSVFNPYQIKSFRGAYTNRKQKNDVIDSILIANFLSFNGSKQTSLPNDDLLALKNLTRYRSNLVSNISKAKTQVTGILDKVFPEYSDLFSDTFGEASKQILLNCPTPNEVINFNTKKLANLLKKASRGRHSTDKVREVKSLAKNSFGIKFTGDACSFEIKQLVNQIIFLENQAHELDFKIKDIYSKLDNHLQSIPGIGEVTAPIILAEIGDINNFSTPSKLTAFAGIDPSENQSGNKKSTDEKTSKRGSPYLRHAIYLAAMVASNNDPIMHDYYIKKRAEGKHHYVALAGVERKLLGIIFHVLKENRDYRPSKSS

SEQ ID NO: 167900 - protein, 355 aa, unidentified
MGGGPNNPGSLKAVGELGAPLIVPLNPNSRLGRKARSPLRQGRVAMESIIVGIDVSKDRLDVAVRPSGEAFTVERSPRGLEELISRMRGLSPAIVALEATGGYETIAAAALAGAGLPVVVVNPAQIRAFAKALGQRAKTDPIDAAVIAHFAEATKPVPRPLPDEATRLLADLVARRRQINEMLGAERQREQRITIPRLRKSISRLIRALERELATLDHDIDDAVRSSPVWRDKENLLSSVPGVGPVISRTLIAELPELGTLGRKEIAALAGLAPFTRQSGKWRGKSFIAGGRTAVRSALFMGAMVAKQHNPILKAFFDRLVAAGKPKMLALIAVARKLLTILNAIIRDSRPWQIA

SEQ ID NO: 167901 - protein, 348 aa, unidentified
MLHAGLDLSRKRLDYCLLTEDGERVGIGAAPPDADGLVSFARRVERDHGVVEVRAAIESMNGARFVHDALERCGWEVEVADAVKVKGLAPLACKTDKIDAWVLAELSRRELVPAIWLPSFELRGERERARWRLFLVRKRSSLKHRVHAQLLAFGHACPVSDLFGRSGRELLGRLEFPEPWRSGVLAAVGMIEDLDAQITEIDRELKAAGADHRYIPLLMSAPGIAWVLGYTIAAEIGDINRFASPTKLCGYTGLCPKTYQSGSKDRRGHLTHAGPKYLRWALIEAAQHAGRHPLYRERYQQTKRRLGKQRGPKVAQVDIARRLAEAIWHMLTRNQPFAPAGATSALAA

SEQ ID NO: 167902 - protein, 338 aa, unidentified
MNKNSNKRFQVGVDVSQDTLDVAARTDSGGEQRTAQFANTRTGHHQLITWLTKGGRSARVVLEATGIYSLDLALALDAAQRIEVMVINPRAARKFAEACLQRSSTDATMATALREYAARMEFVTWTPPAPQVREVRAIARRIAALTLEKSRELNRQHAAGATADTPAVVLNDVAVNVRHLQRRIDDLERHAVTLLTADPELQPLYQRLLSVCGIAETTAIQLLGELLVLPADMSAREWVAHSGLDVRHVNSGTSVHKAPRISKQGNAHIRRVLYMPALVASQREPHVRAFYAQLLAAGKKPLQALVAIMRKLLHAIWGMLKTNTDWDGAKFRKLPEAA

SEQ ID NO: 167903 - protein, 408 aa, unidentified
MIFVGVDWAEVHHDVCIVDEGGDVLARKRIPDALAGVQQLHAMIAEHLGEENDAESVIVGIETERGLLVTALVAAGYQVFAVNPLAASRYRERHHVSGAKSDPGDAKVLADLVRTDRHNHRAIAGDSVLSDAIKLLARNHQNTIWECQRQVNTLRSALKDYYPGALEAFGIELSGPDAVAILAIAPTPTKGRALTKARIETALRKAGRRRLLEERVTRIYEILRREQLAQPALLEDAYGVTTEATVANIAQLNASIAKLEASLSTHFEQHPSAKVILSLPGMGTVLGARVLGEFGDDPNRYADAKSRKNYAGTSPVTKASGKSRVVLARHSRNKRLASALDQWAFSSLLPSPGARSYYNELKGRDKHHRKAIRQLANRWVGILHGCLETDTPYDEAIAWSHHRSDVAA

SEQ ID NO: 167904 - protein, 339 aa, unidentified
MYPFYLGIDLHLKRTYMVLMDAKGEIIDKGRISNQEITKYLQEKVPQETYAVLEATRNWPFMYDLLNEHVQKVDLVHSKGVRAIANAAVKTDQIDATTLAHLARMNYIPKAYAASKEMRDLRQLLRHRGWMVNQRSKAKNRIHATLAAYNLVSPVTDLFGVAGQEYLHEVMDKELRPSARQVVEDHLAMIDHLTERIHALEKNISLNERQDHIVNILKSMPGVGRLIALILLAEIGDISRFRSPKSLCSWAGLTPRVHNSDTVVQHGHITKEGSRYLRTAMVRADTASSCGSPKWYRVHEHMALRCGRRAARVAVARRLLTVIYYMWKKDRPYQENYGQ

SEQ ID NO: 167905 - protein, 315 aa, unidentified
MDSIIQVAGIDVSKDKLDVHVLAGNLAFTVRRDRRGLTNLARRLRKAGVGAVALEASGGYEHPVIEELEAGGLIVRLLNPARVRLFAQASGVLAKTDPLDARVIALYCQHFPDKGLTRRPENARRLGEFLSLRTTLLKMIALARNGLEHLSEPILRAKAECILADAAAQLEEVDAGMAKVIAEDQAMDRKARLVRSLIGAGPVLTANLLARMPELGSTGRRQAARLSGVAPADDSSGKANRRSRIVGGRDHLRPVLHMAALAAIRSNAVIAAFASKLTAKGKSKRLVIAACARKIIVILNAMLRDQTQWRNPKHP

SEQ ID NO: 167906 - protein, 363 aa, unidentified
MQTITTIGLDIAKSVFQVHGVDAAGEVVIRRQLKRRSVLAFFQKLPPCLVGIEACASSHYWSRELQALGHTVRLMPPAYVKPYVKRQKNDAADAEAICEAVTRANMRFVPTKTPEQQSCLMLHRTRHLFIRQQTAVINSIRAHLAEFGIVAPVGRRGVTELLHVVADPSDKRVPEVARGCLAALGTQLLRLKQQIVKFDRMIMAWHRSNQTSKRLHYIPGVGPMLATALVASVADPRTFRSGRNFSAWIGLVPKQHSSGGQGAARQHQQTGGPLSAQPVRGRSTRGHPLCQGPWHRTSALAHGVVRPAPGEGRRHCTCQQDCAHGLGHDGQGRALQTTRGTCAVNEIAPGNRRDVKVGRANST

SEQ ID NO: 167907 - protein, 430 aa, unidentified
MKSNTQNTKIEAVTEKTLVVGIDVGSEFHYARAFDWRGIEFSKKPFKFSNTEPGFIEFKAWILHIQTEHDKDAVVPGMEPTGHYWFNLGKFLQDNGMKPVLVNPHHVKKSKELDDNNPTKNDRKDPKVIAGLIKDGRYSYPYLPDGVYADLRTASNLRFQMQSELTRIQNRISRWFSIYFPEYKDVYGNPDAKSGMMILKQAPLPEDIVTLGVEGINRIWREAKLRAVGIKRAQTLFEAAEHSIGSREGSTAARLEIRILLEDYESRAARLQEIMTLIESLVKQIPMAEKLMEIKGVGIKTVSGFLAEVGDISRFDNPKQLQKLAGLAIKENSSGKHKGETTISKRGRKRLRYLLFEVAMSLVGKNAEFAQLHLYYTTRQINPLKKMQSLMAVACKLIRIFYAMLTKQVDYDPQKMISDIRRPEIYQQAA

SEQ ID NO: 167908 - protein, 411 aa, unidentified
MRRVIGMDIHRTFAEVVFWEEGKLRPAGRITMTRAGLEGFGRSLGKDDEVVIEATGNAMAVVRVLSRYVERVIVANPLQVKAIAHAHVKTDKIDAGVLASLRAADFLPEIWLPDADTERLRRLVARRSQVVRHRTQIKNEVHAILHAHLIPPCPHADLFGRLGRTWLARQVVPDDERSAIDRHLRELDRLSEDLRILDREIAQTVINDPAVKRLLTITGVNLIVAAGLAAAIGDVRRFSEPQKLVSYVGLNPRVRQSGLGLAQHGRISKRGRSHARAMLVEAAWAASKAPGPLRAFFLRIRSRRGHQIAAVAVARKLAVLCWHLLTKGADYQWARPALVANKLRAMELQAGQPVRKGNKPGPAHAYNIKELRDREIELARYAEQAYERFVSQWQRSGKTKRRTGATGEERL

SEQ ID NO: 167909 - protein, 418 aa, unidentified
MFKIIKKNCCGLDVHKTWIFACIGITDSKDRTEYKQARFSSFTKGLQELCDWLAKYHCKDVCMESTGKYWIPVFNVLEKNNLWVTLSHPKYTKPLKGNKTDRKDAKWICDLYMCGMVKPSFIPPADIRQLRDLVRYRFKLTCMITGEKNRAQNCLTVSNLKLDDVFSDVFGKSSRSITEHILAHPGENFDVTPFVDKRCKTPIEEIQSAVDGAVSPEQAVKLRQCLDHIDELEKHIKNVEQEILRLSEKYSVALDLMRTVPGFDKNPMTAIQVLSEIGGDMSVFPTAKHLVSWAGCCPRNDQSNKKIKSTRISRAGSYFKPILVQVANGLLRSNKHPEILTRYRRIKARRGHKKAIIAVCRMLLTAIWHILSDLKPYTPDGYLEPRPVNEAKTLTTSQALNLLRQRGYTIKDDPVTAA

SEQ ID NO: 167910 - protein, 366 aa, unidentified
MDKEYIGIDLHSTQVTVHRIIIGEKGEIERRKSQYPMERMETHFIASLHPGCAVCVEAGSGSHTLARMIVAAGARAFVVNPLSMPQIFMTAKKTDVIDAKKLADCLKQHLENKDPNDGFPEVTVADEDTQRLRMLISQYQRVNAEMTALKNNLYALFRQWLVQVDKGCIIERLDNYLEHPRLPPEVGIIARQEKHRYEELEAFKAELRSMIESIGVIRYREQVGLLIGVSGISVFGAVCIMADIITIDRFRTSKNLVSYLRAAPRVDASNNTIHIGRLNKAGRKMAFEILLQSVTHLVDGNPNLLRYTKHAVGKSKNKIRAAVVGRTIRQIFYILKNKEPNWFLQEGTFAIKKRQFERILVSQKIA

SEQ ID NO: 167911 - protein, 392 aa, unidentified
MSYALFSIDIASRKHDCCIIGEKREVLAPVFTFENNAEGYDCLLKNVRNFEKDYSQVRIGLESTGHYGNNLISFLKTKGFEVVVFNPLQVDLYRKAGTLRKTKTDKADAKFIAQMLLTTENSNRVDPKPEIPELKALVRHRSRIKAMRTKLRVSVSRLVSVLFPELSGAVSKIHQTSSYALLLEMPTAKAIADCHLTRLTNLLAESSKRRYGKDKALEIKTLAAKSVGTNSRAVGFELQQTIRLILNISDELVALDREIKALMLKINSPILTIPGISYNLGSIILSEIGNIENFANPSKLLAFSGLEPSTHQSGNYLATRTSMVKRGSPHLRWAILQAARLISHNDPTFRAYAQKKEQEGKHYYVVLNHVGKKLLRVIFHMLKNNMEFVAAA

SEQ ID NO: 167912 - protein, 427 aa, unidentified
MKAVVERCAGIDVAKNVLNVCVMTGAADLEPEVELGKFGTFNAELNRLRQWLLETGCTHVVMESTGSYWKPVYAALESSGIQVILANGEDVKARRGHKTDWNDCQFLANLLRHGMIRASFIPPQAIRDLRDLTRRRRQLIGDATSERNRVQKDIKLGSVLSDIFGVSGQLMLEKLLEGEPNMEAIANLAQRKARMKIPEIVQALEGHRLRDHHRRMLRLSLEHMAFLEQQISAIDAEALQLIEREGYQTSFDLLQSIPGVQQISAAALLAETGADMSIFPSEAQFSSWIGVCPGNRMSAGNNKSGAISRGNRWARTALVECAWAAASKKDCHLKERFRKLCVKGRKPALIAVAHSLAVIIHRTLNTGIPYQEPNQPAPDERKRQRLIRHYVRRLGKLGVAVHSLRPESATHHKSSAGTRTHRVHHKE

SEQ ID NO: 167913 - protein, 429 aa, unidentified
MEEVDDAELVVERIAALDLGKAALEACVRVPSPHRPGRRMQELRGYGTTTAQLLEMVAWLQQWGVQRVAMESTSTYWKGVYYLLEAEGFQCWLVNAREVKNVPGRAKTDRADAIWLAKVAERGMCRPSLVHPPEIRRLRDLTRYRRALVQDRTGEQQRIEKLLEDAQIKISAVLSELHGVTARAMMEALIAGQRDPRALAQLAKGRARKKTAQLEEALTGFFTDHHAAILRMMLDNTDRISAQIAALDARIEDEIGPFSAQATRLADIPGIDTVAAAELIAEIGVDTTRFPSDAHLVSWAKFCPQTHESAGKSRNKGRGRGNPWLAGTLGRIVFANSRADTFLGARYRRLARRRGKQKAIVATGNSVLTVVYHLLSDPDASFIDVGPGYYESRINKHRRAHDLATQLQALTGQHIVIRDGKAIITDAAA

SEQ ID NO: 167914 - protein, 372 aa, unidentified
MGHHTEAFVGIDTSKLRNAIAIADGGRGGEVRYLGEFPATEAAIRKLSAKLAAKYRDLTFCYEAGPTGYGLYRLLKSLGHECLVVAPSLVPKKAGDRVKTNRRDAVSLAKLLRAGELTAVWVPDERHEAMRDLSRARQAVKKDLQGKRQQISSLMLRLGRIYPGKTTWGPAHMKWLMAQKLEHREQRIAFEELLEGVRQESERMERLEDAIREVVPEWSLAEVVAALQAVRGIDLIAAVGVLAEIGDLSRFQNPRELMGYLGLVPSESSTGDKVKRGGITKAGNGRARRILVEAAWSYRYPPRVSRDKQPKVEAAPRRVREIAWKAQTRLCGRFRSLERKGKRRTVIATAIARELSAFIWAINRELMAHRQA

SEQ ID NO: 167915 - protein, 423 aa, unidentified
MKNSAARKRKQVPEGYLIIGVDPHKKKHAAVAITQDFTLRDRFKFDNTREGLEFLLRRVRTGMVKSDCRGVMFAIETGGHYWRNVAYYLDGQGIPFRFINQFTLKRRREGKDLNRRKNDYRDSEVAAQLLCTGEFTESKLPQGVYAELRTAHSAYRRLVKERTRITNLVKGLLDALFPEFTQVFKDPCALTALSVLSICPIPRVIAGMTEDEFMATIEAQHKGRLMRKKLRALHYSARASIGIDAGARSVSSEISFLVDKLELIRQHIRLIERPLVSLVDETEEGKYLLSIRGLNYIAVAGLLAELGCFKSYRSAKQMIKMAGSNPTESESAGKKRSRTPMSKQGRPVLRYCAWTSVIPMLRFNPDFRAWAKQRRERPAHANPLNGREVVGATLNRLLRLAFAMVKNQTYYQVSKPELTLVAV

SEQ ID NO: 167916 - protein, 369 aa, unidentified
MESTKTRGPQQGAALMKRTTKYVALDVHQATTVASVREESGRVIARSVLPTDHASITEFMRGMRGAVHVVFEEGTQAQWLHDLLAPVVDRVVVCDRRGSPRQGNKGDQVDADQLSELLRRGGLRAVYHGSAHRAVLKELTQTYRNLVEDSTRVMLRLKALFRARAIPTPGTTVYQARARGQWLAQLADRGARFRAEALYAELDVLRRLRPRAKAAMVTEARRDPAWPVLRTIPFLGPVRVALLLATMQTPWRFRTKRNLWAYAGLAVVTRSSADYTILAGQAVRRRRPPLTRGLNRNHNRVLKDVFKGAATAATARPGPLQDFYHSVIARGTREELARLTLTRKLAALTLRLWKKGERYDPTKLTMPAR

SEQ ID NO: 167917 - protein, 333 aa, unidentified
MSRFWVGIDVAKRKLDVALLDEAGKVKSKVFANDPAGFEGLMTWLKERGADAASTHVCLESTGTYSDGCATAFADAGWKVSVVNPSLPKDFGKSELKRNKTDVIDAGLLARYCSKMEPPAWQPPPLEYRKLRSLVERRQALQDIHQQEANRLEATVEAAARASITEHLSWLEARLVELEKDIDDHIDGHKETLGKDARLLASIPGLGKTTAAKVLGLLGDLRRFDSGKALAAFIGVTPRRHESGDSVRGRSSISKVGHASVRHALFMPTLVATRHNPKIKAFRDRLVAAGKPKKSAVLASMHKLVHIMYAVVRKGVEFNPRMGQLALDAQDGI

SEQ ID NO: 167918 - protein, 407 aa, unidentified
MEAIHQRVAGIDVHRMQHTVTILVEQADGTLLQETREFGGFKRDMRALVGWLQEHRIQHVVMESTGIYWKSVFSHLEAAGIPALVVNAFHVKNVPGRKSDQVDSQWLAQLARFGLLRGSFIPPKDLRELRLVSRYRRKLTASLAGEKNRLHKLLDDAGIKLGGVVSDINGVCARKMVEGLIAGGTPQQLCVLGKGKLKASPDLLQDAMDGELSARHRLVLQAIMNHIGFLERQLNELDRYLIAAMKPYAWAWRLLQTIPGIDQIAAAMILIEISDDLSRFGSAARLSSWSALCPGNNESAGKRKSGKTRHGNPIVRYLLCECANAARRTQTVFGAKYKSLVIRRGHKKTIIALAHKLIRTIYFVLTRREPFRDSNFDYQAASVAKNAPRWIKALKKYGYWPKPAVAT

SEQ ID NO: 167919 - protein, 377 aa, unidentified
MSEITRLMLLIVRVGVDLAKSVIQVHAVDAAGRRVVARTLKRDQFLAWCGQLPANTVLAMEACSSAHHWARKLRAMGVDARLIAANFVTPYRMEGKSGKNDANDAAAICEAASRPSMRFVPIKSCEQQGVMSLHRVREGFKEERTGCINRIRGVLAEHGLVFGKSPKALRAVLADVLEDADNELSGRARVVLQQAFEHWRELDEHIVWCDRQVGQHVRSSPQAQQAIKITGIGELGASALVGGVGEFKQFNSAKQFGAFVGLVPSQNSSGGKASLGRITKRGDDYLRTLLIQGAKSAVMSADKRDDPTSRWLVQLTARVGWQKACVAMANKNARILWAVMTRDAEFDPKHVSVKPQAKVAPAKRLAAPPPALAQCPA

SEQ ID NO: 167920 - protein, 444 aa, unidentified
MLSIIYKHVAGLDVHKKTVVATRMRVTEEDRAEWETTTFGTTTPDLLKLHDGLLAWSISHVAMESTGDFWKPVYNVLEDTFELWVVNAQHVHHVPGRKTDAKDSAWWAELMLHGLLKASFIPPRPQRALRETTRYRTTVIQERTRVVNRVQKLLEGANIKLSSVATDIMGVSARAMLAEIVAGQTDAALMADLARGRMRHKIPALPQALTGFVQPHHRFLLAQQLAHIDFLDEQIEALSAEIVRQLEEMSELPSSAGSDAGAEASEPSSESSEEEPLTWSEAVVLLDTIPGVGERAAEEILAEIGLDMSRFPSDKHLASWSGRAPGNNESGGQRFSGHRPRGHKPLSSILTEVAQAAARTKDTFLSARYHRLAARRGKKRAIGAISHSIIVFIWHILTYRQPYRELGSDYFDQRKKEIKVSYLVRRLEKLTGASVSIQLQPVAA

SEQ ID NO: 167921 - protein, 314 aa, unidentified
MAQIAPHVGIDVSKHRLDVAVYPDGDSFAVDNTPTGWAELAERCLQMGAAVVGLEASGGFEQGIAYALQDRGVRVRLLNAFQVRNFAKAMGKLAKNDAIDAAVIARFIATVPGRTLPPRSPVQQKLSAVLTVRQQLTEQLVALGNQARAWGDALLRRISERRIAGLRADIRLLDRRLAEIVAADADMARRYTLLCSVPGVGPVLGFTLLAWLPELGSIDRWRIGALVGVVPYDFDSGKMKGKRCIWGGRSGVRNVLYMAALVASRHNPILKAFRQRLDAAGKEPKVALVAVMRKLLTILNAMIRDGRAWTPATL

SEQ ID NO: 167922 - protein, 414 aa, unidentified
MDVLYPRCAGLDVHKDTVVAAVRSAANGPANTEVRTFDTTTPGLLGLSGWLAECGCTHVAMEATGVYWKPVWHILSDGDVTLILANAAHVKNVPGRKTDVADAAWLADLLAHGLVRASFVPEAPTQAMRALLRTRKQLVREQASHAQRIQKTLEDANLKLASVLTQVMGKSGRAIIGALIAGERDPDALLRLVQRGVKAPPERLRAALTGRVTERHRFLLRLHLRQIDALEAAIAEIDQEVDRDLDPFRQAVRLLRTIPGLSDLTAQVIVSEIGLDMSRFPTAGHLISWAGLCPRNDESAGKRRSTRLRKGAPWLKTTLVQCAWAGTRKKGSYLQAQFQRLRHRRGPKKAVCAVAASILTAAYHMLRDGTFYQDLGPDHLRRATPEAQACRLARQITKLGFTCTLAPADTRVSV

SEQ ID NO: 167923 - protein, 340 aa, unidentified
MAIVVGLDVHRAQITHDALNTATGEVATGRIAPADRATLRTFLRHWVGGHVEAAVEATTGWRFVVEELQRAGAEVQLAEPADTTAARGPKRRAKTDKRDARHLRDLLLERRLPQAWIAPEHILELRALVRLRKTLVDQRTEWLQRIHAVLFHHGVRLAVSRLDGRDAHEQLAALDLSPSAQRQITVALAVIEHVNSQLAPLDRDLKAFARAQPGCRALVRHYGIGPQVACAILAELGDTRRFSSSRQSVRFAGLDVTVHESDAKRRAGHLSRQGPPVLRWAAFEAAESACKPASPDHAYYLELKQRVGANRAVLSVARKLLRRAHHTLRELGDDALAPAA

SEQ ID NO: 167924 - protein, 359 aa, unidentified
MTNGSTELKEAAGLTVGLDVSDIYTSFCMVDKEGNVIEEGRVRTTEPALARRFSVVAPCRIVLEVGTHSPWMSRLLAGLGHEVIVANPRRVRLIAESDHKRDRTDAELLARLGRVDPGLLGPIQHRGPEAQRDLALLRARDALVRTRTNLINHVRGAVKATGGRLPACSAATFHRKAEAHLPEALRPLLTPMVTMIAELTARIRDYDHQVELVARRYPGVRSMRQVAGVGPLTSLGFFLVIENPERFRKSREAAPFVGLTPRQRQSGEREPQLGITKAGDPLLRRLLVQSAHYILGPFGPDTDLRRWGLRLAASGSSRAKKRAVVAVARKLAVLLHRLWVTGEVYEPLRNEKETPARAG

SEQ ID NO: 167925 - protein, 422 aa, unidentified
MLTATDDSEEIIERVAALDIGKAELVCCVRVPRADRPGRLQEVMTYSTMTRPLLGLAGHLRSLGVTRVVMEATSDYWKPVFYLLEAHGFETWLVNARDVKHLPGRPKTDKLDAVWLCKVAERQMIRPSFVPPPEIRRLRDVTRYRADLVGARTAEKQRAQKLLEDAQIKMSVVVSDIFGVSGRQMMASMIAGQRDPRALAELARGRMRGKITALQEAFTGYFTDHHAFLLDRMLARVDALEADIAVLETKIEEMVASPAAEAAQRLDEIPGINATAAHAILAEAGISMDRFPTAGHLVSWAKFAPGIKESAGKKKGKNATGHGNSYLARVPGNAAVSAAQTDTFLGERYRRIARRRGRKKAVVAIGRSLLVIIWHLLAGPSARYTDLGRDFYDTRTNPERRKRGHIRQLEAPGYKVTLEPAA

SEQ ID NO: 167926 - protein, 367 aa, unidentified
MKKGSTRAAAQSRNISQQKLTIGLDLGDRNSWYCVVDESGQIQREQRVRTNGKALCEVFGAMPRSRIALEIGTHSPWISRRLSELGHEVIVANARKVRLIGESRKKDDRLDAQTLARLARIDPELLYPVKHRSVQAQADLTLIRARAGLVRARTGLVNTARGLAKSYGERLRSCNVRNLNPEKAESLSPGLQAALEPLLNAIESLSERIVEYNERLENLAQQSYPQVALLKQIKGVGTLIALTFLLTLEDPHRFRKSRDVGCYLGLQPGRRNSGQSEPQLHISKEGDPYLRTLLVQGAHHILGPFGVDCDLRRWGLKLAERGGGNGKKRAIVATARKLAVLLHHLWVSGEVYEPRHNSSRTTVAAAA

SEQ ID NO: 167927 - protein, 343 aa, unidentified
MYFIGLDVHKKAISYCVKDAAGRVHQEGKIGSTRWELDCWIRTMPQPRMIAMEATIFTGWIYDHLLPHAEKVKVAHPLMLRAIAAAKKKNDKIDAGKIADCLRCDFLPECHMASTEIRDRRRTLRYRNLLIKQMVQMKNRVSGLLMETGVSYNKQRLHKVGYFAELMSTNGEVNESIRPLLKLSREMICRSQKLDYALVSSLQRDPLLKERLRRLQTVPGVGPITALTWALEMGEVTRFTSIKQAISYCGLCGDEKSSADKVMRMPISKQRNKHIQRVLIEAAKLAVRECHELAVIRARELERGNPNRATLAVARKMVGYMLAVERRNQDFVPAEKFSRAAAA

SEQ ID NO: 167928 - protein, 313 aa, unidentified
MALQHSFVGIDVSKAWLDLWLSPIKRLVRLSNDAAGWSAVVVELQGLGPQAGVVVAFEASGGYEQGLRRTLHAAGFEVRRLNPLRVRLYARSLGRQAKNDRIDAQLIARYAQAADVMPDLIDPARERLAELVAHRRRLIDDRTALRNQTKMLHCARLRAQNQRRLALIERQIAETDGLIRDAIGALPDLAATLDLVKRVKGIKDVTAATLVALLPELGRINRRAIAALVGLAPFDHDSGAFSGTRSIAGGRAAVRTALYMAARAAARSKSPLGAFYDRLIAAGKPPKVATVALMRKMLVTLNAMVRDNAVFAP

SEQ ID NO: 167929 - protein, 424 aa, unidentified
MKVTYPTCCGVDVHKSFLVATIIKTTNSFEPSYEKKRFSTFNNSILQFKNWLLENKCYDVCMESTGKYWVPIFNLLEDDINVTIANPKWVKAVKGNKDDTKDSKWIGDLFRLGLVRGSYIPCKKIRILREYTRYRYKLVSCRSSEKNRYQNALTVCNVALDSVVSDIFGRSSTSIIDYLLEQSGTSINHEEIASKLLKRLKSKEDAVIESIEGYQMTDSQKYRMRLVRAHMDYITAEINDVDSMIENMISSDPDYNNAVQLLCTIPGVKHDSAVTIISEIGIDMSQFSTSKRLCCWAGLTPGNNESAGKKKSVRITRAGVYLKPALVQCAHAAVKSDKSPYYKKKYESLVKRRGKKRAIIAIARMILTAIYQMLSTGETWNPSDLYKLDMPQALVNKQKNQAIKQAKKLLQQEGILPPDELIVS

SEQ ID NO: 167930 - protein, 353 aa, unidentified
MNSLTDLREVVDVVIGVDTHVHTHSAAVVDAATGGVLDEITVEATAQGYCELVEFANNHPMLRAWAIEGTGGHGAGLTRHLLESSEIVIELDRPKRAARRNGAKSDPLDAIRAAREAMARPRLGTPRTGGERQALSVLLVARRSAINASTEAQQQVFSLVIAAPEPIRVRFRGQKLAAMLNTAAKLRLQAAWDVETTSTVLALRTLARRAHAMLKEARELQKALVAIIRNWRPDLLEEFGVGPIVAATVLCAWSHHSRIHSEAAFAMLAGVAPIPANSGQVTTRYRLNRYGDRELNNALHTVVQSRIQYQPATRDYVARRTAEGKTGREIKRCLARYVARDLYRLLENGPATA

SEQ ID NO: 167931 - protein, 412 aa, unidentified
MEVVYPCCCGLDVHKKSITACVLWAQGKGKSRKEKKRFGTFTHDLLQLADWLGQCGVTHVAMESTGVYWKPVWNILAEQFEVLLVNAQHIKAVPGRKTDQKDSEWIADLLQHGLLRGSFVAPQPIRELRDLTRYRVSLVQEINRVANRIQKVLEDANIKLASVATDALGASGRAILEAMLAGEQDSARLAEMSKGLLRNKIPELKLALEGRMTEHHRFLLRQLFEHLRFTESKLNEIEQEIDKRMRPFEDKVTRLCTIPGVDRVTAWGMLAEMGMNMNQFPSSGHLASWACLCPGSFESAGKRLSGKMRKGNVSLRRCLAQAARAISMMKNNYLSALYRRIAARRGAKRAVMAVAHALLEIAYHMLKRKEDYRELGADHFDRIDVNRIRRSLVRRLERLGHKVTLEPLAQTA

SEQ ID NO: 167932 - protein, 346 aa, unidentified
MKKIFIGIDFSKEKFDATLIQAEGLKECAPSVHEVFDNKTSGYRRLVKWVKAHAEGFAADAWLFCGENTGGYSIGLSNYLYASGYDMWLECAYKIKHSAGIQRVKNDKADSRAIAEYAMRNYDKMILHKPQSASLTCLREIFLYRHSLVRQKVALTVRRDEKRLTQEKSDARAFMSFTSKHLITEVNKAIAKCDQKIKEIIASDDELREIFDIITSMPGIGVQNATCLMVYTDNFQKFDLDSRKIACYYGIAPFGRQSGTSVNSRPQVSPFANRMIKSLLSQAALAAIKFDMNVHIYYQRLIERGKHPLLVHNNIKNKMLHILVAMVRERVKYNPDYVYRTNKEIV

SEQ ID NO: 167933 - protein, 372 aa, unidentified
MIERTTLSFIGQEIYCGFDVHKNLWSVCVRHCGRELACYSMPAHAREVGRKLRKDYPDASIHSVYEAGFSGFEAHRILVDEFGIHNIVVNPADVPTNGKERVHKSDRIDCRKLAKSLEAGLLEPIYVPSREHLLLRNLLRRETQTSGAIVRTINQLKSHWYFKGEPIPHRAGKTVLGARREQAHARGDYVAVNLIDQWHCLTESRQRIVKCEHETLAKLSLTKEIKHVASAPGIGMRSAIVLLSELWDMHRFPDKNHLASYVGLAPHLVGSGDKEETVSGGNRKQKQLHYILIQAAWRASRSDPQMISLYGRLRLRHLASQRIACIIAKKILFIIRALLLEDRDYQAIFPTREITCKQTKATRNETPPENGR

SEQ ID NO: 167934 - protein, 370 aa, unidentified
MKKNSSVKQSPKRAAVGTPEPITIGMDLGDKTSRYCVLGAKGEISSEGSVATTKKAMAQQFSKMRRCRIALEVGTHSPWLSRLLTNLGFEVIVANARQVPLISASSRKNDRMDARMLARMARVDPQLLRPIRHRSEQAQGDLMTIRVRAALVEARTSLVNAARGLAKAMGERLPSCDTDTLSVEKMEALPPAMQERLRPLLEQVEALTEQIHKLDTVIEQIARTQYPETELLKQVKGVGTLIALTFVLTVEDRDRFQKSRDVGGYVGLRPKQSDSGQSQPQLRITKEGDVYLRKLLVQGAHCILSRRGPDTDLKRWGLKLAERGGKNAKKRAIVAVARKLAVLLHRLWVGGEVYEPLRNHPPARSPRKAA

SEQ ID NO: 167935 - protein, 414 aa, unidentified
MFAVGVDVSNGRSMVAVLQSKSKVILKPFEVPHTPEALGKLVDKLNSLDGETRVIMEHTGRYYESIAMFLNSAGFFVSALNPLLFKDYQEGISVHPVKTDKADAVRIAKFGLDKWDLLRQYEPMDTIRYQLKTLNTQFQLTSKSKTAFTNNLIALLEQNYPGIRKHFPSPARPDGSQKWVDYVGTFWHLDCVRKLSLNAFTERYFKFCRKHEYNFSEEKAAELYRHAQSTIALVPKSDVSKLMVKEAVSQLDSVSRTLETYRSEMNRLASQLPEYQTVMGMYGVGPSMGPQLMAEIGDIRRFPQRNSIIAFAGIDPKKEDSGDKVSTTGKSTKRGSPYLRKTLFVIMDILIQLKPADDPVYQFLDKKRSEGKPYYVYMTAGGTKFLRIYYGKVRDCLIEKGLWDKPTIESGNSD

SEQ ID NO: 167936 - protein, 385 aa, unidentified
MTATTRRFDPIALESMLCLSFELGEGSWTLSFTSGFGAPVHRRRVPARDRDAVLRQIEAMKERLGLAASCRVVSCYEAGRDGFWLHRFLEANEIENLVVDSSSIEVSRRSRRAKTDRLDGESLLDLLLRHQAGSQKKVFSVVRVPTVEQEDRRHLHRELRSAKQDRTRVTNRMKGLLANQGLPLDLKRDVPAQLASLRRWDGSPLPEGLRARLGREWERVVFYTALIERLEAERREILQRGQDPVLEKVRQLNLLRGIGTNSAWLYAMELFGWREFRNRKQVGAIVGLTPTPHTSGMQERERGMSKAGNRHVRAMAIEIAWGWLRFQPRSALSQWYQRRFGMGSKRLRKIGIVALARKLLIELWRYLESGVVPEGAELKTDLRVR

SEQ ID NO: 167937 - protein, 348 aa, unidentified
MNLKRIGLDTSKAVFTLHGVDHDEKVVLRRNVKRVELEAFFAKLPLTLVAIEACGGSHYWGRRLTVLGHTVRLIPPQYVKPFVRRGKNDRNYAEAIREAASRPGMPSVPVKAAERQAEAIVLSARELLVRQRTQLVNPVRGHAAEFGIVAAKGTSRLPTLLEIVAAGETMPDAAKEMLAFLGAQVAQLAGRVAELERQMKQQHKANAVSQLLAEVPGIGPISALSLALTIDPGRFQFGRHFAAWLGLTPKEHSTGGRQRLGGISRAGNERLRQLLVLGAMAVIRYAKPGNKTVSPWLLALLERKPRKLAAVALANKMARIVWAMMATGEAYRGSKTVATQVVGAAVIA

SEQ ID NO: 167938 - protein, 424 aa, unidentified
MQRRKIKRMKSWQDLTHYAGFDWAKDHHAVLILNQQGEIVADFEFEHSLQGWNSFAEKTSAWPNLAVAIETSQGAAVDQLLQKDYTVYPVHPVAAQSYRERKAPSGTKTDHLDAWALADALRVDGHGWKTLQPMDPMTQQLRLLCRDEVVLIEQRTALVNQLQQALLEYYPAALEAFDDWTDSFTWEFLLAFPTPQALVQAGKRRWEKFLHTHKLWRPETAEKRLKLFAQADQFKASDPIVRAKSQLAVSLAKLLCTLGQQLKLYRKQIEALFQDHPDHDLFGSLPGAKKMLAPRLLASVGGDPDRYGSHEVLQCIAGTAPISYQSGKLNKVRVRWACDKFMRYTVHLWADCFRKASAWGQTYYQQKRQEGMTHACALRCLGQRLLKILYRMLVTKKPYDAEFHAQNQQKHGSWVLSLVKKSAT

SEQ ID NO: 167939 - protein, 344 aa, unidentified
MKKVLIGIDFSKEKFDVAIIVKSTSMQVHAVFDNKVSGYRKMIKWIKSVVEEKTCSSWLFCGETTGGYSRMMSDWLYAQGYDVWIENALTIKRTFPLKRIKNDAVDAFMIAEYALRFEDKAQLYEPLSPALSRLRELFLYRHHLVRHKCSSQIRRIEKRFTQEKSPIKNTISQSARHIITEINKEIAKCDEKIKEYIESDDQLYSIFAIVTSMPGVGTINAVSLMVYTNNFTKFAYNPRKIACYYGIAPFGRDSGTSVHTDPRVGFIANKMLKSLLTQAALAAVRTCPQIAKHYQRLIERGKKPMVALNNVKNKMIAIITAMVRNSCMYQPDNICVATQSVNVK

SEQ ID NO: 167940 - protein, 340 aa, unidentified
MNASMMGLDLAKNVFQVHGSDTAGAVVFRKQLRRDKLLAFFAGQPACIVAMEACSSAHYWAREIGKLGHSVRLIAPAYVKPFVKRQKNDAADAEAICEAAQRPTMRFVTVKSEEQQASAAVFRARDLLVRQRTQTINALRGHLAEYGLIVAQGPTHVTRLVLHVEDPRSKLPEATRMALAILVDTLKSLDQRIQKLDVEIARRAREDEDARRLATIPGIGPITATALIALAPEAAGFKRGRDFAAWLGLTPLQRSTGGKQKLGETSKMGERTLRRLLIIGASAVVLQARRRGTPEGSWLGRILARKPPMLVTVALANKMARIVWALMAKGGVYKAPAVAA

SEQ ID NO: 167941 - protein, 339 aa, unidentified
MEQITMIGLDLAKHVFQLHGVDASGTVLLRKAVRRGQLLAFFSRLPPCTVAMEACPTAHHWARELVTLGHEVRLMPPKYVKAYVKRNKNDAADAEAICEAAGRPNMRFVPVKSREQQAALMLHRARNLLVRHRTMLSNAIRGHMAEFGLIEAQGAHRVKGLLEVIEDDADTRLPALARGVLRLMAAQLNDLAARIGAIERQIMLWHKASARSRLLDTIPGIGPIIATAITAAAPDASVFKSGREFAAWLGLVPRQNSSGGKARLGGISKQGNTYLRRQLIVGAHSVLRWSKEARQDPWIGRLLARKPRLVVAVALANKIARIAWAVMVRGEEYRRPATA

SEQ ID NO: 167942 - protein, 389 aa, unidentified
MLCVGIDVAKRKHDCCIIDSDALKTVESFTFPNSREGFDMLLSKISELGIPKDKIRVGLEATGHYSSNLAHFISEHDLPLLTFNPLLTNRYKQGFSLRKTKTDKVDACAIAQMIVSGKGSQTYSSSLYHNEEMKSLSRYRSQTMQKCSKLKISVSRLVTILFPELEGLTSSIHLASIYALLKAYPGHEQIAHCSMKRLTRLLSDASQGRFDKSKALEIHQAACRSIGKVSLSASMELVHTITDIEVLKQHIVEIDEKLKEMVDQEESSIIDIPGIGYTLCASILGEVGDFKRFPDVDKLLAYAGMSPSKHDSGDYHSKHNKMEKRGSPYLRKTLYLAARLVAQNVPKFKEYLEKKLSEHKPYKIALSHVAKKLIRLIYRLGISGCPYLA

SEQ ID NO: 167943 - protein, 331 aa, unidentified
MDEVKRFVGIDVAKAALDVFIGSAGAAFSVANDEVGIQELLRQLKPADFVILEATGGLEMPVASALAAAGIAVAIVNPRQVRDFARATGRLAKTDRLDAEVLARFGQAVRPEARPLANEQAQALEALVTRRRQLVEMLTAEKNRRARAPKVLHRSIDEHIRWLEKRLSGFDDELGELIRNTPMWRERDELLRSVPGVGKVLSSTLLAQLPELGMLDRRQIAALAGLAPFNRDSGNMRGSRCIWGGRAQVRRVLYMATVAGVRSNPTIRTFYLRLRANGKHAKPALIACMRKFLVILNAMLRNKTHWQTPALTSITSPLSPLLGAVSEHGCC

SEQ ID NO: 167944 - protein, 336 aa, unidentified
MWYVGLDVHFRRSSYCVLDPGGRVVEEKTVKGPVRKVLAELAQVKRRFAIVYEASCNYGYLHDELSKIAVRVVVAHPAQLRLIFKSKRKNDRIDAKKLAKMLLLDMVPTVHVPSPRVRAWRGMIEHRQRQIDERTRVKNGLRALLRGRGIEAPKSLWTKAGLAWLRALPLEEPLDAIRRDDLVSRLELLHAAVRRVEAVLNDIGAKHPGVVLLRSIDGVGIRTAEAVVAYIDQPARFARNKAIGSYFGLVPCQDASGGKNRLGHITHDGPATVRRLLTQAAWQGIRRSAEIRAYYERIRRDDPDRKKIAIVATMHYLVRVMLAMLRTGEVWRFSAA

SEQ ID NO: 167945 - protein, 385 aa, unidentified
MRGDSFIPRDYDVFTGLDVSKKSMSVTFTNHQGLIRSLNMPHKAEPLLHYVRKHFPDQKIAFVYEAGPTGYGLYDGLAAQAYPCLIAAPSMIPRAPGQRVKTNRLDSKALSESLRGGQLQSIHIPSPTYRQLRHLTQLRDVLVSELAGMKQRIKSLLLFEGIEFPPAPPGSQWSFLVKDKLRKLACSGTVRFKLDQLLDSVEFNEKQVLKTISEIRRFCRNDPELSQCMKYLMSIPGIGWITASQLLARIGDWRELKNIRQLAGFLGLVPTEHSTGERVDRGSITRTGDERLRSKLIQGSWSAIRQDAELREFFRTVYRKHPREVASRVAIVAVARKLSVRISVVLMKQRPYEVREKVHSAPLTQEETSPQGATRRLTEPGEKNS

SEQ ID NO: 167946 - protein, 349 aa, unidentified
MFAGVDTHKDTLAVAVIDHAGRVVRQLELPNQDSGYVRLLALLTSHHVVRVGIEGSGNFGWPAAIYLLERDLNVVEVPPLMTSRERLSRPGQGKTDPVDAVAIARITAREDALPPVRPMTGHAADLRVLTEYRDQLVNERTATANRVHTDLGWLRPGYQHQLPHLTNMAHLHAALELVSGDDSVRAAVTRGRLDRMLTLTEQLAELRIQIDALVKASGSTLPEVYGVGPVVAATIIGHVFDVRRYPTRHHFATANGTAPIPASSGRTVRHRLNRSGNRQLNRALYTIAITQIRADTEGRAYYQRKRSEGKTSREALRCLKRRLSDLIYRTLRADLANAAQPTPTLSIAA

SEQ ID NO: 167947 - protein, 324 aa, unidentified
MTDAVLGIDVSKTTLDTSFLAGTKPRSRSFANSPDGWRQLIAWLAKEEVRQVHACLEATGRHSLGIALALHEAGHVVSLVNPAQIRDFARTKLGRNKTDPVDAAHIREYAELFEPRPWTPPSPALRRLCELQTIRAGMVASLTEWKNRSTSGMADDRALALAKATIQHFTSQLEAVDQAIAETIDTDRELCAKRTLLVSISGVGETLAGIVLAELPGPEVLGSSGAAAAYAGLNPRQHQSGTSINRPARISKIGNAVLRSALYMPALSAMRYNPAVAALVDRLKAQGRLTGKQIVVAAMRKLLVICFGVLKSGKEFDPAIAMAQ

SEQ ID NO: 167948 - protein, 322 aa, unidentified
MQGKVLPERSAQQVYVGIDVCKAWLDVYLHPIGHPFRVANSREGLKRLKRELAPLKVALIVLEATGKYHREAHRSLHAAGFAVAVVNPLRSRRFAEAAGQLAKSDRLDARMLAILGESLAPKATPPAPATVEELAELVRARAAAIADLTALTNQKGESKTAVLKRELARRIRATGTSIVRLEAEIARRIEADDALARRFAILRSIKGIGPVAAAALLVGLSELGTCSGKQAALLAGLAPVACDSGERRGERRIRGGRAHVRVVLYMAALTAAHCNPDLRDFYRRLRANGKKFKVAITAVMRKLVVLANTLIREDRLWQPQHA

SEQ ID NO: 167949 - protein, 394 aa, unidentified
MHFVGIDIASETHVVAVVDETDAVLVRPTKFTEDALGYDRLFSLLGPPADTLVALEATGHYWKNLFALLVTRGFAVAVLNPLRTRRFADEELARTKTDAIDALGIARFAAQKRPAPTRLPDRATEELRELVRRRDRLVQDFGDRLRHLHRLVDLGFPEFTRYVKSLDRERATAILHDYPTAAAFRNVSARRLAGLRYDGRHKVGDDLARALLDAAARSVGQHHGEAYRLQVRYACEDLDLLRRRLRTLERDIERTLDDHEIGALLTTIEGIGPQTAARLIAELGDPATFRSAAALASYVGVIPAIRQSGKWTSSRAGLSPLGHTALRAALWMPVLTAVRKNPWLRAYYQRLLARGKLPKVALIAAMRKLLIAVYTVAKTRRPFVSQLAPQEARA

SEQ ID NO: 167950 - protein, 369 aa, unidentified
MDQGTTVVGLDVHKKRIVGAVLPWGSDRVTEKVVLENQPQEMERFVTRLAGKGPVEFVYEAGPCGYEVQRQIAGLGYRCVVVAPGMTPVRPGDRVKTDRRDAEKLARYYRAGELTEIRVPSREEEAARDLPRAREDVMKDLLRAKHRLGKFLLRQGRLYAETRTWGVKHRRWLRTQRFEWTPLQQTFEAYMRAVEEAELRLEVLNHQLEELAQQDPYRVPVQYLRCFRGIDTLSALTLVVEAMEFKRFGTARKFMSYTGAVSSEDTSADRVRRGHITKAGNAHIRRILVEAAWSYQRPHGESRALAERRKECPREVVYLARKAQDRLSRKFRRMIRRNKLSQVAAVAVARELAGFVWAMAQHFPMQAAA

SEQ ID NO: 167951 - protein, 424 aa, unidentified
MKVTYQTCCGVDVHKSFLVATIVKTTGDIEPSYQKKRFSTFNNSILEFKQWLLDNDCHDVCMESTGKYWVPVFNLLEDDINVVIANPKWVKAVKGNKDDTKDSKWIGDLFRLGLVKGSYIPCKKVRILREYTRYRYKLVSCRSSEKNRYQNALTVWNVALDSVVSDIFGKSSTSIIDYLLEQSGSSINHEEIASKLLRSLKSKEDAVIESVEGYQMTDAQKYRMRLVRAHMDYITAEINDVDKMIENMISSNTDFENAVQFLCTIPGVKRDSAITIISEIGTDMSQFSSSRRLCCWAGLTPGSNESAGKKKSVRFTRAGVYLKPALVQCAHAAVKSDKSPYYKKKYESLVKRRGKKRAIIAIARMILTAIYQMLSTGEQWNPSDLYKIDMPVALVEKQKAKAIKQARKLLQREGLLPPDEPLAS

SEQ ID NO: 167952 - protein, 346 aa, unidentified
MDYHKKYWYVVLKDREGRVEQRGTVNNTKKEFHQLLKPYQEDKAVLEATRNCGLIYDCLEEILDDVILAHPLEVTAISEARIKTDKISADILCELLCSNLLPEAYVANKENRPSKNTLRQRIFIVRVQTMVKNGIYTILDRHPEMLSLAPDVSDLFGALGMRWLRQAVPPSQYNRLLSSEPELLGIPKRKISESNGIVKELAKGGKRVKLLRSIPRLGPFISVLVANEINDISRFRDEKKLCAYAGLVPSTYASGGKVFHGSITRTVNKWLRCAFIAAVQQAISCDTDLFAYYQQLKLKKGANAAKVATASRLLAIVYRVLKQERLCEIRTRRAIRRLAPATLITS

SEQ ID NO: 167953 - protein, 400 aa, unidentified
MISVGIDVSKGKSTVCVLKPYGEIVCRPFEMQHVEKDLEAFHNLLQKLDGEIRIVMEATGIYHLPILIFFHNKGYFVSVINPFAMKKYAKDNSIRGAKTDKLDSIMIANYGIEKWFKLQRYEGDEEIYAELKLLGRRYRYYMELHVKALQELTHILDYVMPGIKKLFSSWNEANGKDKLSDFVERFWHFDLITSMSLETFTDEYLVWAKEKKYHRSRSKAETVYELASSGIPTLPSSTPSTKMLVQEAISVLRTVDSSLSLIVTRMQVLAKSLPEYSTVREMGGVGDVLAVKLIAEIGDVRRPHSAKALIAWAGIDPPPYESGQFIGSKRKITKRGSSTLRKIGYEVMRVLKSHPAPKDDAVYNYILKKEGEGKSKKHAKIAGLNKFLRIYYARVIAVYQ

SEQ ID NO: 167954 - protein, 345 aa, unidentified
MNYVGIDLHKKTIVLCVVDQDRKVTHRRTFACCQTEAVRDFFRGLGPFRAVVEATASYEWLVALIDPLAERVVLAHPGKLRVIAESDKKTDRHDAYVLAEYLALGKIPEAFRPAARQREHRALVRHRRHLKRSVTALKNKIRRVASDSNADRKDLFTAAGWAALESVGLRAADRFVLGQLRAAWQHLEGQLKELAGRLKEFAAAAPAQEAEARAKLATIPGVGPVTVDVVLSELGDVRRFHSVKAVCAYAGLVPAVRQSGGKKAKELGITKAGSPLLRWALVEAAWRVVRQSAAWRRVYERIKKRAGGKRAVVAVARRRLVVMAAMLRDGTNYDLLRVGEPPPSP

SEQ ID NO: 167955 - protein, 344 aa, unidentified
MNYHTALDVSLRSVSICIVDDDGTIQFEAKVPSEVNEIVTCLRRFSQEISSVGFEAGTLTQYLTYGFQAAGYEVICLEARQVSAALSAMRNKTDKNDARGIAQILRTGWYSRVHVKSMESHLIRALLSGRKTILKKCVDLENEIRGLIRLLGIKLPGPLKHGAYDAFVRQAVEEQACMADTLIPLLDARLVLYKTYLKLDNQVKALVREDTICQRLMTVPGVGAITALTFKVGVDDPGRFKSSRTVAAHFGLTPRRYQSGEVDNPGRISRAGDPDVRSALYLAAHALVTRSEEWSSLKVWGIRLIKTKGRKRAVIAVARKLAVILHRMWLDGTDFRYGSTEVIN

SEQ ID NO: 167956 - protein, 271 aa, unidentified
MLNESFVGIDVSKDWLDVGWEPAQQTERLAHDEVAMVGLCERLVQERPCLIVLEATGGLETHLASALAAAGLSVAVVNPRQVRDYARACGRLAKTDRIDALVLAAFARAIRPQVRAPKDDETLELGALLARRRQLIDMRVQEKLRLERASPVQRDSIKEHIAWLTERIARLDTDLTHRLRSSSLWRDKEGLLKAIPGVGTITRVTLIALLPELGRLNRREIAALVGLAPFNRDSGQHRGERVIWGGRAQVRRVLYMASVAAIRSNPVIRAF

SEQ ID NO: 167957 - protein, 366 aa, unidentified
MRQHTQQDFRGQVVWIGLDVHVRFWLVAIMVGDIFHKSFHQSANVQMLVNYLHRNFPGAEYRCVYEAGYCGFWIQQELERSGIRCSVANPADVPTTDKEKRNKTNRVDAHKLVRSLRNGDIDAIYVPSRQAQEDRSLVRTRHRMVSKQTRCKNQIKSLLCFYGISLPEDMDERYWSRCFIAWLKGLKLHSDSGTNTLQILLNELEYHRVSILSVTKTIRQLARQEHYARDVNNLIGLSGISTLVAMVFLTELVVLDRFRSLDALAAYVGLVPGEDSSGEDRTITSITPRKNRYLRWVLIEAAWVAVRHDPALMLTFTHLSARMPKNLAIIRIARKLLNRVRFVLKNHSPYVCTLIGQNSTIVTQGT

SEQ ID NO: 167958 - protein, 430 aa, unidentified
MKKKNHSNEKIEAITFKTLIVGVDIAKHNQWARFVDCRGIEHNKALKFENNRNGFNTILTRIYEICKNEDFNKIIVGMEPTGHYWKAFANFLLKQAKITVVLVNPYHTKKAKELDDNSQTKSDKKDALTIARLVKDGRYFETYLPHDVYAELRGLTTSRHSMNKRKKSIVNTITAVLDEYFPEFISVFKHPFKGKASMHLLKVCPIPKFILELGEEGVLEEIKKAVKKTVGRKKAAQLAATAQDSIGVDYGEYAARFKIQQLMEELELIISQLAALETEMEEALKKTEISEYLLSIDGMGVVSLATCLGELGNPLRFEDTRQMSRFAGYNLIEDSSGKNKSGTCISKRGRKNLRSVLYQISLTMVATNQEMRKLYDYLKTRENNPLKKMQALVVVSKKVLTLIFTLSKKKVYYEGERVFGSYRKSQLQAA

SEQ ID NO: 167959 - protein, 347 aa, unidentified
MRFYTRQHRHYCGVDLHARSMYVCVLDRDGNVLVSKNIASAPEPFLELIAPYREDLAVAAECMFTWYWLADLCAREGVVFVLGHALYMRAIHGGKAKNDRIDAHKIAGLLRGGMLPQAYVYPQAMRATRDLMRRRNYLMRQRAELLAHITNTNHQYNLPALGVRPARPAERSGLLEHFAEPQVRRSVAVDLSLIEHYDRELPALERYLESNAQAHDPLALAIVRTVHGMGKVLGLSILYEIQDIGRFARVQQFLSYGRLVKPTKESGGKILGHSGRKIGNAHLKWAFSEAAVCFLRANKPAQALRARLMAKHGKGKSLAIIAAKLARAVYFMLKRGEAFDAERFFAH

SEQ ID NO: 167960 - protein, 427 aa, unidentified
MPYRIAGIDVHKKILAVVVSDVEIDQEYQFARRMFGSNPEQLRSLAAWLVEQEVEEVVMESTAQYWRPVWEALERYWKPLRQKREGASRRSGKLHLAQAQSNRGPRGRKRDFPDAERLVKRLVARELTLSFVPDAEQRLCRTVTRRKYQLTRDHVRVQNQVESLLEVAHIKLSSLVSDLLGASARRMLTALAEGETNPATLAALADRRLRATSEQLCDALGACADLKPVYRRLLKMMLEQLQFLEQQIGQLDQEMATLLNQHQGAVERLAEVPGLGVDSAQQIIAEVGPTAATFPSEKHLSSWVGACPGDDESAGVNYSHRSPKGNRNMRRVLNQAANAAAKAKGSVFEIVYRRLVPRLGHNQTIGAIVHRQCRLIWLILHQGARYQERGPDVNKRSRQQRTARMIRELRKLGYSVNLAISQADNPA

SEQ ID NO: 167961 - protein, 348 aa, unidentified
MHQGILLTVDYHDQNCVIRRLCAKTGEERVFSVPTTAGDLRHVVAQARAEVGRRGRVVWLQESTTGWARVQVALGDQVEFLLANVLQMPRPPKGHRRKTDKVDTARLQREYRNGSLPLAHQPPAWWRQVRRLVACRENLVSRRTALRNWINRYLAHETWAERGGLWSAKGLRRLQALVAELPRRDGLVVSAKLAELAYLGQAVGTVEAELLQVYHECADAQRLDAVRGIGVVAAVSIVARIGPVERFGDAAQLVAYAGLAPGVQQSDQTRRAGRIGGGGTDKHLRHYLIEASVWARQLERYRGTYAKTVRRRGVKIGRLVVARLLLRSIYKVLKDGVAFQPAAAAPGE

SEQ ID NO: 167962 - protein, 347 aa, unidentified
MNRIPVGVDIAKSVFQVHHLDENTGATVNKAIKRSAFLDYFANRNPCLIGMEACGGAQHWARRLMEMGHDVRLMPGRFVKAFNIGNKNDSADARAIWLAVQQPGKGVAIKTEGQQAVLAMHRMRQQLVKMRTMQINSLRGLLTEYGEVMSRSRKGLDSAIPDVLARLANRLPTMLIETLREQWNNLVKLDEQIGVIERRLQMWMRADPSSGRLAEIPGVGVLTATAAVATIGDPRAFRSGREFAAYLGLVPRQSGSGGKVLLHGISKRGDSYLRTLLIHCARSVLVHAKDPGKWIDQLRMRRPPNVVVVAIANKIARVIWAVLAHGRPYERDFRSGGLHGHVEPSAA

SEQ ID NO: 167963 - protein, 343 aa, unidentified
MGEVSTIGLDIAKSVFQIHGVDVDGAVVIRKRITRAKLLEFFATLPACLVGIEACPTAHYWSRRLQALGHTVRLLPPSYVKAYLKRSKNDANDAAAICEAVTRPSMRFVATKSEQQQSGLMLHRSRQLLVCQRTMLSNAIRGHMAELGIIAAKGRNGTAELLKIIANEQDDRIPAAARFSLDVLARQYAAVRAEIVAIEKRIHAWHRSSEESRRLEEIPGVGPIVATALVAEVGDWKVFSSGRSLAAWIGLVPRQHSTGGKARLGRISKQGNRHLRWLLVAGAMAVIRYARQHGTKRLWLARLMDRRPIKVAAVALANKIARMAWAMMVRGERFKEPKLLPAA

SEQ ID NO: 167964 - protein, 354 aa, unidentified
MMIIGCDYHPAFQQIAFVDSDTGELQERRLQHREEAEKFYGDLAAQGIKVRVGMEASGQARWFERLLAELNFELWIGDAAEIRTKRVRKQKTDRQDAQLILKLMLKDDFPRIWVPNWENRDLRQLLWHRHRMVQARTRIMNQLQAVALNEGLRCKKRLWREAGREQLEAFRLAPWASRRRRDLLELLDRLNPTITDLTQTIEREVAKCPEAQRLMTHPGVGPLTALAFVLIIGRAERFQCGKQIASYLGLVPLEESSGNRRRLGHITKQGNALLRFLLVEAAQVSARSIPEWRSKYFHLAMRRGRKIAKVAMARRLAVQMFWMWRKGWDYEQVRKFGSHAGQPGNRDGVHSNTE

SEQ ID NO: 167965 - protein, 440 aa, unidentified
MPTSTADLATPGAPPPVCFPPLPPGEYAALIGLDWGDQKHALALSPRGVHAPPEELVLDHCAETLHGWLDQLGERFGHRPVAVALEASKGAVVAALLEHPWLVIYPVHPATSRRFSTAFTPSRAKDDGPDARVLLELLQCHRARLRPLVAQEPQTRRVALLVEARRKVVDRRTQLTNQLQSLLKGYYPQALLLTADTLWSALSLDFLERWPELAVLQGSRPQTLRTFYYRHRVRREEVILARLALQQSARPLSTDRALIEVSVLQLRALLAEVRTLNAHLAKMEEAIASAFAAHPDASLFRELPGAGKAMAPRLCVLFGMDRRRWPSAAELQKYYGIAPVIEKSGRQRRVHWRWNAPVFARQTLVEWAGQSVKACPWAKAYYLQQKQRQKGHSAILRSLAFKWLRILWRCWMDAKPYDDALYLKHLKDRNAPLLVFLPAP

SEQ ID NO: 167966 - protein, 386 aa, unidentified
MSMIDPTSGEQTIVQNELAAIFISLELSRSSWVVTSLSPGAGERMSRIQLVAGNMNALKERFSALQAKCRVRLDRTYPLIVIQEAGLDAFSLHRALEIEGVESHVVDPASIATSRRRRRAKTDNIDGEALLRALLAYKRGEPRVCAMVTPPSPDEEDRRQICRERRLLVTERVAHANRIKGLLFAQGIADYEPARRDRRKRLDMLQTADGRPLPPHLKQRICRELDRLELVIDQIKAVEKRRDEMIAPQNDPRAIPVLLQQLRGVGPEFAAVLWSEGLFRKFDNRRQLASYAGLAPTPWQSGTVSREQGISKAGNARVRTTMIQLSWLWLRHQPTSALTRWFHERTKIANGRSKRVTIVALARKLLVSLWKFATTGLLPEGAIVHG

SEQ ID NO: 167967 - protein, 356 aa, unidentified
MSYDVKYIGMDVHKEAIVIAVLNEGGKLVMESVIETKASSILQFLHGLRGELHVTWEEGTWAAWLYDLLQPQVQHIVVCNPRRNALLKEGSKSDKVDAHKLAELLRTGMLRPVYHGENGLRTLRELGRSYQTISKDLTRVMNRLKALYRGWGIPCAGTQVYAARCRDEWLSKIPQAGVRRRAELLYQQLDGLQILRRNVRLEFLAESRKHKASKLLRQIPCIGPIRAARLIGLMQTPHRFRSKRQLWTYSGLGVETHDSAQYRFVSGQVQRSKKPQQIRGLNRNHNHEMKEIFKSAATRASCGRGPFHDFYAGLLAKGMKPEMARLTLARKIAAIALTLWKKEERFDAEQLKTQAA

SEQ ID NO: 167968 - protein, 415 aa, unidentified
MNAVGIDVSKGKSMIVVMRPFGEVVASPFEVIHTVSELKDLAQFLKNLDGETRIVMEYTGKYFQPIAQYLHEAGLFVSVVNAILVHDFGGNTLRRGKTDKKDAIKLANYAISHWVDLTEYIPENDIRQMLKTYNRQYRQYIKLKIMLKNNLISLVDQTFPYVNTLFSSPPRKSDGHEKWMDFLSKFWHCECVCGLSSNAFRERYCKWCKKAGYYFSSEKANEIYAGACGHIATLQKNDNTKLLITHAILQLNTIAETIAVLMGEMRRLAALLPEYPIVMAMYGVGETLGPQLMAEIGDVRRFYGKKALVAFAGLDSPPYQSGSFEAQSRSISKRGSASLRKTLFQVMSCILQSAPPDEPLFQYLDKKRAEGKHFYVYMIAGANKFLRMYYARVKEHLYHLEAGQTSDTFMTNACS

SEQ ID NO: 167969 - protein, 416 aa, unidentified
MDTTYANVAGLDVHHKTIQCAVRQTATGKLLTQSRSFGTMTKPLRALADYLQAMGVTHVALESTGVLWKPVWNILEGRFTLLLVNPRHLKKVPGRKTDVSDAEWIAQLLQCGLLKGSFVPPRAVRDWRDLTRHRAQLTAEKTRVANRIHKLLADTNVKLDTVASDILGVSGRAMLHALLRGETDVEKMADLAEGRWRGKIPQLRLALEGHVTAHHRFVLERLLAHLDFLDHEEQLLDEEIARREAELLPRDDAKRLDAIPGVNVTTIQNVIAEIGPDMSVFPDEHHLSSWTGLCPGNEESAGRRLRSATRHGNRWLRRALTEAAWAASHAKDSYLATQYRRLAARRGKKRALLAVGHSILVIIYHLLKHHLEYKDLGRDYFDRLEPERLRRYLVKRLEALGHKVILLPRQPNDQAA

SEQ ID NO: 167970 - protein, 397 aa, unidentified
MYIVGIDIAKRKHEAAVIDGEGTVIIKPFSFTNNCSGYNRLLAMLTKAKLPLDEVSFAMEATGHYWLALFTRLQKEGFRVQAINPVQTNSIRSFYIRQAKTDPRDALLIAEVIRFGHFSESTLHPENIYELRELCRGRHAIVSMQADVKRKVIALLDQVFPEYETAFTNLFGDTSMAILQTCPTPKELSEMPLEELCHLIEVSSHKRFRMAKARELQELARNSFGFAMAGDVFSTMIRLYAKHLDFLKQQVREMDRKIAEIMETLDTPITTITGIGPTLGAYILSEIGDISRFSSAAKLAAYAGIDPTMRQSGEYNGVRNRMSKRGSPYLRHAIWLAASSAVLHDPALKLYFQKKRDEGKPYMASVGHACRKMVSIIYAVMRDNKAYTPYIPNEISA

SEQ ID NO: 167971 - protein, 331 aa, unidentified
MNREYIGVDLHKAFFQVCALTDTGERRWEARWPRTADGIARFVARGVGPDSAIAVEATGPTWAFVDALGATGARVCVVDPRKTKLKAGYAAKTDRLDARRLADALRRESVVSIYIPPPAIRELREVCRGRHQVVRLRTRLAQMIRALLLRCDAGEPPGTQLYAPRALAWLAQVPLAPDADRSLRRLERLYHAVHADARAADAEVTQRAAADPIAVALDAMVGIGPVMALTIRAEVGEIQRFPRGPSLACYAGLVPRVERSADHVYHGRITRDGSPWLRWALVHAAMHAMKRPDGIGRWARRLAVRKGANKARVALARVLCDEVVARWPRTT

SEQ ID NO: 167972 - protein, 320 aa, unidentified
MQTPSAVLNIGADVGKDEIVVACAEESFSPRKITNRRAEIMAWLKTLPPGSRLGMESTGSYHELLAETAHQLDFVVYVLNPKDTRHYAKAMGLRGKTDRVDARLIARLIGREHEQLHPWIMPTAEQRQIERMIKRRAKLSAIRASLSQSLKGLAGFAAELKALRRRLDKLIARIDARIKALIEANADRKQDYARLRKIPGVGSIVGGSLVNTLERVPFKKGDAFVAFTGLDPRPDESGHHIGRRRLSKRGPAELRRLLYLGAMAAAKTKTWKPLYERQRAKGLSTTEALVILARHIARTAWSIYTHKTDFDPQRLTPGLT

SEQ ID NO: 167973 - protein, 355 aa, unidentified
MKQFIGCDAHKKFSVFVSMNEEGEYGPAIRVSHDPEEFRSFLAQLPAGSHIALETSGCYYWMVDAIEEAGHKAHLAHAFTAKRRMEGRHKTNDRDARGLAMLLRNGTLPEVWIASKEMRDQRELLRWRMNLSNMRTRVKNRIHAMLQRYNIDIAVSDLFGDTGRAALLARQNELPHCNHRTMLEQLDLIDVVETKITECEEALDEVLYPSVERDLLDSLPCVGKVLSAVLALEIGNVERFAGPDRLASYAGVVPVARESADWKRKDNCPRDCNTYLKWAYIEAANLISIRRRTPSWRERHVVQLYERVKEKTNQHGKATMAVARHLAEASYWILKKQEIYREPQSRRRTLSSTHG

SEQ ID NO: 167974 - protein, 318 aa, unidentified
MPPAAAVYVGIDVAKAELVMAIRPSGERWTATNDEAGIQQLLTRLREDAPALVVLEATGGYERAAVAALATARLPLVVANPRQVRDFARATGQLAKTDQIDADTLALFAERVRPDPRALPDDSAQALDALLTRRRQILGMVGAERNRLEHAVPAVRRGIVQHIRWLERQLHDVDDDLDRTIQASPVWRAKENLLRSVPGVGPVVSRTLIGDLPELGTLPRKQIAALVGVAPLARDSGTLRGKRLVWGGRAPVRAALYMAALVATRRNPVIREFYQRLLTAGKPKKVALTACMRKLLTILNAMLRANTAWRHTDHATIA

SEQ ID NO: 167975 - protein, 353 aa, unidentified
MRCEVKALVDGVDEFIGIDHHKVRSQVLVKDREGKVLKRGRIATREEALGKFLGPSNGAVRMAVFEAGPRYRPMYRWLRELVDEPVMANPGRLKIISETAYKDDKIDTKKLTDLLMLGMIPEAYACSDEAWDRRQFLRQRAALVRMRTSLKNRIHALIDLNPESKPERPKATDLFGKQGMGWLKRLELPGADRKRLDQLLEIYDSFDGQIRKTDKDVRRMVREDRRAQHLATIPGIGDFFAALILAEVDDIHRFNKSKHFVSYTGLVPGRDQSGDREHRGRIHKCGSRWLRWALVEAAIPATRTNLALKNLYDRVCRKKGREAGPNVAKVAVARKLAEIVYRVLMEDRAYEVR

SEQ ID NO: 167976 - protein, 478 aa, unidentified
MRPTRAVVFKQVGRAMQENRDTNSKPNNEAGIEELPVLRPNVAGIDLGSEIHWVCAPKVDRTDVEVETFGATTPELERMAEWLKERKIESVAMESTGVYWIAPHEVLERHGLEVVLVNTRELARVPGRKKSDHVDCRWTQRLHSCGLLSGSFRPSEPVCLLRTLVRDKANLTAEAGDWLRRMQKSLDQMNVRVHRAVSDIDGVTGMRIVRAIVGGERDARQLAKMRDRRCGKTEEEIAEQLTGHWRQDHLFSLGQALKMYDAIQERISEYEQEILRQLAEMERAECRGQEPPKLNNPQKTKAIKKRGEEPLRKALYRICGVDLTAIDAIGVETVQVVLSEYGPDLSKFPSERQFGQHVTLAPHKPMSGGKRVQKKKRGGASTRVAAALRMAALSLRHSQTALGAYYRRIARRLDGDVAVFATARKLATLIYRLLRWGQPYVDEGAAAAEKRYQEARIQRLAAQAKDLGFQLTPKASTA

SEQ ID NO: 167977 - protein, 420 aa, unidentified
MTGVTQPLPAPARGASGLAKTCPPGMRGSRPGEPEDGLIRSLSAVAGVTPHRIAPLALDLQAGPTRAVTSWRKATMSMLTDRVDFVIGIDTHKETHTAAVVDALGGLREVTTVRTEAAGYRALLAWARTVAAGRRVWAIEGTGSFGAALTAQLLEAQEWVCEVDRPERPNRRRGGKSDELDAVRAAREALSSKHLAQPRRRGEREALRVLKATRAQAVRIRTAALTNLKSLVVGAPDELRRGLRGLSSEQLVSTCSRLRPTSALDPESRATAIAMRATARRAQTATAEVSELEAELTELLRGHSELLAEQGVGTVVAAELLDCWSHRARFRSEAAFANLAGTAPIPASSGQTVRHRLNRGGDRDLNCALRTVVVTRLRHDARTRAYVDRRRTEGKSDREIQRCLKRYIARHLFRVMEQAA

SEQ ID NO: 167978 - protein, 477 aa, unidentified
MPLLGRNHNHTNMKSKTPKSKKEKKKISVNEGWEAINPRAAGIDIGAKEHFACVPPEATPKNVRSFGTFTADLNALADWFKECGVTSVAMEATGVYWIPVFQILEERGFAVILANARQTKNVAGRKSDVQDCQWIQRLHTYGLLQGSFRPEDPYCVLRTYLRYRDELVSARSTQCQHMQKALQQMNVQLVQVLSDVTGVSGMAIIQAILEGERDPVKLANMVDRRVRATPVQLQKALEGDYREEHLFVLQQAFSLYGTYEEKINACDEQIVREIATLSDKVDPQLKPLPPRKEGRPASKDKMQGQDMREVLYRKFGADLTAIEGIGVTTALVVLTEVGPDVSGFKTEKHFCSWLGLCPDNRISGGRVLSSHTRRVINRASDALRMAAVTLERSQSALGGFYRRMKGRLGAAEAITATAHKLARIIYRLIKHGEAYVRQGMEDYERKFRERKLYALRKTAISMGFNLVEKQEVTSAVS

SEQ ID NO: 167979 - protein, 425 aa, unidentified
MIRNLKERRPFPMKLFVGIDVSSKDLQVVALDSEDQNKRLINDSFVNDLYGASELKKQILDLAQNKHYDQIIIGMEATSIYSFHPAYFFQNDEDLQKLNVETDVINPKETSRFHKVFEESKTDPLDAYYIALYLSFGHYRVSIARQDNYLALERLTRTRYELVQELTRTKQHFIEALYYRVNKLITVDKDKINTPLFGATMMSIVTDSKTLDEIADMPTEDLISYLQVKGRGRFSDPDTLAKAIKKAVRGSYRLGKVMTDSIDAVLSVHYNMIQSFNESIKDLEKAIDRIVDALPESKILESIPGIGKTYTAGIIAEIGSIDRFDKEEQLAKYAGLTWNQYQSGDHSNEHTPMARTGNRYLRYYLIEAANLARLHDPVFKKYYQKKYDEAVYSPHKRACTLTARKLVRVIFKLLKDDKLYRTPRS

SEQ ID NO: 167980 - protein, 312 aa, unidentified
MNRAIIQIGVDISKNRLDVFYGDTRQAEAFANTPAGVLTLATRLATREESVRICYEATGGYEKTLEKHPWPEPLRLARLDAARVHQLRQALGQQAKTDRLDAEALSHCGSLLPGRAPVTDETLRAIKEVSGRRRQLVAQRATLLKQKQQTDDALLLEQMEALQKLLSEQIETLNKRLLETILRSQALQAKARLLEGVPGVGPVLVQTLLACMPELGDVNGKEIAALAGLAPFARQSGTKTGKAFIRGGRSSVRHVLYMATLSAVRSNAVLKTFYRKLIDSGKPAKLALTACMRKFIVILNAILAKQSPWKPA

SEQ ID NO: 167981 - protein, 371 aa, unidentified
MSVYVGIDVHRKRSQVAVVAEDGKVQLNRNVVNGSEPMLRLIGGLPAGTPVAFEAAYGWGWLIELLEDYGFDPHMVHPLRCKAIASARLKNDKVDAAILAQLLRADLLPEAWIAPLEVRQLRALLRHRASLVRLGTQLRNRIHAVAADHGYDRAASYWTGPGRGWLAELDLPPVSREIITDCLAFIDALAPQIDRLDGEVRARAKADPRVKVLTALPGVGQFTVLVMLAEIGGITRFASARKLASWAGLTPTVRGSDFTVRHGHISKQGSAWLRWVLNQAAQTAKRSPEFSATYAAIAKRRGKKIATIAISRKLLTRAYHLLAAAQAAGAAATSNAAGTATTHTETGRVTKPRASSLLRHEPATGRARSSD

SEQ ID NO: 167982 - protein, 347 aa, unidentified
MQITTIGLDLAKSVFQIHGVDATGQVAVRKSLRRSQMLPFFAKLPPCLVGIEACGTSHHWARELIKLGHEVRLMPPAYVKPYVKRGKTDAADAEAVCEAVTRPTMRFVPVKSPEQQAALSIHRTRDLLVKQRTQLINMIRGLLAEFGVDIPKGLERALLMARQIVDGKAPEVPIEAARIVATLSQQALDIHVRLRGIDRDLAVWLRGNDVARRLMTIPGIGPVSATALAASVTDPHQFRSGRQFAAWLGLTPLQKSSGGKERLGRISKMGDKYLRKLLIVGMTSLVRRSKYNPDKIDPRLADLLARKPTRVATVAMANKTARVIGAIMARGETYRTDHRPALAARFS

SEQ ID NO: 167983 - protein, 355 aa, unidentified
MIIIGVDFHPAFQQIASVDTESGEFQEKRLAHPEEAETFYRALAVAGQQVRVGMEASGHARWFERLLAELQFALWIGDATRIQSTRGRKQKTDRQDAQHILKLMLKDDFPKIWVASGENRDLRQLLWHRHRMVQARTRIMNQLQAVALNEGLRCKKRLWRTSGRQQLESFRLAPWASRRRHDLLELLDRLKPTIAELSEAIEQEAENNPEARRLMTHPGVGALTALAFVLIIGNAERFRCGKQVASYLGLVPLEKSSGNRRRLGHITKQGNSMVRFLLVEAAQVTVRSLPEWRSQYFGLVMRRGRKTAKVAMARRLAIRLYWMWREGRDYEQQKSSVRTQDGPEQVMVCSTTPSN

SEQ ID NO: 167984 - protein, 415 aa, unidentified
MRSFGTFTGDLHRLADWFAECGVKTVVMESTGVYWIPIFELLDERGVEVFLVNARDAKHVPGRKTDVSDAQWLQRLHSHGLLRASFRPKGEIAELRAYLRQRERLLDYAASHIQHMQKALTEMNLQLHHVVSDITGATGMRIIRAIIAGERDPTVLALMRDTRCHAGVDIIEKALTGYYRAEHLFGLEQALALYDEYQQKVSACDLRIEAVLMTLASLRGNRGEPLGSPRRRMPRQANGPAFDVREALYALLGKDLTQIHGLGPYVALKLVAECGDDLSAWPSAKHFTSWLCLAPSNKISGGKVLSSRTRRSGSRVAALLRLAAVTVGRTETALGAFYRRLSARIGKAKAVTATARKIAVLFYNALRHGMDYVDPGASYYETRYRERVICNLHRRAKAFGFILQPDTVASEVAVS

SEQ ID NO: 167985 - protein, 348 aa, unidentified
MTMVCGLDLHRRQITFDAFDVESGDVWRGRLWQPDRARFRRWLRDEVAPRADGRPVALAVEGCTGWRYVVEEITAAGFEAHLAEPADTQAARGRKRHAKTDRSDSQLLRELLASGDLPESWIPPTSVLEWRERVRLYKSLVDHRTVWVQRIHAELYQHGVAVPESAIRSATTRGWLAGGDVELSDAARERIAAGYRMIDATDAEAQPLKRDLQRFGSRQPACRALVDAQYGIGGLIAVAVWSELGDCRRFSRSMQVVRHSGLDVTVDSSDRRRASGFLSRQGPETLRWALYEAAKNSSHQRSPDHDYYLAIKARHDGKLAAISMARKLARRCYHVLRTMEADCVYAIP

SEQ ID NO: 167986 - protein, 321 aa, unidentified
MTDEEDRVVAEKRLPNDLAKILGLLMPWREELAGVVVESTFNWYWLVDGLQAAGFKVHLANTTAIKKYAGLKHSGDETDARYLAHLLRLGILPTGTILPPAQRAVRDLARKRMQLVRSRTTHILAVENITARQHGARISSNQVKRLTAETVDQMALPEDVALAIKTNVAVITTLSAQIDLLEKRLQEKIGERAEYRLLTSVPGIGQVLATTILLETGPIERFAAAGNFASYARCVDSVRTSNGKKKGEGNTRNGNKYLAWAFVEAANFALRYCAEAKRFYERKKAKTNNVVAIKALAHKLARACYYMLREGTDFDVDRAFA

SEQ ID NO: 167987 - protein, 350 aa, unidentified
MFIIGCDFHSRFQQIAMLDPTTGEVIERRLDHENEEAKKFYATLPSPARVGMEATCDAQWFERMLREHHHELWIGDAAEILAAMVRKQKTDSRDALHILDLLLSNRFPRIWVPSPAERDLRQMLRHRHKLIRFRTSVMNQLHALAMGQGLCRRKKLWTQVGRTELQGLILDPWASLRREELLQLLDQLDPWIKKLDEAVIQAAKSRPPAVCLMQQAGVGPVTALAFVLTMGPVSRFANSKKVVSYLGLNPSEESSAGRQRLGAISKQGNPMMRYLLVEAAQTASRLDPELRRDYQRLKFRRGSAVAKVAIARKLAVRLYWKLREATQSVPSARMQGSPASPVVGESLSAN

SEQ ID NO: 167988 - protein, 412 aa, unidentified
MQTLVECGCGLDVHQATVVACLLSVLKSGKVQKQMRMFGTTTRELLALRGWLLSQRCTHVAMESTGVYWKPVYAVLEAEGALEIVVANAQHVKKVPGRKTDVKDAEWIADLLCHGLLRSSFVPPKPIRELRDLTRYRRKLVESQAAERNRLLKLLESANIKLASVATNVFGVSGRLMLRALIEGKTTTREMAELAKGKLRNKISELEPALEGKLEEHHRFLLKLQLERLEAAEKDLAILEQRIQEKLEPYVTQLALLQEIPGVDWTLAAVIIAELGVDMKVFGNVSQLASWAGVCPGNNESAGKRKGSRIPKGNVYLKTALVEAANAAARAKGTYLRDKFFRLKARRGYKRAAVAVAHKILVAIYHMFSHRVCYTELGDLYLDKLNKHHLTRNLVHRLERLGYAVTLEQKAA

SEQ ID NO: 167989 - protein, 344 aa, unidentified
MGEVITIGLDIAKSIFQVHGVVEAGAILIRKRISRAKMLEFFANLKPCLVGIEACPAAHHWGRELQALGHTVKLMPPSYVKAYLKRSKNDANDAAAICEAVTRPSMRFVPIKTKEQQAALMLHRARQLLVRQRTMLSNAIRGHLAELGIVSAKGRKGTGALLEIIADAEDGRVPPAARGILDVLARQYSAIGAEIGSIDRSIVAWHRSCEASRRLEEIPGIGPIVATALVAEIGDWKAFGSGRSLAAWIGLVPRQQSTGGKDKLGSITKQGNRYLRWLLVAGAMAVIRYAQKHGTLKRPWLGRLMERRPTKLAAVALANKIARMAWAIIVHGDRYREPKPLLAA

SEQ ID NO: 167990 - protein, 349 aa, unidentified
MRIIIGCDFHPGYQQIALMDMDSKELVEKSLSHENKDEVRVFYAGLPGPVRVGVETSGQSQWFEQMLAELGHELWIGDAKKIRAAADRKQKTDRRDALLMLQMLVENRFPRIWTPTAKERDARQLLMHRSKLVRMRTQVKNQLQALALNQGLQRKWKLWSEAGRKQLRALPMLPWAARRREELLTLLQQLETSIGELDRAVAEEANTRVEAQRLMTHPGVGPVTALAFVLTLGPPSRFARGKQVASYFGLIPSENSSGGRQRFGHISKQGNSFMRWVLVEAAQSAVRCEPQMRRDYLRLAHRKSRALAKVAAARKLAVRLYWMLRGEMDYAQLIQGSCAGEPGSSCGRR

SEQ ID NO: 167991 - protein, 421 aa, unidentified
MTTIAKKLAQVKPGTLLAGFDLGLDSIAIVILDAGGQRMDRFKAPQSHDGYEYLRQRLLRVVEQQEASGILVGMEPTNYYWKQMGTYLNQQQMPFRLVNPYTVKRHREGDQLDKAKDDWRDAFMIADLLRTGKFNETLLRTGPYAELQIGYATYWRLRHDRGRQLTLLTNSVRQVFPELQQVFKDLTGQTAQAVLQSGPAAARIRARSWADFIAQVRSAADGQRLAVSRLRKLHGLAADSIGLTDGLDSLCFDLRSSLATLRLLDQQTDDLFALLLNHFWALPEAPYLCSIEGLGQAFALGILAETGDLACYTTGKSLIKLAGSQPTPKASGRFQRGKTPFSKQGRARLRLVLYWATLQALSRNAAIAYHYQRLQTRARNPLTKMEAIGACMNKLLWYVWCTGHDRDHYDPDRWQTLGEPA

SEQ ID NO: 167992 - protein, 459 aa, unidentified
MDTRIIGIDLAVKAAHKAIVLDQASNRFVSKMLTFHTDPAQIDRVLAAARADAPDDVRLVAVMEATGMAWYSVGVYLHRHGVQVYRVNGQQVADLRRVYKRHAKSDRIDARVLARLMLVCPERLHRCSFPTGPQMALQRACREVALLKEQVIADKNRLLATDQFAWLGLSDIVSAYDDAACWVRAHWYDPWRVVQAGEAAITAAWCAASPQQPADTSWILDLVRRAEQVIALYGDPEQISYALLQAHLQRVQERLRTAQAQVDHLRLKLVRPLYRQLHPQRHLESLRGVGQDSAAVYIAFVGDILRFPSLHDFRGWSGMIPFSRQSGEGQAKGLHITKAGPNLVKATAFIDAQVARQWDPQIAAIYHKQMMSYGKHHLQALCACATHLLDRIYVVLREKRPYELRDVDGTPLDKHLARQICQERYHVPEEVRRRNNHRVRKERRERKVERRLNRRKKKQ

SEQ ID NO: 167993 - protein, 427 aa, unidentified
MAVVMIGVDPHKASRTAVAINAAEQPLGRLRVRASAVQAERLLEWAQAWPERAWAVEGAGGLGHLLARQLLSAGERVLDVPPQLAARVRLLATGDVSKNDPGDARSVAVAALRSAQVREVRRDDHATVLKVRAKRYRDLGRARTQVACRLHQVLCELVPGGVSGEITAGRAGQVLASSAPAGAVDAARWELAAELTEDLRGAGTRIRETRKKAAAAVRAAGTSLTGLFGAGPVIAATVIGDVRHVSRFPDRDHFAAYNGTAPIEVSSGGRKACRLSRRGNRRLSHAIHMAAVTQIRYRHTKGRACYDKKLAEGKTPKEALRALKHQISDAVFACLQEDARRAAAAAGKSPGGQPGNHSVSRAAGSHPDHRLFGQATPGPATHPTTLTAPFPAPLPSPASELPGPGPGAARPRGGARRASSTRPPASR

SEQ ID NO: 167994 - protein, 328 aa, unidentified
MNKNKKIYGVDISKSFFDVMDNSGKHNQFSNEMGGFKSFLKTIPKESLVVMEATGYYHYRLAQFLYENDVEVSVVNPLSVKRFIQMKLSKVKTDKSDAKAICEYAQAIDVPLYTAKNAIQAECLQLLSLQDLYLKQRTAIKNKLHGENTLGTPSKMVSRSLTRMLKQQEKELSQVETKLEYLVRKIQNDQLEQLISIPGIGKKTAMLLIVITNGFNNFENAKQLCCYTGITPTIRQSGTSVRGRSRISKVGNQKLRNLLFLCSFSACKYNKACKELFERIVDQGKSKKLALIAVCNKLLKQAFAIAKSGINYQEDHCSYITNINRSIS

SEQ ID NO: 167995 - protein, 348 aa, unidentified
MALTAISVLGVDLGKNVCSVVGLDRSGAVVMGRKVRRETLIGLAEKLPQCVIGMEACCGAHHLGRMFATHGHDVRLMSPEYVRPYVKAQKNDDRDAEGIAEAATRPTMRFVDLKSQDQLDIQTLHRSRDRLVGERTALINQLRAILLERGHVAPQGKRKLERFLSVLMDEQGGAELSPRIVLLIADARAQWAELDQRIAAFDAEFVHWARENEEARRLTTIPGVGPTIASALVAAVGRAENFDRGRDLAAWLGLVPQQFTTGGKPKLLGISKRGNKYLRKLLVHGARAALPHVAERDTPLGRWAKGLLGRAHHNVAVVALANKLARIAWAVLRRGQTFAVKGVHSMAV

SEQ ID NO: 167996 - protein, 391 aa, unidentified
MSKRFFGLDLHKKYATICGISQQGEVVVKKDHLPLDRLPTWVAGTLTGEDAVALEATTNTWWAYDCLAAHAGRVVVVNPIKTRLIAQARISTDELSAEALARLLQSNFICEVWVPDERTRGYRQVISHRIRLAQEGTRLKNRIHSTLHRQQLRSPYANLFGQAGRAWLRKLELPELEKLLLRQNLDLLKGSEEALAEVDQHLARLAQEDQRVPILMQIPGINIFSALAILAEIGEISRFASAKKLSSYAGLVPSLHRSGQKHTTGPITKAGRSRLRWVLVEAAHVAARHDPQLGRFYYRLRAKKGTNVAVVATARKMLVVIWHLLSGDGVYRGRQVQMIARKFLEWGWKVGERDRCGTTKEFVFTRLHQIQINNLTHVQAGRRAHALSGPD

SEQ ID NO: 167997 - protein, 374 aa, unidentified
MTIVADNLSAGTTVVSVGVDTHCEFHVAAVIDMVGRQLGHETFAASPAGYRALLAWADTCGTVGVVGVEGTGAYGAGLTRALAGAGVPVVEVDRPDRKARRDQGKSDPIDAYAAARAAASGRASGTPKSRTGDVESVRVLRVARNGAIRARAKALTQLKALIVTAPDGLRAQLDRLDGARLIAACARLRPTRHQPAVPSPFAKRPPRPGRLADPAAATKRALASIAGRIKLLDDELAQLDDELHVLLTPLAPTLLGLMGVGLDVAGQLLATAGDNPHRLRHEAAFAHLCGAAPIPASSGKTTRHRLNRGGDRAANAALYRIALCRLRWDTTTRAYVERRTKQGRTKPEIIRCLKRYIAREVFAAIQADLGATTP

SEQ ID NO: 167998 - protein, 412 aa, unidentified
MRRVIGIDIHRTFGEVVIWEDGRLRRLGRVDMTRTALEGLGGKLLSTDEVVIEATGNCMAVSRVLSPFVRRVVIANPLQVKAIAHARVKTDKVDAGTLASLFAAGYLPEVWTPDAETERKRRLTARRYQIVRHRTRIKNEVHAILHAHLIPKCPHADLFNQRGRAWLGRQDLPDDERQAIDRHLRELDRLGEDLAILDREIAQGALDDGAVKRLMTITGVKLTVAASLMAAIGDIHRFSDPGKLVSYFGLNPRVRQSGLGIAHHGRISKVGRSHARAMLVEAAWSAAKAAGPLHAFFVRIRARRGHQIAAVAVARKLAVLCWHVLMKEQDYLWARPALVANKMRAMELQAGLPQKKGNQRGPAYAYNVKALRDQEMELAQQAERNYARFVDRWRTRSPKGQARERLTPARNE

SEQ ID NO: 167999 - protein, 294 aa, unidentified
MYLKEDIILAVDYHDENLVIRQFNCHTGQERLLKYRTTSKNIRKVICDSASEVAQVGGRVFWIMESTTGWARVKKAIGPLATMLVANVLQMPLPPKAYRRKTDKIDTGRILREFLNGSLPVAFQPSVELRQIRRLVATRESLVSRRTALRNWINRYLAHETWRSRAGLWSAKGMRSLKRFAASVEGPDKVVLSVKFDSPEELISFAGLAPGIQQSDGSKREGRIGGGGTDKHLRHYLIEATFWARRVPRYFKTYERMLDKRGPKIARVVVARMMLRSIHKMLQAQVRFNRLRVA

SEQ ID NO: 168000 - protein, 407 aa, unidentified
MEVLYPRCAGLDVHAETVVACVRVSAGRSTQYAHRTVATTTRGLLELAQWLSDQQVTHVAMEATGVYWKPVWHVLEDAFMLILANAMHIRNIPGRKSDTNDATWIADLLALGLIRSSFVPPAPIQALRDLTRTRKQLVRELARHTQRIQKTLEDANLKLTEVVSDILGTSGRAMLEALVAGETDPERLAALGHGRLHASHAELVDALHGRVTAHHRFMIALHLQQITSLEAAVDDLDARIEETLRPFRAAVDLLLTMPGLKATAAAVIVAEIGTDMTRFPSAGHLLSWAGLCPRLDESAGKRRSTRTRPGTPWLKTTLVQAAWAAARKKDCYFHGQFLRLKSRRGPKKAILAVAASMLTDVYYMLRDGEVFADLGDQYFAQRDKARTTRRLLKRLRDLGVHVEVTAA

SEQ ID NO: 168001 - protein, 338 aa, unidentified
MSLYAAIDLHSNNGVLAVIDEDDRVILERRLPNELPLVLKVLEPFRDELVGVAVESTYNWYWLVDGLLDHGHRPRLVNTAAVPQYAGLKFGNDHSDARHLARLMRLKILPEGYIYPREQRAVRDLLRQRFRLVQQSTRLIHGVQCAWSRRTGTRLGVDTLRALSEEELIRVLIDPCERLAMQSQIAVWKVLQQQVRQVEKAVLAQLDDMPALRAVQTTPGIGRVLGATIVLESGPVERFEAVGDYASYARMVQSIRLSNGKPKGKGNVRCGNRYLAWAYREAANFAIRYNPEAARWYQRKLAKRPLVLARKALAHKLARACYFLMRDGGTFDNARLFG

SEQ ID NO: 168002 - protein, 385 aa, unidentified
MGTQTFIPRDYDVFAGLDVDKKSISVTFTDHQGFLKSLNMPYKVEHLVNYVRKHYPDKKVVFAYEAGPTGYGLYDGLEAQAYPCLIASPSMIPKAPGQRVKTNRLDSRGISENLRGGQLKGIHVPTPLYRELRHLTQLRDTLVSEMVRMKQRIKSLLLMEGLEFPPAPAGSQWSFLVKKKLRELPCSTTVRFKLDRLLDSLEFDEKQVLKATREIRRFCQTDPELSQCIEYLKTLPGIGWIVASQLLARVGDWRQIKNIHQLPAFLGLVPTENSTGERTERGSITHSGDGRLRSKLIQASWSALRQDGELREFFRTVAKKHPRHLGSRVAIVAVAHKLSVRASVVLMKQRPYEVRQKVQSAPLTQEETVPQGTTRRLAVPGETNS

SEQ ID NO: 168003 - protein, 394 aa, unidentified
MEAVTSQPHTPAAIRTDLAAIFVSLELSRSTWLITSLSPGNGEKMSKHSVGGGDVAALLHRFAQLQEKVRSRTGNHVPIVSIQEAGLDGFWIDRVLKANGIESYVVDPASIAISRRRRRAKTDKLDGEALVRALLAFKRGEPRVCAMVNPPSPEEEDRRRVCRERKVLIAERVKHVNRIKGLLFGQGISGYEPLRKNRRKQLDELHTGDGRPLPTHLKTQISRELDRLELLLEQITAVENERDTLLAAQKDSVAATATLIPAGAMLCDVKGIGLELAAVLWTEGLFRHFDNRRQVAAYAGLAPTPWQSGTIDHEQGVSKAGNPRLRTTMIQLSWLWLRHQPQSALSLWFTARVQSSGGRTKKSAIVALARKLLVALWKYVTAGVVIEGAVLKTA

SEQ ID NO: 168004 - protein, 463 aa, unidentified
MTRKRTGTRKRSAQSKLDLKTVEIVHPDAAGIDVGGSEHWVAISPDRDAEPVRRFGSFTADLRDMARWLVEKGVRSVAMQSTGVYWMPVFEVLEQHGLEVFLVNARHTKNVPGRKSDVQECQWLLKLHAFGLLNNSFQPTDEIRIARTLWRQRGNLVAAASGTIQRMQKALIEMNVQLSSVLSDLSGVSGMSIIGAILEGERDPWKLAALVQPEVKAAPQAIAKSLEGNWRKELLFVLRQEVELYRTYQEKIHDCDLQLREHLKSFGSVVNLAAQPIGPKPKGKRSKNAPQFDLRTELYRITGIDWSQVNGIDVLTAQTVIAECGADLSAFPSEKQFTSWLGLVPTNEQSGGKILKRRTRKVVNRAATAFRNAATTLLRSQSYLGAQYRRLRTRLGAPKAITAAARKLACLFYRLIKNGQQYVDKGTEYYETKYREQQVRILAKKAQRLGFQLVTPTPLEPAL

SEQ ID NO: 168005 - protein, 464 aa, unidentified
MRKTRKWGRKPGKKIVDLTAGLEVLRPHAAGIDVGNAEHYVAVPAGRDPQPVQTFGSFTADLHRMGRWLQACGIETVVMQATGVYWMALYQILESYGFQVYVVNAKYTKTLPGRKTDVLECQWLQKLHTFGLLNNSFLPPEKIRVLRTYLRQRENLVAAAATCIQQMQKVLTEMNVQLANVLSDLSGMTGMRILQAILDGQRDPQRLAVLADPRVHASRKEIAQSLEGDWREDLLFVLQQVHDLYFTYLESITACDRRIEAHLKTLEAKADVAAPPLPETSGQNRLPRRKHIPQTHLQEELYRISGVDLTRIDGIQVQTAQVVISEVGLDMTRWPDEHRFASWLGLSPNHQITGGKVIRRGTKRVVNRAATALRLAARTLHHSKSYLGAKYRRLRAKLGAPKAITAMAHQLARLIYRLLRFGTQYHDKGMEHYERKYRETQMKWLLKQAAQLNMQLIPVQGVIR

SEQ ID NO: 168006 - protein, 401 aa, unidentified
MDPQIRVGIDVGCKAHRVGIANPDGKVLEEFDISHTAAGFCDFFRRIDHHKQELDLPVAVAMEGFNGYARPLDRMIQEHGYTLYNVNNLKLARFKEVFPGAAKTDAIDARKILELFHLKDHLPLAKDALQKVVSAPLVNDKLKRLSRRRRQLVNEKVRVASRIQSDMQAVCPGLLAITNNANNLKFLRFLTYRDDLTQLARLQSTTLLKIPGVGQNYARIIQEWQRKASFSAEVEYVGPMIITDARRILELLDQVHILDEAMAALADQSELARRIGSIQGFGKTCIAELAGEIGTTERFAGERSLALYVGMSPLSKDSGQHHGSKCPRSVNHRAKAAMMTAVAHHIRCVPESRAYYDKKRADGKKHNQAIRALGRQLVRVLWSMLKNERDYELREVIPRVT

SEQ ID NO: 168007 - protein, 355 aa, unidentified
MTTITIGVDLAKNLFSVCSVNATGRVLDRQEFRREKFAAWLAQRPAGTAVAMEACSGAHHWARVCVELGLQPLLMAAQFVKPFRKSAGSKNDRNDAEAIATAARQGNMRFVPLKSLDQQVRLSWHRVREGYKAEGLAIGNRIRGLLAEFGVVIAPSDAALRRGLADLDAVSLPSELIELIRDLAAHWEAVVKRVITCDRRIEAHARADERCVRVRSIIGIGALTADALVATIGSGIEFKNGRQLAAWLGLVPRQHSSGGHARLGGITCRGDAYLRTLLIQGARSSLQRAKAVSVEKATPEQRWIRSLTQRLPFGKLLVAIANKHARQLWVMLARKVDYDAHALYHHPMHCTEATA

SEQ ID NO: 168008 - protein, 311 aa, unidentified
MTETNIGIDISKDHLDVHRLPGDERRRFDNSKAGHKALIRWIGETPARVVYEPTGYYHRALERALAAAGMPIAKVNPRQARRFAEATGNLAKTDALDAAMLTRMGAVLSLEARPVPSGIINDLRDLRTARNALIKDQVAAQTRAKAITLPLLKRQNAARLKQIEAQREAVDAEINALIQSNSDLAQRFAILCSIPGIAEVSAAMLLIEMPELGGLDEKQVAALAGLAPIARQSGNWKGKSYIRGGRQQVRQGLYMPALVAIRFNADLKAKYEQLIKAGKAPKQAITAVMRKLIILANALLKKGRKWQTRMA

SEQ ID NO: 168009 - protein, 366 aa, unidentified
MCVGLDTHKARIAVAVAEPGRSGEVRFQGEIANQPEAVRRLIERLGAKYGRLSVCYEAGPCGYGLHRQITALGHDCTVVAPSLIPRKPGERVKTNRRDALTLARLHRAGELTGVWIPDPTHEAMRDLVRARTAAMEAVRRARQQLQGFLLRHGRVFTGRKAWSPAHRRWLAGLRFEHPAQQIVLQEQIDAIDEAERRRDRLGGQIRELVPAWSLAPVVAALQAMRGVAFLSAVVLAAEVGDFRRFANPRQLMAWLGLVPSEHSSGSKVERGGITKAGNGRARRVLVEGAWSYRFPARVTSPIQARLEGVPDEVRAIAWKAQLRLCARYRRLVAAGKNANLVTAAVAREMAAFAWAIARQVRPAAAA

SEQ ID NO: 168010 - protein, 338 aa, unidentified
MTKLICGVDVSSATLEARLGRDGPVERFARSAAGVAELAAFCKQHQVAFVAMEATGGYERLPFGVLWAAGVPAAIVNPRAVRRFAEAMGILEKTDRIDTGVIAWFAEVKRIVPQPPAAPAQQQLAALVTRLRQLTELRTAQTNQRRLVTDPTVRGSFDALLKLVAGQIRELADRIVQLIDSDPLWQKLDAAFRTIKGVADRTVARLIAELPEIGTLSNKAAAKLAGLAPIARDSGKLAGKRPVRGGRSGIRSILFVVADVVRRYDRDFTDCHRRLTEAGKPKKLIRVALARKLLVRLNAKARDARCQLETGRSTVACWRTDRCQPWRRMRSITPTATP

SEQ ID NO: 168011 - protein, 386 aa, unidentified
MQKLNDLSRSLTAFEPDGTLIAVIEMSLSSWLVAGIVPGVERQPLKKLAVDESALLKLLHRWRDEAEKAGRRIERIAVAFEAGRDGFWLARWLKARGIEAYVIHASSVAVSREHRRAKTDRLDTELLKRSFLGWLRGERDHCKMVEIPTMKDEDAKRPNREHDSLIGERSRIVNRMKAALVRLGIRGFNPKLKRANTRLDGLRTPEGEPIPPNALAELRRDMERRRLVNNQIRQIEEERLERIEQAPCDGPHVMVRLLARVMGVGIETADMLVHEVLSRNMRDRRAVARYAGLTGSPDESGRKRREKGLARSGNARVRRGMIQLAWRFLLHQKNSALTKWFRSRTENARGTRKPMIVALARKLLIALWRLVREGVVPDGVVLRPAQ

SEQ ID NO: 168012 - protein, 363 aa, unidentified
MHYVGLDVHARRSSLCILDSCGKVVKRLEVKGSWPKLMERVAAEVPRPFSVCFEASCGYGHLHERLSALAERVAVAHPGKLRLIFRAKRKNDRVDAEKQAKLLYLDQVPLVHVPGADVRAWRGLIELRRRLVGRRTAVKAQLRALLRGAGCCDAPAGKALWSKRGLKWLAAAALGEADALRRDLLLEELAQADERVGRVTRELDRRADAHPGVALLRTIPGVGPRTAEAFVAYVDDVRRFARTRQVGCYLGLVPCQDSSAGRDRLGHITGDGPPTARMLLCEAAWQAVRRSPSVKAFFERVMHGEPGRKKIALVAVAHKLARSMAAMLRAGEAWREEVQEQGRGQGQDRGQGQDRGQGQEPGA

SEQ ID NO: 168013 - protein, 370 aa, unidentified
MGKCSEVFVGMDTAKRKHAVALADTGRDRETRYLGEIDSAPATVERVIKKLAGKYEKVRVCYEAGPTGYGLYRQIGALGHECTVVAPSLIPKKPGDRIKTNRRDAVTLARLFRAGELTSVWVPDAVHEAVRDLVRARETAAADVRKKRQQLLSFLLRHGRIYGGRKHWTKAHERWLAAQAFEHPAQQIVFQDAVDVIEDCAGRLQRLDEQLHTIVPNWSMAPVVAAYQAMRGVSFVVAVTFVAEIGDVRRFDTPRQLTAFLGLVPSERSTGDNVRRAGLTLTGNRRARRALIEGAWTYRYQARISATLQKRLEGLPKAVRDIAWKAQVRLCGRYRRLAATGKKTPVIIAAIAREMAAFLWAIGQHVAPAS

SEQ ID NO: 168014 - protein, 315 aa, unidentified
MTKTITTTAGIDTSKAKLDIAVHGRTERWQVANALPGWRALAANLANTGVTRVGIEATGGYERGVVEHLRGAGFIVLMLQPVQVKAFGRVYLRRAKNDALDAELIAAFTATIDDPRIAPDPRLAEMAQNLTFLEQIEEDIARFKTRLEHIDEPGLRHLVNSDIVRLKARKAAQMRSLAKRLRAYTDLAKRLDLVLSIPGIGERTALALIIRMPELGLVSREEAAALAGLAPFDDDSGKHKGQRHIAGGRGRLRRSLFAAALPAAFRWNKALIALYARLVARGKAHKSALIACARKLLIYANTVVQRGTPWTEKAA

SEQ ID NO: 168015 - protein, 361 aa, unidentified
MKSQRTSVGLDVHARSVVACGLDGETGELFERRLTPDRQEILGWIRSLPPPVAATYEAGPTGFGLARFLLAQAVECVVAAPSMLQRPSGDRVKTDARDARHLARLLHLGEIVAVAIPTAETEAARDLVRAREDVRGDLMSARHRVSKLLLRQGIVYYGGKAWTGAHDGWLRGQRFSAPGLQLAYDTAYDTVLATVDRRDRLDRAIAEMAAAGPYTPVVHRLACLRGVSTLTAFGLAVEIGDWDRLSGRRIGAYLGLVPTESSSGATRSQGGITKTGNGHARRLLIEAAWHHRAPYRPGVGLRRRWDQSSPAARARAQAANRRLHTRWQNFDARKKRPVVANAAIARELAGWCWSLAVLEKD

SEQ ID NO: 168016 - protein, 354 aa, unidentified
MSNKSNSPVATMGIDIGKNAFHVVGLDRRGAIVLRQRWSRGQVQARLANMPPCLIGMEACVGAHHLSRRLQLQGHDARLMPAKYVRPYSKGQKNDFRDAEAIAEAVQRPTMKFVATKTAEQLDLQALHRVRERLVSQRTGIINQIRAFLLERGIAVRQGLRFLRTELPIILATRSDLLSPRMLRVIEELMADWRRLDERIEGLSEEIEAVARQDPACERLMTVPGIGPIISSAMVAAIGNGAVFTKGRDFGAWLGLVPKQISTGDRTILGPISRRGNRYLRALFVQAARVVLVRTKDSDRYGLKAWIDAAKKRLHHNVLAIALANKLARIAWAVLNKERAFECVSTRATSSQPA

SEQ ID NO: 168017 - protein, 343 aa, unidentified
MDLGDRWSFYCVLDEAGKIILEQKVPATPEAMKQTFGKIPRSLIALETGTHSPWVSRLLTELGHEVIVAHAQKVQLITKSNRKDDRHDARTLARLARIDPELLGPVRHRSAKAQIHLTVIRARAELVSARTALVNAARGLAKSFGERLPKCGTQQVSGKLAEGLSAELREVLEPLLREVESLNERIQEYDERMEKIAKEVYPEVSLLKQVKGVGTQIALTYVLTIEDPYRFPKSRAVGCFLGLRPGRRNSGESEPQKKISKEGDRYLRTMMVQGAHYILGPFGEDSDLRRWGLKLAERGGKNAKKRAVVAVARKLAVLLHRLWVSGEVYEPLRNSQKAMRAVA

SEQ ID NO: 168018 - protein, 356 aa, unidentified
MQTQVTKKIDFQGKDLYIGLDVHKKSWSVTILVEGMEHRTFTQPPDPLALYTYLQKMFPGGTYHSAYEAGFCGYRIHRELNDLGIKNIVINAADIPSSQKDQLQKRDPVDSRKIARALEKGLLRAIHIFNRDEEELRSLNRTRFYLMRDFRRSKNRIKSFLQYYGIPIPEEYDNNQWTLKFIGWLKQIQMKTSSGQDAFIGLIRSFEYHREQILILSRQIRIRVREYDKELYNLLKTVSGIGPLTSSALITELGDINRFPHINHLSSFVGLVPRVKQSGETSYNAGMTFRCNEYLRTLLIESSWQAIRQDPALMQYYHQHVINNKGQKVIIKIARKLLNRIRYVMKNRQPYVTGVA

SEQ ID NO: 168019 - protein, 355 aa, unidentified
MDNQSIDYTNQDFFLGIDVHKKSWKVTVRTQNMELKTFSMDPSPEELYRYMNKRYPGGNYHSVYEAGFCGYWIDRELRRYGFKNIVINPADVPTTQKEKSTKTDKVDSRKLGRELENGTLRGIYVPDELHQQLRSLCRLRFKVVQSQTRLKNRIKGHLAFYGYVIPGHDEVSHWSLGFIRWLKTLEFSYGMGRDYLWLCLEELESHRRRLGEVLRLLRRYCREYGIQEEVKNLRRVPGVGFVTAMTLYGELMDMRRFKSIDYLASYVGLIPSVSASGERESSLGLSFRRNRYLRYLLIEGAWVAVREDPALGYVFSRLIRRMSRQKAIVRIAKKLLNRIRHVWNHKEGYACGLIS

SEQ ID NO: 168020 - protein, 462 aa, unidentified
MRTIGIDLAITGDHKAVILDDQGNPIGKVFRLRTDPAGLEALLRRAREGIGEDEPLRAVMEPTGLAWLPVASYLIQRGVIAYLVNGQQVEDLRKFYKKHAKSDRIAARVLARLPWVNPEALHPLQLSPADYLSGQRWCKQLEELAELMTAIKNRVQAWERTFWPGLEEVVSDPFAPWVRRWREKWYDPWQLQAVPTRQLAAFLAETGADPQAVEHLASGLQEVAQRAVALFGTPQGGPSPYVNYAALQDQVLRELRLLAGYEAEHQAVRRKVQELYRQCHPQRHLESIKGVGEEGAAVYTFFIGDVSRFATQKDFRGWSGMVPASAQSSEAEEKGLRITCAGPDPVKKYAYINAEIARQWDPQIAAIYYDQMMHKGNHHCQAVCACATHLLDRVRAVLRDERPYELRDVDGRPVTWEEARAIIAERYHVPEEVRRRTSKRARKHRRDQQAERKQKRRSRPDR

SEQ ID NO: 168021 - protein, 360 aa, unidentified
MADPTTVVTGGVDTHKDLHVCVALDQRGRVLGTEQFPTTMRGYRALWRWLNGFGPLGAVGVEGTGAWGAGLARFLGEAGVKVVEVNRPNRQARRRRGKSDPADAEAAARAVLAGDAVGTPKAATGAVEALRLLRVARRSAIKARTQAANQIHSVIDTAPEALRAQLLGLKQRERVAKAARLRPGDFSSPLGAAKAALAILGRRWLALTEEVNLLDAQLAELVSSAAPSLVAIKGVGVDTGGALLSAAGDNPARLRSDRSYAALCGSSPVDASSGRQRRHRLNRGGDRQANSALYLIVLNRLAWDQRTKDYMARRTAQGKTKKEIIRCLKRYVAREVYKAIMNDLTATAPQHGTEILPKAA

SEQ ID NO: 168022 - protein, 339 aa, unidentified
MQAIRFGIDLAKSVFAIHGVDAAGSVVVRRQLRRGQVLKVFASQPPALIGMEACGSAHYWARELGKLGHEVRLMAPLYAKAYLKRGKNDARDAEACCEAVSRPTMRFVPVKTVEQQCGRALHRARDLLVRQRTQVGNAIRAMLYEIGLIASKGRCGVSELIERIESASLEVPTALLTSLAPLARQWRALAAEIAALDKQLEAEAGADPLARRLMTIPGIGPVTAHAIVAAVGDGRQFASARDFAAWVGLTRLNHDTGGRTRLTGPISKAGDRTLRRLLVLGASSQLRRARAKPEKATIWINGLLARRPVKVVVVAQAAKNARIAWAVLTSGQPYRAAAA

SEQ ID NO: 168023 - protein, 462 aa, unidentified
MALARTLMEGRAVILLDETFAALDVAMRLAMQDLAAGLLALGAGTGCLLALSMASCRRLAAALRPLLLVSQMIPIFALTLWLGYGMAPKIVVSALICFFPVASAQPSPSPQPSCSGYEQERDAVTGPASRPARYRCKIEGKLAPFPYRNPKEDCGMKLFVGLDVSLAKTAICVISEHGKIVKEAQVASEPEALASWVGQLDGTIAAIGIEAGPLSQWLHRGLSDAGLDVVLMETRQVKGALKAMPIKTDRRDAEGIARLLHLGWFRPVHCKSVSAQEVRAVLGARKAVQQSMIALELSLRGLLRNFGLKVGTISRGRFELRIRELTVGNPMLEAATEPMLRARSSLRHELAGLERRVRHLAQDDAVCRRLMSMPGIGAVVALTYRSAVDDPARFTSSKKVGPWAGLTPSRNQSGERDVSGGITKAGDVTLRRALCQAATVMMHRGRSTWLRTWAAQVARRRG

SEQ ID NO: 168024 - protein, 319 aa, unidentified
MSKRSIEFEQVIERGCGLDVHRDTVVATVMGKGIQTETRTFGTTTSSLKELGEWLESLQVTDGAMESTGIYWKLVLHVLRAYPLNLLVVNARHIKNVPGRKTDKADSQWICKLLLSGLLKGSFIPPENIQALCDLHRYKKKLVGTVASEKNRIIRVLEDANIKLSSVVSDTSGVTATYLINGLIEGRKDLEKLVSECYHKKLQSTPGQIVEAINGRLTPHLLFLLKSMQKHIQSVEEQIAEIDAEIATHIKDFEEEIELLQTIPGVGKEGAIGIVAEIGVDMDVFPSEHHLASHSGMCPGNNESAGKKKVQEHDKGTSI

SEQ ID NO: 168025 - protein, 425 aa, unidentified
MGNGVRLEDEELAGKVVAGVDTHADTHWLCVLDENGRVALSEEFPATAEGYAALADAIGDPTGCAAVGVEGTCSYGAGLADELARRGFRVLEVLNKRKGRKRGRGEGKDDAIDAERAARDVLAADGTSVPKLRGGWVDDLRSLLVARDRCVSAAVEAHAAALSLARCAPEAERRRWEGMKRQAMMDAMAGIEEEGATALGRSMLALARAWRACSDEAEALEAEMRRVLEEGCPSLLAVYCCGPVSAAQLAVAAGENPSRLRSEASFAMLCGAAPIPASSGKTSGRMRLNRGGDRRANSALHTIAVRRMRYDPGTRAYVERRSSGTRPLTKAEVTRCLKRYVAREVYRALMHPHDVGERVDRSSLREARRAAGLSQAQVAKALGVAPSSISGVETGRNQCRRLAERYSRWVLDGMPVDIEGPQNAS

SEQ ID NO: 168026 - protein, 343 aa, unidentified
MDHFAGLDVSVKETSLCIVDDAGGIVGEVRVASEPEALLGVLRNPAWHFKRIGLEAGPLSQWLFNALAEAGLPVICVETRHMRAVLKARINKTDRNDARGIAQMMRAGLYRPVHVKTLGSQKLRVLLTHRKLLQSKAIAIENDLRATLRNFGLKVGVVGAAKFEARIKELVENLPDLALLVEPLLVVRRVLRDQIGILHRRLLAIVRDDDVCRRLMTVPGVGPVVALTYCATVDVPSRFRNAKAVGAAFGLTPSQHQSGESNRTGGISRCGDEMIRTMLYEAAQILLVRSTKWSWLKAWATQIARRRGMKKAIVALARRLAVIMHRIWIDGTEFRWTREAVAA

SEQ ID NO: 168027 - protein, 350 aa, unidentified
MPLMKYFIGLDAHSTRSTFAVVNQSGECVLRKTVDTTENNLSYIIDQLQGERELTFEESTMSQWLYLILREKVDRVLVCNPTLVAKKQGAKTDFRDALHLAQELRTNHLVEVHHESSHWIELRTLVSGYQDITQEIIRFKNRLKSIFRASAIRTDEARFYRNKERVSELKNDSEKFVAEKLFAQIEYLEEEKLKYKDQFKLNKKKYRPIRNLITIPGIDLVRSNIIAAIVTTPHRFENKHKFWGYCMLVRHIQESGGRIYGNKRIHGRRELRDVFIGAAESALRTQTSIRDYYDTLKLKGKSHKDAKVAVARRIAALSLSILKNNEVYYDNWEERLRKRKETRKLLNQHS

SEQ ID NO: 168028 - protein, 416 aa, unidentified
MFAVGVDVANGRSRVAVLDGMRNMVAKPFEVVHTAQGFAALVEKLRQLDGEVRIVMEHTGRYYESFAMTMHRAGFFVSAVNPLLIKNYQGGINVRKVKTDKADAQKIAQFALDKWTILPHYTPMDTIRYNLKTLHRQFQLASKTKTALSNNLIALLEQSYPGANRYFDSPVRTDGSQKWVDFVDTFWHVDCVAMSSEHAFVERYRKWCKRHGYVFSEQKAIQLHADARQKIPLVPKSDTCKLLVREAVSQLNAVSRTVETYRAEMDRLASQLPEYETVMGMTGVGKSMGPQLMAEIGDLRCFAHQKSLVGFAGTDPIKEESGDKVSQSAPSSKRGSPYLRKTLFVIMTILLQLQPQEDPVYQFLDKKRSEGKPYYVYMTAGGTKFLRVYYGKVRDCLKAKGLWEVPASASQEVNPG

SEQ ID NO: 168029 - protein, 482 aa, unidentified
MKSKPQEKKKRATNHPTQHHWHEMNRKQRREMTRQIQSEDLSLEVIHPDAAGIDIGNESHYAAVPPSRDSQPVREFRCTTAELKAMAAWLQQCRIRTVAMQSTGVYWVAVYDILEEAGLEVYLVNARDTKNLPGRKSDVQESQWLMKLHTYGLLRNSFRPPQEIRTMRTYWRQRNDLVQSAGRHILRIQKALTQMNLQLANVLTDVSGATGQAIIKAILAGEHDPHKLAEFRDPRVKASEEQIAQSLEGNWQPDLLFLLKQEQDGYEFCHKQMAECDRQLAQYLQRREDRSHGAPLPEEKRKGRLNKKRANKPQFDLREGLFRMTGTDLTRIDSVDVMTATTVISEAGYDMSKWETENHFVSWLRLCPDNRISGNKVIGKGRLPTNNPLSIALKMAASTLRQSKTYLGAQFRRLRTRLGAPIAIKAMAAKLARLIYRMLRYGMKYVDQGAAFYELQHRHLQIKQLKWKAAKLGFQIVGAPAA

SEQ ID NO: 168030 - protein, 318 aa, unidentified
MKVVDHQRQTVTTERFDNTPDGIALMHKLLVKQEVPFNEHSLLVIENTGIYHRQLWRYCSEHSLPIYIGNAAHIKWSFGIARGKNDVIDSKRLCDYAYKQAEDLKATVALDPVYLKLKDLMTSRSMLQRQRNAIKVYLRELKDTHDKTVQDLMEKANEAALKGLDKSIAKIEGLIATTIKETEKAGKNHELLNTIPGIGNVIATYLICCTNNFAGKVSGKQLASYAGVVPFAETSGSSVKGRNKVHKMANKELKAMLHMAAISCIKNYPEFRQYYDRKVEEGKHSRSVLNAIKNKLLLRVVAVINKQQPYVDNTKVAA

SEQ ID NO: 168031 - protein, 340 aa, unidentified
MSSQFFCGVDLAKHHFSLHAVDDRGKVILHKSVSRAKLLTTLANMPPMRIGIEACSGAHYWAREFIKFGHDARIMAAKYVGPYRTKGKNDLNDAIAICEAVQRPNTRFVPVKSPERQAILSIHRMREHWVQERTALINRIRALLAEFGIVIPTGRHAIQRDVPLILEAADYGLPDIARAVLGDSFEHLQVLNQRIDDTELCFDIVTKASPNAQRILKVRGIGPQTATAIIATIGKGEQFDSGRDFAAWLGLVPKQYSTGGKPRLGRISKRGDKYLRTLLVHGARAVITNLGEKQDRLSVWGRNVLERRGMNRAIVALAAKNARIIWALLHNQTEYQDYAA

SEQ ID NO: 168032 - protein, 355 aa, unidentified
MGGLKHQKEKRSMDYFAGLDVSLKSTSVCIVDGTGKIVREVKVASEPEALLTVLRDSAYRFKRIGLEAGPLSQWLFSALAEADLPVICVETRHMRAVLKAQINKTDRNDARGIAQMMRVGLYRPVHVKTLRSQKLRMLLTHRKLLQAKVIAVDNDLRATLRNFGLKVGMVGTIKFEARVKELVENFPDLMASVEPLLVVRRVLREQISILHRRVLAAARNDEVCHRLMTVPGVGPVVALTYRATVDVPARFRKSKSVGAVFGLTPARDQSGERDRPGAISRCGDEMMRTALYEAAQVMLLRSAKWSWLKAWAMKIARHRGMKKAIVALARRLAVIMHRIWTDGTEFRWTREAAAV

SEQ ID NO: 168033 - protein, 341 aa, unidentified
MNTTTYGLDIAKTVFQLYWVEPSGKYFNRRFNRVKLIEFLAKREPGRVALEACASAHWWARQLQSLGHKPVLLHARYVRPFVQTNKTDAADAKAIWTAAQQPGMREVAPKSETQQCVLAVHAMRSLRIKMRTMLVNQLRGMLVEFGIHFRRGRRAGLDDMVQRLSDIESRVPPTLFEAVHQQLHSLESLDREIAEYDRQITAWGRQDRACQVISAIPGIGMLTATALVATIGEARTFKSGRQLAAFLGLVPRQTGTGGKVRLGGISKRGNPYLRTLLIHGARAVLSHLRRKNEGGWSQALAEKRPTNVVAVAMANKTVRTVWALLVHERTYDRDYVSVRPA

SEQ ID NO: 168034 - protein, 369 aa, unidentified
MQAVRSFVGMDVHKETISISVAEDGRNGPVRFIGVIPNQPDDIAKMAKRLAKHGELDFCYEAGGCGYNIYRQLTALGHSCTVAATSMIPRKPGERIKTDRRDSQKLAILHRSGDLTQVWVPDATHEALRDLVRARVDASMHLMRCRQQLLAFLLRHGRSYPTGKHWTQRHRSWLAGQTFQVEVHRIVFQDYVEAVWTAQERRDALIERIGAMTASWSLGPLVEALRGLRGIDLLSSATFLATTGDLSRFESPRMLMGYLGLVPSEHSSGGSIRRGGITKTGNREARRMLIEAAWSYRYPARVAKEKAEILVRLPKNVRDIAWKAQTRLCARYRTMIARGKKPTVVVAALARELAGFIWAIGQEMRLSGA

SEQ ID NO: 168035 - protein, 364 aa, unidentified
MHRNRTSVGLDVHARSVVGCGLDGQTGELFERRLCPDHSEIISWIRGLPGPVGVTYEAGPTGFGLARFLTGQGIDCQVAAPSKLQRPSGDRVKTDVRDARHLARLLHLGEIVAVTVPSVEQEAARDLVRAREDVRGDLMAARHRLSKLLLRQGIVYSEGTAWTGTHDRWLRAQRRGSVFATAGLGTAFDIAYDTLLATTARRDRLDAAIAEMAAASEFTPIVTRLGCLRGIATLTAFGLAVEIGDWHRLTGRSIGAYLGLVPTEYSSGSSRSLGPITKTGNGHARRLLIEAAWHHRPPNRTGAELRRRQDAASPAARDRGQRANRRLHDRWVQFNLRRKRAVVANTAIARELAGWCWSLAVLDD

SEQ ID NO: 168036 - protein, 458 aa, unidentified
MSKQRGKAKKEQKAVKPKKQGKLPILNLDAAAIDIGSEQHVVAVPPGRDLQSVRSFGACTADIHAMAEWLKRCGVKSVAMESTGVYWIAAYEILEARGFEVLLVDARLAKNLPGRKSDVLDCQWHQELHTYGLLRGCFRPEADIVPLRRYLRLKQELVQASSQAIQQMQKALFEMNVQLTNVISDITGETGLAIIEAILAGERDGKKLAELKNRRIVASKATIAKSLEGNWRPELLFGLKTALERYKFAQGQIEQCQQKILETMAQLPTRLLEPDNQLAPKTSSAAVEPVKLSLIQTELKRIAGVDLTSIDGIGEETAQLILSELGPDLRSSFKTDKHFSSYLGLCPGTKISGGKVLKRKSRKVAHRVATALRLAARSLHRSDSALGANFRRLRARLGPPKAITAMANKLAKLVYRLLVYGQEYYDRGARHYEQHFRRNQLHWLQKQAKALDLKLVPA

SEQ ID NO: 168037 - protein, 424 aa, unidentified
MSWLTLDVLLLARLLLKLAVGPVLERKGDITMFYVGLDIAAEKHDCCIMTEERQVLKQFVFRNDAEGFEFLKKTLTKLAPTEEIKIGLENTGVYGSNLVQFLRRNGYKTYTFNPLLINKSIQATTLRKTKTDKADAKFLAQYLTWDNSQPDHDVSYHISELKSLSRLRFSLVQQRSKCKTQAKGVLAQVFPELTQVFSDVFGTTARTILSLCPSAQRIAAYPVPQLADLLRTTSRGQLGLGKAELLHALAVHSVGNSSIALELQLQIYLEQITQLSFHICRCEAALRTILAQMDSPITTIPGIGTVLGATILGEIGDIFRFSSPAKLLSFAGLEPSITCSGKSVSAPGRMVKHGSHYLRWAFGQAARCIILRDQTFAAYASKKRAEGKHFNVVCSHVAKKLVRLVFALLKNHSSFIPNYSSLAA

SEQ ID NO: 168038 - protein, 421 aa, unidentified
MMEEVAQWFVGVDWGRETHQVCVLDAAGAIVGERAFPHGGAGLADLCDWVLTLTGSASQAIAVAIEVPHGPVVETLLERGFRVYAVNPKQLDRFRDRFTVAGAKDDRRDAHVLGDSVRTDRHCFRRLAATDPVVVELREWSRMSEDLQQDRTRLANRVREQLWRYYPQALEVAGGDVAADWFLELWSLAPTPTKAARVRESSVDRVFKKYRIRRLDAAEALGRLRQKPLTVAAGTTEAAVAHIGTVVQRLKLVNRQIKQAHRRLDALCNALASGGEDETPEPSDEPSDVAILKSLPGVGRIILSALLAEASEPVRARDYRALRTLSGVAPVTRRSGKRCIVVMRNACHLRLRNAVYHWARVAIQHDAVSRDRYAALRKRGHSHGRALRSVADRLLAVACAMLTHRRLFDPNHATREVTEAA

SEQ ID NO: 168039 - protein, 459 aa, unidentified
MAKPRAAAPQSKLPVIAPNAAGLDIGSTEIWACVPADRTETPVRRYGTYTPDLHQLADWLVSCQITSVALEATGVYWLPVFEILEARGLQVYLLNPHQLKHVPGRKSDVQDCQWIQQLHSYGLLRNSFQPEAEMRALRSYLRQRSMLLEHRAAHIQHMQKAMQQMNVQLTQAVDDITGSTGLTIIRAIVAGERDPQLLATYRQPGCAKSAAEIAKALTGHYQAEHVFALKQALLLYDTYTEQVQACDVEIERQLQALTPQTDDELPPPRQRSKAASASKNGPRYDARGLLYQATGVDLCAIDGLGPTTVQQILFEIGGSVAAWPTSKHFCAWLALAPRHEISGGKVLRRHVPKTGNRAGQAFRLAAQTLFRSTDTALGAYSRRMRARHGPERAIVATAHKLARIFYTMLKERISFDASQAQTDEDRQRQRKLNYLKREAAKLNYTLTPAESLAVVAGTS

SEQ ID NO: 168040 - protein, 387 aa, unidentified
MLLDHPSDGLAAIRTQFGAIFVSLELSRSTWLVTSLSPCKGEKMSKRSMKAGELSELLKLFAELKRKAQARTGESYPLITIQEAGLDGFWLHRALQQEGIESHVVDPASIATPRRRRRAKTDRLDGETLLRTLLAYKRGEVRVCAMVVAPSPAEEDRRRLCRERETLIAERIEHVNRIKGLLFAQGIFDYAPLRRDRRKRLEALRTGDGRALLAHLKAQISRELDRLELLLDQITAVEREQDALLAASKAAGEKTVSNPVAMLLELKSLGPNFTAVLWSEAFYRQFANRRQIASYAGLAATPWRSGGIEREQGVSKAGNPRLRTTMIQLAWLWVRHQPQSALTQWFKVHSQRGRKRAIVALARKLLVALWKYVTAGVVIEGAEIKAA

SEQ ID NO: 168041 - protein, 413 aa, unidentified
MEYKTITAVGIDVSKGKSTIAVRRPGGEVVLVPFQVNHDAVGLSGLVKTLRGIDGDIRVVMEHTGMYWRPIALALKEAGFFVNVVNAMLIHDFSDNSLRKIKTDKADSMKIANYALVFWQELREYSTEDETRQLLKTQSRLYERTQSAGVALRNSLISLIDQIFPGANYFFGSIPRKSNGHVKWVDFVKRFWHKNCVAGISLAAFSAVYRKWCSNNGYKFYSSDAEKIHRSARDAVAAFPKNDSTKLLITQSVDSLNAVYDALYVMRGEMMRLASLLPEFEVVMSIQGAGEITGPQLMAEIGDVRRFTRKGALVAFAGVDAPPFQSGKFNSKSRRVSKRGSPHLRRTLFQITSILLQHSDPANPVFQFMDRKRAEGKHFYVYMVAGAAKFLRIYYARVKAHLEVSYTGSDNAA

SEQ ID NO: 168042 - protein, 270 aa, unidentified
MSQIIRIGMDTSKYIFQLHGVDASEQVVLRKRLGRKGMLEFFAKLPPTVVVIEACGAAHVLARELGKLGHTAKLIAPQLVKPYVARNKNDGRDAEGLCEAASRPRMRYVPVKTAEQQAALMLLGIREQLVVRRTQLSNMIRGYAAEFGLIEAKGLDKLVSFLAAIEHDERVPTLARELFATLARQYDQVQVELKAVEAKLLAWHRANALSRRLAQIPGIGPVTAAALVMKAPDPHAFRSGRLFAAWLGLTPKGPFHRGKDQARQDNPCRR

SEQ ID NO: 168043 - protein, 343 aa, unidentified
MEYYAGIDVSLEESSICVVDATGTIVREVKIASEPEALVRYFDELAFCVSRIGLEAGPLSQWLHAGLVGAGRDVVLLETRHVKAALSAMTVKTDRKDARGIAQLLRMGWYRPVHAKSMTCKDSRALLVGRKLLQGKLLDVELSIRGILRGYGLKVGEVSRGRFEARIRELTAGHVTLETVIGAMLAARAALWSAFTKLHREMLKIARADKVCHRLMSTPGVGALVALTYRSAVDDPTRFGKSITVGAYFGLTPKKYQSGETDRDGGVSKVGDAMVRTALFEAAHIMLTRATRFSSLKHWALDVAKRRGMKRAKVALARKLGVVLHRMWVDATEFRWSKAATTV

SEQ ID NO: 168044 - protein, 386 aa, unidentified
MIYAGIDIAKLNHFASAISSDGEVVLKPFKFTNDYDGFSKLKSSLDSFDPDQLIIGLESTAHYGNNLVEFLVNNNYKVCVINPIQTSTLRKNNIRKTKTDKVDTLVIAKALMMNPTRFFTKYDISLLHLKELGRFRLKLIKKRTQAKIQLTSYVDQAFPELQYYFNGIHHKSCYALLKEAPTAAKIVSMHMTHLSHLIEVASHGHFNKETAKELRVLAQTSVGIDDSSVALQITQTIELIELLDKQVKTVESDMESIVKSLDSVIMTIPGIGYINGGMILGEIGDISRFSNPSKVLAFAGLDPAVYQSGFFEARSTKMSKRGSKALRFALVNAAHNVVKNNKTFKDYYAQKRSEGKSHYNALGHCAGKLVRIIYKMLTDNVAFNLD

SEQ ID NO: 168045 - protein, 424 aa, unidentified
MNPRVKIACGLDVHRSKIVGSIVTSAGTHETRTFTTNIDDTLALKDWILTHDCERVAMEATGIYWYPVYNLLEEHVTVQVANPLFIKGIPGRKTDQLDAEWIATLCLNGLVKPSFVPGLQVRNRRDLVRTLQRLIQIRTRHKNRIHKIMIRAGIRIGAHLSDLFGPSGLRILHGLLEGRSIDTILKDLKNAKIAKKRDELAKSICGTLDENDVYLIRLELDAIGSVNRLIDNLKQRISHQMMPENEDLDTMISIPGIGYDSAVNILAEIGDVRQFPSGKHLVSWAGLAPGMNESAGKQGPGHITKRGSKFLRTFLIEPAHSIAGMKRTNHLKQFFARMRAKLGYKPAIIALARKLLMLIHHLLVNCEPYFEENLPIKKPVKINPSSLSSMTPDQILKILSDAIAVLSLSDRVDFVQKLSRIGNF

SEQ ID NO: 168046 - protein, 346 aa, unidentified
MEHYVGLDVSLKLTAVCIVDRTGKIEREGVVHSDPEAIAAFIKSNAPHVARIGLETGATSTWMWTELNKLGLPVICIDARHAKAVLKMQINKSDRNDAVGIARIMQCGWYKEVRVKDLDSHAVKALLVSRALLVKIKRDLENQVRGLLKNLGLVIGRAKMNAFAWRAAELIEDRQELAAAVTPLLNARVAIERQIADLDRKVMKLARNTAQVQQFMTAPGIGPITALCFLATIDDPNRFRRSRSVGAYVGLTTRRYASGEIDWTGRISKCGDKMLRSYLFEAANVLLTRVAKWSTLKAWGIRLAKRSGLRKAKVAVARKLAVVLHRMWVDGTDFRWSSKEAADQTA

SEQ ID NO: 168047 - protein, 347 aa, unidentified
MNFYNSTHQHYCGIDLHARSLYVCIISQQGETLLHKEIPAKPDALIKLITPYLDDIVLGVECMHCWYWVADFCDDHDIAFILGHALYMRAIHGGKTKNDRVDSFKIAALMRGGNFPLAYVYPRNMRATRDLLRRRTNLVRHGADMKAHVVNTTSQYNLPPNKVNLKNVGAREQLNSTFHDPVVQRNINLDMAVLECYHRELSQVEWFLEKQAIKHQPAYFYLLKTIPGIGRILALTILYEIGDIQRFESVQKFASYARLIKCKAESAGKTYGTQGNKIGNAHLKWAFSEAAVLYLRGNSGAQQLLQRFQKRMSKAKALSALAHKLGRAVYFMLKNEKIFDEERFLKS

SEQ ID NO: 168048 - protein, 385 aa, unidentified
MSFKILKNNCCGLDVHKTWIYACIGITDSFKRTEYKQARFSSFTKGLQELCLWLAKYNCIDVCMESTGKYWIPVFNVLEKNNIFVTLSHPKYTKPQKGNKTDRKDAKWICDLYMCGMVKPSFIPPADIRQLRDLVRYRFKLTCMITGEKNRAHNCLTVSNLKLDDVFSDIFGKSSRSITEQILQHPGEVFDVAPFVDSRCKTPIEEIQAAVDGAISHEQAVKLRQCLKHIDELEMHKAEIEREIFRLSQKYESVLDLIRTIPGFDKNPLTAIQVLSEIGADMSVFPTAKNLVSWAGCCPRNDQSSRKIKSTRISRAGSYFKPVLVQIANALIKSKKHPEFTTRYRRIKARRGHKKAIIAICRMILTAIWHILTCLLYTSPSPRDA

SEQ ID NO: 168049 - protein, 347 aa, unidentified
MNSLTDLVDVVIGVDTHVLTHTAAILDARTGGVLAQLTVDANAAGYAELVEFADTHATLRAWAVEGTGGHGAGLTRQLEALGDLVVELDRPERAQRRNGAKSDPLDAIRAAREALARTRLGSPRAAGDRQALSVLLAARRSAIESSTDAQRQVFSLIIAAPENIRAKFRGMKLPAMLRTAVKLRQHPSWDQETTTTVTVLRTLARRVRDLTQEARDHEREILRIVRGLRPDLLEQKGIGPINAAIVLCAWSHPGRVHSEAAFAMLAGAAPIPATSGQTVNRHRLNRYGDRQLNRALHNIVLSRLRYDDRTRIYAERRTHEGRTRREIIRCLKRYIARDLYRLLEHPA

SEQ ID NO: 168050 - protein, 407 aa, unidentified
MLEVKVEQCAGIDVGKKIIEVCVLIGPANRKPAGEVRRFGSNVGDLEALRAWLKEKACTEVVMESSGSYGKPVFNIWEGHLQVILANPEQVKALRGKKTDRTDCRWLAGLLRHGLVQPSFIPPRDIRELRDLTRRRRTLLQNGTQERNRVQKVLEDANVKIGNVLSDVFGMSGQAMLEALLENKLNAEQVADLARGSLRRKIPQIVEALEGHRMSDHHRLLIRQSLKHMQFIEEMIEELDQQIHEKLAAYQKQVELACSVPGIRSDAAAGILAEIGMDMSDNGPFTSCHHLASWAGVCPGNNSSAGKRKSGKIRKGNRWLKATLRQTAWAGANTKNSAFQFRYQRLKTRRGVKRATIAVAHAQLIALYWVLRSGVPYQQQRQDLEQQQRESLIRHHLHRLAQLGYTA

SEQ ID NO: 168051 - protein, 343 aa, unidentified
MKSTASVIGLDIAKRVFVAVGRDERGKHLWKKTMARDEVLPTFAQVPSAAVGIEACAGSHYWARQLRELGHDVKLIAAQHTRAYVTGNKNDANDAAAIAEARARAVTKYVAINSAAQQDLQMLHRARQALVTEKKAMVCRIRAFAHEYGTIFPLGVAKFRAGLTRWLSDDDNGLSGMARETFRDLVAQLDDKEARLQVYDQRIAEVARGNEVAQRLLAVPGIGRLTATALLASVADASEFKSGRDLSANLGLVPREHSSGGKQRLYGITKRGDRHLRTLLIHGARSALRCAADKPDRILRWALKLAERRGPNVAAVALANKLARIAWAMLAHGRVYQPNYRVA

SEQ ID NO: 168052 - protein, 343 aa, unidentified
MQSVTTIGLDIAKLVFQVHGVDAAGQVVVRRQLRRRHVLAFFQKLPLCLVGIEACASSHHWSRELQALGHTVRLMPAAYVKPYVKRQKNDATDAEAICEAVMRPTMRFVPTKTTEQQACLMLHRARHLFIRQQTAVINSIRAYLAEFGIIAPVGRRGVERLLEVVADKADQRLPEIARACVAALGEQLRRLKAQILKFDRCIIAWHRSNAMSRQLDDIPGVGPALATALVGSVADPKAFRSGRDFSAWVGLVPRQNSSGGKDKLGSISKQGDRYLRSLFTAGALAVIRYAKIHGTRHRPWLTALLARRPTKVAAIALANKLARMAWAMMARNERYKEPAALAA

SEQ ID NO: 168053 - protein, 344 aa, unidentified
MTEYKRIGIDTSKAVFTLHGIDQQDRPVLRINLRRPQLLAFFRKLLPTEVAMEACGSAHHWARELTALGHEVRLVPPQYVKPYVKRSKNDRNDAEAICEAAGRPGMHLVPVKSVTQQAQGMVLKVRETLVGQRTQMTNTLRGHAAEFGVIAGKGLRQIGPLLTTIEQETTIPAEAREMAALLGREIEHLDARIKELDVKLAAAHKANEVSQRLATIPGVGPVTALTLAIEVDPAAFESGRHLAAWAGLTPREHSTGGKQRMGGISRAGNERLRVLLVTGATSVIKAAMRPGSALMTDWLRALLQRKPRKVVAVALANKMARVAWALMTRGEVYRRPAAGGVVAA

SEQ ID NO: 168054 - protein, 339 aa, unidentified
MRTVFGIDVSKASSEVAILVNGERVHSYTMPNDIIGFSHLLKDLKTVSNPEIIFEATGVYSRRLQAFLEENSYDYTRLNPLEAKKQLDSLRVRKTDKIDAEKLASSQFVLNRKPTYVQEEVYQNLHDLSRFYQNLTEDIVRTKNRLHKVLQVAFPEIENLLSTPTGEQYWNLVSIFPTKHWVLELSEVELKETIRNSTSKRISENRVGNLAEKLVGLAKQSYSAISKTSPMIEEVKYNAQELIRLTNRREQVLQQLIALAEPLPEYEILLSIPGIAETTATSIIGELGDIRRFKSANQINAFIGIDLKHYESGDFLAQEHITKRGNPYARKILYKCIHN

SEQ ID NO: 168055 - protein, 353 aa, unidentified
MEITTIGIDLAKNVFAVSGADRRGRVVVRKQLRRAQLMGFLRTLRPCVVGMEACGGAHHWARALTKLGHQVRLMSPALVAPYRKGNKHDRNDADAVLEAVSRPSMRFVAVKTIAQQDVLALHRVRARLLKQRIALSNQIRALLHERGVAARLGAAGLRAAVAAALADDHNELSAELRQVIAELLDELRQLELRIKAFDQRLARAAQGDERCLRLREVPGVGPQIATALVATVGDAREFKSGRELSAYLGLTPRQHSSGGKTVMLGISKRGDRYLRTLLIHGARSLLYRNRRLAHPRARWAARLSAARGPNVAAVALANHNARVLWALLSRGDRYRPDFQPRGFPSRPSAGAVN

SEQ ID NO: 168056 - protein, 336 aa, unidentified
MTLYCGIDLHSNNHVIEVIDDDDKRLLECKLPNDISATLDVLSPLQPHLAGIAVESTFNWYWLVDGLQDHGYTVHLVNTAAVKQYDGLKHTDDRYDAFHLAHLLRLGILPTGYICPRTKRSLRDALRRRGQLVRMRSKLLISIQSQLWRSLGERYTSNNIASPLFSLPDLDQDTTLALQTHLAVLHAISQQIRLLEKHIKKRLTKTKDFALLQSAIGIGPILAMTILLETGEIERFAKVGNYSSYCRCVKSERLSNNKRKGKGNSKCGNKYLSWAFSEAAHFLVRYSPQAKRFYERKYRHKNGIVAIRAVAHKLARAVYYMLKRQEPFDIDRIFAH

SEQ ID NO: 168057 - protein, 315 aa, unidentified
MDILGIDVGKEYIDCELLGEKRATKRVHNTVRGFEQLQSWLRNRKAHKVHACMEATGGWSEELAFYLQERGHVVSIVNPMQIHAFGQSELSRTKTDKADAALIARFCKAMQPNAWEAPTPAERRLRQLVRRRRALVEMRTQELNRLEAPGTESVEKSIRDMITMLENQIAELEGEIKKTIDDDDDLKGKRDLIESIDGIGPTTSATLLAETPHIDKFESSKALAAFAGVCPQVQQSGRAVARSRTTKIGNREIRKVLYMAALAALRHNAVIKAFADRLRERGKRPMEIVVATMRKLIVLVFGVLKTRRPFDPHWA

SEQ ID NO: 168058 - protein, 381 aa, unidentified
MISETTHSDQYNRLGGSLYLDFELSQKQWKLGFTIGIAQRPRIRNIMARDLQALEHEIRTAKKRFGLPGDAPVLSCYEAGRDGFWIHRYLETYGVQNLVVDPASIEVSRRARRRKTDKLDVNKLLAMLIRYHRGERKAWRVVHVPSRLAEDARQLHRELLSLKTERTRHINRIKGLLISQGVSVPVNANFPDLLESIRLWDGSRLPEALDLRLQREYQRWFFVNQQIDQLSSQREELLKTSQQPSVEQVRQLMRLKGIGINSAWLFVMEFFSWRAFRNRREVGACAGLTNAPYQSGDTSKDQGIEKAGNRFIRAMAIEIAWCWLRYQPESKLSQWYQQRFGQGNSRLRKIGIVALARKLLIALWRYLETGTVPEGAHFKTA

SEQ ID NO: 168059 - protein, 355 aa, unidentified
MNSVKYVGLDVHQSTLSVAVLDGEGKLVMQSVVATHAAAILDFLHGLRGTLHVTFEEGTHSAWLYDLLVRRVTNLVVCNPRKNALLKAGNKSDTIDARKLAELLRAGLLSPVYHGQNSTSAVKHLGRSYAALTEDTTRIMGRLKALYRSQAIACAGKKPYGSRHREEWLAQLTESGLQRRARRLYQQLDLLQELRRQARRDLILECRKYQESKLLRTIPWLGPIRTALLIGRVQTPHRFRSKRQFWAYCGLALETRSSADYQMVNGQLERRKKPVFIRGLNLNHNHDLKNLFKSAATSASGSNGPFRPFYENLLGKGMKAELARLTLARKIAAITLHVWKKGEPFDPEYLKPQAA

SEQ ID NO: 168060 - protein, 417 aa, unidentified
MPVRRARGDKVIFVGVDWAEAHHDVHVADEAGMRLGKARLPEGVDGIARFHELVGAHVEDPAEVVIGIETDRGLFVTALVAAGYQLYAVNPMSTSRYRDRHSTSGAKSDAGDAQVLSDMVRTDRHHHRPVAGDSEGVEAIKVLARAHQTMVWSRGRQTNLLRSTLREFYPAALVAFDDLTSGDALEVLRVAPTPTLGGGLSRSKIAAALRRGGRQRRVEERAVEIQAALRSEQLHAPAVVANAMGASVAANVAVIAEMSAQTTRLAEELESGFEQHPDAEVVRSLPGLGTILGARVLGEFGDEPNRYATAKSRKNYAGTSPITRASGTKKTVLARHVRNRRLADAIYLWAFAALTASAGARAYYDSRRAAGDGHHQALRALGNRLVGILHGCLIHHTTYEEAIAWAHRPESEFGAAA

SEQ ID NO: 168061 - protein, 347 aa, unidentified
MKHYAGIDVSLNSSNVCVVDESGKVVREVKVPSEPVALIRCIKSLGVRVERIGLEAGPLSQWLYGALRESGLPVELLETRHVKAALSAMPVKTDRNDARGLAQLMGMGRFRPVHCKSMAAQEVRALLTARKLVQSKLYDIEMSLRGILRGFGLKVGPTTSRSFAARINHLTADHPSLEMVAEALLSTHAAARCALKTLEKNVRQISRADTRVRLLMSTPGVGPVVALTYVSAIDDPKRFTSSKPVGAHFGLTPKKYQSGETDINGRISKVGDSSVRAVLYEAAHIILTRPIHGGALKSWAMRLAKRAGMKKAKVALARKLAVVLHRMWVSASTFDFEKANSCTRAAA

SEQ ID NO: 168062 - protein, 366 aa, unidentified
MKTSITPIGTPVGVDVHKRRCKVVELNRGEIKVRKPMANAREEWLEMLTELPPDAEIGLDVSTAGYFAMSVLEEAGWRDRAHWVHTAGIDSNRRQKNDRLDAERLARKLAAHHLDPRPEAWFPPPEIRALRLRARARCWLASLRTQGKNHLQSLLQMQGLLLPGSDPLGAAGQKWLEEQKLPLPLSESIPQIQRLLKLLEEEIEISEKYLLAVQGQFPQLALLRTIPGIGAILAAVIWSEIGTIERFRSAKALANDTGLVASFYHSGEVQVSGPITRRGSRWLRWAFVTAANVAIQHRNPFARRYHRLRRGKKPNVAKAAIAHSLARCVYGVLKHGCPYREDRWGRKVGALEQETRDCARSIKTVL

SEQ ID NO: 168063 - protein, 340 aa, unidentified
MFYVGLDIHTKHISICALSEAGQVAHRARVRSIAEMVQTLKGLPDRFEVCYEASCGYGHYHDLLQPLAARVLVAHPGQLRLIFRSKNKNDRNDAERLAKLLYLGETPTVHVPAPEVRTWRELINCRSQLIAKRTRAKNALRALLRSAGVTPPKHPALWTKAGLCWLRRLALPTTSQQLRRDLLLEEIDTLIQQGRRVERHLNRQARHTPGVARLRSIPGVGIRTAEAVAAFVDDPHRFGNAKAVGRYFGLVPSQDQSGDRNRLGHITREGAPVVRQLVAEAAWQAIRRSPTVRAYFERVQRGDPQRKKIALVATGHYLVRVMWALLKRGTVWEENAALAG

SEQ ID NO: 168064 - protein, 398 aa, unidentified
MSRIWAGIDSGKGHHHGLVLDADGKMLLSRRVANDEPELLKLIGDVLDLADGRQVTWAIDMTGGEPALLLALLVNHGQEVLYMPGRLVNRASDGYRGEGKTDARDAYVIADQARMRRDLRPVRPGDEAAVELKLRTGRRADLVEDRTRVVNRLRGTLLSMFPALERALDVTNAGPLKLLTGYQIPAAIRRAGVARLTKWLANRKVRNARALAEAAVDAAERQHTAVPGEKNIAKLVHTLAEEVMALNEQVRGMDKLIEGRFREHELADIVLSVPGIGTTLGAEFLAAVGGSLDGFDSPDTLAAFAGVAPAPRDSGKVSGNLHRPAVYHRRLQRVFYTSALVSVQFDPNSRKFYDRKRAEGKKHVQAVLALARRRVNVLWALIRDRRCYQVAPPVTATA

SEQ ID NO: 168065 - protein, 343 aa, unidentified
MTMETMIGIDLAKSVFQVHGASMMGQLKFRKKLSRVQFRKFMAEHPVATVVMEACGSAHYWAREIAKHGHEVKLIAPQYVRPFVKRQKNDAVDAEAIVIAAQRPEMRFIIPKMEEQQAKALLFRGRERLVRQRTELVNALRSVLYEFGHPTPPGIGHLKRIETIIEDKNSDLPELVRDECRDLSLQIAEKTQRIEAKAKQIASLATQTDAARRLQTMPGIGPMSALAVEAFAPPMDSFRHGRDFAAWLGLVPKQHSSGGKERLGRISKAGQADIRRLLIMGAMSRLNWLGRKTISENSWLSRMLMRKPRMLVAIALANKMARAIWAMLTKGEDYQNPTQTAAA

SEQ ID NO: 168066 - protein, 388 aa, unidentified
MLTSVMVKGSIVKAAYGETSVASRAESCRRREIGRVLVSQAVAERDPRRRYGTSPNSRLSRRQTASSHLQVRDKTMSEPVYVGIDISKDTFHVATCPDLIKTSLPNTPAGHRQLCKSLQNQTVALIVLEATGGYERPLAAELLNASLPVVVVNPKQVRDFAKGMGQYAKTDPIDAQVLAKFAQIVKPAPKSHATPQTVELSELVRRRRQLNDLRTQESNRLLMIHHLKVKKSIKKMIKTLDFQINEIDQLITEQIDADDDFRNKDCILRSAPGVGPQTSAMLIANLPELGKLNRQQITALAGLAPWDRSSGKYDGKAHIWGGRKEVRSVLYMAAFTACRFNPVIHEFAERLKQNGKAYKVVLTACMRKLLIILNTMIRTQTLWTPNIS

SEQ ID NO: 168067 - protein, 424 aa, unidentified
MNFTQNDKIEQIKDETLVVGVDIGKENNYARALDNRGRELKKHIKFANTREGFRAFDKWVSEVSLANDKTDVIVGFEPTGHYWFSFGDHCKKLGHKLAIVNPMHVKRTKELDDNSPTKNDKKDPKTIAMLVKDGRYREVYIPEDIYQELREAVYEKERLTGLVVAINNQVIRWLDIRFPEFTKVFSKWHGHAALMALKNFPTPEKVLKAGVDNIVSKWKEEISRAVGRKHAEKLVKAAEESIGRTTGSISSEVSLKNLIDQYELIMRQIKEQEALMLELLLRVPNADKLLGIKGVGLIAVATFVSEVGDIIRFESPKQIIKLAGMNLKEDSSGKHKGKTRLSKRGRKRLRHSLFKAMITVLAKNTEFKAIHRRNITREINPLSKMQSIFALCGKLIRIFYAILSKGTEYDPNKLMIEIPSMKAA

SEQ ID NO: 168068 - protein, 374 aa, unidentified
MRDYTAYVGLDVHKDTIAVAVALPNGGDPIYRGEIAHTTKALTKLLQRLTAAYGENIAFCYEAGPTGYGLYRWLIKKGFHCEVIAPSLIPRKPGDRIKTDRRDAISLARLFRVGDQTAVWVPDQDQEAMRDLSRVREDMKGMETQAKHRLNSFLLRHSRRFSGKSRNTLAYFCWLEGLKFESPISQIVFQEYVNAVKTAQARIEGIEKEMERALGGWSLTPVVEALRALRGVDLVAAMTIMAELGDITRFTSPRQLMAFLGLVPSEDSSGLKQRRGGITKTGNGHVRRILVESAWSYRYPARLTKHLRKKAENASPEVKVIAWKAQKRMCGRYRHLLHLGKCQQQVVTAIARELIGFIWAIAKEMQPKVITEKV

SEQ ID NO: 168069 - protein, 334 aa, unidentified
MSNVTTVGIDLAKNVFSLHAVDGRGVVVLRKTVSRARLAAVVAQLPPCLIGLEACSGAHEWARRFAQHGHTVKLMAPKFVALYRKSGKNDNNDAEAICEAVSRPSMRFVPVKSVEQQAMLTLHRVRLGFVEERTATINRIRGLLAEFGVVLPQRVVEVRRGVAATLDQLPSLAQRALTDLLAHVRVLDERIREYERELEHHARGDERAKRIQKLSGVGPISASAIVSSVAEGHEFKNGRQFAAWLGLTPKQYSTGGKSRLGRITAHGDPYLRTLLIMGARSMLQTALRRTDRLARWALGVRARRGYHRACVAIAAKHARIIWAMLAKNEPLQLA

SEQ ID NO: 168070 - protein, 410 aa, unidentified
MDVVYPRCAALDLGKDLLVVAVRIHDVSGVTRESRTYGTTTSQLAGLRGWLISHGVTHVVMEATGSYWKSVWRALEGHFELTLANPAQIRSFPGRKSDVRDAARIVDLHAHGLVRGSFVPPGEIDALRELTRTRKQFVREMNRHTQRIQKILDVANLKLTGLIADILGVSGRTILKALIGGESNPEKLAALAHGRLRADRGQLIEALRGRLTEQQRGLLGMHLQLIEALEASITRLDEQIAKVVQPFRPLVDRLQHVPGLSENVSIPTLLGEIGVDMTKFPTAGSIRSWARLCPRNDESAGKILSRRTLKGANWIKTLMIQVAWTAVRTKDSYFRAQFLRLSRTAGKKKAIVAVAASILTVVYHMIRNGSAYKDLGGNYFDRRNRDQAARRLVTRLQRLGYNVQVTEAVA

SEQ ID NO: 168071 - protein, 318 aa, unidentified
MTESRYAGIDVAKDTVDLALGASENVESFANDPGGHEAIVKGLLEHKAELVVLEASGGYEFALACALQAAGVAVALINPRQARDFAKAMGYLAKTDAIDARMLAQLAQVIALHPQRDRFVKVLADAEQQRLQALVMRRSQLVAMLTAERQRLATSHAAARKSVEELIGAIRKQLQEIEAQLASHIERHHADLAALLQSARGVGAATTVTLIAELPELGTLDRRQIAALVGVAPFNRDSGKMRGKRMISGGRAQVRSSLYMATLVATRFNPVIAVFYQRLLAAGKPKKLALVACMRKLLTILNAMVRSGKPWDESLHAT

SEQ ID NO: 168072 - protein, 399 aa, unidentified
MFILSVVVSMCIKRFSLPQSLLHRELLLTIPKRDSQRLTIQFKQWLIDNDCFNVCLESTGKYWVPIFNLLEDTIRITVANPKWVKAVKGNKDDTKDSKWIGDLFRLGLVPGSYIPNKPIRILREYTRYRSKLVSCKSSEKNRFQNAFTVCNVALDAVVSDMFGKSASSITDYLISSDSFDPEYCSSLLQRSLKMTKEQKERIVMVRSHLEFIQQSIAWLDEKLDKMVVPYESAITLLCTIPGIGRASAITIISEIGTDMSQFANSKRLCYWAGLTQGNNESAGKKKSVRITRAGVYLKPALVQVAHAAVKSNISPYYRVKYERISKRRGKKRAIIAIARMILTAIYHMFVTGEVFNPSDLYKVDMPQEMVEKQKAKAIKQAAKLLISLGLIKASDISAA

SEQ ID NO: 168073 - protein, 355 aa, unidentified
MSGEKYIGLDVHQATISVAVVGSQGEMIMESILETKASTILEFLAGLRGALFVTFEEGTWAAWLYDLLKPRVAKVIVCNPRKNAALRQGNKSDKIDARKLAERLRLHDLKPVYHGETGVRMLRELARSYLTVVKDLSRVMNRLKALYRSWAIPCAGRDVYYTRHRSQWLEKIPEAGTRRRAEQLYQQLDLLQRLRQQARGELLAESRKHTITAKLRQIPSSGPIRSALAVALIQTPNRFRSKRQLWTYSGLGLETRDSGEYHFVRGQVRRRKKQVFIRGLNKDYNHDLKGLFKAAATRASVLPGPFQDFYQRSLAKGIKPTMVRLTLARKIAAITLTLWKKGENFDVEKLNSQAA

SEQ ID NO: 168074 - protein, 340 aa, unidentified
MNEITTVGLDLAKHVFQVHGIDASGAPVVRKRLRRSEVLAFFARLPGCLIGLEACATAHYWARELQAVGHEVRLMPAQYVKAYVKRNKNDAADAEAICEAVRRPTMRFVPIKTAEQQAALLVHRGRERLVRQRTALANALRAHLAEFGVIAPLGLRNVARLIAVIRDESDARLPAPARQVLEVLATQVEQLEAAVAALEKQLMAWHKSNPVSQRLATIPGIGPIIATALAATVVEASGFRSGREFAAWLGLVPRQHSTGGKARLGGISKRGNRYLRRLLINGASANLLRSKATHADPWVIGLRRRRPSLVVAVALANKTARIAWAVMHRQENYRRMAEAA

SEQ ID NO: 168075 - protein, 382 aa, unidentified
MTGTEPHAWGTGLMDDIIFVGLDVHKATVCIAVAEGGRGGGVRQLGVFENRPEILNKVVSRLSKGGRRLSFCYEAGPCGYGLHRLLTGYGHECVVIAPSLIPMKAGDRVKTDRRDALMLAKLHRAGELTAIWIPDAAHEAMRDLVRARATAVRVLVKARQHLQGFLLRHDRIYRGARAWTLAYRRWLSTVRFEHPAQQIVLQDYIHAVQEAETRRDRLTQQIEELLPNWSMAPVVAALQSMRGVALVVAVTVVAEVGDFRRFANPRQLMAYLGLVPSEHSSGSSVRRGGITKAGNALARRVLIEGAWTYRMSARVSRKLHDRLEGLPAAVRDIAWKAQLRLCARYRRLAAMGKSKVVVTTAIAREMVGFIWAIARLAQPALV

SEQ ID NO: 168076 - protein, 402 aa, unidentified
MAEGPTRFFGLDIHKEYFVAVGVDAQREVVFGPQRVSNYQLDDWVSRVLTTQDAVVLEMTTNTYLFYDTLVPHVHSVIAVHPPNVSLVTNVRVQTDKKAALALAQLHAAGMLTGVWIPPHEVRDLRALIARREKMVRLSTMAKNRLHSVLHRNHLVLPEKPFAPEQHTWWESLSLSATEQFLVRSDLDTLEFAQKQIGQAEECLKKASAKDERIPLLVQLPGVAMLTAITILAAIGDVTRFPDAKNLVGYAGLGTRVHDSGMTHNSGRITKAGRRDLRRSMVNAANHAIEHHPHWKKEFERLEPHLGRSKAVVAIARKLLVAVWHVLSEKTADRFADTGGVARSFFAHAYKVGVRNLPKGQSAVAFTREQLDRLGIGRDLQEIPWGSKPHKLPRSKLLPEKE

SEQ ID NO: 168077 - protein, 349 aa, unidentified
MVVVGADVHKRTHTFVAVDEVGRQVGSKTVAATTAGHHKAVAWARERFGAEVLWAIEDCRHLSARLERDLLTSGQSVVRVPPKMMAEQRRVARTRGKSDPIDALAVARAAQREPDLPVASHDEVSRELKLLVDRRDDLVKHRTATINRLLWRVHELDPTIAPPERSLDLSKHQQALAAALERFDGIVAELARDELADIVDLTTRINDLERRITARVRDVAPTLLAMPGCGPLTAAKIVGETAGITRFNSEAAFARHAGIAPIPVWSGNTRGRVRLTRSGNRQLNAAIHRIAITQARLDGLGKTYYAKKKSEGMSTPEALRCLKRRLARIVFNHLTTDQAASVTGLAAAA

SEQ ID NO: 168078 - protein, 341 aa, unidentified
MKPAMNVLGIDIAKHVFHAVGMDNTGEIVFRKRLSRHDLMPFMAKLPPVLIGMEACGGAHYWARRFREHGHNVKLMAPQFVKPYVKSNKNDSRDAEAIAEAVTRPTMRFVPIKDVDQQDIQALHRVRERLIGERTALVNEVHGLLHEYGIVIPKGVAKFRQAVIGKLESEKDKLTSLSQEMFWKLIEEFAGLEKQLAYYQEKLEALATTHPECQRLMTIPGVGPLTATALVAAVSDASAFKNGRQFAAWLGLVPRQHSTGGKDRLLGISKRGDSYLRKLLVHGARTTIRWVGRKTDRRSPWIRQLVERRGKNRTAVAVANKNARIVWALLTSHQDYQLATG

SEQ ID NO: 168079 - protein, 352 aa, unidentified
MGKNNKLDFGGQHIYVGMDVHKKSWSVSIHTEQFEHKTFTQPPEVEKLTYYLERTFPGATYHTVYEAGFSGFWLHDKLREKGIDCMVVNPADVPTKDKERAGKTDRVDCRKLARGLRNGEIKGIYVPPRVKVEDRTLMRTRQSMVRKQTRCKNQITSILFFYGIVIPEDGRWSRRFINWIESIRMERASGDFALKAHLEELKHLRQIIANLNKAILSLSRAEEYRADVLLLKSVPGISTLTAMILLTELADLSRFASLDKLASYAGLVPDIRSSGETEYSAGITFRRNAALRALLIESSWIAVRKDPALTMAFNKLSTRMKKTKAVVHIARKLLNRIRFVLKNRQEYVPAVV

SEQ ID NO: 168080 - protein, 357 aa, unidentified
MEIIAFDSHKRYTLASVETKDGQMVKEERINHRQGEICRFLATCQRGSPVAIETIGNWYWIIDEIEQAGMQPRLVHARKAKLMLGCINKTDKLDVRGLNKLQRTGTLPTVWIPPGDLRDKRELPRTRMVFGRQRTRLKNRIQSVLAKYGLQSEFEDISDTFGKAGRQRLGFCLKQLPAQTRYTMRCLLRQLDAVEAEIGRVEKQMAKVFEPTKQVELLQTMPGVGPILAVVIAQEVGQVNRFGSAAQLASYAGTTPRVHASGDKVRYGRLRPDVNRYLKWAFSEAGNSVMVNRERYPDRYAACLYNRLRRRRGHATAIGAVARHLAESTYWILTKKESYLERGVKVFANESMRACMS

SEQ ID NO: 168081 - protein, 320 aa, unidentified
MNDKQVVYGVDVAKAELVVGRSHSEQIVRIANEAKAIASWLAQLPAHSAIAMEASGNYHRLLAHMAHAAGMVVYVLNPQRLKHYGRAVGNRGKTDRLDAQLIARYVLHEHAKLRVWDAPAPEADALSQLLVRRQALVKARQMLAQSLSGVAGLNASRRTLLIDLKRMLCNLELLIRAELARVPAMAALHRRLMSVVGIGPILAAQLVACLTRLHFTRADAFVAYAGLDPRPDDSGERRGRRRLTKHGHAMLRCLLYNGAMAAARSKLFKPLYTQLRARGLQSTEAMVILARKLARIAFALYKSAATFDAQRHLKTALQQS

SEQ ID NO: 168082 - protein, 367 aa, unidentified
MNKTIVHHEGATALTAAVQKVGFSSSIIKLGLDIHSKLYVVVAQYDHTLPKAARRFAPQEFVPWAESLLQAGDSVHVVYEACGFGFGLYRQLIAAGVHCYVIAPRKLDEERTRVKTDTRDAATLCQRLSRYVDGNTRELAVIRVPSEEEERARHSPRQREQLVRHRQKIEAQGRGLLVSHGLPAPAHWWKAQTWNRLKQLLPGWIISSLEIYRPTLFALQERVAALTAQLEAAAPTNIPSGMGKLTTVVVSREICDWNRFKNRRTISSYTGLCPGEYSSGNKRVPGRVTKHGNPRVRAALVECAWRMVRFQPQYPPVTKRLHVLAKGAKATGAARKKAIVAVARHLAVDLWRLHTGRCTAAQLGLVC

SEQ ID NO: 168083 - protein, 343 aa, unidentified
MEIGAVGIDLGKTTFHLVALGEAGKVLVRKKFTQRQLVVFTANMSTSLIGLEACSGAHFLGRILREQGHNVKLIPAQFVKPFVKSNKNDFVDAEAIAEAVGRENMRFVPIKTEDQLDLQAIHRVRDRLITRRTAVINQLRAFLLERGITFAKSPSSLRKGLPVVLEDGDSNLTPRMRNLLELLWSEWKILEQQLDGLNDDLERIASADDACQRLRQIPGIGPLISTAIVAAIGNGAAFHKGRDFAAWLGLVPKQHSTGGKARLLGISKRGNRYLRKILIHGARAAVLRLKRERAPMGAWMTALEARAPRNVLIVATANKLARIAWALLSSGEDYRAETGLVAV

SEQ ID NO: 168084 - protein, 471 aa, unidentified
MKRTFACGHSGKGKYCHACDATEKAKEEERLARQEKRLSKAEAAASDLIDLSCVDHLASVQREARLVLTKVRDGTHPCALKGKPIRSSNELVRTFPISWHSDMPGWLVLDNSSGKGKVMDKITRIGVDLAKNIIQVHGVDSMERVVVRKAISRQKFLEWFANLEPCLVAMEACSAAHYWGRKLRALGHEVRLIAPQLAAPYRKGGKHVKNDRLDAEAICEAAGRPHMRFVAVKTAEQQNVLLLHRMRDGFVEERTALVNRLRGELVEFGVFLPQGINAFRAHFVEALEDGATELNGVARTALLRGWEHLQGLDQQIAWCDAQVATHVKHDSNAQRVMAVIGIGPLTASATVATVGDARLFKNGRQFAAWIGTVPKQKSSGGKTHLGRITKQGNTYLRTLLFQGARSAVTSAHRRTDRLSRWIVQLQARVGWYRTLVAVANKHARILWAILAKGERFDPSYVSTPSTPAQPR

SEQ ID NO: 168085 - protein, 423 aa, unidentified
MEVLHECVAGLDVHKDSVVGCVRTVSGDKTTREHRTFDATTDGLLALLEWLTLCRCELVAMEATGVYWMPVWRILSDGAFKLIVANAAHIKAVPGRKTDMKDSTWLADLAAFGLLKASFVPDEEQHELRALMRTRKQLVREQTRHVQRIQKTLTEANIKLDSVISDIMGRNGRRMIEAMITGVRDPRKLAALADQRLKATPKQLYDALHGRLTDHHRFLLQLHLGQWDTLDATIKGVDREVATRVFRMDTEGTAAKANFSDLIDQLVTIPGVSRLSALTILSEIGTDMSRFATAGHLVAWAGMCPGQNESAGKRKRTRLRKGAPWLKTMLVQCAWAAKRKKDSYYKAQFFRLQSRRGPQKAICAVAASLLTAIYHMLKDGTIHQDLGSGYFDQRPPEIKVKRLVNQIAKLGFEVTLQPIAKAA

SEQ ID NO: 168086 - protein, 354 aa, unidentified
MSNKSTATVATMGIDIGKNSFHVIGLDERGAIVLRQKWSRGQVEARLANMPPCLIGMEACVGAHHLSRKLQSYGHDARLMPAKYVRPYAKGQKNDFRDGETIAEAVQRPTMKFVATKTADQLDLQALHRVRERLVSQRTGIINQIRAFMLERGVAVRQGLRFLQRELPGILATRSDVLSPRMMHIIEDLAGDWHRLDERIEGLSTEIAALADQDPACERLMTVPGIGPIISSAMVAAIGNGSVFSKGRDFGAWLGLVPKQISTGDRTILGKISKRGNRYLRVLFVQAAWVVLIRPQSWERYGLKPWIEAAKKRLHRNVLAIALANKLARIAWAVLNKERNFECVRTRAASSQPA

SEQ ID NO: 168087 - protein, 373 aa, unidentified
MKKRSSSRQNPQSAMKAKPAKQSVTIGMDLGDKTSRYCLLSEEGEILREGQVATSKAGMTGTFGRIGRARIAIEVGTHSPWVSRLLRSFGHELIVANPRQVKLITESSRKDDRLDAQTLARLARIDPQLLRPIQHRAEKAQMALTVIRVRAALIAVRTSLVNTARGLAKTLGERLPKCDADQMGVLQAASLPAKLQQVLEPLLKEVESITEKIKDSDREIEQIARKDYPETALLQQVGGVGSLIALTFVLTVDDKDRFQKSRDIGCYVGLRPRRSDSGQRQPQLRITKEGDPYLRTMLVQGAHYIISRRGPDTDLKRWGLHLAERGGKRGKKKAVVAVARKLGILLHRLWVTAEVYEPLRNHHLRQAEKEAAA

SEQ ID NO: 168088 - protein, 430 aa, unidentified
MKSNTQNAKIEAITEKTLVLGIDVGSETHYARAFDYRGIEYSKKPFKFSNTEAGFVTFKEWILDLKERHEKDKVVPGMEPTGHYWFNLGKFLQDNEMKPVLVNPHHVKKSKELDDNNPTKNDRKDPKVIAGLVREGRYMIPYLPDGVYADLRTASNIRFQLQAELTRIQNRISRWFNIYFPEYKTVYGKPDAKSGILILKAAPLPEDILTLGINGVNQIWRDAKLRAVGKARAKTLIEAAKHSVGSKEGAVAARMEIRMLLEDYESRNIRLQEVMTLIEGLIKQIPMAEKLLEIKGVGIRTVSGFLAEVGDISRFNNPKELQKLAGLALVENSSGKHKGETTISRRGRKRLRYLLFEVAMSLVAKNPEFRELHNYYTTRRLNPLKKMQSLMAIAAKLIRVFYVMLTKGVNYDPKKMVNDIKRPAVYLQTA

SEQ ID NO: 168089 - protein, 355 aa, unidentified
MNDTKYIGMDVHTATISAAVRDSSGNLVMEATLETKAETILEFVHGLRGSLRVSFEEGTCAAWLHDLLKPHVTEVLVCDSRKNALLRVGNKNDREDARKLSELLFLNKLHPVYHGETGIRTLKELARSYLTITRDLTRVMNRLKAIYRGWGIACAGQQVYAPRYRAEWLAKITEAGVRRRAEICYQQFDALAALRQEVRRELLAESRKHPAMRLLRQIPSIGPIRAALLIALMQTPHRFRTKRQLWAYCGLALRTYDSGEYRFVGGQLKRFKKAVTIRGLNKNHNHDLKNIFKGAATRAAATAGPLQNFYEARIANGMKPPMARLTLARKIAAITLLVWKKGVRFDAEQLKQQAA

SEQ ID NO: 168090 - protein, 478 aa, unidentified
MKNQRRAPTPHQAANTKRRALSPALVKRIQPDAAGIDCGATSHYVAVPDDRDPQPVREFGTFTADLHRLADWLVKCGIKTVAMESTGVYWIPIHEVLEERGLEVVLVNAHDVHNVRGRKSDVKDCRWLQELHSVGLLHASFRPTAEIVALRSYVRHRQTLIEAAATCIHRMQKALTQMNLQLHHVLSDLTGVTGMAIVRDILAGVRDPHALAAHRHGGCKASEQEIAAALTGNYRAEYLFVLRQNFEAFEFHQRQIAQCDKAIEAQLTSLAETRQPVSPELPAARPRCQPSKNEPRVELRAPLHRITGGADLSQLDGIGPYGALQLIAEIGTDMSRWRTEKHFTSWLTLAPNNKISGGRLLSSKTQPSANRAATVLRRAAMSLTRSATALGAYYRRVAYRLGQPKAITATARKLALLVYRVLRGDIVYRDPGATAYLQLHRARLINSLRRRAEEFGLSLINLETGEVLDPAAVPSTVS

SEQ ID NO: 168091 - protein, 348 aa, unidentified
MNTTTTIGMDLGNKNHKAVGLGPDGKQLFREEVANTPEGVRDFFVRHAGATVGMETGTHVRWIAALARECKCNPVVGNARKLRLVFESSRKNDWRDAEMIAELCRTNKTLFHPVELRPEVRHKLHQMLKMRDVLVASRTRLVNSVRGLCKANGVLLPKCSAESFPKHADDIPDEGREIFGPLLEEIDSLSGRIRQFEQMIQQYTEEHFKEDMELLRTIPGVGAVTSACFVAAIPSADIFRNPRDAGVYFGLVPRQDQSGETDRPRHITKEGNQMARKSLVLAANYILRDSSQETDLKRFGLRVRGPGKGKIAKRRAKTAVARKLAVIMAAMLRNRKPYNGTTGKGKSA

SEQ ID NO: 168092 - protein, 428 aa, unidentified
MSNQKIIRRRQYCQIIKEISGSDRYLVVGIDVGKDKHHAFMGTATGISLYRKLIFENNLNGFSRLITTADQIKAQNSLTKVVFGLEPTGNYHKPLARHLIGCDRDVVLTAGQSVKNNRQVLNGRWDKNDTKDAANVADLVSRGRCLFYDVPSPEIVELRSLLSLRRRLKKEEHSLRMRIRNGLLAQYFPELDWFYNACENENLAIVRWCLNPDKIAAMEFDHFFKMVTRTRRGIAQKLRLEKIYQAAIDSVGCAMGPAAEFEAELLVEKLNQVRGQLHDTEELIEEICLTFSEYSYLMTIPGFGPYVSAKVLAVIADPFRFDNRKQVIRLAGYDLCANRSGKTSDQAAPVISKNGNGELRYVLYIAANVAASRTEHFRAYFTKMLQGREREKGIKTKMRVKLAVKMLVIAWTLMKKKEVFDPDHLNID

SEQ ID NO: 168093 - protein, 345 aa, unidentified
MNKISVIGLDLEKNVFQVHGIDTDGEVVVRKQLKRSQVHRFFANLEPCLIGMEACGGAHYWSRELTGLGHTVRMMAPIFVKPYLKTNKNDRNDAEAICEAVQRPSMRFVQPKTPEQQAVLHLHRARRLLVRQRVALGNHMRGILSEYGLVLPQGVKTISVRLPALLEDAENELPMLARHLLAECKEEHDQLMKRIKRLEVQIKAWHATNVVSQRLASIPCIGVLTATALAATVGEGQDFSNGRQLAAYLGLVPRQASSVGKARLLGISKRGDGYLRGLLIHGARSVIYHIRRRLKANQRGGNPWVEQLLRRCHPNEAAVTLANKMARIAWVLLVRNETWCPARTV

SEQ ID NO: 168094 - protein, 347 aa, unidentified
MERYIGLDVHSTTCTCVVLGPSGRIAKRAVVETRAEPLQELIRRVPKPSVLVMEEGNQSDWLFEILSPHASNTLVVQPEGSTRRHKSDALDAEWLARVARRGEPGRLIYKAPTRLSSLRHATKAYATTQKDLTRCRARLKLLMQSRGLHAPTEALLDAARREEWIERLPESARARAEILGIAVDAMSHAHREARKLVMAESRSVTAIRWVKSIPGFGPIRAAQAVATIISPHRFRTKRQLWSYSRLAVQSRSSSDWVPNGRGGFERRRRELVLGLNRNGSGVLKHVFIGAAQQIISHMKAHPLRQGYERRVDNGMKPSNARLTLARQLAAITLAVWKKEELYEPTRR

SEQ ID NO: 168095 - protein, 376 aa, unidentified
MTRVIYTGLDVHKDTYSLCSYDAQDNVMFSETTVKAETTSVLSYIKSIEKRYSNDDVMIVCGYEAGPTGFSLCRQLQKKNISCVVMAPTSLPKAPDEKKRKTDKGDARSLALHLAHKTYKAVHVLSPEIETIKELTRTRATALKAQKRAKQNLLSFLLRKGMVYPYGGRAKYWTQKFYAWLKTLEFANDIERYSFEEYLSEVNHQMSRVSRLDEKIGEIAEDPLIRDDVKKLCCFSGISTLTAVSLVSEIGDFNRFEKARYFASYLGLCPGIHSSGLSSQTLGITKAGNKHLRCLLIEAAQAMSRSQICGKKSLRLLARQKNMNPLVIAYADRATERIKRRRSSMIFRGVNCNKATTAAAREMACFIWGLMTNNIA

SEQ ID NO: 168096 - protein, 338 aa, unidentified
MPLYGGIDLHANNSVVVLLNEQDQVIYQRRLSNHLPTILEQLAPYHSDIKGVVVESTYNWYWLVDGLLAADYRVHLANPAAMQPYSGLKYTDDHSDARGLAQVVRLGVWPEGYLYPKAARAVRDVLRKRAHWVRQHPANVLSVQNILARNPGSRFSAKRIHEFTKADLEGLLPEANQVLAVTSSLALLDCLSQQIKTLEKAVTKSLQHTPAYEQLLTVDGIGTILAQTIGLETGDIGRFPTVGNSASYGRCVKRTNISNGQRKGQGNVKNGNPYLEWAYMEAAQFAIRFNSTVQRFSQRKHAKSHLMVARKAVAHKLSRACYDIMRDLVPLDVHKAFG

SEQ ID NO: 168097 - protein, 329 aa, unidentified
MTVFAGLDVHKKYFHATAMDKSGDILVQEEFPNETEGYDSLLKETGEEVKVAFEATYAWEYVYEELEDRVKEVKLAHPKRTEVITKERIKTDVRASEALANLLRTSWLPEAWIPPKETRKLREKLRRRAYLVWKRTGFKNKIKVDLAKHGIRRDFSYSEEDKEWLRSLDIDSVNDYLDMIVALNKPIERITKKIKKEARVDEGAKLVMTIPGVGPIWGLTITSEIGDIGRFPSSKHLCSYSGLVPSTEQSGSKEVHGSITKEGNKYLRWAAVECAWLHKQHADDTYILRFFKRMAARKSGQTAAVATGRKLLTTIYWMLKRGKEFRPQG

SEQ ID NO: 168098 - protein, 397 aa, unidentified
MIAVGIDVSKSKSTVAILNSDGTPLARPFNMAHTLPEMNSFVERLRAFDAPVTILMEYTGHYHYPVLKKLQAEGFPVCLINPYQMKKYGDVEIHKAKTDRKDAVRIATYALEKAYKLTPYSAMEQKYEDLRFLSRQYGQRIADVSRLKTQLLDHLDQTMPGITSLLALKSRTPDNCVLLLFIKRFNSFDEIHRIGKPRFLSAYSSLVKKTTDRYAASKALAIYELALNSITTRGDDPYIWSVQRQCVDLLASAQNAADTIILQMQNIAETIPEYKVLRSMHGVGDRLGPIILAEIGDIRRFHSGKALNSYAGNDAPPYQSGQFESKNRHISKRGSPALRKACFEVMQALKLTKPQDDPVYLFMLKKEQEGKPHNVAKMAGVNKFLRIYYARAMALYK

SEQ ID NO: 168099 - protein, 342 aa, unidentified
MYYIGLDVHKKTISYCVKDASGQVQQEGKVGATRWELDGWMKTLPQPWTVAMEATIFTGWIYDHLLPHAQQVKVAHPLMLRAIAAAKKKNDRIDAGKIADCLRCDFLPECHMASTAIRDRRRTLRYRHLLVRQMVQMKNRISGLLMETGVSHNKQRLHKVGYFRELLASNEEVSESIRPLLRVSRDSIVRLQKTEYALVSSLQRDPLLAERIKQLRTVPGVGPITALTWALEMGDVSRFPSIREAISYCGLCGDEKSSADKVMRTPLSKQRNKHIQRVLVEAAKLAPRQDHALALVYEREKQKGNANRATLAVARKMVAYLLAVDRGQRDFVPFADPQSAAA

SEQ ID NO: 168100 - protein, 353 aa, unidentified
MPRKTDTAVVSTIGIDTGKNALHMVGLDERGAIVLREKVSRLRVAARLVNVQPCLIGIEAGMATHYLARELVALGHEVKQVPPTYAKPFRQGHKNDFRDAHAVAEAVQRPSTRCVPIKTDDQLDLQALHRVRSRLIGDRTAVINQLRGFLLEHGIAVRQGHRFLRRQLPQILATRTDVLSPRMVRIARELVADWDYLDERIDRVTDEIEDLAQTDLSCAQLMTVPGVGPIIASATVAAIGNGAAFANGRDFAAWLGLVPKQMSTGDRTILGRITKRGNRYLRMLFIQGARAVLLHPTSWAKHSFGSWLTAAARRLHCNVLTVALANKLARIALTVLFEGRNYETRVAPAPVPA

SEQ ID NO: 168101 - protein, 360 aa, unidentified
MKRLTNKQTWFKMQKLTAKDKLYVGLDVHKNSIAVACQLNGRIALTFNTSARHDPLIRELLRVKKALRLIVYEAGPTGFGLARALQAAGLSVQVVAPSTIARPAQVRTKTDRLDCRSLAEGAAKGDFKKNVVAIPTVEEEAQRQLPRLRDQLISKRRRVRQQIKSFLLQHGLTQRISFQRWSQKAIIELRQLELHRALRFTLNIYLSEMDHLQTCIEELEAQLKALCQSKPHRRAMAILQSHPGVGPATSWSFYFELFRPQRFTKPSQIAAFIGLAPRLHQTGTRSRGGPIVKTGREQLRSKLIEAAWIWIQHDSHARSVYYRLSRNTGSSNKAIVGLARRLAIHLWAMLCSRQCYRPAA

SEQ ID NO: 168102 - protein, 377 aa, unidentified
MKRILKIGMDVHSTNYTLCAMEPVIGAEDRIFANIKVTADYKNILMFIENLKLKLGLNDEYDIECGYEAGCLGYSLYNQLTAAGVKCVILAPTTMLTPQGVRIKTDARDAVMIAQCLSYGGYHAVYIPTEEDDSVKEYLRMRDDHKLALKKVKQQINAFCLRHGYHYEKTKWTTAHLKWLKGLDVSGLYKEALDEYMASYDEQTAKIERFDQRIEELASQERYQEKVKRLGCFLGIKTHTALSLIVETGDFERFAKGNIYAAYLGLAPGENSSHEKIRRLGITKAGNGHLRQLLIEAAGGICKGAVGHKSKELRRRQNGNTAEVIAYADKANTRLRSRYYKFIRRGKKRNVAVAAIARELACFVWGMMTENISIKAS

SEQ ID NO: 168103 - protein, 416 aa, unidentified
MKKGQNTRGYERYLALDIHREYLLVGGWNEEKEWVLTPRRVGLEKFPEWAKKNIRAGDIVVLETTTNVWTIYDLVAPLVSRVLVANAAEVGEIANARVKTDKEDIKRLLKLLIGGIVPEVWVPPLHVRELRAFTGYRARLVKTSTMIRNRLQSLLHKHNLMLSEAGLLDQAWWEEQKNISALEKLQIRQELVLLQEVEKLKMAVDEELQRQSTSPMWGKQALQIMQLPGVGYIVAMTVLVAIGDISRFENAKQLVGYSGLGAGIHDSGKTHKEKKITKKGRRELRWAVVEAAWRAIRLSPFWKAEYEKHLQRMRKPNQAIVVIARKLLIAIWHVLSKEETDIHASEEDLAYKMLLLSWSLKEETRRGLTYKQFAKYALIKLGVETDITRFVRKNVPRRLASREEVLMRMAELGLSA

SEQ ID NO: 168104 - protein, 349 aa, unidentified
MQQQSYVGLDVSLAETAVCIVDGTGKKLFETKVPTDASMIAGAVRKHAAGQLERVGMETGTTAPWLWRELQAQGLPVVCLDTRHAHRALSLRVQKTDRNDARGLAELVRLGWYREARVRSMDAQFMRALLLSRRQLMQVVRNVSNQLRGALKVFGLARTSTAGKGFRAKVQALAAEHEWARPVLDPLLAVLVATEEQLKAITTKLVRLARDDNDVRRMMTVPGIGPISALAFKAAIDDPKRFTKSQAVGPYLGLVPRVYQSGESEWTGRISKTGDELARTYLYEAAGVLLHQVPSWCALKAWGVRLARKNGLKRARVAVARKLAVLLHAIWVDGTQFEWRSEPPATAAA

SEQ ID NO: 168105 - protein, 342 aa, unidentified
MKKRYVGVDLHRNCFTACYRDEEGQNEIKRWPIGGLKAFSQGLNTEDKVAVEATGNTRLFTEAIKGSGCGITVVNPHQFEVISRSVKKTDEEDAKVLAEFLAKGMLPEVRMKDGLQARIASLVQTRDKLVKLRTILKNKINNLLAGRGILLRKESLASEKGLEAVLKMDVEELEKVELEILVNEIRHLNESIKKVEEVLKEQGPKLPGWKNITSIKGIGDVGANIMLSAIGNIHDFADEGKLASYFGIVPRVRNSNETEHSGHITKQGNKLARTALVQCALIAVKYSPYLNRYYRKIEARRGTGKAIIALARKLLGIIYRTLKNDWVFKDFPNYILVTEKAV

SEQ ID NO: 168106 - protein, 463 aa, unidentified
MKHHPKHERASKKKPVSPSLLERIQPDAAGIDCGQNSHFVAVPPDRDPQPVHEFRTFTAELERLAEWLAHCRIKTVAMESTGVYWIPLYEILEQRGFAVVLMNARDVHNVPGRKSDVKDCEWLRELHSVGLLRASFRPAAAIVPLRAFLRQRQTLVEEAATRIQRMQKALTEMNLKLHTVLTDITGHTGLKIVRSIVAGERDPERLAAYRDPRCHASHGEIVAALTGNYRAEHLFALKQNLAAYEFLLQQIAECDREIEALLTQLADQQPPPAALLPQARRNQVSKQAPPFDIRHPLHRLTGGADLSQIDSIGPYAALQLVAEIGPDMHRWNSAKHFTSWLSLAPNNKISGGRLLSSLTPPSANRAAAILRRCAMSLTRTSTALGAFYRRLAARAGKAKAITATARKLALLVYRVMSGNLIYDDPGATAYHQLHRARELKALCRRARILGFHLVDQATGAVTA

SEQ ID NO: 168107 - protein, 326 aa, unidentified
MITIGIDVSKDKIDCAWLRDSDTGKVKTKVLKNNGEGFKSLIEWAEKSTNHPINEIYFVMEATGIYHEALAYALHGAGAVVSVVNPAYIHNYAKSQGSRIKTDKKDSITIAHYGATHKCAPWQPEPSEIRQLKALLSRYEAIEKDIQRESNRLEKADITRASVEVIDSIKTMIKALSKEKERIKKLMDDHIDQNPQLKNDRALLESIPAVGSVLSHYMLALIYSRHFATAKQCSAFIGLNPVMHESGTSVRSRSRLSKVGDAKIRAKLYMAAVVAIQHNPDIKQQYDRLLKNGKSKMAALGAAMRKLVQICFGVLKHQTPYQPQVN

SEQ ID NO: 168108 - protein, 364 aa, unidentified
MSSVSHRSLTHLGMDVHKDSISVAILRPNDSMDVERLFHDEDSVRRFIARMGDPRRLTACYEAGPTGYELSRQLEHLGVRCRVVAPSLIPKAPGDRVKTDRRDCRRLARLDRAGELVAIRVPSPAEEAVRDLCRARGDMVIDLDRARRRLGALLLRHDRIWRGGSNWSLKHEQWLLAQRFDDPALAATFSQYRSVVEERRLRLVAVESDLLAYCDQDPYAEAVHRLCCYRGVDWLGALTLVSEVCDWRRFAKASSFMSFVGLVVSERSSGEHVHRGHITKAGNEHLRTQLIESAWAYQRGPYVGARIAKAQERCGPKTRERAWKAQVRLCGRFRRLAARKNVKSVVATAIARELAGFLWGEMTA

SEQ ID NO: 168109 - protein, 362 aa, unidentified
MEYFTGLDVSVDETAICVVGDDGKVAFETAVETDPAAIAEALRPYADRMRRVGHEAGSLSPWLHTELLAEGVPAVCLETRHVRAALSAQRNKTDANDALGIAHIMRTGWFRQAHVKTDACYRIRLLLVQRRNLKRKFLDLENAIRHSLKVFGIRLGKVGRGAMEKVVRESVAGDAMTAGLMDCMLRARAALWTEYLTLHKLVVQIAMRDELCRRFMAIPGVGPVTALSFSSAIDDPQRFRRSRNVAAYFGLTSKRWQSGTSIDVHGRISKAGDPDVRRALYEAASAMLTRFKGRDVIKTWGLKLAKTKCHAKARVAVARKLAIVMHAMWRDGTFYIGDPDTSAQDNDASNAAKLRRLSRANS

SEQ ID NO: 168110 - protein, 315 aa, unidentified
MTKQRPSVNVGVDVGKAQLDVYLLERDRMFSVPNEESAIATLVSRLSRYCLERIVLEATGRLEQPFVRAALAKGLPVVIVSPLKIRRFAGAVGQLAKTDAIDARLIAQFAATLKPIAHPTPDPKAQLIKDLVVRRRQLTSLRTMEKNRRQVMPEALKPSIDRIIETLDRELESLEQLIQDTVEQHAAWRHKRDLLTSMPGIGRSVASTLIGDLPELGSLSRRQIAALTGVAPFNRDSGTFRGKRRIRGGRAHSRTALFLSAMVATRYNPDIKRFYERLLQAGKHKKVALIACIRKIVTALNAMLRDDKPWQSSFA

SEQ ID NO: 168111 - protein, 351 aa, unidentified
MVVVGADVHKRSHTFVAVDAVGRKLGEKTVKATTEGHQVALMWARDQFGVELRWGIEDCRNMSARLERDLLGAGQAVVRVPTKLMAQTRKSGRTRGKSDPIDAESVARAVLREPDLPVASHDEVSRECKLLTDRRDVLVAQRTSAINRLRWNVHELDPERGPAPRALKATKHQQALQAWLQTVPGLVAELARAELGDVIRLTSEINALEQRLSQRVREVAPALLEIPGCGDLTAAKLVGETAGVSRFKSEAAFACHAGVAPIPVWSGNTEGQMRLSRSGNRQLNSAIHRIAVTQIRMPDTEGHAYHQRRIANGKTNAAARRCVKRGIARRVYRALLADHHTRTQPHQPTAA

SEQ ID NO: 168112 - protein, 350 aa, unidentified
MIPAVIESCAGIDVGRKFVVVCVMCGDAHATPTQEVRKFSMLTEGLEQLRVWLHQSECTHVVMESTGSYWKPIFNILDDGQLEVVLANSQQVKNLRGHKTDPNDARWLAHLLRHGMIRPSFIPDRDTRELRDLTRRRKKLVECAAEERNRVQRVLQEANIQLGMVLSDVFGESGLNMLDALMSPDASPKQIADLAVRTARKKIPEIRKALEGHRMTEHHRRLIRHSMEHLAFLEEQIAELDREIDDQANGSPALKSATELVKSVPGIQQTAAAALVAETGADMGHFPSGGKLASWIGICPGNNESAGKRKSGQIRKGIPGRNESWWSAPGVPPGRRIRKRSVITSASNPD

SEQ ID NO: 168113 - protein, 326 aa, unidentified
MASMTSPIPTAQPDRVVIGGIDTHKDIDVAALLDCAGMVLGTAEFPTTRAGYRQLLGWMGSAGHLGGVGVEGTGSYGAGICRQLSAAGVEVVEVNRPDRSQRRRRGKSDALDAAAAAEAACGGQRLAIPKSRDGQVEALRVLRLTRASAVKAGTKALQLLQQLIVTAPEQLPDQVGELPRMELIGCCAAWRPHSHDAADPSVATRIALKKLARRYLQLAEEISDSDTLLDGLVTDLAPQLIAVTGIGTDTAGQFLLTAGDNPERVHSEPAFAMLCGVAPLPASSGKTQRHRLNRAGIGKPTGLCTSSPPPGTLRPPHPGVSEEEDR

SEQ ID NO: 168114 - protein, 364 aa, unidentified
MEQNLLETLPPPAFESLPQTQPKQQIKEHIWQWFGLDVSKDSFTAAYYSGLPDTKKSEVVSFESSRKGVKKFLSWRKKHTFSDYPSAIVMESTGYYSRNLTDILLKLDSSIHVSICNARSVSYYIKSHAENKTDQSDARFISRYGYDFQPLSVKIKSRDEKLLKEFVSERMKVVKMMTMLTNKSHSLEYAETKAINKGIIDFLNKKKQELDKKIVEVSKLSVEMDNEIALIDSVPGIGRVSASVIYAELGSLKQYTRLQLSGMSGLFPKISQSGTSMNKSKLAKSGSSNLRQILYMDSIKAIEIIPSLRELRKRLLARENSRKMTAMCACMRKLLLIAKGVVDSGVTYDPSFQQKKGEVSQKTA

SEQ ID NO: 168115 - protein, 472 aa, unidentified
MEEAAMKHNPKRKQISKKERPSISLLERIQPDAAGIDCGQSSHFVAVPPDRDPQPVREFPTFTTELERLADWLARCGIKTVAMESTGVYWIPLYEILEQRGYEVMLVNARDVHNVRGRKSDVMDCEWLRELHSVGLLRASFRPAAAMVPLRSFMRQRETLVEETATRIHRMHKALIQMNVMLHLVVTDITGQTGLKIVRSILAGERDPQRLAAHRDRRCHASYAEIVAALTGNYRAEHLFALKQNFAAYEFLLRQIAECDSEIEALLSKLAEQKPLPAAPLPQARSKRSPKRAPAFDIRSPLHRLTGGADLSQIDSIGPHAALQIIAEIGTDMRRWPTEKHFASWLTLAPNNKISGGRLLSSRTPPSANRAAAILRRCAMSLTRTSTALGAFYRRLAARAGKAKAITATARKLAVLLYRVISGNLVYNDPGATAYQQLHRTRELKSLRRRARLLGFQLVDQTTGEVLNATVS

SEQ ID NO: 168116 - protein, 381 aa, unidentified
MFENITYVALDDHKRKHQVAVLLPGMDRDDAITWRIENKRAGIRKMVRKVLKMAPGDVRFCYEAGPNGYVLQRRIEGFDGVSCVVVAPTKTPRRSGDRVKTDRRDAKKLVGLFRAGELTGIVPPMPEEEAIRDLCRCRRAAQRHLMASRHQLDKFLTRNGFVYWEGKNWTRRYREWLRSLSFDDWRRETAFHSYLFGEEQDEDRVKRLDAEIIRAAEEEPCRTLVGFVRCFRGLDTLSAMILITELYAVGRFMTASAIMGFVGVVPSEDTTGWDPHRGPITKTGNGHVRRILVEAAKHYRHPARISKALATRRKGQPDWVIAIADKAQARLHQKYWKMVMGKGKHPNVATTAIARELVGFIWSVLSRAATEMPSVADELVA

SEQ ID NO: 168117 - protein, 353 aa, unidentified
MTSLTDLREVVDVVIGVDTHVHTHSAAVVDAATGGVLGEITVEATAQGYAELVEFANNYPMLRAWAIEGTGGHGAGLSRHLLESSELVVELDRPKRAARRNGAKSDPLDAIRAAREAMARPRLGTPRSGGERQALSVLLAARRSAINASTEAQLQMFSLVVAAPEPVRVRFRGQKLAAMLNTATKLRVHSAWDVETTSTVLALRTLAHRAHAMLKEARELQKAILAIIRGWRPDLLEEFGVGPIVAATVLCAWSHPGRIHSEAAFAMLAGVAPIPANSGQVTTRYRLNRYGDRHLNTALHTVVQIRIQYQPATRDYVARRTAEGKTSREIKRCLARYVARDLYRLLESGAAAA

SEQ ID NO: 168118 - protein, 357 aa, unidentified
MNRHKYVGMDVDQSTCVIEIQDKAGNFVMETYLPTRASELRAFFKGLDGRIHVAFEEGTQAAWLYELIEPLVEDVVVCDRRGEKVRGNKGDRLDARMLARQLRQGELRRVYQGERGHRELKELIRGYDYLVEDVVRTKSRLKAAFRSRGLKCSGRAVYRKGDREDWLKKIDVDALRARVSSLYEQLDCLMRLHKEAKDAMITGAKKHPSYKLLVKQPGLGPVRSAQILGIVGTPHRFRTKRQFWPYCGLAVVVHESSEYEIVDGQRRRRKRPLRTRGLNKNFNRTLKMVFKGAAKTVIAREPFKQYYQRLIDKQIRPEMAKLTVARKISAITLSILKTGEEFDPNRVNQAVSDSGDQ

SEQ ID NO: 168119 - protein, 469 aa, unidentified
MADKLLPPVTGIDIAKGFSEIQTIDPFNQPYGEPMRMEHNHKAMSNALHRIQKIGKALGTRPIIVMEATGHYFRIVFYLFYNAGFQVVLVNPIQTKAFANAPKIRRATTDKISAKGIALLYRMGMLTPARIPTQERIQLKELCRDYWNFINQAGNWKRRLTALRDQIFLLYEGAFRNPFGLTALSIFLEYPTPERILKEKRETLALKIKRLAHKSLAWAEKKADTLKSLASASPTLPEEERTAIRRLQSYARTIATLKAEADALLEDINALVKDDPEYELLLTIPGIGPITAATILGELGEFRWFKSAGEIVAFAGIDPKVSESGKYKAPRVSMSKRGSPYLRLALYIIASAAALPKRNGRIPNPVLGAYYRRLRERGKPHKVAIGACMRKMVGYIFATLRDGQGFEVREPAKSKKETEQAKPQRPATVRETTFPVYDEENRVIAYATDAVPISRILPQVMEKLRTLRD

SEQ ID NO: 168120 - protein, 356 aa, unidentified
MSEHKRTPKEFEGKEFYVGIDVHKKQWTVTIRHQGLSLKTFSMDPSPEALKGHLERQYPGGIYHLAYEVGFCGFWIQRRFRELGIDCIVVNAADIPTAHKEKDRKEDSVDSRKIARELEKGELRCIYIPSEEDQHLRSLCRLYHRVVENVTRVKNRIKEHLYFNGIELPKHSSHWSGRFIAHLRSLPLDGGPAKDCLELWLEELGQHRQRLVEVLRKLRGYVRQPGRAEVFHNLTSVPGVGFKIGMTLYAEIMDMRRFRSLDQLKSYAGLVPSTHSSGEKERVRGMTYRRNRYVRYAIIEAAWVAIRNDAALLATYNKLIVRMKKQEAITRIAKKLLNRIRYVWRNDSPYVVGVVE

SEQ ID NO: 168121 - protein, 351 aa, unidentified
MKRNYIGMDVHQTSTAIVVVDDEGKVLQRTVVKTEGKTLRGLVSALPGRKELTFEEGSMSEWLFGILEPVVDRLVVCNPMANKTEFRGNKNDLLDAERLAELLRIGHLKPVYHKAHPLREIQSCLRTYHQVTGDLVRAKNRLKVLFLSRGIAVGREVYDREGGDLAAQGLSDPSDRERYRYLMDHVEFFTRQKESLTDDLVKKAKRNKDYRLLQTIPGIGPIHAAELMGVVLTPHRFRTKRQFWRFCGLAVVKRTSSDWIQGARGLERRTFEQTMGLNQDRHPVMKGVFMQAALVVTRSSPFKESYDSFIARGHSPALARVYIARKLATITLTIWKQGGKFRPEMIASNPS

SEQ ID NO: 168122 - protein, 331 aa, unidentified
MNEPIMPAAAARFNHVIAFEVAKESLAVHILPSGESLEVPNTPASARRLLRREQKRNAKLGIGPLLVVCEATGGYENAVLEAACELGLGCHRAHGSSVRAYAKFRGRHAKNDPIDAGLIAGYGRDKPDLRLYQPPRPEELALRELMSRRAALQDMIGAEQCRLEHASLKTVRQSLEKHLKMLDKELAAIEKEIEALARRDAVLNHRAKLMQTVTGVGSVTAYTLLAFMPELGSIPGPAAAALAGLAPYDRDSGKERGRRRIFAGRGQVRACLFMAARAAICHHDVFRSVAERLMKKGKPYKVAVTAIMRKLIVILSAMLKDDQPWKHAKTA

SEQ ID NO: 168123 - protein, 421 aa, unidentified
MKNSIARKLRQVPEGYGVLGVDPHKRRHAAVVMTQDFVVRSKFKFDNSREGFEKMLQRVKAEMARAGWRGLMFGLETGGHYWRNLAYFLDERGIPFRLISQFTLKRRREGKDLNRRKNDFHDAEVAAQLLSTGEFTDTRLPYDVYAELRAAYSAYRRLVKESGRLINLLKGLLDGLFPEFTQVFKNPAGKTAMSVLSCCPVPGVIAQMGEDDFIRIIRANHQGRLMREKLRHLHRLAQASIGIKEGTEAVSLEVSLVAERLSLTQRQIERLIKLMIRLVDATEEGPHLLSIPGVGYITVAGMLGELGSFKNYQNAKQLIKMAGSNPTEAESGGKRSKRTPMSKKGRPGLRYCGWIGVIPLLRHNMEFRAWARRLKERPVHAHPLKPREIIGAAVNKLLRLSFALVKKKAFYQMPKLAEVAG

SEQ ID NO: 168124 - protein, 340 aa, unidentified
MIGGVDTHLDVHVAAALDERGGLLGTKSFPASPGGYRQLLGWLRSFGELQTVGVEGTGSYGAGLTRHLLTAGVEVLEVDRPNRQERRKAGKSDTLDAVSAARAVQAGTANGAAKTRDGNVESIRVLRVARISANKARTQAINQLHSLVCTAPPDLREQLRGRSRDQLIAGCVALRPGNRTDVTALTKRTLRLLARRALALQAEIADLDRLIKPLVVKEAPDLVARYGVGPDTASALLVAAGDNPGRLRSEATFARLCGVAPIPATSGKTHTRHRLHRGGDRLANAALWRIVLTRMSNDPRTRTYVERRLKEGLSKREIMRCLKRYTARELYAYLPRETAT

SEQ ID NO: 168125 - protein, 382 aa, unidentified
MSAERVNDCYVALELSQRTWLIGFLLPGTDKVQIMTVAGGDAEALLSALGRIESLAGTRLAAECTMVSMRVCYEAGYDGFWLARYLIDRGIDTTILDPSSFLVSRRGRRVKTDRIDVEAMVFTLKAYLLGDRSVCRPVRLPSVAEEDAKRLSRERTQLKKERTRHVNRIRALLVLHGIRSVPGLWGGRWKEALSNIRTGDGRELGRFIFRELCRQFERLDLVHSQLKSLEKERIQACETEGAINDSGKITVLKQLDGIGEVGATQLVAEVYHRTFKNRKHLASYLGLSPSPYSSGEVHRDQGISKAGNKQARVMLVELAWCWLKYQPQSELTRWYRARFSGHGSRSGKVGIVALARKLAIAFWRFIEDGVVPEGATLAVATK

SEQ ID NO: 168126 - protein, 294 aa, unidentified
MEAKFVGIDVSKARLDVDCLPVSTARQFSNDAGGIAALVQWLLGSGVERIVVEATGGYEIAVASALAAAGLPVVVVNPKRVRDFAKAQGVLAKSDRLDARVLALFGERIAPPVRALPQAAQRDLTELLDRRHQLVSMRAQEQARLATVLPVARGDVEQHIAWLDQRIRKHETVLLKRLRANEIWDAKVKLLDSVPGIGPVNLFTLVGVAPFNDDSGKRRGQRYIRGGRAEVRCALYMATLTAKRCNPVIAQMFERLIAKGKPFKVAMTACMRKLLTILNAILKSTQPWENRLAT

SEQ ID NO: 168127 - protein, 366 aa, unidentified
MKDYTVFRSVTAAPAAAKSKVNKSGSLLKIGLDIHREKFVVVAQYDHATPRPPHRFAPAEFVPWVEARLREGFEVHVVYEACGFGYGLYRALLQAGAHCYVVAPQKLDEGNTRVKTDGRDSHALCLRLDRYLAGNKNSLAVIRVLSEEEERARHWGRQREQLVHHRQKLEAQGRSLLIGHGLPAPARWWRPQSWSRLGKLLPVWILPQLEFYRPVLLALDQQIRTLTVELEKAAPLALPKGMGALSSVVISREICNWRRFNNRRQVSSYTGLCPGEYSSGTKRVTRSVTKHGNSRLRAALVELAWRLVRYQPRYHAVQKRLTVLAKGAQATRAHRKKAIVAVARQLAVDLWRLHTARCTPAMLGFN

SEQ ID NO: 168128 - protein, 341 aa, unidentified
MEQIIRIGMDTSKNVFQLQGVNAVEQPILRKTFSRKEMVNFFEKTARTTIALEACGGSHHWARLLSCLGHEVKLIAPQLTKPYVKRGKNDAADAEALCEAMSRPTMRFVPVKTADQQAALMLAGMRERLIRNRTQLANAIRGFGMEFGIVATSGMCRIEPLLERIAGDQSLPDLARELFAVHGDEYRGLLSEIKRIEEKLMDLHRADECSRRLAEIPGVGPVGASLLMMKTPDPRMFKCGRDWIGLTPKDHSTAGKVRLGGITRAGDEMLRSVLVVGATAVLQHVGAGRSRHASRGSPNCCNGKSLSWLRWRSLTRLLVLPGKLMVSGETYRRMEGQPKAV

SEQ ID NO: 168129 - protein, 386 aa, unidentified
MKLVGIDIAKYEHAAFIMEASTGESLCDPFFFKNNKEGFKKLYTGLNKYSKNELLIGMEDTGHYNFAIESSLLAEGYKVALINPITTKSLRKASLKSVKSDKEDALLITKALLDKAYYRIISIQDEKLKEAKELTRYRTQLTLEMNRKKNVLQRHIDIVFPEFNTLFNNEYTITYLNILRKYSDAYTIAHTDIRSLRKCFKYCNSFSAEELKELASNSVGIHDVSISFIIQSVISSIDLINSQIEELDKKIEELAITQASSITSIPGISIITGTSILAELGDISKYSNAGKVIKFAGVNPYISESGKFSADKTAITKKGSKYLRTTLYRVIIPVIRHNPAFNNYYHLKRNQGKGHLCALGHCVRKLLRIIYHLETNNLSFDINSLK

SEQ ID NO: 168130 - protein, 465 aa, unidentified
MAKSARSTRSRVPRVPRKTNPTPHVLHPDAAGIDIGATHVYAALPPERAAAPVRVFETFTEDLHALAAWLKEHRITTVAMESTGVYWIPVFQVLETAGIEVSLVNAHHAKNVPGRKTDVSDCQWLQYLHSVGLLRGSFRPPDEICAARTLLRHRGTLVAQAAAHVQHMQKALVQMNVRLQHVLSDLSGTSGLAILDAILAGERDPARLAKLRDPRVKASEATIAKALVGDWRAEHLFTLRQARESYRYCQTLIQECDAEIERRLAQLRSRVDPTQTPPPSGKPGQDRSRKGEIGLQGADLRTELYRVLGTDVTQVPGLGTGHAAGLVLQLGTDLSAFPSAAHFSNWQGLCPNPQISGGRVLKRGTRDVQNPVATIFRMAAQSLHHSDSALGAYYRRMRAKLGAPKAITATAHKLARIYYHLVTTKQAYDESVFAKNEAREAKRRVERLKREATALGFVLSPQAAA

SEQ ID NO: 168131 - protein, 345 aa, unidentified
MENMYYIGLDVHKKTISYCVKDGSGRIYAEAEIPATRLDLDRWMKTLPQPWTAAMEATIFTAWIYDHLKPHAAAVKVAHPLMLRAIAAAKKKNDRIDAHKIADCLRCDFLPECYMASTEIRERRRTLRYRNLLVRQAVQMKNKIAVLLMEAGVSYNKQKLHKVGYFRELLATNQDIDEGLKPLLRLCRETVVRLGKTESALVRSLQRDSLLMERVERLMTIPAVGPITALTWALEVGDVQRFSSIKKAISYCGLCGAENSSANLIKRTPLSKQRNKHLQTTLIEAAKMAPRNSVDLAMLYDREKQKGNANRATLAVARKLVAYLIAVDRRQKDFLVVENENRTAA

SEQ ID NO: 168132 - protein, 459 aa, unidentified
MEAIIERCAGLDVHKKSVTACVLVLEGPGKPKPLVRTFGTMTRNFETLRDWLRELRVTHVAMEATGVLWKPVFNILEDDFTILLCNARHIKAVPGRKTDVRDSEWIAQLLQHGLLSGSFIPPRSQRDLRDLTRHRAQLSSEKAREINRIHKILEDANIKLGAVATDIMGASGRDMLRALIAGQSNAEEMADLARRRMRGKIPELKEALHGHVSEHHRYMLALHVRHVEQVEQMIGELDERIAALMAAGALDAPGAVASPKGEQERCAQSAPAIESPPEESEAKASVEEVKPPLPFAEAVALLDEIPGIDCVAAIEILAEIGADMKQFPSAKHLASWSCLCPGNEESAGKHKSGKTRKGNRWLRRVLTQVAWAATHTKNTYLSAHYRRLAKTRGKKRALIAVAHSMLIITYFMLAYHRHFEELGANYFDQLDPERLRQYHVRRLQELGYQVSVEKLTPAA

SEQ ID NO: 168133 - protein, 330 aa, unidentified
MNSICLSTDHTVAALPVLGLDVAKASVQAELRTSGNKVRFGFDNNAKGFAQLARILKEHNVPKVWAGLEATGPYSHALALWVHGQGHRVSLLNPRRVKQYARSAGNRNKTDLLDAAIIADFVCAHQPAPWQPPLLEVAQLQALVRRREELSVMLQAEKNRLEGVAPNVRSSLGRIIATLSAEKARLEKLITQQIRSHPQLSRDHQLLCTIKGIGSLTAAILLAEMARPGQVERARQAAAHAGLAPRREQSGTSVRRNRGLGKEGNRHLRKALYMPALVAIKYNAPLRYFASRLRTAGKPKMTIVCAVMRKLIHIAFGVLKHQKPFNPSLA

SEQ ID NO: 168134 - protein, 327 aa, unidentified
MYVCIMSQDGEMLVHRNMQAAPEPFLKAIAPYRDGLVVAVECIFTWYWLADLCAQEGLPFVLGHALSRKAMHGGKAKNDKIDSQKIATLLRGGRLPKAYVYPAEMRATRDWLRRRTHLMRKRAELLAHVQNTNAPYNLPEIGKQIAYTAHRAGVAERFDDPAVQKTIEVDLALLTYDDQMRSNLELFMLKTAKHHDAQTLYLLQTGPGIGKILRLVLLYEMHQIDRFPRVQDFASYCRLVKCAKASGGKRLGTSGNKMGNAHLTWAFSEAATLFLRGNEPGQKYLARLEKKHDKGKALSILAHKLARAVYGMLKRKTAFDLEQFLRT

SEQ ID NO: 168135 - protein, 311 aa, unidentified
MQDTIGIDVSKGTLDLHRRADGANVQLGNDTPGFKRLLKWTGPSAAALIVFEATGAYHRSLEKFLNLHKLPYVKVNPKQARRFAQAVGKLAKTDRVDAEMLARMGSALDLQAKEQPHESLHDLKELLTARRALIKDQTAAKSRLATATVPLLRRQIKRRLAQIARDIAQLDIGMREQADKDEAIAERMDILASIPGVGRLTAITMLVDMPELGTLEAKQVAALAGLAPITQQSGKWQGTARIQGGRPWIRRALYMPALVAVRFNPDLKAKYTQFIDAGKPPKLALTAIMRKLLVMANTLLRDHRMWSEVRP

SEQ ID NO: 168136 - protein, 354 aa, unidentified
MLYLGVDLHKRSCWVTVLDADGQLVESRKLGTGRKELEDYFGRLLRPAAVAVEATFNWYYFLDVVEPLGLELHLVHPWKTRAIASARIKHDQLDSRILAELLRTGFLAEAWIAPREVREQRQLLRHRARSVQWATRAKNGVYGVVNRQGIRPPVESLFGPKGRAFLAELELAAMDRWEVEDQLLRLDVLEGQIAALDREIRRRGRENAVVRALEEVPGIGPFIALLLVAEIGDLQRFPSAKHLASYTGLVPSLHASGERRWGGPVTKQGSTLLRWALVQAAHRAAQSARFSEYYQRQRARLGAAKATVALARKLAVISYYRWRAAELRQDSPPAAQSSGVHLGWRMVRTATQTV

SEQ ID NO: 168137 - protein, 410 aa, unidentified
MAELWCGIDWAEKHHDVAVIDDRGSLLISERISDDVAGFDRLVELILELRKGGLDGLPVAIETAQGLLVSALRAAGADVFAINPLSVSRYRDRYSPSRTKSDAADAMVLANILRTDRDNHRRLPNDSEQAQSVKVLARAHQDAIWDRQQIASKARSLLRQYFPAFLETFDDLTTMGAREALRLAPTPAAAVNLRPATIAAALRKAGRKRGVEVEARRIVAGLRLPHLRQPLQVEIAMGRQAHAYARALTATAENVKSLEAALTSAFEEHPDAPILTSFPGLGVVLGARILGEIGDDRTRFATARGLKAYAGTAPVTRASGTRSSTRLRIVRNKRLNHAAYLWALPLILHSPDARAYYDRRRAIGDTYTAAARNLSNRYIGMLHHCLCSRELYDASVAFAHCAEPADAMVS

SEQ ID NO: 168138 - protein, 363 aa, unidentified
MRDPRSVAVGLDVHKASVRLAAVRAGEVVREVTLPYDHERVERELSAWPGVRVAYEAGPTGFGLHRRLVAAGVDCVVVAPGLVPSRPGDRVKTDKRDARRLAALLAAGLLTAIFVPSPELEALRDLVRAREDARLDRMRARHRLGKFVLRHDRRMPTSCWGPTRRAWLGRQAFELPGQQQAFDDYLFAADQLDRRIEALEVELDRLAADGPHAALIARLRCVRGIDTLTALGLVAETGDFGRFTTAEQFMSFVGLVPSERSSGEGRRQGSITKAGSTHARRLLVEAAWHARRRPTVGYELARRQRGQDPAVLERAWRCQQRLHRRWQRMGGRGKPHQKIVVACARELAGFVWAIATDQPLRAR

SEQ ID NO: 168139 - protein, 335 aa, unidentified
MKKIYVGIDISKEKCNLCFRSGLEIVREEECSNDVKALKKAFKAALKVLGASVDEVLVCAEYTGRYIYPLTVACQELDIFLWLDDPTRIKNSMGLTRGKNDVIDAARIAEYAFRYSDKAVRYCIPDAALVSMKNLLADREFLLIDRKRYQSQLTDQKKYMAPGDFKHKSGRWKKVIKSIDEQIAAIDTEIETLIAADPVLTRQKELLVSIDGIGERIAINMIAITGGFTRFQNARQFCSFAGLTPYKYDSGTSVRSKAKISKRANQTMKALLHLAAVSAATHMKQGEYKDYFERKTKEGKHVMCVLNVIRAKLVHRMFSVIKRDTEYTKEYKPAC

SEQ ID NO: 168140 - protein, 342 aa, unidentified
MPQYAALDVSNEETAIHVIDETGAVVWRGKRASDPDVLTTTLRRYAPDLVRVGLETGPLTPWLYHTCKALGLPIVCLDARHARAATALQRNKTDARDAETLAQLVRMGWYREARVKSYAAHAVRHLVGARAQLMGVAIDLSNQIRSTLKTFGLMAGKGAGRAFENRVTELIEARPTIAAIVEPLLAAWRAVRGQIGVLDRRLIALAKGDATCRLLMTCPGVGVIVATSFAAAIEAPEHFRHSRSVGAYLGLTPARHQSGEVDRTGGISRRGDRLMRTYLFEAAASLLVRVREDSALKTWGRALVERLGFKHAAVAVARKLAVVLHAMWRAGTPFQPWPVATA

SEQ ID NO: 168141 - protein, 384 aa, unidentified
MRCIALDVHQRYCEGAELLPGGKIRSFRVATTRDGIEAFARQLGPDVRLVMEATGNALWIYDLISPHAGQVLLANPLRTRAIAEARIKTDRLDAETLVRLLGADFIPEVWVPSPEQRQLRVLLQYRTRLVQLRTRLKNIVHAVLARNGYQSPTSDLFGRKGRRFLESLTLPQGETIILQSALGLIDALDKELKALEGELCARAKTIPEVQLLLGIPGLDVVSIMTILAEIGDIKRFPSPKKLASYAGLVPRVYASGKRHYTGHITRAGRSTLRWILVQAAHGAVRVPGPLQAFFSRLRTRKGYKVAIVAVARKLLTLIWILLTRGEPYRAADPLRTQAKKRRMERRAVPYPVAQASDLASRVRYLAAEEVMLPLAAEERACAFS

SEQ ID NO: 168142 - protein, 403 aa, unidentified
MNAVGIDVSKGKSMVTILRPFGEIVPSPFEIKHTSSDILSLIKLIHSIEGESRIVMEHTGHYYEVLAQQFSAAGLFVSAVNPKLVKNFNNDSLRKVKSDKADSIKIARYALDKWQNLKPYSIVDELRTQLKAMNRQFHFYVKQKTAMKNNLINLIDQTYPNANTYFNSPPRSDGSQKWVDFVYTYWHVDCVRKMSLNSFVKHYQNWCKQKKYIFNKSKAEEIYTKATELVPVFPKNEITKRIIRQAIAQLNSTSATVETIRILMNETASKLPEYPIVMQFKGIGPSLGPQLMAEIGDITRFTHKGALTAFAGVDPGVNESGSYAQKSVPTSKRGSSNLRKTLFQVMDVLIKTMPQDDPVYQFMDRKRAQGKPYYVYMTAGANKFLRIYYGRVKEYLCILSESS

SEQ ID NO: 168143 - protein, 358 aa, unidentified
MRIIGCDLHARQQTIAMLDTDTGELEEKTLEHEGETVREFYSALRGPILVGIEATGSMQWFLELMEELGIECRVGHPAKIRKAETRKQKHDRRDARLLLTLLAENRFPTIWMPSTQQRDLRTLLRHRRQWVRMRSRVQHTLQSIALNHGFRRGHALWSQANQHVLRALPLAPHASERRAALLTLYPHLQGSIEELDKEVCEEVQQHPQARRLLTHPGVGPITALATEVFLGDPKRFIDGKALASYIGMIPSEHSSGRRQRLGAMSKQGNTLLRYLWCEAAMHAVERDPELKRFYRRKLVQKGLGKARVAAARKLGIRLWIMMRDQIDYEEFCRRGKARQESGRVRAGMPAINSGPAQQ

SEQ ID NO: 168144 - protein, 370 aa, unidentified
MKKSIMYVGLDVHKSSIEIAIAESGRHSEVRSYGRIEGTLTALDKVIRKLIAKGSTLSFAYEAGPCGYEIYRHLCNKGYDCIVVAPSMIPKQSGNRIKNDRRDAQMLARLHRAGELTEVYVPSLEDEAMRDLTRAREDAKSVERKAKQRVLAFLLRHGHRYGGKSYWSNAHFRWISKLRFPHPAQHIVLQESLDALSECTARVNRLTEQIQQLLPEWRMYPVVKALRTLRGVSLVVASTTVAELGDLTRFNRPVELMSYLGLVPSEHSSGESTKRGPITKTGNGHVRRVLVEAAWAYRLPPRVSPKLFKRQEGVSQEICDISWKAQLRLCTRYKRFLAKGKPTQLIIAAIARELCGFMWAIANEVETSRA

SEQ ID NO: 168145 - protein, 466 aa, unidentified
MAKNAKSTRRGRRKQQNRAPLKPQDESLGLEVVHPKAAGIDIGNEEHYVAVPPHMDPEPIRVFECFTADLVALADWLEQLGIETVVMQSTGVYWIPLYDLLEARGMKVFLVNARDTKNMPGRKTDVKECQWLMKLHVYGLLRNSFRPAEPIRVMRTIWRQRQQHIADTARCIQRMQKALTQMNLQLANVISDISGTTGQLIIRAILDGERDPKKLAEHRDPRIKAGREVIAKSLQGTWREELLFVLKQEYDSYREYQKKLGQCDEKLREHLHKMEAKADPETLLPVKRAKRAHGNVPQNMDLRKELYRSIGVDLTQVDGLNVLTVQTVLAEIGSDVSAFPTEGSFRSWLNLAPNNRISGGKVIGWDKRKVVNRAGQALRQGASTLFRSHDSYLGAQARRLRSKIGAPKATKAMAGKLANIIYRALKFGQEYIDRGAEYYEQRYRNQQITFVTKKAAELGFKLMPAS

SEQ ID NO: 168146 - protein, 361 aa, unidentified
MTESSDYESVQVFIGVDVGKDTHHAVAINRSGKRLFDKALPNDENKLRSLISDLKQHGQILLVVDQPATIGALPVAVARSEGVLVGYLPGLAMRRIADLHAGEAKTDARDAAIIAEAARTLPHALRTLKLADEQIAELSMLCGFDDDLAAQTTQASNRIRGLLTQIHPALERVLGPRLDHPAVLDLLQRYPSPEKLASLGEKKLAAQLCKLAPRLGKRLAADIAQALAEQTVVVPGTNAAAVVLPRLALQLITLRKQRDEVALAVEQRVLAHPLYPVLTSMPGVGVRTAARLLTEVACRAFASVAHLAAYAGLAPVTRRSGSSIRGEHPRDGVIKLSNGRCSCRPSPRSGIRSPGLTTPAK

SEQ ID NO: 168147 - protein, 335 aa, unidentified
MQIYGIDLAKEKFDVSFFDLTSKKVSNQPSHKVVKNNFKSIGRFLETLPSDAVLVAEHTGVYGDTLLKCCMDSNVKIAFVGGYVIHRYRATPDRAKTDVLDCALLREFGERYPDKLKYRKFPEEALYELRQLARHREMLVEQRKQLMTADKSEDCRPIRSLAVKRSMDRIKEMLDTEIAETEKEMLKVIDGHDSIHHNYEIVKSVNGVGLVTAVELLVKTDNFTKITTARQYAAYAGTAPYEKSSGKMDKGAHISKIGNRRSKTLLYICAESARLHNKEIKLYYERRTLIDKKPRHYVLNAIANKLLRIIFTLVEKGEYYDANFIRQDPRVVKHN

SEQ ID NO: 168148 - protein, 336 aa, unidentified
MKPMPVGVDIAKNIMQVHYIDTETGEITNKAIKRSRFIEFFTNLAPCLIGMEACGGAHHWARQLIKMGHQVKLMPGEFVKAFNIRNKNDIADALAIWRAVQQPGKSVAVKTEQQQAMLALHRMRSQLMKFRLMQTNELHGLLAEYGEVMAKGYASLLRSVPDILTRLSERLPALLIDSLREQLNEIQRIDKRITDTERRIRELSKDDPGVKAISEIPGVGLLTATAAVASMGDATAFRSGREFAAWVGLVPRQTGTGGKLLLLGISKRGDKYLRKLLVNGAHSVIQNANEPGPWVTGLLQRRPINVVSVALANKMARKIWAVLAHGRPYQRDYAPN

SEQ ID NO: 168149 - protein, 372 aa, unidentified
MTSIIYIGMDVHITNYTLCCYTVDADDTFAVVNVKPDYHEILKYMERVRSTRGGNCDFICGYEAGCLGYSLYHQLAKHGVACIILAPSTMPQQKGKSIKTDKRDAKNIAKCLAFNLYSPVYVPTAEDDAIKEYIRMRDDVKADLKRTKQQIISFCTRHGFHYEGKSRWTQAYFKWLDSLVFENALYKETLQEYLALYYTLDEKIAVYDARIEELAHQKRYEENVRKLCCFKGVSTHTALPLLVEVGDFHRFRTAQHFSAYLGLVPGESSSGEKVIHTNITKAGNSHLRTLLVESANSYSRGVVGKKSKVMKDKQGGNSPEIIAYADKANERLHRKFYKIAIRSKKNVAKTAIARELSCFVWGMMTNHISRAV

SEQ ID NO: 168150 - protein, 402 aa, unidentified
MTYDYVIGMDVGKYFHHACVLDIDGAQVLSKRINQNEKSLRTLFSTFSANDHKVLVVVDQPNNIGRLTVAVAQDIGIDVRYLPGLAMRQLSRIHAGNAKTDIRDAYIIAHAAQNLPESLRSVDRVEEAFLQLKVLNGIDEDLARSYTRLINQIRSALVGCYPQFEQALRGQIIHRKWVLHLLARYGGPTKIKRLGKAKAAAFARRYKARNPEPVIDAIFAAISEQTVAIAGAKYAEMGVAMSAKDALLKLEHRKQIEQEVIELINDIPHTQILLSMPGIGPKTAAQILMTAGDMSGFPTAGHLASYAGLSPRTNQSGTSIMSNSLNRAGNKKLKNALWQSSFASIRFHERSRQFYERKRREGKRHNAAVVALARRRLNVLHAMMSNHEYYRDPDQSQEVKAA

SEQ ID NO: 168151 - protein, 402 aa, unidentified
MGHHSEAFIGIDTSKLRNAVAIAEGGRGGEVRFLGEFPATEAGMGKLVAKLAAKYDKLTFCYEAGPTGDGLHRLIKSLGHECIVAAPSLIPKKPGERVKTNRRDALQLAKLSRAGELTTVWVPDGRHEAMRDLSRARQAANKDLQGKRQQISSLMLRLGRIYPRKKTWGPAHMHWLMVQKLEHPEQRMAFEELLQGVRQESERIERLEQAIREAVPDWSLAEMVTAVQAMRGFDLIAAVGVMAETGDLSRFQKPREFMGYLGVVPSESSTGDRVKRGGITKAGNSRARRILVEAAWAYRHPARVGREKQAKVAAAPRRVREIAWKAQTRLCRRFRSLERKGKRRTVVATAVARELAALSGRSVGRSGHLERRNTPGAVDRSSRAALNRPTAPALQSRSNKDR

SEQ ID NO: 168152 - protein, 357 aa, unidentified
MKSQEIKYVGIDCGKKTLEVIRIGDNSLHQRQQFSTTEIGISKLINWLNPNDVVGLEADSQSFRIAKSILNKGVQVIVLNPGNLATIYQSLKKTDKEDSLKIARLIQRHPIEELPTVPIPNDEEEDNRRLCTEQENWTRQLTQSKNRLHSLFTQAGLTHITKKHLRTKANREISVALLPSRYQKEAERILKVLDLVEQNLKLIEEEIQEALKKNKAYVQTIMSMPGIGMITSLAIMSYMGDCKRFSSAKQAAYYAGLVPRVDISGDTVRYGRIINRGCHSIRRVIVQAAWSLVRCQHGGKVKEFYQRLYLKKGAKKSIIATSRKMIEVLYVMIRTGKLFDSMPENILNRKLTQYGLM

SEQ ID NO: 168153 - protein, 391 aa, unidentified
MFYMGIDIAKFKHDFCIMDGDTGEIIVPPRTITNNKEGFQEMLEVLTNLHCSQKIKIGLEATGHYGTLIKAFLTNNGYKFIELNPLQVSRFHSQTSLRRTKTDKIDCQVIARYLMAIATKTYQPQVYHLEALKSLTRLRETLVDQRSRCLVKLTNVLDITFPEFKKFFTAKLRSETALFIIRKYKTPSRIARWTDEDIALVHNVSRKMSTSKLLEIKKSAVDSIGIAPKYLLDELPSILNVYETVNEEVFKLEEKIESIIFELDPPSLSIPGMGPISLATILGEFGDFSRFPSAEQCIAYAGVDVGISQSGTKCHRGKMVKRGSSHLRYALMNVVRTVCIHTPTFKEYWVRKKVTGHKFLRVADSHAAKKLVRVIYYLETHNTKYDPSRCK

SEQ ID NO: 168154 - protein, 315 aa, unidentified
MIISSRCVGIDVSKRMLDIFDDAVGKPERIANAPQPIIEQVARWRCADVFVVFEATGVYDLELAEALRQAGIRFARINPARARDFARANGQLAKTDAIDARMLAAFARAMAPAAEQVAPEAARNALALLAKRRDQLVRMRAQEKNRRSETSDRAMIERIARHLDFLNSEIKAIEAEIKTLIKAEPEISEQARLMRSAPGIGAVACMQLIAQMPELGCVGPKQVVALAGLAPFNVDSGSHRGKRAIGGGRKRVRDALYMAALTAVRRSGTMKAFYERLRAAGKAAKVALVAVARKLLTTLNAMLRDKKIYLQPSPT

SEQ ID NO: 168155 - protein, 425 aa, unidentified
MRTLAPSGDAGQCETESVLLVGCDIGYECHALAILDNSGVLLEKLPRVYNNRRGFDFLKSRIEHWQQMTGAARAIIAFEPTGHYWKPLVHYLREQRMEVRFIKTTAVKAMRELTDSTPSKNDRRDAVTLALLLKEGRVLKGQPLQGVWRELRDLVTYRHKLHEEHIAYLLRLRAMIDTFFPELTKVFTDTNALGLWRFLDEAPFPEDLIMLGEEWLIGHLKRWTRKGESPENKAKALFEAAKQSIGLPPSIGDRRHIASILRLLANYKKELHQVEREMGRVLMETGYGEILLSFPGVGVITAATFVGELGNPEDFENANQVVSFIGIDPSEKSSGKRQSRNRISKKGRPLMRTNAYHMAMSAVLHCPELRDYYAARKEEIESGKLDLKPMQLLFAVAIKQTRMLFAMCRDRQAYQPGFIEMRNAA

SEQ ID NO: 168156 - protein, 426 aa, unidentified
MARKPSKQRFTVVHPDCAAIDVGSREHFVAVDPRHENAVQSFTSFTDDLYKLTDWLDSLGIKVVAMESTGVYWIPIYEILSERGFEVYLVNARATRQITGRKSDVLDCQWIWQLMTHGLLRGAFRPSDPTCCVRSLVRQRAFKVKDQAQTLNRMQKALSQMNIQLANVISDISGVTGMRILRAITAGERDPVRLAELTDARIKAGKDTIARSLHGNWRREHLHALAQELAAYDFLEQQIAECDDVIGKALGQLPVLEHVPQPSRKVLRSPHRTSAQQAALHQALWQVLGVDLTAIPTIGVDTALVLAGEIGADLSRFPSSQHFCSWLGLAPPTRISGGRQLSGGGPKVINRAAQALKQAASNARNDKGFIGASHRARLTRMDTSCAIKATAHDRVPGSGVTKPAEGAQRAKEDGHRGSWLTLSLRT

SEQ ID NO: 168157 - protein, 382 aa, unidentified
MNYVGIDWAYGRAAFCAMGDSGQIQAEGLIPADEDGLAKLVLSLGTEVQACVEMMSGAVWVRDQLHCAGWEVKVAHARKVRDVAPLACKTDKVDARVLAELCRRDLVPEVWVASVEDRALRELLRRRVYLVKLRTSARNRIFGLLTQWGLRVSLKKLREPDGIELLERRGVPETWRDSIADLIGTIDDLDRRIAPIERELRPKTASDPRARLLSTIPGVGPLISLTIAAEVGDVARFASAGKLVGYAGLAPRISQSGDRSRTGALSKAGSRTLRWAAVEAANGAWRPSNPWHAHYLSVASRHGKNPAKSSVARKVLITSWHMLQRGEVFNPSRSSGDVSQTTVSTNSSRFLGRTVRPAALVAPHRTRGRSPPDRAVNLTSCT

SEQ ID NO: 168158 - protein, 419 aa, unidentified
MTKANYSTIIEVMHPVCCGIDVHKDSLTASLILSRDKGKEEIEVREFGTFTDELYKLKEWLLMNDCPVIAMESTGVYWYPVYNILEGYVKVLLVNARHIKNVPGRKTDIKDSKWIAGLLRHGLLRGSFIPPQEVRDWRDLTRLRRSYTESLADYKKRVGKLFETANIKVDSVVSELFGRTGRNLMKLLIERKSNLTLSDIEYCVRGNLKNKVEELYRSVQGFFRDHHRYILKTLLETVDNLEKQIEEFDNRIKELMKPQEDLLKRLKEVPGIGDITVQAIISEVGTTLENFANSSSFVSWAGLCPGNNESAGKRRSGRSPVRNKPLKTIMVEVAWAAVKKKGSYYKDKYYRLKARRGAKKAIIAIAHRLLKVIYYIIKYGDKFKDLGEDYLDKQNSTKKISILKRKADLLGYELIEKAA

SEQ ID NO: 168159 - protein, 339 aa, unidentified
MAIVGGLDVHRRQITFDHLDTDTGEVRRGQVPGTRVGLRDWLARITPRPAVFAVEGCTGWRFVVEELRRAGMEAHLAEPADTQALRGPKRRAKTDGADALHLRQLLAGGTLPESWIPPEHVLEMRTRVRLYKSLIDERTAWLQRIHAVLFHQGVDVNAELVTVEQRRRLEAGEGLSPAGRDTVVVALRRIDGINDELAPLRRDFASFARRQPGCRSLTAEYGIGALTAVAIWAEMGDCRRFSSSRDAVRHTGLDVTVYSSDGKRTAGHLSRQGPPVLRWALFEAAQCGARKTSPDLAYYTGVKERIGGNRAALSVARKLARRVHHRLRALGDEAFVDVR

SEQ ID NO: 168160 - protein, 351 aa, unidentified
MPRKTDVAVVRTIGIDTGKNTLHMVGLDERGAIVLREKVSRHRIAARLVNVSPCLIGIEAGMATHYVARELSALGHDVRQVPPAYAKPFRQGHKNDFRDAHAVAEAVQRPSTRCVPIKTDDQLDLQALHRVRSRLIGDRTAVINQLRGFLLEHGIAVRQGHRFLRQQLPQILATRSDVLSPRMTRIAGDLVNDWGYLDERIGRVTDEIEDLAQTDVSCGQLMTVPGLGPIIASATVAAIGNGAAFAKGRDFAAWLGLVPKQMSTGDRTILGRITKRGNRYLRMLFIQGARAILLHPTSWAKHSFGPWLTAAAKRLHHNVLTVALANKLARIALTVLVEGRNYETRVASAAA

SEQ ID NO: 168161 - protein, 337 aa, unidentified
MSTIHILGIDLGKHCFHAVGNNHSGKEVIRRKFNRSQLLRFLSVLEPTIIAFEACGGAHWLARKCEAYGHQVRLIPPQYVKPYVKGNKNDFIDAAAIAEAASRPSMRFVSAKSEEAQVIAAIHRVRDGYIKERTACMSRIGAILLEFGLSFPKGHAKMKTLFQWLAEQDIKLPQSLVAELLSIHEHYKYLNEQVSIQDKKLKVITENNDNAELLKSIPGIGDLTATLCVANISSPSNFGGAREMAAWLGLVPRQYSTGGKSKLLGMSKRGNKHLRTLFIHGARSVLSRIETTGKVFGDWLVNLRATKPFNVVVVALANKLARIAWAVLYHRQAFKAV

SEQ ID NO: 168162 - protein, 426 aa, unidentified
MNYKQNEKILQVTEKTLVIGIDIAKETHYCRAFNFRGLEFGKVYTFNNNLVGFDNFKKWVVEIMNNNDLDKLMIGMEPTGHYWFNLAEYCRDNDMELVLVNPFHVKRSKELDDNSPTKTDRKDPKTIAKLVIDGRYVETYIPTGIYAELRNIVKMYDHVVGCKSVIENKIQQWFDIYFPEFTEVFSNWDCKSGMITLKNFPLPSTIVELGEIKILEIWKKEIKQGVGKKRAHKLVELAKSSVGIKEGIEIANMELKCLICEYDLYVEQLEEIKDKMEDLLRHVKGANEVLKIKGIGIVTVAGIIAEIGDINRFKNARQIQKYAGLNLVENSSGKHKGQTTISKRGRKRLRAVLYRVILPLVAKNPEFKELHKYYKTRKENPLKKKQSLILLCCKLIRIIFAILTKGIEYDGNKLMKDIKRSFGQAA

SEQ ID NO: 168163 - protein, 370 aa, unidentified
MKSIVYVGMDVHKNTYSLCAVDGKTGEILGETKISSEVKLIKKFISRIKRKIECDDTEFITGYEAGCLGYSLYHQLNEQGIECVILAPTTMHRSSKDKVVKNDRVDSKTIAINLSNGTYKAVYVPEDRDVEVKEYTRMMDDFKAELKKVKQHINAFLLRHGITYSGKSRWTQIHIKWLKEIELSKLYREILDEYLSEYESLSEKIERYAHKLELLSQEERYKEKVGELRAFKGIDTASAMTLHIETADFVRFPTANAYASYCGLVPGESSSGDKSNRTSITKQGNATIRSTLIECAQSLTKGTVGLKSKRVKSRQKGLSVNVIDYADKAVVRLQKKFHKMIYRGVPRNKAITAIARELACFVWGMETGNI

SEQ ID NO: 168164 - protein, 337 aa, unidentified
MYYTGIDLHKKTSFITTIDKNGQIVKRRNIVNDEVKILHFFLTLDDDTQVVIESTANWYWLYDLLTDHGMDVVISNPVKTKAIASARIKNDKLDSHMLAQLLRADLLATVHVSSQQIRQLKELLRHRSKLVRDSVRMKNRIHSIMAKNNLSVPVSDLFGCHGLEFLSQAPLPQYQRRQVDTYLNLYTQLKKQTEELTKEIKQQAKSNPKAQLLMTIPGVGPITAMFMIAEIEDIARFKSYRHLASYAGLVPRLDASADKQRIGSITKQGSPYLRTALVEAAQAATRTKGRLNIFFRRRIVRAGYQKAIVATAHKIIKCAYYILRDQTPYRESIDASA

SEQ ID NO: 168165 - protein, 407 aa, unidentified
MDVVYPRCCGLDLHKRSVTACRMVPGRDGQPVKEIRTVGTMTADLLALADWLEEGGVTHVAMESTGVYWKPVWNLLEDRFTLLLVNAAHVKVVPGRKRDVGDAQWLADLLRHGLLRPSFVPDRPARELRELTRYRSALVRDRSAEVNRLQQTLEGANIKLSSVVSEVTGVSARAMLRELVAGSEDAAALAELAQGALRRKRTELAQALTGRMSAHQCFLIAQHLAHIDALEEQIAVVGEEIAQRLRPFEGQLAILDSIPGIGRWSAEVLLAEIGPDMERFPTAGHLASWAGMCPGHNESAGKRRSGKTRKGSPWLRVTLTEAAYAAGRGKGTALSARYHRLIGHKGKKKTAIAVGRSILELAHLLLSTGQLYDDQRARRPPVRLTEEERLIRRLEKLGHRVTLEPAA

SEQ ID NO: 168166 - protein, 422 aa, unidentified
MSFGAFSAARRKGFKMPYRVAAIDVHKKVLVVVVAEVREGEPEWTVRRFGTGAAELQRLAEWLEQEAVAEAVMESTAQYWKPVWLALEPQMRLHLAQAQSNRAPKGRKTDARDAERLWRRFVAGELMLSFVPDAGQRAWRMITRTRLSLVRERVQVRNQIESLLEEGGIKLAAVVSDLLGMSGRRILQALARGETDPETLAGLGEATLRCGRQALADALTGRMSPVHCALLAQHLERIALLDRQIEHLSRMAAEQMQPWEDALRRLVEVPGIGADAAQDILAEVGPTAAAFPTPGQMASWTGVCPGSQQSAGRNASGRSAKGNPNLRRVLTQAAHAAVRTKGSFFEHLFRRLVVRLGYAKALWAVAHKLCRIIWKILHEGVHYIERGDTLDPRTAQRRIQHHLRMLRKLGYPLPPNPSPAAQ

SEQ ID NO: 168167 - protein, 349 aa, unidentified
MSQNINSAVAVIGIDIGKNSFHVVGLDDRGAIVLRQKWSRGQIEARLANTPRCLVGMEACVGAHHLSRKLQTLGHDARLMPAKYVRPYSKGQKNDFRDAEAIAEAVQRPTMKFVATKTAEQLDLQALHRVRERLVRQRTGIINQIRAFLLERGVAVRQGLRFLRTELPRILATPPDVLSPRMVRVISDLAQDWRRLDERIDDLSNEIAVLARQDAGCERLMSVPGIGPIISSAMVAAIGTGDAFAKGRDFAAWLGLVPKQTSTGDRTILGKISKRGNRYLRVLFVQAAWVVLIKPTSWERHGLKHWIEAAKKRLHRNVLAIALANKLARIAWGVLAGSRTFEASKLQVA

SEQ ID NO: 168168 - protein, 425 aa, unidentified
MKAIRTHVAGVDVHKEILVITVLVGDADKEPAVHQFECSTFTDDLMKCGLKLKEFGVKEVAMESTGVYWKPIHNVWEPMGFDITVAQAAHVKNVPGRKTDMNDSHWLAQLHRFGLIRASFIPEGIFQRMRLLSRHRTNLTGDLATIKNRVQKALEDGNIKWGSIVSDVFGKAGLEVLDLIAAGTTNAKVLASVVTTKIKRIEEAEKALTNTITKEHIFVIKQLMDQFHQLETKIKEVESELAGIAKPYAHIIEKLDEIPGVDKVLAMGIIAEATNQMEKFKDERSFAAWAGVAAGNNESAGKKKRSKTRKGNPHLRKILVQVAQNAKAKRKSFYRAKYNKLVFKLGSKNKAKVAIANRIARSVYKILCGENYKEIGYMRGDPHEAQVRKHVAALKALGVNVFHHNHQMIVSEKRVVVEQSGIILN

SEQ ID NO: 168169 - protein, 320 aa, unidentified
MAKKKSKSFIGIDVSKQQLEVAVHESDCQFRCANNVNAFGELIVELIGWRPALVVLEATGGLEIPVVTALHAAGLPVVVVNPRQVRGFAKALGQLAKTDRLDARVLAHFAAAIKPPLRPLKSKEEQELAALTGRRDQLIEMLIDEKNRRTSAASDTVREQIKEHIDWLEECIAELDEQLKALLQSSASWQAKDDILQSVPGIGPVVSFSMIADLPELGTLNRQQISKLVGVAPLNRDSGQQRGTRHIYGGRAELRRVLYMAALSASRYNLVIKEFYERLCAKQKPFKVAITACMRKLLSIINVMVRDNTCWKSPQQSVSA

SEQ ID NO: 168170 - protein, 430 aa, unidentified
MKSNTQNAKIEAITEKTLVLGIDVGSETHYARAFDYRGVEYSKKPFKFSNTEAGFVTFKAWVLDIKEKHGKDKVIPGMEPTGHYWFNLGKFLQDNEMKPVLVNPHHVKKSKELDDNNPTKNDRKDPKVIAGLVREGRYMIPYLPDGVYADLRTASNIRFQLQAELTRIQNRISRWFNIYFPEYKTVYGKPDAKSGMLILKQAPLPEDILTLGIDGVNQIWRDAKMRAVGKARAKTLIEAAEHSVGSKEGAISARMEIRMLLEDYESRNIRLQEIMTLIEELVNQIPMAEKLLEIKGVGIKTVSGFLAEVGDISRFNNPKELQKLAGLALVENSSGKHKGRTTISRRGRKRLRYLLFEVAMSLVAKNPEFRELHNYYTTRRLNPLKKMQSLMAIAAKLIRVFYAMLTKGVDYDPKKMVSDIKRPAVYLQAA

SEQ ID NO: 168171 - protein, 319 aa, unidentified
MMMHPILNVGVDVAKDAVVVACAAHSFPSKRVPNQRAPLRAWLKSLPAGSRIGLESTGASHELLADLAQAQGFTVFLLNPLETRHDAKAMGTRAKTDRVDAELIARLIAQEHTRVRADTPPTVNQRTLDRLIRRRAKIVGLKGTLKLTMRHLGGFAAALKAVVGKLDALLAKIEATMAAIAACSPQHQEAQQRVETIVGVGPLVGIGLTNTLERVPFRKADAFVAFIGLDPRANDSGHKAGRRRLSTRGPAELRRLLLNAAMSAINTTVWKPIDEHDRTQGWSTTASLVIIARTIARAAWSIHHDRTTVNPERITKCLT

SEQ ID NO: 168172 - protein, 368 aa, unidentified
MSLSKIIALDLGKFKTVCCVMDAATRESAFETVQTSPVSLHELIVKQLPPSPADALVVFETCDLAGWVHDLCQGLGVKVIVTHANGEAWQWRRVKRKTDRDDALKLAKLALLDQLGPVHMPSPDQRQRRRLVLHRRSVVTRRTQSRNAIRAIFNQQGLSLAKGGKQWTIAGLTQLREHARPLADCDLADLWRGQLEVELSLMQAADAQLKVLDAKLDELGKDDARIQLLQTVKGVGPRVAEVVVLHLDDPHRFKSADHVAGYAGLVPKQIESGQMSRFGHITGRGPALLRSMLVEAAWVVWRHNAWAQAWVAKISRGSRARRKIAMVALARKLLTMLWSMMKHNRPFQTPISGPPMAALPLPLTLALA

SEQ ID NO: 168173 - protein, 409 aa, unidentified
MRTIGLDVHREFAEVAIIDEDGVARAAGQVETTPEALRLFAASLAATDEVAIEATVNTFAIAALLEQHVARVVISNPLRTRAIAEAKVKTDKVDARVLAELLRAGYLPGIWCPDEQLQALRRLVARRSGIVRERTRLKNQVQAILHRNLLPRCPAADLFGKKGRGWLAEQPLPVDEEIAVASALRRLDVAGEELALVDRELAQVGQQSDDVKRLLTIPGVDRTVALSLVAAVGDIARFPDSRRLVSYLGLDPRVRQSGNQPARHGRISKQGRAQARGMLVEAAWACSKTPGPLRAFFLRVRARRGEQVAAVATARKLAVLCWHLLSRGEDYAYARPSLVAQKLRALELAAGAPSRRGQRGSTYAYNLKHVRARERALSEQAELAYEKLTARWQKRRPEQGAGAATGERL

SEQ ID NO: 168174 - protein, 330 aa, unidentified
MKSWNVILGVDVSKLTLDICWAEHNLHIRIDNCTKGFTVFKKWCTSNQIDLKETLVVMEYTGGYEYRFLQFCESIPVCYCRIPGLEIKQSMGMTRGKSDHADAFRIGRYGQEKNKRLEPSAPLNSHILKLKQLLSFRKRLVREKAGMESTVKERKHMYALKKTDAIIDIAQSRIKANKKHINLLEREIMELIKSDELMLLNYRIISSIKGIGPVNAWMTVAYTENFASFTDARKYAVFVGVIPFEHTSGTSIKGRKRVSHLAHKELKNELNQAAKTAITHDPEIRAYAERKLKNKAYPLVLNNVKFKLILRMFSLVKRGEMYVENYIRAA

SEQ ID NO: 168175 - protein, 311 aa, unidentified
MLQEENTLSFEHVVGVDVHQASFVCRRIQGEVVGDERTIGNCEQGIDDLLDWSAGGTLIVEATSSLHFALVERALERGTPIAVVRGYKVREFARSQMRAKTDAADALMIARYGQVSRPTLAVRWDQARRQLKELLSKRRGIARHRASCKQMHASKELMKAFAGELKALDENIQALALAKAESYRRLMSIPGVGRLTAAALLVFLWDEEQVPGKAQLTSFVGLDVTVHASANSRRKGHISKQGDPNIRRLLFLAAMAAMRMRRGAPHALYLKLRLRLPTHAAICALGRKLLHTARSLVKYQMEFDHERFLNP

SEQ ID NO: 168176 - protein, 387 aa, unidentified
MMDRTVNNLPAATHGEPVRCLFAIELSTKSWVIAFNTPLSEKISRRTLTGCKWKRLLELIEQVRARVSRETGRTVEVVSCYEAGYDGFWLHRQLEAHGVRNYVIDPASLQVDRRARRAKTDRIDTERLLRSLMAYLRGEPKVWSVVRVPSVAEEDARRLHRERDRLVSERVQHVNRIKGLCALHGIYDYNPLRPQARARLEQLRTTQGGALPPRLNSEIKRELQRLQLVVEMIATLEAERDAIVDDEASTHVNAKKIQNLHKLKAIGPEFAAVLVGEIFHRDFNNRRQLASYVGYAPSPFQSGNVAHDQGISKAGNRKGRTTGIELAWMWLRYQPDSELSAWFRARVGTTKGRIRRIAIVALARKLLVALWRYLETGLVPRGAVLKG

SEQ ID NO: 168177 - protein, 327 aa, unidentified
MAQKMDVVGIDVSKATLDAYALASQQAQQFANDPAGHRALVAWLQGLGVDVAVLEASGGYERAAAQALGQACLAVHVVDPKRVRHYARAAGRLAKTDRIDARMIAAFGAAFLLERPSGIASTEDPARQDLAELVSTRQILVDHRTTLQQQADTVTSAIAKKLLLATLKQHDRQIETLDRQIAAAIARHAPFATLARRLATVPGLGPVSIAALIAWLPELGQLDRRQLAALVGVAPFADDSGKRTGQRHIQGGRMKLRNVLYMATVGAATRHNPVLQARYRRLLENGKKPKVALIACLRTLLTILNAMVARQQDWNPTGLPATEPVAA

SEQ ID NO: 168178 - protein, 362 aa, unidentified
MALESGARQLCRREKTMEHVGIDLAKNKSQVCILTADGEVIERRIATTREQFTKVLGDRPPSRVLVESSTESEWVARHVESLGHEVIVADPNFAPMYAKRTRRIKTDRRDAAELAQACHIGNYRAAHRLSEKQRDSRARIGVREALVRTRAKYVTLVQTLLRRDGLRVGTGTTRGFLTRLKAVGMSARLQAQVQPLLTLLDHINTAIAEADAWLAEQAKSDPVLRRLSSVPGVGPVTAASFAAAVDDVGRFGQAKHVAAYLGLVPSESSSGDRQSRGGITKAGNGRARWLLVEAAWAILRYKKPETEQLREWASRIAGRRGKRVAAVALARKLARILFAMWRDGRDYAPILPALQPSVAALT

SEQ ID NO: 168179 - protein, 401 aa, unidentified
MLDGACGEPDAGPTRTSGSGGRHEETGREQSRNRASCRPHHDVAIIDGDGQLVSKKRISDDPAGFAELIELLTGAGDSIEDPVPVAIETPRGLLVASLRATGRPVYAINPLAVARYRERHSVARSKSDHADAMTLAHILRVDAHLHRRLPADSELCQAIAVLARAHQDAIWARTKAHNELRSLLRDFYPTFLAVFTGRFALGIASPEARAVLAIAPTPAQAIKLSVSRIAAALRRAGRSRGIDQAAAEIKALLRKPQLRQPLRVESAMGKHALALLAALDTAYTSADELGQAAAALFQTHPDYAIITSFPGLADSTGARILAEIGDDRTRFADARALKAYAGSAPVTRASGRSLSVTHRRIKNDRLAAVGWIWAFAAATNSEPDRQTFDEIKAFPPTLAAA

SEQ ID NO: 168180 - protein, 362 aa, unidentified
MNEQISEKVIEKKHFVGIDISMDSFYAAVMDEKGKVFWNESFKMDEEGFKSFYEKIQKHPNRLAGMESTSTYHINLLLFLVEQQESVVLLNPMLVKRYVTSQTLRKCKTDKADARMIASYVRNKEESLMKYVLAPSQHLFRLARCKENVSKQISSYKTKLKQMIRTTFPELIKKKYAIYTDSMLNLLLLFPSASSFCNAGEKKVEKYIQKFSKGKGKNVSYTGDILCNLAKHSIGRTDPSIEFVIKQTIETLCFFQNKKKELIKRLKKEVGKFSMEEVDILSSIPGVGKDSAVHFMAEINNIGKFPNYKALTAYIGTDPGIEQSGQSFHRKKISKRGNSSLRRLGFIMAQKVIQYCPRFKEY

SEQ ID NO: 168181 - protein, 333 aa, unidentified
MVEGTEGSHHKEGTTKMAKHSMVCAGIDTGKHKLDVALDQGPEQLQVDNSPDGHKSLAAWLRQRLVRRIGIEASGGYEQAAVAALRRDGFSVILFQPAQVRAYAKFILQLAKNDKIDAALIAACTAATKTIREPPDPRLAALAGHLTMIEQITEDIARLKTRRESCRDERIRQCWKEQITRLRALARSEFKQLLAAIREHRDLAERLDLMASIEGVGLKTAVDVLIRMPEIGSLSREEAAALAGLAPYDDDSGTRTGERHISGGRQRLRTSLYAAALPAAFMWNPQLMALYRRLIAKGKSHKKALVACARKLLIFLNTVVARGTPWTSNTAQI

SEQ ID NO: 168182 - protein, 340 aa, unidentified
MENTIYDHYIAIDWSIENMAIARMTKKSNKISVIDVPSNIEDLQAYLKNLKGNKILTIEETTTSQWLYAELKEYVDRILICDPNRNKLLNEGPKTDKIDASKLVQLLKAGLMKEVYHSTDKFLYLRRVVSGYEDLVKAGVRIKNQRYSLLRACGKNGKEKAGSPIDSQGEQFVLDCLDRQIEAYETEKEGYEREFERLARKNSEIKHQKSLPGIGTINAVKIVARVVTPHRFPDKGHYLSYVGLIKLNKISGGRSYGKRNPRYSRQLKNVYKSGVLAALGGNNPIHDYYEHLIQEDGYPKFNARQKACRRLATLSLGVFKSGKKYQPFRRNDIKSSTRSA

SEQ ID NO: 168183 - protein, 344 aa, unidentified
MVTTIGIDPHKATHTAVAIDDDETVLGEFTIRAGKDQTTRLLEWAQSVNGDARVWAVEAATGLGHLLSQQLVATGETVVDVPPVLASRVRVLSSGKSDKNDENDARSVAVAALRRDGLAEVRREDEAAVLRMLAKRHRELTSLRTQAVCRLHAMLAVLKPGGMGHRLSAKQASRMLGGIRGLDAVGEQRRCMAKTHLVDIRRLDRDLETIKAQIRTAVAAADTSVTDIYGVGPVVAAFLIGYTPPIDRFTTADRYAAYNGTAPIEVSSGGKVRHRLSRRGNRILNHAIHTAAVTQIRHQTPGRIYYDKKLDEGKTNKEALRALKRRISDAVYRRLVADAQRHSN

SEQ ID NO: 168184 - protein, 340 aa, unidentified
MKLYGAIDLHSTNNVTVVIDEQDRVVYQKRLPNDLEMILKELSVYQSELQGIVVESTYNWYWLVDGLMEQGYKLHLANTAAIQQYEGLKYTDDHSDARWLAHLLRLEVLPEGYIYPRADRPVRDLLRKRSQLVRQRTTNLLSIQNLLTRNTGSSLSANRVKALDVQQVDELLAEPDLALAVKANLAVMSSADEQTKILERTVIERVQLRPQFCFLKTVPGIGKILSLTIMLETGDIRRFASVGNYASYCRCVGSQKISNSKKKGKGNTKNGNKYLAWAFVEAAHFAIQFNSKIKSFYQRKKAKTKGVVSIKAVAHKLCRACYYIMRDRVAFNVTKAFGQN

SEQ ID NO: 168185 - protein, 464 aa, unidentified
MVLTLGIDVACRAAHQATLVRDGATVWRGRKFWTRPADLDRLWADLDLCDPGDLTVVVEPTRNAWIVVAEWFRRRGARVVMVPTTQSADLRKYYSKHTKNDRIDSELLARLPMLHPEGLREYSGQGPADALRRLVKQRSTMVKRRTAVYSRLDALVELLGPAWYEVLRSNYGIAALEFLARYADPNAVIRLGQARLARFLIARSRGAWRQDHAAGLVVAAKDTLALWGPAGMDFAELADDIGHEAEQALFLTRQIKQIDERVANLYAEADPQGIVASAPGVGPVISAVIAGRIGDPHRFTSLAAIRAYTGLVPKVSQSGVRKVESSITKAGDPLLREMLFTAADQARKIDPQIAAKYQRLMVGDRHHDSAICHLATQLLTRIATCMRTGQPYALRDVDGTPITEAEGRAIVKERYQIPARHRDNLRHKQMRDRRKQAASPESQKSQSAPTSGPANTKPTSRQVA

SEQ ID NO: 168186 - protein, 410 aa, unidentified
MIFVGDDWAEAHHDVYVCDDAGTKLASKRLPEGIDGMAKLHDLVASHVDGPGEVVVGIETDRGLWVNALVEAGYVVYAINPKAASRYRDRHTLSGAKSDPGDAKMLAELVRTDRHNHRQVAGDTALAEGIKILARAHQSLVWERTRTTNRLRSSLREYFPAALDTFSELADRDTLAVLAAAATPSEAAKLTPGKIRTVLRRAGRQRNIETRADTIAAGLRNDALHAPAAIEAAHGATTRSSVAILAELNTQIDALAAELADHFEQHPDSDFYLSLPGVGVVLGARALGEFGDDPNRYADAKSRKNYAGTSPITRASGTRWVVLARYVRNDRLVDALDQWAFSSITASAGARAFYDRRRAAGDSHHKALRALANRWVGILHGCLDHRTRYDENTAWGHRIDADLREIARAA

SEQ ID NO: 168187 - protein, 370 aa, unidentified
MPRYQRYWVGLDAGHLETAICLVNSDGHAFFEAKTETRAAPIRDILRRFGVEPVQSVTIEAGVGTQMVRDLRSYGFPVQVVDVRKSSKFLAIRRQKTDASDAKGLADLGRLAQATGTQVYVKPIEHQDIRIMINIRRTLLKHRAKIDALLQSIFRLHGGSIKLLNGRGSLAAEVANQQRLLRTNGVTIGIDLDPLVSMGETLRSHISVMDREMRIMAAAIPACARFQTIPGVGPITSLSFYSAVGDPYRFKHNRDVGPYLGLTPTLYQSGVTARRGRISRYGNKLTRTHLITAATVLLCSIQAESSLRSWGLQLATKIGFLKARVAVARKLAVLMITMWKTGEPFEPDYHRPRFLQSEEAGLDPVQISGT

SEQ ID NO: 168188 - protein, 311 aa, unidentified
MYYIGIDVSKKDLSVFDGKDLKFINKKGLTSFKKYLKKKYNFSEIAIIFEPTGIYSLYLKEFCAENSIKAYIVNPKKSHNFTRALGKRSKTDKIDAHTIYQFHKLIDLKDIQVPKVDQQAKALSGYLVSYEFALKQRISLSHHLESLRDKRLIALMRKDLKRAKNLEDKIFNDIKEYLGKNQDLKEDYQRLSTIPGIGEKAAIALLTLFKTYQGTNRAQITALAGLDPVRRESGTSVKYKVKISKNGKGIYRKILYLPTLCATVHNQKIKIFYQRLLANHKNKKLAVIASMRKILLIAHAMYRDKTEYVAV

SEQ ID NO: 168189 - protein, 363 aa, unidentified
MYDSRTTVTVGLDVHARSIRLAAVRAEELLEERTLPYDEEAVERALRRWPVVRCCYEAGPTGFGLHRFLVERGIDCQVVAPGLVPQRPGDKVKTDSRDARKLARLLAGGLLEPIHVPAPTLEAARDLVRAREDARLDRMRDRHRLSKFCLRHGRRLPGLSWGVVRRKWLSEQRFEFAAQQQTFDTYLHAVDLVDARIEQLERAIRETADEQPWSGLVARLRCLRGVETLTALALVAEIGDFGRFKRAEEFMAFVGLVPSERSSGEQRRRGSITKVGNAHVRRLLVESAWHARRRPSVGYRLARRQRGQDAVVIERAWRCQGRLHARWQRMAGRGKPQQKIVVACARELAGFVWAIANDQPLRS

SEQ ID NO: 168190 - protein, 388 aa, unidentified
MLLAQLRAWRSAIAQSSKTLYVGLDVHKEPIAVAYAPEERGTEVVSLGPIGTRQCDINKLIRTLQSKGGTLVFVYEAGPCGYWLYRYLTHKALRCAVVAPSLMPRKAGDRVKTDRRDAVMLARLMRGGDLTSIYVPQLEDEAMRDVSRGREDALRDLQAAKHRLKAFLLRHDIRYEGRANWTAAHLRWLAEVVCPTPVPHILFQEYVRAVTEQHERLQRLESELREHVTRWRLYPVVQAIQALRGVDLTSAIILIAELGDLTRFHTPRQLMSYLGLTPSESSSGDRRQQGGITKAGNTHAGNTPARRALVEGAWTYRHPAKISRYLQLRLEMLPAEAQAIGWKAQVRLCKRYRQLIARGKHANEVAAAIAREMAAFAWAIARTVPLAP

SEQ ID NO: 168191 - protein, 356 aa, unidentified
MSEKLNSAIAVIGIDIGKNSFHIVGQDRRGSIVLRQKWSRGQVEARLANLPPCLIGMEACVGAHHLSRKLQALGHDARLMPAKYVRPYNKGQKNDFRDGEAIAEAVQRPTMKFVATKTTEQLDLQALHRVRERLVGQRTAIVNQIRAFLLERGIAVRQGLRFLRAELPTILAKRSDVLSPRMLRIVEDLAGDWRRLDERIEGISSEITTLAEQDAGCKRLMSVPGIGPIISSAMVAAIGSGDVFAKGRDFGAWLGLVPKQISTGDRTILGKISKRGNRYLRALFVQAAWVVLVKIGPKHWQRYGLETWIAAAKKRLHHNVLAIALANKLARIAWAVLHKERAFECVKTNATAPRPA

SEQ ID NO: 168192 - protein, 343 aa, unidentified
MKIIGCDFHPSFQQIAMVDTETGEQEERRLTPEEAVPFYSQLQGQTVVVGMEASGNTLWFERLLAGLGHQIRMGDASKIRAMEVRKQKTDRRDAELLLKLLLEDRFPEVWVPSPEMRDLRQLLLHRHKLVGMRRQMKNQLQHLALNQGVQKKWKLWSRAGRQLLQELPLSGWTARRRQDLLGWLDELDQEIAELDRAVEQEARNNTVAQLLQSHPGIGPVTSLAFVLTLGEVERFQHSRQVVSYLGLNPAENSSGGRQRLSGISKQGNPMLRSLLVEAGQSAARGDKELKRAYQRLKQRKHSAVAKVMVARKLAVRLYWMWRTQQPYTATRMQGSPSHPVAAV

SEQ ID NO: 168193 - protein, 358 aa, unidentified
MKKIVIGIDISKEKIDASAIDVRNTQQGVQKLDYQRFENRPLGFRRMLVWARHLIKGVALDEVLFCCETTGGYDRSLCDYIYAKGLDIWRESALQIKRSMGVRKGKDDRADSLMIAEYAMRHMDKAVIYETPSDNVRELKALLQYRHKLVQEKTEKKVRMSHLSDTAAKSKSMSFILRDARKSIKALEKSVKQCERQILELIKGDGELSRSYRHIVSVSGIGIVNATALIAYSNNFRGITTANRMASYYGIASFRDTSGTSVDKKAYVKCYSNSLLKAYLTQAAVWTIRENSIYHDYYLRLKKKGKPYGIIINNARNKLIHLVFSLIENDTDYEQNHEYIRMKRRVNADFATEFKNIN

SEQ ID NO: 168194 - protein, 397 aa, unidentified
MPTMTQPVAQPQRQAQRQAQRRAQFESQFESQFEPRPVLGAGRVTGGVDTHKDTHTAAVLDPTGRLLGHRQFPTTPAGYALLLGWLRAHGEVDKVGVEGTGVYGAGLALYLRVAGVELVEVDRPDRKTRRRQGKSDPVDAEAAARAAQAGRASGIPKDHAGAVEALRALRVTRRSAVTARAQAQTQMKSLLVTAHDPLRSQLREMGERQLVAHCATRRPDRRPERGALADPTTATRIALRALARRHQQLSAEIGELDALIAPLVTQINPALCALLGVGPDVAGQLLVTAGDNPARLRSEAAFAMLCGAAPLPASSGRTQRHRLNRGGDRQANCALYRIVLCRLRWDPRTRAYAQRRTAEGMSRKEIIRCLKRYVAREVYTALLNPLPSSVPASTCAA

SEQ ID NO: 168195 - protein, 311 aa, unidentified
MKVICHEGFVGIDVSKEWLDIAIEQECFRIMQTQEAIDEVIARKIKPYNTLLCVVESTGGYERLIVERLQAAQLSVHIAHPSRVRTFAQAKGLLAKTDKLDAYVLSAYGQFVGKEAVTKPLSPEQQKLRDLQARFTQVKEMLHAESCRLGNCVSKQVKSNIKKIYNFLKKELDSLEVEIQNLIEQDELLNHHQKILRSMKGVGVKTAQVMLIHLPELGQLSRKQIASLVGVAPMTKQSGKKKGNAKIQQGRGSVRHVLYMAALVASRFNPVFKQFYERLVGKGKPAKVALVAIMRKMLVVCLDCSLQILHL

SEQ ID NO: 168196 - protein, 405 aa, unidentified
MAVMIGVDPHKGSHTAAAIDTAETVLGEVRVRSGTSQLERLLAWVAEWPERTWAVEGAGGLGYLLAQQLVAAGERVVDVQPKLAARVRLLATGATNKNDPNDARSVAVAALRSPAVREVVAEDHAAVMKVWAKRHRDLGRARTQVACRLHAVLCELVPGGISGEIYASRAATLLEEVEPDGAVATARYELALAFVEDLRRIDEQMRDTKKRIAAAVAASKTTTTEVFGVGPIVAAIVIGGVGDVARFASRDHFAAYNGTAPIEVSSGPRKIYRLSRRGNRRLNHAIHMAAVTQIRHRHSEGRAYYERKIAEGKTGKEALRALKRRISDALYLRLQRDARQAAKPTYEGPGGQTGNDSVASAAGSHPEHRLFGEATPGPGPRLRQPAPTPRPRRRSRTSETARKAS

SEQ ID NO: 168197 - protein, 405 aa, unidentified
MPVSDSTPNRFIGLDIHKKYFVATGVDRALNQVYGPYEAPMRQLKRWAEKNVTKRDAIVVEMTTNSYLVYDTLQPFAHSVTVVHPPHVALIVRAQVKTDKKAALTLAQLHASGLLPGVWIPPVEVRELRTLVAHRHKMVRLSTIAKCRLQALLHRHGFEAPEGMELYKPDLRPWWEGLHVSALEKHCLLSDLETLDFARQQIDKTEACLKELAAKDPRMPLLVQITGIGFLTAITILAAVGEIERFPSAKKLVGYAGLGSRVHDSGMAYSTGRITKAGRRDLRRAMVDASNHAITDHAHWKAQFEALSSHIGKKKAIVAIARKLLVVVWHVLTKEAADRFANPTQVACSMFAFAHKVRVKNLPKGQTALGFTRNQLDRLKIGQEVKKLPWGTKTFTLPESKLTVK

SEQ ID NO: 168198 - protein, 328 aa, unidentified
MTMNPALSAFNHVVAFEVAKDSLVVHVLPADKQSVAANKPKAIRKVLLAERRRNAEDGLGAMLVVCEATGGYERHVLAICVELGIAVHKAHGSRVRYFARYLGLLAKTDPIDARVLALYGLKTADLRLYVPPAPEVLALRDLRTRRDQLQQMLFAENSRLEHARHSSVSRSLKAHIASLRKALAALEAEIAACLKASETLSRKACLMKTLKGVGPATVTAILAYMPEIGAFTKAGAACMAGLAPINDESGKLNGPRHIEAGRAAVRKALYMAALVASQHNPVMRLFAEKLKRNGKPAKVVITAVMRKLIVTLNAIVRSEKPWSHAKAA

SEQ ID NO: 168199 - protein, 458 aa, unidentified
MECFLGIDASKGYSDFALLNSNREMLEEAFQFDDTRSGHDGLQELLKQMIDKHGINQLNCAVESTGGFENNWYAALIKMSRSMPVKVARLNPSGVKKNIEASLKRNITDALSASYIAEYLVSHPGSVTYEAQNTQYAAFRDLQTCLMLQKKQKTQLINELKMLLYSSFPEMSRFCKESIPGWVLEMLIYYPGAGSVAKLKPDRLAKIKGITLKKAMDIIENAKRSIASRPDPARDFIIKSLAREIIQKQDIIKNYKDYLTENCTGAEVDLLKTIKGVGAYSASSIMIEIEDIKKFPSPKHLVSFFGLHPELKQSGDKKVSRMSKKGRSGMRAILYMCAQSAVLYDPHFKQIYHRHRQKGKNHRQTIGVIMHKMLRIIWGILSSNCPYDACVDQKNQAKNSKAQSTKETEETIKKRRFQNHDPSAPVSNRQLRKRKAHLESQIGNAEQMRDHLNAPNQR

SEQ ID NO: 168200 - protein, 345 aa, unidentified
MENMYYIGLDVHKRTISYCVKDGSGTIHAEGTIPATRFDLDRWMKTLLQPWTAAMEATVFTGWIYDHLQPRAAALKVAHPLMLRAIAAAKKKNDRIDASKICDCLRCDFLPECYMASTAIRERRRTLRYRNLLVRQMVQTKNKIGMLLMEAGVSYNKQRLHKAGYFRELLTTNPDIDEGLCSLLRLCRETVVRLQRTESALARSLERDSLLMDRVERLMTIPAVGPITALTWALEIGDAKRFSSIKKAISYCGLCGAEKSSGNTIQRTPLSKQRNKHLQTTLIEAAKMAPRYSPDLAILHDKEKQKGNANRATLAVARKLVAYLMAVDRGQRNFQVVDTSNCIAA

SEQ ID NO: 168201 - protein, 369 aa, unidentified
MQDSTFIGLDVHKATISVAFAKGERGGEVRHWGTISHRPDHVRKLVERLSADGYRLSFCYEAGPCGYGLHRQLVELGHDCIVVAPSLIPVKAGDRVKTDRRDAAMLAKLHRAGELTAVWVPDAAHEAMRDLVRARATAVRITGKARQHLQGFLLRHGRIYPGKKGWTKAYRRWLTTVRFEHPAQQIVLQDYIHSVTDAEARIERLTKQIADLLPTWSLAPVVEAVQAMRGVAFIVAVTVVAEVGDFSRFDNPRQLMAYLGLTPSEHSSGASVRRGGITKAGSGLARRALIEGAWSYRMQARVSPKLFDRIEGLPQIVRDIAWKGQLRMCQRYRRLMAAGKPKVVATTAIAREMVGFIWAIARTVKPSCA

SEQ ID NO: 168202 - protein, 415 aa, unidentified
MKVVYPICCGVDVHKSFLVGTIVSTTSGVEPHYQKKRFSTYNNDLHRFCDWLLSNGCKNVCMESTGKYWVPVFNILEERGITTTIANPKWVKAVKGNKDDTKDSKWIGDLFRLGLVPGSFIPSKEIRVLREFTRYRYKLVSMKSSEKNRFQNAFTVCNVALDSVVSDMFGKSATAITDYLISADSFDAEYCTSLLQRSLKKKADSVIESIEGYSITDEQKLRMRIVRSHLDYIQSAIAEVDSAIDAMVTQHEGLIALLQTIPGVDRNSAITIISEIGTDMEQFGSSKRLCCWAGLTPGNNESAGKKKSVRITRAGVYLKPALVQVAHAAVKATDNSYYSLKFEQISKRRGKKRAIIAIARMILTAVFQMMSTGEVWNPTDLFKVDMPQALKEKQLEKAIKQATRFLEKQGVFTPA

SEQ ID NO: 168203 - protein, 415 aa, unidentified
MALKIVYKICCGIDVHKTFVVACIASTDSNGVTTYECHRFSTYTSGLKNLLQWLLKHNCKDICMESTGKYWIPVYNILENDCTIVLAHPKYVKAIRGKKTDKKDAKWIADLFKHDLVAGSFMPPADIRQLRDLMRYRFKLTCFQSSEKNRLQNCLTVSNIQLGNVVSDTFGKSAQAILDKLLENPADTSFDLEPLIYKSLKKKLPELRDAIDGYITPEQAGKLKVIKAHYENLESRKAELEELILALAAPYQQELAILQTAPGIRSDFTAIGIISEIGTNMEAFPSAKHLCSWAGLTPTNNESAGKKKSVRVSKAGCYIKPLLVQCANAVVASKKHPEIRNRYLRLKKRRGHKKAIIAIARMLLTALYHMLKNGENYNAELYRKYDLPPVDREITVEQAIIIARNQGYKIKSATA

SEQ ID NO: 168204 - protein, 345 aa, unidentified
MYVAGIDAHATYSVIAIVSNTGQLVAGPIRINNTQEDRLDDLLQQYQPLEVVVETSPAWPWLFDRLEGQGIHFVLAHAKRLRVIAESNYKSDDIDAELLARMRLAGLIPEVHPKCVEQREQAVLLRNRARLVRERTRMVNRIHAQIHNVGLHLERGRLLTQDGREWVRDVAWPLLGDERRLLIEMQWTLIDQLVPMIRTLDRRVEHVGREIPAVALLETIAGIGPYRALLIATETLPITRFRTPGHLVSYAGLAPRSSQSGLRPIRHGSIPAGANRWLRGTFVRAVVNHVTYAPDSWLSQSYEQIKGRLGWLVARIATARRLARAVHAMLRTGEVWHDEPVARAN

SEQ ID NO: 168205 - protein, 361 aa, unidentified
MSRMAKTAGPVTGGVDTHADRHVAAVVDQVGRVLGTESFTADEAGYAGLLAWLRGHGELVAAGVEGTGSYGAGLARYLAAAGVPVLEVPRPDRQRRRRHGKSDAVDAVSAALAALRGEDCGTPKSADGAAESIRALRVARDGAIKARTQAASQLRDLITTAPAPLRAQLAGLSTPRRVRAAAAFTCGDTADPAEGGKAAMASVARRWQDLDTEITQLEGALEALVGRVAAPGYLARTGVGPLSAAALIAAAGDNPGRITSEAAFAALCGVSTVDCSSGKHERHRLNRGGDRQANSALWRIAVTRLRYDSRTQDYYARRIAAGKTRKEIIRELKRYLAREAYRQLIRPGFLQAAVISSAKAA

SEQ ID NO: 168206 - protein, 342 aa, unidentified
MSEAIIIGVDLAKRVFQVHGSATDGSVAFRKKLSRARLLPFLAAQPPCVVGMEACATAHGWGREIEKLGHTVRLIPPIYVKPFVKRQKNDAADAEAIAEATSRPTMRFVALKTEEQQTRAMLFRTRDLLVRQRTQLINAVRGHLAEHGVVAAQGPAHLKRLADAVADEASPLPAMVRELGKLFLEQIDVLDMRIGELDKKLRTVAGQAETTRRLQTMPGVGPITAVAVETFAPVMGTFRRGRDFAAWLGLVPRQHSTGGKQRLGKVSKMGQRDIRRLLIVGAMAVVQAATRTGAPQDSWLARMLAKKPRMLVAIALANKMARGVWAMMTKQENYRDPAAATA

SEQ ID NO: 168207 - protein, 347 aa, unidentified
MEIAVLGIDLGKNSCSIVGLDGAGRVVLRRRMHRDGVAKLAAGLPACVAAMEACCGAHHLGRLLRGMGHEVRLMSPEYVRPYVKAQKNDDRDAEAIAEAATRPTMRFVALKSAEQLDTQSLHRVRDRLVGERTALLNQLRAVLLERGVTAPQGRHKLGQALAALLDGASGGDGRAALSPRVRALLEDMRAEWSDLDRRIGSFDDEFAAQAKADEAARRLATVPGIGPLNATALAAAIGDGAAFARGRDLAAWLGLVPRQATTGGRPKLLGISKRGNKYLRKLLVHGARSAMPSLLKGATPLGAWLRGLVGRAHKNAATVALAAKLARIAWAVLRRGEPFDAAKPAAA

SEQ ID NO: 168208 - protein, 343 aa, unidentified
MGHYAGIDVSLELSSVCVVDGTGRIVREAKVASEPEALVAWFRGLRLEVARVGLEAGPLSQWLFAAMRAAGLAVELLETRHVRDALRAMPVKTDRKDARGIAQLMRLGWSRPVHCKSASAQETRSLLTARELLRSKGHDTEMSLRGVLRGFGLKVGPTTARSFAGRVRELVAGRPTLTAVAEALLAAREVLGEQLRGLEKRLRDQAREDERVRLLMTTPEVGVIVALTFVAAVDDPARFRSSRSVGAHFGLTPRRYQSGETDVTGRISKVGGAGARTMLYEAANVILTKPVKGSALKSWATRLAARAGMRKAKVALARKLAVVLHRMLADDTPFAAERAAAAA

SEQ ID NO: 168209 - protein, 347 aa, unidentified
MKKNSKMTRPRKNAAQTTTTLLTRTVGIDLGDQMSHYCVLDEHGDIVSEGMLRTTEAGFREQFQGMARAKIVMETGTHSPWVSRYLEKLGHEVLVANARQVRIIYDNDRKTDKIDSRTLARLARVDKSLLHPIRHRSAEAQADLAVLRARDQLVSVRTTLINCVRGMVKSVGGRLPSASGAYFATKVREQVPACISGALLPLLDEIEQLTVRIREYDKRIDELAKTKYPKTELMRQIPGVGVVTSLAFALTIDDPNRFRKSRDVGSYIGLRPKQSDSGSSKPQLSISKAGDHLVRATVGQLRSIHSGLLGAGLRSPPLGPEPDGAWWKECEEASGGGSRQETGRADA

SEQ ID NO: 168210 - protein, 341 aa, unidentified
MQIVGGLDIHRRQITFDYLDVRNGQSRRGRIAPADRMLLRRWLEANVSNLPAAFAVEACTGWRFVVEELHRAGIEAHLAEPADTAAARGPKRRAKTDRTDARLLGELLAAGRLPESWIPPEQVLEMRARLQLFKDLREEHTAWVQRVHAILLHHGAPAIAGDLLGADNRRRLEAADQLSAAGREAVAAALRILDALDAELVPLRRQIAAFARRQPGCKALQAQYGVGEITAVALWAELGDTRRFSSSRKAVRHTGLDITVYSSDGKRPPGKLSRQGSPLLRWALFEAAKCAARPSSPDYAYYRQVADRLGGNRAALSVARKIARRAHHTLRALGEEALAPV

SEQ ID NO: 168211 - protein, 407 aa, unidentified
MGITCGIDWAESHHDVALADDTGHIVARARIDTGATGFNDLLRMIAEHGGTPEGTPVAIETDKNLLVVALAEAGFTIYPINPRAVARYRERHGQAGGKSDPGDAAVLANVLRTDPDVHRVLPAVSEHGRAVKALARQHQEAIWALHQTISRLRSVLLEFYPAALHAFPNLKHRAALTVLTAAPTPEAGQKLARRRLEPLLRRCGRRNDPGLVEQILTDLRAPTLRQPPQVEASLGHAVAGLLGIVDSMHRAVDDLEKELGRVFDTHPQAPILRSVPGLGPILAARVLAEIGDDQTRFVTPAGLRAFAGTAPITRASGRSHYVKARKVRNKRLCDACHWWAFAMLTKSAGARAHYDKRRAAGDHHNAALRNLANKLLGRLWWCLQHGEAWDDRAAWPQAHDGPNPAAA

SEQ ID NO: 168212 - protein, 371 aa, unidentified
MGESSKVLYVGLDVHKDSIAVAYAPEDRGGEVVSVGAIGTRQCDIDKLLRKLQAKGARLMLAYEAGPCGYWLYRYLTRKGLSCAVVAPSLIPRKAGDRVKTDRRDAVTLARLLRSGDLSSIYVPGVEDEAIRDLSRAREDAMHDLKRSKVRLKAFLLRQDIRYEGRANWNAAHLRWIARVVCPTPVQQIVFQEYVRAVTEQAERLERLEQALREAVKTWRLYPVVEAIQALRGVELTAAIILVSEVGDLTRFDTPRKLMSYLGLTPSEYSSGSQRRQGGITKAGNGHARRALVEGAWAYRYPAKVSRHLQLRLEKVSADVQAIAWKAQVRLCKRYRHLTGRGKHANQVAVAIAREMAAFAWAIARTVPLGA

SEQ ID NO: 168213 - protein, 352 aa, unidentified
MEEYKRNGQEGKTVFVGVDLHRFKWHVTVRTEDQELFSGTLPGHWEALRRLLDRYRGNSIQVVYEAGYFGFWLHDRVLASGAQCIVTPPSLLPQEYGNRVKTDRRDSRKLAYLLAKGILKRVWVPSLQERYHRQVIRRRRQLIGDRVRTQNRIKAELRFYGIELVEPRGPWPRRYVERLWCIRFGNRWMQESFGRLLEQYEFLTEQISKQTQLLRELSETPLYRERVQILRSVPGIGLIAAMELLVELQDVSRFQRAEQLAAYVGLTPSQYSSAQKIRMGRITGAGKNGLRAILVEASWRLITKDGVMRDKYERIKARSGAKRAIVAIARTLLLRSRRMLLDGRPYALGLIR

SEQ ID NO: 168214 - protein, 351 aa, unidentified
MKYYTTTTKYNCGIDLHARQMYMCLMDRQGRKLVHTNIQGNDFGYFLQKVEPYRHDLTVVCECTFNWYWLADACDAAGIKFVLAHALYAAHIHGGKNKNDRIDSEKLAHLLRSNLIPPSYIYPAERRPIRALLRQRMSYVWHRAELMTHLSMNQTAQNCVPAQKGGHNRDVWQERILAQTTNPYHQFAVRCDMDAIRVYDQLIEKLDSTITLHARQHQCRDYTLLQTVPGIGDVLSMTILYELDTISRFPTVKDFTSYCRLVKGSVASAGKLKGLTGGKMGNAYLRWAFGEAAVICKRSHRLLSPYADRLVAKHGKFKGNAILANQLARAVYFMLQSGQAFDPERVVKTSI

SEQ ID NO: 168215 - protein, 493 aa, unidentified
MSSQNESAQERLHHLESHYAGRVAAFRQRLAQVGYERTLVVLLDIGKNVHWLTALTAASRELIRPCKLPATRTGLNRFFELVEPLIHSSDFDLVLLGHEPTGVYHEPWARTFMERYAPYFEQARPQIKYVFFNPYQVKLARLQTHLRHRKNDPRDLAAMFDLMTRGLGHPAFLPTGVEMLVRNEVGFIRAQSRLLGRLERQLLQQLDRLWPGAVVNVAKFSRAHPELGHPTPIIQTNPLQRDRLRVLLQHCPNPYDLRATPDQEILTLYRQHVGRAGPALLNTLRTWADHAVLLPEDACAPLADQVRRLFAQFVYTETLIEDAHGRLVPLIPLTPARHIPAIHGLSVNDAARYLAGVGAARRFHRAAEVWALAGFDPITDGSGDKPDRVGHISKHGDPAFRDALYQMGYRTALHYAPIGLTFLGAIDRGKSEVEATIHAAHRVNRICFHLLKHDEPFQSQSTPKLEAERERRWKLFQAAKKRRRSGRKRGKRR

SEQ ID NO: 168216 - protein, 485 aa, unidentified
MTSPVLGGKEQPSQELNQYGVGVDCHSSFFQICILIPNGREHRRFEQKVPALWNELHTARAWVLRVLREHGIDVVPGELRYTCESTGQYHMPLCLAWRGRPSVINPSDTSHIRRKTDRLDAQKLAQHSLNGLWRESWMAPDAIQELRVLAIQRNKLVGERTRLCNRINGDMLRFGHTIGQVGEINGSVVRPLIEDFCRNGTVGLRREFFSDVAIPRGVSLVFDQRWKRIDEIDREIKTIERACVNLVDSQEWCLGDSRRVRGPELRKSLESIPGVGTCTAIVWLAEVGDILRFATPNRLIADAGLDSSGEISAGKVVHNKVRKGNARLHYALRNAARAMLTHAPRSQFSVWARAYIARQSCGAKSKTIHALARRVCKAMYYCHLKNQPFDESKYSALLSESSYPDCPVEEMGFSPGVVRILKGNGLNTSRQVVEAFYSDLGRRPGCGRATMQAVATWINSQRSKRRNETRSESVPAPSTAECPED

SEQ ID NO: 168217 - protein, 320 aa, unidentified
MTLMVAAGIDAGKAFLDLAIASRGDRVRSRSLRVTNCASGIEKILRALAGSAVKRVILEAIGPYAAHLVRALVRAGYEVGLVNPKRIKAFREAEGKRAKTDRLDAQLIARFGLVMSEPLRPVPSEDQLAAKALATRRRQIVDIIAMEKTRLKQAFEPLVAASHRNAIKALSEERKAIEAELECRLTSDPMMAIKRACLMSLPGVAEQTSNVLLTEMSELGTLNRRAIAGLAGLAPHPDRSGLNPGRNAIGGGRPCVRAALYMAALSAIRHNPTIKREYQALRDQGKPAKVAIIAIARKLLVLANALVRDQQKYDPSKHSA

SEQ ID NO: 168218 - protein, 410 aa, unidentified
MDQIHDHVAGLDVHRDSITACYRHLGPRGGVVREREQFSTTTAGLEVLVTWLRERRVKLVAMEATGVYWKPPFYALEDGFEVWLCNARHVKKVPGRKTDMSDAEWLADVAAHGMVRPSFVPPPPIRELRELTRYRKTQTDARVAEIQRLEKVLQDAGIKLTSVASKVLTQSGRAMIEALIDGQSDGQSLAELAKGKLRPKIPALTEALTGHFGPHHAVAARRILAHLDFLEATIAELSAAIDERTAAFAPVYDLLLPVPGLQRPTIDVIVAETGADMRRFPTAGDLASWAGVCPGNHESAGKRRRVSTPPGNRWLRRALIEAARAAARTKGSYFGAQYRQIARRRGPNKAAVAVAHSLLDVIWHLLSTGEQFTDLGADYYQRRDDPQRQARHLAARIEALGYTVTLAAAS

SEQ ID NO: 168219 - protein, 423 aa, unidentified
MSKQNVELAAFIGLDWADEEHAVCLQGAGESRKEISTLDQTPEGLQAWIHQLRARFGGRPVAVAVEQARGSLIYALMHVDFLHLYPVNPQTLAKLRQAFYPSGAKDDPGDAQLLLEVLLNHRDHLRVWVPDDVLTRSIQLLTEGRRKLVGERTALTNQLIAALKMYFPQALDWFGDLHTPRACAFLYRWPSLQQLKTATSSSVRKFYQNQGYRGEDKLKQLIQDIQQALPLTGDEAVLLASTMMVQALVKQIPSLTESIEEYDRKIAALFKSHDDSTLFGSFPGAGPTLAPRLLAVFGSDRSRFEYAAEVQQLSGIAPVTEKSGKACWVHWRFACSKFLRQSLHEFAGQSILKSAWARAYYQQQRARGSSHQAALRALAFKWIRIIFRCWKDRTPYDEAKYCQSLQLRGSRLASTLKTASTEV

SEQ ID NO: 168220 - protein, 370 aa, unidentified
MAQLHAMVGKHVGEEEDSYQIKIGIETDRGPWVHALVAAGYEVFAVNPLQAARYRERHSVSGAKSDRADAHVLADMVRTDSHQLRAVAADSALVEAIKVVARAHKTLIWERTRHSLRMRHALREYFPAALEAFDDLAAPDALALLTKAADPATAARLSLSQISAALKRARRRNVAEKAAAIQAALRTPQLRQPEPVNAAYGVTVRSSAAVLAVLNAQIATMAAQVDAHFGQHPAADIVLSQPGLGTILGARVLAEFGDAPDRYASAKARKNYAGTSPITRASGKRKTVMARFVHNDRLIDALHAQAFAALNASPGARAYYDHLRARDIGHRAALRQLANRLTGILHGCLKTGTLYNEETAWAPPQHQSAA

SEQ ID NO: 168221 - protein, 319 aa, unidentified
MQDILEICCGLDVHKETVVACLFKGNVDHKPQSTTRTFSTLLSGLEELKTWLEEENCRHVAMESTGVYWHPVYNVLESAFDGTIVLIVANASHMKNVPGKKTDMKDAEWIATLLRAGLLKGSFIPSQPIRRLRDLTRYRKSIVEEISAQKNRIEKHLQSCGFKLSTFLSDILDVSGRAIIDHLARFGKISPQEVEQYVKRRAKAKLNEIKQAVNGQMDTLQREFLVILLERLDESIEHLQLIEQKIDEELLKYQRQLEQLDGIPGISKTAAAAVLAEIGIDMDQFKTAQHICAWAGLSPGNNESAGKKSLPEHSAGIPI

SEQ ID NO: 168222 - protein, 454 aa, unidentified
MCLEDRPVLEPNAAGIDIGAREIFVAVPPGRDEHPVRVCATFSEDLEQLADWLVVCGITTVAMESTGVYWIPVYDILESRGLQVCLVNARHMKNVPGRRTDWHECQWLQYLHSVGLLRGAFRPEVEITAVRTVLRHRHELVQMSSQHVLHMHKALTQMNLQIHHVIDDITGLTGLAIVDAILAGQRDPAQLAKLRNWRIKADEETIRKSLVGNWRREHLFTLQQSRELYRTYQQQIVKCDQEIEILVGGFEPRVDPEKKPLPPDRKRYRGAKKRAKKIGRLEMGFNLRTEAYKIFGVDVTQIPGLETLALPLFGEVGRDMSKWPTADHFASWQGLCPDNDISGGRVLWKGTRKLHNRAGQMFRQAAFSLHHSLTPMGNYLRRMKTRLGPAAATTATAHKIAVIFYTMVKNQVEYDETIWATRNLKRQQRIESRLKRQANQLGYQLVPLEEKPAA

SEQ ID NO: 168223 - protein, 324 aa, unidentified
MSPHCKEGYSMKKCIGIDVAKQYFDMYVLCSRQHHRLDNTAEGVRQCVLVCKAATPELIVMEATGGYELALACALQTEGLPVAIVNPRRIRDFAKAAGQIAKTDKLDARIIAQFAATLEPMPTEQINENTQKLKALVARRNQLVGLHTAESNRLEHADNRDIQHSIAAVLKVIEDQMKAVERKIEDHIRNTPELKQRSETLQSTPGIGPTTAHMLVTELPELGRLNRRQIAALLGVAPIARDSGTLRGKRMTGGGRKNIRSRLFLPTLVAVRYNPVLKAYYDRLVSRGKCKMVALVAAMRKLICILNTMIKKNQNWQPNFTKIA

SEQ ID NO: 168224 - protein, 391 aa, unidentified
MVCVGIDVAKDKHDCCILDSDGTVRADCFTIPNNMDGFKQLLQTIRDCTKKSDKIKVGLEATGHYSYNILGFLLDNGLPTYVINPLHTNLYRKSLSLRKTKTDRVDARTIATMLLSDVDLKSYTDIAYHNEDLKSLTRYRFDKVQECAKLKQSVSRLATILFPELEGLVSSIHGTSIYALLGEYPGAKQISEVHLTKLTNLLTTASKGRYGKEKAIRIREAARTSIGSVMPAKSLELKHTIKLIQELASEINEIEDSIQKIIDELNPPILSIPGMGVNSAAVILAEIGDFSNFSSPDKILAYAGCSPSTYQSGKLTNCYAHMEKRGSRYLRHALYNATKYVCYWNPVFAEYLAKKRAEGKHYNVALSHAMKKLVRLIYALQKSGKTYLTAA

SEQ ID NO: 168225 - protein, 343 aa, unidentified
MQVVRIGLDLAKYVFEVHGVDGQGNVVIRKTLRRGLVSTFFANLPPCLVGMEASNGAHYWARVLTELGHKVRLISPQFVAPYVKSNKNDRNDAEAICEAVGRPTMRFVPPKSPEQLAIQALHRIRQRLVRSRTKLVNQIRGILAEHGIVIARDIWRLRRALAEITGHATDDLNTLVRVLILETQAELMELDRRIASCDRQIRELYRTSELCQRLGEIEGIGPVTATALVAAVGDRGCFKNGRQFAAWLGLVPKQRSSGGRHRLFGISKRGDRYLRTLMIHGARAALGKAGGKQDPRSRWLASLRQRRHANVAAVALANKNARIVWAMLAGNVSYEPERSVQPA

SEQ ID NO: 168226 - protein, 410 aa, unidentified
MTETSIAQNLPILVAIDIAKGRHEVLIAIPGKKRRRRLTVLNQLDDFKRLITTLASYGLPVRVAFEATGNYHRAIAYHLAAAGFEIKLVSSVSLARTREALHNSWDKNDPKDAQVILHMLEIGNTQFYHDPLACGTNDIQELSKTHDIVSKSKTELWHRILTHYLPLYFPEADRFHRSSRGDWFFAFLERYPSPHLISAMDRAAFIAEAWDVVGRKVAKERLLTDIYETAKTSVGLPIGPHSDAVGMFRLVLGEGRGLIAQRNQIEARAVELLQDLPDYQLLTSVPGIGPINALTILAEAGDLRRFNHHLQFLKFCGMDLATVQSGTFRGQTNLSKYGNARLRRTLWMAGQVAILQKTNSFRDKFERYIAKDRHNTHLRRKAYTAIAAKMARTVHGIIKNGEPYRPFFEG

SEQ ID NO: 168227 - protein, 330 aa, unidentified
MKKWNVILGVDVSKLTLDICCAERNLHIKIDNCSKGFCVLRKWCKINRIDLTKTLIVLEFTGGYEYRFLQFCESMSISYCRVPGLEIKNSSGMTRGKSDEMDAFRIGQYGEDKIKRLEPSKPLNKNIIELKQLLSFRKRLVKEKAGLESTVKERKHMYGVKEADTITCIARDRIKSNEEHILRIEQEIMEMIKTDEDMWRNYRIITSIKGIGKVNGWMTIAYTENFVSFTDPRPYAVFVGVIPFDHTSGTSIKKRKRVSHLAHKVLKAELNQAAKTAIVHDPEIRDYAQRKLKNKAYPLVLNNVKFKLILRMFSLVKRGEMYVENYRRSA

SEQ ID NO: 168228 - protein, 407 aa, unidentified
MELEALYKRVIGLDIHQAQITACALIEQTDGTTRIEQRQFGAFKRDRKELATWAASLQPDEVVMESTGIYWKSPYAALEAVGIRAKVVNARHVKNVPGRKTDMADAHWLAMLCRAGLLRGSFIPPANLRELRLVARQRQKLVGQLASEKNRLHKVLTDSGVRLAVVVSDVHGKSARAMVKAIIDGQPPHRVIQLASQRLKASRADILDALQGDVTDTHRFILGELMQHIEEIEARIARFDARLLAGLEREHSTLKLLQTIPGVDLIGAAMLLVEIGSDMDAFGHPDRLASWVGICPGNNESAGKRKSGRVRKGNQYVRRLLCEFAHAASRTQSVFKSKYQSLLVRRGYKRSIIAIGHKMLRTIFFMIQRREHYRDSAVDYEALSVQRNAPRWIKALTKFGFIQPATA

SEQ ID NO: 168229 - protein, 345 aa, unidentified
MQTMYYIGLDVHKRTISYCVKDGSGAIHAQGTIPATRFDLDRWMKTLPQPWTAAMEATVFTGWIYDHLQPHAAALKVAHPLMLRAIAAAKKKNDRVDASKICDCLRCDFLPECYMASTAIRERRRTLRYRNLLVRQMVQMKNKIGMLLMEAGVSYNKQRLHKASYFRELLTTNPDIDEGLCSLLRLCRETVVRLQKTESALVRSLERDSLLMDRVERLMTIPAVGPITALTWALEVGDVQRFSSIKKAISYCGLCGAEKSSANTVQRTPLSKQRNKHLQTTLIEAAKMAPRNSSELAMLYDKEKQKGHANRATLAVARKLVAYLMAVDRGQRDFQVLEASHCTAA

SEQ ID NO: 168230 - protein, 338 aa, unidentified
MSKLKNFVGIDISKLWFDAALIKTDNSFQIVHQQFVQKPEGFKKLQEWLSTHNVKIDDETLFCMESTGLYNTGLVNYLVKSKAQLWVEMPLRIKKAGGFERGSDDKTASVKIAWYAMRYQDNLKLWQPVNGNMEKIKNLIAQRDRIINAITQLSVPVKELKDCGCETEAKQMEKIQKPALVALQKTKKVIEAVITKTIQQDEQINKKVTLVQSIKGIGPVTAVALLVYTQGFDRFDNAKQLACYCGVVPFKKESGTSIRYKPTVSPFANKKLKKLLHLCALSAIKNDKELHLYFERKVMDGKNKMSVINAVRNKLVHRVYAVLRDERMFEENYVRKCA

SEQ ID NO: 168231 - protein, 313 aa, unidentified
MIQTTIGIDISKDHLDTHRLADGTTRQFANCKAGHKALIKWLADTPLARIVYEPTGRYHGQLESRLGEAGLPLVKVNPRRARRFAEAIGKLAKTDRADAATLAQMGEALKLQPQPATDKTLAKLKELQTARAALIKDRTAARNRQKNLAALLLKQQCKARLEQIHKDLAEIDQAIDDIITADPECTKRRDILVSIPGIAKLTAHAMLIHMPELGTLNQKQAASLAGLAPVTRQSGAWRGKAYIQGGRAILRQTLYMPALVATRFNPDLKAKYQQLIKAGKPPKLAITAIMRKLIITANALIRANRNWKLKTLE

SEQ ID NO: 168232 - protein, 341 aa, unidentified
MPIVTIGIDLAKNIFAIHGVDEAGKAMLIKPRVPRDQLVTLIAQLPACLIGMEACSGAHHWARVFQQHGHTVKLMAPNLVAPYRMSGKRGKNDAADAAAICEAVTRPSMRFVPLKDEHQQATLCLHRTRQGFVEERTATYNRLRGLLSEFGVVLPQSPEKLRRHITEHLDTLPGWAKHSISDLLDHAGNIEDRLLEYDRAIAEIAREDARSKRLMQLRGIGPTTASALLASIGAGHDFRNGRQVAAWIGLTPGQYSSGGKARLGSITKAGDAYLRGLLVNGARAVIASLGEKQDRFSRWVRTLVERRGYWRAAIAIAAKNARLAWASLKYGDDFKLEPVAD

SEQ ID NO: 168233 - protein, 349 aa, unidentified
MKIIGCDFHPSFQQIAICDLETGELQERKLSHADGQAERFYRELGEPALIGIEATGNSQWFLDLVERLGHEIWVGDAAKIRASYVRRQSTDKRDAGHILKLLLEKRFPQLWRPSAAMRDQRQLLRHRDKLVEIRTKVKNSLQHLAMNRGMQKKSRLWTRQGMEQFQQLAMPGWAGTRREDLLQLLKELNGQIELLDQAVKQAAEQHPQAQLLMTQPGVGPVTALAFVLTIGDVARFAGSKQLTSYLGLVPSEHSSGSKRRLGAITKQGNCFLRKLLVEAAQTTVRKDEDFRKEYQHRCHHCPKAVAKVAAARKLAVRLYWMLRSNVGYPEIVHIESNPRVPLGESSPKH

SEQ ID NO: 168234 - protein, 356 aa, unidentified
MVMVLGVDVHKDTHTVVAVDEVGRADGERTVRATDTGHRQLLDWARRQVPQDRMWAVEDCRHVSTRLERALLAAGETVVRVPPKLMAGARSSARTRGKSDPIDALAIARAALREPDLPLARHDDTSRTLKLLVDHRDDLVIERTKMANRLRWHLHELDPELDIPARGLNRLNLLDRLITWLAEQSRPDRLGQVLARLAAELLTDIRAATARINALEREINTLARQAAPRLMTLPGAGGLTTAKIVGETANITRFRSEACFAMHAGVAPIPASSGRTQRHRLARGGNRQLNAALHRIAITQVRITASPGQLYYQRRRAQGDTAMEALRALKRRLARVVFNLLQADTTIAINDLSTAA

SEQ ID NO: 168235 - protein, 423 aa, unidentified
MEVLYPKCAGLDVHKDTVVACVRLASEQEVVRHVATYGTTTSALLDLAEWLSSHGVTHVAMEATGVYWKPVWHALSGSALPAELTDGEVRDDAFHLVLLNAMHIKKVPGRKTDVSDAEWIGELLAHGLVRGSFVPPTPIQDLRALTRTRKQLTRERVQHVQRIQKTLEDANIKLASVVSDITGKSARAIVDALANGETDPEKLAALVTTKLRASRETVLEVLRGNVRRPHQFLLRLHLDQVAAIERAIESIDAEVGERLEPFRNATDLLVTMPGIGDVVAQSLVSEIGTDMSRFPSASHLVSWAALCPGNDQSAGKHRSRRTRKGPVWIKTMLVQAAWAAVRRRDTYLNALFHRIKRRGGAKKAIVAVASSMLRAAYYMLRDGTPYNDLGPDHFTTVDREKIAKRLLRKLADLGVEVQLKLAS

SEQ ID NO: 168236 - protein, 448 aa, unidentified
MKKAKIQNNSASQNTVVGQSGPTVAHPIRIWIGADWADQKHCLVVQPLEGPAQTHFLEQKPELLDQFFLRLRQQHPQGLIGICLEQSRGALLYALMKYDFLVIYPVNPRSLADFRRAFCVSGAKSDPSDAQLLCEMGLKHQPRLRPLQVEDPATRKLRLLVEGRRGFVDQHTAFLNQQRAVLKCYYPLLIELFEENLESAMAREFLRRWPNLAALKRAKPAVLRAFFYRHNSRSQEKIRQRLQAIQRAVPLTEDEAIIQPLQLQALGLAEQLAGLSTLIKQYDEQIHGVFQNHSEAWLFSELPGAGPVLAPRLAALFGTARENWPSALDLLCRTGVAPVKKQSGKQLIVLFRWARPKFIHQTLVEFAKCSLKHCAWAKLLFEDQRAKGKSPFGALRIVAFKWVRILWRCWQDRVAYDELRYLRGLQKRNVKLYASLYQSLTPENVNNP

SEQ ID NO: 168237 - protein, 423 aa, unidentified
MGKTIPICCGVDVHKKFLVATILTGDYLIPQCKQKHFGTSFRNLLAFKQWLLDNNCKDVCMESTGKYWVPVWNILEGVVNVVIANPKWVSAVKGNKDDKKDSKWIGNLFRMGLVPSSYIPGKDIRILREFTRYRSKLVSMRSSEKNRYQNAFTVCNLTLDAVVSDMFGKSAMAIENYLLDTDVVDPEICVSFLQRSLKKKSAEIIEAVEGFNMTQEQKERVRIIQGHFADIDKRISQIDEIIGRLTAEHEGTISLLCTIPGIDRRLAITIISEIGTDMSEFGSSRRLCSWAGLAPGNNQSAGKKKSVKITRAGVYLKPALVEAAHAAVKATEKSPYFKIKFEKIMKRRGKKRAIIAIARMILTSIYAMVSTGEVFNPSDLLKYDMPEELQKKRTLAEAKDAVKLLVSLGLVAEGSISLETLAS

SEQ ID NO: 168238 - protein, 358 aa, unidentified
MEYYIGCDAHKKYSVFAGISEAGEIIPAQRVEHDRESYRSFLKGLPSGSQIAVESVGNWYWLIDEMEKAGHVPTLVNAGKAKLMMGNINKTDKLDARGLAVLSVNGTLPAVWIPPGELRDQRELARMRIFLVHIRTGLKNRIHATFAKYAITFEEVSDLFGVRGRNLIEKRLAELPPETRESIKEQLKLLDQLQRQISSVEERIRQIVKVTPQMRLLMSIPGIGAVLAILIALEIGDVARFSDGAHLASYCGAVPRVKSSGGKTYYGKTRPDVNHYLKWAFTEAANSIVLREHHMPGYHVVTLYRRIRQSKGHAKAIGALRRHLAEAAYAVLKSGQPYHEPKAPRKLSVTKEVCARLA

SEQ ID NO: 168239 - protein, 375 aa, unidentified
MKEKLRFLGLDVHAETIAVAVAEPEGEVRSLGTIPNRAESIRKLIKKLGPADKLRACYEAGPTGYVVYWQLAELGVECEVVAPTLVPVQAGDRVKTDRRDAEKLARCYRSGDLTAVWVPDEGSEALRDLVRAREAAKQDQMRARHRLSKFLLRSGQRPPSGVRPWTRPYLIWVAQLRFTQLAQEATRLDYLHEVEHMRERVARLEQAITEAVKLASPALRQVINDLQALRGIADISAVTIAAELGQISRFDSARQLMGYCGAVPSEDSSGKRIRRGGITKTGNAHLRRIVVEAAWSYRRPPGIWYGLRRRQESISEEVKEIAWKAQHRLHKRYMKLGAAGKDQRKIVTAVARELLGFIWAIGTRAETLAHQQAVA

SEQ ID NO: 168240 - protein, 342 aa, unidentified
MKKESGVYCIGVDVSKLTLDVSLVYVEGHLRYGKGNTTVGNSTEGLRQLYYWLKQQGVCFNKSTKLVMENTGMYHRLLVGWAKKSGLQYCVDNAARIKWSLGITRGKDDKVDAQRIAMYAAKNLQELHWNNVSEEKLLLLKDLLTTRESLLQQINQLRIPLNERKQYLEEKQIREMEKLLSPAITGLKESLKKLDAAIQKTIAADTELLRLYKLTLTVPSIGPQTAAALLCDTRAFKGYENAAQLSSYCGVVPFGYRSGTSIRGKTKVHPMANKNLKRLLHMCVLSGIRKYPEFRDYYERKKAEGKHVMSVINALRNKLVIRVAAVVKRGEPYVDNYVSTPV

SEQ ID NO: 168241 - protein, 428 aa, unidentified
MSPLPEQPFTAYVGIDWADTKHDICVQAAGESRRESGCIAHQVAAIDEWANALHRRFGGRLAVALELAKGPIVAALQKYDFLVLFPINPATLAKYREAFQPSGAKNDPGDAELALDLLLHHPERFGPLRPQSVPMRTLVSLVERRRQLVGDQNRLTNRLCDMLKQYYPQALEWFDDRGTVLFCDFLERWPTLRSVRQARTAVLETFFHAHHCRSASRISARIESIRSAAALTDDPAIIGPCRLHVLALVAQLRAVLAAIVQFDLEIAAVVHTLPDYALFEDLPGAGACLAPRLLAAFGEQRERFRSADELQKYAGIAPVTERSGKKSWVHWRLQCPKFLRQTFVEWAAQTITRSFWAGAYYRQQRAKGSSHHIAVRALAFKWIRILYRCWQTRTPYNETVYLNALAKRGSPLLGKQGDSVKMGSCSPI

SEQ ID NO: 168242 - protein, 341 aa, unidentified
MEYFAAIDVSLEQSSVCVVDGTGKIVREGKAASEPEVLAAWFTASGLAFTRIGLEAGPLSQWLHAGLTAAGLPAILIETRHVKAALKAMTVKTDRNDARGMAQLMRMGWFRPVHVKTLPAQEVRALLTARKLLQGKLQDIELGIRGLLRGFGLKVGQVSKGKYEARIRELAMGHPMLEPVTAAMLQARTSLRTEYAKLHRMLLRIVRDDTVCRRFMTVPGVAAVVAVTYKTAVDDPTRFGKSKELGPYFGLTPSKYQSGEVDRTGRISKVGDAMVRTALYEAANVILNRVTRFSTLKAWALRVVQLRGVKRAKVALARKLAVVLHRMWVDGTDFRWRKAAA

SEQ ID NO: 168243 - protein, 331 aa, unidentified
MHYAGIDLHRRDIVVAIEDEHGPVGKPKRFSCQEPETILSFFEKQQPFRAVIEASCSYRWLYDLLAPLGEVVLAHPRRLRAIVDGRAKTDKLDAALLAFLLRTHGIPQAYAPPDNYAQLRALTRARAQLVRHQVRAKNELHAILARHNQHPPYKTPFGKRWTRWVEQLDLSLVDGVLRREILARITHFQAEIERLDRVLVETAVDFPQVAALLDIRGVGLYTALLIVAEIGEPWRFADGRKVGSYAGLTARVNQSGGHCYYGHITRQGSSQLRWALVQVAMKVMPGDEKLKAMYTRIRKRSSAKIARVAVARKLAAICWLRLMRWHYSQAA

SEQ ID NO: 168244 - protein, 410 aa, unidentified
MPEPTYALYVGVDWGNQTHQVAVLDTARGLRGERGGAHDGPGLHALASWLAELAAPGTVAVAIEVPHGAGVDTLLERGFAGYALNPRPMDRFRDRDTVAGAKDDRRDAQVLAAALLTDRPAFRRLHVDDPQVVQLRELTRIEAELSEELRRLANRLREQLLRFYPQALELCPAADEPWFWALLTQLPTPTAAARRRRGPVAALLREYRIRRLTGDEVLTVLRRTPLTVAPGTLEAATEHIALVLPRLELIATPRRACAPRVETMLAVLAAAGQQQGHRDVTILRSFPGVGRVVAATMLAEASQLLAARAYHRLRASGGAAPVTRQSGKQRGVPMRYAWNPRLRNALYYWAFIAARHDPATRQHYEGLRARGHSQGRALRGVADRLLAVLIVMLKTQTLYDPSRREAKFAA

SEQ ID NO: 168245 - protein, 388 aa, unidentified
MQVIADRPEAPSAIRTNLDAIFASLELSHSTWLITSLSPGSGEKMSKHVVHGGDIAGLLQRFAQLREKALAQTGRNFPIIVIHEAGLDGFWIDRVLKNEGIESHVVDPASVATSRRRRRAKTDKIDGEALVRTLLAYKRGEPRVCAMVKAPTPEEEDRRRLCRERKVLITERVRHVNRIKGLLFSQGVCGYEPLRRDRRRRLDELRTGDGRRLPKHLKAQISRELDRLELLLEQIKAVETERDALLAAQQIAAPPSAAMLIAIKGIGPDFAAILWSEGLFRHFDNRRQIASYAGLAPTPWKSGSIDREQGVSKAGNPRLRTTLIQLAWLWLRHQPQSALALWFKERVVRNRGRLKKAAIVALARKLLVALWKYVAAGVVIEGAIMKAV

SEQ ID NO: 168246 - protein, 344 aa, unidentified
MDYFAGLDVSLRSCALCIVDSKGAIVLERELGCDVDEITNCIKSFAHPIVRIGFEAGTMSQHLFYGLTNNGFDVVCMEARQVSAALSAMRNKTDKNDARGIAQILRTGWFSPVHMKSREAHNIRALLSCRKALLNKTIDLANEVRGLLKIFGLRLPKTVQHGSFDDLVRPLIAADEVLSQAMLPLLDARVAIYKNYLALDRRVKRAARNDNVCLRMMTVPGVGPIAALTFKAAIDDPARFKSSRTVGAHFGLTPRRYQSGEHDNPGRISRAGDRDVRSTLYAAANSLLMRTMAGSQIKSWGMRLMRTKGRRRAVVAVARKLAVLLHRMWTDGTEFRPEKVEGVA

SEQ ID NO: 168247 - protein, 403 aa, unidentified
MIFVGDDWAEEHHDVYLMDEAGRRLSSRRLAEGLAGIRGLHELIAQYAQEPDQVVVGIETDRGLWVGALAAAGYRVYAINPLAAARYRDRHHVSGAKSDASDAKLLADLVRTDRHNHRPIAGDSADAEAIKVLARAHQSLIWTRTRHTNALRSALREYYPAALVAFEDLTHGDALGILDRAPTPAQGAHLAPTAIQAALKRGGRQRNIAARAREIRAALHTEQLAAPAPVAAAFAATTRAAVGIITELNRQIGELEATLAQHFETHPDADIYRSLPGLGVVLGARVLGEFGDDPNRYTDAKCRKNYAGTSPLTVASGKKRAVSARHVRNRRLYDAIDQWAFCALTNSPGARAFYDQHRDAKQTHHQALRALGNRLVGILHGCLRRQQPYNEHTAWAHRTTAAA

SEQ ID NO: 168248 - protein, 427 aa, unidentified
MRFYTKPHRYYCGIDLHARRMYICVLDAEGQIRVHRNGPATPEHFLTTVAAYREDLVVAVECIFTWYWLADLCAREGIAFVLGHALYMKAIHGGKAKNDKIDAHKIAVLVRGGMLPMAYVYPREMRATRDLLRRRCHFTRKRAELLTHIQNTASQYLLPTLGKIAYHGNRGGVAEQFRDPEVRKSVETNLALIDEYDRLLGALELHLTESAKVHDVNAFYRLRSVPGIGKILALVLLYEIHDIHRFPRVQDFVSYCRLVKCAKQSDGKHYGYSGTKIGNAHLKWAFSEAAVLCLRKNPPAQRYVARLAHKHGKGKALTILAHKLARAVYHMLRRGQAFEATKFFAQTTPGDRSARIESDRNTRDEVHDVDAVHDASRSGPTRHDREGGRYLDPPENERRRSRPRVHAGGPEHPARAAGAADRVEEAR

SEQ ID NO: 168249 - protein, 394 aa, unidentified
MKLVGIDVGKNSHHFCVMDKETGEFNVTPTSFSNNKEGFDFLINSLKPYSKKSILIGMEDTGHYHVALLKFLLSNGYTVALINPKTTDLTRKMEGGITKNDKLDTITICDVLDTPERKKQYRITKVDRFDLYEQRQLTRHHHNLKEELNVYCNRLQKSIDLVFPEFNTLFSSKYSIVYMNLLKTFGSAEAIASTDIRTIRKCFEIKGRGNRISLTPEKLKECAKNSIGISSEVETIQIKHLVSQITLIKEQIAEIDKKIKESSITNNSPILSIPGISHFSGTSILAELGDIGNYSKPSQIIKFAGVAPYHYESSQYNAQHTGITKKGSKYLRKTLYQIILTVINNNPVFKKYYLLKISQGKGHRCAQGHCIRKLLRIIYHLLETGQSFDPALLR

SEQ ID NO: 168250 - protein, 397 aa, unidentified
MGTKLGSEAPGHAIDIGSEKHVVAIVDETGKPLRKPIPFSEDASGYERLRSMLGEAADAFVAMEATGHYWQNLFAFLHAAGFQIALLNPTRTSRFAAEDLRRAKTDALDALGIARFAQQKRPAATPMPDAATLELRELMRLRDRLVQDLGDRARQVHRALDLSFPELTDHVRDVASAKATTLLVVCPTAEKFRAADPKVLAELKYDGRHVIGLELAKALCEAAKTSVGRHQGTPYELQIRYACEDIATLRARIKKLDEDISQSLDRHEVGKLLTTIDGIGDNTAARMIASIDFDGFKSAAALAAYVGVAPLVNHSGKRQPLRGHACAMGDADLRAKLWMPTLRAVTHNPWLKAFYQRLVAAGKPKKLAIIASMRKLLGAMISVARTRTPFVPKLAAA

SEQ ID NO: 168251 - protein, 339 aa, unidentified
MSQTVIAVDIAKKVFQLHWVDQETGVIERLKLKRSQMLPWFANREPSRVIMEACGGAHEWGRQLVQSGHDVRLLAPKTVRPFVQRNKTDAADAHAIWTAGQQPGAVFVAVKNEAQQVVLSLHRLRAQLMKMRIMQTNELRGLLYEFGVVLPEGHRALLQELPDALRDAQKRLPAMFIDSLDEQVKRINGLEADIAKIERRLSQQLRQTAACKALSAIPGVGLLTATAIVASMGSPDVFKDGRQFAAWIGLVPRQTGTGGRVRQLGISKRGDAYLRTLLMHGARAIVRSDRADHWPWLAALLKRRPYNVAVAAIANKLARTIWAVLAKGQEWRPQAWQAG

SEQ ID NO: 168252 - protein, 383 aa, unidentified
MTGTEPQAWETGLMENITYVGLDVHKATVCVAIAEGGRSGEVRQLGVFENRPELLLKLVARLGKGGRRLSFCYEAGPCGYGLHRFLSGCGHDCVVVAPSLIPMKAGDRVKTDRRDAVMLAKLHRAGELTPIWIPDAAHEAMRDLVRARATAGRVLSKARQHLQSFLLRHDQIYRGARAWTLAYRRWLTTVRFAHPAQQIVLQDYIHAVQDAEARLDRLTRQIEELLPSWSMAPVVTALQAMRGIALVVAVTVVAEVGDFRRFANARQLMAYLGLVPSEHSSGASIRRGGITKAGNALARRVLIEGAWTYRMPARVSRKLHDRNEKLSPAIRDIAWKGQIRLCSRYRRLAAAGKPKVVVTTAIAREMVGFIWAIARIAQPTLQG

SEQ ID NO: 168253 - protein, 350 aa, unidentified
MERSSITIGMDMGDKKHQVCVLDGNGNEMRSETISNTSESMKRFFSAYTGATVALEAGTHSGWVSRMLEGLGCTVLIGNPRKLKAIWASTNKSDVRDAEMLARIARFDRKLMYPIHHRGEQAQKALETIKARDMLVHSRSALINHVRGAVKGIGSRIASCSTESFHYKAEEEMPEGLAPALTPLLKVIEDLTQRIRAFDKAIKELSCREYPETSRLRQVTGVGPVTALAYVLTLEEPGRFAKSRAVGPFLGLTQRRDQSGETDKQLRISRAGNEYLRRLLVGCAHYILGPFGPDCDLRRYGLRIAERGGKNSKRRAVVAVARKLAVLLHRLWTSGEQYEPLHVVNMKRAA

SEQ ID NO: 168254 - protein, 353 aa, unidentified
MNATTVAIDLAKDVFELGFADARNTVLERKRLSRKPFAHCLDNRPPLRVVMEACGSAHYWGRRFEALGHQVLLFPPRDVRPYVRRNKTDRTDVDGMLEADRCADIGPVPLKTPEQQGIQALHRIREQLKAQRTATINLLRGVLREFGVVIPMGAAKVRPAVLCALEDGQNDLPMSLRDTLAGLLEQILALETRMAGIEHHLDEFASRDAATQRYQDAPGIGLLTATALRASIGSLDRFPSGRHLSAWIGLVPREHSSGSQRRLGRISKRGDGYLRTLLIHGARSALHAATARRRKGQPLDPLQAWALAVQQRQGHNKAAVALANKLVRRLWAMEHHGQRFDPNHRSVRPEVTH

SEQ ID NO: 168255 - protein, 323 aa, unidentified
MDYIIGCDAHKHYSQFAVLEEDHTRCKQVRVEHERGAIREFLSEYPEGTPVALESIGNWYWIVEEIEQAGCQALLAHPAKAKAMMGNVNKTDKLDARGLAMLLRNGTLPTVWIAPSEVRDERELPRTQMALCKIRVALKNRVHATLAKYNLSLPTESDIFAPKWSSQLNQVIEQLPVETKNCLQQEMQLLKTVPGVGDILAIVIGTEIGLIERFASAEQLASYAGTVPAVKSSGGKVRYCHTPKESNHYLKWAFVEAANGPAQYHKHPHWQHRHVTRLYERVRLRKGHSVAVARHLAEATFWILNKKEPYREPTRQKVLPRQA

SEQ ID NO: 168256 - protein, 355 aa, unidentified
MNPTLIGVDLAKHSFAVCEVNDTDRVLQRHEFKRQAFAAYLVQLPAGTQVAMEACGGAHYWARKCLEFGLVPRVMAAQFVRPFRKGKTAKNDRNDAEAIATAARQGNMRFVPVKVVDEQARLSWHRIRDGHKQAKLAIGNRIRGLLAEFGVIVAQGDAAMARQLADLDALTVPDDLKTLLHLEAREWARQDDCLTTCTQHIQAHARQDYRCQRIRDILGVGAVTADAFVATIGNGQDFKNGRQMAAWFGLVPKQATTGGRVKLGAITRDGNAYLRTLLVQGARSSHKCALATDADKATPEQRWIQTLDQRTLYGKVLVAIANKHARQIWAILAHDVDYDPCAGMCHAIQPEATAA

SEQ ID NO: 168257 - protein, 320 aa, unidentified
MMAQNDLVVVGIDVAKDKVDACIRALALRQTFPNTAQGHRKLVGWLRKHDVNKAVMEASGGYERVWAKLLRQAGIEVRIVDPKRVRSFALSAGRLAKNDAIDAEMIAWFAETFSEAPSQTHDAAHEELQTLVKARLGLIDFRMRLESQSEHAALGLVQKAHAHILKSLASEIAKLEAAISAKIKSTPDFAERAEIIESVPGFAETSSANLVAGMPELGQVSDEIAAALIGVAPYDDDSGKRRGERHIKGGRRWVRNAVYMPCVGAATQNNPVLKAYYQRLIAKGKEPKVALIACMRKLIIILNTMIARRQKWDPSRYVLS

SEQ ID NO: 168258 - protein, 353 aa, unidentified
MRKMQEYIVKGNKIFIGLEDSKKTWKLCVRCNRMVVHETGMPAKYEALRAYLLNRYPDCTIKVMYEAGFQGFWLHDLLEEDGITCIVTPPNKVTCAKDDRVKTDKRDAHRLAQNLENGDYVSCHVPDRERRKDRQISRTLDQVQKDIKATKNRVRRFLDYYGLNGGLKIGAWYDKDYLKLTGLELPRSLKVSLDMYLRLLEEQLAIKKELLVELRALCEKERYKAGVLAKKSCPGIGWLTAIRLTLEWGDMARFRTGKHIASYTGLTSREYSTGETVRRGRITGQSSEQIRSWLIECAWRAVRKDPVLLDKFRAVWRNSGSKKKAIVAVARKLAVRLWALETTRQTYCIGIVE

SEQ ID NO: 168259 - protein, 327 aa, unidentified
MIIIGCDYHPGVQQIAFVDTETGEFQETRLQHREQAEQYYRELALRGMQVRLGMEASGQARWFERLLAELKMELWIGDAAEIRAQRVRKKKTDREDARHILRLLVEDRFPRIWMPSWENRDVRQLLWHRHRMVQMRTRVMNQLQAVALNEGMRCKKRLGGERGRQQLESFPLAMWGSRRRHDLLELLDRLNPTIAELTQAIEAEVANYPAAQRLMTHPGVGALTALAFVLIIGETERFQCGKQIAAYLGLVPEENSSGESRRLGHISKQGSGFMRFLLVEAAQVTVRSDGQWRSRYFHLAMRRGRKIANVAMARRLAVRLYWMWRRQ

SEQ ID NO: 168260 - protein, 461 aa, unidentified
MLYSLIIKCKDMSKVSKELHPLQLAVINDHAAAIDIGSMMMMVSYSDRNGIPQLLECSAYTESLDSLVHTLQQEGVTHVAMEATGIYWIVLYEILEQYGMKITLINPKHFKNVDAQKTDVKDCQWLHQLHASGLLRASHIAPEIFRELKNYLHERDILQKQKSDTLNRIQRILTQMNIKFQHLISDIEGVSGMKLLHGISSGITDPKKLLLLIDTGKLKASADDLIKSLTGIYKQQFITILKNLLKAYHFFKDEMKAYETIIEQVLKRMLPEDKDGNKPLIEPKKTYYRKNQYSINLKSYLNHILGVDLTKVDGLDEISILTILAITGVDMNKWPTADHFVSWLNLSPRPKITGGKRIGHDKRFTDNPATQAFRMAAQSMWQNKGPLGHLYRRLSAQKGSKKAIKAIARKLAVIFYNMVKNKSEYDKTRLQQNTHRQQQRRIARLRKEAAKYGFKLENLIA

SEQ ID NO: 168261 - protein, 341 aa, unidentified
MSITVIGLDIAKNVFQVHGVDETGQIVLRRRLRRCDVLRLFGELSPALVGIEACHTGHFWARQIKALGHDVRLMPPQFVKPYVKSQKNDAADAEAICEAVTRPSMRFVPIKTAEQQSVLLLHRARDLLIRQRSSLVSAIKAHCAEFGIILAGGARDLDRFVEKLNDVCRDLPDVARDMLALLGMQVRDVAARACEVEKKLLVWHRTNEVSRRLATIPGVGPITASAIAATVVDATQFKTGRQFAAWLGLVPQQHSSGGKERLGSISKRGDGYIRRLLIHGARAIVGWRKRSASKTDRWISGLLDRRPVNVATVALANKSARIAWALMSGGTDYDHRRCRAA

SEQ ID NO: 168262 - protein, 331 aa, unidentified
MKKFSGIDLHSNNSVVVVSDEVDHIVYQRRLPNDALQIRAALAPHREELEGVVIEATYNWYWLVDALLADGYHVHLANPAAIRQYEGLKYSGDFTDAAHLAQLLRLGLLPEGYIYPADGRQVRDLARKRMQLVQCRTAQILAIGNLFARHTGSQMHGPQVKRLDGAQVSRFGFAPDVTLAIRANLAVLGTLQQQIEIIEKRLMQQVKLNPDYALLNTVPGIGPVLATTIMLETGTISRFATVGHFSSYCRCVDSRRESNSRKKGEGNTKNGNRYLAWAFVEAANFAIRTCPQARRFYERKKRMRNGIVAIKATSAQAGSRLVSHASGAQTI

SEQ ID NO: 168263 - protein, 307 aa, unidentified
MQAVTTIGLDIAKSVFQVHGVDAEGKVLIRRKLKRRYVLAFFQKLPPCLVGIEACATSHHWSRELKALGHTVRLMPPAYVKPYVKRQKNDAADAEAICEAVTRANMRFVETKTPEQQSCLMLHRTRHLFIRQQTSVINAIRAHMAEFGIVAPVGRQGVEALLEVAADGGDNRVPEVARSCLAALGAQLRALKAQILEFDRRITAWHRSNETSRRLDAIPGVGPALATALVASVADPKAFRSGRNFSAWIGLVPKQHSSGGKDRLGSISKQGAAQPLHCRSPRRDPLCQDPRHKASTLAYSLAGAASD

SEQ ID NO: 168264 - protein, 371 aa, unidentified
MEHTRFVGLDIHKERISIAVAESGRSGAVEYLGEISNDPDAIGKLCDRLRRPGKTLAFCYEAGPCGYGVYRQLTDIGHRCDVVAPSLIPTKPGDRVKTNRRDATMLARLHRAGELTPVWVPDADHEAMRDLIRLRSVVRQIVTRARQHLQGFLLRHGRKHGRGTAWRMAYRRWLSTLAFEHPAQQVAFQDYVDAVMDAERRLQRVEEQISGLLPEWNLRPVVDALQVMRGIASINAVVLVAEVGDFTRFSNPRQLMAYFGLVPGERSSAETIRRGGITKTGNAHARRALVEGAWAYRMKARIGRHKVDRIEALPKVVRDIGWKAQVRLCTRYRRLSARGKTANVVNVAIAREMVGFIWSIACMVQSAPKTA

SEQ ID NO: 168265 - protein, 327 aa, unidentified
MDAHSSSCTLCVTDAAGREIDNVVLETNGKLLKNYLHSIDGTKKLTFEECELSRWLYSIVSPEVDELIICNPVANKEYKKAKTDKLDARKLAKLLRGGFLTQVFHDGSERERFRNLMSSYQDIIDEGVRLKNRYKSLFRKNGQRIRGEALYNDENLLEGLPRSEDRFIGSHFYRLLANLEQSRQAYIKEICQYSKKFKELKLLKTLPGIGDIQAAKIVSQVVNPHRFETKYKYYSYCGLVRHTRTSADRSYGTRKIWGNRILKCAYKMAGHAVLKGNSQLRVYYDDLRQRGISHDNAYNAVCRKIAAISLSLWKHNKRYDEHMIRAI

SEQ ID NO: 168266 - protein, 352 aa, unidentified
MLTIGVDFSKRTSVYSVLDSLGHRIKRCKVENDPVLMSEFFKSLPEEPLVLAMEATRNWGLYYETVKDNVNHFLLAHPVKMKAITHSETKNDQNDADMIAKLTFSGFLPQAHISSLGTRQLRSLLRYRIFLVHQRSAIRNQVQTLIDRNVWPSERPRSFKSPFCRRGFTWLKGLQLPEQERFILDQALKAFNQLTQSILDIERYAQSQTLNLPGLEQLRTVPGFRTSRVHIYTVLLEIDTINRFSKARNLAHYAGLIPRERSSGDKHRTGHLVKQANKHLRTALIESVFGALLSDKNLKAYYQQVKERAGAGSAVIATARKLSYAIYHVLKDQTNYKSYPPPVTARGPLAAD

SEQ ID NO: 168267 - protein, 412 aa, unidentified
MQVVHPVCCGIDVHAKMLVACLILANGEKKKRTFSTMTAELLQLRDWLVAVQCTHVAIESTGVYWKPVFNILEDALTVILINPEHTHALRGRKTDVKDAEWLADLLRHGLLQPSFIPPPVIRELRELTRYRESVIREQSSVANRIQKLLESGNLKLGQVASDALGVSGRMILKALAKGESDPRKLAALARGKLKEKSLSLEQALQGRLTVNQRFVLGELLSRWEQLEAADARVTSEIDKYVQANPKLARARELLDSIPGIGPRVAEVIMAEIGIEMASVFADAAHLASWAGICPGNKATGGKRLSGRTRKGNTYLRSALVQAAWGASLKKHCYLSSQFHRLVKRIGRKKALVAVGHSLLVIIFHVLQNDQTYTELGGDYFDRRHVEQQRDYYVRRLQMLGLKVTLEELPQAA

SEQ ID NO: 168268 - protein, 407 aa, unidentified
MIFVGVDWAEAHHDVHVADEDGRRLAKARLPEGVDGIARFHELVGGHVDDPAGVVIGIETDRGLFVTALVAAGYQVYAVNPMSTSRYRDRHSTSGAKSDAGDAQVLSDMVRTDRHNHRLVAGDSQGVEAIKILARAHQSMVWSRGRQTNLLRSTLREFYPAALVAFEDLASPDALEVLRIAPTPTLGAVLSRSKIAAALRRGGRQRRMDERSAEIQAALRSPQLQAPAAVATAMGASVSASVAVIAEMAAQTAHLAEELTSGFEQHPDAEVVRSLPGLGTILGARVLGEFGDEPNRYATPKCRKNYAGTSPITRASGTKRAVLARHVRNKRLADAIHLWAFASLSASPGARAYYDARRAAGDGHHQALRTLGNRLVGILHGCLASHAAYDENIAWAHRPENNLASAA

SEQ ID NO: 168269 - protein, 434 aa, unidentified
MANQTHSTTPSTPLVFGAFVGLDWGDEKHALSLCAGTPTTIERATLEQTPEALAQWANALRGRFPNSKIAVCLEQARGPLISSLLAYEHIVLYPVNPKTLARFREALYPSRRKDDPIDGDLLLDLLVKHRDHLRPWQPDTVQTRQLALLNEQRRHFVDHRTGLTNELLSHLKAIFPQALDLAGADLASALASDFLKKWSTLQSVQKVKPAVLRKFYYGHNSRSEELMSQRLALVKNAVALTADPALLAAHSLAIQTLAAQLQALRPCIEQHEEQIGALFAAHPDAAIFESLPGAGPALAPRLLTSLGTDRSRFAQALAVSCYTGIAPVTEKSGKIQNWVHLRWSCPKFLRQTWHEFANSSRKFCPWAKACYDQCIERMDHHEAIRKLAYKWQRIVWRMWQDRQPYDEGRYLRSLQKHGLKTYAALAVEPVKPGE

SEQ ID NO: 168270 - protein, 356 aa, unidentified
MSRDTKYIGMDVHKEAVVIAVRNSTGQLVMESIVETKASSLLQFIHGVQGELHVTWEEGTWAAWLYDLLKPHVHEVLVCNPRRNALLKEGSKNDKVDARKLSDWLRTGMLRPVYHGEHGLRTLRELARSYQTISQDLNRVMNRVKALYRGWGIACSGTQVYAPRYRQEWFDKIEHAGVRRRAELLYQQLDGLQTLRRTLRPELLAESRKHKASKLLRQIPCIGPIRAARLLALMQTPHRFRSKRQLWTYSGLGIETRDSAQYRFVRGQLQRAKKPQQIRGLNRNHNHEMKEIFKGAATRASCGVGPLRDFYEALLAKGMKPEMARLTLARKIAAIALTLWKKEERFDAQQLKTQAA

SEQ ID NO: 168271 - protein, 475 aa, unidentified
MNIKGSKKKNQVLSVNIFEQQEIIAKADAIKAELKASTWHELETKGKFDKNDKLSFVSDDMLILGCDIGSETHYVRTIDTRGRELSKSAFGFSNTAEGFERMLDWSTKLAAANDKKQIVLGLEPTGHYWFCLTTWLVAKGISVVQVNPYAVKQTKELEDNSQLKDDKKDPKLIANLVKDGNFGMPYLPEKLYADIRRLSMFRDQLNEDRIRNLNRLHREMKIYFPEYKDAFGKIDGAFSLELLKEAPFPDELAALGTEGMKQIWHEAKLRGRGYANASSILEYVRKSVGIKDGADAGRQAVKWFVSRIIELDEQLSDIENQLNQRCNEIPYAKNILAISGIGENILSGILAENGDISRFDNVKKIQKLSGLGLVACSSGKHTGETKISHRGRKRLRYWLFQAAKSAVAHSEEFKELHVYYTTRKQNPLKKMQSLIVIACKILRVIFTILTKGTTYDPKKLLGDIVRPDQSIPQAA

SEQ ID NO: 168272 - protein, 332 aa, unidentified
MIYIGIDVSKAKLDCCLLRDTASTKRKSKSVANSKTGSANLLEWIGKQGILPADLHAVMEGTGVYHEQAAFALYDAGVTVSIVNPAQIKDFGRGLAVRTKTDGVDSFVLARFGALVKPAAWVPPPREARVLKALLARREAVAQDLQRESNRREKAEATDTPGLIRKSIDDSIDFLQKQLVTLQKDIDDHIDRFPDLRRDLDLLTSIPAVGQQVGSNLLAVMHCQQFNSAEQLAAYLGLVPIERQSGSSILGKARLSKAGPPRIRAVLYMAAIVATRYNPHVKALYERLLVRGKAKMAALGAAMRKLVHLCFGVLKTRTPYQSDYDGKISHAA

SEQ ID NO: 168273 - protein, 425 aa, unidentified
MFVESSDDEQIIERVAALDIGKAEIVCCVRIPAADGERRVQEVSTHSTMVGSLCELANRLVGLGIERVVMEATSDYWRPPFYLFEAHGLEPWLVNAKDVKHLPGRPKTDRLDAVWLCKVAERQMLRPSFVPPGDIRRLRDLTRYRIDLVGVRTAEKNRVDKLLEDACLKLSVVASDIFGVSGRAMLAALIAGERDPKVLANLARTRMRLKIPLLEEAFAGLRLGTFDDHHRFLLTRMLGRIDAVNADITAVDTQIGQHLTPFADAAGRLDEIPGIGPTAAAIFIAEIGLDMTRFPTPAHLASWAKFAPGINSSAGKTKGNGSTGHGNRYLARILGEAVVGAGRTDTFLGARYRRLVRRRGKKKAIVAVGRSILVIIWHLLADPNIRFHDLGADHYDRHVNTHAKRRNHIRQLEALGYRVTLEPAA

SEQ ID NO: 168274 - protein, 376 aa, unidentified
MGHDSTVYVGLDVHKESITAAYAVGIGEVELLGKIGTLKTDIDRLCQRMQSKATHVRIVYEAGPCGYGLYRQLVQKGFDCMVCAPSLIPRKPGERVKTDRRDALKLVRSLRAGDLSSVYVPGVEDEAFRDLARAWATAKADLKHARQRVKSFLLSHGVRYTGSANWGPAHRRWISTFAFPNHWQQLAFDECRRAIEDRLAQCDRLEAALREAVVNWRFYPAVLGLQAMRGIQFTTAVGMLAELGDLSRFEHPRQLMAWLGVTPSEHSSGDRRRQGSITKNGNSYARKLLVEAAWSYRYPARVSPDIQRRHEGIPKPIIDRAWDAQLRLCRRYRKLAARGKNVNTSVVAVARELSGFIWDISRLAMSLAIPKDARPV

SEQ ID NO: 168275 - protein, 368 aa, unidentified
MYLHSPVHFDRSPGHSREGTSVNQVIIGVDTHKANHIAVAIDTRGTRLGGITIPATPKGYAALEEWASGYGAIKAFGIEGTGSYGAGLSRDLLAKGHTVVDVMRPNRQLRYLHGKTDDLDAEGAARSVLNGQATAIAKAQTGSSEMIRHLKVARDSAVKAKSQAMITLKTLIINAPAELREGLDQIRGPISLVRHIAALRPGELTSPIASAKAAMRALARRWLLLHEEIERHDRELERMVQDKAPKLMQSHGISTMTVAEMLILVGDNPERIKSESALAKMCGVCPIPASSGKTNRMRLNRGGNRQANAAIYRVAIVRMRDDQQTKAYAARRTAEGKTKREIVRCIKRYIVREIYRALCASPARSADA

SEQ ID NO: 168276 - protein, 431 aa, unidentified
MKDSQTKKLMKIDPGTLVVGVDIAKKVHWARFVDYRGIEFGKAHKFNNTINGFKSIVEKAENIKRAAKLSKVIIGMEPTGNYWKPFANFLIANGIEVVTVGTYQTKMAKALDDNSPTKNDPKDALTIAKLLKDGRYSEVYMPNDIYAELRILGSLREQLNDKLYAVKNRIHNIIDEYFPEFTSVFKSPFKKAALQLLKSCPFPAQIIELGTEGVLAEIKKAVKKTVGRKKAQEVVEAAKKSIGVEYGMTAAFLKLSMHIEEFELLIRQLDETETAMGKALSETGFAETVLGIKGIGIVSAANIFGEVGDFRRFENERQIHRLAGYNLTENSSGNSKSKTSISKRGRKRLRSILFQSAMVMVSTNGEMKAFYEYLKNRKTNPLKRKQALVVVAKKIITIIFKLITKQVKYDSKLMFNSYRATQISEALKMAA

SEQ ID NO: 168277 - protein, 317 aa, unidentified
MTNLSYLGIDISKSKFHAALQLHDKPQQKPKVKVFKNNASGFEELQEWLERQGALSVHAYLHEQGHCVSVVNPSRIKGFAISELSRTKTDKADAQLILRFCMALRPEAWQPPAPEIKQLQALMRRLEALQQMVVQERNRLETATAELQASIQAHIEYLERDIENLKQQINDHFDQHPGLKQQRDLLDSIPGIGEHTAALLLSEIVDWSLFDSPRQLAAYAGLTPRQRSSGTSVQGKPALSKVGNARLRKALFLPAMAARRFNPLISALCERLLAKGKVKKQIIGAAMRKLLHLAYGVLKSGCPFNPSFAVPAELRLR

SEQ ID NO: 168278 - protein, 343 aa, unidentified
MKLIRVGVDLAKNVFQVHGIDRSEKPVWRRKLSRANWLETLLETIEPGCLIGMEACGGAHHWARRLQGHGFKVRLIAPQFVKPYVKSNKNDANDAEAICEAMSRPNMRFVSVKTVEQQDIQAVHRVRFELSNQRKAKANQIRGLVGEYGLVAPKELVQLRVAIPGWLEDAENGLTDRFRRLLNGLWHDMLALDQRMTELDREIAQIAATDPVAKRLQQLCGVGPMIATAMVATVGDVKHFANGRQMAASLGLTPRQNSSGGKERLLGISKRGDAYLRTLLIHGARSALRTAKDKDDRLSRWVTRIAQNRHPNVAAVALANKTARIAWAMMKNATDYQPDRVAK

SEQ ID NO: 168279 - protein, 347 aa, unidentified
MAIVDSPRLVVGGVDTHLDEHVAAVVDGVGGVLGVGRFQVTPAGYRRMLSWMRSFGRLERVGVEGTGSYGVGLSRFLLSSGLVVLEVTRPNRQERHRNGKDDDLDAIEAARAVIAGRALASAKTSGGNTEALRVLLGAQRSAKQARISTMVQLRHLMFTAPDELRERYAKLSRKELTRQCARLRPRLDGDSVRFATKTSALTLARRVQALEHEIDELDVLITGLVKQISPGLLNVYGVGVDVAAAILVAVGDNPERIRNEAAFAKLCGVAPLPANSGKRTNRHRLNPGGNRHANNALWHIVLTRVSQREPRTAAYVKRRREEGLTNREIFRCLKRYVAREVFIALPR

SEQ ID NO: 168280 - protein, 419 aa, unidentified
MIFKSEESESRIATKQLSKACSLIEPDLTLFYLFEFEQNVRNTALRYIQNIQSGDKTEGDFTFHFLKLIGMKKIVKQVAGIDVAQKELVVCLGRMYDDWSPQLYAHKTFTNTIKGFEALLLWLKKTTEEAIGVRFVMEATGIYHESLAYFLDEKGYEVSIILPNRISNYFRTLDIKTITDKTASEAIALFGLERKLDCWQKPKAIFKTLRQLTRERDQIVEERTMVKNQLHAEQTEAEPNSKTVKRIKERIKILNRQEKEIKSEVAALIKQDEQLAQHVMIICSLTGVATLTSAIVLAETNGFELIRNKRQLASYAGFDIKEKQSGTSVKGKPRISKQGNKYLRKAMHMPALCAIRYDERFKAIFVRLVSRHGIKMKAAVAVQRKMLEMIYTLYKTGKKYDENYFKKQGNIKEKHENAA

SEQ ID NO: 168281 - protein, 355 aa, unidentified
MQSNKISFKGQNIYVGIDVHLKTWHVTTLTESGCKYSFAQHADAKELFDRLNKKFPEAHYKSAYETGFCGFSVHYALTELGFENIVVNPADIPTTGKEKAMKTDAVDSEKIAWSLKRGELTGIYIKDKRYMDDTNLMRLRQRFIRDLSRQKNRTKHLLYTQGVVYPERFSKKGTHWSRNFIKWLREDVELLSEEKRTLMLLCNQVEHIRKDILAITREIRRLSTTDRYKENFSLLSSVPGFGLITSMSMLTELDNNPIRFPNERKFVAILGLIPTCHDSGEKKSNGAKTFRGNKQIGPLIVEASWVAIRRDYQLGCYYTNCCQSMNPQKAIIKVARKLACKAYAVMKTKKTYVLS

SEQ ID NO: 168282 - protein, 362 aa, unidentified
MPRLRVPTEPRRITVGVDTHKDIHVAVALDHLGVRLAELHVRTTLAGYTRLERWATNLGIVEAFGIEGTGSYGAGLARFLRARHHRLLEVNRPDRATRRRLGKSDPIDAEMAARLVLAGVATGIPKAGDGPIEMLRMLKLAKDSAVKTRTQSLNQIKALLVTAPAELRETLTGLPRGQLVDRCAAFRPGPLTSAVAVAKYALRLLARRYLELRLEIESLELEIDRLVSVAAPALLNVFGLKGDGAATLLVSAGDNPDRLHSEAAFAALCGANPIPASSGKTQRHRLNRGGDRQANATLHRIVVVRLRWHAPTQTYMSRRLSEGKTKPEIMRCLKRYIAREVFAILRGPVAIPSTTGHLVQAA

SEQ ID NO: 168283 - protein, 337 aa, unidentified
MEYFAGLDVSMAETQVCVMGRNGAVIHKAKVPSTPADIAAELAQLPTCRRIVFETGRMAPMLYHGLRQLGLPVICVESRQAYQALKLLATHKTDHNDARGLAHLARTGFFKPVHVKSLPAHAVRSLIIARKKLVGQRVTLENQIRGLAVVFGVRLPRALSSTFIRQALQASEGIPGLSAAMQGLVAARTAVLAAIVAIDGDIRRMVRASDTCRRLMSIPGVGQLTALAFTAAVDDPGRFRRSRDIGAYLGLVPRRYQSGEVDYSGGISKCGDRRLRTLLYEAANVMLTRYKGPLKLKDWAFAIAKRSTMRKARIALARRLAIIMHAMLRHGTEFKPA

SEQ ID NO: 168284 - protein, 321 aa, unidentified
MQVHEVFVGIDVAKATLVCSIHGARGQRELKNDDASIDAWLATLPMGAAIAVESTGRYHQLVVRLAHSSGRCVYVLNARDVFFYAKGLGARAKTDRKDAQLIASYLAQHHAELKPWEPPTPLQGRVQALLQCRAGVATKRSSLRQVLKDVTGLDAAVKALEERFDVLLDEIDGQITIELDRDKELSAKRELLRTITGVGPQASAMFTGLLSRVPFANVDALTAFTGLDPRPNDSGTKTGKRRITKRGNPELRRQLYLCAFAASHSKAFGPLYRSIKAKGFKPTEALIILARKILRVMWAVWKSGKPFDPSFFSAVEPCVKT

SEQ ID NO: 168285 - protein, 409 aa, unidentified
MQEATQHDAVDVFVGVGVDVDVDVDVGKGRHHAVALDRNGKRLYNKALPNDEVKLRALIAELKTHRRLLFVVDQPSTIGALPVAVARAEGVLVAYLPGLAMRRIADLHAGEAKTDARDAAIIAEAARSMPHTLRSLRLADEQLAELTMLCGFDDDLAAQVTQTSNRIRGLLTQIHPALERVLGPRLDHPAVLDLLERYPSPSALAAANEKTLANRLTKLAPRLGKNLAAEIVQALNEQAVIVPGTQAATIVMPRLAQQLAALRKQRDEIAAEVERLVLAHPFWPVLTSMPGVGVRTAARRLTEAAPKAFATAAHLAAYAGLAPVTRRSGSSIRGEHPSRRGNKVLKRALFLSAFAALRDPVSRAYYSRKIQQGKRHNQALIALARRRCDVLFAMLRDGTIYPPKSAPDA

SEQ ID NO: 168286 - protein, 361 aa, unidentified
MLYSGVDLHRRLIVICTVNESGSIIARKSMKTQPDLVTAYFRQWPDQHRAVVECTTGWYWFADLLRSLGVDVVLAHAKYLKAISYAKVKTDAVDALTLAQLLRMGYIPEAHQLPPEYRAMRDLLRQRMVMEHKRTNIIQRVTSILAQFNIIDLPISPYQPGFADFLNQCSIPDEYRMTLMMYHLECVQTSEHRKQLEKYFKAQLRPTQAVQLLMSLPGIGDITGSIIAMETGDIHRFADDKHYCSYCRLVPGAKDSGGKHSHRSGSKDGNQYLKYAFTESAIKAMRFYPEIKHFASRLERRSSKAIARTVVAKELAKITYYVLSRQEEFKTFKGIEINKLRNWPRSRKPVRLTGGITPPSV

SEQ ID NO: 168287 - protein, 339 aa, unidentified
MVEVYAGLDVSDKMTHVCVVDGSGVVVWAGACATDPEVIARTLKTRAPGLVRVILETGPLSAFLYHGLAERGLQVICVCARHAKGVLSARINKSDPHDAEGLAQMARTGWFKAVRIKDEATHMDRARLKIREQLIESQHAMAGQLRGLLKLFGLRLGKVTTANKRRERLEALFAQKPELEPIMAPLIESLEALEVQITCSSRQLAAQAVADPVAARLMSVPGVGPITALVFKTSIEDPDRFARGEDAGAFAGLAPRRNQSGERDYKGRISKAGDPMLRSALYEAANSLLVRVKRPCALQAWGKRLAETKGGKRARVAVARKLAILLHRLWQSETEFRWT

SEQ ID NO: 168288 - protein, 316 aa, unidentified
MKVGIDVSKLTFDASWIDGENHQQHCFDYTDLGIEAFIELMASDAHIVMEATGVYHSRLALKCYEAGLSVSVVNPVAIKRFGQMLLKRDKSDKADALLIRLYAESQDPEQWKPSSESINSLRQALGWIDDLTRERTMVSNREEAIRHNAAPCEFVVYEIRDLRKYLKERIQRAEQYLKATVKKHFPELYERLQTIPSVGEKTATEMIVITEGFTKFASDKALAAYVGVSPTTYSSGTSVRGRGGISRASKGRTRQLLYLCSWTARRSNPACTALYNRMIAAGKPPKVISIALAHKLLRQIFAVGMSSQNYRAEYAY

SEQ ID NO: 168289 - protein, 341 aa, unidentified
MEEYIGLDVSMKETAVSIRRAGERIWRGKCASDPSVVAELIRKRAPSVKRVVFETGPLSVWFYHSLRTEGLPAICIDARHAKAALDMATNKTDANDADGLAQLAEVGFFREVRVKGFDSMLTRTLVAARTRLVRITTELSNQIRGVMKTFGLLVPAGKGSTFEKNVRSLLADRDRLASIVLPMLEAWRGIRVRAAELGRQLVRDARQSRACRILMTIPGIGAITATSFTTAIEEPDNFRKSRSVGAWIGLTTRRYQSGEVDYDGHISRRGDRPLRGLLYEAAAVILTRSSTHSTLRTWGLQLRERIGFKRAAVAVARKLAVIMHTMLKTGQLFNPNAGAAA

SEQ ID NO: 168290 - protein, 370 aa, unidentified
MLNTTTFVGLDVHARSIKAVALDAMTGEVRSATFAYDAAAVAEWVGSLDPAAKCVYESGVTGFDLQKKLTALGVDCVVGAVSKMIKPSADRKRKNDRNDAEFLARMLSVGNVVEVCVPDDECEAARDLVRALDDAREDLKRCKQRLSKFLMRHGYAFSETTPTGRRKGNWTAAHWAWIRSIEFPEKADDEVLAYYIDAVRQATENKKRLEKLVEAEASKPRWKKRVDSLRCLKGVDAMTAADIVFEAGEFSRFKNARSFAAWLGLTPSEHSSGESARQGGITKAGNKHLRRVLVEAAWHYISASPHPKDLAKGQAPDPAARRHAAKGIRRLVKRREEMLGRGVHKNKANVATARELACWCWAVGRMIENG

SEQ ID NO: 168291 - protein, 426 aa, unidentified
MKSNTQNAKIAAITEKTLIIGIDVGSETHFARAFSWRGYEYSRKPLEFSNTEEGFATLLSWIDELKKKHSMEKVIPGMEPTGHYWFNLGRFLQDHGMRPVHVNPHHVKRSKELDDNNPSKNDRKDPKVIAGLVNEGRYLYPYIPDGIYAEIRVLSGLRGAAQSELTRIKNRFARWISIYFPNYKDVYGNAGAVSGLMILKEAPLPEDIVKLGVEGVNRIWRDAKLRGAGMKRAKTLIEAAEHSIGSREAHEAARIELRILLSDYERQAAREAELMGLIEEKIAEVPYIDNLLDIKGVGIKTVIGFVAEVGDIRRFDDPKQLQKLAGYAIVKNDSGKHKGESHISYRGRKRLRYVLYEAAVSVVSHSAEFKAIHQYYTTRSRNPLKKMQSMIAVACKLVRIFYLLLRTGATYDASKMMGDIRRPEAA

SEQ ID NO: 168292 - protein, 424 aa, unidentified
MGSDTVWICVGEHMSGEPVRVFGTTTAQLRESAEWMRSLGVDTVALEATGVYWVAAYEIYEEYGLRPILINSQSIRAFNGMKKSDFIDCQWIQLLHTFGILQPAARAEAKMIELRGYMRQRKTLTEQCSEQIQRIQKALILMNVRLDQAVTDVMGVTGMSILREIIKGERDAAKLALLRDPGCAKSESQIAEALTGHWREEQLFVLKQTVQLWDFLQGLMLECDEKIAAVLGTLSIKTVAEGKPSKAKRRKNQVSFDGRTLLHERLGVDLTLIKGLDVLTILTVISESGMDLSRFPTDKHYVSWLGLAPGTKKSGHRVLSSRSRRTTNRAATALRLAAQSLLKSQSELGAFGRSLKARIGAEKAITAIAAKLARRIYLSLQTGRVFEDRGIEYHDQQHRERKLASMRKHARRLGMRLVPLEECA

SEQ ID NO: 168293 - protein, 468 aa, unidentified
MARKSKKHGKSKNRKRQPRTLKTVQPNAAGIDLGSREHWVAGPPLPDGSPNVQHFGTTTPELLRLAGWLDQQEIVTVAMESTGVYWIPLFEILDNRGFDVNLVNARQISHVPGRKTDMIDCQWLQLLHACGLLRGSFRPDDDICRLRALIRERNKVVDNRSDWVRRMQKSLDQMNICVHHAVSDITGVTGMAIIRAIVAGEREPQTLAGLRDPRCRKSEEQIAEELTGNWRPEHLFNLEQALKVYNQLCAVIADYDTEILNYIDSLQPPEANDSSVPPPTTKTKARSIVKRGQEPLRQALYRMSGIDLTTIDGIGVDTAAVVISELGPDLSAFTDEGRFISYLRLAPNISISAGKKVPGKFKAVTSTRVCNALRMAATTLRNSKTALGAYYRRISYRKGASVAVFATARKLAQHIYRLVRYGQAYVDAGAKVYEERFAQRRLKSYTNALKEMGYKVESLTAPEAVGAI

SEQ ID NO: 168294 - protein, 393 aa, unidentified
MFYVGIDVAKHKHEAVVTDDSGSVIIRSFHFANSCDGYKILMEKLKKITVLKSQFVFGMESTGHYWLPLYTRLMRDDYQVQVFNPIQSDALRGLYIRQNKCDSRDAFIIAEILRFGKYSATVVPQDKLMALRELCRNRAFLVDEQSDLKRKADALLDQVFPEYENLFSNNFVHASTELLLKYPTPEKILKASVKTISNIISKASNGYYGLAKAQEIKTAAKDTFGITDTCGAYSSLIVLYISQIKAINEQINELNKKIEEIFSELNSKITTISGIGTTLGATIISEIGDINRFTSADKLAAYAGIDPTVKQSGNFNGTKNHMSKRGSPYLRRAIWRACVVAVQNDPMFRAYYEKKAAEGKRYMVIIGHCTKKMMGIIYAVLRDDKEYVPWSLA

SEQ ID NO: 168295 - protein, 428 aa, unidentified
MNYNTQNAKIASITEETLIVGIDVGSEMHYARAFDWRNYEYSKKPLEFSNTEAGFLTLKAWMEDIAERHGKTAVIPGMEPTGHYWFALGKFLQDSGMKPVHVNPHHVKKSKELDDNNPNKNDRKDPKTIAALVNEGRFSYPYIPTGIYAEIRSLSNLRFQTQEELTRIKNRIARWFSIYFPEYKDVYRDLKAVSGRMVLKVAPLPEDIIKLGAEGVNQIWRDAKLRGAGMKRARTLVSVAEHSIGSKEAPEAARMELKNLLSDMDVYASRLEELLQSIEEKLKEIPYIDKLMAIKGVGLVTVSGFIAEVGDIGRFDNPKQLQKLAGYAIVANDSGKHIGESRISYRGRKRLRYVLYEAAISLIGKNAEFREIHEYYRSRKENPLKKMQSVVAVACKVIRVFYAILTKGVDYDAEKLMGDIRRPQMQAA

SEQ ID NO: 168296 - protein, 339 aa, unidentified
MKLYTGFDLHSSSSYLGIIDEDGKRIWKRKLRNDPILISETLRRFKKDIIGIVVESTYNWYWAVDLLNEEGYHVHLANPSRIQQYSGLKHADDEHDAFWLAEMLRLKILPEGYIYPKEQRPLRDLLRKRGHLVRLRTSLITSLQNILARNVGSKMNTNSMKALTMDHVTPLLAENDDLCLAGKVSKDAIDSLSRQIIAIEKVVVKKLPLKKSFDLLMSMPGVGKILAMTIVMETGSIDRFPKVSKYVSYCRKVPAARFSNEKKKGSGNRKNGNKYLSWAYAEAAELARRFDPEARAYYDRKRRLTNAPIAYNALANKLSRAAYYIMRDEVLFMPERMFT

SEQ ID NO: 168297 - protein, 356 aa, unidentified
MNYAGIDYHKRYSVVCIIDATGSILHEERIEHGFPERFAALLGEYAPLEVAFEATMNWSWLYELLEVTEGIKRIVMANPLHVRLISAAQVKTDKVDSRKLAHLLRTGLLPASHIPDRATRLRKEVLRQRTFWVRTRTKVRNRVHRLLGRQHGLAMPQVTDLFGRKGRAALDKVVLTSPDDMLLRQQLSVLDVLGTQIRELEARITEDGAPDEAVKLLSTVPGLGPILGNVVATEIDGIERFGDSASLCAYAGLIPSTSSSGDKTYHGRLVPGCNKWLRWALVEAAWVAVGCSAYFGGFYRHHRARGKKANTVIMIVARRMCQVIFRILKERRPYEARPCTNDVPGRSQQGRTTQAA

SEQ ID NO: 168298 - protein, 403 aa, unidentified
MTVRPLVWVGIDVGKTSHHACAVDETGKVLWNQKVSNEQRAIEQLIARAHKGADEARWAIDLTSPMALMLITVLLGAEQSVVYVPGHVVNTMTGAFRGEGKTDAKDARVIAETARMRSDLSEVAMPDELVVELAQLTGYRTDVMADWVRGVNRLRSLLGSIFPGLEAAFDYSNRTPLILVAHLCTPAEIRAAGIKGVTAYLGDNGGWPTAIAKTAATAVAAAKQQPLALPGEAGTAALVKRLAGKLLDLDHEIKDIDKTITERFRDHPYAHIIESLPGFGPGLGAEFVVVTGGDLASFATAGRLASYAGLVPVPRDSGRISGNLHRPKRYNRRLRRVFYMAALSSIRGDGPSRQFYDRKRGERLIHSQALLALARRLVDVLWALLRDGREFTPHKPTPATAAA

SEQ ID NO: 168299 - protein, 347 aa, unidentified
MKYVSTIGLDLAKHVFQVHGADVAGSPLFNRKLRRGEVLRFFEKLPSCLVGMEACGGAHYWAREIANLGHDVRLIPPAYVKPFVKRGKTDAADAEAISEAVIRKTMRFVPIKTAEQQADAMVLKTRALLVQQRTQSVNALRAHLAELGIIAAGGLPSVAALMTIVREGEDTRLPAAARFALMAVADQIDTLADQIFKLERAIVTEAKRDEDMRRLTTIPGVGAITAATIKALVPDPGGFKSARHFAAWVGLTPRPHSSGGKERLGGISKMGNPELRVLLVLGATAVLRIARNDDRARPWLKALLVRRPFKVAAVALANKMARIIWALLNKGGIYHRPEPLSIAAVAR

SEQ ID NO: 168300 - protein, 347 aa, unidentified
MDQIIIGVDTHKSKHIAVAISRQGARLGTMTLPTTRQGYRDLEVWASELGTSKAFGIEGTGAYGAGLSRDLLAKGYTVLDVMRPNRQLRYLHGKSDSLDAESAARSVLNGQATALAKTQAGASEMIRHLKIARDSAVKARSQAIITLKTLIINAPAELREMLELIKGPIKLIRHIAALRPGKIVSPTASAKAAMRAIARRWLLLHEEIHAHDQELEPMVREKAPGLMNTYGVGVMTAAEMLIVVGDNPERIKSEAALAKLCGVCPIPASSGKTNRMRLNRGGNRQANAALYIVAITRMRDHEVTQNYVLKRTAQGKSKREITRCLKRYIIREIYRELCAPNDAKCAP

SEQ ID NO: 168301 - protein, 315 aa, unidentified
MTNSVYKYYVGIDVSKAKLDIAISKQESNLVFGNKEEDFKELIKALPAKKRTLIILEATGGYEKLVANYLRKKKFAVSVVNAKRVRDFAKASGKLAKTDKIDARTIMLFGQAFNPFPQALVCESQEERGQLIIRREQLVRMIALEKQHLEHVVEGNSKFINQHIGYMEKQLALIEKQLEESFDKDARLKEKRDRLDEIKGVGKVTAMNILIYLPELGTLSSKEASALAGVAPYNKDSGQSQGKKQIAGGRAKVRAALYMAILSARKFNPAIKNFYDRLISRGKLKKVAMVACMRKLITVMNAMLRDNTSWRFHGV

SEQ ID NO: 168302 - protein, 328 aa, unidentified
MSDDVAALFVGIDVSKARLDCAALVGETVTQSKSFNNDSAGHERLLRWLQDGECQPGLIVVEATGGYESAVVAMLATAKLPIAVVNPRQARDFAKATGVLAKTDAVDARVLAQFGRAIRPQVRGPKSEELSLLGAVLTRRRQLVEMITAETHRRGVATSPVIARQIDRHLRWLERQVQAADDDLNGMIGKSSLMQRKLDVLTSVPGVGRVTAVALLAQLPELGGLNERQLSALVGVCPFSRDSGTMRGRRVIWGGRARVRAALYMAALVASRHNPILRTFYRRLLNNGKAKKVALVACMHKLLLILNAMIKRDQMWQPAYVHPGAQVA

SEQ ID NO: 168303 - protein, 414 aa, unidentified
MFAVGVDVSNGRSMVAVLGARRSVVVQPHEVPHTADGFAELAARLHALDGEVRIVMEHTGRYYESFAMSMYRAGFFVSAVNPLAIKGYQEGISVRKVKTDKADALKIAQFAIDKWEILPHYTPMDTIRYDLKTLHRQFQLSSKTKTALNNNLIALLEQSYPGANRYFDSPVRPDGSQKWVDFVDTFWHVDCVARVSRKAFVERYQKWCKRHGYNFSEAKAVEIHEDARQRFPLVPKSDTCKLMVREAVAQLNAVSRTVETYRAEMDRLASQLPEYETVMAMTGVGKSMGPQLIAEIGDLRRFAHQKSLVGFAGTDPIKDDSGDKVSDSKPSSKRGSPYLRRTLFVIMTILLQLQPPDDPVYQFLDKKRSEGKPYYVYMTAGMTKFLRIYYGKVRDCLKEKGLWEQPNVDEVNPV

SEQ ID NO: 168304 - protein, 379 aa, unidentified
MYRIIKIGMDVHSTSYTLCAVEPRFATEDRVLANIDIGPDYKLIVDFIKKIKLKMDPGNKDEIDVECGYEAGCLGYSLYYQLKGCKVRCTILAPTTMLTEKGSRIKTDHRDARNIAFCLSNGGFHPVHIPTPEENAVKEYIRMRDDHRDALKKIKQQIGALCLRFGQCYNGSYWTGKHVAWLRALKLSAMIRETLDEYLSTYDDLTARINRYDERIQEIAGQKEYNEKVRKLECFLGIKTHTALSLIVETGDFNRFAKGNIYAAYLGLAPGEHSSGESTGRLGITKAGNSHLRRLLIEAAEGICKGHIGQKSKSLVARQKGNPGDVISYADKANIRLRSKYYRLINHGKKRNIAVTAVARELACFVWGMMTDHIHGKEA

SEQ ID NO: 168305 - protein, 346 aa, unidentified
MVLIGCDYHPSWQQVCWFDQATGETGDEKLVHASGDAEKFYRRFSSPVRVGLEATGNCQWFLDLLNRLGNEVWVGDAAKIRASDSRQQKHDKRDARLLLQLLREDRFPRIWTPTREQKDLRQLLMHRYKLVGLRARVKNELQHLAMNQGITKKRKLWSKAGEQVLRELPLAPWASQRRKDLFRIREMLNEQLDLLDRAVVEAAEKNEKARLLMTQPGVGPITAMAFVLTMGDVSRFQRGKQVASYLGLIPREYSSGGKQRFGSISKQGNRFLRMLLVEAAQAAVRYDPGFRSEYLHRCHTRAKGVAKVAAARKLAIRLYWMLRTNTRYPEVVHVESSSRVALVSAS

SEQ ID NO: 168306 - protein, 398 aa, unidentified
MLYLGIDQHKKHLTINIRNEHGEVIQKGQVSTAHADIDEFFDTFTKKACKHRGYMAIVEVCGFNDWLLEKLKKNGCSEIVVIQPGNSALNKTDRRDADALGALLWNNRKLLQGGKRPNGIQRIFPAEPTDAEVRQFANFRQHLIKQRTRIINKIKGIINKHNMAQDAPTEDCSTKKFKQWITTVPLPVVDRFEIDRLIQSWELLDKQILEVESELVKHSESSETKMAEVYRLKAIPGISAMGAITLLSRIGDIKRFKNPDSLANYFGLTPGCHNTGGKHRVGGITKRGNAVARQVLNFAVLHVVRKDPLMKAWHKKIKTRRGARTARVAVMRRLATIIWHMLRWDKPYQFRYDPLLPMPKQGDLRSPKEVFQGIDNNHHSRRREKPPLKCRGKTKATR

SEQ ID NO: 168307 - protein, 385 aa, unidentified
MRGQTVLPRDYDVFAGLDVDKRTLAVTFLNHHGLLRSVRMPYSVDHLLNHVRKHFGDQKVAFAYEAGPTGYGLYDGLTAQAYPCVVAAPAMIPRAPGQRVKTNRLDSVSLAENLRGGQLRSIHVPAPLYRELRHLTQLRDTFVRQQAGMKLRVKSLLLFEGLPFPTAPPGSQWSARVLAELRTLPCTGAVRFKLDQLLDSIAFTSQQVHQTTRAIRRLCQTEVELARCIGYIRTVPGLGWSVASQLLARLGDWRHIHHGRQVAGFLGLVPTEHSTGETIARGGITRTGDGRLRSKLIQAAWVAVRQDGELRAFYHTVYRSHPPDRAARIAIVAVARKLGLRVAAVLKEQRPYVVRDDLRSAPGAQAETMPQGTPRRQAEPGAASS

SEQ ID NO: 168308 - protein, 374 aa, unidentified
MDPPLKDGVIMCQHRISIFKKRRRSMKDIKILGVDIAKDVFQLCGIDEWGKVIYTRRVKRAQYVSTVASLKVGCVVMEACGGANHWYRTFMGMGIPTQLISPQHVKPYVKSNKNDRNDAQAIAEAASRASMRFVRGKTVEQQDVQALLKIRDRLVKSRTALINEIRGLLQEYGLTMARGAKRFYEELPLILASEAVGLTPRMKRVLNCLYTELLNRDEAIGDYEEELKAVAKANEDCQRVQSIPGVGYLTALSVYASVGDIHQFHRSRQLSAFIGLVPRQHSSGNKEVLLGISKRGNVMLRTLLIHGARALLRHVKNKTDKKSLWLKALIERRGMNRACVALANKNAPIIWGAFNTPRNVSLWRLNTAVGKKKN

SEQ ID NO: 168309 - protein, 381 aa, unidentified
MLLNSNASRQKSQMENHISIGIDQGATLWYATILNHNTDKKSRYSFKGEDKEAECYVKIKKMQESHQGTISVCYEAGRSGFTPARVFDKLGCMVRVLPYNKIQIINTGKQVKTDAVDSLFLAEIDPFDNSIPNVWVPSVRQEELRGIPREQQRIQKDIQMNNNRIIAVLQRWLVKNENKHLSAIDWEEKMLGWQNDKNFSKIIPILEFKKIKLIVEEIKLLEKHKEEWEQIIKETEEEERVQAKIKGEEFFVDVLREYRGIGDVIARTFCFEIADFNRFGNGKKFSSYLGLTPTPFASGKMNKEQGISKQGNPEIRRLAIQLAWLWMHWQPDSFLTLKYKEQLNKKGRQRKTAIVAMGRQLMVALYRRVVKGIDIEGAIKN

SEQ ID NO: 168310 - protein, 405 aa, unidentified
MGGDAMSGLQGSFDGFVGIDVSKDKFDACGITGGEVKLFQFSATMDRKGFEKLKGHLAAASISSILIGMESTASYHVNLFSYLVSEGYKVLLINPLLISKYVKMQLRKTKTDKKDAVVIAEFLLTNGDTLIQRATPSLISDLRDLSRQRESLVDEMTALKIEIKRLLNITFPELEHMVGIFTKSILKLLQQYPSAFALRDADLGQLSRMLIADSYGRKREAFAAELIKAAHSSISSKSPAKEMILKQKIALLLHLEDALQEITSMLIETSRKLMEEDINIMTSIRGIGDKTAANFLVEMGGDITQFERSGKIIAMAGLDPAVYQSGKHEGRGRITKRGNRHLRRVIWMMTTRVIHYSDIFKAYYLKRRKEGLPYKMAVLATAHKLIRVVYAMLKQRTTFCPVVNS

SEQ ID NO: 168311 - protein, 348 aa, unidentified
MDHYAGIDVSLEYASVCVVEAGGKIVREGKVLSEPAALIAWFGSLGFGLERIGLEAGPQSQWLYAGLKQAGLAIELLETRHVRKALETMPVKTDRNDARGIAQLMRLGWFKPVHCKSLPAQEVRALLTARKLVQSKLFDVEMSLRGILRGFGLKVGPTTPKRFAGRIQELVTGHPNLQAIADALLAVRAVLLREFNGFEQRVRIMARTDAKAELLMSTPAVGPIVALTYACAIDDPARFKSSKQAGAHFGLTPKKYQSGETDYTGRISKIGDAAVREALYQAAHVMLTKPVKGCADLKSWAMRIARRAGMRKAKVALARKLAVILHRMLADGKPFNPTVRRQPVAAAA

SEQ ID NO: 168312 - protein, 545 aa, unidentified
MKTAVFGVGIDTARYGHHVTFVDQDFRTATQAYHFKEDRGGYDKLKKSLEALAKKNPDAVIRIGLDPAGIYGNNLTRFLQGLEIPRLSVSVAHPERSKDYRKVVVGRKKADATDSWACARYAVNENPAATQDSSAMDSLRRCVSAIESMATERTMAVNQLHNLLASVFPELAVYVSDVASSHCLKMLEKYPTAKRVASAKLDSILSIPHMSEEVAKAIHAAAKQSVASSSDDIIEILVTQKVKQIQSIETQQQLLDKTLKKAWDCLPEAPCKQLLTICGFGLQTAASIVAKVVDIKRFESPSKLIGYFGVYPTLYESGTTKQGSAKRQNPIGMAMQGNDLVRRNLYMAAQTAAQHNPAVKALYVRQRQLGKDHGVALGHCMTKLLRVAYALWVKNESYSPEFEAKQQEEKSPKEKSVVGPNLEVKPQRQGVTTTPSSVPPKTETSNRKPLNYTILKTLLNIEDILGVYRWKERSSRGAQMRGACPLCNHQDERAFAANRSKNVYCCHRCDSKGNAMDLLAKLSNTPIHEAAWDWIDRKLLTPPLL

SEQ ID NO: 168313 - protein, 416 aa, unidentified
MPLALPEAQVFTGIDWAAATHAVCVLNAAGKVVAEFTVEHSADGIATLIRRLSRFGDPGDVPIGIERPDGRLVDLLLEAGHPVVPVKPNAIKTWRDGEVLSGAKSDAGDAAVIAEYLRLRYHRLQAAVPYSAETRALRTVVRTRDDLVDMRVAATNQLAALLDAHWPGAKAIFADVESPISLAFLARYPTPASARHLGEKRMAAFLVKHGYSGRRSAATLLERLRAAPAGTAGEALTEALRDAVLALAAVLTALNTAVKDPGRSAAAHLGEHPDGKIFTSLPRPGQINAAQMLAEWGDCRPAYEHPDAVAALAGCTPLTKESGKHRAVHFRWACNKRFRKAMTIFADNSRHASPWAAKIYNDARAAGKDHPHAVRILARAWIRVIWRCWIDGVPYNPAQHGAAAALAEQTGSQFAA

SEQ ID NO: 168314 - protein, 322 aa, unidentified
MVVGFDVSKASTNWALVNGIGKVLAEGKCNNTERAVATVLVPIRGKYSRLRCAVEATGIYHLPVLRACEVQGIPCRQLNPIQTKQFTRTTVRAAKTDRKDAVYVALLGLRGAGYTVLPVDDALMAAKTYLRLADRLRDAGHSMLFMQQYLHDNGQGLSEDSLTACRIQLLAAVQDYRGRAAKALDASRPVALLQSIPGLGPVLAMGIVAEIGNLGRFHNAPQLVAYAGLDPRIKQSGPMHSTGRLTKRGSPFLRQRLHVASMGVQRYDPELKAVHERQRARGKSYTAATVCVSRKLVHRIFSVLKRDAPYEVRSLDAAPKNT

SEQ ID NO: 168315 - protein, 420 aa, unidentified
MLAESEDSEQIIARVAALDIGKAELVCCVRVPGRGTRRLQEVSTHSTMTRSLTELANHLVESGVSRVVMEATSDYWKPVFYLLEAHGLDPWLVNARDVKHLPGRPKTDVLDAVWLAKLAERQMLRPSFVPPPPIRQLRDLTRYRIDLVATRTAERNRVEKLLEDACIKLSVVASDIFGVSGRAMMAALIAGERDPKVLAQLARSRMRSKMDRLEEAFNGHFDAHHRFLLTRMLARLDGIDADIAVLDEQIEAYLAPFAAAAARLDEIPGIGPVAAAIILAEIGTDMSVFPTAGHLCSWAKFSPGIKSSAGKTKGNASTGHGNRYLAQILGEAAIAASRTDTFLGQRYRRIARRRGNKRALVAVGRSILVIIWHLLDDPDATFIDLGPDHYTKRLNPETKKRNHIRQLEALGYTVTLTSAA

SEQ ID NO: 168316 - protein, 387 aa, unidentified
MLQPNDLSRSLVALAQDSTIIAVVELSQSSWLVGGVLPGIERQPRKKLEPSPERLLAVLHRWRDEAIKAGRNITRIALAFEAGRDGFWLARWLAARGVEAHVIHPSSVAVSREHRRAKTDRLDTELLKRGFLGWLRGERGHCSMVRVPTLAEEDAKRPNRERECLVKERTRLVNRMKGALARLGIRNFRPTLRNAAEHLAGLYTPEGSPLPPNVAAELERDIARLGLVIGQIKQLEAARRQRLEEQPESRPHAMVRLLVRVVGIGTETADMLVNEVLSRPLRDRRAVARYAGLTGAPDESGAKRREQGLAKAGNARVRRGMIPLAWRFLRFQQNSALARWYQARTADRRAGTRKTMIVALARKLLIALWRFVTTGETLEGVVLRPAA

SEQ ID NO: 168317 - protein, 442 aa, unidentified
MPGREDVVTTESGRGQIQGLPVVRENVAGIDLGSEQHWVCAPSGDGSSREIASFGATTPELIRMAEWLKARRVESVAMESTGVYWIAPHEVLEGQGLQVLLVDTRQLARVPGRSKKTDPSDCEWIQRLHSCGLLQGSFRPEEAVCMLRTLVRDKANLMAERGDWLRRMQKSLDQMNVRVHRAVSDINGVTGMAIVRAIAQGERDAHKLASLRDLRCSKTQEEIAEQLSGHWREDHVFSLQQALRMYDAVEERIAAYEKEILRKLGDMERGEHPGQTAPPLQNANKGKMIRKRGQDPKRQALYRMSGVDITQIDAIGVETVEVVLSEYGSDLSRFPTEKQFVSHATLAPRVPKSGGKPVKKKKRNSASTRVAAALRMAALSLRHSQTGLGAYYRRVAQRCGGDVAVFSTARKLAIFIYRLLRWGQHYVDEGAAAYENRYLQQP

SEQ ID NO: 168318 - protein, 486 aa, unidentified
MTPRGSEFAPVEPVKKPKKPKKRSFKKVRLPASLKQINLNAAGIDIGDGEHYVAVPEDRDEQAVRCFTSYTMDLYAIADWLQSCEIETVAMESTGVFWIPLMEVLEERGFEVILVDPHKLKNVSGRKTDVLDCQWIQQLHTYGLLSGAFRPSDQVCALRSYVRQREMLIRRGGQHVQHIQKALTQMNVKLTQVLSDVTGKTGLKIIRAILEGERDPAKLAALRDGRCRKDEATIAKALQGNWRDEHLFALRQAVELYDVYQEKIEACDREIEAYLGTFSDAIEGLAPLEKKPKSHASHPLAFDAYSELYRIAGVDLTEVPGLDAPTVLTIISEIGLDMTRWRHSKAFSSWLGLCPGSKISGGKRLSSRSKACANRAAAAFRLAAYGLQHSNSYLGAFCRRMKARMGPAKAITATAHKLARIVYAMLLTLSPYVEKGVDFYENEYRARRVASLKRNARNLGFKLIPIADEAPGPLGSPGSPDAALAA

SEQ ID NO: 168319 - protein, 362 aa, unidentified
MRIIGCDLHTRQQTLAMLDTETGEVVKMTLTHEEDNVREFYSALPRPACVGIEATGSMQWFVNLMEELGIECRVGNPARIRAAEPRKQKHDRRDADLILTLLAENRFPAIWLPSKELQDLRALLRHRHQWVRMRTRVQNALQAIALANGLRRGPSLWSREGQSRIASLPLAPHTAHRRNELQAMYVKLEADIEKLNQRVEEQAGQRPGARLLMTHPGVGSVTALATDVFLGNPKRFADGKTLASYVGIIPREYSSGGRQRLGGLSKQGNALLRFLWGEAGAHAARRDPELQRFYRRKLVQKGLGIARVAVARKLGIRLWIMLRDQIDYNEFCRRGQKQQKSSDACAGMPETAYGAKSHRTCD

SEQ ID NO: 168320 - protein, 429 aa, unidentified
MNCTQNKKIEQVKETTMIVGIDVGSEKHYFRAFNWRGIELTRKPVAFSNSMEGFNSFYNTIVELMQKSELEEALVGIEPTGHYWFDLGQFMGEKSIKFVMVNPHHVHKTKELDDNSPSKNDRKDPRVIAGLVRDGRYFYSYMPTGAYAELRNASNRRFVLVEEQTRAKNRLQKWIAVYFPEYKGIYTHIDAKGGMLVLKKAPTPEEIVRLGVEGIIKIWKDAKLRGNGHKKAILILAAAMRSIGLKAGLTEARMEIQDLIEDYELQTKRLERVNDLIKGLCQQVRYADKLLEIKGIGITTVAGFIAEVGDITRFDSTKELQKLAGLELVADSSGKHNGKTKISKRGRKRLRYLLFEAAISVVGKNEEFKEIHRYYTTREKNPLKKMQSLIVVACKLIRVFHAILTKGIRYDASKMLKDIRHPGEQLKAA

SEQ ID NO: 168321 - protein, 383 aa, unidentified
MKAVCGLDVHKDSIFLCILHSDGELFEQVFGVLTFQLEEMRKLLQKHHVFEVCMESTSIYWIPIWRVLSPHFTLRLVNPYFIKQLPGHKSDVKDAQWIAECTMKELVRGSFVPPEIIQQLRQYDRRIFDLNAEIVRKVSKVDGVLQRCNIRLSNYVSNIECKSYRDVVRRLSEGVANPNELMKLVHGRIVNRHGVETILASLTGVVSQAEIDVLRQLHEEIDIAESHRNECQQRMLEICEKHFPEELERLQKIPGIKERAATSLIAEIGTDMSKFETANHLASWSGLRPRNDESNKKIKSRKITHGNVYLRNTIIQCAWAASRQKDSFFSRFSYHQTIVRRKNKMKVIVAVARKLLIAVWHVLHDKTDYVDFKPDREESASNG

SEQ ID NO: 168322 - protein, 383 aa, unidentified
MQTLNDLSRSLITLEPAGTLIAVIEMSLSSWLVAGIVPGIERQPLKKLAVDESALLKLLHRWREEAEKAGGKIERIVVAFEAGRDGFWLARWLKARSIEAHVIHAASVAVSREHRRAKTDRLDTELLKRAVLRGERDHCKMVAIPTIKDEDAKRPNRERESLVGEQSRIINRMKAALVRLGIRGFNPKLKRAARRLDSLRTPEGEPIPPNTLAELRRDMERRRLVRDQIREIEEARQERIQQAPSDGPHAMVRLLARVIGVGIETADMLVHEVLSRNMRDRRAVARYAGLTGSPDESGRRRREKGLARSGNGRVRRGMIQLAWRFLLHQKNSALTRWFRARTENARGTRKRMIVALARKLLIALWRLVREGVVPDGVVLRPAQ

SEQ ID NO: 168323 - protein, 413 aa, unidentified
MVEVVYPRCCGVDVHKKTVVACLIVPGPQGRPVKEVRTFGTMTDDLLALVDWVVAAGCTHVAMESTGSYWKPLYNLLEGVLEVLVVNAARIKAVPGRKTDVRDCEWIADLLRHGLLQASFIPDRPQRELRELTRYRASLVHERAAQVNRVQKVLEGANIKLAAVATDIMGVSGRDMLAALIGGTADAATMAQFARGRMREKIPQLEKALAGTFGTHQRFLIAQQLAHIDFLDALIERVSAQIAERVRPFEEFIALLDTITGIGRYTAEVLVAEIGVDLRRFPSAAHLCSWAGVAPGNNESAGKRKSGKTRKGSPWLRAALVEAAHAAGRTPHTYLGAQYRRLVARKGKKRAAVAVAHSILTIVYHILTDREPYADLGGDYFDRRDQQAVQRHLVHRLEALGYTVSLQPKEPAA

SEQ ID NO: 168324 - protein, 344 aa, unidentified
MTIVEDACVITGGVDTHADTHVAAALDPLGGLLGVREFPATAAGYAGLLDWLGGFGTVVLVGVEGTGSYGAGLARHLASAGIRVVEVDRADRQDRHRQGKSDPLDAVSAARAALSGRASGAPKGRDGAVEAIRALMVAKRSARHERTQAINQARALILTGPDELRARFAGQRAAALAEAVAALRPRPGDAADYSLRVALRELGRRVEFLDAQIGRLDDLIIPLVTARAPGLLSLYGVGPDTAALLLIAAGDRPERLRSEAAWAHMCAVAPIPASSGKTRRHRLNRGGNREASHALWRIVITRMSAHPATRAYLERRTAEGLSKKEIIRCLKRYVAREVYPYLRG

SEQ ID NO: 168325 - protein, 347 aa, unidentified
MDVYIGMDISLQTTHLCAVDRDGNLIWEGSAPSEVSALTQRVKEHGGEWEIKRLVFETGQLSTMLFHGLKAAGLPVVCIDARHAHGMLKAQRVKTDRTDARGLAQIARTGWYNAVHVKSVESLRLRTLIAGRKQLLHTRQAMENHIRGTLKTFGIKLGVVTTDGLAHKVKAALKDVDAFVLGTMASLLKAREELLTQEKALEKRCKQLAGKDEVCQRLMTIPGVGTLTALAFKSEIDDPARFAKSRDVGVHVGLTPRKYASGEIDYDGAISRCGNPAVRTLLFEAAVTMLARSKKWSRLKAWGVKLAQRSSFKKACTAVARKLATVMHRMWVDGTEFAYGAPETSAA

SEQ ID NO: 168326 - protein, 397 aa, unidentified
MCGTGHESIRKHGALSPVSARADGMTPPVFFRHHRARSTNPVRGEQEEPVEKSMTVAVDLAKDVFELAVADERGRIVERQRLSRSQFGRFFENRLVCRVVMEACGSAHYWARLIRGHGHTVRLLPPQYVRPYRRRNKTDRSDCEAILEASRNREIREVPVKQVDQQVIQGLHRVRAQWMATRTNRINVLRGLLRELGIAIPLGATTAIRRVSEAAETLPARLQPVVHALLDEIRELEERVDLIDTALREHTRLDADAQCLIQVSGIGVITATAMAASVVDPRFFRNGRQLASWVGLTPREHSSGNRRHLGGISKRGDVYLRMLLTHGARSVLNRAKQLHKAGKPLNRLQRWVVELEQRRGHNKATCALANKIARIAWATWRHQRKFDGNYSLQKQAA

SEQ ID NO: 168327 - protein, 462 aa, unidentified
MARRKRKNTSSSDALPPQLATVNLHAAGIDVGAEEHWAAVPPCDDPQPVRRFGANTADLEALADWLWGCDVTTVALESTGVYWIPLFELLETRGFQVLLVDPSKLPRSGRPKTDVHDCQWLQRLHTYGLLSACFRPEEQVVVLRSYLRQRATLLADAARDIQHMQKALTQMNIKLQHVVSDITGVTGLAIIRAILAGERDPLQLARWRDPRCKQDEAAIAAALHGTWRVEHLFVLQQALERYEFQHRQLAACDARIAAHVETFADQSHGAPLPPKRGQRRRHRNRPAFDPREPLYRMTGVDLTRIEGIDETTALIVISEIGLDISKWPSEKHFTSWLGVSPQRRISGGKVLSSRTRPTTNRAAAALRLAAASLHHSQSALGAYFRRMKSRLGTSKAITATAHKLARLLYSMLKHGTAYVAQGLEAYEQQYRERVVKNLSRKARKLGYALVKPGEATVETSLA

SEQ ID NO: 168328 - protein, 337 aa, unidentified
MPGSDVMEARTVIGIDVSKATLVVAVQPSGETWTSDTTSPALEALVARLRERHPQLIVMEATAGYELPLAAACAAAGLPVAIVNPRQVRAFAQALGRTAKTDTLDAGVLALFGVRMQPAARAVTDGETRALADLVTRRRQLLEMLGAERRRLEHAPPTGPVTRDLRHHIRWLERRLADVDDEIGTAIQHSAVWRVNDDLLRTVPGIGPTTARTLLAELPELGHLDRRTIAALVGVAPFNCDSGQFLGRRRIWGGRRSVRASLYMAALVASRHNPVLAAFYRRLRDLGKPPKVALVAVMRKLLTIVNAMIKHQCRWNPKAASTPASTSEPARGVAVLA

SEQ ID NO: 168329 - protein, 316 aa, unidentified
MQTPLVGVGIDISKARLDVHVRPSGTSTSVSYDAAGITALIGQLTEVPPTRIVVEATGGLERPLLRALVDAALPVIVVHPRQVRDFAKATGQLAKTDALDAQVLARFAEVIQPALRVLPDAQTQELAALLARRRHVVAMHRAEQNRLDRTPDRVRKRIAVHLRWLRAELVRVDAELDDLIQHSPLWRAREDLLQRVPGIGPVMSRTMLAELPELGLLNRIQIAALVGVAPFNRDSGRLRGHRTIWGGRAPVRTALSMATLVATRWNPVIRTFYQRLRTAGKAPKVALVAAMRKLLTIVNAMVHHGTPWHPVVAANA

SEQ ID NO: 168330 - protein, 407 aa, unidentified
MACEHGYGVFLGFDVGKGEHHAVALAPDGTRLHDAALPNSEPKLREVFDKLADHGRVLVVVDQPASIGALPVAVARACGHDVAYLPGLAMRRIADLYPGNAKTDARDALVIADAARTLPHTLRQVDLGDDTLAEMEVLVGYDDDLAGEATRLSNRIRGLLTGIHPALERAIGPDITHRAVLEILAHCGGPAGIRAAGREQVAAIAAEHAPRKHAKLVDRVWAALDEQTVTVPGTTAADTVLPQLAESLKTVLAQRKTLAAQVEELLDAHPLAGVLTSMPGIGVRTASRILLEIGDASSFASSAHLAAYAGIAPLTHKSGSSIKGEHPTRAGNRKLKRAFFLAAFAALSDPVSRAYYDKKRAEGKKHNAALICLARRRCDVLFAMLRNGTYYQPPQPSKENEKLATAA

SEQ ID NO: 168331 - protein, 340 aa, unidentified
MRKYIRIGVDIAKNSFQVHALESEDCSATKRRLSRSGIVKFLAEVEPCAIGMEACGSAHYWARRFRAMGHEVKLTPPIYVKAHVKRGKNDAADAAAICEAMSRPNMRFVAVKSEDQQATLMAHKARELLIKQRTMSVNALRGHLAEFGVIAAKGISHVEELVERAAAADLPTRVQATLGVLLAQLRSLDVAIDELERAIVADHRCDPVSRLAASVPGVGALAASAILASAPDPQAFKSGRDFAAWLGATPKQNSTGGKEKFGSITKQGNRYIRRLLVLGAISVLRAAPKRKGALCDWLAALRARKPPKVVAVALANKLARIVWAIITTGEVFRTSIYAKA

SEQ ID NO: 168332 - protein, 355 aa, unidentified
MNSEKYIGMDVHKESISIAVMNGAGKIVMECVIETKASVILQFIHGLSGDLQVTFEEGTWAAWLYDLLKPHVTKLVVCDPRKNASMKEGNKSDKIDARRLAELLRLNHLSPVYHGEHGLRSLKELVRSYLTITKDLGRVMSRVKAIYRSWGIPCTGKQVYAPRHRAEWLGKISELGVRRRAEFYYQQLDALRALRKQVRRDLLAECKKHQAWKQLCQIPSIGPIRAAVLLGILQTPHRFRTKRQLWTYSGLGIETRSSADHRSVDGQLERAKKQISIRGLNQNCNHDLKNLFKGAAIVASSKPGPFQEFYTTLLTQGIRPEMARLTLARKIATIALIVWKRGASFDAQHLKPQTA

SEQ ID NO: 168333 - protein, 404 aa, unidentified
MYYVGIDVAKEKHYVCILDDTRELACKPFWIYSDILGLRDLVKRLAELSLNNDDFIIGVESTGAFSENLYEYITDADYKVILLNSYQTAKYRDFSTMKKIKNDSIDALVIAELLASDKYKESYISNDDYQSLKVLGRLRKSLSDKIKTIQREISTVMATVNPEITKVFPNIFTKTALATIKAYPTAVDIQKATPKKLTKLFRHIKGNNFNEDKAKFLIELSKSSIYAGRAHESRALMIRTNIRILELLCQERDEIELQINTLLYNKIEVIDSSIENIKTIPGVSEKTISALLGECGDIKRFTSAKAFIAYLGLYPTQYQSGNSMSVGRLAKRGIPIAKHALYMAAISSVRHNPELNKLFRDKVSLGKSKKEALIIISKKLATIIYSLFKYNQPYRAKRVFVPHR

SEQ ID NO: 168334 - protein, 404 aa, unidentified
MPTYFVGIDVSKFKHTCCVIDENGEVIKKSFDFSNSKEGFDSLIENFKSIYQSESSFQIVMEATGHYHECLFRYLVAHNYLAQIKNPVVIAKFKQSEYLDKAKTDNLDALIIAQYASKHPFSPTMLKSYNIERIRRIARAKYFLYQDKERTINHLHRYLDESFPELIPFLRKRGDIKRYQGRNFFDSKTTLWFLENFPSAAKFSNARSETAEKLRRMSKGAFSLIKFNELRNTAKNSIGVSFQETEEIIIQLIKELRNIQERNDRLDELLVPLINETAPNLLTVPGIGYRLAGLLISEIGDASEFPSADKIIKFAGLDVRVYQSGTIEKHGAIRKRGSPLLRYALFQAAEKARIHCPEIAEFYSKKKGEGKHPICALTHTARKILRIVWALLKTGQNYSQSISD

SEQ ID NO: 168335 - protein, 341 aa, unidentified
MYRTKVGVDLAKNIIQVYTLNGKKVTSNVEMGVDEFSTWLAKSKLLTVAFEACSTSNYWYQRAIEAGHDARLISAKLVKAVRQNQKTDKNDALAIAQALFLPEVSFINGKSIEQQQLQSIQRLRELAIKSQNASQKQVVSLLLELNIRLPNTQAGILRGLEGVLEDGEINLSDTFRATLSVAKVQLENMISAIREYDKYLEQSIQLLPDCKKLLKLEGVGPVNAVNLYIALGANQSQPFKSGKNASACFGLTPIQHSSGGKEVMGTIGKYCKNGSLRSQLITGAMSVVIKVIKYGAKTKKELWLQSLMQRRGNRCAAVALANKTVRTAYSLLQNNTEYHAA

SEQ ID NO: 168336 - protein, 346 aa, unidentified
MEHYVGLDISLKLTAICIVDRTGKIEREGVVASDPEAIAVFIKSHAPHVARIGLETGPTSTWLWTELNKMGLPVICIDARHAKAALKLQINKSDRNDAVGVARIMQCGWYKEVRVKDLDSHAIKALLVSRALLVKIKRDLENQIRGLLKNLGLVIGQAKMNMFSVRAAELAEARPELAAAVEPLLKAREAVGRQIADLDRKVMRLARNDVQVRRFMTAPGVGPITALCFLATIDDPTRFKKSRSGGAYAGLTTRRYASGEIDWTGRISKCGDKMLRSYLYEAANVLLTRVAKWSALKAWGVRLAKRSGLRKAKVAVARKLAVILHRMWIEGTEFNWSSKEAANQPA

SEQ ID NO: 168337 - protein, 410 aa, unidentified
MQVLYTRCAGLDVHKKTVSACILLADGAGPRRSQVRTFGTFTRDLLALADWLHQHAVTHLAMEATGIYWRPVWAVLEGQFEQMLVNPQHIKAVPGRKTDTRDAEWIADLLQHGLLKGSFVPPTPIQDLRDLTRYRAELRQSQNRVANRIQKFLEQANLKLASVASNTLGVSGRQMLEAILAGQDDPHRLAQLARGRLRDKIPQLEQALEGRIRDHHRFLLAEFLDEWEALNLRIRRIEAQIDEQIHPFETAVALWTSMPGVDRVTACNLVAEIGVDMNPFPSAPHLASWAALCPGNHESAGKRKSGKTRDGNKWLRRSICQAAWAVTRKKNCYLAAQFKRIAARRGAKRAVMAVAHTMLVIAYHMLKTGNSYQDLGSNYLDQLNKTQIQHSLVKRLQHLGFQVTLQPARA

SEQ ID NO: 168338 - protein, 294 aa, unidentified
MSHPTRFIGLDIHKFYMVAAGVDADQQEVMSPQRVTWEHFDAWVTRTLNVRDAVVIEMTTNTWDVYDALIDHVHSVCVVHPPHVKAVVNPQVMTDKIASRTLAKLLAAKLLVSIWVPPREVRDLRMLVVEYHKMSVLGATAKHRLHALLHRHRILPEAGLEIFHPDVRPWWNLLHLSPAEKACMNTDLDTLAFAQSQKKRLDAALSECAAQDERVPLLVQLPGVGMLTAITILAAIGDIRRFPDEDHLVGYAGLGASVHASGEKRTSGGITKHGRRDLRRVMVDAANHAVAHHP

SEQ ID NO: 168339 - protein, 365 aa, unidentified
MQKISTMQASGKNIFEGQLTIGLDLGDRSSAYCVLNEAGEIVFEHKLATTPEAMKQVFGSLPRCRIAMETGTHSPWVSRLLTALGHEVIVGHAQKVRLITKSRRKDDRLDARTLARLARIDPELLSPVKHRSAQAQLHLTEIRARAVLVSARTALVNAARGLVKSYGERLRKCGTQQFSWETTSGLSTGLREALEPLLREVESLNERIQEYDRRIEKMAKQTYPETTLLKQVKGVGDLIATTYVLTIEDPHRFRKSRDAGCFVGLQPGRRNSGESEPQMRISKEGDEYLRTLLVQGAHYILGPFGKDSDLRRWGQKLSARGGKNAKKRAVVAVARKLAVLLHRLWVGGEVYEPLRNSQKAMSAAA

SEQ ID NO: 168340 - protein, 424 aa, unidentified
MAGVVIGIDPHKGSHTAVALDVHEKQLGWLRVRASSRQVGGLLEWASGWPRRRWAIEGARGLGQLLAQQLIASGERVLDVPPKLAARVRLLDSGQINKNDPNDARSVAVAALRAHELPELAAEDHAMVMRVWARRYHDLARLRTQVVCRLHAVVCELVPGGVRKYLRASQATDVLDRIVADSPVAQAKLELARELVADLERIDAQRREAKRRTARAVAATRTSINDVYGVGPIVAGTVLGYVRDIRRFPTRDRFASYNGTAPIEVSSGDRKIYRLSRRGNRQLNHAIHMAAISQIRHHDSGGRAYYEKKIAEGMTGKTALRALKRKISDALYKRMIDDARRLAAKDPGGHTGNDSASSAAGSHPETPALRKSHSRATANSKTGTGQRPLRLRPAPDRRRTSRRAAGVQVEPRLGPHRGRRQDRP

SEQ ID NO: 168341 - protein, 343 aa, unidentified
MSNDTRIGVDVAKAVFEIAISDRPGHIVRRERAQRAQFLPFMAQQPRATVVMEACGSAHHWGRKLQDLGHRVILLPPHHVRPYICRNKTDRTDAKGILEASRNEDIRPVPVKTVDQHVLTSLHRLRSGWMTERTARLNALRGLLRELGIFIPMGAREVVPMVWSLIEDADSELPEALRPIFAEACREIREIEARVKQVERQLEATAEQLPAVGYLRTVPGIGLLIATALVAFIGDIRRFPSGRHFASYLGLTPREYSSGLKRNLGRISKRGDGYLRTLLIHGARSVLIHARQQQPDRLREWANNLRKTHVHNKAAVAVANKLARIVWAVWSRQQPFVLIAKAA

SEQ ID NO: 168342 - protein, 358 aa, unidentified
MKNLKYSIGIDVSMKDFVCCISTINDQQDVKVKATHKFANTVAGFGSLLAWVTRHQKEELPTVFVMEATGVYHEQLAWFLYHKNRPVSILLPNRAKKYLQADGNRSKNDTIDARGLAKIGAEKKLDLWTPPSRELYTLRDYTRQHQSLNEMYTAIANQLHSIEHSQFRNKDIIKQLKNTLKLLEKQLKEMDVSMGKLIKSDPVLNQHHQNICAIKGLGILSFAVIAAETNGFALFENAASLVSYAGYDVIENQSGKHTGKTKISKKGNSRIRRILHMPALCAVRLDQPQFQKLFERVYERTKIKMKGYVAVQKKLLVMMYYLWKKSEKYNPAFKKVAPALPGATRDELLNEILIEQQN

SEQ ID NO: 168343 - protein, 356 aa, unidentified
MKKNQAIHYLGLDVHQATIVACVRDERGAIVMKATVPTEATAILRLVRGLGSHVHVAFEEGTQAQWLHDLLLPDAERVVVCNVRGKSEVANKSDRIDAAELSERLRVGSLKTVYHGATSMLTLKELARNYNALVEDTTRVMLRIKAMFRARAIPTPGMSVYRAASRKTWLEQIKTPGARFRAESLLTQLDLLLKLRPKAKAAMVAEAKKHSGWKSLRSIPFLGDVRVAQLMAIIATPHRFRTKRNIWPYAGLAVITRSSADQEFADGRLRRRKKAPRTRGLNRNHNPMLKSIFKGAANAAAAKPGPLNDIYKACVARGTKPELARVTLARKIASVVLRLWKKGEFFDPKKLTMQTT

SEQ ID NO: 168344 - protein, 349 aa, unidentified
MKTIVKQIAGIDVAQDELVVCLGKMYDDWTPELYAHKTFANTAKGFISFTEWVTRLTDVSVPVRFVMEATGVYHESLAYYLDEQGLEVSIVVPNKISNYARTLTVKTVTDKTASEAIARFGLERNLDQWSRPKGIFKKLRQLTRERGQLVEERTVLKNQLHAEQAQAEPYKKSIERIKKRVVLLDKQEKEILEELRSLIKTDNEMQQLVILLCSLPGIGILTAATVLGETNGFDLIRNKRQLTSYAGLDVKEKQSGTSVKGKPRISKKGNKHLRKAMHMPALAAIRHDERFKAIFARLISKHGIKMKAVVAIQRKLLEMMYILYKTNKSYDKNYLQNKTVQSIDNTIKN

SEQ ID NO: 168345 - protein, 349 aa, unidentified
MSQNLNSAVAVIGIDIGKNSFHVVGLDNRGAIVLRQKWSRGQVEARLANMPPCLIGMEACVGAHHLSRKLKGLGHDARLMPAKYVRPYSKGQKNDFRDAEAIAEAVQRPTMKFVATKTADQLDLQALHRVRERLVSQRTGIINQIRAFLLERGVAIRQGLRFLRAELPRVLAKPSDVLSARMVHVIESLTEDWRRLDERIDQLSGDIAALARQDAGCERLMSVPGIGPIISSAMVAAIGAGEVFSKGRDFAAWLGLVPKQISTGDRTILGKISKRGNRYLRVLFVQAAWVVLIKPQSWDRHGLKRWIEAAKKRLHRNVLAIALANKLARIAWGVLAGGRTFEASKLQIA

SEQ ID NO: 168346 - protein, 343 aa, unidentified
MQQSTFVGLDLGSSRCQQTVLGADGALAFSRSIPTSEQHLRNAFANLEGDVRVHLEASELSTWARSIIKPLVASVTVSHPRSLAWIGKDAVKDDAIDARKLAELLRLNLVHEVFCDSDSERRNFKYLVCHYEQLSREQARLKSKIKARLRTLGIIRKDARLFAKSGQAALLDELQEPCLKQMLAQTFAVLNQLLDAQGQAKTAMVEFACRFPEVRLLQTAPGVGIVTACRFVAYIQTPARFSNKRKLWRYARLGITRRESNGKRLSHPRLDSAGVGSLKDCSRKIFEAARRTKKDNSFKRAYENSLANTKNAVHARLSAQRKILSCLRAMWLKRQPYQDSDGT

SEQ ID NO: 168347 - protein, 347 aa, unidentified
MLADQLDYVVGVDPHRDSHALAAVHVVSGAVVFEASVAASSEGYAHALSLVEEHAAGRRAFAIEGTGSFGAGLTRFLTARGERVLEVGRLRRERRSGGKTDALDAIRAARSVLAQNRPATPRASGEREALRALMAAREGAVNAKRAGLCQLRNLLVTTPEPLRNQLRPMTRARLLQRLAATRPERRADPELRGALLALRSVARRVLQLTSEERELAREIEVLTRKLAPQLLAQPGVGPLAAAQLVLSWSHPGRITSEAAFARLAGCAPIPASSGQTVRYRLDRSGDRRLNRALHMILVTRRRSHAPTIAYIERRIQEGKSRREAIRCLKRYLARNLYRLLENPPLPT

SEQ ID NO: 168348 - protein, 310 aa, unidentified
MSSSVYVGIDISKHRLDVATEPATPPTQFPQTEAGVGAVVTHLQALGPALIVLEATGGFETAVVTALAAADLPVVIINPRQVRAFAQAIGRLAKTDAIDAAVLALLAARLQPPRRPLPDAAQQELKARVARRRQIREMITAEQQRLPQTRGRIRADIEAHIAYLKARSDEIDTDLRRLIAESPHWRATDDLLQSVPGIGPTTAAALIADLPELGHLAARPLAALVGVAPLNHDSGTLAAPRITWGGRAPVRSALYMATLTATRYNPIIKAFYQRLLAAGKPRKLALIAAMHKLLTILNAIVKTQKPWAHA

SEQ ID NO: 168349 - protein, 404 aa, unidentified
MNGLPDRTYAVYLGLDVGKEHHHACALDPAGKRLHDKTLPQDEQRIRDLLTDLSVHGDVLVVVDQPASIGALPVAVARSMNIQVAYLPGLAMRRIADLHPGNAKTDARDAYVIADAARTLPHALRRVDVGDDALADLEVIVGFDDDLAAETTRVTNRVHGLLTQIHPALERAIGGSLHHPAVLELLSRFGGPSGLRTAGRRRLLAVAKPRAPRKYQAFVDAIMTALDEQTVTVPGTRAADLVLPKLADQLAGLLAPRAEAATQVEEMLDAHPLAQVLTSMPGVGVRTGARILLEVGDASSFATPGHLAAYAGLAPVTRRSGTSIRGEHPSRSGNKNLKRAFFLAAFAALKDPASRAYYDRKRAEGKRHNAALICLARRRCDVLYAMLRDGTTYQPGRPVTPIAA

SEQ ID NO: 168350 - protein, 433 aa, unidentified
MKNKAYRALDVNQIHLDRLLQQRHEVLVHAGLDVGKDYILCVLRWDGHNFERPWRCRNPADLACLAQALQHVAQGRRLVVALEPTGTYGDASRQALQRAGLRVHRVSPKAASDYAEIFDGVPSQHDGKDAAVVAELAAQGRSWPWPLVLPSETEQELAYQVEWLEGQRRQTQLWYGRLEALVSRHWPEATALLPLTSGVLRRCLLRYGGPRGLAEDSQAAQRLYRWGKGLLRRDKTEALAASARQTAGVPTGCWDEERLRRYAQQVQDGLRQHRQARRRLRQLAATQPIIQAMGGVVGPVTACVLWVELGNPQDYHCGAAYRKAMGLNLSERSSGRWQGQLKISKRGSSVVRRWLYLAALRWLRQEPVRSWYVRHKAQGRGAAKPALVGVMRKLALALYHVGGRGEPFDRAQLYPSLTAGGPASLDAVVGKKS

SEQ ID NO: 168351 - protein, 412 aa, unidentified
MEGETVIAGVDTHKDVHVLCLLDGLGRKIWSGSFGADPEGYDRLAEAIGDPGSCMVVGVEGTASYGAGLTRRLVELGYNVVEVLRPKRDKVRPGEGKSDPLDAERAARKAASGRGCSVPKSQDGWVEAVRQLYVARRLAVATSTSCVACAKSMLTTAPSALRERFRGRERPKDLMPLLARGRKAGDALEESELASLRSVAVVWKEARSQVESLDERIRALLEANAPALLGVEGCGTTTAAALVVAAGDNPGRLKGEAAFSMMCGASPIPASSGKTDRHRLNRGGNRQANWALYEIAIKRMAYDERTRRYVARRTSEGKSRREAVRCLKRYIAREVYHVLMDPNPDGAAPEGPELAKMRKAMRVTQKKAAAELGLSAATLGHLERGKRRSTKLERRYYELLCELERTLPQTAS

SEQ ID NO: 168352 - protein, 343 aa, unidentified
MSEQKIIGIDLAKTNFYLFSINAHGKPAGKSKLSRNQLLNWLAQQPKMTVAMEACGASHYWAREIRKLDHDVILLPAQHVKAYQRRQKNDYNDAQAIAEACQHGTIRPVPIKTLEQQDVQTFLKMRRLVSMERTQLINHVRGLLAEYGIVFSKGATELRQKLPALLEDAENELTDTMRTLLHRQYIRLITLDNELEWYDSEQKKYVRQDPVCKRLLSIPGFGPLVSQAIKSWMGDGKQFRRGRDASAALGLVPRQFSTGGKQVLLGITKCGDQYVRSMLIHGARAVLFSASEKTDSLSVWGNRIREKRGFNRAVVALANKLLRIAWVIIARNEMYLPATKQNQ

SEQ ID NO: 168353 - protein, 385 aa, unidentified
MSKTTVTALDQRSASSPVLMLAFELGEEGWLLGFSTGFGQRVLRRKTASRDREGVLRAIAWAREQLDAAEARVVSCYEAGRDGFWLHRWLEAEGIENLVIDSSSIEVNRRRKRAKTDRLDVTKLVGLVARHLAGERDAFSVVSVPDPEAEDLRHLGRELKLLKKDRTRVSHRIKGLLANQGLTIDMKRDPVAQLDATRLWNGEPLPGHLRDRLVHYCEDFAYHTQRIRGLEQRRRDLMRARESVVVEKSWRLLQLRGVGIESSWTYGTEFFGWREFRNGKQVGSLAGLTPMPFDSGTQSREQGIGKDGSRWVRGMAIEQAWAWLRFQPESALSRWYQERFGHGSKRLRKIGIVALARKLLIALWHWVEHGVLPEGAVLKPHLRLV

SEQ ID NO: 168354 - protein, 361 aa, unidentified
MTSTTIIAFDQHAATTVAAVLLPGHRTPALHSLTSDSATILRFVERLRRQGSVTCCYEAGPCGFELQRAVTARGIACEVIAPALIPRRAGDRIKTDRRDAGQLAVLYRAGALTAIHIPSEQEEAARDLLRCREDIRADLLRARHRLSKFLLRHGRRFTATKKAWSKRHDTWLRAQRWPLATLDQTHRAYLRAVDEVVTRLRDVEQDLRALLDLEPLHERVRRLRCFRGIDDLTALTIAAELGDPRRFATAPRLMAYVGLVPSEHSSGAARRQGGITKTGNAHLRRVLVESAWHYRHHPFVSAAVRVRQRGAPATAIANAWAAQQRLHRRYARLAARGKRKQHIVTAVARELTGFLWAALTR

SEQ ID NO: 168355 - protein, 357 aa, unidentified
MPSFSSTPLAEAGRAAARLVGTIAHDVGKLLKVLSRYGEPGAVEVVYGAGPTGYGLQRALAQRGYRCRVIAPSLVPKRAGDRVKTDRRDGLRLAELARAGELRAIWIPDRADEAIRDLARAREDAVNARTQVRQQLKGFLLRHDVRYAGKTSWSKTYYRWLATLNFGESGAQTAFTDYWQAVSAADERVVRLTSALAASIAGWRFEPVVLALQALRGIDQISAIGLVAEIGDIGRFAHPRELMAYLGLVPSEHSSGERIARGSITKTGNAHARRLLTEAAWNYRFQPRIGYQAQRRAEDLPQAIRDIAWKAQLRLSGRFARLRARGLQINKVCVAVARELAGFVWAIATARAKLPQS

SEQ ID NO: 168356 - protein, 335 aa, unidentified
MKTWHVTTLTESGYKYSFAQHSDAKELFDRLNKKFPEAHYKSAYEAGFCGFSVHYALTELGFENIVVHAADIPTTGKEKAMKTDAVDSEKIAWSLKRDELRGIYIKDKCFMDDTNLMRLRQRFIMDLSRQKNRIKHLLYTQGVTYPERFHNSKTHWSRNFMKWLREEVELLSEEKMALTLLCDQVENTRMAILTVTREIRRLSTTDKYRENFSLLTSVPGFGLITSMSMLTEFDNNPTRFPNERKFVAMLGLIPTCHNSGEKKVSGEKTNRGNKQLGPLIVEASWVAIYRDYQLGAYYSSCCQSMKPHKAIIKVARKLACRAYAVLKTKTSYVLS

SEQ ID NO: 168357 - protein, 342 aa, unidentified
MNHYAGIDVSLECSSVCVVEADGKIVREAKVASEPAALIGWFRSLGFGLERIGLEAGPLSQWLFAAMREAGLAVELLETRHVRKAFEAMPVKSDRNDARGIAQLMRLGWFRPVHCKSLSAQETRSLLTARKLVQSKLRDVENSLRGILRGFGLKVGKTTERNFAARINELVAGHPHLQMIANALLAVRETLRKEFTAFEKQTRRMARSDMQARLLTSVPAVGPIVALTYASAIDDPGRFKSSKQVGAHFGLTPKKHQSGETDYTGRISKIGDGSVRTALYEAAHIMLTKPLKGCSQLKSWAMRIAKRAGMSKAKVALARRLAVIMHRMLVNRTPFNVAAAAA

SEQ ID NO: 168358 - protein, 465 aa, unidentified
MKSKTSKSKKQNKQLSINAAWELVNPHAAGVDIGSREHWACVPAAATECPVGQFGTFTADLEAMAQWFEDCGVTSVAMEATGVYWVPLFQILERRGFQVILANARQTKNVAGRKTDVLDCQWIQRLHTYGLLQGSFRPADPYCVLRTYLRYRDELISARTTQCQHMQKALQQMNLQLTQVLSDVTGCSGLAIIQAILDGERDPVKLAALVDRRVRATAAEIQKALAGDYREEHLFVLRQACALYHTYEEKINTCDQQIVQETTRLSDKVDMTLKPLPARKEGRKPSMDKMAGEDMREKLYLKFGVDLTAIEGVGVVTGLTLLTEVGPDVSRFPTEKHFCSWLGLCPDNRISGGKVLTSRTRRVVNRASDALRMAAFSLERSKSALGGYFRRMKARLGAAEAVTATAHKLARIIYRLIKHGETYVQRGLEKYERQFQGRKLAALRKTAKAMGFDLIQTQTVASGVS

SEQ ID NO: 168359 - protein, 418 aa, unidentified
MNEDGDTRGSRRYVALDIHKKYCIMGGVDREGRVVLHAMRVEHADLEGWLKKNLRSTDQVVFESTTNAWHVYDLLEPLVERVVVANPAKVKQIANARVKTDVRDTFILARLLAANLVPEVWVPPGHVRELRQLLSQRRQLVETHTQIVNRMHSVAHRHHLQHARGKRFNEKNTVWQKDKRLSRVEQFQLELEMENRAYIEKQIQRIGREVAKMCHQKPWADSMTYLMQLPGFGVITGMTVLAAIGQVQRFESAKHLASYSGLTGGLDQSGTHLVQKGITKEGRKELRWALVEVAQRAVKSDPHWKRKFQEMEKRMHRNQAIVAVARQLLELVWYVLTRRQPYRHFSQQRIAYKYLTWAWQMDEAARDGLTRQQFTRYYLMRLGIGHDLTRMALDPKHPRKIASEAELLALRPELNHIE

SEQ ID NO: 168360 - protein, 475 aa, unidentified
MARKNRKMQRLRVVNPDCAGIDIGKDRHFVAVDPACSSEPVRAFDGFTRDLQTMADWLSSCGVTKVAMESTSVYWIPVYEVLERAGFEVLLVPPRMTKQIAGRKSDVLDCQWIWQLLSYGLLRGAFRPGDAVCPLRSYVRQMKRLTEDRSRSVQHMQKALTEMNVRLDSVITDITGQTGMKILRAIVDGERDPQRLASFRHRGIKASADAIAASLEGTWREEHLFAVEQAMQRYDFLDRQIEDCEARIAEQIDLLTPPDGSEDNGASDDMPPPGADGAGPDTASHRGGGRRSTMHDKALTTALTDMMGVDLTAIPTIGTGIALTIASEIGPDFSAFPSAQHFCSWLGVAPGTRISGGKPLPGRTPKAVNPVGQALRMAAMSARRSQTFIGARHRGRLARKDSPVAITATARELACLIYLMVTRGEEYVEKGMEAYEKRRIDRTLANLQRKARTLGYQLVQPAEDQAVPEGGMALA

SEQ ID NO: 168361 - protein, 482 aa, unidentified
MKPSQQNKPQKTSCRSEQGSWQQMNRKERREMMRKMHAEDLSLEVVHPHAAGIDIGNEAHYVAVPTDRDNRSVRRFGCTTAELKDMAAWLKQCGIRTVAMQSTGVYWIAVYDILEAAGLEVYLVNARETKNLPGHKSDVQESQWLMKLHTYGLLRNSFRPPQEIRTMRTYWRQRNDLIRSASRHIQRMQKALTQMNIQLANVLSEVSGMTGQAIIKAILAGERDPRKLAAFRDKRVKASEEEIARSLEGNWQEDQLFMLQQEQDGYEFCQKQMSECDERLQQYLQQTEDRSKGAELPEEKRRERLRKIKTNKPRFDLRAELFRITGTDLTRIDGIDVRTAATVISEAGWDMSKWRTEGHFVSWLRLCPDNRVSGDKVIGKRRLPINNRLTVAFKIAASTLRQSETYLGAQFRRLKTRLGPPIAIKAMAAKLARLVYRMLRYGMQFVDRGAEFYEAQHRRRQIDSLKRKAANFGMKVIDATPA

SEQ ID NO: 168362 - protein, 383 aa, unidentified
MKKTKGTPRKEDNTKDKVLHLAFELGHSKWKLVSSDGGKMRSKGIAARNLEQVQEEIDTAKARFKLRGDVRIVSCYEAGRDGFWLHRYLLSCGIENLVVDSSSIEVNRRKRRAKTDRIDARKLLGMLMRYQAGERRHWSVVNVPSEEAEEARHLHREMEVLKVERNMHRNRIKSLLIQQGIAFSNPSSRKFLIELDSLRTWDGKELPKDFKTRIVREHERLRMVEEQIYMLNKERERRIQSGDKPSYRQVAQLMSLRGIGMHSSWKFVMEFFAWRNFKNRRQVGALSGLTPTPYDSGASRREQGISKAGNKRIRTLAVEIAWMWLRFQPQSKLSRWYMKRFAGGGGRMRRIGIVAMARRLLIDLWRYLQHGVIPQGAITTHAI

SEQ ID NO: 168363 - protein, 346 aa, unidentified
MMIIGCDFHPSWEQVAWLDTETGETGERRLVHADGEAERFYRQLPAPVLIGMEATGNSHWLVDLLSELGHELWVGDAAQIRASYVRQQKTDKRDAAHILKLLVEGRFPRIWMASSEVRDLRQLLIHRYKLVILRARVKNELQHLCLNQGVQRKRKLWTKAGQQVLLDLPLKLWAGRRRDDLLRLLAMLDQQIKPLDEAVKAEAQRDKMALLLQTQPGVGPITALAYVLTMGDVSRFPRGKQVASYLGLIPREHSSGGRQHLGAISKQGNRMLRMLLVEAATTTVRLDPGFRKEYWHRCHQKPKAVAKVAAARKLAVRLYWMLRTKVAYPEVVRIESSPRVRLVGEH

SEQ ID NO: 168364 - protein, 348 aa, unidentified
MSQNLNSTVAVIGIDIGKNSFHVVGLNDRGAIVLRQKWSRGQIEARLANMPPCLIGMEACVGAHHLSRKLKAFGHDARLMPAKYVRPYSKGQKNDFRDAEAIAEAVQRPTMKFVATKTAEQLDLQALHRVRERLVSQRTGIINQIRAFLLERGVAVRQGLRFLRAELPRILAAPPDVLSPRMVRVVSDLAEDWRRLDERIDQLSSEIAVLARQDAGCERLMSVPGIGPIISSAMVAAIGTGDAFAKGRDFAAWLGLVPKQMSTGDRTILGKISKRGNRYLRVLFVQAAWVVLIKPKSWERHGLKPWIEAAKKRLHRNVLAIALANKLARIAWSVLANGRIFEARLQAA

SEQ ID NO: 168365 - protein, 319 aa, unidentified
MAQNEVVVVGIDVAKDKVDACIRAFKLRQTWLSTAQGHRKLVAWLRKYQVNKAVMEASGGYERAWARVLREAGIEVRIVDPKRVRSFALSAGRLAKNDAIDAEMIAWFAETFSEAPSQPHDAAREELQALVKARLDLIDFRMRLVSQSEHAAPGLVQKAHAHILKSLASEIAKLEAAISAKIKSTPDFAERAEIIESVPGFAQTSSANLVAGMPELGQVSDEIAAALIGVAPYDDDSGKRRGERHIKGGRRWVRNAIYMPCVGAVTQNNPVLKAFYQRLIAKGKKPKVALVACMRKLIIILNTMIARRQKWNPICHAAT

SEQ ID NO: 168366 - protein, 321 aa, unidentified
MSQFNLGIDVAKAKLDCALRLPDGKFKNKVFENNPKGFKTLTGWLEKHGATTAHVCMEATGVYWEAVAEYLVSEGMTVSVVNPAQIKAFGGSHLVRSKTDKVDARLIAGFCAERNLEPWQAPTPSEQALRAMALRLDSLQVMRAQESNRLEVARDAVKPGIVSHIEWLDKEIKALARKIGEHMDGDANLKDKQALLDSIPGLGERTIAVLLAFYADLERFGNARQAAAFAGLDPRHHESGTSVKMKPRMSKVGHAFLRKSLYMPAMVALYKTAWGIRFRERLAAAGKPPKLIIGAMMRKLVHVAFGVLKSGKTFDPALHGC

SEQ ID NO: 168367 - protein, 365 aa, unidentified
MNAIHYIGFDVHKKTISFCVKTADGQIVEEGSLQAERTVLRRWAAGRKQVWHGAMEATLFSAWIYDTLKPYAQQLSMGHPAKMKAITAGKNKSDQIDARTIADLLRCNLLPASYVLPPQLRDLRRLLRYRNLVVQQSVRMQNKMAGLLMESGTAFNKQKLHQKKYFADLMKSLEEVPESVKDLLRMSRGSMEMFQSTQKQLVKRLLSEPALEQRVERLMSIRAVGPITALTWALEIADPQRFASIADAVSYCGLSAAFRSSAGKQQRGPISKQRNAWLQPVLIEAAKLAPLWNPQLAAVHARALERGHANRATLQVARKLVAYLLAVDKSGQPFQVHTPPPPAGTTAKKKPARKSKKAVALAPAA

SEQ ID NO: 168368 - protein, 372 aa, unidentified
MGHHSEAFVGIDTSKLRNAVAIADSGRGGEVRYLGEFPATEAAIEKLVAKLAAKYRQLTFCYEAGPTGYGLYRLLKSLGLECLVVAPSLVPKKAGDRVKTNRRDAVSLAKLLRAGELTAVWVPDERHEAMRDLSRARQAAKKDLQGKRQQISSLMLRLGRIYPGKTTWGPTHKKWLMAQKLEHREQRIAFEELLEGMRQESERVERLENAIREAVPEWSLAEVVVALQAVRGIDLIAAVGVLAEIGDLSRFQNPRELMGYLGLVPSENSTGDKVKRGGITKAGNGRARRILVESAWSYRYPPRVSRDKQPKVEAAPRRVREIAWKAQTRLCGRFRSLERKGKRRTVIATAIARELSAFIWAINRELMAHRQA

SEQ ID NO: 168369 - protein, 391 aa, unidentified
MSLYFVGIDISKYKHDCCIISATDQQVVSKFTFDNNKDGFSELLTALRSLSSPEDIRIGFESTAHYALNLELFLEKAHHSFMEINPVLISEYKKSTTLRRTKTDRVDCESIARWLMTVEYKPHSMGFYHAYSLKSLTRLRDKLIRQRSFYLVKITNVLDHTFPEFKPFFNDRFSKTALYLLENYGSAEKMARMNTVSYDRLRSLSRGKFSPQQFLSLKSLAANTVGVNNSIFDTELCSLLTLYKATVEQICILEVQITELIGDVHPHYMSIPGIGPISAAIIYAEYGDISNFSKPSQMLAFAGLEPGVNDSGTESHSGKMVKRGSSQLRYVLMNCALPLIRFDMTFAAYYAKKRAEGKPHRVALSHVAKKLVRVIFALERQNADFVAQALR

SEQ ID NO: 168370 - protein, 345 aa, unidentified
MVMIGIDPHKRTHTAVAVDASADIVASRLVHARRGQTRELLSWADGLATRRTWAIESAGGLGYLLAQQLVAAGEEVIDIPAVLSARVRVLSSGTSNKNDPNDAYAVALAALYGKDTMRVRAEDHATVLRVLSRRHTQLAWSYNKTACRLHALMCELIPGGIRKEVVVKQASQLLEQVEINSPVTAARVEVAREMIDDLTQFAAQRKASERRIRDAVAASGTTLTEIFGIGDVLAATLIGHTRDIARFPSDDKFAAYNGTAPVERSSGDGEKIWRLSRRGNRAMNHAIHIAAVTQIRHAHSPGRAFYDRKRAEGKSPRRALRALKRRISDTVYRTLVADAARAAKR

SEQ ID NO: 168371 - protein, 351 aa, unidentified
MLMIGVDYHPSVQQIAFTDTETGECGERRLNHSDGEAEKFYRELKQRGLSVLVGMEATGYARWFERLLAELGFELWIGDPAEIKTKRVRKQKTDRQDAQLLLRLLLENRFPRIWRPSPENRDLRQLLWHRHRLVQMRTRIMNQLQAVAMNEGKRWKKKLFSAQGRAQLEELPLAPWASRRRHDLLELLDRLNPTIETLTAAIEQEAKRRPEVLRLMTLPGVGPITALAFVLIIGTPERFQCGKQIGSYVGLIPCEDSSAGRQRLGHISKQGNTLLRFLLVEAAQAAVRWDPDWRRRYLHLAMRRDRRISKVAMARRLGVRLYWMWRNGWEYSQLVKFGSHAGQPVHVHGVR

SEQ ID NO: 168372 - protein, 343 aa, unidentified
MTHYVGLDVSQKSTAICVVDDSGRRLWRGQCASDPEQIERAVRRHGGEDARIGIETGPMTPWLVHELRGRGLAVTCLDARHARAALKMQINKTDQNDAEGLAQIMRTGWYRSVHVKSFDTHRARALLGARAQLVGMTTRLSNHIRGVLKTFGMLPGAGRGLPFDRRVETLLADRAEVAPIVRPMLAAWRQLRQQIAAFDKAVHMLVKSSPTCRHLMGVPGIGVLSVLAYVSMIEDPARFGRSRSVGAHLGLTPKRYQSGEIDRSGRISKCGDTLARTLMYEAAVVLMSRVKRASGLKDWAQAIARRSGVGKARVALARKLAVILHSMWRSGEPFRWSEQPAAV

SEQ ID NO: 168373 - protein, 336 aa, unidentified
MEQSTEIFVGIDVSKARNAVAVASSGRNGEVRFVGEVDSSVESMRRLIKRITAKHAEAHFCYEAGPTGYGLHRLIVSMGFPCSVVAPSLIPRKPGDRVKTNRRDAVALAKLLRAGELTAVWVPDESHEAMRDLVRARAAAVETLCVHRQQVSAFMLRHGRIFPRKTAWGARHLRWLQEQKFDHAAHQIALQEMVEAVRISKERAERLEAAIKEFLPEWSLAPVVQALQTLRGVDLIVAVSCAAELGDLSRFDNPHQLMGYLGLTPSERSTGDTVRRGGITKAGNGRLRHLLIESAWTYRHPPRIGKLKLYKIEAAPPRVREIAWEAQTRLIRFPAD

SEQ ID NO: 168374 - protein, 364 aa, unidentified
MDNATHLGLDVHKDTIAVAVLRPDGAEPDERTIPNTPEAIRTLIRHGSFEHPVACYEAGPTGYETHRLLTSLGVACDVVAPTMIPRRSGARVKTDRIDARNLTRLHRAGELTPIRVPSPTEEALRDLVRVREDIKDDRRKTQHRVKAFLLRQGRRYPGRDKGWTDKFDLWARSQRFEEPASDAAYRHYLAALDVRRSQLATITAEIEAAAQLPPLAEPVARLRCLRGIETLSAVSITAEVCDFRRFAGAPSFMAFTGLVPSEHSSGRSVHRGSITKTGNAHVRRVLVEAAWSYRHRPAIGINLRRRSEGQPPEVLAYAWAAQCRLHSRFHSIASTKNRNVAVVAVARELSGFVWGLMTDRVEGA

SEQ ID NO: 168375 - protein, 371 aa, unidentified
MKSIIYIGMDVHKKTYSLCALLKETGEIIGETKIPADVSLIIKFIENAKKSVDSDDVQIKTGYEAGCLGYSLYWQLAAKGIECDILAPSTMHRSAKNKVVKNDRRDAKNIAANLANGTYKSVYVPTDEDVEIKEYIRMMHDFKIELKKVKQHINAFLLRFGHHYPGKSKWIPAHIKWLKELELSDMYREILDEYLSQLEILSEKIERFKHRLEELSQKETYNEKIGQLRCIKGIDTTAAMTMHAETSDFDRFPTANAFASYCGLTPGEDSSGESYHRLGITKQGNSMIRTTMVEAAQVLVRGTIGKKGKKVKSKQKDQDVKVIDYADKAVIRLQKKYHRMILRGVKRNIAITAVARELACFVWGIETGHIS

SEQ ID NO: 168376 - protein, 481 aa, unidentified
MILFRRVPRIDRLRPISNRFKLQQREDMPKKSSKKAKSQRSRERNLLAKVHLNAAGIDVGANEHWVAVPEDRDPYPVRRFGVFTSELIVLCNWLKQCQIETVAMESTGVYWIALFQVLERNGFEVRLVNASHVKNVPGRKTDVVDCQWLQQLHTFGLLRGSFRPEAAMCVARSYLRLRDTLTKDSNSLVQRMQKALTEMNVQIHRVISDITGLTGMSILRAIIAGERDCVKLAQLKHPQIKSSTEVLAKALEGDYCQEHLFALQTALELYDSLQLKILGCDKRIEEAFKAFEAKVSLPAPDLSRLRSAEKRREARQRHHLEQMTGADLTTLPGLELLAVQRILSEIGRDMTRWPTEKHFCRWLGVAPDKRVSGGKPLPSKPRKNANRAAAALRLAAQSAMQSKTAIGAFIRRIKSRLGAPTAINAGAHKLARLLYRMLKFAKAYVEVGQQAYEKLFKERMLRNLQRKARDLGFQITPIPSQ

SEQ ID NO: 168377 - protein, 349 aa, unidentified
MAEVSTIGVDIAKSVFHVHGVDTDGTVVICKRLGRTKILKFFADLPPCLVGMEACATSHQWARELKRLGHEVRLMPPTYVKAYVKRGKNDAADAAAICEAVTRPSMRFVPIKSAEQQSALMLHRARDLLIRQRTQLINALRAHLAELGLVAAKGREGLHQLVTIVMESCDEKLLSGARFACQAIVMQLHAAQTQINGLDKCIVQAHRVNADSKRLDAIPGFGVILSTAVVATMTDPKAFKTGREFAAWIGLVPRQNSTGGKERLGSISKQGDRYLRRLFVVGAIAIVRTARMRPEKYPWVIKLLARRPAKVVAVALANKMARVAWAVLAKGESYRAPTRSSNAALAAAA

SEQ ID NO: 168378 - protein, 402 aa, unidentified
MNCVGIDVSKGKSTIAVMRPFGEVVVSPFEVCHTVNELSELARQLKSLDGETRVVMESTGNYHAPVAWLLHDAGFYVSVVNAMLVHDYGNNSLRRAKTDKKDAVKLANYGLDHWLTLPRYVPEEDTRLMLKTCYRQYQQYSKVQTMLKNNLISLLDTAFPDANRLFTSPPRADGSEKWVDFVATFWHCECVCGLSEKAFTAKYQKWCKKHGYNFSEDKALDIYASAFAHFGVMPKTDTAKLLVEQAISQLRATSAALAALKQKMQSLAASLPEYPVVMEMFGVGPTLGPQLMAEIGDVRRFHSKKALVAFAGIDAPPYQSGQIDVRSRSISKRGSASLRRTLFLVMGVLLQCAPMDEPVYQFMDKKRSEGKPYRVYMMASANKFLRIYYASVKAYLDSLEHD

SEQ ID NO: 168379 - protein, 333 aa, unidentified
MAIIGIDISKLKLDCLWLRDLTGHKAKSKIHPNTPQGHQALLAWSTQQTGEAVTSLHFIMEATGIYHEALAYALHEAGAKVSVVNPAQLRNHARSLGTRTKTDKKDSWVIAHYGATQQPRQWQPEPDEVRRLRALIARYEAVKQDMQRELNRLEKARITRVSDEVLTSIETMYRQLEAEKNRLQSLIDEHIDRHPQLKRDRSLLESIPGVGPVIAQQMVAVIRSRGFTTASQCAAFLGLVPVQHESGTSVHGRAHLSKAGNAPIRAKLYMAAIVAKQHNPDIKCQYDRLLRNGKSKMSAIGAAMRKLVQICFGVLKHQTPYLPQTRQTGLEQI

SEQ ID NO: 168380 - protein, 436 aa, unidentified
MPARNSPDRWHASDGQNVHRTVDTRRKAEVAAGAPDRYAAGMPRDEMRWTPPAFRVDPGFQQTVEGWNPWSPHGIDVPNWDCVNNHTRDRGTTMNDITTYGLDLAKQVFQVHWVDLHSGEIRRKTLRRTQVSTFFARAPRGVVAMEACGSAHHWARLLRGLGHQVKLVAAQFVRPFVKTNKTDAADAQAIWEAVQRPDMRFVSVKSEQQQAVLSLHRLRAQWVSIRTQQANQIRGLLYEFGIVIPLGWRSLLKAVPQLTNEVPTLLRTELLEQLEALRTATARIDALEKQLANWQRAEPECRCLLAIPGVGPLTATAVVASVADARQFRSARQFAAYLGLVPRQSGTGGQVKLLGISKRGDGYLRTLLIQGARSVLISHTRKRRDRPLDRWLGDLLQRRSSHVVAVALANKMARTIWALLAHARTFDANWHRAVTA

SEQ ID NO: 168381 - protein, 365 aa, unidentified
MNQSIYVGLDVHLNSITAAVLEGDVQVPQVIKLSGDLNQTRRLFRRLATKGPVRACYEASGAGFVLQRVLSRDGFHCEVIAPSLIPRKPGDRRKTDRLDAVNLARLYKSGHLTPVHVPTREQEALRRLIRLRYEYVRYIVGTKNRISGMLRNHGLVFTEGKTTWTKTHRQWLATTRDQLDGAMRTALATELEHFEYLETQRGMLDSEIERYAQAPPYRGDVEALCCVRGIKTLSAMTLLSEIGDVRRFARPASLMAYFGLVPSERSSGERERRGPITKAGNTHCRRILTEAAWNNRHRSGADLILKRRRQGQPPEVVAIAIKAQHRLYKKFQRLDHRKHRHVAITAVARELCGFIWAVLGAAPQS

SEQ ID NO: 168382 - protein, 392 aa, unidentified
MVVFVGIDVSKDKHDCFILSSEGEVLADVFTIPNNLDGFRFLLRRIRDCTHAQDKIKVGLEATGHYSYNLLGFLLDNGLPTYVLNPLRTNIYRKSLSLRKTKTDRVDARTIASMLLSDVGLKPYTDTAYHNEELKSLTRYRFDKVKERAKLKTSISRLVCILFPELEKLVPSLHIASVYALLEEFPGAKQIAAAHLTRLKTLLETASKGRYKRDMALEIRDAARNSIGSWMPAKSLELQHTIRLIRELDDEIAEIEEQIQAIMDELNSPITTIPGIGFRMAAMIFAEVGDFTRFDSPDKLLAYAGMSPSTYQSGQLKNCYPHMEKRGSRYLRYALYNATKYVCHWDPTFAAYLAKKRAEGKHYNVALSHAAKKLVRLIFAMEKSRQPYCPAA

SEQ ID NO: 168383 - protein, 360 aa, unidentified
MKIVGVDRHAKQQSIAMLDTETGELIEKVIHHEGNAVREFYSALEGLIVVEIEATGSMQWFLELLDELGVQYRVGHPAKIRAAEPRKQKHDRRDARLILELLTANRFPDIWMPSIEQRDLRILLRDRHQWVKMRARLQHTLQSIALNHALRKGTSLWTAAGLEAMRKLPLPPYTSERRNQLLRLYAQLQKRIQELDRQVEEQAQQRPQARRLLTHPGVGPLTALATEVFLGNPSRFTTAKQVASYIGMIPREYRSGQRQRLGNLTKQGNSLLRYLWTEAALHAVPKDPELKRFYRRQLIQKGMGKARVAAARKLGIRLWIMLRDQIAYEEFCRRGKLRQNGEAQAGMPDFNRGPATTVTG

SEQ ID NO: 168384 - protein, 418 aa, unidentified
MYYVGIDIAKQFHIACVLDESNKLIVKNMRVESEITDYSMLHSELVNITQDKSQFLIGMEATGLLFENLYIFLQGLGYNVVLLNPYQTTRFREMQTMKYVKNDNIDSQMIAALLKSGQYSKGYVSEDIYQAIKSLYRHKATLMQEMKNAKRQVSTTLAVVFPEFEQIIRDPFSVSGMALLEKYPTAKHYKGASGERILKLFRNIKGNNFNLQKANDLLDLARLTIYQGNASDERAYVIHSNLRRIRFLKEEIEACESQMFALLNDVNTTIETSQDEEVYISDLVDNLRSIDGVGDKTIFALLSESGDISRFHSAQAFIGFLGLYPTLYQSGNSTKYGKLAKRGAKLAKLALYQAAVACVRHNDELKKIYLDKKSDGRAPKECVIIVARRLAMIIYSIYKNNTPYNPARVFNTQASLSH

SEQ ID NO: 168385 - protein, 401 aa, unidentified
MKRLSGGIDVGSESHHIIILDEEDNFLYNQKVAHKLNEFTENIKQFKKIEKKEGGKISFALEGKNGYSAPFDRILLNQGFTLYNVDNLKLKSFREAFAGEWRDDERDSLMLSKMLKLKDYINSERERVFIKIEKPSLVTESLKLLSRHQQTLIDEKVRLVNRLGKKLLEVCPQILELGKLKNKKIIAILAKYPDFSKYKRITLKSLLKIKGIGKIQAPFLLKRLNNIEYMSGLTDIYKTIISSYAKRIMQLQREIKDIDKSLDEIGGKNKEVNHLKTIPGVATKLASRFIGEIGDINRFPSEKQLAVYCGIACVDNNSGKITKARVVYKANKICKQTLITMAGCSIRFSFQCKDYYLKKRTEGKSHNHTLRCLARQLIKVIYRMLTEDREYIVRKELKKVA

SEQ ID NO: 168386 - protein, 376 aa, unidentified
MGTPSAQTLDDVGVRKMFQELEEVPMTMVGGLDVHRQQITFDYVDDDGLVHWGQIRPATRKTLRGWLAEHCPDGNGEFALEGCTGWRYVSEELAAAGLGVHLGDPAEIAVLRGPKKRAKTDRADAKLLRTLLLEGRFPESWIPPAHVAEIRSLGRLYYTLMDERRAWQQRIHAQLFHQGCPPIKALLSAAGRDALARAPLSAAGRQYVDTALRRIDELSAEIEPLRTQLVNFARRQQGCQALQRHYGIGWLCAAIIWAEIGDTRRFTSSDQLVRFAGLDITVYSSDSKRSPGHLSRQGSPELRWAAFEAAKCAARRGSPDYAYYHRQAAKHDGHNGKNPTLAVERKILRRCYHTLRDLGDAALALPDTRPQQEVAA

SEQ ID NO: 168387 - protein, 420 aa, unidentified
MIPAVIERCAGLDVGRKFIEVCVMVGEAAAVPREQTRKFSTLNEDLERLRQWLHENGCTHVAMESTGSYWRPIHNILDDGQLQLILANSQHVKNLRGHKTDRNDARWLAHLLRHGMIRPSFIPDRKTRELRDLTRRRKQMVCCAADERNRVQRVVQEANVPVGAVLSDLFGESGLRMLDALMDSRQAAEQIAELAVRQARKKIPELRPALEGHRMTDHHRTLIRHSMEHLAFLEEQIAELDAEIAAHVKSHATLQAATELAQSVPGIQQTAAAAIIAETGADMSQFPRADKLASWIGTCPGNNITGGKRKSGQIRKGNPWARRTLVECAWSATRKKDSEPQRYYERLKPRLRHKPALIATAHLLTLRLYETLATGKPYAEDPQPELTAAKVQRLARHHSRRLRHLHRWLDEHKKRCVQKG

SEQ ID NO: 168388 - protein, 411 aa, unidentified
MKHQNYLFVGIDTHKNQHTAVVINCFHQKLGSVQTFNNPSHYQSFINNLKSLDSTDKTLVFGLEDTQGLGRSLAQWLIEHEYTVKEVNPALTKRERHHSPNPDKSDEVDAKAIAEVLFSKWDELPTINQDDNFKAIRQLNNQRKSLVKQKTKIKNRLHNLLHQQYPNYKEFFSDPFGKTAMAFWEKYPHPAKLKHYGPKRLQKFLNNQAKSISNDKAKFILSLVDKDRRQDMSSDARNSIIPMLIKQLRLINQNLEKMNKNLKNTVNKSQYKLTTMPGIDFKLAAMFISNIKNIDRFDSADKLARYAGIAPSKYSSGKAKNTISKKYGCRQLNHAFYLLAVQQVGVSCSGKIKNPVAYKYYQKKLSEGKSRKVALTCLQRRLVDIIYAMMRDRSAYELPGKPDYESINKAG

SEQ ID NO: 168389 - protein, 424 aa, unidentified
MKVTYQTCCGVDVHKSFLVATIVKTTGGIEPSYQKKRFSTFNNSILEFKQWLLDNDCHDVCMESTGKYWVPVFNLLEDDIHVVIANPKWVKAVKGNKDDTKDSKWIGDLFRLGLVKGSYIPCKKVRILREYTRYRYKLVSCRSSEKNRYQNALTVCNVALDSVVSDIFGKSSTSIIDYLLEQSGTSINHEEIASKLLRSLKSKEDAVIESVEGYQMTDAQKYRMRLVRAHMDYITAEINDVDKMIQNMISSNPDFANAVQFLCTIPGVKRDSAITIISEIGTDMSQFSSSKRLCCWAGLTPGSNESAGKKKSVRITRAGIYLKPALVQCAHAAVKSDKSPYYKKKYDSLVKRRGKKRAIIAIARMILTAIYQMLSTGEQWNPSDLYKIDMPVALVEKQKAKAIKQAKKLLQQEGLLPPDEPLAS

SEQ ID NO: 168390 - protein, 312 aa, unidentified
MAKDTMGIDVSKDRLDAFWHSQEEARSVANTAEGFEQLCAWIGQKDDVLVVFEATGAYHRGLERHLSLAGQPYIKVNPKQARRFAQAIGRLAKTDSVDAKMLARMGVGLDLTPQQIESEDVHDLRELLTARRALVKDQITAKTRLSTAVNPLIREQLSRRIGDISADVKALDEAIAQIAKQRGTLEERIRRLTTIPGIGRLTATTLLIDMPELGQLDSKKIAALAGLAPMTQQSGKWQGKERITGGRASLRRAIYMPALVAIRFNRDLHDKYQQMVKAGKAKKVAITAIMRRIIVLANTLLREGRDWQPQRP

SEQ ID NO: 168391 - protein, 383 aa, unidentified
MQPTQAQYFTPDAAVLAVSLELAKGSWKVALHDGRRAKPAVHTVAHEQAAGRLAEAVQLVEATKRKWQLGAATRVVVIYEAGQDGFWIERALAALGYEVKVVDPASLPVTRRARRAKTDRLDAIGLVLSLLAWLRGERDRMQVVRVPAVAAEAQRHGVRERGALQKEIGQHRDRIRKLLRTVGCWEEVKSDFAQRLARGAVVCHDDSELPAQLRTRLERECERLALAVGQLKTLEAALMEALPEAVRERIGRLMQIKGVGQVGATRLVLELFWRDFANRRQVGACVGLVPQPYDSGESRVDQGISKQGNRRVRALLIEMAWLWLRYQPDSALTQWFAYRTQGSGPSKRGKRIAIVAVARKLVIALWRYLEQGVIPEGAALKAA

SEQ ID NO: 168392 - protein, 359 aa, unidentified
MKIVGCDFHPRWEQIAVFDVETGEMSEHKLLHSDGEAERFYRALPAPALVGIEACGNSQWLIEMLKELGHEVWVGDAAQIRASYVRKQKTDRRDAGHILRLLMENRFPRLWTPSAEQRDLRQLLMHRHKLVEIRTRVKNGLQHLALNRGLQKKSGLWSVRGRACLEKLPLTGWTARRREDLLKLLAELDRHLGELDQAVDQAAQEHPQARLLMTQPGVGPVTSLAFVLTIGDAGRFRHSNQVASYLGLIPREHSSGGRQRLGAISKQGNRFMRQLLVESVQTVNRLDEGFRRQYAARCHHKAKGVAKVAAARKLAVRLYWMLRQNVGYPEIAHIESSSRVPLIGSAQIEGLVERSRIQH

SEQ ID NO: 168393 - protein, 340 aa, unidentified
MFRKGVGGKAPTPMMLGIDVSSCSLHSALCSQEAVAPKWRKQVQNNMAGIRELLAATPADIPMVVEPTGRYSLLLVEQARAAGRRVLLAPPRESHIYLKSFNPRGKTDALDGRGLAWYGLTHPLREYPVKSVTVDTLDQMLSARKGLAKALSNLTLQAHSLPRAADVIAPSIQHLRQRIREIDKQIAAQTKEHPEFGVARNLQKVPGVGAVTAAAVTSRLCAKQFVHPDQFVAYVGLDVALNDSGKIKGRGRLSKHGDAELRRLLFMCAKANLRCKESPFKDQYQRERAKGLASTAALCAVARKIACVLWSMHKHNAVYDAARVSRRAKKEEEAPQQPGA

SEQ ID NO: 168394 - protein, 406 aa, unidentified
MNMNAVGIDVSKRKSTVAILRPGGEIVKKPFDVPHLSSDFRSLTRLIQDLDGETRIVMECTGHYYEPIARRLSQAGFFVSAVNPHIIRNFQGHDNPLRKVKTDKADSVKIARYTLDSWGNLKQYTLMDELRSQLKTMNRQFSFYTKHKTAMKNNLIGLIDQTYPGANTYFNSPVREDGCQKWVDFVDTYWHVDCVRKMSLTAFINHYQKWCHRRRYIFSKLKAEEIYGKAKELVPVLPKDNFTKRIIKQAIAQLNTTSKTVEELRNLMNETASKLPEYPVVMAMEGVGPSLGPQLMAEIGDVMRFTHKGAITAFAGVDPGVNASGEYSQKSVHASKHGSPVLRKTLFQIMEVLIKNKPDDAVYLFMDKKRAQGKPYYVYMTAGANKFLRIYYGRVKEYLLNLSELN

SEQ ID NO: 168395 - protein, 341 aa, unidentified
MEYCGIDLHAEQSRICILDEDGEVMETSTIRTSRKALERFFSRDAMQVVLEAGGSSPWVSRLLDSLGHEVVVCSPRRVRLIAESKLKNDRVDAEVLARLVRLDPEFLRPIQHRSEEAQLLRANLKVRSAMVEARTKWINTIRGLLRSFGYRVSGKAPHTFVERVDKMELPGELRAVIEPLLEQLDLLTGEIDRRNEHLEEMVKDLPEVEHLREIPGVGPVVATYFVLTIDDPHRFRNSRDVASFFGLRPSMRESASVSHFGRITKEGDPEMRRLLVQAAHACLLTKADSELKSWALALAERKGKNKAAVALARKLAVLMHRLWVTGEVYKAFPNSEGTQAA

SEQ ID NO: 168396 - protein, 405 aa, unidentified
MKIIALDVHRTFAQVAILENGKIRDAGRLELEREHILKFAERLNVEDEVVLEATVNTKAIVRLLSPFVSRVVISNPLLVRAIAWAKVKTDKIDASVLAKLHASGFLPEVWMPDEETERLRRVVAEQVQLVSQMTRLKNRVHSVLHANLIPPYNASLFTKRGRKWLEEQPVAHDQRRVILRHAGELDRLGLELKQIDEDLAQTALQEPRVKQLMTITGVNMIVALSVLAAIGDIGRFSSPEKLVSYFGLNPRVRQSGDKAAYHGRITKQGRSHARAMLVEAAWSVSRTPGPLRAFFRRIREKRGNQVAAVATARKLTVVIWHMLSKGEEYIWSRPALLDWKLRKLELTAGYPSHRGGRTKGSAADYCLKSVRDREREAVGHAEEVYRRFVIMWKQKSPMAKPVAPQ

SEQ ID NO: 168397 - protein, 343 aa, unidentified
MDHFAGLDVSVKETSVCIVDDSGRIVREVRVASEPEALLPVLTNPAYHFKRIGLEAGPLSQWLFGALAEAGLPVICVETRHMRAVLKAQINKTDRNDARGIAQMMRAGLYRPVHVKTLSSQKLRMLLTHRKLLQSKAIAIDNDLCGTLRNFGLKVGMVGTVKFEARIKELVENLPDLAILVEPLLIVRRVLREQLGILQRRLLAIVRDDDVCRRLMTVPGVGPVVALTYRATVDVPARFRNSKSVGAAFGLTPSKYQSGEINRTGAISRCGDEMMRVMLYEAAQTMLVVSTKWSWLKAWAMKIARHRGMKKAIVALARRMAVIMHRIWVDGTEFRWTRDIAAA

SEQ ID NO: 168398 - protein, 348 aa, unidentified
MLADEVDYVVGVDPHRDSHALAVVEVVTGAVVFEASVEATSDGYAHVLTLVDQRAAGRRVFAVEGTGSFGAGLTRFLTGRGERVLEVGRLRRERRSGGKTDALDAIRAARSVLAHNRPATPRAGGERQALQALVAAREGAVNAKRAGLCQLRDLLITAPEPLRGELRPLTRARLLQRLAATRPGGGRDPELRGSMLALRSIARRVLQLTAEERELAREIETLTRKLAPQLLDQPGVGPHAAAQLVLSWSHQGRITSEAAFARLAGAAPIPASSGQTIRYRLDRSGDRKLNRALHMILVTRKRSHPATIAYIERRLQEGKTRREANRCLKRYLARNLYRPLEHGPPLAT

SEQ ID NO: 168399 - protein, 376 aa, unidentified
MREKLRFLGLDVHAETIAVAVAETNGETRSLGTIANREDSIRKFIKKLGSPEQLRACYEAGPTGFVLYWQLTQLGVDCVVVAPSLVPKKPGDRVKTDRRDALKLAHCHRNGDLTAVWVPDDASEALRDLVRQREAAKQDQLRARHRLTKFLLRTGQRPPLGLKPWTERYMRWLAQVRYAQPAQEVTRLDCMNEFEHMSVRVKRLEEAIFEVVKQAPQAMQELIRGLQALRGVAHISAVTIAAELGNISSRFQTARKLMGYSGAFPSEDSSGNRIRKGGITKAGNAHLRRIVMESAWCYRHLPRVGEKLRKRHQGVPAEIIEISWKAQNRLYKPYRKLTMAGKDQRKVITAVGRELLGFIWAIAIKAESISTQPIAA

SEQ ID NO: 168400 - protein, 470 aa, unidentified
MAARKDKADGAGVPGHGGDGAEVAEELTQVVAYAAAIDVAKGFGMVCTRVPGSRPDRRRQKVWRVEATCGQVTALMDHLRAEGIQRLVLESTSDYWRIWYYLAEAAGLEVWLVNARDVKHLPGRGKSDTADCVWHCKLNERGMLRRSFVPPEAVRDLRALTRTRSRLAQDQARHQARVEKILEDALLKISVVISDLFGTSGRRFLDALVAGERSPQALAALGDYRLKASRAKLEEALTGRFRDIHATEIALHLRLIDAINAEITALDEQIGQQLAAVPGTAPACSGCGLAGGGHTPDCDDLGILLLGLADRLDEVTGIGAVNGRAIIAELGTDPSQFPTPGHAAGWARLTPRSRQSGETARPGRTGKGNRYIRGALGQAVMTAAKTDTRLGAMYRRIARKRGKQKAIVAVARVICEIAWILICDPSARYQELGPDYYTPRSPARQTQARIREIERLNPGKKVILADDDAA

SEQ ID NO: 168401 - protein, 319 aa, unidentified
MAQIVVTAGIDVSKGWLNVALWPLKAKLQVDQTGAGYAQLAAWLTQHGVVRVGLEASGGYEIAVIDALEVHGFEVVRFNAQRVRLFAKAKGRLAKNDRADARTIAQATAVLLDAAPTPRRRDLDPLVEHLTYRRQLRAWITDCTNQLERLRDRTLRNKVERRRIAVQQELAGLDKRLAALVAEHDDWHVLERRLRTVPGVGPVLAQTLIALLPELGRLSRRAIASLVGVAPFDDDSGNYAGERHIKGGRAAIREVLYMATLVAKRYNPLIAAFAKRLAGKKPKVVLVACMRKLLVILNAMARDGQPWKYAGQHALDPVA

SEQ ID NO: 168402 - protein, 343 aa, unidentified
MKTVTTIGLDIAKSVFQVHGVDAEGKVAVRKQLKRARVMPFFSKLEPCVVGIEACASSHYWARELTALGHEVKLMPPAYVKPYVKRQKNDAADAEAICEAVQRPNMRFVPVKSPDQQSGLVLHRTRHLLIRQLTAVTNSIRAHLAEFGIVAPVGRRGVEVLIGLVTDGKDDRIPGLVRTCLAALSIQVQALKDQIRILDRRLVLWHRSNETCRRLDAIPGVGPALATALVASVADPKAFRSGRDFSAWIGLVPKQNSSGGRDKLGNITKAGDRYLRSLFCAGALAVIRYAKKHGTKHRPWLTSLLNRRPTKVAAIALANKLARMAWAIMAKGEPYKEPIALAR

SEQ ID NO: 168403 - protein, 310 aa, unidentified
MDAIVVGIDVSKDRLDVHVLPSGEAFFVTNDAAGVETLAGRLARLGPSVVALEATGGFELLAASTLSAAGVPVVVVNPAQVRSFADALGKRAKTDPIDAAVIARFAVASGVKAKPLADEQTRLFAELITRRRQIGAMIVAEEARLTRAANRQLKKSISRLLVALRREMETLDDDLDSQVRTSPLWRIKENLLSSVPGIGKGIARTLIAELPELGSLTAKQIASLAGLAPFTRQSGKWRGKSFISGGRASVRAALFMGALVASRHNPILKAFRDKLVAKGKPKIVAIIATARKLLTILNAIIRDQKPWQSA

SEQ ID NO: 168404 - protein, 466 aa, unidentified
MESFYLGIDVSKGYSDFVIINNKKQPVVENFQLDDTFESHNRLYGILQEFLVQRPKATVYAAVESTGGYENNWYNSLSKFQGSLSLKTARLNPLAVVHNSKAGLTRNKTDKISAQNVAEYLVAHPEKVTYQHHDQMASLRKQWGFIQMLTKQSTQLRNQLNSLLYTTHPEMLSFCQDGVPEWILKLLIDYPTAEQVKKARAKTLAKIPYVTMQRAQQLVANAKRSVASATDEVSRQLVSDTAQQILHLKKTIATQTDLMIDACDLPEVALLKTFVGIGDKSAIGLLLEIESVARFKTVKKLASFWGLHPVYKTSGDGSGGFKMSKQGRKSPRKILFTVALAAIEKNPVIKALYEYHLKQGRKKMNAIGICMHKILRIIYGMLKNNTPFDPKIDRANRQRMIPVKATNGKESKDRRFEGYDPAAPVSRRQRKKRVEREQPQSVNNTMRGISAPVHISTILANMLCKV

SEQ ID NO: 168405 - protein, 369 aa, unidentified
MEQHTEVFVGLDVAKVRHAVAIAESGRDGEVRFFGEIDADAESVRRMVAKLAKRHAALHFCYEAGPTGYGLHRQLTKLGHQCSVVAPSLIPRRAGDRVKTNRRDALQLARLMRAGELTAVWVPDEAHEAIRDLVRARETAVDDLRRKRQMISSMMLRQGRIYPGKKTWGARHARWLQEQSFAHPAHHLLLQDLLLATKHAEERLGRTDSTIVEFLPKWSLAPVVEALQALRGVSLVTAAIIMAETGDLRRFENPRQLMGYLGLVPGESSTGEHVRRLGITKAGNGRVRRALIESAWSYRHLPRTGKEKHYLVERVSPGVRDIAVKAQSRLCGRYRALSGKGKNLNVAVTAVARELAGFVWAIGMEVQAG

SEQ ID NO: 168406 - protein, 399 aa, unidentified
MNYFGIDISKRTSVIAHYQDDIFQKEFTIQNNKNGYNQLLNYLNEMDQFQFVFEATGIYSRGMVKFCRVNQIDFIEMNPLEARFKTSSLRAWKTDESDAHKLALLAPYLKASTSLDSNPDIFFELREQARFHVEIENDQNRLKIMIIELLHQTFPGLEKLFKNRYSKIALNIIEEYAHPDLVSQKDIEILTSSIMEYTNKNLSYQKAQNYAERLNKIAQESYPNVKHSSFLVKKVRLLIQQLKSSIQQLSQLDKEMIELAQQLECFEVMHSIPGIGKLTVAMIIGELGDLTKFKTNKQLNAYVGIDIKRYQSGKTQYRDTINRRGNKKARRLLFLVVMNIIRGQRNYNNHIVDYYYKLRKQPNEKSHKTAVVACINRLLKTLHYLVNESKLYDYQMSPH

SEQ ID NO: 168407 - protein, 425 aa, unidentified
MNSTQNHKINQVTENTLVVGMDIAKHKHYACFIDDRGRILQKSFPVMQSGHSFEWFYGRILAAMKTHGKSEVIIGIEPTGHYWLNLAYFLDDRGIPLVMVNPMHVSRAKELDDNLPTKNDTKDALVIARLVKDGRFSYPRILKGMEAELRVGANLRSKLVEELASVSNQLIRWTDRYFPEFPQVFPSFGKMALAALEQTPFPGDPVGKEVDEVLMLYCQSEGLKAPQRPKAIKLIQLAESSIGVTEGNQMARIEVATLVRRYRQLEDEIKLLTQQLTELVQQSVEYQWLKTVPGLGDATIVELLSEIGSFSHYQDPRQLLKLAGLTLREHSSGQHKGQKRISKRGRRRLRALLFRVMMPLIRHNEAFRQLHEYYTNRPENPLRKKQSIVVLCGKLLKVLYAISTKQVAFDAKRMMQDIPKLEMAA

SEQ ID NO: 168408 - protein, 334 aa, unidentified
MRDHSEAFVAFDTSKLRNAVAIAEAGRSGEVRFLGEIDNTAGATAKLVKKLAAKYGRLSFCYEAGPTGYGLYRQISQLGHDCMVAAPSLIPKKAGDRVKTNRRDALGMVTQFRAGELTAVWVPDPRHAAMRDLTRARGTAVEDLRRKRQHISSFLLRLGLHYAGKKTWTKTHMKWLASQKLEHAEQRIAFEEMLLAVRQAEERIARLEEAIRAMVPDWSLAQVVDALMAMRGIDMVSACAFLAEIGDLSRFRSPRELMAYLGLVPSEHSTGDTVRRGSITKTGNRRARRILVECAWSYRHPPRVGKKKQDKVAAAPLARSPGKRSTGCTVATGR

SEQ ID NO: 168409 - protein, 341 aa, unidentified
MDIVVLGIDLGKNSCSLAGLDTSGRVVLRRRMRRSSVESFVNGLGRSTVAMEACCGAHHLGRVFAAQGHSVRLMSPEYVRPYVKAQKNDELDAEAIAEAATRPTMRFVTVKSQYQSDVQALHRARERLVSERTALINHLRALLLERGIVAPQGRRKLQEELAVFADEDGIEALSPRIRLLIEDLRSEWRALDERIAAFDAEFVRMAREDEAVRRLTTIPGIGTINATALAAAVGNARAFRRGRDMAAWLGLTPRQMTTGGKPRLLGISKRGNRYLRKNLIHGARAVLPYLVERETPLGRWARGLLARAHKNIVVVALANKLARIAWAVLARGRTYEAAAAV

SEQ ID NO: 168410 - protein, 364 aa, unidentified
MKRKVYVGMDVHKETIRIANLTNNTKEIVKEQQIKHNEVQIKKFVNKLKSEWNEIHSCYEAGVTGYPLYRYLKSLGVNCILVAPGKIPRQSSDKIKTDKRDAIKLAKLLRSGELESIHVPSEEDEAVRDYLRSRDSLRLDLGRNRQRLMKFLLRKGITYSKTKYWTVSHNKWLNNLQFNNEILQETFNDYYSRVRVQEENLKAMDKRIQEIAESEPYREKVGILRCFRGVDYLTAMFLLCEVCDFKRFKTAGSFMSFLGLVPGEYSSGSKRKQTGITKTGSPRLRRILTEAAWQHRFPGTGSKIVTARRSGQPALVVALAEKASLRLHKKFRNLQQRGKTPQVIITAVSRELSGFLWAAMNLVA

SEQ ID NO: 168411 - protein, 421 aa, unidentified
MPNIEIGVDSMDKENFIYVGIDLHKETHTAVMIDCYNQKLGEITFPNRPADFPKLVAKVKKCNTDGKTIVFGLENAYGYGRALAVWLIDKGYLVKDVNTAISHRQAKHRGAMYRKSDSDDAEAIALATLNMLDKLPDAYPNDAYWSLGQLVHRRDNIMKQRTRLVNQLHEQLCIAYPSYKQFFNDISRPTALYFWEHYPSRKYLKGKSVEDLRAELVPVSHNKCSTKTCEKILDAVASDKVKNNAYQDARDMVTLSIVSDLQHYDSQLAEVDKMLEQMYKMLGCTLTTIPGVNVITAVKILAEIGDIKRFSNANKLAQFAGIAPLHLSSSGKGKDVATKQGNRRLQATIYFLAIQMVQISSKGTPRNPVVRAYYEKRKAEGKTSQQALICISRRLISVIYGMLKNGTEYRMPVVENAGETV

SEQ ID NO: 168412 - protein, 359 aa, unidentified
MGYERTFVGLDVHARSVVGCAMDTVTGEVVQRRLGTDAGEIRHWLGELDGPVAVTYEAGPTGFGLARDLRGHGFRCLVAAPSKITRAPGDRVKTDARDALLLARLLKMGEIVEVVVPSVAAEAARDLVRAREDCRGDLMRERHRLSKLLLRQGIVYSGGQPWTGVHDAWLRRQSFDQPARQVAFESAYEAVVLTTGRRDRLDVAIEEMAADSEFTPVVNRLGCLRGVSTLTAFGLAVEIGDWHRFTGSSIGAFVGLTPSESSSGQSRSLGSITKTGNTHARRLLVEAAWHHRRRYVIGATMTRRWDRVDAAARTRGHQGNQRLHARWQRFDARSKRPSVANVAIARELAGWCWSLAIMT

SEQ ID NO: 168413 - protein, 392 aa, unidentified
MYIVGIDIGKNHHEASIVSPEGKQIGRSLRFATTHKGADSLMSFIFKNIGNSPCVFGMEATGHYWYPIYSFLKAKGYTICVINPIQSDSLRKMYIRQTKNDSIDSFFIAEVIRFGQFGTTSMADENILAMRQLCRYRDSVISSRTEIKLRIGTIMEQIFPEYEKQFSSLWVSTSMGILEKYLTPENIENAPIDELFEIIKDKSHNRLTKAKAISIKEAAADTFGIKIAQDAFSFQLKQLIDRMNFLDKQIEALDIEIMKYYEQFDCYLHTIPGIGMIATATILAEIGDIHRFKSSSALVAFAGIDPTVRQSGEFNSTHNHMSKRGSPYLRHAIFLAATTCSFHNSPLNAYYKKKRDQGKHHLTATRAVARKLTTVIYAVLRDGKPYEPKKFC

SEQ ID NO: 168414 - protein, 368 aa, unidentified
MNKSITGYVGLDVHATSTAISFAAAGRAKPRFVGTVGAKRPQLTKALSQLGKPKSLVVVYEAGPCGYKLARELTDQGYHCEVVAPAKIPRSPGDRVKTDRRDALQLASLARAGALVSVVIPDARDEAVRDLSRAREDAVRARLKARQQLKALLLRHGLRYSGKTSWTAAHERYLATLTFDHPAQNIAFAEYRQAVAESQARVERLTQALAQQVEQWRMRPVVYALMTLRGLDLVAAATLVAELGDLRRFARPRDLMGYLGLVPSEHSSGAKRRLGAITKTGNGHARRILVEAAWNYRYPARISRVLQVRQEGQPAAVRDIAWRAQLRLCNRYRRLSARGVQHNKVCVAIARELLGFVWDIGQQVAPEA

SEQ ID NO: 168415 - protein, 273 aa, unidentified
MKQYVGLDVSQKETSVCVVDDAGRTVYEGRVKSDPGALTELLRKRAPHAERIGFETGAMASWLWHELRRVELPVVCIDARHAHAALSVRVNKSDRNDAKGLAELVRVGWYREVKVKSEESQRVRAILVARSRLVSIRRDIENQVRSIIKEYGFLFRRAIGLQFRNQVIELLGEDHHLRAVIDPLLSIHEQVCRQQDKFDDEVRHLAKSDETTRRLMTVPGVGVVTALTFRHTIDEPSRFRSASAVGAYLGLTPRRNQSGEADTNGRISRWGDR

SEQ ID NO: 168416 - protein, 340 aa, unidentified
MFKYLGVDLHKKQFTVCWMDEIDEKKVKVEEYPVSSAGFKKFKGKLTGSMEVAVEATGNSGYFCEAVRSKVSKVVAINPMQFKVISTSVKKTDENDAVMIAKYLKMGLLPEVRQMDKGQRELRSLINTRDKLVKLRSCLKNKIHNILNENGIVSQREMFSSDVSLERVQQAEISDTAKFEIGVIVEQIRSLTKSIKDIEEKIKDTSNNMPGHKNLKSITGIGDLSAAIILNGIGDIKDFDDPKKLCAYVGMVPSVRNTGDTVSHGHITRRGNKILRTTLVQVALIAIKYNSYLRKFYERLKAKKGSGKAIIATARKVLEIVYNTLKNGWVFADFNNFVLE

SEQ ID NO: 168417 - protein, 373 aa, unidentified
MTKNLRYLGLDVHAETIAVALAEPGGEVRSLGMIPNEPSAVAKLVRKLGGREQLRACYEAGPCGYVLYWQLTKLGVACAVVAPTLVPIKPGDRVKTDRRDAEKLARCHRAGDLTAVWVPDAAHEALRDLVRAREAAKADQLRARHRVSKFLLRHGMRAPGDVKPWTQRHRRWLDTVTFAPVAQQTTLADYIHEVDHAGARLERLETALDVAIAAAPPAMQTIMRALQCLRGVRQLTAATIVSEIGPLSRFAHPRQLMGYSGTVPSEYSSGSSVHRGAITKTGNAHLRRVLVEAAWAYRFPPKCGDALRTRQRGQPPGITDIAWKAQQRLHTRYRRLLGRGKPVPHVITAVARELVGFIWAIGIAAEREVAIAA

SEQ ID NO: 168418 - protein, 355 aa, unidentified
MEYGAIDLHKKESQIRIVTTAGEVLDQRIATTRDRFTAVFWGRPRMRILVEASTESEWVAQHLETLGHEVVVADPTFAPMYSERSRRIKTDRRDVAALADACQRGCYRAVHRRSASQRTVQWHLNVRRELTDSRTRAISLARAITRGAGLRVRSGSTASFLVRVSALDLPSSISETLTPLQRQIAILNEELVTADERFATIAAQDPVVARLTTVPGIGPITATAYVAALDDAARFGRAAQVASYLGLVPREYSSGEQQRRGRVLRSAHPYVQSLLVQAAWRVWLSKDPRTAGLRRWAQSLAHRRGKNIAVVALARRLARILFAMWRDGVPYDAAHTRPTRTRGAASIAVDVAAPA

SEQ ID NO: 168419 - protein, 406 aa, unidentified
MELVTLYKRVVGLDVHQAKITACAISEDEAGKVTVELAEFGGFKRDRQALAEWVSTRDPEVVVMESTGIYWKSPYAALEKLGIVATVVNARHVKTVPGRKTDWADAQWLATLARSGLLRASFVPPAKLRELRQVARQRQQLVGILAGEKNRVHKVLSDGGIRLSVVVSDIHGVAGRTMVKALIEGQSPAEVLMLAGNRLKADRQELLDALDGDLTAEHRFVLRELMAHVQELEQRIDRFDRHLLNELEPYRTTLALMQTIPGIDAIGAALLLVEIGNDMDAFGSVDRLASWVGICPGNNESAGKRKSGRIRKGNPWVRRLLCQFAHAAGRTQCAFKSKFEALRLRRGHRRAIVAIAHKILKTVFLLIRRQTHYRDSVVDFEAMSVTRNAPRWLKMLRKHGFIPAAA

SEQ ID NO: 168420 - protein, 311 aa, unidentified
MTETTIGIDISKDHLDAHRLPGGEYSRFDNTSAGHKALLRWIGPTPTRVVYEPTGPYHRKLEVRLAAAGMPIVKVNPRQARRFAQAAGGLAKTDALDAAMLARMGAVLGLEARPVRDAVLNTLKDLHLAREALVKDRTAARNRAKVITLTLLKQHSVARLKQIDQQLAAIDAAIAAEIGADPTLAARMAILVSIPGIAAVTAAMLVVEMPELGGLDPKAAAALAGLAPITRQSGRWKGKAFVQGGRKQVRQALYMPALVAMRFNPDMKAKYEQLTSAGKAPKQAITAIMRKLIVLANALLKKAMPWQQKLA

SEQ ID NO: 168421 - protein, 419 aa, unidentified
MENRQFQYYVGIDWASDSYQVCVIDADRKVLGEKQFDHSGDGIRECIDWLLKWAAGDVSSIAVTIEVPHGAMVESLIENRLTVFAINPKQMDRFRDRHTVAGAKDDDLDAFVMADSLRTDQSCFHLVELDEPAILRLRELSRMEQDLQTDHNRLANQLWEQLRRYYPQMLKLSPAANEVWLWDLLESAPLPGDAGKLRLAKVKAILRAHRIRRVTADQVLEQLRQPPLRLAPGAAEAASEHVRMLLPRLRLLQQQRDATARRIRQILDELSTPEGQGCEHRDAEILLSLPGIGPVIAATMLAEAAQPLRDRDYQALRNYAGAAPVTRRSGKRKVIVMRYACNERLRNALYHWSRTSMQNDARAKQHYAELRRRGHSHGRALRGLADRNLAMLMAMLKSGTLYDPARRSSTTTNALGEAS

SEQ ID NO: 168422 - protein, 398 aa, unidentified
MLMIKLTVWALPHTKWRHCMEIITRNEKILYIGIDVHKDTYSLCCFDFHKNELSDEMTIKATTKAVIKYLEAIKKKHREEILFACGYEAGPTGYGLCRGLQKAGYGCVVMAPTTMSNPDGKRRVKTDRIDARAIARILAYKSYSQVHLPSEEMEALKEYTRARDAKKRMFKKAKQELLSFLLRNGKSYPESGNYWTEKFFKWVKTVQFSEKWMQEAFNEYLSEVYSLKAKIELMDMKIREIAELEIIKDKVDKLVCFSGIDVTTAVETAVEIHDFTRFATAAQFVSYLGLCPGEDSSGKTKNMLPLTKAGNKRVRALFCESAKAIKRTNPYGQKSKRILERQKNASPEIVAYADKATKRIRTKMRHLEERGKNYNVSSAAGARELACFVWGMMNGKIA

SEQ ID NO: 168423 - protein, 392 aa, unidentified
MIYVGIDVAKDKHDCFIASSNGELSFNPFIIPNNRKGFDALYQKIRSVSDGLTKVKVGLEATGHYSYNLLGFLLDKGLTTFVINPLHTNLYRKSLSLRKTKTDKVDSRTIATMMMSDMNLKSYSDTSYHNEELKSLTRYRFDKVKERAKLKSSVSRLVCILFPELEKLVPTLHMASVYALLSEFPGADAVASAHLTRLSNLLSESSKGRYGKDTAVMFREAARSSIGSHMAAKSPELKHTIKLIQELTIEIDEIETAIKRIMDEEIQSPILTIPGISYRMGAMIIAEIGDFSRFDSADKILAYAGMSPSTYQSGQLDNCHSHMEKRGSRYLRYALYNATKYVCHWDESFGTYLEKKRSEGKHYNVALSHATKKLVRLIFAMEKSRRAYIPVP

SEQ ID NO: 168424 - protein, 319 aa, unidentified
MKSAAVIGVDVSKLRLDIAIEGRPGARQIDNTRAGIRAWLAELPERCLIGVESTGEYQQLLVSCAIKAGHTVYVLSARDLFRYSQSLGRRAKTDRLDAQLIARYLAREHQYLHPYHLPSKIQQQVDQLIRRRHTIVVMQGTLRQSFATLSRKLRSSRRAAVALQGLIDEIDRELKGLVQKDPALSSASVHLLSVVGFGPLVSTALAHALTRHDFRGSDAFVAYIGYDPRVRDSGQYRGRRFLSKRGPAEMRRLLFNAAMSASRTTLWRPVYARYRARGLSTTATLVILARKLARIAFSIVKHNVVFDPERFQRSACVQP

SEQ ID NO: 168425 - protein, 318 aa, unidentified
MTRSADVEWSSVGIDVSKAELVIAVAPSGERWTSATTPEALVAFVARVKTVAPSVVVMEATAGYDVPVAVACAAAGLPVAVVNPRQIRAFAQAIGRTAKTDPIDAEVIALFGERVRPEPRPLPDADTQALAALVARRRQLLEMLHAERQRLEQATATAVRRDLRQHVTWLKRRVADTDDELQKRIQKSPAWREKDDLLRSVPGIGPAVSRTLLAELPELGQLDRRTIAALVGVAPMNRDSGRFRGKRMIWGGRASVRQALYMAALVASRYNAPLRTFYQRLQAAGKPKKLALVAVMRKLLTILNAMVKHNTEWQQQAA

SEQ ID NO: 168426 - protein, 350 aa, unidentified
MEYIAFDAHKRYTLASVVRPDGQLVREQRIAHERGALQEFLGRCERGSPVAVETIGNWYWIVDEIEAAGCLPRLVHARKAKLMMGEINKTDKLDVRGLNRLQQAGTLPTVWIPSGELRDQRDLPRTRMVLVRQRTQLKNRVHATLAKYALHDVEVSDLFGVRGRELLRQRLSLLPPHTAYATEQLLEQIEGLDRRVHGFEQRIQAVFKPTPVIQRMLTLPGVGLTLAVVIALEVGDVTRFATAEKLASYAGTTPRVHASGGKTRFGPSRPDVNRYLKWAFVEAANAICLTRGRRSHRHVSRLYERVARRKGHGKAIGAVARHLAEATYWMLSKEESYREPTASRRFVHGG

SEQ ID NO: 168427 - protein, 368 aa, unidentified
MQVISNRRETSGAIRNDLGAIFVSMELSRSTWLITSLSPGGGEKMSRHTLPAGDIGALLARFSELGQKALMRTERSFPIIVIQEAGLDGFWIHRVLESEGIESHVVDPASIATSRRRRRAKTDRIDGEALLRALLAYKRGEPRVCTMVKTPAPEEEDRRRLCRERRVLTNERVLHVNRIKGLLFSQGAAGYEPLRRGRRQRLEELRTGDGRPLPPHLKAQISRELDRLELLLEQIKSVESERDALLAAQQTTPKPAAMLLAIKGVGPESAAILWSEGLCRHFDNRRQVASYAGLAPTPWQSGAIHREQGVSKAGNPRLRTTLIQLAWLWLELCRKIGDGVNQAADLISATASIPSLNFIPLTTFGNWF

SEQ ID NO: 168428 - protein, 317 aa, unidentified
MKVVVGIDVSKDWFDIAWKENDRIKTQRFDSTASGINQLMKATPADAIYVMEATGVYHARLAVTLFETERNVAVINPLVIKRYGQMRLSRVKTDTADASLILSYGESVEFMLWKPEPHHIQELKVAQGWLDDLTEDMTRLSNRGHAQSYLVVRSAMVDRQFLRRKEQLKQDITECEAHLEKQVKKHFAELYKLLNSIPSIGSKTATQLIISTGGFTKFISIKQLSAYVGVSPTTYESGSSVRGRGGIAKMGQGRLRQLLYLCSWTARKCNPSCVALYERLQALGKPAKVISIAIAHKLLRQAFAVATKKTAYSPEFA

SEQ ID NO: 168429 - protein, 464 aa, unidentified
MKKKTGTEKLRQRRVQGHLDQVNLYAAGIDIGSNSHYVAVPQELDENCVREFSCFTGDLNRMADWLVKIGIQTVAMESTGVYWIPAYEILEERGLEVLLVNARHVKNVPGRKSDVQDCQWLQRLHTYGLLQGCFRTPEESIALRTYMRQRQSLIESASDHIRHMQKALRQMNLLLDNVVSDITGKTGMGIIRAILSGERDPQELTKLRDPRCKENNKTIAASLEGHYREEHLFSLKQSVELYDFYQQQIITCDEAIEQQLHTLESKGDGDDLPPIKKRKGKNSLNFDVRSELHRITGVDLTKIDGMDENSILKVLAETGTDMSAWPSEKHFASWLGLSPGNKITGGKVLSSKTKPTANRAAASFRMSAYGLFNSKSALGAYFRRQRSRLGAPKAITATAHKLARIFYSMIKKGEEYVDHGQEYYEEQYRGRVVKNLKKKAQSMGFLLVADVAASDGSDATLSTG

SEQ ID NO: 168430 - protein, 350 aa, unidentified
MASQRWRAAMEHYVGLDVSLKQTSICVVDRSGSVVREGVVDSDPEAISVYVRSKAPGAVRIGLETGPTSTWLWTELKRLGLPVICIDARHAKAVLKMQINKSDRNDAIGIARIMQTGWFKEVHVKDIDSHSVRALLASRALLVKIKRDLENHVRGLLKNLGLVIGRAKFNVFAVRAEELIEGRPELIATIRPLLEARNAVEQQVSELDRKVMKLARHDAQVRRFMTVPGVGPITALAFKATIPARFTRSRSVGAYVGLTSRRHASGEVDWTGRISKCGDAMLRSYLFEAAGVLLTRVPKWSAVKAWGVRLAKRNGLRKAKVAVARKLAVILHRMWIDGTEFNWSKKEIAA

SEQ ID NO: 168431 - protein, 341 aa, unidentified
MTSTKYIGMDVHQESISIAVRNNVGKLVMEGVVETKANLIVDFLHGQRGELQVTFEEGTWATWLYDLLKPHVTKLVVCDPRKNSRQGNKNDRIDARELSDRLYMNKLSSVYHGGAGVRTLRELARSYLTISKDLGRVMSRVKAIYRSWGIPCAGKQVYAPRHRAEWLAKITEVGVLRRAEFYYQQLDALRPLRHEVRRELLCQIPAIGPIRAALLIALIQTPHRFRTKRPLWKYSGFGIEMHSSADYRKVQGQLQRSRKRVSVRGLNRDCNHDLKNLFKSAATIASVKPGPFQEFYAALLAKGMRPEMARLTLARKIATIVLIVWKRGVGFDAKYLKPQTA

SEQ ID NO: 168432 - protein, 362 aa, unidentified
MQKHIFVGIDLGDKNSVARIGVDLEKSERFGFVNTNAGRARLILEVKRRSEQVGGAVVVMAYEASSCGFVLRDQAQVAGIDCKVLAPTKMEKSVEQKRNKNDDRDADDVLEKLRGHVLAGNRLPIVWVPDPETRDDREVLRTRLALSEHQTQVKTQIQMLLKRHGLEKPSDLGSTRSKQYRQWLEGLSRWESLGWGTRQSLASLLRQLSGIEGEMENLDKLVRELGSQLRHKPIVEALMKEKGVGLLAALVYRTEIGTARRFHRGRHVGKFVGLTPTSHESGQQNDRKGHISRQGPPRLRKVLCQASWVHVRYDPHSREAYQRLVAKNPKKKKIALVAVMRRLAVRLWHRMREAESLQQTSL

SEQ ID NO: 168433 - protein, 343 aa, unidentified
MECKRYIGVDLHRNCFTACTRLENGREYLKEWKLEELRGFTAKLRATDHVAVEVTGNTRLFYDAVAPHVERVVAVNPNQFKVITHSVKKTDPNDARNLALYLAKDLLPEVRMKDKTRAQIASLTQTRDSMVKLRTALKNKVNNICSAHGVNLNKESLASEKGLKAVLEIQFDLLVNLELRIIVDQIRSLNKSIAELEEAIGKEGQKLEGHKNLTSIKGIGGLSGGILLSIIGNIDDFADEGKLAAYFGIVPRVSISNETEHSGRITKRGTKLGRTTLIQCALIAQRYNPYLKSYYDKMKSRRGTGKAIVALARKFLGIIYRTLKNKWVFADFPNFVLAEGETR

SEQ ID NO: 168434 - protein, 407 aa, unidentified
MEVLYERCCGLDVHKRTVVACLLTPGPDRRPQKQIRTFATLTKGLLDLRDWLAAAGCTHVAMEGTGVYWKPVYNLLEDRFTLLLANAQHIKAVPGRKTDVKDCEWIADLLRHGLLRASFVPDRPQRELRELTRYRTSLVQEHAAEVNRLQKTLEGANIKLASVASDVLGASGRAILEALVAGEQDATVLAGLAKGSLAAKRADLEQALLGRLGAHQRFLLGEQLRHIAELEASIERVSTEVAERLRPFAEALERLDAIPGVGRRTAEVLVAEIGVDMARFPSAAHLASWAAMCPGNNESAGKRKSGRTRRGSPWLRAALVEAARAAQRTKGTYLGAQYRRLKARQGGKRAAIAVGHSILVCAYHILRDGQDYADLGADHWEHLAKRREHRMAERLRGLGYTVIEPAA

SEQ ID NO: 168435 - protein, 350 aa, unidentified
MNVNHYIGFDVHKKSISYCVKAADGTIIEEAKLAAKGAVLRAWAGKRREPWHGAMEATLFSGWIYDTLRPFAAELQMGHPAQMKAIGASKKKNDRLDARKIADLVRCNLLPVCYVAPPELRELRRLLRYRNLVVAEAVRMKNKMSGLLMEVGAEYNKGRLHGKEYFAELLDTVEGVPESVKDLLRLSRGALELFQTTQQGLLARLQKEPLLAERVTRLKSIRGVGEVTALTWALEICDPWRFPSIGDAVSYCGLTSALDSSAGKQQRGPISKQRNAHLQTVLIEAAKLAPRWNPQLAAIHELEIQRGHRNRATLEVARKLVAYLLAVDKSGKPFQIRIPETIKLEVQTAA

SEQ ID NO: 168436 - protein, 449 aa, unidentified
MSERSGLSRGDRNRNARLARLRALLPASNAIVGIDLADVKQAIVVTDHDSKVLARKKVLCKAWQLGEVLDWAVARAKAAGFDSVTVACEPTGHRWRVLDQLAAQRGLNLVCVQPLLVWRAREAEDLTWDKSDPKDAVIIARLAAQLCCYEPERTSEAYARLRHLGARRNQLTTAATTGVQQLRDLLECVWPAVLDAAGAPFRSATWCAALAVVLDRCDGDLKRVRRLGAARFLAAVRAELPRWNASRPRFRIVTAVFDALTDPTGVIVHRPGALQRTAMILHDWHTARARLAEAEAAMVTVIDELDLTNLVTSIPGLSAVGAAAILAETGDLTRFPSPRSVVKHAGLCPRDNASGHHHGKTTISGRGRPELRLAAWRAVWAAMLNNTVLKGRFAYLTTRPANRLAPLQARAACAAALLRWLHVVVTRRVTWNPAIASGIVDTTPQARAA

SEQ ID NO: 168437 - protein, 354 aa, unidentified
MKGTTQFNDLHLYIGIDVHKKQWSVSVFTDAAHHRTFSQPPSPAALKAYIDRQFPGSVVCCAYEATKLGYWIYRALTQFGYRCLVVNAADIPTSNKESTSKTDPTDSRKIARALRAGLLTSIHVPDQVTEGDRQLFRYRKRLLSDLTRVKNRIKDKFLFTGIVIPPRFDNANWSKAFLTWIKNEHMPDASTRLTLDRLLEQYHFLYRHMLKVSIEVRKLQCEPRYKKSARLLRSIPGIGPLTTVELLAEIQDINRFESFKKFNGFIGFRPGSHSSGEHDWKGSMSYRRHKALRSSLVECAWTTIQKDPIMLQRYNELKTRLTGKRAIIIIARKLVSRIYAVLKNETPYQTGLAK

SEQ ID NO: 168438 - protein, 346 aa, unidentified
MKINRVGVDLAKNVFQLHGVDRKGKALWKRRLTRGKWLTVLCDTVEPGTEIGMEACAGAHHWARQLMQRGYPVKVIPPQFVKPFIKSNKNDANDAAAICEAMGRPDMYPVKVKTVEQQDLQAMHRIRDEIKGHRIAKANQIRGLVTEYGLVAPQQLSALRSAIPDWLEDADNGLTFLFRQLLQGLWGDLYALDQRMTELDKQVVVVAQEDPTAKRLQQLRGVGPLIATALVATIGDGKQYRRGRDMAAALGLTPRQHSSGGKDRLLGISKRGDAYLRCLLVHGARSAMRTVKDKDDRLSRWIINLQARRHANVVAVAMANKMARMAWVIMTKDVDYDPDLAAASVN

SEQ ID NO: 168439 - protein, 386 aa, unidentified
MPRLNDLSRSLVTLEQDATLIAVIEMGQSSWLVAGIVPGVERQPLKKLAVDEAALLKLLHRWRKEAEEAGHRITRITVGFEAGRDGFWLARWLRARDIEVHVIHASSVAVSREHRRAKTDRLDTELLKRAFLGWLRGERDHCKMVAIPTINDEDAKRPNRERESLVGEQSRIINRIKATLARLGIRGFNPKLKKAAERLEGLRTPEGEPVPPNTLSELHRDMERRRLVRDQIRQIESARLDRLEHAPGEGVHAMVRLLARVMGIGVETADMLVQEVLSRNLRDRRAVARYAGLTGSPDESGKKRREKGLARSGNPRVRRGMIQLAWRFLMFQKDSALAQWFRARTENARGSRKTMIVALARKLLIALWRLVREGVVPDGVILRPAQ

SEQ ID NO: 168440 - protein, 349 aa, unidentified
MRFYTKNHQHYCGIDLHAKSLYVCLIDDTGKILLHRKIGAKPGYLLKILAPYRGDVVVACECMFAWYWVADLCADEGIEFVLGHALYMKAIHGGKAKNDKIDAFKIATLLRGGSMPKAYAYPSEMRATRDLLRRRQHLVRRRGSLLAHIQNTHHQYNHPTPKAKIAYKANRVGVAETFADLDARKSMEMDFALTENYDAIIRDVENHLERRAREHNAQAYHRLKTVPGIGKILALTILYEIHDIKRFPRVQDFLSYCRLVKCDHSSAGKKLGTGGAKIGNVHLKWAFSEAAVLFLRCNPEGQKHLRRLAGKHGKAKALSILAAKLGRAVYLMLSKDRVFEMERFLAHNH

SEQ ID NO: 168441 - protein, 296 aa, unidentified
MFQNFVGVDISKQYFDASVEVKGKMRHHQFPNSEKGFEEFRAWWEKWNVTDAHFCMEATGAYWMELATWLHGEDMAVSVVNPTCTKRFAQSELKRTKTDKVDAGIIARFCKAMSPILWQPLPAEAQELQRLVRRLYDLTKMRQQERNRHSSKSLDEVTLESVDRTLKFLDGEIAKLDRLIERLYKKHEVLRRKREILLSIPGVGEQTANVVLAEVPSPELFGSAKQLAAYAGLAPKQIRSGDTIRGRTRTSQTGRSRLRSALYLPAVSARKYNPIISAFCDQKWQGSDESCWSFNA

SEQ ID NO: 168442 - protein, 442 aa, unidentified
MDTDCFSLYVGIDWGDAQHQVCMLSDPNHPKELQVKHGGRALADLAMALAHDVWGQNHRVAVAIEVDSGPVVESLLLQGFAVYSINPRQLDRLRDRYFPSGAKDDRRDALVLAQSLRTDRQLFKRVEADDPDTITLRHVTRARDELQRSLQRTTNRLRNHLAQYLPALLQLSPDASDPLVWALIERAPDPEAAAKLSIVTIAKIVKDLRIRRVSPQQIRDVLREPPVQLLPGARQALAQRALTLIPQIRLFHEQFVEHTRAMERQIADRCQPVQEPVSEPAGEPALEAPAPDQSSKPSDAPTSPAPRLSDAAILRSMVGIGAYVLAVLLTEATRAIARRDLAALRAQTGIAPVTRQSGHSLHVSMRRACSWRLQKAAYCWGMAAIQNDPLSKAHYQRLRASGHTHARALRGVVDRLLDVLITMLRDGTLYDPERRRELQNAA

SEQ ID NO: 168443 - protein, 313 aa, unidentified
MTSMNFIGLDIHKKTISYCVKDAAGEVLAEGTISSTRQSLDDWMRTLRGPWTVAMEATMFTGWIYDYLLPHAAAVKVAHPLMLRAIAAAKKKNDRIDASKIADCLRCNFLPECYMASTEIRERRRTLRYRKLLVRQNVQLRNKVSQMLIATTADDLPRDHCADRQDRRRPGALAARDPLLSDRVQRLMTIPAVGPITALTWVLEVDDVARFGSVKQAISYCGLCGAERSSADMVKRMPISKQRNKHLQSVLVEAAKLGPRLSPDLALVYEAEKQKGNANRATLAVARKLVAYLLAVDRSGREFVVAGERREAA

SEQ ID NO: 168444 - protein, 377 aa, unidentified
MSTIRFLGLDVHADTIAVAVAEPDGEVRSLGLIPNRPESVRKLVAKLGPAKQLKACYEAGPCGYALYWQLTALGVACEVVAPTLVPVKAGDRVKTDRRDAAKLARSFRAGDLTAVWVPDADHEALRDLVRAREDARQDQHRARHRLSKFLLRHGRRPPEEVRKSWTLKYMTWIKGQVHFDQPALEATLLDYVHEVDHMAERIERLDKAIGEAIQKAPPAMRAVVEALQALRGVAQVTAVTVVAELGTLSRFDSPRKLMGYSGLVSSEYSSGNRIQRGSITKTGNAHLRRVIIESAWAYQYRPWLGGYLLKRQQGLDQEVKAIAWKAQHRLHSRYKKLAASGKNKPQIVTAVGRELLGFIWAIAVQTEAKFQAEQKAA

SEQ ID NO: 168445 - protein, 344 aa, unidentified
MQHYVGLDVSVKETSVCIVDKTGKVIREVKVATEPVAILAVLTEEPLAIERIGLEAGPLSQWLYSALAEAGLPVICVETRHMKAALSAQINKSDRNDARGIAQMMRVGLYRPVHVKTLASQKRRMLLTSRQLLQAKALDIENDLRGTLRNFGLKVGMVGTVKFEARIRELVADHPDLAAIVEPLLIVRRVLREQLDVLHCQLLEIVRNDEVCRRLMTTPGVGPVVALTFRATVDVPSRFSNSKAVGAAFGLTPCRQQSGEIDRMGGISKCGDALMRETLFEAALVLMTHSRKWSWLKAWGMKIARHRGMKRAIVAVARRLAVIMHRMWVDGTEFRWTRKEAAAT

SEQ ID NO: 168446 - protein, 470 aa, unidentified
MKSTAKKNKVQFNNDLSSEEIIEIGKKAYESGTAVTWKQAEVGRTLTQNDKIALVDEKTLVVGADIGSDKHDIRAFDNRGREISKKAFEFPNNEAGYEQAKAWIFMRRDERHLEKVMVGMEPTGHYWFNLASWLMTEGITVVTVNPHHVKKSKELDDNLNRKTDRKDPKVVAGLVIEGRYSMPYLPEGIYAELRNINNLRLMNNEEKIRFMNRLNRWLDIYFPEYDTVFKDVSGVGSLLLLERAGLPKDIVKLGADGINKVWREAKLRGTGLGKAQRVVSAAQHSVGSKEGLESARDELRWIIRSLKLYTRQEEEYLARLDALGTQIPYIDNILAIKGLGIRTVIGVMAEIGDITRFNGVKPIQKLAGLALVEDSSGKHKGKTIISKRGRKRLRYHLYQGALALISQNSEFREVYEYYLTRDRNPLKKMQALMAVACKLLRVLYAIMTKGVKYDPEKMLGDIRRPESKAA

SEQ ID NO: 168447 - protein, 394 aa, unidentified
MKLVGIDIGKKHFFCIMDKDSGEVLLQPSSFSNTKDGFDSLIQKLSSYSKDSILIGMEDTGHYYFALLKYLLEKNFTVALINPKTTDYTRKMQNGITKNDKLDTLTICDVLDTPVRKKQYRITKVNSFDLYEQKQLTRHHHNLKEELNVYTNRLQKCIDIVFPEFNSLFSSKYGIIYMNVLKTFGSAENIASTDIRTIRKCFEIKGRGNRISLTAQQLKDSAKSSIGISSAAEVIKIKHLISQIELINEQLAETDKKIEEFSIQNNSPILSIPGISHFSGTSILAELGEISNYSKPSKIIKAAGVAPYHYESSQYDAQHTAITKKGSPYLRKTLYQIILPVINNNNPVFKQYYDLKISQGKGHHCACGHCVRKLLRIIYHLSSTNQQFDDALLR

SEQ ID NO: 168448 - protein, 375 aa, unidentified
MKNKVRFLGLDVHAETIAVAIAEPDGEVRSLGTIANRAESIRKLVKKLGSVEQLKACYEAGPTGYVLYWQLAELGVACEVIAPTLVPMKAGDRVKTDRRDAERLARSYRSGDLTAVWVPDEGSESLRDLVRAREAAKQDQLRARHRLSKFLLRMGQRPAVGMKAWTAPYMAWVRQVHFTQVAREATMLDYLHEVDHMAARVKRLEQAITEAIKLATPAVQEVVKGLQALRGIAEISAVTIMAELGSITRFDTPRQLMGYSGAVPSENSSGKRTQRGSITKTGNAHLRRIVVEAAWSYRLRPAIGPRLRKRQEGVSEPIKEIAWKAQVRLTKRYARLAAAGKDQRKIVTAVGRELLGFIWAIGIKAETASKLQMAA

SEQ ID NO: 168449 - protein, 347 aa, unidentified
MNLYQTQHPFYCGIDLHANEMYACVVDQDGKKHLHRNFKTRQPEKLFDELQPYGSNVIVGCESTFNWYWLCDACEEKKIPFILGHALYLKAIHGGKVKSDKIDSEKLARLLRGGNFAVSYAYPSHWRATRDLLRRRGHFVSRRGETLAHIQIVNHQQNLPAFPKKLQYKSNRQGIAEQFHDPAVAFSVETDVAMLDAYDKVIRDLERFLEQSAKVHDANNFYLLKTIPGVGKIIAMTMLYEIHQIKRFPEVGDFLSYARLVRGSHTSAGKSYGSPGKKMGNRYLKWAFSEIVPLIKRQSPEVKKYMTRIEKKHGQARAHSNLATKLGRAIYFMLRRGEVFDMQKLLR

SEQ ID NO: 168450 - protein, 322 aa, unidentified
MAMLSFGGIDVSKDRLDITVLPDEQCSSVSNDAAGWAELIEQLRGSSITAIGVEASGGYERGVVRALLAAGMSVRQINPFKLRQFAKASGTLAKNDRLDARMIASFVAIMPTRPVQRQAPMIEQLAAMLTVRRQLSDHKVATENASRLLEGAMLQRLSRRRVAGLTADINLLDQRLVEIVTADAALAHRFWLLTSMPGVGAVLACTLIALLPELGQMSRKQVAALVGLAPYDFDSGKLKGRRCIWGGRARVRHVLYMAALSASNWNPALKAFHDRLAVTGKKPKVVIVAVMRKMITTLNAMLRDGTTWVDRYSGRRSAATAR

SEQ ID NO: 168451 - protein, 378 aa, unidentified
MIYTEHRRQTVDELITGFVGLDAHAESTAIGVAEAGRAAPRFVGTVGAKLAELTKALAKLGEPGSLLVVYEAGPCGFGLARELLALGYRCEVVAPSRIPKRPGERIKTDRRDALKLASLARAGELTAVTIPDQRDEAIRDLSRARVDAVRARLKARQQLQSLLLRHGRRYSGKTAWTAAHERYLAEISFAHPAQDIAFTEYRQAVGADEARVKRLTQALAHEVESWRMQPVVGAVMTLRGLDLVAATTVVAELGDLRRFARPRELMGYLGLVPSEHTTGSKRRLGAITKTGNGHVRRMLIEAAWNYRFPARVSRTLQVRQERQPAVIREIAWRAQLRLSHRYRRLKARGLQHNKICVAIARELAAFIWDIGRHVGPNV

SEQ ID NO: 168452 - protein, 365 aa, unidentified
MPSVTSAVGPIHLGMDTSKNTIVVGILNPGEEVPVLDRIWNEEGSVRHLIGRFGDPGALRACYEAGPCGFELHRLLASMGVACDVVAPSLIPRRPGDRVKTDKRDATRLARLHRAGELTPIRVPSLAEEAIRDLVRARAALLADRKRAQQRITAMLMRHGRIWRGTYWTQAHEQWIAGQRFDEPALAAALAHYGAALHTRRGELDAIEAELAPWAAREPLGPLVARLGCYRGIAELHGLTLAAEVVDWRRFPSARAFMGFTGLVPSEYSSGDRTRRGSITKAGSAATRTALIEAAWAYRYKPAIGVTLRRRQRDASPATLARSWQAQRRLHGRYKTMTARSKPAGVAVTAMARELAGFVWAEMTS

SEQ ID NO: 168453 - protein, 339 aa, unidentified
MNIVGCDFHPGWQQVAVFDMETGEIQERKLNNGNGEAESFYRRLSAPALVGLEASGNSQWFEDLLGRLGHEVWVGDAAQIRASYVRKQKTDKRDAAHILKLLLESRFPRIWRPTAGDRDLRQLLIHRHKLVQIRIRVKNGLQHLMLNRGVQMKRKLWSEAGQQALRELPLEGWAAQRRADLLHLLAALNDQIGKLEEAVSRAAKLDPGAQLLMTQPGVGPITALAFVVTLGDVRRFPRGKQVASYLGLIPTERSSSQHRRLGSISKQGNPFLRMLLVESAQSVNRLDEGFRKQYQHRCHRMATGVAKVAAARKLAVRLYWMLRTNTRYPEIAHIESSPR

SEQ ID NO: 168454 - protein, 430 aa, unidentified
MEIVYPRSCGVDVHKSCIVAVICISESVKPKYIKKRFSTFNNQLIQFRDWLIENNCQNVCMESTGKYYIPVYNALEGHISNVVVANPKWVKAIKGEKDDNKDAKWIADLFKFGIVRSSYIPEKDIRILREFTRYQYKLVNMRSSEKNRFQNALTTGNCKLDIVFSDIFGKSASAIVDTILSNNPYTSEDILSKVHAGCKASHEDILSAVEGIQLNKFQKARIRIVQKHMEYLDSLLDEIQHHIDLMVANYEEYIQLLCTIPGINRKSAITIISEIGTDMSQWSSHRKLAAWAGLAPGCNESAGKKKSVKISKAGVYLKPCLVQVAHAAVKDKNCDYYADKFNKISKRRGKKRAIIAIARKILIAVYHLLKTGEVFNPTDMADVETTKKQRIEYVKNNLRNAFNQLSRTGLSEAEILQLIRKESKNSPQIE

SEQ ID NO: 168455 - protein, 431 aa, unidentified
MEKIRKNVGGIDIGAKKVFTSIEGQPVISHFTFTEDFYNLRDYLLRYKVSSVAMEATGVYWVILYEILEEAGIDVWLVDGRQTKQVPGRKTDVKDCQWIQELHSYGLLNRCLVVDADIKELRSYIRLREDHINSSAMHVNHMQKALTLMNIRLKEVLSQIHGVSGLAIIEAILDGERDKQVLVGLCHSSVLKKKKDLVLKALEGRYTESGLFALMQAYDGYKFYQKQIAECDNRINVVMNRIGQSGIGQELEKKRKVVRHHKPNVDKLGPNLLNVFDSKDATLISGITDYTWMQLLAETGPDLTRWPSEKHFTSWLGLSPGQHNSGKTLRNARKKGKPKAGQIFRLIAQGLINSKDIAIGSFGRRLRGRKGPKIAIKAMARKLAALYYRVMVKGLEYVEQGIKYYEEQILMSKIKTVNRLAHELNLSISEK

SEQ ID NO: 168456 - protein, 451 aa, unidentified
MSKQRNKAVSLPVMEPNAAGIDVGATEIFVAVPADRDPEPVRHFPTFTADLERLADWLQQCHIRTVAMESTGVYWIPLFQILEKRKIDVRLVNAHHVKNVPGRKTDVSDCQWLQHLHSVGLLRGSFRPDDEICAIRSLWRHRDSLIQLATLHLQHMQKALDQMNLQIHHVISDLDGTTGLAIMDAILAGERDPHKLAQLRHPRVRAPEETIIKSLNGDYREEHLFTLGQSLKAYRYYQELIQEVDSQVKQMMQRLPSRVAEGDKPPQGSKRRARKTPWRNEPPQLREDLYRAFGVDLTEIPGVNSLTAQILLTEIGPNLDRFPTAATFCSWLRLCPDPKISGGQVLSSRTRPTKNRAALALRLATQALHRSDSFLGDYFRRMKARMGTPKAMTATAHKLARIIYHMVTTQQEYDATIFQQQEERRRQQKSARLHTQARQLGFQLVPINFVP

SEQ ID NO: 168457 - protein, 341 aa, unidentified
MSIIAVGIDLAKNVFAVHGVDDNGKPALVKPKVSREHLLPLIAQLPPCLIGMEACSGAHHWARLFRQHGHTVKLMAPKFVIPYRLSGKRGKNDAADAAAICEAVTRPQMRFVPVKEEHQQIILALHRTRTGFVEERTATYNRLRGLIAEVGIVCPQKITALRRALMDHLEDLPGYLNRCVGDLLAHADSLDVRIAEYDRIIRDAAREDARSRRLMDLPGIGPNTASALLASIGGGHDFKNGRQVAAWIGLTPGQYSSGGTTRLGRITKAGDRYLRSLLVMGAKAILSGLGEKQDRFSRWARSLVERRGYWKAVVAIAAKNARLAWAVLRFGEEFRLRQADA

SEQ ID NO: 168458 - protein, 366 aa, unidentified
MEVTTIGIDLAKSVFAVSGADSRGRVVIRRQLRRAQVLGFMRGLPRCVVGMEATGGAQYWARQFTALGHAVRLMSPALVMPYRKGNKTDRNDADAILEAVSRPSMRFVTVKSVAQQDLLALHKVRAQLVKSRTALCNQLRGLLRERGVAVRMGVAALKRGLPAALADESSELSGEMRELLSEMSQWLGTLEQRIASCEARITQKFKHDERCVRLAEVPGVGPLTATALVAAVGNAQRFKNGRELSAYLGLVPRQHSSGGKTVLLGITKRGDRYLRTLLIHGARSALRQCKLKGDARSDWARRISAARGPNVAAVAMANKNARILWALLSRGDRYRSSRVLTRAVLRPGSPPPVKRARGAKLRVAKD

SEQ ID NO: 168459 - protein, 351 aa, unidentified
MRTSQKTPETISTIGIDVGKNTFHLVGLDKRGAIVLQQKVTRHQLGRRLSNIPRCLIGMEACSGTHFIARQITALGHDVRLIPAQYVKPFLKGHKNDYRDAEAIAEAVQRPTMQFVSIKTPEQMDLLALHRVRSRLVRQRTGVANQIRGFLLERGITVRQGLMPLRKALPEILSAKSDALSPRMTSLISELIQDWRRLDERIAAVSAEIEALAKQDAGCQRLMSIPGVGPIISSAVVAAIGNGAGFRQGRDFAAWLGLIPKQESTGDRTILGKISKRGNKYVRTLFVQAAHVVLERRPRTARQGLWPWIEQASKRLQRNMLAIALANKLARIAWAVLARGHSYQPRIISNA

SEQ ID NO: 168460 - protein, 368 aa, unidentified
MRDYTGKKVFLGIDVHKQHYSVTAICEGQVVKKDKLVAQPDTLVTYLRKCFSKAEIISAYEAGFCGFHLHRYLERHGVQNNVIHAAGMEIAIGDKVKTDKRDSLKLAVQLSVGRLEGIFVPEKEREDFRTISRLRDKFLSQRSRIGCQLKSLLFLQGMIPPNDDQKVSSKWIKSVLSQEMTPDIKYAVQQLADLWLHMAAKIKEIDKRLMEQSLHDEHLERIYQSVPGVGPLAARILANELGDMSQFPNERKLFSFTGLTPSEYSSGTHVRQGHISRQGRPVLRRVLVQSAWVAIRYDYDLLQVYERISQKSGKKKAIVAIARRLVGRIRSCLKRGEVYQVRSVPDQSIINIEMSEIDEETGEIIGQN

SEQ ID NO: 168461 - protein, 344 aa, unidentified
MNHFGGLDVSVKETSICIVDDTGRIVREVKVRSEPEALLEVLGNLAYRFKRIGLEAGPLSQWLFSTLAEAGLPVVCVETRHMRAVLKAQINKTDRNDARGIAQMMRVGLYRPVHVKTLRSQKLRMLLTHRKLLQSKAIAIDNDLRGTLRNFGLKVGMVGTARFEARIRELVENLPDLVALIEPLLIVRRTLREQIVILHRRLLAIVRDDEVCRRLMTIPGVGPVVSLTYRATVDVPARFRKSKSVGAVFGLTSARYQSGEVDWSGEISRCGDEMMRTMLYEAAQSMMHSKKWSWLKAWAIQIARRRGMKKAIVALARRLAVIMHRIWVDGTEFWWTREQAAAAA

SEQ ID NO: 168462 - protein, 357 aa, unidentified
MNNHTVQDFVVKGKEVFVGLEDSKTTWKLAVRCEKMLVHQSAMEAKYPVLKQYFANRLPDCTIHLIYEAGFKGFNLFDRLSEDGIDCVVIPPHMVTEPKVNKVKTDKRDARRLASVLENHDFKDSCHVPDKERREDRQITRTLIAVQKDIIRTRTRIRQFLQFHGIAVAIEKDQWGREQFRALKNLVLSDPLRISLSVLLTELEQLWEHQLTLRRALRELCRKERYKRAYEIARTLPGIGWYTAIRFVLELGEDLSRFTSGKKIAGFLGLTPGEYSTGATERKGHITGMGPGFVRATLIENSWAAIRRDPVLLGKFHRVWKTTGSKKKAIVAVARMLIVRFRACIISDTPYAIGIVH

SEQ ID NO: 168463 - protein, 464 aa, unidentified
MPLRLGIDIACRAAHQVSLADDEGRFVWSGRRFRTTPSDLAGLWAMLPAGTDPAQVLVVMEPTRNAWVPLAAWFRRQGARVVLVPPERSADLRSYYAKHTKSDRLDSQLLARLPMLHPEGLHFEEGLGPADALKRAAKLHSTLVHRRSQSLARLDALLEILGPAWHTAIGADLANRTVLKFLAAGYADPHVVRRLGRTRLTRFCYRHSRGAWGEPQAEALLAAARETLELWAEGELDYPDLAEDIAIEARLALQLTEELKDLDERTALVLKDADPTGILTSAPGVATITAVAILGRLGDPNRFGSLAGARAFTGLVPILDSSGLTGRHGGPTKRGDAVLRQALFMAAGQARRIDPTLAAKYHRLMVEAGKHHNSALCHIATTLLTRIIACWRARQPYQLRDIDGRPVSIEQARAIIADRYAIPKDLRARRNTLTATRNGPAKQGVANAPSTGPSTCDATTRQPT

SEQ ID NO: 168464 - protein, 341 aa, unidentified
MNEVTMIGVDLAKSVFQAHGATATGEPVFRKKLSRGQFLKFLSEQPSCVVAMEACASSHYWGREIMKLGHDVRLIPPIYVKPFVKRQKNDANDAEAIAEAAVRPTMRFVPVKSAEQQSQSMVFKTRDLFVRQRNAIINALRGHLMEYGIIAPPGLTFVKKLAKKIEDPESDLPPIVVELSRVHLDQLGTCTDKIVMIERRLKDEAKSDPETIRLQTAPGVGPVSAMAIKAFSPPLEGFKRGRDFAAWLGLVPVQKSTGGRQILGRTSKMGQRDIRRLLIIGAMTRIRWAIKNGPPKGSWLEQMLERKPRMLVAIAFANKTARTIWAMMTKHEDYRDPIVAV

SEQ ID NO: 168465 - protein, 348 aa, unidentified
MLADELDYVVGVDTHRDEHVLAVVAAPAGAVLASRAVAANARGYRETLRFAELYAPGGRAWAIEGTGSYGAGLARYLGQRGETVLEISRTTRGERRLRGKDDSLDATRTARSALASETLARPRSGERREALRLLLVARRSAVDVRREALVQLRSVIVTAPDQLRQQLRGLPAGKLLERCSRLRRTSSATADELATRLVLRSLARRIEAATLEAAELEQEILGHVQALAPRLLDEPGVGPIIAAQLIVSWSHHGRLRSEACFARLAGVAPLPASSGQTTRHRLSRGGDRQLNRALHTIVLHRRQHHPATRDYIARRIAEGKSRRDATRLLKRYLARHLYKRLQQEPLMA

SEQ ID NO: 168466 - protein, 422 aa, unidentified
MKLKYSICCGLDVHKNVIVATIVTTNKDGISEYKQKSFSTINSDIQRFHNWLIENNCYHVCMESTGKYWIPIFNYLEHDIDVCLTHPKYVKAIKGKKTDKKDSKWIADLYKFDLVRCSFIPPKDFRQLRELSRYRFKLVCMKSSEKNRIQNCMTVSNVGIASVLSDPFGKTATEIMSYLLEHTSDSMDEHAVRKLIKKGAKAKSDEIIEAIKGYNIETDQAKKLELARAHLEYLDNMITQTEVELYVRIKPYYEFVEFVSTMPGMTELSSTIVLAETGVDMSIFDDAKHLCSWCGLSPANNESAGKKKSVRIAKAGDYLKPMMVQCALAAIKSKKQPYFAIKYGRIKKRRGHKKAIIAIARMMIVCIYHMISEKKPFSPTDYEELMDPQNHVERVVLTENNFFAYLESLGYDSSKLVKRNDN

SEQ ID NO: 168467 - protein, 367 aa, unidentified
MDVHTTNFTFCCYTADSDRGFAVAQTEPDYRQVIKYMERVQKQRGEECKFVCGYEAGCLGYSLYHQLTRCGVDCVILAPSTMHQEKGKRIKTDRRDAENIARCLAFSLYSPVYVPTTEDDAVKEYIRMRDDIKADLKRVKQQIIAFTTRHGFAFDGKSYWTQKHLKWLETLVFEHPLYKETLQEYLILYYMLDEKVAVYDTRIEEMSHLEHYEENVQKLCCFRGVAAHTALSLLVEVGDFQRFRSAKHFAAYLGLVPGEHSSSDKQIRTSITSITKAGNTHLRRLLVEAAQSYNRGAIGKKSAALKARQGGNPAEVIAYADKANERMQRKYYRIAFKSRHNIAKTAIARELACFVWGMMTGNISNAA

SEQ ID NO: 168468 - protein, 353 aa, unidentified
MKCDKYIGCDLHQATTVVAVLDAEGKIVMETIVATEAAAIIRFLKGLSGTLHITFEETTQARWMYDVVRGYVKEVIVCDPRRNKLLGEGSKGDKPDARKLAELLRAGLLRPVYHGHEATRQLKELVRGYETLAADTQRMMVRIKSIYRAHGIRTPGSAVYQQKQREQWLQRLTEPGTRQRVSWLYEELDHLRQLRKQAKMAMVAEGRKHQAFNLLRRIPQLGPIRCAMLVATVDTPYRFRTKHQLWAYSGLAIVTYMSSEYEIKSGRVVRSRKPLATRGLNRNCNRRLKELFISAAVAGSRSEPYRSYVECLQQKGMRTEMARLTLARKIAAVALTVWKKGEAFDPKKLNSTT

SEQ ID NO: 168469 - protein, 433 aa, unidentified
MDEVTDEPLYRDRVCGIDIGKAQMVATIRVPSDSNPARRASETRSFATTRRGVLALADWCRSWQVPAVVMEATGDYWKGPFYRLEAEGFECVLADPRQVRNLPGRPKRDPSDSRWLSACFERGAVRGCFVATPEFRVIRLHTRYRRDLIEERTREKNRAGKLLESAAIKVSSVVTDLHGVTGRDIMDHLIAGERNPKVLAQLARGRARRKLTELEHALEGAEFFTSYHAALLTAMLQRIDRVTAEIGSLTEVIESLLAPYEEQLAQAESMPGWARRPAQDAIAGTGVDMTRFPAGAHLVSWGSRAPLDHQSGARKGRAKTKKGNRYLAGVLGETAVAAGRTQTREGARYRRLARRTGKNKAQVAVGNTQLKVLHKLLSNPGMRHQDLGPDYYDRQRGLRRQIHHHVTKLESLGFEVTLARTPEPDPASHTQTA

SEQ ID NO: 168470 - protein, 317 aa, unidentified
MNNTEIQTPVNVGVDVGKANLDIALHPSGQFYTIPNTEAHIRRFVRILKNYEIERIVVEASGRYEHALVQACDQAGLPIIIINPISVRRYAQAIGVLAKTDRIDAQVIARYAATLKPEIKPIPDKTSQKIKDLLIRRSQLLEMSTMEKNRLQILPKYLHRSIKSLLRTLQSQIETVTRQIEQEVAKVDQWRTKMEIMTSVPGVGKVLAYTFLSELPELGSLNRKEIAALVGVAPINRDSGKLNGKRRIRGGRHRVRTVMFMAMLSSIQCNPVFKRFYERLKAQGKIPKVALIACMRKMIVMLNTMIKNQESWRGEMA

SEQ ID NO: 168471 - protein, 310 aa, unidentified
MTTAVGIDVGKAALDLAVDGVSGVVRFANNAAGIRKLVARLGRLDDPRIVVEATGGYEETLLEACCDAGLWICRANPRQARDFARATGELAKTDAIDAALLALMARLLHERLRRHEAPQPWQRELRDWLRRRGQVVVILQAQKQQTALTSPAVHLLMTRTIAALKRELAAIDAAMQALLKAHASPALRSSKGMGPIFQATSLALLPELGRLSRQQIAKLVGVAPMNRDSGQTTGKRRIRGGRAPVRVALYMATLSAVRWDPVMRAHYQQLRARGKLGKVALVACMRKLLTIVNARRRDELRAQEGDVIAA

SEQ ID NO: 168472 - protein, 343 aa, unidentified
MDIMYYIGLDVHKKTISFCVKDASGQVHQEGKIGATRRELDRWIETLPQPRIIAMEATIFTGWIYDLAARAAGKVAHPLMLRAIAAAKKKNDRIDANKITDCLRCDFLPECHMASTEIRDRRRTLRYRQLLVRQMVQMKNRVSGLLMETGVSYNKQRLHRVGYFRELLSSHEEVHESIRPLLKLSRETIVRLQKTEYGLVSSLERDPLLADRIRRLRTVPGVGPITALTWALEVGDVSRFRSIRQAISYCGLCGAEKSSADKVMRTPLSKQRNKHIQHVLVEAAKLAPRQDHDLALVYETEKQKGNANRATLAVARKMVAYLLAVDRGKRDFVPAEDHRSAAA

SEQ ID NO: 168473 - protein, 416 aa, unidentified
MTDSHTTPEAAILVAVDIAKDHNEVLIELRERRSQRRRFRVANTLGEYQRLVAYLRQLGAPALIGFEATGNYHRPLAYFLHAQGFALRLIPTMALARTREAMHNSWDKNDPKDAQVILHMLQTGLTQTWHDPLVSGTNDAQELSKTHHQVTLARTRVWHRLRNHYFSLYFPEIEHFIRSDHSDWLIQLLLRFPTPGAITSLASEDFVAQAWSLIGRKVHKSALLAEIYAAAERSIALPVTPDSAAVAMLRLVLEEYLALGRMRESIAQQAEIVLASNPDRRRLMTVPGVGPLTALTILAEAGDLRRFAHYRQFLKFCGMSLSTQQSGRFRGISRLSKYGNARLRTAFWMAAKTAVRMRENSLRRKFDRYVRANPLDADLRRKAYSAIAAKLARIVYGLIKNGTDYRPFFEEAIPGG

SEQ ID NO: 168474 - protein, 425 aa, unidentified
MDENTRTVTWESHVYFMGFDWATKHHVAIVLDRAGRVVLDLQISHTAEGWRHLREQLVQVAGPELRQVAAAIETTCGPAVEQLLGLGCTVYPLNPKSAQRYRDRKSPSGTKTDHLDAWSFADALRTDGHAWRRLKPEDPKIQELRLLCRDEVELIGQRTALVNQLREAVEAYYPVILEAFEDWTLPAPWEFVQQFPTPEALQKAGKRRWEKYLHTHHLSDPRTYNKRLDIFGRATEFCGGPAATNAKSLLAISLSQQLQLLHRQLHGYRDRIEQLFCEHPDHDLFGSLPGVAEKLGPRLLSECGDDRSRFEDHEALQCYAGTAPISFQSGQMHRVKFRRACNKHLRTAVHQWADRSRFQCTWAQVYYEQKRREGKSHACATRCLGQRWLKILWKMWQTKQPYDEQIHTRNQTKHGSWVLALKPAK

SEQ ID NO: 168475 - protein, 409 aa, unidentified
MEVVYQRCAGIDVHQRFLVVCLSRIEGGQRRKEIRSFRNETADLLALRAWLVQEGCSAVGMESTGVYWMPVYRRLEGFFELIVANAQHMKAVPGRKTDVQDADWIADLLQHGLLTASFVPNQEQQDLRDLTRLRVSLVQERARLVNRVHKVLDAAGCQLSAVLSDILGFSGKRILQALCAGESDPVRLAKLMHPGVKATEEQVVAALTAEVREHHRFLLRELLELIEVQDRSIARLEAEIEQHLSPFEEEMGRCEQINGVSRQVLYILMAEIGTDLARFPDAEHLSSWAGVCPGQKESAGKRLSGRARKGNRYLRAALVQAAHGVRRSRTYLGEQYRRLKKRRGSKRAALAVGHSILVIYYQMMKTGEEYHEKGEAFFARKDHGKVEQQLARRLERLGYQVTRPSQPVA

SEQ ID NO: 168476 - protein, 342 aa, unidentified
MLLIGCDYHPSVQQIAMLDTETGDYSEHRLKHSDGEAEKFYRDLKLHTPKIRVGLEATGHRRWFERLLTELDCELWVGDAARIATMRVRKQKTDRQDAQLLLKLMIEDRFPRVWISSQEDRDLQQLLWHRHRTVQMRTRILNQLQSIAMNEGIQRRGGLRSVQGRKRLEQIPLGPWGARRRNDLLTLLNQMDERVNELTAAVQQEAERRPEAQLLMTHPGVGPVTALAFVLIIGYPERFQCGKQIGSYVGLIPTESSSGVRQRLGHISKQGNVLLRLLLVEAAQAAARFDPEWHKKFSHLAIRREREIAKVAMARKLAVSLYWMWRRQRSSQMAPKVGSYAG

SEQ ID NO: 168477 - protein, 367 aa, unidentified
MEKSSKVFVGMDVHKESIDITLAEHGGEVRRWGAVGGDRAALTKAVRKLESGGAKLHFVYEAGPCGFWIERLIRARGHECWVVSPSLIPKRSGERVKTDRRDSEKLARMARAGELSPIYVPGEADEALRDLMRARDDAIIAQRRARQQLKALLLRNEIRYVGRSSWTPAHRRWLADLKLPQPVQQIAFEEYVDAVEVASSRIERLTRAIERSTEGWRFAPVVAALQALRGVQFVHAVTLICELGDLTRFEQPRQLMAYLGLVPTEHSSGAQRRQGAITKSGNRFARRALIEAAWAYQHPARVSPVIARRQTGLSKQARDIAWKAQLRLCARFRKLCARRLNKNKVVVAIARELAGFMWAIARDVKLG

SEQ ID NO: 168478 - protein, 406 aa, unidentified
MRIIGMDIHRVAAEAVALLEGHLTKLGRIPMTRDSLEAFARKELTHDDHVVVEATGNAAAVVEVLAPYVDRVVIANPKQVRLIAHAKIKTDAIDAAVLAKLSATGFLPEVWVPDQRTMALRRQVARRTQLVRQRVRLKNLIQSILHAYLIPPCPHLNLVGISGRRWIVAQIVPADERAAIERHLAQIDLIQGSLNEVEADIAREAMSDPIIRRLMTLPGVDMTVASGVAAAVGDIRRFGDPTRLVSYLGLNPSVRQSGEGSAYHGRITKQGRGQARGMLVEAAWAVARSPGPLRAFFQRVASRRGKHIAAVATARKLAMIIWHMLTKSTDYIWTRPALLARKFRSIELRAGLPTSHAKRGSAHDYNIPAKRAEERARVESAEKEYTRFTSRWRAKPRSRHTKASAT

SEQ ID NO: 168479 - protein, 338 aa, unidentified
MNYCGFDAGKKSSHFCILDEGRTILKEGPVRNRLQDLRRVFGKLAKMRIVIEASGKGFWLADQLEMLGHDVVVCDPGQTKAIGAARIKHDRLDARVLAELCKADLLTKVDRPSQAERVRRMTLVVRRTLVRNRVRLINTVRSLADGEGVILRPCAAARFTSVARGSDDQLPMGLGLTIDPLLTAIDGLTVQIEDATKRLEEAANKDPVVGLLKTCPGVGTQTAAAFAWTIRDPRRFRSGRQVAAYLGLVPSLYASGQTHRRGNITKRGDRNARWLLTMAANAVMNRYRGGSPLRLWALRLSERIGKKKAIVALARKLATVLWAMWRDGRTFEVKAPAA

SEQ ID NO: 168480 - protein, 318 aa, unidentified
MQVPLNSFIGVDVSKAELVIATYGQDDCLSVPNECTAILQWLRTLAAGSLLAMESTGRYHQLLANLAAGAGRPVFVLNARDVYFYAKGLGARGKTDRADARVIARYLAEHHDRLHPYHAPSASQAELEQLLGQRWTIVTKRIALRESLQACGASIAQAASQLDAAFAALLRTIDGRITELIKADPQLHRARTLLQSIVGVGPQSSALLASLLARVPFASSDALVAYSGLDPRANDSGRCRGRRRLSKRGDPALRHQMFMAAMSACHTSTFAATYQALRARGLKTTEALVILARKLMRIAFAVWRSGQPFQAHRVTHNA

SEQ ID NO: 168481 - protein, 316 aa, unidentified
MSETISRVLAIDVSKDWLDLATAIDSDVERLPHDKHGIQSVVEHAAAMDAQRITVEASGGWQTRLVAALLHAGLPVIVVNPRQVREYARATGRLAKTDRIDARVLVAFTMAVQPPLRKLKDEQAEALSALLARRDQLIGMRAAEKNRLALGATGLVRKNLKAHIQWLDRHLRDTDRELKHLIEASPAWQAKQDLLTSAPGIGDTTARVLIGQLPELGRLSHKQIAALAGLAPFNRDSGTLRGQRMIWGGRHHVRKALYMATVSAIRSNPPIRDFYQRLKSNGKSSKVALTASMRKLLVMLNAMLRDETPWRLPAKA

SEQ ID NO: 168482 - protein, 340 aa, unidentified
MIHLPEEREVILGVDTHLDVHVAVLIDVVGRIVATTSVPTTALGYEQLIEWARGFGRLTRAGIEGTGTYGAALARRVHAHGVQVLEINRPDRSRRRLRGKSDPTDAENAARAVLAGEANAIPKAQSGVVEAMRAVSMARRSAVKAKTQAINQLRALLVTAPESIRATLWKVKPEQCVARCARLQSLGDTPLLKALTSTLRLLARRWMSLAKELHQLDAALEELTKRAGRRLLTRFGVGPQTAATLLVTAGDNPNRLRSEAALAALCGASPLEASSGKTTRHRLNRGGDRAAHNALWTISMVRMRSDPRTRAYVTRRTAEGLSTKRFNDVSSDTSCVSCTR

SEQ ID NO: 168483 - protein, 366 aa, unidentified
MKKISTVVMEGIQIFKENQLTIGLDLGDRISHYCVLNEAGEVIWESKLPTTPKGIEEVFSKLPRSRVAFETGTHSPWVSRQMTQLGHEVIVAHARNVQLISESSRKDDRLDARTLARLARIDPALLSPVRHRSAKAQIHLTVIRARATLVSARTALVNAARGLTKSYGARLPQCGSEQMNREIAQGLSQELREALNPLLAEIESLNERIAEYDRRIEKVAQEVYPEAALLRQVKGVGPLIALTYILTLDDPYRFRCSRDAGCFVGLRPGRRNSGRSEPQMHISKEGDRYLRTLLVQGAHYILGPFGQDSDLRRWGLKLAERGGKNAKKRAVVAVARKLAVLLHKLWVSGEVYEPLRNNHKVVAAVA

SEQ ID NO: 168484 - protein, 418 aa, unidentified
MVMKIVRFNCCGMDVHKNLVVATIGITDRKTNITEYFQRSFSTLNSDLYRLKDWLRSHHCSDVCMESTGKYWIPIFNILEDETNVHLTHPKYVKAIKGKKTDKKDSKWICDLFKHDLIKFSFIPPKEIREMREIARYRYKLVCMRSSERNRYQNCMTVSNVGLASVVSDPFGKTASNIMKEVMKSNVIDDDKILKLVHKNCKNRDKILDSLHGYHIESDQRFKMEKSLDHMEYLDQLIDSCEVELIKRAYPFRRSFQHITQIKGISALSAILIISEIGIDMSQFGSDKQLVSWAGLSPANNESAGKKKSVRISKAEQYLKPLLVQCALSAIKDKTSYFGRKYSNIKKRRGHKKAIIAIARMMLVSIYHMILTGEEFNPCDHESFMDPKPNANPSLTVEKALNFLKQSGIDISSIPVNL

SEQ ID NO: 168485 - protein, 317 aa, unidentified
MNSRTTESFAGIDVSKASLEVAVSGGRRVLSFRNDKRGVRALTGYLRGEGPALIVVEASGGYQRLVVAALIAGELPVAVVNPRQVRDFARATGTLAKTDAIDARIICHFAAAVRPELRRLATADEQELSDLQARRQQLVEMITAEKNRLRTSGPRVARQIGRHVRWLEKQLKDVESELRDLVQSSPVWRAKDELLQSVPGIGPALSGALVANLPELGELNRHEIAALVGVAPLNRDSGVFRGKRRVWGGRQNVRTKLFIGALVASRYNPAIKSLYQRLCAAGKPKKVALVACMRKLLTILNSILRTRTPWNPKPAYA

SEQ ID NO: 168486 - protein, 343 aa, unidentified
MQAVTTIGLDIAKSVFQIHGVDAAGNVIVRRQLKRRYVLPFFQRLPPCLVGIEACASSHHWSRELKALGHTVRLMPPAYVKPYVKRQKNDAADAEAICEAVTRANMRFVETKTPEQQSCLMLHRTRHLFIRQQTAVINAIRAHLAEYGIVAAVGRNGVEELLGVVADPSDKRVPEIARACLAALGAQLRMLKAQILEFDRMITVWHRSNETSKRLDAIPGVGPALATALVASVPDPKAFRSGRNFSAWIGLVPKQHSSGGKDKLGSISKQGDRYLRSLFTAGALAVIRYAKIHGTKHRPWLTALLARRPAKVAAIALANKIARMAWAMMAKGERYKEPVALAV

SEQ ID NO: 168487 - protein, 339 aa, unidentified
MKYTPVGVDIAKHLIQVHFINEHTGEVVDKQLRSRDFLTFFSNREPCLIGMEACGGSQHWARELTKLGHKVRLLQARFVKAFVMGNKNDVLDARAIWMAVQQPGKEIAVKTEKQQSVLVLHRTRRQLVKFRTAQINSLHGTLLEFGESIHKGRAAMEREFPEALERMKERLPPYLITVLEDQYNRLSELDSLIDDIEKQLTSVARQNETCKRLLDIPGIGSLIATAAVATMGEASAFKSGREFAAYVGLVPKQTGSGGKIRLLGISKRGDTYLRTLFIHGARAAALLTREPAPWITELKKRRPASVAIVAMANKLARTVWAIAAHGRKYDKNHVSIRPY

SEQ ID NO: 168488 - protein, 355 aa, unidentified
MTHHTAKRSPVTIGLDVGDRTSHLCVLGLDDQVAARGKFATTRGELRSALKRWRGARVVLEAGSQSPWMSRALRADGFEVHVADPRRVQLLSKDPRKSDRRDAEMLARLGRLGPELIGRIFHRGEQAQADLSVVRARDMVVRLRTQCVQHIRGLSKAFGCRLPDASTRTFASKVRELVPAIVLPAIRPLLDLIDTLSVVIKQFEQELADIVQQRYPETERLQQVTGVGPITSMAFVLSIDDPARFASSRRVGSWLGLCPRSQASGDKDPDLPISKAGDGYLRRLLVQCAHCILSRGKDCDLRRFGERLLRRGGGRGARRKVIVAIARKLAVLLHALLRSGAAYDPDYLLRRASAA

SEQ ID NO: 168489 - protein, 351 aa, unidentified
MWIIGVDYHPSVQQIAFVNNDTGECGERRLSHSDGEAEKFYRELKTAGCKVRVGMEATGHARWFERLLAELGFELWMGDPARIKAKRVRKQKTDRLDAALLLQLLLEDRFPRVWVPSPENRDLRQLLWHRHRLVQMRTRIMNQLQAVAMNEGVRRRAALWSKSGRAQLESLPLAPWAARRRHDLLELLDRLNPRIEELSAAVEQQAQQRPEVLRLMTHPGVGPITALAFVLIIDSAERFACGKQIASYVGLIPCEDSSADRRRLGHITKQGNTLLRFLLVEAAQAAVRRDPDWQRRYTHLAMRRERRIAKVAMARKLAVGLYWMMRKEWNYLQLKKFGSYAGESKYGHGVQ

SEQ ID NO: 168490 - protein, 353 aa, unidentified
MSSLTDLREVVDVVIGVDTHVHTHSAAIVDARTGGVLEEITVEATADGYAQLVAFADEHAVLRAWAIEGTGGHGAGLTRHLERDQEVVIELDRPERAKRRHGAKSDPLDAIRAAREALSRPRLGGPRSGGDRQALSVLLAARRSAVNAAGDAQRQVFSLVIAAPEQIRARFRGQKLPAMLKTAAGLRVHASWDVETATTVTVLRSLARRAHALAEEAAEHEKAIRVIVRSWRPDLLEQLGVGPIVAATVLCAWSHPGRIHSEAAFAMLAGVAPIPANSGQITTRHRLNRYGDRQLNRALHTIVLSRIRYHQATRDYVARRTSEGKTPREIKRCLKRYIARDLYRLLEHHPVRA

SEQ ID NO: 168491 - protein, 327 aa, unidentified
MSNLTYIGIDVAKKELCCSLPGCRPFKLSSSLAGINALIQRTADLDQPGNLCFVMESTSGYSEYTADALQDLAGVQAAIVPPGRIIGFKQAGLTRTKNDPTDAIAIRKFAESHQPDPWQPPTPAQRHLRSLQNQMNSLHKAVAQQLCLQEKFLSAYRPDDFALASVARTIRFMKGELAHLQAEFDRTISEDETMAADVAHMLSIPGVGTGVCNVILTVCYRQLRELSQRKLLTFCGMSPKEFQSGQRKGQTRMSKAGDSRVRRVLYMAAMVSVREEGLMRDYFRQQKADGKKGMIAMVNVMRRLLYIIQGVVKSNSPFDINVFHSNA

SEQ ID NO: 168492 - protein, 318 aa, unidentified
MSDSVFVGIDVSSQTLEVASSDQAKTWQIGNDAAGLEALVAQLSTLAPALTVLEATGGYEFEAACALQAAGLAVAVVNPRTARDFARAMGALAKTDALDAKMLAAFARVLHQHPERERFVKPLADAELQRLQALVLRRRQLVQMITSERQRMRIAHSAARPSIERVIEFLKTELGDSDADVAAHVQRHHAELAQALASVPGIGAASVAVLLAELPELGKLDRRRVAALVGVAPLNRDSGQMRGQRTIWGGRADVRRTLYMATLTAVRHNPTLKIHYDHLLAAGKRKKVALVACMRKLLTMLNAIAKHGTRWDPTLHQA

SEQ ID NO: 168493 - protein, 406 aa, unidentified
MEVVYERCCGLDVHKKSVTACAITPEGKEIRTFGTMTDDLLKMTDWLKEKGCARVAMESTGVFWKPIYNLLEIAEVETLVVNAQHIKAVPGRKTDVRDAEWIADLLRHGLLKGSYIPDREQRELRELVTYRRSLIQERARESNRIQKVLEGANIKLASVATNVLGMSGRSMIEAIIADIDDPRVLASLAKGKMKSKREELESALKGLIGSHQKMLLSEQLEHVDFLDRKIGALDAEIERRTRPFEESLELVDTIPGVGRRTAEEIVSVIGVDMGRFPSAGHLSAWAGVSPGNNESAGKRKPAKSLKGNPLLKTALVSAAHAAAGSKNTYLSAQYRRIAARRGAGRAAVAVAHTILVIIYHILKKREPYKELGADYLAKRKEDTSLRRAITTLETLGYRVQIEKVAD

SEQ ID NO: 168494 - protein, 379 aa, unidentified
MRGPVPVLSAVPARAFHPLPALTNEGMAMTTMTDVRLRVIGGVDTHRDVHVVAALDEHGAELGVQSFPATPAGYRSALRWLMRLGDVTRIGVEGTGSYGAGLTRFLHDQGIEVVEISCPNRQRRRSHGKSDPVDAVAAARAVHSGDATIEPKTRTGKVEAIRALRTADRSARHDRNRALNQMRALLLTGPEELREQFRGTTVLRMVRGAARLRPGDPTTPLGATKYSLRLLAHRVLELEAELVDLKAILTPLVAAAAPELVARHGVGTDTAGALLVAAGDNPERLRDEGSFAHYCGVSPIDASSGMVVRKRLNRGGNRSANEALWRIVMVRLVSHPETRHYMERRTKEGKSKRETIRCLKRYVARELYPFLVESGLDSR

SEQ ID NO: 168495 - protein, 343 aa, unidentified
MQAITIIGLDIAKSVFQVHGVDATGQVVIRRQLKRRYVLAFFQKLSPCLIGIEACASSHHWSRELQALGHSVRLMPPAYVKPYVKRQKNDAADAEAICEAVTRANMRFVETKTPEQQSGLVLHRTRHLLIRQQTAVINAIRSHLGEFGIVAPVGRNGVEELLDVVADPSDKRVPAIARACLAALGAQLHRLKEQILEFDRMIRAWHRSSEMSLRLDDCPGVGPVLATALAATVADPKAFRSARNFSAWIGLVPKQHSSGGKNRLGSISKQGDRYLRSLFVAGALAVIRYAKIHGTKHRPWLTALLARRPTKIVAIALANKIARMAWAMMARGERYKEPVALAA

SEQ ID NO: 168496 - protein, 312 aa, unidentified
MTHACAAGVDVGRDWLDVGLAPSGKVFRLANGPSGVAALVMRLEREGVAKVVLESIGTYGARLVRGLAQAGFEVGVVDPKRIAALRTAEGRRAKTDRLDAGLIARFALLMQDAARPVPSARAFEIRALSTRRRQLVEMAAMEKTRLKQTLDEAVADSCRRAIAWLAQERADVEARLQALILEAHDGPARQALLQTIPGVGPAVSMTLLADLPELGGLDRKAVGSLAGLAPHPNQSGTRTGPAHIGGGRPCVRAALYMAAISAARSDNGFKREYQALRAAGKPAKVALVAIARKIVVAANGMLKSGQPWQRPA

SEQ ID NO: 168497 - protein, 373 aa, unidentified
MNNTTNASRAICANAATANNGPEQTPMLTAWAGLDVAKATFDAGIWLPEFSQTELPMREIPVKTFPRTPQGAAEFLQWADDFLERRPPKPGALRAVMEATGKYSIELAMWFAELRADLAPAIINPRTSKDFMKSLALRNTTDKIAAQSLARYGADRAPAPYQPPSSLQAQLRDLCRWRQTLIQARVAEENRQREGSASPLVRKMQRARIQKCKRDIARVEKEIRGLIASAPSLTRDCELLDGIYGIGFTTAATVLAELGDLRRFKKGRQLTAMAGLSPQRGESGTSVHKKTRLCKQGSSWVRTALYLPAMTAVRGENELSEFYHRLIRAGKTPKPALIAAMRKILLVMRAILISGEPYQARYHACAKLKEKSA

SEQ ID NO: 168498 - protein, 338 aa, unidentified
MKLYCGIDLHANNSVISIQDEQDNVRYEKRLPNDLASIVTALQPFQEDLQGCVVESTYNWYWLVDGLVEAGFPVHLANTAAIPQYAGIKYTSDDTDARHLAHLLRLGILPQGYIYPKQDRGLRDQLRRRLLLVRQRTMQNLSLQGMITRYTGRRLSGNQIKQLTDDKLIELLPDKSAALAGRVSLALIQTLDQAVDLLERDVQKKAGKRSGYQILITIPGIGEVLGLTILLETGTIERFPDAGHYASYARCVKSEKLSNGKYKGQGNRKNGNRYLAWAFMEAAHFATLWNQEIKRYYQRKLAKSHLMVAKKAVANKLARACYHMLKEHTNFDVTRAFG

SEQ ID NO: 168499 - protein, 338 aa, unidentified
MKVYVGMDLHATNTYVGMIDEENTVLYKQRCRNELPLILAALDPFKKDIQGVVVESTFNWYWLVDGLMDKGYRVHLANVSAIKQYEGLKQIDDKRSAFWLANLLRLGILPTGYIYPKEERPTRDLLRKRLQLVRHRTSHVLSVKNILARNLGIRMKSEDVKRITDQEVMRFFPDREMQTMVLSSVGLIRHLEDQISTIEAMITKKLKVRKEFAKLMTVPGIGKILTLTIMLEVGDIHRFPTVGDYSSYCRCVKSIRTSAGKIIGYGNRKNGNKYLSWAYIEAAQAARRFHETVRSYYEKKMAKTNRIVAIKALSHKLTRASYYVLRDQVDYDPARLFA

SEQ ID NO: 168500 - protein, 346 aa, unidentified
MAIAVLGIDLGKNSCSVAGLDGTGRVILRRRLTRESVVRLAGTLPACVVAMEACCGAHHLGRVLREQGHEVRLMSPEYVQPYVKAQKNDERDAEAIAEAATRPTMRFVELKSEAQLDAQILHRARSRLVGQRTALINQLRAVLLERGIVVAKGRRRLEEYLIGLLDEDGDRRATLSLRTCLLIEDMRLEWSELDQRIAALTAEFVARAREDQAARRLATIPGFGALNATALVAAIGTGETFRRARDLAAWLGLVPRQATTGGKPRLLGITKRGNTYLRTLLIHGARAALPSLSASQSPMGEWLRGLIGRAHKNKVIVALAGKLARIAWAVLRSGATYVKEGRPVAA

SEQ ID NO: 168501 - protein, 338 aa, unidentified
MNKTSLSSYLGIDISKDKFDAYCIGTDKEKHFYLSCSMDRNGFKRLESRLEMLSKPKEAILIGMESTACYHINLFSFLLAEGYTVILINPLLISNYVKTQLRKTKTDKKDALVIAQFLLIHADQLIQTNIPAHISDLRDLSRQRESLLSQMTVLKCDMKRVLTITFPELEKLTGVFTKSILKLLSRFPSAQAIVAANPVEINHLLIDHSMGRNSAKTTEAIIKSARSSVGTTSPAREVILKQKAEVLIHLDEHLKELTALMIELCRKDMDDDIQIMTSLKGIGENTATNFLVEMGGDITKFKDHKKLIAMAGLDPAIYQSGKHDGQGRNNQARKSTSP

SEQ ID NO: 168502 - protein, 333 aa, unidentified
MQHTIGIDISKGTLDCFELSSCKHYQYPNDDLGQKDLTKWIKKQDTVFVVFEATGAYHRSLEATLARHKHSFAKVNPRQARRFAQATGRLAKTDRVDAAMLAKMGAILDLPAQEPKSENINSLRELLTARRALTKDNAAAKTRAQTTVHAVLKIQIKARQKQITLQLKQIDKIIAEMIAVNEGLSRKFEILISIPGIGQATAFSMLIDMPELGTMTGKQAASLAGLAPISRQSGKWQGKERIQGGRAFFRRAMYMPALCIIRHNLSSKQKYDQMIKSGKPAKVAITAIMRKLVVLANVLLRDDRIWAEKPTRPTRILRARKSIELVRHLKQPQ

SEQ ID NO: 168503 - protein, 312 aa, unidentified
MTGKPIVGVDVAKDWLDLCRAGTTRVERIANEPKAIAAWLEQVDPALVAFEPTGGHERRLRAVLGERATLFVRVHPNDLIAFRRSRAIKAKTDAIDATLIAAFAAEELVRRGLKPSIVADETLRELAARRRQLVDALQAERCRLALAQAKPVRQSLTLLIDTLASSLDSVEAEIAAGVAANPETASRAQLLRSLKGIGPISASTLIADLPELGHLSGKQIAALVGLAPHTKQSGKVKNRERTGFGRPGVRRVLFNAARSAIRHNPTMKAFYQRLVFQNQRPGKVALTAVMRKMLVTLNAIARDKQAWNLQAA

SEQ ID NO: 168504 - protein, 384 aa, unidentified
MQTVAERPEAPTAIRTDLGAIFVSLELSRSTWLITSLSPGGGEKMSKHVVRGGDVTGLLERFAQLREKTRARTGKVFSFVVIQEAGLDGFWIDRVLQNEGIESHVVDPASIATSRRRRRAKTDRIDGEALVRALLAYKRGEPRVCVMVKAPTPEEEDRRRLCRERKVLIAERIRHVNRVKGLLFSQGISGYEPLRRDRRERLVTLQTGDGRLLPDHLKAQVCRELDRLELLLEQIKAVEAERDVLLAAQQAPAAMLLDIKGIGPEFAAILWSEGLFRHFDNRRQVASYAGLAPTPWQSGSVDREQGVSKAGNPRLRTTLIQLAWLWLRHQPQSALALWFEERVRRNGDRLKKTTIVALARKLLVALWKYVTAGVVIEGAVMKAA

SEQ ID NO: 168505 - protein, 339 aa, unidentified
MGLHCAVDLHGNNGFYGITDETGKRLFKKRIPNSLPAVLAALEPYREDLDSGVIVESTYNWYWLADGLQENGYHVRLANPAAMQQYNGLKNTDDESDTFFLTEMSRLGILPEGHIYPKEDRPVRDLLRRRLLLVRHRTAHILSFQNLIARELGDQITSNQIQKLWPEQVKPFFEDERLILMGQTNVEMIRFLTKHIRKIEKVILGEVGPKPEYEKLLTTPGIGKILGLTISLETGDISRFKKVGNYSSYSRCVKSLRTSNEKKKGENNRKNGNCYLNWAYVEAANFIRRYCPEAKAWHQRKLRRSKQVVATKALASKICKACYFIMRDQVDFDVKKIFG

SEQ ID NO: 168506 - protein, 349 aa, unidentified
MSAKFNSEIAVIGIDIGKNSFHVVGLDRRGAIVLRQKWSRGQVEVRLSNLPPCLIGMEACVGAHHLSRKLTSLGHDARLMPAKYVRPYSRGQKNDFRDAEAIAEAVQRPTMKFVATKTAEQLDLQALHRVRERLVSQRTGIINQIRAFLLERGVAVRQGLRFLRAELPRILARPCKALSPRMLRVIEDLAGDWRRLDERIDGLSTEIEVLARQDADCERLMSVPGIGPIISSAIVAAIGGGDAFSKGRDFAAWLGLVPKQSSTGDRTILGKISKRGNRYLRVLFVQAAWAVLIKPKSWARHGLKPWLEAAKKRLHHNVVAVALANKLARIAWSVLAHGRVFEATRIRAA

SEQ ID NO: 168507 - protein, 349 aa, unidentified
MLIIGVDFHSRFQQIAMVDTESGELVERRIDHSNGEAQKFYVELQKPVRVGMEATGYAQWFERMLAQLGHELWIGDAAEIRAAMVRKQKTDARDALHILDLLLANRFPRIWMPSPAERDLRQLLRHRHKMVGLRTSVRNQLHALAMGQGVYRKRKLWTAGGRTELEALGLDPWASRRRQELLEILDRLDSILAELDRAVAQAAEQRSVARCLMEQPGVGPVTALMFVLTIGPVERFRRSQQVVSYLGLNPRESSSGGRQRLGAISKQGNSMARFLLVEAAQTAARYDEELRRDYQRLKFRRGTAVAKVAIARKLAVRLYWKLRKLNSAVPLARMQGSPENPLVGASLSS

SEQ ID NO: 168508 - protein, 386 aa, unidentified
MPKPNDLSRSLTAFEQDSTLIVVIEMSQASWLVAGIVPGVDREPLKKVEPNGDALLRLLQRWRDEATKAGRMLKRIAVAYEAGRDGFWLARWLRARGVEAYVIHPTSVAVSREHRRAKTDRLDTALLKRVFLGWLRGEPKHCSMVAIPTLAEEDAKRPNREHESLVGERTRLVNRIKSGLVRLGIRTFKPMLRRAPEHLDALRTPEGAPVPVNTLAELRRDLARLHLIRAQIKVIEAARLERLQQGPEQGPHAMVRLLARVIGIGVETADMLVQEVLSRNLRDRRAVARYAGLTGAPDESGAKRREKGLAKAGNARVRRGMIQLAWRFLMFQSESALAQWFRSRTAQAPKMRKTMIVALARKLLIALWRLVRTGDLPEGLALRPAI

SEQ ID NO: 168509 - protein, 429 aa, unidentified
MSYRIAGIDVHKKILAVVVSDVEIESEYQFERRMFSSNPEQLRSLAAWLVEQKAEEIVMESTAQYWKPVWETLERYWKPLCEKREGARRRSGTLHLAQALSNRGRRGRKRDFVDAERLVKRLVARELTLSFVPDAEQRLWRTVTRKKYQLRRDLVRLNNQLESLLEEAHIKLSSLVSDLLGVSARRMLKALADGETNPAALAALAHERLRATPEQLCDALGACTELKPVYRRLLKMTLEHLQILEQQIGQLDQELATLLHPHQDAVERLAEVPGFAVDSAQQIIAEVGPAAATFPSEKCLSSWVGACPGEEESAGVNYSHRSPKGNRHMRRLLNQTANAAVKAKGSIFEIIYRRCVPRLGHNQAIGVIAHRQCRLIWLILHQGTRYEERGPAVSKRSRYQRTWRMIRQLRNLGYHIEPPNPQPSQARAQ

SEQ ID NO: 168510 - protein, 355 aa, unidentified
MTSTKYIGMDVHTESISMAVRNSTGKVVMECVIETKASSILQFIDGLRGDLQVTFEEGISAAWLYDLLKPHVTKLVVCDPRKNKSMREGNQNDKIDARRLAELLRLDHLTPVYHGEHGLRTLKELVRSYLTVTKDLARVMTRVKAIYRSWAIPCSGKQVYAWCHRAEWLGKITEPGVRRRAEFYYQQLDALRVLRQEVRRDLLAESKKQKAWKRLCQIPAIGPIRAAVLLGILQTPHRFRTKRQLWNYGGLAIEMHSSADHRRVDGQLERSRKNVLVRGLNRNCNHDLKNLFKGAAVVASSKPGAFAEFYAALVAKGMRPEMARLTLARKIATIVLIVWKKGASFDTQYLKPQTA

SEQ ID NO: 168511 - protein, 324 aa, unidentified
MNTIPSSDIVVHIGIDVAKASLQVDLQGTSTSFDNSPKGRAALLSALPRAAFVIMEATGSYHLRLLELLHSRGVPAAVINPVWVKKFAGAAGKLAKTDRSDAAMLSAFGQTFRPAPTSPREPERVELKELLAIRDTLVAETVLWKNFMEHQQSAVARKMTASRLKQATAALAKVEKRISVLLEESVAIAPAARVIRACKGIGLVTTAVLLAEMPELGQVGRREIAALAGLAPYSNDSGKSEGPRHIRAGRSNVKRALYMASLSAVRHDPVLGPAYKQLRAKGKPSKVALVAIARRLLVIINARLRDLYVEHSKEKGDTARYPTK

SEQ ID NO: 168512 - protein, 340 aa, unidentified
MKLYTAFDLHANNSYAAIIDQEGHKVAGKKLINDPQVVLEFLKPHQKDIMGIVVESTFNWYWLVDNLMDCGYKVHLANTTAIQKYNGLKHSGDKEDAFWLAELLRLNILPEGHIYPKEERPIRDLLRKRSHLVRLRTSLILSLQNIVDRNCGKRVKVKDIKKRKEDLVAPFFEGNDDLSLTGKISKEAIDFFTAKILTVENFVEDKLELKKPYQYLLSIPGIGKILGLTIMLETGPVERFEKVGNYVSYCRKVSTRWTSNDKTKGKGNKKNGNKYLAWAFSEAAEFSRRYDEKAKAFYNRKMQKTNFMVAHNALAHKLARAAYHIMKDQVPFMPDKLFSS

SEQ ID NO: 168513 - protein, 445 aa, unidentified
MIAAVVERCAGIDVGKRFLKVCVMVGALSEEPRFEIRKVDCTDTNFQQLREWLRTEGVTQVGMESTGPYWVPVFNVLEPEVKVVLANPVEVKNRKGHKTDATDAWWLAHLLRHGMIRASFIPEKATRDLRELTRRRKKLIGQVAQERNRVQKQLEYGNVKLGNELSDVFGLSGQLMLKALVDEERTPEQIAELAQGSLKKKKAEIAESIRGQQLSEMQKELIRSSMRHMVFLEMEIGQLDGLIAGLIQAAQQQEPYQLLQTIPGIKQEAAGNVLAETGPDMKQFPSAGNMSSWGGICPGNNESAGRHKSRHTTHGNPWFRATLIECAWAASRTNGSSFQAKYQQLKPKIGHKRALVAVAHALVKAIYYVLSTGEPYREVKSEVLNEVKRQRIIRHHTRRLRRLGCWLPAEQLTPLKEWYVTHCIPEAETPPKKPGRKPKLAKDQQ

SEQ ID NO: 168514 - protein, 402 aa, unidentified
MNAVGIDVSKGKSMVAIMRPFGEIVSTPFEIKHTASDIRSLVELINSVEGESRIVMEHTGRYYEVLAHQLSEANLFVSAINPKLIKDFDNDSLRKVKSDKADAVKIARYALDKWQNLKQYNVMDELRNQLKTMNRQFGFYMKHKTAMKNNLIGILDQTYPGVNTYFDSPARSDGSQKWVDFASTYWHVDCVRKMSLNAFIDHYQNWCKRKKYNFSQSKAEEIYGKAKELVPVLPKDAITKLIIKQAIDQLISVSTTVESLRTLMNETASKLPEYPVVMAMKGVGTSLGPQLMAEIGDVSRFTHKSAITAFAGVDPGVNESGTYEQKSVPTSKRGSADLRKTLFQVMDVLIKMMPQDDPVYQFLDKKRSQGKPYYVYMTAGANKFIRIYYGRVKEYLASLPES

SEQ ID NO: 168515 - protein, 387 aa, unidentified
MPQPNDLSRSLVALDQDSTIIAVVEMSQSSWLVAGMLPGIERQPRKKLEPSAERLLGLLHRWRDEAVKAGRKITRIALAFEAGRDGFWLARWLRAHGVEAHVIHPSSVAVSREHRRAKTDRLDTELLKRGFLGWLRGERGHCTMARIPTIAEEDAKRPNRERECLVRERTRIVNRMKGTLARLGIRNFKPTLRKAAERVTTLHTPEGSALPPNVSAELQRNMARLGFVVSQIKEIEAARQKRLEQEPETEPHAMVRHLARVVGLGVETADILVNEVLSRPMRDRKAVARYAGLTGSPDESGAKRREQGLAKAGNARVRRSMIQLAWRFLRFQKQSALALWYRARTADSRVGTRKTMIVALARKLLIALWRFVTTGETLEGVVLRPAG

SEQ ID NO: 168516 - protein, 337 aa, unidentified
MKITTIGLDIAKRFFHVVCCNEQGRLVKKKMLKRAQVLSFFQQHTTCLVALEACATSHFWAREIRKCGHEIKLIPPQHVKAFLVGNKNDYNDALAISVASKQHHIKSVCIKSVEQQDNQAQHKARELAVRQRTALCNQIRGLTAEYGIILNQGVNTIRKSIPLILEDENTGLSGAFKAVLKQLETQLSNLDSCIETYSTLIVETAKNNDICQRLQTIPGFGPMVSSAYFNEVGNGSNYKRGRDVSASLGIVPRQHSSGGKDTLLGISKRGNSYLRCLLIQGAKAVVSRAKTKNDKLSQWINRLVQTRGHNRACVAYANKMARMAWAISASGESYSPV

SEQ ID NO: 168517 - protein, 344 aa, unidentified
MKLTTVGIDLAKNVFQVHGIDEHGKVLVKKQLRRDQMATFFVNLPPCLLGMEACGSAHHWARKLQAMGHTVRLMAPQFVKPYVKTNKNDAADAEAICEAVGRPNMRFVPIKNIEQQAVLALHRVRQGFVKARTAQANQIRGLLGEFGLIVPQGIGFIASRVPELIEDADNQLPGSFRVLVQRLLDHLKELGRQVEELEAQIQAWHRSNDLSTRLAQVPGIGPITASALVASIGDTKNFDGGRQLAAWLGLVPRQHSSGGKSNLLGMSKRGDSYLRTLLIHGARSVIYRAGQKADPCSWINAVVQRRNKNVAAVALANKNARIVWALLAHDRRYETGYKKAAEVA

SEQ ID NO: 168518 - protein, 307 aa, unidentified
MKEHVVYCGIDVAKGQLDGALLGKRWQVPNTKAGIRRLIKMLRQRNTCPQVICEASGGYEQDLVELLHQAAVPLTLVQPQRVHQFARASGILAKTDKIDAQVLVRFGQALAPAPNAAPGAQTLLLRELDRQRAHLSGLLVAEQNRRAQLRDPSLRQLSAQLIKQIQGHIVRIDARTQAIIAADQELKAKAKMLTSFSGVGLRTATMLLAQMPELGQLNRREAAALAGLAPFNRDRGTWRGQRRVCGGRSLVRRGLYMAALTAARRNHILAPFYQRLRAAGKPPKVALTAVMRKLLIALNSALSPTPA

SEQ ID NO: 168519 - protein, 368 aa, unidentified
MSVYVGIDVHRKRSQVAVIDARGEVLANRNVPNGAEPILKVIGGLPPGCPAAFEACYGTSWLVALLEDYGFTPHLVHPSRCKAIASARLKNDKVDAAILAQLLRADLLPEAWIAPPAIRQLRALLRHRVALVRLRTRLRNRIHAIVADYGYDRPAGEYWSGPGRAWLASLQLPAVSRELVEDDLGLIGALQDRIDRLDWGIRQRARSDPRVKVLTQLPGVGPFTALVILAEVGDISRFASARKLASWAGLTPTVRGSDRVAHYGHISKQGSVWLRWVLCEAAQTAKRSPEFAGTFQRIAQRRGKKIATTAIARKLATRAWHLLADAEHAAAATRRAPGHGTVTDPGGGRMAPGELADQPEPAPPRSNN

SEQ ID NO: 168520 - protein, 351 aa, unidentified
MHWIGVDCHKWQHTAAVLNAQGQVVDTWQGGTTPTDWQDMLSWAARYGGGCQWGLEGSGHYGRGLAQFLVTQGEVVVEVNTRLTVLGRRSRGTFQKSDHHDAAAIAAVVREQAERLPQIQAEDASAVLVLLTRERDDLQAAATRLRNQLHALIQQAEPGAPKARLRRAHDLEVWCDYQATSDAPLVQVRAARIRSRAWQLVRFLEELDDLEGEIETAVPAVVAPLTEIVGVGKLTAGMLAGYLGPGKRFASDRQLAAYVGVAPLEVSSAGRVRHRLNRNGHRQLNAIIHRIALSQLRYSAEARVYIARRRGEGKSQREAIRALKRYIVRRIYNQWQRCLPHLNPHWEDAIV

SEQ ID NO: 168521 - protein, 335 aa, unidentified
MQIYGIDLAKEKFDVSFFDLTSKKVSNQPSHKVVTNNLKGIGKFFKGLPSDAVLVAEHTGVYGDTLLKCCMDSNVKIAFVGGYVIHRYRAPPDRAKTDVLDCALLRDFGERYPDKLKYKTFPEEALYELRQLARHREMLVEQRKQQITADRSEDCRPIRSLAVKRSMDRIKEMLDTEIAETEKEMLKVINGHESIRHNYELVKSVDGVGLITAVELLVKTENFTKITTARQYAAYAGTAPYEKSSGKMDKGAHISKIGNRRSKTLLYICAESARLHNKEIKLYYERRTLIDKKPRHYVLNAIANKLLRIIFTLVEKGEYYDANFIRQDPRVVKHN

SEQ ID NO: 168522 - protein, 422 aa, unidentified
MSDLEAVVYHAYVGIDWAISKHDVCVQQSISDTREFAVVQHSPEAIDAWVKGLQLRYGSPIAVAVELSKGPIVSALQKYDFIDIFPINPSTLAKYREAFQPSKAKDDPTDAALAVDLLLHHPERFKLLKPQSAKIRALATLVEQRRSLVGERIRITNRLRAALNQYYPQVLDWFVHIDTPLFCEFVKRWPTLVQAKRARTSTLRRFFREHHMYRENVAENRIQAIKNAHPLTLDEAIIVPYRLQVLVLVEQLELMFKAIEQFDVEIEKQASAHPDYKLFQSLPGAGPSLAPRLLVAFGEQRDRFKSAQDMQKYSGIAPVTERSGKKHWVHWRLRCPTFLRQTFVEWAGQTINKSYWAGLYYYQQREKGSTYQAAVRSLAFKWIRILFRCWQSGVAYDESRYLKALEQRGSPLLKGKAMPKSA

SEQ ID NO: 168523 - protein, 324 aa, unidentified
MNIKRIGVDLAKQVFQVHGVDSHEQVVARKRLSREQMHRYFKELPPCLIGMEACGTSHYWARVLTGYGHTVKLIACQFVKPYVKGGKNDANDAEAICEAVGRPGMRFVAIKTEEQQAAQADHRIRSRLVQVRTALSNEMRGLLAEFGIVLPAGTAQLRKALPILLEDEEQKLPASFKVLLTELAEELRHTDERVGLHDQRIQAAAKSDERIQRLLAIEGIGPITASALVAAVGDATQFASGRNMAAWLGLVPSQHSSGGKERLGHISKRGDTYLRTLLIHGARAALNGAAGKEDRRNRWAQALASRRNRNIATVALANKNARIA

SEQ ID NO: 168524 - protein, 360 aa, unidentified
MKIVGCDFHPSWQQVAIFDPETGEIAELKLVNTDGEAERFYRELEAPALVGIEACGNCQWFIELVERLGHLVWVGDAAQIRASYVRRQKTDRRDAGHILRLLIENRFPRLWVPTAEQRDLRQLLIHRHKLVEIRTRVKNGLQHLALNRGFPKQRSRLCGVRGRAYMEKLPLEGWTARRRGDLLNLLVELDKCLDELDEAANHAAEEHPQAKLLMTQPGVGPITSLAFVLTIGDVSRFKHSNQVASYLGLIPREHSSGGKQKLGSISKQGNRFMRQLLVESVQTVNRLDEGFRKEYAARCHHKSKGVAKVAAARKLAVRLYWMLRQNVGYPEIALIESSLRVPLVGASQTEGLIGRSRIQQ

SEQ ID NO: 168525 - protein, 346 aa, unidentified
MQSYVGLDVSLRKTAVCVVDEAGKILREGMVDSDPEVIAVFIQSNARNPVRIGLETGATSTWLWTELKKRGLPVICIDARHAKAVLKMQINKSDRNDAAGIARIMQCGWYREVRVKDRDSHAVRALLASRALLVELKRDLENQIRGLLKNFGLIIGRAKMTTFTTRATELIEGRPELGVAIEPLLKAREALAGQIEGLDRKVLRLARSEPQARRFMTVPGVGPITALCYLATIDDPSRFKKSRSVGAYVGLTTRRYASGETDRTGRISKCGDEMLRSYLYEAANVLLTRVTKWSTLKAWGMRIAKRRSMNKARVAVARKLAVILHRMWIAGTEFCWTKEGDAMQPT

SEQ ID NO: 168526 - protein, 274 aa, unidentified
MSIVMGLDQHRAQITADWLDTETGEVKRGRVAPADRAGVRRFLERFDGQELEVALEATTGWRFVVEELRRVGAIVHLAEPAETAGLRGPKKRARGDRADARHLRELLMLERVPESWIPPDHILDLRARVRLRHMLGEQRSEWQQRIQATLYHHGCPQRRQLMVGDGRDWLAAQPLSAVARERVTVALAMIDALDLQMRPIEKELRAYARRQAGCRALMAHYGIGELSAVTILAELGDCTRFSSSRQAVRYAGMDTVASNCTSCSGDFGLCGDVG

SEQ ID NO: 168527 - protein, 408 aa, unidentified
MIYIGVDLSDKFFDSCITNSYGDVLTRNRFDFDHDGFCSFTKLISEHQANPSECVIGLENPRSRLVDFLDGRGYTVVLTNPNAICSYRKSKTSSNAKSDQADAQLIAEYVRENHKRLKCIQIPDETIRELSLLLEDRDKMVQQKVRFSNQLTSTLKEYFPQALDAFGSIDSKCTIQFLKRIDTFAQLKALSAEEKEKLLSDCGINRKDSKERFYEAMKKPVYHISPSVVKTKVKLKNVLVAHLDLLIQQIQDYESQIQNLMDDSDHGNIFRSLPGADYILGAKLLVIYSTRNFSNASEAQQLFGTAPYTSMSGQSRIVGFRKGANKLGRNTFQQLARGSIRSSKWAKKQYFKKRNQGKGSHHAFRCLANTWVKITFALWRDKTPYDESRHLVSIANHLINQPAFVNND

SEQ ID NO: 168528 - protein, 472 aa, unidentified
MRYIGLDLALATVHKAVVIDEQGRDITPVLSVETSAHSLEQLFHRAREGAQSDEPLVVVMEPTGMAWFPVAVFCQRQGVKVYLVNSQQVADLRRYYRKHAKSDRIDSRVLAKLPIVSPEKLHPLQLIGASQLACQRGCKELDRLMDMNIAIQNRLRAIDRFAWPGLEQVLPDNVAPITRWFREHWYDPHAVLALGEEGLLANWLENEQISDEMLESGKWAAALVHLAEQVLALYGPETAFLDYAYLQAEVTREQSLLSMLEAEYKQLQLETVRPLYRQLHPSRNLESLYGVGQDGAAVYSSFIGDPKRFPDHASFRGWSGMIPRSSQSGTSEAKGLPISQAGPDLIKKFSFLGAETARQWDPQIAAIYYDQIVHHGKHHTQAVCVCATHLLDRIWIILKEDRAYELCDVDGTPVSVEQARKIITTRYNVPKEVRQRNNQRTRLARREQLAEKNQKRKGTSHPVRGELETPSL

SEQ ID NO: 168529 - protein, 349 aa, unidentified
MITIGIDPHKQTHTAVAVNEVGQLLGEVTISGDETGQRDLLRWAQNLEGAEERRFALEDCRHVNGRLERFLLSSCEAVLRVPPSLMAGARKSARTRGKSDAIDALAIARAALREGAELHPASHDKAARELKLLVDHRDALVSERTGLASRLRWHLHDLEAGLEPSARSLDQASVRRSLSQRLARREQTVQVRICRDLLARIGDLTRRERQLASEIGERAKRYCPALFEVPGVASLTAGKLIGEIAGIGRFASDAQLAHFAGCAPIPASSGKTERYRFDRHGNRQLNAALYRIALTQARVHPGARAYLAKKREEGKSTAEALRCLKRLLVRVVWRTLRTAGEPLVSPSPT

SEQ ID NO: 168530 - protein, 370 aa, unidentified
MNSITYVGLDVHKATISVAVAEGGRSGEVRQVGTFANRADVLRKMVERLAQRGVQLSFCYEAGPCGYGLHRLLSGLGHGCTVVAPSLIPIKAGDRIKTDRRDAVMLAKLHRAGELTAVWVPDAAHEAMRDLVRARATAAKVLSKARQHLNGFLLRHGRLYSGLRTWTQAYRRWLTTVRFDHPAQQIVLQDYIHAVTDAEQRIDRLTRQIEELLPNWSMAPVATAIQAMRGVALINAATVVAEVGDFARFSNPRQLMAYLGLVPSEHSSGARLRRGGITKAGNAHARRALIEGAWTYRMQARVSRKLHDRLESLPQEICDIAWKAQVRLCSRWRRLAALGKPKVVVTTAIAREMAGFIWAIARQVQPGATG

SEQ ID NO: 168531 - protein, 338 aa, unidentified
MGRFIGIDLHRNCFTVCMIAENGREYLSEYDLDDIDRFLRKLRTTDEVAVEVTGNTRLFYDLVAPHVQRVAVVNPSEFRVIRQSTKKTDKHDARALALFLSKNLLPEVRMKDREHAELASLTQTRDALVKQRTALKNKVNNLLSSQGVNLSKESLTSEKGLRQVLGMKFTPLMEIELAVLVEQIRALNASVAKLEGTIKEEGAKLPGHKNLKSIKGIGDLGATILLSVIGDVNDFANEGKLAAYFGIVPRVNNSNETERSGRITKRGTKLGRTTLVQCALIAKRYSPYLARFYERIKARRGTGKAIIALAKKFLGIIYNTLKEGWVFADFPKFELVTP

SEQ ID NO: 168532 - protein, 309 aa, unidentified
MTMVCAAGVDVGRDFLDVSIAPIGRTFRVSNALAGIRTVVNRLQRAGVTRVVLESIGTYGMRLVRALADAGFEVGIVDPKRIKALRLAEGGRAKTDRLDAELIARFALLMSDAARPIPNAKALEIRALSTRRRQLVEMAAMEKTRLKQALDPEIAESCRLVIAQLSAERLRIEQKLHQHLLAEPDNADRADLLQTIPGVGPVVAMTLMADLPELGTMDRKAVASLAGLAPHPNESGTKTGARHIQGGRPCVRAALYMAAVSAARSDKGFKSEYQALRASGKPAKVALVAIARKLVVAANAILKTRQPWS

SEQ ID NO: 168533 - protein, 358 aa, unidentified
MNHPKMRYTYVGIDSHKGTHTAVFLDCFFDKLGEIVFNNRPSAFRKFLSGAEKLKIDGTELLFGLEDASAFGRRLLIYLKDNGQLVKHVNAFLVAQERKNQNITEKSDSVDAECAARVLLSKFDKLPDAEPYDKYWILRTLVVRRDFIIRSNISLKNHLHNLLTQHYPNYRSFFENIDCDTSLAFFSRYPSPSTLKDVTVEELTALLKEHSHKIVGEEKAREILDSLEDTEVKFQEIRDTTVQSTIRQIQFNLKEVKQLEDSLATFLARFDCPLTSMAGLDVVSAAQFLSCIGDIKRFESPAKLARYAGIAPITYASGQKDKKYSNQRPGFDTCTLRNGVNQVKYHSKKRELSLGACF

SEQ ID NO: 168534 - protein, 387 aa, unidentified
MPQPNDMRRSLITLEQDSTLIAVIEMGQSSWLVAGIVPGIERQPLKKLAADQDGLLQLLHRWRKEAAQAGHPIKRIAVAYEAGRDGFWLARWLRAREIEAYVIHPSSVPVSREHRRAKTDRLDTELLKRAFLGWLRGEPKHCSMAAIPTVEDEDARRPSRERESLVGECTRIVNRVKANLARLGIRGFRPRLAHAPKRLETLRTPEGTAVPANTLAELQRDMVHLRFVKQQIKEIETARAKRLEQASGGGRDAMVRLLARVVGIGIETADMLVQEVFSRKLRDRKAVARYAGLTGAPDESGQKRRERGLAKAGNARVRHAMIELAWGHLLHQKDSALAEWYERRTVDARGGTRKTMIVALARKLLIALWRLVTTGEAPAGLLLRPAA

SEQ ID NO: 168535 - protein, 316 aa, unidentified
MNQLGIDVSNDTLDASRSGEGPIARRRFANTPSGHRQLLRWALNPSGAAQVCLEATGVYHLQLALALYHHSAIELMVVNPRAARRFAEAHRVRAKTDAIDADGLLLMVQRMPFRPWAAPRDELLQLQSLAHRVAQLDKELTRERSRLHAVRKAGPHTGPVQQDIQAHIKQLQRRKDAMQARAEALIQRDQALADDARLIDTAPGFAARSATQLLAELAPLPKDMQASQWVAQAGIDPRPGESGTSVRSARQISKQGNARIRAALFMPALVAIRHDANVVAYYQHLLARGKSKMTAITAVMRKLLVAIWGMLHHRQE

SEQ ID NO: 168536 - protein, 362 aa, unidentified
MSNGSREWTKMTAGLDLGDRYSYLFVLDNESGQMIEEGRLRTTTDDLRRRFDSGERMKIAIEVGTHSTWVSRLLEECGHEVLIANPRKTRLIYGDKRKTDKLDAQKLARLARVDPELLYPIEHRGEESQAHLALIHSRDALVRSRTQLINHVRGTVKSFGARLSQCSAQSFHKKVADQLPDELAEALEDVVAIIASLTEKIRDYERRIERVCRERYPQETGLLQQVAGVGMLTSLTFVLTLEDPDRFEKSRAVGAYLGLVPGKDQSGESDPGKRISGEGDEMLRRLLVGSAHYILGPFAPDSDLRRHGEKIASRGGKNAKKRAVVAVARKLAVLLHRLWITGEVYEPLHNARLSGTLGEEVA

SEQ ID NO: 168537 - protein, 372 aa, unidentified
MGHHTEVFVGIDTSKSRNAIAIADGGRGGEVRYLGEFSATEAAIRKLVAKLAAKCCHLTFCYEAGPTGYGLYRLLKSLGHDCLVVAPSLVPKKAGDRVKTNRRDAVSLAKLLRAGELTAVWVPDERHEAMRDLSRARQAVKKDLQGKRQQISSLMLRLGRIYPGKTTWGPAHMRWLMSQKLEHREQRIAFEELLEGIRQESERMERLEDAIREVVPEWSLAEVVAALQAMRGIDLIAAVGVLAEIGDLSRFQNPRELMGYLGLVPTESSTGDKVKRGGITKAGNGRARRILVEAAWSYRYPPRVSRDKQPKVEAAPRRAREIAWKAQTRLCGRFRSLERKGKRRTVIVTAIAQELSAFIWAINRELMPPRQA

SEQ ID NO: 168538 - protein, 437 aa, unidentified
MHEVEDEPLFAERVAGIDIAKAEVMVTIRVPVDTGSGRRQQETRSFRATRKDLLHLADWLRSWGVTRAGMEATGDYWKPVYFLLEQEGFDCQLYHAAQVKALPGRPKTDKLDSVWLAKITERGALPSSFVPPEPIRRLRTCTRYRRHLTQARTAEKQRCEKLLEDAHLKLSTVITDIHGVSGRDMLTAIIAGERNPTVLAQMARTRMRGKIRQLEEALDCSFFTAEHAFALAMMLANIDHLTAQISELSARIDALCEPYLHQISQLDAVPGFGIITAQDIIAEIGTDMTVFPTAGHLASWARRCPQVTSSAGKRKGSNATGRGNPYIGAALGEAAVNAGRTSTFLGAKYRRLVKRMPKKKAQGAVSRTQLIITHALLSDPDAVYTDLGTGYYEQRDTIRRQVHNHVRAIERNGYKVTLEPIDPDPTDPGTLPVGKAS

SEQ ID NO: 168539 - protein, 342 aa, unidentified
MVKIILVIGIDISKDEFHVLAKEKAPNGEVKIKGSRSFTNDGKGFAEFALWVSKKRKESSEVSYVMEATGTYYEDLAYYLYETGDKVCVVLANKIKHFSKSLNVKTKTDKVDASIIAEMGIQRELMAWKPMSANYKQLRDLCREMLSLKKEKSRAMCQFHAMSYAHEKTESVLKIKKTQIEFYETSISQIEAEIAKIVSTDTELKPRVENIMKVKGLGLITIIVVLCETNGFETFNNIRQVVSYAGLDVVMKESGNFKGKTRISKKGNNRIRQCLFMPALSATMCNEKIKDLYERINEKNPGIKRKGVVAGMRKLLILIFVLWTKNEAYDPKHEWKSTGIGK

SEQ ID NO: 168540 - protein, 343 aa, unidentified
MQDVATVGLDIAKQVFQAHGADASGETLFNTKIKRENVLEFFSKLKPCLIGMESCATSYYWARQLLEFGHDVRLIHTSYVKPFVKRGKTDANDAEAINVALTQKTMRFVPVKTLNQQAAITIFRTRSLFVSQRTQLVNALRGHLAEAGLIAAKGIQNYSKLVNLMETAADTVLPTVMKQALTDICDQIHRLNDLVTKLDKEIERRVRRDENACRLLTIPGVGPKTAMCVIATIPDIHRFPSGRHFSSWLGLTPRTHSSGGRSVLRRITKMGNSELRTMLYLGGTVIMMRDKKTPIGRWAARLRARRPYKVVVIAVANLIARIIWTLLTKGGVYDPTYGREASA

SEQ ID NO: 168541 - protein, 415 aa, unidentified
MGGRQQWYAGVDWGSQSHHVVLTDGDGRKIGERSFKHGGEGLAEMAAWLMAASCAAEPGQILAAIEVPHGPVVETLIERGFKVHAINPKQMDRFRDRFTMAGAKDDSRDAEVMASALRTDPRCFRSLAAADPIIVELREWSRIAEDLGVERNRLINRLREQLWRYFPALLELEDDLGAEWLLELWEAAPTPDTASRLREATIAKLLKRHRIRRFDAAFVVNTLRRPPVCVAAGTVEAASAHVALLVPRIRLLNRQIKDAHSRIDGLTARLMPAEAAEPGQKKQHDAEILASLPGVGRTVLATLLAEASDALQRRDYAALRSLAGVAPVTKRSGKSCVVVRRQACHDRLANAVYHWARVAVQHDPRSRAKYAELRRRGHSHGRALRSVADRLLNVACAMLKSGAAFNPSSAAQKPA

SEQ ID NO: 168542 - protein, 369 aa, unidentified
MIIIGVDFHPEFQQIASVDTDTGEFQEKRLTHREEAEKIYRALACAGQKVRVGMEASGHARWFERLLAELQIELLIGDAAEIRTKRVRKQKTDRQDAQLILSLLLEDRFPRIWVPSWENRDLRQLLWHRHRMVQARTRIMNQLQAVALNEGLRCKKKLWRERGREQLESFRLAPWASRRRRDLLELLDRLNPTIAELSQAIQQEVEKCPEARRLMTHPGVGPLTALAFVLIIGEADRFQCGKQVASYLGLVPLEDSSGNRRRLGHITKQGSSMLRFLLVEAAQVTARSLPQWRSKYLHLMMRRGRKTAKVAMARRLAVHLYWMMRQGWDYQQWIKFGSHAGQLGNRCSLKCARKVLDTADIVREAILRQ

SEQ ID NO: 168543 - protein, 415 aa, unidentified
MSLKIVYKICCGIDIHKTFVVACIASTNDKGITSYESHRFSTYTSGLKTLLQWLLNRNCKDVCMESTGKYWIPVYNILENDCSIVLAHPKYVKAIRGKKTDKKDAKWIADLFKHDLVAGSFMPPADIRQLRDLMRYRFKLTCFQSSEKNRLQNCLTVSNIQLGNVVSDTFGKSAQAILDKLLENPADTSFDLEPLVYKSLKKKLPQLRDAIDGYITPEQAGKLKVIKSHYENLESRKAELEELILALAAPYQQELAILQTAPGIRSDFTAIGIISEIGTNMEAFPSAKHLCSWAGLTPTNNESAGKKKSVRVSKAGCYIKPLLVQCANAVVTSKKHPEIRNRYLRLKKRRGHKKAIIAIARMLLTALYHMLKNGENYNAELYRKSYLPPVDREITVEQAIIIARNQGYKIKSATA

SEQ ID NO: 168544 - protein, 388 aa, unidentified
MNRILKIGMDVHSTNFTLCAMEPTIGSEDRVYGETQVAPDYKEIIAFIASLKLKLGLHEEYSIECGYEAGCLGYTLYHQLANAGIKCVILAPTTMLTQQGKRVKTDKRDARLIAQCLCYGGYHPVYIPTGEDDSVKEYLRMRDDHKVALKKLKQQINAFTLRHGHQYPGTKWTRKHVTWLKKLELDLMYRETLSEYMASYEEQEAKIERYDQRIEEIASEARYQENAKKLGCFLGIRTHTALSLIVETGDFKRFAKGNTYAAFLGLAPGEHSSSTNVNRLGISKAGNSHLRRLLIEAAGGICKGAIGHKSKELRFRQRGQSAEVIAYADKANTRLRSKYYRMIRHGKKRNVAVAAVARELACFIWGMMTGNINVLPGTGTSVPAVSQG

SEQ ID NO: 168545 - protein, 465 aa, unidentified
MLFAGCDWSDKWLDFAVQDRTGTVLAEHRIVYATSTDPVADYLAFLTPLARRWRATITGIEDTGILFARALAASGMTVVHVDPTRAARHRSALGVAKSDRADATLIATMVRTGVHRPVVASTSESQALRVVAHAHRAAVTARTAAVHSLRAALVRIWPAAADAWPSTVGGLRSAQARTILAAVPGPRAASQLTRAQLADLLRRAGRNRNVNDEAERLHLHFRRPAMLLDPCVEEAEALRIQDLVASVDHAIRRTFHLERELTTRYGTHPFHAVTAGVPGIGSVLGAYLLAEVGDRPTERFGSGRSLAAYAGVAPITWASGSTTRVSFRRASSLHLRSILHTAAFCMAMHSPGAQDYYRRRRAVGDAHSTALRKVARRLILCLYHCMAAGVLYEDSVAFSYDPDRPDAPVLRRRKGPLSDTEIVQAREQLDGGEATVVGVARMFGVSPQTIYRHVLCRPRRGSASA

SEQ ID NO: 168546 - protein, 441 aa, unidentified
MALAKGKRRTGVSAMSQGTADWSERAAFVGFDWASDHHDVIVVNEQGTIVEDFRFDDAFEGWQLFRTKLGSYANPAVAIETSSGATVERLLEAGYAVYPINPKAAKRYRERKAPSGTKTDRIDAWSLADALRLDGLTWRALKPDDPLTVELRLLCRDEIGLIRQRTALVCQLRAALGEYYPVALQAFDDWTSPSSWAFVEAFPTPEALHQARKRRWEKFLHVHKLYRPETYEKRLALFAQVRAFCGSKPAAQAKSLLALALTAQLRALQNHLDKYRERIQELFAQHPDHELFDSLPGAGAKLAPRLLAELGNDRERFDSPQALQCHAGTAPVSYQSGQIHKARFRIACQKLLRHTVHLWANLSREKCPWAEAYYRTKRAEGQSHACALRCLGQRWLKILWKMWQTRTSYDAELHQRNQLKHGSWVLNLMTSKTTGLAAGEA

SEQ ID NO: 168547 - protein, 356 aa, unidentified
MADKPIVGIDISKEWLDLCTSQAVEVERIANTPEAVAAWLERTGPGLIAFEPTGGCERFVSAAARERGIPFLRVHPNDVVAFRQSRGIKAKTDAIDARLLLAFAGDRLARRELRTSVLGDERLRALAARRRQLVETLQAEGCRLGAAALPAVRNSIEAVMAALRHSLDALEAELAAVIAANPQTAELARLLQTICGIGPVVATALIADLPELGLLSSKQIAALVGLAPYTRRSGKTQFRETTGHGRVGVRRALFNAARATLRHPSPFKDFFDRLVSDNRRPGKVALTAVMRKILITANAVARDRQPWRGLRHTTPPPGAVGTLCQPHGEQTGHRPGRVKAAAALRAVARSASLDAA

SEQ ID NO: 168548 - protein, 360 aa, unidentified
MLYLGIDVHRKQLTVNVRNEAGEAIERRQVSTEWKRVRAFFQRLSERARGEGGYVAILETCGFHDWVLALLDEYDCREAVVVQPTGRTKKKTDRRDAQALSETLWINRERLAAGQPIRGLRRIHPPEPRDAENRQLTALRVRVTQLRTRTLNKIHRILLKHNLEQHCPTKGLATKRARQWLDQLELPELDRLEMDLLLAQWSLWDRQLTSVDCQIRQRQAASPTATLIASLPGAGAFGSLALASRMDRVERFARPGSLANYWGLTPSVRNSGETTDRLGSITKEGSRLARFVLAQMVLHVLRRDPAMRTWYQRIKRRRGAKIARVAVMRRLATILWHMVKRKEPYQLGGVPRRPLMAAVE

SEQ ID NO: 168549 - protein, 347 aa, unidentified
MSFVGVDLHTNSFTACRRAADGTESFETFTLSPAALARFCLTLDADDEVAFEATGNSAWFRDQVLPRVGRVVVVNPSQFKVIRQSVKKTDRNDARALALFLAKDMLPETRAKTQAESELGSLTQTRDLLVKQRTRLLNKVHALHNRHGIKLKRESLASRKRLLAITAEPFTPLEWAELEIVRDQALSLSEAIGKIDARIEEAARALDGYASLTSIKGIGPRAAAVFLSTIGNVHDFASADKLAAYFGIVPRVSQSNETDSRGRITKRGSRLARTALVQCTLIATRYSPYLKAYYDRMRLRRGSGKAIIATARKLLAIIYDTLKNRRVFTDFAAFQFQLGNIPAGQSS

SEQ ID NO: 168550 - protein, 461 aa, unidentified
MAKKAKKVKTAKGAELRIFNPDAAGIDIADGIMQVCVPADRSKDNNRAFGAYTSDLHAISAWLRECGIKTVAMESTGVYWIPLFCRLQEDGMDVVLTNARDVKNITERKTDESDAEWLMLLHQYGLLKASFQPHNDAKRMRTLTRHRDTLSREASSIVLRMQKAMQQMNIKLTLVLSDITGKSGIRIIEAILAGERDPKKLADLADIQCKTPKEEIAKALEGNWEEDLLFVLRQNYDTFKHFCAQLDRCDTELEKLMENYRTEVAGTGRPSYSPTKKRRDYHKRKRNVGFDVERKAYDMWGVNVFEIPGISHLTALGLMSELGHDFTRKFPSSKQFCCWCNIAPNTKISGGKRISSHVPHRRNNVGLIFRSIASSLANAKNQLGNFYRRIRSRAGGKAAVIATAHKVAEIFFAMVANQTTYNPEKVGIDEEVLLEKRIARYKRELERITGMHIEIGNACVP

SEQ ID NO: 168551 - protein, 523 aa, unidentified
MASTRSSKRSRAAAEFLQKPRGIIHPRVQQVGPDHFGIVSVDCAKARCKWMLTDFYGTILVPPTEVANNRVELDAAVARCRAAMIQHALGDAIVAIERTGRYHHPVKNAFARAGFETRIVHPYATKQFRQPANPDNKTDDTDLAAIARAAVNGFALVENPLPEAWRQLQLCIRHRRDLVRKTSALACQIREHLDAAMPGYAACFADKLWDSNVAFCLVRQFGSATVLLQQRLTGLCHYLRQQKVRFQQRTLDTVLAWAQSAAAPDPAAELHRQIALAYHDDRQRKTEEILVLERNIAHRLAQTPYILLLSFPGINVVSAADYAGEMGPIENYANPRSITGRAGLFPSRYQSDRVDHADGPLVRRANRALRAVIMGIADNLILCNQRFRMLAAAWKAAGKDPRLSHVKVACRFCRMSFHMVAGRQVFRHPSLRERGYILDKLLAFHLEHQTPYQQSLRDLNLAFTQIPAKEHAAEAQPLIDRQRTARRGRARGPQHIGEILAIVLARLGVGALPSTPSGDQDLP

SEQ ID NO: 168552 - protein, 340 aa, unidentified
MWYSGIDQHKRFCLITTYGPDGPRVKQARVASTPLALQQYCAEFSGPHQAVVESTGGWYWLADTLSALGVDLVLAHATRLKAIAAAKVKTDKIDSDTLALLLRADLIPRAHMIRPEARGPRDLMRTRLRVVEKVVSAQNSIDRLLEKFNLDDVARLADPLYQLQARCHAAQIQLLEEQITLLERALYPHLIPNAEVQRLLWIPGLGKVNAFTVYTEIDGIRRFPSEGQFFSYCRLVPGADNSGGKTRHRSGSKAGNRYLKLAFSHAGIRAVQYYPEIRAFFKARARKKPIRIARTLVALELARIVYHVLTKQEDFNGRFKKRPLSRQKHAQWPRRASPAA

SEQ ID NO: 168553 - protein, 422 aa, unidentified
MTRGQDTAILRVMHEVCCGLDVHKEMINACLIITGENGQEHSELRVFQTFTDDLIRLRDWLVECNCPIVAMESTGIYWRPVHNVLEGLFEVILVNARHFKNLPGKKTDMSDCQWIGGLLRVGLLRGSFIPPKMVRQWRDLTRHRRSLVEALGDAKRQVHKLFESANIKIDSVASHLFSRSGRNLMELLVQEEHSLTLDEVRKCTKGALRSKAEQLYRAVQGFFEEHHRWLLKGMLAHIDHLEHFINSIQSRLRDLLEPYEDLVDRLAQIPGISFIVAYAILSEVGPTLCAFAVAACLCSWAGVCPGNNESAGKRRSGRSPVRKSNLRTILIEAAWGAVRTKKSYYRAKFFSLRARLGPKKAIMAIAHRLLKAIYHVIKHGAEFKDLGENYLNDLHRKSKINYLVRQAGKLGYRLMPCPSHEE

SEQ ID NO: 168554 - protein, 321 aa, unidentified
MTEDAVCVGVDVAKSTLDVAVSGCEETRQFANDHEGISQAIRHISGLKPAGIIVEATGNLEMPLAAALQASHLPVVIVNPRQVRDFARAIGVLAKTDTIDARILALFGTRVKPDIRPLPDQKAREMARLLTRRRQLVEMLTAEHNRLLQASEDIRPGIETHIKWLEEALSEINDDLERRIRRSSSWCEKDNLLKSVPGVGKVVSSTLLIELPELGRLNRRKIAALVGVAPLNRDSGNMRGKRTVWGGRARLRAVLYMAALVASRRNPVISAFYQRLLDAGKAKKVALVACMRKLLTILNAMMHTMTIWQPETIIRGVSVEA

SEQ ID NO: 168555 - protein, 374 aa, unidentified
MADCSEVFVGLDTSKLRNAVAIAEGGRNGEVRYLGVIENTEVATSKLVKKLAGSHRRLTFCYEAGPTGYGLYRQIRALGHECVVVAPSLIPKKPGDRVKTNRRDALNLAKLLRAGELTAVWVPDERHEAMRDLVRAREAAVNDLKSKRQQVLSLLLRVGRHFMGKRTWTRAHMNWLVSQKLAHREQRIAFEEMLLAVRQADERVIRLERAIAAAVPDWSLAEVVTALMAVRGLNLISAVIFLAEIGDLSRFASPRQLMAYLGLVPGEESTGDRVWRGGITKAGNHRARRILVECSWSYRHPPRVGKKKLAKVEAAPPAVQEIAWKAEARLTARYRALARRGKRPTLVVTAIARELSGFIWAVSRAVGAPATAAI

SEQ ID NO: 168556 - protein, 457 aa, unidentified
MQSFYLGSDVSKGYADFVILDSTKQQVMTNFQLDDTFEGYCHLHDILNQFLSAHPGASLFAAVESTGGYENNWYNALVKFQSTLNIQTARLNPLGVMHNSKADLKRNNTDKISAQNIAEYLITHPEKVIYQQQDQMATLRKQWGFIKMLTKQSTQLLNQLESLLYTANTELLAYCKGGTPDWVLKVLLKYPTAAKLAGARVPALARIPYVTSERAQELVISAKRSVASASDRITEKLVAATTKQILNLKKTINEQAELMVKECSMPEVDILKTFTGISDSSAIGLILEIQAIERFKTVKKLASFFGIHPVYKISGDGTGSFRMSKTGRKEPRKILFMVTLTAIRSNPLIRNIYLERTEKGMEKMAAIGLCMHKILRIIYGMLKHGKPFDPQIDLDNRQRSVNKKPAGQMDKSRRFQDYDSNAPISRRQNKKRLERKQSHSVNDTKFGINAPVPESAS

SEQ ID NO: 168557 - protein, 397 aa, unidentified
MCAGSGCEAREFDRFSHKVAAIDEWAHSIHQRFGGQIAVALELAKGPIVYALQKYDFFVLFPINPSMLAKYRQAFKPSRAKDDPTDAELALDLLVRHRERFQPLEPQSVPMRKLCMLVEQRRRLVGDKTRYTNRLGNALKQYYPQTLQWFEQRDTVVFFDFLTRWPTLTQAKRARKATLTTFFNVHNVRVERVIEARLCAIKSASPLTHDKAVITAYQLQVEALVEQLRVTIKAIARFDAEIATTAAKLPDYALLFKPLPGAGPALAPRLLAGFGEDRQRYAGAKEIQQYTGIAPVTERSGNKTWVHWRWQCPTFLRQSIIEWAGQTINKSFWAGVYYRQQRDKGASHQAAVRALAFKWLRILYRCWQSRTPYDESKYLEALRRRGSPLLKHLGEAM

SEQ ID NO: 168558 - protein, 349 aa, unidentified
MLIVGCDYHPSFQQIAWVDTESGECGEEPLMHSTGEAERFYRKLKEQGVKVRVGIEATGHSRWFERLLAELGHELWVGDAAEIKAKRVRKQKNDREDARLLRTLLVENRFPRVWLPDVDNRDLRQLLWHRHRLVQMRTRVMNQLQAVALNEGVRRKRGLWSKAGRAQLESFQLMPWATTRREDLLELLDGLTPRIAALTAAIEKQVEQHPEAERLMTHPGVGPLTALAYVLIIGSPERFRCGKPIGSYLGLIPCEDSSASRQRLGHISKQGNSLLRFLLLEAAQAATRCNPAWRREFLHLTMRRGRQIATVARHANLPSVCTGCGATDGITRRHRNSVRTWGSPVWPMV

SEQ ID NO: 168559 - protein, 308 aa, unidentified
MIAQNYVGCDISKQWLDFFDETSSRLRRIDNRADAIAAYVAGLDPSRDFVVMEATGVHDRLLRHALAKAGVPFSRHNPAHTHNYAKSTRRRAKTDPLDAGMLSDYGRRYNPEAEPAPSEEVEQLQSLAGHRDQLVGMRATLKKQLGEAFNEIVIADLEETIAYLDTRIKALESRIAEVIRQNQDTARDHALMVSVPGVSKVGALSLLALLPELGKRSPKSIAALAGLAPFDNKSGKLNRRSQIQGGRSRVRRALYMAALSAVRVCDRFKAFYTALAARSGSKKLAIIAVARKLLVVLNAIIRDKTAFA

SEQ ID NO: 168560 - protein, 342 aa, unidentified
MVYVGLDVSGKSLVVYAVNERKQRVFEGEQPATRAGLRALLRQVGVGAKLVAVEAGNQMKWIAETRKKLADIRVHVVHPNEVKWITESRGKTDRVDAKKLAELARGDLLPRGVHVVEGPVRELRELVSARQQLQSKRIALINTIRGYVYQEGHRWPEKFFAGPTWAAKLARWPVSAPLRLIIQMFMAGIEALVAAEQQLTERLLAIQDPRSALLETIPAIGPLSARVLVSALDEVRRFDDQKAVANYGALAPTIYQSGAIRQVGRINRDGRGEVRRVLLQCAHTVARMTSHGAKPLQQFGARIARRRSKKIAVVAVARKLLTTAYGVLKSGQPYDPRKLQPA

SEQ ID NO: 168561 - protein, 472 aa, unidentified
MDHIIRIGMDTSKHVFQLHGVNAAEEPVLRRKLRRNDMVVFFERLAPTIIAIEAAGASHHWARLLRSFGHEVKLIAPQLVKPYVKRGKNDAADAEALCEAMSRPTMRFVPVKTAERQAALMLLGLRDRLVRNRTQLANAIRGYAAEFGLAAAKGIAHLAPLLARIQSDESLPGLARELFAAHAQEYAQLQAQIDEVEGKLIARHKTNPGSRRLAQIPGIGPIGAAMLIMKTPAPEMFRSGRQFAAWIGLTPKDHSTAGKVRLGVITRAGDEGLRSALVVGATAVIRHLRNGKGRSMLSAWVEQLLKRKPPKLAAVALANKLARIAWKLIVTAETYAAKPRPVASGRAPGIGVQSAIVLVREAFVREFANGKALGSYAGLTPTPFSSGATEREQGIGKAGNRRLRTVMVELAWLWQRYQPGSAEAGWFRQRVGGTGRRMRKVMVVAMARRLLIALWRFATQGVVPEGAIMKPA

SEQ ID NO: 168562 - protein, 325 aa, unidentified
MQNQTIAGIDVSNDTLDICVSTQHGDRSFVIKNDVKSICKFFNQYKESLIIGMENTGRYNWALYEAFKDSHHKVFVVSPLHLKKSIGLVRGKNDKMDAIRIAAFIRKNHHELSPWKPSLQAIQKLKVLLTERSSRVKTRRQLLKQQHDYAKMKHLGMDKYLMSLNKQQLVLLDKQLALLEREIEAVIKGDEQMKAQSDLIRSVPGAGKVLCWMMLAKTEGFTTITEPRKMACYSGVVPFAHQSGTSIRGKERVSSYADKALKTILHLAAMSAIRLENDLRAYYQRKVEEGKNKMSALNAVRNKIVHRIFAVIKKQMPYQQHLLLS

SEQ ID NO: 168563 - protein, 322 aa, unidentified
MQGKVITEDAMAAVYAGIDVCKERLDVYLHPLGEQFSVMNDAGGWRRLLRCLGRHAIERVVMEPTSKYHRAAHRHLVAAGIAVALIPPHRARLFAGAFGQLAKTDRIDARILALAGERLDPAVTAPPTPEEEALEELAGARGAAVADRTAIGNRLRTTSSAFLRRELTSRLKGIERHIDRLEARIASMIAADARLSRQAEIIRSIPGMGPVNVLAILTGLKEIGRLNGKEAAALAGLAPVADDSGPRHGPRRIKGGRAALRRALYMAALSAIRCNAELKAFYRRLRDKGKPAKAALVAVARKLIVLANTLVSQNRTWTLERP

SEQ ID NO: 168564 - protein, 408 aa, unidentified
MEVMHKCCAGLDVHKRIVVACLRVQQAGAVRREVRRFSTTTRELLQLADWLREAGCTHVAMEATGVYWKPVWHVLEGEFELVLANPAHIRNVPGRKSDLNDASWIADLLAHGLIRSSFVPPGPILELRDLTRTRKQLMREAAQHKQRIEKVLEDANVKLAAVISDVCGESGRRILKAMVAGQGDPQRLAELGSQRLAASRALLAQALEGKVTSHHRFLLNQHLKTLEQLETTVMEFEAQIEAALQPFRAAVERLLTIPGVSTTAAHVIIAEIGCDMSRFPSAAHLRSWAGLCPQLNESAGKVLSRRLRQGDPWLKTVLVQCAWAATRNKRSYLHAQFLRLRARRGPKKAIVAVAASILTSAYYLLRDQIPYRDLGSLYFSQHDHERTAMRLARRIQQLGYQVEIHKAA

SEQ ID NO: 168565 - protein, 312 aa, unidentified
MKHDTIGVDVSKGHLDAHRLADGATRRFANDKRGHKALIEWLAETPAIRVVFEPTGPYHRGVERALGLSGVPFVKVNPRQARRFAEAAGKLAKTDRLDAAMLARMGAALELKARPVRSEALLELRELYVARAALVKDRTAAKNRGKVLTLSLLKRHNAQRLEHIDRQIAAVEAAILGIVEADVGLSDRFAILTSIPGVSNITAFALLIEMPELGALEAGQAASLAGLAPVVRQSGRWTGRAFVRGGRASLRQALYMPALVATRFNPDLKANYAHLLAAGKPAKVALTAVMRKLIVLANALLKANRRWTPKTA

SEQ ID NO: 168566 - protein, 343 aa, unidentified
MQTITTIGLDIAKSVFQVHGVDNDGKVVIRRQLKRRYVLAFFEKLQPCLVGIEACASSHHWSRELQALGHTVRLMPPAYVKPYVKRQKNDAADAEAICEAVTRTNMRFVPIKTPEQQSGLMLHRTRHLFIRQQTSVINAIRAHLAEFGVTAAVGRKGIEELLRVIADPSDKRVPDVVRACLAALGSQLLSLKKQILDFDRMIMAWHRSNQTSKRLNCIPGVGPLLATALVASVADPKTFRSGRNFSAWIGLVPKQYSSGGRDRLGSISKQGDRYLRSLFVAGALAVIRYAKIHGTKYRPWVAALLTRRPTKVAAIALANKLARMAWAMMARGERYNYPASLRV

SEQ ID NO: 168567 - protein, 316 aa, unidentified
MADEGTMFVGIDVGKYQVDVALGAGGSVQQFKNDDEGIETILELLAGHRIGLVVLEASGGYQRQLLAAMLAKKMPAVAVNPRQARDFAKAIGRLEKTDKVDAQMLALFAERVRPPVRPAPDETLEQVSDWLARRKQLVEMLTAEKNRRQQAKGAIRRNIESHITWLKAQLRETEKDLSDTMSSCPTWDAVVELLDAQRGIGRLAAMTLMAVIPELGTIDRKGIAKLVGVAPLSRDSGTYRGRRAIWGGRAAARSCLYMATLVATRYNPTIKAFYARLLAAGKPKMLALTASKRKFLSILNAIVRQHRQASATPTSP

SEQ ID NO: 168568 - protein, 346 aa, unidentified
MMIIGCDFHPSWQQISWLDTETGECGERKLVHAAGDAKLFYQQLAAPVLIGMEATGNSQWFIELVEDLGHEIWIGDAAQIRASYVRKQKTDKRDAAHILKLVVEGRFPRLWTPDREQRDLRQLVLHRHKLVMIRSRVKNELQHLALNKGMQKKRTLWSQAGQKLLRELALKPWAACRREDLLGLLGMLNQQIGTLDDAVQQAAEESPQARLLMTQPGVGPNTALAYVLTIGDVSRFRRGKQVASYLGLIPREESSGGRQKLGAITKQGNRMLRSLLVEAAQVAVQHDPGLGKQYRHRCHQKPKAVAKVAVARKLAVRLYWMLRTQVAYPEIVRIESSSGLALVGAS

SEQ ID NO: 168569 - protein, 323 aa, unidentified
MSAFVGIDIAKNSFDIATPLHNGKFRTKAKLPNDLKGYQVLQTWLETHSEPGAWVVMEATSVYHLGVADFLYALGYRVCVVNPAIVHQYGKDDLRRVKTDKTDAKLIASYAQDKQAKLREWIPEPAARRRLRALVRRLDDLQEILQMESNRLDVAEDKVKESIQSVISHVKSQIAETKKAIKDSIDDDPDLRHKRDLIVTIDGLGDTTAALILAELGDPLDYKGPRSIVAFAGLDPVGASSGEWTGPTHISKTGSKRLRTGLYMPGMVGLKHNAVLMALKTRMKANGKAPKEIICAAMRKLLHLVYGVLKSGKPYDPDIALAR

SEQ ID NO: 168570 - protein, 360 aa, unidentified
MAMILAIDMGKNKSVCCHYDPQSGEERYKTIPTSPQSFHDLLIDHPDDTVVIEISPLAGWVADLCQALKMNLKVVNTASEQWSWKKIKNKSDRKDARKLAVMEAMNQHRYVHMPSSPARQWRELIAYRDDQVSRVTACKNRIRGLLDRQGQRWAAGSAGWTEAAIGQLKTQAKPLSECDSDNLWRGMLHEEIESLQQAQAHLAQVTAKLDQIAQQSERVRRLKTAPGVGNRTAEIVIAMLDDSSRFHNVRQVGAYAGLTPRQCQSGQMDRQLGISHAGSKLLRKMLVQSAWAGQQTNPWMKQTFERVCGGKADRKKKSIVAVARKLFVRLWAMDRDKKDWNGPEAVTPAWRALQKSKALC

SEQ ID NO: 168571 - protein, 476 aa, unidentified
MVMTREPEEILDEPHEQIMQRVCAIDVGKDSGKVCVRLPAESGSGRRVSKVWDVPARTKAVIDLGDHLACQGIQKVTVESTSDYWRIWFYLLEARGLDVQLVNARDVKNVPGRPKTDKLDSVWLAKLTEKGLLRPSFVPPKQIRMLRDYTRLRVDLTAERTRHWQRLEKLLEDALIKISAVASRIDLRSVRDMVEALIAGQRSPRLLAGLARGRMKLKHADLVEALTGQFDEHHAELARMLLDQIDALTAQIDTLTARIDTHLAAILNGRNPDPDHPDPNHPEPGPADPLPATGNGPGDIAQPSPDQRSAVPSTADLVDILDEIPGVGPHIAQVIIAEIGLDMSRFPTAGHLVSWAKLCPRTIQSGAKSTAGKTGKGNRYLRAVLGDAAAGAGKTDTFLGERYRRIIKRRGKLKALVAVARSILVIIWQLLSHPGLRYHDLGADFHTRRIDTERRTRNHVRQLEALGYTVTLTAAA

SEQ ID NO: 168572 - protein, 342 aa, unidentified
MKGYHYVGLDVHKKKIYYCVKTADGDVVDEGKINATRKELFLFADRLPKPWVGGMEATLFTGWIYDELKPHAHEIHVGHSYMLKAICAAKKKNDRLDAAKIADAVRCDLMPTCHMAPPEIRELRRMLRYRGFLVRQSVRMKNKTAGLLMEVGAEYSKKKLHGRRYFNKLLEELADTPDSVKQMAAQTHACMELFESNQKRIVAALKKHPKLRERIERLMTIPGVGEITALTWALEVDDPHRFSNSGKAVSYCGLCSGQSESAGKPHRGPLSKQRNKHLQSILVEAAKLAAQWNPRLEMVKEKSLARGANKNEATIDVARKLVAYLLAVDKSGKAFSMKERDL

SEQ ID NO: 168573 - protein, 346 aa, unidentified
MKHSVGLDVSVKETAICIVDEAGKVVRESKVATEPQAVIAFLSSAGVEYARIGLEAGPLSQWLVNGLAKAELPVICVETRHMKAMLKAQQVNKSDRNDARGIAQMMRVGLYKPVHVKTLASQQQRMLLTGRKLLRDKLQDMENELRGTLRNFGLKVGVVSSGQFEARIKELVAGQPPLEMIVVPLLTVRRVVREQLAKLDKMVLDQVRGDKLCRRLMTVPGVGPIVALTFRATVDQAQRFTRSKTVGAHFGLAPRRFQSGERDYDGRVSKCGDAMMRTALYEAAQVLLTRTQTWSWLKAWGMQVARRRGAKKAIVALARRLAIVMHRMWVDGTEFRWRKEADTAAT

SEQ ID NO: 168574 - protein, 400 aa, unidentified
MVTQETPQVFLGLDVGKSEHWACAITSGRKVIWNKALPNDEAKLVDMYTRLQEHGPLLVVVDQPATIGALAVAVAQHMGVPVAYLPGLTMRRIADLYPGDAKTDEKDAFIIADAARSLPHTLRELTEADVDEATLGMLTGFDLDLSRQVNQVSNRIRGLFTQIHPALEKVLGLRLEHDAILEMLATWPTPEKLRKAGRARIDAKLKKHGARRHAAWTEEILTALAKQTVTVTGTQAAGIVIPHLARQLIHLHAQRADVAQEVEEIVVHHPLYLVLTSMPGVGLRTAAVIIAELSGKTFTSAAALASYAGLAPTTRQSGTSIKSERVSHSGNKRLKRALFLSAFAVIRTDPESRAYYDRKRSQGKRHNQAIIALAHRRLGVLYAMLRDGTLYNTPETVLMA

SEQ ID NO: 168575 - protein, 401 aa, unidentified
MVSDFMKGRYNLMKIFVGIDIAKLNHFAAAISSDGEILIEPFKFTNDADGFQLLVSKLESFDKNSIIIGLESTAHYGDNLVRYLVAEFYQVCVLNPIKTCQMRKNNVRKTKTDKVDTFVIAKTLMMQDDLRFITFFDLDMMDLKALGRFRQKTIKQRTRLKIQLTTYVDQVFPEIQYFFKSGLHQNAVYALLKEAPSPKEIASMHMTHLANLLKVNSHGHFTKEQAKELRVLAQKSVGANDSAISIQITQTIQQIELLDSQLEKIEAEMTDIMKFNDSVIMTIPGIGYINGGMILGEIGDIHRFSNPNKLLAFAGLDPSVYQSGNFQAKTTRMSKRGSRILRYALVNAAWNVVRNNATFKAYYDAKRAEGRSHYNALGHCAGKLVRVIWKMLTDEVEFNLE

SEQ ID NO: 168576 - protein, 425 aa, unidentified
MTENMTEFGALVGIDWVDRKHNICVQPLPGQVRERLVLEHRPEAIEEWANGLRTGFANRPVAVCLEQRRGPLVYALSKYEHLVLFPVNPQLLAGLRRAFRPSGAKDDPSDAELAVDILVQHREKLRPWVPEDPRTRQLQALVQARRRLVEQARAHDQPPAGEPQGILPASPRLLRQPRYRGGVRFPHPVALPRGGEAGAGGDVDGVLSPARGARARAQRRAPCAAQGRPAADPRQRGVILPSLLATRTLVAELRALIAGIEDYDTTIARAFKTHPDAFIFESLPGAGPIFAPRLLAALGSDRERFASVASVQQYLGIAPVTERSGNSSWVHWRYACPTFLRQSIVEWAGMSVRYSFWAEAYYRSQREKGKKHHVAVRALAFKWLRIPFRCWKERKPYDEAKYLFALKQRASPLLGGVKAPLASAG

SEQ ID NO: 168577 - protein, 427 aa, unidentified
MKDDVIRYKEFCQFKSEIRASKEHLVVGMDIAKDKHYAFFGTARGKTLFRRFIFNNNIKGYMRLIEQTEELQTQYDLPEAVFGFEPTGNYHKPLAEWLINNEHFLMFVSGKAVHDNREMLTGRWDKNDDTDSANVADLISQGKCLFYENPEESIIELRNLLSLRKRLKKEDHSLRMRIRNGLLAKYFPEMDQHWRSAIGENLAIVKYCIDPKKISEMDFMEFVKQVTTMDRGERQLVRLRKIYDAASKSIGLPVDSSVEFEARMLVDRLKSVRERINDTMHQIEKVGRKHKSYKLLQTIPGFGPFISALVLSAIGNPFRFRSYKQVIRLSGYDLNASRSGKTSKSAVPVISKKGNSDLRYGLYQASKISTYHNPQFRQLFNRVLKDRERERGIKTKMRVKIAAKLLVIAWTLMKKGEPFNPDMLITE

SEQ ID NO: 168578 - protein, 404 aa, unidentified
MWFTGIDWADTHHDILILEESGRQLTSFRVAHTPKGLTELTSRLEAVCGSHNKAAMACIIETNHGLLITTLLEAGFAVYPVNPKTVDRKRSASGAKTDKIDAYLLAKHGRSEWADLRRLEPDSPVVAELKALTRDQDHLIRSQTRLVNQLTACLKAYYPIALSLFYKVQQRSTLRFLQAFPTPQEAMAATPQQIAAVLQTAGYPKAEQAGTKIVEQLHQPHLIADAITTRTKARLLLALIRQLLPVMEEIAAYDKEIERLFLTHADSHIFSHLPRAGKRLAPRLLAEFGDDRQRYQNTASLQALAGTSPVPYESGNYAKPHRRYACIKPLRNALQQFAWQSTQTEPWAMTYYERKRREGKSHSVAVRALANVWVRILFAIWLKREEYQPAVFEQARREHAPRAA

SEQ ID NO: 168579 - protein, 342 aa, unidentified
MDHFAGLDVSVKETNVCILDDAGKIVKEVKVASEPQTLLKVLGNPTYRFKRIGLEAGPLSQWLFSALAEAELPVICVETRHMQAVLKAQINKTDRNDARGIAQMMRVGMYRPVHVKTLRSQKLRMLLTHRKLLQSKAIAIENDLRGTLRNFGLKVGMVGTARFEARIQELVEHFPDLGVLVEPLLIVRRALREQIVLLHRRLLAIVREDEVCRRLMTTPGVGPVVALTYRATVDLPARFRKSKSVGAVFGLTCSRYQSGEIDWSGRISRCGDEMMRVMLYEAAQSMLRSKKWSWLKAWAMQIARRRGIKKAIVALARRLAVILHRIWIDGTEFRWTRETAAA

SEQ ID NO: 168580 - protein, 395 aa, unidentified
MYKLLVGVDVSKDFFSAAGLNEEGKELFSGSYKMNSHGFSEFLKTLFSHGRGLDQMIVAMESTGCYHINLFSFLSSQGIHTVVVNPLLISNFAKLSLRKTKTDKKDAFTIARFLLDHHEEISQFSISQDHQDLRDLSRERESLCHLISATKVEIKRVLRTIFPALESIGNLYSGVMLRFLQQYPSARLVRGAKRKAIAKALRGPYVGDKLTFTAEDIVKAAQRSVAVVSPAKEIIVQGKIATLLHLQERLGELTKLLTDLCKATRVEDLKILQSIKGIGPNTAVPFLAEVGEVKNFTSSKKLIAFAGLDPSIHQSGKFLGISKLSKRGNRHLRRAIYLMTASVVSQNGFFKAYFLRKKKEGLPPQKALFAVAHKLIRVIFAMLSQRTCFNVEEAI

SEQ ID NO: 168581 - protein, 347 aa, unidentified
MSISMIGLDTAKSVFQIHAVNESGQIELRRKLRRSELIRFFEKQEACTVVMEACGAAHHWARVLTGLGHKVKLIAPEAVKPFVKKGKKNDAADAAAICAAASHPDVKFVPAKSLEQQGVLTLHAARSLLVKQQTMLANAIRGLATEFGLTVPKGIGKLEELMTLVDTDETVPETAREAVQGLFDQTHALAEGIKALEAKIVDHARHNETARRLATIPGIGPITASLIVATVVDISLFKTARDFAAWLGLVPRQHSTGGKTRLGRITKTGNREIRKLLVLGATSMASRASQWNSAVGAWTRAALERRPFRLVTVALANKMARIAWALMTRKEVYHAKGRVAAAADAVA

SEQ ID NO: 168582 - protein, 390 aa, unidentified
MILVGIDVAKDKHDCCIINSDGEFPEEVFSILNNREGYETLYKRICSLAVDFTKVKVGLESTGHYSSNLLAFLLDKHLTAYVINPLRVNLFRKGQSLRRTKTDKIDSRNIAHLLMTDSSLKPYSLSSYHMEELKSLTRYRGTKVRERTKLKTSIARLVTILFPELEQLVSSIHIHSIYAMLEEFPGSAYIAAAHLTRLTALLLKASRGRFGRETAIRIRDTAKRSIGAVSPAKSMELQHTIAHLRVYDQEIGEIESEIEKIMDDVNSPITSVPGIGMQMGAVILAEIGSFRRFDSPDKILAYAGMSPSMYQSGKLTGSYSRMEKRGSRYLRYALFNVTRYVCHYDPGFTAYLSKKRKEGKHYYVAISHAVKRLVRVLYAMEISGNRYKTA

SEQ ID NO: 168583 - protein, 283 aa, unidentified
MQLTIGIDISKETVVAYRLPDNQSIQVANDRAGQKTLVRWIGKQNGSLVVFEATGAYHRCLEAALAANGTPFAKINPRQARRFAEATGRLAKTDRVDAIMLAKMGAILGLKADQPKSEVLYILRELLTARRALMKDKVAAKARLQTTRQTLLKNQIKARLKQIEIQIRQVDAAIAEKVQLDEALSNKLAILISIPGIAETTAFSMLIEMPELGTLEGKQAASLAGLAPMSRQSGKWQGKERIQGGRAFLRRAIYMPALVATRRNPGISSFAQENPGKLLLRRS

SEQ ID NO: 168584 - protein, 487 aa, unidentified
MHPRTTNIPTPTSDVRRFSFESAGVLALDNEYSGFAVLPAHYIAFAERKRARPWTSIYHFGRYDVKPLATQLFSAYVGIDWADTKHDVCLQAPGAEAREFDRIRHQMTDIDRWAQSLHQRFGGPIAVALELAKGPIVYALQKYDFFVLFPINPLTLAKYREAFAPSRAKDDPTDAELALDLLMRHPQRFTALRPQSVEMRTLLSLTEHRRELVGDKTRFTNRLTNTLKQYYPHALDWFEQHDTLLFCDFLTRWPTFSQVKRARRASLQAFFYAHNGRRPNVISARLDAIKAAIPLTEDMGVIAPCRLQVLVLIEQLSTTLQAIDRFDRETAELAPRLPDYSLFQDLPGAGPHLAPRLLVAFGEDRQRYQHVDELEQYAGIAPVTERSGKKSWVHWRWQCPTFVRQTFVEWAGQTINKSFWAGAYYRQQRAKGSSYQAAVRSLAFKWIRILYRCWQTRTPYDESTYLNALRKRGSPLLKNLELIAKNP

SEQ ID NO: 168585 - protein, 325 aa, unidentified
MCKVGRTGVRRSDVPCFLGIDGAKAQLDMALRPAGERWAVPNDASGVTTLVERLAVLHPTLIVLEATGGLERMVTSALATAGLPVVVVNPRQVRDCARATGHLATTEALDARALAHCADVIRPTPRPRPDAQTHELRALLGRRQPLMVMRTAEHNRLAGTSARLTKDSAAHMTWLNEGIATLDDESETMLRASPLWRDNDDLWQSAPGLGPVCARTLVLELPELGTLTRQQSAALVGVAPLNGDSGTMRGRRTMWGGRAHVRSVFSMGTLVATRDNPQITALYQRLLAAGKVKKVALTACIHKFLTILNAMLKHRTPWQAQEVQS

SEQ ID NO: 168586 - protein, 402 aa, unidentified
MNAVGIDVSKGKSMVAIMRPFGEIVSAPFEIKHTASGINSLVELINSVEGESRIVMEHTGRYYEVLAHQLSEANLFVSAINPKLIKDFDNDSLRKVKSDKADAVKIARYALDKWQNLKQYNVMDELRNQLKTMNRQFGFYMKHKTAMKNNLIGILDQTYPGVNTYFDSPARSDGSQKWVDFASTYWHVDCVRKMSLNAFIDHYQNWCKRKKYNFSQSKAEEIYGKAKELVPVLPKDAITKLIIKQAVDQLNSASTTVESLRTLMNETASKLPEYPVVMAMKGVGTSLGPQLMAEIGNVSRFTHKSAITAFAGVDPGVNESGTYEQKSVPTSKRGSADLRKTLFQVMDVLIKTHPQDDPVYQFLDKKRAQGKPYYVYMTAGANKFLRIYYGRVKEYLASLPES

SEQ ID NO: 168587 - protein, 335 aa, unidentified
MKTYFIGIDISMDTLDVCILNDFNEKQTVLKVENTVEGIEKMIDSASDFEPDSERLYCFENTGNYGLLLCRMLEDRQIDYYQVPALEIKLSQGIQRGKNDRVDAWRIAKYAKTYSKDLKPYVLPEKVLFKVKNLLTYRNILIKVRTQFKNEKKSFYQASKISDVDFEMDDITYHIQQLDKKVTLVEEKIQQQINSEARINKNFEKITKVKGVGFLTAAYMIVLTNNFTSFQNPRKFNCYAGLAPFEHTSGTSIKGKTKTSKLRNKRIKTVLFNGANSAIIYDEELKAYYKRKKEQGKAHNSIINAVCCKLVYRMFAVVKREQPFVNLVRYNLHMS

SEQ ID NO: 168588 - protein, 344 aa, unidentified
MTQTISNAEVHTLAIDLAKTSFHIHAADRSGVKIHSKPVNRSKLIQYVSNLQPCTVVMEACGGANHFARKFTAMGHTVKLIAPQFVKPFVKSNKNDALDAQAICEASQRPDMRFVSPKDTAQQDIQSIHRARSLVVAHRTALSNQIRGLLTEYGVVLPQGISILRRSLPSIIDSDNRELSILFRELLQNLYSALITVDQQVEDFNQKIELLARQDERCVRLQTIPGIGPMAATALVATLGDGSAFKDGREASAYLGLVPRQNSTGGRSTLLGISKRGDQYLRSLLIHGGRAVVRTSPKLSDYRSNWITDLARRRNVNVASVAVANKNVRTAWKILQDGNNYLAA

SEQ ID NO: 168589 - protein, 412 aa, unidentified
MFKIFRNNCCGLDVHKTWIYACIGITDPNGRTEYKQARFSSFSKGLRELAAWLAKYSCTEVCMESTGKYWIPVFNILEKSCFVTLAHPKYTKPQKGNKTDRKDGKWSCDLFMCDMIKPSFIPSPEIRQLRDLVRYRVKLTNMLTGEKNRARNCLTVSNLKLDDVFSDVFGKSARSITNYILEHPGETFDVSPFVDPRCKTPVSEIQAAVDGAISPEQAVKLRQCLAHIDELEAHRKEIESEILQIAEPFSAVLDLLYTLPGLDKNPMTAIAILSEIGPDMSVFPSSKHLVSWAGCCPRNDQSNQKVKSRRISRAGSYLKPLLVQVANALIKSKKHPEFKERYHRIKSRRGHKKAIIAVCKMLLTAIWNMLSKLEPYNPEGFLEHRPVKQEKTLTVSQALELLRLRGYTITNQ

SEQ ID NO: 168590 - protein, 411 aa, unidentified
MSKLLVGVDVSLKSHHVHFMMEDGNSLADFSVSNDQLGADTLIKRMLEAAEKSQVKQLKIGMEATDQYSWHLAHYLKDQLKGYEPRFQSFIYTLNARKVARFKKGYDSLPKNDRIDAWVIADHLRFGRLPYEMKDAVQYEALQRLTRTRFHFMKEIGRNKTYFLNQLFLKFSGLRQDNPFSNTFGATSLAVIEELEPETIAEMRIEELVEFLQDKGKNRFENPEELAKYLQKLARASYRLDKAMQDPVNLSLSVTLSTIQHMESQVKRLDKEIAKLMKGIPQTLTSVKGIGDVFAAGLIAEIGDISRFKSHHSLAKYAGLVWSQYQSGEYESEETSRMRTGNKYLRYYLIQAADSVRKHDSEYKAFYNKKYQEVPKHKHKRALVLTARKLVRLVYSLLSTNQLYTPLERRD

SEQ ID NO: 168591 - protein, 348 aa, unidentified
MRFYTQQHRFYCGIDLHARTLALCVLDAHGQVVARPSVAASPQAVLDALAPFRDDLAVACECMFAWYWLADLCQEQQIPFVLGHALYMKAIHGGKAKNDPIDAEKIARLLRGGDLPLAYVYPKAMRATRDLLRRRTFLVRRRAELLAHVVNTNSQYNLPPFAKKLSYAANRAALDLERFADPSVRKAVEADLALADACDEQIRRLELYLTRTAKVDDPQAYQRLRSVPGVGPVLALVMLYEIHDIRRFPSAGDFPSYARLVRCAHESAGKKKGSGGNKIGNAHLKWAFSEATCLFLRQSEQAKAWLERRQKKRGKARALGALAARLGRAVYHLLRKQEAFDVTRFFAS

SEQ ID NO: 168592 - protein, 332 aa, unidentified
MNYGGIDVGKDSLDVVIRKKGKSHKCMTFNNTTAGHLAIIKYLHQHNVSHIGIEATGYYHLDLALELDDAADVDVMIINPRASKNFAKAMMQRMKTDAIDAELLAQFVERMDFIKWKAPASHVFAIRACGRRLVSLNKEKAKSKNQLHAYSRTKRTPQFVIDDVHLSIEQLENQIENLVLHALQLINESDQLKKRYERLISIKGVANRTAIKLLGELGVLAEDMLAKQWVAHAGLFPRVFESGSSVKKRATIGKIGNRYIREALYMGALSATRHDVNIRAFYLHMIEDNGLSKLQAICAVMRKMLLAMHGMLKEDKPFNGQRFYGLDNSNAH

SEQ ID NO: 168593 - protein, 318 aa, unidentified
MTKLNNVAGIDISKEFFDVCRISKGVREEKIFSNDAPGINQALAWLNKEDYCVMEVTGAYYMRLATSLYQAGFKVSVVNPLIIKRFSQMRLMRTKTDKADARMIAEYGLSEPQQQWAPPPSFIRQINQLDGIAEQLQKHYTALANQLEAYTISGIDKETKQLLVTLIKSVRRKQQEIEKRIQEVITCYHAELMQRLCTIPGLGKKTVTMLIVITEGFKKFASYKQLSSYTGLCPRIFKSGSSIKGRGRICKMGMGRVRMLLYLCAWSAKKYNKACKDLYERLVEQGKSKRLALIAVANKLIKQAFAIAQSGLTYNPNY

SEQ ID NO: 168594 - protein, 412 aa, unidentified
METVVERPAALDVHKEQVTACVRVPGEGRSREQHVAEFPTTVAGLLTLRDWLAAFGVEQVVMEATGVYWKPVWAILEDEFECLLVNARHVKQVPGRKTDIKDAEWLCQLAEAGLLKASFVPPKPIRALRNLTRYRKTQIQERSREANRLHKALEDTGIKLDCVATDILGKSGRAMLDALVAGTTDPEVLANLAKGKLRAKIPALKEALEGRFDHLHAVWIGAILSHLDFLDQQISSLTEAIGEQIAPFEKSVELLCTIHGVQRRTAEVIIAEIGVDMSVFPTAKQLASWAGQCPGNDQSAGKRRSGKTRKGSKWLDWALEEAAMAAIRTKDSYLAAQYARLRPRRGHKKALGAVKHSIICICWHMLSTGELYTDLGGDYFRKRDPERLTKRLIAQLESLGHKVILEELAQAA

SEQ ID NO: 168595 - protein, 345 aa, unidentified
MKGRGPLSDGCREKTLNNHINVDALIQKGACNDRLIESISGPVHITFEETTQAEWLYELLQGFVAEVVVCDPRRNRLLSEGSKGDKADARKLAELLRTGMVRSVWHGRQTTRGLKEMVRSYETFAADTRRTMLRIKALYRSRGIATTGTGVYQVKQREHWLKQLTEVGMQQRAAWLYQQLDHVRELRKQAKAAVLAEGQRHQAVELLRTIPQVGPVRAAQIVATAGTPHRFRTKRQFWSYSGLAVVTHTSAEYELRAGRVVRRNKPVATRGLNPNCNRRLKSVFVSAATAGGVSHPWQPYLDNLKRKGMRADMARLTLARKIAALALAIWKKGEAFDPKKLNWTT

SEQ ID NO: 168596 - protein, 338 aa, unidentified
MKLYGAIDLHSNNNVTVLIDEQDKVVYEKRLPNDLGVIAQQLAAYQSSLEGIVVESTYNWYWLVDGLMDKGHQIHLANTAAIQQYEGLKYTDDHSDARWLAHILRLGVLPQGYIYPKEERAVRDLLRKRGQMVRQRTANLLSLQNLITRNTGSSISSNRIKTLDSETVDALLPNPDLALAVKANLAMIQCADGQIDILERTVTDRVKLRAEFSFLKTVPGIGQILALTIMLETGEIRRFSTVGDYASYCRCVGSQKLSNGKKKGSGNTKNGNKYLAWAFVEAANFAIRYNARIKSFYQRKKAKSHGVLAIKAVAHKLCRACYYIVKNRVAFDIAKAFA

SEQ ID NO: 168597 - protein, 418 aa, unidentified
MTRRDDSRIIRIVHPICCGLDVHKESVSACVIFPDDKGEEQCDVKVFGTFTDDLMRLRDWLAAHNCPVVAMESTGVYWRPVHNVLEDSVQVVLVNARDMHNVPGRKTDIGDSRWIAGLLRHGLLKSSFIPPQDVRQWRDLTRLRKKYVHTVGDYRKRTHKLFESANIKIDSVVSDLFGVTGRNLMQLLVADRKLTLSDIQICVRGKLKGKEAELFRSIQGFFTDHHRFVLKMILETIATLEAQIEALDLQIRCAMKEHETLLDRMKQAPGIADVASREILAEIGPTLDSFRKDTALVAWSGLCPGNNESAGKRKSGKSPVRKHHLKTIMIEVAWAAIKKKDSYFKDKYYRLKARRGAKRAIAAIAHRILLGIYHVIKDGVDFRDLGGDYLTLRNKSQKVFHLRKQALAMGFDLVPQTV

SEQ ID NO: 168598 - protein, 367 aa, unidentified
MRKGNTTHVGLDAHKAAIMVAVLLPGESRPVEWQISNDGTAVRKLVKKVQRMAMGRTRFCYEAGPCGYVLQRWIQALGEECMVVAPSLIPRKPGDRIKTDRRDARKLAELDRAGLLTEVHPPTEEDEAVRDLCRAREDAHEDLVRCRHRLSKFLLRRGRQWLDGKKAWSQGHRLWLRNLRFEHAADQVVLEDYLLAVEQVEERLRELETRIETASQAPRYVEAVGALRCFRGIDTLTAMSLVTELHDFMRFPSARGLMAYLGLVPSEHSSGGKERRGEITCAGNSHVRRLLIEAAWHYRHRPNPNGLASRRKGQPRRVISIADRAMVRLHRRFYRMLERGKARPKVVVAVARELTGFIWAALRLHAA

SEQ ID NO: 168599 - protein, 336 aa, unidentified
MDNSTAVVGIDVSKKKLDVALLVNGKIKAKVVDNSAAGHQSLLEWLDKTKLPKAVLQVCMEATGVYYEAVATTLHDAGLRVSVVNPGCIKGFGQSENVRNKTDKADAALIARYCAAMAPPAWMPAPLEQRQLRAWSQRIQALKDIRQQERNRLESYEASGMAEVAEHARSLITWLDAEIKQLEEDVDDHIDRHPGLKHDAELITSIPGIGNTTAARILGQLGDIRRFNSAKALAAFLGLTPRQRSSGTSIKGRTMMSRSGSTSLRAAFFMPGMVASRHNPLLHQFALRLAANGMAKKAVIGAVMHKLVHLIYGVIRTGKPFDANYLSKGLAIQDGI

SEQ ID NO: 168600 - protein, 414 aa, unidentified
MFAVGVDVSNGRSTVAVLQTKKKVILKPFEVPHTPEALGRLVDKLNSLNEETRVIMEHTGRYYESIAMFLNSKGFFVSALNPLLFKAYQEGISVHPVKTDKADAIMIAKFGLDKWDELRQYEPMDTIRYQLKTLNTQFQMASKSKTAFTNNLIALLEQNYPGIRKHFPSPARPDGSEKWVDYVGTFWHIDCVRKISLKAFVERYLKFCQKHGYNFSEEKAAELYCHAHSTIALVPKSDISRLMVREAVNQLSTISHTVETYRAEMNRLASQLPEYKTVMGMYGVGPSIGPQLMAEIGDIRRFPQRNSIIAFAGIDPEKDDSGDKVSKTGKSTKRGSPYLRKTLFVIMDILLRLQPADDPVYQFLDKKRSEGKPYYVYMTAGGTKFLRIYYGKVRDCLKEQGLWDQPMIESGNSD

SEQ ID NO: 168601 - protein, 330 aa, unidentified
MTNAVAHHGAAQLPQFVGVDMAQQTFVWALHGAPQTQLLANDDRGFEALRDSLQGHHIGLIVIEATGGLERALAGFLLHHGLPVAVVNPRAAREFARSMGHLAKTDAIDAQALAHYAQTLANKADQSGVRFAPPSPQVEALQALVSRRNQLMGMRTMEKNRLGAAVRVLQPSIRAVIKTLEREIAKLDKDIDGLLRQHFSEQAKRFEDIKGVGITTCSTLLAFMPELGAISNARAAKLAGLAPLNQDSGKARGKRHVWGGRSVVRSTLHMAMLSAVRYNPVIKAFYERLIAAGKPKKVALTACSHKLQRILNAMARTGQTWNGDLHASAG

SEQ ID NO: 168602 - protein, 337 aa, unidentified
MRFIGVDLHTNSLTACYLSEESNEEMRTFELKQLHQFQASLSASDQIAVEATGNTRHFRAAIKSLVSRVVVVNPSQFEVIRKSVKKTDRHDARTLALFLSKDMLPESRLKGPAHAQLNSVAHTRDKLVKLRTTLINKIHAMHVACGIKSKKSSFSSRRGLQAALSRPWDELTRAELGIIVSQIGSLNEGIKQLERQLIEHGQRLAGHRNLTSIKGIGDKSAAVLLSVIGDVSDFAGADKLASYFGLVPRVANSNETITHGHITKRGSKLGRTTLVQCTLIAVRYSSYLKKFYQRIKQKKGAGKAIIATARKFLGIIYRTLKYNWVFADFPNFVLAED

SEQ ID NO: 168603 - protein, 457 aa, unidentified
MNANNARFQSASKIRISLLLIVLQCPMKGGDFMKNNFLSTLFVGIDVSSKTNVLCALDFQGNKLLNLKALNNHPGAESILESILDCLNSNSLNFVVIALESTSFYSTHIANFLSSNEVLLAYSPMVYCLNPKTIANYRKSFVDMDKTDPLDAYIIADFARCGRIKSQPWRGAQFLALQRLTRHRLHLVEAIAKEKTYMVSNVYLKFSQLTVLEKADRPFSNTYGATSEAVLTEFLSLEDIAYSSIEDLVAFIKDKGKNRFSNPVGTAELLQKAARDSYRLDKVLYEPINIAIASSFNVIKALQIEIKEIDKAIEKNIKGINTTEYQSLISIPGIGPVFASGILAEIGSITSFSSNDALAKYAGLTWRIKESGDYSASETNMTKTGNKYLRYYLIEAANSVKNNIPEFNVYYRKKFNEVPKHQHKRALALTSRKLVRLIFGLLTKNQIYSSSKVGEIQ

SEQ ID NO: 168604 - protein, 474 aa, unidentified
MKSKQRTKATREQRYRERNPRWTPLLERIQPDAAGIDCGAEHHYVAVPPDRDERPVRAFRTFTADLNQLADWLIQCRTRTVAMESTGVYWIPLFEILEARGLEVVLVNARHLRNVRGRKSDVTDCEWLRELHSVGLLNPSFRPAAEIVVLRSYLRQRANLVEEATSHIQGMQKSLTQMNLILHVVLSDITGTTGLKIIQSILNGERDPATLATHRDDRCKASAQEMIAALTGNYRAEHLFTLKQNFDAYQFDCRQIAECDSAIQQLMVTLAAHRPSPTTELPSARRPTKPKRHDPAFDIRTPLHRLAGGADLSQIDGIGPHAALQLVAEIGTDMSRWPSAAHFTSWLSLAPNNKISGGRLLSSRTQPSANRAAAVLRRCAMSLMRTSTALGAFYRRLAARTGKPTAITATARKLAILIYRVLRGDISYSDPGAETYAQLHRSRLLKSLCKRAHQLGHALVDLSTGEILPPHEVS

SEQ ID NO: 168605 - protein, 346 aa, unidentified
MGIDAHKRTHTAVAIDEAGRKLGEKTTRMTTTEANLELVRWADSFGPERRFAVEDCRHLSRRLEADLLASGEELVRVPPKLMAHARDAARTYGKSDPIDALAVARAAHREPGLPVARLDGPSRELRLLVDHREDLVRDRVAQINRLRWHLHELDPSWDPAPRSLVRFKHLDALAARLEPMEGTVAWVARDLVGRIRELTQAANDLERRIVQAVSGLAPALLELAGVGALTAAKLVAEVADVRRFRSKDAFARHNGTAPLPVWSGNHVRHRLSRTGNRQLNAAIHRIAVTQMRIHQPARDYLERRIAMGNTKTEALRALKRRLSDVVFRALLVDADMAAEARFSDAA

SEQ ID NO: 168606 - protein, 375 aa, unidentified
MCERAVLTNRPSLDLSPIVLEGHRACRGAWDRSGVFLNPNSCKGFEPVPSKEGSWMMAQNDLVVVGIDVAKDKVDACIRSLSLGRTFPSTPQGRRQLTSWLRRHKVVKAVMEASGGYERDWARTLREARLEVRIVDPKRVRNFARSAGRLAKNDAIDAEMIAWFAETFVEAPGQDHDAAREKLAQIVAARQGLLDLQTRLQNRDEHAEVGPVHKMHERLLKTIALEVERLETAIAALIKATPRFTELAEIIESVPGLASTTSAGVIAMMPELGQVNDKIAGALLGTAPYDDDSGKRRGERHIKGGRRRIRNIFYMACLGASTQHNPVLKAFYRRLIAKGKEKKVALVACMRKLIVILNIMIARGEKWDASRYAVG

SEQ ID NO: 168607 - protein, 326 aa, unidentified
MHILGIDLAKKTFDVTLLTPTGARHHHTFPNTPAGFRELWRWARAHGARSVRACMEATNVYWEALAQYLVEQDATVHVVNPARIKGYAQSQMLRNKTDKQDSATIAAFCAAHDLTAWVPPTAAQRKLRALVRHRDDLIASRIQQTNRLEDTTDPDVRASLSTVVATLASQLTAIQQQITAHLHAHAELREQHDLMDAVPGIGPVTAQKLVAEFYDLASYTSAKAVGADAGLTPANYESGTSVRRRPRLSKMGKASVRAALYMPAITVMRSNTEFKQFAARLAARGKSYGVILGAVMRKLLHIIYGVVKHKAPYDPQKVLGPAASAT

SEQ ID NO: 168608 - protein, 390 aa, unidentified
MEAISESYFKAFVGLDWADKKHDACIQRAGFSEREFACIPHRVDKIEEWALSLYQRFGGPVAIIVELTRGPVVYALQKYDFIEIVPVNPSTLARYRKLLHPSGAKDDPSDAELALDLVLKHPERFQTLKAQGPQLRELQLLVEHRRQLVADKVRLTNRLNAALKQYYPQCLDWFQRLDTVLFCSFLQRWPSLEKVQSADTKTLKKFFQEHRANRKEVQEQRLRGIRSARPLTVDKPLISAYARKVQVLAEQLEVSLRAIKQYDTEIESLAVGHPDYELFENLPGAGAALAPRLLVAFGEQRDRFQSADEIQMYVGVAPVTERSGQKKWVHWRTQCPRFLRQTFIEWASHSICYSYWAEVYYRQQREKGKGHQAAVRSLAYKWIRVLYRCW

SEQ ID NO: 168609 - protein, 347 aa, unidentified
MRFYNRQHRHYCGIDLHVKTMYVCILDAAGHALVHRNVKSTPEAFLEIVAPYRDDLVVAAECMFTWYWLADVCAAEGITFVLGHALAMKAIHGGKSKNDKIDSHKIASLLRGGLVPQSYVYPAMMRSTRDLLRRRLHLVRKRGQLLAHIQNTRAQYNLPEFERRLAYPANRDGVSDHFPDASVRKSIEVDLALLERYDTLINDLELTLVRDAKRHDGDAFHRLRSVPGIGKVLALTILYEIHDISRFDRVQEFASYARLVKGRKQSGGKLLGTSGAKMGNVHLKWAFSEAAVLFLRHATGGKKFLATLEKKHGKGKALSILAHKIGRAVFYILSRDTVFSMEKFMAA

SEQ ID NO: 168610 - protein, 403 aa, unidentified
MNNVAGIDVSKGKSMVSVLRPFGEVVAKPFSIGHTGSELKELADYLKSLDGETRVVMEHTGRYYEPVARFLHDEGVFVSAVNPKLIKDYGNNTLRKVKTDKADSRKIARYGIDNWAELRQHTPMDTIRMQLKTLNRQQSLYSKTKTMMKNNLIALLDQTYPGVNALFDSPVREDGSQKWVDFATTFWHVDCVRNMSLTAFAERYRKWCKRHGYNFSQSKAVEVHAGAQDLIAMLPRDALTKTMVRQAIDALNAISASMERLKAEMQALAAQLPEYPVVMAMHGVGDSLGPQLMAELGDVTRFTHRNAITAFAGVDPGADQSGTHEAKSTRVSKSGPPELRRALFLVMDCLLKTQPQDDPVYRFMDKKRAEGKPYLVYMTAGANKFLRIYYGRVKEYLASLEGN

SEQ ID NO: 168611 - protein, 348 aa, unidentified
MTEAYDGRQVVGMDLHRRRSVLVRMTEDGRKLETVRITNSPAELRKVIARAGENPRVVVEATYGWYWAADVLEEAGAEVHLAHPLGVKAYTYRRVKNDERDAADLADLLRMGRLPEAWIAPPEIRELREITRYRHKLVKARTSYKDQVHGVLAKLGVPVSHSDIFGVHGQAWLDGLPLPQPYAGKVASLRQLAGELGAEIALLDKVLGDLLDGHQGYRAIQQLPGIGPVLAAVIVAEIGDIRRFPGPGQLGSWAGLTPRHYESDAKVIRGHVTKQGSRMLRWAVTEAIQRQPAGSRPREVKDAIIARRGKEAKNIAKIAAARELLTLVFYGMRDGRVRRLAAPRRPAA

SEQ ID NO: 168612 - protein, 338 aa, unidentified
MVYGAIDLHMRYSQIRIIDADGHVLREGRVPTTVERVVGAFGDLGAVRILLETGTESEWVAQALEAAGYTVIVADPNYAPMYGELRRRVKTDRRDVAALAEANRRGWYRATHRVSAAQREIRQVLRSRRQLVQMRSGTVSLIRALLRQAGCRLGPGSAEGVPARLARLPLPPALAATVAPLGRVIAQVSETIAEVDARLAAYAAQDPVVQRLRTVPGVGVVVGLTFRAFVDDVQRFARAAQVSAAIGLVPREDSSAERRHRGHISKAGPRELRSLLVQAAWACWRSHGSATLRAWVERLAARRGRRIAVVALARRLSRILFAVWRDHAVFDAAQLAAA

SEQ ID NO: 168613 - protein, 338 aa, unidentified
MGIVYVGIDLAKNVFAVHSVDEAGKPALVRPSVSRARLHELIAGLPPCTVAMEACTGAHHWARLFAAHGHAVRLIAPKFVTPYRMSGARGKTDAADAAAICEAVQRPNMRFVPLKSEQQQSQLTVHRARQGYVQARTACINRIRGLLAEFGHVLALKADTVRRQAAGLLEELPGWANTVIGDLLSELHRLDERITQYDRHIAQIAREDARARHLMQLPGIGVTTATAIVAMIGNGHEFKCGRQFAAWLGLTPGQYSSGGKTRLGRITKAGDSYLRSLLILGGRSVLALAKGRSDPISGWALALQQRRGYWRAVVAIAAKNARMAWAALRRGENFKMPA

SEQ ID NO: 168614 - protein, 388 aa, unidentified
MMLIGIDPHKSTHTATAVDPETNRDLASIRVDVTLQEYQRMLDRACQWPERRWAVENARGLGHHLTSWLLARGEQVVDVAPGATARVRQLSRGAGRKNDRIDAAAAACVAALQGDARPVQPESSTDALALLDERRSDLAQARVRAVNQLHALLRALLPGGAPRDLSAATAEQLLDTVVPVGSAEFTRCALAADLIAEIRTWDAKLKDNAKAMAALVTESESRLTDTPGIGAVTAARLLGRTKNPTGFPTAGAFAQYAGTVPIEIASADRVRHRLSRRGDRQLNAALHTVAITQIRMPDTRGHTYYQAKPAEGKTSREAQRCLKRRLADHVRRTVIGDERRRTRTTGSGGQPGATTASSAAGPTPTADSSDKSLPGPAEPEPTPTPQPA

SEQ ID NO: 168615 - protein, 394 aa, unidentified
MFLVGIDIGKHKHSFCIINKETGESIVKPKFFDNNKVGFEELLSSFKGLPKKDILIGMEDTGHYHFALLKFLLDKKYQVALINPVTTDLTRKLSGSHTKTDKLDTLTICDVLTSNQRTKPYRISKVDRFDLYEQKQLTREHHNLKEQSNVLKNRLQKSIDIVFPEFNSLFKSMYGVVYMNILKEFGSADALAHSDIRTIRKCFDFKGRGKRIELTAKELKKAAIDSIGFPSIAEVVQIKHLVNQIELVEEQIEELDKKIEEFSIANNSPILSIPGISHFSGTSILAELGDIHNYSKPSQIIKFAGVAPLTYESSQFMAKHTAITKKGSTYLRKTLYQIILPVINNNKVFKDYYNLKLSQGKGYRCAQGHCVRKLLRVIFQLLSTNTQFDPTLLV

SEQ ID NO: 168616 - protein, 355 aa, unidentified
MKQRHFIGMDVHCKFSEVAAVTEAGRLTYQGQCATSIPTLVQELEKIPRPRHLVIEEGPLADWLWRNLREHVDEMVICNPRRNHLIAKEGDKDDPIDAPKLAQLYRGGYIKAVHHGDSLARSLLKQHVGLYHDRVRHRVSEALRAISLLRRHGVFVREKAFVHVSDRPALLERLPKQRVLRGAVRMLWKGYDAAVSQEEWMRRRLVQLAKKEEVVRRFTELPGIAWVRAVTLFVWLDTPWRFASKSALWKYLGIGLERRHSGASAEQLRVPRIVNRRLKSTILGAAKSAVAQGDNPFADQYRRWIEQGLSPRLARRNVARSLAATLWGLWKNGSAYCPSWVGVAGAAGNAAEVST

SEQ ID NO: 168617 - protein, 404 aa, unidentified
MIFVGVDWAEDHHDVCVMDEAGVVLGRRRIEDSVNGLAELHGLVGAHTDEPDEVAVGIEVDRGLIVTALVGAGYAVYAVNPMATSRYRDRHTSSGAKSDPGDAKVLADLVRTDRHNHRQVSGDTELVEGVKVLARAHQSAIWGRQRQVNALRSALREYYPGALVAFGTDLSHHDAVAVLSIAPTPALGRGLSRSKIVSALRRGGRRRYIERRAEEIQAFLRADYLEAPQEIARAQGEVAKASVALIDAFTKQIVALELSLSEHFEQHPDAKVVLSLPGLGTVLGARVLGEFGDDRTRYASAKSRKNYGGTSPITKASGRSHAVLARHARNRHLGHSLDQWAFCSITSSQGARRYYDELRDRKKTHRQAIRQLANRWVGILHYCLEREELYCEDSAWKEGSRPAA

SEQ ID NO: 168618 - protein, 358 aa, unidentified
MSHYRVGCDAHRRYSQFAVLDQDGQLRQQTRVDHQPGAIQAFLDSLPEGTPVALETVGNWYWIADEIEAAGCLPLLTHAAKAKVMMGNVNKTDKLDAKGLAKLLHLDSLPTVWLPPGEIRDERELHRTRMALSKLRTALKNRIHATLAKYGIASTHHSDIFVGTGRAWLQATLCRLPPETGRCVGQEIKALDGLQDQISQLELRIRERIVLTPSLPLLKTLPGVGDILAILIDREIGSIDRFATPGQFASYAGVVPTVHASGGKTRYGHMRKPSNQNLKWAFIEAANVVVRHRRHPAWKTKYVCQIYDQVRQRNGHAIAVGAVARHLAEAAFWILKRQQPYRPPAVRQASPEQVQGRA

SEQ ID NO: 168619 - protein, 349 aa, unidentified
MSLTQPAAWAGIDTAKATFDASIAHPSQALVFDLALLHVMPVRTFARTRDGVNEFVAWARKQTQEVGTGLRVVMESTGNYSIELAAWITEIDDALLPAIANPKRTANYIKSLGLRNKTDKLEARALALYGLQRSPAPYEALTTERVELRSLLRYRDALVAERVAERQRADETRACKAVSAMQERRLEQLDRDIKSIEKSMRVLLTKTPTLKRDYELLTSIYGVAFVTASVILAEIGDLRRFTRARQLSAFAGLCPRLVHSGTSRRGSHLSKDGNRRVREALYMAVSTALRGDNQIAHFHRTLVQNGKRPMAAHAAAMRKLLTIMRAILITERAYDSQQGIGGKLCGKRP

SEQ ID NO: 168620 - protein, 390 aa, unidentified
MDVLYQSCAGIDVHQANIVVCILHGPLTSTRPKREMATFDTTTKGLRACHDFLSQFHVEAVGMESTGVYWRPVWHALCDDFKLILAQPAHMKAIPGQKTDKKDAHWIAKLTRIGLLPRSFVPDETIQELRELTRQRKHYVESRNRETNRIHKILQSGGIKLTTYIEDIMGLSGRNLLQLLVDGTPITPRIVHQSVYTSLKKKVPQLMEALDGYFSDHHRFMLKQSLEIYDFYQKQIELLEERMNVYLSQYENHVEILDSIPGIDVITASVIISEVGVDMSQFPTSGHLASWAGLCPGNNESAGKKRSTKIRHGNSYLKKCLCQAAFAIKKQKGSPLADRFYQIQSRRGSQKATIALAHQLLKIAYILLKEQITYPEFLAQKKTTRDELVA

SEQ ID NO: 168621 - protein, 345 aa, unidentified
MYNMLTGVDLAKKEIQVCVAKSNKIIRNMAMTPTAFSNWLATQKPMTVVFEACATSNYWYQCAREYGHDARLISAKLVSNIRQNQKTDKNDAEAVLQASQLSNVNFISGKSKEQQELQSLVRMHQLSVKHKVAYGNQLCSLLLEFNIKLSPTDTGLNSAIQSILEDAENGFSAIFRDALHTAWHQYLKSIELVKHYEQSVARASRASEACKNLMKIEGVGPTNAVNLYIALGCCELGVFKKARDAAACIGLTPIQHSSGGKVRLGSIGKNIRNSSLRANLVAGAMSAVNQAVKRDSRTKKDEWIKGVVERRGKRCAAVALANKTVRTAFSLLRNGTEYKAELLAA

SEQ ID NO: 168622 - protein, 477 aa, unidentified
MQDRRLVGIDLGITSAHTVRVLDGAGAIVCRRKAVPTVESLSQVEQAALAGTTGGTRLEVVIEPTGPAWLPIAVFFTTRGHTVYRVSSAKAHDLRRFLSRHAKSNGIDADTLARLPLVDPAGLQPLQLPDAPRAALDRRVRATDRLTQQAATHKRRLKDLVRQLLPCSPLVGELGAADLAVLERYGDPRALLRAGHARLTRLIHTASRGHQDAERADQWRAAAHAALQLHADHPAVALAELAAEVATEVRLLRATQAELARHAIQREACYRRVDPAGLARSLPGLAEIGGPALVAIMGPASRFSHAGKFRAFTGLAPKAAETGHSDRKPQPISKAGNRLLRTTLVRAADNARHLDPQLARIYWTQMVQRGKDHLGALCVVAARLAERAWTVMDRGLPYVICDTDGTPVTPAQAKAIIAERYTVPEDVRQRRRSKKGKAPQQVLAGHVHGAQGATRRPSPPASLGRQPAHVKRTKPRA

SEQ ID NO: 168623 - protein, 347 aa, unidentified
MRKIAYLSMDVHARNCVLGDMDGNGKFRGNRSFTTCEINIIKALKAIKAKKKYLVMEAGPMSNWVAQVANDLLTKVFICDPRENALIYKSSHKHDKVDTKKLCRLLRLNEFKEVYRPENDQRAIFKAAVQHYQDLRDQLTAIKQKIKAMYRQWGVIDIFTDSVYSASGRDRFLAQVQHRPIYLQLKRLYTLLDTTAAMKQDALNSMISLGRHYPEIKEFNKMPGMGATGSHTFDAYVQTPERFAKSNRLWKYSRLGVTDRSSDGKPLGFKRLDKSGINELKALSYRGFLTAMKSDNEVKRFYLKSLQRTHDKKHARLNTQRKILSVMLGIWKKGEAYRPELFLDPST

SEQ ID NO: 168624 - protein, 351 aa, unidentified
MMVIGVDPHKLTHTAVAVDELGRRQASRAVQARREGHQALIGWGRQVAPGSRCWAVEDVRHVAGNLIRDLLAAGERVVFVPPRLMAGVRRGGRERGKSDPIDALAIARAAQREDTLPEGQLDAATRPVRLLADYRDVLVKERTAMISRLRWQLHDLDPALEPAKGTLDRAITRRKLAAALAGLPAGTGRQIALSQLARITSLSEEISSLERQLAALVTPLAAALLAIPGVSVLTAARLLGETGDIRRFRSPAAFARHNGTAPIPVSSGRPDGPYRLNKGGNRQINAALHRISLTQARCHPPPQAYLDHRATTCRETVKASRRAHKRHLSDTIYHAMTTDARNRDTTQPHAA

SEQ ID NO: 168625 - protein, 340 aa, unidentified
MTEIKRIAIDTSKSVFTLHGVDDAGRAVLRRNLRRGELLRYFEKLPPVEVALEACGGSHHWGRALAALGHRVRLIPPQYVKPFVKRGKNDRNDAEAIAVAAAQPSIGSVPIKSVEQQAAAMLLSVRELLVRQRTQLVNAVRGHAAEMGAVAPLGEKGLKELQAEIAAADEAAVPAAAKQAIALLSREAERIAIRLRAIEAELMQQHKANPVSRRLAAIPGIGPIGALNLALRVDQTQFASARHFAAWLGLVPRECSTAGRQRLGGISRAGDERLRQLLVLGATAVIQHAKPGRPATSQWLLNLLSHKPRKLAAVALANKMARIVWAMMTSGKTYRPAPAA

SEQ ID NO: 168626 - protein, 435 aa, unidentified
MEKIRTNVAGIDIGAKKVFTAVEGQSVVSHFTFTEDFMLLRDYLLKYKVKTVAMEATGVYWVILYEMLEEAGIDVWLVDGRQTKQVPGRKTDVKDCQWIQELHGYGLLNRCLVVGADIKELRGYLRLREDHINASAMHINHMQKALTLMNIRLKEVLSQIHGASGLAIVEAILHGERDKYVLVTLCHQSVLKSKKELVLKALEGKYTEAHLFALQQAYDGYTFYLHQIEECDKRINTVINRLGFSGKEQDVKKKRKAIRHHKPAVEKLGPNLINIFEGKDATVVSGITDYTWMQLLAETGPDLKKWPTEKHFTSWLGLSPGQNNSGKMRRNAKKKGRPKAGQIFRVIAQGLINSKDIAIGSFGRRLRGRKGSSIAIKAMARKVAVLYWRVMVKGLDYAEQGIKRYDEQLLANKMKIFNKLAKELAVEMPVNVQVA

SEQ ID NO: 168627 - protein, 464 aa, unidentified
MKQCRRKGPPQRKSGSSSFSMINKDAAGIDIGSGEHWVAVPEDRDEEPVRCFGCFTADLHAMARWLKECGVTTVAMESTVVYWIPCYQILEEHGFEVKLVNARHVKNVPGRKSDVSDCQWLQRLHTYGLLSGSFRPDDQICVLRSYWRHRANLVRYASDHIQHMQKALTQMNLHLHKVLSNVTGVTGMNIIRAIISGERNPEKLALMRERGVKNTPEAIAKALEGDYRQEHLFALKQAVELYDVYHRQIEACDWEIERYLHTFEAKVDPVQNPLPKQKRKKEMRYQSFVDLRTELYRVSGIDFTQIPGLDVVTVQTILSEIGLDPGKFPTEKRFASWLGLCPNNRITGGQVKSTKTRKTANRAANAFRMSAQSLANSNTGLGAGGSTGASVPVSVLQRRSPPPPISSPAYSTACGQPGTPTPIWGVTITRTVTRSGCSATLPGGRENWGTTQSYNRSSSGLLRR

SEQ ID NO: 168628 - protein, 484 aa, unidentified
MKSKPKEKSKKATDHPVQHHWHEMNRKQRRDMMRKVQSQELSLEVVHPDAAGIDIGNESHYVAVPPSRDNQPVRRFGCTTGELKAMAAWLKQCRIRTIAMQSTGVYWVAVYDILEQAGLEVYLVNARDTKNLPGRKSDVQKSQWLMKLHTYGLLRNSFRPSQEIRVMRTYWRQRNDLVQSAGRHILRTQKVLTQMNLQLANVLTDISGATGQAIIKAILAGEHDPHNLAEFRDPRVKASKEEIAQSLEGNWQEDLLFVLKQEHEGYEFCQKQMAECDRQLQQYLQRREDRSHSAPLPEEKREGRLRKKKQGNTPQFDLREGLFRMTGTDLTRVDGIDVLTATTVISETGYDMSKWQTENHFVSWLRLRPDNRISGEKIIGKGRLPTNNRATVALKMAATTLRKSNTYLGAQFRRLRTKLGAPCAIKAMAAKLARLIYRMLRYGMKYADKGAAFYQIQYKQFQIKHLKWKAASLGYQVTPIPAAA

SEQ ID NO: 168629 - protein, 340 aa, unidentified
MNTPDTPFTTFIGIDPAAESFTVCAYHQAPTHTFANTTDGRAAFLKWLDQHPRQTTLVLVENTGVYSEALAYELHEAAWPLVVVDPFKVWKAFGTSGPKTDPVDSRKIAEYGLRYTDRLTLWQPNAVIVEQVKVLLTTREQLVEQKTALINTHRMLKRKVIQTPLAMQALEQSIAQLKQQIRRLEQQVRVLIEQNPRTGQMLALVLTAPGVGLLLAAHLFVLTKGYKEGGRYRRLANYLGIAPHAYTSGTSVRRRARSHGFGPAKTRKLLHLAARSVCTHKAKYRRYYERKREAGKAPVLVYNNVANKLLRVLCSMLVNERAYVADYKSIQPRLLHASSS

SEQ ID NO: 168630 - protein, 424 aa, unidentified
MKNTAARKRKQVPEGYLVIGVDPHKKRHAAVAITQDFTNQAKFKVDNTREGLETMLDRARVEMVKCGCRGVIFAIETGGHYWRNIAYYLDERGIPFRFINQYTLKRRREGKDLNRRKNDYRDSEVAAQLLCTGEFVESVIPQGVYAELRSSHNAYQRLVKERTRITNLVKGLLDALFPEFTHVFKDPGGLTALTVLSTCPIPRMVASITEDEFVATIEAHHKGRRLMRKKLRALHHSAIRSIGIHAGARSVSFEIGFLVDKLELIRQQIRIMEGMLVKLVDETEEGKYLLSIRGLNYIAVAGLLAELGCFKLYRSAKQMIKMAGSNPTESESAGKKRSKTPMSKQGRPLLRYCAWTAVIPMLRFNADFCAWAKQRRERPAHANPLNGREIVGAALNKLLRLAFALVKNQTYYQNTRSALIPVAV

SEQ ID NO: 168631 - protein, 431 aa, unidentified
MVTSKPEEIPDADHELMIERVCAVDVAKASGKVCVRVPHQSTPGRRVSKVWDVAAMTGAVTELGEDLIRQGIQKVTVESTSDYWRIWFYLLEAAGLDVQLVNARDVKNLPGRPKTDKLDAVWLAKLTEKGLVRPSFVPPEPIRQLRDYTRLRVDLTQERTRHWQRLEKLLEDALIKVSSVASKLDSLSVRDMLEALIAGQRDPRRLAELARGKMKAKRPALIEALTGRFDDHHAELTRMLLDQIDTLSVQIDRLTSRIDQLLLGMPAAQAGTDQQPPHPDGGGGPDLAHRTADLLARRVRAGLPAAQRLDEIPGIGPLGAQVIIAEIGLDMSRFLTPGHLASWAKLCPRTIQSGASHRAGKTGKGNPYLKGILGEAAAAAAKTGHLPRRALPPDCQTPRQAQGPRRGRPLHPGHHLAAVVRPHRTLPRSGQ

SEQ ID NO: 168632 - protein, 402 aa, unidentified
MNSVGIDISKGRSTVAVMRPFGEVVISPFEVCHTGSELSELAKRLKSLDGETRVVMEATGNYHAPVAKLLHDAGLYVSVVNAKLVHSYGNNDLRRVKTDRKDAVKLANYGLDRWLTLARYIPEEDTRLLLKNCYRQYQQYSKVQTVLKNNLISLLDTVFPNANRLFGSPARADGSEKWVDFVAEFWHCECVCKRSEKAFLNKYQRWCRKHGYHFSQEKAHAIYDEASGHIGILPKSETTKLLVTQAVSQLRATSAALAALKLEMQTLASKLPEYPAVMEMFGVGPVLGPQLIAEIGDVRRFYSKKALVAYAGIDAPPNDSGNVVGRHKSMSKIGTSSLRRTLFLVMSVYLQKSPPDEPVYQFMDRKRAEGKPYRVYMMASANKFLRIYYATVKAYLESLVRV

SEQ ID NO: 168633 - protein, 369 aa, unidentified
MKTRKQRYSTEQKLTIGLDLGDQKSYYCVLDKDGTVVEEGSIQTSPASLEKHFSQYPPCVIALEVSTHSRWVNQLLQRLGHESLVANANKVKLISKNNRKCDRVDARTLARLARADHELLHPIQHRSDEAQSVLALLRARESLLAARTQLINCIRGLVKPTGYRLPRCTPEAFAKHMGPLIPPALQAAILPLLEQIKKISETIREYNVSIEALAREQYPESRLLTQITGVGDLTAMAFMMTIGDKHRFARSRQVGCYLGLQPKQHQSGSRDPQLGIGKDGDNYLRKLLVQCSHYILNRAPDSDLRRWGLALRVRGGKNGRKRAVIAVARKLAVLLHHLWVSGEAYEPLRRNPSEQTIAMPAETSLAAVA

SEQ ID NO: 168634 - protein, 425 aa, unidentified
MNYKQNEKINQVKESTLVVGIDIGSTTQYARAFDWRGIELGKVLPFSNSREGFESLKAWMQHLQDKYKKLDAIVGIEPTGHYWFDLGAYLEDEGIRLVMVNPYAVKQTKELDDNSQSKNDRKDPKVIAKLVTEGRYSAPYTPDGVYADLRIMVANRKRLIREMTQIKNRFARWFAIYFPEYTDVFGDYEAQSSMLLLKKVCTPEAIVELGAEKINQIWRDARLRAVGMKRATTLCETAKRSIGLKKGSSAARYEMKLLLEDYEYKKAQLDAVMEEIEKLCRKIPESEQMLAIKGIGVITVAGFLAEVGDVRRFESPRQIQKLAGLSLRENSSGKHKGQTTISKRGRSKLRAVLFNAAIPLIAKNPEFKSLHEYYTTRANNPLKKKQSVIAISCKLIRVFYAILANGVTYDSQKLLSDIHRQPQVA

SEQ ID NO: 168635 - protein, 340 aa, unidentified
MEKRYLGIDLHRNQFTCCLRLDSGRSYWKQWRLEELPQFVRKLRASDEVAVEITGNTRLFYEAVRPQVERVVVVDNNQFHVISRSVKKTDDRDAALLALYLSKGLLPEVRMKDKQHAQVASLVQTRDSLVKLRTSLKNKINNLLSARGMNLRKEALSSEKKLEEIVNLPFDEVMQIELRIIVDQIRSLNHSIQKLDKTIADEGSKLEGHTCLMSIKGIGKTTSAILLSVIGDVRDFPDESRLASYFGIVPRVSNSNETEHSGKIHKRGSKLGRTALVQSALIAAKYSTYLKSFYLRVKARRGAGKAIIALARKFLGVIYHTLKNRWVFEDFPNFVLAETA

SEQ ID NO: 168636 - protein, 365 aa, unidentified
MDKAHYTIIGMDVSDRKTQVCVMTKTGATPKIVMETAIPTTREGLAKFLSAQDRSTPVAFETGMHCRWMNEVAEGMGFKVYVANPCRLRMITESKTKNDVNDARMLARIALSDPGLLHPVKLRGPEHQKMINLHEMRNLLVKQRTGIVVQMRAIAKSMGFRIPKRQAASFHKLDRKAWPEEFRDIAWPMLKNLEQLAITIKAYEKQIRELAETPTFKAQVERLMEIRYVGLYVATGFVAVTGGDMERFEKPRDVGPWLGITPKQDQSGDIDRQCHITKAGSPFMRRLLVESAQMILRDGSADTDLKAKGLRICARGAKIAKRKAVTAVARSLAVLMVAMLKKPDAPYVPLSERCEKELLAMRAAV

SEQ ID NO: 168637 - protein, 402 aa, unidentified
MTAIGIDVSKGKSMIAAISATRDILIAPKEFLHTKEGLSKLIDAIRAQGSNIRIVMEATGHYHEPVAKVLHEAGFFVSVVHPLLVYSYSDNSVRRVKTDKKDAVKIAGYCLDNWRRLREYTPQETVRQQLKLFSRQYNLCIKTVHTMENNLISLLDKTFPGVTKFFSSRKKKNGRQKWVDFAAYFWHVDIVVNIEEDDFYQKYHEWCRQNGYRFTFKKAYEIWHGSQGHSTTLQANEETRLLISSAALQVSAIAGNLAQIKEQLVQLSSKLPEYEIVMSLYGVGELTAAQLLAEIGDVRRFHSGRALIAFAGIDPLPKQSGTYEKRSTKTSKRGSASLRKTLYQITVTHIRLSPEQEAVYQFIKRKRAEGKPYFVYMTAAANKFLRIYYARVKEYLDAELTI

SEQ ID NO: 168638 - protein, 458 aa, unidentified
MAVRKQGRGLEVAHPNAAGIDVGSASHFVAVPPDRDDEPVREFKAFTEDLEALAEWLSACAVDTVAMESTGVYWIPLFELLESRGFIVYLVNARHVQNVSGRKSDVLDCQWLQQLMSYGLLSGAFRPKGEICVLRALSRQRDMLTQYQAKHIQHMQKALAQMNIQLGNVISDIAGETGQKIVRAIVAGERDPVKLAKLRHQRIRASEEQIIKSLKGNWRQEHLFALQQAVALYDAYGQAIAQCDQQLEELLGRLACHPAPAQPEKRRGRPRNAAKFDLRTALFRLCGVDLTRIDGIDTATALKVLAEVGPDLSRFKSAKHFASWLSLCPGTKISGGKVLSGASKRATNRLAQALRMAATSLHHSRSALGAYYRRLCGTTGQTQSDPSHRAQAGASHLHLAHQGHRVRRSRPGLLRRTLSPASGSPPQPKGHCNGLQIDSSRSHQRMRVQKISYLILVS

SEQ ID NO: 168639 - protein, 389 aa, unidentified
MLQPDKGKEEVERIAVGIDPCKEFLQLAILSPGRDVEFRKLPLLLSITEEIAKSTDPSRTQIAIESYASYGRLFIHELLQKGYDIREVNSSVSNKLVDLFTEEHSDRRDAETIARALQLIPDLPKVSFTEEKLWLAKLSRLRKKLVKDLNGYLNRLHVALTESYGAVYRKIFRTLWTGKALTFFETYPTINDALAHQRKVRKVLGEEKWELVREAGQWGEGFYLELLGREVRSLTRVIRVLQATRKEFDEEIRRIGEKDEEVKRLRTFPGIDYVTASTLLGEIGNIERFENESCLSSYCGVSPVVWQSGTSKIKAKRRKRFSRRLKGVLYFISLSQIRINPESRQYYWRKRREGKTHWQAMNALSRQLIKIIYYMLKNKESYCRKEAIN

SEQ ID NO: 168640 - protein, 463 aa, unidentified
MAAVMIGVDPHKASHTAAAIGPAEEPLGGIQVRAVASQAAQLLAWAAAWPERTWAVEGATGLGNLLAQQLVTAGEVVLDVQPKMAARVRLLASGNTNKNDPNDARSVAVAALRSRAPRRVTAEDHTAVLKVWSKRYRDLGRARTQVACRLHAVLADLVPGGFSREITAGQGASMLKRIRPSGPAARARRELAAEFLGLRRLDGQIRDTRNKLAAAVQASGTTLTGIFGVGPVIAAAILGEAGDTTRFGDRDRFAACNGTAPIEVSSGGRKIHRLSLRGNRRPGHAIHMAAVTQIRYAHSPGRAYFDRKLAEGKTGKEALRCLKRQISDAIYARRWPTPPPAARPPKRRAREGNRGTALSPARPARTPGAGSSEKPLPDHTPAYGRPPRHAAQCKQPRSRPRTEALDNKEVFDRRGPLLHDRVTHRATYLGYLLALGRGWSCPARAACCPRRPWRCWCGHWLGR

SEQ ID NO: 168641 - protein, 362 aa, unidentified
MEITIAKVGLDVHAAQTQAAVLDPATGVVALRRLRVPPLGVLEFLAGLGPRVCAVYEAGPSGFALARGAAERGLDVRVVAPGLIPRKAGGRVKTDRRDAVRLARLLAAGELTFVRVPSVEEERFRDLVRAREDLRGDLMRARHRLSNFLRRRGLRFPGPAGAWTREHRRWLAKLRFDDLASETTFLDYLGGVETLPHRCAALEATLAELATACPFATTIARLRCFRGVDTLSAAGICAEVGDFRRFEHPRLLSGYLGLVPSERTSDQQRRQGSITKAGPAHARRLLVEAAHHYRHQPRLDERLARRQAGQDGRVCAISWRAQQRLHSRWRALALTRGKPRGIVAVACARELATFLWEAAVLE

SEQ ID NO: 168642 - protein, 344 aa, unidentified
MLYVGLDLCRKRVDFDARRRDGELVERGSLPPDADGLRVLVRRLGDADVVAVIESMNGARFVHDQLELQGWDVRIADAAKVKGLAPLACKTDAIDARVLAELARRDLVPEIWLPSPEVRAERERARFRLHLVKHRSALKNRVHAILIAYGVPSPCSDLFGDAGRRLLARLELPEPWRSTTAASIALIDVLDEQIAVCERELRTLGADHRYVPLLMTTPGIGWILAYTIASEIGDVGRFATPAKLVGYSGLTPSVSQSGERDRRGPLRKNGPNYLRWALVEAAHTASRNPVYQPILERHRARHGRKKGTKTAALTIARKLAEATWHMLTKNQPFAPAGAPARLAA

SEQ ID NO: 168643 - protein, 291 aa, unidentified
MRASARQVAELLAWAAGFEERTWAVEGAGGVGYLLAQQLVGAGERVLDVPATLAARVRVLGSGRSNKNDPNDGYSIAVAALHAPRLAVVTGADHASVLRLLAKRNQELSSARTRTACRLHALLVELVPGGITKEITVSRAAQVLASVTPSGPVETTRHELALEHLEDLRRVEEQIRASKRRLTAAVEASATTVSEVFGFGPVGTAIAIGHTRNIGRFPSRDHFAAYNGTGPIEMSSGGRVVHRLSRRGNRQLNHAIHIARSPRSATRTHPAAATTTANSPKERQPKKRSAH

SEQ ID NO: 168644 - protein, 409 aa, unidentified
MRYYVGVDWADQTHAVWVVDERGTKITARTVPHTAAGFSEWGRELDEWRAQGIERWAAIERPDGRVVDFLLDHGVVVYPVNPKALDRARDRFRQSGAKSDPFDARVLADFLRTDHAHLQALQPSSDPAQELKLLTEDCQRHIRQQTRLVNQLTATLKAYYPRALEVAELTTALAREFLQAYPTPEALTVLTQRQWQRWARGRRLSEARIGALWAVLQQPQLPVPAHVVRAKARLMQSLVEQLTPVVAAIAQYRTVIDDFFARMPAAQWARTLPIGKRGITAPTLWARLGDAPGRWESFRHLQAQAGAVPVTKRSGKQRVIHFRFACDKSLRHVVDQVAFLSLLSSDWARAYYDRQRARGHSHYQALRALGAKWLKIIFVMWHRHVPYDEQYHLATMTRQQLQQRQKTIA

SEQ ID NO: 168645 - protein, 355 aa, unidentified
MNQSTKLNFKGHSIYVGIDVHLRNWKISIFTDEIELETKTMDPSVKILSHYLRRMFPGATYYSVYEAGYCGYWIHEKLVEEGIYNIIVNPADVPTTDKEKRRKTDPVDSRKLARELRNGELESIYIPDKQHQEDKLLLRTRSSMVKKQTSCKNQIKSTLSFFGIELTDENIKSHWSKAYIGWLRKLSEENSSKALRLRAFLDQLESLRKIIAELTKEIRTLSLQDRYKKNVLVLDSVCGISTLSAMTILTEFGDIKRYSKLDSLCSYVGLPGDEHTSSDKEKKLGMTKRGNKYLKKVLIESSWIAIRKDPALLLAYKNYNKKYKSSKCIIKIARKLLNRIRYVLVTGKEYQIQTM

SEQ ID NO: 168646 - protein, 409 aa, unidentified
MSNSLLVGIDVSLKDNKVRILHPDGTSLSKFVVPNSIPGAKTLSQRVTGIAEKNNLDSVVIGLESTSVYGDPLVYFLKQDASVNRFNTRIHVLNPTQVNKFKMMYPDLPKTDDIDAWVIAEHLRFGRINKEVYMDDKYKALQKLTRARFHTVQNLAREKNWFLNNLFLKFSSLAQDKIFSNRYGATSSSIIEEFLSVDEISYMPIEELVEFINKRGKGRFENPEEIAAAVQKAAKSSYRLPKTVTDSVNQVLAVSMVAMKAYKEQLKTFDKAIEEQIKLIPNPLTSIKGIGPVYSAGIIAEIGDIHRFKDQAALAKFAGIAWTKHQSGNFTAAHTQLIKFGNRYLRYYFMEATNKVRLHDHELKRFYDLKYSQTPKTPHKRALALTARKFVRLVYALLHSNRLYTPPKG

SEQ ID NO: 168647 - protein, 355 aa, unidentified
MNSLGIDVGKKRCRAALKDERGDVIREFFFSNNNEGISALIQSVSHYGKCTAVVESTGNMWIRIHDTLEENEIDTILANPYKTKIIAEAKIKSDKLDARILADLLRADLVYESYVPTKEFREKRSLVRHRISLVRNRTMLENKVHSLLDKYDYKSELTDVFGKSGIIWLKTLDVSTIDRLIMNTTLAAIENIGLQIDTISKELAKYGWDSDDVKILLSMTGIDVFSAMLIATEIVDVKRFCTPWKLVSYAGLAPSTRESSGKTKTGRISKQGSPWLRWILVQCAMTAVRYDQRLKSFYERLKSRKGSAKAIVATAKEILVIIWYMLTRRELYRHINKDRYEQKLSRLKKIKESAV

SEQ ID NO: 168648 - protein, 425 aa, unidentified
MKIQTIHSKIIPDNKLVVAFDVGKDKLDAYCEYGQHYFQDTFANNTLKIEQKFITFSGIAESTGYDGLRIVAEPTGIYHLKLFRSARRLGHQTALVNPESVHKFKVVESNDSGKTDHKDPRVINLLAKYGKTLIDRDLRDEYLLLRQLNTMIIDEEKAYTGTRCKIHRVLAELFCDYSFKKDFLYSNTGRIFMEKYHANPYRVVQRGYGVFYQRLKRAAPRIRKVTILRLWQDAQCSVRHQLPADYVQILESRLNYLWEELLLRENRMAEIEDAMISVTNELRQKDFNIPIPVKGVVTVFRIAQLLAETGPLNDFKSIDQLMRYAGLNIRERQSGYYRGNNKISKKGRSNLRRVLGYIVLPLVKKKSLYGTVYHAKKDSGMVGNKAMVAMMRKFLRMFYGWYKSGLPFDKNRVFTDEVNCVQITQ

SEQ ID NO: 168649 - protein, 526 aa, unidentified
MATTRKSATNRTRRRKSQSVVHKPRGAFHPRVQKVGPEHFGIVCIDCAKARSKFLVTDFYGKILLPPTPLEHNRPELDAAIARVRALFAQHAIHDGLVAIERTGRYHQIAQRAFAAANFETRILHPFATKQFRQPADPGNKTDDTDLFAMQRAAVNGFALCEPVWDVSWRTLQLLTRHRRELVRKGSALCCQIHEHLEAALPGLTKCFDPIWKSQAVWHLIEQFNSAAAMTQAGSDGLAQSLRGANIRFQQRTLDTLLAWARQAAPAEPTAAVQHRLVLALNADRLQKNREIQALERDIAQALARTPYILLLSIPGVNVVSAAEFAGEMGPITNYANARAITGRAGLYPSRYQSDEVDKANGPLVRCCNRRLRAAILGIADNLILCNQHFRALAGCWRLAGKDPRLTHVKVAFRFCRIAYQMVAGRQVFRHPCLQQRSYILEKLNAFHAEHETPLTDIMTDLRNAIEQIPAKEHAAEARPLQEKLQASPNDRKRGPQLLRDILPIILARLGVGSVQSPESGETDLT

SEQ ID NO: 168650 - protein, 399 aa, unidentified
MLEAMVRSCAGLDVHHRQVICTVIREGTRETREFATFHRELKELGSWLQREQVELAVMESTGIFWKAVYASLEEAGIEGCVVNARHVKQVPGRKTDVCDSEWLAELGRCGLLRASFIPPQDLRELRLLTRYRRKLSGILAGEKNRLHKVLDDAGIRLGCVVSDIDGVSARAMVEALIKGGSTPEQIAEQALGRLQKKKDALQLALEGEISDRHRLVLQKILGHVKWLQRQMALIDGQIVAAMKPYQEEWKLLQTIPGLDVLSAAMLLAEIGVDMSRFGSKDRLCSWAGMCPGNQESAGKRKSGRARKANVYVRSLLCEAANSARKTQSRFQGLYKGLVIRRGHKRAIVAVGHKILQWSISSSQERSLTKIQKSTMRLWSCAATLRAGSMPCTNTDIWSV

SEQ ID NO: 168651 - protein, 343 aa, unidentified
MERYVGLDVSLKLTSICVVNQAGSIVQEGVVVSDPEAIAAFVRSKAPGTVRIGLETGPTTTWLWTELKRLGLPVICIDARHAKAVLKMQINKSDRNDAAGIARIMQTGWFKEVRVKDLESHAVKALLASRALLVKIKRDLENQIRGLLKNLGLVIGRAKFNVFAVRTEELIENRPELVAAVRPLLEARKAIEQQVDDLDRKVMRLARNDAQVRRFMTAPGVGPITALCFKATIDDPTRFKRSRSVGAYVGLTTRRHASGEIDWSGRISKCGDGMLRMYLFEAAGVLLTRVPKWSALKAWGTKLAKRNGLRKAKVAVARKLAVILHRMWIDGTEFNWSTKKAAA

SEQ ID NO: 168652 - protein, 323 aa, unidentified
MTTFVGIDISKESFDVYFEHEGEGSYVKLNQTEKDYKVLVHLIGLKRTCVMEATGNYHLKLAYHLYQSGIQVVVENPLKIKRFSQMRLQRTKTDKADSQLIFNYAETILSPQEVHSWVPDESNIGELKQYDTVRQQLIKQQTSLTNTEEALACITELNAEVIQVLQGMVHAVKTAIETLDKGMLKLVTEHHADSFELITSIPGVGPKTATMMICLTNGFQKFQYDQVKQFISYIGMSPRTFNSGTSVKGRAHITKVGNGRVRSLLYMCSWTAKKSNQQCADLYKRLAEKGKPEKVIKVAIAHKLIRQIFGVIKSGQPFSNEFA

SEQ ID NO: 168653 - protein, 337 aa, unidentified
MKSYLFIGIDISKATLDVCVLSPSDITDLHHHSFCNNTKGFSQLLKWLKQSSEGVTVDDWRVCMENTGMYSLELNCFLHEKGIWQSMENALQIKRSMGVVRGKTDKADSKIIAMYAYRFIDKLKPYVLPTSTLLRLRALFAQRERLVGMHSQLLVASQSIKGYPKELVKDIQDQNEMLLKNLTVQIKGIDKSIKECLQEDKDLQRKSKLIQSVPGIGQQTAAYLLIVSQGMKGFTSARQFACYSGCAPFAHQSGASIRGKTKVHFIANRKMKVLLHMAAMNAITFNDELKAYYQRKVAEGKNPMSVLNAVRFKLICRIYSVVKRNEEYQKEYGKIAA

SEQ ID NO: 168654 - protein, 350 aa, unidentified
MDTNTSALASIGIDIGKEVFHIVGFGTNGKIAFRRKIKRLALVDTFKGLPSCVVGMEACLSAHFVSRALRQLGHQPRIIPSIYVKPFVKGQKNDYNDAEAIAEAALRPNLRTVREKTQDQLDLQALHRVRSRLVSRRTATINQIRAFLIEQGIAVRTGARALRNSLMAILENRQDEISPRMRGLIADLYEDWVGLDERIETIAGEIETIGEKEANCQRLMSVPGIGPLISTAVVAAIGTGEAFERGRDFGAWLGLVPRQYSTGGRSILGRISKRGSKYLRTLFIQAAKVILMRPHNWERFSFGAWLLNATPRLHRNKLATALANKLARIAWSILRNEKVFDVPSREAMAI

SEQ ID NO: 168655 - protein, 341 aa, unidentified
MQITTIGFDIAKNVFQIHGIDAAEKVVIRKQLRRGQVLKFFAALPPCLVGMEACATAHYWARELTKLGHEVRLMPAKDVKAYVKRNKNDAADAAATCEAVRRPTMRFVAVKSAEQQAQLMQHRARDLLIRQRTQVINALRAHLAELGITAAQGREGIRDLLAIIADDGDARLPIDARASLMVLAAQLQALQTLIGSIEKRIVARHRSSEASKRLQTIPGVGILGASAIATIVTEPKAFRSGRDFAAWVGLVPRQDSTGGKCKLGPISKQGDRYLRRILVVGAHAVLKRARLHPQKYPWLTQLLARRPFKVVAIALANKMARIAWALLAKGETYRMPRLAAV

SEQ ID NO: 168656 - protein, 337 aa, unidentified
MKYCGIDLHSNNCVVIVSDDHDRVVYQNRLPNDLRQIAAALEPYRPELAGVVIESTYNWYWLVDGLMDAGYTVHLAHPAAIRKYEGIKHSGDFADAAYLAQLLRLGLLAEGYIYPREERGARDLARKRMQLVRYRTAQILSIEGTVMRQTGHTLKGEVVKRLSASEVEEFGLAPDVAMAIEANRAVCQVLGQQIETLEKRLLECVSLRADYCLLKTVPGIGQTLATTIMLETGSISRFPKVGNFSSYCRCVDSLRESNGKKKGEGNTRNGNKYLAWAFIEAANFAVRFCPQAKSFYERKKSRTNRILATKALAHKLARACYHILHDQKPFDVHLCFG

SEQ ID NO: 168657 - protein, 348 aa, unidentified
MVTIGVDSHKRTHTAVAVDGNGRKLAERTLATSPEGHLELLRWARHWHERTWALEDCRHLTRRLEGDLLRTGEQVLRVPPKLMAGARRSAREPGKSDPIDALSVARAALREPNLPSARLDGPERELRLLVDHREDLIADRTGHQARLRWFLVELGIAEPKLRTLGQARVLDDLERQLAGRAEPCARISRDLLARIRELTAAINGLGREIEGRTKILVPSLLALPGCGHLTAAKLVGETSGIGRFRSRAAFANHNGTAPIPVWSGNVVRHRLNPGGNRQLNAALHRIAITQLHGPGGGREYVARRMAAGDTKLEAIRALRRRISDEVFRRLQVDEAAQSVVNDIERAVA

SEQ ID NO: 168658 - protein, 315 aa, unidentified
MTVTCVGIDIAKEEFVVACRPERPEWAASNDAAGIAATVTGLQRLVPTLIVLEATGGYETALVAALAAAGLPVVVANPRQVRDFAKATGQLAKTDRLDAHLLALFAERVQPTPRPLPEPVLEQLTALLTRRRQLLDMLIAERNRLEHATPPIRRDITQHIRWLERRVADVDRDLDDTLQSSPVWRAKENLLRSVPGVGPIVSRTLLADLPELGHLNRKQIAALVGVAPLARDSGTLRGKRVVWGGRAPVRAVLYMGALVAARHNAVIRAFYLRLLAAGKPKKVALTACMRKLLTILNAIMRTQTTWRQTHQAQIT

SEQ ID NO: 168659 - protein, 397 aa, unidentified
MYIVGIDIAKRKHEAAVIDGEGTVIIKPFSFTNNCSGYNRLLAMLAKAKLPLDEVSFAMEATGHYWLALFTRLQKEGFRVQVINPVQTNSIRSFYIRQAKTDPRDALLIAEVIRFGHFSESTLHPENIYELRELCRGRHAIVSMQADVKRKVVALLDQVFPEYETAFTNMFSDTSMAILQNCPTPKELSEMPLEELCHLIEVSSHKRFRMAKARELQELARNSFGFAMAGDVFSTMIRLYAKHLDFLKQQVREMDRKIAEIMDTLDTPITTITGIGPTLGAYILSEIGDISRFSSAAKLAAYAGIDPTMRQSGEYNGVRNRMSKRGSPYLRHAIWLAASSAVLHDPALKLYFQKKRDEGKPYMASVGHACRKMVSIIYAVMRDNKAYTPCIPNEISA

SEQ ID NO: 168660 - protein, 480 aa, unidentified
MAKRAVHHADLKAVPMLLNESLYIGIDIGKAKHVAGFLSKTLLERHERFEACPALVFENSREGFRLLIERIRSLAPLEHIFVLMERTGHYHRTLEQYLQELDITVYVMHVQSRSTGMLKTDKRDALTLANQLYNQLELGVQVPNKLQLIRRVVPPTQAAAELRGLIRHRYELIHESTRRKNKLTAICDELFPELVRVVKDPNGQVALALRERFPTPAALATVSLTTLQQIRGGARSFSDAKLLELQRQAAQSIGIKEVARLRGLVLEQTQLIKELQMLQEHIQQLDKEIAGIVEHAREGQILLSFPGIGPIMAATSIAAIGSIHNFPSAAALKSYFGWAPVVAQSGSTLDHTRLTHGGARTMKHMLFLAVFQAIRLKDNEWARLYERLVKTKCPFDERTQSYLGKTRVIGRVAGQMTEAIYALLKRDAELLSKVPPSQDPPPPLLYDPEVHRQHHLGHYRPLKSTPPPNTITLLHPLPAE

SEQ ID NO: 168661 - protein, 407 aa, unidentified
MEVMYPRCAGLDVHKDSVVACVRVQEGPSALHKVETFGTTTKDLLALADWLGEHACTHVAMEATGVYWKPVWHVLDESFELVLANAMHVKNVPGRKTDVNDATWIADLLAHGLIRASFVPPTPIQDMRTLMRTRKQLVRERAQHVQRLQKTLEDANIKVASVVSDITGKSGRAILRALIQGETDPAQLLAVTTGRLRSDQATLTESLRGRVRAPHRFLLRLHLEQVENIEKAMDSVDQEVGALLEPFRAKVARLVTMPGISDVAAQVIVSEIGVDMSRFPTAGHLISWAGLCPRNDESAGKRRSTRLRQGAPWLKATLVQAAWSAVRTKNTYLQAQFLRLKSRRGPKKAVLAVAASMLTSAYHMLRDDVDYRDLGPDYFTRTDKTKVASRLVRRLQDLGYAVELKAA

SEQ ID NO: 168662 - protein, 404 aa, unidentified
MNNVAGVDVSKGKSMVTVLRPFGEVVAKPFSVGHTGSELKELADYLKSLDGETRVVMEHTGRYYEPVARFLHEEGIFVSAVNPKLIKDYGNNTLRKVKTDKADARKIARYGLDNWAELRQHTLMDTIRTQLKTLNRQQGLYTKTKTMMKNNLIALLDQTYPGVNDLFDSPVREDGSQKWVDFATAFWHVDCVRNMSFAAFTERYRKWCKRNGYNFSQSRAIKIHTEAQDLIAMLPKDALTKTMVRQAADALNAVSKSLERLKAEMRSLASQLPEYPVVMAMRGVGDSLGPQLMAEIGDVTRFAHRGSITAFAGVDPGSDQSGTHEAKSPRTSKSGPPELRKALFLVMDCLLKTMPADDPVYRFMDKKRSEGKPYLVYMTAGANKFLRIYYGRVKEYLASLENAD

SEQ ID NO: 168663 - protein, 402 aa, unidentified
MHYLGIDVSKASHQCVILDAEGEALGKSFAIQSSKDDFANLVKKLSDLNIPKSDITAGLEATGNLWENLYVYLKEQGFNIALLNPFQTNKFHQAMLKKAKTDSIDALVIAGLLRSGCAAGSYIPDEEIQSLRDLIRLKDGYLKDTKNYKRKAYSLLNLVFPEFLNLIKDPFNISCTEILSKYQTASDFKKLKPKDLLKVARGHQGNNYDEAWADKVIQAARDSIYSGKASKARGIVVKSLVLNIKNLKEQITELDNEIQNILKSDSDSSNNDIDNLLTIPGVGPKTIAVFIAEVGDITRFASCKDFIGFVGLYPKIEQSGSSLNRAKLTTKGSRLLKHALYMASVASLIHNPYLKSVYNDKISQGKCAKQALIVVSRKLACIMYSMLKNNAAYNPNRVAIAV

SEQ ID NO: 168664 - protein, 328 aa, unidentified
MKSVGIDVSSTSFHACVYSASGKQDVHRFALRGDWLSEFVRWCEARGVDAETDWIVVENTGVYSAQICYPLHEAGFQIALLSPTQIRDGFRLRKTDAVDAARLAEYGYRFADCLKRWHPRSERVEQIHQRLIERMHYRDMLQELSNVLRSLRQHPVHSEASLSRLQQMIAQLAQQVKQVEEEIRALVAEDEHLQEGCAIVRSVPGCGEVVSWHILDVTDGFRRAVSGRQLSSHLGKAPHERSSGKSVCKGSHSRGYGPTELRRVLHMVALAAVRLRGELQGYYRRKVQEGKRGLVVLNAVKNKVLHRVCACLRDWRYYEREYVRGVAV

SEQ ID NO: 168665 - protein, 347 aa, unidentified
MKRIAVDLAKSVYQVAESIHVGRVDRRRRLDPEAFRRYVQEQPEPVEWVMEACGTAHYWGRVAQAQGHRVVLLHPRYVRPYRRRNKTDRNDCDAILEAARCADMHPVPVKSHEQQQVQQLHNLREAWKKTRVQHINLLRGILRELGVAAPSSTQAFLRQACELIERAEVFALRGALQMVLAEISLCEQSMRDSEEQLARWHADDDIVHKLDEVSGIGLLTASALKTAVGKPERFASGRHLSAWLGMTPNEYSSGARRRLGCISCKGNTYVRTLLIHGARAALLAAKRCQTRTPERLTQLQRWALQTAERIGHNKAAVALANKLVRICWAVWCHERRFSGDWQSARPA

SEQ ID NO: 168666 - protein, 314 aa, unidentified
MPKVNAYIGIDISKDHLDLHQLPQDRAARFEANPEGISKLITYLKRRKPTLIVIEATGGYESQLAAELVTAKQNVAVVNPFQVRSYAKALGIIAKTDSIDAKVLARFAQDVKPQPRPLPNEQELELKALIMRRRQLVEMLVAEKNRFHRASSTQVKQSLQRMVNTIQLQIDQLDKQIKSSVQNSPIWREKDNLLRSVPGISNKTSNTLLALLPELGKLNRRQIASLVGVAPMNRDSGLYRGKRKIYGGRKSVRNALYMATVTAIRFNPLIKSFYERLTSSGKEFKVALTACMRKLLVIINSMMKKNTAFKQSFA

SEQ ID NO: 168667 - protein, 414 aa, unidentified
MKRQENKACGADIHKRFLMACILSRDGSKVLNRFDMTVEGVLGFASWLKDNNCKKVAVESTGNYWHLVYQVLDDEFEFILGNAFKTRRHSGAKTDKRDAEWLAELCLNNQIEPSMILPKEDRELRALTRARKGYVDFRSKLKARTIQELEACTIKLASELSDVFGKSGRHVLQGLVDGRSADVIVESIPSKKVKKNKEKIKQAIIAGLSPISIFLIKSHIQMIDEVDKKLVQLDAQISRLLKARKRDVEIAMSIPGIGFVSAAAILSEIGDYRNFASGKKLAAFSGLDPSVYESAGKRYNGKITKMGSKYLRRMIIECAHALSRTKAKTQLKRFFLRIMARRGKNIATVALARKMLVVLHHLLINQEMYKDDGLAKPKNVKVSFSEESNYPSLDEMIEVLVGAGYFVKKDSQGG

SEQ ID NO: 168668 - protein, 429 aa, unidentified
MLTHLARWSKCRPLGGRNFGEFLRNVGGEDTMVGPVAHAIVGYTERLSRSVQSQYREDWSMYDPTRIRSVGLDVHKETIAIAVADGTLPAKVLATIPNDFTTLLKSLRRLGPPETIVCCYEAGPTGYGLYRRLKAAGYTCHVVAPSMVPVKSGCRIKTDRRDAAKLAHYLRSGDLTFIHVPDEATEAIRDLERTRDDAKIAERVTRHQLSKFLLRHGRIYPKKTAWNPAHMAWIAEQVFEQPAQRQVLADYREAVELGGARVARLTAQMVTASEAWEKAPLVKALQALRGVDMVTAVTVVAEVGDFRRFATAGELMAFVGLVPSEHTTGETRRQGRITRTGNTHVRRVVVEAAWHYRRQPRMSKAIRSRNDFVSAGVRAIAWKAQKRLHERLKRLLGRNKPACQAVVAVARELVGFLWAISREEVLLAE

SEQ ID NO: 168669 - protein, 463 aa, unidentified
MAARKPKRMGAQTVEDEDYQLRYERVAGIDVAKGSAMVCLRLPPGPGKVRRTCRTWEVMARVPDIEALAAELKAARVERVSMESTSDYWRIWVVVLEGAGLDVQLVNSSQARNLPGRPKTDKADAQWIARLTEMGLLRGSFVPPPEIRALRQYTRQLVHLSQDRTRYWQRLEKLLESALCKLTSVVSGLAGSASCLAMLEAMIAGERDPQVLAGYARGPMRSKHAALVKAFTGMQFGPEHVFSASSDLRMIKMLDAEITGLEQQVRDHLAAIPAAWGTDADGVTGPGAGTGPDAAVLPAVDRLTEIPGVGPAIAAGLIAEIGLDMSRFPTPHALVSWAGMAPVPNQSGPRKGRGRKGHGSSYARRLAGQAGNGAARTDTFLGQRHRRIRSRPAGGGWKKANVAVGRSIIIIVWHLLKDPAARFTDLGPDHYAKHTDTNRKARNHKRQLEALGYDVILTPREAA

SEQ ID NO: 168670 - protein, 430 aa, unidentified
MPAGVPQTRLVLRTQVAHKWNSTMLGRARQIEMRRPTPGDRHTFGRGNKGTGQHAHHQEVGPMTTTTFPRITIGLDLGDSRSTFCVLDRGGAVIERRTTPTTRAALREVCGRYPRARVVVEVGTHSPWVSRLLGELGHDVVVANARKVKAVSAATLKSDPVDAETLARLGRADRALLAPITHRGAAAQLALAHLRARDAVVRARTLLINHVQGALKTLGEPLPKAVTSRAFARKVSAGLPAALRPALERALDAIAALTTAIAGYDRDLNAVARTQYPETARLRQVAGVGPLTALCYVLTLEDPHRFRTGRSVGAYLGLVPRRAQSGGRDPQLRITKAGDAVLRRLLVTAAHYVLGPFGPPCDLRRWGESLMQRGGTNAKKRAVVAVARKLAGVLHRLWVTGAVYEPVRAQIAAPLGVPQRAPRVRMEACW

SEQ ID NO: 168671 - protein, 380 aa, unidentified
MNAVGIDVSKGKSMVAIMRPFGEIVSTPFEIKHTSSDINSLVKLIKSIEGESRIVMEHTGRYYEVLAHQLSEANLFVSAINPKLIKDFDNDSLRKVKTDKADSVKIARYALDKWQNLKQYSVMDELRNQLKTMNRQFGFYMKHKTAMKNNLIGILDQTYPGVNTYFDSPARSDGSQKWVDFASTYWHVDCVRKMSINAFIDHYENWCKRKKYNFSKSKAEEIYGKAKELVPVLPKDDITKLIIKQAVDQLNSASITVESLRTLMNETASKLPEYPVVMAMKGVGTSLGPQLMAEIGDVSRFTHKGAITAFAGVDPGVNESGSYEQKSVPTSKRGSSDLRKTLFQVMDVLIKTHPQDDPVSVLRQKTGSKETVLCLYDCRC

SEQ ID NO: 168672 - protein, 490 aa, unidentified
MARLEFQKKKARPRWREFSTESPPGRAINLKHGVIICPFTAQPNPKKSRRPADPLAGLPPLHLNAAGIDVGSAAHYVAVPPDRDPKPVRRFDSFTADLHALANWLAACGIDTVAMESTGVYWIALYQVLEARGFEVRLVNARHAKNVPGRKTDVADCQWLQQLHTFGLLKDSFRPEDSICVLRSLLRQRENLVAAAGTCVQHMQKAMVEMNIQLANVISDITGETGLAIIRALLAGERDPVRLAQLKNPRIQASTDTIVRSLQGNWRDELLFILGQSLWLYECYQAKIAECDLRLETQLRSFDEKVTPLPLRPRRPSRGSNRPAFDLQSHLHRITGVDLTRIDGLNVLTIQTIISEVGLDMSPWPTEKHFASWLGLCPDNRISGGKVLKRKTRKVINRAATAFRLGAWNLLRSRSALGANYRRLRARLGAPKAITAMANKLARIFYRMLKYGQDYVDQGMEHYESRFREQQLKWLQKQAKMLNMQVVPVQ

SEQ ID NO: 168673 - protein, 326 aa, unidentified
MASVIGIDVSAKSLDVVVRKAGKNSQSTVYANSHSGHNELTSKLKKLNPDLIVMEATGVYHFAIAERLFDEGLPVSVINPKQSYHFAKTLLQRSKTDAIDAGLIAEYGQRMEPRKWCAPSRARREFREVARQLNRLTAELTAAKNRLHALKVGAQSDFLIADEQDAIELHERRIERIRKYASQCITSDDELTVQLNNLTQGKGIGEITAVAVLGELCVLEKSLKAPQIARYAGLDVRENQSGSSLARPGRLSKAGNTYLRAALYMPALSAGKHDGPSQVFIERLKNRGKKPIQAQCALMRKMLTGIWACMKNNEPYDSTKLFDLDA

SEQ ID NO: 168674 - protein, 411 aa, unidentified
MKDSRKRYIGLDVHKQYLIALGVDDELNIVLPVRRVELTRLEAWMKKTLTQQDEIVLEMTTNTWQLYDELCEHAGKVIVVHPPHVALITRSQVMNDKIAASILARLLAKGLLVGIWVPPQEVRELRGLVAQRKKMTGLATQAKNRLHAVLQRHHLVPPKGNPFYASQQRWWLTLPLGALEKVNVQSDLDTLHFAEAQRIHLTSMMEEIASQQEQVTRLLQIPGFGVVTAVTVWAAIGDIQRFVDPQHLVGYAGLGTRVHDSGMSTRTGRITKAGRRDLRVVLIEAAQVAANSHPHWKAELARLQPRLGRNKAIVAIARKLLVAVWYILAQHKTDRFAEPEAIAQKFLKFAYQLGKANRPAGQSAAQFVRKRLDALQLGHELTSIAWGSKKPIPLPPSTNKVSDVPNGALAP

SEQ ID NO: 168675 - protein, 372 aa, unidentified
MMAQSQEKKDDVGKDRFRIWCGLDVSKETFEAALVVGEARSLIGEQEVDMRQIPVRSFARSEAGARKFLAWADKKLAALVKQTQEPRRFGVVMEATGKYSLELTAWLCELRPSLAAAIINPAQASAFIKSLGLRNKTDKVDARALALYGRERNPRVYEPPSAELVQLQALSRQRDALLKTLVAERQRAQEGTPSKVVSQVQRSLIRHLERQIGKIERAMEELIDESADLARDVELIDTIPGVGRQTAMVVLAELGDVRRFSRSRQLSAFVGVSPRVWESGSSVRKRTRLCKAGNARVRSALYMATLTVIGRRNHLGALYQHLVERGKAKRAAMGAVMRKMLVLMRALLRSGECYHDDYHALGRHTRECVRMM

SEQ ID NO: 168676 - protein, 347 aa, unidentified
MNRIPVGVDIAKSVFQVHHLDENTGATVNKAIKRSAFLDYFANRNPCLIGMEACGGAQHWARRLMEMGHDVRLMPGRFVKAFNIGNKNDSADARAIWLAVQQPGKGVAVKTEGQQAVLAMHRVRQQLVKVRTMQINSLRGLLTEYGEVMSRSRKGLDSAIPDVLARLANRLPTMLIETLREQWNNLVKLDEQIGVIERRLQMWMRADPSSGRLAEIPGVGVLTATAAVATIGDPRAFRSGREFAAYLGLVPRQSGSGGKVLLHGISKRGDSYLRTLLIHCARSVLVHAKDPGKWIDQLRMRRPPNVVVVAIANKIARVIWAVLAHGRPYERDFRIGGLHGHVEPSAA

SEQ ID NO: 168677 - protein, 341 aa, unidentified
MCEYIGLDVSLKETAISVRRDGNRVWRGKCPSKPSAISEVLRRRAPAAQRIVFEIGPLSVWFFHALSKEGLPAICIDARHAKAALDMAPNKTDANDADGLAHLAEVGFYREVRVKGFDSMLTRTLVAARTRLVRIATELSNQIRGLMKTFGLVVPRRKGSRFEEEVRRLLSGQEDLASILMPVLEAWRSVRTRAAELTRQVLATARQSDACRLLMSIPGIGAITASAFVTAIEEPENFRKSRSVWAWLGLTTRRYQSGEVDYGGHISRRGDAHLRGLLYEAATVVLTRTRADSDLRHWGLRLRETIGFKRAAVAVARKLAVIMHAMLKSGEPLQRAGAAPT

SEQ ID NO: 168678 - protein, 350 aa, unidentified
MNATTVAVDLAKSVFELAVADSQWRIVERHRLTRAQFERWFQNREVSLVVMEACGSAHHWGRVLRERGLEVRLLPPRYVRAYVKRNKTDAADAVALLEAARASDIKPVAVKSVEQQALQALHRTRSAWMAARTGRINMLRGFCREFGLVVPEGAARGLAQMARYLADERSGLPAMIRGSMRLVLEEIRLMEARIENLERELAELARHSPACQVLLTVPGIGLLTSTAMVAAVGNPRSFDSARRYASFLGLTPREFSSGEQRYLGRISKRGDRYIRMLLTHGARSVLRAATVARRCGRQVDRLRSWALAVQARTNHNKATCALANKLARIAWVVWVKHETYRTEPAIQPGA

SEQ ID NO: 168679 - protein, 434 aa, unidentified
MTKKRRYRAISVNDAAKVAALTESVAATRVAVGIDIAKTRQFAAFSTPDGRVHGTIRWEHPKESPQFVEVLRELAGSGSEIEVVLEPSGTYGDALRAALLRAELPVYRVNPKRSHDAAEVYDGVPSLHDAKSAAILAKLHFDGASEPWPVTSTHQRDLAAALRVLDIYQKQFQQNRNRLEGVLARFWPELSRVLDLGSVTLLTLVSEFGSPREVSRRREEAHALMIRVGGHQLDPEKVKLVLDQAEGSFGMEPTHEERLAVQAIAIEARRCQKAARAARKKVEALTDMNGPAREMRGVVGKTTAAVLVAAVGDPTKYGSTSAYQKALGLNLKEKSSGKHQGALHITKRGPGVARLFLYLAALRLVQRDPIVKAWYAKKVARQGGIAKNRAVVAVMRKLAKALWHVAAGAAFDSRKLFDVSRLHLPMEPQAEASA

SEQ ID NO: 168680 - protein, 423 aa, unidentified
MSKKKQTVAGLGAIYARVCGMDVHKEVVVGCVRILDIKDGTVQSTLRRFGTMTADLLELRQWLAQEQVTHVALESTGVYWQPVFNILEGHFEVWVVNAQHIKKVPGRKTDMKDAEWIAQLLQCGLLKPSFVPDRQQRELRDLTRQQTKLVQQRNAVANRIQKVLETANIKLGSVATDVLGVSGRKMIEALIAGEKDISKLADLAEKRLRHKIPQLQRALEGEVGEHHRFLLRRLLDQYDFFEKEIARISERLAAIAPPSFRAAIKRLDEVAGVAERGARALLAETGTDMSRFPSHKHFASWAGRCPGNRESAGKRKSGKTPAANRHLDAVLTEIAHAAVRKKDSYFKSQYHRLAGRRGKKRAIGAVKHSILVTIYFMLRDNKSYTDLGADYFDKLNPQQQIRYHVRKLNELGQNVELSLRPAA

SEQ ID NO: 168681 - protein, 354 aa, unidentified
MLSIMQGRVQIASNQIVVGTDTHKQTHTYSALSSVGGVLGTETFPATLIGHQKALTWARQFGDIAAFGIECAANYGAGLARFIRDQNIPVVEVNVVDKQARARAGKTDEYDSITAGRLLLSGQCQDEAKQLEGPFLAISVVLNARDSAVRMQTKANNQVKAALVRCADEYRAGFDGLTTLALHKKLANSRPRVTDSQYSVKNTLRLLSARYLFLKDEIKEHDKQLKELVVPLAPQLLECEGIGLVGAATILSVVGSNLTRINGRDGFCRLAGVSPKPVSSGMTDKHRLDRGGNRQLNKVLYTAAMTRSQKKDSATAVYIEKRLSSNKTRKDALRCLKKYIAREVYSVLLKVYEK

SEQ ID NO: 168682 - protein, 420 aa, unidentified
MSYWIAGIDVHKKMLAVVVADVEVEGEYQFERRLFGSNPDHLRLLANWLIEQPVEEVVMESTAQYWKPVWGALEQYWKPTGQGTGPMSGTLHLAQAQSNRGPRGRKKDFPDAERLVKRLVANEWILSFVPDAEQRLWRTGMRRKYQLTRNRVQLQNRLEALLEEAHIKLSSLVSDLLGASARRMLKALAEGATDPAALASLADKNLPATPAQLCDALGACTELNPVYRRLLKMFLEELQLIDQQTAQLDKEMATLLSQDQAAVERLAEVPGLGVDSAQQIIAEVGAKAATFASAKNLSSWVGACPGEDESAGVSKSHRSPKGNRHMRRILNQCANAAAKSKGTIFQIIYGRLVSRCGHNQTIGAIAHRLCRLIWIILHQGVRYEERGPAVNANSRRRRTTRMIRELRSLGYRVEAMGSPA

SEQ ID NO: 168683 - protein, 430 aa, unidentified
MKQYELLHSLFVGIDVSMKENVVHAMPFSPEDHPGHAHLRFSAPNTPAGSVGIVEKVSDFLKFYPDVIQVVIALEATSVYSFHLATFLSVAHFNGHIPAIVYSVNPKEIHAYKKTFTDVGKDDYVDAMVIADYARSNKIRSRPWKGPELLGLRVLTRLRFRIAKLMGIVKNSTGNSIYLECSGLMTGENPFCNVWTTTCQELLTTFQGPDEILSLSDEELLNFITEKGHRRFSHPLDVVEKVKKAARNSYRLDKRVYEPLTSGLSVSFFIIHSLEAAIKKLDKSIETMAKSFSSDSYQILLSIDGVGPVIAGGLLAEIGDIKRFKTDDALAKYIGLTWRGKQSGQSESPVKHLSKAGDVYLRYYVLLATGQIINYSAKYREAYERIRSRKTLFPHRAALNLVARKIVRLIFTLLDKHQLYSDNKVMVTLE

SEQ ID NO: 168684 - protein, 399 aa, unidentified
MVTRHRLIWVGIDAGKGHHWAVAIDGDGERLLSRKVINDEDAILALLADVLAMADEVRWAVDISSRPSALLLTLLLGHGQPVVYIPGKTVNRMTGAYRGEGKTDAKDARIIADLARMRRDFRPIEPSVELSSGLLLLVGYRQDLISERVRLINRLREILVGICPALERAFEYRKRPGLILLTGYQTPAAIRRMGVKRLTDWLARRSVRTASVFAQQAVEAATSQQTSLPGEELAATLVQQLAHRILELDERIKENERAITTLFRTDERAAVIESLPGMGPILGAELLAIVGDMTTHKDAGHLAAHAGLVPVPRDSGRRTGNMHRPKNYSRRLRHIFYMSAHVSMTLPGPSQDYYRKKRGEGLIHTQAVLSLARRRVDVLWAMLRDKRLFTATPPDPAAG

SEQ ID NO: 168685 - protein, 530 aa, unidentified
MVTRIKKRKCAGSKKRFIGKPTGQIQERVQAVGPERFGIVSVDCAKRRSKWMLCNFYGKVVVEPTVVEHTTGGLRAMTHVVAVACRAEGLTDTIVAVEMTGIYHKPVQRAFRKAGFDTRIVHPFASNHYRRPLHPDEKTDDHDLEAIFHAAVNGYGLATLPAGEVYQSLQAVSRHRHNLVKQRSRLMVQMRRLLHQTMPGFADLFEDDKLFHKSIALPIALEFSSAEAIRHAGVAGIEGHLTMMKVRFQTRTIERIVAWAGTAAESSELATIHTRQWQQLNEVRQLFDEQVAAAEREMAGFLVKTPYILLLSVTGINVVSAGRLAGEAGPIEHYASAGAINGRAGLYPSRYQSDEVDHADGTLVRQCNRQLRGAAMLVAENLIKCHPHYRGMSALWAQQKVDPRDRRCRIANRAMRMVYQLVGGRQVWRGRGVDREYLLAKLQEFHGLHHTPIDQSIRDLTEAFVWLPKSVYAAEAKPLAELPRRKRRDPQRLGDLLVPLLIRLGLSHKELGVPGEETVESNTSEARSSG

SEQ ID NO: 168686 - protein, 416 aa, unidentified
MLRVYRRCCGMDVHKETVVVCVLPPDGEEGEIVRKVFGSFRNELARMRGCFKQLKITHVALESTGLYWMPVWNVLDGHGFELKLVNPGQVKALQGRKSDQRDAKRIAEFLQDERLDGSFVPPREIRELRQMLRHRQSILEARNEVHNQIRDLLETANFKLSSVATDLMGLTGRNILRALADGLDSPERLSWKARGSLRHKEAKIKEAMKGQASEFFRWMLKSHLEHYDFLTNLIATLERQIEGYMAPYEEHILRLITMTGVDRLVAWNLIAELGVDMSVFPTAAHCASWAGLAPGTHESAGKQKTGRTKRGNRTLRRILTQSAWANTRCKYGYLKAFFLRIRARCGWSKAIVATAHKILVIAYGILKNHQPYQDLGGDYYDRLNPDKTIRRIQNRLAKPGYQATLTLLPAPTMRST

SEQ ID NO: 168687 - protein, 453 aa, unidentified
MKKDKNKEQKVVELDAFEQINHNAAGIDVGAKEFYVAVPKGRDTQSVRVFLTFTADIHHLADWLAQCGVKTVALESTGVYWIPLYEILEQRGFEVYLVNARHLKNVTGRKTDVLDCQWLQQLHTYGLLRASFRPSEQICAIRSLVRHRDMLVSYRSAHIQHMQKALTLMNVRLTNVLSDITGVTGMKIIRAILSGERNRKTLASYRDAKCAKTEEEIEKSLEGNYKLEHLFVLKQALELYDFYDQQIKQCDQELETLYNEFEEPAQPGTPAPEKRKRKRRKNQPNFDLSESLYRMTGGIDLTKIEGLDALTVQEILSETGTDVSKWPTVKHFCSWLCLAPNNKITGGKVKSSHTPHTQNRAANAFRIGAQSLMKSKSALGAYCRRIAALHDAPTAITATAHKLATIFYFMLKRREAYRPLAADYYEKEHREKVVRSLQRRAATLGFRLEPTVS

SEQ ID NO: 168688 - protein, 421 aa, unidentified
MRKANTGKLKVVRDDALIVAVDIGMEMNRGYCTTPDGRSSKTFKFNNTRQGMDTLWNMIMINKNRFQCNEVIVGYESTGPYGEPMVHYLMKKPVRVVQVNPMHTKRVKEINDNSPLKTDEKDPRVIADIIRWGRALSIVIPEGDAAYLRRLNNSRERHVRERTALVNQLQQLVFLLFPEFMTVIKNIKCKTPLYLLKEYPTPEAISVLDKQFLGEEMRKRSRGKFREHHADMLINLAKHTVGIREGSAGLSMDIRHILVQLEMLKNLIAEIEGEMEIALGRIPYSPKLLSIKGLGVVSVAGIIGEIGDFKKFKTRSEIMKLAGLDLYEISSGKMKGQRRISKRGRSLLRKILYYAAIQTIRKKGILHDYYTRLTDRGMKRMMALVAVSRKLLGIIYAIVRDDSEYSINFESMKKQVIKKAA

SEQ ID NO: 168689 - protein, 374 aa, unidentified
MDKFSKYVGLDTHKETIAVAVADALGGKPRYYGEIANTPEAIRKLALKLCDPGERISFCYEAGPCGYEIYRQISRLGHHCSVVAPSLIPTKPGDRVKTDRRDSVKLCRLDKAGELTPVWVPDQEQEAMRDLTRAREDMKGLEKTTKQRLNAFLLRYGRVYDGGKSRWTQAHFRWLEKLKFDITVQQIVFQEYVDAVKQAEARVAGLEKEMEKALKSWALAPVVDALMALRGIKLVSAMTLMAELGDITRFESPRQLMSFLGLVPSEISSGATRRQGGITKTGNGHARRILIESGWSYRFPARKTAHLQRRAERCSKEVQAIAWKAQKRLCGRYTHLLDRGKLKVQVCTAVARELVGFIWAIACEVMSKPIVSAR

SEQ ID NO: 168690 - protein, 411 aa, unidentified
MKFIGLDWKDKGYTTRIINKEGTDLSGSFEVEKNREGFSEFIYKVRKYCDGDSNVLFGIERERDPIVEYLLTLGYKVYLVCPNMMKSLRKRYSSTGKYNDEFDSYIIADTVRTDRNRLTQIEPRDDKIRKIEFLLRHRDKTVDDKRRLTNRLTCYLKEYFPAFLDFFSDITCPTALSLLKVYPTYEDAKELSKEDIKAFLRKHHYHKESGALRICKAIKEGQVKIDTAVIQERSRSAILLIKRIELLNEEIKEYENDLKETTENDKDAEIFKSLPGSGDTLSPGLMVIFGKNRSRYENAEEINSLSGIVPFTKQSGNWETHLFRFGCNHFYRNIITRLAYCSLTKSEWARSYYNEKRAEGKSHYHALRCLARIWIKIAFSLWKRREKYNEDKHMAAVQRHKIRNRLARKSA

SEQ ID NO: 168691 - protein, 374 aa, unidentified
MSSNSITWVGLDAHKQSIHVAMLVPGRAEPLNWQEANEECAVRRLARRLNREAPGEVRACYEAGPLGYALQRELEAQGVICEVVAPSLIPIKPGERIKTDRRDARKLAELLRAGLLTEVQAPNEADEALRDLCRGRDSVRQDLMRARHRMSKFLLRRGYRYHDTQRHWGVRHMKWLRPLTFEQAAAQAIFDHYLPTIDHLEERLRRVDAHLEVFGGQEPYRQPVAWLRCFRGIDTVTAVSLVAELHDFRRFRSARALMAYLGLVPSERSSGEQRRQGSITRAGNRHVRRLLVEAAWHHRQRPVLSQPLRRRREGQPAHIIAIADRAQERLHARFVRMTRRGIHYNKTVVAMARELVGYLWATLYPREPGAPPAA

SEQ ID NO: 168692 - protein, 397 aa, unidentified
MIAVGIDVSKSRSTVAVIDSNGVVLASPYTIAHTQPELHALAKYLKELKEPVTILMEYTGHYHYPVLKQLQSEGFPVCLINPYQMKKYGDTEIHKAKTDKKDALRIATYALEKSYKLVPYSSMEQKYEDLKFLSRQYEQRISFVAKLKVQLLDLLDQTMPGITKQLSLTSRNPEKCALLLFIKRFKSFDEIQRMGKTRFLSSYETMTKKTSDKYAAQKGLAIYELAKNSITTRGDDPYIWLSQAQCVDLLSAAQNAADEIILKMQNIAQTIPEYAVLRAMHGVGDRLGPIILAEIGDIRRFHSGKALNSYAGNDAPPYQSGQFESRNRHISKRGSSALRKACYEVMQALKLTKPQDDPVYLFMLKKEQEGKPYNVAKMAGVNKFLRIYYAKAMELYR

SEQ ID NO: 168693 - protein, 430 aa, unidentified
MKGGDLVKNNFMSTLFVGIDVSSKTNVLCALDFQGNKLLNLRALNNQPGAESILDSILNCLNSNSLKYVVIALESTSFYSTHIANFLSSNEQLLFYKPLVYCLNPKSVANYRKSFVDMDKTDPLDAYVIADFARCGRITSEPWRGAQFLALQRLSRHRLHLVECITREKAYMVSNIYLKFSELAVLDKNEQPFSNTYGVTSAAVLTEFLSLDDITYSSIEDLVTFVSAKGKNRFNNPYETAKLLQKAARDSYRLDKVLYEPLNTSIASSFNVIKAFDDEIKTIDKAIAKAIKGMNTAEYQSLTSIPGIGPVLASGILAEIGTIASFSSHNALAKYAGLTWRTNQSGNYSADDTRMTKTGNKYLRYYLIEAANSVRNNISEYREFYNRKYGEVTTHCHKRALALTSRKLVRLIFGLLTKNQIYSSNKVGDI

SEQ ID NO: 168694 - protein, 402 aa, unidentified
MAAGQLWAGVDVGKEQHWVCVVDDTGAVVLSRKLVNDEQQIRGLVSDVDALGEQVSWTVDLTTVYASLLLTVLAEAGKPVRYLSGRSVWQASVTYRGGEAKTDAKDARVIADQSRMRGADLPVLHPDDHLITELRMLTGRRADLVADRTRTINRLRQQLVAVCPALERAAQLTQDRGWVVLLARYQRPKALRQSGITRLTRILADAGVRNAPTIAQAAVAAAKTQTVRLPGEQVAAGLVAQLAQEVMALDERIRHTDADIEDRFRRHPLAEVITSLPGMGFRLGAEFLSTVGDPALIGSPDQLAAWAGLAPVPRDSGKRTGRLHTPQRYSRRLRRVMYMSALTAIRCDPHSRTYYQRKRDQGKRPIPATICLARRRTNVLYALIRDNRTWQPDSPPIATAAA

SEQ ID NO: 168695 - protein, 427 aa, unidentified
MRFIGLDIHRDFCEVAISEGGKARRAGRVASRPAELELFAQSLGEDDRVVLEATGNALAIARIIEPHVGEVVLAHARKVRAIAEAKVKTDAIDACTLAELLAADLVPGVWLGDERTRLLRRLVSRRRQLVKQSTRTKNEISAVLLRNLKGRPPVSDVFGKSGRAWLGALELGLDERETVDAGLRQLDFLQHELAHVDRTIAEQALASPEIRRLMTIPGVDVTTAAALMAAIGDVTRFPSPRHLAGYLGLDPKLRQSGVAKPRQGRISKEGSAAARHALVEAAWSAAKAPGPLRAFAARTAARRGRHIAAVAVARKLAVLAWHLLTRGEDYAYQRPSVVRRKLRRLELKTGAPRAKRQAGAAPLWGSRAQDDLERELARQAELAYRRLVADWQRTRPKDGAGATPGRASSRPSDRQAARQETAPPPAL

SEQ ID NO: 168696 - protein, 404 aa, unidentified
MIYVGIDWAEAHHDVCAVDEAGELVMRMRIADGLDGVAQLHAALAERAASATEVVIGIETDRGLLVQALVAAGYELYAINPFALSRYRECHVTSGAKSDAGDAKALADLVRTDRHNHRRMAGDSELAEAVKVLARTHQSLIWARQRQVNAMRNALREFYPGALEAFGTDLDSGDALAVLAIAPTPEEARTLSVPRIVRALRAGGRERFLERRARVIHDTLRRPQLGGSPVVSGAYGESVRSMARIVASLAGEIARLEDELKARFEQHPDAEILRSLPGLGLILGARVLGEFGDDPTRYTDVRSRRCYAGSAPITKASGTKLVVLARFARNRRLADACYLWAFSAISRSAGARRYYDRQRACGRSHHQALRALSNRLVGILHGCLHYRCFYSEEIGWRSQPAAAA

SEQ ID NO: 168697 - protein, 584 aa, unidentified
MSANAPLDRIGVGIDTARYGHRVSFLRPDLKPAAKPLTVMENRAGYQDLHERLIQLHEHHSDAHFYVRIDAAGQYAVNLEQFLRGLKLPMTISVGEPKRNKDYQKAHFPKRTTDDTESQAMARFAVVEQPGASPASSPSMVVLREVAGRLQARVKQTTQAINRLHNLLARVFPELATFTEDISAGWVLRLLDLYPTAERIAGAHLDSLEKIPYLSSAQAQTLHQAAKQSVASLRGETVEQLVRDLVTQVRHCEKAEQHLRQLLAAAFDELPESPHVQVLTIPGIGPATAAALVAKIVDIDRFATPNHLVNYFGVFPEESSSGVDKRGRPLPLGTLIMSPKGNDLVRFYLWNAVRSGIQHNPAIRALYRRLVARGKRGDVAMGHCMRKLLHLVYAVWKTNRPFDEKHFPWDDPSNTPEPAATLVPGDTRATPSANEKAVGHKRDVPANKVVTTAASTVRPAPHPVKRAPDSTTRPSVDFAYLRGHVTMQQVLECLGVFADLRGRGPQRRGSCPVHSGPTAAERTFSVHLDKNVFQCFHAECGLKGNVLDLWAAVHRLPLYEAALHLAETFHLPRNREEEPVIRTR

SEQ ID NO: 168698 - protein, 322 aa, unidentified
MAMLSFGGIDVSKDRLDIMVLPDEQCSWVSNDAAGWAKLVEQLRGSSITAIGVEASGGYERGVVRALLAAGMSVRQINPFKLRQFAKASGTLAKNDRLDARMIASFVAIMPTRPAQRQAPMIEQLAAMLTVRRQLSDHKVATENASRLLEGAMLQRLSRRRIAGLTADIDLLDQRLVEIVTADPALAHRFRLLTSMPGVGAVLACTLIALLPELGQMSRKQVAALVGLAPYDFDSGKLKGRRCIWGGRARVRHVLYMAALSASNWNPGLKAFHDRLEATGKKPKVVIVAVMRKMITTLNAMLRDGTTWVDRYSGRRSASTAR

SEQ ID NO: 168699 - protein, 413 aa, unidentified
MNRPLYVGIDVAGNSLVVGIVDANGAKLDKAKTYRNTLPAAVQLVTDLIAEADKHSANALFCATEATGFYDWHLLEYLAESTELAVYQPKLYRLNPRAVKAFTAIASQTDKTDRNDAFFIANYLRFTQPEHPFNAQMDYLPLQRLTRFRKHIVEQITAEKNYFLNHLFLKFSAYHQVQPFSSVFGATSCAFLEDFFSPEEVAMTDMEQLLAFVIAHGKNRFQNPEEVVRKLVQVARESYRLRPTLAKSVNLVLATSLANIRALAKSLAEINAAIETAFAGFTTTLTTIPGIGTIYAAGIFAEIGDIQRFASDAQLARYAGLAWRKRQSGNFTAEDTPLIRQSNATLRYYLVEAANSVKNHNPTFRVFYEKKKNEATRRQHKRALVLTARKLVRLVYAMLSRGEIYQLQKASGN

SEQ ID NO: 168700 - protein, 350 aa, unidentified
MSKQIIALGQPAVSSSDPQVKKLFCGIDVGAETLAIAVMELDRPCIQREFANTITGHKALLTWLKKMKAQMRVSLEATGIYSMDLALALDATECVEVAVLNPKRVHDFARTLRRSKTDSADAQVLAEFSLRMPFVAWQKPSQSALALRALSRHLEALVVQQRREANRLHAAERSIATPRCVVADLKRSLAGVGRRIVKLRRESMTLITADANLRERFKLLTGVPGIAAVSALQILGELVLLAPDMKVRQWVARSGLDPVHQDSGTSVHKPSRISRAGSRHLRRALYMPALAAVRWDPHLKAFYNALLARHKRKLQALIAVARKLLHAIYGIFRTRTPYDGSKLFPHLETV

SEQ ID NO: 168701 - protein, 431 aa, unidentified
MLKINPLSTLYVGIDVSSKSNYVCALDFYKNKYINSSFANNQPGAEELALKILECLKEHPDITTIVAALESTSVYSIHIANYLSSCEELMRFKPYVFVLNPKCTANYKKSYIGLGKSDPIDAFVIADYARAGNIESEPWRGSQFLALKRLTRHRLHLVECMTREKTYLVSNLYLKFSELQMLEGDDQPFCDIYGATSSSVLMEYFSPEEILDSSEEDLIAFLAKKSRNRIKDISKTADLLKKAARDSYRLDKALYEPLNVSIASSFNCIETFKREIKVIDNAIEKEIKGLNPNAFIILQSIDGIGPVFAGGIIAEIGDITAFHSSDALAKYAGLTWKSNQSGAFDGEDTPMIKAGNRYLRYYLGEAANSMRKHNVEYGTYYRKKYNEVPKHQHKRALALTSRKFVRLVYGLLARNQLYSGVSLDTSIKDSN

SEQ ID NO: 168702 - protein, 345 aa, unidentified
MKIVGCDLHTRYQQIAMLDTETGELIERRLEHAHGEARAFYASLQGNVRVGVEATGYTRWFERMLAELGHELWIGDAAQIRAAMVRKQKTDARDAAHLLQLLVEDRFPRIWRPSMAERDLRQLVWHRQKLVWMRNAIGNQLHALAMGEGLCRKKQLWTKQGRAELEGLRLDEWASYRRQELLEMIDQLDGSLKKLDEAVEEQSQQNEAAVLLRTHPGVGPVTSLAFVLTLGPVERFTRSKQVASYLGLNPREHSSGGKQRLGAISKQGNPMMRSLLVEAGHSAARLDAELHKDYQRLKLRRGSGVAKVAIARKLAVRMYWMLRQQANYAQLVRMQASPWATLVQK

SEQ ID NO: 168703 - protein, 342 aa, unidentified
MKQTYYVGLDVSKDTTAICVRRADGVVERVCETATEPEAICTALTDLRGGLERVVLETGRMANWLHGELTRRGLPAICVDARQAHAVLSQIHNKTDANDAAMLADLARTGFYRRVEVKSRDGQERRALLAARDAAIGARRNAENTIRSLLASFGLRVPGQPRTYEDRIRAVLEGQDALAPVILPLLAIRMEALRQAAALTKELVRRVKSSDACRRLMTVPGVGTVTAAAFVATIDAPGRFAKSRSVGAYAGLTSRRHQSGAVDYGGRISKRGDRLLRTMLYEAANSLLCRVKPGRGQALKDWAMAVKRRTSHKKAVAALARKLAVMMHAIWVSGSIFKESEA

SEQ ID NO: 168704 - protein, 355 aa, unidentified
MKQEKYIGMDLHQATIAVAVMDSMGKLIMECILETKAATILEFIGGLNGSLWVTFEEGTSAAWLHDLLKPHVSHLIVCDPRKNALLKDGSKNDRIDARKLAELLRGNQLSAVYHGEHGVRTLKELARTYLTISQDLVRVMIRVKALYRSWAIPCSGKQVYGVRHRSLWLDKIGEAGVRRRAEFYYQQLDALRSLRQQVRRDLLTESARHQATKRLRQIPSIGPIRAALLVALLQTPHRFRTKRQLWAYSGFGIETHDSGEHRYVDGELRRSKKKATVRGLNRNYNRDLKNLFKGAATQVTAKPGPFQEFYTALLAKGIRPEMARLTLARKIAAISLTIWKKGVDFDPKQLQRQAA

SEQ ID NO: 168705 - protein, 383 aa, unidentified
MKAVCGLDVHKDSIYLCILHPDGELFEQVFGVLTFQLHEMCKLLKKHHVSEVSMESTSIYWIPIWRVLSPHFTLRLVNPYFIKQLPGHKSDVKDAQWIAECTMKELVNGSFVPPEIIQQLRQYDRRIFDRNEEIVRKESKVDAVLQRCNIRLSNYVSNIECKSYRTVVRRLSEGVTDPQELIKEIHGRIINKHGRETKLASMEGVVSQAEIDVLRQLREEIDIAESHKKECQDKMSEICQKYFPEELRRLQTIPGIKERAATSLIAEIGTDMSKFETANHLAAWSGLRPRNDESNKKVKSRKTTHGNSYLRRTIIQCAWAASRQKDCFFSWFSYHQTVVRRKNKMKVIVAVARKMLVAVWHVLHDNVEYFDFKHDCEESANNG

SEQ ID NO: 168706 - protein, 346 aa, unidentified
MGKSITDLSSVTTVGLDLAKHVFQVHCVDASGRVVVAKAIRRNKLLEFFASLPRCLVGPEASGSAHHWARELIRLGHDARMMPPAYVKPYIRRQKNDAADAAAICEAVTRPSMRFVGVRSLENQATLMRHRAREMLVSQRTQLLNGLRGHLTEVGVIAAQGPRHARELAGLIEACDETIPIEVCEARAPLVVQLRTLDEAIARLERTIAKMAQKDEVARRLMSIPGFGPITASVMAATVQDASSFAGPREFAAFLGLTPKQNSSGGKQRLGRISKMGNRNLRKLLVVGAHAVLFHRKPHTDALRMWAKKLIEKKPFKLVAVALANKMARIAFAILRGKTTYREIPA

SEQ ID NO: 168707 - protein, 475 aa, unidentified
MIATTRRRSAASSPAFDHLGKPHGILSPRVRAVGPEHFGIVAVDCAKASSKWMLTDFYGKILIAPTVLDHRRDAFDHALAQISQVTASHQIKDHVVVLEQTGRYHKLAQRAFTAAGHDVRVMHPMISRHFRHAAHPGEKTDDTDLEGIVQATCNGYGLVEPPWEPIYCQIQLWARYRRDLVQKSTQLRCQILEHLESCLPGYARCFDDVFKSGIALVIPGAYGTPQAILEAGLPGLVELAGRQGVRVQQSTLIRILAWAQDAPSPDREAILHQRLLGELNRDRITKEEDIQASERELVALLVQTPYVRLLALAGINVVLASELAGELGPIVHYATARVITGRAGLFPRRHQSGPVDYRRGLVCQGNRRLRQVLLLAAETLCRCNNYFQVLSQRWSSHGKDPRDVYVRVAGRLSRITFQMVAGSAAFRHPACQGPPAVLEKLMEFHDEHEINLTTTRTNLQHAAAQLPGAERARER

SEQ ID NO: 168708 - protein, 351 aa, unidentified
MVIIGVDYHPSFQQIAFVEEETGECGEQELSHSDGQAEKFYRDLKQRGICVRVGMEATGYSRWFERLLAELGFELWIGDPAEIKAKRVKKQKTDRNDARLLRRLMLENNFPQIWVPSPENRDLRQLLWHRHRLVQMRTRIMNQLQALAMNEGYRWKKKLFSEQGRGQLEKLALAPWASRRRQELLELLDRMNPTIEELTAAVEREARKRPEALRLMTHPGVGPLTALAYVLIIGTPTRFPRGKQIGTYVGMIPSEDSSAGKQRLGHISKQGSSLLRFLLVEAAQAAARINPEWRRRYIHLAMRRHKSIAKVAMGRRLAIRLYWMWRNGCEYSPSLEFGSYAGQLGTGHGAK

SEQ ID NO: 168709 - protein, 411 aa, unidentified
MKNNIKATTMQLAKNHSVKAQITGTQTKKASRESEQLSERLKYPIRDGGSRARAAKEVNCYVGIDLGDKKSNYCFLDAKGNIFAEGTLATTQAGLSELFSQIPRCRIAIEVGTHSPWVCALLKGHGHEVIVANPRKMESIHKNRRKNDKVDARTLARLVRADPELLYPIQHRGDQARQDLVLLRAREGLVAARTKLINCVRGQVKSVGGRWPSCSAESFHYTVAEKLPDSVSEALLPLVLQIGEMSKRIRAFDAEVIRISRQKYPETECLQQVRGVGPITSLTYILTLEKPERFTKSRDVGSYLGLVPRQDESGAISKQLRITKTGDKMLRQLLVSSGQYILGPFGEDCDLQRFGLKLAERGGKNAKKRAVVAVARKLAVLLHRLWLTGEKYEPLHNVHVHEKTLGIAANG

SEQ ID NO: 168710 - protein, 443 aa, unidentified
MKQKQQSHLRGQRGQAFADRIRGIRPEQIVCVSIDISKDFHVALLHNGLGEIIAPSFEVNIFRTGFEQLCQTIDTAVIRTEAQVVLIGMEPTGHYYENLARHFQAGGRNVTMINSYAVKENRRQQMMAREKNDEIDAASIGDLLRRGEGTPYRPLTGVYLQLQQLDRARLGEVKIQTMYKNRIIGHLDRIWPGLVLTKEAANTRYKPLFAADFWECQRWQQLVRVCPDPREIAAMSPHEMRTAFHEHGFFMGPVWSQRFIDYAQRSLWADPEVVASRRLLLTSDLGALDGVSTRIACFNAQIYPLLAQTPYQFLTHVKGLSPTVVASFAAAVGDPDNYKNGRQVFRRSGLVSGQNDSGARQRQGEGSAITKAGDVYLRRALNNMFGGLILHQPILSAYYHRLKQTKKSGVARVATLRRINGIVWATVRDQRTDTLILKKEYSM

SEQ ID NO: 168711 - protein, 347 aa, unidentified
MDHIIIGVDTHKSNHIAVAINAQGARLGVVTIPTNRQGYRDLEIWAAKFGRIKAFGIEGTGSYGAALSRDLLVKGHTVLDVMRPNRQLRYLHGKSDSLDAESAARSVLNGQASALAKTQTGSSEMIRHIKIVRDSAVKARSQAMITLKTMIINAPAELRDTLDQIKGPISLIRHIAALRPGDIASPTASAKWAMRALARRWLALHEEIQAHEVELERMAREKAPELMKSHGISTQTVAEMLILVGDNPERIKSEAALAKLCGVCPIPASSGKTNRMRLNRGGNRQANAALYRVAIVRMRDDEKTKTYVTRRTAEGKTRREIVRCLKRYIVREIHRHLCVPPTAASST

SEQ ID NO: 168712 - protein, 335 aa, unidentified
MKNILETLGIDLSKSTLDAYLHLSGLHKQFENNKQGFQAMLTWARKAAKVKNSELLICFEHTGIYGMELAAFLEKKNIFYCMVPALEIKKSMGMVRGKNDRVDAKRIAEYAHMRRDTIKETRLPSAIIRKMKKLIGLRSKMVRQRAGYMASLGELKRIYKRSDHKHLFALQESLIKELTKSIDVVEAELNALVKSDEEVYKTCRLLMSIKGIGPIVAYNLIVVTQCFRAFENSRQLACYCGLAPFTYQSGTSLKSKAKVSNYADKGLKALLTTAANSAVGCDAELRAYTERRLKQNKSKMSTLNIIRNKLLHRAFAVVKRGTPYVETYRHQVANC

SEQ ID NO: 168713 - protein, 312 aa, unidentified
MMASQDVFVGIDVSKDRLDVHMRPLGVGFAVGNEAAGYGALIARLRPLRVKRIVLEATGGYERALWLALSEAGLVAAVVNPRQVREFARAAGRLAKTDRLDAAVIAHFAETFVPRIGKPDAVADRLGEHVLYRRSLQDELVALEHQRRRLETPALRERADRRHAGLRAEVKEIEREMRAIVDSDPAKKALFACLTALKGVGLVLACTLIANMRELGSLSRHQAAALIGVAPLNHDSGTRRGYRAIAGGRRRVRNVLYVATLSAVRSNPAIKAFYRRLAAGGKPPKVALVACMRKMLVMLNGRVRDELAAAVP

SEQ ID NO: 168714 - protein, 414 aa, unidentified
MDVIVERCAGLDVHRDSVVATVRVPGKGKSRRRRAQETRTFATTIAQLEQLGDWLGGFGVTLVGMEATGCYWKSVFYVLERRFECWLINAQHLQNVPGRKSDVIDSRWCCELVELGLVRPSFVPPPEIRRLRDLTRLRTTQVQERSRAIQRLEKVLQDAGIKLTSVASAVYSVSARAMLEALLGGVSDPVVLAELAKGRLRKKIPQLQEALASRFDVAHHGVLVAGLLAHIDALDQAVATLDARVETITQPYADLIELLDTIPGVGVHIAQVLIAECGVDMSVFPTPGHFVSWAAICPGTNQSGRRRRSGKTRHGNAWLRSALTESAHAAVRTKNTYLASHYWQLRGRRGNAKAVGATRHDILIAYYHITRDRVPYRELGPDWLARRHSPAHRTRRLVKQLEALGHKVTLEAAA

SEQ ID NO: 168715 - protein, 389 aa, unidentified
MYSYFVGIDIAKNTHWAYCISSDNEIIFEPFSFSNDATGFQKLVSKFNSLDKEKILIGLESTAHYGENIISYLFNLNFKIGLINPIQTANLRRSNIRKTKNDKVDTKIIIKALTLGNYSLITSRDINNLKLKGLCRSRRNLVTMRSKAKIQLVSYMDQLFPELSEFFKGNLHLNVSYQLLKEYSSPNEIKNIHLTKLANILHDNSQGHYNKDDAIQLRNLAKSSVGIDNPSLSLQVKHAILQIELYDEQIKEVESLYKQILDDMNSPILTIPGMSYNQAAVILGCIGDIQRFKHPCQLLAFAGLDPSVIQSGNFQARSTRMSKRGSGMLRYSLVYSAHNVVKNNQTFKEYYDLKRSQGKSHYCALGHVAHKLVRIIFKILKDNVEFNLD

SEQ ID NO: 168716 - protein, 412 aa, unidentified
MTAKDQFAAHVGLDWADKKHDVCVQFKNGDRIFHVIEHTPEALDIWLNELHQRVKGRIAIAVELKKGPVVYALQKYPFVTVFPIHALSLARYRQAFWPSGAKDDPQDAKLALDLMLRYPHKIKAIEADNPDIRLLQQLVEQRRLLVEDKRRFVNRLINTLKQYYPQPLEWFSHRDSSLFCELIIRWPSLQQLKRARSDTVRHFMNAKGGPAVAYTEQRVASIASAIPLTTDKTVIEANALMATALASQIKLAGDLIRTYDERIESLFDTLPDAELFKSLPGMGPCMGPRMLAALGDNRDRFNSAEEIQNYAGIAPVTERSGQKSWVHWRWKCAKFVRQTFVEWTAKTVNSSYWARLYYQGQREKGKSHQSAIRALAFKWIRIIYRCWKTKTRYDEAKYLLALEARKSPLLKP

SEQ ID NO: 168717 - protein, 338 aa, unidentified
MKVHILGIDLAKNVFQLHGVDRKGRSALVRRVRREQLLKVLGELEPCLIGIEASTGAFYWQRQFEKLGHAVKIMAPQYVKPFVRRQKNDSNDAEAICTAVQQRNMRFVPKKTLEQQDIQALHRARQRLVNHRTALISQMRGLLLDRGIAIAVSATRARRLIPKILSESNDELTEMMREIVSSLYAFMLQIDERIKAFDRKITAIFKASDVCQRIAKIRGIGPKTATAMIAAIGDGCDFKNGRHLAAWLGLVPRQHSSGDRKVMMGITKRGSQHLRTLLVHGARAVVRTAVRKTDSRSIWVNELRQRRGYNRATVAVANKNARVIWAVLTSGEPYRAAA

SEQ ID NO: 168718 - protein, 412 aa, unidentified
MDVTVERCAGLDVHKATITACIRYPGQDRTRVQVTQTFGTTTPALLALRDWLTAHAVTAVAMESTGVYWKPVYYLLEDAFRVLLVNAAHMANVPGRKTDVADCAWIAQLLECGLLRGSFVPPPAIRELRDLTRYRKALIQDRTREANRLHKLLEDAGLKLATVATDVLGVSGRAMLTALVAGTTDPTVLADLARGRLRAKLPALRQALTGRFRPHHAFLLTQLLAHLDYLEETIGVLSTEVEAHLAPFGEAAARLLTIPGVKQRTVENLLAEVGVVMTPFPTAGHLASWAGLCPGNNATAGKRRRGRARKGDRWLKATLVEASLAAIREKGSRFGALYRRICRRAGHNVAIVAVAHAILEIAWHLLTKGTTYQELGADYLDRRDKQRTTTHYVRLLEKLGHRVTLEPATIAA

SEQ ID NO: 168719 - protein, 317 aa, unidentified
MSHITTLTAGIDTAKDKLDVAVHTTPFRLVVDNRRSGWRRLATALTRVGVSRVGIEATGGYERGIVAYLRASGFEVVVLQPLQVKAFARLHLRRAKNDALDAALIAACAAAVMPHDTEHDPRILPLADELTFVEQIEEDITRAKTRLEHIAEPRIQRLVRADIQRLEKRREAELRRIVQALQAHDDLARRLQLVLSVPGIGERTALAIVLRMPEIGQISREQAAALAGLAPFDDDSGTRKGERHIAGGRGRLRRSLYLAALPAAFRWNQALVSLYKRLIARGKPHRIALVACARKLIVYANAVVQRGQPWETKHPGS

SEQ ID NO: 168720 - protein, 418 aa, unidentified
MMTSPLFVGIDVSSKHNVVCCLTRDEAKRPVTRFTITNNRPGIKELQDRILKLVKKHGYEQILFGLEHTGNFSTHVAMYLHRHLDFGVPDKNVYAFNPSLIKQFKKSNYLDAPKNDRADAWFIAAKLRAGNLPHPFTWSEPQMALQRLTRTRYHLMQDLTRESNFLMTNLYLKFSDYSITGPFKSNKLGATSLAVMEEFESVEDLTGMSLDKLIEFLVQHGKNRFDDPEAVARSLKKAARSSYRLPDSMADSVNLAMASSIRVIRTVQEQLKVLKKAIIDHLETIPQTLDTVPGIGPIFASGILAEVNIPDFKTQQQLAKFGGLAWNQDQSGDFTAKRTRLIQSGNRYLKYYLVEAANSVRMHDPVFAQYYAKKLAEPKEFADKRALALTARKLVRLIFYLLKTNQIYHPEGGVRQKN

SEQ ID NO: 168721 - protein, 392 aa, unidentified
MIYAGVDIAKVDHVVGAIDETGDEVAKPMPFKNSKEGFERCAAWLEGVAESPNDVVIGMEATGHYWQACFSYLTSCGYRVAVINPMQVKAVRKLKSLSKVKNDRIDSVVIAETLRIGDFDQTALATDELQSLKTLTRYQQSLKEQVAAVKTHVVCLMDTYFPEYGGIFSNMFGKASLAVLAKCPLPDEIAHVRESTLEKIITEASHGRSGARQAAKVKARAKESIGFTLGSAAASFEVKSYVAQIEFLLARVAEAEARIAALLESIEPLILTVPGISTTTGAQIVAEIGDVSRFRNAAAIVSYAGINSSVNQSGKFELEGGSITKSGSPYLRRALYLAAQGAYRNDPGLRAFYDKKRSEGKCHRVAVMAVARKLCHIIYAILRDRVPFESRG

SEQ ID NO: 168722 - protein, 425 aa, unidentified
MNYKQNEKINQVKESTLVVGIDIGSTTQYARAFDWRGIELGKVFTFSNSREGFESFKAWMQHLQDKYKKLDAIVGIEPTGHYWFDLGAYLEDEGILLVMVNPYAVKQTKELDDNSQSKNDRKDPKVIAKLVTEGRYSAPYTPDGVYADLRIMVANRKRLIREMTQIKNRFARWFAIYFPEYTDVFGDYEAQSSMLLLKKVCTPEAIVELGAEKINQIWRDAKLRAVGMKRATTLCETAKRSIGLKKGSSAARYEMKLLLEDYEYKKAQLDAVMEEIEKLCRKIPESEQMLAIKGIGVITVAGFLAEVGDVRRFESPRQIQKLAGLSLRENSSGKHKGQTTISKRGRSKLRAVLFNAAIPLIAKNPEFKSLHEYYTTRANNPLKKKQSVIAISCKLIRVFYAILAKGVTYDAQKLISDIHRQPQVA

SEQ ID NO: 168723 - protein, 344 aa, unidentified
MKYFTGIDVSLRSVSICVVDEAGAVRYETKVAADVDLIVECLRRCSPAIKQVGFEAGTLTQYLTYGLQAAGFEVICLEARQVAATLAAMRNKTDRNDARGLAQILRSGWYRRVHVKSIESHQVRALLSSRKTILTKCVDLENELRGLLKIFGVRLAPRVGHGSFDQAVRTTVTADPLLARALVPLLDARTVLYKTYLKLDNAVKAIVRSDPICQRLMSVPGVGPVTSLTFKVGVDDPGRFRSSRTVAAHFGLTPRRYQSGETDNPGRISKAGDADVRRALYTAAHALMTRSDAWSTLKAWGLRLAKIRGHRRAVVAVARKLAVILHRMWLDSTRFRASRIEVAV

SEQ ID NO: 168724 - protein, 345 aa, unidentified
MKHFVGLDVSLKEVAICVVDENGVIMREGSVVSEPDEIAGWIGALDVEVTRIGLEIGGLSRWLYGELRGMGLPVTCIDPRHLRGLTKTMPVKTDRNDARSIAQVMRVGWYRVVHIKSEPSQELRMLLTKRRTLLIKQIDVENEIRGTLRAFGLKLSGRITQATFEQRALDLVEDRPRLAAMLRPMLIARTALRQQCAALHKMLLEAVRASETCRRLMTVPGVGALTAVTYVTTIDDPDRFHRSRDLGAHLGLTPRKYASGEVDRNGAISKCGDVMLRSTLYQASLALLTRCQRWSTLRAWGMAVAKRRGMRRAVVAVSRKLAVLMHSIWADGTEFRWTKEEAAMA

SEQ ID NO: 168725 - protein, 327 aa, unidentified
MVMEAKKLCCGIDISHTKLDVCYQNNLGEFFHLQVGNNITGFKTILEHTGTGYHFVMEATGVYYIRLAFYLHEQGCKLSVVNALSIKRYIQMHLERNKSDKKDAAWICRYAIEQCPVYWEMPDSAYFESKQLYNTIREYTEQIKRFNNQLHSLKLLPVPSKDTIKSLEKIKKQLAKEIEVLEVKLETMLEQWQPAQLKSIGSIKGIGKRATAMLIVFTQGFKNTHNHRQLISFAGLSPTEYSSGSSIHGKPRIYKRGGKNLRDVLYMCSMNAIKTNTACKTLYERLRANGKTGKQALIAVCNKLLKQVFAVVKNNSLYQPNYCSARP

SEQ ID NO: 168726 - protein, 397 aa, unidentified
MIAVGIDVSKSKSTVAVIDSNGVVLASPYTIAHTQPELHALAKYLKELKEPVTILMEYTGHYHYPVLKQLQSEGFPVCLINPYQMKKYGDTEIHKAKTDKKDALRIATYALEKSYKLIPYSSMEQKYEDLKFLSRQYEQRISFVAKLKVQLLDLLDQTMPGITKQLSLTSRNPEKCALLLFIKRFKSFDEIQRMGKTRFLSSYETMTKKTSDRYAAQKGLAIYELAKDSITTRGDAPYIWLSQAQCVDLLSAAQNAADEIILKMQNIAQTIPEYAVLRAMHGVGDRLGPIILAEIGDIRRFHSGKALNSYAGNDAPPYQSGQFESRNRHISKRGSSALRKACYEVMQALKLTKPQDDPVYLFMLKKEQEGKPYNVAKMAGVNKFLRIYYAKAMELYR

SEQ ID NO: 168727 - protein, 386 aa, unidentified
MMVIGVDPHKSTHTATAVDPSTNRSVASIRIEASLADYARMLRWARQFEQRRWAVENAEGLGRHLSSWLLARGEQVVDVPSTATARVRQLSRGGGRKNDQIDAAAAACVAALQGDGRPLAAEGITDALALLDESRMNLAQCRVRLVNQLHALLRELLAGGAPKDLSATAAAELLRRVRPAGDVERVRKQIAAGLVTQIRSVDALLKSNAKQISELVAASGSTLTDTVGVGAITAGRLIGRTGRADRFPSSASFANYAGAAPIEVASAERARHRLSRSGDRQLNAALHTVAITQIRTPGSRGHAYYNAKIAQGKTAREARRCLKRRLADHIWRTMITDKRRVAANPGGHPGATLQSSAAGSTPTASSSDRSLPGPARHDSTTPCPAA

SEQ ID NO: 168728 - protein, 400 aa, unidentified
MLSIGIDVSKGKSTVCGMKPGGEIVYTPFEVQHTREGMSELVSLLRSSGEEVRAVLESTGSYHCPVVAALLENGIFVSVVNSLRMKRFCSQSIRKVKTDRIDAMQIALYGLAYWQELQPARLPEDTYRELQLLARQYYQMTSMLIKAKVDLNAICDQVLPGMQELMNDHAGRHKLSDFVLRYRHTTHILEMGETRFRKDYCKWAEKKGYRNCERMAALIFATAQNGIPVLPNAPSTQIVITEAIRVLHTVEASRDAILTQMQALAKTLPEYSLVREMPCIGDTLAPRLIAEIGDVRRFHSKRALIAYAGIDAPPYQSGKFCANNRHISKRGNRYLRKTGYEVMQSYVMHKPANDPIFTFIEKKRGEGKSGKLAMVAGLNKFLRVYYGKVTELYRSLPAIE

SEQ ID NO: 168729 - protein, 345 aa, unidentified
MQYDAGIDVSLEQSSVCVVDAAGKIVKEAKVATDPHVLVTFFKGLGFPVTRIGLEAGPLSQWLYAGLIQAGFDVVLLETRHVKAALSAMVVKTDRKDARGIAQLIRMGWFRAVHAKSASSQEIRALLTARRLLLDKLRDVELSLRGVLRGFGLKLGKVTQRAFETRVRELVANHPMLQQITRSMLLARATLQREHNTLHKALLKIVRRDKVCQQFMTVPSVGPIVAITYKTAVDDPHRIKKSKGAGPLFGLTPTRYQSGETDVIGGISRIGDAMVRAMLYEAANVLLSRTMRFSALKRWGLAVAKRRGMKRAKVAVARKIAVILHRMWIDGTSFRWSNQKAAAYA

SEQ ID NO: 168730 - protein, 369 aa, unidentified
MKKDSTFVAIDDSKRTLMLGILRPGADEPETRSIPNESRHVRRMFARLKREGPVMVCYEAGPSGYDLYRQLTALDVPCQVMAPALTPRKPGDRIKTDRRDAVKLVRLFRAGELTPITVPDEAGEAARDLLRCREDVQEDLLRWRHRLGKFLARHGRVYREGRNWTQRHWTWLRSQQFTLPTLQRTLVEYRCAVEQLLARVADLNREIAALAETAPYREQVGWLRCFRGIDTLAAMTLLAELGDVQRFPHPRELMAYLGLVPSENSSGDRTQRGSITKAGNTHVRRILVEACWHARHPPRLGAALTRRSQGQPPRILAHAWKAQLRLHRRYRHLVGHGKRPPVAVVACARELVGFLWAALTHPDPVALAA

SEQ ID NO: 168731 - protein, 349 aa, unidentified
MEQNEVILGVDTHLDTHVGAVINDIGRLLGTRSVSTDMAGYLDLLTWANSFGPLRRAGVEGTGTYGAGLARMLHDHEIEVLEVNRPDRAMRRSKGKSDPTDAENAARAVLSGRATAVPKEQSGAAEAMRAVSVARRSAVKAKTQAINQLRALLVSAPQEIRDRLLKVKTAECIKGCIRLRSLGKTPMLQTLTTTLRLLAKRWLTLAEELKSLDTMLDDLTSQHAKRLRERFGVGPQTAAVLVAVAGDNPERLKSEAALAALCGTSPLQASSGKTVRHRLNRGGDRSANNALWTIAMVRMRSDPRTRAYVDRRTKEGMSNKEIHRCLKRYIVRELYPLILADLADSTRAV

SEQ ID NO: 168732 - protein, 361 aa, unidentified
MSEVKIKKYTYFIGVDVSANELDYAVMKGSKFLFHKERKNEMVDIVDFIKELKLLPGFMVSRAVFCMEENGIYNLHLLAALKKIKANIVNENALQIKRSIGIARGKDDKIDAKRIANYAYMNREILNIYNPKRPPLQQIADLFSLRNRLLGVQLALQTPLTSQATFIKKGTHEQTVKSCSKSINSIKEDIANIDTAIDQLIAVDDNLSRLNKIIMSVPSIGRVTAIQIIISTNEFKNISNPKKFACYAGVAPFKKESGGVKAKARVSPIANRKVKALLHLCAMSSVRNEKELKMYYERKVAEGKSKMAVINAVRNKLILRVFACVNQNRLYKKDHVRDTAGNESIVDQVKDQEDVLNPAVN

SEQ ID NO: 168733 - protein, 323 aa, unidentified
MHGRNAAGEVVLRRSLKRSQVEKFFAKLAPAVIGLEACGSAHYWARVLGKLGHEVRLMPPAYVKPFVKRNKSDTIDAAACCTAMRQPDMRFVPVKTVEQQAALSLHRSRDLLVSQRTQLGNALRALLSEFGIVAGKGKAGLARLMDELRAGTLDLPVDAVAAAMALAGQRAALDAAADALERRITAQAKADEKACMLKTAPGVGPLSAHATLATMPDPSLFKSGRDFAAWLGLAPRLHGTGGKTRTGRITKQGNQPLRRLLVLGATAWLRQVRARPEKASPWLRGMLARRPAKVVAVAQAARTARILWAMLSHNQPYRAPAIG

SEQ ID NO: 168734 - protein, 341 aa, unidentified
MEPTVVGVDIAKRVFQLHWIAADTGEVFDRQLHRSDFLEHFANREPCLIGMEACGGSQHWARRLTELGHQVKLMPGKLVKAFVTGNKNDVADARAIWAAARHPGVKAVPVKTEAQQAVLALHRIRQQLVIFRRSQSNCLRGLLGEYGEVMGVGRAAMNRAMPDLLLRLELRLPQVLIDSLREQWQRLVDIDKQITLIEQRLRAWLHENPACRTIAEIPGVGFLTATAAVAAMGDPKAFRSGREFAAWLGLVPAQFGTGGKVRLLGISKRGDRYLRTLMIHGARSVMKHAKDPGSWAVQLSMRRPLNVVVVALANKIARTIWALLAHGRSYCESYPPPVNAA

SEQ ID NO: 168735 - protein, 487 aa, unidentified
MAKRNRSTFERLQRGEKLSRHERKQIERQLQAEQPAWEIVHRNVAGIDVGNESHFVAVDTRQADPPVREFGSWTAGLHQMVEWLKTCQVQRVVLQTTGVYWIPVQDVLEKAGFEVAVVDARGTKNLPGRKSDVQECQWIRKLDIYGLLRGCFQLPDSVRSVRTIWRLRQRWVEEAGRSIQQLQKALTLMNIQLANAITDLSGQTGMAILRAIVGGERNPWTLAKLRDRRTQASEEEIAHSLQGNWREDVLFELEQVLAAYDFQIQQIEKCEQQLEKYMKAQPTRPAVGPVRAQAAPEVEEARKKTKKKARGGKGPRKNRVGFDLETELARVMGGDLTVIDGIKLMTVQTIYSELGPDLSAFPSENHFASWLMLAPKRDISGGKVIRHVWVKGRNRVANALRIAAESLNASQSYLGARYRSLRGRLGAPKAIKAMARYLACLVYRMLMKGQDWVDRGAAYYEQRRQQRELLHLQRKAIALGLKLVPAK

SEQ ID NO: 168736 - protein, 343 aa, unidentified
MQIHSVGIDLGKTTFHLVALGAGGKVLVRKKFTQKQLLAFTANMQTSLIGLEACAGAHFLGRALRKQGHDVRLIPAQFVKPFVKSNKNDFVDAEAIAEAVERKNMRFVPIKTDDQLDLQAIHRVRDRLVSRRTAVINQIRAFLLERGMVFAQKPAKLKAAMAEVLENAEADLTPMMRNLIDMLWGEWKTVEQQIEELTDKLEQISANDAGCCRIRKIPGIGPIVATAIVAAIGNGAAFRKGRDFAAWLGLVPRQHSTGGKAKLLGISKRGNVYLRKILIHGARAAVLRIKRDRELIGAWLDALDARAPKNVVVVAMANKLARVAWAVLSSGQDYRPTANAIPV

SEQ ID NO: 168737 - protein, 403 aa, unidentified
MVFVGIDWAEAHHDICVVNEEGQVLAKRRVPEGLDGVGKLHALIAEHAEDPSRVVVGIEIDRGLLVGSLVAAGYQIYAINPLASSRYRDRHATSGAKSDPGDARVLADLVRTDRHKYRPLAGDSNLAEAVQILARAHQGLVWTRQRQVNQLRNALREFYPGALSAFDDLDAADAVAILEQAPTPIRGRALSKARIISALRHGGRERNLEAKAAQIQAQLRLPQLEAPALLVEAYGHSVAATVAVIKQLNLQIAALEQELAASFEKHPDAEIYLSLPGLGVVLGARAMAEFGDDRTRFLHPKARKSYAGTAPITKASGTRKVVLARVARNRRLADACYQWAFSALTRSEGARHRYDVLRARGQTHHQALRALANRLVGVLHGCLVNRQAYSERIAWSALIEAAA

SEQ ID NO: 168738 - protein, 349 aa, unidentified
MVTDEVDYVVGVDTHRDEHVLAIVAVPVGAVVAQRAVAANGRGYVQALRFARRHAPGARLWAVEGAGHYGAGLARYLSEQAETVLEGARVPRQERRSRGKDDQLDAARAARAALAGEPLPLPRSGQRREALRLLLVARRSAVDVRREALVQLRSVIVTAPDQLREELRGLPVQRLLDRCSRLRRSTTAKPDELATRLVLRTLARRIEAVTVEASELECEILAHVRMLAPQLLEEPGVGPIVAAQLLVAWSHRGRVRSEAAFARLAGVAPVPVSSGQTKRQRLSRGGDRQLNRALHTVVLHRRQHDPATKDYIARRIGEGKSRREATRLLKRYLARHLYRVLDNQEPLMT

SEQ ID NO: 168739 - protein, 412 aa, unidentified
MEVLHPRCAGLDVHKETVVACVRIVSGGEVSRAIRTFETTTARLIELAEWLEASGCTQAAMEATGVYWKPVWQVLAGSGFELVLANASHVKNVPGRKTDVNDATWLAELLAHGLIRASFVPGPEIQELRGLLRTRKQLVREKASHVQRLQKTLEEANIKLESVLSDVMGCSGRAMIQALIAGETDPAKLAALAHPKVRAPQARLREALRGRVKRHHRFLLDLHLQQIEALDAGIAAIDREVDAGLASFRDAVKQLSTIPGVSELSAQVILSEIGTDMSRFATAAHLRSWAGLCPRNDESAGKRRSTRLRTGAPWLKAMLVQCAWAAARTKATYLNAQFVRLRTRRGPKKAVCAVAASILTAAYHMLKDGTFYQDLGATHFDRRRPEAHARRLVKHLADLGFSVQLKPVTAVS

SEQ ID NO: 168740 - protein, 329 aa, unidentified
MVVRTVFASERKYTMNRIAKINVGVDVSKDSLDVCFHPIGKIFKVENTLDGLDCLIQELNQFSINKVVFEASGGYEELLFDTLEGVGYKCWKVRPDRIKGFIMGEGVSVKTDKSDAKMIALFSAKTEQSYESIKLTQEEKLLRTFFRRKQELKEYLATEKTRLKNPTQKSFEKEICSLIKFLEKQLNFLDKKILRIISKNKKMQRKCEIIESVPGFSKESSQALISEVPELGLVDNKKAAAILGTAPYTNESGKYKGKSKTAIGKKIPKKVLYMAAVVASRHNPDLKLFYERLVKSGRPKKVALVAVMRKLICLVNTLLAEDRLWVKNI

SEQ ID NO: 168741 - protein, 364 aa, unidentified
MKKISIVRTSGNKIFKPQLTIGLDLGDRSSSYCVLNEAGEMLLERKLPTTPEGMKETFAAISRSRIAMETGTHSPWVSRLLTALGHEVIVAHARNVRLITQSRRKDDRFDARTLARLARIDPQLLSPVQHRSAQAQLHLTEIRVRAVLVSSRTALVNAARGLVKSYGERLRKCDTRQVRREASGLSAGLREALEPLLQEIDSLNEGIQEYDRRIAKMAKATYPEVELLKQVKGVGDLIAMTYVLTIEDPRRFRKSRDAGCFVGLQPGRRNSGESEPQLHISKEGDEYLRTLLVQGAHYILGPFGEDSDLRRWGQKLAERGGKNGKKRAVVAVARKLAVLLHRLWVSGEVYEPLRNSQKTMPAVA

SEQ ID NO: 168742 - protein, 429 aa, unidentified
MNSTQNKKLEQVKSTTMVIGIDIGSETHYARAFDWRGYEFSKKAFRFNNTEHGFAGLLKWMRNIKEEQGSEDILAGMEPTGHYWFCLGVFLKENGIKPVLVNPHHVKKSKELDDNSQSKNDRKDPKVIAGLVKDGRFTEPYMPEGVYAELRTASNMRFRIESELTSVKNRLARWFSMYFPEYSEVYGKADAISGLMVLKVAPLPEDIIELGIDGINQIWRKAKLRAVGIKKATSLVEAAKRSIGLRSGGEAARLEFSILLEDYDSKLRRQDEIMSLIEKLMDEIPEAKKLLEIKGIGMKTVSGFLAEVGDVRRFKDPKQLQKYAGLAIVDNSSGKHKGKTTISRRGRKRLRYLLFEAAMSLAATNAEFRQIHRYYTTRENNPLKKMQSLIAIGCKLIRVFYVLLTKDVRYDAEKFLGDIRRESANMLAA

SEQ ID NO: 168743 - protein, 426 aa, unidentified
MRVMYERVAGIDVHKDMIKVGVRTPGHRAWTRNSEVLEYRTFYGVLLTMAADLRQRGVTHVVMEASGVYTEPVYYALVDQGFEQVAVINPAHAKALKGHKTDAKDCLRLAELFECGLLRGSYIPPRELKDLRDLTRYRAKTVQARTSEIQRLAKALESAGIKLDSVVSDLTGKSATLMIEALIDGERRGQVLADLAIGRMRTAPKLTDLSQALTGRFTEHHAALCRLHRDRITLFNAAVEDLERRIAVRAAPYQRELELLKSVDGFGDAVAQAWLAEIGPAPHEYFASHEKLASWVTLCPGNYISAGKRAHGRTGTAGAYIKPMLVQAAWAAVKTEGRLQARYHKLVRRFGGPKNRGAVKKAILAIAHTLLKIAYQVLKSGQPYQDLGADFYTRRESPEQRRAYLLRQLEKLSPGCTITITPAEAA

SEQ ID NO: 168744 - protein, 351 aa, unidentified
MNYIGVDCHISSLDFAVVNERGTTTKKAKVNTGVKEFIGFVKRVPKPRKIYIEEGELAGWMLETSLKFGEQLIITDPKINKWIGKAGQKDDAIDAEKLAQLARGKYIKAVYHPVNKRRRFKELVFAYHDTVKSQARIKNKLKANFRRNGVRCSGATVYSDKHRDKWRGTLSKNKIPHLIVEELWAQLDQLRTSKERLKRNIRVQSKQYPEIKRFMKIPGIGLIHAATISAIIETPHRFANKKKVWMYAGVGLMERSSGEKVYSRKLTREYNRPLKNAIKQAVESALFASDNQFRRQYLRLTMEKGIASHKAKLTVARSLLAALYGMWKKGEEYDPDIDTKRRNGDIKQVRA

SEQ ID NO: 168745 - protein, 342 aa, unidentified
MNSTKTVVGVDTAKQVFQLHWVDAETGEMFGKQIKRAKFLEHFANSAPCLIGMEACGGSQHWARRLQEMGHEVKLMPGKAVKAFVSGNKNDVADARAIWLAVQQPGVRAVAVKTEAQQAVLALHRMRQQLVKFRTMQSNGLRGLLAEYGEAMAVGRAGLNRGMKDALTRLAERMPAVLIDTLREQGDMLGKLDEQIAQIEHRLLAWMKQDKASKTIAQIPGVGLLTATAAVATMGDAKAFKSGREFAAWLGLVPAQTGTGGRIRLLGISKRGDTYLRTLLIHGARSVLTHTKEPGQWLQEIGKRRPPNVVTVALANKIARTIWALLAHDRSFDKGYVSVRPT

SEQ ID NO: 168746 - protein, 346 aa, unidentified
MQTTSQLYIGIDVHKKSWSVNLRTDLFDHKTFSMNPDAGELVRYVDQHFSGYQVKCCYEASCCGYTASRKLSEAGWEVLVVNPPDVPVINKQQQHKSDKVDCRHLCKQLQSGQLRGIYVPDERQEQLRSLFRQRNNLTKALRRIKCHIKGELLYYGIELPKQYDNNNWSKEMLGWLQNQEWKYETGRSSLQSKLRHLNFVYNEWLSVSKELRGYARKEYKKDYYLLRTVPGIGPLTAVGILAELGDIRRFKKFDQLCSYVGLIPSVYSSAEKFQTRGMTPRSKHLLRSYLIEAAWTAVRRDMVLQEYYRRHAGKPSNKIIVKVARKLLSRVWHVIKNEVSYQCEVK

SEQ ID NO: 168747 - protein, 411 aa, unidentified
MDAIYQCVAGLDVHQKIIVACRRRLIGEGQAESEVEKFGTSTRELKRLGGWLRECGVKQVAMESTGVLWQPVWNVLCDEFELMLINAQHLKKVPGRKTDVTDAEWIAQCLQCGLLRGSFVPSEQIRQWRDLTRQRTKLLDQRSSVINRIHKTLEGCNIKLSAVASDVMGVSGRAMIRAMSEGEQEAEKLADLARGRLKSKYDELVESLEGKVSEHHQWLLKHMLKQVEFLDEEIAAYNSRIEELMRPFEKALERLDTIDGVGRRTAEVMLAEMGPEMSQFPDDEAVSSWAGMCPGNNESAGKRKSGRTSKGNKWLRRALVEAAYAASRKKDSYLAAQFARLARGGKKRAAVGVGHTILVAAYHIMKEEVDYKDLGGDYFQKRNEEKTTRRLVRQLEQFGYQVELKRLKAAA

SEQ ID NO: 168748 - protein, 342 aa, unidentified
MEEVSIIGVDLAKNVFQLHGAAADGSVVFRKKLSRLQFGRFMADHPACEVAMEACPSAHHWARELTGHGHRVRLIAPHYVKPFLKRQKNDAADAEAIAEAATRPTMRFVEPKTTEQQARAVAFRAREQLVKQRTEAINALRAYLYEFGHVAPEGIGYLPRLAQVVADPGSDLPDLARDICRMAVEQVELLTARLTAITAKIAAASRAAAMPKQLQTMPGIGPIGALAIETFAPPMNQFRRGRDFAAWLGLVPRQHSSGGKQRLGKTSKMGQRDIRRLLVTGAMSVIRWALRKGTPRNPWLERLLERKPPMVAAFALANKMARGIWAMLTRGEDYRDPMPVGA

SEQ ID NO: 168749 - protein, 436 aa, unidentified
MTATNPPADPLAHLAHDDFTSFTHFGGFDWGIEHHQLCIVDKQGAVLVNLCVSNDADGWRIVQEKLKLYPHLAIAIETSSGPAVERLLDLGITLFPMQPKAAERYRDRKAPSGVKSDELDAWAFADALRTDGHGWRRLLPLDPLTAEIRILCRDEIALIEQRTALVLQLKAALHEYHPVALDAFDDWTHPATWDFVLAFPSPDDLHKAGKRKWEKFLHTHKLYRPETAAKRLELFAKALQFVNPNKAVNNAKTLLATTIARQLRALQPSLDEYRARIQRLFNDHPDHDCFGSLPGAGPKLAPRLLAEFGPDRSRFQTFQSVQCFAGTAPVTQTSGKSRHVSARWACNKILRGTVHLWADLSRASCAWAQAFYQQKKRLGKSHATALRCLGNRWLKILWTMWQNHTPYNEALHTQNQVKHGSWVIALTQPTPAAPTR

SEQ ID NO: 168750 - protein, 339 aa, unidentified
MEQITTIGLDIAKHVFQLHGIDAAGNVGLKRRLRRSEVLTFFAKLPPALVGMEACATSHYWARELTALGHSVKLMPPHYVKPYVKRQKNDMADAAAICEAVTRPSMRFVPMKSEEQQAVLMLHRSRELLVRQHTMLVNALRAHLAEFGIVMKQGKAGAAAVASFIEDGEASCLSSAVREALLPLVEQLRQIAARIARLEGSIVAWHRRNPTSLRLASVPGIGPITASAIVATITDARLFSSGRHLAAWLGLVPRQNSSGGKERLGGITKKGDGYIRKLLVIGANAVLRFARKGSPNSTRWASSLLMRKPHKVAAVALANKMARISWALLARNEAFRPTA

SEQ ID NO: 168751 - protein, 386 aa, unidentified
MIYVGVDIAKHTQYACVADERQKIITAPFSFSNDEAGYAKFRKAFRKYPKDNVIVGLEATSVYGENLIAFLADLGYKIALINPIETAVERKKKIRNAKTDKIDTKIICKYLAPEEYRLLQPKELETLRLRGLCRFRQTLKKSNCRLKTQLVSYLDVSFPEFAGAFSTVHGKGAYAVLSEFPSAQAVAKANVSKLAQLLSDASRGKLSRARAEKLKALAKHSIAAKDCDMGFQVKNTIGQIRLIASQLQDVETHIGKIFDELDSVIRTVPGIGAINGSMILSEIGDVKRFSNPGQLIAFAGLDPIVRSSGQFRARTTRMSKRGSSVLRYALINAAWNVSLNNATFKAFYDEKMAQKGRHYATLGHVAGKLTRVIFKMLKDNVTFDLP

SEQ ID NO: 168752 - protein, 411 aa, unidentified
MIYCGIDWAERTHDVALVDDSGQLLAKRRITDDATGYQLLLDLLAEHGDTAEDPIPVAIETGRGLLVAILRAGGRKVFAINPMAAARYRDRHGVSRKKSDPGDALVLANILRTDMPMHRPMPADTDLARAIAVLARAQQDATWNRQVISNQLRSLLREYYPAALDAFAPWQNGLCRPEARELLRLAPTPARAARLTRAQIAAALKRAGRSRKLDTETDRLREVFRGQYAHQPQLVEDALGRQMLALLHQLDATCQAADELAQAVEELFPQHPDAEILLSFPGLGTQLAARVLAEVGDDHTRFADARGLKAYAGAAPITRASGKKSHIGRRMVKNDRLNHVGYLWAFSALTASPGAGAHYRARREHGDWHAAAQRHLFNRLLGQLHHCLQHHERFDEGTAFPTAAPAAAAAA

SEQ ID NO: 168753 - protein, 316 aa, unidentified
MAKHHATQVNVGIDVGKAQLDVHIYERDIAFSVPNDPPGIRKLLARLGRYRLERIVVEATGRMEHAVAGALMDKQMPVHVANPILVRRYAGAIGQVAKTDAIDARVIAEYAAIVQPTVRRPISKSVRKIKDMMARRRQLLEMIVMEKNRLQIMPKPLKADIKRHIQHLQRQVDKLDGLLDTAIEKEADWQARRTIVLSAPGVGPVVANTLLADLPELGQLTSKQVAALTGVAPYNRDSGSMRGRRRIKGGRASVRTALYLSVLSAIQHNPLLRAFYQHLVAAGKHKKVALTACIRKLVTILNAMVRDGTLWEEKYA

SEQ ID NO: 168754 - protein, 394 aa, unidentified
MIYVGIDVAKDKHDCFIVNSEGEVLYDVFTIQNNITGFEDLLFKIKTAEQNPDKVRVGLEATGHYSCNILGFLKNVGMQTIVINPLYTSLSRKSMTLRKTKTDKVDARTIANMIMSDVSLKPYTDKLYHNEDLKSLTRYRFDKVSQRAKLKQSISRLVNILFPELEKLVSTLHGKAVYALLSEFPSAQHIASANLKHLTHLLDKASKGRFKRASADKIRETARHSIGSYLPAKSLELKHTIKLIHELDDEIAEIEVEIKKIMDAIDSPILSIPGIGLNLGAIIIAEIGDFSRFDSPDKILAFAGCSPSTYQSGQIYSSHAKMEKRGSRYLRWALLNAAAYVCNWEPTFRAYLSKKRAEGKHYYVALSHAAKKLVRLLYHLETTGETYQAEKLSS

SEQ ID NO: 168755 - protein, 345 aa, unidentified
METMYYIGLDVHKKTIDYCVKDGSGRIYAAGSIRAARLELDMWMKTLPRPWTAAMEATIFTAWIYDHLQPHAAAVKVAHPLMLRAIAVAKKKNDRIDAKKIADCLRCDFLPECYMASTEIHERRRTLRYRNLLVRQAVQMKNKIAVLLMEAGVSYNKQKLHKVGYFRELLATNPDIDEGLKPLLRLCRETVVRLGKTESALVRSLERDSLLVERVERLMTIPAVGPITALTWALEVGDVQRFSSIKKAISYCGLCGAERSSANITMRTPLSKQRNKHLQTVLIEAAKMAPRNSPELAMVYDQEKQKGNANRATLAVARKMVAYLVAVDRRQNGFLVVENKNRTAA

SEQ ID NO: 168756 - protein, 341 aa, unidentified
MRDVQYESALLKLLHRWREEAEKAGRRIERIAVAFEAGRDGFWLARWLKARGIEAYVIHASSVAVSREHRRAKTDRLDTELLKRSFLGWLRGERDHCKMVEIPTMQDEDAKRPNREHDSLIGERSRIVNRMKAALVRLGIRGFNPKLKRATTRLDGLHTPEGEPIPPNALAELRRDMERRRLVNNQIRQIEEERLERIEQAPCDGAHVMVRLLARVMGVGIETADMLVHEVLSRNMRDRRAVARYAGLTGSPDESGRKRREKGLARSGNARVRRGMIQLAWRFLLHQKNSALTKWFRSRTENARGTRKPMIVALARKLLIALWRLMREGIVPDGVVLRPAQ

SEQ ID NO: 168757 - protein, 343 aa, unidentified
MQAVKIIGLDIAKSIFQVHGVDANGQVAIRRRLKRRYVLAFFQKLPPCLVGIEACATSHHWSRELQALGHTVRLMPPAYVKPYVKRQKNDATDAEAICEAVSRANMRFVATKTPEQQSGLVLHRTRHLFIRQQTSVINAIRAHLAEFGVVAPVGRTGIEHLLSVIADVSDKRLPEVARACLLALGAQLRALKAQLLELDRMITAWHRSNETSKRLDAIPGVGHVLATALVASIADPKVFRSGRDFSAWIGLVPKQHSSGGRERLGRISKQGDRYLRSLFTAGALAVIRYAKIYGTKHRPWLTALLARRPTKVAAIALANKIARMAWAMMTKGERYKEPIALAA

SEQ ID NO: 168758 - protein, 338 aa, unidentified
MQLYAGIDLHSSNNYLGIIDTNDKRLFGKRLPNCIKTISMALKPFRKKISGIAVESTYNWYWLVDGLQDKGYKMHLANPSAIQQYEGLKHTDDKWDSFWLAHMLKLGILPQGYIYPKKQRPMRDLMRRRLRYVSQRTSHVLSLQSMLNRHLAMQLNSNDIKKLKLTDADKLFKDPFSTSAAKHSISAISFLDATAKKIEKQIMASAKLKKNFQVITSMPGVGHILGLTVMLEADDFSRFESPGNYASYCRCVKSERTSNKKKKGEGNRKNGNKYLAWAYVEAAHLIIRFCPEANAFYQQKKAKTNGAIATKALANKLARATFCMMSDQTMFDVKKIFR

SEQ ID NO: 168759 - protein, 454 aa, unidentified
MKKDKSNDLTKEGIKKKKFSQGMPVFNLHAAGIDVGDTQYDVAISDGANGFEVRVFRTFTEDLILLVKWLESESITTVAIESTGVYWLNLYLMLEEVGIEPYLVNAKHVKNVTGRKKDDTDAIWLQKLHTCGLLQKSFQPETEIRILRTYVRQRKTLISISSDSVRRMQKAMELMNIKLHTVISDLLGKTGLQMLNAILSGERNPDELIKYKDPRIKASEEDIKKSLTGIWKEEYLFMLKQSYDGYLFHQLQLKECEEKIKEQLINHVAKIMDGDITDVLLEKKKPKKNQFNIELRPLLKTIAGVDLCKIDGISEISCLELISEIGTDMNKWYGIKHFSAWLNVAPNTKITGGKIISSKMQKKKNQAGQTIRMSASCLSTSKSPMGDYSRKMKSRLGKRGGVVATAHKLAKIIYTMMKEKREFDPTIMINNQEIWKQKRIKYLEKQLNSLKMAV

SEQ ID NO: 168760 - protein, 365 aa, unidentified
MNAIYIGVDFHARQQTVCYLKTETGELVIATLRHQDKEQVRAFYQQFAAPVIVGLEASGYSPWFEALLERLGCEVWLGHATEIRRRARWRHKNDCRDAELIWELMVHDEFPRLHRPTLASREVLRMLRYRQKLIKLRTMAKNSLQAIALQAGLAKGKQLFSAAGQEEFRAAALSPVLHWQREHWFALLQPLNQQLLETMVWFKTQSKDDRCVTRLRTHPGLGLLTALCLVHTLHPVSRFRNTRKVVAYAGFDPVERSSAERKCFLGISKAGSRLLRYLLVEAAQTAVRYDEDLQRFYKRLAQRRGRPKAKVAAARKLLIRAYIMMRDEIDYAEFRRRAVAARLARTGQRPKVPEVLIGQPASSGQ

SEQ ID NO: 168761 - protein, 315 aa, unidentified
MTITLEGYVGIDVAKDKLDVAVMGEKATSEATNTQRGISALVKKMCQQNPKLIVVEATGGYEEALVLRLFEAGLPVALVSPQRVRQYAKARGLLAKTDKLDAQNLAEYGKNIQPRLFVAKSEEGRRLSAIMGRRRQLADMVKAEKNRLRTAYCEMKHSIQTVIDCLEAQIEILDEEMRKFMKEHENFGEQEKLLRSAKSIGPVTAATLLADLPELGKLDRKQIAALVGVAPINHDSGKKRGYRKTKGGRPEVRSVLYMSALSAIRYNPTIKAQYDQLVKRGKEKKVAITACMRKMLTILNAMMRDQCPFGGVPWA

SEQ ID NO: 168762 - protein, 413 aa, unidentified
MDSIIERCCGLDVHQASVVACLLVKAAGGRRRKEVQSFGTTTAELTRLREWLLAEGCTHVGMESTGVYWMPVYAVLEGSFALIVGNAAHIKNVPGRKTDVKDAEWIADLIQHGLIQRSFVPPKWQRDLRDLVRYRRKLVQGQAGERNRLLKILEIANIKLASVATDVFGKSGREMIRALSAGDLTPLEMARFARGRLKSKQDALTLALDGRIEPHQRALLKIQLDRVERTEDDIAAVDKLIQDALAPYQDTVDRLMAVPGLDWAGITSVIAELGLDMSVFRSAKQAAAWAGVCPGNAESAGKNLGARKRRGNVHLTTTLVQAATGAGRTKGSYLKSTFYRLRARRGTKRAQMAVAHQLLNIIYVMLRDGVPYRDLGEAYLDQQRAEATKNKLLKRLNALGYHVEITAMQAEVS

SEQ ID NO: 168763 - protein, 356 aa, unidentified
MTSNIKYIGMDVHKESISIAVRNSVGKVVMESVIETKASMILQFIDGLRGDLQVTFEEGTSAAWLYDLLKPRVTKLVVCDPRKNKSMREGNQNDKIDARRLAELLRLDHLTPVYHGEHGLRTLKELVRTYLTVTKDLARVMTRVKAIYRSWAIPCSGKQVYARCHRAEWLGKITEPGVRRRAEFYYLQLDALRVLRQDARRDLLAESKKHKAWKRLCEIPAIGPIRAAVLLGILQTPHRFRSKRPLWNYGGLAIEMHSSADHRSVDGQLRRSRKNVLVRGLNRNCNHDLKNLFKGAAAVASSKPGPFQEFYTALVAKGMRPEMARLTLARKIATIVLIVWKKGVCFDASHLKPQTA

SEQ ID NO: 168764 - protein, 409 aa, unidentified
MDVFHERCAGLDVHKEKIFVCVLIGRGSGYQKITFQSGTFHHQLVEMRQKLVELGVTHVLMESTGVYWMPVYDVLEGFVEVIVGNAQHIMNVPGRKTDESDAEWLAKLLRFGLVKPSFVPAREFRELRQLTRYRRAVVQTRASEQNRVEKHLQISGVKLSSVASHVFGVSGTDMLNRIAEGTTDPGELAGLARGRLRKKMPQLRDAFAGSISEHTQHLISLQMEQMNRLESTIAQAELKIDEKVKPYEELLARLDDMPGLNLRSSIDVLAEIGTDMSPWATHRQIAAMAGLCPGNYISAGKRLKNRSRQGNPYLKSILVQAACSAINVDGSYYQAKFKGLKKRRGHKRALVAIAHAMLVAIYHMIKKGEPYRELGAKVVSDHELSRKKEYLVKQFQNLGFAVSLTPLTA

SEQ ID NO: 168765 - protein, 351 aa, unidentified
MPRTATVHAVTAIGIDMGKNTLHMIGLDSRGTIVLREKVSRGRITSRLANLPPCLIGIEAGMATHYVARELTVLGHDVKQVPPAYAKPFRQAQKNDFRDAFAVAEAVQRPTTRFVPAKTDEQLDLQALHRVRSRLVRERTAVINQIRGFLLERGIIVRQGLRFLRQALPDILAKRTDVLSPRMVRIVADLASDWRQLDERIEPVTDEIEALAKSDSSCRRIMSVPGIGPIISSAMVAAIGSGAAFARGRDFSAWIGLVPKQMSTGDRTILGRISKRGNGYLRTLFMQAARVILLRPASWPKHGFGVWLARAAQRLHPNVLAAALANKLARIAWTVLAQQRSYEARITTAAA

SEQ ID NO: 168766 - protein, 276 aa, unidentified
MRIIGCDLHARQQAVAMLDTETGELMEMTLTHEGNNVREFYSRLPRPVRVGIEATGSMQWFVNLMEELGIECLVGHPAEIRAAEPRKQKHDRRDADLILKLLVENRFPAIWLPSKELQDLRALLRHRHQWVCMRTRIQNALQSIALANGLRRGPSLWSHDGQNTIASLPLAPHTAYRRNELQAVYAKFETEIEKLNQRVEEQACKRAGARLLMTHPGVGPVTALATDVFLGDPARFADSKALASYVGMIPREYSSGGRQRLGGLTKQGNPLAVSFG

SEQ ID NO: 168767 - protein, 360 aa, unidentified
MNTVTWVGMDVHARSTHAAAINLLTGEVKRMRFGAGVQDPVAWLGQLPGPVHACYEAGPTGFGLYRAAVAAGLRMDVIAPGKTPRGPSDRVKTDRKDAELLARLLIAGQLTAVTVPPAGVESARELTRLHDACRRDLMTARHRISKMLLRHGRVYPKPTTWKVDHRRWLAGQRFDEPTSELVYLDLLARVDMLTVRKLQLRDEVIKLAEDERWWPTVARLRTFRAIDTLTALSIHLELGANWARFERPHRLGAWLGLTPSLSQSGESSASGSITKTGSTLARRLLIEAAWHYGPRPSIGPVLQARQAGQPEHILAISNKAQRRLHRVYQQMKARGKPHGIVTVAVARELSCFLWAAATAD

SEQ ID NO: 168768 - protein, 321 aa, unidentified
MQSYHLGIDVAKAKLDCALRLADGKFKHKVVENNQKGFALLSDWLSKHDASGAHVCMEATGVYWEAVAEYLAHRGMMISVINPAQIKAFGTSRLVRTKTDKVDAKLIADFCFERHPAPWQAPSPSEQALRALVLRLDSLQAMKTQEGNRLEVARDIVKADIVSHIAWLDKEIKSLIKKIHDHLNNDPDMRNKQELLGSIPGLGERTIALLLAFSMHPGRFANARQAAAFAGLDPRQHESGSSVKGKPRMSKVGHSILRKALYMPAMVTLYKTAWGRAFRERLAASGKPPKLIIGAMMRKLVQVAYGVLKSGNSFNPALQNA

SEQ ID NO: 168769 - protein, 356 aa, unidentified
MSRDIKYIGMDVHKEAVVIAVLNSSGKLVMESIVETKASSILQFIHGLRGELHVTWEEGTWAAWLYDLLKPHVHQVLVCDPRRNALLKEGNKSDKIDARKLADLLRTGMLRPVYHGEHGLRTLRELGRSYQTLSQDLNRVMNRIKALYRGWSIPCAGTQVYAPRHREEWLHKIEHVGVRRRAELLYQQLDGLQMLRRTLRPELLAESRKHKAAKLLRQIPCIGPIRAARLIALMQTPHRFRSKRQLWTYSGLGIETRDSAQYRFVRGQLQRAKKPQQIRGLNRNHNHEMKDIFKGAATRASCGAGPLRDFYLTLLDKGMKPEMARLTLARKIAAIALTLWKKEERFDAEQLKTQAA

SEQ ID NO: 168770 - protein, 405 aa, unidentified
MNAVGIDVSKGKSTVTIRKPGDVVLMSPCDIPHTQSAINDLIKQIKSLEGETKVCMEHTGRYYEPVATWLSDAGIFVSAVNPILIRDFGDDSLRTPKTDKADSKKIARYTLDRWAKLKQYGIMDKTRNQLKTMNRQFGFYMAQKTAMKNNLIALIDQVYPGANDFFDSPARNDGSQKWVDFIHTYWHVDCVRSKSLNAFTEHYQNWCKRKNYNFSAEKAAKIYQISSDLIAVFPKNDITKMLIWQAVALLNTASKTVESLRSKMNELASTLPEYPVVMDMNGVGATLGPQLIAEIGDVSRFTHREALTAFAGVDPGKNDSGKHIQNSVRTSKKGSPYLRKALFQIMDSLIKRSPVDDPVYAFMDKKRSEGKSYYVYMTAGANKFLRIYYGRVREYLSNLSNNETI

SEQ ID NO: 168771 - protein, 329 aa, unidentified
MFDETKEYEVPNEKGLKTFKKFLKKDCGKEWIETKLIYEPTGPLIFCNLYSFSAGYSNYLREFASENQLRVYEVNPKKSANFAKAFGNRSKTDAVDAKMLYNFHLLLKKEDLNIPEIDETTEQLGSFIGSYEILQKTRTILSNHLHSMEYKSGIDTELKESIKKEINHLKQIEEDLEREMKTFAENNPKTREVLDNLLSIKGIGVISAIALLYLFKKYPDINRNETTALAGLDPVRRQSGSSLNGGRKRSRAGDPMLRKVLYLSCMNSIQHSDRIRMFYEPLVANNHKKPKVALVACMIKILLGVHQIYVNKSKYKPLYIDNKNLCLPS

SEQ ID NO: 168772 - protein, 347 aa, unidentified
MTHYIGCDVHKKYSVFAAIDDEGNIYTPRRVEHDLDIFRSYLAELPPGSPIALETTGNWYWVVDEMERAGHLPALAHALKSKLMMGEINKTDKLDARGLAMLLRNGTLPSVWIPKGELRDQRELPRMRLTLVHMRTALKNRIHATFAKYAIHFESESDLFGTRGRQAMSKRLPELPPETRRTVEQELVLLDELAEQIDLAEQRIHEVISVTPDMELLMSLPGIGPVLAITIVLEVGDINRFPDNQHLASYSGTVPRVTSSGGKTRFGRTRPDVNHYLKRAFVEAANVVMINQARWPDRHVVRLYQRVKTNKGHGKAIIAVARHLAESTYWILRKKEPYKEPVLEKQG

SEQ ID NO: 168773 - protein, 352 aa, unidentified
MAATAQSAIAVIGIDIGKNSFHVVGLDGRGAIVLRQKWSRGQVEARFANMSPCLIGMEACVGAHHLSRKLKALGHDARLMPARYVRPYSKGQKNDFRDAEAIAEAVQRPTMKFVVTKTADQLDLQALHRVRERLVSQRTGIINQIRAFLLERGIAVRQGQRFLRVELPRILATPPDVLSPRMVRVIEGLASDWHRLDERIEGLSSEIEELAKRDAGCERLMSIPGIGPIISSAMVAAIGTGDSFSKGRDFAAWLGLVPRQISTGDRTILGKISKRGNRYLRVLFVQAAWVVLVKVKPTRWQGHGLRPWIEAAKKRLHHNVLAIALANKLARIAWSVLAHGRAFETNKLQAAA

SEQ ID NO: 168774 - protein, 343 aa, unidentified
MNIVRIGLDLAKYVFHLHGVDERGKVVLRKTLRRPGVAPFFANLPRCVVGMEASNGAHYWAKTLSEFGHDVRLISPQFVTPYVKSNKNDRNDAEAICEAVGRPNMRFVSVKSAEQLAIQAVHRIRSRLVASRVRLVNQIRGLLGEHGVVVAQAIGNLRRALPRIIDEEANGLNSIVRALIGELREELSDLDGRITIYDRKIINLYRMSEACQRLGEVEGIGPITATALVAAAGDGKCFKNGRQFAAWIGLVPKQRSSGGRSRLLGISKRGDRYLRTLLIHGARAALGRTRGKQDPRSLWLLKMRERRHANVVAVALANKNARIAWGLLASGMNYDQHLTVSSA

SEQ ID NO: 168775 - protein, 328 aa, unidentified
MMKTMIGIDVSKAKIDCAWLRDLETGKVKTKVFKNNPEGFQLLIKWVENNTQQPVTTICFVMEATGIYHEALAYALHDAGATVCVVNPAYIHDYAKSLGVRSKTDKKDSVVIARFGVTHHPAPWQPEAPEIRQLKALIARHEAIEKDLQRENNRLEKAEITQVSPEVISSINTVINELTKELKRIKQLIDDHIDQHPTLKQDSILLKSIPGVGPVISQRMVALIRSRPFVSARQCSAFIGLNPVIRESGSSVRGRSHLSKMGDAKIRAKLYMAAIVAIQYNPDIKQQYERLLKNSKTKMAALGAAMRKLVQICFGVLKHQIPYQPQVE

SEQ ID NO: 168776 - protein, 382 aa, unidentified
MKQYSKYVGLDVHADTIAIAVADRGRSSEVRALGTIPNEASTLKRALAKLGKAEELLVCYEAGPCGYAIYWLLAAMKIDCVVVAPTLIPVRSGDRVKTDRRDAMKLARLLRSGELVAAWVPSQQDEALRNLVRTRTAAKRDERRAKNRLSKFLLRMNKRPPKKTKSFGEMHCQWLAGLAATFELESNRLTFEEYYAEWLHQHERVRRVEKHIDATVEKLSPAQREVFQALCSLRGVAKTVAVTALAEVGSFSRFDSPRQLMSYAGVVSAEYSSGNSVKRGRITKTGNAFLRHVIAESAWSYRFCGRAGRALRERRKECSATIVGIAEKADWRLSSRYRHLLANGKPAQKAATAVARELLGFMWAVAVAAENNAATRQQAKAA

SEQ ID NO: 168777 - protein, 320 aa, unidentified
MTYIGIDVSKDSFIAAYPTKSGYTTKTFPNTTSGVRKFVNSLPADCHCVMEATGNYSMLLLYLLQQANIIVSMENPQKIKHFARAMLSTTKTDEIDAKLIATYGEKMTPAPYKIPTESIILLKQKRTVLRQLKKQLTATINLQQSLAVLPKQDPASKVAIEQTVKFLRKQISKMEEEITNLSTKEFGRQVKLLTSIKGISVTIASALILATGGFTYFSNAKQISRFLGLCPTYQQSGTSVNFKGHINRNGDTHLRSQMYVAAFASIRCNAACRETYERLRARGKSGKLAVVAVANKLIRQAFAVVTNNQPYIDGFVSSYA

SEQ ID NO: 168778 - protein, 350 aa, unidentified
MPQRNMPRSAAIYGIDIGKNIFHVVGLGSDGVPIQKVRFRRDTLLQFFERAAPAIVGMESCAGSQWIARKIQALGHKVRLIPAQFVKPYVKSNKTDIIDAEAIAEAATRPTMRFAALKSEEQADLQALHRVRDQMIGTRTRLINQMRAFCLEYGIALRQGAGLFKLDLPQVLEDQSNDLTSAMRKLLADLFADLRQLEQRISDITREIEAIASREDMARRLMTIPGIGALGATALLAAIGSGRQFQKARDLAAWLGLVPREYSTGGKQKLLGISKRGNRYVRKLLVHGARSCFRHLDRTKDRLGNWLDGLQARMHPNKAVVALAAKIARIVWVILTKPGALYERRDPAFT

SEQ ID NO: 168779 - protein, 357 aa, unidentified
MEKRLKQSLGIDVSKLDLSLSLGFLTDRLVKGFMHHSDVSNDISGYKELLEWLKESVDKNVDLLVVMEATGVYHQGIAHYLHAHGYAVCIMQSGRVKRYAQSLDQRSKTDALDSRMLSMLGLERALRLWHPPSAELQQLKALSRERSSLIKDRTVETNRQGAIVSGVYRDTRASKRHGQRLKLLNTQIEAVEKEMRGLISKNGILQKKLGFMMSIPGISFISAATVVGETLGFESISNGKQLSSYAGYDVVLRESGNFKGKTRISKKGNSHIRAALHMPSMTCVRCNPTLKQFYTRLKPKKAKPLVALVAVQRKLLILMFTLWKNEEVYDPEFENKKQQKHKALAAQDNNLINQLVS

SEQ ID NO: 168780 - protein, 422 aa, unidentified
MVLKGVPMALKIVYQICCGIDVHKTFVVACIASTNKQGVTTYKRHRFSTFTQGLKELLQWLLDNHCKDVCMESTGKYWIPIYNVLEKDCNIVLAHPKYVKAIRGKKTDKKDAKWIADLFKHDLVAGSFMPPADIRQLRDLMRYRFKLTCFMSSEKNRLQNCLTVSNIQLASVVSDTFGKSSQRILDKILENPDDTSFDIEPLIHGSMKKKLPDLELAIDGFITPEQAGKLKVIKKHFEDLESRKAELEKLILALASPYQQELDLILTAPSFKNKFTAIGIISEIGVNMEAFPSAKHLCSWAGLTPTNNESAGKKKSVRVSKAGCYIKPLLVQCANAAIKSKKHPEIRDRYLRIKKRRGHKKAIIAIARMLLTALYHMLKNGENYNSDLYQKSDILPTTREITVEQAILMAQFQGFRIKSATE

SEQ ID NO: 168781 - protein, 315 aa, unidentified
MTTIGFDVGKLELVGVRIGKDAKVRERYYIANQPKAIDNLLSILGNKYKHIRIGSEATAEYHRLLALSCIDKNIPFCLINPIVTKQFTRATVRKKKTDVSDALVIAKLIRQGEGRLVSKDDFMASKAILRTANKLSSMHQALSLIKRRFEDNYHNETTTIKIVDHCLSVVEDSIGQIRKQAQAEDEELLKLLCSLPGVGKITANALIAEIGNIERFKNSKSLIAYAGLDPRVRQSGKLLHHNTRLTKRGSPYLRKALFTAASIGLRHDKELGDYYTKKRNEGRSYKEAVIATARKLTNRAYAVWKERRVYVKTQT

SEQ ID NO: 168782 - protein, 392 aa, unidentified
MYIIGIDIGKNHHEASIVSPEGKQIGHSLRFATTHKGADSLMSFIFNNIGNSSCIFGMEATGHYWYPIYSFLKARGYTIYVINPIQSDSLRKMYIRQTKNDSIDSFLIAEVIRFGQFTTTSMADENILAMRQLCRYRDSVISSRTEIKLRISTIMEQIFPEYEKQFSSLWLSTSMGILEKYLTPENIENAPIDELFEIIKDKSHNKLTMKKAISIREAAADTFGIKIAQDAFSFQLKQLIDRMNFLDKQIEALDCQILEYYEKFDCYLHTIPGIGMIAAATILAEIGDINRFKSSSALVAFAGIDPTVRQSGEFSSTHNHMSKRGSPYLRHAIFLAATTCSFHNSPLNAYYKKKREQGKHHLTANGAVARKLTTVIYAVLRDGKPYEPKSFC

SEQ ID NO: 168783 - protein, 349 aa, unidentified
MLHVGLDLSRKRVDVCLISGEGELVGHFPAPADRDGLRGLARRLAAYGEPVRGVIESMNGARFVHDELVAHGWEVLIADAQRVKGLAPLACKTDKVDSRVLAELSFRDLVPAIWLPDRQLRRERERSRYRLHLVKHRSSLKNRIHSTLICFGHQCPVSDLFGVSGRELLARLEIPEPWRGHVDASLVLIDDLTRRIEEIEQELRRAGADHRYVPLLMTAPGFGWVVAYTAACEIGDVRRFSSPTKLVGYTGLCPRVKQSGDMDRRGPLSKHGPKYLRWALMEASLHALSHPVYKERYQRTKRRLGKQRGPKVAQVDLARRLAEAIWYMLTRNQPFKPFAPAGAAFRLAA

SEQ ID NO: 168784 - protein, 392 aa, unidentified
MGRVVIGMDPHKRSATIEVIDERERVLAQGRYGTDTDGYQAMLAAGRRFPDRVWAVEGCAGIGRHVAQRLVADDETVLDVPAKLSARARVFATGQGRKSDPVDAHSVAVAGLRSPGLRRVVADDTTVALRLLVDRRDELGRTRTQILSRIHGLLLELIPGGAKTFLTRGQASYLLRTAPAPVGVVAQTRHQLAGELIEELTVIDAKIKAANKQLTALVAATGSSPRALNGIGPSGAARLLGDIGDIRRFATAAHFASWNGTAPIEASSGDQRRHRLSRAGNRRINRVLHIMAIVQLRHDTPGRAYYRRRLSEGKTAMEALRALKRHLSDVIYQTMLTDTRRATHHAGTDPGGQPGATQQSSADSPIPTTASSDKSQPGPATGKRRTILAATP

SEQ ID NO: 168785 - protein, 339 aa, unidentified
MARFIGVDLHPSCFTACVVDAKGREQFSDYKLAELDKFRQSLRRTDLLAVEATTNTRFFCEQIAGCVKRVAVVNPRQFEVIKRSSAKTDKRDAANLALFLSKGLLPEARMKDKEQAELSSLVQTRDKLVKQRTQLLNKLHAHMTAHGLRSKKEAYASERGLVRVLEEPVFTAIERVEVEVIVAQVRSLNTGIQRLDEEIKEHGPKLEGHDQLTSIKGIGSRSATILLSVIGEVEDFSDEAKLASYFGIVPVVRQSSETEHHGRITKGGSKLGRTTLVQCTLSALRYSPYLKKFYDRIKARRGAGKAIIATARKFLGIIYQTLKNKWVFADFPNFVLAEQ

SEQ ID NO: 168786 - protein, 479 aa, unidentified
MNSKAKKAKKQAVINNSTTNILSKEELARRTAMLQEGMKAATWRELETNGKFTKNDKLTFISDDMLIIGCDIGSEMHYVRAIDSRGRELSQDAFPFSNSSEGFQSAKAWALELAAANDKHQIVLGLEPTGHYWFCLAAWMVSNDISVVQVNPYAVKQTKEIEDNSQRKDDRKDPKLIANLVKDGNYGMPYLPEGLYADLRRLSMLRDQLTEDRIRNINRLHREMKIYFPEYRDAFGKLDGAFTLEALKAAPFPEDIVRLGVDGLKDIWHRAKLRGRGYSKADQIVQYAKESIGLEHGRAGGRKAVKILAEQIESLSEALEEIEAELHQKCREIPYAENILEIRGIGENILAGILAEMGDITRFDDASEIQKLSGLGLVACSSGKHKGETKISHRGRKRLRYWLFQAAKSAVSHGEEFKELHAHYTTRKDNPLKKMQSLIVIACKLLRIIFTLLRTGCRYDPMKMLRDIKRPERAAAQAA

SEQ ID NO: 168787 - protein, 348 aa, unidentified
MSQRNQYVGLDVSLKETSICVIDEADKIVWRGRVDSTPKAIASAVKQHSPHAVRIGLESGQLSNWLFQELQAAGLPVICVDARHAKAALSLKVNKTDANDALGLAQIMRVGWYREVTVKGLDCQAVRALLVARAQIVSQITTLKNCVRGILKTFGRVLPKGLRSQFPARVRAAIDGHQVLGTIIEPTLRVLEAMRVQLRVYDKAVIQRARSDDTARQLMSAPGVGTVVALAYITGVEDPARFKRSSSVAAYFGMTPRRYQSGEVDHAGRISKCGDGMVRGLLFEAAKVLLSRSARPSALKTWGEALGKRIGAKKATVAVARKLAVILHRMWTTGTTFQWNAEAASSAA

SEQ ID NO: 168788 - protein, 355 aa, unidentified
MNVYTGVHSYYCGIDLHARTMYVCVLDKDGKTVYHKNIPCRPDRFLQAIEPYRGDIVVGVECIFCWYWLADLCEEEGIGFVLGHALYMKAIHGVKTKNDRIDSLKIARLIRGGNFPVAYVYPPEMRATRDLMRRRNHFVRKRAELLSHIQNTTMQYNLAPLGTLSRPHHRRDKDIVGHFPDPVVQLIVETDLQLIDHYDPIIKHLDKQILALAKGHDPTSLDLLRSIHGVGDVLSLTMLYEIHDITRFPSRGEFCSYARLVKGQKSSAGKNYGTTGGRIGNAHLRWAFSEAAVLFLRNNTQAERYYNRLINRHGKSKALSIVAKRLGIAVYYMLRRGNPFNINMFLQNHMANEKA

SEQ ID NO: 168789 - protein, 323 aa, unidentified
MNTVFSNFVGIDVSKDTLDAFSTETSKHCKISNGNKAIKTLFADFNPDNTFVVVENTGGYEKRCIRALLSLGFKVHRTNNNKVKAYIKSLDRKGKTDKVDARYLAMYGQERHSRLEIYELPGENREAIRQLAKYVYELKVSRVEEKNRLQSPGCEDIQEEVIETLEFFDSHIEKVEGKIDTLLQTDKETRKKIDLICSYKGVGKNTAVQLIAHLPELGTVKRKTISALAGCAPYANQSGKREGYKTTKGGGRPVVKRVLFMAALSATRFNDDIANYYQRKQSQGKRKMVAMVASMRKMIVQLNAVVRDGKIKQRPSQINLFNK

SEQ ID NO: 168790 - protein, 346 aa, unidentified
MSKDLYIGVDVSKSWLDLAYYDGVAVDWKYGHIRVDNKESGYNQISKWLRKLGVNRERVLFCMEHTGLYCQNFRLWLERKGYVYGMVQPRKMHRFEPDLGENERALDRIKTDEMDSFRIAIYCKEHCRKIKASPSKLPGEAYFKLKRLMAERKQYTRQTVIYKQHLHDISVYDTEGSRERKKVGLNILTEQIRQTNREIQRIIESDSALKRNYELLCSIKGVGLVVAVETIILTENFTSITNPRKYACYIGIAPAKKESGVSVRGGEHISRKGFTQAKADLSQISLVAIRYDPGIRTYWERKKAEGKHSGVVLNAVKFKLILRMFAVIKRQKPYIEMQAYTNKRRT

SEQ ID NO: 168791 - protein, 343 aa, unidentified
MTSIKAVGLDVAKTVFQVHAVDSAGRIVMRKKLRRGQVLAFFAELDRCLVGLEACATAHHWARSLQALGHEVRLIPPQYVRPFVKTNKNDAADAEAICEALMRPTMRFASVKSAGQQSLLTLHGARELLVRQRTMLINALRGHCAEFGVTAAQGLSRAQELVALIDDEADDRLPTLARRALRSLVVQIRSIQEQIGELEAELLAWHRSSEESGRLAAIPGVGLITATALTATIGNASQFRSARQFAAWLGLVPSQRSSGGKDRLGRISKRGDGYLRRLLVHGARTVLRWTRQRAERRSPWIEGLLARRPTNVVLVAMANKTARIVWAMLRRSQTYQPGRVAAV

SEQ ID NO: 168792 - protein, 413 aa, unidentified
MRVVHERCAGLDVHKKTVVACVITPEGREIRTFSMMTEDLLALVDWLQERGCRVVAMESTGVYWKPVYNLLEAAELEPIVVNAQHIKAVPGRKTDVKDAEWIAELLQHGLLRASFIPDRPQRELRELVRYRRSLTQERSREVSRLQKVLEGANLKLSSVASDVLGRSGRDMLQAIIQGTEDPVALAALARGRLREKSEQLQQALRGLVGAHQRFLLQEQLSHIEELEARIGRLSAEIGVRLAPFDPLLELLDTIPGVGRRVGEDTLAEIGTDMSQFPTDRHACSWAKVCPGNHRTAGKAKREHVGGGNPWLRATLVEAARAAAKTKDTFLSAQYHRLARRLGDKRAAMAVAHSILVIAYHVIRDRKPYQELGATFHEQRSKKAIVRRLTRRLEALGFAVILQATDATPEKEAA

SEQ ID NO: 168793 - protein, 467 aa, unidentified
MRKASKKVKSPAAVGKKRLTLLEQINFNAAGLDVGSREHWVAVPVDRDPQPVRCFGTFTSDLHALADWLLQCGVKSVAMESTGVYWIPVFQILEGRGLEVLLVNARHVKNVSGRKSDVSDCQWLQQLHSYGLLAGSFRPEDQVCVLRSYLRHREHLVEQASTQIQLMQKALTQMNVQLHHVLSDVTGVTGMAILDAIADGERDPLKLAQLKDPRVRSSVETIAKALTGDYRTEHLFVLKQARESYRFLQAQIAECDVEVDTVLSGWEAKVDLQQQPLPPTRKKNRSKSKHKPLPFNLRQQLYRVTGVDLTEIDGLDVLSVQALISEIGLNMHRWPSQKHFASWLGLCPDHRISGGQVLKHKTRAVTNRAADVLRMAAQSLKDSRSALGAFFRRLKARLGPAKAITATAHKLARIVYLLLKHGHHYIDPGAQYYEQRYRDNVVKHLRKRAAALGFTLVENSALNLQVS

SEQ ID NO: 168794 - protein, 408 aa, unidentified
MQHSRPLYGGLDVHKDSSAVADGANDHDAEVISLGPIGTRQCDIDQRVRQLQAKATPLVFVYEAGPWGYWRYRELPQTSYDGWVVAPSLIPKQAGDHVKPDRRDAVHWARLLRSGALTPVDVPTVEDDAIRDLRRAREATLHDVNTATFRRKALLLRHDIRSTGRATWGPAHRRWRSEVVCPTPAQPIVLQEDVRAVTEHTERLHRRAQDLHEHVNAWRLSPVVEALQALRGVQVTVAVTLIAKLGDLTRVDNPRPRMKYVGLTPAEDARGERRRQGGITKTGPTPARRALLEGAWADRDPAQVSRHLQRRLEKLPKPLQDIRWKAQARLCKRSRQLSARGTHPHQVVVASARELIALMWAIAKQVPVTASIRRPHGRCIEGPQEFQGKVPLAIGRGAAPVWCTPRAR

SEQ ID NO: 168795 - protein, 410 aa, unidentified
MKRVIGMDIHRTFAEVVFWEAGQLKAAGRVDMTRAGLEGFGRTLSKEDEVVVEATGNAMAVVRTLEPHVARVIVANPLQVKAIAHAHVKTDKIDAGVLASLRAANFLPEIWLPDADTERLRRQVARRNQVVRHRTRIKNEVHAILHAHLIPPCPHDLFAGLGRAWLERQNLPDDERAAIARHLRELDRLGEDLEALDRDIAQMVIEDPAVRRLLTITGVNLIVAAGLIAAIGDVRRFTSPEKLVSYVGLNPRVRQSGLGLAQHGRISKQGRSHARAMLVEAAWAASKAPGPLRAFFLRVRARRGHQVAAVAVARKLAVLCWHLLTKQVDYQLSRPALVAHKVRAMELQAGHPAQKGNKRGSTFAYNVKELRHREIEIARQAEHAYEQFVRGWQRRGPAKRRTGAANEERR

SEQ ID NO: 168796 - protein, 341 aa, unidentified
MKGYYYVGLDVHKKTISYCVKKADGTVVDEGTLQARRAAVLSWAERMAVPWVGAMEATMFTGWVYDLLLPYAEDVQVGHSFMLRAIAASKKKNDRVDAEKLADLVRCDLFPACYMASQEVRDLRRVLRYRNLMVREATRMKNKTAGLLMEVGAEYDERRLHGKRYFGALLDSLEDVPASVVELLKLTRSALEVFQASQIRLLEALRTDRELRERVERLMTIPGVGEVTALTWVLEIADPHRFSSRRKALSYCGLCSAQNESAGKTMRGPLSKQRNRHLQTMLIEAAKLAPRWNPQLAAVYYRERDRGANANRATLAVARKLVAYMLYVDKTGKEFELRQTA

SEQ ID NO: 168797 - protein, 317 aa, unidentified
MNQQLNEVVCFGVDVASTHLDIAVHGVQQVQRIPNDERSIKQWLKTVARSSRLAVEATGSYHQLLARLAHEHGLQVFVLNPRDVKRYAQGLGQRGKTDRLDALVIARFIHREHQELRVWQPPTKEAQRLDDLLRTRALLQKQYAAQKQSLVHRPELEQVIEDVLQSMQAALTRLETLIAQAARNLPEGRAGLRCIMSIPGVGVLTGAALLQLFTRAKDASCDAIVALTGLDPRPMDSGSRKGIRRLSKRGNAEMRRLLYNAAMSGARTLTWRGVYERERAKGLPATGALIALARRLVRVAFSLFKSHSMFDQTRVCA

SEQ ID NO: 168798 - protein, 405 aa, unidentified
MAIGISNYRDISVFVGLDVGKSNHHAVALDQAGERLFDHELPNDEKRLRTILDDLKTHGPVLMVVDQPATIGALPVAVAQDAGVTVGYLPGLSMRRIADLHPGEAKTDARDAFIIAEAARTMPHTLRSIDLGDEQIAELSMLCGFDDDLALQVNATSNRIRGLLTQIHPGLERVLGPRIGHRAVLDLLQRYPSPQALAAAGEKRLANHLTKLAPRMGKQLAGDIITALGEQTVVVVGTGAAATVLPRLAEQLAGLHRQRDEIATVVEKLVEAHPLHPILMSMPGVGVRIAARLLTEIAGKTFPTAGHLASYAGLAPVTRRSGTSIRGEHASRGGNKTLKRALYLSAFASLRNPDSRAYYDRKKAEGKRHNQALIALARRRSDVLFAILRDGTLYQTRSQKAAAAA

SEQ ID NO: 168799 - protein, 366 aa, unidentified
MKKSSTVQVFGNELFKEQKLTIGVDLGDRWSFYCVLNETGKIILEQKVPTTPEAMKQTFSRMTQSLIAMETGTHSPWVSRLLTELGHKVIVAHAQKVGLITKSNRKDDRHDARTLARLVRIDSELLGPVQHRSAKAQIHLSVIRARAELVSARTALVNAARGLVKSYGERLPKCGTQQVSRELGAGLSAELRDVLQPLLKEVESLNEQIKEYDERMEKIAKEVYPEVSLLKQVKGVGTQIALTYVLTIEDPYRFSKSREVGCFLGLKPGRRDSGESAPQKRISKEGDRYLRTMMVQGGHYILGPFGEDSDLRRWGLKIAERGGKNAKKRAVVAVARKLAVLLHRLWVSGEVYEPLRNSQKAMRAVA

SEQ ID NO: 168800 - protein, 349 aa, unidentified
MILVGCDLHTRKQQVALLNTETGELWDQELSHDGDATERFYATLPPPVTVGIESTGYSLWFHALLQRLGHTLLVGEAAKIRAMVVRKIKTDRRDARHLRDLLKDDRFPVVWIPDPATRDLRALIKHRLRLVRIRTMVKNGLHAIALNQRLALGSSLWSRAGLAQLQALVLPPHTRRRREDSLELLHWLNGHIDELDLHVATAAAADPNARRLMTHPGVGPLTALATVLVLGPVARFPGSKHVVSYIGLAPAVSASADKYRLGHISKQGSALLRWVLGQAAPLATRGDAALKRIYFAVLRRRGRPKAKVALARRLLIRLYVMLRDQIDYTEFCRRGRAQRPGLEPAHTPV

SEQ ID NO: 168801 - protein, 358 aa, unidentified
MEEAKTRVVGIDLAKRSYVAHAIDPAKDKAVIWDGRTDERGIERLCAKLKPTDRVGIECCSYAFYLVKVLTAKVGCRVLVLNAGDLAIIYKSVKKTDLEDAGKLAWLMDKMSNDELPVVTPPSEKEEHRRALVSELGSKKKARTALINRLHSLFVRQGIVTVGKEDLRTADHREAQLESLSGHTSSEAKRVQQELILLESHIDEIEAEIKLDLRGEPKVSHLMSIPGVGPTTAMAFLAYVGDGSRFSRARQVSHYVGITPRVDSSGETTRIGGITKRGCTAIRALIVQSAWAAVHTSKDHHLKRKYQELVARRGKGRAIVAVARRLLELMWVVLRQDTFYWETTKEELDLKLVRSKVA

SEQ ID NO: 168802 - protein, 340 aa, unidentified
MNITRLSIDLAKDVFQLYGVDGKQKCVLTKRITSRAKLIEFISKLKACEIYMEACSSSNYWARTFQGYGHAVKLISPQYVKPYIQRNKNDYRDAQGIMEASFWAGTPYVTPKTVEQQDIQSLLRIRSNYIEIRTTVSNQLRGLMKEYGVFVAAGYQKLKQELLGIFDRNIENSLTPQMKELIEGQYNMLLIFDEKIDKLDIQIEQISKQHEVCQRLQKIEGIGPITALAIIALVGNGQGFKNGRHFSAYLGLVPRQHSSGQKEKLLGISKRGDVYLRELLIHGGRSVVMHSSKKSDSRSIWVNKIKDTGGMNKAAVAVANKNARIVMAMILSGNNYQKAA

SEQ ID NO: 168803 - protein, 318 aa, unidentified
MYYIAFDVSKKVLCGFDGEKELAFDNKKGLKALKSYLKKKYKDLNDLVIVFEATGVYSNYLKAFCADNNLKVYIINPKRSSNFSKAIGNRSKTDKIDTKQTIYEYRKIIGPKDIKVPKIDQVAQTLSAYLTSYKFTVKKRVSISNHLEALERNTSSLELVALLKGELKQTKKTEEKIKAKIEEYIKKDSQLNEDYKRQMTIPGVGKVSAICLLTLFNQYKDTNQAQITALVGLDPTKRESGTSVKGKMKISKNGDRMIRGTLYFPLLSAIRFNKKIKALYDRLLANHKPKQVALIAAMRKLILISHAIYKNKTVYSAG

SEQ ID NO: 168804 - protein, 323 aa, unidentified
MTRVICGVDVCSQSLEARIGPTGASASFPNNPSGIAALCAFCDTHQVELVAMEATGGYEQQAFAQLSEHGLAVSILNPRSVRQFAQSMGRLEKTDAIDAGMIGWYAEVKNSPSVCLAPQSQQHLRALVTRLRQLTEVRTAQLNQQRLVTDRAVQASFDKMLSFLEREIGKLEKTIAARIDADPLWRELNLAFRTIKGVADRTVARVMAEMPEIGVLSNKTISKLAGVAPLANDSGKHQGKRAVRGGRAALRQILFIVASVVGRHEPDFIAFRQRLAAAGKPPRVIRIALAHKLIVRLNAKARQVRSRMIHSQLTPSPPATVNG

SEQ ID NO: 168805 - protein, 393 aa, unidentified
MSDPYGSVACGGMDVHYKFSNVRWRGVMGDVVLRERLDHQDRARLREQLATWPKGVPIVMEASFGWGWLSDEMAAAGLDVHLSNCFKVEHMRQARGDVKTNQKDADLLSLLPMEATGWWEVWRSPPEVRDRREWMRYRSGLVAAQTETKNRLHAVCHRHGIFYEFSDLFGGEGRRFLKAVCQEGRQAGGVLAPGALETLRGLMRLLEHLRAELATVAWYLRQELARDALTRRLDGIPGFGLILSHTVEAEVGRIERFRHGKALASYACLAPRADETGEAKPGRSPHGRHLGSRGNLVLKWAFIEAAHAAVRHGGKWRAMWDRATDGGKRNENRGYINVARALVTVVDVVWRKGVEYREDAPSRPVSGKAGRRRQADSRPGTGQPLPAMVHAKA

SEQ ID NO: 168806 - protein, 338 aa, unidentified
MIVIGVDVHKQSVTAVAVDEAGRMLNERTVAVGGDELIGWASALGAERLWALEDCRQLTRWLERQLLTRGEDLVRVPPKLMAPERRAGRTRGKSDPIDALAVARAALREPDLSRPRPGEQVFRDLKLLVDHRDDLVDERRRTQQRLRWHLHQLDPTFAVPLRMLGRPSHLERVSRWLARQEQELQVRLARELVSRCRALTRTIAELDRELEQRTGETAPTLLKLPGCAALTAAKLLAEIGPIDRFKTDAQLARHGGVAPLEASSGRVQRHRLDRGGNRQLNAALYRVAITQARYHPAACAHLERKQAEGKSRREAIRCLKRQLVRVVFNTLKASPALT

SEQ ID NO: 168807 - protein, 427 aa, unidentified
MSYRIAGIDVHKKMLAVAVADVEVDADFQFEREKVGTTPIELRRLADWLVEHEVDEVVMESTAQYWRPVWEALEQQWRPQRRALKSAPPLAGTLHLAQAQSNRGAGGRKRDFPDAERLVKRLVAQELTLSFVPDAEQRLWRTVMRRKYQVTRNRVQLQNRLEALLEEAHIKVSSLVSDLLGISARRMLQALADGETDPAALATLATARLRATPEQLCDAFQACPTLHPVYRRLLQLTLEELRVIEDHLGQLDQQMADLLAAHHDAVQRLAEVPGLGVDSAQQIIAEVGATAATFPSAKHLASWMGACPGNEESAGVNYSHRCPKGNQHMRRVLNQAANAAVKAKGSIFAIVYRRLVPRLGHAQAIGAIAHRLCRLIWKILHEGIRYEERGPAVSVEAKKVRTRKMIRELRTLGYRVELLPAPSSNPA

SEQ ID NO: 168808 - protein, 420 aa, unidentified
MSKHRYHTIECKKFDWQKLLETVSGQRVVFAIDVAKQDFVAAFGFEGQVLSRIKWKHPNETNDLLVGIELIAESGGLEAVMEPSGTYGDALCWQLVKRGIDVYLVSPKRVHDAAEVYDGVPSLHDAKAAEIIAHLHFEKRSVPWNEMTKERRAAEARLSKLRICKKRHQAELNRLEAQLSRHWPESQNILDQKSLTLQRVLAAFGGPEQINIHPDEARALMQCSGGPGLRSDKIEQLLHSAVHTLGVPCIAEENEGLQWLATQLLETHDLLRTIELEIEQLVSDSEVLTNTAHIVGKVTSAVLLASLGDPRSYFDADSYCKGLGLNLKERSSGKYKGRLSITKRGPSIARYYLYFAALRLIAKEPLVKRWFAAKTSRPGAIKLKTVIELMRKLAKGLWHSAQGKAFCVDKLFNLKAVENN

SEQ ID NO: 168809 - protein, 347 aa, unidentified
MLADRLDYVVGVDPHRDEHAVGVIDVRSGVVVFEASVAADSNGYVEALRLAEAHAPGRRAFAVEGGGSYGAGLTRFLTRSGEQVFEVGRLPKQRGSGKTDALDAVRAARAVLSQERPATPRSGGEREALRALMAAREGAVNAKRAGLCQLRDLLVTTPEPLRAELRPLTQARLLARLAATRPQSRQDPELRGALLALRSVARRIRQLTVEERALAREIKTLTEKLAPQLLDQPGVGPLLAAQVVLTWSHRGRVRSEAAFARLAGVAPIPASSGQTIRYRLDRSGDRQLNRAPHQILVTRRRIHPPTIAYIDRRISEGKTPREANRCVKRYLARGLFRLLENGAPPDA

SEQ ID NO: 168810 - protein, 331 aa, unidentified
MSNIIGIDVSKAGLDCAYLHDPDQDKAKRKSCPNKVRCFASLVTWATARSGLPVQALAFIIEPTHVYHEQLVQFLHNTGATVYLVNPGRVRKFAEGIGILSKNDLVDADLLTRYGLIARKLIAYQPVAQEVNDLRSLLNRLEVLERLLRSELNRQEKVGKTMVFHRLEQQSIARAVKRLKAEIITFKRAIRECVNSTSSLQQNFDLLHTIPGVGAKTAWIMLVILGSRAFRSAPEVASFLGLNPIEKRSGKSQYRRPRLSKSGSGNYRQQLFFPAMVATRKNPDIQALYERLLAADKTKMCALGAAMRKLVHICYGVVKNQAPYRPQIVKS

SEQ ID NO: 168811 - protein, 346 aa, unidentified
MLYAGLDLSRRRLDVHLLREDGSTALAVAVAPDGDALRGLARRVAAEGEPVRATVEGMTGSRFIHDELELAGWDVLIADAQRVRGLAPLAAKTDKIDAFVLAELTRRSLVPEIWLPTPEVRSERERARFRLHLVRHRSALKNRIHATLMTFGHPVPMTDMFGVAGREMLDKLALPEPWHTNLVASLALVDDLTARVDALEVELRHLGATHHAIPLLMTVPGVGWVLAYTIASEIGDVHRFASAKKLAGYTGLCPLVRQSGGKDRRGPLAKNGPKYLRWALIEAATHAARDARYRDRYERTKKRLGKQRGAKIARVDLARQLAEAIWWVLTKNEPFAPAGPAIFLVA

SEQ ID NO: 168812 - protein, 390 aa, unidentified
MRTTHDIVIGVDPHKASWTAAVINREQRVLGKIRVPTSPDGYRQLRRFTATWPRAAWAVEGATGLGSPLTVRLLDDGDTVIDVPAKLSARVRMLDRGHSRKTDEADAVSTAAAALANDSLHPVRLDPAAQALRLLSDRRDDLIAARTLVINRLHAALTHLVPGGAPTSLNATAASRLLASVRPRDQVNRARRQIAKDLLADLRRLDTQITTLDKHILQAVRDTGSTLTALFGLGPVLAARVLGRVGDINRFPSEAHFASYCGAAPIEASSGDTVRHRLSRAGDRTLNHALHMMAITQVRSHPEGRAYYQRKRTAGKSHNEAMRCLKRRLVSVIYRTLRADADREAAGPGGQAGASLTSSAASPTLRASSSEKSQPEPTDRHLTRPTTPAS

SEQ ID NO: 168813 - protein, 320 aa, unidentified
MMAQNDQIVVGIDVAKDKVDACIRALSQRHTFPNTAQGHRKMIAWLHKHKVNKAVMEASGGYERGWARVLRLAGIEVRIVDPKRVRNFALSAGRLAKNDTIDAEMIAWFAETFAEVPGQSHDAAHEELVALVKARKGLIDLKTRLQSQDEHASPGPVQKAHARVLKSLGAEITRLEVAISAKVKATPEFADRAEIIESVPGLAETTSATLIAGMPELGQVSDEIAAALIGLAPYDDDSGKRHGERHIKGGRRWVRNAIYMPCLGAATQNNPVLKVFYQRLIAKGKEPKVALVACMRKLIIILNTMIARRQKWDPSRYALN

SEQ ID NO: 168814 - protein, 308 aa, unidentified
MNYSIIGVDISKHFLDICMLPTGEICRYSNDKSGFKELLGMLNKHSFERILMEDTGCYHKAFYKFLIQYFDNVFIINPKRIRDFARSSGRLAKTDQLDAYIIAMYGERMNIISKITRSPAAEKLRAYVVRRRQLISLRKQEYNHIETCLDDDFKSSIYKIIKFIDDEIKQIEKAMKELIKLDDRFKSIYDRLNQIKGVGDVLITTLMSDLPELGYLNKRQIASLAGLAPMNCDSGKMRGSRHIQGGRASVRHALYMAALSATKTNDVIKIYYTHLREQGKPGKVALTACMHKLLIYINSVFNKEFCSI

SEQ ID NO: 168815 - protein, 394 aa, unidentified
MKLIGIDIGKNKHFFCVMDQQTGEIISQPVSFSNDKEGFDFLVQKIKSYPKDSILIGMEDTGHYHFALLKYLLDLQYTVALINPKTTDFNRKIQGGITKNDKLDTINICDVLDTPERKKQYRITKVNSFDLYEQKQLTRHHHNLKEEENVYKNRLQKCIDIVFPEFNKLFNSKYGIVYMNILKMFGSAENIANTDIRTIRKCFEIEGRGNRISLTPERLKECAISSIGISSSAEVIQIKHLTAQIELIEEQLTEIDKKIEEFSIQNNSPILSIPGISHFSGTSILAELGDISNYSKPSQIIKFAGVAPLHYESSQFNAQHTAITKKGSKYLRKTLYQIILPVIRHNPVFNKYYQLKISQGKGHRCAQGHCVRKLLRIIYHLLKTNQQFDPQLLR

SEQ ID NO: 168816 - protein, 342 aa, unidentified
MNAVHTVVGVDVAKNVFQAYWVVPETGEIRNIQIKRAKFLEHFAGRPRCLIGMEACGGAQHWARELSKLGHDVVLLPAKAVKAFVVGNKSDAIDARAIWIAVRQGGIKRVAVKSEAQQAVLALHRMRQQLVKVRTAQSNALRGLLMEYGEVFAQGRASLARGIAAALERIEQRLARVVVDSLRELWQRVIEIDGQVKQVERRLKSLLAEDRNAQRILQIPGVGMLTATAVSATMGQASAFKSGREFAAWLGLVPAHTGTGGKTRMLGISKRGDSYVRTLLIHGARSVFTGAKNPGPWLQKIGQRRPMNVAVVALANKMARTIWALLAHGRTYEPDYVSRAST

SEQ ID NO: 168817 - protein, 385 aa, unidentified
MLESIGQIRTMTPWCLTSRDTKEGRFESITLAARLAKLSTFLETITGPEQKEQMACIIETTHGLLIAFLLEAGWPVYPVNPRTVDRRRAASGAKTDTIDAYVLAKTGRADLADLHRLTPDSELVQELKTLTRDQDALIQMQTRLVNQLTATLKAYYAVALRLFTKVQQHSPLIFLQTYPTPQAAMGASVEQITEVLQHAGHTTAEKVAPKIFETLHQPHLTANAITTRTKSRLMVALVTQLLPLVEQIAEYDKEVKRLFLTHEDNEVFSSLPRAGKRLAPRLLAEIGDERTRYADAASLQALAGTSPVLFQSGNYAKAHRRVGCIKPLRNVLHQFAWQSTQQEGWARDYYQRKRAEGKSHTVAVRALSNVWARIVRHVGAYGIPA

SEQ ID NO: 168818 - protein, 359 aa, unidentified
MVKEYHIGVDLHKRFSQVAVIDGKGEEIENKRLENNAFEVSEYFSSFPKETPVSFESTIGYEWLADTLAENGFTNLHMAHPYKVRLIAEATIKTDKVDAATLAHLERTNFLPLSYLPPIAVRETRELLRHRLKLVTIRAQLKNRIHAVLAKRGIFSYPVTDLFGKAGRQFLSNLTLPAVYQKEITNYLLLLDQIAKIVSTLEKDIKRQVKEDYPQAGLLLTIPGISYFSALLLMAEIGDIERFPSSKRLASHAGLVPATRETADKLHQGHIKKDSNKYIRWILLEAVDILIRKDPGLAFIYRKLVCRKGKNRARVAVAHRVLVSIFYMLKKNEPYRTHLLKHYTVSGKPVLDTGPYMRP

SEQ ID NO: 168819 - protein, 356 aa, unidentified
MNEGSCVGLDVHARSVVAGVIDVGSGEVRSQRVPPGSEAMVAWLKTLPSPVRVVYEAGPTGYGLARACADVGISCVVAAPSKIRPAADRVKTDRRDAERLARLLRLGEITAVRVPGPDEEAARDLVRAREDARGDLMRARHRLSKLLLRHGAVYDATAWTRAHDAWLRKQRFQGGPLAIVFDECYSRMLDAKARRDTLDKAIAELAASEPYVDVVGRLVCLRGVSTLTAFALTVELGDWNRFRPESLGPFLGLTPSENSSGQRRRQGGITKTGNTHARRLLIEAAWHQRSAPRLSITLERRRTGKSLAVRAQADSSARRLHGRWNALEARGKPRLIVVVAVARELAGHCWALATME

SEQ ID NO: 168820 - protein, 346 aa, unidentified
MYKDNLFAIDLSKHSFQGCLLDKYHHECFNRNFTRAKLIEWLSRQQPLTVAMEACGSAHHWARLVKRMGHHPLLVPTRSVTAYRQGHKTDASDARAIGIAARQPKVKFVAPKTLEQQGMQGIERIREHLSDHLTATSNLIRGLLNEFGLPMPKGISAFKRGVIEILEDAENDVPMELRLQLIESWAYYQDLEARLATATRARDQVIAQHEVCQQLMHLQGVGPVNSLGLYLALGDRGSSFNQGREASTCIGVTPKQHSTGGEVTLLGISKQCANKRLRSTLVQGARAVINVLKKRDPKNGLEVWLKGVMVRRGEGRAAVALANKTVRLAWAMLHYGDDFKLHPDMA

SEQ ID NO: 168821 - protein, 343 aa, unidentified
MQTITTIGLDIAKSVFQVHGVDAEGNVVIRRQVKRRYVLAFFQKLPPCLVGIEACASAHHWSRELQALGHTVRLMPPAYVKPYVKRHKNDAIDAEAICEAVTRPNMRFVATKTREQQSCLTLHRTRHLLIRQQTSVINAIRAHLAEFGIVAPVGRNGVEQLLGVVADASDKRLPELARASVAALGDQLRALKAQILQFDRLIMAWHRSSEASRRLDDIPGVGPALATALVATVADPRAFRSGRNFSAWIGLVPKQHSSGGKDRLGSISKRGDRYLRGLFVAGALAVIRYAKIHGTKHRPWLTALLARRPTKIAAIALANKIARMAWAMMARGERYKEPVALTA

SEQ ID NO: 168822 - protein, 317 aa, unidentified
MSTPNRSSEINVGVDVGKFQLDIHIRPADIHFSVSNDTQGIREALKTLGKHRPDRIVVEATGRLEQAFVCACAKAGLPFVIANPVHIKKFAGAIGQLAKTDKLDARLIARYGEMIQPELSKLKPEIIKDISDLLSRRNQLVKMQTMEKNRLQIMPKSVQGSLQAILKTLQKEIAKLDKQLLTLIDSCEEYREKSDILKSVPGVGNVTVITLLSCFPELGYITNKQAAALAGVAPMNRESGRYHGVRKIRGGRHQVRTVIFMGMMSAIQCNPVFKAKYEALVKAGKSKKVALIACVRKLIVTLNSMVRDGTKWRSEMA

SEQ ID NO: 168823 - protein, 351 aa, unidentified
MMIVGVDYHPSDQYIAFADAETGECGERRLSHSDEEAERFYRDLQLRAVSVRVGMETTGYSRWFERLLAELGIEVWIGDAAKIKTKRVRKQKTDRQDAQLLLKLLLEDNFPRIWVPSPENRDVRQLLWHRHRLVQMRTRLMNQLQALALNEGQRRKKKLWSEQGRAQLEKLPLATWASRRRQDLLELLDRMNPTIEELTAAVEQEARKRHEVLRLMTHPGVGPVTALAFVMIIGTPERFPCGKQIGSYVGLIPSEDSSAGRQRLGHISKQGNALLRFLLVEAAQAAVRCDSDWRRRYLYLAMRRERRIAKVVMARRLAVRLYWMWRNGWEYAQSVEFGSHRGQLVTGLGVN

SEQ ID NO: 168824 - protein, 455 aa, unidentified
MSLLLVGLGPTGRVVAGRLTLFVTLKPSGLLAECLSVDLSVRGGAAGADRAHLGDLIEGCPTRIESWLITVLSRSDLHPGRRRPLRDRPQSAQERKPSAVTIVAHAHPFVVGVDTHARNHTIAILIASTGELVAREEFPATQTGLKRAVAWAARRTDGDLSTLWVIEGVATYGARLARTVTATGYQVVEAARMDTRANRGVGKSDPLDAHRIAAAVLPLDTGQLRHPRKDDGVRAALRVLVTAREHMATERTRAINALVALVRAAVLDIDARRPLSNRQMAEIARWRTRDEDLATATARAEAVRLATRVVDLDDELAANQRHMTDLVRQSRAAALLDKPGIGPVTAATTLVVWSHAGRVRNEAGFAALAGVNPIPASSGNTTRHRLNRGGDRRLNQALHMATIARMTHDPATRAYVERRRAEGRTTKEIRRILKRYLARQLYRALNAFDSPPLTT

SEQ ID NO: 168825 - protein, 346 aa, unidentified
MKITTIGIDLAKVVFQIHGVDERGKVAVRKQLKRAEMSGYFANLEPCLIGMEACGSAHHWARKLEGYGHTVKLMAPQFVKPYVKTNKNDMADAEAICEAVSRPNMRFVALKNVEQQAILSVHRARQGFVKARTAQGNQIRGLLSEFGIIIAQGIGAIAKRVPEILEDGENGLPGTMRNLIERLTENLKEMDRQAKELEAQIQLWHRDNAASRKLAEIPGLGPITASAIVATVGDAREFKNGRQLAAWMGLVPKQNSSGGKQNLLGISKRGDTYLRTLMIHGARSVVRVAEKKAEPGSWMRKLMDRRNKNVAAVALANKNARIVWALLAHDRMFRLDYIPAATAAGM

SEQ ID NO: 168826 - protein, 352 aa, unidentified
MVVVGADVHKQTHTFVVVDDVGRKLGEKTVRAVTAGHAEVVMWTRERFGTDVVWAIEDCRHLSARLERDLLTAGQKVVRVPPKLMAQTRASARTRGKSDPIDALAVARAYQREPDLPVASHDEVSRGLKLLVDRREVLVSQRTATINRLRWRVHELDPERSPAPRSLDLAKHRRLLQQWLDTQHGLVAELARDELADITRLTEAINALAKRIGERTRAVAPTLLALPGCGELTAAKLVGEAAGVTRFKSEAAFARHAGVAPIPVWSGNTAGRVRMTRSGNRQLNAALHRIALTQIRLDGSGQAYYRKKLDTGASTHEALRSLKRRLARVVFNHLHTDHNNRNQPWPTGSGLT

SEQ ID NO: 168827 - protein, 410 aa, unidentified
MQVLYPHCAGLDVHKDTVVACVRHMAGGTVKRQVRTFKTTTTELLALSEWLAAEKCTHIAMEATGVYWKPVWHILSDGDFSLVLANAAHVKNVPGRKTDVNDATWLADLLAHGLIRGSFVPDQQTQEMRDLLRTRKQLTRERSRHVQRLQKTLEDANIKLDSEISDIIGLSGRKMIEALIAGESDPEQLARLAHRRIKAPPEALREALRGRVTRHHRFLLRLHLHQIDAIDKMIADIDREVDALVEPFRTTVLLLTTIPGVDELSAGVILAEIGRDMSRFPTAGHLISWAGLCPKNDESAGKRRPTRMRKGAAWLKTTLVQCAAAAARKKASYLQAQFHRLRARRGARKAIGALAASILTIAYHMLISGELYHDLGPDHFDRRTKTAQTRRLVMRLQHLGYAVHITPVAA

SEQ ID NO: 168828 - protein, 378 aa, unidentified
MAEGSTWVGLDAHKKAINVAMLQGHETRPQEWIVENKPAALRRLVKKLVREADGREVRCCYEAGPCGYALQRQIESEGPVICEVIAPALIPRKPGDRIKTDRRDARKLAELLRAGLLTEVQAPTPEQEAVRDLCRAREDAKQDQMRCRHRLGKLLLRRGMVYGGGKKAWTQTHRKWLRTLKFEHASDQAALDDYLLAIEQVEERIKTLEQRMQATAESEPFAKPVGWLRCFRGIDTVTALSLVAELHGIERFPSPRALMAYLGLVPSEHSSSDRPRRGAITKAGNSHARRLLVEASWHYRHPPCLGVALKERRKGQPAAVIAIADKAQQRLYRRQRHLAARGKIPTQAVVAAARELSGFIWAALLHQHQQQLASAEGQ

SEQ ID NO: 168829 - protein, 402 aa, unidentified
MEKYAGIDIAKKVHWMCVTDGEGRLIMEPRPYGNDSEGLSRMVADLDLYGGDVAVGMESTGCYWRSCYKVLAEGGYPVSVINPVKTCSERKQGNLGRAKTDRVDCLVVADTLRKQGIAPTPPPDADAAQLRDLCRFRRTVSESLSRAKIQIVALLDQVWPEYPRLFGNLFCGASLAVLRRFAVGDMGADGLASDLLSASRNRYGAAKAVEVLDSLRETCGVPATDALLLQLRLLLDQLDFCASQLSEVDAEADALLDAVAPTLPTVPGIGRATAAQIAAEVGDVTRFRDAKALVAYAGLDPTRRQSGGFDPDKNRISKRGSAHLRRSLYIAAQASLRADCEFRDFYDRLRGRGYSHRYAVCAVARKMLCVVWALMRSGEEYSRERHAARGKALEGASPVDAG

SEQ ID NO: 168830 - protein, 376 aa, unidentified
MRNDSTVYVGLDVHKESITVAYAADGGEVESLGRIGPTKTEIDRLCERLRSKARHVRVVYEAGPCGYGLYRQLVQKGFDCMVCAPSLIPRKPGERVKTDRRDAIKLVRALRADDLSAVYVPGTEDEAFRDLARAWASARDDLRQARQRLKSFLLAHGVRYIGSANWGPAHRRWLSEYSFGNEWQQLAFDEHRRTIEDRLAQCDRLEVALREAVVNWRFYPAVLGLQAMRGVQFVTAVGMLSELGDLSRFEHPRQLMAWLGVTPSEHSSGGKRRLGGITKTGNSYARKLLIEAAWSYRHPARVSRDIQCRHEGIPKALIDRAWDAQIRLCRRYRKLAARGKHVNIAAVAVARELAGFIWDIGRLAMSLAVPHREQAA

SEQ ID NO: 168831 - protein, 345 aa, unidentified
MKLTPVGIDIAKMVFQVHYVDEETGEIVNKPVKRAVFLEHFANRPSCLVGMEACGGAHHWARKLLKMGHQVKLMPGEFVKAFNIRNKNDAADARAIWLAVQQPSKAVAVKTEMQQAMLALHRMREQLVKFRTMQINGLRGLLTEYGEVTAKGRASLDKAIPEILARVAERLPAVLIDTLREQWNGLTNLDGQIAAIERRMREWKKDDRAVKAISEIPGVGLLTATATVAMMGDAKAFRSGREFAAWAGLVPKQTGSGGKVNLHGISKRGDRYLRTLLIHGARSVLINAKDPGSWVEQMKQRRHPNVVTVALANRIARTIWAVLAHDRPYQKGYVSAKPALAVTTR

SEQ ID NO: 168832 - protein, 307 aa, unidentified
MRFYTQQHQFYCGIDWHARTMSLCIVNQDGAILVHRNMPAGPEPFLKAVAPYREDLVVCVACLFPWYWLADLCAREGMPFVLGHALSMKAIHGGKAKNDTIDSQNMAVLLRGGMLPQASVSPAAMRATRDVLRRRMPLMRKRAELLAHMQHTHSQYHLPGMGKNIAYKANRDGIAERFPAPAVQQSLAVDLALIGHDDHLVNDVEFSIVHTAQQHDPQTLSRRPSVPGIGTILRLVLLDDIHPIDRLPRVHDVVSSCRLVTCAKESAGKRSGTSGATIGHASLQWAFSEAAGLLRRTHPAGQKSLAR

SEQ ID NO: 168833 - protein, 343 aa, unidentified
MKIITVGLDLAKNVFHVVCFDEHSKEVKKRMLRRNQLRNFFTQLPPCKVGMEACASSHYWGRELKALGHEIKLIPAQHVKPYLLGNKNDFNDARAIAEALTRPHIRGVALKTTEQQDIQATHRMRSQCLRDRTALCNSVRGLLAEYGVVLGKGTSILRKSIHGLLEDAENGLSQIFRHLLARRYEQLVELDGHIDFFTHELEIQSRQDDACQRLQEIPGYGPIIASAFYSTVGNGEGYSRGRDVAASIGLVPGQHSTGGKNVLLGISKRGDGYLRGLLIHGARAVVIHASKKKDQLSQWINRIVAERGKNKAAVAVANKMARIGWAVLRHNSHYQAALIVSSL

SEQ ID NO: 168834 - protein, 346 aa, unidentified
MEVTYYTVIDVSLRSVSICVVNDKGKVCLEAKVAAEIDAIVDRLRQFSSDVKSVGFEAGTLTQYLTYGLQAAGFEVICLEARQVSVTLAAMRNKTDRNDARGLAQILRTGWYSRVHVKSLHSHQVRALLASRKAILKKCVDLENELRGLLKVFGIRLPSRVGHGSFDAELRDTVSGDEMLACALVPLLDARTVLYKTYLKLDNAVKGLVRVDPVCRRLMSIPGVGPVTALTFKAAVDDPNRFKSSRTVAAHFGLTPRRFQSGELDNPGHISRAGDADVRSALYVAAHSLLTRNAQWSTLKAWGVGIAKVRGHRRAVVAVARKLAVILHRMWIDGSEFRWGPAPASA

SEQ ID NO: 168835 - protein, 339 aa, unidentified
MKLYAAIDLHSNNNVLVILDERDRIKLEQRLSNELPAVLAQLAPYRKRVEAIAVESTFNWYWLVDGLMDAGYTVKLVNTAAVKVYEGLKYTGDEHDARHLAHLLRLGVLPTGYIYPKEERAVRDLLRKRGQLVRCRTAQILSIQNLVSRNSGHGISTRDIRELDEKGIAEVCVGNEFRALAIRSNLAVLRCLDEQIQGVERVVLGEAKLKPEFKKLLTVDGIWNILAMTIMYEAGSMDRFAKVGQFASYGRCVDSSRWSNGKKKGEGNRKNGNKYLAWAFVEAAHFAVRSNERIRRFYQRKKAKTNGIVAVKAVAHKLARACYHVLKDQVPFEEARAFA

SEQ ID NO: 168836 - protein, 390 aa, unidentified
MHTLFVGIDIAKLNHQATVIDETGKVLGGSIRFPNTTKGGTTLLDHVTKFRDGDTPIVFGMEATGHYWLALYSFLVGKGHTAIVINPYQSESWRKVYMSAVKTDKEDAFLIADLLRFGSIKKSQVPSEVTIALRNLTRFRVSMSLQLSDTKRRILTVLDQVFPEFPALFSDAFGKTAISILEEYQTPEALETLSSRKLTNLVSKLSRGRFGKAMAQSLHAAASDSFGITFALDSFSLQLKLLLHQLELLVGQLNLLDEEITKLFGTESKLLTIPGIGPTTAAAITAEIGDISRFKTSAQLVSFAGINPTVRQSGNFIGNKNKMSKKGSPYLRLALWQASVVASRKNPILKAFYEQKVKEGKHKMTAIGAVSRKLTGIIFAIMRDNKPFMI

SEQ ID NO: 168837 - protein, 415 aa, unidentified
MEVVYERCVGLDVHKQSVTACLIVSGQGVKPNPKKEIRAFGTMTDDLLKLSDWLTVNAVTHVAMESTGVYWKPIWGILEGDFTLLLVNAQHIKAVPGRKTDVKDSEWIADLLRHGLLRASFVPDQDQRELRELTRYRTTLVRERAAEANRLQKTLEGANIKLGSVATDVLGVSGRSMLAQLIEGTADPTAMAELAKGRMRAKIPELVRSLTGKVRSHQRFLLAQQLEHIDFLDGAINEASREIGERLRPFEEDIERLDTIPGVGRRTAETILAEMGRDMARFPTERHLASWSGLAPGNNESAGKRRSGKTRKGSPALKAALVEAAEAAVRAKNTFLAAQYHRIKARRGHKKAVVAVAHSILVIADHILNDKEPYRDLGAAYHDERNREKTKRRLVARLERLGVQVTLVDPAIPAA

SEQ ID NO: 168838 - protein, 357 aa, unidentified
MCRLMWGCWKMRADKKRRVKVNGSSMNSIVAGIDLGDRESLTTVLSPIGDVTDRFTFPMNEEGYAYFANRVPLEARIAFESTIMAYPIMRALRGHGYSDITVAHPKTLAWIVRSKKKNDRVDSLKIAKLHMAGMLPESRLLDRDAQIVRDLLVQRVKLGVEVSRLKNSLIGYLKREGVYDSLPKTGDNFSIKRRESIRSLRFNDERDLVLGTMMDRLEFLERQCLPLEESVRANAKLSDDVRLLMSITGVDYYLASLTSSFIGDVNRFPSDDHLASFLGIVPTSRDSANVKRRGKMTKDGSSIARWALSVMVDTVMRHNEPIREYYVGVKKRTGSGKLAHVSTMRKLTRMHVPYAEG

SEQ ID NO: 168839 - protein, 369 aa, unidentified
MDNTTFVGLDVHKATVCAAVAESGRSGEVRQIGVFENRPDVLKKMLTRLGKNGRRLSFCYEAGPCGYGLERLLRGAGHECMVVAPSLIPIKAGDRVKTDRRDAMMLAKLHRAGELTAIWVPDQAHEAMRDLVRARATAVRVLGKARQHLQGFLLRHERVYHGPRAWTVAYRRWLATVKFEHPAQQIVLQDYIHAVQDAETRRDRLTGQIEELLPNWSMAPVVAALQAMRGVAFVAAVTVVAEVGDFRRFANPRQLMAYLGLVPSEHSSGGSVRRGGITKAGNALARRVLIEGAWTYRMSARVSRKIHDRLEPLSTEIRDIAWKAQVRLCARYRRLVASGKPKVVVTTAIAREMVGFIWAISRIAQPNFA

SEQ ID NO: 168840 - protein, 366 aa, unidentified
MKKTSTVRVNGNMIFKGHKLTIGLDLGDRWSNYCVLDEAGEVLLEQKLATTPEAVKQTLGRIPRSFIALETGTHSPWLSRLLKELGHEVLVAHAQKVELISKSNRKDDRHDARTLARLARIDPELLGPVRHRSAKAQIHLTVIRARAELVSARTALVNGARGLTKSYGERLPKCGTEQVSRELGAQLSAELREVLEPLLKEIESLNEGIKEYDVRMEKIARESYPQVVLLKQVKGVGTQIALTYVLTLDDPHRFAKSREVGCFLGLKPGRRDSGQSQPQMRISKEGDRYLRTMLVQGAHYILGPFGEDSDLRRWGLRLAERGGKNAKKRAVVAVARKLAVLLHRLWVSGEVYEPLRNSHQAMRAVA

SEQ ID NO: 168841 - protein, 340 aa, unidentified
MRRLYAGSDLHGNNNFVGIVDEQGRRIFKKRLPNDPQLILEGLRPYKEEIVGVVVESTYNWYWLVDALMGEGYKVHLANPSAIEQYSGLKHGDDKHDAFWLAEMLRLGILPEGYIYPKEERPARDLLRKRAHLVRLRTSLVISLQNILSRNLGRKVNVNDVKALREDRISPLLERNEDLALAGQVSKEAIDHLTHQIYKIEWVVQKRVALKPEYRYLLSVFGVGKILSLTIMLETGPIGRFPTVGDYVSYCRKVPSQWTSNGKWKGSGNRKNGNKYLAWAYSEASEFARRLHGEARAYYQRKMQKTNAPVAHSALAHKLARAAYHVMRDQVPFDPEKLFG

SEQ ID NO: 168842 - protein, 335 aa, unidentified
MSSLVCGLDVHKDNVYATVMNYGGEIVEKRKLSTDEVAGFLSRYPIDKVAMESSTSIVPVYRALRGRGYTILVSHPKKTRLIAESRIKTDRVDSWAVTELARLDALPLSYMPPDDIAALREKVRRRAFLVRMRSKLKVKIKSQLLVNGFTPPSEHGLFTVKGLEWLRSLQLDAVDSYLPVIHTLTIQVGKLSRELRGLASGDEDVKLLMTIPGIGYYSALLIKSEIGDISRFPDGEKLCSYAGLVPSVSISGGYTRYGSITKEGSRWLRWIMVECVHIHLRYDTSITRAYHAIAERKGAGIAKVAAARRLLMCCDSVLRNRRPYYDPAGGYQASS

SEQ ID NO: 168843 - protein, 339 aa, unidentified
MMIIGCDYHPSFQQVAFVDTTSGECGERKLTHQMEAESFYRNLHGQEVRIGMEATGHARWFERLLAELQFELWIGDPGEIRTKRVRKQKTDRQDAELLLQLLVENRFPRIWVPSPENRDLRQLLWHRHRLVQMRTRVKNQLQAIALNEGLRRQKGLWSKSGRAQLEALELAPWSARRRQDLLELLDRLHPRIEELSAAIQQAAEQKPEAQRLMTHPGVGPITALAFVLILGVPHRFRCGKQVGSYLGLIPCEQSSGGRQRLGHLSKQGNTLLRFLLIESAHAVVRYEPDWRRRFLHLALRRGRSIAKVAMARKLAVRLYWMWRKGRDYQQISKFGSHVE

SEQ ID NO: 168844 - protein, 358 aa, unidentified
MAKPTQITPVVGGVDTHKDLHVAAVVDQSDRVLGTQSFATTRQGYKLMLTWMRSLGDLQRIGVECTGSYGAGLLRYMQAAGVDVLEVTAPDKLDRRRRGKNDDFDAESAAHAAFAKRRTVTPRSRDGMVESLRVLKVCRKTAVQARRIALQLIQSTIVCAPDQLRDTLRKMTRMQLIRTLAAWRPDLTAYRDVEEAYRIAFKSLARRYLELHDEVADLDTMIQAIVADLAPELIARNSIGVNSAAQLLLTAGDNPERLRSEASFAALCGVSPVPASSGKTIRHRLNRGGDRAANSALHIIAIGRLRLDPTTQEYVARRIAQGHSKLEAIRCLKRYIAREVFTIIARSHKQINQTQIAA

SEQ ID NO: 168845 - protein, 371 aa, unidentified
MKSIIYVGMDVHTTNYTLSCYTVENDMSFATVQVEPDYKNILKYLEQVQKNYGEPCEFLCGYEAGCLGFTLYEELKRHDVPCVILAPTSMPVYKKTEIKTDKRDAMKIAKCLAYNTYSAVHIPTKEDSDIKEYVRMRDAHKTALKKVKQQILAFCTRHGFRFSEGRNHWTQKHLKWLRDLKLDGLLREILDEYLATYTQETDKVERFDKRIAELAEGESYAKKVHCLSCMIGIRTHTALSLLVETGDFHRFKKAEQYAAFLGLVPGEHSSGDGQNRLGITKAGNSHLRRLLTEAAQCYSRGKAGYKSKALKARQYGNPAEIIAYADKANERLRRKFYRMVLNCNKKHNVAVAAVARELSCFVWGIMTEHTT

SEQ ID NO: 168846 - protein, 338 aa, unidentified
MNMKRVGVDLAKQVFQVHGVDTHERVVCRRQLKRAHVLDFFRQLTPCVVAMEACGSAHYWARELRKLGHDARLIAPQFVKPYVKGDKHDAHDAEAICEAASRPGMRYVPVKSAEQQAAQAVHRIRSRLVRARTALSNEVRGLLGEFGIVSSRHGRAASSELLNLVVTGEYDPLPAPMGTLLTDLKEELQALDQRIARLNQLILNNVRSDVRIQRLLTVEGVGPISATALVAAVGDARQFRTARQFSAWLGLVPRQHSSGGQQHLGKISKRGDTYLRTLLIHGARAVLRTCATKTDTRSRWLQGLLQRRNQNIATVALANKNARIIWALLSRESSYQPD

SEQ ID NO: 168847 - protein, 394 aa, unidentified
MKLVGIDVGKNSHHFCVMDKETGEFNVTPSSFPNNKEGFDFLINSLKPYSKKSILLGMEDTGHYHVALLKFLLSNGYTVALINPKTTDLTRKMEGGITKNDKLDTITICDVLDTPERKKQYRITKVDRFDLYEQRQLTRHHHNLKEELNVYCNRLQKSIDLVFPEFNTLFSSKYGIVYMNLLKTFGSAEAIASTDIRTIRKFFEIKGKGNRISLTPEKLKECAKNSIGISSEVETIQIKHLVSQITLIKEQIAEIDKKIEEFSIPNNSPILSIPGISHFSGTSILAELGDIGNYSKPSQIIKFAGVAPYHYESSQYNAQHTAITKKGSKYLRKTLYQIILPVINNNPVFKKYYLLKISQGKGHRCAQGHCIRKLLRIIYHLLETGQSFDPALLR

SEQ ID NO: 168848 - protein, 356 aa, unidentified
MTSTKYVGMDVHKESISIAVMDAAGKIVMESVIETKASMLLQCFNGLRGDVRVTFEEGTWAAWLYDLLKPRVSEVVVCNPRKNALLKDGSKSDRIDARKLAELLRGNHLKPVYHGEQGLRTLKELARSYLNISKDVTRVMNRLKALYRGWGIPCAGHEVYVPRHRSEWLGKISEAGVRRRAEHCYQQLDVLRLLRQQVRRDLLLESRKHPTWRLLGLIPGIGPIRAALLIALIQTPHRFRTKRQLWTYCGLGLETHDSAQYRVVEGQLQRSKKSVTLRGLNQDHNRDLKDIFKGAATKVSSSNSGPFHDFFEHLLAQGRKPTMARLTLARKIATITLIVWKKEVRFDASYLKSQAA

SEQ ID NO: 168849 - protein, 388 aa, unidentified
MNKIIYIGMDVHSTNFTLCSFEPGYGFETDKIFGQTQIKEDIFNSTVKYINKLKSMRPDVDVVCGYEAGCLGYNLHRKLKAKEIESVILAPTTMAVSRNCSKKKNDYRDAITIAKCLASSAYKAVYIPDDKDEDVRDFIRMRDDHKTALKQIKQQLNAFCLRHGHHYDKTKWTGLHLNWLRKLELSKVQRETVEEYLATYEALTSKIAALDVRIEDIASEERYAEKVNKLKCIKGIKTHTALSFVCEIGDFNRFKSADKFAGFIGLVPGECSSGNTERMLGITKAGNRHLRRLVVEISNTYRRGTVGRKSAALKERQKDMPKDVVAYADKATNRCQRKYQRMMFKGKNSNQAVAAVARELCCFIFGMMTGHYSRTAQAEASVYRSELD

SEQ ID NO: 168850 - protein, 460 aa, unidentified
MKNNKQSKQIKNKRISKHLEQVNLFAAGIDIGSQSHYVSVPEELAPESVREFPCFTGDLNRLADWLVEIGIQTVAMESTGIYWIPVYEILEERGLIVLLVNSRHIKNVPGRKTDVLDCQWIQQLHTYGLLEGAFRPEEETVALRTYMRQRETLTQQSSDQIRRMQKALRQMNLLLDNVVSDIDGVTGMKIIRAILEGERDPIILAKYRDGRCKKEESTIAASLEGHYREEHLFSLKQSVELYDIYQTKIIDCDKAIQAQLDKMDTKGDKKDLAPSKKSKSKNTPKFDVRGDLYQMTGVDLTRIDGLNESSVLKILSETGSDISSWPTEKHFCSWLGLSPGNKVTGGKMLSGKTKPSANRAAAAFRLAAFGLLNSKSALGAYCRRQRTRLGAPKAITATAHKLARTFYSMLRNGTEYVDKGQDYYEKQYRERIINNLKKRATEMGFELIAKDGSMLEILKA

SEQ ID NO: 168851 - protein, 353 aa, unidentified
MRSSHTSSNPIATIGIDAGKTTFHLIGLDKLGAISLRVKVSRSQLARRLATVPRCLIGLEAGSGAHHIARQIQALGHDVRLIPAQYVKPFLKGHKNDYRDAEAIADAVQRPTMDFVSIKTPEQSDLLSLHRVRSRLVGQRTAVMNQIRGFLIERGITVRQGPAPLRKALPEILSSPPEVLSPRLVHLISDLSQDWRRLDERIQAVSAEIETLAENDGSCQRLMTVPGIGPIISSAVVAAIGNGSGFHQGRDFGAWLGLVPRQESTGDRTKLGKISKRGNKYLRTLFVQAAHVVLVRRPAAAMRGLWPWIEQASKRLAHRNLLAIALANKLARIAWAVLARGRDYEPRTRSHAG

SEQ ID NO: 168852 - protein, 375 aa, unidentified
MKIIGCDYHPSFQQIAMVDTETGEVTERRLYHGNGEAQRFYESLSGAVRVGVESSGNMLWFERLLARLKQELWIGDAAAIHWQNPRKQQLTDKRDAQHLLDLLVEQRFPRIWVPSVEERDLRQLLKHRHTLVQMRTRVKNQLQHIALNQGLQKKSKLWSQEGQEWLKKLELDPWTQRRRDDLLQMLEDLDRQVKQMNREAEKAAAARKDAQLLMSHPGVGPILALATVLTLGDVSRFQCGRQVASYIGLVPTEMSSGQHRWLGSITKQGNSFMRFLLVQAGLSAARGDAELGRVYKRLAQKKHHGIAKVAVARKLLVRLYWMLRTQKQYPEVVRMQGSPSHPVAEAKADRLSGRPASRPEPKDQKQKQKNRKKQK

SEQ ID NO: 168853 - protein, 359 aa, unidentified
MRTKDAWERRSLHMMLIGCDFHPSWQQVSWLDVETGETGEQKLVHARGEAKQFYEQLAAPVLIGMEATGNSQWFIELVEDLGHEIWIGDAAQIRASYVRKQKTDKRDAAHILKLLVEGRFPRLWTPDREQRDLRQLVLHRHKLVLIRSRVKNELQHLSLNKGMQRKRRLWSQAGQQLLRELPLKKWAACRREDLLGLLTMLDEQIGKLDGAVQHAAEENPQSKLLMTQPGVGPNTALAFVLTIGDVGRFPRGKQVASYLGLIPREESSGGRQKLGAITKQGNRMLRSLLVEAAQVAVQHDPGLRKQYRHRCHQKPKAVAKVAVARKLAVRLYWMLRTNVAYPEIVRIESSSGLPLVGAS

SEQ ID NO: 168854 - protein, 437 aa, unidentified
MRVLYEHVAGIGVHKDMIKVAIRSPGEKPWTRTTEILEFRTFYGVLQEMARLLRRRGVTHVVMEASGVYTDPVCYALCEQDFAEVAVVNPAHARALRGHKTDAADCRRLAELFECGLLRGSYIPPAELREVRDLTRYRMKTVQARTSEIQRLGKALESAGIKLGSVASDITGKSATAMIDSLIDGERRGAVLADLAIGRMRTAGKLADLSMALTGRFTEHHALLCRLHRDRIAGLDAAVADLDDQIAGRAGRWQRELDLLKTVPGFGDVVAQTWLAEIGPAPHRHFASHEKLASWVTLCPGNNISARKRKHGRTGDAGTYIKPMLIQAAWNAIRPKGRLQARYSRLVRRFGGEKNPGAKKKAITAIAHTLLKIAYQVLKSEVPYQDLGADFYTRRESPDQQRAYLERRLRKLYPGCAITITISPPEAVLTSTVSNAP

SEQ ID NO: 168855 - protein, 387 aa, unidentified
MEKTRGRVVGLDVHPDSFVGAVMEGTDPLSAQVLSTSTRVQLEQLERWALRHTRTEDRLVLEASGNAFAVAERLRMIGRKVDILDSHRAGKVGKVYCANDRVDAVKIARIYLSALSPIVWQPDEKTLERREVFSAYQAVVKESTRAKQQLRSMLNEHCVRLEKGFRLCHPKAITRLLALREWTPARTMLLQQLHGSLVAARARRTLLRRHMAQEIAAEEALLRLTRLCGINLITLYGVVAAVGDVRRFPHSKKLVAYLGLNPSVSQSGNFQGSTALKRHGRGALRALLIQSGKKLLEVNNPLQKWGLAVASRRGRNKAAVAVARKLCVALWHVLMGHVIGALERLDTLKTKLSKFATEMGPAALHAFGYNNKAEFVEKKLYVLRSYP

SEQ ID NO: 168856 - protein, 407 aa, unidentified
MIFVGVDWAEAHHDVHVMDEDARRLGGGRLPEGVDGIARFHELVGAHADEPGDVIIGIETDRGLFVAALVAAGYAVFAVNPMSTSRYRDRHSTSGAKSDPGDAKVLADMVRTDRHNHRLVAGDSEAVQAVKVLARAHQSMIWSRGRQTNALRSTLREFYPAALAAFDDLASADALEVLRIAPTPALGRALSKAKIAAALRRGGRQRRIEQRAEEIQTALRAPQLEGSEMVATAMGASVSATVAVIGTMVAQIALLASELEAGFDQHPAAKIVLSLPGLGTILGARVLGEFGDEPDRYATAKSRKNYAGTSPITRASGTKRVVLARYARNQRLAAAIYLWAFAALTASPGARALYDDHRAAGDTHHAALRALGNRLVGILHGCLANGTFYDEELAWGHRAETEPAEAA

SEQ ID NO: 168857 - protein, 416 aa, unidentified
MGKQRDNACGADIHKNKIVATILSQSGTKIQADFGTTLPELLKFKAWLINNDCRIMAMESTGTYWIPIYSVLEGSIDIIVANPYMIKHIPGKKTDLVDSDWLAELCLKDLIVPSRIFPKEDRVLRSLTRSREGLVKIRTRLKNKIHRDLSSSHIKLSSVVTDIFGKSGTHILRGLLDNRSIDEIIESIPSRRVKKNADKIKESIENNLDSSQIFLIESSLDLMGSIQDNINRIDADLRKRTSSRLNDLKIAMSIPGIEFTSAVTILAEIGDYRDFRSPEHLASYFGIVPFVNQSADKLRTGCITKHGSKHLRWIMVQVAHAASKKIGSRLRKFYLRVKARRGANVAIVALARKILCILHHLLINQEMYEEPGVTKRTRPVKLDQPSSQSEFTAQEMIDILQRSGYEIRKIERGAFG

SEQ ID NO: 168858 - protein, 313 aa, unidentified
MSQNTLTTIYAGLDIAKLNLQLHLGGRFHDLPNTAAGHSRLCKLLARYPGAHVVCEATGGYEREVVDALHASSIVVSVINPARARHFAHAQGQRAKTDRIDAALLAAYGRAMQPPPTGAATPVQRQLTELVRRRHQLVDTLVAQRQQAENLTLRALQRQARQLIRQIERNIHNIETELQKLGQLDAELGRRAEKLQAITGVGALTAVGVLAEMPELGTLNRRQAAALAGLAPHPRESGQWQGRRMTGGGRANVRRALYMAALVAARTNQHLKPFYQKLRSAGKPAKVALTAVMRKLVVLMNHILKNDDFVLQN

SEQ ID NO: 168859 - protein, 349 aa, unidentified
MVMTIVEPARAVTGGVDTHLDIHVAAALDGVGALLGTAPFPTTPAGYQALLSWLESHGEVTKVGVEGTGSYGAGLSKFLARAGISVVEVNRPNREERRRSGKSDPLDAIEAARAALGGKAKSIAKSKDGPVEAIRALLVAKRSARTARTSALIQMRELLVTGPDQLRARLRGLRISALTQEAARLRPGRHGDTVLIATKAALSSLAHRVQELDGELSELDARIEEILLRHWPALLGLFGVGPDTAAALVVCAGDNAERLRSEPSWARLCGVAPIPTGSGQTSGRFRLHRGGDRQANAALWRIVMVRIAHHPETTAYYHRKLREGRSKQDIVRLLKRYVAREVFRYLPRS

SEQ ID NO: 168860 - protein, 356 aa, unidentified
MSRILAIDLGKFKSVTCLLDSDTNQTEFWSMATDRHYLLAVLKNYHPDLVVIESCGLAGWVHDICSEEGYEVLVCNPNQEAWKWKHIKRKTDRDDALKLAKLAAPGQLVPVYIPCRQQREYRRLVKYRQVVLGRINRVQNNIRAIFAQRGMEMVRGQKAWALERLELIAQHRKPLAECSLDELWRGELDLELIQLEHLRQHQYEIHKKLKALAAADERVQLLQTIPGVGRKTAEVVVAYLDDPHRFQNARQVSSYAGMVPRRYQSGEMDRHGRIHKRGPRQLCSALVEAAWLMLRYNPWAKTVYERLTSGQRTRKKKAIVAVARKLLVRCWVMLLRKEPWNKETMIRQSAGIAVAV

SEQ ID NO: 168861 - protein, 392 aa, unidentified
MKISIGIDAAKHTHWACAVDEGGRVVLDCAVENNPQAIEGFVAALRGLDGDPVIGLDVVGSFARFLEAVLLAEGYALVHAPGIAVNRAGQGFAGGERKSDPRDARTIAELVRTRDLRPIAPDNETVVAIRLKVGRRRELVAEQTRRLARLRDLLCGIHPGLERGLDVTTKAPLALLSRFVTPAEIRRAGKARLIAQLRKTPQVRNVEALAECALQAAQAQRIAVVGEAATADLIRELAAEALQARERITRIDRDLEGLLTSHPDGALIRSLPGMGAVLAAEFIACVGNIGRFPSADALASAAGLAPVLRQSGRSAAWRRAFGGDKALKRVFFQSAFCAVMTGDPLSRAFYDRKRREGKHRTQALIALARRRVTVLWTMLHSRQNFDPIRKAA

SEQ ID NO: 168862 - protein, 351 aa, unidentified
MEITTVGLDIAKRVFQLHGVDAAGKAVLRRKLQRSEVLAFFKALPPCLVGIEACGTAHYWAREISELGHEVRLMPPSYVAAYVKRGKTDAADAAAICEAVTRPVLGLDPGMRFVPIKTAEQQAVLMLHRTRDLLVRQRTMLVNALRGHMAELGVIAPQGIARVADLIAVLFGEDTTKVPALARQALGGLAAELEALDRRVKEIEVAIVRWHKDNEASRRLATIPGVGPITASAIVATITDPFQFHSARHLAAWIGLVPRQHSSGGKQRQGGISKQGDRYLRRLLVLGATAVIRHSRSKSTAEAGWLKSLLERRPARLVSVAQANKTARIVWALLVRGEAYRTPAAVPGGAA

SEQ ID NO: 168863 - protein, 366 aa, unidentified
MQETLTQIKTADKLFIGMDLHKNTSTLCVKNEAGAEILSQRILTDKNAMKKFIGDIKEKSTELSLVMEPVSQWYYYADLIENLGVDVHLAHPMRVKAIAAARIKTDKIDAGVLADLLRTNLLPEAYFSSVDVRGWKEQCRFRASLLNLRTQVKNKIHAILFKHALRHTFSNLFGKGGMAWMGSLKLKEPFKTNLDKYLLLVDQFTELVLQAEQMIQSTVTHNPQANLLISIPGISFCSALTIMAEIGDINRFNSAKKLQGYAGLVPSTYASGEKQVHGRITKQGSKWLRWIMIEAAYHQERCKKIPGFGSYYLSIKKRRGTKTAAVATARKLLAVVWRLLKDNRPYEVTAPHCWKSGTLAPKLSSI

SEQ ID NO: 168864 - protein, 428 aa, unidentified
MIEWYNKAKGGDVMRSKKTFMPGTLVVGVDISKNTHVASAQAIGSQQLAFSDFSFENTTVSYEGLLSKISGLGHVNCVIGLEPTGHYWENFAYYLRKKSMKMVFVNPLFTRRMKDIEDNTPGKTDSKDSRIITSLMLQGKILNWAVPIGVYAELRPLSNIREQICRDLIRKANQLHSYIDRLFPGFSDSFCNLLQQTPLYLAKRYPTAAEFLAEDTDKLIQQVARVSRGCLGHDRIMLLKEKALLAQEVTEGTEALKVSLRTILAQIIYLKKQQRQIERRLTERLKEVPYAQYLLSIKGLGEVRLACILGETGDLKEFSSSCELIKFAGLNLYEISSGQHKGKRHISKRGRSLLRKQLYLAVLSMIKRDGVFFNEYQESVAKGKVKMRVMIALMRKLLRILFALARKERYFQKDYDRLTENYLMQVGG

SEQ ID NO: 168865 - protein, 391 aa, unidentified
MESAQMLQPVFVPREFEVFAGLDVDKTRIAVTFTDHNRLLKSLQMPYSSQHLLNYTRKQFADRRVAFVYEAGPTGFGLHDDLLAAGHRCLVVAPSMVPRAPGQRVKTNRIDSRKLSEGLRGGQLNSIHVPSLAYRHLRHLVQLRDSHVRQMMAAKYRIKALLLYEGIPFPEAPASNQWSARVLHKLGTLPCTAAVGFKLNSLVASLYFHQLEAAATQKQIRRFCQQDPELSRSIQYLTTIPGIGWIVASHLVARLGDWRQIRNVRQIASFLGLVSWEHSTGDQVQRGSITRTGDVRLRNKLVETAWTAVRKDPELEEFYRRIYQRHPRPIAARKAIVAVARKLTTRIYSVLKQQRPFRLKTGVAQAPLTPEETACPRGRLDQPQNEGTHGS

SEQ ID NO: 168866 - protein, 380 aa, unidentified
MDVHSKNYTLCAMEPTIGSEDRIFGEVQVAPDYKEVIYFIESLKMKLGLDNKYSIECGYEAGCLGYTLYHQLTAAGVKCVILAPTTMLTQQGKRIKTDKRDARLIAQCLCYGGYHPVYIPTGEDDAVKEYLRMRDDHKLALKKLKQQINAFVLRHGHQYSGTKWTIKHVTWLKKLELDPMYRETLNEYLASCEEQEAKIERYDKRIEEIASEARYQENAKRLGCFLGIRTHTALSLIVETGDFKRFAKGNTYAAFLGLAPGERSSSENMNRLGISKAGNTHLRCLLIEAAKGICKGAIGHKSKELRSRQSGQPAEVIAYADKANTRLRSKYYKMIRHEKKKNVAVAAVARELACFIWGMMTGNISIRSKAGTSSPAVSQG

SEQ ID NO: 168867 - protein, 448 aa, unidentified
MAKRKIKMDIINPNASGIDIGSRSHFVAINQQHSDVREFGVYAQDLKELVKWLLDNDIKTVAMESTGSYWQNLFTELQNASIEVILTNGKFTKNIKGKKTDVLDCMWIQKLHTLGLLSGSFLPDLQTEHLRTLVRHRGNLIDTTSKASKRMSQNMRLMNLRLDVVVKDVVGLTGLRIINAICNGQTSGEELAKLRHGNCKKSEEEIAKALQSNNRQDYLFVLKQELRKYQYAQQLIIECDIEIKKLLDEFINQDEVKKSLFIEKKIHKRINKNTPKNIDLNLMSYQYFDGVDLYAIEGFSHGTVLTLMSELGEKGIKKFINAQHFTSWLRLAPNNKISGGRILSSKTPKGSNRLKIALRQAANAIGNLKDTHLSNFFNRIAYRKGRSVAVSATARKLAVILWNMLYNNIQYNPPTVYEYLDQKRKRKVRELQKQIANLDARMSKINPS

SEQ ID NO: 168868 - protein, 354 aa, unidentified
MNSPVVGIDIGEEKSTVTYLSPEGEVKENFEFDMNTDGYSEFASKIPRETRIAFEASGSAYVVDRTLRELGYSDITVAHPKELSWIVKSKKKNDKVDSLKLAKLHLVGMLPESHLLSEDERIFRDLLIQRVKLSSEISSLKNSIIGYLKREGLYSSLPESNDTFSEKRRTAIMNIRFNNQKDLVLKTMMERLEFLERQRDPLDLEIKKIARDNEDVKLLMTIPGIDYYLASLLSSYIGDVNRFPNADKLASFFGVIPETRDSSSITRRGHMSKEGAATARWALSIAVDTITLRNKPLKEYYNSVKNRNGSGKYAHVSTMRKLIRMIYTMLKERKEWKYENTALTESKLSRLDDD

SEQ ID NO: 168869 - protein, 383 aa, unidentified
MKSVCGLDVHKDSVYLCILSEFGELIEKVFGVLTFQLEEMRDLMLHHHVVEVSMESTSVYWIPIWRVLSPHFKLNLANPYFIKQLPGRKSDVKDAQWIAECTMKELIRGSFVPPEIIQQLRQYDRRIFDLNEEIVRKLSKLDAVLQRCNIRLSNYVSNVDSKSYKAVVRAISQGITAPEELVKLIHGRIINHHGIDVITASLKGVVSLAEIDMISQLRDELDMAEAHKEKCQARMLEICEMEFPEDLKRLQTIPGIKERAATSLIAEIGTDMNKFETANHLASWSGLKPRNDESNKKIKSRSITHGNVYLRKTIIECAWAASRTKDCFFSRFSYHQTQVRKKNKMKVLVAVARKMLIAVWHVLHDNTIYIDFTTDRKTSRTKG

SEQ ID NO: 168870 - protein, 335 aa, unidentified
MQIYGIDLAKEKFDVSFLRLSSKSNVVTPVHHVVRNTESGIKAFLKGLPSDSVLVAEHTGVYGERLLKMCTEMNVKIAYVGGHVIHTYKSGPDRGKTDEQDCNVLREFGERFTDKLVYTTFPEEDIYELRQLSRQRTMLVEERKRITTADKTEDCRPYRSEAVKRSMQHIVDLLDEEIKDMERAMLTVIRKHDKISSSYDIITSVNGVGLVTAVELIVKTRNFTTITTAKQYSAYAGTAPYEKSSGKINQGAHVSKWGNRRSKTLLYICAECARMHNKEMKLYYERRTIIDKKAHHYVLNAIANKLLRLIFSLINKNEKYNPCYIQRDPRSLNIN

SEQ ID NO: 168871 - protein, 411 aa, unidentified
MNPVVGLDISKGESQVQAFLDKGKPYQRSFKITHTVEGLNLLVAFLEDVKKVSGQKPSVVLEATGHYQTPVVHYLEERGYLLIIINPLISYKARGSSLRKVKTDAIDAYLLCELFYKEELEPYKKRGVQLLNLRNLTRQHENITGVMVQTKLQFQAVLEQVFPEYKGVFGDLYSVVSLLTLSEFPSSEDILKASEEAITARIFELCKSRSIKWANEKAIQLKAAAARNPFEKTVYQSHILSLGMYINILLQYKEHLSKLEAEIDALAKEIEEYTILKSIPGIGEKIAATIISEIGEIDRFNNPKKLVAFSGVDPSVFESGKFTATKNRITKRGSSRLRHALYMAVRCAIRDCRKSKTTDEIIPRNKKLRVFYDKKREEGKPYKVAVIACVNKLLHWIFALLKNKMTFQDIV

SEQ ID NO: 168872 - protein, 344 aa, unidentified
MKIAVLGIDLGKNVCCVVGLDASGAVVLRRRVRRDTLIDLVAKLPACIVGMEACCGAHHLGRLFATQGHNIRLMSPEYVRPYVKAQKNDDRDAEGIAEAATRPTMRFVEVKTEAQLDMQTLHRSRERLVGERTALINQLRAVLLERGIVVPQGKRKFEQYLVAMMDEHDGEGLSARMRMLVADTRAQWRELDRRIAAFDAEFARWAKENEDARRLATIPGVGVTISTALIAAIGKAETFEHARDLAAWLGLVPRQATTGGKPRLMGISKRGNKYLRTLLIHGARAALPHLAEKGTTLGRWAKNLLSRVHQNVAVVALANKLARICWAVLRSGEKFAAKEATLTV

SEQ ID NO: 168873 - protein, 335 aa, unidentified
MQIYGIDLAKEKFDVSFFDLTSKKVSNHPSHKVVKNNFKSIGRFLETLPSDAVLVAEHTGVYGDTLLKCCMDSNVKIAFVGGYVIHRYRATPDRAKTDVLDCALLRDFGERYPDKLKYKTFPEEALYELRQLARHREMLVEQRKQLITADKSEDCRPVRSLAVKRSMDRIKEMLDTEIAETEKEMLKVINGHDSIHHNYELVKSVDGVGLITAVELLVKTENFTKITTARQYSAYAGTAPYEKSSGKMDKGAHISKIGNRRSKTLLYICAESARLHNKEIKLYYERRTLIDKKPRHYVLNAIANKLLRIIFTLVEKGEYYDANFIRQDPRVVKYN

SEQ ID NO: 168874 - protein, 389 aa, unidentified
MIYVGIDVAKDKHDCIIKNSEGRTLYPSFSFPNNLTGFNLLFERIQSCSSDFDEIKIGLEATGHYSNNLVDFLTFKNLHIFIINPLHTCLYKKSLSFRKTKTDKADAQSIVSMLMTQTLTSYVPISYHEKELKSLTRYRFTLVKDNSKLKISFTRLMNIIFPELQGIVHALQVNSVYHLMNEYPDTASLANAHLTHLTNLLSKYSKGHYSRSKAIEIRDAARNSIGCSDCIQTLELRHTIARILLLTEQISMVEQRIKEIMKEIDSPFVNIPGISYITAAMLHAEIGDFSKFSNAGKILAFAGMEPSIYQSGQHTSTHAKMVKRGSKYLRYALYTAAKNVANWDNTFKAFMQKKLAEGKPYTVAVSHVAKKLTRVLYKLEIEHLTYKAT

SEQ ID NO: 168875 - protein, 424 aa, unidentified
MSQRTLTERVTMVKPGMLLVGIDLGRDDNVAVVLTDTAQRLTRFKFPHTRAGYDFFYRQLEQLRAQHPGQGLLIGMEPTNHYWKWLAADLEAHQPPLPYRLVNAYTVRKHREGEQLERAKDDLRDAFQIAELLRTGKFTETQLLQGAYAQLRQYATLHMRLQHDAAQLQNVLTTAVDLGFPELRQVFKDLSGETALALLRTASCASTIRELPLSEFLAQVREQLQGHRLSVSKLKQAHALAQTSVGLVDTGALHFTIQVYSEQLAHAHESLKRTETALVELFLTLPEAPYLLSLPAISPLFAALLLAELGDPQDFSCASQWVKLAGVQPVADSSGHRTRSPTPMSHKGRSRLRELLYWLVLRWVQHDPYFKAEYERLQTRPQHPLTKMEALGALMNKALHVIWAVLRDRTFYDPQYRQAGAGAL

SEQ ID NO: 168876 - protein, 388 aa, unidentified
MLQSNDLSRSFTTLNQDNTLIVVIEMSLSSWLVAGIVPGVERQPLKKLEPDEDQLLKLMNRWRHEALQAGHAIERVVVAYEAGRDGFWLARWLRERGVEAYVMHSSSIAVSREHRRAKTDRLDTELLMRALLGWLRGERRHCSMAAIPTIEEEDAKRPNREHEKLVGDRTRIVNRMKSTLSRFGIRGFKPTLRKADEKLGELRTAEGTLLPENTRAELRRDMTRLRIVREQLKEIEQQRLRKLEAAAPAKKGPHAMVGLIARVTGIGIETADMLVNEILSRHLRDSKAVARYAGLTGSPDESGKRRREKGLARAGNARVRRGMIQLAWRFLRFQKDSVLAQWFRARAADGRSGTRKTMIVALARKLLIALWRMTTTGEIPEGVILRVA

SEQ ID NO: 168877 - protein, 334 aa, unidentified
MEKDHYIGVDISKRTIDVAVYAKNQTKKGAFPHETFQNTAEGFKDMKRWLRKQNAVLSKSLFCMEATGNYTYELCLFLEQLGIAYSIQSPLHLKRSFGLTHGKNDKVDASRIAYYAYLHREDIKLSKLASESVRKLKSLIAERKSLIAEIARCKAQLKEAGENAPSPGTIKRTEALQEFLESQVESIEEEMAQTIETDEQMRTNYNLLLSVDGIGVVNAINTIIATHNFEMFDNARQYASYIGVAPFEHTSGTSVRGRTHVEPGAKMLKADLTGAVRSCINHDKEIRKYYERKIAEGKAYGVVANAIKFKLLLRMFAVIKRGTPFVRKPDFIYS

SEQ ID NO: 168878 - protein, 332 aa, unidentified
MYLGIDVHKRYAQVAVMDEAGKIVEEVRVENANLDDLAQRYAGAQAVLEATSNYYHIHDTLSEHLDVTVAHPKKINQIADTDKKTDRVDAKELARMLRLNSVPESYVPSEEVREARALVRGRQTLVENRTKYANKVHGLLSDHGITEDVKPLSVEGREFLRELSIPTPWDELLDSYLDLIESLTEEIQKLEETIEQRAGSLKETQLLMSIPGVSYFTALTIYAEVGDIRRFDRDKEVVSYVGLNPVIRESGDSRIEGSISKRGSGRVRWLLVQAANTAVHTCNDEYLSRFYDRLASRKNSQKAIVATARKVLVSIYHMLDRGEVYDPPGVSA

SEQ ID NO: 168879 - protein, 360 aa, unidentified
MSFNGTSVGLDVHALSVVAHAVDEETGRVERARLCPDHGEIVGWLGRLRAPVRVAYEAGPTGFGLARALADAQIDCMVAAPSKLIRPPGDRVKTDARDAAHLTRLLRLGEITAVTVPERDVEAARDLVRAREDARADLMRMRHRLSKLLLRQGRVYSGGQAWTGVHEIWLRRQRFDNAHTAAAFDHHFGAVLNATAARDRLDEQIIEVAALPLFADMVNRLGCLRGISALTGLALTVEIGDWTRFTGASIGAYVGLVPTEFSSGASRVQGSITKAGNAHVRRLLIEAAWHHRASYRNPGPTMRARWAKVDPALKARGHAGNRRLHQQWCRFNERKKNRVVANVAIARELAGWCWSLATLE

SEQ ID NO: 168880 - protein, 412 aa, unidentified
MLKIVYPICCGLDVHKDFVYACIATSVNGVTTYKSHRFSTFTKGIRELLSWLLEHNCKDVCMESTGKYWIPVYNILETDCKIVLAHPKYVKAIRGKKTDKKDAKWIADIFKHDLVSGSFIPPADIRQLRDLVRYHTKLTNFTTGEKNRAQNCLTVSNLKLDSVFSDVFGKASSNIIGHILANPSEKLSDVSAFRTKHMKATDDAILEAIDGEFCPEQAEKLRIIREHMSNLDLCKLNLQSLILTTAEKYISEIELVCTVPGISTFSAISVIGEIGVDMSVFPTSKQLCSWAGLTPQNDQSAGKKKTTRISRAGAYFKPLLVQCALAAIKAKNKHPEIFNRYSALKKRRDHKKATIAIARMLLTAIYNILKKREPYNPELYRKSDVPPEHRNVSVDEAIFILQRQGYLVSSPT

SEQ ID NO: 168881 - protein, 442 aa, unidentified
MDKTLLLGIDVAMAENTCCPLLEDGTEARRCFTIANNLPGAQHLVKEILVLMEQFGLSRLLIGLEATNLYWWHLACFLTSCPELAPFQPKVYAFNPRLIRAFKKALADSGKSDIADAYAIAERLRFGRLPAPFMVNEAYQPLQRLTRFRCHLMHQITREKNYFLSFLFLKFSEYQNLDPISKTFGAASQAVLMDYLTVDEIVAAPLEELAGLLAEESRNRFPSPETVAAAVKRAAKDSYRPHPSLNEPLNLILGATLENIRTFSQQVKKVDKAIEREVRKFPNTLGSIRGLGPVFVAGILAEIQDINRFPDSAALAKFAGLFWRTRESGSFQAEETLMGKSGNPYLRYYLIEGANSVRMHTAEYGRYYQAKYDESTKHKHKRALVLTARKLVRLVDAMLRRNQLYIPPPLNLIEEVSKQGITKARPAKQHRYRQPGTPALCA

SEQ ID NO: 168882 - protein, 317 aa, unidentified
MTYTSHFVGIDISKSSFDVCVLPEERFANFANDAAGIARFVTFLAQWEGVERLVLEPTGGYERGVVEGLLAVGLPVAKVNAKQIRQFARACGRLSKTDRIDAFVLADYARRMDTKVLEPSSPAHAMLIDLVSRYRQLSHMIVQEKNRREKLVNQDNARTRAWIEQTLAFLQQQRQAVVDAMAACLTSDEHLALKAEVLMSLKGIGLRTACFLLAGLPELGQMNKGQIAKLVGVAPINRDSGQMRGKRMISGGRKPIRDALYIAALPAIRFDPNMKAVFQRLKAKGKPGKVALVAVMRKMIVILNARMRDHRATALDC

SEQ ID NO: 168883 - protein, 315 aa, unidentified
MTKTNITTAGIDTSKLKLDIAIHGRTERWQVANALPGWRALAANLAKAGVTRVGIEATGGYERGVVEHLRAVGLTVLVLQPMQVKAFGRVHLRRAKNDTLDAVLIAACAATLDQPRTAPDPRLTELAGYLTFLEQAEEDIARFKTRLEHIDEPQLRRLVTSDIKRLKARKAAQLRDIAKRLRAHDDLARRLDLVLSIPGIGERTALALIIRMPELGRISREEAAALAGLAPFDDDSGKYKGQRHIAGGRGRLRRSLFAAALPAAFRWNKALIDLYARLIAKGKVHNAALIACARKLLIYANTVVQRGTPWTEKAA

SEQ ID NO: 168884 - protein, 339 aa, unidentified
MVHVGVDLHKRSSQLAVLMPDGEVTQQRLENDPTQLERFFARVPRGARVAIEASGTWWWFVDLVERLGHHAILSNPKQTKAIAAARLKNDRVDAERLALLLRGDLLPTVWIPPAELREARELVRHRVSLVWVRTEIKNRLLALLSRRNLQPTSSTRWLTVRGRRELEGLPLGAIPSTVREDCLALLRVLDEQIRRLDHELVQRWGDDPRVRRLQTIPGVGPFTAILLILELGEIQRFPSAKHLASYVGLTPRVRASANRVRMGHISKEGNRLVRWALVVAATQAARRPGPLRAWFRAVQQRKGMKIARVALARRLAEIVYQIWKQDMDFVTLVCGGVRG

SEQ ID NO: 168885 - protein, 395 aa, unidentified
MMSHLSFTLNGSQPNSRVNVGIDMGRRKWAANVLDTASGRHHGHSFIGQEHTENTYNLIEKLVSTGREVDVIYEAGRNGFTPAREMMARGANVTVLPVNKLEVVKAGKKAKTDGLDAYNLSERDARAPGFPRVWVPPVEDEVRRRMTRERERLRKDIKRNNNRILAILERWPVGYSRGHRTASEWRREMKGWQKAGVVPQRLPDGERASIAAMVREIEVLEKNLAAWEKRIDAELASQRRQAEEQGMHCPADILMQYKGVGRQLAIGLCWYVGDFSRIGNGRKMASLLGLAPMPWDSGAKNRCQGISKAGPPDVRRLMVEIAWVWVRYQPDSLITRKWLPKLQQKGAIRRKAIVAVARQLSVAFLRLINENIELEGAVKNLPFALPAASPRPPMA

SEQ ID NO: 168886 - protein, 409 aa, unidentified
MVVGIDIGSTTQYARAFDWRGIELGKVFTFSNSREGFEAFKAWMQRLQDKYRKSDVIVGIEPTGHYWFDLGAYLEDEGILLVMVNPYAVKQTKELDDNSQSKNDRKDPKVIAKLVTEGRYSAPYTPDGVYADLRIMVTNRKRLIREMTQIKNRFARWFAIYFPEYTDVFGDYEAQSSMLLLKKVCTPEAIVELGAEKINQIWRDAKLRAVGMKRATTLCETAKRSIGLKKGSSAARYEMKLLLEDYEYKKAQLDAVMEEIEKLCRKIPESEQMLAIKGIGVITVAGFLAEVGDVRRFESPRQIQKLAGLSLRENSSGKHKGQTSISKRGRSKLRAVLFNAAIPLIAKNPEFKSLHEYYTTRANNPLKKKQSVIAISCKLIRVFYAILANGVTYDAQKMLSDIHRQPQAA

SEQ ID NO: 168887 - protein, 340 aa, unidentified
MTITTVGIDLAKNVFAVHCIDQNGKAVLVKPKVSRAALSELIAGLPPCVIGMEACSGAHYWARLFRQYGHDVRLMAPKFVSPYRMAGKTGKNDAADAIAICEAVQRPHMRFVPVKDESQQAMQCLHRTRQGFIQERTATYNRLRGLISEFGVIAPQSTDALRHVVSDQKETLPVQVRLCIDDLLAHVTNIEEKIAEYDRVLSRVAKKDHRSQQLMELKGVGPTTASALVASIGNAHDFKNGRQLAAWLGLTPSQYSSGGKSKLGRITKAGDAYLRTLLVQGARSVMVGAENRTDPFSRWVCSLIGRRGYWRAVVAIAAKNARLCWASLHYGDDFRLYSTT

SEQ ID NO: 168888 - protein, 333 aa, unidentified
MRLIVGSPLDGEGSSVDVLGIDISKADFHVCLLQGDRAKPKSFPNDRTGYSHLRKWLREQKVAQVHACMEATGGYWLGLATALFESGMRVSVVNPSKTAFFARSQLRRTKTDKVDAEMIAEFCKTQDPGLWQPPAPEILELRALLSYRHQLVAQRKSLEQTVRDIHAGKELRELHSALLKSLNETVDAVERQMREVVKAHENLKTGVARLEAVKGIGPLTAAMFVAKLPVDRLRNGKAAAAYVGLSPSERQSGTSVHGKPRICKTGDAELRRDLYMPALAAKRHNPILAQFAARLNERGKPPKVVTVAVMRKMVVLAYELLTAPEDAKLEATA

SEQ ID NO: 168889 - protein, 349 aa, unidentified
MALTIVEEARPITGGVDTHADTHVAAALDPVGGLLGVGEFPATAAGYARLLGWLGGFGTVCLVGIEGTGSYGAGLARHITAAGIRVVEVDRSDRQDRRRQGKSDPLDAVSAARAAQSGRARGAPKGRDGAVEAIRALMVARRSAAGERTRTINQARALVLTGPDDLRARFGRHTPAALITGLASLRPRTGDVAGHATRVALRELGRRAQFLDGQLERLDELIVPLVTAHAPGLLALYGVGPRTAALLLIAAGDHPGRLRSEAAWAHLCGAAPIPASSGKVTRHRLNPGGDRQANHALWRIVFTRLGSDPATRAYAERRTAEGKSKAEIIRCLKRYVAREVYPHLRPAAG

SEQ ID NO: 168890 - protein, 382 aa, unidentified
MKGNVCGLDVHKDNVFVCILKENGEKILQRVGILTPELDALRDMLVSHGVGEVCMESTSIYWMPVWRVLDSDFHLWLVNPLAIKQLPGRKSDVKDAEWIATCLKKDLVRGSYVPEEVIQQLRQYNRRVFDINKETVFLHNKLDASLQRCNIRLSNYVSNVDTKAYREVVEDLSKGVTDPDTLLGHIHKRTKNKWGEDVLRSALTGVVSEVDTELIGMYREELELLRTQKAKCLSRMREICQKHFPKQMKDLQTMPGVREQSATQIIAEIGVDMRTFLTAAMLVGWAGFKPRNDESNKKLKSRSITHGNKYLKKLMVECAWGATRTQGCFYSQFSYHQTQVRKKNAMKVRVAVARKQLVGIWHILSEGCTYKEYSEKKEEGES

SEQ ID NO: 168891 - protein, 311 aa, unidentified
MKEPERFVGIDISKQELVVAVRPTAELQSFTNTEEGLAALIRFLQPLSAHAIVLEATGGFARAAVNVMALAALPVVVVNPRQIRDFARSVGLLAKTDAIDAQIIARFAEAVRPEIRPLKDLETQKLEALNNRRRQIVEMLTAEKNRLGASPAWCHKDIRSHITWLEKRLKRANDDIDDLIKQSPVWRQKEKILTSVLGVGPVVTTTLLCGLPELGSLSARKLSALVGVAPFNRDSGQYRGRRSCWGGRAHVRAALYMAALTASRCNPVIRAFYQRLRLAGKPAKVALVACMRKILVILNAMIMNNTCWQQA

SEQ ID NO: 168892 - protein, 406 aa, unidentified
MNEHLLVGIDVGCHSHQVAIAKSNGTYLKEFGISHNASGFNSLFSEITYYESTLKCPVVIGMEGFNGYARPLDQLIQQKGYTLYNINNLKLARFKELFSGPAKTDAIDARKIVEFMRIAPSFQEQRRAITEIKPGNGVNQTLKRLTRRRRQLVNEKDLYPESDARLSFQSVAPGLVDLVKNVDSRWYLHFLTCRPSLRQLATMRKESLLKIKGVGKKYAAVITSWQKEAHFSTDVDLVSSMIIEDAKRILELMEAIATIEQELEPLGEQSDLAVTIGSIPGFGLISSAELAGEIDNLSRFPSEKSLALYLGMAPLDNSSGKKEGCKIAKSVNTRAKAAMMVAVAHHSWQVEESKRYYEKKRAEGKKHNQAIRSLGRHLVRVIWSLIKENRSYEIREENERNILKMA

SEQ ID NO: 168893 - protein, 484 aa, unidentified
MAEQRRRKQKPAVAAVPVEIADADHEVVIERAAAIDVAKATGTVCVRLPGKSGRRFSRVWEVSARTGMIGQLTQQLIELDIEKVTVESTSDYWRIWYYLMEAAGLDVQLVNARDVKNVPGRPKTDKLDSVWLAKLTEKGLLRPSFVPPAPIRRLRDYTRLREDLTRDRSRYWQRLEKLLEDALIKVSSVASTLDTFSTRDMIEALIAGERDPRRLAALARGRMKAKRSELITALDGRFDDHHAELARMLLGQIDALSAQIDTLTVRIEELIAELPAAAGAIDHRDPGTGPGAGIDADRDTSGSDPDTGDGTRVDPVTVARCAPSVIERLDEIPGIGQRAAQRIIAEIGLEMTRFPTPEHLVSWAKLCPRIVQSGPISRAGKTGKGNPYLKGALGEAAAAAAKTNTFLGERYRRIVKRRGKLKALVAVARSILTIIWQLLSDPTARFHDLGPDYHTNRTVTERKIRNHLAQLTAMGFHVTLQPAA

SEQ ID NO: 168894 - protein, 411 aa, unidentified
MNPVVGLDVAKGESQVQGFLDKKTPFKRSFKILHTVEGFEQLLQFLQKIEETTNTKPVLIMESTGHYHSPVMQFLDNLNYIYIVINPLISYRAKSTSLRKVKTDAIDAYHLCELYYKEELEPYKKRGVQLLNLRNLTRQHDHLTGISSQAKLHFLAILDQVFPEYRGVFGDLYSNVSLLTLLEFPSSEAVLQAGEDQLSKRIASLCTSRSKQWAKEKAKLLMTAAEKNPFQINLYRSLLISLEMHIKMVLQYKEHLSNLKAEIDVLVKEIEEYNIIQSIPGIGKKIAATIISEIGEIDRFDNPKKLVAFTGVDPSVFESGKFTATRNRNTKRGSSRLRHALFMAVRCAIRDNRKSKTTDEIIPRNKRMRQFYDKKREEGKPFRVTVIACVNKLLHWIYALLKSKTTFQDLA

SEQ ID NO: 168895 - protein, 359 aa, unidentified
MDAQEGAVRRIIGGVDTHKDLHVAAVVDEQDRVLGTQSFASTRQGYRQMLAWMRSFGEVQRVGVESTGSYGAGLLRFLQQAGVTVLEVTTPDRQDRRRRGKNDDFDAQNAAHAAFAGIRTVTPKSRDGMIEALRVLSACRKTAVTARRIALQMIQNTIVCAPESLREMLRRMTRMQLVRTLAAWRPDLTAYRDVEAAYRISLKSLARRYLELHDEIADLDAMIAAIVDELAPNLVARNSIGHRGAAQLLLTAGDNPQRLRSEAGFAALCGVSPVPASSGKTARHRLNRGGDRAANSALHIIAIGRLRTDARTQAYVAKRIGEGHSKLEAIRCLKRYIAREVFTLIKQRQREINQTRIAA

SEQ ID NO: 168896 - protein, 364 aa, unidentified
MLYSGIDLHKRLIVICTVNTEGSVVGRATIKTAADVVEAYFRQWTESHQAVVECTSNWYWLCDLLRSLGIVVVLAHAKYLKAISYAKVKTDAIDAHTLAQLLRMGFVPEAHQLPPEYRAMRDLLRQRMVMEHKRTNLMLRITSILAKFNITDVSVGPSQSGFADFLDECTIPEQYRMTILMYHQQCLQVTDHKKQLEHYFKAQLRPTATLQLLVSIPGIGDITGAIIAMETGDIHRFADAKHYCSYCRLAPGAKDSGGKRSHRSGSKDGNQYLKYAFTEAAIKAMMYYPDIKRFAVQLEKRSNTAIARTVVAKELARIVYYVLTRQQPFETFKGVRVTKRHDWPRTCKPVRITGVLVHRELSTA

SEQ ID NO: 168897 - protein, 318 aa, unidentified
MSDKTTIGIDVAKNTLEVFIDTTGQLLHLENSAAGILELQAALSGLSVTGIIMEATSRYHCTAELMLSAAGLPVAVINPRQIKNFARAMGKVAKSDPIDARIICEYGRRMTPQFRPAKSEQQQDLAVLLTRRRQLVQNRVMESNRCKERCGAYVEQGIMRHIEWLDVEINILDAEIKQRLRQDDDLAAKRLLLDKVKGIGPITQATLLIQLPELGYLTRRQISALVGVCPYDRDSGQLRGKRAIWGGRSGLRATLFMAMLSAVRYNPQIKAFFNGLLARGKPKKVALTACIRKFVTILNAMFRDQKDWVYEGASSLTP

SEQ ID NO: 168898 - protein, 310 aa, unidentified
MAAYVGIDVAKATLVLCLQPEGRTWTRPNTPAGQAQVVAELRAVQPERIALEATGGYERAIWQQLHAAGLVVVRLQPRRVKALARALGRQAKTDPLDAALLAEAARILVVPVAIVPDAATEALRALVDLRRQLVSQRDDNRRRLKQNPAAVAQQVLGRVNAGLQREIRQLDREIPVQLAATATPDLATAPGAGPVLRATLAARLPELGHLDRRQIAALVGIAPYNADSGAHQGKRHIRGGRADLRRVLYMATLASIRARSVLATTYQQLLARGKLKKVAIVACMRKFLTMLNAMARDHTTWAPTTLSGAT

SEQ ID NO: 168899 - protein, 337 aa, unidentified
MRYIGVDLHSNSITVCYLTKKGEETLATFALSNLQEFKKSLRRTDRVAVEATGNTRWFVGEIREKVGQVVVVNPNQFEVIRKSVKKTDRHDARALARFLSKDLLPEARLKGELASQINSLAETRDKLVKLRTTFVNKLHALHRARGIISRKSQFLSQKGLKAALELEWEVTTRVEVEVIIGQIRSINEGIARLDTELVASGKQLKGHGNLVSIKGIGARAASVLLSVIGDVADFESDDKLFSYFGIVPRVSNLNETVQHGRITKRGSKLGRTTLVQCTLVAKKYSSYLNNFYERIKAKKGGGKAIIATARKFLGVIYRTLKNNWVFADFPNFVLAED

SEQ ID NO: 168900 - protein, 435 aa, unidentified
MPAYSIFFRVMLMLKIIHPVCCGVDVHKKFIVATIAFSEKNNVTTYKAKKFNTFTSDLLLFKEWLSANNCDVVCMESTGKYWIPIFNVLEESCSITLANPKYIKNIPGKKTDKRDSLWIADLHMHGLVQGSFIPPKNIRELRDLLRYRFKLVNFRSSEKNRFQNSLTVSNIMLSNVVSDTFGKSAAAIIRFTMNNPEKTNVDYTQFLHGSMLPKADEIKAAMQGSISKEQNAKMSVCLNHYDYIDKCIAQLDTAISLISSEFKPQIQLLSTVPGFTEKSATVIISEIGTDMSAFKDAKHLCSWAGLTPQNNESAGKKKSVRISRAGVYIKPLLVQCANAAIKDKSCPYFHHRYQAIKKRRGHKRAIIAIARMLLTCTYNMLFKNEAFDNSMYDSYLASNDISKSNYPTASIDIAILYLQSQGFAVTKLMQGNGSP

SEQ ID NO: 168901 - protein, 366 aa, unidentified
MPSVGLLKPYAPSMEFTMIARSDAACFVGIDLHKDTLTACVLRGTDREVTYVKLACKCRERIRSFFSALPQPSVVAIETVGFYRWLWAELEPLTGQLVLCDARGARALAGRRIKTDREDALNVALLLADGRLPLAWAPPENVQVLRTWTRHRNGLTRQHAKVLHHVKSTLNRLNFPGPVRLDAAALQRYLLAGVERFTADDLTMLWQHQRRLVEIEQDRAQSERRISELMRAPEFSRLRELLESVPGVGLVTAATVIAEIGDFSRFADSKAIGRYAGLTPTVYASGNSSRLGHISKTGAPDLRWVLQQAAWTAIRCDAGFKKTWLRIAKTAGKKAAAVAVARKILVLMWTLQRKDEPYKSRDPVAA

SEQ ID NO: 168902 - protein, 464 aa, unidentified
MKTSLYLGIDVSKGYADFCLLNAAREVVGKPFQLFDIDEDYERLERYLGKVIKENNTMQIYAAVESTGSYENHWLDFLYSLREKYPIKVARLNPLGVSKSRQADMKVQVTDRTSSEAIARYLINHADSVKYYEPDSYARYRAVLSHIMLLTKQRVQLMNKLRQHLYLYFPEILPYCRNSFSEYVLKLLELYPTSEAMAKFRRSKKNAIAYSTRIDWEALRERCKLRESLDTDELAEMMIRDSVRQIQDYSLKIDKMYDLLYDRLPQDKLKILMSMPGIAKKTAVVLLCVIGDVSRFEGPHQIVGYFGLYPVIKESGDGKKKPHMSRKGNVLLRKSLYMSAMVACTHDPYLRSIYLRSVEKGMPKISAICKIMKKMLRMLYGMLSNNQHYNPQIDVMYRERYEQRKASIIDERQVEGNEEFERCIDLAPISKKNAYIRKEQTSAAIQTRGLCRQPAAPSDFLPKP

SEQ ID NO: 168903 - protein, 326 aa, unidentified
MLIIGIDIAKEKLAVCLQAEREILKEEEFGNHKKGFKAIEKWLKPHRMDEVHICMEATNVYWEEAAEYCHAAGAKVSVVNPVRTKGFAMSQLRRNKTDKVDARDIAAFCAATPDLTLWRPPTPEQRKLRALVRHREALVKTRTQQSNRLQTAREEEVRSSLQSVITMLNEQIEKINQQISDLIDQEPGFKEDHELLCTIKGVGGRTAERILAEMYDLAQYESARAAAADAGLTPAHHESGTSVRRKPKLSKVGKASLRSALFFPAMSAVQSNPIIRRMAERLENRGKTPKVVLGAAMRKLLHIAYGVLKNRTPFDPDHQPVHASLG

SEQ ID NO: 168904 - protein, 339 aa, unidentified
MTVKTIGLDLAKDVFQVHGISENGRVIFNKAIKRAKLLAFFEALPPCRVGMEACGSSHHWGRTLRQLGHDVRLMPANYVKPYVKRGKTDAADAEAICEAVRRPTMRFVEIKTEDQQAVLSIHRTRDLAVRQRTQMANVIRSLLREFGHILPLGVEAVTAFAKRHLDGDHPDMPDIANGMLGMQCYQFIGLNERIAGYSKMIEQHALLSADARRLMRMPGVGPITASAIIATIGDAKQFRTGRDFAAWLGLTPLNKSSGGKERLGKITKKGDRYIRKLLVVGMTSRAVMAKRSPEKVDLWTAKIIADKPFRLATTAMANKTARIIWAMLTKKQEYRQPAF

SEQ ID NO: 168905 - protein, 458 aa, unidentified
MTRHARAPHRTGPLSVIHPHAAGIDVGATEHWAAVPGGDPAPVRRFGACTADLEQLADWLAGCQVTTVVLESTGVFWIPLFELLESRGFEVRLVDARQMRRIPGRPKSDVHDAQWLQRLHTYGLLAGAFRPDEPVCVLRSYLRQRAMLVTYAAQHIQHMQKALTQMNVKLQHVVSDITGVTGLAIIRALVAGQRDPTELAKLRDDRCGHSAADIARALYGTWRAEHLFALKQALELYDFYHRQMATCDRQIEQQLQQFADKSGGQPLPPKARRRRRGGNRPGFDPRGALYRMAGVDLTVIEGIEESTALVVLSEIGTDMSRWPSAKHFGSWLGLCPNHRISGGKVLSRRTKPCANRAAAALRLAAQALHRSQSALGAFLRRLKARVGAPKAITATAHKLARLVYSLLKHGTAYVTQGMEEYERRYRERVVRSLSRRAKELGYALVELPAPAAAQPLPT

SEQ ID NO: 168906 - protein, 332 aa, unidentified
MWYLGLDVHRRTVTLAGITSEGKVLASRSYPSVDPTALFEAVNRHRPYHAVIEACGSYYWIYEPLRQGGEVTLAHPFKLRALWSARAKTDKLDAMRLAQLLRADLIPASYVPPPAYQQLRDLVRSRIRLVQERAALYNHLHSILSRFNYHPPGKQSFSKEGLAWLRRLDLPEPFDLVRQEYLDRLAHFDRAIETLEAHLYPLAAKYPQTEALTDLHGIGTFSALVVVAELGEVDRFHRGEEVAAYAGLTPRVRQSGTQDRHGAITKSGSAWLRWILVEASMKVIQKDEALRAFYYRVQRRAGWRRARVAVARKLAVICWKRLRTWHQQYAAA

SEQ ID NO: 168907 - protein, 412 aa, unidentified
MQAIIERCCGLDVHQETVVACLLIGAPGAQPKKEVRTLRTVTRDLEALRDWLQEAGVTHVGMESTGVYWRPVYAVLEGHFELIVGNARHIRNVPGRKTDVKDAEWIADLVRHGLIAKSFVPPKPLRELRELLRYRRKLVESQAAERNRLLKLLETANIKLASVASDVFGVSGRAMLRALIAGEASPQAMADLAKGQLRRKRADLILALDGRPEEHHRFLLAMQLRRLEAIEADIAALDLRIGERLEPYSAPHALLMQIPGVDWVVAAVIIAEIGVDMSVFVSAYHLSAWAGVCPGNHESAGRQKSGRARKGNIHLRTILVSAAISASRTKGSYLKDKFHRLKARRGGLRAALAIAHKILVSAYHMLAKTLPYRDLGEAYLDQIGQTRTVANLKRRLERLGYRVILEPNAQAT

SEQ ID NO: 168908 - protein, 361 aa, unidentified
MIYLGIDLHTRNMTIYAILSNGKKLGEWKLPNSVEQLDTLFETFNEPVKAVVEATSSWYWLSDWAQAHQIDLILAHAKMLKAIAYTKVKTDSVDARTLAELLAVDLVPTAHMVKGKQRELRELLRARLRFVWRRTKVQDSIYNLFFKYNVTIPTYPYQNLNLLEAHLNRYLSPAARLEATLQIDQLRLLEYQIRQIEMHIDTHEPNYPMLEAIQQIPGMGKVSAWAILAEIGDIHRFKSDKHFASYSRLVPGAADSGGKHRHKSGNKDGNKYLKIAFSQAAIGAIRFYKPVRDYYHKVRLRSGKHVARTVVAKELARIVYYMLTRQEAYKGFKGKATPKDTYPNWPHSISPHSLSGPDRFQ

SEQ ID NO: 168909 - protein, 352 aa, unidentified
MTSITTIGVDLAKNVFQLTGLDGDGVIVWRKRLRRAAFTRFMERHDKDCLVGFEACGGANHWGRWLMGLGYRVKMMPPRAVKAYLPSRHKSDARDADAIAEAATRAHVRGVPVRSEAAQARALAMRLRERQIRQRTQIVNQLRSALHEHGFTVAKGREKGMKEVAQIMASEAWEELPDLVREVVAVLWDEIVALDARIEASTARIVRAGEEAETTRRLMTIPGIKAISAAVLASHLEDPRRFAGARAFAAYLGLVPRDCSSGERRGQGRITKQGSREARRLLFLGARAILANVGRSRQPKDGLRIWAAHMLARKPWDVAVVALAHKLARIAWAVAARECDYRSARITVCTAM

SEQ ID NO: 168910 - protein, 339 aa, unidentified
MKLYAAFDLHSSNNYLAVIDEEGKRQMQKKLPNDAGAIVMALSPYQKKIAGITVESTYNWYWLVDLLMAKGYEVHLANPAAIQKYKGLKHADDRHDANWLAEMLRLNILPEGYIYPKEERSLRDLLRKRGHLVRLRTSLIISLQHIITRNCGIMVNVNDVKRLKEDRISPLLNDNEDILMAGGVSKDTIDYMTRKIKDIEKTVEGKIELSSSYQKLLSIPGVGKILALTIMLETGPISRFQKVGNYVSYCRKVSSTWVSNGKSKGKGNERNGNRYLAWAYSEASELARRFDDQARAYFQKKAQRSNRMVAHQALAHKLARAAYYIMRDDVPFMAEKLFA

SEQ ID NO: 168911 - protein, 398 aa, unidentified
MTESSDYESVQVFIGVDVGKDTHHAVAVNRSDNRLFDKALPNDENKLRSLISDLKQHGQILLVVDQPATIGALPVAVARSEGILVGYLPGLAMRRIADLHAGEAKTDARDAAIIAEAARTLPHALRTLKLADKQIAELSMLCGFDDDLAAQTTQASNRIRGLLTQIHPALERVLGPRLDHPAVLDLLQQYPSPEKLASLGEKKLATQLCKLAPRLGKRLAADITQALTEQTVVVPGANATVVVLPRLALQLITLRKQRDEVALEVEQRVLAHPLYPVLTSMPGVGVRTAARLLTEVACRAFASAAHLAAYAGLAPVTRCSGSSIRGEHPSRRGNKTLKRALFLSAFAALRDPISRAYYTRKMSQGKRHNQALIALARRRCDVLFAMMRDGTFYTPTTS

SEQ ID NO: 168912 - protein, 337 aa, unidentified
MEHIAIDLGGRESQICVRAADGSVVDEKRCATRSLMKYLGARPKGRVIVETCSEAFGVADIALTAGHEVRVVPATLVRALGVGSRGTKTDRRDAQILSEVSCRIDLPSVHVPAQESRRRKSMCGVRDSLVRARTQLSNCVRGWLRGQGQSIRSGSIETFPGRVRQAVTEVPAFLERQLEIIDEITKKVVAAEKELGEAARADTTCRRLMAVPGVGPNTALRFVAALDEVSRFSGAHKVEAYLGLVPGENSSSEKKRRTGITKAGPPALRHTLVQAAWAARRCRRQDPLQIWSFEVEKRRGKRVAMLALARKLAGILYAIWRDGSAYEPSKGAKAPGR

SEQ ID NO: 168913 - protein, 317 aa, unidentified
MKDITQPPILGIDVSRDHLDGYFLPDGKRLRLANTEDGHALLIELLAAYPNVVVCFEATGGQEWRLWAALDAAGIATRQLPPAQIKAFAASRGTRAKTDRIDAELIARFLDFRPEAGRQLPHEKLRLLRALCAKRRQLVEMRKRLVAQIKAHMKNGSGDPFEGMDDELRALLGDQIADLETRVEAAIVADPDMMATAHILRTIKGVGPVTSWMLIAELPEIGQISGEQAAALTGLAPFAHDSGAMRGKRAIGGGRRALRHVLFQAALVASHHNPVLKAFADRLRERGKPHKVIIIAVARKLVTIANAMCKSRQVCAA

SEQ ID NO: 168914 - protein, 323 aa, unidentified
MSSSSQTESSCYVGIDVSAERLDVQVWPVEQRHSVVYDSSGVTQLIEVLQPLKPTLIVVEATGKLEISLVAALAAAELPVVVVNPRQIRDFARALGLLAKTDRIDAYVLARFAASVQPPRRVWPTEQQQALQELVNRQRQLVEIRAAESHRLKRTRTSTVRHNVQIHLAWLDQQIQGLDRQIRQLITSSPLWREKDQLLQSVPGVGPKLSSVLVAHLPELGRLNRRQIASRVGLAPFNHDSGQWRGQRFIGGGRAKVRCTLYMSSLAAAYHNPVIRSLRQRLEHQGKPFKVVLTACMRKLLTILNAMVKNGTPWNSALCRNLS

SEQ ID NO: 168915 - protein, 386 aa, unidentified
MTQYAHSTATSGLDYDRTLILAVEISNRSWVVAAQVPGLRQKGAKQQLAPQADALMAAIEGYKRRAAAAGMVVDRVIVTYESGGSGFWLARWLHQRGVEVYVMQPSSVPVDRRMRRAKSDRIDADMLLRTLLAWLRGEPRVCSMVPVPDEAVEDARRPIREREELIRARVALVNRIEAVLTVLGAGDYNPLRRDCRERLGQLRTALDQPLPPHARAQIERLLDRLDLIRQQVADLEAQRDQAVEGEAAGRTEQMIQRLARLRGIGVQTATVLVHEAFVRRFRNARALGSYAGLTGTPYSSGGTQREQGISKDGNRRLRATLVELAWMWLRYQPGCALSRWFHDRLGGSRGRLRKVMIVALARKLLIALWRYLQDGAVPQGMELKPA

SEQ ID NO: 168916 - protein, 348 aa, unidentified
MKATTIGFDLAKNEFQVHGVDAAGKPAIRKKLSRAQVLPFFARLAPCTIGIEACASAHHWARKLTALGHTVKLMAPHFVKPYVKANKTDAADAEAICEAVARPNMRFVPVKSVEQQAILAVHRVRSGLVAERTAQLNRLRALLAEFGLIAPRGRRALMERLPALFADETLPGVARNLFERQSTRIRQLDAEICAEEAVILDWHRNNALSRRLDAVAGVGPITATAVVASFGEGREFDNGRQMAACLGVVPRQHSSGGKTRLLGISKRGDGYLRMLLIHGARAVIRTLERRAKGGGNPTDQWLAKLLARRNPNVAAVALANKTVRVIWALLAHDRTYDRNWSGQAAATV

SEQ ID NO: 168917 - protein, 458 aa, unidentified
MFNGQEKRATRPRRRLSPINPAAAGIDIGATFHVVAVGEDRCERPVRTFRSFTSDLGELANWLTEARIKTVAMESTGIYWIPVYEILEARGFEVLLVNARDVKNVPGRKTDINDAQWLQQLHQYGLLRASFRPREALARLRAILRHRERMVEYAASHIQHMQKALMQMNVQLHHVVTDITGLTGLRIIRAICSGERDPAVLAQLRDSRCKASADVIRAALTGHYRAEHAFTLRQALELYDVYQAKIEECDRELEDALVEINRGHSAAEESLPKRRDAGGRNEPHFDVRTALYTLLGRDLTQIDGLGTYTVLRLVGECGDDMTKWRTSKHFASWLCLAPGNKVSGGKLLSSKTRRSSNRAATLLRIAAVNVGRTQTALGAFYRRLAARAGKAKAVTATARKLAVLFYNALRFGRDYLDPGADYYEERYRRRVIRSLHRRAAQLGLILTEARVVTESGVS

SEQ ID NO: 168918 - protein, 354 aa, unidentified
MKKRTMRGGTLTIGLDLGDRWTEGRVLDDSGEVIESFRVRTSEPAMDARMSSYDPCRVVLEVGTHSPWVSRCVQRHGHDTIVANPRRVRLIAENDSKSDGVDAELLARLGRVDASLLKPIVHRGVQAQKDRILIQARDGFVRARTQLVNQVRGLAKTMGMRAPSCSTEAFAQRVRKSVPLDLFPGLETLLSTIESLTATIREMDREVERVCRDRYPETALLRQISGVGPITALCFVLTIEDPSRFAKSRSVGAYLGLRPKRHDSGEQQPQLRITKAGDRLLRRLLVSAAHYILGPFGPDTDLRRWGLRMAERGGNAAKKRAVVAVARRLSVLLHRLWVTGEEYEPLRDTTAKAA

SEQ ID NO: 168919 - protein, 356 aa, unidentified
MSRDIKYIGMDVHKEATVIAVLNGSGKLVMESIVETKASSILQFIHGLRGELHVTWEEGTWAAWLYDLLQPQATQVLVCDPRRNAFLKEGNKSDKIDARKLADLLRTGMLRPVYPGEHGLRTLRELGRSYQTISQDLNRVMNRIKALYRGWSIPCAGTQVYAPRYREEWLHKIEHAGVHRRAELLYQQLDGLQALRRTLRPELLAESRKHKASKLLRQIPCIGPIRAARLLALMQTPHRFRSKRQLWTYSGLGIETRDSAQYRFVRGQLQRAKKPQQIRGLNRNHNHEMKEIFKGAATRASCGVSPLRYFYVALLDKGMKAEMARLTLARKIAAIALTLWKKEERFDAEQLKLQAA

SEQ ID NO: 168920 - protein, 320 aa, unidentified
MSAYEFVGVDIAKDKFDSALEINNRCKHAVFSNNEQGYKAFLKWLEQYTISPWVCMEATGHYSEGLADFLAEKGIRVSVVNPFQIKSFAKASLARNKNDRIDAKIIAQFGQRMEPRIYQSNSAEQKEIRELTKVLDMLKAQVIQLTNQLHSIRGHAAQKSLKKMIEKLEQEIKRIQQQIDELINNNQQLKEKFELLFSIKGIGKLTAYHVLARIPDIQCFQTAKQFAAYMGITPKQQQSGSLIGKTTISRLGDSRLRKALYMAALVAKRYNKSLLPFINKLQTKGKTPKTIICAVMRKLAHIIFGVLKNKQPFNENVACF

SEQ ID NO: 168921 - protein, 342 aa, unidentified
MSIMIGIDPHKASHTAVAIDGDEHVLDEIRVRTSATQTDQLRCWADSFEDRTWAVESAQGLGYLLAQQLVAAGEVVLDVPAVRASRIRTLSSGRSQKNDPNDARSVAIAALRADDLAQVRADDHARILRLLAKRHRDLGRAKNQSCGRLHALLLEMIPGGAGFRMSSITRANTLLGTFEPTDAMGRQRLEIACELAVEIARFDEQLKTSKRRIRTAVAASNTSLTSIRGLGPVTAAIIIGHTGNIDRFPTKARFASYNATAPIEASSGSRVRHRLNPRGNRQLNWAIQVVAISQLRHDSSGREFYDRKIAEGKSSKEAIRALKRRLSDVIYRHLVNDALQQR

SEQ ID NO: 168922 - protein, 289 aa, unidentified
MKHYAGLDLSMESTQVCIVDENGRKLVSEKVESTPEALAAMLERYRPIERAVIETGRMSPAICLGLRELGVPVVCIDARQAHQSLKAMRANKTDPHDAAGLAQLARTGFYKEVHVKSLAAHGVRSVITARSHLVEARVRLDNTIRGLCATFGYRPGAGQGKAFLERIMQAAHIPGLGDAIASLLSVRAELVEQIKEMDHRLRIIASQSQACEILMTIPGVGVQTSAAFAAAVDEAGRFRQSRDAGAYFGLVPRRHQSGELDWTGRITKQGDGTVRRPPGLVGRADAQAP

SEQ ID NO: 168923 - protein, 416 aa, unidentified
MNAVGIDVSSRKSTVAVLRPLGEVVCLPFDVTHDIAGLASLVEKLKALDGETRVVMEHTGRYYEAVAKALHEAGFFVCAVNPLLIKEYGANSLRRVKTDKADAVKIARYALDNWADLRDFTPMDAIRYDLKTLNRQFQLASKQRTASANNLIALLEQSFPGIRKCFDSPVRSDGTQKWVDFAHSFWHVDCVRKQPFAAFCERYRKWCKRHAYLFKLSNAEEVYALAKRAVVLTPKSKVVKVLVQEAANQLSSISRSVEVYRAEMDRLAAMLPEYPVVMAMYGVGKSYGPQLMAEIGDVRRFERKQALVAFAGIDPMPNQSGDKNVRSNKSSKRGSPYLRKTLFNVIRTYLQCAPQDEPVFQFLNRKRAEGKPFYVYMLAAANKFLRRYYAKLRDFFASLDTLQPVAPIPTILKATL

SEQ ID NO: 168924 - protein, 343 aa, unidentified
MQTVTTMGLDIAKSVFQVHGVDANGQVVIRRQLKRRYILAFFQKVPPCLVGIEACASSHHWSRELQALGHTVRLMPPAYVKPYVKRHKNDATDAEAICEAVSRPNMRFVATKTPGQQSCLTLHRTRHLFIRQQTSVINAIRAHLAEFGIVAPVGRHGVEQLPQVVADKSDKRLPEVARTCVAALGAQLQTLKAKILEFDRLIMAWHRSSETSRRLDDIPGVGPALATALVASIADPNAFRSGRDFSAWIGVVPKQNSSGGKDRLGSISKRGDRYLRGLFVAGALAVIRYAKIYGTKHRPWLTALLARRPTKVAAIALANKIARMAWAMMAKGERYKEPVALAV

SEQ ID NO: 168925 - protein, 399 aa, unidentified
MKVSGLDVHKDSIFCAIYDGKDYSEVKEYGTMTEDIRRMGEYLQKEGVIQVAMESTSIYWVPVWDILESMGFELILVNPYFIKQMPGRKSDVKDAQWLSKLLHKRMLRSSMVPSPQIREFRVYTRKYARIVQRASQVITEMDRVLVMAGIRIGSCVSNLTNKSVIKIIDAIIEGKTNPDDLVKLVYGNTANKQSGKLRMALTGNISEHHRQTLKWSKEQYDLYQRQILECLLLMKKMCDEHYSREMKLLQTIPGISNISAMCIIAETGADMSAFENSGKITGWAGLRPRNDESAGKFKSKAITKGNKYLRAILVQTAWAASRTKGSYFKEKYNRLALRKANKRAIVAIARKMLTVIWNVLKDNNPYNPSLVHVYDPVKVERAIAYHKKEIERVSKLLPA

SEQ ID NO: 168926 - protein, 341 aa, unidentified
MDVSVLGIDLGKNSCSVVGLDATGKVVVRRRMRRDTVITYAAGLPACVVAMEACCGAHHMGRALARQGHAVRLMSPEYVRPYVKAQKNDDRDAEAIAEAATRPTMRFVELKTEEQLDMQTLHRIRDQLVGDRTSLMNQIRSLLLERGYIVPQGRAKLAVRLGEMLDGDEPVLGSRIHRLVSDMRLRWIALDDRIADLNAEFTEAARSDERTRRLLTIPGIGALNATALVAAVGDARTFGRGRDLAAWLGLVPRQATTGGKPRLLGITKRGSRYLRKNLIQGARASLPTMSKSDTRLGAWLRGLLSRSHHNTVVVALAAKMARIVWALLRHERTYDPAAQAA

SEQ ID NO: 168927 - protein, 324 aa, unidentified
MNDTVVGIDVSKKTLDTSYAQGQRKQARIFENSSDGWKQMLSWLKAKGSQPAHVGMEATGRYSLGAALMRHDAGHTVSIINPAQIRDFARSKLGRNKTAKADAALIREYTTLFRPQPWTPPSPAMRRLCELQTVRAGLVANRTEWKNRLGSGLGDSTAIQVAKAVIDALSSQLKVIDQAIAETIEQDGDLRGRRDLLLSVIGVGDTLAALLLAEMPEPGVLRHSAEMIAYAGLNPSHHRSGTSIDRPTRISKIGNAALRSALYMPALSAMRFNPVVAALAARLKSAGRLKPKQIVVAAMRKLLVLCFGVLKTGTPFDPAIAMPT

SEQ ID NO: 168928 - protein, 340 aa, unidentified
MQVTTIGVDLAKNVFQVHGIAENDDVLFNKPLRRAQFLPFFAKLEPCLIGMESCSSAHHWARELTAFGHEVRLIPPMYVKPYVKRGKSDAIDAEAICEAVTRPTMRFVAIKTVEQQALLSLHRARDLLVRQRTQLINGLRGLVAEFGVYIPGGLARVIGFAEDITLGEVLDLPDIANEVIRNLSEQLMALHKRIRWYEERLKQVAKEDARVRLLRTIPGVGAVTASAIIASIGDGHQFRNGREFAAWLGLTPANKSSGGKEKLGRITKMGDQYLRSLLVVGMTSLVRQTRSHPERASKWLTSLLERKPARVATVAMANKTARIVWAVLARDEPYSPRAAV

SEQ ID NO: 168929 - protein, 438 aa, unidentified
MSNESSAEPQWAAYVAIDWADREHVWKVQPAEGGPCESGKVEQTPEAIEIWASQLATRFNGRPIAVALEQSRGPVVFSLTKYSHLHLFPVHPSMLAHFREAMVPSGAKNDPGDTGLLLELLLHHRSRLRRLRPDTEQTRELQFLVENRRRLVDDKTYFSNRLIAQLKLYYPQILRWFFKPASPVACDFLLRWPTLESAQKATPRALKTFFAKHNCQDVERRMEDIRKAVCATHDQAVIRSAMIMVQATVRLIQTVHQDIGRCEERIEQLTKSHPDFAIFDSLPGAGDALIPRLIAALGTQRDRFASAVEIQSYSGVAPVVKQSGNTKLTHCRQAYPRFLRQTFHEWALHSILKSTWARAYYERQLSRGKKHHTAIRALAYKWIRILYRCWKDRLPYVESSHADAQKKRSHENVPPQNAVVELQCKKVAGFLKVVALNY

SEQ ID NO: 168930 - protein, 436 aa, unidentified
MDIVHPRVAGIDVHKKIIWVAVRLPGEGPGERIVTVRKLATFWRPLQQMAAWLAELGVTDAAMESTGIYWWPVYHALAAAGIEVCVCNAAHMRNVPGRKTDLRDCQWIAELHEHGLLRASFIPGPAVAALRQRTRYRKKLIESRTAEGQRLSKVLEDAGIKIDSVASELLGVSGRDMIEALIAGERNPGVLANLARSRLRAKIDALQMACDGRFTDSHAQMCRLHLDSYDHLTARIAELDILVAEAAEPFAAIIARLVTIPGIGPRTAQVIVAETGGDMARFATPARLGAWAGLAPGDNESAGKRKKAAVRPGNQHLRAAMVEAGWSAARTATRPGARFRRLARRFGRGNEKKAAVAVAHTLICIAWAVIKHDQDYAEAGEQYYEQRDQRNREHLIRHYQQALARLGYQVTLVPPDDGSPPPGTDTPPTAAPDQAA

SEQ ID NO: 168931 - protein, 397 aa, unidentified
MYIVGIDIAKRKHEAAVIDGEGTVIIKPFSFTNNCSGYNRLLAMLTKAKLPLDEVSFAMEATGHYWLALFTRLQKEGFRVQVINPVQTNSIRSFYIRQAKTDPRDALLIAEVIRFGHFSESTLHPENIYELRELCRGRHAIVSMQADVKRKVVALLDQVFPEYETAFTNMFGDTSMAILQTCPTPKELSEMPLEELCHLIEVSSHKRFRMAKAQELQELARNSFGFAMAGDVFSTMIRLYAKHLDFLKQQVREMDRKIAEIMETLDTPITTITGIGPTLGAYILSEIGDISRFSSAAKLAAYAGIDPTMRQSGEYNGVRNRMSKRGSPYLRHAIWLAASSAVLHDPALKLYFQKKRDEGKPYMASVGHACRKMVSIIYAVMRDNKAYTPCIPNEISA

SEQ ID NO: 168932 - protein, 347 aa, unidentified
MSLRPSTVGVDLAKNVFQVHAIDDVGEVVVRRALRRRQVVPFFSKLEPCLIGVEACGTSHFWARELCQLGHEVKLMPPAYVKPYVKRGKTDAGDAEAICEAVTRPTMRFVAIKSREQQAMLALHRARALLVRQRTQLVNMIRSQLAEFGIVLAKGIQHALKLVEQLLDGKVLDIPELAAKVVITLAEQLRALQARIADLEKDLVIWSRDDPVVKCLQTIPGIGIITASALVASVTDPHQFTSGRQFAAWLGLTPKANSSGGKERLGRISKMGDQYLRRLLVNGTTSRLRWIRRHPETHPWAASLLQRKPAMLVAVALANKVARVVWADMTRGEYYRSPQPSIQEAEA

SEQ ID NO: 168933 - protein, 336 aa, unidentified
MNHYIGIDVAKATLQVYVPEGNQDIELSNTQTALKTLYSKLKKIYKKEKEKIVLIYESTGSYSTVLENFAQKQNILCFKVGSAQSASFARTIKNRSKTDKADARMLCEMSILAKPKDIKVPYRDEKAHQIRSLMKYYQSLIKEQNRSSNYLEAAKYNKEDSYVIKKLQQKILKLKKEQKELITKILLIIENNTLYKKAYENIISINSIGEKSAIILLYLFLRYPNASRQHITALCGLDPIHRESGTSLKKRAKISKQGMSLVRSILFMPVMTAVITNDEMKYHYDKLLERGKCKSLAQIAIMRKIVLLAHSLYKNNEKYDSKKYLNHLDFKDGIMS

SEQ ID NO: 168934 - protein, 451 aa, unidentified
MNPKPEVPAEALGLVHPHAAGLDIGAAEIWAAVPPERDQPSVRAFGTFTPDLQALAAWLAACGVTSVAMESTGIYWIPIFELLEARGLEVYLVNARHIKNVPGRKSDVADCQWIQRLHSYGLLSASFRPEAEMVVLRAYLRQRTMLIEHRAAHIQHMQKALHLMNLQLTQVLSDVTGVSGMAIIRAIVGGERRPAKLAALRNARCQRSEAEIVKALTGSYRPEHLFALKQALTLYDAYSTQLAECDREIESHYAAIKPRFDPDDPDTPLGPDPKTNTHSKNAPDFDVRRQLFQLVGVDLTEVHGLHVSSVQQLLAEIGTDMRKFPTVKHFCSWLGLAPHNDITGGKVKRSRTIKNHNRAGQVLRLAAQSVGRGQSALGAYYRAMKGRIGVAQATVATAHKLARIIYFMLRDRQPYQPISPEEYHQRQHTRQIAALKRKAAKLGFTLQPQAV

SEQ ID NO: 168935 - protein, 311 aa, unidentified
MAKEDLTIEQLVEKGFGIDVHKEMMMVTIMGKGIKKQTREFKTFTEDLELCRQWIEEQGITQGAMESTGVYWKPVFNILTESLQIKLVNARHIKNVPGRKTDVKDSEWICKLLLSGLLNGSFVPPELTRETRDIYRYKVKMTQAGASEKNRIQRILEDANIKLSSVVSDMSGATAIKLIDGIIAGRTDINELVEENYHGKLSASKSDLKKAMTGRLTEHHKYMLLEIKDHIKYLEEKIKHLEQKLEEKLSAYQTEIQLLDTIPGVDTEAAIGIISEIGTDMSVFANEQKFASWAGMCPGNNESAGKKKVHA

SEQ ID NO: 168936 - protein, 359 aa, unidentified
MRIIGVDLHTRQQSVAMLDTDTGEVIEKTLAHEGDEVRKFYSELPDPVLVGIEATGSMLWFLELMEELKIECRVGHPAKIRAAEPRKQKHDRRDARLLLNLLAENRFPSIWMPSTEQRDLRTLLRHRHQFVRMRTRVQHTLQSMALANGLRRGTTLWSQAGQHALEALPLAPHASERRAALLALCPGLQKSIDDLDHQVSEQALLHPQARRLMTHPGVGPVTALATEVFLGDPLRFPDGKAVASYIGIIPRERSSGGRRQRLGALSKQGNALVRYLWGEATMHAVRRDPELKRFYRRKLIQKGMGKARVAVARKLGIRLWIMLRDRIDYEEFCRRGRIRQKSGDARAGMPGPINGPAMQ

SEQ ID NO: 168937 - protein, 405 aa, unidentified
MIAISQPVAPEDSVFAAFVGLDWADQKHDLVLYDQRGGKPEHRELIQTPEAIDEWACGLRQRFGGRPIAVCFEQSRGGIAYALLKYDFLVLFPLSPARLASYRESFSNSGAKDDPTDAALLVDYLLRHRDQLRVWQPDTPATRELQLLSEARRDAVDQRTRLSNQLTAVLKRYFPQAVVLVGHDVDRPLACDFLSKWPTLTAVQAAAPTTLRKFYYAHHSRNEERIVERLELVKSAIPLTTDQALIRAGVLQVQCLIGQLRALAKAIERYEARLSELMDQHPDAALFRSLPGAGPALAPRLLVAFGTDRERFQSAVELQSFSGVAPVTKRSGKQCSVHRRWACPKFLLQTFHEFAHCSCKRSTWAKAFYLQQRSCGKGHHAVLRILAFKWIRILFRCWKTKIPYS

SEQ ID NO: 168938 - protein, 341 aa, unidentified
MSESALIGIDLGKHSFHLHGQDESGREVFRKKLSRPQMMQFFGNLKACTVVMEACAGAHFVARQLIAMGHQAKLISPQFVRPFVKGNKNDFVDAEAICEAASRPSMRFVSPKTEAQQTLSVLHRLRESLVHDRTKAANQMHGFLLEFGISLPKGLAIMKRLPSILAEHELPVRLTMQLQRLHDHFVYLDGQIKELDKELASQLAVDDLGNRLLSLPCVGPITASLLAVEMGDGQQYRCSRDFAAAVGLVPRQYSTGGKANLLGISKRGDKHLRQLLVQCARVYMQRLEHQKGALADWVRSLLMRRHSNVVACALANKLARIAWAIAAHHTQYETGPDALNA

SEQ ID NO: 168939 - protein, 381 aa, unidentified
MKIFVGIDIAKLNHFAAAISSDGEILIEPFKFTNDADGFQLLVSKLESFDKNSIIIGLESTAHYGDNLVRYLVAEFYQVCVLNPIKTCQMRKNNVRKTKTDKVDTFVIAKTLMMQDDLRFITFFDLDMMDLKALGRFRQKTIKQRTRLKIQLTTYVDQVFPEIQYFFKSGLHQNAVYALLKEAPSPKEIASMHMTHLANLLKVNSHGHFTKEQAKELRVLAQKSVGANDSAISIQITQTIQQIELLDSQLEKIEAEMTDIMKFNDSVIMTIPGIGYINGGMILGEIGDIHRFSNPNKLLAFAGLDPSVYQSGNFQAKTTRMSKRGSRVLRYALVNAAWNVVRNNATFKAYYDAKRAEGRSHYNAPWSLCRQACQSHLEDAH

SEQ ID NO: 168940 - protein, 356 aa, unidentified
MSHEVKYIGMDVHKEAIVIAVLNESGKLVMESIIATKASNILQFLHGLRGELHVTWEEGTWAAWLYDLLQPHVQHIVVCNPRRNALLKEGSKSDKVDARKLADLLRTGMLRPVYHGENGLRTLRELGRSYQTISKDLTRVMNRLKALYRGWGIPCAGTQVYAARTREEWLSKLPQAGVRRRAELLYQQLDGLQALRREVRPEFLAESRKHKAAKLLRQIPCIGPIRAARLIALMQTPHRFRSKRQLWTYSGLGIETHDSAQYRFVSGQVQRSKKPQQVRGLNRNHNHEMKEIFKSAATRASCGRGPLYDFYAALLAKGMKPEMARLTLARKIAAITLTLWKKEERFDAKQLKTQAA

SEQ ID NO: 168941 - protein, 448 aa, unidentified
MSNGSGVSRGDRNRNARLNRLRELVPVRNAIVGIDLADNKQMVVVTDHDSKVLARRTFRVRAWDLGLALDWAGQHASKAGFAGVTVACEPTGHRWRVLGQLAADRGMAFVCVQTLLTSWARRSEDLTFDKTDEKDAVLIARLTAQLRCYIPEPLDETWGRLRHLGARRERLLAETVSQVQQIRDLLECVWPAPLDAAKHPFRSRTWLAAMSVILARTDGDPARLRRLGEARFEAAVRREIVARQGKKPCLRIVRLLFAAATDSRGVTTHRPGALERVQLLLDDFRDTGRRQGEAEARMVEVLDELQLTELVCSIVGLSALGAATILAETGDLNRFASARAVVKHSGLAPREKSSGTYTGRTKLTGQGRPGLRRAAWRAVWGAQKANPVYAAKFTHLTTRTENKLNRGQAHAAIAAAILRQLYAVVTTGQKWDAVIAAGGRCEVIQPAA

SEQ ID NO: 168942 - protein, 338 aa, unidentified
MEHQTQYVGIDLHRRRSVIVRRSETGETLDKVRIDNDPVALAAEVTKAGPHPDVVLEATYGWYWAADVLKECGATVHLAHPLGNNWGHRRVKNDERDATDLVDLLRMGRLAEAWIAPPPLRELRELIRYRAKLVQLRGNLKSQVHSVLAKEGVTVPMSDLFGVGGRRLLFETALAHAYRVRVESLLDLLEICDREVDMLEKEVGPYFAGDLGYQAIVAIPGVGPVLAAVFVSEIGDVSRFKSARHLCSWAGLTPTHHESDEKVRRGHITKQGSRLVRWAAVEAVAHQRGATAVGRHHHRVAERRGNKIGRVAAARKLLTLVYYGLRDGEIRCLAQTTE

SEQ ID NO: 168943 - protein, 459 aa, unidentified
MSQRRKKPKRAGQGGAVPSLSCIEPNAAGIDIGATEIFVAVPQGRDPSPVRSFETFTEDLHRLKSWLQQCGITTVAMESTGVYWIPLFQILEKAGMEVCLVNAQHVKHVPGRKSDVIDCQWLQYLHSVGLLRASFRPEERICAIRSLLRHRDSLVQMAAAHVQHMQKALTQMNLQLHHVLSDITGQSGLAILDAILGGERNPAVLAQLRHARVQASQEVITKSLVGDYQREHLFTLRQSLQAYRYYQSLITTCDQEIAEQLQNLDSRTPPDASPLPPEPYPHRPRKNEFRFDMRSELYRIYGTDLTAIPSINALTGYTVLAEVGTDWSKFRNGDAFASWTCLCPQNKKSGGKILSAHTRRSANRVNRALRLAAQTLERSTSYLGTYYRKMRARHGAPAAITAAAHKLARIIFHLVTTGQAYDESLFAAEEQRQRKRLENKLKRSAQQLGYQLIPLGQTA

SEQ ID NO: 168944 - protein, 368 aa, unidentified
MTEDIRRTIGVDVGDKHTHVFVIEADGEVSEQTRIPTTPASVERFFRRQPPSRVAMEVGGHSRWMSQAILQLGHEVLVANPRKLRAIFENDKKTDRADAQILAEMARVRPALLHPIRHRGPAAQQAVSLIRARDSLVRARTLLVNHVRGVSKAFGARLPKCATGSLPKHQAELPEAVQQILAPLMRVVEELTTQIRRYEWQVEQTARASFPETEPLRQVPGVGALTALAFVASLEDPNRFPSSRKVGSYLGLRPRLDSSGTLQKQLGISKSGDPYLRRLLVGSAQYILGPFGPDCDLRRWGLKLGQRGSKNAKKRAAVAVARKLAVLLHALWRSQQPYQRLLETGARPTTQAPSESVSTALPSAATTS

SEQ ID NO: 168945 - protein, 403 aa, unidentified
MSGYFAGLDWASTTHAVCIIDEHGGVQREFEIAHTAAGLSELVRHLKRCGTPPIAIERPSGLLVDTLVEAGFTVVPIHPNVVKATRPRYRSHGAKSDASDAYLLADLLRTDGHRFKPLAPQSDELRALRALVRGRDDLLATRVQLANQLHALLESFWPGAAEIFADIASPIAVAFIERYPTPEAAARLGPKRLAAFCAQHAYCGRRPIEELLARLQRAPASACAELEMEAKGELARALARTLRGLLEQQRALSSRIEHHVAELEDGRLLMSFPRAGRICAAQLLAEIGTVRERFTSEVHLAAEAGVAPLTFASGKSKAVAFRFSCNHRLRAALTCLADNSRHASPWAAAVYARARARGCDHPHATRILARAWTRVIWRAWQDRKPYDPTRHRAAQQLVPTITG

SEQ ID NO: 168946 - protein, 354 aa, unidentified
MSERAKARVTVVGIDIGKNSFHVVGLDRRGAIVLRQRWSRGQVEERFANMPRCLIGMEACVGAHHLARRLRALGHDARLMPPKYVRPYSKGQKNDFRDAEAIAEAVQRPTMRFVVTKTPDQLDLQSLHRVRERLVSQRTGVTNQIRAFLLDRGVAARQGLRFLRCQLPIILATRSDVLSPRMMRVIEELAGDWRRLDERIDGLSQEIEALARQDPACERLMTVPGIGPIISSAVVAAIGNGAVFTKGRDFGAWLGLVPKQISTGDRTILGAISRHGNRYLRALFVQAAWVVLVRIKDWDRYGLKAWIDAAKKRLHHNVLAIALANKLARIAWAVLNKERVFECVRTRATASQPA

SEQ ID NO: 168947 - protein, 475 aa, unidentified
MNLKGTKKKNQVSNVNIFEQQELLKKIEVVRENLTASTWRELETKGKFDKNAKLSFICDDMLILGCDVGSETHYLRAIDTRGRELSKSAFSFSNNADGFNKAKEWAVKIAAEYDKKQIVLGLEPTGHYWFCLATWMISNGLSVVQVNPYAVKQTKELEDNSQLKDDTKDPKLIANLVKDGNFGMPYLPEQLYADLRRLSMFRDQLNEDRIRSINRLHRELKIYFPEYKEALGKTEGTFSLELLKQAPFPDDLAALKEDGIRQIWHNAKLRGRGYSRAGEILEYAKASVGLREGKETGKLVVQWFVQKILELDAELALIETQINQKCLEIPHTDKVLEICGIGENTLSGMMAEMGDISRFDDVKEIQKLSGLGLVASSSGKHKGETKISHRGRKRLRYWLFEAAKSAVVHAEEFKELHVYYTTREQNPLKKMQSLIAIACKLLRIIFTILKKGIKYDPRKMLKDIRRESRQESLAA

SEQ ID NO: 168948 - protein, 406 aa, unidentified
MYFAGVDIAKRRHELCVIDDSGDILLQLPVENTKRGFEKLLTAFRTKQLTNQNVRFCLEATGHYWIALYCQLREHGFSVDVVNPIQSDALRNLYIRKTKTDQKDSFILADLLRLGRATSTQLASETVLKLQTLSRMRFEFVSQIGGLKNKVIGILDRIFPKYPGCFSDVFIKTSRELLKQYSSPEELAEVDLTELSDFLREHSRGRIGMDRAERIQNLARGTFGISIAIDAFTLELRLLLQQIEFIEEQIKEIEDAIDQVMEEMRPSDETPYRHVIETIPGIGPVLAAAIIGEVGDITRFKNAKALVAFAGIDATIRASGQFEGTRNRMSKRGSPVLRHSLWLAAVSARRFNPKFKEYYDTKRAQGKHPNVVTGAIARKLAHLIFALWTDNRPFDPNYKWTAGSTN

SEQ ID NO: 168949 - protein, 473 aa, unidentified
MTSSKQRREVQGQPTLSNEALYIGIDIGKFKHVAGFLSKTLLERHKHFDHCPAFTFEQSREGFRAFVERIQAYCPLEQCFILMEQTGHYHQSLLQYLLELDLPVFVIHIQRRQEGMVKTDKRDALGLANQLYTQLELGAQVANTLQAIRRALPPSEAAAQLKGLVRHRYELVNEATQRKNKLTAICDELFPEFTQVFKDPNAALALDLREHFPTPSAIAAATSVELRTVRRRNHPSEAQFVQIQQLARQSIGTKDTARQDSLIVEQTLLIQELRLLQNHLEQLEEKIGQIVEKSREGQILTSIPPIGPLFAASIIATIGSIGNFEDAAHLKSYFGWAPIRTQTGVSFDRTRLTRAGSREMKKVMFLVAWKAIQMDTEWAKLYKRLVPRLCFYDERMQAYKGKGKALGHIIGRLITLIFALLKKDYELLNKLSPGAEPPPLTLYDPELHHRHRTGHYSPLRKEGPKNRIVQHSS

SEQ ID NO: 168950 - protein, 390 aa, unidentified
MERPMQKLNDLSRSPNPLDPDGTLIAVIELSLSSWLVAGIVPGVERQPLKKLAVDENALLKLLHRWREEAAKAGHRIKRIAIAFEAGRDGFWLARWLRARDIEAHVIHASSVAVSREHRRAKTDRLDTELLKRSFLGWLRGERDHCKMVAIPTTQDEDAKRPNREHESLVGEQSRIVNRMKATLIRLGIRGFNPKLKKAAERLDGLRTPEGEPIPPNTLAELRRDMARRRLVSDQIRQIEDARLERLKQAPSDGPHAMVRLLARVIGVGVETADMLVQEVLSRSMRDRRAIARYAGLTGSPDESGRKRREKGLTRSGNARVRRGMIQLAWRFLMFQKDSTLAQWFRTRTENARGTRKTMIVALARKLLIALWRLVREGVVPDGVVLRPAS

SEQ ID NO: 168951 - protein, 313 aa, unidentified
MANISKTYVGVDISKNTLDICIYPKKMLLKIDNSGLAIKSFIKELAKHDVAQIACEATGGYEKQLAITLKKHGYDLWIVDPRRIRGYIISTGCKSKNDKIDALKIAEFCSKNTKDYLAVEKTDNQEKLQALVNRKNDLTKFLAAEKTRLKHPSHEMNKPSIKRLCKILGAEIRTVEKQIKKLIEVDANLSKKTKILESIPGIGQASAALLLSHVPELGMISNNKIAALVGLCPYDNESGKSKGKRKIRGGRITPRNHLYMCALTTIKYNLTLKAFYDRLIGKQKTFKVAIVAVMRKLIILANSLLKKGELCKV

SEQ ID NO: 168952 - protein, 387 aa, unidentified
MTKNKGRVVGLDVHPDSFAGAVVQGSDPASAVVSSTSTRVELEQLEHWALRHTSTEDTLVLEASGNAFAVAARLRAIGREVEILDSHRAGKVGKVYCATDRVDAVKIARIYLSALSPIVWQPDQKTLERREIFSAYQAVVKESTRAKQQLRAMLNEHCVRLEKGFRLCPPHAITRLLKVREWTPARRILLQQLHGSLVAARARRTMLRRHMAQEIVAEEALLRLTRLCGINLITLYGVVAAVGDVRRFTHSKKLVAYLGLNPSVSQSGNFQGSGALKRHGRGALRALLIQSGKKLLEVNNPLQKWGLAVAARRGRNKAAVAVARKLCVALWHVMMGHAIGTLERLDTLQTKLSKFATEIGPAALTAFGYNNKADFVEKKLYVLRSYP

SEQ ID NO: 168953 - protein, 363 aa, unidentified
MTSMTTNSTIVTGGVDTHGQTHHGAALDSVGRQLGDREFPTTPAGYRALLSWLQAFGHLERVGVEGTGAYGAGLTRQLRAAGVTVVEVNHPDRESRRAKGKSDPLDAYSAARAALAGKATGVPKTQDGRVEAVRMLRVARSSAVKARSQATNQLKALLVTAPAELREQLRTLSNTKLIATCARLRPTGDIADSEHATKTALRRLARRHQYLSEEISAADTELRTLVTAAAPALIALPGVGTEVAGQILITAGDNPDRLHSEAAFAHLCGVAPIPASSGRTHRHRLNRGGDRRANNALYIVVIGRLRYDSRTRAYAARRTTEGLSKPEIIRCLKRYVAREIFTVLTARAADDHSHQAHTMSTAA

SEQ ID NO: 168954 - protein, 457 aa, unidentified
MARSKRASQRKEVEHAMFQPNAAGIDIGAREIYVAVPADRDDHPVRKCETFTSDLHQMAEWLVCCGITTAAMESTGVYWIPVYDVLEEHGIQPCLVNPRNMKNVPGKRTDFHECQWIQHLHSMGLLHSAFRPDGEVCAVRSLMRHRNDLVEMASQHVQHMQKSLTQMNVQFQHVISDITGTTGLAVLDAMVAGERDPGKLARLRDPRIKASEETIRKSLEGNWRAEHMLALKQRLVLYRSYRDQINDCDKEIEKLVASFEPKVDPEQKPLPEDRKQKQRRRQKKTGNPDFDMRTEAYKLFGVDLTQVPGLMTLVFMLFSEIGRDMSRWPTAAHFVSWLGLCPDNDISGGKVLWRGARRTKSRAGTLFRLAAHSLHRNQTPMGDYLRRMKAKLGPAAATTATAHKIAIIFYTMVNKQVEYDVSLWAQRDAMREKRLEARLHKQAAQRGYKLVPLEPVA

SEQ ID NO: 168955 - protein, 337 aa, unidentified
MKFIGVDLHSNSLTACYLDENGSEEMRTFALKELEKFKASVKGTDQIAVEATGNTRHFVGSIKSLVSKVVVVNPSQFEVIRKSVKKTDRHDARTLALFLSKEMLPESRLKEPAHAQLNSVAHTRDKLVKLRTTLINKMHALHVAAGIKSKKSSFSSRRGLQLALKRSWDELTRAELEVIVSQVGSLNEGIKRLDQQLSAAGRQLAGHRNLTSIKGIGDKSAAVLLSVIGNVSDFPGEDKLASYFGLVPRVANSNETIHHGRITKRGSRLGRTTLVQCTLVAARYSPYLKKFYERIKAKKGAGKAIIATARKFLGIIYRTLKNNWVFADFPNFVLAED

SEQ ID NO: 168956 - protein, 351 aa, unidentified
MSKRTNSIAVSTIGIDTGKNTLHMIGLDEKGVIVLREKVSRSRIAARLVNMQPCLVGIEAGMATHYMARELVALGHVVKQVPPAFAKPFRQGHKNDFRDAHAVAEAVQRPSTRWVPIKTDDQLDLQALHRVRSRPIGDRTAVINQLRGFLLEHGIAVRQGHRFLRQQLPRIVATRTDVLSPRMVRIIGDLIEDWANLDERIERVTDEIEGLARTNVSCGRLMTVPGIGPIIASAMVAAIGDGAAFAKGRDFAAWLGLVPKQMSTGDRTILGRITKRGNRYLRMLFIQGARAIQLHPASWAKHSFGPWLAAAARRLHCNVLTVALANKLARIALTVLVQGRNYETRIEPIPA

SEQ ID NO: 168957 - protein, 341 aa, unidentified
MNVTTVGIDLAKSVFQVHGVNKNGKPVLRKQIKRQQMAEFFANLPPCLIGMEACGSAHHWARKLQAMGHTVKLMAPQFVKPYVKTNKNDAADAEAICEAVARPNMRFVPIKNVEQQAVLALHRARQGFVTARTAQANQVRGLLAEYGLVIPQGFATLTLRVPEMLEDATNELPGSFRLLVQRLLDHLKELDRQAQEIEAQIVAWHRESALSRKLAAVPGVGPITASALVATVGDAKSFDSGRQLAAWLGLVPRQNSSGGKNVLLGISKRGDTYLRTLLIHGGRAVIRAAQRKNIQIDGWLGELLQRRHKNVAAVALANKNARVMWALLAHGREFEAQYKEA

SEQ ID NO: 168958 - protein, 410 aa, unidentified
MDAFCGIDWAEDHHDVALVDHGGAVLARLRISDDAAGLTRLLGLLAEHGDSAENPVPVAIETPRGLLVACLRAGRPVYPVNPMAVARYRDRHSVAGRKSDKGDAAVLANVLRTDIHAHRPLPADSELAQAIAVLARAQQDAVWDRVTAHNKLRSHLREYYPGFLAAFAAAKGGIMRPEARAILAAAPTPATAARLTLAQLRALLRKAGRSRGIDAEAARPREAFRQEQMRQPPLVEEAMGRQSRALLRQLDAACQNASDLEAAAIGSFSQHPDAGIITSFPGIGALTGARVLAEIGDDRSRFADGKGLKAYAGAAPITRASGKSRSVTRRHVKNNRLAAAGYIWAFSALTASPGARAHYDRRRDAGDRHAAAERNLFGRLPGCLHHCLATSQDYDEATAFPSHPAIPAAA

SEQ ID NO: 168959 - protein, 355 aa, unidentified
MNLLRQSNKLNFDGQIFFIGIDVHKKSWAVTIRSNGMQLKTFTMEPNTKKLEKFLKKNYPGGHYFSVYEAGFSGYWLHYQLTELGIRNIVVSPGDVPISNKEKSYKDDSIDSRKLARELENNSLEAIYVPTANQSATRQLSRLYALQSNENKNIKLRIKSFLNYLGVDIPIEVGSRWSNRLINWLEKLGLENEGDRYYLDQLIKNMQAKRKEILATLKLIRKSYGDHEVIKLLRTIPGIGLITAFTFYAEIMDIHRFANQNKLASYVGLIPSIKSSGNKTRVQGLNHRQNKLLKFRIIESAWVAVKNDPALTSSYMNYVKRMPNQKAIIKIARKLLNRMRSVWINQKEYQLGRMV

SEQ ID NO: 168960 - protein, 349 aa, unidentified
MLHVGLDLSRRRVDVCLISSEGELVEHFRAPADRDGLYGLSRRVAVYDEPVRGVVESMNGARFVHDELVHYGWEVLVADAQRVKGLAPLACKTDKIDARVLAELSFRDLVPAIWLPTPELRQEREHSRWRLHLVKHRSILKNRVHASLIAFGQQVPMADLFGVAGRRLLAELDFPEPWLGHVRASLELIDDLDRRIGEIERWLQHSGADHRYIPLLMSAPGIGWITGFTIAAEIGDINRFSSPVKLTGYTGLCPRVNQSGEVDRRGPISKHGPRYLRWGLMEAAIHASAHPLYKERYQRTKRRLGRQRGAKVAQIELARKLTEAIWYMLTRNQPFKPFAPEGAIYRLTA

SEQ ID NO: 168961 - protein, 420 aa, unidentified
MLKPETTPPFVACIGLDWGDQSHAVALQPVQGKTESGTLVNSPEVLHTWLQELAQRFEGRPVALAVETSRGPLIHVFSAYPWLTVYPIHPATSARYRSAFKPSGAKDDQPDALLLLELVLCHQAKLRPLQLQDTATRKLGALVELRRDLVDRRTQALNQLTSLLKSYYPQALELAGKDLSSALALDFLTRWPDLLALKTARPAALKTFYYRHSVRSAELVAQRLALIQPAQVLTTDEAVLEPALLHLQALVAQLRVFLKHVALLEKQIHSLFQSHEEAYLFRDLPGAGAALKPRLLVAFGQDRTLYPDPASFQKLSGVAPVIEKSGHQSWTHWRWQASRFLRQTLIEWAGQTVIYSTWAAAYYKAMKAKGKRHHVILRALAFKWIRILWKCWQTRIPYDEARYLKQLAARKSPLAIKINP

SEQ ID NO: 168962 - protein, 335 aa, unidentified
MKKFDYYVGIDVSKKTLDVTLLYECGNTTKTEYYKIENNEKNIVRLLKERLGKYDLKQILFCFEHTGIYSLPLASYFSNNELSYWQVPAIEIKRSKGVTRGKSDKIDSKDIAFYAYTHTHKLRPSCMSPKSIQKLHLLFTEREKILKALSIFEATAENKDFMSKEIFNTVVSVNRSVIKKLKQALKCVEEKMLDIITCEDKLNQQYKLITSIKGIGMQTAIYLIITTKGFEAFENWRQLACYAGVAPFPYQSGTSIMGRTKVHHLADKKLKSLLNMCAIVAVRHDKELETYYKRKVKEGKNKMLVMNNIRCKLLARVFAVINRKTPYINTFKFAS

SEQ ID NO: 168963 - protein, 369 aa, unidentified
MNKIVKYVGLDVHKDSITVAIADQGRNGNVRVYGKIANDMNQIDKVMRALKSRNTVLNCVYESGPCGYTIYRHLKCKKIKCAVVAPALIPKKSGQRIKNDRRDATKLATLHRAGELTTVYVPDQHDEAIRDLVRARADVIKALRKVKQQINAFLLRQGISYSGRSKWTKAHWTWLSAIEMAHPAQQIALTEYLDAMENNQSRVVRINKQLEILCHNWRFASVVKALQSLRGISFISAVTIVAELGDLNRFDCASQLMGYVGLVPSEYSSGNRVKKGGITKTGNTHARRALIESSHAYRLPARKSPTIRKRQHGVPEKVLSIAWDAQLRLCHRYRRLKARGKNHNVVITAIARELSGFIWAIARVVPLSA

SEQ ID NO: 168964 - protein, 352 aa, unidentified
MVRRRVEVTGGVDTHKDTHTAAVLDSAGRVLGTEQFTTTRAGFAALLAWLRGFGTLQKVGVEGTGAYGSGLTRFLSDAGVTVIEVDRPDRKTRRRQGKSDPIDAVSAARAVLAADTAGIPKQRDSRVEALRNLRVARRSAVADRADAVRQMHTLVITAVDEVRDQLRGRSTAALVKVCAAAAPKTTDVADPAVAVLIALRSLARRHQQLTAEITDLEKLITPLVEQINPNLLELKGVGPDTAGQLLVTAGANTDRLRCEAAFAMLCGTAPLPASSGKTNRHRLNRGGDRQANAALYRVVISRLRWDQRTRDYMDRRTKEGKTNKEIIRCLKRYIAREIYQQLNPPRPAPTPA

SEQ ID NO: 168965 - protein, 379 aa, unidentified
MKKHNTAKKNQKVLWKTKQKQIVEMAANKRLTIGLDLGDRTSRYCILDEAGEVVSEGQLPTTRTGLNSLLDKMPSSRVALEVGTHSPWVSRQIASLGHEAIVANPHKVKLITQSTRKNDRIDAQKLARLARVDPRLLSPIRHRGVEAQADLAVIRARAELVEARTGLINCARGLAKPMGERLKECDADQVQESSAQPLSEATRAVIGPLLKSVEALREQIAVYDQKIEEIAQRYPEVELLTQVYGVGTLIGLTYLLTIEDAQRFQHSRDVGAFLGLQPRQRESGNSQPELGISKSGDRLLRSYLVQAAHCHLRKGAPDSDLRAWGLGKALKGGKRGKRRALVAMARKLAVLLHRLWVTGEVYDPRYNRKAASAGKAAAA

SEQ ID NO: 168966 - protein, 429 aa, unidentified
MQNESTPGARGPVFCGVDTHADSHWLCVLDWRGRKVLSRQFPADAAGYEALAGAIAAAGEPACVAMEGTSSYGAGLTRHLASLGMPVREALSPARMQRRRPGQGKCDEADAERAARAAMSGSRLGTPKSQDGWVDGVRCMLAARSGAVKARTSAINTARSLLTTAPEGLRSRFRGMAGPRLMEELPSVRAEGALGAALGALADLWAAARDAALDMERAIEASLEENCPALLAMYGCGPVSAAKLAVAAGDNPGRLRSEASFAAICGACPIPASSGKTVRHRLNRGGDRQANSALHEIARQRVMRDPETAEYAERARGRGKSDREVMRCLKRYVAREAYRALMHPHEIRRPGDASELVAARRAARVSQVRAASILGTSEKYISMLERGRRELKPIRRAYEAWVEAGLPLDWDRQAFEAERKFDSKKHLAK

SEQ ID NO: 168967 - protein, 401 aa, unidentified
MKRLSGGIDIGKDFHHLIILDEQERVRYQKKIPHHLGEMTKIMKQLTCLQKKEKAHLSFALEGKNGYGNPLDRLLLAQGFTLYNVDNYKLKRFRQAFSGERKDDNRDSLMLSKMLNLKEHINTKGEKVFIEITKPSVITESLKLLSRHQQVLIEENVRLTNRLGKKLLEVCPELLTLGKLNNQKIIAILARYPDFSRYSKITLNSLLKIRGIGKKQAPALLAGLHELAYMPEMTAIYQTIISSYSKRILQLREEIKQIDQKMERIGRQDNSIRHLKSIPGVATKLASRFIGEIGDINRFPSEKNLAIYCGIACVNNASGKTNKTKAVYKANKIAKQTLVLMAGCSIRVNPQCRDYYLKKRKEGKAHNHALRCLARQLIKVIYRMLTEDRDYQIKKEALKAA

SEQ ID NO: 168968 - protein, 423 aa, unidentified
MASATTALFTAYIGIDWADRKHDFCLQAAGSTAVEFGVIEHKPEAIEKWAQSLHERFGGPIAICLETTKGPLVYALQRYEFLVLFPVHAATLAGYRRAFVPSGAKDDPSDAHAALDLLWRHPERLQPLKPQSPAMRMLASLVEERRQLINSITRTSNRLVSTLKLYYPQALDWFEHRNTKMFCDFLDRWPTLAHVRRARVTTLESFFHEHNCRRPHVVTARIESIRSARPLTEDQAVIRPAQMVVETLVAQLRVLIKASERYDEEIDAISRTLPDYWLFASFPGAGQIQAPRLAVAFGEDRDRFASASEVQRYAGIAPVVERSGNRCWVHWRIACSTFLRQTFVEWAGSTISRSSWAGAFYWQQRKKGCSHGVAVRALAFKWIRILYKAWKTRKPYDETIYLDALKKHASPLVGSTVETVNTA

SEQ ID NO: 168969 - protein, 364 aa, unidentified
MTTLAQSDAPCRVLGGVDTHKDVHVAAVIDDVGRILGTASFPTTRPGYRQLFVWLRGFGEIVAVGVEGCGSWGAGLARDLTARGVRVVEVNRPNRQTRRRRGKSDTVDAEAAARAVLAGDATVTPKTGTGPIEALRQLRVARGGAMKARTAAANQLHSLIDTAPDPVRAQLRALSFKQKVALVASWRPRNATTPEGASRYALCSVARRWRDLAVEIGELDARIKVILDDIAAPLLAVHGVGPDTAGQLLVTAGDNPDRLSHERSYAALCGSSPVEVSSGRTNRHRLNRGGDRHANSALWRIVIVRMNSHQPTKDYIARRTAEGLSKQEIIRCLKRYVARELFRHLQHAVTDPHHEVPALVQRAA

SEQ ID NO: 168970 - protein, 391 aa, unidentified
MRFAGIDVGSEHHAIAIVDEHGDPIQRSLSITEDADGYRRLRDVLGDPTDCLVAMEATGHYWRNLFASLTTDGFTIALLNPIRTRRFAEEELQRTKTENVDALGIARFAAQKRPKATQPPHQATQELRQLVHLRRQAIQHLGDRVRNLHRAIDLTFPEFTRYVRGLDTELANAILSRYPSALSLAAVTVTKLAKLCFDGRRRVGPTLARALIAAAKQSVGSLQTAPFELEVRYACQDICEMRERCRQLEGDIQRRIDSHDLGKLFTTIKGISTLTAAAIIAEAGDPARFPNAATFASYVGVVPRLHHSGKRKFSGNGAIPLGNARLRHALWMPVLVAIRVNPWLRAYYQRLRAVGKRPKVAIIACMHKLLAAVYSVAKNRRPFVPRLSADL

SEQ ID NO: 168971 - protein, 317 aa, unidentified
MAEVTFPQLIQRACGIDVHLKVVVATIDGAGIQRETRSFKTFTSSLNELKEWLLSNGVTHVGMESTGVYWKPVYKVLEDSIPNIWIVNARHIKNVPGHKTDKMDSEWICKLLLAGLLKPSYIPPKEQRQLRDLTRYRNKLIQQIASEKNRMMRILEDCNIKLSSVVSNTSGTTATSLIDMLCEGKVLTLDDINSVYHGKLSASPEELLEACTGFVEEHHIYLLQMIRKDIDQTQTLVDDLSERIKRLLSKYENVLELLREIPGFSTKVVEDLVSEIGLDMSHFPSEKHLSSWAGLSPGNNESAGKKKAHESLTETNR

SEQ ID NO: 168972 - protein, 359 aa, unidentified
MKRKVYVGMDVHKETIQIAYLTSNSKEILKEQQIKHNEVQIKKFIKKLKTEWNEIHCCYEAGVTGYPLYRYLKSLGVNCILVAPGKIPRQSTDKIKTDKRDAIKLARLMRSGELESIHVPSEEDEAVRDYLRSRDSLRLDLGRNRQRLMKFLLRKDIKYSTTKYWTVSHYKWLNNLHFNNEILQETFNDYYSRVRVQEENLKAMDKKIQEIAESEPYQEKVGILRCFRGVDYLTAMFLLSEVCDFKRFKTAGSFMSFLGLVPGEYSSGSKRKQTGITKTGSPRLRRILTEAAWQHRFPGTGSKIVTARRSGQPALVVALAEKASLRLHKKFRNLQLRGKTPQVMITAVSRELSGFLWAQ

SEQ ID NO: 168973 - protein, 343 aa, unidentified
MDHFAGLDVSVKETSVCIVDDTGKIVREVKVASEPEDLLQILSNPAYHFKRIGLEAGPLSQWLFSALAEAGLPVICVETRHMRAVLKAQINKTDRNDARGMAQMMRAGLYRPVHVKTLRSQKLRMLLTHRKLLQSKAIAIDNDLRGTLRNFGLKVGMVGKVRFEARIKELVDNLPDLAAMVEPLLIVRRTLREQFCVLHRRLLAIVRDDEVCRRLMTTPGVGPVVSLTYRATVDVPARFRKSKSVGAVFGLTCAKYQSGESDWSGRISRCGDEMMRVMLYEAAQSILHSKRWSWLKVWAMQIARRRGKKKAIVALARRLAVIMHRIWVDGTEFRWTREEAAVA

SEQ ID NO: 168974 - protein, 338 aa, unidentified
MSEYYLGIDLHKKRSFTVLMNRDGQVVDEGSVPNEEMRGYLAEKVPRSTTAVIEATFNWPFMYDLTCQYVEQVLLAHPQKVKMIAEATVKTDKIDARTLAHLARTGYLPTAYAAPQAIRELRQLVRHRANLVADRTRHKNRVQSALTRHNLTPPVSDLFGVQGRAFLQSCLSQDLSMADRRSIEDNLAAIDFIDHLVGEIRQCLQKQVHGDAQVVLLQTLPGVGLITAATVRAELGEVKRFPNADRAARWAGLTPSVRASAETVHRGPISREGSPYLREAMVGAALRAVRYSPALRRFHDRIAKRRGPGMARVALARKMLVIAYCMLRSGQPFSEAAV

SEQ ID NO: 168975 - protein, 348 aa, unidentified
MLIIGCDYHPGFQQIAFVDTETGEFGERRLTHREEAEQFYDTLRERSVRVGMEASGHARWFERLLRDLQFELWIGDAAEIRTKRVRKQKTDRQDAQLLLRLMVEDRFPRIWVAGAENRDLRQLLWHRHRLVQMRTRVMNQLHVVALNEGLRRKKALWRPAGRNELESLILAPWASRRRRDLLDLLDQLTPKIQELTRALEDEVEKRPVTRRLMTHPGVGPLTALAFELVIGTPERFHCGKQIASYVGLVPSEESSGDRRRLGHISKQGNSLLRYLLVEAAQVTVRSQPHWRSKFFHLAMRRGRKIAKVAMARKLAVRLYWMWRQGCDYAHFEKLGSHAGEPGNRHGVE

SEQ ID NO: 168976 - protein, 353 aa, unidentified
MSHLPEEREVILGVDTHLDMHVAVLIDVVGRIVATTSVSTTALGYEQLIEWARGFGRLTRAGIEGTGTYGAALARRVHAHGVQVLEINRPDRSRRRLRGKSDPTDAENAARAVLAGEANAIPKAQSGVVEAMRAVSMARRSAVKAKTQAINQLRALLVTAPESIRATLWKVKPEQCVARCARLQSLGDTPLLQALTNTLRLLARRWMSLAKELHQLDAALEELTKRAGRRLLARFGVGPQTAATLLVTAGDNPNRLRSEAALAALCGASPLEASSGKTTRHRLNRGGDRTANNALWTISMVRMRSDPRTRAYVARRTAEGLSTKEIQRCLKRYIVRELYPLILADLADSVCET

SEQ ID NO: 168977 - protein, 388 aa, unidentified
MTQAPGALPTPTMLDYERTLILAIELSNTSWVLAAQIPGLPGVKAKRSIEPTPEALMAAIEGYRARAEKAGRNAARVIAIYEAGWSGFWLVRWLAKYGIETHVIQPSSVPVDRRVRRAKSDGIDADLLLRTLLAWLRGEPRVCSMVPIPTEADEDARRRVRERAELVTERIGLVNRIGAVLATLGVGVYNPLRRDRRQRLDELRTALGDSLPTHACAKIARMLDRLELLLIQITELEQSRDAVLKDENPDRAAGMIQQLAKLRGVGVQSATVLVREGFVRKFANGKALGSYAGLTATPYSSGGTEREQGIGKAGNARLRTVMVELAWLWQRYQPDSAQVSWFRERISGTGRRMRKVMVVALARKLLIALWRFATQGVVPEGAVMKPAF

SEQ ID NO: 168978 - protein, 357 aa, unidentified
MENKNTQVNFSSQKFFVGIDVHKKSWKVTIRTNQMELKTFSMNPQPEELAKHLQKNYPNGEYRSVYEAGFCGYWIDKQLRQQEIQNIVVNAADVPSKGKERINKDDIIDSRKLARELENGTLSGIYVPDDYYEGIRSLCRLRYSLTKEQTRIKTRIKSLLAYYGKELPENYELKNWSGKFINYLEGIGFNQVTSKQTLNHLIEELKDKKQRLAKIIRELRDSTKEAGLGIKIRQLITIPGVSFITAITLYTEVMDMSRFKRLDDLCSFVGLVPATYSSGDRERILGLSNRQSKYLRYLLLESSWVAVRNDPALTMKFGELTQKMVKQKAIIRIAKKLLNRIRYVWLNDVEYVKAVVK

SEQ ID NO: 168979 - protein, 460 aa, unidentified
MNMNIKTNQSSSLRIVNPDAAGIDIGASSHFVAVPKGRDDETVKEFECYTPDIHKMIRWLKSCSIKTVAMESTGSYWIPVFELLEQAGFEVKLVDAHHLKNVRGRKSDVIDCQWIQQLHMHGLLSAAFRPEDAIVELRSYLRQRSMLIETVAKHTQHMQKAMIQMNIHLHNVISDITGVTGMLIIRAILRGERDPDVLAKMRDPRCAQPVEVIKKSLEGNYREEHLFALQQALEAFDFFQSKISECDEQIKKKLQKICPKPIVEETSTRKKQRKPRKNEYPFNLAGYLKQMTGIDLTKIPGIDASTALKLISEIGTDITKWPTPKHFCSWLGLCPGTKISGGKRLSGRTKPCRNKAAIALRMAASTLHRSQTAYGVFLRKAKSRHGSVQAVTALGHKMARAIYSMMSEKQAFKELGPDFYDRLHKERTLKYLQKRANSLGFYLTETSKTENHKQLISKNL

SEQ ID NO: 168980 - protein, 412 aa, unidentified
MSVFCGIDWAESHHDVALVDQDGQLVAKRRISDDLAGYRLLLDLLAEHGDSPETPIPVAIETSSGLLVAVLRTGRRKIFAINPLAAARYRDRHGVSRKKSDPGDALVLANILRTDMHAHRPLPDDSDLARAITVLARAQQDAVWARQQIANQIRSLLREYYPVALDAFLGKQGGLTRPEARAVLAVAPTPSTAARMTLPQLRAALKRAGRSRGIDAEAERLKTALRFEQAHQPTLVEEAMGRQLLALLTQLDAACKAVEDLTEAVEASFRRHPDAEILLSFPGMGIQLGARVLAEIGDDRARFADARALKAYAGSAPITRASGKKRFVGRRYIKNNRLTNAGHQWAFAALTASPGAAAHYRRRRDRGDWHAQAQRHLFNRMIGQLYHCLQTRQHFDEQHAFTSSSADLAVAA

SEQ ID NO: 168981 - protein, 411 aa, unidentified
MNTNPVFLRYLALDAHKHYVVIGGVNATCETVLPPRRLEMAELEDWLRTHLQPTDKVVIEATTNTWTLYDRVARYAGAVVVAHPPHIKLIGAALVKTDKRDVFVLAKLLALNLIPEVWVPPQPVRELRELVAHRVRLTRARTQTTNRLHSMLQRHTLATPDGDPFAAQHRPWWHALDLSHTEKLHVRQDLATLDHLNTQIAEVEQELARLSTVAPWAAQAPFLMQLPGIGLITAMIILAAVGDITRFAHAKHLVGYAGLGTYVHNSGKTHRHGGITKHGRADLRYAMVEAAWVAARTHPRWQAEFARLAKRMPDNQAIVAIARKLLVVVWHVLHDHQADRHALPDKVAAKFFVWSGRLGQTYRGRFTPRQFVRWQLMQLGLGEDLTHIRFGGQLRSLPSVEELTALTSTVT

SEQ ID NO: 168982 - protein, 332 aa, unidentified
MTAVSTLGIDLAKNTFSVHGVDAQGVVTVRRTVSRAKLGELVGRLPPCLIGMEACSGAHEWARRFSEAGHTAKLMAPKFVTPYRKSGKNDGNDAEAICEAVGRPNMRFVPIKSVQQQCDLSLHRVRLGFVEERTATLNRIRGLIAEFGYVVPLGTERLRREVRDLLERLPARAASCVRDLLEHAERLRSKALEYEREIRSSLQHNELALRAHTRPGIGPITASALVATVGNGHDFRNGRQFSAWLGLVPRQYSTGGKTRLGHITKRGDPYLRTLLVMGARSVLQRAYRETDPLSRWALALQQRRGYHRACVAIAAKNARVAWALLAKGAAAA

SEQ ID NO: 168983 - protein, 339 aa, unidentified
MDEYGGRQYVGIDLHRRRSVIVQMTSDGQRLATTRIDNDPFELAAQVTSWGETPEVVLEATYGWYWAADVLAEAGAVVHLAHPLGVKGFAYRRVKNDERDAADLADLLRMGRLPQAWIAPPEVRGLREAIRHRSKLVALRSGLKAQVHAVLAKQGVPVAVSDLFGVGGQKLLDNLQLDAPFHARVVSLRRLIDAFTFEIDILTKRTSAQLKNHPGFQAVQAIRGVGPVLAAIFVAEIGDVTRFARPQQLCSWAGMTPKHRESDTKVHRGRITKQGNPLVRWAAVEAVQTLRQGPLGHTRVRIGERRGANIGKVAAARKLLTLVFYGLRDGHIRCLTRTA

SEQ ID NO: 168984 - protein, 413 aa, unidentified
MDVLHPRCCGLDVHKSSISACILVHEAGRVQKHQRRFGAMTQDLQELGNWLRQFEVAQVAMESSGVYWKPVWNILEGQFTVVLVNAQHIKNVPGRKTDQKDAEWIAQLLQHGLLRPSYVPCEIIRDLRDLTRMRASLSQEASRISSRVQKVLEDANVKLASVATNTVGKSGRAMLEEIIAGQNDPEHLASLALGHLRAKIPQLKLALEGKVRPHHRFLLRRLLDQLRFVEHEILLLDERLEDIGRERPELSEAVARWDTIPGIDRVAGWTLLAEVGHNMAQFPTAEQLASWASLCPGNHESAGKRLGGTTRKGSPWLRRIACQCAWAAARTKNTYLSAQFRRLAARRGNKRAIIAVAHSLVIIGYYLQKSQRNYEDLGGDYFDRIDSAGLRRYFVRRLEKLGHRVTLVPIQAT

SEQ ID NO: 168985 - protein, 430 aa, unidentified
MDEVNRNRLEEFRQLRKEIRHSEEYLIVGMDIAKDRHYAFFGTATGKTLLKRIVFSNDHEGFRKLLDYAESLRVQHGLKKVVYGMEPTANYHKPLGEYLINLGRTVVLVCGVTVARNRESLDGRWDKHDGKDSANVADLISQGKCLYYEHPSAELRGLRGLLSLKRRLKKQEHGYRVRIRNQLIAQYFPEMDSNYERLGVEGLSIVRWCLPASQIARLDVDPFIDQVTSRRIRMEKRRRLEEVWEKAAESIGCEAVPGVDHEAKVMVEGLKQIREMIKETEDKIKELCEQFSEYQYILTIPGFGPDVSAKVLGAIGEPDRFQNGKQVLKMGGLDLSADRSGKNSDKAIPEISKRGKADLRYALYQAALVASVQNRDVMIYYTNKIRGREKEKGIHTKMRVKLAAKLLVIAWTLMRKKEAFNPAYLKAELS

SEQ ID NO: 168986 - protein, 318 aa, unidentified
MKEKVRFLGLDVHADTIAVAVAEANGEVRSLGTIPNRAESIRKLVKKLGGVEHLRACYEAGPTGYVLYWQLSELGVQCDVVAPTLVPVKAGDRVKTDRRDAEKLARNHRSGDLTAVWVPDAGSEALRDLVRAREAAKQDQLRARHRLSKFLLRTGQRPGHGVKAWTQGYLVWVRQLCYAQPAQTATLLDYLHEVEHMGERVGRLEQAITEAVKLASPQMQAVVRDLQALRGIAEISAVTIASELGRISRFESARQLMGYSGTVPGEDSSGKRMRRGPITKTGNAHLRRIVVEAALELPAAASRWAGVTQAPAGGSARN

SEQ ID NO: 168987 - protein, 358 aa, unidentified
MATNSLSRVEQFVDGFQSHSFWIGMDVHKRSYHIALLRTDGKSLTFVSPASPQFVVQLINRLAIHVAAVAYESGPTGFPLARELEAAAIPVMVVAPSRVPRPVTSGAKTDRLDCLKLASYAAKGLLHSIAIPSPEDEARRALLRRRHNVAASLRQCKQHIKSLLLFLGLDEPAEVENWQQGADESLRALSMVTAAKLTLESHLRELTFFRQELKEVESQLQQLTKQQTDRKTIACLKSVPGVGPILATTFSCELFRPERFTRAEEVASYLGLAPMVRHSGEKTPSGRLVPVGQTKLRSLLIEAAWIWRGRDRYAQELYNRFLNRMGIAQKAIAAVARKLAIILWRLCIEQRPYRPATN

SEQ ID NO: 168988 - protein, 352 aa, unidentified
MEQIFMIKENYMYVGIDLHKETHTAVIIDCYNQKLGEITFPNRPADFPKLVAKVKKCNTAGKEVVYGLENAYGYGRALAVWLIDKGYFVKDVNTAISHRQAKHRGAMYRKSDSDDAKAIALATLNMLDKLPDACPNDAYWSLGQLVHRRDNIMKQRTRLVNQLHEQLCIAYTSYKQFFNDISRPTALYFWENYPSRKYLKGKSVEDLRAELVPVSHNKCSTKTCEKILDAVASDKVKNNNFQDARDMVTLSIVSDLQHYDSQLAEVDKMLEQMYKMLGCTLTTIPGVNVITAVKILAEIGDIKRFGNANKLAQFAGIAPLHLSSSGKGKDVATKQGNRRLQATIYFLAIQMV

SEQ ID NO: 168989 - protein, 394 aa, unidentified
MKLVGIDVGKNSHHFCVMDKETGEFNVAPSSFSNNKEGFDFLINSLKPYSKKSILIGMEDTGHYHVALLKFLLSNGYTVALINPKTTDLTRKMEGGITKNDKLDTITICDVLDTPERKKQYRITKVDRFDLYEQRQLTRHHHNLKEELNVYCNRLQKSIDLVFPEFNTLFSSKYSIVYMNLLKTFGSAEAIASTDIRTIRKCFEIKGRGNRISLTPEKLKECAKNSIGISSEVETIQIKHLVSQITLIKEQIAEIDKKIEEFSIKNNSPILTIPGISHFSGTSILAELGDIGNYSKPSQIIKFAGVAPYHYESSQYNAQHTGITKKGSKYLRKTLYQIILTVINNNPVFKKYYLLKISQGKGHRCAQGHCIRKLLRIIYHLLETGQSFDPALLR

SEQ ID NO: 168990 - protein, 358 aa, unidentified
MKKIVVGIDISKEKIDASAIDVTGSHPGVVRLDYRVFDNRPMGFRRMLVWVRHLKEGACLDEVLFCCETTGGYDRSLCDYLYAKGLSIWREGALQIKRSMGVRKCKDDKADSLMIAEYAMRHMDKAVIYETPSQSVRELKSLLLYRHKLVQEKTEKTVRMKELEATSLRSKSVSFILRDARKSIKSIEKSIKECERQILDLYKADGDLKKSYDHLTSVSGIGIVNATAFIAYSNNFTGITTANKLASYWGCASFRERSGTSLDRKAYVRCYSNSLLKAYLTQAAECTVKEHGIYHGYFLRLKSAGKPYRVIINNVRNKLIHLGFSLVTNDMDYESDHESLRAKRKGEKGKSFMLDNIN

SEQ ID NO: 168991 - protein, 402 aa, unidentified
MQVWCGVDWAEHHHDVAFVDEDGKLLVKERITDDSAGFARLLELLTAQTARSSTPISVAIETSRGLMPAAIMAAGYAVYAINPLSVSRYRDRHSPSRAKSDAADAIVLANILRTDRDNHRPVPADTELVQSLRVLARAQQDAVWDRQQITNKLRSLLREFYPTFLACFPDLSLMGARAVLALAPSPSRAQALRKSSVAAALRRGGRTRGVDAEAERVVTALRQEQLRQLPQVEDAMSVQAQAYLRALNAALDNLAQLEAALTTAFEQHPDKAVITSFPGLGTVLGARLLAEIGDDRGRFSDARGLKAFAGTAPVTRASGMKTSVTMRVVRNKRLHQAAYLWTLPLLVHSPGARAHYDRRRARGDSYSAAARNLGNRHLGMLYHCLQTGQLYDETKAFPTQVP

SEQ ID NO: 168992 - protein, 466 aa, unidentified
MWQLSTLSYKGFAGSKAGLVRLRFREEVSKSTMSEVESIQSGPEFAAFIGIDWADQKHTWSLQTAGSKQRESGELEHTPEAVEAWVAHLYQRFGQRSIAVAVEQSRGALVFMLNKYELFHLFPVPGQMAGSMRQALYPSGAKDDPRDADLLLDLLLQHRNKLRRLSPDSEATRRVQNLVEERRKLVDEKTAQINRLTDHLKVYFPQMLEWFGRLDSELVCAQLERWPTLEELQKASPASLRVFFRKHRCRDRERIESRMEAIRRALPAIQDRAVIEAKSAAVKVIVQLVRVLVEGIEVLDGQIEEAAAAHPDFFIFNSLPGAGPVMAPRLLAAFGSQRERFRSAREIQSFSGIAPVTESSGKRKWVHFRWACPKFLRQSFHEWAGHSIVQSEWARVYYQQQRSKGNTHHAAVRALAFKWIRIVFRCWQDGVAYDENRYLAALVKRGSLVGAGGAMGKHCESVVDTL

SEQ ID NO: 168993 - protein, 350 aa, unidentified
MMIGVDYHPSFQQIAFLIEETGEYDEQRLNHEGGEAERFYRDLKRKGIRVRVGMEATGYSRWFERLLAELDFELWIGDPAEIAAKRVKKRKTDREDARLLLRLMREDRFPRIWVPSPENRDLRQLLWHRHRLVQMRTRIMNQLQALAMNEGKRWKSKLFSQKGRAEFEKLALGPWASRRRSELLELFDRVDPSVEKLTTAVQQEVHKRPEALRLMTHPGVGPITALAYVLIIGTPERFTRGKQIGTYVGMIPIEESSGGKQRLGHISKQGSSLLRYLLVEAAQAAARYNPHWRRRYIRLAIRRHRSIAKVAMGRRMAIRLYWMWRNGCEYSPSFEFGSYAGQLEKRHGGK

SEQ ID NO: 168994 - protein, 358 aa, unidentified
MSTQFFCGVDLAKHHFSLHAVDDHGKVILHKSVSRAKLLATLANMPTMCIGIEACSGAHYWAREFNKLGHDTRIMAAKYVGPYRTKGKNDLNDAVAICDAVQRPNSRFIPVKSPERQAILAIHRVREHWVNERTALINRIRALLAEFGIIIPTGRAAVHRQVPLILEAAENGLPDIARAVVADCFDHLQTLNQRIDDTEQCFDMVTKASPNAQRILNVRGIGPQTATAIIATIGKGEQFDSGRDFAAWLGLVPKQYSTGGKPRLGRISKRGDKYLRTLLVHGARAVITNLGDKQDRLSVWGRNILERRGMNRAIVALAAKNARIVWALLHHQTDYQDTENQQFIVLIHWDDCDNLSSF

SEQ ID NO: 168995 - protein, 461 aa, unidentified
MNKTGQKNTKKQSKSQVNFQLTNPNAAGIDIGDTLHAVAVPQGRDEVVVKEFGTFTSDLLAIVDWLKACRIETVAMESTGIYWKNLCAVLTSEGFDVYLVNARHTKNISGKKTDESDAQWIQKLHSCGLLGSSFLPDDQTDCLRTLVRYRRKITQDSSTCVLRMQKALELMNLKIHTLIADLMGKTGKAIIETILAGERTAENFLPLVDSRIKADRTHIIKSLEGNWRKEQLFLLEQNYQNYKFLQNQINKCDQQIEQVLQLMHARENEGITMPEKQPRLTPKGKVSKQKKDKNQPAFDTQSYLKGIHGVDVMDIYGLHEISALEILSETGTDFSKWQTPERFVSWLNLCPNSKISGGKLLSSKLQKKKPNAAAKAFRMAAGGVQNSDHWMGHFFRRMKAKGGHKYAIVATARKIAIIYYKMVSDKQPFNPLNYDDYLKKHQQAKITSLQKALDRLKQQVA

SEQ ID NO: 168996 - protein, 346 aa, unidentified
MVLIGCDYHPSWQQVCWFDRATGETGDEKLVHASGDAEEFYRRFSSPVRVGIEATGNCQWFLELLNRLGHEVWVGDAAKIRASDSRQQKHDKRDARLLLQLLREDRFPRIWTPTREQKDLRQLLIHRYKLVGLRARVKNELQHLAMNQGVTKKQKLWSKAGEQVLRELALAPWASQRRKDLFRVREMLNEQIDLLDRAVVEAAEKNEKARLLMTQPGVGPITSMAFVLTIGDVKRFPRGKQVASYLGLIPREYSSGGKQHLGPISKQGNRFLRMLLVEAAQAAVRYDPGFRNEYLHRCHKKAKGVAKVAAARKLAIRLYWMLRTNTGYPEVVRVESSSRVALVSAS

SEQ ID NO: 168997 - protein, 400 aa, unidentified
MATRKYDRPRVLAHRRPSGHIEREVTYVIAGIDTHKDTLAVAVVDDSGRLVAGGDVPNTERGFAQLVDMFTAHHVQRVGIEGSGSFGRAVAVHLALCWQSGQPVAVVEVPTLMTSRERHGQLGKGKTDPVDALAIARITTREQQLPPVRLTVGAAADLRALLDYREDLVRERGALVNRAHAELGGLRPGYQQQIPIMTTRARVRAAVDLLGDDSSIRATLCRRRLERVIAIDAETAELKQQITRLVAAADTTLTDLYGVGPLVAARFLAEVVDIRRYPNRNAFAAANGTAPLPASSGRTVRHRFNPGGNRQLNRSLYTIALTQIRGDTEGRAYYERKRAAGKSKREALRCLKRRLSDIVFTTMRHDAAGADAPPDQASPPAWPVLVGVGAVDANEARLTA

SEQ ID NO: 168998 - protein, 343 aa, unidentified
MEIIKQVTGIDVSMDTLACCTGTINTEQQLDLGPVQTYNNNTTGIKKLYRAAQSQKLPGVSQYFLMEATGVYYEALAYFLKSKGAHIIVVLPNKAKHFAKTLAQKSKTDSIDAKMLTQMGLEKVLQEWEPPSEQMKALKQLTREHQQIMALLTQAKCRTHAKQKAFQPHSSSLKRLKQEIKFYQRQLEDIEAEILTLLKQDHENWNKVQNIQQVKGLSYMTIAKILAETDGFALIRNGKQLASYAGLDVVLRQSGKYSGKTTLSKRGNKYLRMSVYMPALSAMRSNRQMKAYYERILDKGKPKKVGIMAIARKMLLLVYYLWVNDTKYDPDYHPALQANLACF

SEQ ID NO: 168999 - protein, 457 aa, unidentified
MSQKKKSRAARHWSPVHPDAAAIDIGATMHVAAVGPDRDEQPVRTFRTFTDDLERLADWFARCGIKTIAMESTGVYWIPVFEILQQRGFEVIVVNARDAKHVPGRKTDVSDAQWLQRLHEYGLLRASFRPQAEIAGLRAYLRQRERLLDYAASHIQHMQKALMQMNLQLHHVVTDITGMTGMAIIRAIVAGERDPAVLASHRDRRCHATVETVCQALVGNYREEHIFALTQALELYDVYQTKVAACDKQIEDILKRLRQTATPPATKLLPAKQRTRQPNAPAFDVRGALHAILGVDLTEIDGLGPSLALKLVAECGTSLAAWPTAKHFTSWLALAPHNKISGGKVLSSRTRRTGNRAASLLRLAAGTVGRTDTALGAFYRRLSARIGKAKAITATARKIAVLFYNTLRHGMAYSDPGATYYEDRYRQRVLHNLQRRAKSLGFGLQPLEPDAAQGGVS

SEQ ID NO: 169000 - protein, 379 aa, unidentified
MGWPGRAQRLICWAVVGRREAKLKEHAMRTSHQNAPETISTIGIDVGKNTFHLVGLDKRGVIVLQQKVTRHQLGRRLSNIPRCLIGMEACSGTHYLARQLTALGHDVRLIPAQYVKPFLKGHKNDYRDAEAIAEAVQRPTMHFVSIKTPEQMDLLALHRVRSRLVGQRTGVINQIRGFLLERGITVRQGPMPLRKALPEILSASSDALSPRMINLIGELIQDWRRLDERIAAVSSEIEALAKQDASCQRLMSVPGIGPIISSAVVAAIGNGAGFKQGRDFAAWLGLIPRQESTGDRTILGKISKRGNKYVRTLFVQAAHVVLARRPSTARQGLWPWIERASKRLHRNMLAIALANKLARIAWAVLARGQAYQPRITANA

SEQ ID NO: 169001 - protein, 364 aa, unidentified
MEITTIGIDLAKSVFAVSGADSSGRVVVRRQLRRAQVLSFMRGLPRCTVGMEASGGAQYWARQLTALGHEVRLMSPALVMPYRKGNKTDRNDADAILEAVTRPSMRFVTVKSVAQQDLLALHRVRAQLVKSRTALCNQLRGLLRERGVVVRVGVAGLKRGLPAALADESSELSGEMRELLGEMGQWLRTLEQRIASCEAQITRKFKHDERCARLAEVPGVGPLTATALVAAVGNAQRFKNGRELSAYLGLVPRQHSSGGKTLLLGITKRGDRYLRTLLIHGARSALRQCKDDARSGWARRIRAERGPNVAAVALANKNARVLWALLTRGDRYRSTRVATPAALHSSAPPAVKRARATRLRVLKD

SEQ ID NO: 169002 - protein, 329 aa, unidentified
MTYIGIDVSKDSFVVAYSPEKACKTKTFKNTVKGIHKFIQTLSKDENHCVLEATGNYSALLVYLLSEAGIVTSVENPLKVKNFAKAMLSVIKTDEIDARLIALYGERMQPKPYTMPSKELLTLKQKRTVIRQLKKQLVANQNLRGSLEVLPFFDSDCKSAIDKTIVFLEKQLKKLERDLFDTASKEYKRQMELLTSIKGIGATLAAALIITTGGFTYFSNAKQLTRYLGLSPTYQQSGTSVHIRGHINHNGDPTLRGQLYIGALTALRSNAECRACYNRLKENGKPGKVAVVAVANKLIRQAFAVVTQGVPYEDGHVSKLHSASANVTA

SEQ ID NO: 169003 - protein, 320 aa, unidentified
MEREETHIGIDVSQDTLDMAAYPTGQIWQYKNNKSGIAKVVAKLAAISPKLVVMEATGGLEQALKNALDEAELAVAVVNPKRIRDHGRSMGMLAKTDKLDAKVMAHFAAKIEPQPQPPRDKGERELDNLVTRRNQLSDILTAERNRLKDYLDEAVKSDIQEHIQWLEVKIATLDKEVKERVKQNPIFLKKAKLYKSMKGVGDIFSSTLIAKLPELGRLNQREIAALVGLAPVNKDSGKFRGKRMIQGGRAVVRKVSYMPVLSAIRFNPAIRALYRRLIAKGKLQKVALVACMHKMFTILNSMAKTNTPWRDTSLAPQSVD

SEQ ID NO: 169004 - protein, 401 aa, unidentified
MTAVRSRAWIGVDIGKTHHWVCAVDETGKKLLSLKVLNDEAQIIEVITSITDLADGRVWAIDILGTPSALLVALLANAGEQVRYASGRVVAAMSTAYTGEGKTDAKDAYVIAETARIRTDLAVIDADTDLVRALGVLTGHRADLVADRVRMINRLRDLLTSVFPALEREFDFASCKGALVLLSGYATPESIRRMGEARLSRWLRQRRVRGYADVAARAVAAAHTQHTVLAGQDVAASIVAELAGAVLAQHERLKLLDQQIQDVFAQHPRAEVIESIPGFGPVLGASLLVAAGDLAAFPTAGHLAAAAGLVPVPNDSGRRAGNLHKPRRYSRPLRHALYLSAQSSMMRAGPNRDYYLKKRDQGRTHSQAVIALARRRIDVLWALLRDNRTWTAAPPPRAQAA

SEQ ID NO: 169005 - protein, 348 aa, unidentified
MNYVGIDLHRDFFVAGAQNEKGIELFKKRYENSVASVHDLVTHCEVKPRIVVEATRNWMWFIHALQAKGCSVQLAHPFRTKAIASALIKTDSIDAKTLCDLLRADLIPQAYIAPIETLDNREIGRARIALIHDQTMVKNRIHAIIIKENRRFLGSDMFGVKGREWLTLQKITCGAREAIDVYLGELKAIQHAITTIDKGITQKCSSIPEVKLLQTIPGFGTTTAFLLASEIGNVTRFPNSKKFTSYFGVVPRLSQSGDHAYYGRITKLGNPYVRWLLVQAAHRYTRVDREARRFVTRLSFRSGKKKAIVALARKLGVITYTILKENRIYEKRIKERAVKVCPAIIPER

SEQ ID NO: 169006 - protein, 362 aa, unidentified
MRIIGCDLQARQQTLAMLDTARGEAVNVTLTHEGNNVREFYSTLPGPVRVGIEATGSMKWFLHLMEELGIECQVGHPATIRAAEPRRQKHDQRDAELLLKLLVENRFPSIWQPFQELLDLRGLLLHRHPWVRLRTRIQNALQAIALANGLRRGSSLWSESGQDAIASLPLATHTAHRRSELQAMYARFEAEIEQLNQQVLEQAGQRPTAGLLMTHPGVGPITALATDVFLGDPKRFRDSKALASYIGIIPREHSSGGRQRLGGLSKQGNPLLRFLWCEAAVHAVRPDPELRRFYRRKLVEKGLGKARVAAARKRGIRLWIMLRDQIDYQEFCRRGQMQQRSGGACAGMPGERYGAKSHRPID

SEQ ID NO: 169007 - protein, 393 aa, unidentified
MNVVGIDIGAARHVVAVCREGEENAERTVLRISSRRAGFDELDGWMARQGGVGLVVMESSGHYWMPLASHLRRQGVPVAVVNPLSAKYFAKSRLQRTKSDPADARTLAVLGMSTHPTPREPLAGAELREAARFAMTLVTEQAKVCQRIQRLVDLGFPELRDAFEDPTCVSALAVLRQAPTAAAVQRKRATTLARATRPGGGRAIGPKRAEGLKALAQRTVAPPELEGQVGFELGLLIEQYDLLEGQITQAESRLAGLLDDDVSRRLQSIPGVGPATAATLIAEIGDIFRFTDVDQLLSYAGVHPKEASSGRKGANPETSWHMAKTGNAHLRAALYRMAMVGVQHNPVIADHYARKRAAGKSKMNALGHCMAKALALVWGVWRGGRDFDPAHRV

SEQ ID NO: 169008 - protein, 366 aa, unidentified
MKKPSTKTVDRKGKLQGQQLTIGLDLGDRSSFYCVLNGAGEVILEGRVATNQEAMKRVFAKMSRSRIALETGTHSPSVSRLLSDLGHEVIVAHARNLRLIGESRRKEDWLDAQALARLARIDPQLLSPVQHRGAQAWADLSVIRVRYALVRTRTALICSARGLTKSFGERIRGRNPTVFKPAMGEMLSPQLQVALAPLLSALETVTMRIREYDAQIEELAEKSYPDVALLKQVKGVGTLIALTYILTLEDPRRFPKSRDAGCYVGLQPGRRNSGQSEPQLHITREGDSYLRMVLVQGAQYILGPFGEDSDLRRWRLKLAEHGGKSGKKRAIIAVARKLAVLLHHLWISCEEYEPLHNTRKRRLVAA

SEQ ID NO: 169009 - protein, 323 aa, unidentified
MDIDILGIDLAKRVFQLHGADRSGRALHRSKVTRDGFVEAVRSLRPRVVAMEACSSAHHWGRCFRAMGIEVRLISPQYVSPFVKTNKNDRNDAQAIVEAASRPTMNFVTVKSVEQQDMQAVHRVRELLVHQRTALINQARGLLGERGVTMAQSPEAFKRAVPKVLSSCEGEVTSICQAMVLELTEQIQALEDRIKRTEAWINSFMKRSALCKRIAVVSGVGPITATAMVAAVGEAKEFRNGRHLSAWIGLVPRQYSSGGKSQLKGISKRGDTYLRTLLIHGARTVLRYAVAKTDAQSRWLQDLIARRGYNRAAVALANKNARG

SEQ ID NO: 169010 - protein, 334 aa, unidentified
MDTMYERCCGLDIHKKTIEACFRSGKKKTHMSFGTTSAELRKLTMWLVENDCQSVAMESTGSYWKPIFNILELSGTDMKIIVVNARHMKNVPGRKTDVNDAEWIAELLQYGLLRPSFIPDREQRELRELSRYRKSLVGERAREINRLQKMLEGGNIKLTSVVSEVTGYSSRRLLDRLLRNDEPMTEDVISGLVHTSLAGKSKELETALDGLLSELQKELLIKVLDHIDDMSRRIADLDDFCRKQMEKYEDALDKLDEIPGIARRTAETILIETGLDMSRFPTAKHFARWAGLAPGNNESAGKRSSGRTTKGNPTLKSTLIQSAKVAARKKNSFF

SEQ ID NO: 169011 - protein, 401 aa, unidentified
MSTSDTRIWVGIDAGKGHHWAVAVDADGETLFSTKVINDEAQILTLIETARERADEVRWAVDISGRASTLLLALLVSHAQQVVYVPGRTVNRMSGAYRGEGKTDARDARVIADQARMRPKDFAPLDTPPELVTTLRVLTNYRADLIADRVRLINRLRDLLVGICPALERAFDYSAAKGPVVMLTEYQTPAALRRIGVKRLTTWLERRKVRGADAVAAKAVEAAQAQQIALPGEKRAAKLVCDLAHQLLALDERIKDNDREIRETFRTDERAEIIESMPGMGPILGAEFVAIVGDLSGYRDADRLASHAGLAPVARDSGRRTNNYHRPKRYNRRLRHVFCLAAQTAMMRPGPSRDYYLKKRAEGLLHTQALLSLARRRVDVLWAMLRDKRLFTSAPPVTQTA

SEQ ID NO: 169012 - protein, 346 aa, unidentified
MRNSNTIGVDLAKNVIQVSIVTPSNKELSNKELTRIKFAEFLAKQKPGLVAFEACATAHHWARLATTYGHQVKIIPAISVAPFRQGHKTDKNDALAVAEAANRPNVKIAPMKSIDHQSIQSIQRSRELIIQERTATSNHIRSLLLEFGVVIPKGLAYLRKLAPLILEDAENGLPMSYRPTLHRMFMRFRAAEEDLDFMDEQIKQVVRSNDGCQRLTALEGVGPIGAILIFATLGSGDAFKNGREFSAYLGLTPKQYSSGGKTNVIGISRHVANRRLRAVLIQGARAYVHKHKHVTSGKDEWLQALVARGGTGRAAVALANKNVRTAWAMLTQGTEYNCKPCVGNAA

SEQ ID NO: 169013 - protein, 407 aa, unidentified
MVDTTAIDLFLGLDLGKEFHHAHGRTEDGRTVHDKRLPNTEPKLLEQFTRLVAKFGTVLVIVDQVANIGALPLTAARAAGCRVAYLPGLSMRRAADLHPGEAKTDARDAFVIAETARTMPHTLRAVDRDDEVLAELAMLTGYDNDLAGEVNRTTNRLRGLLSQIHPSLERVLGPRLAYPYIQALLQRHGSPARLTKLDRTRCESLLKAHGSRKAHHLTGEIFDALAEQTVVVPGTEASALIVPGLAAQLAAAHTQRRQAEQEIAALLEALPLFHLLTSLPGLGVRTTVAVIVAIGDGTSFPTAGHLASYAGLAPATKSSGTSIRGEHAPHRGNRLLKRALFQVAFAAIGCKADPSSRICYDRQRARGKTHTQAILRLARQRVNVIHAMIRTGALYEARTPGDVGLAA

SEQ ID NO: 169014 - protein, 375 aa, unidentified
MTSMPQPAASPHPVPPAATSPVVIGGIDTHKELHVAAVIDTGENVLATRSFSTTRAGYRALIRWMRSFGDVARIGVEGTGSYGAGITRHLADAGIEVLEVDRPDRSDRRRKGKDDDLDAISAARAALRGQRTSIPKSKDGAVEALRVLRVTRGTAIRARRNALQLLRMSIVSAPDEVRDQVRNLTRMQLIRTCASWRPDTTSAADPASATRIALKSLARRILELGDEIAALDELIKPIVCKLAPQLLERTGIGIEIAGQLLVTAGDNHQRLRTEAGFAMLCGVAPLPASSGMTQRHRLNRGGDRQANSALHLAVISRIRMDPATQAYLARKTAEGHSKLEIIRCLKRYLAREVYYLLNPGQPTIPKQAPKINIGA

SEQ ID NO: 169015 - protein, 391 aa, unidentified
MAEDASRPAQAAIHTALGAISVSMELSRKAWLITSLSPGGGEKMSKHSVPAGEVCGLLRRFAELRRKAAARTGRDFPIIVIQEAGLDGFWIHRVLQSEGIESHVVDAASILTSRRRRRAKTDRIDGETLVRTLMAYKRGEPRVCSMARAPTPQEEDRRRVCRERRTLVGERVTHVNRIKGLLFAQGVFGYEPLRKGRRERLEDLRTGDGRPLTVRLKAQIIRELDRLEVVLAQLKAVEAERNLLLKLTSDEVASPAAMLVRLKGIGPQTAVVLWSEGLFRQFDNRRQVAAYAGLAPTPWQSGSIEHEQGVSKAGNPHLRTTMVELAWLWLRNQPTSALSLWFRERVRRLGGRIRKTLIVALARKLLVALWRYTTAGVVIEGAVMKAAPATI

SEQ ID NO: 169016 - protein, 455 aa, unidentified
MRPAELIVATSQAVSTRRKFGSSFAPLIGLTHNKEGASREEYAALQVVSERCCGLDVHKKTGVACILIALASGEVQRHIRTFSTMTVGLLALSDWLESMSINVIAMESTGVYWRPVFNLLEEGRTVILVNAQPMKAIPGRKTDIKASEWLADLLRHGLLKASFIPPAPIRELRDLTRYRKTLVQERADEVNRLHKVLETANVKLTAVATDVLGKSGRAMLDALVKGTTDPEILAELARGRLRQKLPQLQEALDGRVEAHHRLLLKHILAHVAFLEQTLEQLQQDIEERLPPFEDAMTLLMSIPAIAELAAATILGEIGDDMSRFPSANHLASWAGVSPGNKQSGGKRLNGKTTKGNTTLRAMLTEVVWVLSHRKDNYLSAQYHRLARRLGKKKAAMAVAHSLLVIIYPILSTKKPYHDLGANYFEQRESTRLTHRSVRQLEALGYTVTLVPKEVA

SEQ ID NO: 169017 - protein, 346 aa, unidentified
MEQIIRIGMDTSKSVFQLHGVDAAERPVLRKQLRREAMISFFKKLPPTVIGIEACGGAHHWARLLASFGHQVKLLPPQYVKPYVKRGKNDAADAEALCEAMSRPTMRFVSVKSAEQQAAQMLAGVRDQLVRRRTQLTNAIRGYAAEFGLVASKGLGKIEPLLARIRTDEVLPTLAKELFEAQAREYGHLQKELKVLDAKLLAWHRSNEMSRRLAQIPGVGPIGATLLAIKVADASAFKSGRDFAAWIGLTPKNHSTAGKNRLGVITRAGDEMLRSVLVVGATALIQPVKRGRRPASPWLVGLLRRKAPKLVAVALANKTARIAWKLMVSGECYRPGSAMPLGMAQV

SEQ ID NO: 169018 - protein, 333 aa, unidentified
MNKQNRVGIDVSKDWLDVERVDATGVVGTARFDNTGAGHRKLCGWLTKRGHSARVVLEATGVYHKKLALVLAERKGIEVMVANPMAVKSFGDSLLQRARTDATSAHVLREYAERMDFVRWDPPSKARRNLRAVSRRIETLGKVLTEEKNRLHAASVDGEPESVLRDMRSSLASLKRRREELRKSALEIIAQETELRAMFKLLISAKGIGEASAVALLGELAMLPPGLSVRQWVAYAGLDPRPVESGSSVRRAAHISRQGNVRLRSALYMPALVAKRFDPNVRAFAEHLLAKGKSKLVVTTAVMRKLLHAIYGMMKTMTTFDGEKFYRTQAAVR

SEQ ID NO: 169019 - protein, 390 aa, unidentified
MMTMTRIEESTVSTHPSPTVLLACELSERTWKLGFTTGLGQRPRVRSIAAGAVDRLVEEIARAKARLHVPVDTPVVSCYEAGRDGFWLHRYLVAHGVTNHVVDSSSIEVNRRARRAKTDRLDLEGLLNLLARYVLGDRRVWRVVRVPTVAEEDARQLHRTWETVQQDRTRLINRLKGLLVAQGVRLPVGPAFLTRVAAARLWDGTPLPTGIVDRLTRVWTQLHGLNQQLEDLAAARAALATDTTTATGQCAARLQTLRAIGPGGAWVLATEIFGWRQIRNGRELGALVGLVPAPYQSGEMARDQGITRAGNRHVRRMMVQLAWSWLHYQPSSALAQWYQRRFAGGGPRLRRIGIVALARKLLIALWRYDAAGVVPEGAVVKATTLNAATV

SEQ ID NO: 169020 - protein, 390 aa, unidentified
MIYAGIDVAKDKHDCVIVDSDGEVLFDPFTIQNSCIGFEELFKRFETCSKDLSMIKVGLEATGHYSDNLLEFLISKGLTTTVINPLHTNLYRKSLSLRKTKTDKVDAHSIVTMLRTENLKSYSQSSYHIRELKSLTRYRFSLVQDCSRLKTSYSRLCVILFPELEKLVPNLHIASVYTLLSELPNAKAIADCHITHLTNLLSTASKGRYGKDKALEIRNAAKNSIGSYSEVKSLELQQTIQLIQMMENQIKQIEAKINPIVDSLNSPIITISGISYRMAAIIIAETENFQNFDSAEQILAYAGLEPSVYQSGQLTSTHAKMVKRGSKYLRYALFNATKYVCHWDPTFHAYLAKKRSEGKAYNVAVSHAAKKLTRVIFHLVKSNKPFVSQA

SEQ ID NO: 169021 - protein, 407 aa, unidentified
MELMGLYKRVIGLDIHQAQITACALIEESDGNSRIEQRQFGGFKRDRRELADWVASLRPDEVVMESTGIYWKSPYAALEAVGIRAKVVNARHVKNVPGRKTDVGDAHWLASLARAGLLRGSFVPPAKLRELRLIARQRQKLVGQLASEKNRLHKVLTDSGVRLGVVVSDLHGRSARAMVKAIIAGQPPREVLKLASARLKASREEIFDALQGELTASHCFVLDELMRHIEETEARIARFDARLLAELESERNTLALLQTIPGVDLIGAAMLLIEIGTEMDAFGSADRLASWIGICPGNNESAGKRKSGQLRKGNLYVRRLLCEFAHAASRTTSVFKSKFQSLVVRRGYKRAIIAIGHKILRTIFFMLKRREHYRDSTTDYEALSVQRNAPRWIKALTKFGFIKPTCA

SEQ ID NO: 169022 - protein, 342 aa, unidentified
MKLHVLGIDLGKTVFHLIGLDSAGSVVIRKKCSRKQLLAFTANLQVQLIGMEACSGSHFLGRALREQGHEVRLIPAQYVKPYVQTNKSDFLDAEAIAEAVQRPRMRFVPIKTDEQLDLQALHRVRERWVMRRTAAVNQIRSLLLERGLTMPKGRRHVDALLPRILEDAELKLSFSFRVLLAQLRVELDQLTGRIEQMDAVIQQTAKENEACQRLSEIPGVGPVTATALIAAVGNASDFRKGRNLAAWMGIVPGEYSTGGKQKLLGISKRGNKYLRTLFIQGARSVVQQRHKQTPGLSSWLAQLLARTHQNVVIVALANKLVRMAWAVLYKNERYRAPGLAAA

SEQ ID NO: 169023 - protein, 409 aa, unidentified
MAAVMIGVDPHKGSHTAVVIDQAEMALGEVRVRASASQVQQLLEWAAAWAERTWAVEGAGGLGHLLAQQLVAAGERVLDVQPKLAARVRLLAAGDVNKNDPNDARSVAIAALRSAACPPVRADDHAAVLKVRAKRHRDLSRARNQVVCRLHAVLCELVPGGVSKQIHAAAAVRLLDQIQPAGAVQAARRELAGQFLADLRRLDAQRRDTKKKLAAAIRASGTTVTEVFGVGPAVAAAVIGDVRDISRFPGPDCFAAYNGTAPVEVSSGGRVIYRLSLRGNRRLNHAIHMAAVTQIRYRHTKGRAYYDKKIAEGKTPKEALRALKRQVSDAIYQHLKADARRAAAAAGPGGHPGNGSVASVTGSHPADRLFGQATPGPEPSLRPRPGPAKATRPGSSRRTRRPVPGHTPG

SEQ ID NO: 169024 - protein, 422 aa, unidentified
MLEEAHDSEELIGRVAALDIGKAQLVCCVRVPSPDRPGKRLQEVRTYPTMTRSLLVLADRLGALGVSRVVMEATSDYWKAPFYLLEAHGFEVWLVNAKDVKHLPGRPKTDRLDAVWLCKVAERQMLRPSFVPPPAIRRLRDLTRYRADLVVGRTAEKQRVEKLLEDAQIKLSVVASDIFGVSGRAMLAALVAGERDPKVLAQLARTRLRAKRGLLEEAFVGRFGDHHAFLLQTMLARVDQASADIAALEVHIEAEIAPFAAAADRLDEICGVGRTAAQVIIAEVGVDMGRFPTPGHLVSWARFAPGVKESAGRRKGNATTGHGNPYLARVLGEAAVAAGRTNTFLGERYRRIARRRGAKRAMVAVGRSILIIVWHLLSDPTVRYQDLGAGFYDTRINAERRKRNHIRQLEALGYKVTLEPAA

SEQ ID NO: 169025 - protein, 426 aa, unidentified
MVQNDDSRLQEFRQLKNDIRGSTEYLVVGIDVAKEKHYAFFGTAAGKTHLRKLVFDNTKEGFEKLCLYADTFKDRHGLKKALFGLEPTGDYHKPLGEYLITQGHTVVLVAGTAVKRNRELLNGRWDRNDTKDAANVADLITQGKCLFYEYPSPEIRELRELLSLKRKLKKQEHATRVRIRNHLIAQYFPEMDAYVSYSEGPAIIRWCFDPKEIARLPLPEFARMVSSRSGGEKQRRRLREIHTKAHTSIGCTVTPAAPLEARLMLDMLKQITTIIGETDAAIEKVCMTFPEYPCLLSIPGFGPDTSAKVLGAIGNPHRFENARQLLKTAGLDLSGDKSGKRNDTPMVISKKGKADLRYGLYQAAFIASSRNEYFMKYFTSKLVGREREKGIGTKMRVKLAAKMLIIAWTLMKKKEMFDPGYLKNEG

SEQ ID NO: 169026 - protein, 402 aa, unidentified
MNSVGIDISKGRSMVAVMRPFGEVVVSPFEVRHTDSELSELAKLLKSLDGETRVVMEATGNYHTPVAWLLHGAGLYVSVVNAKLVHGYGNNDLRRVKTDRKDAVKLANYGLDRWLTLPRYIPEEDTRLLLKNCYRQYQQYSKVQTMLKNTLISLLDTTFPGMNRLFNTPARADGSEKWVDFAADFWHCGCVCECSEKVFMNKYQRWCRKHGYNFSERKALDIYTEASGHIGVMPMSDTTKLLVAQAVSQLRATSAALAVLKQEMQTLASQLPEYPIVMEMFGVGPALGPQLMAEIGDVRRFHSKKALVAYAGIDAPPNDSGDVTGRHKGMSKVGAPSLRRTLFLVMSVYLQNAPLDEPVYQFMDRKRAEGKPYRVYMMASANKFLRIYYASVKAYLETLERF

SEQ ID NO: 169027 - protein, 413 aa, unidentified
MVDVLHERCCGLDVHQQTVVACLITPGPGGPPQKEIRTFGTMTADLLELADWLRAAACPVVAMEATGVYWKPLWNLLEDAFTLLLVNARHIKAVPGRKTDVKDCEWLADLLRHGLLRASFVPDRPQRELRELTRYRTALVRERAAEIQRLHKTLEGANLKLGSVASKVLGVSARQIVDALLAGTTDPAALAALAKGKLRAKRPQLERALVGTPGLHQHFLLACQLAHIDFLDETVEQVSAAIAERLRPCADALARLDGIPGVGQATAEVLLAEIGADMRRFPTAGHLAAWAGMCPGNYESAGKRQKGKTRKGSKWLRTALLEAARAAARKKESYLAAQYHRLVPRLGKKKAAVAVGHSILRIAYYLLQRDTTYADLGPNYFDARYRGRAERRLVRGLEKLGFEVTLTPKDPAA

SEQ ID NO: 169028 - protein, 352 aa, unidentified
MYTLGIDLHKKSSVWVLIDEQRTELWKENVLCRPEYISIAIEKIPVSPKEIQVAIEPVAGWRWVSKQLEDVGMKVHIAHPRKIHLIAESTKKNDEEDSRTLANLLQAGYFPEAHRSSEEIYQLRLLLRERTFIVRQQTSVKNQLHGIATTQGLHFIKSGNPLHKKGKEGIMASDNFVLKQLHMLIEDFKRRISPFDERLKVELKKYPIAHILMSIPGVGMITALTIISEVDDFARFKTGEKLSSFAGLVPRQRSSGETIRYGAITHAGSAPLRTTLVETAMRIRESNAPELFAFVKRLTPICGARKARVALARKLLAIMWKLVTSHTLYDPSKVLSSSCTTKVSDLDTGSGA

SEQ ID NO: 169029 - protein, 375 aa, unidentified
MREKLRFLGLDVHAETIAVAVAEPEGEVRSLGTIPNRAESIRKLIKKLGPADKLRACYEAGPTGYVVYWQLAELGVECEVVAPTLVPVKAGDRVKTDRRDAEKLARCYRSGDLTAVWVPDEGSEALRDLVRAREAAKQDQTRARHRLSKFLLRSGQRPPTGVRPWTRPYLIWIAQLRFKQIAQESTRQDYLHEVEHMRERVTRLEQAIMEAVKLASPALQQVINDLQALRGIADISAVTIASELGQVSRFESARQLMGYCGVVPSEDSSGKRTRRGGITKTGNAHLRRIVVEAAWSYRRPPGIWYGLRRRQETISQETKEIAWKAQHRLHKRYMKLGAAGKDQRKIVTAVARELLGFIWAIGTRAETVSRQQVAA

SEQ ID NO: 169030 - protein, 343 aa, unidentified
MQSISTIGLDIAKSVFQVHGVDAAGQVVIRRQLTRRQVVAFFQKLPPCLVGIEACASSHHWSRELQALGHTVRLMPPAYVKPYVKRQKNDATDAEAICEAVTRPSMRFVPTKTVEQQSCLMLHRARHLFIRQQTAVINSIRAYLAEFGIVAPVGRRGVEQLLEVVADTADHRLPEVARACVAALGSQLRALKAQILEFDRRIMAWHRSNAASKRLDAIPGVGPALATALVASIADPGAFRSGRDFSAWVGLVPKQNSSGGKDKLGSISKQGDRYLRSLFTAGALAVIRYAKIHGTDHRPWLTGLLARRPTKVAAIALANKIARMAWAMMARGERYREPAALAA

SEQ ID NO: 169031 - protein, 412 aa, unidentified
MQTLIERGCGMDVHQATVVACLLMVRRDGKVQKQMRTFGTTTRELVGLREWLLSEGCTHVAMESTGVYWKPIYAILEGALEIVVANAQHIKKVPGRKTDVKDAEWIAELLCHGLLRSSFVPPKPIRELRDLMRYRRKLVESQAAERNRLLKVLETANIKLANVATDVFGMSGRLMLRALIAGKATPQEMAELAKGLLRKKIPELELALEGKLEQHHRFLLELQLQRLEAAEKDLAVLEQRIRQMLEPYAAQLALLDEIPGVDWTLAAVIIAELGVDMSVFGNVSQLASWAGVCPGNNESAGKRKSSRIPSGNVYLKSGLVEAANAAARAKGTYLRDKFFRLKARRGYKRAVVAIAHKILVAIYHMLSQQVSYNDLGDLYLDKLNKNHLTRNLVHRLERLGYAVTLTLQQKAA

SEQ ID NO: 169032 - protein, 459 aa, unidentified
MRKTAKKQSRAVKRAQKSGFPMINPNAAGIDVGAREHYVAVPADRDSQPVRCFGAFTQELHRLAQWLKQCGIKTVAMESTGVYWIPLYQMLESYGLTVKLVNARHVKHVPGRKTDVQDCQWLQQLESFGLLSGSFRPEAKICVLRSYMRQREMLIRAAGRYIQQMQKALTQMNLKLHHVISDLSGQTGLRIVRAIVAGERDGLKLAALKDRRIKSDVSTIAKALEGDYRAEHLFALKQGLELYDCYQQKIAECDAEIRKELERLESRGSAGAVLKRKPRSRHATGFDSQAELYRVLGVDLTSIDGVNESTAQLIVSELGLDICQKWPTEAQFTSWLGLCPNNEITGGKLLKRGTRKVVNRVANALRMCAQSLLKSKSALGAYARRMRSRKDTPVAITATAHKLARLIYRTLKYGQDYVDVGADLYEAKYKAAIVKSLQRRAKSLGYQLVSYQTLDAVVP

SEQ ID NO: 169033 - protein, 322 aa, unidentified
MKYIGLDIHKKHTHACVRDENGKVQGNERFRTDVADIGRYFQRMTADTDQRLAVALEATGFYFWIYDCIVALGHEVLVVHPTKVKPLMRAKAKNDKHDAATLAELLHTGCLEGIYVPPPREIREMRDLTRHRESMVRKRSDLKREVLASLDLKGVKLPEEFHTNFTRKQMDWMRSLHDFVIGEKLDLLELTVEKIGKVQALIEERWDGDEEVRLIRTIPGVGLVTAAVLKAEIWDLSRFPSAESLAAYVGLTPTTYQSGEKEWTGPTRRGNSRVKHVLIEAMLFHTHFCPDSRISLYKRRKSDAIGKKKAVVAAGRKLLEAI

SEQ ID NO: 169034 - protein, 368 aa, unidentified
MKNVTTYVGIDAHKKDLFVAMLIGNEKTPVTWQLANEPRAVHRLVRKLERETPGPVRVFYEAGPCGYALQRQVTTARVSCDVVAPALIPRKPGERVKTNRRDARKLAELGRAELLTAVQPPTPEDEAVRDLARARDDAREDLQRCRHRLGKLLLRRGLHYSGRNWTRAHRQWIDSLTWTYAAERVVVDDYLLAIDHTEARLVELDARLAEIAETEPYREPVSWLRCFRGIDTLTAMLILAELHDFRRFASAPALMAYLGLVPGEDSSGEKHRRGRITRTGNALVRRLLVEVAWHYQHRPNIGVVLTRRRKGQPGRVIAIADKAQQRLCRRFRKLAAEHKPAPKIAVAIARELAGFLWAALQPVPVPVT

SEQ ID NO: 169035 - protein, 324 aa, unidentified
MNLPRLGIDLAKVKFNACLLHLTGKLKHKVFPNNAAGFAQLQEWLEKQQAPLVHACLEATGTYGEALSHYLHQQGHTVSVMNPAAIKAFAASRLSRTKTDRVDAALIARFCLAHQPPPWTPPAPEVRELQALVRRLESLIEMRVAEENRLSSGLTVVAVRTSVEEMIAYLKEQITRTEKLIRQHIDKHPGLKQQHELLDSIPGIAATTAALLLAEVPDLKRYRNARQLAAFAGLVPRERQSGSSVRGRVRLSKIGNARLRRALYFPAITALRCSPFFQEWAEGLRQRGKSKMSVIGAVMRKLIHIAYGVLKSGRPFDPNLAKSA

SEQ ID NO: 169036 - protein, 367 aa, unidentified
MKKVSTAVAKRSRNFSQPELTIGLDLGDRSSWYCVLDEAGEIVLEQKLSTTPKAMREGFGGMPRSRIALETGMHSPWVSRVLSELGHEVIVAHARNVRLIGESRRKDDRMDAQTLARLARIDPQLLCPVKHRSARAQADLTVIRARAGLVRARTALVNTARGLAKSYGERLRGCNVRNMNPEKAEGLSPELQRALEPLRAALESLSERIREYNERIEKLAQESYPQVALLKQIKGVGTLIALTFLLTLEDPHRFRKSRDVGCYLGLRPGRRNSGQSEPQMHISKEGDPYLRTLLVQGAQHILGPFGADSDLRRWGLKLAERGGRNGKKRAIIATARKLAVLLHRLWVSGEVYEPLHNSKQRAMPAAA

SEQ ID NO: 169037 - protein, 315 aa, unidentified
MLDTTTFVGLDVHARSIKAVSLDVMTGEVRAATFGYDAGAVAEWVRSVDPGARCVYESGVTGFDLQKRLSGLGVDCAVGAVSKMIKPSADRRRKNDRNDAEFLARMLSVGNVVEVWVPDDECEAARDLTRALEDARDDLSRSKQRLSKFLLRHGLVFDERTPTGRRKGNWTRAHWSWIESIRFAEGADNDVLAYYVDAVRRAAEEKARLEGLVGAEARKPRWRKRVDSLRCLKGVDTASATDLVFEAGEFSRFRNARSFAAWVGLTPSEHSSGESDRRGAITKAGNKHLRKTLVEAACGLATPIWTIPGGTAPPF

SEQ ID NO: 169038 - protein, 420 aa, unidentified
MRADEKYLFARRFAVHVGVDTGKAFHKLVARGPDGRRKSPFKVLVNRKGFDEAHAHLCELFPDHSPADFLIGLEFAGHHGYTFAHFLVGKGYHVVSVLPAHTKKAKELEDNSPLKSDDKDARLICKLTGDGVFVPFPFLDTPYVELKVLVTQRHRLTVEQTRFRNRLQTILDLVWPEFLSHFANLTKRTPLAILERWPLPRDILAASPETVLRLVKKMSRNHIKPTKVRALLASARETVGLVDGADQRRHEMNDLFARWRLLRAQLGELDTQIAALVELCPEAERLMTVPEIGTLCAATIVAELGTPDSYEHPAQVLKLAGMNLVGRDSGLSLKGRRWQSKRGRPMLRRQLFLLAGRWCSSRGLMRSEYVALKERNGNCKTKAVAAIARKIVPVLFHVMKSGEGFDYERYYRNRRRKDAA

SEQ ID NO: 169039 - protein, 338 aa, unidentified
MSLYCGIDLHSNNCYLAVLDEQLRPVLGRRTPNSLETILAALAPHQEQIAAVAVESTFNWYWLVDGLLDAGYPVKLVNTSAVRQYEGLKYLDDRHDARWLARLLQLGILPTGYIYPKQQRALRDLLRRRAFLVRQRTANLLSIKNLYSRQTGAQVPTKDLKRLTAEQVAEQFTDPWLVQAITCGVNVAEALQTEIVGLEKTILEQARQCPEYALLESIPGIGKTLAMTILYETGSLSRFADAGHFCSYCRCVPSRHLSNGKVKGKGNTRNGNPYLSWAFIEAAHFAIRFEPLAKKYYERKKARSCPLVALRAVAHKMARACFYVMRDQVPFQATQAFG

SEQ ID NO: 169040 - protein, 359 aa, unidentified
MKYRTCVGIDTHSTKNEVFALDTETGEAWRATLSADPRDLGRFLCSLPVDRDATTCVYEAGPTGFGLARSLGLAGWSCVVAATSKLPQRIDAMKTDRIDAEWLARCLAAGAVRPVRVPTAAEESLAHLSRLRGEQAREKRAARQRVSSFLLLTGERYTLTKSLWTKTFGRWAETHEFADAADTYVFRDLFREAEHQAARVADTEAEIERLVGADPALSERVDRLTCLPRVGRVTAFSLVCEVYDFSRFRNGAAFANWLGLTPSERSTGKRRSRGGITKRGNSELRRLLVEASSAYSASSAPARVDGSGVGEEVTEKARRCCARLRRRRLALRERGVAANKAKVAVARELAEWIYYMMVM

SEQ ID NO: 169041 - protein, 368 aa, unidentified
MDKFSKYVGLDVHQETIAVAVAQTGGEVRYVGEIVNTPEAVKKLVAQLKRDGARLSFCYEAGPGGYVLYRQLHDLRQDCQVVAPSLIPRKPGERVKTDRRDSLSLARLHRAGELTAVWIPGEAQEALRDLTRAREDMKHLQRQAKQRLLSFLSRHGHRYAGKCRWTQAHWRWLEGVKFAQPVQQIVLQEYMDTVKACSQRVASLEQEIERAVQDCPVWPVIEALMALRGVSLIAAVTVVAELGDLRRFSDAPQLMAYLGLVPSEHSSGKRERRGGITKAGNSHVRRVLVEAAWTYRHPARKTAVLQRRAERTTAQVQEIAWRAQKRLCQRFRHLTTRGKLPVQVSAAIARELTGFIWAIGQQAEVGRA

SEQ ID NO: 169042 - protein, 417 aa, unidentified
MEEGEKSSSCRYIALDIHKYYSVAAGVDREGEEILPACRVEHLDLENWAIKHLLPTDRVVIESTTNAWHVYDLLEPLVGEVLVANPIKVKQIACARVKTDKKDTFILARLLAANLVPTVWVPPKHVRELRQLISHRRRMAGMHTQVVNRMHSVAHRHHLNHPKGKDFQPKNTGWQRDESLSKLEKMQLELDMETREHLEKQIGRMTRELGRMSHEEPWASDMLYLMQVPGCGVVTGMTILAAIGDITRFETPKALASYSGLVPGLEQSGVKLRGKGITKEGRRELRWVMVEVAWRAVKADPHWKKYLEELKRRMHPNQAIVAIARHLLTMVWYVLTRHEPYSHYSPERIAYKYLTWSWALDKEQRQGMTRPQFARYYLMRLGIGDELKRVALNPRFPYKLASVEEVLALWPDLRPPG

SEQ ID NO: 169043 - protein, 372 aa, unidentified
MKDHSEAFVALDTSKLRNAVAIAEGARREEVRFFGEIDNTPEATAKLVRKLAGKYRRLTFCYEAGPTGYGLYRQITVMGHPCLVVAPSLIPKRPGDRVKTNRRDALSLARQLRAGELTAVWVPDPRHEAMRELTRARGAAVADLRGKRQQVSSFLLRLGRHFAGKKTWSKAHMAWLASQKLEYPEQRIAFEEMLLAVRQAQERVARLEAAIRAAVPDWSLAAAVEGLMAMRGIDMIAATAFLAEIGDLSRFQTPRELMGYLGLVPSEQSTGDTIKRGPITKAGNRRARRVLVESAWSYRHPPRVGKKKQAKVAAAPPAVRAIAWKAQHRLYGRYRALTRRGKLRTVAITAMARELAGFIWAVNRELTTMAGA

SEQ ID NO: 169044 - protein, 341 aa, unidentified
MGDYIGIDLHKTKSFVTRMTAQGQILEQGNLLHTTGALQQYLTALSADVPVAVEATGNWMWLYEQIEDRQLDLVLAHPLKVRAIASARIKTDKIDATTLAHLLRTDLLPTAYIPPRAIRDQRERLRYRASLVRLRTQVKNKIAAILTKTGVQTPTKTAFGVKSRRFLATVPVRACYRLALDGYLRQLEHLTAEIRGADQVIAEQVTADPQAQLLCTIPGIGAYSALLIHSEIGDIHRFPDSRHLCSYAGLGPSVHASADTTRLGRLTKQGSSWLRWILVEVSVHAINGAPQFRSLYYRVAKKHGHNVGRVAVARALLKTIYAMLTTQQPFRPIRRGTPVSA

SEQ ID NO: 169045 - protein, 337 aa, unidentified
MESKVLKVSVGVDMAKDTFYSAVILLMEDLTIKCKGTRKFSNTGKGFKEFIEWVDRKVKMDHTVNFTMESTGVYYENLACFLYDNNQRVHVVLPNKAKKFSESLDNKSKTDKLDAKTLGRMGAERILKLWDPGSKIYQRLKKLTREREAIQKDRTRLQNMLHAENHSAFSEVVSRERYKERLALLTTQLKEVDKDIKKTIENDPEVLRKVKQVESIPGISLTTIAVVIAETYGFAAFTNMKQLTSFAGYDIVHRESGNYSGKTRISKKGNSHIRRILYMPSLSAIQHNETYRSFYNNLNKHKNNELISGTAVQRKLLCLISTLWKNDTTFIENYQNN

SEQ ID NO: 169046 - protein, 388 aa, unidentified
MQDVADQSAAPTTIGADLCAIFVSLELSRSTWLVTSLSPGRGEKMSKHSVSAGDIAALLARFSELRRKACARTGKSFPIVVIQEAGLDGFWIHRVLLSEGIESHVVDAASIATSRRRRRAKTDRIDGETLLRALLAHRRGEPRVCSMVRAPTPEDEDRRRICRERKVLIMERVQHVNRIKGLLFSQGASGYEPLRRDRRVRLDALQTGDGRRLPQHLKAQVCRELDRLELLLEQIKAVEAERDALLNAEQTKASAPPPMLLGVRGVGPEFASVLWSEGLSRHFDNRRQVAAYAGLAPTPWQSGSVHREQGISQSGNRRLRTTMIQLAWLWLRHQPGSALTLWFKDRMERNGGRRRKTTIVALARKLLVALWKYVSAGVVIEGALIRPA

SEQ ID NO: 169047 - protein, 402 aa, unidentified
MNCVGIDVSKGKSMIAVMRPFGEVVISPFEVQHTASELSELAKLLKSLDGETRVVMESTGNYHTPVAWLLHDAGLYVSVVNAMLVHDYGNNSLRRAKTDKKDAVKLANYGLDHWLTLPRYVPEEDTRLLLKNCYRQYQQYSKVQTMLKNNLISLLDAVFPEVNRLFNSSPRADGSEKWVDFVSTFWHCQCVSTLPLKSFSARYLKWCRKHGYYFSQEKAFEIHSKAKNCIGVMPRNETTKLLVQQAIAQLKATAAALAALKQEMQSLAAALPEYPVVMEMFGVGSTLGPQLMAEIGDVRRFHSKKALVAFAGIDAPPCQSGQMDIHSRSISKRGSAALRRTLFLVMGIYLQSAPLDEPVYQFMDKKRSEGKPYKVYMMASANKFLRIYYASVTAYLNTLARI

SEQ ID NO: 169048 - protein, 353 aa, unidentified
MLIVGCDFHSRYQQIAMVDEQTGEYFERRLEHHNGEARAFYARLPAARVGIEATGYTQWFERLLQELGHELWVGDAAAIRASVVRLQKTDERDARHLQVLLSQGRFPRIWLPTLAERDLRQLLVHRVRLVQWRTRLQNQLHALAMGQGLCRKKKLWAQSGRRELEALPLDPWARRRRSELLELLDGLNPKIEELNLAVEQQAREHPRALRLMTHPGVGALTALAFALSLGPASRFARGKQVASYVGLNPREHSSGDRRRTGAISKQGSSLLRWLLVEAGQVAARYDPALGRVYQRVKFRRGSQIAKVAVARKLAVRLYWMLRRQITYRELLGAQVPVPGSSGSAVMSDNTSGR

SEQ ID NO: 169049 - protein, 347 aa, unidentified
MSMTMIGLDTAKAVFQVHAVDGAGQVMTRRTLRRNELIAFFEKQAACTVVMEACGAAHHWARVLTGLGHEVKLIAPEAVRPFVKQGKKNDAADAAAICEAASRPGTRFVPVKSLEQQGILALHSARSLLVKQQTMLANAMRGLATEFGLTVPLGMGRLNELMALVDADEAVPAKARQTLTALSDQCRALGESIETFGAEIVAHARHDNTARRLATIPGIGPITASLIAATVADIGVFPSARHFAAWLGLVPRQHSTGGKTRLGRITKAGNREIRRLLVLGATSMVRRAPGWNSVAGAWARGVLERRPARLVTVALANKMARIAWAVMARKEVYHAKGRVAAAAEAMA

SEQ ID NO: 169050 - protein, 340 aa, unidentified
MQAIRFGIDLAKNVFQVHGVDASGQVVVQRQLRRAQVEKFFAAQPPALIGMEACGSAHHWARTLSALGHEVRLMPPAYVKPYVPRNKNDARDADGCCEAVSRPKMRFVPIKTVEQQWARALHRTRDLLVRQRTQLANAMRGMLYEMGLTSAKGAAGIETLLRRIEAADEAIPAALLICLAPLAGQWRALDGEIGKLDKQILAQVRQQRAALRLTTIPSVGPIIAHATIAAIGDGRQFASARDFAAWLGLTRKSHDTGGKHKSTGHISRAGDRDLRRLLILGSSSWLRQVRAKPDRGSPWIRGLLARRPVKVAVVAQAAKTARVIWAMLQSGQQYRAPSAA

SEQ ID NO: 169051 - protein, 350 aa, unidentified
MAIPAPVYHLYVGIDIAADTFTAAWLPASGTPSGPLTREQTPTGLVALQQRLAATGCPPATTLVVMEATGNYWVAPAVALHAAGYVVSVINPLQAHHFAKAQLRRAKTDNLDAQDLARLAAQLCPAPWTPPPTVYHEVRQRLVARDALLTMRQQARNQRHALLQWPVVVVGVRRHLDELIADFDARLTTLEAEIAAALQESAWAESLACLLSAPGIGLVTAAWLLVGTLNFALATGPAAATAYVGLAPMPRESGRSVRGRPAIGHAGNARLRTALYMATLSAARYNPAIKAFYERLRAVGKPMKVARCAAARKLLHLAWALVTKHQHFDPTKQQQQHASPADPTATQEAA

SEQ ID NO: 169052 - protein, 315 aa, unidentified
MDTQVFVGIDVGKDVLFVAIRPFGDNLEIANREDGIADLVKRLRFLRPTLVVMEATAGYETPVAVAIYRAGIPVVISNPRLVRSFARATGHLAKTDKIDAGVIAHFAELIRPEPRRLEDPEEERLGRLVKRRKQLLRMIVMEKNRVAKGVPEMRKEIQKHLDWLAKDLERIDQALNDFIQSSPIWSAKNDLLQSVPGIGKVGAQAIISDLPELGTLNRKQIASLVGVAPLNRDSGNFKGRRSIWGGRAHIRTVLYMVAVVASRCNPVIKEFYERLCKAGKPKKVALTACIRRLLAILNAMMRNGTRWGEFKPAIT

SEQ ID NO: 169053 - protein, 363 aa, unidentified
MTRKRLSSNHLLDFIGVDEKTPVWIGLDVHKKSYHVALRRADGVCQSWVSPADPIVLARRLSTISQRISLIVYEAGPTGYSLERVLKANGYKVAVVAPSRIPRPVTNQAKTDKLDCLKPAEYAAKEMIEAITTPSEQESAERSVLRRRNQLVDSTRKTKQRIKSFLLFHGIEEEYGLRYWSRSAKAKLSKLPLQSDLKFVLKSLLRQLSYEEEELAKITNRLSRIAKRRQHGEVVKNLKTVPGVGDIVACAFRTELFRPERFRRAEEVCSFLGLAPAIRQSGEKRQGGWLMRSGQTRLKSLLIEAAWMWRAKDPWARKKYQTHLSRCGITQKAIAGLARRLAVILWRLSVENRAYVMLKVDSV

SEQ ID NO: 169054 - protein, 386 aa, unidentified
MRTDNHTMRMIKLHLGLDVHKDSITIAVAQDGLQSEIRLFGTITHDLHALEKALSRIRKAHAGAALRVAYEAGPCGFGIARRLQQLAVPCIVAAPSLIPKQPGAPFKTDKRDARGLARLLRAGELTAVYIPEPTDEAIRDLCRARTDAVDDLRRCRLRLKSFLLRHSYRYQGKANWSAPHMRYLRELVLPHPAMKTILEEYLQGIDAAHQRVQRTQASMLALLESWRLKPAVQALMALRGFQQVAAMITVSELGNIHRFAHPRQLMTYLGLVSVEDSSGPRQRLGRISRCGNSHARWLLTECAEHYLQPPKVSRELACRQEGQPPDVRALSWKAQNRLHRRFSQLLARRVQRNKAKIAVARELCGFVWALLRTQPCYQCSTGGAPS

SEQ ID NO: 169055 - protein, 344 aa, unidentified
MEQLYYVGMDIHKKIIVYCIKKVDGTIVDEGKVAATRNSLSQWVETLPRPWIGAMEATLFTGWVYDFLVPFAHVLHVGNPLMMKAISAAKRKSDKLDARTITDLVRCDLLPCCYMGSQEQRDLRRKMRYRKLMVAQATRMKNRTSTLLMEVGQEYDKQKLHGARYFKALLERLQDVPDSLKELLQMSRGGLELFESCQKRLTKELVTNERLKERVQRLMSIDGVGEITALTWVLEIGDVQRFSSIRKAVSYCGLCSSQVESAGKVKRMPLSKQRNKHLQTALIEAAKIAPIHNAELEKIYNKELQRGSNRNQATISVARKLVAFLMAVDKSGKEFVKKTKQKAA

SEQ ID NO: 169056 - protein, 343 aa, unidentified
MQVSTIGLDIAKNVFQVHGVDKEGKVVITRQLRRGQVIVFFKKLAPCLIGMEACATAHHWGRELTELGHTVRLMPASYVKAYVKRSKNDAVDAAASCEAVTRPSMRFVPIKTIDQQAALMLHRSRSLLIRQRTQLINALRAHLAELGLIAAKGKDGVKGLVTIVIDGANSSQLPEPMRQALQPLVMQLAALQDQIGQIERSIHAQHRASDDSRRLETVPGIGVIGATALAATITDPSVFKSGRECAAWIGLVPRQNSTGGKERLGGISKQGDRYLRRLLVNGAMAVIRQARLHPDKYPWVMKLLAKKPAKVVAVALANKMARIAWAILAKGETYRAPALAAAV

SEQ ID NO: 169057 - protein, 392 aa, unidentified
MVCVGIDVAKDKHDCCILDSDGTIRADCITIPNNMDGFKQLLQTIRDCTKKSDKIKVGLEATGHYSYNILGFLLDNDLAVYVMNPLHTNLYRKSLSLRKTKTDRVDARTIATMLLSDVDLKSYTDTAYHNEELKSLTRYRFDKVRERAKLKQSVSRLVTILFPELEKLVPSLHIASVYALLSEYPGAKQISEIHLTKLTNLLATASKGRYGKDKAIQIRDAARTSIGSVMPAKFLELKHTIKLIRELTSEIDEIEVSIQKIMDELNPPILSIPGVGIQSAAMILAEIGDFSNFESPDKILAYAGCSPSTYQSGKLTNCYAHMEKRGSRYLRYALYNATKYVCHWNPVFAEYLAKKRAEGKHYNVALSHATKKLVRLIYALQKSGKSIYLVAA

SEQ ID NO: 169058 - protein, 404 aa, unidentified
MVPIGVLPLAGHRGAVRRDLIGAWFIFDLGLSAEPLRDRPTQHAMKHERRRMSGAVMIGVDAHKRTHTFAGADEVGRQLAVRTLAATSEGHLAALEWAQQWPERVWAIEDCRHLTRRLEADLLRAGETVVRVPTRLMAEARHGGRERGKSDPIDALAVARAAWREPNLPVASLDESTRRLRLLVDHRDDFVAERTRVQSRLRWHLHELDPTLQVRPKGLRCRSVVAQVADHLADVQGPVAEIARELLARCAQLNQRVNELEGQIRELVEKQAPSLLAIPGCGALTAAKIVGETAGVVRFRSRAAFARWNGTAPIPVWSGNTDRVRLNRGGNRQVNAALHRIAITQAGRPTLGQAFIARRLAAGDTRTEALRLLRRRLSDVVYRTLLADELDVQTRPAGGSLVAA

SEQ ID NO: 169059 - protein, 403 aa, unidentified
MKTIFVGLDVSKDDFKAAVKDEKNKLIKPVKTYGHDRLSLEAFDKDIGSIKIQLGSSTIFGMESTGIYHLSVYQHLLAAGAHVKLFNGLELKRFKSSIRKTKTDDLDAQAIAEALLLVRDASYDPASEPELINLRELCRVRARMTSKITQCKNQAIRNMDTLCRGYTNLFSDVFLPSSIGIMKATIRSTRLFKTDIITLENILVKYMPHPAAEKKAELLLVLFQHAVVPEQMKEICIMELHMLIQQFELLKQQVGRIEKRIEKGVKEVNTCILSIPGIGTLTAGIVLGELGNLGRFDNHNQLTAFAGLDPSIKESGRSSKTGRISKCGSPMLRQALYRAALSASRVNPVCQQLYQRLKAKGKHHKVCMVAVARKLLHIAYSVERNHRDFYVPAYILEQLATSE

SEQ ID NO: 169060 - protein, 424 aa, unidentified
MNDTQNKKIAQVTDKTLVVGVDIGSDTHYARAILARGYEVSKKPFNFGNTREGFEKFVNWAYNLAAANMLTKIFVAIEPTGHYWFNLADYLKAYDVKFVMVAPQHVKHSKEMDDNTQRKDDRKDPLVIARLVLEGRYMIPYIPENVYAELRAAFNRRCDLVEALNRNENRMIRWFDMHFPEYREVYGKASAITGLLVLMRAPLPSDILVLGVDGICRIWREEKVRAAGINRAKKLVEAAQKSIGLKGGEAVRQELWQLMEEHELLKKQLSDIMQIIEGLLVRIPGADRLLKVPGAGVVTVAGFLSEVGDISRFTDPKQIQKLAGLAVVENSSGKRKGMPGISRRGRSRLRWVLFQLARTTVKSNKEMKAYHQYYTTRKENPLKKMQSLMAIAGKMTRIFYGILKKGTEYDPAIVMKDFNKEATA

SEQ ID NO: 169061 - protein, 387 aa, unidentified
MPKPNDLSRSPAALSEDSTLIAVIEMGLASWLIAGRIPGVNRNPLRKQDPDPEALLVRLRRWRDEAVQAGHSISRIVVAFEAGRDGFWLARWLQARGIEAYVIHPTSIPVKRDHRRAKTDRLDTALLMRAFLGWLRGEADHCSMAAIPTLEEEDRKRPNREHQNLSGERTRIINRVKGALIRLGIRSFNPNLRTAAERLKQLQTPEGAPIPPNTLAELDRDFARLRFVADQARAIEKTRLNQLKTAPHDGPNSMVLLLARVIGVGIETADMLVHEVLSRGLRDRRAVGRYAGITGSPDESGVKRREKGLAKAGNSRVRRGMLQLAWRWLMFQKDSALTQWYRARTENAPPRARKTMIVALARKLLITLWRYTTNGEVPAGVVLHPAV

SEQ ID NO: 169062 - protein, 338 aa, unidentified
MKFYAGIDLHSNNLVLVILDSNDKVIYSKRLPNDVQSILGVLAMYKEQIEAIAIESTYNWYWLVDALQAEGYEVRLVNTAAVVVYDGLKYSGDKSDARHLAHLLRLGLLPCGYIYPPEPRALRDLARKRAQLVRQRTTQMLSIKNLLARNCGQDTSSAVIKKWTEEQLTQLPLLPEQRMAIKANWAVMQALEQQIDVVESELLRQLKPNKEFQLLKTMSGVGDILSMTIYLETGDIGRFDSCGQFASYARMVDSKRESNSKKKGEGNRKCGNRYLCWAFMEASHFAIASNEDIRRFYQRKCSKSPKVVAMKAVAHKLARASYNMLKDGVEFDVKRAFS

SEQ ID NO: 169063 - protein, 317 aa, unidentified
METTACFVGIDVAKARLDIAVRPSAEQWTARNDEAGIEQLVARLKELGPTLVVLEATGGLEIPLAAALTAAGVPLAVINPRQARDFAKAVGQLAKTDALDAQLLARFAEAVRPVPRPVPDAEAQALAALLARRRQLIGMLVAEQQRLGTALPTVRRRVEAHIAWLRQELSELDAELHETIRQSPVWREKEQLLRTVPGVGPVLAMTLVADLPELGQLGRKQIAALVGLAPLNCESGLLRGRRIVWGGRGRVRAALYMSTLVAIKHNPALRPFYERLLAAGKPKKVALTACMHKLLLALNALLRKGVAWQQPAPAAAS

SEQ ID NO: 169064 - protein, 343 aa, unidentified
MQVSTIGLDLAKNVFQAHGVSAEGKVVLKKQLRRGQVLSTFAKLPPCLVGMEACAGAHYWARELRKLGHDVRLMPARDVKAYVKRDKTDAADAAAICEAVSRPSMRFVALKTPEQQGRLMQHRVRDLLLRQRTQTINALRAHMAELGLVAATGRQGLGLLLAILADAKDERLPQDARASLKLLASQIAALQAQIDTLDKRLHAQHRQCPASRRLETIPGIGVIGATALAATITDPKAFKSGRDLAAFIGLVPRNNSSGGKQRLGPISKQGDRYLRRILVVGAHSILKQARTRPDKHPWLARLMARKPGKLAAVALANKTARIAWAVLARGETYRAPTAPAAAG

SEQ ID NO: 169065 - protein, 414 aa, unidentified
MEVLFNVAAGIDVHRDTVVVSVRARQGTKESVETRTFETFRDGLDAMCDWLAEREVQVVGLESTGVYFKPVILALRRHARQRPVWLVNAAAVKQVPGRKTDVNDSSWLSKLVMHGLVRPSFVPQEAQEDLRLLTRYRKKLVGDLTSCKNRIIKCLEAAGYKLATVCSDVLGKSGRSILGALIDGTETPEQMADRALGRLRAKRDVLIRALQGDMSPIKRWLLRDLMTRLGQCEANIASLDAKIADLLVVHEKDMELLVQIPGVDRVGAAAVVAEMGADMSIFPSSKNAAAWAGLAPGNHESAGIRRDVPTRKGNPYLRTMLVQMAHAASRAKDSPWRSFFARVARATGSRKKAIFAVAHKLCITIFHVLRERVFRPYVPSPPTLPQRQRSVRRALDALESLGFVVTLEERAAVA

SEQ ID NO: 169066 - protein, 411 aa, unidentified
MRRVIGMDIHRTFAEVVFWEDGKLRPAGRVSMTHAGLEGFGRSLGKEDEVVIEATGNAMAVVRVLAPYVARVIVANPLQVKAIAHAHVKTDKIDAGVLASLRAADFLPEIWLPDADTERLRRLVARRNQVVQHRTRIKNEVHSILHAHLIPPCPHADLFGRLGRAWLVRQVIPDDERAAIERHLRELDRLGEDLGVLDREIAQAAIQEPAVKRLLTITGVNLIVAAGLVAAIGDVRRFPDPQKLVSYVGLNPRVRQSGLGLAQHGRISKRGRSHARAMLVEAAWAASKAPGPLRAFFLRIRARRGHQIAAVAVARKLAVLCWYLLTKDVDYQWARPALIANKLRAMELQAGRPVRKGNKRGDAYAYNIKELRDREIDLARHAEQAYERFVSQWQRRGNGKQRTGAASEERR

SEQ ID NO: 169067 - protein, 346 aa, unidentified
MNQIIRIGMDTSKHIFQLHGVDAAERPVLRRKLRRNQVLAFFAKLPPAVIGMEACGAAHYWARELRKLGHEVKLMAPQHVKAYVKRNKNDGRDAEGLCEAMSRPTMQFVPVKTEEQQASLMLAGVRQQLIARRTQLSNAIRGYAAEFGLTAAKGLEKIEPLLAQIAQDESLPALAREMFAIEGREYAQLQVKLKAIEAKLMAWHRANAASRRLAQIPGVGPIGATTLVMKTPDPGAFPSGRHFAAWLGLTPKDHSTAGKTRLGKITRAGDEVLRSLLVAGATAVIQQVRHGRGHPSPWLVALVKRKPPKLAAVALANKIARIAWKLMTTGESYDSARMPGASAAAA

SEQ ID NO: 169068 - protein, 343 aa, unidentified
MSEYVGFDVSKEETSFCVIDEDGRILSQCKTATDPDALFDAVKRSCHCPLRMVMETGTWSHWLVRELRQRGLPVDCIDARQAHAVMKLQHNKTDANDAYLLAQIARTGFCRPVAIKSEAAQDKRLLLKARSHLVRLRCRTESTIRGLLGTLGIRFAKGSAKLPARVQAVLEQRPELNTAIAPLLELIARLNQQTDCMDDEIEAAAKEHAACQLLMSVPGVGEVTAMAFVATIDDPKRFAKSRSVGAYAGLTTRRYQSGEMDYSGKISKHGDGMLRSLLYEAAHSILCVVRKAHPVKDWARRIKKRTSHKKACVALARKLAVIMHKMLVTGEPFRWPQQGDAMA

SEQ ID NO: 169069 - protein, 374 aa, unidentified
MGNHSEAFIGLDTSKLRNSVAIAEGGRGGEVRFFGEIDNTPGAIGKLVRKLAAKYDRLTFCYEAGPTGYGVYRQIAGLGHECVVAAPSLIPKRPGDRVKTNRRDAVSLAKLLRAGELTAVWVPDRGHEAMRELTRARETAMLDLRRKRQQISAFLLRQGLHYAERRAWTKAHMNWLACRKFDHAEQRIVFEEMMLAVREAQDRLKRLEDAIRTAVPEWSLAEVVTALMAVRGMDLVSAATFLAEIGDLSRFQSPRELMAYLGLVPSEESTGDTIKRGPITKTGNRRARRMLVECAWSYRHPPRVGRNKQEKVAAAPQAVREIAWKAQCRLHNRYRMLIRKGKLKTVANTAIARELAGFLWAVSREITKASAAGR

SEQ ID NO: 169070 - protein, 390 aa, unidentified
MLKLDGLSHSLTAFDQDSTLVVVIELAVSNWTVGGLVPGVLRQPTKKMAADKFALAQQLENWREQGEAAGHPIKRVCVAMEAGRDGFWLARWLRARDIEAYVIHPTSIPVPREHRRAKTDRLDVGMLLRAFLGWLRGERKHCSMVKIPTREEEDDKRPLREREALVSGRSSLINQLKSLLALHGIRGFKVTTKRAAAQLQGLQTEEGLPLPGQILAALERAMARLALIKTQIADIDRERVRRLQAAPEEGLHPMIRIIAMVKGIGLMTAELLVREILSRPMRDRRAIARYGGLTGSPDESGKRRREQGLAKAGNGRVRHVLIELAWRFLRHQKDSALAQWFLARTQDGRGPTRKVMIVALARKLLIALWELATTGKPLEGVQLHSRLIFA

SEQ ID NO: 169071 - protein, 357 aa, unidentified
MKIVGCDLHARQQTIAMVDAESGEFTEKTLHHEGNAVREFYASLKGPVVVGIEATGSMQWFLELLDELGIESRVGDPAKIRAAETRKQKHDRRDAGLILDLLLRDRFPTIWMPSTEQRDLRTLLRDRHQWVQMRSRLQHTLQAIALNHALRKGSGLWSHAGQTVLQALPLPPHTSDRGVALLSLYVQLEKRIRKLDQEVEHQVQQRVQARRLMTHPGVGPVTALATEVFLGDPDRFATGNQVASYIGMIPSEHSSGKRQRLGKMSKQGNSLLRYLWTEAVMHAAQKDPELKRFYRRKLIQKGMGKARIAAARKLGIRLWIMMRDQIDYQEFCRRGKLRQSGEAHAGMPDFNSGPALQ

SEQ ID NO: 169072 - protein, 465 aa, unidentified
MKSKTSKTKKRKQKISIDPGWAPVNGHAAGIDIGAREHWACVPPLAAPNPVRKFGTFTADLEALADWFQECGVTTVAMEATGVYWIPVFQILERRGLQVLLANARQTKNVAGRKTDVQDCQWIQRLHTYGLLQGSFRPADAYCVVRTYLRYRDELVGARSTQCQHMQKALQQMNLQLTQVLSDVTGVSGLAIIGAILQGERDPVKLSQLVDRGVRATPAALQKALAGDYRPEHLFVLQQAFALYHTYEEKIQACDQEIVREVTQLPDRVDLSRQPLPARKKGRKAALDQMAGQDMREALYRKTGVDLTAIEGIGPLTSLVLFTEVGPDVRRFPTEKHFCSWLGLCPDNRISGGKVLSSRTRRVVNRATDALRMAATTLERSPSALGGYYRRMKARLGAAEGVTATAHKLARIIYRLIKHGEAYVRQGMEDYEAKFRARRLAALMKTAKTLGFELIQTQALPSGVS

SEQ ID NO: 169073 - protein, 467 aa, unidentified
MNAVGIDVSKGKSMVAALRPMGEVALLPQEFLHTEVGLEQMAYAIIALGEDTRVIMEATGRYHEPVAAALHEYGIYVCVLNPLFIKQSGGGSIRKVKTDKADAMKIAKYGLDNWVDLREYTPMDTVRQQLKLCSRQYNLYMKTVVSLQNNLISLTDKTFPGVNELFSSPERADGHQKWVDFVMTFYHCDCICRVSENAFAERYQKWCKRKGYHFSAEKAQDVYLGSCGHFTTLPKNDNTKLLITTAAQQLLAGKMTLAALRTEMTRLAKQLPEYDIVRAMYGVGETTAVQLMAEIGDVRRFPRRSSIVGFAGVDPAVDQSGKHSAKSVPTTKRGSPHLRKTLYQIVCTYLKKSPVDEPVYQFLDKKRSEGKPYFVYMTAAQNKFLRIYYAHAKECLETFDAQRDILTQCDPKGHLHLKLVINFVPIHLHHLQTFSLELLNPFADIIPYYPCCSQCFQWFPSFFCAVQ

SEQ ID NO: 169074 - protein, 348 aa, unidentified
MNYCGIDLAGVSSYAYVTDEKGRKLWSGPVETEKAAFERLVKKFRRGGLSIAIEAGNQTAWVYDELVKLGAKVTVVNPAKVKLIAESRRKTDKIDAKILCELLRLDALPHPVHIPGPEARALRGLLVARRQLVAARTKLCNVVRGMLRQTGVRLPAGALSTLAGWKRLFAAGFEHDHLLHIVTAYHDNFLALTKSIRELDRQLAEREKNEPRAARLKTMPKVGRIASLTFLAAVDDVNRFPTSRKLVGYSGLAPTVRQSGERTEYGAISREGRRELRAVWVQIAHLVAIDKKKATQPLRTWFNRVAKKRGKKTALVGLARRLLVIAYQLLKSESDYDVGRLKKKRQAA

SEQ ID NO: 169075 - protein, 322 aa, unidentified
MHSDSNALWAGIDVAKEWVDIAVVEQGRIVEQWRCARSTVELQQAAERLQRRKVVGAVLESSGGLEIAVGTALLAGGVMAFRINAKRVRDFARAHGVLAKTDRVDARVLALFGERMQPPARDWLDQDRQQLADWITRQRQLIDMRTMERNRLHCTTASPLRRSIERMLRWLEKELERIESELQAWWREHGARWNEQETRLRSMPGVGPKTARVLIAHLPELGRANRREIASLAGLAPIACESGAWRGRRRIRGGRAVVRSALYLASWTAVRLDATFRAFYENLVARGKARQLALIAVARRMLVALNDMLKNSRNWEKCTISA

SEQ ID NO: 169076 - protein, 409 aa, unidentified
MKVLHRVCCGLDVHKNSITACLIAKGRKTLKTFGTMTEDLLALLDWLLKANCMFVAMESTGVYWKPVYNILEAGGLTEILVVNARDVKAVPGRKTDITDAEWIADLYRHGLLRGSFIPDRPQRELRELVRYRRSLIEEQSREVNRVHKVLEGANIKLGSVATDVNGKSGRAIIEALIKGEASVDKMADLAKGRLRNKMDLLKKSLNGLIGPHQRMLLEAQRRHIDFLEQEIERLSKEIEARMRPFDEAIERLDEVPGLGRISAEQVLCVIGLDMSRFPSSKHIASWVGLCPGNNESAGKRKSGKTRHGNQMVKTTLIQAAQSIAHTRGNYLSAMYHRLAARKGAKKAAVAVAHALLVIIYRMLKDGTRYKDLGGNFFDELNKQAVVKRTVKRLEALGYKVTVEPTAPAA

SEQ ID NO: 169077 - protein, 348 aa, unidentified
MEYYVGLDVSLKQTSICVVDQSGSVVREGVVDSDPEAISVYVRSKAPGAVRIGLETGPTSTWLWTELKRLGLPVICIDARHAKAVLKMQINKSDRNDAIGIARIMQTGWFKEVHVKDIDNHTVRALLASRALRVKIKRDLENHVRGLLKNLGLVIGRAKFNVFAVRAEELIEGRPELIAAIRPLLEARNAVEQQVSELDRKVMKLARGDAQVQRFMTVPGVGPITALAFKATIDDPARFARSRSVGAYVGLTCRRHASGEVDWSGRISKCGDAMLRSYLFEAAGVLLTRVPKWSAVKAWGVKLVKRNGLRKAKVAVARKLAVILHRMWVDGTEFNWSKKEIAAKQVEY

SEQ ID NO: 169078 - protein, 315 aa, unidentified
MSSTLYLGADVGKENIVFWDRHTHTLSTVPNRKTNLNAYLRHHPDRVVVLEATGGYEAVLIACALQTRLTLYRVTPSRARAFAHASGQLAKTDALDAQILAAYACTHHADLHPYQPPSETSNNLRKLTRRRDELIAMRTQERNRLQAPDNMPLRASIRTVLACLERQIASIEAAIAQTVAQAPSLAQTIKTLEAVAGVGNTTAVNLIAAMPELGSLTGKAVAALAGLAPHPRSSGQKTGYRRTGTSGRTSVRRILFMATMTATRYNPCIRTFYQRLIANGKKTMLALTACARKLLVILNAKLRDARLNQPALQQS

SEQ ID NO: 169079 - protein, 339 aa, unidentified
MQVTTVGLDLAKNVFQVHGITDDGDVAFNRALRRAQVLSFFEKLEPCLVGIEACGTSHHWARELIKLGHKVKLISPAYVKPYVKRGKSDAADAEAICEAVTRPTMRFVEVKTPEQQAILAVHRTRDLIVRQRTQTINMLRAQLAEFGIVMPQGIYHALGFAKNCLNGEQVDLPEVVGDVIFELCDQLMFLHSKILRCSRQMTQIAKLEKRVALLRTIPGVGQITASAIVATVGSGKQFNNGREFAAWLGLTPLNKSSGGKERLGHISKMGDQYIRRLLVLGMTSRIRSIRTKPEKFDPWFADILSRKPSRVATVAMANKTARMIWAVLTRNEPYKVRTA

SEQ ID NO: 169080 - protein, 405 aa, unidentified
MIASLPTRPRKYFCGIDIAKNKHVACVIDREGKLVIRSQSFTNDAEGFQCILDRLKEVGGPTKVAIAMEATGHYWYSLHDFLVRNCYDVAVLNPIQTAKQVTKGIRKTQTDRIDAHHIAVLLKNGEQRPALIPGELGMTCRQLTRLHQTMVRQASRIKQLIWSRLHPVWPEYEDLFATPFCKTGRTLLNKAPTPQDVLALPREELTELIRKTSRGRFGVIQADKVRQAAQNSVGTHRGLTASRTAIRLLLAQLDVLKPIREQLEGEIETLAARLPDYLMTLPGASAASIVSLFGETDPIEAFASPSQLIAFAGLDLVVSQSGDYQAARRHISKRGSPFLRHTLWAMAHRACYQEGDLRDYWLRRKGQGLSHLASVTAVAIKLCPVVWRIMTDRRNYLPQRPVTKP

SEQ ID NO: 169081 - protein, 379 aa, unidentified
MRNVRFVGLDVHAQTIAVGVAETGGEVRSLGVIPNRAESINKLIKKLGKPEQLRVCYEAGPTGYVLYWQLAKLGVRCEVVAPTLIPVKPGDRVKTDRRDAEKLARCYRAGDLTAVWVPDAAHEALRDLVRAREAAKSDQLRARNRLGKFLLRQGRRAAEGTKAWTGKYLKWIKEQVHFEQPAQEATLLDYLHEVEHAGERIQRLEKSIDTAIETVPQKMRAVIQGLQSLRGIAKISAVSIVAELGEISRFAKPVQLMGYSGAVSREHTSGERVQRGQISKAGNAHLRRIVVEAAWSYRHRPNIGAGLAARQKDSSEEVKEIAWKAQHRLHSRYSKLLARGKTKQKVVTAVGRELLGFIWAIGVQVEQTVGARAPKRRAA

SEQ ID NO: 169082 - protein, 314 aa, unidentified
MTENTSERFAGVDIAKHSLDLHIEGQPVLHLTYDDAGIQEACSRFRAAAPTLIVMEATGGLETRLATELGALGLPVAVVNPRQVRDFAKASGRLAKTDRVDAQVLSAFARAIRPQARPLKEDEVRELDALVTRRRQLIGIRVQETLRLGTASRLQAKSLKEHIAWLDRRIARLDIDLTAKLRQSAAWRAKEDLLKSIPGVGQVTCTTLLAKCPELGQLNRREIASLVGLAPLSHDSGRRRGKRFVWGGRAEVRAVLYMATMSAMRSNPLIQSFVKRLKQAGKPAKVVIVACMRKLLTIMNAMIKHNAPWNPNLA

SEQ ID NO: 169083 - protein, 414 aa, unidentified
MALKIVYQICCGIDVHKTFVVACIASTDSKGVTNYKRHRFSTYTSGLKELLQWLLSNNCKDVCMESTGKYWIPVYNVLEKSCTIVLAHPKYVKAIRGKKTDKKDAKWIADLFKHDLVAGSFMPPADIRQLRDLMRYRYKLTCFMSSEKNRLQNCLTVSNIQLGNVVSDTFGKSSMKILDKILENPLDTSFDIKSLIHGSMEKKIPELELAVDGYITPEQAGKLKIVKRHYEDLESRKAELEKLILALASPYQQELDLILTAPSFKNPFSAITVMSEIGANMEAFPSAKHLCSWAGLTPTNNESAGKKKSVRVSKAGCYIKPLLVQCATSVVKSEKHPEIRNRYLRIKKRRGHKKAIIAIARMLLTALYNMLSKKEPYNAELYKKSDCLPVEREITVEQAILIAQHQGYKIKSAV

SEQ ID NO: 169084 - protein, 409 aa, unidentified
MEVIYPRCCGVDVHKREVVACVVSTGPDGTPSKTIQAFGTMTPDILALADWLTTHEVTHVAMESTGVYWKPIWNLLEDQFALLLVNARHVKAVPGRKTDIRDCEWLAELLRHGLLTGSFVPDRPQRELRELTRYRTSLVRERTAAANRLQKTLEGANVKLASVATDILGKSGREILAALVAGETDGAALAQLAQGRLREKIPQLERALVGCVGPHQRFLVAEQVAHIDFLDEAIARVSAEIAARVRPDEDAVARLDTIPGIGRSVAEALMAEIGADLTRFPGPKHLASWAGLCPGNHESAGKRRGGATRKGSPWLRACLVQAAHAAARTKGTYLAAQYRRLAARRGRAKAAIAVAHSILIIVYHLLTDGTVYHDLGANYFDERDREAVEHRLVHRLQGLGYRVSLEPVA

SEQ ID NO: 169085 - protein, 515 aa, unidentified
MHQTKYRGIITEGRIIDVSSLGASGFPLVKPLRKSVNPFGGDLCFGWLGSLRLYLYKPLGCVSTLWKWMPAGKDITMHYHKVLEMFESIPYLSVGLDVGADFTWMSIMLPNGILTGKPFKIIHSDPQSRELAVSKIKEAQEMYSLESRCFLESTGIYHIPLLYFLRDKGFDCAVINPIITKNSTNRNVRKLHNDKFDSKKAAKVGLDASLKTSIVPDDAIIDLRNLVRDYYYFKDLQSAIVLKLNAELKVSFPAYLNVFSKVTTQTSLKLLEAYPLAADMLAAPKDELVEIIRSTARFGEKYALAKYDAICTAAKDAAVFGRALKSNALRIRLYIKMYWEYHAHLDSILEELHQAVDKLEGTPDYDRICLIQTLHGIGFLSAVVLIAEMGSFDLFPSPKKLYAYFGLDPGVNDSGKFHGDRVHMSKRGSSLARRILHMVAINNLKVDKATKAPVNPVIYNYYIRKCASKKRSLLSGPSCTKSATSFSPCSGIISLLSSLRRKNTVNIMQQSTQNL

SEQ ID NO: 169086 - protein, 366 aa, unidentified
MKKYTVFHSVTATPAAANSKVNKSSSLLKLGLDIHREKFVVVAQYDHATPRPPHRFAPAEFVPWVEARLREGFEVHVVYEACGFGYGLYRALLKAGAYCYVIAPQKLDEGNTRVKTDGRDSRALCLRLDRYLAGNKNSLAVIRVPGEEEERARHWGRQREQLVRHRQKMEAQGRDLLISHGLTAPARWWRPQSWSRLCKLLPAWILSHLELYRPVLLALDQQIRTLTIELEKAAPAALPKGMGALSTVVISREICDWQRFNNRRQISSYTGLCPGEYSSGAKRVPRSITRHGNGRLRAALVELAWRMVRYQPQYHAVQKRLTVLAQGAQATKAHRKKAIVAVARQLAVDLWRLHTARCTPAMLGFK

SEQ ID NO: 169087 - protein, 429 aa, unidentified
MNYNTQNAKIASITEKTLIVGIDVGSETHYARAFNWRNYEYSKKPFAFSNDEAGFSSFKDWMDDIAEKHGMEALIPGMEPTGHYWLNLGAYLQEQGMKPVHVNPHHVKKSKELDDNNPSKNDRKDPKTIAGLVNEGRFSYPYIPTGIYAEIRNLSNLRIQTQEEITRIKNRIARWFSIYFPEIKDVYRNPDAVSGLMVIKQAPLPCDIKELGVDGVNKIWRDARLKGAGMKRATILVTAAEHSIGNTEAPRSARKEIRNLLEDYEGYKKRMDELMEEIEETLSEIPYIDKLMEINGIGIKTVSCFIAEVGDIGRFDNPKQVQKLAGYAIVADSSGKHNGESRISHRGRKRLRYALYEAAISVIGKNKEFKEIHSYYRTREKNPLKKMQSVIAVACKLIRIFYTILTKGVDYDGKKMLNDIVRPEMQPAA

SEQ ID NO: 169088 - protein, 346 aa, unidentified
MPEDHFIGLDVSARSVNLCAVNGDGKVVHEAKLSSNPDDIVRHILALPFSVVRIGLEAGMLSQHIYSGLVEADLAAVCVETRHMKAALAAQLNKTDRHDARGIAQMMRVGLFKPVHVKTATSRRLRAVLAARQLLRNKLQDVENEIRGVIRDFGYEIGRVTKRDFESRVRELTENTILHGVSDALLLARRGLWEQFLRLDDLLVRLAREDELTRRFMTVPGVGPMVALTFRATVDVPSRFIRSRTVGAHFGLTPRKHQSGDVDRTGRISRWGDAMMRSLLYEAAQVLLARVKRWSALKAWAMQVARRRGRKKAVVALARKIAVILHRMWIDGTEFDWGERRQPASP

SEQ ID NO: 169089 - protein, 400 aa, unidentified
MSLDRPFAKTVAIHSQLGAIFVSLELSRSTWLITSLSPGAGEKLSKRVIKAGDVSGLLTRLAELRHKALARTGTSHPIIVIQEAGLDGFWLHRVLQEEGCESHVVDAASVAAPRRRRRAKTDRIDGEALLRALLAYKRGEPRVCSMVRPPPPEAEDERRICRERAELIAERVRHVNRIKGLLFSQGVGDYEPLRRDRRKRLVELRTGDGRPLRPNLKAQIERELERLELLLEQIKAVEGARDRLLARLAESRSQDATAPAETQPSPVALLISLKGIGPEFAASLWTEGLSRSFANRRQAGAYPGLTPSPWRSGKIEHEQGLSKAGNPRLRTKMLQLAWLWLQHQPKSALAQWFHRRLPGMTGKAARKRLIVALARKLFVALWKFTSAGVVIEGAVMKTPA

SEQ ID NO: 169090 - protein, 351 aa, unidentified
MRTSQNTAESINTIGIDVGKNTFHLVGLDKRGAIVLQQKVTRHQLGRRLSNISRCLIGMETCSGTHFIARQLAALGHDVRLIPAQYVKPFLKGHKNDYRDAEAIAEAVQRPTMHFVSIKTPEQMDLLALHRVRSRLVRQRTGVANQIRGFLLERGITVRQGFMPLRKALPEILSSKSDALSPRMINLIGELIQDWRRLDDRIASVSTEIEAIAKRDESCQRLMSVPGVGPIVSSAVMAAIGNGTGFKQGRDFAAWLGLIPKQESTGDRTILGKISKRGNKYVRTLFVQAAHVVLERRPRTARQGLWPWIEQASKRLHRNMLAIALANKLARIAWAVLARGHAYQPRIIANA

SEQ ID NO: 169091 - protein, 433 aa, unidentified
MEEAVDEPLFCERAAGIDIGKQSVMVTVRVPSEARRGGRAQETREFGTTRRQLLELADWLRSWGVERAGMESTSDYWKPVFFLLERQGFECVLYQASKVKAQPGRPKTDKLDSVWLAKVTERGSVAGSFVPPEDIRRLRTHTRYRRRLTQARTAEKQRAEKLLEDAHLKLSSVISDIHGVSGLEMLRAIAGGERDPRILAEMARGVMRRKLAALREALDCSFFTEEHAFVLSMMLDNIDHYSAQVTVLDEKIAALCEPYERQVAQLDAIPGFGVKNAQDLIGEIGVDMSAFPTAGHLCSWARVAPRPKESGGRRKGGSATGKGNPYIGATLGDAAASVGRTQTFLGAKLRRLVRHMPKKKAQVAVMRTQLAAAHALLSDPEAEYRDLGPGYYDERAGTARQARSHVRSLERLGWKVTLEPLDPDTGELTAQAS

SEQ ID NO: 169092 - protein, 460 aa, unidentified
MSRARKPGKQMPTRKRDRQEDELTKINPNAAGIDLHRDEMWVSVSVVQDDIPLRRFGMNTPDLNACADWLEGCGIETVAMESTGVYWIPLYEILEARGFEAYLVNARHAKNLPGRKNDEADAQWLRRLHTFGLLNNSFRPDSEMRALRAYMRHRSGLIEHRAAHIQHMQKALLQMNVRLSPAVSDITGVTGMAIIHAILVGERDPVHLAQLRQPGCAKSEAEFVKALTGNYREEHLFALKQALALYKAYTQQIRECDQELERKFSALKPVHDNDLPPLDTSDKRNTHSKNAPAYDARTLLYQKLGVDLVAVHGLNEVTAQIIVTEVGTDMSRWKNEKHFCSWLGLTPHNDISAGKVLRSRSLKTRNRAGQAFRLAAQSASRSNSEYGVFYRRMRARLGPKKAMVATAHKIARVVYFMLRDRQPFHSLSAEEYAQRARDRELARLTKRASKLGFTLAPVSA

SEQ ID NO: 169093 - protein, 408 aa, unidentified
MEVIHERCAGLDVHKETVVGCVRVSERGEVRHEVRRFATTTAGLLELADWLRQAGCTHVAMEATGVYWKPVWHILEGEFELVLANPLHIHNVPGRKSDVNDATWIADLLAHGLIRSSMVPPGPIQELRDLTRTRKQLMREVVQHKQRIQKVLEDANVKLASVVSDVFGPSGRRMLKAIIAGQTDARKLAALGSEQLSASRETLTQALHGKVTAHHRFLLKQHLQMIEHLDQTAREFEAQIEAALEPFRAAVERLMTIPGVSATAASVIIAEIGVDMSRFATVGHLRSWAGLCPQLNESAGKVMSRRLRYGAPWLKTVLVQCAWAATRSKTNYLHAQFLRLRARRGPKKAILAVAASILTAAYYLQRDQVPYRDLGPLYLARLDQDRTAQRLARRIKELGYEVEIRKAA

SEQ ID NO: 169094 - protein, 399 aa, unidentified
MECRDAPAERPRPAPGQALSRSLVTLDQNSTIIAVVEMSQSSWLVGGVVPGIERQPCKKLEPSPERLLAVLHRWRDEAVRAGGNVTRIALAFEAGRDGFWLARWLAARGVEAHVIHPSSVAVSREHRRAKTDRLDTELLKRGFLGWLRGERGHCSMVRVPTLAEEDAKRPNRERECLVKERTRLVNRMKGALARLGIRNFRPTLRNAAEHLAGLYTPEGSPLPPNVAAELARDIARLGLVIGQIKQIEEARRRRLEEQPESSPHAMVRLLARVVGIGTETADMLVNEVLSRPLRDRRAVARYAGLTGAPDESGAKRREQGLAKAGNARVRRGMIPLAWRFLRFQKNSALARWYQARTADRRAGTRKTMIVALARKLLIALWRFVTTGETLEGVVLRPAG

SEQ ID NO: 169095 - protein, 325 aa, unidentified
MEKLYAGIDIHKENLAGCIMDKDGKITREHIFPSSKKAVEKFLCNIPNSEITIAIEACGMWRGVHKVLTELGYEVKLANPKKTHDIAGSKKMDKIDAKTLADLLRTHYLPEVWIPDEQTLQFRDLTRHKSNLTRLKTQVQGKIRGYLLRKGAKYSKLSKEETLTTLAEEDPDIKNLVHVYQCLKQEEKEVMRRIKRISQNMKQTTMLMSMPGIAEFSSLMILAEIGGIKRFPSPKELVSYSGLCSGIYQTGSTERNVRNTAVNKWLKWIIYECSGRALMLDPRFQNYYYKIKEKKGFKTARRATARKMLTIIWYMLTNEEPYRAS

SEQ ID NO: 169096 - protein, 412 aa, unidentified
MHNRQNYLYVGVDLHKEHHTAVIINCWQEKLGEIQFENKPSAFSEFLLEVETYVSNGLSVVFCLEDVGGYGRALAKYLVDHEQVVKEVNPALSFLERKSQVMIQKNDSWDAECVARILVNKFNQLPDAKPNDLFWSIQQLVSRRNALVEAQSALKNQLHIQLNHHYPSYKKFFSELDGKTALAFWQQYPSPSCLEGTNIKRLTAFLLDVSNNTCSVKKASEILKLVKEDGHTMKEYQETRDFLVRSIVRDIEFKKTEMKYIERELKQLVKLLDYQLETMPGIELVTASALIAEIGDVRRFPNANKLARFAGIAPVYFRSGGKGKVHKSKQGNRALHALFYNLAVQQVQVAKGSKLSRNPVFHAYYQKKLKEGKTKGQALVCIMRRLVNIVYGMMKYKAAYELPVVEEKEVVQ

SEQ ID NO: 169097 - protein, 343 aa, unidentified
MKLHVLGIDLGKTVFHLVGLDSIGKVVIGKRCSRRQLLALTANLQVELIGMESCSGSHFLGRALREQGHQVRLMPAQYVKPYVQTNKSDYLDAEAIAEAVQRPRMRFVPIKSEEQLDLQALHRVRERWVMRRTAVVNQIRSLLLERGLTLPKGRSHVEQMLPRILEDAEVKLSGSFRVLLSQLGVELGQLGERIAEMDGAIEQRAREDDACQRLTTIPGIGPVTATALVAAIGNGAAFRKGRDLAAWVGMVPRECSTGGKQKLLGISKRGNVYLRRLFVQGARSVLQYHQKQAPALAAWLKQLLARRHQNVVIVALANKLVRTAWAVLCTNQPYRAITPMIDL

SEQ ID NO: 169098 - protein, 388 aa, unidentified
MEPASIHPTAVRTDLGAIFVSLELSRSTWLITSLSPGSGEKMSKHVVAGGNVAELLDRFEQLQQKARLRTGKLFPIVTIQEAGLDGFWIHRVLEAHGIESYVVDAASIATSRRRRRAKTDKIDGEALTRTLLAFKRGEPRVCAMVRVPDPKDEDRRRICRERKVLIAERVRHVNRVKGLLFAQGVSGYQPVRKDRRQRLEELQTGDGRELPKHLKAQINRELDRLELLLEQIAAVESERNSLLSMDEQPAVEATSPAAMLLSLKGVGAEFAAVLWTEALSRHFDNRRQIAAYAGLTPTPWMSGTIDHEQGVSKAGNPRLRTTMIQLSWLWLRNQPASALSRWFVDRVQSNGGRLKKAAIVALARKLLIALWKFVTAGVVIEGAVMKTA

SEQ ID NO: 169099 - protein, 350 aa, unidentified
MNVNHYIGFDVHKKSINYCVKMADGQIVEEGRLRATHDALRRWAGRRQEPWRGAMEATLFSGWIYDTLKPFAAELQMGHPAMMKAIGASKKKNDKIDSRKIADLVRCNLLPACYVAPAEMRELRRLLRYRNVVVAQGVRMKNKMSGLLMEVGAEYNKQQLHGKKYFTELMGNLEEVPESVKDLLRLSRGALEMFEATQRQLLDRLRKEPRLVERVAELESIRGVGEVTALTWALEICDPQRFRSIADAESYCGLTSALDCSADKQHRRPISKQRNGHLQTVLIEAAKLAPRWNPQLAQVHERELERGNRNRATLAVARKLVAYLLAVDKSGQPFRIRNQPAPTTEVATAA

SEQ ID NO: 169100 - protein, 358 aa, unidentified
MSDTLNPGPVAGTIVGLDGHLRTCNLCGINTAGVVLRRFRNLPTQAEALTEAIGCFPRPVILIVEESTLAHWFLTLFRPRVDRVVVVDPKRNRLISEANTKSDPLDAYRLADLFRIGAVREVFHSTDQNRVAFRRAVQQYEDITRESTKLKNRIRKTYHLYGRNPSALVIYHPHRRLAEMADLPEDGRFRLQAWYRVLDEMAACRKEALRRIRTLSRTFEEVAWFQTIPGAGILTASQLSAYLQTPDRFQRKSQVWGYGRLAVVDRSSDGQPIGRQHLSRQGIGVLKAASRRIFDTALRKNGGKNALAQYYFRLLGRINNPVHARLTTQRRILELAWTMWKRKEAFDPERFLKNLQRV

SEQ ID NO: 169101 - protein, 313 aa, unidentified
MEPCWVGIDVAKDASVVAVIPQGDQWTVAHTPTALAELAQRLHVLRPQRIVLEASGGYQQPVVSALAAAELPVAVVNPRQVRDFARATGQLAKTDILDARVLAAFAQVIKVELRPLPDREARTLRALVARRRQIMEMLTAERNRLLQTEEAIRPSIRAVVEVLERRGNDLDDDVDQRLRTSPLWREGEDLLRSVPGVGPVTARALLAFLPELGRLNRKEVAKLVGVAPLNRDSGRWHGQRFVCGGRPAVRAPLYMAALGATERNPVIGAFYQRLLTAGKPKKVALTACMHKLLVILNAIVRDRQRWSAASLTS

SEQ ID NO: 169102 - protein, 333 aa, unidentified
MNKFKHFLGIDVSKEFFDAVLILEEKKEHPVHNQFINNYKGIRALVKWLRDMGATGENTLVCLEHTGMYGKLIIKYLIGFNFSLWVEMSLRIIKSIGIQRGKNDKIDAERIAFYALKNVESAVIYRAPRQVVDKIRTLLSLRDKLTTNKLRLLQYDNEMVDFDKELTKISTKFNKNTLAGIKKDLLSIEKQLDKFIKEDENLNKIFNQATSVTGVGKITALYLICFTNEFTMYSNPRQLACYAGVVPFEHTSGKSIKGRAKVHYMANKTLKKHLHLCAMAATNYDPEIKQYYQRKVEEGKSKMLVMNNVRNKLIHRICSCIKNEKLFEVKKID

SEQ ID NO: 169103 - protein, 348 aa, unidentified
MTEAYDGRQVVGMDLHRRRSVLVRMTEDGRKLGTARITNSPAALRAEIAKAGENPRVVLEATYGWYWAADVLEEAGAEVHLAHPLGVKAFSYRRVKNDERDAADLADLLRMGRLPEAWIAPPEIRELREITRYRHKLVKLRTSVKDQVHGVLAKLGIPVTCSDIFGVHGQAWLDELPMPQPYAGKVASLRQLAGELGAEITLLDQVIADLLAGHEGYAAIQQLPGIGPVLAAVIVAEIGDIRRFPGPGQLGCWAGLTPRHYESDTKVIRGHVTKQGSRILRWAVTEAIQRQPAGSRPREVRDAIIARRGKEARNIAKIAAARELLTLVYYGMRDGRVRRLAAPRRPAA

SEQ ID NO: 169104 - protein, 399 aa, unidentified
MFYCPPSNIRVSVDVGCKFHQVAVGLSSGEVLDEFSISHQPEGFKTFFAKLEKLEREYQCPVQVAMEGYNGYARPLDSMVLARGWQLYNINNLKLARFKEIFPGAAKTDVIDARRGLELFQLQDHLPMAKDVLQVVAEPPQENKMLKRFSRRRRRLVNERVRVTNGLQTDLQAVCPSLLALTGEAGNLWFLRLLTCTDDLQKLQRMQLKTLRKIPGIGRKYSDLVVQWQKQAQFSAETEWVGEMIQDDATRILELSRQIKALEAKMATVAASSQIAGLLTTIPGFGPICTAELSGEIGNASRFAKESSLALYLGMAALDNSSGKYQGTKTPRQVNRRAKAAMMVAVDRHRKQIPVSQRYYEKKRAEGKGHNQAIRALGRHLCRIIFKMLKEQRAYMPPN

SEQ ID NO: 169105 - protein, 392 aa, unidentified
MQISVGIDIAKEIHWVTAIDAGGVVQVDRKLLNTPAGIATLVDELTALRGTVRIGLDVIGGIAGLAEAMLADAGFALVHVPGIAVNRARQGTVGGENKSDPRDARTIAEQVRTRSDLRPIEPATELDLEIRLLVGRRSDIVQAQTQRLSRMRDLLVGIFPGLEACLDLKTKGPLHLLTKFVTPAELRDAGKKRLVRHLQAAGGVPKVEDLADRVLTVATEQRIAVPAERTTARLIRELAVEALASRTRLTELDRELEALLARHPDAALIRSLPGMGAVLTAELIAEAGNLARFRSADALASAAGMAPVLRQSGRSRFLRRPSGGNKGLKRVFYQSAFCSLAHDDSRAFYERKRREGKRHHQAVIALARRRVNVLWAVVHSRTPFQTAFKTAA

SEQ ID NO: 169106 - protein, 405 aa, unidentified
MNAVGIDVSKGKSMVAVLRPFGEVVTLPYSVPHTASELSELANSLKSLDGEVRVIMEYTGRYYEPVAKALHEAGFFVSVVNPLLINQYGNNSVRKVKTDKADAVKIAKYGLDNWAELREYDPMDTTRQNLLLVCRQYNLYMKNKTAFKSNLIALLDQTFPTVHKLFKSPVRDDGSQKWVDFATTFWHCECVCSISGNAFIKRYRKWCKRHGYNFLPRKAAEIYVAAQEQFPTLPKDDHIKLLVTQAITQLNATSRTVEALRFEMQSLAQSLPEYPAVATMYGAGDTTAAQLIAEIGDVRRFKSKQALSAFAGVDPSPNQSGTRETKSVSITKRGCALLRKTLFQIMDCHLRTKPNDEPVFQFLDKKRTEGKPYYVYMTAGANKFLRIYYGRVREYLTAPLSGDES

SEQ ID NO: 169107 - protein, 391 aa, unidentified
MIFVGIDVAKDKHDCFILNSEGTVLADVFTIANNRIGFETLLSRIQSCSQGESKIKVGLEATGHYSYNLLGFLLDSGLATYVINPLHTNLYRKSLSLRRTKTDRIDARTIAMMLMSDVDLKSYSNTAYHNEELKSLTRYRFDKVKERAKLKSSVARLVNILFPELEKLVSSLHIAVVYALLSNYPGASYIANANTEELAETLCTASKGRYTKSKTAKIQVAAGVSIGSKMPAKSMELKHTIALIRELDKEISEVESAIDKITSQMDSPIFTIPGIGRHMGAMILAEVGDFSNFASADKLLAYAGLSPSTYQSGQLQNCYAHMEKRGSRYLRYALFNAAKYVCLWCPTFSAYLEKKRSEGKHYNVAISHAAKKLVRLIFAMQRSGKAFLADY

SEQ ID NO: 169108 - protein, 353 aa, unidentified
MKSRMESKMSSPMVIGVDIGKEVFHLVGFTADGKIAFRRRIRRLGLKDVFEKLPPCIVAMEACLSAHFVSRTLRALGHEPRIIPAIYVKPFVKGQKNDYNDAEAIAEAALRPNLRFVQEKSQDQLDLQACHRVRSRLVSRRTATINQIRAFLIEQGIAVRTGPRALRKSLFSILENRKEEISPRTAKLIRGLYDDWCCLDERIETVTGEIEILSRSEAKCRQLMSVPGVGPLISTAMVAAIGSGEAFERGRDFAAWLGLVPRQYSTGGRSILGRISKRGSKYLRTLLIQAAKVLLMRPHNWARYSFGPWLNAASERLHRNKLAVALANKLARIAWSVLRNDKAFDTHIEVAAI

SEQ ID NO: 169109 - protein, 409 aa, unidentified
MKHVIAFDVSKGKSTIVIYNEDRQCEFEGELHHTRFDFEQLHRRIEKITALDGQPPEIVFEATGVYSKPVEEFLRDHGYTYYRMNPLEASLQMASMRRHKTDSSDAHELAKTHFKVERETTYVQDTYYEQMRAITRYYDEVDKEIILLRSRMHAILHGTFPELEQLITPSSALFLNFVQLYPHPALLLAHSKTIIKNRLKSNTRKKLSLERAEKKAIVLLEAAENSYPSIKPTDIRCIQVRDYARRIADLMETKDKLVKQMVTMSEDKKEYKVLLSIPGIGDTTACRLIGELGDIRRFQNAKQINAYAGIDIMRYQSGNTQYRDRINKRGNKKLRKILYFMVCTMLMAKGKGEENHFVDYYYKLKTQPQKKHHEVAIVACMNKFLKVAFHLITHGILYDYESALPALKS

SEQ ID NO: 169110 - protein, 453 aa, unidentified
MEREEKRLEQFRQLRKEIRGSQDYLVVGIDISKDTHNALMRNTSGKILYRRLTFNNTGEGFETLLLQVEAVRVRHGLKEVVFGMEPTANYHKPLGEFLINQEKQVVLISPEAAKQNRPLLDGRWNKHDGKDCANIADLMCQGKCLYYEYPSPDLRDLRNLLSLNRKLKKLEQGLRLRIRNHLVAQYFPELDQYCHWGANEGLALVRWCLDPAVMSVLSDEELGKRLGTQGRTIAQRKRLSALKDKAQSSIGCDFGSSVEFEGQSVVKLLKEVRQTLASTQEQIEQVCLKFKEYSYLLSIPGFGPTLSAMVLGAIGNPWRFQNAAQVIKMVGLDLSASQSGKSQGAPIVSKKGKAEIRYALYQAAMVASSRDKHFVAYFTDQLRGREKEKGIKTKKRVKLAAKMLMIAWTLMKKQERFDPKYLSGQTPPMAAHNAVKTDNGRIPRVQPERDRGL

SEQ ID NO: 169111 - protein, 337 aa, unidentified
MNITTVGLDLAKNVFHVVGLDGQGHEQMKKRLSRGQVLKFFANTPACVVGMEACASSHHFGRQLRQLGHVVKLIPPQYVKGYLRGQKNDINDARAIAEAARVPGMRTVTVKTVAQQDVQSLVRLREGAIQSRTALVNRLRGLLGEYGIVAPKSVTVLRRALPEVLADASNGLSDPFRRWLERERRQLLELDAHLVELTAELTALSRQDDRVQRLQTAPGFGPIVASVFASVVGDGHQYRRGREASAALGLVPRQFSTGGKTVLLGISKRGDRYLRSLLIHGARAVVRAARRKDDRLSRWVNRLRETRGMNKATVALANKLARIGWAILRHGTRYQPA

SEQ ID NO: 169112 - protein, 350 aa, unidentified
MIILGVDAHKRTHTFVVVDEGGRKLAERTVSATEEGHVEALAWARRWDDRRFAVEDCRPVTRRLEADLLAAGETVVRVPTKLMAGARRSGRTPGKSDPIDALAVARAAIREPDLPIAHLDCATRELRLLVDHREDLVAERTRIQSRLRWHVHELFPGLEIAPASLGRHRHIAALEARLVDATGTVAEIARELLKRCRELTLRANELERQIGRLVRVLAPTLLGLPGCGGLSAAKIVGEVAGVLRFRSKATFARWNGTAPIPVWSGNADRHRLNRGGNRQVNAALHRIAITQQRGVGSGRDYVQRRLRAGNTKTEALRVLRRRISDEVFRRLSVDEQRRATTTPNAIPLAA

SEQ ID NO: 169113 - protein, 311 aa, unidentified
MNVGIDVSKARLDVAIRPSAERFSVANDEKGHEELRKRLAKSKPERIVLEPTGGYELGVVQVLVAAKLPVVVVNARQVRSFAQALGRLAKTDRIDADILAHFGEALRPEIRVFPDEALRELEALVNRRRQLVDLRACEIKRKQTAPRVVHPKLDELVAFLTEQIDDIDKELHGLIRKTPAWREADDLLQSVPGVGPVLSSTLTALVPELGRLNRKEIASLVGVAPFNNDSGKGERKRMTWGGRAPVRAVLYMATAAACRFNPAIRCMYDRLIERGKPAQVALVACMRKLLTILNAMARDRHPWNAQIAAPS

SEQ ID NO: 169114 - protein, 354 aa, unidentified
MIIIGADYHPGFQQIAFVDTETGDCGEQRLEHCEGAQKFYRELASQGKKVRVGMEASGHARWFERLLEELKIELWMGDAEVIRAKRGRKPKTDREDALHILNLLLTGDFPKIWVPNWENRDLRQLLWHRHRMVQARTRAMNQLQAVALNEGLRCKKKLWRAHGREQLEAFRLAPWASRRRKDLLELVDRLNPTIAELTQAIEQEAQKCPPAQRLMTHPGVGALTALAFVLIIGKAERFQCGKQVGCYLGFVPLEESSGDRRRLGHITKQGNSLLRFLLVEAAQVTSRTLPEWRSKYMHLTLRRGRKIAKVAMARKLAVRLFWMMRKEWDYQQVMKFGSHVEQPGNRHGVQSNIE

SEQ ID NO: 169115 - protein, 341 aa, unidentified
MVMIGIDPHKGSHTAVVVDRDERVVDEVRVRTSNGQTGELCEWALAYDDRCWAVESARGLGYLVSQQLVAAGERVIDVPAMMASRVRLLGSGKSQKTDPNDARSVAIAALRHSGLAMVQTDDHVRVLGLLAKRHRDVARFKNKVACRLHALLMELAPGGLASEMTVNKAISLLEHVDVADQVTRQRVVIATELIDDMGRLEAQMKASKKRIRAAVEASGTTLCDIRGIGPIGAAMILGSVGDIGRFPTAGHFASYNATAPIEASSGDRRRHRLNPRGNRKLNHVLHIAAVTQLRYPSQGRDYYQKKLAEGKTSKEAIRALKRRISDVVYRRLLADARRSNN

SEQ ID NO: 169116 - protein, 464 aa, unidentified
MTLLAKLGKELPERYYLGLDVGYKQHVAVVISLRIFVRGDERWKHARFESFASTRAGLRRLQKYLDGFSTDPQAFLGICEPTGGYYSAAVYQYLLDHHYPMWLVDNATTGHMREQIFGNLAKTDGMDGRVMARIAYLHESVGEEFTLRLLTLPKPDDADLLALCRDSWKLHMLICRARNQFGQLMAVVFPELKTFFTHSVTSLAPVSLAAAYPTPAELAAAPEEAVQAVLKQAEAHQHAKRVAELQALARDSSGLLPDPGRAWRLAWLTEFLLHGFKAHTDLEHRIVQLLASREDYALLDPIPYSGPAALAMILALTRDVSRFHNYRQYVAYSGYFAGLEKSGTIDRTHMSRRGNRDLKRAIFQIVAPLCWFDEGDNPYKALYERKKAEGRPWYAAMPFACAALARHIYHCLKSKEPYDVAKTFQGSAPRPAAETALLDLQADLDAKFEAMDAYLCQTEGVCPP

SEQ ID NO: 169117 - protein, 341 aa, unidentified
MTLQLIGIDLAKNVFHLHGVDGSGREVFRKRVYRDELLESLRGVTPCRVVMEACGGANYWARSIESLGHKPQLIAPQYVKPFVQRNKTDWKDAEAICTAARQPHMRFVPRKSIEQQDVQNLHRVRQRLVTARTALVNEMRGLLHEYSIIIPRGRRVFTKVIPELLVAQGDALSSLTRETFYELLDEYRSLELRIDALERKMKALCAAHPICRRLMAIPGVGYITASAIVSAVGDIGVFKNGREFAAWLGLTPREHSTGGKQRLHGISKRGDVYIRTLLIHGARIALRYAHRHNDRQSRWALDLMQRKGTNRTVVAMANKNARVIWALIAKDDEYKAFPLAA

SEQ ID NO: 169118 - protein, 317 aa, unidentified
MGKFIGIDISKQTFDVCFLNNGKWIHQVFENKTTGFKKLQKILSTEDWAVMEASGTYYLPLAEYLHGIGIKVSVVNPLVIKRFSQTNLYRAKTDKKDAKTIAEYAEKYELKKWNPESENAKKLRQLYTRIEMLEKQIHQNNSQLEAFLASGFLDKSLKSEIKMTIKYLGNKKLKLENEMDKISVEQYSETMVNLQTIPGVGKQTAMMMCLITGNFENFDNYKQLVAFVGFSPRIYQSGTSVKGKGHICKMGKSQVRKLLYLCSWSAKRWNKRCKEMYERLKAKGKPEKVIKIAIANKLIKQIFAIAKSKQKYQINFN

SEQ ID NO: 169119 - protein, 317 aa, unidentified
MSQSSVFIGIDVSKNQLDVAVRPHHVFFSVTNNDAGIQDLVQRCVELQPVSIVLEATGGYENMVALALGAAGLPISVINPRQARDFAKALGKLAKTDKIDAATLAHFAQLLDPLPLPLATAEQEELSSLTTRRRQLVEMITMEKNRREHVPPHILSYIQRHIAWLQSELKQLERQINDVIKKTPMWQGKIKILQSVPGIGSVTTSILLAELPELGVLDNKKIASLVGVAPFNHDSGKFKGRRRIKGGRKMVRDKLYMATLVATRWNPVISEYYQRLLQAGKAKKVALIACLRKLLIIINTMVKKSSLWQPNLSPQTS

SEQ ID NO: 169120 - protein, 456 aa, unidentified
MPDYFFGIDASKGYSNLVMLDSSKRCVEDDFQLDDTFDGHQKLYSILSEFCVRHPKANIFAAVESTGGYENNWFNALVRFQSHLPIKTARLNPCGVYNNSRAGLDRNITDKISAENIAKYIIEHPEKVRYQQQDPLAPLRKQWGFIKMLKKQKTQLLNQLESNLYTANPEILAYCKDNTPAWVFSLLQRYPTASKLAKARKSSVALIPYVTPQKAKKLIEAAKHSVASATDETTSQIIKATVQQIRQLSKVIDAQTKAMTDKCSIPEVELLKTFIGVGDDSAVGLILEIGSIERFESSKHLASFFGLHPVYKKSGDGSWGFHMSKKGRVVPRQILYMVAMVAIQSNPLIREIYEKHTEKGMEKKAALGVCMHKIIRIIYGMLKHNKPFNPEIDRKNREKQNTQGEKKICRDKSRRYQAYDAKAPISRRQAKKREERKQSQSDNIAKCGIKAPVPVL

SEQ ID NO: 169121 - protein, 436 aa, unidentified
MFVGHRFRTDPDELDTLWARLPKDAERIEVVMEPTRNAWVALAAWFRRHGATVVMVPPEQSADLRDYYNKHTKTDRLDSKVLARLPLLHPEGLHREDSLGPGDELKRAVKIRSGLVHRRTACMARLDALLEILGPAWIAALGSDMTLTALRFLARYANPVQVKRLGKARLAAFFRRCSRQAWADERADAVIEAAATTLRLWGADGGELDFDALAADIAAEARLALTLTDEINGFDKRIGALYDKADPAGIVRSVPGAGRVCAPQILGRLGDPTRFANLAAVRSFAGLVPAADSSGQADGHRGPTKAGDSCLREALFIAADHARKVDPTLAVRYQRLMLAGKHHDSAVCTLAAVLLTRIAACLRAGTHYLLRDTDGRVITEAQGRAIVAERYTVPPEVRAARRKVTPHRHPRRNERNERAKTGVATRSKASPVPQPA

SEQ ID NO: 169122 - protein, 342 aa, unidentified
MKNTTIAIDLAKSVFEIGISHHPGQVAETHRLSREQITEFMAKQNAATVVMEACGSAHYWGRTFKDFGHEVKLLPPLYVRPYVQRSKTDRADVKGMLEAYRNSAIRPVPVKSESQQQLTSLHRVRSGWMAARTARINSARGLLREFGFAFPLGAAAISGRIRELIEDAETPVLMPLRELLNQMILEIGDLETRIKAVEKQLEGLAAQTPVVALLRTIPGIGLLTSTALVGFVGDVGRFRSGRHFACYLGLTPREYSSGSRRRLGRISKQGDAYLRTLLIHGARAVLVSAKSKSQPDRFRAWGLEVQHRCGHNKAAVAVANKLARIAWAVWKSGKPFESRPQS

SEQ ID NO: 169123 - protein, 340 aa, unidentified
MTHHNLVSIDLAKSVFQVCLFTDDIKIVSNKKVSRNKLSHQIAQLSPTTIAMEACYSAHYWGRVFEQYGHTVKLVPAQHVKPFVRGNKNDANDAIAIAEASLRPHMKFVRVKTVEQQDIQSLHRIRERFVGSRTRIGNQTRGLLSEYGLIGGAGFKALNILIQQALESDSLSALFKEEIASVYEELLDLEYRLKRVNRKLKALAEHYPLCRLLMTIPGIGFINATAIYAAIGDGKQFETARHFAVWMGLTPQQYASGEKSYTGKITKRGNRYIRKQLVHGARSLLIRAKGKKDRLSVWANTIRERRGLPKACVALAHKLARIIWAVLTRGEEFKLQTMAA

SEQ ID NO: 169124 - protein, 386 aa, unidentified
MRGKTFIPHDYDVFVGLDVSKNKISVTFSNHQGFIRSLTMPYKAEHLVNHVRKHFPDQKVAFAYEAGPTGYGLYDGLTAQAYPCLIAAPSMIPRAPGQRVKTNRLDSRGLSENLRGGQLKSIHIPSPLYRELRHLTQWRDTMVSEVRAMKQRIKSLLLFEGIDFPPAPAGSQWSLIVRGKLRKLRCSKSVRFKLDQLLESLEFSEKQAVKATKEIRYFCKNDPELSQSIKYLMTIPGIGWIVASQLVARIGDWRELNNIRQLAGFLGVVPTENSTGDRTDRGSITHTGDGRLRSKLIQASWSAIRQDAELREFYRSVCRTHARDIASRVAIVAVARKLSTRISAVLMQQRPYVVREKVHSAPLTQEETSPQGTTRRQAEPGDAKDS

SEQ ID NO: 169125 - protein, 425 aa, unidentified
MKATTDFAATIGLDWADQKHDLWIRPADGSKAEHLQLPQTPEALHQWVAKLRERFGNRPVAIGIETSRGPVISALLGYDFIVLFPVNPKALKDYRAAFSVSGAKDDRTDAMLLEEFIRLHRDKLPALEPDTELTRKLAGLVETRRRLVDERTRLVNQLHSCLKTYYPLAEILLDGKLNHPMAADFLARWPDLETLKKAEAQTLRAFFYKHNSRGAKKMEERLEAVPKAKALTTDPAIIIPARWLVGAFAGMLKPLHQAVAHLDKEIAQAMDQHPDAAIFRSLPGAGPALAPRLLVAFGTNRDRFESATEVAQFYGLAPVVIQSGNSKTIHMRHRCPNFGRQTFHENAGCAIKKEPWARCFYEQHKQRHDGKHHQACRALAYKLIRIYYACWKHCKAYDPNSYLLALEKHGSPLHKKLQNLTPKPL

SEQ ID NO: 169126 - protein, 401 aa, unidentified
MDPHLCVGIDVGCRSHRVGIALPDGSILEEFDISHSDAGFQEFFRRVEAQRRKLSLPVAVAMEGYNGYARPLDRLVQDKGYRLYNVNNLKLARFKEVFPGAAKTDPIDTRKILELFQLKDQLPLAKDAIQEVLTAPAVNEKLKRLSRRRRHLVTEKMRVLNRMQADLQAVCPELLAATNDADNLWFLRLLTFRDDLRQLARLRPSTILQIPGVGQKYTGLIREWQATAQFSGEVEYVGPMIIQDARRILELRAQIHALDEAMAELAEQSEIARRLSTIPGFGKTSIAELAGEIGTLERFASEASLALYLGMCPLTRQSGQMCTARAPRQVNTRCRAAMMTTVARHIGCVPQSRAYYDRKRAEGKAHNQAIRSLGRHLVRVIWAMLRDGRDYQIREDLHPTP

SEQ ID NO: 169127 - protein, 346 aa, unidentified
MCSLPVFVGLDYHDSSVRVCVLDTDGSELANADCANDWKAIAAFGDRFGRPVRAAIESCCGAADLAEELVSCAGWSVDLAHPGYVQRMKQNPDKTDCQDAHLVADLERVGYLPRVWLAPHYIRELRRVVRYRLQLTEQRRASKLRLRGLLREQRCHAPEGVNAWTKAWIHWVRHGAELSEQGRWLAEQHLAELARLATAIRTVEKRLEHMTANDVEVQRLQQQPGIGPITAWTIRAEIGHFDRFRTGKQLARFCGLSPRNASSGQRQADAGLIRAANPALRTVLIEAAHSLVRYDRSWQKFALRLRTAGKPGSVVAAAVANRWMRRLYHEMKTPFGELAEAVGPAR

SEQ ID NO: 169128 - protein, 429 aa, unidentified
MTCISAGVDVSKNRSTVCIMNQDGKFIMRPFLVWHSTEELDFLADTLKRLNGEVRVIMESTSVYQYPIALQLKERGLFISIVNAYEMKQFANTDFRGGKTDKKDSRTIASYGISYWYKLVEWQIPKDTYFNLDLLNRTYMNAKKHRQIILQELQHYIDCAMPGMDKELHSLNLSTKKDFMLDFVEKFWHRDEIVNMTEAEFTEVFTAWAKKKGYRPVEGKAAKIYAIAKSCIPYYPANPTVKTILQCIVDKLSGVNRTLVTIVTQMIEEAKKLPEYQIVREMPGVGDPLAARFFGSVGDIRRFKNSKALVAYAGIDSPPDESGDFSSTHRHITKKGSKVFRDTGYEIMMALRAQKRTWEKVRKNPDVYDYMLKKEAEEKPRKVAKIAALNKSLRIVYARIKELYDNMALAERAKAKTKSKTKAKTKATA

SEQ ID NO: 169129 - protein, 397 aa, unidentified
MIAVGIDVSKSKSTVAILNGDGSIRAKPFDVHHVADELQALVDYIKRTSEPPTILMEPTSHYHYPLLKAFQEAELPVCLINPYQMKKYGDTELRKAKTDKRDSLRIAQYALEKSYSLIPYTPQDQKYEDLRFLSRQYSQRISTLTVAKVQLLSLLDETMPGITTILPLKSRDPDNCVLLRFIKRFKSFDVIRKMGKTRFLDSYQVLIKKTKDRFAGSKGLAIYELVLNSVTTRGENPLSAMTQDQCVDLVSTSQKAADEINLQMRIIAETMPEYKVLRSMAGVGDRLGPIILGEIGDIRRFHSGKALNAYVGNDAPPYQSGQFESRNRHISKRGNPALRKACFEVMQALKLTKPQDDPVYLFLLKKEQEGKPYNVAKMAAVNKFLRIYYARAMELYK

SEQ ID NO: 169130 - protein, 406 aa, unidentified
MEVFVGVDAAKDVHWACAVDRDARALFSRAVANDPDGIAGLLAEIAALQAGRVRVALDLLGGSATRLCAMLTDAGLAVVHTPGLAVNRARQGMRGGENKSGPRDAATIAELARTRPDLRPDLRPDLRPDLRPVAVETGIDVDIRLLVGRRREIVVDQTRRLSRLRDLVSSLFPALERRVDVTIKAGLVFLGLFAAPRELRRASPARMARQLAKAARDLRGVDALARAAVELARAQTVDVPGAEPRARLVKDLAAEALRARETRIQIDADLAALLARHPDAALIQSLPGMGVVLTAEFVACAGNRARFHSADALAAAAGLTPVLRRSGKSRAIRRSTSGDRPLKRVFFQSAFVALSHPESRAFYDRKRAGGKRRNQAVIALARRRVNVLWAILNSRQPHRENIKLAA

SEQ ID NO: 169131 - protein, 355 aa, unidentified
MNKINSNFEGQTIFAGMDIHKSSWNLGIHLNDMFVRNVHQKPSPAIMANYLKQHYPGANYKAAYEAGKFGFWIQRQLTALGVECLVVNPADIPKSQKDSLQKTDPRDARNLGLRLQSGVLHGIHIPDEQQEADRAFFRHRKRIWKDLTRCKNRIKGLLAFSGIDVPEQYDNASWSHNFINWLKALDCKQQSRRRALDYMISQMEYLRKELLQISNEIRKMMREQRYKKNYYLLRTIPGIGPLTAASILVELGDIKRFETFCHLNSFVGLLPMEHSSGQSENKLSLTVRKHRQLRSDLVESAWTAKRTDPAMALYFQQQIKRKDSKIVIIKIARKLLNRIRYVLINQQPYEMGIVK

SEQ ID NO: 169132 - protein, 397 aa, unidentified
MHGFEGPYDVYVGLDVGKRAHHACAVLADGSVAFRTGVDNSEAAIDRVIADAAELGTPLVVVDQRRNIGMPAIRRARAAGVEVAYLPGISANRASSLFPGDAKTDARDAEVIARTAMGVPQSLRPVPEEDDLEGTRRLEAQRADLIKDRTHQVNRLRSLPLESNPDFERRLEPEAAWCIAVLERLGGPWNVLDAGRRRFLRAASQAPRERAEAVWRSLGMATRPTERQVEAEMVLVPMLARRIREDTEQIEALEELIDDQVAEDETYRCLLTIPGVARRTATQLVLNVRLADFADHDHLASCCGLAPRNRQSGTSLNSVSSSRQGNKQLKNVLIFSCNSLLRSKGYFREYYDSCRFRGMTHKAALKATARKRMKVIYAVMRDRMPYREDALLRRQTL

SEQ ID NO: 169133 - protein, 374 aa, unidentified
MRIAVGVDLHSKTAVAHAVHAGGGEPGMREAEFLDGFNREFGGVPSTPEEMRRMAAALRGREACVLLENSTKTHETYWVLTNAGCKVTVAFAADLYRITKSVKKTDRNDAMELAAYMRRRMNGENEFSECYMPSLDWMMKREICRTVFWEKRHLADLKRRVRSHLLLHGITLSREYSDIFSRKATEEMRRTKDPCLLIAISEAESIKKRTDDEARLVQHLFSKDRMYGMICSIPGFGSISAAYLTSLIVDISRFRDSSSFSAYFGIVPKVRNSADSSPRCSTTHRGDEDARRLLCQSAMVHIRTVEDSVVTRMYHRLTGNGKAHKEALVACARKLTTVVWSVVRSGLPFTDDAGLLARADGAIEGVEEEMAEES

SEQ ID NO: 169134 - protein, 322 aa, unidentified
MSVSVLGIDIAKQKFDAALLVDGKTKHKACKNSAEGFETFRLWLEKQGIQKVHACLEATGNYGEDLAIYLHEAGHIVSIVNPARIKGFGQSELIRTKTDKIDAALIARFCLAMKPGPWSPPSPEIRSLRALVRRVDSLIDMRSQEKNRISTAHKSVSLLIKEHIAYLDQEIEKIRKQIADLIEQNPNLKRKKDLLDSIPAIGKATIPHILAELDDLEKFNHVRELVAFIGLAPKETLSGSSIKGKPRICKIGHARLRKALYMPALVSIQCNPVMIAFYNRLKDKGKNGKVIVCAIMRKLVHVIFGVLKSGKMYDPNYKPISA

SEQ ID NO: 169135 - protein, 311 aa, unidentified
MTDDTIGIDISKATLDIHRLSDGKMMSLSNCPAGFKALSRFCAQTPVTRVVYEATGAYHSGLERALGAHLPLVKVNPLQARRFAQAQGVRAKTDAVDAKMLAVMGDAFALEPDETATKIQHDLRELRAFRSGLIKDRTRIMSRLKTQTLSITCRQSKARLGHVDKQIAEIDAEVDRLINSNDTLAHSMKILRSIPGIGAVCASTILIEMPEIGSMDRKQVACLTGVAPMTRQSGQWRGKSFIQGGRKVVRDALYMPALVAMRHNPDLKAKYQAMIKAGKPPKVALTALMRKLIELANALIKANRNWVKKAA

SEQ ID NO: 169136 - protein, 462 aa, unidentified
MKRKAKSEATHSGMAVVNPNAAAIDIGATMHVAAVGADRASDPVRSFGTFTADLHRLADWFAECGVKTVVMESTSVYWIPIFELLDERGFEVLLVNARDSKHVPGRKTDVSDAQWLQRLHSYGLLRASFRPKGEIVELRAYLRQRERLLDTAASHIQHMQKAMTEMNLQLHHVVSDITGATGMRIIRAIIAGERDPAVLASMRDTRCHSSAEVIEKALTGHYRGEHLFVLEQALALYDVYQQKVAACDIRIESVLKELSSIRGRKEDARADGSGSSRRRSRQSNGPDFDVGEALHSLLGKDLTRIHGIGPYLALKLVSECGDDLSAWPSAKHFTSWLCLAPGNKISGGKVLSSRTRRSGSRAASLLRLAAVTIGRTETALGAFYRRLSARAGKAKAVTATARKIAVLFYNALRHGMDYVDPGASYYETRYRERVVKNLHRRAKAFGFVLQAADVPVPEQAVS

SEQ ID NO: 169137 - protein, 302 aa, unidentified
MDVGKANLDLALDGQVGITRFANDPSGIAKLVQRLQASNIDRIVAEATGGYEEPLLEACCDAGLWIARVNPRQARDFARATGELAKTDAIDARLLALMARTFGDRLRRHVAPEAWQRELRDWLRRRGQVVVLIQAQKQQAAMAPPAVRKLVARTVAALGRELAEIERKMKALIQEHATPALRSSKGLGPVFQATMLALLPELGHLNRKEIAKLTGVAPMNRDSGQGKGKRRIRGGRSAVRVALYMATLSAVRWEPMMKAHYQQLRERGKLAKVALVACMRKLLGIINARRRDELRAEATALA

SEQ ID NO: 169138 - protein, 340 aa, unidentified
MTITTVGIDLAKNVFAIHGVDQNGKTVLVKPKVSRAAPPELIASLPPCVIGMEACSRAHYWIRLFRQYDHEPRLMAAKFVSPYRMAGKSGKNDATDAQAICEAVCRPHMRFVPVKDESQRAMQCLHRTRQGFIEEKTATYNRLRGLVSEFGVIAPQSTDALRHTVSEQKGSLPLQVRQCVDDLLEHIERIEENMAEYDRILSGMAKADHRSQRLMELKGVGPTTACALVASIGNAHDFKNGRQLAAWLGLTPSQYSSGGKSKLGRITKAGDSYLRTLLVQGARSVLIDADKRTDSFSRWVCTLVERRGYWRAVVAIAAKNARLCWASLHYGDDFRLYSAS

SEQ ID NO: 169139 - protein, 336 aa, unidentified
MKLTVIGMDIAKHVFQLHAVNANTGEIERIKLKRSQVTDFFAQRERSLIAIEACGSAHHWARELQKLGHEVKLISARSVRPFVLRNKTDAADARAIWTAIQQPEARMVAIKSESQQAILALHRMRAQLMKFRIMQTNALRGLLYEFGEVLPEGYREFAERISGALAKIADRLPAILIDSLREQWARAQSTEKEIAALERRLKVALRENQECQKIAEIPGVGLLTATAAVAAIGDAKTFRSGREFAAWLGLVPKQTGTGGHVRQLSLSKRGDTYLRTLLMHGARSVIIKGSRTAWLDGLLQRRPFNVVVAAVANKLARTIWAVLARDSRYTPPVVAL

SEQ ID NO: 169140 - protein, 393 aa, unidentified
MIYVGIDVASEKHDCAILDREGNALCDVFTFANSRDGFDTLISKLFLFSETKDFSDIEIGLESTGHYSNNLVNFLHEKRLSVKVFNPLSVQRLRKAQTLRRTKTDKTDAKFLACMLFSDDSKPYEKSVAQMDELKTLTRHRARLVKETSKHKQHISRLITIVFPEIQTVFCSTSLVAVRELLMQFPSAETIAKADIRKLTNLLWDASKHRFSRNKAEEVRNLARSSIGTSNRGTSFELRQHLQSVDFLKQQIKELEAQIKEIMLELNSPILSIPGISYTLGAVILSEVGDINNFATPSKLLAYAGLDPSCYQSGKFNADNTPMVKHGSSYLRFALIQAAMCASRNAPEFKNYFAKKTAENKHYFVAASHTAKKLVRVIYSLLKYQKQYEFQAG

SEQ ID NO: 169141 - protein, 407 aa, unidentified
MICVGIDVSKRKSTVCFMAPGDKIIRRPFDVKHTKEELQPLVDEIRVQAKYDEIKVVMESTGVYHLSIAYFLQQNGIFVSVVNALKVANFNKAENFRHTKTDSIDSTNIARYGIAYWAKLPQFDLNGDKYFLLKRLCDAYLNFSEERSRILLQLQSQLEQTMPGIFDLFGGFDINSGKDKLLDFLERYCHIEDIIAKSEAEFVASYREWAKEKGYRSNESKAATIYAQAKNGIPSIPNNPIVRETIMWYVGLLRRADEALMASLTRMEDIAKDLPEYELVGEMGGVGRVTRVALIAQIGDVRRFKNKHSLICFAGLTPSIHESGKFRASQNHIVKKGPARLRKVLYQVMMSLVMHKIPKDDAVYRFIKKKEAEGKYKKVAKVAGMAKFLRIYYGRVMHLYRDLGLAA

SEQ ID NO: 169142 - protein, 369 aa, unidentified
MKSSVAQSAGPIHLGLDVSKNKFAVGILRWGEQVPDVETIINDEASVRRLVDRFPERGQLRVCYEAGPTGFGLHRLLTSMGVACEVIAPALIPKAAADRVKTDRRDCQRLARLHRAGELVAVRVPTQAEEAVRDLCRARADLVADRTRTRHRLSKFLLRHDRVWRQDAWTLKHEQWLTGQRFDEAALQSTYGHYRAVLAARDAELAAIEADLAHWYTHGPFTDAVTRLAAYRGIARLGALSIASEVGDWRRFPAARTFMGFTGLVPSEYSSGQSVHRGRITKAGNAHLRTQLIESAWAYQHRPSLGVVLRRRQDGVDPATAARSWTAQQRLCARFRRLSARKTSRNVVTVAIARELAGFLWAEMTATGS

SEQ ID NO: 169143 - protein, 455 aa, unidentified
MTRDKKKQKAIRVNEEMPVMNPNAAGIDIGSTEIWVSIPPDRDEQPIRQYETFTRDLYAMADWLKQRGIESVAMESTGVYWIPVFEILEGQGIHVVLVNAKYAKNVAGRKSDWLDCQWLRMLHAFGLLPASFRPAAEIAVLRSYLRHRQMLIDYAAAHIQHMQKALTQMNVQLANVVSDITGTTGMQIIRAILKGERDPHRLAAMRNYRTKNDEDTIAKALEGHYEAQHVFALKQAVEIFDFYQQQRLACDQEIAQHLKSLESRIDVDSHPIQPARAQKKNRRNSPGFNCRYEAYRISGADLTQIDGISESSALTILSEIGTDLTPWKTEKHFASWLTLCPNNRISGGKILQRRTRKSSNRVHDVLCVCAQTLLNSRSALGAYARRMRSRLGPQKAIVATAHKLALLIYRLIRFGKDYVDIGQDAYEHQYQQRTLKSLARKAKEFGFQLVALTET

SEQ ID NO: 169144 - protein, 322 aa, unidentified
MLIGIDVAKAELVVAARPSGERWTVANDEAGVRALAARLAAAAPELVVLEATGGCELLAAAALAAAGLPVAVVNPRQVRDFARATGQLAKTDRLDAGVLALFAERVRPAARPLPNAEAQALEALLTRRRQLLEMLHAERNRLGQLAGRGQRAVAKSLTAHVAYLEREVRATDTDLGAMVRASPAWRERDDLLRSVPGVGPVLSLTLLAELPELGRLSRREIAKLVGVAPLARDSGTLRGRRFIHGGRASVRAVLYMGTLAATRSNPAITAFYGRLLAAGKPKQLALVACMRKLLTTLNAMARTGAPWRHDPASLGLDPQHSC

SEQ ID NO: 169145 - protein, 394 aa, unidentified
MTDLYVGIDVSKDCSSAHGIDAKGRSNFSLSFSMDAEGFAELWKAIMGYCKNLSEVMVGVESTACYHINLYSFLTAKGINAVVINPLLIANFAKLSLRKTKTDKKDALTIARFLLVHGDTVSQLSPSQDLQDMRDIARERESLCNMISAFKVEMKRLLQSTFPELENLCDITTKVMLDFLEEFPSARLVKAAKPKAIQQALKRKGVGTRLTYTAEDIIKAARKSVATLSPAKELILKGKVATLRHLQQRRDELTQALTQYCKSTMLEDLEIITSIEGIKRATATTFLAEIGSIGNYASHRCLIAFAGIDPTVYHSGKFEGTSRISKRGNRHLRRVIWLMTVNVIQHNSTFRNYYLKRKAEGLPFKKAVFATAHKLMRVIFALLSQRTQFKEVCA

SEQ ID NO: 169146 - protein, 444 aa, unidentified
MIGPQVSKVKLSTQPFGDRPTMTKRSSNPTDAVLVAIDMSKHRQEVLIERPEGGPRRRMTVMATKADYDRLATDLSDIGRPIIVGFEATGNYHRTLAHRLLSAGFELRLISSVALARTREALHNGWDKNDSKDAQVILHMLRIGATQRYVDPLAAGINDLQEMSKTHEAISKAKTQTWHRILTHYLPLYFPEIERFAGNSRSDWFLALLERFPTPASMTVLGQETFSREAWDLVGRKVSKARLINDIYETACASVALPVDEDSVSIAMFRMVIAQARNLIRQRDEIERTAHAMLAENRDYQLLRMIPGIGPINALTILAEAGDLRRFSHHRQFLKFCGLDLATRQSGTFRGRTMLSKYGNARLRRTFWMAAQVAARQRNNSFRDKLGRYTAGHADDADRRRKAMTALTAKMARVAHAVIKTGTEYRPFLERSDARWKDPSLQVP

SEQ ID NO: 169147 - protein, 415 aa, unidentified
MKSSSSTEFAAFVGIDWADRKHDVCLQAAGSDKRERSVLPHRPESISQWAQELAERFCGRPIAVCLELAKGPLVYALQRYAFLVLFPVNPTTLAKYRETFCVSGAKDDPSDAEFALELLLTHPERLTRLHPQSTPMRVLQQLVEQRRALVDDVRRLTNRITDALKQYFPQALEWFRDKDTVVFCDFLTRWPTLKQAQRARQARLRAFFQEHNLRYPHIIEQRIQAILAASALTSDPAVIEPNRLLIEVLVQQLRALLHAVERFDHEIAELAPTLPDYAVFNSFPGAGPVFAPRLLAALGEDRERYPTPAELQKYTGIAPVTERSGNKCWVHWRLQCLKFLRQTFVEWAALSIPHCYWAKAFYEQQRARGSSHQATLRALAFKWIRILHRCWQDHVPYDEAKHLNALKRRGSPLLN

SEQ ID NO: 169148 - protein, 412 aa, unidentified
MDRATYGLDIAKNVMQLHWVDGETGEIGRRKLGRARRGEFFAQRQPARVAMEACGSAHHWARVLGGLGHHVELLPARQVRAFVRSNKDDAADARAIWLAAQHSDIRRAPIKTVEQQAVMSLHRARSHWVSVRTATINMLRSLLYEFGVVLPGGKKASLETISARRAEIDDQLPQLMRELIDLQLETLKGVERSIDQLEAQLVAQQRQLDPARTLREVPGTGVLGATALAATLGDASGWRSGREFAASLGLVPAHSGTCKTWMGHLSKRSDPYLRTLLIHGARAVVTSTKVRPAWVEQLMQRRPLNVAVVALANKMARTGERTNRGGNSAKWLQRASAGGLDQQPETTTYRSGCRKECVSRVDEVMAKRSDRRPGKAGSRARASLVQSPPQEISTGLANDHQGQQPACSELHQ

SEQ ID NO: 169149 - protein, 371 aa, unidentified
MEGLSPLLRRVAGIDVHRMLHVVTVLIEQPDGSMVKHSREFGGFKRDCRALAQWLAELQVELVVMESTGIYWKSVYAHLENAGITAWVVNAHFIKHVPGRKTDMLDSEWLAVLARFGLVRGSFIPPKDLRELRLVSRYRRKLGAMCASQINRLHKMLDDAGIKLGAVVSDLHGVSARAMVLGLIEGQSEAVLLSHARGALKRKTEELAASLDGDLSERHLFVLRHLSDSIDEMQRQLADIDAYLMRAMQPYAWAHSLLQTIPGIDQTAAALILIESGEDMARFGSPERLACWAALSPGNNESAGKRKSGRTRHGNNTIRFILCECANAARMTKSTLASKYRSLMVRKSHKKAIVAVAHKMIRLIYILLSRR

SEQ ID NO: 169150 - protein, 329 aa, unidentified
MSYGGLDVHKDFVQACWVNQDNQVVREKRFETTPAGIQALCACAQGSQCVVESSTAVYPVYDALQDARVQVHVAHPFRVKAIASAKVKTDKVDARTLAQLECANLIPEAHLPCKQTREWRELIQQHIVITNETTRIKNQTRAKLLKKGIRITNPFTKKNQAALLNESTPMTKLALEQAFQRLRFLQQQRKTVDELIESEAQLHPDAVLLKTLPGCGWFSALLLASAIDGVARFPDAEHLISYAGLAPSTRQSGNVTRTGHISKQGNSKMRWVLTQIAWRAVRQSKKFRKKFIKLGRKKKKTIAVIAVARKLLTVAYFMLSRREVYSEMA

SEQ ID NO: 169151 - protein, 342 aa, unidentified
MITTNNVARMGIDLGKNMFHLFAVDETDHPLLRKQLSRKQLLAYLANVKPCLIGLEACGGSHYWARKIAALGHNVRLMSPQFVKPYVKSNKNDYNDAEAICEAVGRPTMRFVAVKTVEQQDVQALHRIRQAIVKARTAQANQIRGLLGEYGIVLPEGIAWLRRRIPELLEDGENGLTTRFRGWLSEIYQELRALDKRVQQCTREIVKLFRTNEACQRIGTIEGIGPQTATALVSAYGQAREFSSGRQFSASLGLVPRQHSTGGKPRLLGISKRGDTYLRTLLIHGARSVVRHAANKSDPRSQWIQRLVAERGTNRAVVALANKNARIVWALLSKGDQYHAAV

SEQ ID NO: 169152 - protein, 372 aa, unidentified
MYYNTIYVGMDVHKSSFTLCSYTIEAEKASHFQRTEADYKKVLKYLEFLRTVYGDDARFVCGYEAGCLGYTLYHQLTEHHVECVILAPTTMLEQRSRKRIKTDKRDAEVIARCLAQHNYSAVHIPTATDEETKEYLRMRNDHKLALKRIKQQILAFCLRHGHIYGGKSNWTISHLKWLKELELNSMHREILDEYLLTYTTLTDKLERLDSRIEEIASKPEYNESVKKLSCFIGIKTHTALSTLVEVGDFHRFATASKFASYLGLVPGEDSSGDDQTRLGITKAGNRHLRLLLTEAAQCYARGQIGYKSKALKARQSGNPPEIIAYADKANERLRRKYYKMVLQERKTHNVAKTAITRELACFIWGMMTDRIA

SEQ ID NO: 169153 - protein, 485 aa, unidentified
MAKRKQSNFERINLERMNRKQRRELGQRLEKSDPGLEIVHPHAAGIDVGNESHFVAVPGNRDPQPVREFGCWTGDLVKMAAWLKGCGIETVLVQATGVYWIALKDIVEQQGIEVVVANAQHTKNLPGRKSDVQECQWLMKLHTYGLVRGSFQLAEDMQGVRAVWRLRGRHVEEAARSVQHMQKALTQMNVQLANVLSDISGKSGQAIIGAILEGERDPGKLAELCDRRVQASTEEVAESLRGNWRDEMLFELSQARESYRFAQQQIQSCDRKLESYLKVLPTRQVEIMLPAPPVPSPATPVRARQAPRKQGNTPEIPGMRDELVRICGVDLTTIDGISIVTAQTILAEIGTDTSRFRTEQAFVSWLGLAPNRDISGGKVIRVVRRKVPSRTSTALRLAATSLKSSDSYLGARYRHLQRQLPSKASAVKAMARYLGVLVYRLMTKGQAWVDQGAARFEQKRKALNLATLQARALASGYRLVPVTGS

SEQ ID NO: 169154 - protein, 339 aa, unidentified
MVAVGVDTHKERHYAAALDQLGQLLGERTFAASAVGYAELRRWAESTATGHKLVFGVEGVGSWGAGLCQHLQHSGHAVVEVERPRRRDRRAGKSDRIDALTAAKCALNNENVSIPRRRGTLTAIRALLIARRSAVAERTRLLNQLQALNATAPIALRDRIGEGTGKQLERRIMSMRARPRADVETRTVFAVMRDTAARSRALEADARRYENDIAELVRSLDPTLLDEPGIGPISAAKLFACDPARFKHEAAFARCNGTAPIPASSGKTVRHRLSRGGDRQVNNAIHTIAIIRAKHQPETRAYLERRIREGKTRREALRSLKRHISRELYHRLVPIPLTS

SEQ ID NO: 169155 - protein, 341 aa, unidentified
MLYVGVDAHSETSWITVMDEKGKVLKRREISSSRKAVKETLGRYRQPMKATLEASYSWAPIYDWLDEVTDDVVLAHPAKVRAIAEARIKTDKIDSETLAHLLRADLIPQAYAPSKDVRAVKRVLRQRMFFVRVRTMLKNRIKALLAQHSIQTPEVSDLYGKSGLQWLRDLKLPDPDGRLLFEDLELLAVLNERIGATESLIKDLSAGDEAVNWLSSLPGIGEFFSVLVRYEVDQMARFGSAKKFTGYTGLVPSTYASANRMVHGRLTKQGNKWLRWAFIEAVTPAIRKSPSLRRYYEKIKVRRGAKDARTATARKLAELTWTVWTERRSYVESARPRKGKN

SEQ ID NO: 169156 - protein, 374 aa, unidentified
MKEKVRYLGLDVHAETIAVAIAEPEGEVRSLGTIPNCSESIRKLIKKLGPAEKLRACYEAGPTGYVVYWLLAELGVHCDVVAPTLVPVKAGDRVKTDRRDAEKLARCYRSGDLTAVWVPDEGSEALRDLVRAREAAKQDELRARHRLGKFLLRSGQRPPSGVKPWTRAYLIWVAQLRFTQIAQEATRQDYLHEVEHMRGRVTRLEQAITEAVKLASPALQQVINDLQALRGIAEISAVTIAAELGQVSRFDSARQLMGYCGTVPSEDSSGRRTRRGSITKTGNAHLRRIVVEAAWSYRRPPCIWYGLRRRQESISEEAKETAWKAQHRLHKRYMKLGAAGKDQRKIVTAVARELLGFIWVIGTRAETVASQRAA

SEQ ID NO: 169157 - protein, 384 aa, unidentified
MKLIGIDIGKNKHFFCVMDQQTGEIISQPVSFSNDKEGFDFLVQEIKSYPKDSILIGMEDTGHYHFALLKYLLDLQYTVALINPKTTDFNRKMQGGITKNDKLDTINICDVLDTPERKKQYRITKVNSFDLYEQKQLTRHHHNLKEEENVYKNRLQKCIDIVFPEFNKLFNSKYGIVYMNILKMFGSAENIANTDIRTIRKCFEIEGRVNRISLTPERLKECAISSIGISSSAEVIQIKHLTAQIELIEEQLTEIDKKIEEFSIQNNSPILSIPGISHFSGTSILAELGDISNYSKPSQIIKFAGVAPLHTAITKKGSKYLRKTLYQIILPVIRHNPVFNKYYQLKISQGKGHRCAQGHCVRKLLRIIYHLLKTNQQFDPQLLR

SEQ ID NO: 169158 - protein, 323 aa, unidentified
MQGKVSFQEDAMPVVYAGVDVSKEWLDIHLHPLGESRRFSNDKTGIRQLKRLLARHRPKSIVMEATGKFHRPAHRSLWLDGFAVAVVDPLRARMFARACGYLAKTDRLDARFLALLAESLRPPADTPPSPHIEALQELVNARSAAKCDITALQNRSKTATTALLRGELNRLVRRLEQHVERLDKEIERCVGEDPQLCRKAEILTSIPGIGRVTALALMAGMDELGSCSGKQAAMLAGLAPIANDSGARTGRRSIRAGRPAPRRALYMAALSACRYNPALARFADTLKAAGKPAKVILVAVMRKLLVLANCLLSQDRLWTPTPP

SEQ ID NO: 169159 - protein, 344 aa, unidentified
MQITTIGIDLAKTVFQIHAVDADGATVIRKRLRRAEVLSFVSGLEPCLIGMEACATSHYWARELAKFGHTVKLMPPAYVKPYVKRGKNDATDAEAICEAVTRPNMRFVPVKSADQQAVLMLHRTRALLIRQQTMLANAFRAHLAELGIVVSQGIRHVRALTERVFGEGADTIDLPALARTALRPLVAQLMELRLQIKTIEKELLAWHRTCQESRRLETIPGVGFITATAIAGTVTDPSHFRSSREFSAWLGLSPRQNSSGGKDRLGRVSKMGNGYLRSLIVVGATAMIRYAREKGPVSAKWINALLEKKPARLVSVAVANKTARIAWALLVRKEDYRAPMPVAA

SEQ ID NO: 169160 - protein, 310 aa, unidentified
MYVGIDVSKKQLDVAIRPSGEQFSAKNDAAGIGRCIETLKARAPRLVALEATGGLERHLVGELAMAGLPVVVLNPRQVRDFGKAINRLAKTDRIDAQLIAHFAEATKPEPRPLGDEASRQLAELLTRRRQMVEMLVAEKNRLAAANSAVVKRKIANHLHFLKVELAEIDDDLDQQIKESPLWREKDDLLRSIPGIGPTTSRTLLAGLPELGKLDRKQIAALVGVAPFNHDSGTLRGQRHIQGGRAHVRTALYMAAVTAARCNPVLKDFYKKLRAAGKPGRLALVACMRKLLVVANAILASGKLWATPITV

SEQ ID NO: 169161 - protein, 379 aa, unidentified
MDAHPTMFSAATLEGRDAATARVAVVHDRIPLEQLDRWLERHVRSGDVIILEASGNSFAIVERIRAKGHKAVVLESASVGKIGRAYCATDKLDAIKIARVWLSGLAHVVWTPDEKSAARREVFFSYRNSVKDTTRARNRIWAFLNQHGLRRPRGLRMTLGCGKDRVLSLRTWTPMQQALIEDLFDALWHAEERRKKFKAIIAQEVASEEAILQLVRLTGIRDIIAFALTAFIGDIARFRTPKNLVGYIGLNPRVSISGTGGGTGPLAHTGRSDLRALLIQAAQSVLRYGNGTAQHRWAVALKMRKGANVAVAALARKITVACWYLMNGLFTPLTEVTAQLSIKLHKIACSIGAARLKESGYASISEFQHELFQKLLSTA

SEQ ID NO: 169162 - protein, 422 aa, unidentified
MLVNRPAIGIDVAKNFCFYAAVSPTCTTFLKPFRALNTKQGLLFALGQIKKVEEAFSSKPVIVLESTGHYSQRIVHFFLKQGFEVYHINPLISHSIKNSVVRKVKTDRVDALELAKLVFVQTFRPTTMPKEQLANLKVLTRTRGHLVEQRAKSVNQLQCAIEQIAPLFPSVLNPGSLTALTLVSKFPSPCEWIEKANHRAIMNMLETLPRQGKTYGQQKYAALVACAEDAQVTGISLAAYASTIRCFASVVQSLDVEIKVIDDQIKALSEQLPEVALLRSIPGIGDTLAPIILGEIGDIERFIKAKQLVAFSGIDPSVKQSGNFIGTKNKVTKRGSPFLRHALYIASTTSVRKESKGSQVNSVIYEYYQRKIETKTKKQALGAVMNKLLRIIFSVLKNKQAFCLISPDQQVEMYQQHLKKSA

SEQ ID NO: 169163 - protein, 381 aa, unidentified
MRQVCGLDVHKDSVFACIVNEKGVVFQEKFGVLTPELEQLAAVLQEHDVDEVCMESTSVYWMPVWRVLERYVMDLKLVNPYFIKQLPGKKSDVKDAEWIATCLLKDLIRGSYVPADIIQQLRQYDRRISDLNVECVRKLGKLDAALQRCNIRISNYVATTDGKSYKEVVRLISEGVRDPAELLKVIHGRITNRVGKNVIIASLTGVISDTDIDVIRQLREEVDLAQRHKDECQSKMDAICQQYFPEQLKKLQTIPGVKGRSATAIIAEVGSDVSSFQDAAHLVSWCGLKPRNEESAGKIKARSITHGNRYLRKTLIECSWAASKTQGCYLNRFSYYQTVVRRKNKMKVQVAIARKILTAVWYVLHDNVAYRDYTPDIAPAV

SEQ ID NO: 169164 - protein, 410 aa, unidentified
MGLFCGIDWATEHHDVAVVDDDGRVVARGRVSNDAAGFAQLLTLLAEAGDSAADPIPVGIETDRGLLVAALRETGRVIYPINPLAASRYRARYAVSGAKSDATDAVLLANIVRTDPGAHRPLPADTEAAQAIRVLARAQQDAVWARQQIGNQIRDLLKDFYPAALTAFAGLSEGGLARRDARTILAAAPTPAQAAKLTPARLRRLLVKAGRQRHLDRDVERLREVFTDTYLHHPPTVENAMGIHLAALLGQFEAACTAADELAEAAIAHFERHPDAEIITSFPGLGMLAGARVLGEIGDDRSRFADARGLKAFAGSAPITRASGKKTVVLHRHIKNRRLAAVGPIWALGSLRASPGARRHFDARRAAGDWNHQAQRHLFNKFLGQLHHCLHTAQHYNEHLAFPPPLLLAA

SEQ ID NO: 169165 - protein, 304 aa, unidentified
MFGIGIDVSGENLDVAVHEQAFRQFKNNKRGWASLIRWLQRWPAKQVVLEASGGYEQKALDALHEAGLPMVRINPGRGRSFASATGKQAKTDRIDAMVLAHMADVLKLTRYVPPAAWQRCLGELCQRRRHLVQMRVSEHQRMRAFSEPSLISMLNQHLREIQKTIKQLDTTIAALLAEQEGWRDFAKLKGAGPVLMATLACELPELGRLSGKAIAALVGVAPMNRESGNWKGRRSITGGRAVVREALYMAALTAKRYEPRLKEFFESLVNQGKPGKVALVAVMRKMLVILNARKRDAEAQMASA

SEQ ID NO: 169166 - protein, 461 aa, unidentified
MEEKSISMEIINPHAAGIDVGSRSHWVAISQLEEGIREFGVFNEDLYAMADWFTEKKIKTIAMESTGTYWQNLYAVLVSKGFEVILCNGKFTKNIKGKKTDVKDCQWIQKLHSLGLLTSSFLPDGQTEQLRTYCRHRANLIHSSASTSKKMQMYLRLLNLRLDVVVNDICGLTGLKIIRAFCNGETNPEKLASLRHYNCRKNEKEIAKALQSNGREDYMFVLKQELEAFDNLQKKIGQCDKEIETMLNKIIENDENKKQHYIESKPHKRVNKNTPKNIDLNLKSYQMFEGNDLLAIEGMSYSTVLALMSEVGIEGIKKFPTAKHFASWLRLAPNNKISGGKILSSKVPKGSNRLKIALRNAANAIGNLKGSTPLRDFFQRINFRKGRVSAISATARKLAVIIWNMVVKNTPYINPEGYLYLDQKRKLGIAKRIKKQIDKFDLKPEDVGFDNSLILKTQILR

SEQ ID NO: 169167 - protein, 338 aa, unidentified
MLHVGLDLHKRFSTVATMDDNGNVQLEDKLYHDDRARLKRFFGDMAGKAVVTVEATRNWYWLYELLEDQGVTVKLADARKVRLIAEAQLKNDKVDPRSLAQLERTGFLPEAYIPPRKIRDNREYLRYRLTLVRLRTGLKNKVHALVDKLGICHQFADLFGPAGRHFLSQLELRPVYQEELGNYLALVDDLERRIVAATKEIKLQLKPDPRAKLLMTLPAIGHLTAYLLLNEIGDIRRFPSPGKLCAYGGIVPIVKQSADHRWQGHITRTGNRYIRWALTEVACLAPSKDYALGSFYRRVAYRRGPLKARVAVARKLLVAVWHVLTYEEPYKPTPFPTV

SEQ ID NO: 169168 - protein, 339 aa, unidentified
MKNTKYFIGLDVHKERTSYCVRDRLGNILIEGETATLYSELEPQLKPYLPVSMIGLESCTSYYTLYQNFLKNGYQIKVANTIQLHQLIAKNDKLDAQRLAEMLRLGTFPCSYIPEEKIQRLRSLLQVRHGLMEEKTRCNNRIQAFLDRNGILMPDHEAFSKKWRHQLLQYIGSGDVSLELRYEYDHFVYLEKQAEHLDQEISGYTMKHWKNEYRLIQSITGFGPVLSCYVIAHILPITRFSSNRKLRRYAGVVPTFHESGNRKSNGHIPKTSSRKHLRWALIQAANAAGKTNTKLGRYYRKKKKQKDNASIAHVAVASSMIDIIYKVLTTKKPYNPQSN

SEQ ID NO: 169169 - protein, 405 aa, unidentified
MTIDVFVGLDWAVHTHAVCVIDAAGSVLDRFEVAHDRDGLAELMRRLARWGERLRIAIERPSGLIVDALVEAGHEVFPIHPNAVKASRPRYRSHGAKSDASDAYLLADLLRTDGHRWRALAQQSDAIRALRALVRSRDDLVAARVAAANQLTSTLLAFWPGAACIFADVASPIGLAFLRRYPSPGCARRLTEAQLQRFCKAQHYSGRRSAADLLGRLRAAATGRVGAQTEQAMADVVRAQVAVLVPIVTQITELTRHIEQFMHSLPDGLLMMSFPRAGQVCAAQILAELGDVRERFPNADLLAAEAGTVPVTYQSGKTRSVAFRWACNHRLRQAITCLADNSRHANEWARSVYTNARKRGHDHPHAIRILARAWLRVIWRAWTDRTRYDPDLHNAAQKLALARGG

SEQ ID NO: 169170 - protein, 400 aa, unidentified
MISVGIDVSKGKSTVCILKPYGEIVSKPFNITHTHKDLSELSSMLFRLNDEVKIVMEATGIYHLPVLTYLQEKGFFVSVINPYLMKSYRNESLRKAKTDKIDSRIIANYGIDHWFKMKEFQTSGEIYEELKLLGQQYRHYMKLHLLSLAELTHLLDLTMPGIKNLLASWNETNRKDKRSDFVERFWHYDVITSMSEQEFTEEYILWAKEKKYVPSQEKAKVIYTLAQESIPTLPSETSSVKMLVTEAVRVLKEVDATLGLILSRMQEIAKTLPEYSVVREMGGVGNTLAPKLIAEIGDVRRFRNGKALVAFAGIDPPPYESGQFVGCNRKISKRGSASLRKVGYETMRSLKMRSKPEDPVYRYVVKKESEGKSKKSAKIAGLNKFLRIYYARVTELYKNI

SEQ ID NO: 169171 - protein, 361 aa, unidentified
MTVTSMPQPTLTAQHVPPLAEDVILGVDTHKDIHAAAVITTLGAPLAHQEFPATTVGYRQLIFWARSFGVVRRAGVERTGSYGAALTRALSRENIEVVEVNQPDRATRRKRGKTDAIDADAAARAVLSGRATTTPKTADGPAADMRVLRLAKESAVRARTQAMNQLKAVLLVLDPDLREQLSGLSSPALITTCAALDGDHSEAAFTLHLLACRIQSLAQEIKELTKRTTKALMASRPQLLELVGAGPDSAAVLLIAAGDNPDRLTDEASFAALCGVSPVEQSSGMTQRRRLNRGGHRQANAALYRIVQSRMRWDERTQAYLQRRTAEGLSRREIIRCLKRYVARELYRHIRRPAITAPPAA

SEQ ID NO: 169172 - protein, 327 aa, unidentified
MKIYIGIDISKDTFDAATSSQKQSVTFNNNPTGFKKFIKWLSAFDSPHIAMEATGKYYLSLALHLYEQDYPVSVINPFKIKHHAQSKLKRVKTDSEDAKLIADFCEVHPTKPWQPDSPIIAKLQEFSALQALLIQTKTRIKNQMQSSTEIEVLKMQSSTEIEVLKIQKAQIQQLEKQIEKIQSQMKACVQQDVELTKQLALLTSIKGLGEKTAIELITHIKDIYRFDNAKALACYSGLVPQIQQSGSSLNRSSLSKMGNANLRRCLYMPAVNSIAYNPVLKAFAANLRNRGVAGKKIVVAVMRKLIHLVFAILKSGKPFDPEYKIRA

SEQ ID NO: 169173 - protein, 323 aa, unidentified
MSKHSMICAGIDTGKYKLDVAINSCGEQLQADNTADGHAALSAWLRRHKVQRVGIEASGGYEQDVVARLRHDKLVVVVFQPAQVRAYARFVLQRAKNDKIDAALIAECTAQTRKIHAPPDPRLVPLAARMTLIDQLTDAVARFKNYREGSRDVGLRQFWKEQISHLNKQLRARLKELAATIRAHRDLAERLDLINSVDGVGLKTAVAILVRMPEIGGVTREQAAALAGLAPYDDDSGTQLGIRHIAGGRERLRGSLYNAALCAAFHWNPQLKAFYRRLTAAGRPHKYALIACARKLLIFVNTVVARGTPWLSSRTRSVACAVA

SEQ ID NO: 169174 - protein, 455 aa, unidentified
MPRKSAKASFDLTRHIQGAAAIDIGSRMHMAAVSPEAAKDPIRSFGTFTSDLHALAEWFKECKVTSVAMESTGVYWIPVYEILEQHGFDVILVNARYAKNVPGRKTDVSDAGWLQQLHSYGLLRGSFRPQADIAALRAYLRQRERLVEYAAGHIQHMQKALMEMNLQLHHVVSDITGVTGMQIIRAIVGGERDPETLAAKRDVRCRSSAEVISAALMGNYRDEHVFALTQALELYDIYQERIMACDRRMEGLLLLLSHGSAKPAADLPKPRIKTKQVSAPSFDVRGILYRLLGVDLTQIHGIGVSLALKLVAECGTDLRAWPSAKHFTSWLCLAPGNKISGGKLLSSRTRRSSSRAAALLRLAATTLGRSDTALGAFYRRLSARVGKAKAVTATARKIAVLFYNTLRYGMVYADPGAGHYDEIHRKRVVSNLHRRAQSLGFALHPIPVATEPAVS

SEQ ID NO: 169175 - protein, 373 aa, unidentified
MKEFSKYVGLDVHKETIAVSIADAGRSKARYYGTINHTSAAVSSLLKKINPDGDVLELCYEAGPCGYGLYHQLLASGHECQVVAPTLIPTRASDKVKTDRRDSLRLAELLRAGELTPVWVPDVEQEAIRDLVRTRDDFKTLQRQVRQRLTAFLLRHSLKWTGGKRNWTKGFWCWLEALELSNAHQQFALKEYIDAVRIYDGQIQAIEKQMLVAKAGWSLAPIVDALMAMRGINLVAAMGIVAELGDLSRFTKPTQLMAYLGLVPSEHSSGPSRQQGGITKSGNGHVRRLLIESAWCYRFSARRSRDIEQRAQRTSPEVQAIAWKAQRRLCGRYRALSERGMSSCKVVTAVARELCGFIWAVAQQARHQQASAA

SEQ ID NO: 169176 - protein, 300 aa, unidentified
MGDGSKEPQTMTAGLDLADKYSHLCLLDTDSGEIIEESRLRSTSEAFRRRFDSERPVRIAIEAGTHSPWVSRLLEECGHEVLVANARKVRLIYGQGRKNDGLDAQNLARLARLDPKLLAPLKHRGETSQAHLAIIRSREALIQARAKLINHVRGTLKSFGSRLPSCSSPTSFHKKVGAHVPEPLKPALEPLLKTIASMTERIQEEYDRELEVLAEEYYPERKLLKRVAGIGTLTALSFVLTLEDPSRFETSRAMGAYLGLVADKDQLGERDPQKRISKQGEGLLRRLLVGSAQRSAQRAS

SEQ ID NO: 169177 - protein, 345 aa, unidentified
MELHTIGIDLGKTVFHLVGLGLRGEVVVRKKFSRTQLLRFTANVHVRLIGMEACGGSHFLGRALREQRHEVRLIPAQYVKPYVKTNKSDYIDAEAIAEAVARPTMRFVPIKTDDQLDMQSLHRVRERWVMRRTAVINQIRGLLLERGITLRKGRHHVDAALPLILEDADANLSGAVRLLLAQLKLDLDQLSVRIDQADTVIQKTAHENDACRRLVAIPGIGPVTATALIAPIGNGGAFRKGREFAAWMGVVPREHSTGGQQKLLGISKRGNSYLRRLFVQGARAVLQQRTKQSSGLSAWLAQLTSRTHRNVAAVALANKLARIAWAVLAKNEQYRPSVVADVAAA

SEQ ID NO: 169178 - protein, 322 aa, unidentified
MSLTVLGIDIAKQKFDVALLADGKIKNKTCRNSTEGFETLKVWLEKQGIQKVHACMEATGNYGEDLAVYLHEAGHTVSIVNPARIKGFAQSELVRTKTDKLDAGVIARFCLAMKPETWIPPAPEIRSLRALVRRVDSLIDMRSQEKNRISTAHESVIVLIKEHIIYLDQEIEKIRKQIDDLIKRNPHLKQRKELLDSIPGLGKATIPHLLAELDDLDKFTHVREMVAFIGLAPRETISGSSIKGKPRLCKIGHARLRKALYMPALVSIQCNPVMIAFYNRLKEKGKNGKVIVCAIMRKLVHVIFGVLKSGKMYDPNYKPAFA

SEQ ID NO: 169179 - protein, 311 aa, unidentified
MSIAVGIDVHKATLMIAIAGGRTWEVANTPRARATLVTRLRTLAPQTIVLEPSGGYERPLRAALHAAELPAARVTARQIRAFARARRLSAKTDRRDAQVLATSGATFAPTPTPVLDAGTAALAALSARRRQLTDTVAAEQRRRETAAPIARPSIDRHLAFLAGELANLTAQRDALIAADPGLARKHTLLTSVPGIGATTAALLLAELPELGRRDRGAIAALTGVAPFDEESGATRHSAHIDGGRERVRTGLFRPTRSAMRYNPVIASFAARLKAGGKPDRVRVIACMRKLLTILNAMLAKDELWHARPVTT

SEQ ID NO: 169180 - protein, 312 aa, unidentified
MMQQIFIGVDVAKGWLDIHHPKQRSLRIDNTPKAARAFAAACAKEGAWVIFEASGGYDRILREALEIAEVRFSRVNPRQARDFARAMGVIGKTDRVDARMLVELGIRLNPPRTEPLAQARKALQAQTVRRRQLVDLRKQEDTRLKQTANTNVRSDIKSLIAVLERRIAKIEQEMVRLVNADAELAAIDEILQSAPGVGPIVSATLIAELPELGNVDRRAIAALAGLAPVARDSGKRSGPRAIEGGRPVIRTILYLAGLHASRAASRFRDFRGRLQRAGKAPKAAIIATARKLLITLNAMVATQQRYPVQPPG

SEQ ID NO: 169181 - protein, 338 aa, unidentified
MKLYAGIDLHSNNSVLAIIDEQDRVMFQKRLPNELERILLALASFRQWLVGVVVESTYNWYWLVDGLMQAGYCVHLANPAAIVQYQGLKYSADEHDARWLAHLYRLGILREGYIYPREARAVRDLMRRRMQLVQTRSAQLIAMQTQFMRSTAQRPSSDALKRMLPEEIEAQLSEANVASAVRANLAVVRTLNVEIARLEREVLEQVKLAAQFEPLLSIAGVGRILALAIMLETGAIERFAKVGNFASYARCVDSRRLSNDKKKGEGNTKCGNAYLAWAFVEAAHFAVRYNARIKRFYERKAAKTNKIVAIKAVAHKLARAAYHVIRERVPFDEARAFA

SEQ ID NO: 169182 - protein, 419 aa, unidentified
MKSLNIPPFTAYVGIDWADTKHDICLQAAHSSQREFDCIPHRVPLIDDWAKALYQRFGGPIAIALELAKGPIVYALQKYDFFVLYPINPLTLARYREAFQPSRAKDDPTDAELALDLLLRHPERLIPIQPQSVAMRTLLSLTEYRRGAVADKIRLTNRLINTLKQYYPLALECFEHRDTPLFCDFLTRWPTLAQLKQARQTTLRTFFHAHNSNRPKLIEARLQSIKAAVALTEDPGVIVPNRFQVLGLVDQLRATLQAIDRFDRAIAELAPTLPDYSLFASLPGAGPHLAPRLLTAFGEQRERFPKAEDLQEYAGIAPVIERSGKKCWVHWRWQCPRFLRQTFVEWAGQTINKSFWAGAYYRQQRAKGATHQAAIRALAFKWIRILHSCWKTRTPYDETRYLNALRKRGSPILNNPTPS

SEQ ID NO: 169183 - protein, 416 aa, unidentified
MNAVGIDVSSRKSTVAVLRPLGEVVCLPFDVTHDIAGLASLAEKLKALDGETRVVMEHTGRYYEAVAKALHEAGLLVCAVNPLLIKEYGANSLRRVKTDKADAVKIARYALDNWADLRDFTPMDAIRYDLKTLNRQFQLASKQRTASANNLIALLEQSFPGIRKCFDSPVRSDGTQKWVDFAHSFWHVDCVRKQPFPAFCERYRKWCKRHAYFFKLRNAEKVYALAKSAVVLTPKSKVVKVLVQEAANQLISISRSVEVYRAEMDRLAAMLPEYPVVMAMYGVGKSYGPQLMAEIGDVRRFERKQALVAFAGIDPMPNQSGDKNVRSNKSSKRGSPYLRKTLFNVIRTYLQCAPQDEPVFQFLNRKRAEGKPFYVYMLAAANKFLRRYYAKLRDYFASPDTLQSVDPIPATLKASL

SEQ ID NO: 169184 - protein, 366 aa, unidentified
MFEGITFIGLDVHKRSNAVAVRRPGTVAVHEERLPHEPGAVARWARRWKRTSGGKLVCAYEAGACGYALQRQLEGLGIECRVVAPSLVPRKPGERIKTDRRDARKLAEYLQGGHLTAVRSPTPAEEAARDLCRAREDAKQDRMRCRHRLAKFLLRRGQSYPTGRKPWTLAHHTWLQGLSFESPAAQVVFDDYRLAVAQLDARIEALDRQIEIVAQEPLYRSAVGALRCFRGIDTRTALGLVSELHGIERFGRPRALMAFVGLVPSEASSGERQRRGAITKAGNGHARKLLIEAAWHARHKPALPAALRQRRQRQSPEIIAMADVAQQRLHRRFWRLVQRGKPSTVAATAVARELTGFVWAALHAVH

SEQ ID NO: 169185 - protein, 312 aa, unidentified
MIQTTIGIDISKEWFDAHRLPDGTAKRFSNDKTGCRDLLAWIGREPIARVIYEPTGAYHRLLEDALGRAGLPLAKVNPRQARRFAEAIGVLAKTDRVDAAGLARMGAALQLPQTPPADEKLADLKDLHMARRALVKDRTAARNRQKIVRVALIKRQLAQRLKQIERQIQAIDTAIDQRIRHDPVLRRRFEILISIPGISNTTAATLLAEMPELGTLEAKQTASLAGLAPVIRQSGTWRGRAHIRGGRATLRQALYMPALVATRFNPDLKASYTRLRSAGKPPKVAITAVMRKLIITANALLRDNRNWSNQRP

SEQ ID NO: 169186 - protein, 426 aa, unidentified
MRVLYDRVAAIDVHKDMVKVAIRVPGAKRGTRKTDVLEFRTFYGVLQAMARELRGRGVTHVVMEASGVYTDPVYYALRELDFTEVMVINPAHAKALKGHKTDAKDAIRLLDLYECGLLSGSYIPDPDLREVRDLARYRMKTVQARTSEIQRLQKTLETAGIKLSSVVSDVTGGSATAMIEALISGERRGSVMAGLAQTRLRTAGKMADLSMALTGRFTDHHALMCRLHRDRITIFDDAVQDLDAKIAPLVARYAREAELLKTLPGFGDVIVAGWLGAIGPAPHQHFATASRLASWATICPGNYMSARKSKGGRTGDGGAYIKPLLIQAAWGAVRVPGRLQARFGRLVRKFGGPRNKGAQKRAITAIAHTLLKIAYGVLKTGKPYADLGADFYTRRESPDARQDYLMRQLRKLNPGCVITITPAEAA

SEQ ID NO: 169187 - protein, 412 aa, unidentified
MAEWICGEQAASKFCEGGFLMIYVGIDVAKSKHDCCILGMEGQILFDSFTFPNSKSGFQELTSSIQACLQKANEKEVRVGLEATGHYSTNLVAFLRNSGIEPVPFNPLSTNLFRKSQTLRKTKTDKVDARCIASMLRSADPAPHVSVSYHIDELKALTRSRYRLIGYRSKLKISLNRLLDMVFPELAGLVWSTNQKSVYALLLELSNTNAISHCRMDKLTRILHDSSKGKYGREKALLIRQAAMDSIGSNSPALAFEIRQTIHLIQNVQVEVDQLEQEIENEVKSASTPLLTIPGIGYTLASIILAEIGDIDRFNSPEQLLAFAGLEPSTHQSGKFRADHTPMVKRGSTYLRWAILQAARLVAMRDKTFQSYLKKKRHEGKHFLVALSHTGKKLVRVIFHMLKTNRVFVPQS

SEQ ID NO: 169188 - protein, 349 aa, unidentified
MVVVGTDVHKRTHTFVAVDQAGRELGHRTFDADSVGHREAVAWARERFGTELLWAIEDCRHLSARLERDLLTAGQSVVRVPPKMMAEQRRIARTRGKSDPIDAAAVARAALREPDLPVASHDEASRELKLLVDRRDDLVKHRTATINRLLWRVHEVDPAWAPKKRSLDLAKHQQILADRLAAVPGIVAELARDELADVVDLTVRINELERRIAGLVEKAAPTLLAMPGVGALTAAKIVGEAAGVTRFKSEAAFARHAGIAPIPVWSGNTKGRVRLTRSGNRQLNAAIHRIAVTQIRLDGLGKTYYEKKKADGMSTPEALRCLKRRLARIVFNHLNTDQAAAATGLAAAA

SEQ ID NO: 169189 - protein, 340 aa, unidentified
MFHVGLDIHTKHISICALDEKGQVAHRSRVRGIQDMLRVLTGLPDRFEVCYEASCGYGHYHDLLRPLAARVVVAHPGQLRLIFRSRDKNDRKDAERLAKLLYPGEAPAVHVPSPDVRAWRELINCRSQVIAKRTRAKNTARSLLRGAGVAAPRRPALWTKAGLAWLRQLGLPTASQQLRRDLLLEEVESLTRQLRRLEQQLNQRAQQAPAVARLRTIPGVGARTAEAVAAFVDEPDRFRHAKTVGRYFGLVPCQDQSGDKNRMGHITREGPPVVRQLLAEAAWQAVRRSPTVRRYFERVQRGEPQRKKIALVATAHYLVRVMWAMLRRGTDWQEGAAVAR

SEQ ID NO: 169190 - protein, 335 aa, unidentified
MTIITIGLDTSKSWFQVHGVDADGQAVVRRKLPRSKVLNFFANLPPCTVGLEACGGAHYWARELAKLAHMPRLMPARYVRPYVKTNKHDAADAEACCEAVQRPGMRFVPTKTVEQQSMLMVHRVRDLLIRQRTAAVNALRGHLSEFGIVRPKGTASARELMSLVATDERVPPLAREALDGLVDQIRDTEQKIAAFNDRIVAMAKNDDVCRRLMTVLTIGPFVATALVATAGDPNYFSSGRHFAAWLGLTPKQHSTAGKERFGGISKRGDSYVRKLLIHGARATVHNIRSVRVKGAWVAGLLARRHFNVATVALANKTARIAWAVMTTGQNYRVAV

SEQ ID NO: 169191 - protein, 343 aa, unidentified
MSTLYYIGLDIHKRIIAYCIKAIDGRLVAEGKITAERKALAAWVKGLPGSWIGAMEATIFTGWVYDFLKPYAVSLKVAHPEMLKAITAAKKKNDRADAEKIADLLRVNLLPECHMLSEEIRDLRRILRYRNHLVRTAVKMQNKMSGLLMEVGVPYSKRRLHGKKYFQELLDRVEDIPPSVKGLLQLSRSGYEMFRSFQKRLVETIREDVLIRDRVERLLTIPGVGELTALTWVLEIGDCGRFSSIRDAVSYCGLCSAQRESAGKEQRGPISKKRNKHLQTMLIEAAKLAPHWNKQLARLHEKELKKGNRNRATLAVARKLVAYMMAVDRKQTLFKQPAETQVA

SEQ ID NO: 169192 - protein, 375 aa, unidentified
MSEHSEAFVAFDTSKLRNAVAIAEGGRDGEVRFFGEIDNTAEATAKLVRKLAGKYERLTFCYEAGPTGYGLYRQITGLGQACSVVAPSLIPKKPGDRVKTNRRDAVSLAKLLRAAELTAVWVPDEGHEAMRDLTRARETAVIDLRSKRQQVSAFLLRLGRHYLEQRKTWTKAHMNWLARQKFEYAQQRLVFEEMMLAIRQAQERLARLEEAIRGAVPEWSLAAMVTALMAMRGLDLISATTLLAEIGDLSRFRTPHELMAYLGLVPSEDSTGDTVRRGPITKAGNPRARHMLVECCWSYQHPPRVGPHKQHKVDAAPPAVREIAWKAQCRLHKRYRALIRRGKLKTVAITAVARECAGFIWAIGREITTAQGAAR

SEQ ID NO: 169193 - protein, 433 aa, unidentified
MKVLHERVAGIDVHKDMVKVAIRSPGDKPWTRKTEILEFRTFYGVLRHMAAGLRRRGVSHVVMEASGACTEPVYYALAEEDFEEIAVINPAHARALKGHKTDAKDCARLAELFECGLLRGSYIPAPELKEVRDLTRYRMKTVQARTSEIQRLAKALESAGIKLGSVASDITGKSATAMIEALIDGERRGQVLADLAIGRMRTAGKLADLSQALAGRFTGHHALLCRLHLDRIAGFGTAVDDPGQRIAGKAGRWQREADLLKTIPGFGDVVAWAWLGEIGPAPHRYFPGHEKLASWVTLCPGNNISARKRKHGRTGDAGTYIKPMLVQAAWAAIRVRGRLQARYSRLVRRFGGDKNPGAKKKAITAIAHTLLKIAYQVLQAGTPYQEPGADFRTRRESPQHRQAFLERQLQKLHPGCTITITISPPQAALPAGA

SEQ ID NO: 169194 - protein, 351 aa, unidentified
MDKITTVGLDLAKQLIAMHAVDARGQVVLRKVLRRDALLRWSATLPPCEIAMEACGGAHHWARELTQQGHSVRIIAAEFVRPFRKSGKNDANDAEAICTAVRQANMRFVAIKSVEQQAALCVHRLRQGLVEERTALINRMRGLLTEFGVVAPLSPEKLRRELRLCLDEEKTHVPLMVRQLVTDELAALDALEQRIADYAAQIAAQVRDNVSAQRLQGIAGVGALTAAAMVATVGQPQAFRNGRQFAAWLGLVPRQHSTGGKSRLGRITRRGDAYLRTLLILGAKSALQAALRKPPPLRHRLRQWIVDVFTRIGYHKTLVAIANKHARIIWALLVKGEDFDVQRLTLTVVAA

SEQ ID NO: 169195 - protein, 344 aa, unidentified
MKVTTLGIDLAKNVFQLHGVNEYGKTVIKKQIRRDQMAEFFANLPACLIGMEACGSAHHWARKLEGFGHTVKLMAPQFVKPYVKTNKNDAADAEAICEAVARPNMRFVPIKNIEQQAVLALHRVRQGFVKARTAQANQIRGLLSEFGLIVPQGIGYIASRVPELIEDAGNELPGSFRMLIERLLDHLRALDHQVVELEAQIVSWHRQSAVSSKLAQVPGIGPITASALVASLGDAKNFDGGRQVAAWLGLVPKQHASGGKQKLLGISKRGNTYLRTLLIHGARSVIYRAQNKPESCRWINGVVSRRNKNVAAVALANKNARIVWALLANEREFRPDYTTAKAAT

SEQ ID NO: 169196 - protein, 348 aa, unidentified
MFIIGCDFHAGFEVLSIFDNRTGEVREKRLSHPSEATAFYRGLREQGERARVGIEAGAPCQWFRRLLAECGHELWVGDAAQIRAAEPRKQKTDRRDAELILRLMMEGRFPQIWVPSEEERDVRQLLMDRHQRMRARTRAKNQLQALAMNQGVQKGRRLWTAAGRGLLAGLEMMPHAARRRDELLHGLELLDQQIAELDVLIAEEVRQRPAAVRLMTHPGVGPQTALATVLTLGDVSRFENARKLSSYLGLVPSEHSSGGKQRLGHISKQGSSLMRFLLVEAGQTAVRGDEQLRRAYKRMWVRKGNRAVAKVMVARRLAVRLYWMLRHDWSYAELVRNAGEPESSCGER

SEQ ID NO: 169197 - protein, 309 aa, unidentified
MKQSIVYIGIDVAKAHLDVAWQEQSRRFANDKCGQAALIKWLKQSAFPVQLICEASGGYEQALVESLEHTDITASVVQANRVRQYARAAGILAKTDKVDARVLAAFGAAMQPKPTPPLCPEQKRLRQYEAQRRHLSAVLVAEQNRLAQLSYAELQVLSRSLISKIKKQIATIDARINGLIAQDKQLCQKAQKLTSITGVGARTAALVLAQMPELGQLNRRQAAALGGLAPFNRESGTLRGKRTIFGGRRALRSGLYMAAMVAARRNPILCSFYQRLRAKGKPHKLALTAVMRKLLLVLNQNLKPITSPA

SEQ ID NO: 169198 - protein, 357 aa, unidentified
MAIVAHTRPFVIGVDTHARNHAISVLACPAGELVDESQFPATTAGLSRAVSWAARRTGGDADALWVIEGTGTYGARLARAAADAGYTVVEAPRMNARANRGIGKSDPLDARRIAAATLPLRETQLRQPRADDGIRAAVKVLLASRDHMSTERTATINALTALLRVVDLSIDARHPLTQAQITTIVGWRTRDEDLATATARGEANRLARRVAALDEELKQITKRITELLRQSPAGELLDQPGIGPVTAAVALTAWSHLGRIRSEAAFASLAGASPIPASSGNTVRHRINRGGDRRLNRALHMAIVTRMRMDPRTRAYVERRTAEGRTPREIRRCLKRYLAREIYRRLNTAARTKLATT

SEQ ID NO: 169199 - protein, 349 aa, unidentified
MELAKIKSKYYCGADLHSKTTYIKVMNGEGDILLKRNLPNNFAVFKSLVKSFLPDLVVGAESTYSYYWLYDGCRESGIPFYLGHALYMKAISGNKKKSDPIDAETISNLLRSNFFPIAYPYPKEMRATRDLLRRRHRLVRIRAEGYTHIHLIFHQEGLGDITSEAVKNKSTRRELISRFSNQSLQHTITADLDIIDMLDPYIKQLELEIRNQAKSHNHRDYALLQTMPGIGEMNALIILYETHDINRFPTVQKYSSYCRVIRCERESNGKNTGNKNQKMGNPYLKWAYGQILHSAKRYNDRINRHYQKLESKHGPARARSIMGHKFAVAVYSMLKHHQAFDEERFVQNN

SEQ ID NO: 169200 - protein, 346 aa, unidentified
MTIVGCDFHPGWQQVAVFDFDTGEIRELKLENATGEAERFYRSLPSPARVGIEACGNTQWFEDLLDRLGHELWIGDAAEIRASYVRKQKTDKRDAAHILKLLIEDRFPKLWRPSAVERDIRQLLIHRHRLVCIRTRVKNGLHHLMLNKGIQLKQKLWNEAGQKILHELPLDGWAAQRRQDLLQLLSTLNPQIAELDQAVECAAEANERARLLMTQPGVGPITSLAFVVTMGDVSRFRRGKQVASYLGLIPSENSSSKRRRLGSISKQGSPFLRMLLVESVQTVCRLDEGFRRQYKHRCHRMVKGVAKVAAARKLAVRLYWMLRTNTAYPEIARIESSPRYGVVGES

SEQ ID NO: 169201 - protein, 348 aa, unidentified
MLTYCGVDFHSRQQKVVFCDLATGEIQRKELKHQSDEVRQFYTQLPKPVIVGLEATGSSQWFEKLLAELGHEVWIGNATEIRRRARSRQKNDWRDAELVLDLMVKDEFPRIYRLSEESLEILRRLRYRHRLVKMRTMAKNGLHAIALSAGLSMKSKLLTKSGRAKLELLDLSPALKDQRDEWLDLIDQLNHRIARLDSEVEQEGQTDPRVQLLRTHRGLGPLTALALVHTLEPVNRFSSSRKVTAFVGLEPCEESSADKVRWRGISKAGSRLLRFLLIEAAGVAIKYDDELKRFYLHLLHRRDWRKAKVAVARKLLVRAWIMLRDQIDYAEFLKRGVAVRSARTGRRP

SEQ ID NO: 169202 - protein, 318 aa, unidentified
MSHGYDKFVGIDVSKDALDVHGLPDGSPSRFDNTAAGRAKLLSLLPPAGACLSVVEATGGYERDLVAEAVTAGHHIAVVNPRQVRDFAKALGLLAKTDRIDASVIARFAETTRPVPKGYDERQEQLRELIVRRRQLLDHRTAEKNRAEMAHSSLVRKSVLKLIETLNKDIQRIEKAILQLVESNDDWRERFEKLKGVPGVGGQTAATLMAELPELGHLNRQQVAALVGVAPFNRDSGQFRGRRAIWGGRQSVRNALYMAALSAKKHNPVIREFAARLMAKGKPPKLVLTACMRKLLIILNAMLQSGDSWSPRVATLTP

SEQ ID NO: 169203 - protein, 460 aa, unidentified
MNQYYLGIDVSKGYSDFVMLNAKKQAVIENFQLDDTFEGHAQLYELLRNFHQAYPQATIYAAVESTGGYENNWFQSLLKFQGSLPINTAHLNPLGVNLNSKADLKRNVTDRISAQNVAEYMIAHPEKVSYQHQDSLASLRKQWGFISMLTKQSGQLLNQLESLVYNANPEILMYCKDGTPQWVFKLLTRYPTALRLSKAKAKSVARIPYVSKDRAQQLVATANKSVASAGDQITEQLIVATVKQILDLNKTIKTQTQILADECAVPEVELLKTFIGIGDYSAIGLMLEIQSVKRFLTSKKLSSFFGIHPAYKISGDGTWKYRMSKKGRREPRRILYLVAMSAIKSNPLIRSIYQQAVERGMKKKAAVGLCMHKILRIIYGMLKHNKAFDPEIDRKNKQQKSLRQSKVRQDKDRRYQEFDSKAPISSRQKKKREERKQSQNVSNVEYGINEASVPVTELVN

SEQ ID NO: 169204 - protein, 350 aa, unidentified
MWIGVDAHKRIHQAVALGGDGELSERTIDNTPVGWASLLTWAQQWPERLWAVEGSGSLGRGVAQFLAEHGQRVHEVSPKWTAQRRRTQRKPGKSDRLDALAVARLLREEATSLPLVLPDEDDVASLQLWSRLREDVVADMTRVRNRLHALLLLCDPTYKTHIPDLTTRTGIRACQAYTAPGQGVLARHREQAVRQVAAQLTLLADQEQQLHRQLEGAVARRFAPLQAIPGLGPLTAAALVAELGAPRPGLGESQLAALAGVAPLEASSAGGVRHRLNRQGNRRLNRLFHQITLTQQRIYPPAQGYLARRKQQGRTPREARRALKRLLVRSVWRQWQACWSPASGAAPLAA

SEQ ID NO: 169205 - protein, 402 aa, unidentified
MNAVGIDVSKGKSMVAVMRPFGEVVLSPFEVPHSSSELSKLARLLKSLDGESRVVLESTGNYHTPVAKMLHNAGLYVSVVNAMLVHDYGNNSLRRAKTDKKDAVKLANYGLDHWLSLPGYVPEEDTRLLLKNCYRQYQQYAKVQTMMKNNLLSLLDMIFPAVNRLFSSPVRTDGSEKWVDFIDAFWHVQCVSGLSANAFSAKYLKWCRKHGYNFSEEKALEIHRTARDHVAVMPKTDTTKLLVKQAVAQLRTVSSAKAALQNEMDALAASLPEYPVVMDMFGVGPKLGPQLMAEIGDVRRFHSKKALVAYAGIDAPPYQSGQLNVHSRSISKRGSPALRRTLFLVMSVYLQCSPADEPVYQYMAMKRAEGKPYLVYMMASANKFLRRYYAAVKAYLNALEQG

SEQ ID NO: 169206 - protein, 413 aa, unidentified
MGKKIAEVELHYERCCGLDVHKKLIVACFRDGTNKTIRQFGATSKELRSLAEWLIEQQCEMTAMESTSSYWKPVYNILELYGLDIIVVNAHHMKNVPGRKTDIKDAEWIAKLLSQGLLKPSYIPSRDQRELREITRYRKSLIEERSREINRLGKMLEGANIKLTSVVSEVLGQSSRRLLDAALNDEPINGLTIEGLITKRMAGKSTVIVEAMDGSLSKTQKLLIRAVLSHIDDMTKRIDDLDDVINGEMQEYAAAIDLLDGVDGIGPASAETILAEIGLDMDRFPTAGHLAAWAGLCPGNNQSANVKKSAQTRKGNKILKAAMVQCAKSAVTKKGTFLRAQYDRLVVRRGKGRALVAVAHSMIVAIWHMLKYGTTFIDLGGDYYNRFHPEKKIAMHLKKLEELGWTPPIQTTA

SEQ ID NO: 169207 - protein, 516 aa, unidentified
MRAGVLSPSSTPIRFGSSSRRSPGSLVPAGFQGKRGGVAAEKKNAKTDTDGKSAGAAAEHGGDGAEVAEDRVQVVEYAAAIDVAKGFGMVCTRVPGSRPDRRRQKVWRVEATYGEVTALMDHLRCEGIQRLVLESTSDYWRIFYYLAEAAGLEVWLVNARDVKHLPGRGKSDKADCVWHCKLNERGMLRRSFVPPQEVRDLRALTRTRARLAQDQARHQNRVEKILEDALLKISVVISDLFGASGRRFLDALVAGERSPAALAALRDARLRATRRELQEALTGRFRDIHAFEIKAHLRLIDAINDEVTRLDEKIKQQLAAIPGTAPACTACGLAGGGHAPGCADEGTAPLSLAGRLDEITGVGERNAAAIIAELGTSPSQFPAPGHAAAWARLTPRTMQSGETAKPGRTGKGNRYLRGALGQATMTAAKTDTRLGAMYRRIARKRGKQKAIVAVSRVICEIAWILICDPGARYQELGADYYSPRSPARQTRDKIREIERLNPGKKVILADASPDAA

SEQ ID NO: 169208 - protein, 432 aa, unidentified
MERIRENAAGIDIGARKVFVSVEGKEVKSFFTFTEDFEKLRDYLLENAIKTVAMEATGVYWNILYEILEEAGLDVWLVDGAQTKQVPGRKTDVKDCQWILQLHSYGLLNRCFVADSDIKELRIYQRLREDHIRSASMHINHMQKALTEMNIRLTEVLNQIHGASGLAIIEAILKGERDKEKLLKLCHIKIIKNKKDEVLKALNGRYTKSGMFALKQALDSYYFYQNQIKQCDAMLEEVLKRISKGKPNQTISTRRKPIRHNKPDIDNLGILMLKIFDGKDATALSGITDYTWMQLLSETGTDLSRWESEKQYTSWLGLAPGQHKSGKMKKNKRKLGRPKAGQIFRQIAQSLLTSKRIALGAFGRRLSSRKGSPVAIKAVARKLAVLYWRIMVKGMDFVEKGIQKYEEQLMAQKQRSIIRLAKELNMHVAYNV

SEQ ID NO: 169209 - protein, 343 aa, unidentified
MVEYIGLDVSLKETAISIRKDGKRIWRGKCPSDPKILAEMIHKHAPHAKRVVFETGPLSTWFYHALTAEGVPAICIEARHAQKVLDETLNKTDANDADGLAHLAEAGFYKAVRVKAFDSMLTRTLVAARNQLLSISTQLSNQIRGLMKTFGLIVPKGKGRIFDGNVRQLLDGNDGLAKIILPLLEAWRDIRRRAADLDRQLLTAARESQETKLLMTIPGIGAVTAVSYLAAIEDPENFKTSRSVGAWLGLTTRRYQSGEVDYDGHISRRGDNHLRGLLYEAATVLLTRTSARNENSLRSWGLKLRERLGFKRAAVAVARKLAVIMHSMLKTGEVFNALAGATA

SEQ ID NO: 169210 - protein, 346 aa, unidentified
MNSTTVAVDLAKNVFELAVADAEWRIVERHRLNRTRFARFFVHRAPCQVVMEACGSAHHWARRLVAEGHTVRLLPAHYVKPYVGRSKTDRADAAALIEAARSSQIRAVPIKTLEQQQLQSLHRLRSQWLSTRQRYLATLRGILREFGIVIPLGPSVAKAQVGATLAAADSAIPEGLRPALAQMLQEIAPLEEKILSVERQLATLTSADERAQQLREIPGVGLLTSTALLSTVGDIQRFPSARHFACWLGLTPSERSSAERRRLGKISKQGDVYCRTLLVHGARSALLAAHRAQRAGKPLDRLRHWALNCERVRGHNKATVALANRLARIVWATWKYQRSFDGNWAA

SEQ ID NO: 169211 - protein, 334 aa, unidentified
MKIRSVTFGIEPKLTHPMDGIAFDQVIKRGCGIDIHRDEAVATIGGEGITTETRSYKTFTSSLTELKEWLIENGVTDVAMESTGVYWKPVMNVLEGPELRVWIVNARHIKYVPGHKTDKKDSAWICQLLLAGLLKKSYVPPREQRELRDLTRYRKKLIQNIASEKNRIIRILEDCNVKLDSVISNLEGVTGTALIDLLISNGVVTMDDIDSVYHKKLKASKELLYEACNGKIGEHHKYMLQMIRKDIEQTQCLIDELTFRIAVVLAPYNSALEALSEIPGIDRKTAEDLVAEIGLDMEQFPTEKNLASWAGICPGNNESAGKKKAPRPTTGTSK

SEQ ID NO: 169212 - protein, 336 aa, unidentified
MSLYCGIDLHSNNHVVVVINEEDKKVVDKRIDNNLDATIELLAPFKEQIKAVAIESTFNWYWLVDGLIEKDYQVELVNTAAVKQYDGLKYSGDHQDAFHLAHLMRLGILPTGHIYPPEFRQVRDLLRRRRQLVKQASSHMVSIQNQIWRSLGYRVSCTDIRKASFILPFEVGSFLFHSAHSNLMMLKALDLQIDLIEQQTLSAVKLKDEFKLLTGITGIGPILGLTIMLETGDINRFSAAGNYASYCRCVNSIRESNGKKKGAGNRKAGNKYLSWAFSEAAHFLVRFDKKAKRFYERKKQKRNGIVAIRAVAHKLARAVFHMLKNKQAFDIDRVFS

SEQ ID NO: 169213 - protein, 405 aa, unidentified
MEELLVGVDWSQSHYDIAVVAPSGALLTQFRIAKTAPEFSLLAEKIEAFGVPTSHCHIGLETAHNILIDFLWSRQYATFVIAPSIVKSSSGRFGNSGAYTDAKDAHLIADLLRTDRERFAPWRPDSELLTRIKTKLGHMDYLTKLITSHTNRLRSILLRVYPQVLQAFNDLHVCLALHLLVAYPTAAALAGFSYAEFAAFCRSQHCHRLDWITTWYSRLQQPQPPVQSTMAAAYRDEIVFIAQQLLGLIQEKKLALQQVQVLYQQHPDHPIFSSLPGAGDMLQPKLLVMFGEDRARFPSPQDIRALAGTCPVTKQSGKRRHIQFRRACNHSFRETAQQFAVASVQHVDWAAAYFTSALSRGLRKNHAYRCVANRWLGVIWKMWQTHQPYDETYHLKQIHHQRRPT

SEQ ID NO: 169214 - protein, 352 aa, unidentified
MIVLGADTHKSSHTVAAVATGTGELLGDKTVGVGACGFAALLHWARGLAGERVWALEDCRHVSGALERFLIGRGERVVRVSTRLMATSRRSSRERGKSDRIDAIAVARAAVAEGVNSLPTAALAGPELDVRLLVDHRERLVGARCALNNTLQWNLHDLWPELTLPGGALFSTKWSTKIARRLARAEQTMRVRIARDELRRLRELTQTIKALEAEITDLVADIAPQLLDEPGCGPLTAAKLIGEIAGADRFSSDAKLARAAGLAPIPVSSGKTNRHRLDRGGNRQINAAIHRIAVTRARCDARTKAYIARKKAEGKTHREAIRCLKRHLIRRIWQLLRAPAPTRNISPSTSIS

SEQ ID NO: 169215 - protein, 353 aa, unidentified
MTGTKYIGMDVHKESISIAVRNDAGKIVMECVMETKANVILDFIHGLRGELQVTFEEGTWATWLYDLLKPHVTKLVVCDPRKNSRQGNKNDRIDARELADRLYMNKLSSVYHGGAGVRTLKELARSYLTISKDLARVMSRVKAIYRSWGIPCAGKQVYAPRHRAEWLAKITEVGVLRRAEFYYQQLDALRSLRHDIRRDLLAESKKHKASKLLCQIPSIGPIRAALLIALIQTPHRFRTKRALWKYSGFGIETHTSADYRSVKGELQKSRKQVSVRGLNRDCNHDLKNLFKSAATIASVKPGPFQEFYASLLAKGMRPEMARLTLARKIATIVLIVWKRGVNFDAKYLKPQTA

SEQ ID NO: 169216 - protein, 348 aa, unidentified
MTVTIVETRAITGGVDTHADTHVAAALDPVGGLLGVQEFPATPAGYARLLGWLGGFGPVCLVGIEGTGSYGAGLARHMAAAGARVVEVDRSDRQDRRRQGKSDPLDAVSAARAAQSGRARGAPKGRDGAVEAIRALMVAKRSARSERTQTINQARALILTGPDDLRARFAQHTAAALVAGTALLRPRPGDAAGYATRFALRELGRRAEFLDGQIERLDELIVPLVGARAPGLLALYGVGPETAALLLVAAGDHPERLRSESAWAHLCAAAPIPASSGKRTRHRLNPGGDRQANHALWRIVITRMSSHPPTRAYVDRRTAEGLSKKEIIRCLKRYVAREVYHQLLTPAG

SEQ ID NO: 169217 - protein, 335 aa, unidentified
MKKIYVGIDISKEKCNLCFRSGLEIVREEECSNDVKALKNVFKAALKTLGVSLENVLVCAEYTGRYIYPLTVGCQELGIFLWMDDPTRIKNSMGLTRGKNDAIDAARIAEYAYRYSDKAVRYCIPDAALVSMKSLLADREFLLIDKKRYQSQLTDQKKYMAPGDFKHKNSRWKKVIRSIDEQIVAIDAEIESLIAADPVLTRQKELLKSIDGIGDRIAINMIAITGGFTRFQNARQFCSFAGLTPYKYDSGTSVRSKAKISKRANQTMKALLHLAAVCAATHMKDGEYKDYFERKTGDGKHVMCVLNVIRAKLVHRMFSVIKRDSEYTKEYKPAC

SEQ ID NO: 169218 - protein, 336 aa, unidentified
MSHYCGIDLHSNNHVVVVIDEEDKRVLEKRLSNDLSLTLKALSPYRKSLQGIAVESTFNWYWLVDGLQEQGYDLQLVNTAAVKQYDGLKYSGDHQDAFHLAHLMRIGILPTGYIYPKEQRAIRDLLRRRLSLVRAASTQLISAQSQIWRSTGIRIKSGELRKPVFVPPPVDDYTRQAVHAVLAVYQAIQCEIDGLEESAYQAVKLTDDFAILQTITGIGKILGLTIMLETGDIHRFAGAGNFASYCRCVDSKRTSNGKNKGVGNAKAGNKYLSWAFSEAAHFAVRFEPLAQRFYERKKAKTNGIIAIRAVARKLARASWMMLKHQVPYDAKRMFPG

SEQ ID NO: 169219 - protein, 409 aa, unidentified
MEVVHPKCAGLDVHAETVVGCVRICEKARASYEVRTYSTTTSGLEKLREWLTQQGVTQAAMESTGVYWKPVWHVLEGAAELVLANAMQVRNLPGRKSDVSDARWLADLLAHGLIRGSVVPPTAFQDLRELTRTRSQLLAERGRHIRRIQKVLEDANVKLTEIVSDVMGVTGRALLEALMAGKPMDAALVTACRRGRMKSTTDEMVEALRGCVRSNHRFLLQMHIRQYDALTEAVGQIEQRLKGLIEPVRSDFERLTTIPGVKEATAYILLAEIGPDVSRFPTSGHLVSWAGLCPVNDESAGKRRSTALRKGRRWLKTALIQAAWPASRKTDSYLRAQFLRLRARRGPKKAIVAVAASILTAAYHILSRHVPYHDLGPRHFDDRDRDRTARRLVRRLQDLGLQVAIKPAA

SEQ ID NO: 169220 - protein, 345 aa, unidentified
MEYFAGLDVSLEETAICIVDEMGEVVREAKVASEPEAIAEYLQDGELAFGRVGLEACPLSQWLYDGLAAAGLPVVCIEVRHLKAALSAMTNKTDRNDARGIAQVMRTGWFRAVHVKSTESHELKTLLTSRKLLLNKMLDVENQLRGSLKVFGLKVGKVTRRQFEARVLDLVEDRPTLLAIVRPLLRVRAVIREEYNSLHRMVLHAARQDAVCHRLMTVPGVGAVVALTYRAAVDVPARFTKSKALGAHFGLVPRKHQSGELDRTGRISKVGDEMVRTALYEAASVMLSRVVRFSALKAWALRVANRRGVKKAKVALARKLAVILHRIWIDGTTFRWGSDPASAQA

SEQ ID NO: 169221 - protein, 403 aa, unidentified
MAKVFIGVDPHKLSATIEVVDGRERVLATGRFGTDKAGYAAMRKQVASYPDRVWAVEGSNGTGRPLAQRLLADGEHVVDVPAKLSARARLLDTGHNRQTDAHDAHAVAVVAVRTKNLRVLSYDADLEVLRMLVDRRDELSKSKVQAVNRLHRLLSELVPGQSKKDITALQAKAILASVRPRDSVGKTRKRLALEQLAEMVAIEKKMKASSKELKTLVIARGSHLMDLTGVGPVVAARILADVGDVARFTDRNRFASWTGTAPLDASSGEQIRHRLSRAGNRKANHVIHIAAVNQIRLDTPGRAYYRRKLAAGKTPLEALRCLKRRISDALYRQLRADARTAATTDANAGPGGHRGASHVSSAAGSHPHTDTSDQPLPGPAPTTLPASTPTRKTTILRPLEPAS

SEQ ID NO: 169222 - protein, 322 aa, unidentified
MSIYTDYFGIDISKETFDVVNKKGKHYQFLNDNRGFAKFKKIITDGSICVMEVTGIYHLRLAKFLYSKNIATAVVNPLRIKRFSQMLLRRNKTDKADARMICLYAQDQQVDLWKPAPKVIEQSKDIYQTMEQYIEFKAGLKNKLDALKVKKAASFLIDSVTNQIKVISESIDALQNELDSLVKIYNPVMLQNITSIVGIGQRTASLLIIATEEFQHFDSAKQVSSYFGLAPTETTSGTTINGSRQITKMGNPLVRKKLYMCSLQASRYNLSCVNLYQRLLAKGKPKKLALIAVANKLLKIVFAIAKSGLPYDRLYKSYMTIV

SEQ ID NO: 169223 - protein, 339 aa, unidentified
MLIIGCDYHPSFQQIAWLNTATGECGNRRLEHHDEAEAFYRGLRGQAVVVGMEATGGTGWFRQLLRECGHGLQVADAARVRARATRRQKTDERDAELLLELLLDPKFVWLTMPTAEQRDRRQLLLHRHRLVQMRTRVKNQLQSLAMDQGVRQQKKLWSSKGRTQLQALSLPPWTAVRRGDLLQLLDDLDQRLVGLDREVRQQAYGSAEVRRLMTHPGVGPVVGLAFQLIILDPARFAGSRQLTSYLGLIPSEHSSGGKQRLGHITKQGNALLRGWLVEAAQVAVRRDPQWGRQFRRLAMRKNRSIAIVATARKLAVRLWWMWKRGLDYGQMVQSGSHVE

SEQ ID NO: 169224 - protein, 324 aa, unidentified
MSDPDVFVGIDVAKATLCVHIQPEGDAGGHERTFEVANAGKGIASLVADLLKLSRAGRRLAIGFEASGGYERELGQALFDADLPCFLIDPARVRAFARAERQIAKTDPLDARLIARCLKAVGHSLRPYAPNPLVLLLAENVRTRRHLLDQAVELEAQIETLSAPTLRRMMARQIASLRATAKAIEIEMRAILAGDGGTEQLYRRLRTAPGVGPILAATLVASLPELGRLSSRQIAALVGVAPFDRQSGRTDLRRTCHGGRPAVRSVLYMACISVTRMKRGPLKAFYQRLRENGKPPKVAIIATMRKLLVTLNAMVAKNTDWRAA

SEQ ID NO: 169225 - protein, 385 aa, unidentified
MQRNDLSRSLVAFDQNSTVVAVVELSLKSWVVSGVVPGVKRQPLKKLPADRDRLLALLERWRNEAVKAGFAINRIAVAFEAGRDGFWLARWLRARGIEAYVIHASSIAMPREHRRAKTDRLDTESLMRGFLGWLRGETRHCRMAAIPTLEQEDARRPTREHESLVAERTRLINRMKAALVRLGIPGFNVKLRKAADALAALRTPEGEPVPPHTLAELRRCLERYAVIGGQIKAIERAREHRLEAAPAQGTHPMILMLAKILGLGIETADMLVHEVLARGLRDHRAVGRYGGLTGSPDESGSKRREQGLAKAGNARVRRGMLQLAWRWLMHQKDSALTQWYRARTANGRGDTRKTMIVALARKLLIALWRYVTTGEVPAGVVLKAA

SEQ ID NO: 169226 - protein, 344 aa, unidentified
MKCYAALDVGLRTVALCIVDETGEIRLERSLPSEVDDIVHCLRGFDGQIACVGLEAGSLTQWLTYGLRAAGFKPVVLEARQVQAALAAMRNKTDRNDARGIAQILRTGWYRPVHVKSIESHYVRTLLAARKALLRKCIDLENEVRGLLKVFGIRLQPGLRHGAFDKAVREPIEANAELCHALVPLLDVRLELYKTFLEMDRRVKALAYSDQICRLFMTAPGVGYIAALTFKAAVDDPGRFKRSRTVAAHFGLTPRRYQSGERDNPGHISKAGDSEVRAALYAAANIIMTRSSKSSTLKAWGNRLAKSKGRKRALVAIARKLAVILHTMWIDGTEFCLKPQGAAA

SEQ ID NO: 169227 - protein, 340 aa, unidentified
MEKASMIGLDIAKNVFEVHGRNAAGEVVVRRSLKRGQVEKFFAKLPKALIGMEACGSAHHWARVLGKLGHEVRLMPPAYVKPYVKRNKSDAIDAAACWEAVGRPDMRFVPIKTVEQQAALSLHRSRDLLVSQRTQLTNALRALLSEFGIVAGKGRAGLARLVDELRAGTLELPADAVVAATALADQRAALDAAADALERRITAQAKADKNAAMLQTAPGVGPLSAHATLATMPDPALFKSGRDFAAWLGLAPRLNGTGGKTRTGAITKQGNSPLRRLLVLGATAWLRQVKARPEKASPWLRGMIARRPSKVVAVAQAARTARILWAMLSHNQPYRAPAVG

SEQ ID NO: 169228 - protein, 352 aa, unidentified
MVYNSQDYDIFIGIDVDQKSFSFTVKDHGQMNRSYKIPADPENLYRHIENIYNGKRVICAYETGGSGYHLHDYLTSRDIRCLMVPPVSIPKAGNDRTKNNRLDSERISQHLKNGDMSPIRVPDYDFRELRQLIRSRQDYVNLGRITKQRIKALLLFSHLNPLIKDTLQNWSNRYLKRLRTVSCTPATRQRLDLLLADLDYARSQQLKVIKELKAIALENSCLTTNVHFLRSIPGIGFITATTILAKIGNPRQLNNPRELGAFIGLVPREHSTGDKISKGSITHMGDVFLRSLLVEASWVVIRKDKRMRQFYDRIRCRHHPHIAARKAIVAVARKLTLIIYRVLKEQREYIAY

SEQ ID NO: 169229 - protein, 341 aa, unidentified
MSDYSYFCGIDLAKNHFSLHAVDQNGKVLLHKSVTRSKLLTTIANMPLMRIGVEACGGAHYWARTLNKLGHDARIMAVKYVIPYRTKGKNDLNDAVAICEAVQRPSTRFVPVKSPEQQAILSVHRMREHWVRERTALMNRMRALLSEFGLIIPVGRSSLMKQVPLMLEDAENELPHLARTVIADAYHHLGELNQRIADTEQVFDSFAKVSDNVQRVMKVRGIGPQTATAILASIGNGSQFDKSRDFSAWLGLVPKQYSTGGKPRLGRITKHGDKYLRTLLVHGARTVIANLGDKQDKLSRWCRGVLERRGMNRAVVALAAKNARIIWSLLHNQTEYENYAA

SEQ ID NO: 169230 - protein, 370 aa, unidentified
MLDTTTFVGLDVHARSIKAVSLDVMTREVRAATFGYDTGAVAEWVRSVDPRARCVYESGVTGFDLQKRLSGLGVDCAVGAVSKMIKPSADRRRKNDRNDAEFLARMLSVGNVVEVWVPDDECEAARDLTRALEDARDDLSRSKQRLSKFLLRHGLVFDERTPTGRRKGNWTRAHWSWIESIRFAERADNDVLAYYVDAVRRAAEEKARLEGLVEAEARKPRWRKRVDSLRCLKGVDTASAADLVFEAGEFSRFRNARSFAAWVGLTPSEHSSGESDRRGAITKAGNKHLRKTLVEAAWHYPTCSGRPKGLAKGQAPDRGARRHAAKGVRRLVERREALLARGVHGNKANVATARELACWVWAVGLMAEEA

SEQ ID NO: 169231 - protein, 461 aa, unidentified
MECYLGIDVSKGYADFMLLDTEKTKLEKVFQLDDNRAGHDTLKKLLEKLIDTHRISMLYCAVESTGGFENNWYSSLIGLSKAMKLKVARLNPSGVKQNIGAGLNRNVTDALSAYYIAEYLISHPEKVDYNEQSNSYASFRSINKHIKLLLKQQTQIINQLKMNLYSAFPEMVCYCKSSVPFWVLEVLSKYPTASALKNASVAKLCKINHLSLERAESLIKKAKTSVSSRSDDAEGFLVKSLARQIIEKQELVKEHKQYLAKHCKGEEVTLVESIKGIGTYSAAAIMVEIEDIKRFASPKKLVSYFGLHPELKESGDKKAIARMSKKGRSSMRNILYMCAQAAVIHDEHFKQIYHNQRSKGMGHKQAIGVIMQKMLRIIWGVLTHQKTYHSNIDKTNQDRKVVTVVDNNEKQELKVKRRYSPSTTDAPISNKQSKKRRVQIESQVEHVEQVRDHQNTPGVKI

SEQ ID NO: 169232 - protein, 386 aa, unidentified
MIYAGVDIAKTDHVIGAVDERGAETCPPMPFKNTEAGLERAVAWLEGLAGSPSDVVVGMEATGHYWMACYSFLVARGYSVAVINPMQVKAVRKLKGLDKVKNDRVDAGLIAEALRIGQYDETRLATDEVASLRSLSRYLQSLRGMVAELKTQCICLMDAHFPEYAGVFSDMFGAGSRAVLSKSPLPFELARRRADSLARDIAEASRRGGKSSGYAAKIKAAAKSSIGVRLGQEAASFQVKSLIRQIEFADSECAGVDEVEPLVLTIPGVSYVTGAQIVSEIGDVSRFRNAPALVSYAGLNSSVSQSGKFDSGGGPITKHGSPYLRRALWLAANRARQYDPGLRAFYDRKRAEGKPHRVAVTAVARKLCHIVFAVMRDRVPYDPGRE

SEQ ID NO: 169233 - protein, 373 aa, unidentified
MPRYSTAFGMDVHLRSTTVCALDAETGEAVARRFRGNPWGEVAEWMSGFPGPSLAAYESGYLGFAPQRELSALGVDCVVAAVSKVPRSAADLSSKNDRNDAARMAKAILSHDISPVWVPSPEIEGLRDLAGAHDAATARLAAAKQRLLAFLARRGYAYGGTTPAGNPRKDWTYDFLRWLDKVRPADDGGIRALAALRNEVEAAAETRDDLLAEYRAAVAAGPLSAEVEALQSIKGCGFALAAAFASEVGDFSRFRSGRQVTSYFGLAPKQRSSADSVRLGGISGAGNALVRRLAVEGSWSYIQASHQPKLMPKGSGVPLEVRMHGRKGSERLLRRRKEMLARGMPQAKANAATAAELVRWLWALGAMCREATE

SEQ ID NO: 169234 - protein, 393 aa, unidentified
MRYLGLDVHRDFCEVAICERGRARSIGRIDTTRDALELFASSLAPDDRVVLESTGNALAIANILRGHVADVVLANPMQVRAISHAKVKNDRVDARTLAELLAADLLPQVWIADEQTRVLRRLTSRRTQLVRQRTRTKNEISAVLVRNLIARPQVSDLFGRAGRRWMATLVLPVDERHTLDGCLRQVDFLADELAVIDRAIAERVLASKDMRRLITIPGVDATTAATMMATIGRIQRFPTPRQLVGYIGLDARVRQSGNRPARHGRISKQGASAARHVLVQAAWAAIKTPGPLHAFYLRLKARRGAQIAIVAVARKLTILAWHLLTKQQDYAHQRPVLVARKLRRLELQTGAPRRPHRRITGPNTDKHDLHRARFAETVYTELTTDWTPRPLRT

SEQ ID NO: 169235 - protein, 407 aa, unidentified
MKAVYRCCCGIDVHKKLIVACLKKGSRQEVREFGTMTSEIKELTGWLQEAGCEMAAMESTGVYWKPLYNLFELMGQEVIVVNAAHMKAVPGRKTDIKDAEWIAELLQHGLLKASFIPSREQRELRELTRYRKSLTEECSRELSRLQKVLEGANVKLASVVGDIQGKSARRLLDRLAAGEPLGREEVLPLLYKTMQPKLDDIISSLESITTPLQRALLRQILDHIDDLNKRVAVLDEMVEQYMAEYAQALDAIDEIPGIARRSAQVILAEIGLDMDRFPSAAHLCSWAGVSPGNHQSAGKRKHGRTNKGNKTLKSMLAQCAKAAGKVKNSYFYAQYQRIAARRGKNRAAIAVAHSILTVIWHLLKHNVPYCDLGADYYDGFHREHKIKAYLKRLQALGWEPQPPAIPA

SEQ ID NO: 169236 - protein, 389 aa, unidentified
MKIFVGIDIAKLNHFAAAISSDGEILIEPFKFTNDADGFQLLVSKLESFDKNSIIIGLESTAHYGDNLVRYLVAEFYQVCVLNPIKTCQMRKNNVRKTKTDKVDTFVIAKTLMMQDDLRFITFFDLDMMDLKALGRFRQKTIKQRTRLKIQLTTYVDQVFPEIQYFFKSGLHQNAVYALLKEAPSPKEIASMHMTHLANLLKVNSHGHFTKEQAKELRVLAQKSVGANDSAISIQITQTIQQIELLDSQLEKIEAEMTDIMKFNDSVIMTIPGIGYINGGMILGEIGDIHRFSNPNKLLAFAGLDPSVYQSGNFQAKTTRMSKRGSRVLRYALVNAAWNVVRNNATFKAYYDAKRAEGRSHYNALGHCAGKLVRVIWKMLTDNVEFNLK

SEQ ID NO: 169237 - protein, 421 aa, unidentified
MHEERRWFVGIDWASQEHVVTLCDGQGKKIGQRKFAHGGTGISDMIAWLLQASGGQPGEMHVAIETPHGPIVEALLERGFNTYSINPKQLDRFRDRFTVAGAKDDSLDADVLADSLRTDMRLFRKLSVAEPLIVELREWSRIDEELKVERVRLANRLRDQLWRYYPQMLELGDLDEDWMLDLWEAVPTPEKAGRASKAAIGRVLKKHRIRRFDAAGVLSELRKPALRVAEGTIEAATAHIRVAVERLRLVNRQLADAELQLDRLCKKLAELVAGDEGENVPGQRHKHRDATILDSLPGVGRTVLATMLAEAPDALQRRDYHGLRTLCGSAPVTRRSGKSCIVTRRRACNRRLSNALFNWGRVAVQHDPRSKAKYEALRARGHSHPRALRSVIDRLLYVACTMLEHGTLFDPSFAEAKKVAA

SEQ ID NO: 169238 - protein, 354 aa, unidentified
MDTTPAVAKSVSTPQAFVGLDVSKDTLDVCLLIESKRHEKQFANDGAGHRQLLRWSHSLAKESSCHFCMEATGPYSQSVALFLVEQEQLVSVINPARIRFFGLAQNQGNKTDKADARLIADYCRMQCPPPWRVAAPEVRLLQEMVRRLHALSDLAAQEKNRMQAPGQCKTVLASSKRVVTALEKELLRLKKEVRSHVKAHEDLFRDSKLLQSIPGIGEITSWDILAEMPDVQEFDSAQSVAAYAGLAPREQRSGSSVRKQTQLSKRGNSRLRKAFYFPAVSAMTWNPLVKAHYERLREKGKPKMVALAACMRKLLMICYGVLKRQKPFDPKWLSHASSQSSSELAVSSNLLPVR

SEQ ID NO: 169239 - protein, 323 aa, unidentified
MSSFVGVDVAKNTFDIATHLPNGKHKTKAKLPNDAKGFKEFEVWLTKQVEPSALIVMEATSVYHLELAEFVYNKGYRVCVVNPATTHAYAGSELRRIKTDKSDAKLIADFAREKNEKLKLWAPEPLKYRQLKAMVRRLDDLQEMEQMKRNRLEVSDEKVKASINSVLRHIEKEIAETHKAIKKHIDDDPDMRQMRDLIVTIDGIGQKTIERLLAELGDLRKYDDPRKLVAAAGLNPKLHDSGQLKGRSTISKIGSVRVRAGLYMPGLVALQHNEAIKAMKDRLKANGKAPKQIICAAMRKLLHFVYGVLKSGQPYDPKLALAR

SEQ ID NO: 169240 - protein, 382 aa, unidentified
MQPNDTGNPTILLAIELSASTWLVAARVPGSDKPHLHRIDGGDTAALLALVSSLRDRVARRLGAATAVVCCFEAGRDGFWLHRLLTAHGVAIHVLEPTSILVNRRARRAKTDRLDAEGMLRVLAAYLRGDRQACSMVRVPTPEEEDAKRMHRERESLVQERLRIENRIEALLFTQGIRKRPSLRSWERDLAVLRTGDGREIPSHLRLELDRLRRRLLMTLELIREVEAERDEAAETKPQDETCRKIAALCRVRGIGENFAAVLTREVFYRSFDNRRQIASYVGITPMPHQSGGMDRDRRISRAGNPRARTTMIQLAWLWLRYQPGSELAEWFRKRVGTLAGRTRRIAIVAMARKLLIALWRYAETGVVPAGAEIRAAATVAA

SEQ ID NO: 169241 - protein, 352 aa, unidentified
MDKGSKLDFTGQHIYIGMDIHKKSWSVSIHTEQFEHKTFNQPPEVEKLTNYLQRTFPGATYHSVYEAGFSGFWIHDRLTEEGIHSMVVNPADVPTKHKEKTGKADKVDCRKLARNLRSGDIKGIYVPSRVQAEDRHLIRTRQSMVRKQTRCKNQIKAVLFFYGILIPEEGHWSRNFINWIETIRMERASGDLALKVHLEELKHLRQIIAGLNKAIRALSRTDTYRDKVLLLRSVPGISTLTAMTLLTELYDISRFSSLDKLASYAGLVPDIKSSGETEHTSGITHRRNPALRMVLIEASWVAARKDPALIMAFNKFSLRMKKTAAIVHIARKLLNRVRFVLMNQERYVPAVV

SEQ ID NO: 169242 - protein, 411 aa, unidentified
MATSTVQSVRFIGLDMHKHYVMVGAVNKEQEVLLRPRKFTWPEFDRWQQQHVGPADAIVLEASGNAWHVYDQLTARGATVSVANPLLVQWIGAAPVKTDAHDTLKLAKLLAANLVPTVWVPPAPVRALRTLVGQRQRWIKQRTQARNRLQGLLQDHNLLPPEGDVFAPAQRAWWLALDVSAAERLLVAQDLLALEQLAPLIDQVETALQMQSTCEPWADQVPYLLQQTGIGLLTAMTLLAAIGDISRFEHPNQLVGYAGLGARVHASGETHATGGITKQGRRELRAAMVEAAWVAVEHNAFWQAKFARLAQRLGAAKAIVAIARQMLVSVWYLWHNRTVDRHSDALAIAHKLWTWAEQGGKPMRHGLSCSHFVRYQLDQLGIGQELTELRHGSHVYRLPPTGSDAHLPAAN

SEQ ID NO: 169243 - protein, 309 aa, unidentified
METIVGIDVSKDRLDVAVLPQGEAFAVDNDDAGIGELTGRLKAIGADAIALEATGSFETQAVAGLSSAGLTVLVVNPAQVRAYANAIGRKAKTDPIDAAVIAAFVLATKPEIRPLRDAETQALSELVARRRQIVQMIVAEENRLRMVLARQAQKSIKRLLAALRRELESLDADLDDHIRKSPIWRVRESLLVSVPGVGPTTARTLLAELPELGSLDRRQIASLAGLAPWTRQSGKWKGKSFIGGGRGKVRAVLFMAALVASRHNPGLKAFRDRLVAAGKPKIVAIVATMRKLLTILNAIIRDAKPWQNA

SEQ ID NO: 169244 - protein, 334 aa, unidentified
MALELLAIDLGKRSFHLYGIDTDGVILSQKVSRAKLAEVVANLAPTVIAMEACASAHHWGRCWLAAGRKVRLINPRFVKPFVKGSKNDAVDAEAIFEAAMRPTMRFVPVKSTDQQDLQSLHRARDRLICQRTALINHTRGLLAEYGIVLRQGRWHFATQASAAIADADLSDLARVIFGELLDQLDDLDRRVKRLDATMVALCRTNAICRRLAKLPGVGPVVATAIVAAVNDGRQFRSGREMAAWIGLVPRQYTTGGKPRLGGIGRRANHYLRRQLIHGARAVVSRLPKHDDPRSIWLKALLARRGFNRTIVALANQTARIAWALLSRKEEYAIA

SEQ ID NO: 169245 - protein, 389 aa, unidentified
MPTVADRPEAQTAIQTNLAAIFISLELSRSIWLITSLSPGGGEKMSKHSVPAGDIAALLARFSELKQKALARTGKSFPIVTIQEAGLDGFWLHRVLQSEGIESHVVDPASIATSRRRRRAKTDRIDGEALLRALLAFKRGEPRVCAMVRAPTPEEEDRRRLCRERKVLIAERVKHVNRVKGLLFSQGVSGYEPLRRDRRQRLDELTTGDGRPLPTHLKTQISRELDRLELLLDQIKAAEAERDALLAAQQPATPAPAGRMLLDLKGIGPEFAANLWLEGLFRHFDNRRQLASYAGLAPTPWQSGSVDREQGVSKAGNPRLRTTLIQLAWLWLRHQPQSALAQWFKERVSRNGGRLKKTTIVALARKLLVALWKYVTAGVVIEGAVMKAA

SEQ ID NO: 169246 - protein, 419 aa, unidentified
MPKSNTCKQLAQVRPRTLHAGVDLALEKNVVVVINDPAQQLDQFSFSQDRSGYDYFLQRLEGLRQKHQASEVTVAMEPTNYFWKLLARELEQKKIPYHLVNSYTVKRHREGDQLDRSKDDRRDAKQIAELSRTGHYTQTRLQQGAYEDLRQYGRLYDQLNQSVRREKQVLWGLVGQVFPELSQVFKNLEGDTSQALLAACTPAALIRQMTIETFITKVRSAYTGKRLLISKLARLHQLSSGSIGVTEGLPAIQLAIQVHLKSLQSLQKELEQVTSAMTDSLVSLPEAPYLLSIKSLGPVSAATFLADVGDPKRYQAAAQWVKLAGIQPVPRTSGKKQRSPTSMSHQGRPRLRTMLYFTCLRMVQQDQHFAQLYAHLQKRKKNPLTKMQALGVLMNKLLHILWALIHNQSFYNPAFSQSA

SEQ ID NO: 169247 - protein, 356 aa, unidentified
MTEQHGSVESPVEVTGGVDTHKDVHVAAAKDALGRVLGTAAFPATTVGCTALWVWLCGWGTVVAVGVEGTGSYGAGLARSLSAQGVRVVEVNRPDRAKRRQHGKSDPQDAINAAAAVQSGDATATPKAGTGIVEAIRMLRMVRAGAVKSRTVALNQLDSLIVTAPAALRASLTGLRGSARLAHCAALPAGIDRANPTQATMTALRRLAHRIGHLSEEIAQADTDLRALTAQAAPRTLARFGVGPDSAAQLLSTVGDNPDRLHSEAAFAHLCGVAPIQASSGRTTKHRLNRGGDRAANAALHRIVIVRLRYCERTRTYLAKRTSQGLSKRDIIRCLKRYLAREIYNALRADFTALSA

SEQ ID NO: 169248 - protein, 348 aa, unidentified
MRFYIQQHQYYCGIDLHARTMYNCILDQAGNTLLHKNINTKPELFLKIIEPFRDNLVVAAECIFTWYWLADLCAKECIDFVLGHALYMKAIHGAKTKNDRIDSYKIAKLLRAGMIPMAYVYPAKMRSVRDLLRRRMHFMRKRAELRAHIKNTNSQYNLPPLGHTIPHRSNPDDVQAQFTDPCVHKSVQVDLDLIGYYDKMLKDLELYIHRIAKSHDAKDHYLLRTIPGIGPILSLVLLYEIENINRFPRVQNFSSYSRLIKPIKESAGKRTGKSNKKIGNAHLKWAFSEAAILMMRERDEAKKFVQRKQSKHGKAKAIAILSHKIGRTVYYMLKHQRPFDPDKFFNKK

SEQ ID NO: 169249 - protein, 362 aa, unidentified
MKEKKTRFIGIDLGKRTYVMAIAGKGGKVTMSNGKTTAEGRQKLYSKLQPTDKISLEAGTLAFIMAKEIEASVGCKVYVLNPYRLSIIYKSMKKTDKEDALKLAHIIEDFQEERLPLVAVPSDKEIERRKILAGYRRAQQGRNREINRLHALFVNQGITSVARKDLAEDEQRKESIKVLTGLEREEAEYLIEVLELHEKRIEALEKKMKKETEGNEMIQRLQEIPGVGPMVSFAFSAHVGAERFENAGQLSNYLGLVPRVYMSGDTVRYGSITKRGNSYLRALLVQASWALIRTKKGGKLKARYEYMTKEKAMGKKKSIAAIARRLAELMYVLMRDGTRYEARPFIRNNEAVRDISGIKFSA

SEQ ID NO: 169250 - protein, 338 aa, unidentified
MVVIGIDPHKGSHTAVAIDEDETKLDEVRVRADRRQLEALKTWASAFPKRSWAIESANGLGALLSQQLVGAGEEVFDVPPTLSSRVRVLASGKSQKNDPNDAFSVAIAALRSSRLRVVVVEDHIAVLRLLWNRHKNLTSLHTQAVCRLHALLAGMVPGGLPRRLSADRASALLSGSRPRTAVEKARKAQAHDLIGDVRRLDAQLKASKRTIVEALSSVPTGLGELSGVGPVATCIILAHTGDIRRFASQDDYASYNGTAPIDASSGPRKRHRLNPRGNRQLNHAMHIIAFSQLSHPGPGRDYYERKVAEGKSQKEAVRSLKRQISNVVYRQLVADSQR

SEQ ID NO: 169251 - protein, 332 aa, unidentified
MFNCIGLDISKKLIAVHIPINKADIEIENNTESIKALYSKLKKLYKKEINDLVFIFEPTGSYSFALTKFCNEKSIKCFMVNPKQFSNYAKALGQRNKTDLIDAQVLSQAIHLAKDGEIKVPYINHVVEEMKELISYYKFISKKTTKTINHLEAITAKDGNTYMINDLKKSIKEYKKKEAEILSKVKNIISSDEKLLKGFNNIKSIYGIGEIGAIVLLHLFIKYPKANQRQIASLAGLDPIEKTSGTSVHKKSKISKAGSRVYRGSLFMGVLTAIRFDENFKNFFERLKSNGKHTTLAQIAVMRKMIIIAHSLYKNDRKYDKEFHKKCCGVQE

SEQ ID NO: 169252 - protein, 376 aa, unidentified
MERGSLMLNTTTFVGLDVHARSIKAVALDAMTGEVRSATFGYDAAEVAGWVSSVDPSAKCVYESGVTGFDLQKRLSSMGIDCVVGAVSKMIKPPADRKRKNDRNDAEFLARMLSVGNVVEVWVPDDGCEAARDLSRALDDAREDLKRRKQRLSKFLLRHGYVFSETTPTGRRKGNWTAAHWAWIKAISFPEKADNDVLAYYVDAVRQAMEDKARLERLVEAEASKPRWKRRIDSVRCLKGIDVTSAADLVFEAGEFSRFKSARSFAAWLGLTPSEHSSGESVRQGGITKAGNKHLRRVLVESAWHYLGCSPHSKDLAKGQAPDPAARRHAAKGVRRLVERRRAMLERGVHKNKANVATARELACWCWAVGRMAENG

SEQ ID NO: 169253 - protein, 295 aa, unidentified
MQLYCGIDLHSNNSVISMIDDTDRVISEKRLNNDLDTITEHLKPFAQDLTGIVVESTYNWYWLVDGLIENDYTVHLANTLAIKQYNGIKHTNDETDARFLAHLLRLNILPTGYIYPKSQRHVRDMLRRRLLLVRQRTAQLLSLQSMITRHTGKRLTSYQVKRLTKDKLPLYFEDAPTLFTASHALQLMQQLKIQVEEVEDFVLSYCKHNTPFSIITSTPGIGKILGMTILLETGPIERFLQVGNYSSYARCVPTNKISNGKSKGKGNARNGNRYLAMAFVEAAHYATIWEPTIKR

SEQ ID NO: 169254 - protein, 367 aa, unidentified
MGEYSEVFVAFDVAKKKHAVAIAEGGRTGEVRFVGEVENSPAAIERTIKRLGKKYDRLHVCFEAGPTGYGLCRQVRDLGCDCMVVAPALIPKRPGEHVKTNRRDAVTLARLHRAGELIGVWVPDVVHEAVRDLVRAREAAADDLRRKRQQLLSFLLRHGRIYASGGHWTLAHRRWLAHQSFDHTAQQIVFQEKIDAIEDAAQRLHRLDEQLRAVVPTWSMARVVEAYQAMRGASFAVIFAAEIGDVRRFDTPPQLMAFLGLVPGECSTGDTVRRSSLTLAGNRRARRALVEAAWTYRYPARVSEGLRVRLEGLPKAVRDIAWKGQVRLCARYRRLSAAGKKPPVVAAAIAREMAAFLWAIGREVAPS

SEQ ID NO: 169255 - protein, 340 aa, unidentified
MHKSSAEAFLSCGIDVSAAQLVVALEGEGGSWRQRSFTNRAGGHQALIRWLQKSGERVRICLEATGRYSLDLALALHAASGIEVAVLNPKVVHAFAATLCRSKTDPADAQVLAEYARRMAFQPWHPPRAAALELRAITRHIAALTQQHTQQSNRLHALSASSTGSGWVRQDLKRSLRDLERRMEKMRGAALALIAKDAELHPRWAQLLSMPGIGEISALSLLGELALLAPGLSVRQWVAHSGLDPAHHDSGSSVHKRARISRAGNRYLRRALYMPALVAVRRDPHLRAFYQALLARHKAKLQALMAVARKMLHAIFGMFRGNADYDGSRLFPGLELAAAA

SEQ ID NO: 169256 - protein, 308 aa, unidentified
MERFVGIDVAKDTLEVFIRPDTIQKSFANNETGRTDLARFLGKTGSDLVVLEASGGYEVPVVEVLALHKLNVAVINPKQVRDFAKATGKLAKTDAIDAEVIARFGEAIRPEIRPLKDADAQRLQALVARRRQLVRMLTEEKNRLHSASSWTKPDIEAHIAWLTGCINTIGKDITTFIKKTPLWREKENLLRTFKGIGPVNAVTLLVRLPELGHLNSKKIAALAGLAPINRDSGRFRGRRTIFAGRADVRAALYMATLSAKCHNLAIKVFYERLIHAGKLPKVALTACMHKVLIILNAMVRTNTPWYAR

SEQ ID NO: 169257 - protein, 352 aa, unidentified
MKAINAEEMLQITWVGIDVAKDSYDAAIYLPLDLNQKSRDILKLPNRHFERTPESLDAFHHWTFKIREQAGVGGGQMRVVMEATGRYSSELAGWFQEKMSFTRPAILNPKMVADYRKSLYPGNDTDMIAAAALARFGAERQPERKTEYPAEYIHLRELTRQRAFLVSQRTTANNRLKEVANTIFVADVQREVVATFEQAIEKIELEIKKCIEESDELRENIVYATSIKGIGTMTAATVFAECGPLNNYNSRQLSSYSGLSPFKHTSGTSVNATRITRNGPKQLRRALYMPVTAMLKCNPEMQAFRQRLLSRGRTRMQARCAIMRKTLILIRALVVNKTSYQKNFKQNISVKS

SEQ ID NO: 169258 - protein, 422 aa, unidentified
MEIIYSRCAGLDVHKQTVECAVRLAEPKGSAPVEVRQFGTMTDDLWERVEWLKAQRVTPVAMESTGVFWKPIYNVLEGHFTVLLVNARHVKQVPGRKTDVRDCQWLAQLLQCGLLKASFIPPRWQRELRDLTRERTQLIDEQTRVANRIHKVLEDGNIKLGSVATDILGVSGRDILQGLIAGQEDPEKLAEKARGRLRAKIPQRRLALRGHLREHHRFELRLHLDHLQRLEELIARLNERVAELCKPHREQIQLLDGIVGLDQAGAESVVAEVGVEMEVFPTDGHLCSWAGICSGNNESAGKRRSGRIPKGDRWLRRTLVLAAQAASHAKDSFLASRFRRLAARRGKKRACVAVGHSILRIVYHVLKDGRPYRDLGGNYFDRLDPERLTRYLVRRLERLGHQVSLAPAPSIQVPNRLSPTTV

SEQ ID NO: 169259 - protein, 347 aa, unidentified
METETFVGLDVAKNSVVATAVDPLGRLIDQSTLGPTDQELIEYLRRLPGVKRVALEACTMWEHYHDAAVASGAVVMLSHPSKTRLIADASLKSDKVDSEALATLLRLRALPTAYVPDETTRMLRRVVRDRVFYRKQYEAAANHVYSRLIAKGIAYEDGILGFKRRREGLRSLHLPEVDRDLDRLQDLDKATRELDTAIHAAFDESPEAQLLESIPGIGELTAVVLVGFLCPIGRFASFEELSSYCGLYPTNYQTAETARKGSLKSDCNHILRWILVEASYIHRQRARGSYVARVGRRGARRKGAKRGAIDAAHALLRVIFAILKRGTPYTPHAPERPSCRAGTAASR

SEQ ID NO: 169260 - protein, 344 aa, unidentified
MHIATIGLDLAKNVFQIHGIDADGDAVVRRRLRRSQVFEFFAGLEPCLIGMEACGTAHFWARVLMSLGHEVKIIPPSYVKAYVRRGKNDAVDAAAICEAVTRPNMRFVPIKSEEQQAALMLHKSRALLVRQQTMLVNAMRAQMAELGMIAPQGRARIKELIAVIEDDAQDSIPALAKAALKPLVLQLRAGEAAISALDDEIKAWHLSDEASQRLASIPGVGILTATAISATMGDPAYFKSGREFAAWLGLVPRQNSSGGKDRLGRISRQGNRYIRRLLVIGATSMLRRAKDRSAPGGEWVNSLLERRPARLVTVAMANKTARIAWALLAHGETYRAPSAPAMAR

SEQ ID NO: 169261 - protein, 425 aa, unidentified
MKITQTAEKIKGNFAMDVSVDVHKDTLNCFFETGGREYYDEFRNRNTMISKKLKAYHEIAMEHGRKTLRIICEPTGQYQNKLFRTARHMGFLTCLVSTESVAKFRVIETNDTGKTDIKDPRVIRTLGQLNKTIRHRHLDNEYLVLRKYNRIYDEAECAIISLKGRINKLLVELFCDYSFQKDFLYSASGTALLEKFHCNPYRIVTAGYKRFRRTMKKAAPRIWETSLQRLWDDAQSSVLNELPDDYIETLQTHLQQLIHDYREQAYRKEATTEKMIRLLNRLRKKDPNIPPATRGVINDKNLARLIGETGPLCDFANWRLLMRYAGLNIRMRQSGKYKGENKITKKGRVLLRKILLNIALPLVKRGRMYGDYYHRKKEVDRMVGNKAMTCVARHFLRKFYGWYKSGEVFNRDRFFTCETQYRKAA

SEQ ID NO: 169262 - protein, 349 aa, unidentified
MTLYIGVDFHPHQQTTAWCDTRTGETRTSDLVNDPEIVREFYSSLPEPAMVGIEASARATWFENMLFETGHKLFVGNPVLIRKRATSRHKNDRRDAELILELLLRGEFPAIWRRPPESESVLEILRLRQTLVRQRTQSYNRLQALAHDVGLRKGRIRTIGFQKLVKASEMTEVASIRRTHLFSLVGKLSEQIAELDQWLQKMADNDHSVQLLLSQKGVGYLTALVTVHTLGDVSRFPRLSKQIASFAGLDPVEKSSAGKTRFGSISKSGSRLLRYHLGLAAQIASRTDPKLKSFYKRLAKKKPKAVAKTAAARKLLVKLSIMLRDRITAEEFDRRGRTVGNARGTTDLK

SEQ ID NO: 169263 - protein, 412 aa, unidentified
MLFVGNDWAADHHDVEIVNEQGRRLARRRLPEGLDGITRLHALIAQFFPEEWAELEPAEAASRVKVGIETERGPWVQALIAAGYEVFAINPMSVARYRERHSTSGAKSDSGDAHVLAEIVRLDRAHHRPVAGDSELGEAIKLVARAHQSLIWDRTRHILRLRSVLREFFPAALEAFADLAAADTLELLAIAPDPDRAARLPKSKIVAVLRRANRRGVEEKAATIQSVWRAPALRQPTQVQAAFAVIVTSQVRVVTALNLEIGQLGEVVAHHFGRHRDAEIYASQPGLGVILGARVLAEFGDDRTRFEDAKARKNYAGTSPITRASGTRKVVLARYARNERLGDAIQQWAFGALKGSPGARAYYDTLKARKIGHQAALRQPGNRQVGIQHGCLKTGTLYDENTAWAHHHTAAA

SEQ ID NO: 169264 - protein, 316 aa, unidentified
MTSPQPFVGIDVSAKRLDVAVLPAGTHFTVAHTDEGIASLVRRLRELGPQIVVLEATGGYEIPAAYAMSEASLPVVIMNPKVLRHFAKSTGKLAKTDKLDAQVLAHYAQAIQPPVRPLKDPEQHELATLMSRRRQLQGMIVMEQNRRRTSTPKVRHNIDQLLAYLRQLLNDLDREIHDFIRRTPLWHEKQEILRSTVGIGPKVSASLIADLPELGTLPGPQVTALAGLAPMNRDSGQYRGKRMIQGGRPAVRQALYMAALVASRHNPVIREFYQRLRQAGKPAKVALTACMRKLLVILNAMLKNNTHWEDRLPIAA

SEQ ID NO: 169265 - protein, 381 aa, unidentified
MTTAVTHKTNVHTTEATLFVAFELSEKIWKLGFTMGHGQKPRERNVTARHQERVLDEISLAKHRLGLPETAPVVSCYEAGREGFWLHRFFLAHGITNHVVDSSAIEVSRRQRRAKSDGLDVRKLLSMLIRYAQGEHQVWQVVKVPSAEAEDQRHLHRDLETLKRERASTTTRIQGLLSSQGIQVSTLAKLPEQLDTLRLWDGTPIPPGLRRRVLRVYAHHTFLTEQIAAIEAERRAQLQTSSDASIDQIRQLMMLKGIGINGSWLLVREFFGWRAFKNRREVGGLAGLTPTPYQSGESAREQGITKSGNPHVRWMITELAWSWLRFQPESALSVWFRARFGDGGKRLRRIGIVAVSRKLLIALWRFLETGVLPEGAVLKEG

SEQ ID NO: 169266 - protein, 342 aa, unidentified
MKITTIGIDLAKNVFQIHGADARGKAVLKKALKREQMAAFFTNLPPCLIGMEACGSAHYWARKLEALGHTVKLMAPQFVKPYVKTNKNDAADAEAICEAVTRPTMRFVPIKNGEQQAVLAVHRARQGFVKARTAQANQIRGLLAEYGIAIPQGISHLATSLPDILEDGENGLPGVFRQLIDRLGAHLKELDRQVGELEVQIQTWHRANDASRKLAEIPGIGPITASALVASISDANAFANGRQLAAWLGLVPKQHSSGGKQTLLGISKRGDSYLRTLLIHGARAVIRLADRKANHAGSWLAGVMGRRNKNVAAVALANKNARIVWALLAHDREYTAAYAPLA

SEQ ID NO: 169267 - protein, 366 aa, unidentified
MPVVRGERVARYACGTPSPWVSIWRALATVLWEPEQLIDSRSHLQGWETENMPEPIHVGIDVAKDSLEVAFGAEAATRSFANEDDGHEALIIALNAHSVELIVMEATGGYETPCACALQAGGFAVAVVNPRQARDFAKAMGHLAKTDRIDAQVLAAFAAVLAKRPDREKVARALPSEEQQRLHAMVLRRRQLVQMLVAERNHLASSHRAARRSIEALIKAIRKQIVEIEGDLASHVARHHAEVAKLLQSAKGVGPNTCMVLIADLPELGKLSSREITALVGLAPFNRDSGTMRGKRTIFGGRAQVRCALYMATIVAMRHNRVIRTFYERLLVAGKPKKVAIVACMRKLLVILNAMVRTHSRWSALP

SEQ ID NO: 169268 - protein, 371 aa, unidentified
MDESSKTLYVGLDVHKDSIAVAYAPEDRGAEVLSLGAIGTRQCDIDKLIRQLQSKGATLVFVYEAGPCGYWLYRYLTGKGLACHVVAPSLIPRKPGDRVKTDRRDAITLARLMRSGDLSAIYVPGIEDEALRDLSRGRDDALQDLKRSKRRLKSFLLRQDIRYEGRATWNAAHLRWLSEVVCPTPPQQIVFQEYVRAVTEQQERLQRVERELHEAVKGWRLYPVVEAIQALRGVELTGAIILMAELGDLTRFDTPRKLMSYLGLTPSEYSSGARRHQGGITKAGNSHARRALVEGAWAYRYPAKVSRHLQLRLEKLPAEVQALGWKAQVRLCKRYRQLTARGKHVNQVVVAIAREMAAFTWAIARIVPLAS

SEQ ID NO: 169269 - protein, 429 aa, unidentified
MTNDHSTAPTLLVAIDISKHRHEVLIGIPGKKRRRRMTITNSLEDFQRLVTALASYELPVRIGFEATGNYHRVLAHHLGQAGFDMKLVSSVGLARTREALHNSWDKNDPKDAQVILHMLEIGAVQFFHDPLVTGTADIQELSKTHEIVSRSKTELWHRILTHYLPLYFPEAERFHRSSRTDWFLAFLEKYPSPHMITVMSQEAFIADAWDVVGRKVSKERLLSDIYATAVSSVGLPVHPGSDAIRMFRLVLAEGRSLIRQRDVIEARAVELLSDLPDYQLLTTIPGIGPINAMTILAEAGDLRRFRHHRQFLKFCGMDLATVQSGMFRGQSRISKYGNARLRRTLWMAGQTAVLKRTNSFRDKFERYISKDRHNAHLRRKAYTAIAAKMARTVHAVVKQGAPYRPFFEGGEPRRKDLSLTSRGGSLLTS

SEQ ID NO: 169270 - protein, 345 aa, unidentified
MENMYYIGLDVHKKTISYCVKDGSGRIYAEAEIPATRLDLDMWMKTLPQPWTAAMEATIFTAWIYDHLKPHAAAVKVAHPLMLRAIATAKKKNDRIDANKIADCLRCDFLPECYMASTEIRERRRTLRYRNLLVRQAVQMKNKIAVLLMEAGVSYNKQKLHKVGYFRELLATNQDIDEGLKPLLRLCRETVVRLGKTESALVRSLQRDSLLMERVERLMTIPAVGPITALTWALEVGDVQRFSSIKKAISYCGLCGAENSSANIIKRTPLSKQRNKHLQTMLIEAAKMAPRNSPGLAMLYDREKQKGNANRATLAVARKLVAYLVAVDRRQKDFLVVESENRTAA

SEQ ID NO: 169271 - protein, 409 aa, unidentified
MEVVHVRCCGLDVHKRTVVACLLTLGEGGQPAREVRTFGTMGADLLQMREWLLAAGCRQAAMESTGVYWKPVYNALEGAVELLVVNTQQVKMVPGWKTDVSDAEWLADLLRHGLLRGSFVPPAPQRELRELTRYRAALVRERAREVNRLQKTLEGTNLKLASVATDILGVTGRAILEAVARGESEAAVLAGLARGRLREKRAELERALAGEVKPHHRLLIAEHLEHIGYLNEAIGRVSREIEERLGPFEETLGRLQTVPGVGPRTAEVLMAEVGRDMSRFPSHRHLASWAGLCPGNNESAGKRKSGRTRKGSPWLRSALVEAAWAASHTKRTYLSAQYHRLAARRGGKRAVVAVAHTLLVIVYHLLKGGETYSELGGNYFDERDSWQVERRLVRRLEGLGYTVCLQPAA

SEQ ID NO: 169272 - protein, 359 aa, unidentified
MIVIGIDPHMKTHTAVALDATTGAAVGELTVTCDGTGHDELLRWARGLGETRIFAIEDCRHVSARLERHLLPAGERVVRVPPKMMAGARRSARTYGKSDPIDAQCVARVALREPDLPCATLVGPGHDVRLLSDHRDDLVEERRRIIKRLRWNCHDLEVGLDLPPRVLTRGVWLERLAQALRSLPESTRRRIALDQTARCVELTDEIRGLEREIRSHMRVLTPELMEVPGCSALSAAQLIGQVAGASRFRSEAAFAMHVGTAPLAVSSGKCERHRLNRTGNRRLNSTIHIIAVTQARMHPPAIAFLERKRAEGMGNREALRCLKRHISRVLYKTMVRAERARAGGVVHVDFAPSPVAAAV

SEQ ID NO: 169273 - protein, 419 aa, unidentified
MEAENMEYAAWIGLDWGSQKHAICLKPADSETVEHYTLEQKPQALHGWFMNLIARFGGRKVAIAIEQTRGAVIHFLLCLACVHIFTIHPKSLKNYRDAIHPSGAKDDPTDAELLLQFLTLHQHRLKPWLPDRSEVRLLVRLVEFRRKMVGKRVRLTNELTQVLKEYFPAALDCAGDLDKVMACDFLAKWPTLEKLQESQPETIRKFYQEHGSRRRNVIEGRLKQIRSALPLTTDAPVIEPSVFLVQSIAPQLRSVIDAIAQFDRRINEVFEKHPDAQIFSSFPGAGAALAPRLLAAMGSDRSRFGSSQEVAEYSGIAPVTERSGKSKWVHRRFACAHFVKQSFHEFAAQSIMFCDWARCYYDQKKREGKSHHSAIRALAYRWIRIIYRCWKDRILYDEGKYVKALHQRKPDWAKFLRES

SEQ ID NO: 169274 - protein, 318 aa, unidentified
MRKSSTKACVCAGIDVGKASLSFAVAGGSGPLDCANTIDGRAQMIAFFKSQRVRRVGMESTGSYHFEVADDLRAAGFEVVVLQPMQVNAYARFKLKRAKSDPIDADLIAQCTAAYDAIRAAPDPRLAAFAEHLTMIDQIGDDIARLKTRRDRYRDPRLKQMLEDDIKQKTALKRQELKLLLKAVRAHKDLARKLHLLSSIQGVGEPTALALVIRMPELGSLSREQAASLLGVAPFIHESGRYKGQRRTGGGRARARTSLFAAALAAARQWNPALIALYDRLVKAGKPHTLAIIACVRKMIIYANTVLAQDRPWQIRQG

SEQ ID NO: 169275 - protein, 376 aa, unidentified
MEHDSTVYVGLDVHKDSITVAYAIGTGEVELLGKIGTTQADIDRLGKRLQSKGRHLRIVYEAGPCGYGLYRQLGEKGFDCMVCAPSLIPKKPGERVKTDRRDAVKLVRSLRAGDLSAVHVPDIEDEAFRDLARAWVTAKDDLKQARQRLKSFLLSHGVRYTARADWGPAHRRWVSQYSFASEWQQLAFEEHRRTIEDRLAQCERLAAALRDAVVNWRFYPAVLGLQAMRGVQFVTAIGILAELGDLSRFEHPRQLMAWLGVTPSEHSSGGKRRQGSITKTGNSYARKLLIESAWSYRHPARVSPEIQRRHEGIPKAIIDRAWDAQIRLCRRYRKLAVRGKHANVAVVAVARELSGFIWDISRLAMSLAVPRTRQAA

SEQ ID NO: 169276 - protein, 341 aa, unidentified
MDYFAGLDVSVKETSVCIVDDAGKIVREARVASEPDALLQVLTIYRFKRVGLEAGPLSQWLYSVLAEAGLPVICVETRHMRAMLKAQINKTDRNDARGIAQMMRAGLYRPVHVKTLRSQKLRMLLTHRKLLQSKAIAIENDLRATLRNFGLKVGMIGTIKFETRIRELVENLPDLAVLVEPLLIVRRVVREQLGILHRRLLAIVRDDDVCRRLMTVPGVGPVVALTYRVTVDVPARFRNSKAVGAVFGLTPAKYQSGEIDRTGAISRCGDEMMRMMLYEAAQSMLVRSTKWSWLKAWAMKITRHRGMKKAIVALARRLAVIMHCIWVDGTEFRWTREVAAA

SEQ ID NO: 169277 - protein, 431 aa, unidentified
MPAEEQKLAQNRAILPPSGVNPGGTPTRSVTQLDGAQGRMTMRIVALDLGTKKTSFCELSQGQVVQRLTVSDVCSLEHLLGPDQPPAQVAIEACREAWFVHDLLVQWGNEVVVIDTTRSKQLGIGQHGRKTDRIDAEVLARALESGRVPKAHVLPPQRREMRRVLLVRRTLVENRAQLVTTARGLVREQGVKIPTCHTSSFVSRVRAQQLPADIAQLIEPMLVLIQLIDSQVVSITERLDALCAQEPTVALLTTTPGVGTVVAACFVAVVDDAKRFHRAHQVESYVGLVPNENTSGGGKQRLGAISKHGNSYLRALLVQAAWTIVRSRDKSNPLYLWAAQLIERRGKRIAVVALARRLVGVLWAMWRDGTVYDTEHLAKQNVRGLRGAIQTLEQQSAALAQAAKKTSAKQPRIASTATPRRKTKTPAAKAA

SEQ ID NO: 169278 - protein, 322 aa, unidentified
MSQPGSLCVDIDVSKAILDIAASSAIEQFSVGNDIDGFDAIIAELRMYAIALVLMKATGGLETAIVCALQAEGFELAVVNPRQARDFARAMGYLAKTDSIDARVLSQMAEVLNRHPERERFIRALPDTECQVLTAMVVRRRQLITMLVAERNRLHLAHPLNRKSINIIIKALEDELARLDTDMNSHIHSHFKELAKRLSSIKGVGTMTAAALLAEVPEQGNLSRREISALVGMVPVNRDSGTMRGRRTIFGGRAGVRTALYMAALVATRFNPVIKVFYMRLLAAGKPKKVALVTCIRKLLTILNAMLRKNEEWNESYHHVAP

SEQ ID NO: 169279 - protein, 549 aa, unidentified
MKLCSSIVAEESKLSFPAVVGREGRLIIGALCPSRSLVSGVSVFNIGDVFILQSECDPVKEMAAVSAPLRPQLLYQSPVAKTRKRDQIISHPQKQSQRTAQNSVSNLPAHLQHININAAGIDVGSDRHLVAVPEGRDTVSVREFAAFTADLQAIADWLEQCGVTTVAMESTGVYWIPLYEILEQRGFEVYLVDARRVKNVSGRKSDVLDCQWVQELHTYGLLAKAFRPAEEVCVLRGYMRQKEMLVQTAAMHIQHMQKALQQMNLLLHNVVSDITGATGMKILKAIITGERNPKVLAKERDPRCRNSRETIAKSLVGNYRPEHLFALRQAVELYEIYQTKIADCEAAIVAYLEQQNQRTDDEPPAPQKPISARDRMRAGTDVRAKLYKMTAVDLFAIPGLAADTLLTLASEVGLDISPWQSEKHFTSWLALCPGTKRSGRRVLSSKTRPSANRAAQAFRMAAATQARAKTALGAFYRRIRARSGGREAITATAHKIARIFYSMLKNGTAYVEIGQAAYEQKFKERRLRSLKHQATALGYQLTPIAAGSF

SEQ ID NO: 169280 - protein, 541 aa, unidentified
MHIQKPKGSRFTEEAKQIGPEKVGIVPIDVHKDKYCITICDYYGKILKDEFEIPNTITGFQTLLAHILETIDKFKLEKVYTVMEYTGNYHKNLANRLREAKIPVTFVFPNSTYHLRQGQLNWSKTDSIDLCAIGQAFVNGWVSSSPPLDNFYENWQTLTRARRNEINLQTQAKNRITNLLDELMPGFQELFGNFWEHNAPPVILQLAHSPKQLTYLNRSSLIQKLTQAKVQKPGDLTDKVLIWAKTSIGTSQDFPGKIQQLNVEWQRFLALKENIASYHISIAQYLAQNPALLFLSIPWINVPSASEYASEVGHFDNFTSPKQITALLGIAPKKFKTGKVSFENGHITKKGKNQGRSAVMTIANNLVQGNDYYAPFYLSLLTRGKAKQQAKVAIANKFIRNSFRMVENSQLFEPPAWTGKTLKNDPISKLKDFLYNNTKDKPLIEQIVAQAQQTLDTILKRNPCPQEKENEVIKQTPQLSKTIHRRPKLESIGSNVVFSRIKPPNYKGPTPIGDVIENMVASGQFPAWLLTGKGPQPAQLS

SEQ ID NO: 169281 - protein, 336 aa, unidentified
MRELLFVYIGVDVSKETLCVDAGDAFRGVVPNTPDGIRKTLAVVKRKLGRGRASHVCLEATGPYGEALLAVCRGGGFPCSVLNPAKVRHYAKAMSESAKTDPIDARVIREFAEAKHPAADRVPGSAETLLRQLMTAREALTKSAVQLEGVLDSMTCASARKAVTQAVGCIKRKIRALEDGMATALKADRRLEGLAAELAGIDGVGALSAAKIVALVPEPGSLGRRDAASIAGLAPFRRDSGKFSGKAFISGGRASVRRALYMPALVAVKHNPTLKAFYQRLVGQGKPFKVAITAVMRKLFIHMDGVAHKWLAAHGGTGEGNAPQPFPLLPSFPRTP

SEQ ID NO: 169282 - protein, 337 aa, unidentified
MEMLYAAIDIHKHVLQAALLDSASGELRDARFPATREALREWAMPLQGRVGAVAIEATSGWRWAWRELSALGFEVQLAEPAQTRALRGKKRKAKNDRLDARWLALLLAKEMLPRSWIPPEDIQRLRDLTRLRQALRHDRTSWAQRLHAVLAHEGWPCSRSQLLSNKGGRWLDGLQLDSHVRALVDAHLAVVDAVSAQMGEVERELRRLARSDRRLVALQTIYGVGPIVACHLLAEIGDARRFRRADQVVRVAGLDPVVLDSAETRRRGKLSKQGSPHLRWALIQAAQHAAIHPASSPDGDHYLALKQRIGSQRAAVSTARRIAKAAYHVLAALENAA

SEQ ID NO: 169283 - protein, 357 aa, unidentified
MRQSKELNFKGQNIYIGLDVHLKSWTVTVLSEVSVLKTFSQDPNPDKLYKYLTNNYPGAEYYSVYEAGFCGFWIHHRLTELGIHNIVVNPADVPTMTSERLRKTDAVDSKKLAVGLRAKQLRGIYTPDDEAIEVRSLIRLKSTITKDITRQKNRIKSHLRYLGIDIPQEFTGPSFHWPMRFIDWLRDVSIKTTSGRQALDMHIRRLEDLHSQNLEITREIRELSRTDRFNQIHSLLMTIPGIGRTVSLILMAEIIDIKRFNSSEQLAAYIGMIPMCHSSGEHKGNGNITVRRQAALRSVVVEAAWAAIRQDPALQLCYANNCKRMPPGKAIIKVARKLINRIYFVLKRQQPYVQAVA

SEQ ID NO: 169284 - protein, 387 aa, unidentified
MTKNKGRVVGLDVHPDSFAGAVVQGSDPASAVVLSTSTRVELERLEKWAWRHTSTEDTLVLEASGNAFAVAARLRAIGREVEILDSHRAGKVGKVYCANDRVDAVKIARIYLSALSPIVWQPDQKTLERREIFSAYQAVVKESTRAKQQLRSMLNEHCVRLEKGFRLCHPQAITRLLKEREWTPARRMLLQQLHGSLVAARARRTMLRRHMAQEIVAEAELLKLTRLCGISLITLYGLVSAVGDVRRFAHSKKLVAYLGLNPSVSQSGNFEGGGALKRHGRGALRALLIQSGKKLLEVNNPLQKWGLAVAARRGRNKAAVALARKLCVAVWHLLMGHVIGSLERLDTLETKLSKFATEIGPAALTAFGYNNRADFVQKKLYVLRSYP

SEQ ID NO: 169285 - protein, 416 aa, unidentified
MNAVGIDVSSRKSTVAVLRPLGEVVCLPFDVTHDIAGLASLVEKLKALDGETRVVMEHTGRYYEAVEKALHEAGLFVCAVNPLLIKEYGANSLRRVKTDKADAVKIARYALDNWADLRDFTPMDAIRYDLKTLNRQFQLASKQRTASANNLIALLEQSFPGIRKCFDSPVRSDGTQKWVDFAHSFWHVDCVRKQPFPAFCERYRKWCKRHAYLFKLSNAEEVYALAKRAVVLTPKSKVVKVLVQEAANQLISISRSVEVYRAEMDRLAAMLPEYPVVMAMYGVGKSYGPQLMAEIGDVRRFERKQALVAFAGIDPMPNQSGDKNVRSNKSSKRGSPYLRKTLFNVIRTYLQCAPQDEPVFQFLNRKQAEGKPFYVYMLAAANKFLRRYYAKLRDYFASLNPLQPVAPIPTILKATL

SEQ ID NO: 169286 - protein, 315 aa, unidentified
MTTSSGKFVGIDVAKDKLDVAVLGEKKASQVGNDEGGIGKLIKKLQALNPELIVVEATGGYQRAVVLGLYEAGLPVAVVNPTRVRQYARASGLLAKTDKLDAFNLAEFGKQMKPRRFEAKSEAGRDISALLVRRRQLEEMLKAEKSRLRTVPPKMRGSVERMIETLKEEIKRLEKDLDQFMKENEEWQAQEQILTSAKGVGRITATTLLAELPELGKLDRKKIAALVGLAPMNADSGKKRGYRKTKGGRVEVRNVLYMSTLVATRFNPLIQAQYQELLRRGKVKKVALTACMRKFLTILNAMMRDKVPFRQTDIA

SEQ ID NO: 169287 - protein, 421 aa, unidentified
MGKLIERCAGIDIGKRFLVCCVMTGAAHEEPRSETRRFDTTVPGLTRLRNWLNEERVTDVVMESTGSYWIPVFNLLEGHVTVVLANPEEVKNRKGHKTDRKDAGHLADLLRHNHVKSSYIPTEPVRQLRDLTRRRVQLTQDATRERNRVQKLLEQVNVKIGSVLTDVFGVSGLHMLLALLDGRAAPEEIAGLARGSAKRKTPQLIEAIEGNRMSDHVRFLIRGCLRHLACLEEEVEELDTEILRRMQLSTFQKAFTLLQTIPGVGQLSAATILAETGPDLAAFPTVEQMASWAGLCPGNRESAGIQKGPQTTHGNPYLCTALVQCAWAATRKRDSVFRSRFQRLAPRRGEKRAIIAVAHHMVIILYCMLKRGVPFLGAENAPKQRRRERRAHHHLRCLRRLGFSVEIRQNSEATPPDTISR

SEQ ID NO: 169288 - protein, 316 aa, unidentified
MNLQNSPVHIGIDVSKDELVLDLLNVIHRLPNCPSAIGRLLKTLSSHPDSSRMHLVCEPSGGYEQTLVGAALKAGFTISLVQPLRVRRYAQALGILAKSDPIDARLLSRFGADLKPKALPPQDEDRRKLAELLKRRDELINSIQRERNRCAHHNDPLCLSQHRSLIKMLEKHLAQIQDAYERLIASSASLKKARALLCNVQGVGPQTSAILLAQLPELGLASRSQIAALAGLAPYDRDSGSLSKKRFIHGGRTKLRRALYMAALSAARCNPVLKPAFQKLVARGKPKKLALIAIARKLLIHLNSLLASHSKSPLAF

SEQ ID NO: 169289 - protein, 351 aa, unidentified
MRYVGIDWGTRRVAWCSKAADGTIVGEGMLPADADGLARLVLACGTEVRACVEMMSGAIWVRDQLVAAGWQVEVADARKARAIAPLACKTDKVDARVLAELCRRDLVPALWLPALDERALRERLRRRMHLVRLRTSAKNRVFGLLSQWGLRVSVRRLRQPDGLELLERHGVPEVWRRSVIEALAVIDLLDQRLAPLDRELLPLARADTRVALLATIPGVGQLLGLTIAAEVGDIARFASPRKLVGYAGLAPRITQSGQSARTGPLSKAGPRALRWAAVEAAQSAWRPSNPWHQLYSDVKQRSGKANPAKSAVARKILIAAWHVLARQQPFKPARPRGDSSVPASSPMFLAA

SEQ ID NO: 169290 - protein, 412 aa, unidentified
MKDLLEISCGLDVHKEKIVACILTGPLGKPTRSEIREFSTLIPDMIALRNWIVSKNCHHVAMESTGIYWMPIYEILEDAFSGDITLLVVNARHMKNVPGKKTDMRDSEWISTLLRAGLLNGSFIPEKRIREFRDLNRYRKSVIRDITSQKNRIEKFLQSSGFRLSSFISDIFGASGRNIILHLVEHGQIDKTALDSCLKTKTRNRIDEILMSVNGTLSEHQKAFLRILMTHYDSLKKHLAEIETSLEEDMAPFALQVEQLNSIYGISTTASCAIIAEIGIDMKPFKTAEHICSWAGLCPGNNESAGKRKSTSVTKGNPYIKSMLCEIAWVIAGKRNTYLSAWYWRIKQKKGAKKAIVALARKLLVIIYTMLKQGTLFDESCFETRRKDCEQKQLSRYIRELEKHGYHVEAQS

SEQ ID NO: 169291 - protein, 343 aa, unidentified
MGQYIGLDVSLKDTAISIRQDGKRIWRGKCPSDPGIIAQAVRKHADDPLSVVFETGPLATWFFHALTGEGLRAICIEARHAQKILGETLNKTDANDAEGLAKLAETRFYKAVRVKSFEAMLIRSLVAARTQLLAITTQLTNQIRGLMKTFGLVVPKSKGRVFIEKVNDLLDGHVELKEIIYPLLEAWQAVRERASTLSPQPLLAARQCQSTRLLMTIPGVGAITAVSYVAAIEDPKNFPKSRSVGAWLGLTTRRYQSGEMDFNGHISRRGDQRLRGLLYEAATSLLTRAQAETVSDLKTWGLQLRERLAFKRAAVAVARKLAAIMHSMLKTGQTFIPTREELA

SEQ ID NO: 169292 - protein, 368 aa, unidentified
MKTVLFVGLDVDDKMFHATVINSQTGEISYFKTKPIGSKLVEKLLTYHSCPQDYQICYESTYIGFSLCRFLRKESFHCDVIASGLVPEVSGHKVKTDRCDSEKLAKLYMKDMLTTLNIPAEEDEAERDLVRSRSLVSKQVIKTKNHIQSLLRRHGIDYRNEEKQLNLWTERYRKWLYGKASKLNDTLKINLNLLLSQLEFLESSLKTYNKEIENLAKTEKYESKVQALVCYRGIETLTAMKVITELGDIRRFDHPRKLMSFLGFDVIEYSSGGKERKFGITKYGNKIVRTALVEATQRCATPPKVSYNLRIRRGKTPPELIVVADKCMQRLYRKSNHLLSREKNRNKVKVACAREMCGFIWESLMRVS

SEQ ID NO: 169293 - protein, 417 aa, unidentified
MNTMTMQPFAAFVGIDWADTKHDVCIQSANSSRREFAVIPHKVEEIDEWAKSLHRRFSGPIAIAVELSKGPIVYALQKYDYFVIFPVNPSTLAKYREAFQPSRAKDDPTDAELALDLILRHPERFEPLQPQSVEIRELTELVEQRRRLVSDRVRLTNRLRSTLKLYYPQTLDWFNRIDTKLFCGFIERWPTLMQVKRARTTTLTTFFRAGNTRNPALLETRLASIRSSQHLTLDEAVIAPNRLRVLMLVGMLRVILDAIKSYDQTIAELAPEHDDYCLFSSLPGAGPSLAPRLLVAFGEQRSRFKNAAELQKYSGIAPVTERSGTKHWVHWRWRCPNFVRQTFVEWAAQTINKSYWAGEYYRQQREKGSAHQSALRALAFKWIRILYRCWQTRTPYDEATYLKALQRRGSPLVAKAV

SEQ ID NO: 169294 - protein, 339 aa, unidentified
MKLYAAIDLHSNNNVLVLIDENDRIILEKKLPNELSAVLMHLAPFKDAVEAIAVESTFNWYWLVDGLMEAGYNLKLVNTVAVKTYSGLKYTSDEHDARHLAHLLRLGILPTGYIYPKEERGVRDLLRKRSQQVRCRTAQILSIQNLVSRNTGKGISTAEIRKLDEEAVSRLCAGEPTRMMALKSNLAVLRCLDEQVEVLESAVLAQAKLKPSFEKLLTVDGIGRILGLTIMYEAGSMDRFKKVGQFASYARCVSSSRWSNDKKKGEGNRRNGNKYLSWAFVEAAHFAVRYNEPARRFFQRKQAKRNKIVATKAVAHKLARACYHILRDQTDFNEAMAFA

SEQ ID NO: 169295 - protein, 421 aa, unidentified
MMSVGGHVGTTYEILVGIDWATETHQVCVLTPEGKPLLERTVEHKAPAIHAFIETLIARVGGRAASIAVAIEVPRGGLVETLLERGLHVYSLNPKQLDRFRDRHSVAGAKDDRLDAYVLADALRTDLHKFRQVALDHPLVIQIREISRADEDLRDEANRLTNRLREQLYRWVPHLLSLSPSTDEPWFWDLIERITRSDSMRLNRGQLEKLLRKHRIRRHTPDAVLAALGTERMNIAPGAAEAARSHIRLLLPRLRVVHEQRKQCAKQLTSLLDQYAAEDDDERGSSPSDVHLLRSLPGVGAGVTATLLAEAASLLRAADYPALRAFGGLAPVTKRSGKSRVVLMRYGCNTRLRNAFYHWARTSVQHDDAARNYYATLRARGHSHGRALRSVADRWLRILTAMLNSRTMYDPLHKRLVRVVA

SEQ ID NO: 169296 - protein, 388 aa, unidentified
MEVRFVAAPPTAGDDALACILIAIELSKASWLVGVQTPLKSKTSQFKLEAGDWEGLLKLIERFREQLARELGRPVEVITCYEAGYDGFWLHRLLEAHGVRNYVLDPASLLVTRRARRAKTDRIDVERMLRALGRYLRGELDACSVVQVPSVEQEDARRLHRERKRLVNERVQHVNRIKGLCALHGIYDYQPMRADRKAEFEGLRTGDGRPLPARLKAEIMRELQRLELVLKMIADIEAERDAIVKEAAPQHPNAGKIKALVELRSIGPEIATKLVGEAFYRSFDNRRQLGSFAGMAPSPYSSGSMERDQGISKAGSPIVRTTMIELGWLWLQFQPDSALSIWFRERVGDRKGRVRRIAIVAMARKLLVALWRYLETGLVPVGAVFKPR

SEQ ID NO: 169297 - protein, 324 aa, unidentified
MQHEPPTDVARPVAGVDVSKDQLDLFVDTVGRHLRVGNDDEGVARLVATLLEHGVRLVVVEATGRYHRRLAAALLQAGVDAAVVNPQQVRAFARAAGKLEKTDRIDAVVLARFGRAMNPRATVKTPENQTLLGDLVSRRRGLIQMRVAETNRAHEQLPKLAASQSRKLLRLIEQQVEDLDREIARLIEADDDRNNAAKVIDSVPGIGPDTANQLVVELPELGELNRQQIAKLAGLAPLNCDSGRYRGQRKIRGGREEVRTCLYMAAFNARRKCGRFKRYFDDLIARGKLYQVAMTACMRKLLVVLNQMVKNNTHWDHNLTGALA

SEQ ID NO: 169298 - protein, 343 aa, unidentified
MKDTIYDQYIAIDWSIENMAIARMTKKSNKITAIDVPSDIVDLQAYLKNLKGTKILAIEETTTSQWLYAELKDYVDTIFICDPNRNKLLNEGPKTDKIDAAKLVQLLKAGLMKEVYHSGDKFLYLRRVTSGYEDLVKAGVRLKNQRHALFRACGKVGNEKKDINLGSQGEQFVLECLDRQIEAYEREKQCYENEFERLARKNSAIKHQKSLPGIGTINAVKIVTRVVTPHRFSDKGHYLSYTGLIKLDKISGGRSYGKKNPRFSRQLKSVYKSGILAAIGGNNPMNDYYEHLIQEKGYPEHNARHKACRRLAILSLGVFKSGRKYQPHRRDHVKGGKEDTSGL

SEQ ID NO: 169299 - protein, 340 aa, unidentified
MKITTFGLDLAKNVFQLHWVEPQTGEVKRRALKRDQMIKFFAQRSASVVAMEACGSAHYWARKLIELGHEARLIAPQFVRPFVRSNKTDAADAQAIWEAAQRPERRFVAVKSVHQQAVLMLHRVREQRVKMRTMQINQLRGLLYEFGVILPAGRHKAMTQVAQALARLEDTLPAMALEALREQCASIEALSAQIEEIERKLAAWRKEDEAAKRLMQMPGVGLLTATAAVAAVGDAKVFSSGREFAAFLGLVPRQSGTGGRVKLLGISKRGDGYLRRLLIHGARAVITHAKARDPWVEALLARRPLNAVVVALANKMARTIWALLAHGRHYEPRGQALGCA

SEQ ID NO: 169300 - protein, 440 aa, unidentified
MPRFIGCDVHKKQVTICILDTEGRVVTRLRVPCTREALLKLAQRQLHADDQLALEATSNTWAVVEILEPFVARLVVSNPLRTRAIAAAKIKTDKVDARVLAELLRADYLPEVWQPDAETRRLRGLTHRRAALVADRTALKNRIHSTLAQRLIPVPVSRLFSNLGLEWLQQLDLDADGRQALDSDLHLLRVLEEEIQSLEDLLAQLAYQRDAVRLLMTLPGVDFTVAQGVLAAWGPIDRFPDADHAVAYLGLVPSTRQSDRHCYHGPITKQGNAHTRWLLIQAAQHLDRHPGPLGHFFRRLAKKKNRNVAVVAAARKMGLIAYYMLRNNEPYRYAIPTSTQNKLVKLRVRATGRRRRTGPAPGSRPRPAADGSGIATRHVPSLHEVYNKEQLPPAQSLAELTPGELRHLRRTASLQHAQKLQRPSRRPRKAKAPDRELTTS

SEQ ID NO: 169301 - protein, 346 aa, unidentified
MHYIGMDCHITTLDFAVVNEAGRLLKVSRVATSVNGFIEFVKTVPPPRTIYMEEGTLAAWALETCVRFREKLVITDAKKNHWIGSSGQKNDSIDALKLAQLARGGYIKEIHHPVGQRRRFRELMIAYHDAVRSTTRIKNKIKAKFRQNGIQCTGATVYSETHREEWKGKLPQEATLLLILDGLWRQLEQSEQTEKELLAAARVQAKHYPEIKHFEAIPGIGFISAATISAMLETPYRFADKKKVWMYAGLGIMTRSSGGKVYSERLSKDYNRLLKYTLKQATEVAIQAKDNPFRRKYLDMTLLHGIAPHRAKLTIARDMLATMWAMWRKGEKYSPEIREKAVCKQG

SEQ ID NO: 169302 - protein, 355 aa, unidentified
MAIRKQSIGIDISKSTFTACLCQQSDDGKLTFSKVLDFSNDSKGFNQLLRWTKGLIVSDSELVFLMEATGVYYENLAHHLHKIKKRVHVVLPNTSKHYFSSLNVKTKTDAVDARILSQFGVERVHKLWSPPPGALLQLRNLTRYYVQLQEQKTALGNIKHSKDCSHDIQNFITKSNKKLINEIDKEIQRCLKEIKKAIEEDKALKERVRKILTIKGVGLITVATILAETMGFDQFHSSKQLVSYSGYDIVQRESGTSIKGKTRISKKGNRYIRNALYFPAMVACRYNETLKETYIRINKNSKASKMIGQVAIQRKLLALIYTLWKNNKEFIENYKGSSPDPKTETTQDSSVAELL

SEQ ID NO: 169303 - protein, 315 aa, unidentified
MTTKTETHVGIDVSKDRLDLAVLEEKRVVQHTNTPGGVKKLVDAMKELMPALIVVEVTGGYERAVVQALFEAGLPVARVSGYRARQYARAKGQLAKTDPLDAMNLAEYGKHVQPRLFEGKSEQGQCLAGKLARRRQLGEMLQAEKNRLRQVYGDSGSSIERVIEFLQGEMKQLDEEIRAYLKANPAWQEQEQLLCSMKAVGPVTAATLLAELPELGKLDNKQIASLVGLAPINQDSGKRSRYRKTGKGRPSVRNVLYMAALTGIRYNPVIKKQYDGLVARGKVKKVALTACMRKLLTILNAMVRDQEPFRYVAVS

SEQ ID NO: 169304 - protein, 429 aa, unidentified
MKRARPLLTRLVRIHLTEYNPMLPEKPPPSRFFGLDIHKHYLVAIAVDPNGNQIYGPRKVHWTDLETWRNKTLTASDAVVIEMTTNTWQIYDDLRPYVYSVTVVHPPHVKSVTQAQVMTDRIAAFNLAKLLAKGLLVSIWIPPADVRDRRALVAHRNKMTRLSTQAKNRLHAVLHRYHLLPSAGDLFAPGQCAWWLALPVSPLEKVRIQSDLDTLAFAQAQIANLEEALAAIAAQDDRLTLLVQLPGVGWLTAIVILAAIGDITRFPDPKHLVGYAGLGGRIHDSGQTSRSGGITKAGRRDLRAALVEAAQTAANTHPHWQAELARLEPRLGRNKAIVAIARKLLIAVWHVLTEGCADCHAEPQRLARKLMQVTYQLGKNNRPAGQSSAALVRAQLDRLEVGQDLKEIPWGNKKHPIPLPPSSLPSAAD

SEQ ID NO: 169305 - protein, 370 aa, unidentified
MLSIGIDVSKGKSTVCGMKPGGEIVYAPFEVQHTRKGMSELVSLLRSSGEEVRAVLKSTGSYHCPVVAALLENGIFVSVVNSLRMKRFCSQSIRKVKTDRIDAMQIALYGLAYWQELQPARLPEDTYRELQLLARQYYQMTSMLIKAKVDFNALCDQVLPGMQELMSDHAGRHKLSDFVLQYCHTTHILEMGETRFRKDYCKWAEKKGYRNCERMAVLIFATAQNGIPVLPNAPSTQIVITEAIRVLHTVEASRDAILTQMQAFAKTLPEYSLVREMPCIGDTLAPRLIAEIGDVRRFHSKRALIAYAGIDAPPYQSGKFCANNRHISKRGNRYLRKTGYEVMQSYVMHKPANDPIFTFIEKKRGEGKEW

SEQ ID NO: 169306 - protein, 311 aa, unidentified
MTELTIGVDISKRRLDAACYTSGRQERFANDAAGLKALRRWIGPGRLVARLVYEATGRYHAGLEAAFAGWPLVKVNPLRARRFAEACGTRAKTDAVDARMLARMGAQLALPPDPPAGPGARELQALQTARAGLVGDRIALIQRADQARLPLLRRLAARALRLVEAQLAEVEAAIAARIAADRALARRQEILLSIPCVGQHLSATLVVEMPELGAASAKEVAALAGVAPLTRQSGQWTGKARISGGRGDLRRALYMPALNAIRYHPDMRRLYERLTAAGKPAKVAIVAVMRKLLVLANALVAQDRLWEPRPA

SEQ ID NO: 169307 - protein, 361 aa, unidentified
MSEITRVGADLAKRVIQVHGVDAAGKLVTNRPLPRDKFIAWCAQLPSGCLIAMEASSSAHHWARKLIRLGLDARIIAAHLVLPYRLQGKGGKNDANDAAAICEAASRPTMRFVSVKTVTQQGMLCVHRLREGLKQERTACTNRIRGLLAEFGVVVSQSPKVLRECLGDLLEDATNELPGLARLVIERAQTQWRELDEHIAWCDARIAAHLKDDEQASAATQLMGVGPVTASAVVATVGDFKQFKNGAQFGAWLGLTPRQNSSGGKNVLGRITKRGDMYLRMLLIQGAKSVVMMAHKRNDPISNWALRLREKSGWQKTVVALANKNARILWAVMTKGKPFDARHVSLKPGAAPVSVMAAGAA

SEQ ID NO: 169308 - protein, 373 aa, unidentified
MFHFTTLFIGMDVHKESFSLCYYDMMTNQFKHSTKVGPNVSYIVNYVNELRRLYGQDAEVLCGYEAGCLGFTLYHQLQAHGIPCIVMAPTTVMKEGSKRVKTDKKDAAQLAKALAFRSYRPVHIPTVEDEQVKEYIRMRTDHKVALKKIKQQIFAFCLRHDFRYTEGSSNWTQKHVRWLHSLNPKGLYAEILTEYLLTYEKLVDQIERYDARIVQLAQSDSYQEKVSQLSCFIGVKTLTALSIVTEIGDFNRFATAQHFASYLGLTPSENSSGDKERRGAITKAGNSYVRRLLIEAAQSLAKGTIGYKSKELKRRQSGNRVEVIAYADKANERLRRRYRTLVLGKNKKQNVAKTAIARELSGFIWGMMTGRIA

SEQ ID NO: 169309 - protein, 311 aa, unidentified
MGGVNAAVEVGKHTLEIALGSEGALFSEPNQPRAIARLAKRLAASSCERVLIEGGSYQNLLVGALRAAELPVVIINPRRVREFAKSIGQLAKTDRIDARLLARYGEQIQPPVRALADEQNQALRGLWVRREQLIEMLVMEENRLEHAPKTLHRSLRAHIDYLRKQIKQSDSDLDSAVRNSALWDKYELMSSVPGVGRVLSVALLSDLPELGRLNRREIAALAGVAPFNCDSGTLRGQRRIQGGRKRLRRVLYSATLASVRCNPVLRPFYQRLRASGKPAKVALVAAMHKLLLILNAMLKAKIAWRPSCPVA

SEQ ID NO: 169310 - protein, 359 aa, unidentified
MTITKRNIRPTLDKTQPIYMGMDVHKSSWSICLIHCGQVLGRISMQAEFELLKKYLRRYQGIKIFSVYEAGFSGFHLHHQLTSIGISNTITPTNKMPILRADLVKTDRRDSLKLATFLAKGLLRSIHIPTEFEIDRRQILRTREQLKRKKTRAINQIKSLVIQHGIVLNGVGISQGTINYLSEVEMPPMIRMSVELHLDQIDLIKRQIKKLESEYKKISQEDGKYKENYLLLNTVPGIGPLVATALAYEIGDWSRFKNEKQISAFFGLTPSEFSSGGKSHRGRITGQGNPMLRSLIVQSSWKIVQKDPAMESFYLRVAHQTGSKKKAIVAVSRKLVCRIYAMIKNKKEYQSGIKEEAAA

SEQ ID NO: 169311 - protein, 403 aa, unidentified
MTGVIIGVDPHKLSATIEVVDRHGYLVGSGRFTTDKAGYAAMRAYVKAWPDRTWAVEGANGTGRPLAQRLIEAGEHVVDVPAKLAARVRLFDTGHNRKTDALDAHSIAMVALRTVGLRVLTPDGDLEALRMLTDRRDELARLRVQTVNRLQRLLSELIPGQRKKDLSALQAKAMLATVRPRDIAGKARRRMAAEELADLGAVDKKLKKMKTELKAAVQARGSTSMEVHGIGPAGAARILADVGDIARFADRNRFASWTGTAPLDASSGEQIRHRLSRAGNRRMNHVIHIAAIVQLRHDTEGRAYYRRKLAAGKTPMEALRCLKRRISDVLYRHLVADARAAEAGAAETGPGGHCGATQESSAVDLPPHIDTSDQPLPGPAAPTLRPTPTTRKSPGRQALEPAS

SEQ ID NO: 169312 - protein, 338 aa, unidentified
MNEITTIGLDLAKQVFHVVGCDARGKEVKRKRLRRGQVRAYFANLAACVVGMEACAGAHFWARELGALGHEVRLVPAQHVKAYLRGNKNDYNDARAIAEAAQRPDMRFVRVKTVEQQDVQALHRLRAGRVKERTALCNQVRGLLAESGVVLAQGVGRLRRRLPEVLEDAENGLSDDMRPLFGECYEQLCELDAHIESYTRALQAHAKRTAAVQRLQTVPGFGPVVASAFHAFVGDGRGFHRGRDVSAAVGLVPKHHGTGGKTVLLGISKRGDRYLRALLVHGARSVLQRASGKEDRLSRWVMGVQAERGTHKAIVALANKMARIGWAVLRQDTTYRAA

SEQ ID NO: 169313 - protein, 343 aa, unidentified
MKDTTIAVDIAKEVFEIAVSHEPGVVDEKRRVTRKKFLSFFVNRPIATVVMEACGSSHHWARELEKLGHRVVLLPPHVVRPYVQRNKTDQTDAKGMLEAYRNKDIKPVPVKNIEQQSITALHRVRSTWVASRTARINTLRGLVRELGIFIPVGASKVVPVVLELIEDADSALPDALRQCFHEVCLEIRDYEKRISGIEGQLRALSKQMPTVVLLLTIPGIGLLTSTALVALVGDIQRFRSARHFASFLGLTPRLRGSGLSLHLGRISKQGDRYLRALLTHGARSVLLRAGRMEKPDRLRAWALRVYSRRGHNKATIAIANKLARTVWAVWKHNTEFKSYPKAA

SEQ ID NO: 169314 - protein, 370 aa, unidentified
MKKLIMYVGLDVHKNSIEVAFADAGRDGEVRSYGKIDGNLTALDKVIRKLEAKGSELHFAYEAGPCGYEIYRHLSSNGYDCIVVAPSMIPRQSGNRIKTDRRDAQMLARLHRAGELTSIYVPALEDEAMRDLTRAREDAKSVEKKAKQRILAFLLRHGHRYSGKTPWSKAHFRWIAIIKMPHPAQQIVLQESLDALSECTERVNRLTEQIQRLLPQWRMFPIAQALQTLRGVSLIVASTTIAELGDLTRFASPVELMSYLGLVPSEHSSGEQTKRGSITKTGNGHVRRVLVEAAWAYRLPARVSRALLLRQEGMSQNVCAISWKAQLRLCNRYKRLLERGKAKQLIITAIARELCGFMWAIAHEVETPSS

SEQ ID NO: 169315 - protein, 412 aa, unidentified
MEGETVIAGVDTHKDVHVLCLLDGLGRKIWSGSFGADPEGYDRLAEAIGDPGSCMVVGVEGTASYGAGLTRRLVELGYNVVEVLRPKRDKVRPGEGKSDPLDAERAARKAASGRGCSVPKSQDGWVEAVRQLYVARRLAVATSTSCVACAKSMLTTAPSALRERFRGRERPKDLMPLLARGRKAGDALEESVLASLRSVAAVWKEARSQVESLDERIRALLEANAPALLGVEGCGTTTAAALVVAAGDNPGRLKGEAAFSMLCGVSPIPASSGKTDRHRLNRGGNRQANWALYEIAIKRMAYDERTKRYVARRTSEGKSRREAVRCLKRYIAREVYRVLMDPNPDGAAPEGPELAKMRKAMRVTQKKAAAELGLSAATLGHLERGKRRSTKLERRYYELLCELERALPQTAS

SEQ ID NO: 169316 - protein, 452 aa, unidentified
MEQGNKGLSRGDRNRNARLAALRAMVPRDHAILGIDLAQSRQAAVLADHDSRVIARWRPRCSPWKLGELLERALRKALAAGFAGITVACEPTGHRWMVIAQLAAERGIPMVCVQPLVVARAREAEDYTRGKSDDRDAVLIARLASQLHCYLPEQAGQEWARLRHLGVRRSRLIESATACRQQLRDLLEVAWPAVLAAAADPMESATWLACLQAALARCDGDLAAVRALGQDAFTAQARAELGAFGARRVCRRIAAGVYAALGDGAGVAAQRPGALERAFRVLGDWSVTRAELGDVSARMLQSLDAMGLLEVAGSIPGVSAVQVAAILAEAGDPSRFATSRAMVKHAGLAPCENSSGNHAGETGISRRGRPALRLAAWRAVWGALRHNRVYAARHAELTGRAKDPLTDQQARAAIAAALIRQIHAIITRRVPWDADIAAGRRRPGQEVTAQAA

SEQ ID NO: 169317 - protein, 337 aa, unidentified
MEQQTQYVGIDLHRRRSVIVRRNGAGETLDTVRIDNDPVVLAAELAKAGEHPEVILEATYGWYWAADVIQECGGTVHLAHPLGNNWGNRRVKNDERDATDLVDLLRLGRLAEAWIAPPPLRELREHIRYRAKLVHLRTNLKSQVHAVLAKEGVAVPMTDLFGVGGQVLLDEVHLGDAYRVRVESLRDLIEHVSREIAMLEEQTAPYFAGDLGYHAVQAIPGVGPVLASVFVAEIGDIARFKSARHLSSWAGLTPTHKESDVTVRRGHITKQGSRLVRWAAVEAVAHQRGDTPIRAHHRRVGERRGTQIGRVAAARKLLILVYYGLRDGEIRCLAGTG

SEQ ID NO: 169318 - protein, 340 aa, unidentified
MKLYGAIDLHSTNSVMVLIDEQDQIVYEKRLPNDLAMIIKELSVYQSEIEGIVVESTYNWYWLVDGLMAEGYKVHLANTSAIQQYEGLKYTDDHSDARWLAHLLRLGVLPEGHIYPRAERPVRDLLRKRGQLVRHRTIHVLSIQNLLTRNTGSSMKANQIKGLDVPQVDELLPDKDLALAVKANLAVLSSAAEQIEILEHRVLELVKLRPQFSFLKTVPGIGEILALTIMLETGDIGRFPSVGNYASYCRCVGSQKISNGKKKGKGNTKNGNKYLAWAFVEAAVFAIRPNSQIKSYYQRKKAKSKTVVAIKAVAHKLCRACYYIMRDRVVFNMTKAFGPK

SEQ ID NO: 169319 - protein, 345 aa, unidentified
MKKLVAGVDLHSNNVVIGIMDTDGKRVANQKVPCELEAVVKFLAPYKKRLDQIAVESTYNWYWLVDGLRALRYPVVLANPAGMAQYSGIKHADDTNDAFFLAELLRLKILPTGYIYDPELRPVRDLLRRRLSLVHQRTALMLSFKSLYTRTTGQEMPLRQLKELAIKEAQELYHHPANQLIAGMQIKHIEQLTESIEQIEKVVLASARELPCYTKLGTLPGVGRILGMTIAMEVGDINRFADAGNFASYCRTVEAKRTSNSKKKGENNSKCGNKYLAWAFVEAANFARRYDGQCRKWYDRKATRTSNVIATKALACKLAKAAWHVMSAETDYNAQRVFGPLAKTT

SEQ ID NO: 169320 - protein, 343 aa, unidentified
MQVTTIGLDIAKNVFQVHGIDAAEKVVVRKQLRRSQVLEFFKALPPCLVGMEACATAHYWGRELTKLGHQVRLMPAKDVQAYVKRNKNDAADAEAICEAVRRPTMRFVQVKSAEQQSQLMLHRTRDLLMRQRTQVINALRAHMAELGMTAAQGNAGLRELLAIIAGAADERLPAEAHASLIVLMTAELQAMRTLIASIEKRIIAQHRSDEASKRLRSIPGIGLVGATAIVATITDPKAFRSGRDMAAWIGLVPRQDSTGGKQKLGPISKQGDRYLRRILVVGAHAVLKLARQKPEKYPWLTQLLARKPFKVVAVALANKMARIAWALLVKGGPYRARALVAAA

SEQ ID NO: 169321 - protein, 391 aa, unidentified
MKPDGEKQSSFSVPNNRVGAETLVDRVVLSLRQLFLPKVVIGMESTSVYGENLMYFLRESGKLGSFERNLHMLNPKQVKKFKDSYSDLPKNDFVDAFVIADHLRFGRITSEVYMGDYRYEALKTLTRARHQAVEELTREKQRFLNHLFMKFSSMAQEKLLSDNFGATALALLEEFETLDELAYMDTDELTAFIRKHGKSHFDDVEGLSEALQKAAKDSYRPPTVIANSVNQVLAISMSTIRLMQKQVKEYDKAIQKQLSLIPNTLLSVKGIGLVYAAGILSEIGDINRFKGQASLAKYAGLSWTQHQSGNFEAENTKLIKSGNRHLRYYLCEAANSLRRCDSEFKRYYNLKFHEVNKFQHRRALALTARKLVRLVYTLLKTNRLYIPPEEY

SEQ ID NO: 169322 - protein, 356 aa, unidentified
MNQITTVGVDLAKEVIVVCSGDAEGRTAYFKQFSFAGFAEWAVKLAPCTFGMEACSSAHHWARFLSEHGHTVKLMAAEFVAPFRKSQGAKNDRNDAQAILTAVRQPDMRFVTVKSADQQAMLAWHRARAGFGEERTALLNRTRGLLAEFGVWLGRSSTALIRHLPQLAQDERLPARFRPILTHALDHLRDIEKRIADCDTEIHNHVRHSEQAQRIQALAGVGPLTASALIATVSNPCDFKNGRQMAAWTGLVPRQKSSGGKQRLGVITKRGDSYLRGLLTQGARSTLQVALKREPLKRSRLEQWIIDLHGRVGYHKTLVAIANKHVRIIWAILATGESYDPNAWRRHTPTRSALSA

SEQ ID NO: 169323 - protein, 353 aa, unidentified
MRTYYVGMDVHRASIVIVVLNGAGKVVMQSVIETGAERVRGFLKQLRGKVYVTFEEGTQANWLHEVVRALVTEVVVCDPRYNKLLQSGNKNDRVDAQKLAELLRNGALRAVYHGDNGVRALKELVRSYDCLVSDTTRVMNRLKAIYRGRAIGCAGHDIYRQDRRERWLEKLTERGAKQRASCLYQQLAALKPLRHEAKRMMVKEARRQPAYPWLMSVPQFGSVSVAQLLAIVSTPHRFRSKRQFWTYIGLAVVTRTTADHEVVNGVLRRSQRPVSTRGLNRNHNHLLKRVFKNAANGACHGGPFKAAYELRVTQGMVPSLARLTIARQLAAITLAVWKRGEQFNPERMKQQAA

SEQ ID NO: 169324 - protein, 315 aa, unidentified
MSTMVVIAGIDVSKDKLDIHILPSNQTFMVDRDRRGLANLVRRLRKAGVEQVALEASGDYERIVIEALEAAGFVVHLLNPARVRAFAEAIGILAKTDPIDARLIALYCQHFPDKGLTRRPEKARKLGEFLNMRTMLLKVAGEIRNSLEHVREPGLKALADTLADDIAAKLKDVEDRIAKAIADDVATKRKARIVRSFTGAGPVLTSSLLARVPELGSVTRHAAARLSGIAPTDRQSGRSKRRSSIDGGRDQLRPVLHMAALAAIRSNPIIKAFAQKLSAAGKPKQLVIAACARKMIVILNAMLRDNTEWKYAKAA

SEQ ID NO: 169325 - protein, 328 aa, unidentified
MLTLGIDVSKLTLDCYLSEGIEKKARNSCKFQMSNSEAGFKELAQNLAKRGIGIEQMTIVLEPTSQYHKALLYWLYEHKARACMVNPADVRHFAKSLGKYSKSDGLDCFVLAQFAQTRELITWQPPARIIQNLDSLLHLRHQIVVERGAAQVRLSELPSDSLQTVKDCYSKTLEHFKAMEKEVNHEIQKLIDSDVSLKQKHKLLQTSPGIGPVVASLMLVIFETKQFTKSCQVPAFCGVTPKEFQSGTSVLGQTRMTKRGPAQVRAGLRMAATAIVCSKRRSTLKVFYESLLAKGKSKACALGAVMRKITLVAYAIWRDSNAFNGFVS

SEQ ID NO: 169326 - protein, 331 aa, unidentified
MAKSKIDELMSVGIDIGKDTFHVVAFDPDGHLVMRKRIKRLALVATFEKLPRCVVGMEACLSAHFVSRTLRKMGFEPGIIPAIYVKPFIKGQKNDYNYAEAISEAALRPNLPVVPEKSQEQLDLQALHRVRSRLVSRRTASINQIRAFLIEQGITVRKGLRVLKNSFGKILDERKDEISPRMRTILIGLYGDWLWLDDRIDTVSKEIEQISRTEENCINVMTVPGIGPMISTAMVAAIGTGEAFGRGRDFAAWVGLVPRQYSTGGRTILGRITKRGSRYLRMLFVQAAKVILMRTNRWPDFSFGDWLIKAAERMNRNKLAVALANKLARMA

SEQ ID NO: 169327 - protein, 477 aa, unidentified
MSKRSRILSQVGLSPAPVLEANAAGVDIGATEIYVAVAPDRDAQPVRRFATFTEDLMAAADWLERCGITTVAMESTGVYWIPLFQMLEARGLKVCLVNARHVKNVPGRKSDVSDCQWLQYLHAVGLLRASFRPEQQICAVRSVMRYRDSLVAMAAVHLQHMQKALDQMNLQLHHVISDLSGTTGMAILDAILSGERDPHRLAKLRDPRIKADAATVARSLLGDYRREHLFTLGQSVTAFRHYQQQLSACDIEIEKMLAEFSDGGGPDQPKLEAPKDRHKPRRNELRFDLRGHLYRVFGVDLTAVPGINAQTAHTLLSEVGRDLSAFPSAGAFASWMGLCPDNRVSGGKVLSSHTRKVKNRLAKALRLAAQSLFRSQSWLGQFFRRMRAKLGAPKAITAAAHKLARILFHLLTTRQPYDESVFAIQEIQNNQRMQQKLAQQAKKYGFQLVEIKNNLRMWSLGTRVASISAQGRQGNLR

SEQ ID NO: 169328 - protein, 329 aa, unidentified
MSDSSHVTEIIGADVSLREIVLAWARSQRPRLSVANNRKAILAWLKQLPAHCVIGVEATGRLHHLLADLAVAHGHTVYVVNPKHVSSYAKGVGQRGKTDPLDAAVIARYIDRERDSLHPYTTPSALQRKLRDLISQRAAVVRHSTALKQSIEATGKELNSTLKRAYKATLNGLNKLLTEINNELKRVIAADKALESKRKQLQTITGIGFINSAALTHRFDRTPFANSDAVVAAYGMDPRPRQSGNLIGKRRLTKQGNPEDRRLIYLAAQSASKTKLFKPLYNALLAKGFATTQAILIIARKLLRIAFAVWTTNKPFNPDKVGKHACQKP

SEQ ID NO: 169329 - protein, 296 aa, unidentified
MKKLFIGIDFSKEKLDATIILACGMNEIGSREYGCFPNNTTGYRKLCNWVKTNAWNTIAEEWLFCGEDTGSCSIGLSKWLYGKGYDIWIENAYAIKHSSGIQRVKNDKADSAIIAEYAWRQQDKVVPFEPLNESLAQLREIFLYRHKLVGQRVAMELRKEDKSQSNKSKAISFINRKSKHLIAEINKTIAECDKAIDSIIEADEELKENYAIITSIKGVARQNATCMLVYTNNFKKFGYDPRKIACYYGVAPFGKQSGTSVNTPAHTSHFANKLIKSLLGQAAHIAKIYNPEIRDY

SEQ ID NO: 169330 - protein, 382 aa, unidentified
MQASTVDTPTAGHCGTIFVTIELSQKTWLVTLHSPDRDRISRHKVEGGDHAGLLALIESIRVRAALKLGAAPKVVSCYEAGYDGFWLHRLLTAAGITNLVFDPASIAVEQRSRRAKTDRIDGELLLRTLMAHLRGEPRVVRIVRVPSVEQEDARRASRERDRLVKEQTGHTNRIKALLRLQGMAVGYPRRRDWLNWLGRQSDWQGQPVSPHLLAEVTREHARLMLVREQLAALEQAQAAQALPVPAAMAERRDLLQRLKALGPAFSATLTNEVLYKDFRNRRQVGAYCGLTSSPWRSGGIDREQGISKAGNPRARLKAIELAWLWLRHQPESELSRWFRTRTANAGKRAKRIAIVALARKLIVALWRYLTTGLVPAGATMKA

SEQ ID NO: 169331 - protein, 461 aa, unidentified
MSHDGQKQSKPDQGRQKKKRRKGMRIEDRPILEKNAAGIDVGAREMFVAVPPDRDEHPVQIFDTFTEDLQRLADWLVSCGVTTVAMESTGVYWIPLYDILEARGLKPCLVNARHMKNVPGRRTDWHECQWLQYLHSVGLLRGAFRPEADVCAVRVLIRHRAELVQSASQHVQHMHKALTQMNLQIHHVISDITGLTGLAIVDAILEGQRDAAALAKLRDPRVRANEETIRKSLVGNWKPEHLFTLRQSRELFRTYQEQVVKCDREIEQRLGDFKPWADPKQKPLPPDRKRNRSSQKRRKKTGHEGTGFDLRTEAYKLFGVDVTQIPGIETIALPLFSEVGRDLSKWPSTGHFASWLGLCPDNDISGGRVLWKGVRNIKNRAGQLFRLAAHSLHRSLTPMGSYLRRMKAKLGPAAATTATAHKIAIIFYTLVRRQLEYDQAVWAARNAERQKTARAEPQAPG

SEQ ID NO: 169332 - protein, 405 aa, unidentified
MLNAVGIDVSKGKSTIAVLRPAGEIVRKPFDVRHTPKELSILSSYIQHLEGDTRIVMECTGHYHEPILKVLSDSGFFVSAVNPHLIKEYDGDNSLRKVKSDSADAKKIAGYTLDKWHLLRQYSAMDNTRTQLKTLNTQFQFLMRQKTALKNNLISLLDLTYPGVNAFFDSPVRKNGSQKWLDYAYSFWHADCVRTIGLKTFTERYKKFCKRHSYIFQPDKPKSLFESSKELIAVAPKDHIYKDMVLSAIVQVNLISAQIESMRLKMDELASTLPEYEVVMNMFGVGHTFGPQLMAEIGDISRFNHRSALTAFAGVDPGVNQSGKMKIDSNRASKRGAPRLRKTLFQIMQTLMQNAPADNRVYLFMMKKKAEGKPYHVYMTAGANKFLRIYYGTVKAHLASQFQTE

SEQ ID NO: 169333 - protein, 369 aa, unidentified
MKKMIKYIGLDVHKDSIAISIADEGRNGEVRYYGEILNDMNSLDKLLRKIISQNSKPHCVYEAGPCGYYIYRHLTENGIDCCVVAPALIPKKSGDRIKTDRRDSMTLARLHRAGELTGVYVPDTEDEALRDLVRGRDDAKKAQRKAKQQLGAFFLRHNFIYSGKSKWSKAHFNWMADITMSHPAQQIVLQEYIDTIRTCGDRVDRMTDQISQLSRLGRQKDVISAYQSLRGVSLIVATTVSSELGDLRRFERPEQLMAYIGLVPSEHSSGEKKKRGSITKTGNSHVRRALVEAAQAYRFPARKSRRILKRQEGIDDKIIQIAWKAQCRLCSRYRMLVAGGKKSNVAKTAVARELAGFIWAIAQEVPLAA

SEQ ID NO: 169334 - protein, 384 aa, unidentified
MNKHSMIFIGLDTHKEFHEVAYCEEQRGASPVHYGRISSSKVSVKKLLRQFESKYPSATLHVVYEAGPCGYWIYRLITSLGHCCYVVAPSLIPKKPGERIKTDRRDALKLVRSLKSEDLTPIYVPEPEDEAVRDLSRAREAAMKDLKEAKYQLKALLLRNNIRYEGTANWSKKHLRWLTELILPHPAQQIVLQEQLQTIEERIRRLERLDNELTHHVHQWRYYPVVKAIQAMRGVRLLVAVGVVAELGDLHRFDHPRKLMAYLGLVPSEQSSGGKRHLGAITKAGNGRARRLLIEGAHSYRYPANVSTELQLRQEGLSKDIVDIAWKAQLRLCKRYQRMSKKGKHYNLIITAIAREMAAYIWAIAKEVVLTPVNPKLRLSRVPA

SEQ ID NO: 169335 - protein, 414 aa, unidentified
MIEVINKACGLDIHKLFFIATILSRSGEKQQQRFNRDDEGILALKNWVISEKCNVVACESTSDFWVPIYDSLIKHLPVIVGNARDMKVFTHKKTDKIDSEVIAQLALNNMIQPSRVFPKDQRDFRSYVRLRLTLVQKRTDLKNESHSILASEMLNLKNVLTDIFGKNGRMILSGISSGKTVDQIIASLSPNVRKKSDQIREILDREISQSATFRLHICLKLIKSLDDEIEALEKEIFNYAYRNYKRQMDILMSVPGIGELGAAILLAEISNFKDFSSGDKLASWLGLVPNVYQSADKYHNGRITKRGSKRARWILTQIAQAAARKNNSKLKEFFNRKKKSIGHAKAIIALARKIATIIWHLITNDEMYEDETGYQKGEVQKRKIVETEIFSVDERIKIISGILAIMGKEDEEST

SEQ ID NO: 169336 - protein, 425 aa, unidentified
MNLLVLKGVPMALKIVYKICCGIDVHKTFVVACIASTNDKGITSYESHRFSTYTSGLKTLLQWLLDRNCKDVCMESTGKYWIPVYNILEPDCSIVLAHPKYVKAIRGKKTDKKDAKWIADLFKHDLVAGSFMPPADIRQLRDLMRYRFKLTCFKSSEKNRLQNCLTVSNIQLGNVVSDTFGKSAQAILDKLLENPADTSFDLEPLVYKSLKKKLPELRDAIDGYITPEQAGKLKVIKAHYENLESRKAELEELILALAAPYQQELTILQTAPGISSPFTAIGIISEIGTNMEAFPSAKHLCSWAGLTPTNNESAGKKKSVRVSKAGCYIKPLLVQCANAVVKSTKHPEMRNRYLRLKKRRGHKKAIIAIARMLLTALYHMLKNGENYNAELYQKSDLLPVDREITVEQALMIARNQGYKIKSATA

SEQ ID NO: 169337 - protein, 383 aa, unidentified
MKKNSIAKLQANKSQIRKMAAKQKLTVGLDLGDRTSRYCILDGAGNKVGEDQLPTTKVGLDSLFAKMAPSRIALEVGIHSPWVSRQLAALGHEAIVANPRKVRLITQSVKKNDRMDAEHLARLARVDPQLLAPIRHRGVEAQADLAVIRARAELVEARTKLINAARGLAKPMGERLKSCDADYVKESLADGLGEATQNVIRPLLKSVEDISQQIGVYDKKIREVEKRYPETELLKQVHGVGTLIALTYVLTLEDAERFEHSREVGPYLGLTRKQRDSGDRQPELGISKAGDELLRRLLVQAAHCILRDGAPDSDLKVWGMTKVQTGAKTGNGKKGSKRRKKKAAVAVARKLAVLLHKLWVTGEVYDPQYNRKAVEAGKGKAAA

SEQ ID NO: 169338 - protein, 358 aa, unidentified
MKYVGIDVHKKMCQAAVLEEDGELLDEIRFPNDPEGIEEFAGKLTTFHDDVKAVVESTGNLWIQIHDRLEEHGFEVALSNPAKTRFIAEAKIKTDKVDARTLAGLLRADMLPTCYVPGEELRSRRELLRHRLNLVKIRTEVKNRIHSLLDKHGLRMPGTTPFSKGNIAWLRGLSLGFMDDAILRSDLSLLDTVDVQVELIEGKIAALAAEERRVRLLMTMTGVGYFTAMLVLSEVGDIGRFHSDKAFASWMGLAPSVHQSGERTRIGGVSGPGNKRLRWVMVECAQAAVRYDPRFRGLYERLLRRRGAGCAVVAVAHEMARVLFFMLSRDEPYRDADGGLVERKLKNMSRKALDGLRN

SEQ ID NO: 169339 - protein, 337 aa, unidentified
MKSNLISIDLAKTVFQVCAFGDHGEILSNKKLSRARLLHHLRQFEPTVVVMEACYSSHPWGRKIQALGHQVKLIPPYQVKPFVIGNKNDANDAVAIGEASARPKATFVRVKTLQQQDIQSLQRIRERLMKQRTATGNQIRGLLAEYGLIMPKGISHVRTKIPAILEDAENELTVVARGFIQRLYRELIEHDRQISELEDELESLLKENEDYQRLQTIPGIGPVIASNLLAAVGSAQSFKNGRQMAAWMGLTPKQHASGLKNRMQGISKRGNRTLRMLLIHGARSVVNWCLGKTDKLSLWLQALLKRAHPCKVIVALANKLARIAWAVLAKHEPYRVV

SEQ ID NO: 169340 - protein, 326 aa, unidentified
MKAVTWIGVDIAKDSCVVAQRCPEGFQTEEFPITPQGLKALGNWLPQQPRLQIVLEATGPYWRAFTSGFNSVAPEIPIAVVNPRRVRDFAKASPHASKTDLLDAQVLVHFAETFQPGLMEASANRADRQLRALTRHALQLTQQRDQVRDQMEKATADPDTPKFVLRSLKRHLQHLEKALKLCWSQARVNLDQDPQLRQCSRLLLSIPGIGEKTALTLISEYGAGLLQVGPKQLTRYAGLDVVFFQSGSSVYRLPRISKQGNWRIRRALYMAALSAIRHNPVVRAYYLKLVASGRPKKSALVAAMRKLLHQCYGVLKNQSPFDPAYA

SEQ ID NO: 169341 - protein, 366 aa, unidentified
MKKHSMTQLQMWKQSEGPLTMGLDLGDRHSHLCVLDKQGEAVWTDRVATSKKSLTKLFEQAPASRVVMEVGTHSPWVSRLATASAHEVVVANARNVAYITRSSRKSDKVDSESLARLGRLDPKLLSPIRHRSERAQADLAVIRARATVVEARTKLVNAARGIAKAMGERLASCDADQVGRRLVAGHSERLRKALGGLLTDVEQLTGTLRGYDKQIAQMATSKYPEAGRLRQVYGVGELVSLTYVLTLEDPARFRRSREVGPYLGLRPRKRDSGKIQPQLRITKEGDRYPRWLLVQSAHILLKKNAPDTDLKRLGEKLAARGGNNAKKRALVAVARRLAVLLHRLWVNDEVYQPLYNASQPSPAKAA

SEQ ID NO: 169342 - protein, 430 aa, unidentified
MQEKQTDVTKELNYAAFIGLDWSDKKHDVYLHVCATGEEESKVIASTPEALDEWILQLRERFESRPVAICLEQARGVLVYMLMAHDFITLYPINPAMSAKYRQAFTPSHAKDDPTDARIMMELLLHHRDRLSAWKPDNVQTRMLARLCEERRAAVNLRTKLVQKLNAKLKMYYPQALTLVGENLSSTLACDFLQKWPSLAEVKKAKPAKVRAFYYGHNCRSESLIQERIKLATTAKAATTDEAILIPLVASVKMLARLIRDLDPAIKDFDEQIKVLFAQHPDAAIFSNLPGAGDALAPRLLVSFGSDRDRYSSAAEVQQFSGIAPVTERSGQRQWVHRRWQCSKFTLQSFHEFAQHSMGWSAWAKAYYQFYKSKGKKHNTIVRSLAFKWIRILFACWKEHRPYDEARYLETLQRRGSPLCQHLDLPALVA

SEQ ID NO: 169343 - protein, 404 aa, unidentified
MTESSDYESVQVFIGVDVGKDTHHAVAINRSGKRLFDKALPNDENKLRSLISDLKQHGQILLVVDQPATIGALPVAVARSEGVLVGYLPGLAMRRIADLHAGEAKTDARDAAIIAEAARTLPHALRTLKLADEQIAELSMLCGFDDDLAAQTTQASNRIRGLLTQIHPALERVLGPRLDHPAVLDLLQRYPSPEKLASLGEKKLAAQLCKLAPRLDKRLAADIAQALAEQTVVVPGTNAAAVVLPRLALQLITLRKQRDEVALEVEQRVLAHPLYPVLTSMPGVGVRTAARLLTEVACRAFASAAHLAAYAGLAPVTRRSGSSIRGEHPSRRGNKALKRALFLSAFAARRDPLSRAYHTRKMSQGKRHNQALIALARRRCDVLFAMMRDGTFYTPAGVITCLTT

SEQ ID NO: 169344 - protein, 344 aa, unidentified
MNIASIGIDLGKTTFHMVALGERNKILLRRKFSRSQLLAYTANLPASLIGLEACAGSHFIGTVLREQGHQARLIPAQFVKPYRKSNKNDFIDAEAIAEAVTKQNMRFVQIKTQEQLDWQAMHRVRDRLMQRRTALINEIRGFLLERGLTFAARPIYLRKNLPTVIEDAEQNLSPRLRWLLDRLWQEWKQTEIDIKAITDEIERISNEDARCRQLRQIPGFGPLVSTATVAAIGNGAAFRRGRDFAAWVGVVPRQFSTGGKQKLYGISKRGNVYLRRMLIHGARAVLLRVKYDTGGFGQWVHRLAQRAPHNKVVVAIANKLARMAWAVLSSGKDYRHQPLQPAAA

SEQ ID NO: 169345 - protein, 411 aa, unidentified
MNNTLFVGIDISKRSNVATFMNCEGKVVGRLAFSNNGSGADRLVAKILSYYEKEDFEEIRIGMENTSVYSKNLVWFLYEHEALNEHKLSIIPLNAIMVANYKKSFLDMDKDDITDSFAIADFIRIRPGLLPFKLDDRQEALKIMTRSRYNYVQALSRMKSQFLTRLFLSFSEMEAGKPFYSIFSKTSLSLLEEEFTLDELAEKPIPELVEFLQEKGGGKFQNPEEIAKVLKKAASSSYRVPAMVRESLNRTMASDMEIMRILENEIHNCDKNIKKLMKSVPAILVSIPGIGPVLAAGIMSEIGDISRFQKQESLGKMAGFKWKRNQSGKKESENKAAVLSGNKKLRYYLVEAANRVRIHDPVFEAYYRKKYAESKTHAHKRALILTARKLVRVIFYLLKENKLYKPDVGIS

SEQ ID NO: 169346 - protein, 367 aa, unidentified
MKKHTTGNQSLSPSDLAACTTVAADLAKRVFQIAGEDALGQVLYEERIKSREGFQAFLCKLEPHVVVLMETGPGAQAWARQLQDQGNLARILPAGRVADHRSGAKNDRNDALAILRAGRDDRISAVPIKNAAELAMQALHRIRQGCVRRRTAVGNQMRGLLLEHGVAMAQGEAAIIQKVPRVLEDATQPLPDMFRELIDELLAEWCHLGERIRGLTGRLEEAAKQDRTTMRLMTIRGVGPIIATAIVAKQTRPERFADARMFAAYFGLVPDQNSSGERVRLGRMTKRGDSYIRSLAIQGAHAVLRQLRHDSDQPDDRRLLQWLNHLGSKKAAVRLANRNLRIIWSLLQNDQTYRREPSNRQETAMSH

SEQ ID NO: 169347 - protein, 350 aa, unidentified
MMIIGCDLHTRYQQIAMVDTETGEFVQRRLEHESGEARGFYAGLKGAVRVGIEATGHTHWFEAMLSELGHELWMGDAAKIRAAVVRKQKTDARDAAHLLDLLCSERFPKIWRPGLAERDLRQLLWHRQKLVWMRGAVKNQMHALAMGEGVCRKKKLFSAKGRKELEGLTLGPWASYRRQELLRMFDELQGSVTKLDEAVEQAAQSQPLAVRLMTHPGVGPITSLAFVLIIGPIERFERSKQVVSYLGLNPREHSSGGRQRLGSISKQGNPMMRSLLVEAGHTAARLDPQLQRMYQRLKFRRGAAVAKVAIARKLAVRMYWMLRSTADYAQLVRMRGSSWPTLVEDNPSLG

SEQ ID NO: 169348 - protein, 419 aa, unidentified
MNVVHERCCGLDVHKETVVACLLIREGKKTEKDIRTFSTMTADLVVLGDWLRANGVTHVAMESTGVYWKPIYNLLEGEFEVFLVNANHMKTVPGRKTDVRDCEWIADLLCHGLLRGSFIPPEPIRDLRDLTRYRRSLTDERVREINRLQKLLEMANIKLSSVASDVLGVSGRAMLEALLGGSTSPEVLAELARGKLRHKLPQLRQALEGRFRPHHRFLLGQILAHLDFLDESIEEVSKEVARRIVPFTSQLELLKTIPGVEQKTAETIVSEIGVDMTRFGTARQLASWAGVCPGNNESAGKRKSGKVRKGDRWLKRVLLEAAWGASRSKETYLRALYVRMARRRGLKKGALAVAHSLLVIVYHILRDQKPYRDLGPNHFDRLNLVYLKTQFVRRLEGLGYKVQLEQIPQPATHEVAFSR

SEQ ID NO: 169349 - protein, 304 aa, unidentified
MSKAKLDVCIEPGHRLASFNNDTSGIAELAAFCREHKVELVVMEASGGYERRTFIELWEQDISCALTNPRSVRRYAEAMGILEKTDRIDASVIARFADAKGLAPTPLPSQAQQRLKALVARLRQVTDDLVVQKQRRSSMFDNTEMQASVDEVVDLLKRQSRSLEGEIASMIDDDPLWAKLADTWRELKGVARRTIAWLHADLPEIGTLSNKAIAKLAGLAPIANDSGKRKGKRPTRGGRAGVRSILFLVAAIVARYDQSLGEFRDRLLKAGKEKMVVRIALARKLLVRLNAKAREARAQYAIAT

SEQ ID NO: 169350 - protein, 410 aa, unidentified
MAYKVAGIDVHKKVLMAVILDADDPASEPQRRRFGTTTSELQKLSSWLRQQEVQQAVMESTAQYWRPVWYELEPYMKLFLAQAFSNRAPRGRKHDFRDAERLVRRLLAGELTLSFVPEPEQRTWRMMTRARVQLAEDKSRLQSQVECLLEEMRIKLSSVVSDLFGVSGYRILRALAGGETDPRKLAALADDRLQCSERQLIDALSGRPQSAHLQLLTMHLDRYQLMVEQLARSDRLIAEALKPHQEAVARLALAPGLGVDSAQQIIAEVGVDAGTFPSAAHLSAWVGTCPGRNESAEANYSSRSAKGNKYLRRILNQAAHAAVKKKGSHFQAVFRRLLPRLGYKAAIWAVAHRLCRLVWKMLHEGVSYIEQGSEPDARTKRRRARNLLRALRKLGYDVNLQPTSTACPAA

SEQ ID NO: 169351 - protein, 403 aa, unidentified
MKHVIAFDVSMGKSYMVIYNVQKQCVFESEIKHTKPDFKKLQEKIHKLTDETGESPEIVFESTGIYSRQLERFMQNNQYTYCLLNPLEAKIQCDSLRIHKTDRSDAHRLALTHFTVTRRVSTGTDNLFYQLKSLSRLYSELDGELSIIRGRMHKVIQLTFPELERIFTSRSDLFLNFVQLFPHPDCVLGLSKTIIKNRIRANTNKKISNITAEKKAIQILEIAKICYPAVSQNDVLCDQLKLYARRYQELLHQKESCISKMVYVAEQREEYDVIRSLPGIGPNTAVRLMAEIGDITRFNNNKQLNAFAGIDIRRFQSGKTFFKDKINKRGNKHLRKLLFLIIQNMIKQRRYGQNHIVEYYDKLKTQPYNKCHKVASIACVNKLLKLLFYLITHNMHYDYRLTA

SEQ ID NO: 169352 - protein, 389 aa, unidentified
MIEGKASDATPQDRTRRDGVDGPLRHQCARMRLLRSQTREPSVNQITRIGMDTSKYIFQVHGVDASEQPVLRKRLGRKQMLGFFAELPPTVIGMEACGSSHYWARELKQLGHEVKLIAPQHVKPYVTRNKNDGRDAEGLCEAMSRPTMRFVAVKTPEQQAALMLAGLREQMITRRTQISNAIRGYAAEFGITVAQGLNQIEPLLARLAQDESVPELARDLFALQGRDYAQLQMELKAIEARLMAWHRANADSRRLAKIPAIGPIGATTLVMKTTDPGAFASGRHFAAWIGLTPKDHSTAGKTRHGKITRAGDERLRSVLVAGATAVIQQAKQGRGHPSPWLIALLKRKPPKLAAAALANKTARIAWKLMVTGESYDGARMSKAPLIAAT

SEQ ID NO: 169353 - protein, 357 aa, unidentified
MLHVGMDMHKKFSVVTVVGEGGEEVVQGKRLENEEGAIVEFISELGEDAQVVLEAGSNWYWMCDLLDELEIPNKLCHPSKTKAIASARTKTDKLDSRILAHLLRMDFIPESYKPDLKTRRSREVLRYRAGLVKVQTGIKNRAHALLAKNNVPNPFTDLFGKEGKRYLAGLDLAPEYREALDGYTRMLASLATEIRKAERTVDAAIESTPETELLETIPGVGRIRALTIASEIGDIDRFHAAKQLVSFAGLAPSTSQSGETTRHGHITRQGSKWLRWTLVEAAIHVVGKPGPLRDFYLKTARRRGKKCARVAVARKLCTYVYHMLKEKKDYAAVISFVEKVKPTTLCTFVRSKQGIPV

SEQ ID NO: 169354 - protein, 350 aa, unidentified
MSATCVVTLGVDTHKDLHVAVALDQLGRRLGVADFPTDDAHHRFLWDWAAGFGELRQAGVEGTGSFGYRLAQFLTGAGVAVFEVNRPNRTARRRRGKSDPVDAENAARAVLSGDATATPKSRTGPAGQLRALLVARRSAVKSRVQAELQLRSLVLELDDTTRGRVDRRRAADLVAACAKLTSTDGTSLGLRALARRWQYLEREVRDSDNAIELLTRQTVPGLLAQPGIGPICAAQLLVTAGDNPERLSGEAAFAALCGVSPVEHSSGKTQRHRLNRGGDRAANSALWTIAVNRLIHDSRTSDYAARRNATGSSRKEIIRLLKRYIARQVYGEIIRALAPPTTPAPEQLLT

SEQ ID NO: 169355 - protein, 342 aa, unidentified
MGEISTIGLDLAKHVFQVHGVDEQGNAVVRKPLRRGAVLKFFAELAPCTVGIEACSTAHYWAREITALGHAVRLMPPAYVKPYVKRGKNDAADAEGICEAVMRPTMRFVPVKSAEQQANAMIYKVRELLVRQRTQLINALRSHLAEMGIVAAKGVGKLDDLIAIVHDQEDGRLPVPARQALQELAGQIAALDARIEPLQQEIVSQLSSNETARRLTTIPGIGPLIAGALVAMVPDPGGFKSARHFATWLGFAPRQKSSGGKQRLGSISKQGNRYLRSLLILGAANVLRRRSASRSAWLVALRGRRPFKVVAVALAHKIARIVWALMVKGGSYRAAMPAAAQG

SEQ ID NO: 169356 - protein, 333 aa, unidentified
MLFVGVDAHKETSQVTVMDEAGKVLRRRRIPTSREGVQEALSGYQEPIKAVLEASYCWGMMHDWLDEVADEVVLAHPLKVRAIAEARIKTDEIDSETLAHLLRADLIPEAYAPSKEIRAVKRVLRQRMFYVRVGTMIKNRIQALLAQHSVERPEVSTIYGQAGMEWLESLELPSPDGELLDEDLKLLKVLERRIAATEGLIRKLSAGDAAVRWLDSLPGIGEFFSVLIRYEVDDITRFHAAKKFASYTGLVPSTYSSGNRTVHGHLTKQGNKWLRWAFIEAVSPAIRKSPWLRGYYQRIKTRLGTKEARTATARKLAELAWTVWTEERCFEER

SEQ ID NO: 169357 - protein, 438 aa, unidentified
MKAKQRKAKGNDHSSSMASKQRAKIAKAMQAPEQMEIVNRHAGGIDCGSEEHYAAVSPESVEEGEPFVRCFSAFTEGLDALVEWLKDCGVTTVAMESTGVYWVALYQKLEAAGIEVFLVNARHLRHVPGRKTDVKDCQWIQRLHSFGLLSASFRPEDMICRLRSLQRHRLNLVSAGAAEIQHMQKALQQMNLHLHHVVSDISGLSGLRIIEAILAGQRDPSQLAKLRDPRVRKSTVAQMEAALVGDYRPEHLFVLDQSLQAYRFYQARIEECDHEIEPLLQQLAERFECSSSPLAAESSQPEVIQDQAAQSQTARPIKPKRKRKPKANQPKIDLAGYLQRICGVDLTQVVGLDVLSVLLIVSEIGVDMSKWRNAKAFCSWLGLCPGNKISGGKVLDRRTCKVINRVATTLRLAAQAVGRSNTCLGIFYRRKESASGTS

SEQ ID NO: 169358 - protein, 421 aa, unidentified
MLKPAQDNDEIITRVAALDIGKAEVMCCVRVPDPDCPGRRVQEVRPCSTMTRSILLLADRLTKLGVTRVVMESTADYWKPVFYLLEAAGLDTWLVNAKDVKHLPGRPKTDRLDAVWLCKIAERQMIRPSFVPPPPIRQLRDLTRYRRDLVEARTAEKQRVEKLLEDACLKLSVVASDLFGVSGRAMMAALVEGQRDPAALAGMARASMRRKLPQLEEALTGYFTDHHAFLLRTMLARVDAITADIERVEARVEELVVPFAQAVDRLDEITGIGRAAAHVIIAEIGTDMTRFPTPGHLCSWARFAPGVCESAGRKKPAGTGHGNPYLARVLGEAAVAASHTHTFLGERYRRIARRSGAKKAIVAVGRSMLVIIWHLLSDPDARFHDLGPEFYPRHTNTQRKVRNHVSQLTALGYRVTLEPAA

SEQ ID NO: 169359 - protein, 452 aa, unidentified
MDVVVQRCAGLDVHRDNVVATVRVPGTGRRRVEQQTRTFSATLAGLSALASWLGEFGVTLVGMEATGVYWKTVFHALEDRFECWLLNAHHLRNVPGRKTDVKDSEWICQLVQHGLVRPSFVPPPEIRRLRDLTRLRKAQANERARTIQRLEKVLQDAGIKLSSVASTTYSKSARAMLDALLGGINDPEELAELAKARMRQKIPQLREALASRFQIEHHGVMVAQLLAHIDTLDAAIANLSDRGAAVLTAHQELIELLCTIPGVHVHAAQVLIAECGLDMTRFPTVEHFTSWAGACPGHHESAGRRRSGRTRPGPRWLTDVLTECARAAVRTKGTYVAAHYVQLRGRRGEPIALGAIRHDLLVAYYHVVRDHVTYRDLGPDWQHKRYSPEHRARRLQRQLEALGYKVNLEQPEPANRHIRGPSTAGRPAGRIAPARTACNLGDSQASLRRKRQ

SEQ ID NO: 169360 - protein, 361 aa, unidentified
MNTTTVGVDLAKQVFAVCVLDGQGRVQQRRELRREAFGAWLAQLPAGTTVAMEACSSAHHWARVCMEHGLLARLIAAQFVTPFRKSRGAKNDRNDAEAIATAARQGNMRFVAVKSVEQQGRLAWHRVREGFKSERLAVMNRLRGLLSEFGIAIEVGAASLRRALAQVQERADWPLGFAELLGQLRTHLDQVEEHLGACDRRIESHARADERCMRLQALAGIGVLTADATVAMVNDGREFRHGRQMSAWLGLVPRQNSSGGHEKLGRISRSGDSYLRTLLIQGARSSVNQARRVAQDKATPEQIWIQQLSTRMSFGRLLVAVANKHARQLWAMLARGKAYDAHAWLNHPMVQRNAKRARAAA

SEQ ID NO: 169361 - protein, 345 aa, unidentified
MTIVNTRAITGGVDTHADMHVAAALDPIGGLLGVQEFPATAGGYAGLLGWLGGFGTVALVGIEGTGSYGAGLARHVTAAGIRVVEVDRSDRQDRRRQGKSDPLDAVSAARAAQSGRARGAPKGRDGAVEAIRALMVAKRSARSERVQTINQARALVVTGPDDLRTRFARHTAAGLVSGLASLRPRPGDVVGHATRIALRELGRRAEFLDAQLERLDELIAPLVAARAPGLLALHGVGPDTAALLLVAAGDHPERLRSEAAWAHLCAVVPIPASSGKVTRHRLNPGGDRQANHALWRIVLTRMSAHPPTLIYVERRTKEGLSKKEIIRCLKRYVAREVYRHLRAAG

SEQ ID NO: 169362 - protein, 393 aa, unidentified
MRFYTTPHRYYCGIDLHARRMYICVLDAEGQIRVHRNGPATPEHFLTTIAAYREDLVVAVECIFTWYWLADLCAQEGIAFVLGHALYMKAIHGGKAKNDKIDAHKIAVLVRGGMLPMAYVYPREMRATRDLLRRRCHFTRKRAELLTHIQNTASQYLLPTLGKIAYHGNRVGVAEHFRDPEVRKSVETNLALIDEYDRLLTELELPLTQTAKVHDVNAFYRLRSVPGIGKILALVLLYEIHDIHRFPRVQDFVSYCRLVKCAKQSDGKHYGYSGTKIGNAHLKWAFSEAAVLCLRKNPPAQRYVARLAHKHGKGKALTILAHKLARAVYYMLRRGQAFEVTKFFSGTAGGDRPPRAPRMAATPAGNDLDGGAILTLPKSSGAGRPGAATNATA

SEQ ID NO: 169363 - protein, 414 aa, unidentified
MPYKIAGIDVHKRVLMVVVIDATTPEEKPERRRFATLPSELRRLSIWLREHGVQEAVMESTAQYWRSVWLELEPYMLLHLAQAFSNRAPRGRKHDFKDAERLVRRLIADELILSFVPSGEQRNWRNLTRMKLQLTRDRVRLQNQMECLLEEMRIKLSIVVSNLLGVSGLRILQALAKGETDPKQLAALGDGRLKCSEEQLVDALTGRVQPLHREMLALQLERLQLIDKQIAQLNALIAQAMKPHQEAVMRLAEVPGLGVDSAQQIIAEVGVQASTFASAAELTSWVGTCPGKDESAEENHSSRSAKGNKYLRRVLNQAAHAAVKNKGSYFQAVFRRLLPRLGYQSAIWAVAHRLCRVVWKILHEGVRFIEYGIQPDPRAKKRHARRLAQALRKLGYQVAITPINLATSENGIQM

SEQ ID NO: 169364 - protein, 385 aa, unidentified
MTIQIQVPRFIPRDYDVFAGLDVDKKSMAVTFADHAGSQRALRMAHQVTPLVNYVRKHFAGQRVAFAYEAGPTGFGLHDELVRRAYTCVVVAPSKVPRAPGERVKTNRLDSRKLAESLRGGQLHSIHVPNAVYRNLRHLVQMRDTHVRQLTSSKLRIKSLLLYEGIAFPEEHEKWTARAMRELQTLPCSETVRFKLDDLLDTLHFHFQAAARATKQIRQYCLDDPELQQSIDLLLSLPGIGWIVGSHLVARLGNPREIKNGRQIAGFLGIVSSEHSTGDKQNRGEITRSGDSRLRNKLIQSAWTAIKKDPELRDFYRRIYQRHPKKVAARKAIVAVARKLTNRIYVVLKEQRPYVVRPDSSIAPLTVAETVGPRERLDTAQNDQS

SEQ ID NO: 169365 - protein, 384 aa, unidentified
MTPRRDFIPKLYGPVPEPLEAEVDTALQVLNPYAAGIDIGEAAHWVAVPAHCDSQPVRRFATFSVDLHALATWLLACGITTVAMESTGIYWITLFELLESRGLEVVLIDPRQAKRAPGRPKSAVLDCQWLQRLHTYGLLCGAFRPDEQVCVLRAYLRQRQMLISCAAEHIQHMQKALQQMNLKLTQVVSDITGVTGMAIIKAILAGERDRLQLARLRDPRCKHAESDIAKALEGTWRAEHLFALRQALELYEFYQQQRLACDQQIEAHLHTFADQSDGQPLSNASKTKKPKANAPSFDARTLLYQMSGVDLTAIEGIEASTALVVLSEIGTDMSRWPSVKQFSSWLGLSPQHRISGGRVLSRRVRPGAQRAALALRLAANSLHR

SEQ ID NO: 169366 - protein, 326 aa, unidentified
MRMFIGLDVHKNYLQAAVLDAEGRLVKQQRIANSRDELANFFQPFDKAKAVIESSTTWYPIYQLLSDKHEVTLSNPARTKAIAQAKVKTDKIDALTLARLLRGGFIAESYVPPRRIMDLRELVRYRASLVRLRTMVKNKIHAQLLKRGIRIDAYPFTKAHNAKLTAIGDYKIDGYLKILESLNLQITETSGRIKQTAEYDEASRLLMTIPGVGYYSALLIACEIGDVNRFPDSAHLCSYAGLTPSTHSSGGVTYHGHITKTGSRHLRWILTECTRTHIRTEPDSNITRFYLKLAKRKGDAKATVAASTKLLKIAYWLLKEKRPYHG

SEQ ID NO: 169367 - protein, 350 aa, unidentified
MLIIGCDFHSRFQQIAMVDTETGELIERRLDHNNGEAKKFYAELKKPVRVGMEATGYAQWFERMLATLGYELWIGDAAEIRAAMVRKQKTDSRDALHILDLLLANRFPRIWIPSPGERDLRQLLRHRHKMVCLRTSVRNQLQALAMGQGVYRKRKLWTAGGRAELEALGLDPWASRRRQELLQILDRLDPCLAELDRAVAKEAEQRPAARCLMEQPGVGPVTALMFVLTIGPVERFRRSKQIVSYLGLNPRESSSGGRQRLGAISKQGNSMTRFLLVEAAQTASRYDEELRRDYQRLKFRRGTAVAKVAIARKLAVRLYWKLRKHSSLVPSTRMQGSSEHPVVGASLSGN

SEQ ID NO: 169368 - protein, 309 aa, unidentified
MFPVGIDVSKNPLDLCMLYDGIKGRIKTRNIQNNRHSVENILRWLRLQHCSPEDVHVVMEATGVYHEQLATELHDAGFRVSLANPHRSREFARGMGIMTKTDKVDAYMLACYAFLKKPHRWEPPAPEIRYLGALLRRRDVLLGDALREENRLEKYLSTDTPADIISSCRRMAQLLREEVSNIERQIKAHIKASPALRRDYTLLTSIKSVGPQLGMHMLVVLRSHNFVSAEQAAAFLGVVPIEKRSGTSVRRRPRMSKIGPPQLRAKLYMSALCGKIYNKRMRNIYDEGNAVNLLMTILICSHSILVTSG

SEQ ID NO: 169369 - protein, 319 aa, unidentified
MYVGIDVSKDRLDVASLGEGAFAPFQVGRDEKGLSELISRLKAYSIQLIVLEATGGYERAVAAALAAAKLQAAVVNPRQVRDFARATGKLAKTDSLDAAVLAQFAEAVKPQVQTLPDALSMQLDEMLTRRAQLVQMLVAEKNRRASVLVMRNPTQSKKVAKSLESHIQALEKLIAELEDDIDTTIKNSPVWREHEDLLRSVPGVGPTVARVLIGYLPELGTLNRRQIAALVGVAPFNRDSGKSTGKRAIWGGRAHVRSVLYMAAVTAIRFNSDLKAFYHRLLAGGKAKKLALTAVMRKLLVCLNAMMRDRASWSPRLPA

SEQ ID NO: 169370 - protein, 402 aa, unidentified
MNSVGIDISKGRSMVAVMRPFGEVVVSPFEVRHTDSELSELAKLLKSLDGETRVVMEATGNYHTPVAWLLHGAGLYVSVVNAKLVHGYGNNDLRRVKTDRKDAVKLANYGLDRWLTLPRYIPEEDTRLLLKNCYRQYQQYSKVQTMLKNNLISLLDTTFPGMNRLFNTPARADGSEKWVDFAADFWHCGCVCECSEKVFMNKYQRWCRKHGYNFSERKALDIYTEASGHIGVMPMSDTTKLLVAQAVSQLRATSAALAILKQEMQTLASQLPEYPIVMEMFGVGPALGPQLMAEIGDVRRFHSKKALVAYAGIDAPPNDSGDVTGRHKGMSKVGAPSLRRTLFLVMSVYLQNAPLDEPVYQFMDRKRAEGKPYRVYMMASANKFLRIYYASVKAYLETLERF

SEQ ID NO: 169371 - protein, 316 aa, unidentified
MAEPEVFVGIDVSKRTLDVAVWARGELLQMENSARGIAALAERLTALAPALIVLEASGGYQAALVGELAAVGLPVAVVNPRQVREFARAVGLLEKSDALDARVLARFAAQVRPPLRELPDQLGRELKALMARRRQLVEMLVAEQNRLQQAPAVLHHQLRGHIDYLRKDLHRLTRDLDRMLRGSPLWREQENLLRGVPGVGPVLCATLLAELPELGRLSRGEIAKLAGVAPLARDSGTLRGQRTTWGGRAAVRAALYMATLSATRHNPVIAAFHRRLRAAGKAPKVALVAAMRKLLIILNALLKHRAPWRPPCPANP

SEQ ID NO: 169372 - protein, 315 aa, unidentified
MCHNFIGIDISKNDFVIAVHGNIKAFKYLNNPKGFNELLKEHPILKNNSFVVLETTGGYEKALLDYLLSHKIAVHRANTRVVKYFIRSTGQLGKSDNIDAIGLARYGHERHKCLTLYKPNKDNLQELVKYTLRKQDLKKQLVAEKNRSQAPDQECTKESHIRVIEFLEQENAIVESLIDDLVKDCEYLTKARDLLVKEVAGLGKATATSLLALMPELGNLNRKQVAFLAGVAPYPYESGKKIGYRKTYGGRADLKPVLFMPAMTASRSNGKLGTFYNKLVENGKKKMVALIAVMRKIIVIANAKIRDLRLKMQIS

SEQ ID NO: 169373 - protein, 360 aa, unidentified
MAPTNLTNPAQTDQPDVVIGVDTDKDFHVAVALATNGGRLGECSIPANRLGYAVLQDWALEMGRRPVFAVEGTGSFGAGLCRELMAVGYSVVEINRPDRSTRRRLGKDDAIDAEAAARSLLAGTATITPKGGTHLVEMIRLLKGNKDSASKSRTRAINQMKAILITAPAVLREQLEPLVHDALMATCAAFRVAMVDSPGTAAKKALCFLAQRVLGLEREIAGLLDDLNQLTQQACPGLRQTYGIGTDGAATLLITVGDNPERLRSDAAFASLCGVSPLPASSGKTNRHRLNRGGNRQANATLHRIVVVRLRWHEQTKAYASRRLKEGRSKAEIMRCLKRFIAREVFHTLLGRPPVRTAAA

SEQ ID NO: 169374 - protein, 305 aa, unidentified
MKSYLGIDISKHHLDLSHSAPANRLANTETVILPWLKSLPPETILVCEASGGYEALLLRLAHAARRPIIQLNARQVRDFARAKNRLAKTDRIDAGLIADFAQTFQPEPLPQPDPLQEQLLALVKHRSHLLTQVTQNNNLTQTVTDKNLLRLIAKTVAFLQKQVTQLEALMQIKIAASPDLLAKVNRLRQVQGIGVLTATSLIALMPELGSLSDTQAAALAGVAPFNHDSGQFRGQRHIFGGRSQVRSVLYMAALVASRHNPVLRPLYLRLLTRGKAKKLALTALMRKLIVLANQLLKNPDFILAS

SEQ ID NO: 169375 - protein, 387 aa, unidentified
MPQPNDLSRSLVTLDQNSTIIAVLEMSQSSWLVAGMLPGIERQPRKKLEPSPERLVAVLHAWRDEAVGAGRTITRIALAFEAGRDGFWLARWLEARGVEAHVIHASSVAVSREHRRAKTDRLDTELLKRGFLGWLRGERGHCTMARVPTIAEEDAKRPNRERECLVGERTRIVNRIKSTLARLGIRNFKPTSRKASERLATVHTPEGMPLPPNTLAELQRDMARLGFVMSQIREIEVARQKRLEQHPETGPHGMVRLLARIVGVGVETADMLVHEVLSRPMRDRRAVARYAGLTGAPDESGAQRREQGLARAGNARVRRGMIQLAWRFLMFQKESALAVWYRARTADSRSGTRKTMIVALARKLIIALWRFVTTGETLEGVILRPAG

SEQ ID NO: 169376 - protein, 311 aa, unidentified
MSEQALFVGIDVAKDRLDVAVSPSGETKPFTHNHQGLSALTAYIRALSPALIVLEATGGYHKTVLSTLAAEGLPAVAINPRQIRDFAKATGTLAKTDRIDALVIARFAEAVRPEVRPLRDEEAERLQALITRRRQLIEMLTAEKNRLAMAAQWTRKDIRAHIHMLERQLKRIDDQLKDLIDQSPLWRQKDQILQSMPGVGPVLARTLLAELPELGTLNRRQIASLVGLAPFNRDSGRFRGRRMIWGGRAHIRTVLYMSAVVAARFNPVIRAFYQRLKEAGKGFKVAITACMRKILIILNTMIKNNTYWKYA

SEQ ID NO: 169377 - protein, 388 aa, unidentified
MPQQRKPNDLGRSLISLAMDTTLIAVVELSLSSWLVAGIVPGVERQPLKKLKTDENALLALLNRWRDEAVRSGHKISRIAVAFEAGRDGFWLARWLKARDIEAHVIHASSIAVSREHRRAKTDRLDTELMKRAFVGWLRGERDHCKTASVPSLWEEDAKRPSRERESLVGEQSRLINRMKATLIRLGIRGFNPKLRHAEQRLETLRTPEGEPIPPNTLAELKRDMQRRRFVCDQIRSIEQDRLERLERTPDTEPHAMVRLLARITGIGIETADLLVHELLLRNMRDRRAVARYGGLTGSPDRSGGTNREKGMARSGNARVRRGMIQLAWRFLLFQKNSALAQWYRRRTEHAPKARKTMIVALARKLLIALWRLVREGVVPEGVAMRPA

SEQ ID NO: 169378 - protein, 402 aa, unidentified
MNQNALFVGIDVSKLKHDIAVMDENKKYVCKPFVIKDDYSGYQLLFGKLTEYTEKLQKQCLYIGLEATADYWKNIYYFLKKQSPSYYLTVINPVRTKAFAKTDLRRAKTDPIDAKDIALFMAEKRPSPSIDRPPIFDNIKDIDNRIYQIKKQQTMLMNKLRLELAKVAPEIEKSISRVKGLQIIALLEKYPTAEQITKASVQEMAAIKYGKKSWSLPRPFIEKMKSLAQNSIGYKTGEGAGYVVQSLLRSLSHFRQEIDCLQKQSGQLYHIVKEQDSLLATIPGISLETAIALEAYIGDVNRFLDSRDLVAYFGMNPTVSRTGKSIRVSHLEKKGNPIVRHKLFMAVLPMIAHKQEPFYSYYLRLVAAGKPKLVAIVATMRKLLVVIFAMLKKQKPFDEKIF

SEQ ID NO: 169379 - protein, 340 aa, unidentified
MDKHDFSGIEVSAKELIVAVEREGRTVPLECFANDAQGHQAVLRFLRGGKHPVRACMESTGVYGLDLALVLARAGIEVMVANPRAARHFATAMMQRSKNDRLDARVLLEFVRRMPFQAWTPPRPAILQLHALSRRLEALKDTLVAEQNRLHAARATDTTPAAVRRDLERSLRSLRRAVARLTVEAVKIIRQDSGLQLRFDLLLSAKGIGETSAIALLAELAVAPQDLDVRQLVAYAGLDPREHSSGSSVHKKPRISKHGNVHLRRALYMPALVAIRRQPNLHAFYEHLRARGKAKMVALVAVMRKLLHAIFGMFKHQTAFDGNKVFALPTPDISTTEAAA

SEQ ID NO: 169380 - protein, 379 aa, unidentified
MVSAATPASLAETASATLFVALELSRSTWLVALHSPLTNKVSQHRLDGGDADGLLALITRKRGQAEEKLGQPVRVVCCFEAGYDGFWLHRWLCARGIENRVLDAASLLVDRRARRAKTDRLDAAGLLRTLMALERGEMQVCRVVHVPTPAQEDARRRSRERARLVVERGQHTSRIKGLLMTQGIRDFEPTRRDWQVRFEALRTPDGLPLAPCLRAELLRECRRLWLVMEMIAEVEAEQKAVADAEDGPAARLAQLRGIGLTFATVLGDEVFFRDFRNRREVGGYFGLAPSPWQSGGVRRDQGIAKSGNPRARRTAIELAWLWLRHQPGSALTRWFHERVGSTKGRLRRIMLVAIARKLIVALWRYVTVGLVPDGAVLKS

SEQ ID NO: 169381 - protein, 378 aa, unidentified
MSQQVLKCFCGMDLHSNNTYIGIIDENGRMVFKGRFPNNTDAILDVLVPFKERLGGVVVESTFNWYFLVDALQENDYKVHLAHPAANHQYKGLKRTNDKTSAFWLAELLRLNILKEGYIFPREERHLRDLARKRTRLVENRTQYILSFESLVNRNLGVSIDGNATKKLTEADIEQMFDNEHLILTAKTNIAMMRCLDERIKQLEKEILAAAVLKPEFSRLLSVSGIGKVLAIAISLETGPIDRFPEAGNYASYSRCVDSKRTSNKKKKGENNRKNGNRYLAWAFVEAANKMKVHCPQAEGYYKRKLLRTNNIVATKSLAGKIAKACFYIIRDQVDFDVTKMFGQPINPNNKGSGSKPERGLVIKPTAPIGNTAAAALL

SEQ ID NO: 169382 - protein, 421 aa, unidentified
MDKYRRYVGIDWATQAHEMCVIDPDRHVLEQRSFEHAGSAIAQCVEWLTRISEGDPSSTAVAIETPRGAIVEVLVERGFHVFSLNPKQLDRFRDRHTVAGAKDDRRDAFVLADSLRTDQPCFRRVVLDDPLVIQIRELSRMDEDLREEEGRLHNRLREQIHRFFPQLLKFSPAADDPWLWAFLELASTPAAAARLHEGTIAKFLRSHRIRRFSAKELATELKTPALQVAPGVVEAATRHIARLIPRLRLVHHQRADCGREIDALLDQLAPAGDAEGQKCEHRDVQILRSLPGVGRVVAATMLAEASQPLAERNYHALRAHAGVAPVTKQSGKRAHVTMRRGCDTRLRNALYHWARVSTQLDPHSKAQYAALRKRGHTHGRALRSVADRLLRVLVAMLKNATLFDPNRARRVPAGAPSPAAA

SEQ ID NO: 169383 - protein, 339 aa, unidentified
MKNTKYYIGLDVHKERTSYCVRDKLGNIIIEAEAATLYSELEPRLKPYLAASMIGLEASTSYYTLYQNFLRNSYQVKVANTIQLRQLIAKNDKLDAQRLSEMLRLGTFPCSYIPEEKIQHLRSLIQMRHALMQEKVRCNNRIQAFLDRNGVMMPLCKAFSKKWKHALMQHLGSGNASTELRYEYNHYVYLEKTNEQADQEIIGYTKTYWNQEYQLLRSITGFGVLLPCYIIAFVHPIERFLSNRKLRRYAGVIPVAKESGNTTSRGRIPKTSSKALLRWALVQAANTIGKTNTTLGRYYRRKKNQKKNSGIAKIAVASTLVDIIFKVLTTKKPYISTAC

SEQ ID NO: 169384 - protein, 431 aa, unidentified
MLGGNQEKLMSQNQPEIQYAAFVSIDWADQKHVWSLQEANSRTREHGEVGHMPEAIEAWIAQMSQRFAGRPIAVAVEQSRGALVFMLSKYEQLHIFPVPPAMTANLRKAFYSSGAKTDPADTDLLQDVLQMHREKLRRLSPDTEATRLIQNLVEERRKLVDEKTAQSNRLEAHLKIYFPQIPQWFGDVDSPLVCALLERWSALEALQKARPDTLRSFFRKHHCRKEELIESRIKAIGEAMPALKDRAVVEAQLAVVKVLVQVIQVLHQGIEDFNRQIQEAAEAHPDFFIFESLPGAGAVMAPRLLAAFGSQRERYRNAAEVQTLSGIAPVTESSGKSSWIHFRFACSKFVRQSFHEWAALSITQSQWARAYYELQCRRGKRHHAAVRALAFKWIRIIFRCWKERVAYDEKVYLAALAQHNSPLLAATKIAL

SEQ ID NO: 169385 - protein, 403 aa, unidentified
MNAVGIDVSKGKSMVVVMRPFGEIVISPFEVTHSACELSKLADLLKSLPGETKVVMECTGSYHLPVANALHYAGIFVSTVHSLLIHDFGNNTIRRVKTDKADAVKIANYAIQNWLALEAYTPEEDVRKILKSYSRQYNKYSKIKTVLKNNLISILDQSFPNVNRLFTSQSRSEDGHQKWIDFVQKFWHAECVSGLSKSVFFDRYKRWCKHMGYYYRQSNADKIYAFSKECSCTLLKSSSTEMLIKQATIQLNAVSESQAILFREMHRIAQSLPEYPVVHSFFGVGDLLAAQIIAEIGDIRRFPKKSSLVCFAGLESPPDQSGVVDRKSNEVSKKGSPHLRKALFQVMDCLIKHSPINEPVYQFLDRKRAEGKHYYCYMTAGSAKFLRIYYARVKEYLDTYYPA

SEQ ID NO: 169386 - protein, 339 aa, unidentified
MSKVTTIGLDIAKNVFQVHGVDETGQVVLQRRLRRAQVEPFFAKLAPALVGVEACGSAHHWGRVLTGFGHEVRLMPPAYVKPYVKRNKTDGRDAEAICEAVGRPSMRFVAIKSMEAQAVGSLHRARDLLVRQRTMLANALRGMLAEFGIVAAQGHKGLAELVQRVEQAPIPEAARVAAGVIARQWKELDGEVDALERRIVRAAKENEAARRLMEIPGVGPISASAIVAAVADPHVFRSARGFAAWLGLSPRQNNSGDKRRSGHISKQGNRNIRRLLILGASAHMRQVRARKGKDPWLSALLARRPAKVASVARAAKTARIIWALLARGQHYRAPASAAA

SEQ ID NO: 169387 - protein, 405 aa, unidentified
MQTVYERCCGIDVHKKLIVACFRNGNKAEIRKFDTLTSSIKELGNWLLDNNCQMVAMESTGAYWKPIYNILELLSLDVIVVNAHHMKSVPGRKTDVKDAEWIADLLQHGLLKASYIPDREQRELREIVRYRKNLVEERSRELNRLEKTLEGANIKLSSFVSDLSGVSSRKLIQQSLVGDVNQENIEYLIHPSMKSKKDVLLKAMDGVFSPIQKQLVRAILDHIDDMTKRIKDLDIIIDHHMKNYEDAIKKIDELSGIGKRSAEVILAELGTDMSRFPSAAHLASWAGLCPGNNESAGKRKSGKTNKGNKHLKTTLIQCAKSAIKNKDSFFYAQYQRLVVRRGANKATVAVAHSMLIAIYHMLKNNLPFKDLGSDYYTKFNTESKAKYYMKKLQELGVSVPVSLAI

SEQ ID NO: 169388 - protein, 338 aa, unidentified
MAIVMGLDQHRAQITAEWLATETGEVSRTRISPAHRAGVRRFCEQFRGRELEVALEATTGWRFVAEELRRVGAVVHLAEPAETAARRGNKKRAKTDRADARHVRELLMLGRLPESWIPPGHILDLRGRVRLRHTLSHQRGEWQQRIQSVLYHHGCPQRSNLMTEDGLNWLAAQPLPAGAREQIQVALSMIDALDSQLAPLDKELRAFARRQAGCKALMGQFGVGELTAVTILAELGDATRFSSSRDAVRYAGLDITVHQSDQRRAAGRLSRQGPPALRWALFEATMCAARSGSPDHEYYSQAAERLGSNRARLSVARKLLKRSYHLLRELGEEALAPA

SEQ ID NO: 169389 - protein, 389 aa, unidentified
MNYLKYGIGIDMAKDNFDVCLSVIDTTQLVTIKATSSFANNLKGFTAFLSWSLKHLREALPAIYLLEATGIYHEHLAWYLFDNDCKVVVVLPNKAKKYKESLGLKSKTDSIDAKGLSRYACEQNLRLWQPVSKKIYGLRIITRQIEALSVQATQVQNQLHSLLHGMYRLKDIEKMLSKQLALLQQQKDSMHQQLLEVIEQDAVLKERFEKILKIKGLGALSLAIIIAETDGFAATQSIAQLTSYAGYDVVENQSGNRKGKTKISKKGNGHIRRALHFPSLNMVRYEQANFHLLYKRIYNKSNIKMKGYVAVQRKLLALIYTLWKKNEPFNNTYQKQASGNEEPVPSLASALQKPGKKIASGKPEATQDKLPSTNRRKPSLAYYKGTKKG

SEQ ID NO: 169390 - protein, 407 aa, unidentified
MQEATQHDAVDVFVGVDVDVGVDVGKGQHHAVALDRNGKRLYNKALPNDEVKLRALIAELKTHRRLLFVVDQPSTIGALPVAVARAEGVLVAYLPGLAMRRIADLHAGEAKTDARDAAIIAEAARSMPHTLRSLRLADEQLAELTMLRGFDDDLAAQVTQTSNRIRGLLTQIHPALERVLGPRLDHPAVLDLLERYPSPSALAAANEKTLANRLTKLAPRLGKNWAAEIVQVLNEQAVIVPGTQAAAIVMPRLAQQLAALRKQRDEIAAEVERLVLAHPLWPVLTSMPGVGVRTAARRLTEATQKAFATAAHLAAYAGLAPVTRRSGSSIRGEHPSRRGNKVLKRALFLSAFAALRDPVSRAYYSCKIQQGKRHNQALIALARRRCDVLFAMLRDGTIYPPKSAPDA

SEQ ID NO: 169391 - protein, 320 aa, unidentified
MLSFCGIDVSKDRLDVMVLPNEYSSSVPNDPAGWAILVEQLRGFSITAIGIEASGGYERGAVRSLQAAGMPVRQVNPFKLRQFAKASGVLAKNDPLDARMIASFVGIMPTRPAQRTTPAAEQLVEMLAVRRQLSAEKTAAENASRLLEDLMLQRLSRRRIARLAADIELLDKRLVESVATDATLAHRYRLLTSMPGVGPVLACTLIALLPELGGMSRKQVAALVGVAPYAFESGTLKGRRCIWGGRANVRQVLYMAAMSASNWNPVLKLFHDRLKGAGKLPKVVIVAVMRKMITTLNAMVRDDIAWADRLSGRHSVTTAR

SEQ ID NO: 169392 - protein, 461 aa, unidentified
MTISKNKGNRTNETPVPTSLPAIRPRVAGLDVGSSAHWVCGPARDDGKPNVRVFGTTTDQLNELAGWLSAQGVESVAMESTYVYWIPIYELLEARGIEVVLVNARQLHNVPGRKTDFSDCQWLQLLHSCGLLRGSFRPGEAITRLRALQRQLANLVAERTRCVQWMQKSLDQMNVQVHRAVTDLTGLTGMAIVRAIVGGERDPARLAMHRDRRCRKSADEIARYLTGNWRDEHLFNLASALRLFDTLETEIAAYEAQLLTEIASLQPPDRQAEPVPPHPNPAKEKAIKARGEQPARTTLWRFAGVDLTRLDGISAGAAQVVLTEVGPNLAAFPSEDQFVSWLRLCPRTPISGGKPLKKRRNGLGANRIAGVLRMAAISLERSKTALGASFRRIARRKGGAVAVFATARQLARLIYRMLRYGHDYVDIGEKAYDRQFQIRRLAALTETAKSLGYALVPNVAG

SEQ ID NO: 169393 - protein, 395 aa, unidentified
MFIVGIDVAKRSHEVCMITSDGQTVQRPFSIRNNCTGYNLMLEKIRKHTNIKSQIVFAMESTAHYWLALFTRLRKDGYHVILLNPIQTSAMRDMFIRKIKTDAKDSFIIAELIRFGRYAESNVAQDRLLALKELCRNRFYLVDMAGDLKRKLIALIDRVFPEYEAQFDTIFCKSSVALLKKYPTPQKLSNAHLDKLTELLWNSSNGHFGEWKARELRELARNSFGVEDCDGAYSTLILLMLDQIQSLSGKADALEKEISRLFQSFDTTVTTIPGVGPIIGAVILSEVGDISRFSSADKLAAYIGVDPSVNQSGEFQAAHAHMSKRGSPYLRRCIWMASQVAVQRDPMFRAYYEKKAAEGLKYMTIIGHVTRKMTTVIFAILRDHKVYEPVLPTAA

SEQ ID NO: 169394 - protein, 355 aa, unidentified
MSSEKYIGLDVHQATISVAVMDSQGKVIMESILETKASTLLEFFAGLRGSLFVTFEEGTWAAWLYDLLKPHVTEVLVCNPRRNALLKHGNKSDKIDARKLAERLRLHDLKPVYHGETGVRMLRELVRSYLTVVKDLSRVMNRWKALYRSWAIPCAGRDVYYTRHRSQWLEKIPEAGTRRRAEQLYPQLDLLQHLRQQARREVLAESRKHSITAKLRQIPSLGPIRSALAVALIQTPHRFRSKRQLWTYSGLGLATRDSGEYHYVRGQVQRRKKQATIRGLNKDYNHDLKGLFKGAATRASVQPGPFQEFYQRSLAKGIQPTMVRLTLARKIAAITLTLWKKGEDFDIEKLKSQAT

SEQ ID NO: 169395 - protein, 319 aa, unidentified
MAQNDLVVVGIDVAKDKVDACIRSLSKRQVFPNTAQGHRKLVAWLRKHEVSRAVMEASGGYERAWAKVLREAGIEVRIVDPKRVRSFALSAGRLAKNDVIDAEMIAWFAETFSDAPAQKYDAAREELQTLVKARLSLIDLRMRLVSQSEHAAPGLVQKAHAHILKSLANEIAKLEEAIAAKIKSVADFAERAEIVESVPGFAKTSSANLVAGMPELGQVSDKIAAALIGVAPYDDDSGKRRGERHIKGGRRWVRNAIYMPCVGAATLNNPVLKAYYQRLIAKGKEPKVAIIACMRKLIIILNTMIARRQKWDPSRYALS

SEQ ID NO: 169396 - protein, 430 aa, unidentified
MKSNTQNAKIEAITEKTLVLGIDVGSETHYARAFDYRGIEYSKKPFKFSNTEAGFVTFKEWILDLKERHEKDKVVPGMEPTGHYWFNLGKFLQDNEMKPVLVNPHHVKKSKELDDNNPTKNDRKDPKVIAGLVREGRYMIPYLPDGVYADLRTASNIRFQLQAELTRIQNRISRWFNIYFPEYKTVYGKPDAKSGMLILKAAPLPEDILTLGIDGVNQIWRDAKLRAVGKARAKTLMEAAEHSVGSKEGAVSARMEIRMLLEDYESRNTRLQEVMVLIEELVRKIPMAEKLLEIKGVGIRTVSGFLAEVGDISRFNNPKELQKLAGLALVENSSGKHKGETTISRRGRKRLRYLLFEVAMSLVSKNQEFRELHNYYTTRRLNPLKKMQSLMAIAAKLIRVFYAMLTKGVDYDPKKMVSDIKRPAVYLQAA

SEQ ID NO: 169397 - protein, 430 aa, unidentified
MKSNTQNAKIEAITEKTLVLGIDVGSETHYARAFDYRGIEYSKKPFKFSNTEAGFATFKEWILDLKERHEKDKVVPGMEPTGHYWFNLGKFLQDNEMKPVLVNPHHVKKSKELDDNNPTKNDRKDPKVIAGLVREGRYMIPYLPDGVYADLRTASNIRFQLQAELTRIQNRISRWFNIYFPEYKTVYGKPDAKSGMLILKAAPLPEDILTLGIDGVNQIWRDAKLRAVGRARAKTLIEAAEHSVGSKEGAVSARMEIRMLLEDYESRNIRLQEVMALIEGLVKQIPMAEKLLEIKGVGIRTVSGFLAEVGDISRFNNPKELQKLAGLALVENSSGKHKGETTISRRGRKRLRYLLFEVAMSLVAKNPEFRELHNYYTTRRLNPLKKMQSLMAIAAKLIRVFYAMLTKGVDYDPKKMVSDIKRPAVYLQAA

SEQ ID NO: 169398 - protein, 303 aa, unidentified
MAVHASFEAPPPNFGGIAMAFIGVDLHSNSFTICRLKTDTEEEFESFQLSMDDVKRFCLGLDAEDSLAVEATSNSAGGCDQVRSCVGRLVVVNARRFELIRKSVNKTDRNDARALAYFLSKDMLPETRLRTHAETELGALVQTRDVLVKQRTMLLNRIHAIFTRHGIKLKKEGLSSKRSLTDLSISQFTPVKQIVLGALRDQALRLTDTLKRLDKAIEKTAEQIDGYEEISSIKGIGARSAAILLAGIGNVDDFASADKLAAYFGSAPRVSQSDEPDTRGKITKRGDRRVRTTLVLYPLIAIK

SEQ ID NO: 169399 - protein, 349 aa, unidentified
MYYVGVDYHKRYSVATVVDSDGLMLARKRLDNQLEAFREFLQPYNKAELEAVVEATRSWGVAVDILEQVADKVILANPGQVKLIAKARISTDKIDSLALAKLLRVGWVPEAYLRPRTNREHQLILRVRCFFVQLRTRVKNRIHDLIDRQSELVRETATGFSDLFGKRGMTWLRTLELDYPHSTLLERLLAAYDALDAQVRQSDRLVAELFTADDDCKLLKKTPGIGVFFAVLIKTEVGSIERFPSSARFCSYAGVVPSTQSSGGKVWHGRIIKQSNRWLRWALVEAVIPATVADAGLRAHYEYYRRTKGSKVAKVVTARRLGCIVYRVLKERKPYYERPVQSRGYRQAG

SEQ ID NO: 169400 - protein, 449 aa, unidentified
MEQSTRFVGMDVHKDTIVVAVTATGEVGKATAYGTFPNTAAGLEKLVKRLRQAGDGPTKFCYEAGPCGYGIHRALTKMGEDCMVVAPSMIPRKSGERQKNDKRDAGGLAVLHRGGLLTAVWVPDAAHEAMRDLIRTRLAAVRAVRTARQQLSAFLLRHERTYPDGKKAWTKAHRRWLADQSFAQPAQQIVLEECVEAVRQGEQRRDRVDGYLRAQIPSWSLFPLVQNLCALRGLDMIAGAGLAAAIGDPSRFATAPHFTAYLGMVPSEHTSGPKRRIGAITKAGDVHARSLLIEAAHSYRYPARIGRHKLAAVDAVPEAVRAIAWKAQTRLCQRYRHMMARGKLKQVVVTAIARELAGFVWSIACITSDPVVSNNVVTESYDEATATRDNVTMASEESAQKVHRITPDTDLRAASPVAGRRVREQNQANQGGISREEPDGMIAQHHSTG

SEQ ID NO: 169401 - protein, 372 aa, unidentified
MNQDSRLFVGLDVSKLKISVAVADSERGGEVRFVGDIPSDPASVSSIVKKLAKRGAKLHFCYEAGPTGYELYRQLIEMGHDCVVVAPALIPKRPGDRVKTNRRDAVSLARLHRAGELTPVWVPDRGHEAMRDLVRARDAAQEAQKRARQQLQSFLLRHGRIYPGRTVWSQAHMRWMSTLKFEHPAHFIVLKEYCQAIEDAEVRLRRLTDLITETVKSWTMGPVVHAYQALRGVSVMAAVVFVVEIGDIRRFENPRQLMAFLGLVPSESSTGEHVKRGGITKAGNGRARRVLIEGAWTYRFPARVSRTKQRQLTGLPRAVREIAWKGQVRLCARYRAMLAAGKHKAVTITAIAREMGAFLWAIGQEVQPAAQA

SEQ ID NO: 169402 - protein, 336 aa, unidentified
MQVKFIHFAGIDVSKLWIDVCVLMNGEKSMFYQERFEQSKKGFNELRKWLLKLTGKQVSGLLICVENTGLYDDALLYFLSDQGFSVCLENAAKIKASIRDRRAKNDQLDARNIALYALRHWDELEIWQKPRLVVEKLKQLVAARTTLLGHLSSIKQAQKEIGTFNWSGLKKTKNYEAGIKGLQKDIEQIEADIWELIKTDEALHKMFMLIISIPAIGKITAYHFICYTNEFKRVKSGKNLSSYCGVVPFKETSGTTRKGPARVSPEANRTLKKLLHLCALTALKMKGEFAAYYQRKIAEGKHALNVINAIRNKLALRIAAVIKTQEPYDENYIYQP

SEQ ID NO: 169403 - protein, 354 aa, unidentified
MIWEMKRILRQVVGIDVAQKELVVYFGLVNAELGIEMKAYKTFPNTLNGFAKLVVWAWKLKDADTTVRFVMEATGVYHESLAYFLDSESFDVSVVLPNKIANYFKTLDVKTVTDKTAAETICRFGLGRELDSWKRPHKVFKMMMQLCRERDQIVVERTVSKNQLHAEESEAQPHQPSIFRAKERINLFDRQEKEVQAELRVLIKNDESVDRLMTLLCSIPGVGTLTAATVLAETNGFELIKNKRQLTSYAGLDVKEKESGTSVKGQPRISKRGNKYLRKAMHLPALTAIRHDERFKAIFTRLVARHGIKMKAAVAVQRKLLEMIYTIYSTQQPYDKDYLKSKNELGKVESSTKN

SEQ ID NO: 169404 - protein, 340 aa, unidentified
MVYGAIDLHMRFSQIRVVDEVGAVVRERRVVTTRERLVAAFEGYGAMRILVEASTESEWVAQALEDAGHEVVVADPNFGPMYGALRRRVKTDGRDTAALAEANRHGWFRPAHRVSRAQRTLRQQLGVRRQLVRLRTGLISHVRALLRQEGLRLPAGSSATVPHRVAALAVPEALRAVLAPLIAALEGLTPVIRGTDRDLERQASADPITTRLQSVPGVGPIVALTFRATVDDVQRFPTAGHVSSSLGLVPREDSSAERRHRGHLTKVGSSETRAMLIQAAWSCWRSPTIRLTPLRTWTDALAARRGKRIAVVALARRLSRILYALWRDGTVFRTGLAPAA

SEQ ID NO: 169405 - protein, 344 aa, unidentified
MLYVGMDVSSKSFVVHVINEKKKVVFRDEVSPSREGLRQLMTRLGAEKKLTVFEAGNQMKWIALTLKKMEGVEIHVVHPNEVKWISQSNGKTDKVDAKKLAELARADMLPRAVHIVEGKVRELRELTSARTHLMGKRIALVNTIYGYAKQEGHRLPGRFFSREDWKEALSKSKFTKTLQTIIESFMESIAAMQKSQAALNEKIVAIEDERLERLESIPSIGALTSRTLLGALDNAERFDDKKAAAKYGALVPTLYQSGNVTQLGHVNRNGRHEVRRVLLQCAHTLARMKSAGAAPLRAFYERIRRKRGKKIAIVALARKLLTIAYGVLKHGTYYDPAKLMPARA

SEQ ID NO: 169406 - protein, 343 aa, unidentified
MKLSRIGIDLAKNVYQLHGVDRSGKMVWKRCLKRHQWLKVLLDKTEPGCVMGMEACAGAHHWARELQSRGYTVRLIPPQFVKPYVKSNKNDAKDAEAICEAMSRPNMRFVTVKTIAQQDIQATHRIRAELITQRTAKANQIRGLVAEYGLVAPQRLSSLRAAIPCWLEDAENGLTDHFRTLLHGVWNDLLALDDRVDELDKRIQRLAANHADCVRLQQLRGVGPMISTAMVATVGDARQYHKSRQMAAAIGITPKQHSSGGKDRLLGISKRGDVYLRTLMIHGARAVVAQAKHQDDRLSRWVTGIATRRHPNVAAVALANKTARMAWAMLRNETDYDPEFAIS

SEQ ID NO: 169407 - protein, 434 aa, unidentified
MSKFFNDFVIGIDVSSEFSVVAMLEPSGSLIRKPFRIDHNPKGFNKLLEILKKEEERLKQKPIYFVESTGIFHLPLFFFLRSNDLKGFVLNPLSVHSIKNFDLRKVKNDAKDAESIARLAKFQEVKYSLVPEPQILALRMMSREYYQVSDMLTEMKNRLCTDLYLLFPGYLDVFGNPFGKASLEILKTYSSPRALSEVDSSELALMISKISRKTVSWANKKVNALLEITTQALSMPMEFDILSLKIKTHVENIENFQNRLDGLIDQLKVMIQSPDFPAKERRYIELLEGMPGIGFLTAVTLIAEIGDFSKFHSSKAFVAFFGIDPSVNQSGKFNGDRNKISKRGTRFGRRVLFTAALASIRTTRKGDAINPVLRDYYHQKCENKKKKVALVAVMHKLLNYIFAVLRDEKPFALRSPKDHQSWRHTKETALKLVA

SEQ ID NO: 169408 - protein, 373 aa, unidentified
MKNSITQVAMDTHKKEHVVALVYPDTGEMESFTVRNTVKDLTKMVKRIQRKAPGEVRFCYEAGVCGFTLQRRIEALGSPCAVIAPSLVPTKQGDRIKTDRRDARKLLGQFLAGALTEVYPPSVAQEAAREITRCRQAAQEDLKRSRHQLVKFLTRHGYIYTDGRHWTQKHARWLLSLPFDSTDLREVFDWYYTQLQHCQQRLATLDKEVATLAKRPAYRRLVGLLRCLRGVDTLTAITLVTELFEFGRFASPRKLMAYLGLVPSESSSGEKRRPGAITKTGNARVRRLLTESAWHYRHRPAVGKELTQRRRDQPPWAIATADRAMFRLHKRYRRLTERGKIPQKAVVAVARELAGFIWSLLHEYQVRESRQTG

SEQ ID NO: 169409 - protein, 334 aa, unidentified
MNTYFLGIDIAKASFDVALQRADGTVVGRGHFSNDKAGFAAVRKWLKGLKATPQHNCVHACMEATGRYGLALAGYLYAAGCIVSIVNPQRICAYGASKLRRNKTDPLDAQLIADFCATQQPQPWTPPSPAQRQLQELVRFRASLLEDRQRAANRLAAGVLTPTVIKQIKRQLALFDEQLATIESEIAACANQDADLKHKIELIDSITGFALTTATIFAAELPPIDQFDDANQVAAYIGVVPSLKVSGTSVRKRGRMSKLGNEHLRCALYFPALTAWRCDPTIRTFAQRLEKAGKPSSTVRGAIMHKLARYIYAVLKNDTPYDKNHAAQLSTSGA

SEQ ID NO: 169410 - protein, 412 aa, unidentified
MFKIFRKNCCGLDVHKTWIYACIGITDANSRTEYFQARFSAFSKGLQELSHWLDKYNCKEVCMESAGKFWIPVFNILEKTCLVTLAHPKYTKPQKGNKTDRKDAKWICDLFMCDMIKPSFIPPPAIRHLRDLVRYRGKLTNMLTGEKNRAQNCLTVSNLKLDDVFADVFGKSARSITEYILAHPGEPFDVAQFVDRRCKSPLSEIQAAVDGAVSPEQAVKLRQCLDHIDQLRLLRQRLEQEILRICEPFADILQLLRTVPGLGNDPMTAIAVLSEIGGDMSVFPTAKNLCSWAGCCPRNDQSGAKVKSTRISRAGSYLKPLLVQVANALIHSRKHPEFAERYRRIKARRGHKKAIIAVCKMLLTAIWNMLSKLEPYNPEGFLEHRPVRQEKTLTVSQALELLRLRGYTITNQ

SEQ ID NO: 169411 - protein, 408 aa, unidentified
MNPLYVGIDVSSKSNVVYLMLPDGKKHSNFSVPNSQDGSTQMIKRILSVLTSHSLDTVIIGLEATSVYGDNLVYFLREDAILAPYNRKIHVLNPKQVKKFKDSYNDLPKNDYIDSFIIADCLRFGRINNEVYVSDYRYKALQNLTRARFYAVQNLTKEKQRFINVLFKKYSTMTQEKVFSNTFSTTAFAVYQEIESAEALANMDLQELTDFIIEKGKNRFPDPDAVAKAIQKAARSSYRLPKTINDSVNQVLSISITSMKALETQIKEFDKAIEAEIQLLPNVLTSIPGIGPVISAGIIAEIGDINRFPNQAKLGKYAGLAWKQHQSGDFDSEHTRLVQSGNRFLKYYLYEGAFSLVRCDTEYSNFYHSKYKEVNRFQHKRALALTARKFTRLVFRLLKDNRLYRAAE

SEQ ID NO: 169412 - protein, 324 aa, unidentified
MENIALIGIDLGKNSFHIHCQDHRGKAVYRKKFTRPKLIEFLATCPATTIAMEACGGSHFMARKLEELGHFPKLISPQFVRPFVKSNKNDFVDAEAICEAASRPSMRFVQPRTESQQAMRALHRVRESPVQDKVKTTNQMHAFLLEFGISVPRGAAVISRLSTLLEDSSLPLYLSQLLLKLQQHYHYLVEQIKDLESQLKRKLDEDEVGQRLLSIPCVGTLTASTISTEIGDGKQYASSRDFAAATGLVPRQYSTGGRTTLLGISKRGNKKIRTLLVQCAGVFIQKLEHQSGKLADWVRELLCRKSNFVVTCALANKLARIAGH

SEQ ID NO: 169413 - protein, 329 aa, unidentified
MNVHTQDRDAATVSRINAGIDVSKAWLDACWGQHARRFTHDPDGIKQLAASLGQAQVDLVVMEASGGYEMASVAALQAEGFAVAVLNARQARDFARSMGVLAKTDRVDARVLRDFANVIAVHPKRDRYLRALPDEQRVQLAALVLRRRQLLDMRIAEANRLTTAHRSARKSLAAVLQLLDAQLKSVDADIDGCMRQHFKETLRWLDTVKGVGPVLKSTLLALLPELGHLSGRAISALVGVAPIARESGQWRGKRQTWGGRHDVRAVVYMATLSAVRHNPVLKEFYQRLIGAGKLPKVALVACMRKLLVILNAMVRDRTTWRAPTLNLST

SEQ ID NO: 169414 - protein, 350 aa, unidentified
MQFTTQLPVVGMDIAKNVFQLHLVDPLTGEIKQVKLKRDRVSSFFANHPRSLVAMEACGGAHHWARTLSALGHEVRLLPAKHVRPFVLRDKTDARDAQAIWVAASQHHIRSVPMKSESQQACLSLHRMRAQLMKMRIMQTNALRGLLYEFGVVLPVGHEALLKCIQSELSQAQANDQVPQVLVFSIQEQLQRIDALAKDIAQLDRRLSQLSKLNPQMQALQAVPGIGPLTATALIATASDMSGFKSGRQFSAWLGLTPRQTGTGGRTRQLGISKRGDAYVRTMLMHGARAIVARSKKSLWIQALLKRRPYSVVVAALANKLARTAWAVITKSQGFDARKWHSAQETTVPV

SEQ ID NO: 169415 - protein, 408 aa, unidentified
MERLIERVCGLDVHKQTVAACVRVPGSKGTREHVQTFGTTAAELLALRDWLEAHEVTHVAMESTGVYWKPIYYVLEERFTCLLVNAAHVKQVPGRKTDVQDCMWIAQLLEHGLLRGSFVPPAPIRELRDLTRYRKVLIQDRTREANRLHKLLEDAGIKLASVATDILGVSGRAMLEALVRGTTDPEVLAELARGKLRAKLPALRQALRGRFRPHHAFLVSQLLAHLDYVNETITILSERIEEVISPFADELARLDTIHGVARRTAEVLIAELGVDMSQFPSDRHLASWAGLCPGNNESAGKHKSGKTRRGNRWLRAALTEAALAAIRTSNSAFTARYRRIMRHRGHKKAVLAVAHAMLVTAYHVLARQTTYQELGADYFDRRHGERVTRRAVQLLERQGYRVTLERAA

SEQ ID NO: 169416 - protein, 363 aa, unidentified
MTYERSTLVNDEKYIGLDVHQATISVAVMDANGKVVMESILETKAATILEFFAGLRGTLWVTFEEGTWSVWLYELLNPHVDKLVVCNPRKNALLKDGNKSDRIDARKLAELLRGNQLKPVYHGETGVRMLRELSRSYLTIVKDLSRVMNRLKAVYRSWAIPCGGRDVYYRRHRDEWLGKIREAGVRRRAERLYEQLDMLQHLRQQARRELLAEGRKHAITARLRQIPYLGPIRSVLAVALIQTPHRFRTKRQLWAYSGLALETRTSADYRYVEGQLRRSKKLISIRGLNKDHNHDLKGLFKAAATMASVRPGPFQDFYQAALAKGIKPTMARLTLARKIAAITLTLWKKGENFDAEKLKSQAA

SEQ ID NO: 169417 - protein, 343 aa, unidentified
MQTVSTIGLDIAKSVFQVHGVDANGLVVVRRQLKRRYVLAFFEKLAPCLVGIEACASSHYWSRQLQALGHNVRLMPPAYVKPYVKRQKNDMADAEAICEAVTRANMRFVPTKTPEQQSGLVLHRTRHLFIRQQTSLINAIRGHLAEFGVTAPVGRKGIEELLRVIADPSDKRVPDVVRACLAALGSQLLSLKKQILDFDRMIMAWHRSNQTSKRLNCIPGVGPLLATALVASVADPKVFRSGRNFSAWIGLVPKQHSSGGRARLGSISKKGDRYLRGLFVAGALAVIRYAKLHGTKYRPWVAALLARRPTKVAAIALANKLARMAWAMMARGERYNYPAALRV

SEQ ID NO: 169418 - protein, 359 aa, unidentified
MIVIGADSHKRTHTVVGVDQVGRRLDERTVKTTSDGHLALLEWSAQWPEVTFALEDCRHLTRRLEQDLLAAGQRVVRVPTRLMAAARRAGRQPGKSDPIDAEAVALAALRHPDLPVAELDGPTREVKLLVDYRRDLVRQRTRVANRLRWHLHELDPALQVPSRGLRRYKVLEELAVRLAGVEGTVARLARRLLARCRELTVEINALEAELRSLVRRLAPRLLAVPGCGVLGAAMILGETAGAHRFRSKDAYARFTGTAPIPVWSGDRRGKMRLNRGGNRTINTALHMIAVTQIRGIGPGQAYAERLMARGKTRTEAVRLLRRRLSDVVFSALRTDEQARSTSTQTRYSAAAKAASARAA

SEQ ID NO: 169419 - protein, 314 aa, unidentified
MSGTCFVGMDVSQDTVDVAVQPGPAFQIANDDLGIAEAVARVQAIQPTLIVLEATGGLAVPLAGALAAVGLPVVVVNPRQVRDFARATGQLAKTDRLDAQVLAHFAEAIRPPIRPVPDEQTQTLAALVARRRQLIEMLTAEKNRLRLAARLIQKRVHAHITWSENELERTNTDLTATMRESPVWREKEEVLRSVPGVGPVLTTTLFANLPELGTLTRKEVAALAGVAPFPRDSGTLKGRRTIWGGRAHVRAALYMAALVATRRNPVIRTFYQRLCQAGKAKKLALTACMRKLLTILNAMVKSGTSWRESVGQPA

SEQ ID NO: 169420 - protein, 337 aa, unidentified
MTLDLLAIDLGKRSFHLYGIDTDGVILSRKVGRAKLAEVVGDLAPTAIAMEACASAHHWGRCWLAAGRQVRLINPRFVKPFVKGSKNDAVDAEAIFEAAMRPTMRFVPVKSTEQQDLQSLHRARDRLICQRTALINHTRGLLAEYGIVLPQGPWRFTAQAPTAIAAADLSDLARAIFGELLDELDDLDRRVKKLDATIVALCRTNEACRRLAKLPGVGPVVATAIIAAVNDGRQFRSGREMAAWIGLVPRQYTTGGKPRLGGIGRRANHYLRRQLIHGARAVVSRLPKLPKHDDRRSIWLNALAARRGFNRTIVALANKTARIAWALLTRKEEYAIS

SEQ ID NO: 169421 - protein, 481 aa, unidentified
MSRQKKHPQKPAEAKTKAGKGNRGRKRKGMCLEDRPILEPNAAGIDIGAREIFVAVPPDRDEHPVRVFSTFTEDLQKMAKWLVSCGITTAAMESTGVYWIPPYDVLEQHGVKPCLVNARGMKNVPGRRTDWHECQWLQFLHSVGLLRAAFRPDAEVCAVRSLMRYRGDQVLMANQHIQHMHKALTQMNVQIQHVISDITGLTGLAIVDSIIEGEHNPAVLAKLRDPHIKASEETIRKSLEGNWRAEHLFTLKQSRKSYQHYQEQINACDEEIEKMLLAFEPRVDPEQRRLPPDRKRRQRGRKKKNVNPKTGFDMRTESYKLFGVDLTQIPGLMAMVLTLFSEVGRDMSRWPTAAHFVSWLALCPDNDISGGRILWRGIRKVHNRAGDLFRLAAYSLHHDETALGDYLRRMKSKLGPAGATTATAHKIAIIFYTMIKKQVEYDPTIWAQRDAERAKRFEAKLKRQAHQLGYKLIPIEAKPAA

SEQ ID NO: 169422 - protein, 385 aa, unidentified
MKEQNFVPYEFDIFGGLDVDKKSIAVTFMSHQGVLQSFSVPYRAEHLLNYVSKHFAGKKVAFAYEAGPTGWGLYDRLTAEGHPCVVAAPSMIPKVPGQRVKTNRLDSQRLSEHLRGGQLKSVHVPTEPYRQLRHLTQLRDTFVKDVVAMKLRIKGLLLFEGLEFPPAPAGSQWSYLVRGKLKQLPCSGSVRFKLDRLMESLESSEKQALETIREIRRFCQQDAELSQAIKHLKSISGIGEIVASHLLARTGDPDQITNVRQLGGFIGLAPREHSTGDRIARGGIMRTGDGRLRSKLIQAAWSAIRHDPELREFYRSVYQRHPRDRAARKAIVAVARKLTTRIYAVLKQKRPYVVREKVNSAPLTQEETSPQGTTRRLKEPGEIIS

SEQ ID NO: 169423 - protein, 352 aa, unidentified
MVAEAPQREAVHEEVIRTAIDLGKTYFQVHGLESEGGQSISRKMKRSKMREFYEQIEPCRVGMEACGSGHYWARELVAMGHEVVLIPPAYIKPYIKRGKNDAVDAAAICEAMSRPGMRFVPIKSADQQAVLMLHKTREMFVKQRTMSVNALRGHLAEFGIIVAKGIGRVDELLALAQSDTKLPQIAKSTVAGLAQHLEGLDQSIEAVGDEIARAHKQNPTSRLLDEIPGIGVLIASVIASSVPDPSVFKTGRDFAAWLGLTPRQNSSGGKEKLGSITKQGNRYIRKMLVVGATSVMRVAGKRKGALADWINALQAKKPKRVAAVALANKLARICWAIMTTGEGFRVDTYVKA

SEQ ID NO: 169424 - protein, 339 aa, unidentified
MNIITVGLDLAKNVFHIVCLNEHNKEVKKRMLRRNQVGQFFAQLPSCQVAMEACATSHYWGRKLILMGHDVKLIPPQHVKPLVQGNKNDYNDARAIAEAVNRPRISFVAIKTVEEHDIQAIHRIRSQCLRDRTALSNSTRGLLGEYGISFSKGIAVLRRKVPELLEDADNGLSFQFRNILARRYEQFVELDEHIAFYTKELELVSQQDDACQRLQTIPGFGPIIASAFRSTIGNGQSYVCGRHVAASLGLVPKQWSSGGKNVLLGISKRGDRYLRTLLVQGARAVALHASKRDDPLSRWINRLQERRGWHKTVVAIANKLARIGWAILRHNTSYEPNLA

SEQ ID NO: 169425 - protein, 391 aa, unidentified
MILVGIDVAKDKHDCFITNSDGEVIFDPFTIANNKAGFNDLLKKIQSVSKDPSKVKVGLEATGHYSYNILGFVLDKGFPTYVINPLHTNLFRKGQSLRKTKTDRIDARTIANMLLWDQSLQPYSLESYHNEELKSLPRYRFSKVQERSKLKTSVARLVNILFPELEHLVPTLFTVSALALLSELPGASYVADCHLTRLTHLLQEASKGHYGREKAIEIRDAAKNSIGSVMPAKSLELKHTIALIRILDDEIREIESEIKTLMDKTNSTITSIPGINYRMGSMILAEIGDFKKFKSPDQILAYAGLSPSTYQSGQLTSSYAHMEKRGSKYLRYALFNAAIYVCHWDPVFKAYLDKKQKEGKHYYVAISHAAKKLVRLIYAMEISGRPYFKVA

SEQ ID NO: 169426 - protein, 358 aa, unidentified
MQRNKISFKGQKIFVGIDVHANNWEVAIAPEVGIVKRHSQKPSAKELFDFLKKNYPDGDYLAVYESGFSGYSTYYALKEVGIDCMVIHAADVPTTQYEEVMKTDRVDAVKLARSLKAGLLKSNYVPEKQYIDDRSVVRIRKTIQKQLSGYKSRVKHLLHCHGVEFPERFSKKQTHWSRAFITWLMNDVRLMSDTRASLDLLIRQVEVLRGTLLETTRQLRMMSQTERYKHRHDLLRTIPGIGIIVTMCILTEVCDVKRFQNENEFAAYLGLIPTSHSSGEKTVHGEKTFRGNKQLGPMIIEAAWITIGRDAGLGAQYFQYKQRMEPQEAIVRIARKLSNIIFSVLKNEKEYVPYQTGN

SEQ ID NO: 169427 - protein, 364 aa, unidentified
MHATTKPASVGSSAVSLAIDLAKDVFELAFADASGRIVERKRLKREPFARCLENRPPLRIVMEACGSAHAWARRFARLGHEVTLLPAQHVRPYVRRNKTDRADAAGLLEAARCGDIRPVPVKTPEQQGTQGLHRIREHHKAQRTAAINAVRGLLREFGIAIPAGADKVRPATLAALEDGDNDIPMALRHALAGLLDQIAACQEAMAAIEKQLADIAKLDTRCQRLMAASGVGLITATALSAGIGDFARFPSGRHFASALGLTPREYSSGGTRKLGRITKQGDVFLRTLLIHGARSALIVAATARKRGQPLDRTQQWALALAERKGHNKAAVALANKVARRLWAAEHHGASFDPEHVSRRESRAA

SEQ ID NO: 169428 - protein, 497 aa, unidentified
MSTKASIYPDCNPQVLKLFEQAGHPAKVMCVALDYAKAQHSALICNGLGDLLKGAFAVDNNTSGATQLVRQVRQCAKARKIRPAQVFFGGEDYPAFAENFLRQLRREKFLVVRVNAWEAKQQRSNFAASSDALDLLGIARCCLNRRGAPVRDLPAAYANLRLATRDRDQLVRDATALTNRIHSYVDRLFPGFLTLGKSGIAPLSQASLDLMLERFSPAELSRRPVKSLAEWLGRRGLEEPQAAAAQLKVLAQATLGPAPEQTVLLQRTLRQLVGLYRGTQASVAMLDRELAYWLARTPGALLTSIAGIGVTLAAGWTAELGPPEQWRAVRRLCSYAGVASKTKQTGGPDKEPHTGHAQHRCNKRLKNVVLQAVEKVRLFGPEDLRQTAQELEARGAHTPYAMAKRLLRLAKYLVTTGTIYRPKALLDPDTPKAALATYYQGLWEKLVPKWKGKADLKDVFAPGQPLGQWREMAKELYALELRLPQQRAAHHPGAVTP

SEQ ID NO: 169429 - protein, 260 aa, unidentified
MTYVGIDVSKVTFVVAYSSVKTNKTRTFKNTVNGVHEFVQTISASEHNCVLEATGNYSALLVYLLSEAGITISLENPLKIKNFARVMLTVTKTDEIDARLIALYGEKMQPAPYKLRSDAILVLKQKRTVLRQLKKQLVATRNLKGSMEVLPFFDPKCKKTIEKTITFLEKQIKEMEEELASLAQGEYKKQMDLLTSIKGIGVTLAAALIVATGRFSYFDNAKQLTRYLGLSPTYQQSGTSVNVKGHINRNGDSTSEANFM

SEQ ID NO: 169430 - protein, 317 aa, unidentified
MPQLSTLVAGIDVAKNTLDLAIHGQAARLTAANDAAGWRQVATALHDAGVRRVGLEATGGYERGIVSHLRRAGFDVRLLQPLQTKAFARLHLKRAKNDAIDAGLIAACTAMLDAPPDSADPRLELCADLLTFVEQTEEDIARCKTRLEHIRHARLRRIVARDIARLQARVAAELSRIAVSLRQFDDLATRFALVLSVPGIGERTAIAVVVRMPELGRVSREEAAALAGLAPFDDDSGTHRGQRHIQGGRGRLRRSLYAAALPAAFRWNPALKALYARLIARGKPHKTALVACARKLLIYANTVVQRGTPWVTQSERG

SEQ ID NO: 169431 - protein, 426 aa, unidentified
MGETEYSSIERFRQIREQIRGSKEYLIVGIDVAKEKHHAFFGTATGKTLLRRLVFENSREGFDKLLFQAEALKAQHLFKTVVFGLEPTANYHKPLGEHLIKNEHMVVLVSGNAVKRNRELLDGRWDKHDLKDAANVADLISQGKCLFYDHPGEGLRELRSLISLKRRLKKHEHGFKVRIRNHLIAQYFPELDRFVGYGEGLAIVRWCLAPRAIRQMGCQEFMRMVGSRNGGDRQRRRLQLIWDKTGESIGCATGEALAFEAQLMVEQLKQTQEAIRVTDEKIKERCIKFPEYTHLLSIPGFGPDVSAKVLAAIGNPSRFESAKQVLKLAGLDLSAQRSGKGSDGAIPVLSKKGKAHLRYALYQAALIASTRNRTFITYFTNKLKGREREKGIKTKMRVKLSAKLLTIGWTLMKKKERFNPEYLKLN

SEQ ID NO: 169432 - protein, 348 aa, unidentified
MLVIGIDAHKRTHTAVAVDGNGAEVGTRTVAATSDGHLELIKWASGLDPARRFAAEDCRHLTRGLERDLLGAGELVVRVPPKLMAGARRSGRTAGKSDPIDALAVARAALRERGLATARLDGIERELRLLLDRREDLVAQRTRQINRLRWLLHDIDPSLETGAANLTRFKAMDALGEHLRHRDGLTAEIALDLVEEIRELSTKANRLERQIAERVQPHAPSLLTLEGVAALTAAKIMAETADVRRFKSADAYARHNGTAPIPVWSGNNDHHRLNRGGNRQLNAALHRIAVTQMRSPGLAKDAHDRLTKAGKTKRDALRIIRRRLSDIVYKHLMEDSSIRESTGLAWAI

SEQ ID NO: 169433 - protein, 385 aa, unidentified
MDRATPSTAFANTLHCALELSKKSWLLAIQFPDREQPSLYPIEGGNAEKLMAKLTAARECWAKVSGAVPVITLCYEVGHDAFWLARFLKARRVECLVIDPGSLQVNRRGRRVKTDRIDVKVLLRTLIAWCRGERHVWSLVRIPSIDEEDLRRSHRERGRLVRERTAHINRIKGLLFGQGIRRINVKSKYKTLAVDKLVTGDGHRLPPRLACEITREIQRLAVVQEQIAEIERERDAAPTSCEATERKRHLLLRLKSIGPGISALLSREVYYRQFTNRRQVGSFLGLTPSPYNSGEQEHCQGISRVGSGHVRAVMIETAWLWIRHQPKSALTQWFVERTAGQSKRMRKIMIVAVARKLAIALWRYVELGLVPQGAILNPPMTGNAR

SEQ ID NO: 169434 - protein, 343 aa, unidentified
MQATKANELYAGADLHGNNVFLSVCDHNGGNVFRKRVKANIAAVNAALDPFWDRIEVLGVESTFNWYWFIDGLQEDGRSVKLGNPAKMEQYKGIKITNDLSDADWLAEQLRLGIFPECYVYPKETRAVRDALRRRQMFVRRRTQVLLSFGSLLERYGLPAPSAAKIEKWTAADIQATGLDDWVVLQLETLLEAVHESDRLAKKIEKQVLAFAKPTEQYKRIVSLPGIGMALGMLIVLESGDFKRFPTAGDYASYCRAVKSERTSNEKKKGSNNSKNGNKYLAWAFVEAATYAARFNPRIQSWYEKKKRKSGVPKAKKALACKLAKAVWHVMNGEDFDEKLMFG

SEQ ID NO: 169435 - protein, 460 aa, unidentified
MSHKQSKSKLDRTMPTVHPNAAAIDIGATMHMAAVRADRASEPVRSFGTFTADLNQLVEWFTECGVETVVMESTSVYWIPIFELLDARGFTVCLVNARDAKHVPGRKTDVSDAQWLQRLHSHGLLRASFRPKGQIAELRAYVRQRERLLEYAASHIQHMQKALTEMNLQLHHVVADVTGATGLRIIRAIIAGERDPEVLAGLRHYSCHSSAETIAKALTGSYRNEHLFALEQALALYEAYHEKASACDVRIEAVLELLTADRGRSGSEPVPPPRRRRRADQANALAFDARAALFRLLGKDITRIDGLGPYLSLKLIAECGDDLSSWPSAKHFTSWLGLAPCNKISGGKVLSSRTRRSGGRAAALLRLAAVTVGRTDTALGAFYRRLSARIGKAKAVTATARKVAVLFYNAVRHGMEYVDPGASAYETRYRTRVVNSLHRRAKAFGFVLQPLEPKAGATVS

SEQ ID NO: 169436 - protein, 357 aa, unidentified
MRKRLNAEKINVNGKTVTVGIDVHKVSWHVTALVEGVIVESATIKPSYRVLKKLLAQYKGARIRIAYEAGFSGFNLYDELTADGMDCIVVSPSLIPVESGNRVKTDKRDSKKLAQYLENNLLKRVYVLSKQERAHRQYVRTRRQLSNHRTDVMRQIKSLLLFHGLPSFDGKRGFWTRPVLRALRSITPDEYVSYSLNKLIDVYEYLTQQVKHLTRAVHRLARTEKYARRVELLTSIPGVGVLSAMEILTELQDVSRFVTADQIAAFLGLTPSQYSSGQHVRMGKITHAGNHRLRTRMVECSWIAIKKDPGLNKTYQAIKMRRGGKRAIVAVSRKLIIRIRRILLDGVTYHLDYATAA

SEQ ID NO: 169437 - protein, 346 aa, unidentified
MEKLIRIGMDTSKSVFQLHGVGERDQPVLKKRLKRRQVVPFFSGLEPTVIAIEACGSAHHWARTLRELGHQVRLIAAQRVKPYVPRGKNDAADAAGLCEAMSRPSMTFVAAKSAEEQAALMLAGMRERLIATRTQVSNTIRGYAAEFGLIAPKGLDKIEPLVMRVTQDESLPELARRLFALHGREYARLQEEIRALEAMLMNWHRANPDSRNLAEIPGIGLVAGVRLAMKKTDAMACKSARYYAAWLGLTPKDHSTAGKQRLGGITRAGDPALRAMLVTGAMAVIRQAERNPAKASPWLLGLLKRKPKKLVAVALANKNARIAWKLMRSGERYNPDHAAPARASAA

SEQ ID NO: 169438 - protein, 395 aa, unidentified
MQVMHPVCCGIDVHQKSIVCCILDGPLTSNEPKKYQTSFGTTTKELKAALDWLLEHQVTHVFFESTGQYWIPLFNIFSDSNLELILANPQHIKNVPGRKTDVKDAEWIAQLGRCGLINQSYIPSQEVLQLRYLTRYRISVKQRLTQIKNHIHVILQRGNIKITSYLADIFCKTGQALLTLFINGEVINEDNVESCIHGRIKASTRQLIEAMEGKLSTVDRFLIKECMEEYQLQKKISDELNKEINEYILEHFSEEYQLLLTIPGISDNCCATILAEIGPNVDAFKTEKKLASWAGMCPGSNESAGVKRSSHTTQGNKYLKQALVMSVLSVQRAKEESFSLFYQRISSRGSKMKAIVACGHKILRIIYKILQSHQPYNSQKALGLRQQTNALSLTI

SEQ ID NO: 169439 - protein, 449 aa, unidentified
MNYYLGGDVSKGYADFVILNFEKTVIENNFQLDDTNDGHGKLYELLLDFFKKYPSAHIYASVESTGGYENNWYNFLCKCKCELQLSVARLNPVGVHHNLKASMNRNITDKISACAIAEYLLSHGDKIRYDSQDNYADLRKQKKYIDMLIKQKVQLGNQLEKILYSANPEILIYWSEDPANWLLQLLLEYPTAEKLSRAKANSLKKIPYLKDNNVEIIIEKAKKSVASSSGVITENLIVSMLTQILQLKAEIKKQEKSMAENCKLEEVELLKSFKGISDNSAIGLMLEIGFIERFSSAKKLASYCGLHPVFKQSGDGKSGMHMSKKGRKSPRAILYMVSFTAIKSNLLIREVYKKSRAKGMTHNAALGVCMHKILRIIYGMLKTNTRFDPAIDAANQQKEKAKEIKKPSDKNRRYQKLDESAPISKRQHRKRKAQNQSQNDNNIESGIMT

SEQ ID NO: 169440 - protein, 341 aa, unidentified
MQKFIRIGVDLAKNYFQVHALISEGGSAITRKLTRSKMREFFSQTEPCRVGLEACGSAHYWARELQAMGHEAFLMPPAYTKPYVKRGKNDAVDAEAICEAVSRPGMRFVPVKSTEQQATLTLHKTRDLLVKQRTMTVNALRSHLAEFGIIVAKGIGRVSDLLQLAETDERLPSVANAAVMALAQQIEALDQSLDNLEKEIANAHSRSEMSQLLVEIPGVGKLTATVIAASMPDRNVFRSGRDFAAWLGLTPRQNSSGGKPSLGAITKQGNRYISELLVRAGTSLLNVVGKRKGVLRDWIVGLLTKKPARLVTVALANKLARIIWAMMKTGESFRTEIFMKA

SEQ ID NO: 169441 - protein, 371 aa, unidentified
MKNTIKYVGLDVSKEKIAVAIADEGREPARYYGAIPHTPDAVARMIRKLKGSGITLEVCYEAGPTGYDLYRWLTKMGISCVVIAPSRMPQRPGDAIKTDRRDAEKLAQLHRAGELTAIYVPTPELEALRDLIRAREDARQDLHRARQRLIHFLLRHQIHKPEGMKKRWTKRYREWLSMLKFNNVAQERVFTESLQQLREVEERIKRLEAAMREEAQICPYAPVIQALQGLRGIALLTAMTLVVEIGNFERFRSPAQLMSYLGLVPREYSSGASTKRGSLTKVGNSGVRRALVESAWSYRHRPAVKGDLAVRLEGQSIHVHETSWKAQERLHSKYLKLVRRGKHRNLTMAAVGRELIGFIWSIAVEAERKMA

SEQ ID NO: 169442 - protein, 367 aa, unidentified
MIIIGVDFHPGFQQLASVDTETGEFQEKRLAHREEAERFYRALASTDQKIRVGMEASGYARWFERLLAELQIELWIGDAAEIERKRARKQKTDREDAQHILQLMLKDDFPKLWVASWENRDLRQLLWHRHRMVQARTRIMNQLQAVALNEGLSCKKRLWRTGRRQLECFPLGPWGSRRRHDLLQLLDQLNPKIEELSQAIEQEAEKCPEAHRLMTHPGVGPLTALAFVLIIGQAERFQCGKQVASYLGLVPLEKSSGKRRRLGHITKQGSSIVRFLLVEAAQVTVRKLPEWRSKYLHLMMRRGRKTAKVAMARKLAVRLYWMWRKGWDYEQWKKFGSHAGQPGHPYGELKHRDIDWASCSPSLGSLK

SEQ ID NO: 169443 - protein, 355 aa, unidentified
MSQEKYIGMDVHQATISVAVMDAQGKLIMECLLETKAATIVEFIQGLQGTLSLTFEEGTSAAWLHDLLKPHVSRLVVCDPRKAALLKDGNKSDRIDARKLAELLRTNQLKPVYHGEHGVRTLKELGRSYLTLTKDVTRVMNRIKALYRSWAIPCSGTTVYAPRHRAEWLAKIGEPGVRVRAERLYQQLDVLQPVRQAARHDLLRESHQHAAVKLLRQIPSIGPIRAALLVALLQTPHRFRTKRQLWAYSGFAVETHDSGEFRYVRGKMQRNRERITVRGLSDNYNKDLKNLFKGAAISASTRPGPLHDFYVARIAKGMRPTMARLTLARKIVTITLTIWKKGVSFDPQQLHRQAA

SEQ ID NO: 169444 - protein, 508 aa, unidentified
MSKTSEKAPKWTELPRINLHAAGLDIGQSEIMVCVPPGNAEGCVRAYGTYTPDMTALADWLAACQVTTVAMEATGVYWLPVYEVLEARGFSVFLVNARHIKNVPGRKTDVSDAQWIQTLHSYGLLSASFIPETEIRVLRSYWRQRAGLIEYRAAHIQHMQKALQQMNIQLTQVLSDITGVSGMRIIRAIVAGERDPVTLAQMRDKRCAHSSDEIAKALTGNYRPEHVFALKQALALYDFYTTQIDECDSQMERQYAALESVADEDDLPPQTPGQRASHSKNAPGFDARPQLFRITGVDLVAVPGLEQSTVQTIITEIGTDVSRWPTERHFCSWLGLAPHNDISGGKILRSQTLKTNNRAGQAFRLAAQSVARSQTSFGAFYRRLAARIGKQQAIVATAHKIARVVYAMLKHRTPFNPSSQQEYEQHHRQLEIKRLTRKAATLFLRNNRRFSLRESNSRLVSLAESRFDGVKTSQNRPNRVSSGRYSEIAFDLATKERTDDSRDWLDQR

SEQ ID NO: 169445 - protein, 416 aa, unidentified
MASNQNTPVLSIVHPICCGLDVHKRTISACVIETRCDGSVQHHLGEFGTFTDELFRLRQWLLEMDCPIVAMESTGVYWRPVHNVLEGYAEVVLVNARHVKNVPGRKTDIEDSRWLAGLLRHGLVRGSFIPPKDVRQWREMVRLRRGYVEALSDFKRRTHKLFECANIKIDSVVSDLFGLTGGNLMQLLVSKETITLDEVKGCARGHLIRKVEELYRSIQGFFEDHHRFLLASLLETVKSLEGQISSLETRLKSLTKDHDTLVERLDEVPGIDQLAARAILAEIGSNLEAFPTVEQLCSWAGVCPGNNESAGKRHSGKSPVQRHPLKTMLVDVAWAAVKKKGSYYRAKYYRLKARRTAKKAIVAIAHRILKAIYAIIKHGARYRELGEQYLDRQTQARKLAKLKIEARQLGYKLVPA

SEQ ID NO: 169446 - protein, 341 aa, unidentified
MKDTMIGVDLAKRVFQIHGASTTGQVKFRKKLTREQFRRFMSEQPACIVVFEACGSASYWAREMETLGHDVKLIAPQYVRPFVKRQKNDAADAEAIVIAARQPEMRFVVPKTADQQARAVMFRSRERLVHQRTELVNALRAVLYEYGHVFPTGLIHLKRIEAVLNDPACDLPALIIAEGHDLMAQIAEKTERIDAKTKELKALAAETDTARRLQTMPGVGPLTALAVEAFAPDMAQFKCGRDFAAWLGLVPRQHSSGGKERLGRISKAGQSDIRRLLIIGAMSRLNWLGRRSILEGSWLARMRARKPKILVAIALANKMARQLWAMLMKNEDYRDPALAAT

SEQ ID NO: 169447 - protein, 340 aa, unidentified
MPDEVHVVGLDIAKSVFQVHGADEHGRAIVRRKLRRDDVEQFFRALPSCLVGLEACPGAHFWGRLLRSMGHEVRLIPAQYVRPYVKTNKNDAADAEAICEAVTRPTMRFVPIKEEMQQEILVIHRVREMLIRQRTQLINAIRGHLAEFGVIGPNRAHNIGLLTVLIEDETETRIPPVVRHALRYLVEQLREVKTKLARIDSDLITVARDSSACRRLMTIPGVGVVTASALVSSMRDPADFKSGRHFSAWLGLVPKQHSTGGKEQLGSISKRGNGYLRKLLIHGSRSIMRWRGRTWIWLAKLRDRRPANVAVVAIANKTARVVWALLRYGGTYGVLTRGAA

SEQ ID NO: 169448 - protein, 397 aa, unidentified
MYIVGIDIAKRKHEAAVIDGEGTVIIKPFSFTNNCSGYNRLLAMLTKAKLPLDEVSFAMEATGHYWLALFTRLQKEGFRVQVINPVQTNSIRSFYIRQAKTDPRDALLIAEVIRFGHFSESTLHPENIYELRELCRGRHAIVSMQADVKRKVVALLDQVFPEYETAFTNMFGDTSMAILQTCPTPKELSEMPLEELCHLIEVSSHKRFRMAKAQELQALARNSFGFAMAGDVFSTMIRLYAKHLDFLKQQVREMDRKIAEIMETLDTPITTITGIGPTLGAYILSEIGDISRFSSAAKLAAYAGIDPTMRQSGEYNGVRNRMSKRGSPYLRHAIWLAASSAVLHDPALKLYFQKKRDEGKPYMASVGHACRKMVSIIYAVMRDNKAYTPCIPNEISA

SEQ ID NO: 169449 - protein, 353 aa, unidentified
MEKVSKFTLGVDLGDRQSVICVIDPSGDVIEQSKVTTNKKAFKKYFDNYAGQLVAIENGTHSPWVSRLLKELGCQVLVGNARKLPSIWRSPIKTDFRDAEMLARIARFDPKLLYPIVHRDEQAQADLAIIKARDMLVQSRSGLINHVRGAVKSMGGRIPASSADSMHKKAMDHVPEILKPALLPVIEQLAKLTETIKEYDRQIKNLSEEKYTETQVLRQVTGVGPITALAFILTLEDPARFRKSREVGPVLGLVPRKDQSGEVDKQLPITKCGNIYLRQLLVNCAHYVLGPFGPDCELKRFGERLSQRGGKIAKKRAIVAVARKLAVLLHRLWVTGEVYEPFYNQRTAMKKTA

SEQ ID NO: 169450 - protein, 351 aa, unidentified
MVIIGVDAHTRSHTAAAVDDHGRELATLTVGAGTDGLEALDAWIAERGPVQLVAIEGARGFGLPITRRLLAAGAEVVDVPTHLTAFGRRSSRSRGKDDESDAVTIARIALREPGLPRLRLSHLAADLKLLVDARDQVVAEGTRVRNRLHALLLALAPGYRDSTGALATAAALRRARRLVRAAEASDPVRARLALAAIRRLRAVEAEAGELEADIRALVDASGAPRLLAICGVGPIVAAKILGETHDVGRFPTAAAFAAHAGAAPVPASSGTTSRHRLNRGGNRQLNRALFTVAMVQARWDEQGSAYLARKRAEGKSPAEARRCLMRHLAGVVYRAMVLDAKAREQAPSRAA

SEQ ID NO: 169451 - protein, 344 aa, unidentified
MQITTIGLDLAKSVFQVHGIDAAGQVVVRKSVRRAQMLAFFSKLPPCLVGIEACGTSHYWARELIRLGHEVRLMPPAYVKPYVKRGKTDAADAEAVCEAVTRPTMRFVPVKSPEQQAALSMHRARDLLVKQRTQLINMLRGLLAEFGVDIPKGLERALLMARQVIEGNAPEVPIEAARIATTLSQQALDIHVRLRQIDRDLAIWLRGNDVARRLMTIPGIGTVGATALVASVTDPLQFRSGRQFAAWLGLTPLQKSSGGKERLGRISKMGDKYLRKLLIVGMTSLVRRAKYTPDKIDPRLADLLARKPTRVATVAMANKTARVIWAIMARGETYRTGHQPALAA

SEQ ID NO: 169452 - protein, 316 aa, unidentified
MAKREVWVGIDVSKRRLDVALGVHGELLQVDNDPGGFTVLLEKLGALGPELIVLEASGGYETALVGELVDAKLPVVVVNRRQVRDFARAIGQLAKTDALDARVLALFGERVRPPLRALPDEVGRELKAVTARRRQVVEMLVAEQNRLGQAPRMLHHQLRAHIDYLRKDLARLNRDLDQTLRRSPLWRETEELLRSVPGVGPVLARTLLAELPELGRLSRREIGKLVGLAPLNRDSGMMRGRRTIWGGRASVRAALYMPTMVATHKNPVIAAFYNRLLAAGKPGKVARAAAMRKLLTILNAMLKHHTRWSPLCLPIA

SEQ ID NO: 169453 - protein, 387 aa, unidentified
MPQPNDLSRSLVALDQNSTIIAVVELSQSSWLVGGVVPGIERQPRKKLEPNPERLLALLHRWQDEAVRAGHTITRIAVAFEAGRDGFWLARWLEARGVEAHVIHASSVAVSREHRRAKTDRLDTELLKRGFLGWLRGERGHCSMARVPTIAEEDAKRPNRERDCLVGERTRIVNRIKSTLARLGIRSFKPTLRKAAERLATVHTPEGVPLPPNTLAELQRDMARLGLVVSQIRQIEDARQKRLEQQHEAGPHAMVRLLARIVGVGVETADMLVHEVLSRPMRDRRAVARYAGLTGSPDESGARRREQGLARAGNARVRRGMIQLAWRFLMFQKESALTLWYRGRTADSRRGTRKTMIVALARKLIIALWRFVTTGEPLEGVVLRPAT

SEQ ID NO: 169454 - protein, 372 aa, unidentified
MDQVTTTFVAMDTHKQTISVAMAEGGRRGETRFLGEIPSRPEAVAKLVERLSKKHTKLAFCYEAGPCGYGLYRQIVALGHECVVVAPSLVPTRPGDRVKTDRRDAVTQASLFRSGELTSVWVPDEAHEAMRDLCRAREAAVETLRRARQQVTSFLLRHGRIYSDGKHWTGKYRKWLASQRFDHPARQIAFEELVQAMEEALARRDRLAGQMHELLPSWSLAKVVAAIQALRGVAAMSAMTLVAEIGDFHRFSNPRHLMAYLGLCPSERSSGAKTARGGITKAGNRRGRRMLVEGAWTYRLPARVGLAILERNKLLPPPIREIAWKAQVRLCARYRRLAKMGKPINIVCVAIARKLAAFVWAIATNDAVSAIA

SEQ ID NO: 169455 - protein, 356 aa, unidentified
MNNLSKPNFSGQHIYVGMDVHKKSWSISIMTEHSTHKTFSQPPDPAILSSYMQRNFPGATYHAAYEAGYSGFWIHDQLHENGIDCMVVNPADVPTKDKERSGKTDKVDCRKLARCLRNGELEGIYVPARVKVEDRGLLRTRRSMVRKQVRCKNQIKSLLAFYGIHLPNDIVHSNWSYKFIQWIQSIQMERASGNYVFKVYLYELDQLRKVVTALNRQIRILARTDEYKTNVQLLRTVPGISTLTAMTLLTELFDIDRFQSLDKLASYIGLIPDTDSSGENDTTKGMTNRKNRFLRFLIIEDAWIAVRQDPALLMTFERLTKKMPKTRAIIHIARKLLNRIRYVLKNQKEYVPAVVQ

SEQ ID NO: 169456 - protein, 396 aa, unidentified
MYNLFVGIDVSKSSFSVTGLDPKGNVCFSITANMDCNGFSELFKSINSVCNDSSKVLAAMESTGCYHINLFSFLCSKGINTVVINPLLISNFAKLSLRKTKTDKKDFLTIAQFLLVHKDSISQFSIAQDIKDLRDIARERESLCNLIASTKNEIKRILQFTFPEIESLCNVFTQTMLYFLKEFPSVRVIKAAKPKAIAQALENFSRGRKINITADDIIKAAKSSVASFSLAKELILPEKISTLLHLMYWLDKMTDMLSSFCQSMMIQELEIITSIDGIDTTTGAAFLAEVGNISNFPSHKSLIAFAGIDPSVFQSGKFEGTSRISKRGNRHLRRVIYLMTVNVIRVNAFFKAYFLKRKQNGLPYRKAVLATAHKLVRTIFAMLSHKSFFHVKENSL

SEQ ID NO: 169457 - protein, 423 aa, unidentified
MIRPQLTPPAGVLVAIDVGKARNEVLIEVPGSGRRRRLSVLNTRAEHDRLIALLSNLGQPVTCGFEATGNYHRPIAWRLLQAGFAVRLISSVALARTREALHNGWDKNDPKDAQVILHMLRIGATQRYVDPLVAGINDLQELSKTHETISRMKTQTWHRILTHYLPLYFPEVDRFRHNSRSDWFFAFLDRFPTPASITALSKEAFIAAAWDVVGRKVAKAQLLGDIYETARSSIGLPVPPDAPAVSMFRLVIGEVRGLIQQRDAIEATADALLRDSSDYKLLRCIPGIGPINALTILAEAGDLRRFGHHRQFLKFCGLDLATQQSGTFRGQTKLSKYGNARLRRTLWLAGQVAIRQRENGFRDKFERYIARDRHDADLRRKALTAITAKMARVAHAVIKTGTEYRPFLERSDARWKDPSLQGP

SEQ ID NO: 169458 - protein, 341 aa, unidentified
MKLRAIGIDLAKNVFQACGVNEHMKPQFNKRLKRHELLDFMRQQEPTMVVMEACYSSHYWGREMTKLGHNVKLIPAQHVTPFVRGNKNDPNDSFAITEASQRPYIRFVPVKTEFQQEILCLHRIRERLIKNKGALSNQARGLLSEFGVVFPCGHKALLNGLNGVIDNAQYSHRLQNMMIDMLSEYETTLKRLKGIEQQLGIFVEGSESGRILLSIPGIGIINASALLASIDKGQAFNNPKEFAVWLGLTPKQHASGNINKMGGITKRGDRYLRKQLVHGARSVVSRAAKKTDSLSLWATKLRVTKPFNKVAVAMAHRLARLIWILLTRQEHYSATPTGVSA

SEQ ID NO: 169459 - protein, 320 aa, unidentified
MSEPYTVGIDVSMDRLDVAILPGGQRLFVANDAAGWAELVGRLQRCAIAAIGLEPSGGYERGVVRALLAAGFSVRRINPNKLRQFARARGVLAKNDRLNAQLIAEYVAIMPTRPVQSDPAAERLAEIVTMRRQLCDAHVAAENQASHLEDAMLRRIAKRRLARIEADIRLLDKRLAELVAAELGLARRFRLLCSMPGVGATLAYTLLALLPELGAIGRKQIAALVGLAPYDFDSSKFRGQRHIYGGRMAVRNVLYMAALAAFRFNPALKAFHRRLLAAGKKPKVAIVAVMRKMTGVLNAMLRDKTDWVDHTTGRHIVPAT

SEQ ID NO: 169460 - protein, 430 aa, unidentified
MKSNTQNAKIEAITEKTLVLGIDVGSETHYARAFDYRGIEYSKKPFKFSNTEAGFATFKEWILDLKERHEKDKVVPGMEPTGHYWFNLGKFLQDNEMKPVLVNPHHVKKSKELDDNNPTKNDRKDPKVIAGLVREGRYMIPYLPDGVYADLRTASNIRFQLQAELTRIQNRISRWFNIYFPEYKTVYGKPDAKSGMLILKAAPLPEDILTLGIDGVNQIWRDAKLRAVGKARAKTLIEAAEHSVGSKEGAVSARMEIRMLLEDYESRNTRLQEVMVLIEELVRKIPMTEKLLEIKGVGIRTVSGFLAEVGDISRFNNPKELQKLAGLALVENSSGKHKGETTISRRGRKRLRYLLFEVAMSLVAKNPEFRELHNYYTTRRLNPLKKMQSLMAIAAKLIRVFYAILTKGVDYDPKKMVSDIKRPAVYLQAA

SEQ ID NO: 169461 - protein, 332 aa, unidentified
MKKIFHFIGIDVSKETLDIALIKNNDKSHIYSFKVTNNLDGFKKMKRWLRSEKIVLKQAVFCVEHTGLYSKAVSRFVLSEQSNLWMEMSLKIIRSMGIQRGKNDKIDAIRIALYAQRYQDEMKLYEPPRPIVEKLKTLLQLRKTLIISRNHLQVPCKELLAVDCQAGKEAFKLIAPAIKALQKSIDAFNEQIEMLIASDEQLNHYFEIGTSVPGMGKITLAYIICFTNEFKNFSSGKQLACYSGVVPFEYTSGKSIKGKPHVHNMANKTLKRQLHIGALAAVTYYDEFKCYYKRKLLEGKPKMLILNNVRNKIILRLAAVIKNDKPYLKRVA

SEQ ID NO: 169462 - protein, 342 aa, unidentified
MQITTIGLDIAKNVFQVHGIDAKEKVVARKQLRRSQVITFFKALPPCLIGMEACATAHYWARELTKLGHEVRLMPAKDVKAYVKRNKNDAADAEAICEAVRRPTMRFVRIKSAEQQGQLMQHRTRDVLIRQRTQIINALRAHLAELGIVAAQGNAGVNELRAIVTDEQDTRLPIDARASVIVLAAQLEALESVIGAIEKRIKMQHRSSEASQRVETIPGIGVIGATAIVATVADPTIFRSGRDFAAWIGLVPRQDSTGGKQKLGPISKQGDRYLRRILIVGAISVLRRAQENPGKYPWLTQLLARRPFKVVAVALANKMARMAWALLAHGGTYRAPELAETA

SEQ ID NO: 169463 - protein, 408 aa, unidentified
MIYIGVDLSDKFFDSCITNSYGDVLTRNRFDFDYDGFCSFSKVIQEHQTDTHESIIGLENPRSRLVDFLTQRGYTVVLTNPSAISSYRKSRKPSRAKSDQADAQLIADYVREHHKSLRCIQIPQETVRELSLLLEDRDRLVQQKVKFSNQLTSTLKEYFPQALDAFGSIDSKCAIQFLERVDTFAQVKAFSRKELEQLLKECGVYRKDSKERFHKAMSKPVPHVSQAVVNAKVRLKNTLVTLLHLLIQRIQEYETHIKSLMDDIPDGHIFRSLPGADYILGAKLLVLYSTRDFTDASEAQQLFGTAPYTAMSGQSRHVGFRKGAIKFGRNTFQQFARGSIKSSSWARKQYVKKRNEGKGSHHAFRCLANTWVKITFAMWQSKMPYDESRHLASIANHLINQPAFVNSG

SEQ ID NO: 169464 - protein, 339 aa, unidentified
MPFLGGENISLIGVDIHKKYCLGIIEGNNTETKLRFPNTRNGWKAFLKNKEHIDKVIIEAGSVSEKTLRYLEDLNVPVKMANPRKARLIAEATIKTDELDAKRLIDLEKVGLLPESWIPSREIRDIRHLCRYRYFLVQIRTKIKNRIHYELDREDINVKTLTYKYLETVKEKTIMIDQLYRLLKEINEKIREVEKEIEREYSNNEYSRIIDTIPGISKYGSLLLSMEIGDINRFSNSKKLASYAGLVPREYQSGTREWKGHITKEGNKWIRWILDECLAIHINVCPESPISIYYRSLVPIKGNGKAKIAAERRLLSVIYVMLKEKITFDQYIKMMRRAI

SEQ ID NO: 169465 - protein, 401 aa, unidentified
MPFHGGLDWGGTSHALCIVDGTGGVVARIEASHDATGLADMLARLKRVAPSAELPIAIERPSGLIVDALVAAGHPVIPIHPNIVKACRPRYRAAGGKSDPGDAFMLADILRTDGHRFRPLMPVSDDIRALRALVRGRDDLVAQRTALANQLRSLLEGFWPGAAAIFAAIDSPIALAFVSRYPTPDSASRLGIRRLASFMAQHAYCGRRSAAELLDRLRAAPTGLASDAEADAKGELARAMAAILERLVAEIAKLSSRIEHDVAELPDGKIVMSFPRSGRICAAQILAELGDIRERFPTEDQLAAEAGVCPVTHASGKSRGGVFRWACNKNLRLAVTCFADNSRHASAWAADIYAKAKARGCRHPHAIRILARAWVRVLRKTWQERSTYDPARHTAAAKIAA

SEQ ID NO: 169466 - protein, 387 aa, unidentified
MPQPNDLSRSLVALDHNSTIVAVVELSQSSWLVGGVLPGIERQPRKKLEPSPERLLAVLHRWRDEAVRAGHTITRIAVAFEAGHDGFWLARWLEAHGVEAHVIHPSSVAVSREHRRAKTDRLDTELLKRGFSGWLRGERGHCSMVRVPTIAEEDAKRPNRERECLVGERTRINNRIKATLARLGIRNFKPTLRQAAERLATIHTPEGMPLPPNVLAELQRDLARLGLVIGQIREIENARQKRLEQQPETTPHAMVRLLARVVGIGIETGDLLVHEVLSRPMRERRAVARYAGLTGAPDESGARRREQGLARAGNARVRRGMIQLAWRFLRFQKQSALTLWYRARTADSRIGTRKTMIVALARKLVIALWRFVTTGEPLDGVVLRPAA

SEQ ID NO: 169467 - protein, 343 aa, unidentified
MDQYIGLDVSLKDTAISIRQEGKRIWRGKCPSDPKLLAEMIRKHAPYARRVVFETGPLSTWFYHALTAEGVPAICIEARHAQKVLGETLNKTDANDADGLAQLAEAGFYKAVRVKSFDNMLTRTLVGARNQLLSISTQLNNQIRGLMKTFGLIVPKGKGRVFDDNVRELIDGNDGLARIILPLLEAWGGIRKRAADLDHQLLAVARESQATKLLMTIPGIGAVTAVSYVAAIEDPDNFRTSRSVGAWLGLTTRRYQSGEVDYDGHISRRGDNHLRGLLYEAATVILTRASTKNESSLKSWGLKLRERLGFKRAAVAVARKLAVIMHSMLKTGEVFNASAGATA

SEQ ID NO: 169468 - protein, 506 aa, unidentified
MKVQASKPTFTIGYYPIGQYGSNICRQDIGRKRPYRSLLRQRYWAWSFTSKLITMAKVAKRKQTSKGLRLEVVNPNAAGIDISPKEMQVCVPSDRDGECNRTFGVYTEDLHYIAEWLKVCCIDTIAMESTGIYWLPVFRILKESGFEVILVNASDVKNFSGRKTDASDAEWLMMLHSYGLLKPCFQPENIARTMRNLVRHRDNLIRSASREVLHLQKAMEQMNLKLDNVFSDILGKSGQSVIKAILNGERDPKVLADLADPRCRTSKEEIEKSLQATWDEEHLFEMRQSDSLYQFYQQLIAECDAKINEIAMQYSATVDAPKMELLRSEKYNAKKNRIGFDVEKVAFELWGVNVMRIPGMSRGALLRLVGELGADFTTKFVDVKHFVSWANLVPNNKISGGALLSSKVPKKKNPVGMIFRQAANTLKVAKNPLGDYFRHMRAKGGHLQAMVATGKKLASIFYCMVQRKVEYNEKVYCNHRKQELQNKVAYLHKRLQRMESELANCG

SEQ ID NO: 169469 - protein, 423 aa, unidentified
MVKNNGKETAMKEKVYVGIDLAKANSRVAAFDTSGEAVLKPFSITNSKEGIRKLLSKLPGYKAGQIVCGMEISSNYWENMCSYLKGMGVGVILLNPYQVKKYRQATGAKIKTDSIDAEAIAGLISGRKYDSLYISDDTTVELRELVRIKYGFQRRVKDLKKSVLALLFLVFPEYTKMISRPFSKVSMEILSKYPTSCHMAKSSPSRLVKIFRRYQGCNFDLNKAKELVSAAKDSFYSGRASKSRGLSITMQLDEIRSLSEKIADIEEEIKSILCPDDPSGGSSAYDILNSIKGVGIGTIAAFVGCVGDVARFSSADKLISFIGFYPRIFESGKYKKSSPTIQKAGPKELRYMLYLASVACIKHNSELAKYYYDRVSAGMPVKKAIIKVAVKLARMMYSMLKYGSQYDSSRVFMQQPLSLKNAA

SEQ ID NO: 169470 - protein, 462 aa, unidentified
MPGTKERETSEKSRRQLEGLPVIRLGVAGIDLGSEQHWVCAPTLDRSGREVASFGATTAELLRMAEWLKARQVESVAMESTGVYWIAPHEVLEGQGLQLLLVDTRQLAQVPGRDKKSDPTDCEWIQRLHSCGLLRGSFRPEEAVCMLRTLVRDKANLVAESGDWLRRMQKSLDQMNVRVHRAVSDIDGVTGMAILRAIAGGERDAQELAKLRDRRCSKTQQEIAEQLSGHWREDHVFSLQQALKMYDAVQERIAAYEQEILRKLGDMEREEPHEPTAPPLQNAHKARKIKDRGQESKRQALYRMSGVDMTQIDAIGVETVEVVVSEYGSDLSRFPTEKQFVSHVTLAPRVPKSGGKPVKKKKRNSASTRVAAALRMAALSLRHSQTALGAYYRRIAQRRGADIAVFAAARKLATLIYRLLRWGQPYVDEGAAAFENRYRQHRIGRLAATAKELGYQLTPVAA

SEQ ID NO: 169471 - protein, 475 aa, unidentified
MANKRTAGGTKNLSRKECRGRKLRIRSADPGLDVVHPHAAGIDVGGSEHYVAIAPGPDAEPVRRFGCFTTELRALSRYLSNHGVRTVAMQATGVYWIALFDILEEDGFEVFLVNASHTKNLPGRKSDVQECQWLLKLHTYGLLRNSFHPSSEIRVVRSYWRQRGTWVQTATDCVNRMQKALSQMNLQLSNVISDIVGTTGQKILRAIVAGERDPETLAKMKDSRIKASQSEIVASLTGNWRPELLFALEQELQHYDFCQLRMRDCDQAIAQQLKAIPTRPEHARTNARQPSDRPVVRKQVRGNAPRFPLAQELKRITGVDLTRIDGVSAITVQTVISEIGLDMSRWKTEAHFASWLGLCPHNDVSGGKVLRRGTRHVVNRAATAFRMSALTLRNSDSYLGAQFRRFRGKLGAPKAITAMAHKLALLFYRMMRFGQEYVDQGEAAYQEKFQAQQLRQLEKKAALLGFAVVPLPENA

SEQ ID NO: 169472 - protein, 401 aa, unidentified
MIDTGDIDVFLGLDVGKGEHHATAVTPAGKKTFDKRLPNTEPKLRELFAKLQVKHGTVLVVVDQPASIGALPLAVARDMGCPVAYLPGLTMRRIADLYPGEAKTDARDAFIIADAARAMPHTLRAIDGEDETIAELEMIVGFDDDLAGEATRVANRLHGLLTQIHPSLERVLGPRLQHPAVLALLERFGSPAQIRKAGRRRLVTLLRPKAPRMAERLVEEIFAALDEQTVTVPGTDAAALIVPSLAGSLAAVLDQRKLLAGRIEELLEDHPLSKVLTSMPGIGVRTGARILIEVGDGSTFPTAGHLAAYAGLAPATRSSGSSIRGEQPSRRGNKQLKRAFFLSAFAALADPASRAYYDKKIAQGKHHTQALLCLARRRADVLFAMLRNGTFYEPQPSAAVT

SEQ ID NO: 169473 - protein, 347 aa, unidentified
MLHAGLDLSRKKLDICLLSAEGEHLDQLAVAPDVDSLRRLARRIDEVQAEPVSAVVESMTGARIVHDTLGAEGWSVELADGQKVKGLAPLACKTDRIDSLVLATLSRRDLVPAIWLPDPEIREQRELARFRLHLVKHKTAPGNRVHSTPMSFGRACPVSDLFGVGGRRLLERLEVPEPWRSNVTASVWLIDELERQIDEINRRLREGHADHPYVPLLLSVPGIGWVLAFTIAAEIGQIERFSSPQRFVGYTGLCPTVKQSGDSDRRGPLSKHGPRYLRWALIEATSHALRHPAYAERYQRNKKRLGKQRGPRVAQIDIARRLAHAIWHMLTRNQKYAPRGATFRLRE

SEQ ID NO: 169474 - protein, 345 aa, unidentified
MNARYDGREIVGLDLHLHRTVMVRMTPAGERLEVARFANDPAVLTEQVAKAGPAPEVVLEATYGWYWAADALAAAGASVHLAHPLGVKGFAYRRVKKDVRDATDLADLLRMGRLPEAWIAPPPVRARRELVRHRHKLVQAATSLKAQVHAVLAKCGLRIAVSDLYGVSGSRQLRQLPLPEPFRARVDSQLRLLEAFEAEIARFDQLIREEFRGDGGYRVIQRIDGIGPVLAAVLVAELGDVTRFTGAPAVCSWAGLTPKHRESDLTVHRYGITKQGSRLVRWAAIEAVQRAPVNSPMRRTYDRIVARRGGTGKNLAKVAAARKLLTLVYYGLRDGEIRCLTAAAA

SEQ ID NO: 169475 - protein, 441 aa, unidentified
MERIKNPNAAGIDISSREHVVAVPKYQTEHSVRTFGTFTEDLHRLAKWLTSCNVKTIAMESTGVYWYHLYTVLLDYGFEVYLVNAYYVKNVPGRKSDISDAQWLQELHSFGLLKACFQPDNLTRTLRNYVRLRKSIIEQMGSEVQRMQKALEQMNIKLNNVIRELTGKTGMAIIEAILSGERSPVALAKNRDYRIKASEQVIVKSLTGNWREEQIFNLQMAYEHYCFLQNQLKKCDKESEKTIKKMSGSSTKQKEIKEKKKAKNSLNFNASQYLYNALGVDITQIFGVKETTGLTIVSETGINLKETFPSEKQFLNWLNVVPDNKITGGKVISSRVRKKKNKAGFAFRDAANALWRAQNPLGDYLRRKKARSGSKQAIVSTARKIAAIYYKMVTEKVEFDPQYLKQKTKQYLEQKLIDLEINTIRIKKLLANEMEFNDAVI

SEQ ID NO: 169476 - protein, 405 aa, unidentified
MKVYIGIDWSENKHDVCFLNETGEVLLVKQIAHTIAGFRQLDQACQSLGVGRQEVIVGLETAHNLLVDYLWELGYEQIYVLPPAAVKSAQKRYRQSGAKDDRWDAHLIANLLRTDQRCYTPWKPDQPLTRQIRAEVRFARQLGQEVVRDGNRLRALVLRYYPAILDAFPDLNSVVFLAFLQAYPTLSQAQALSFEQLKNFLREHHHTQSRSWPKIYAGLHADHPASNPDLDAAYAPLAVAQARILETLLRSRQACLTRLDKLFQQHPDHEIYDSLPKAGTLLAPALLAKLGDDRARFPTPAILQAVAGTCPLTKRSGKHSYVLFRKACDRDFRHIVQQWARLTLDVSPWAATYYHSVRPHCQTDNDAIRRLANRWLEILWRVWIDRKPYDEALHLKQHTLRLQAR

SEQ ID NO: 169477 - protein, 332 aa, unidentified
MSVYVGIDVHRKRSQVAVINEGGEVLANRNVPNGAKPILSVIGGLPAGTPAAYEAAFGWGWLLELLEGHGFEPHMVHPLQCKAIASARLKNDKVDAATLAQLLRADLLPEAWIAPPAVRQLRAMLRHRAQLVRLSTLLRNRVHAVLADHGHGRPAGCWSGPGRAWLASLELPAVSREVIDDALALMDALQQPIDRLDQEVRQRAKADPRVKVLTQLPGVGPFTALVLLAEIGDITRFGSARKLASWAGLTPTVRGSDRTVHHGHISKQGPAWARWVLCEAAQTAKRHPDFAPGYEALARRRGRKIATTAVARKLITRAYHLLTDASAAGEPG

SEQ ID NO: 169478 - protein, 404 aa, unidentified
MDTILERCAGIDVGKKIAVGCLITDQGRKAPTVQIRTYGTAVTQLDQLRDWLKQAGCTHVVMESTGSYWKPIFNVLEATMTVVLANPAHLKNVPGRKTDVKDCQWLAELLRHGLIPGSFIPTRPIRELRDLTRRRRRLIATGTSERNRIQKVLEDANVKLGCVLSDLFGVSGQDMLEALLEGNPTAEQVAQFARGTLKRKIPEIIASLEGHRLSDHHRFLIRQSLAHMDFLESQICDLDAEILRKLQPYQQQFELLQTIPGIKADAAASILAEIGSDMSQFPTAAHLASWAGVCPGNNASAGKQRSGKARKGNAWLRGTLSQSAWAAANTKNCSYKSRYRRLAARRGKKRAVVALVHALLRTSYYVLRRASPYQELGSDYLDERRREALIRYHTKRLHELNVSA

SEQ ID NO: 169479 - protein, 412 aa, unidentified
MQAIIERCCGLDVHQETVVGCLLVGEPGAHPTKEVRTFRTVTRDLEALRDWLREAGATHVGMESTGVYWRPVYAVLEGHFELIVGNAKHIRNVPGRKTDVKDSEWIADLVRHGLIAKSFVPPRPLRELRELLRYRRKLTESQTAERNRLLKLLETANIKLASVASDVFGVSGRAMLRALIAGEASPEAMADLARGQLRRKRADLILALDGRLEEHHRYLLAVQLRRLEAIEADIAGLDQRIGERLEPYSAPHALLMQIPGVDWVVAAVLIAEIGVDMSVFLSVYHLSAWAGVCPGSYESAGRQKSGRARKGNVHLRTMLVGAAISAAKTKGSYLKDKYHRLKARRGALRAALAIAHKILVSAYHMLAKNLPYRDLGEAYLDQIGQTRTVANLKRRLERLGYRVTLEPKAQPA

SEQ ID NO: 169480 - protein, 389 aa, unidentified
MKIYVGIDIAKLNHFAAAISSDGEIIIEPFKFTNDADGFQLLVSKLESFDKNSLIIGLESTAHYGDNLVRYLVTELYQVCVLNPIKTCQMRKNNVRKTKTDKVDTYVIAKTLMMQDDLRFITFFDLDMMDLKALGRFRQKTIKQRTRLKIQLTTYVDQVFPEIQYFFKSGLHQHAVYALLKEAPSPKEIASMHMTHLANLLKVNSHGHFTKEQAKELRVLAQKSVGANDSAISIQITQTIQQIELLDSQLEKIEAEMTDIMKFNDSVIMTIPGIGYINGGMILGEIGDIHRFSNPNKLLAFAGLDPSVYQSGNFQAKTTRMSKRGSRVLRYALVNAAWNVVRNNATFKAYYDAKRAEGRSHYNALGHCAGKLVRVIWKMLTDEVEFNLE

SEQ ID NO: 169481 - protein, 482 aa, unidentified
MKKRTIYSNQSQELLALFEQAGNSAKVLCVPIDYAKKDHVVMFCNGHGDIVRKPFSVKNSPEGIKYLSDQVSRSCRYHKINQEHVFFGGEDVGSYAENFANTLRSGGWLVAGINAHDAKKQRANVQASTDRLDLMGIATMMLNRRGNCSPAQSGIYLNLRTLVRHRRKLVVMSTEVRNRIHTIVDRLFPGFLDEKKSGITPFSKSSLYLMENRFSAMQIRRRRGKKLIETLRRLGTAKPDCAAVKLQQYAQQVLHTPDEYLGTLQLSLAQHIKHYRCLQENIEQLEKEIAVWLSQTQGAFMTSVRGIGIVLAAGLTAEIGDPFGQKPINNLVSYSGIIPRTIQTGGPEGEIYTGKVAKRSNRILKDYVVQSASHLGLHGPEDLMTDYKRRDSAGQHADFGIARRYLRMAMCLMRTSQIYLPQRLRKTGIKPEERAGYYLMIWPFLRDKWQKLGALKAAFSEDRPLGLWRNMVQDLYEIKLTL

SEQ ID NO: 169482 - protein, 346 aa, unidentified
MVYVGIDLHRNRSQIAVLDQEGSELLSRRIVNDPELFLALLADFEQPRIALEATYGWEWLADLLEEAGYELHLAHPLRTKAIAAARVKTDAVDARTLAHLLRADLLPEAYIAPRELRDLRDLLRHRVALTRIRSALKQRVGSILAKNGIARPYSNLFGPGGSRFLVELELREGPRRRLDSLLALIADFDREIGATTNEIEQRATGDAYVEVLCQIRGVGRYIAMLVIAEVGDITRFASARHLCAWAGLTPTVRSSDGKARLGHISGQGSPALRWALVEAAQHAPTGGGPLRQSYERIAKRRGKQVAKVAIARKILTLCFYGLRDGEIRCLAPRAKPRTNRTTAVAT

SEQ ID NO: 169483 - protein, 463 aa, unidentified
MRKAKKGARKKRGKSLQEIIEGLPPLNLNAAGIDVGNAEHTVAVPPGRDPQPVRTFGSFTADVHRMGRWLVACGVDTVVMQATGVYWVGLYQILEMYGLIVKVVNARYTKTLPGRKTDVQECQWLQKLHTFGLLNNSFLPNEETRVLRTYLRQRENLVAAAATCMQHIQKALTEMNVQLANVISDLSGVTGMAILRAMVSGERNPQRLAELKNQHIQASREEIARSLEGDWREELLFVVEQSLQMYDTYHQKIVACDGRIEAQLKSMDAKVDVVAQPIPEPRRVKWPRKHRPAYDLRGELYRVTGVDLTQIDGLDVGTIQTVISEVGVDMTPWKTEHHFSSWLGLSPDNRISGGKVLKRGTRKVVNRAATALRLAAWSLLRSQSALGANFRRLRARLGAPKAITAMAHKLARLIYRMLKYGKEYVDKGMAYYEEKHRQQQLKWLTKQAAALNLQLVPATAVVR

SEQ ID NO: 169484 - protein, 345 aa, unidentified
MSHKLNAGIAVIGIDIGKNSFHVVGLDRRGAIVLRQKWSRGQVETRLANLPPCLIGMEACVGAHHLSRRLTSLGHDARLMPAKYVRPYSRGQKNDFRDAEAIAEAVQRPTMKFVATKTAEQLDLQALHRVRERLVSQRTGIINQIRAFLLERGVAVRQGLRFLRAELPRILAAPCDALSPRMLRVIEDLAGDWRRLDERIEGLSSEIEALARQDKGCERLMTVPGIGPIISSAMVAAIGTGDAFSKGRDFGAWLGLVPKQISTGDRTILGKISKRGNRYLRVLFVQAAWVVLIKPKSWQRHGLKPWLEAAKKRLHHNVLAIALANKLARIAEASKIEAACFNANC

SEQ ID NO: 169485 - protein, 437 aa, unidentified
MLCCLNPNAAGVDIGATEIYIAVPADRDPQAVRCFATFTEDLHAAANWLKACNIESVAMESTGVYWIPLFQILEARGFKVFLVNAHHVKNVPGRKSDVSDCQWLQYLHSVGLLRGSFRPEQAVCTVRSILRHRDSLVQMASTHVQHMQKALDQMNLQLHHVISDITGVTGLAIVEAILAGERNPHTLAALRDRRIKASADTIAKALVGDYRREHLFTLSQSLTAFHHYQELIAACDREIAHYLEEFESKVDPPSGSPSPSKYESQPKTSEPRFDLQTHFHRILGVDLTQVPGINVLTTQTLLAEIGPDLSSFDDGSALASWLGLCPDNRVSGGKVLSVKTRKVKNRAATALRMAAQSLYRSQSHLGHFYRRMRAKLGAPKAITATAHKLARIIHHMVTTGQAYDEAICAQNEVQNRHRLEARLRKQARELGLQVVAL

SEQ ID NO: 169486 - protein, 352 aa, unidentified
MRTITTIGIDLAKKVFQVRGVDAEGKVVVARKLRRKEVLAFFAKLAPCLVGMEACGSAHYWAREIAKLGHTVKLMPPKYVKAYVKRGKTDAGDAAAICEAVTRPSMSFVPVKGLEQQGLSMLHSARSQLIGQRTQLVNAVRGHLSELGIIAERGLLGLGELAAIVRDESDQRLPAAARAALMILVRQIEAVSAGIAALDSTLRKENKASELGPRLKTIPSVGPVIASALRARVTNAKLFENGRHLSAWIGLVPENDSTGGKVKQKGLSKKGDRYLRSLLVNGAMAVVQQAQKRPDKHPWVTKLLGRMSAKQAAIAIANKTARIAWAIMVHGGVYEAGHRAPQYRAEACAAAG

SEQ ID NO: 169487 - protein, 315 aa, unidentified
MTDSLNQFIGIDVSQNSWDVHVLPEGRSFSIRVEAGAIERLLSQLGSTAQALVVVEATGGLERELVAALLEAGWTTAAVNPRCVRDFAKALNRLAKTDAIDAVVIAQFAQAIQPRPVEQSSERQERLDALVTRRRQLVSLRSVERTRLTQAADRTARQSIDKTLRFLDRQVAELDEAIARLIDSDDQWRAKRALLQSVPGVGPTTSAALIAELPELGRLNRCQIAALAGVAPLNHDSGKFRGQRRIRGGRAALRTALYMAAFAARRFNPVIRRFAQRLQDAGKPFKVVLVACIRKLLVTLNTIVRQGVPWRTTAN

SEQ ID NO: 169488 - protein, 418 aa, unidentified
MLKIVYPICCGIDVHKKFVVATVGTTNKSGVTEYQTKQFPTFTEDLYRLLDWLKSQSCLHVCMESTGKYWHPVFNILENDCDVVIANPKYVKGIRGKKTDKKDSIWLCDLHKHGLVPSSFIPPLLIRQIRDLMRYRFKLINFKSSEKNRIQNSLTVSNIMISSVVSDTFGASSMRIIQHILENPDDTDFDVSSMLHGSMKDKAGTIVKSIHGNLTKPQADKMRVCLDHVDSIEKHLADIESIVLELVQPYLPQLQLILSLPSIKDIFTAIAILGEIGIDMSEFLSHKRLGSWAGLTPQNNESAGKKKSVRISRAGVYIKPLLVQCANAAIKSKKCPYFKIRYDQIKKRRGHKKAIIAIAHKLLTCIYHMLDKNEPFNHDLYHLDSKPKLTYAPQITEEMAIRYLETLGYQIPDMRSNT

SEQ ID NO: 169489 - protein, 338 aa, unidentified
MPLYGGIDLHANNSVVVLLNEQDQRIYHKRLPNDLATIVEQLAPYHADIEGLVVESTYNWYWLVDGLMDAGYRLHLANPAAIQQYSGLKYTDDHSDARWLAHLLRLGVLPEGYIYPKAQRPVRDLLRKRAHLVEQQTANVLSVQNIILRNTGARLSANRIKSVSQAEVDTLLPNADQALAVSSALAVLHCLAEQIKTVETRVRTRIQSTPLYELLQTVDGIGPILAQTILLETGDIGRFPSVGDYASYCRCVDSTKVSNGKRKGQGNVKNGNPYLAWAYAEAAHFARRFNLQVQRYYQRKQAQTNVTVAHKTVAHKLARACYHMMRHQAPFDAAKAFG

SEQ ID NO: 169490 - protein, 344 aa, unidentified
MSNLDTCGIEVSAKELVVSLRRQEDLEPLRNFTNTPEGHLIILRYLRQAGRVVRVCMESTGLYGLDLALALSGQEGIEVMVANPRAVRHFAQAMMKRSKNDQIDAGVLEQFALHMPFKPWQRPSVAVLALHALARRLRELVEMQTAEKNRQHAAGLSQAIPAVVRRDLARSLRAQERAIERLTRQARKLIAQDPQLAERFELLDSVPGIGETSAVQLLGELGVLAPDLEARQWVAYAGLDPRQYTSGTSVHKKPRISKAGNKHLRHALFMPALVAVQHDPHLRAFYQHLLAKGKFKMQALVAVMRKLLHALHAMFKTHQLYDGSKLFRLKPAPAQEVNHVLVAC

SEQ ID NO: 169491 - protein, 358 aa, unidentified
MSQIKQLDFSGHTLFCDIDVHKKNWRVNIRSKEFELEDFSQDANVDIFYRHITRKYPNASFKVCYEAGFSGFSAQRWLAEKGVNCCKVNAADVITTHKDQRRKTDKSDARKLCEHLQSNRSVGVYIPEVAGEHGRSLTRAREKIVRNQARCKNRIWQLLYFSGLSVPKQYETQQYWSKQFVDSLRSISCGSEALQTALLLYIKDYEQTRSLLLEATRAIGNLCKQQEYKSEITLLRSIPGIGLINAAVILFELQDINRFKNFDQLSSYVGFVPDTNQSGESNYDRGITVRHNSYLRSALVESSWQVIRKDTALLLKFKQYCKRMNRNRAIVRIAKHLLSRIKYVLKNKVEYEIGIVGG

SEQ ID NO: 169492 - protein, 312 aa, unidentified
MEKLSYGGIDVSKDCLEVVVLPEGWFFSVSNDTAGWAELVARLRPLAVSAIGLEPSGGYERGIIRALLSAGLSVRRINPNKLRQFARARGVLAKNDRLDARLIAEYVAIMPTRVVQRDDAVERLAEIVTMRRQLCDEHVAVENQAAHLEDAMLRRLSKRRLIRLEADIRLLDKRLAEMVATNAAFAQLYELLTSMPGVGPVLAFTLIALLPELGKMSRKQIAALVGLAPYDFDSGKLRGHRSIYGGRMPIRNVLYMAALSASRHNPALKAFSNRLADANKKSKVIIVAVMRKMITTLNAMLRDNAAWQPQSA

SEQ ID NO: 169493 - protein, 350 aa, unidentified
MRQTTPVHEIVVGVDTHKHTHTAVALDALGARLGTMTAPVDREGYLRIESWARAFGPVRAFGVEGTGSYGAGLSRALREAGHRVLEVDRPDRSARRRRGKDDPLDAEAAARAVLGGQATAEPKAGTGSVEMIRHLKAARDAAVKARTQAMLTLKAIIVSAPAELREQLEGIRGKLALVRHLAKMRPGPIVPTTASAKAALKAIAGRWLALDEEIAAHDRALEALVSASAPDLMAARGVATATAAEMLLLVGDDPGRVRSEGAFAKLCGACPIPASSGRTSRHRLNRGGNRQANAALHRVVVTRMRSHRPTIDYVGRRTGEGKTKAEIMRCLKRYVAREIFGLLRKGSSAA

SEQ ID NO: 169494 - protein, 392 aa, unidentified
MDKDSQRQERETSATSPLLYAGYVGMDVHKNSIAVAVAWDGREKPKFFDTIENTPQAVASMVGRLNDIASPLLFCYEASPCGFALYKTLTAMDAVCQVVVPPRHMRIKTDPRDALRLAGMLRAGELTSVWIPDQEQEAIRDLCRCRADFRAQGQNVRQQLNAFVLRHGHHWPSRKKRWTRKHFEWLEAIRFAFEAQNQVRDEYVAAVRLSDSRVLAVDRKLRDLVAQWSWAPAVYGLMALRGFDHLSSITLLSELGDISRFESPTRLMGYLGLVPSVYSSGEKRRTGGVTQAGNQHARRVLVESAWSYRFPARQTAYLTEKAEEVQASAHAQAVAWKAQQRLCERYQKLLQSGKSQKVVCVAVARELTGFVWDIVCHEMSRCNRVEEQTSPC

SEQ ID NO: 169495 - protein, 377 aa, unidentified
MGTTRQALINDTSVVVMLYMALELSASKWKVALADGQRAASQHTLEAGDVGGLLKLIEKAKKRCGLQGTLKVMSCYEAGRDGFWLHRWLLEQGIHNVVVDSSSIEVNRRARRAKSDGLDAVKLYEMLVRYVGGDKRMWRVVRVPSVQQEDERRVHRELERLKRERTAHVNRMRSLAVLHNVRLQRVGGRGWSERLEQLKGQLPGALWAEIERESVREKLVCEQIVALEQERKEQLQAMLEQGGPLVALLKLRAIGLQTAWVLVRELFGWRHFNNRRELAACVGLNPSPYDSGASQREQGISKAGNRRVRALVVEIGWYWLRYQPHSALSEWFNRRFGAGGKRMRRIGIVALARRLLIALWRYVEHGVVPAGAQLKKA

SEQ ID NO: 169496 - protein, 416 aa, unidentified
MKSEIGNTKSVVNPSWFFAAEFPRLQLGLFRFMRKSSLGQPLTKKLLNWYACFWNKKQTNKELAMKTAPKKMNYKGSKVYIGIDVHKKTYTFSAHCDGTIVKTATVPANPKKFVESLKKWFCGAEIHSVYEAGFSGFKLHKVLESSGIRNIVINPASLEIAAKDKVKTDKRDSKKLSEQLTVGRLRGITIPTEKEELARLITRTRCQVLKGRNRVGHQIKSRLHYFNLIQEEDNRIISNKLLREYEAQNYPLELKRSLQILIDHWRFLNRQLEDLKVDMKVQSYEDPYNEMVYQSIPGVGDISARILSNELGDLSKRFNNQQALFQFVGLTPSEYSSGENQRLGHIDRQGSARVRKVLVECAWRAIKIDGALKECFERIAIRRGKKRAIVAIARKLIGRARACFVSGYEYNLGVVV

SEQ ID NO: 169497 - protein, 297 aa, unidentified
MNYNTVYVGMDVHKETFSLCCYTNEKEQAEYPQKVDAHYSKVLNYLEAMRFHYGDDVMFICGYEAGCLGFMLYHQLTSHNVKCIILAPTTMSKPTGKKKVKTDKRDAALIARCLAHHDYSPVHILTEQDEQVKEYIRMRQDHKLALKKIKQQILAFCLRHNYRYDTTKSHWTQAHLTWLRSLEPEGLYQEILTEYLVTYDQLTDKLERLDQRIEELASKEDYQENVSHLSCFLGVKTQTALSTLVEVSDFKRFASAQQFASYLGLTPGEDSSSGDQNRLGITKAGNSHIRTLLVEAA

SEQ ID NO: 169498 - protein, 404 aa, unidentified
MKGPIVSIDVSKGKSDYQAFKEMNVKYTGSRSIKHNKEGFDEIVNLVREMEKKLETEVCVVYEATGVYHRVLKKVLEDNNIKQFIINPLLSAKTRKNDSLRSPKTDKLDPKSIAKTYYSHSLHNSHKQETIYHELRELSRYYEDILVHIRKDKVAFRAQLDIVFPGYDTLYDDLYGPVALAVIEKYPHPEMLQKKKINTVSKVIQNKTCHRQAVSDTMADKAIEYSKTIYSGCDKDDIEVLILQRFIKKLNEDMAEAERTIGEMIKLAQELPDFNIIKSIPGIGDNLAARIIAELGDMTRFKKKNELVAFAGLDPRISESGQNDGDHMHITKKGNKRLRCLLYLAVTCSIRLKRDDNSIKDFYIKKKQQSNTMCSKAAKTACASKLVRIIYSMCKTGELYQYNK

SEQ ID NO: 169499 - protein, 345 aa, unidentified
MDHFAGLDVSVKETSICIVDDAGKIVREVKVASEPEALLAVLKNLAYHFKRIGLEAGPLSQWLFSALAEAGLPVICVETRHMQAVLKAQINKTDRNDARGIAQMMRAGLYRPVHVKTIRSQKLRMLLTHRKLLQSKAIAIENDLRGTLRNFGLKVGVVGKVKFEARIRELVENLPDLAVLVEPMLIVRRTLREQIVILHRRLLAIVRDDEVCQRLMTTPGVGPVVALSYRATVDVPARFRKSKAVGAVFGLTCAKYQSGEVDRNGRISRCGDEMMRVMLYEAAQSMLRSKKWSWLKAWAMQIARRRGMKKAIVALARRLAVIMHRIWVDGTEFRWTREQATAAAA

SEQ ID NO: 169500 - protein, 367 aa, unidentified
MKKVSTVSTKQSRNISQPTLTIGLDLGDRNSWYCVLDEAGQIQLEQRVRTHAKALQDVFGTMPHSRIALEIGTHSPWISRLLGELGHEVIVANARKVRLIGESRKKDDRLDAQTLARLARIDPELLYPVKHRSAQAQADLMMIRARAGLVRSRTSLVNTARGLAKSYGERLRGCNVRNLDPEKAEGLSPELQRALEPLLATIEELSERILEYNDRIAALAQSRYPQVELLKQIKGVGTLIALTFLLTLEDPHRFRKSRDVGGYLGLQPGRRNSGESEPQLHISKEGDPYLRTLLVQGAQHILGPFGIDCDLRRWGLKLAERGGRSGKKRAIVATARKLAVLLHHLWVSGEVYEPLHNCKRNTLAIAA

SEQ ID NO: 169501 - protein, 388 aa, unidentified
MSQHFRFDASRSHTALDQDSTIIAVIEMSQTKWLVAALVPGVERQPLKKFDANEETLLKLLHRWRREAGQAGRNIKRIVVAYEAGRDGFWLARWLRARDAEVYVIHPTSIAVSREHRRAKTDRLDTELLMRVFLGWLRGEKRHCSMVAIPTIAEEDARRPNRERQNLVTEQTRIINQIKAIFSRFGIRSLRPTKRKLAEGLEDLRTAEGTPLPQNTLSELRRHLARLRFVRDQIRAVEQERQRKLAVASKSADAMVYLIARVLGAGVETADMLVNEIFSRHWRDRKAVARYAGLTGSPDESGSRRRERGLARAGNVRVRSGMIQLAWRFVRFQKHSALAQWFAARTADGRAGTRKTMIVALARKLLIALWRLATRGEVPQGVVLRPAS

SEQ ID NO: 169502 - protein, 478 aa, unidentified
MRACCGRPYGAVTVDIGNYGCVINFPSDGTDRISQARLQTIKSPFFSSGTKEVKPLFPHKTGTKKEVPLSFPWLSPSPSFRKGETKMTKSNLVVSFDLGKYLGQALIYKDGHVIETFPFQNTSYEGLKKLLDKTLAHGSQPVFVFEATNVFWRPLYFHLTCAGYQCYTVSSSQTGASRKTRMRKTQTDKIDCKEILDIYLKGQAHPTKFHPEPLTSLKELTRLYTHLVDTRTNLCYRIREIIYQLFPEWESCFSDIFGKTSLALMEQQLADPIVLARTRKDKLARIIKKVSYGKFTPAKADQLKEKARKSFGISTAQQAFSLNLSLLVKAINFLDSLLVPLEENISDLFSQVPQQLLTVPGVQVVPAASFISELGQPHNFSTDKVVAWFGLDVTWKSSAGKGRGFHLSKSGTPYGRKWLYVAAGEFVRHFPPARAKYLKLFKEHKLHKRALLPICADLAKILFAMYRDGSAFDPTRYH

SEQ ID NO: 169503 - protein, 430 aa, unidentified
MKSNTQNAKIEAITEKTLVLGIDVGSEMHYARAFDYRGIEYSKKPFKFSNTEAGFVTFKEWILDLKERHEKDKVVPGMEPTGHYWFNLGKFLQDNEMKPVLVNPHHVKKSKELDDNNPTKNDRKDPKVIAGLVREGRYMIPYLPDGVYADLRTASNIRFQLQVELTRIQNRISRWFNIYFPEYKTVYGKPDAKSGMLILKAAPLPEDILTLGIDGVNQIWRDAKLRAVGKARAKTLIEAAEHSVGSKEGAVSARMEIRMLLEDYESRNIRLQEVMTLIEGLVKQIPMAEKLLEIKGVGIKTVSGFLAEVGDISRFNTPKELQKLAGLALVESSSGKHKGETTISRRGRKRLRYLLFEVAMSLVAKNPEFRELHNYYTTRRLNPLKKMQSLMAIAAKLIRVFYAMLTKGVDYDPKKMVSDIKRPAVYLQAA

SEQ ID NO: 169504 - protein, 410 aa, unidentified
MNVIYERCCGMDVHKKTIVACVLSGRKKETRTFSTMTASLLSLVDWLKSVDCQCVAMEATGSYWKPIYNLLEMEEMPALVVNAQHIKAVPGRKTDVKDSEWIADLLRHGLLNGSFIPKREQRELKELVRYRRSMVQERARELNRIQKVLEGANIKLSSVVSEIDGKSSRDMLAMLAAGCNDAKAMANQARRQMRKKIPQLEEALHGFMGEHQRLMLDIMLKHIDFLENHVLSLDKEIREKMEPVRDQTFLVDSIPGIGERSAQVIIAEIGTNMDQFPSAAHLASWAGICPGNNESAGKRKSGKTRKGSDILKATLIECAKVAGHLKNTYFSAQYSRIAARRGKNRATVAVAHTILTIVYHMLKANAPYQELGPDFFERRRKTEIVKKSVKRLEAFGDIVTIDQQIRTNTA

SEQ ID NO: 169505 - protein, 343 aa, unidentified
MKLIRVGVDLAKNVFQVHGIDRSETPVWRRKLSRANWLETLLETIEPGCLIGMEACGGAHHWARRLQGHGFKVRLIAPQFVKPYVKSNKNDANDAEAICEAMSRPNMRFVSVKTVEQQDIQAVHRVRFELSNQRKAKANQIRGLVGEYGLVAPKELAQLRVAIPGWLEDAENGLTDRFRRLLNGLWHDMLALDQRMTELDREIAQIAATDPVAKRLQQLCGVGPMIATAMVATVGDVKHFANGRQMAASLGLTPRQNSSGGKERLLGISKRGDAYLRTLLIHGARSALRTAKDKDDRLSRWVTRIAQNRHPNVAAVALANKTARIAWAMMKNATDYQPDRVAK

SEQ ID NO: 169506 - protein, 347 aa, unidentified
MVTLGTDSHKQSHTLVAVDENGRQLGELRVAATSAGHREALGWARQWRERRWAMENCRQLSRGLERDLLVAGEQVLQVSPKLMGTSRRSGRQLGKSDPIDAMAVARVALREPNLPVARLEGKSRELKLLVDHREDLVGERTRIQNRLLWHLHELEPGLQIAGGGLTRRVVLKEVGGRLQAHQGVVSEIAGDLVERLAELTMSVNRLQRRIEVLAGELAPSLVSLPGCAGLTAAKLMAETADVRRFHSSAAFAMHNGTAPIPVWSGNQQRHRLNRGGNRQLNVALHRIAITQIRLGGEAGAYVARRMSLGNSKTEAIRSLRRQLSDEVYRRLRLDRLERLAVPTTAAA

SEQ ID NO: 169507 - protein, 414 aa, unidentified
MDVVVERCAGLDVHRDSVVATVRVPAAGKSRRRREQQTRSFGTTIAQLETLADWLADFGVTLVGMEATGVYWKPVFYVLEQRFECWLLNAQHMHNVPGRKSDVIDSAWCSQLLEHGLVRPSFVPPPEIRRLRDLTRLCVAQVEERTRAIQRLEKVLQDAGIKLSSVASSTYSASARAMLEALLGGVSDPTALAELAKARLRAKIPQLQEALANRFELAHHGVLVAGLLAHIDSLDQTVATLDARIEAATQPHAELVELLCTIPGVNVNTARVLIAECGLDMSVFPSAQHLVSWAGICPGLNASGGRRRSGKTRHGNRWLRKTLTEAARAAARSKNTYLASHYWQIRGRRGDAKAIGATRHDILIAYYHIVRDRVPFRELGPDWLARRHSPEHRTRRLVKQLEALGHTVTLEAAA

SEQ ID NO: 169508 - protein, 349 aa, unidentified
MKIIGCDFHPGYQQIVMWDKATGEMLERALSHERKEEVRAFYAGLQGPVRVGIEASGQSQWFEQLLAELGPEVWIGDAAKIRASCERKQKTDRRDAELLVKLLDEERFPRIWVPTPAERDARQLLLHRHKLVRMRTQLKNQLQALALNQGVQRKRKLWSAAGRKPLEALPLLPWASRRRAELLVLLDQLEASIGELDGAAAEQANTRPAVRRLMTHPGVGPITALAFVLTMGPAQRFRRGKQVASYLGLIPTEHSSGGRGQRLGHISKQGNPFLRGLLVEAAQSAVRHEPEMRRAYQRLAQRKCRALAKVAMARKLAVRLYWMLRREVDYAQLIQGSHAGQLESFRGRV

SEQ ID NO: 169509 - protein, 313 aa, unidentified
MTFSSDYVGVDVSKQHLDLAMAGARVFRVPNNPAGMSRLVARLAGLQRPHLVCEATGSYTRLMAREMARQGIAFSAINPRRVRDLARADGQLAKTDAIDAAVILRFACLMQPEPSPAPDPHTLEMADLVRRRRQMVDMLASEKQRREHPETARVRTSIDAHIDFLSTQIAEMDQAIAAQIRSDGALQHKVELLITIPGIGQTTAAVLVAEMPELGTIGNKQAAALAGVAPFNRDSGETRGQAHIAGGRLSVRCALYMATLSAIRANPPIKAFYQRLREQGKPAKLAIVAAMRKLIITANAVLASNTPWKTNMD

SEQ ID NO: 169510 - protein, 361 aa, unidentified
MNTITIGVDLAKNVISVCEVDAGGRVLRRRDLGRQAFAMWLAQLPAGTVVAMEACSSAHHWARRCLEHGLQPKLMAAQFVKPFRKSRSIKNDRNDAEAIATAARQGNMRFVPIKTVDQQARLSWHRVREGYKTEGLSISNRLRGLLAEFGVVVAKGDAALGLLLADLAAHALPASLIALLGDLNAHWRQVHERIAASERQIGQHAKSDARCRRVQALIGIGPITADAVVATVGSAQEFRNGRQLAAWLGITPTQNSSGGRDRLGNISCRGDAYLRTLLVQGARSSVQRAQAVTREKATPEQIWIQSLSARMLFGKVLVAVANKHARQLWAMLARGEDYDPNAWFKHPMVQRPVSKRSAASI

SEQ ID NO: 169511 - protein, 465 aa, unidentified
MGAGKMNRKQRKELGRRLQSANPGLEVVHPSAAGIDVGNGAHYVAVRPEQDAEPVRRFECFTADLHRMADWLEACEVKTVAMQSTGVYWIPLYEILEQRGFEVYLVNARHTKNLPGRKSDVQESQWLLKLHTHGLLNNSFQPTAEIRVVRTYWRQRGEHVRGASTCIQRIQKVLTQMNVQLANVISDLSGLTGQAIVRAILVGERDPRKLAELSHPRIRAGREQIAKSLEGNWRSELLFVLKQEMEMYDTYQHKIAECDRELEATLKQFGVPERASTEQPKIPNAKKTKRIQRNAPGFNLTSELHRITGVDLSRIDGVNAIVAQTIISEVGLDMTRWKTEAHFASWLGLCPDNRISGDKVLARGTRHVINRAATALRMAATTLIKSQSYLGAQYRRLRTKLGAPKAITAMAHRLARLVFRMLKYGQEYVDKGTQYYEQKHREQQLHLLKKKAATLGFQVVETGVA

SEQ ID NO: 169512 - protein, 494 aa, unidentified
MATRRATTDTQTQPRSAYRRRKARARAKAARAHEAEERRVEGLPVTQAHAAGIDVGSRSHWVCVGAGAGDPAAAVREFPAHTDGLHQLLDYLRQHHVTTVALESTGVYWIPLYELLESNGFEVLLVDPSYTKQVKGRPKTDRLDCQWIYRLHSVGLLAAAFRPDEKTCQLRSYLRQRANLIRYAGQHIQHMEKALEQMNLKLREIISDITGVTGQAILRAILKGTRDPQKLARLRNQKCKATEAEIAQALHGSYRDEHLFALRQAYEAWQFYQKQLDQVEEQIQQQLARMKQDRALPPLKPRPRTSGRKPNQPRFDVRTALYYVVGIDLTEIEGIAELTALTIISEIGPDVSKFATVKHFCSWLGLCPQLKKTGGRVKSSRTRPGVNRAAVAFRLAANSLYASKGALGAFLRRQKGRLGAPQAVTATAHKLARIVYLALKHGLAYVRQNQQEYAAKVREQQIKGVQRRARQLGLEVIEKQPSTSTAAQTAAVPC

SEQ ID NO: 169513 - protein, 357 aa, unidentified
MTAKDQFAAHVGLDWADKKHDVCVQFKNGDRIFHVIEHTPEALYIWLNELHQRVKGRIAIAVELKKGPVVYALQKYPFVTVFPVHALSLARYRQAFWPSGAKDDPQDAELALDLMLRYSHKIKAIEVDNPDIRLLQQLVEQRRLLVEDKRRFVNRLINTLKQYYPQPLEWFSHRDSSLFCELIIRWPSLQQLKRARSDTVRHFMNAKGGPAVAYTEQRVASIASAIPLTTDKTVIEANALMATALASQIKLTGDLIRTYDERIESLFDTLPDAELFKSLPGMGPCMGPRMLAALGDNRDRFNSAEEIQNYAGIAPVTERSGQKFWVHWRWQCAKFVRQTFVEWTAKTVNSSYWARLY

SEQ ID NO: 169514 - protein, 349 aa, unidentified
MRFYTQAHRFYAGVDLHARTLAVCILDQAGAVVFEDNLAADPRAFLQAVAPFRAGLAVACECMFAWYWLADLCTEQAIPFVLGHALYMKAIHGGKAKNDPIDAHKIAVLLRGGMLPQAYVYPRGMRETRDLLRRRTFLVRKRAEALVHLTNTNSQYNLPPFPKKLAYAANRAELSLPDRFTDPSVRKNVELDLALIDTYDEQVGAVELYLTRTAKVDDPQAYARLRSVPGVGPVLALVLLYEIHDIRRFPEVGQFLSYARLVRCTHESAGKKQGTGGNKIGNAHLKWAFSEATCLLLRESEPAKRWLARREKKHGKARALGALAARLGRAVYHLLRKHEAFDSKRFFAS

SEQ ID NO: 169515 - protein, 388 aa, unidentified
MLHDHPSDRPAAIHTQFGAIFVSLELSRSNWLVTSLSPGKGEKMSKHSVTAGDIAGLLTLFAKLKRKAAIRTGQTYPIITIQEAGLDGFWLHRVLQQEGVESHVVDPASIATPRRRRRAKTDRLDGETLLRALLAYQRGEPRVCAMVVAPSPEEEDRRRLCRERRTLIAERIEHVNRIKGLLFAQGISDYVPLRRDRRARLEALRTGDGRVLPSHLKAQIKRELDRLELLLEQIAAVETEQDALLAEARKPAGEEMAADPVTMLLALKGIGANFTAALWSEAFYRQFANRRQLAAYAGLAATPWRSGGIEHEQGVSKAGNPRLRTTMIQLAWLWVRHQDQSALTRWFKVHSERGRKRAIVALARKLLVALWKYVTAGVVIEGAVMKNA

SEQ ID NO: 169516 - protein, 391 aa, unidentified
MRKPKQHKLNDLSRSLTTLDVHHTLIAVIEMSLSSWLVAGIVPGVERQPLKKLDTDENALLKLLDRWRKEAERAGHKIRRIAVAFEAGRDGFWLARWLRAHGIEVHVIHASSVAVSREHRRAKTDRLDTELLKRAFLGWLRGERDHCKMVAIPTITDEDAKRPNRERENLVGEQSRIVNRMKAALARLGIRNFNPKLKKAADRLQGLSTPEGEPIPPNTLSELRRDMQRRRLLMDQIRQIEDARLERLEQAPSNGPHAMVRLLARVVGVGIETADMLVQEMLSRNLRDRRAVARYAGLTGSPDESGKKRREKGLARSGNARVRRGMIQLAWRFLMFQKRSALAQWYRARTENARGTRKTMIVALARKLLISLWRFVRDGVVPEGVVLRPAQ

SEQ ID NO: 169517 - protein, 344 aa, unidentified
MFYAGLDLSRKRLDVHVLDEAGEAVAQRAICPDADGLRSLATTLGLSPVRAAVESMTGARFIHDQLELHGWDVEVADAAKVKGLAPLACKTDKIDAWVLAELCRRDLVPAIWLPSPEVRAERERARFRLHLVRHRSSLKNRIHATLLTFGKPCPVSDLFGHAGRELLARMQIPEPWKGSITASLELIDDIDRRIHDCERALRSLGASHPYVSLLQTAPGIAWVLGYTIASEIGDISRFATARKLVGYTGLCPRVYQSGERDRRGPLAKNGPRYLRWALIEASTHAARHPCYRQRYERTSKRLGKQRGPRVARVEVARSLAEAIWHMLTRNQPFAPAGAFETSVA

SEQ ID NO: 169518 - protein, 345 aa, unidentified
MHITSIGIDLGKTTFHLVALGERNKILLRKKFSRTQLLAYTANLPASLVGLEACAGAHFMGAALRAQGHQVRLIPAQFVKPYRKSNKNDFIDAEAIAEAVTKQNMRFAQLKTQEQLDWQAMHRVRDRLVQRRTALINEIRGFLLERGITFAAQPIHLRKNLLTVIEDAEQNLSPRLRWLLDRLWQEWKQIEIDVEAITDEIERISNEDARCRQLRQIPGFGPLVSTATVAAIGNGAAFRRGRDFAAWVGVVPRQYSTGGKQKLYGISKRGNVYLRRMLIHGARAVLFRVKYDTAGFGQWVQRLAQRAPRNKVVVAIANKLARIAWAVLSSGRDYRHQPLLQPAAA

SEQ ID NO: 169519 - protein, 437 aa, unidentified
MQEATQHDAVDVFVGVDVDVGVDVGKGQHHAVALDRNGKRLYNKALPNDEVKLRALIAELKTHRRLLFVVDQPSTIGALPVAVARAEGVLVAYLPGLAMRRIADLHAGEAKTDARDAAIIAEAARSMPHTLRSLRLADEQLAELTMLRGFDDDLAAQVTQTSNRIRGLLTQIHPALERVLGPRLDHPAVLDLLERYPSPSALAAANEKTLANRLTKLAPRLGKNWAAEIVQVLNEQAVIVPGTQAAAIVMPRLAQQLAALRKQRDEIAAEVERLVLAHPLWPVLTSMPGVGVRTAARRLTEAAPKAFATAAHLAAYVGLAPVTRRSGSSIRGEHPSRRGNKVLNAPCSSPPSLPYETQSHGPIPRARSSRASATTKHSSRSHGDAATSCLPCCATAPFTHPSQPLTLDERHRAPARAVPQHRRAAPRPCAGCDPAPM

SEQ ID NO: 169520 - protein, 342 aa, unidentified
MYTLAFDNHKKYALATALDKNGTYMNSAKLTMKKESFEQYIKGFDGPCQAVIEAGYSWGQVYDILTELGVDVTVAHPLRIKAIASAKIKTDEIDSRTLAELLYANLIPEVYVPSTDIRQQKNILRQRCWLVKLRTMVKNRTHNILNRNHIETPFTDSFGKGGRKFIESVQLPDSEKELLTQDLSLLDYLTKEIKITEKWIGECLKDNPMYKIIMSAPGFGETFSGLTTLEITDIARFKTPGKLFSYAGLVPTTYASGGKVYHGALLPTCNKWLRYAFIEASWSAITKSDYFRSLYLRVKNRKGPNPAIVTVARRLCEVIFYCLKEQRNYYEKPYIYYNQKSA

SEQ ID NO: 169521 - protein, 333 aa, unidentified
MENIALIGIDLGKHSFHVHCQDKSGKALLRKKFTRTKLMQFLATCPSAVGVMEACAGAHFMARRISDIGHKAKRISPQFVRPFVKSNKNDFVDAEAICEAASRPSMRFVQPRTEGQQAMRALHRVRESLIRDKVKTTNQMHGFTEFGISLPIGDSVIKRLSLVLAEHEIPEYLSRLLMKLHAHYLYLVEQITELESELNQSIKVDDTAQRIMTIPGVGPITASLLSSQLGDGKQFSCSRDFAASTGLVPRQYSTGGKSTLLGISKRGDKNLRRLLVQCARSFMMRLEHQQGRLAEWVRGQLSNRHSNVVACALANKLARIAWAITANHNEYQA

SEQ ID NO: 169522 - protein, 354 aa, unidentified
MNTIKYIGIDVHQATSVFAIRDCQGNLLGESILKTEPTTIIDFLKGQRGALRVTFEEGTYASWLYDVIKPYVSKVIVCDPRKNKLDENKTDRIDARKLAELLRLNALSAVYHGEQSSQTLKEYARSYLSLQQDNTRIMNRLKAIYRGRGIGCRGTAIYRRKNRKEWLDKLKDKGAQCRAERLLKQLESFGKLRLEAQRDLVRESRKQKDYKILKGIPGLGLIRIALIMAFVMTPHRFRNKRQFWTYIGFSVVRRGSSEYEITEGELKRKKRKPLPRGLNHNYNHVLKDVFKGAALTAAYRGQFKKLFERRVANGAAENLALLTMARKIASITLAIWKKGERFDITRHQLSEQKT

SEQ ID NO: 169523 - protein, 393 aa, unidentified
MPRKRILVKSIDTSISYQVIGIDLAKHLVSACLITGAGEIFGIDRLTYDDLLKSAERMSPTLFCMELCPEVHYLAEKLQGYGHHTKVIDGAAVKEYIKTHFGGQKTDLNDAQAIAFLSLDTNLPEITPKNTSNSVLSSIQAVREQFRKEYIQSFVSLKGICQRWGLPISKGVMNKNKVEELVSESKKIPQEVKDWLLELLQSCRELQKRLNKISKYLKEYADNDEICQKIMSVPGIGPITATRLKATIGDIQRFEKPKSIVAYYGLVPKSKATGHNEKKGGITRRGDRVARSLLIEGAGVVLNLAAKGFLRSKPLNKWIEKKRKLKMPWGKLCCALAAKMLRIVRAILIQGTSFNAKIAGVARCSLPKESRNNVMGNNKLSEIPSPNGSVYIH

SEQ ID NO: 169524 - protein, 338 aa, unidentified
MTCYSGIDLHSNNSVVVVSDETDRVLYQRRLPNELSGIAAALEPYHSELAGVVVESTYNWYWLVDGLRAAGYRVYLANPAAMKQYEGIKHRGDESDAQYLAHLLRLGILPTGYICPPQERAVRDLARKRLQLVRTRNAQVVSVESNLARQTGGRLSSNAVKRMTVADAHTLGLPEDVTAALAANVAVIQALNIEIAKLEARLRARVRLRRPYRVLITVPGIGEVLATLIMLETGAIERFAAVGNFASYARCVDSVHRSNHKKKGAGNVKNGNKYLAWAFIEAANFARRYCPQAERFYERKKAATNGIVATKALAHKLARACYHMLKEGQPFDVTRCFA

SEQ ID NO: 169525 - protein, 354 aa, unidentified
MTRATKYVALDVHQATTVASIRAETGQVIARTIVPTEARAVSELFRGMRGTVHVAFEEGTQAQWLHDLLVPLVHRVVVCDRHGEKRCGNKGDRVDADQLSARLWRGELRAVYHGSAHRATLQELTRAYRTLVEDTTRVMLRLKALFRARAIPTRGTKVYQPAHRVSWLAQLEERGVRFRAESLYAELDVLTMLRPKAKAAMLAEARRDPAWAVLRRIPFLGPVRVALLLATLQTPWRFRTKRNLWAYAGFAVVTHSSADHEMQHGRPVRRRRAPRTRGLNRNHNRVVKDVFKGAATAATARPGPLQDFYQGMVARGMREELARVTLTRKLAALTLRLWKKGATYDPTQLTQQAH

SEQ ID NO: 169526 - protein, 364 aa, unidentified
MPMLEGKVDHVIGVDTHRDTHAAAILDRNGGLVAHLEVPSSQAGCEALLRFVAERAPGRRCWALEGTGCYGAGLASFLLAHGEWVTEIDRPKRPRGRNGAKSDPLDAIRAGREALSREHLACPRQRGQREALRVLQLARSGAVKVAADARRQLKALVVTAPEPLRAGLRTGTALQQARVCAALGASAADPVEHRATVRALRVTAARMLTAYREARQLEQELRALVTAVAPALLAQPGVGPITAAQLLISWSHPGRLRSEAAFAMLAGVAPIEASSGRVVRHRLNRGGDRQLNRALHTIVMIRETWHEPTRRYVARRIAEGKSEREIRRCLKRTVARGLFRLLTRTVLPATGPGGLGAWRPAPPR

SEQ ID NO: 169527 - protein, 348 aa, unidentified
MNILAMDLGKSKTVVCLYNSENGEHRFGKVVTRPKEIHDLIVEESPDRIVFEICSSAGWIYDIAKSLNFDVQVANPSTEGWRWKNVKRKNDREDALKLAKLSAMNQLPTVHMPKPEVRQKRSFIQYRQRLVKRVVQIKNSIRSILDKEGYSMSSGKAGWTKGSVEQLEEMALPLVECDFNNLWRGQLYVELEMLEAAGKCLSEVTSNLDTQGKTDEQIQRLQTIPGVGARLSEAIVAFIDEPERFNSSKQVGNYAGLTPKQYQSGSMDRQGRISGQGNKLLRALLVEVSWLGLRHNSWMRETYNRILRGSPSRKKIAITAVARKLLVRCWAMLRDKQPWRNEVSSEAA

SEQ ID NO: 169528 - protein, 321 aa, unidentified
MQKDLLYCAIDVSKDKLDVDGAALALPAQLGNDHGSFRQLIKAAKKYPGPVQFVFEATGPYHLGLALALWEAQIPLSVLNPARVRYYAKAQGKAKTDPLDKQVIGDFARSFRPPPTPAPDPVRRELTELLQRRDGLISTRAAEQNRLGQCRHKIIKGQIRRLMAQLAEQIGQIDGLMKKLVNSSQELKAKVKALCQVKGVGHLTAVTLLITLPELGTLGRNRIVRLVGLAPLNDDSGTQKNKRYIQGGRARPRCALYMPALSASRHNPVLKEVYERLLKAGKLKKVALTALMRKLLICLNALLRKLADQHPSPQGLCLAKP

SEQ ID NO: 169529 - protein, 340 aa, unidentified
MTVIIGIDPHKSTHTAVAICGDEAELASITLRATCQQTDRLLKWAEPLGPRTWAIESAGGLGYLLSQQLVDAGEHVVDVPATLASRVRVLGSGRSNKNDANDALSVAIAALRAPGLQTVRAAEHNEVLRLLAKRNHDIGRLRNKVVNRLHAQLAALAPGGISKELNASDADGLLENFDPSSAAEQIRYDLALELLEDVRRLDRQLKESHKRIKVAVQASKTSLTDLYGVGPILACAIIGYTGDVRRFTNRDKFAAYNGTAPIELSSGGRIVHRLSRRGNRQLNHAIHMVAICQIRQTNSEGRAYFERKVAEGKTKREAIRSLKRQISNTVYRHLVLDAQR

SEQ ID NO: 169530 - protein, 413 aa, unidentified
MLFIGDDWAEGHHDIEVEDDVGRRLARIRLPEGVEGLARLHEVVAEHFDSDSTGSSDLPEGAVVVGIETDRGVWVSALLACGYQVYAINPMSAARYRERHGTSGAKSDAGDAHVLAEIVRLDRGHHRQIAGDSPQVEALKLLARAHQGLIWDRTRHLQRMRSALREYFPAALTAFDNLAAPDTLALLRKAPDPDRAARLTTGQITAELARAHRRGDRTATATRIRDALRAPALRQPAAIEHAYAVVVAGQARMLEHLAEQIEELEQEVKRSFRRHPAAEIVRSCPGLGDVLGARVLAEFGDDPHRYRNAKARKNYAGTSPITRASGKRKTVSARYARNKHLADACHQWAFCSMNTSPGARAYYDALRAREVGHHAALRQLGNRLVGILHGCLKTGTIYDESTAWPQVPTQAAA

SEQ ID NO: 169531 - protein, 418 aa, unidentified
MFKVQLNNCCGLDVHKTWIFACIGITDSSRRTTYYEARFTAFSKGLRELAQWLDKYQCVDVCMESAGKYWIPVFNILEKSCHVVLAHPKYTKPQKGNKTDRKDARWICDLFMCGMIRPSFIPPACIRQLRDLVRYRAKLGNMLTGEKNRAQNCLTVSNLKLDDVFTDVFGKSARSITEFILAHPGETFDVSPFVDRHCKTPIPEIQAAVDGAVCHEQAVKLRLCLDHIDEIQLHRATVEDEIRRIVSPFAASLDLIRTVPGFNGNPMTAITVIAEIGADMSVFPTAKNLVSWAGCCPRNDQSGGHIKSTRISKAGACLKPLLVQIANAVIKSKDHPEFGERYRRIKARRGHKKAIIAVCRMLLTAIWNVLAKAVPYSPDGFRCVPQSPFVPKHLTKAQGLALLRQMGYVISEPAPLPV

SEQ ID NO: 169532 - protein, 342 aa, unidentified
MAQAITVLGIDLAKLVFHVVGMDDAGHVILRKRLTRSALLSFIANLPPLRIGMEACGSAHYWARQFREHGHDVRLIAPQFIKADVKSPKNDARDAEAICEAVTRPTMRFVPIKRVEQQDLQALHRIRERLIKARTALVNEIRGLLSEYGIILPQRLTKFRALIVEKLEADQAKLTALSTEVFRHLYEEFLALEKRLAYYHEKLTAIGQAHPECQRLQTIPGIGPVSATALIAAIGDVTQFKNGRQLAAWLGLVPREHSTGGKPRRLGISKRGERSLRKLLVHGARATLRWVDTKSDDRSRWLKALIARRGKNRATVALANKNARIAWALLAHNQEYRVRTVV

SEQ ID NO: 169533 - protein, 412 aa, unidentified
MDVIVERCAGLDVHRDSVVATVRVPGKGKSRRRRARHTRTFGTTIAQLEQLGDWLEGFGVSLVGMEATGVYWKPVFSVLERRFECWLINAEHLHNVPGRKSDVIDSRWLCELLELGLVRPSFVPPPEIRRLRDLTRLRSTQAEERTRAIQRLEKVLQDAGIKLSSVASKTYSVSARAMLEALLGGVSDPACLAELAKGRLRAKIPQLTEALANRFDTTHHGVLVAGLLAHIDALDQAVATLDARIAAATDTELIELLSTIPGVKRHIAEVLIAECGLDMSVFGSAQRLVSWAGICPGTNQSGHRRRSGKTRHGNRWLRTALTQAAHAAARSKNTYLASHYWQIRGRRGDAKAIGATRHDILIAYYHIVSDRVPFRELGPDWLARRHSPEHRTRRLVKQLQALGHTVTLEAAA

SEQ ID NO: 169534 - protein, 346 aa, unidentified
MRYYTGRHKFSCGVDLHARTMFLCVLDERGYPLLEKNIKTDPELFLKAIGPYREDLVVAVECMFTWYWLADLCSRENIPFVLGHALYMKAIHGGKAKNDRIDANKIAALLRGGLFPVAYVYPPKMRSTRDLLRRRMFLSRKRAALITHVKCTFAQYNLPEPEQKISRVANRHGIAELIPDPGASRNVQLDLDVLDFYDQTLTKLEQELTVIAKDHDPDAYFRIRTVPGIGKILSLVILYEIHDISRFPSVQDFASYCRLVKPAKESGGKRIGFGGAKIGNVHLKWAFSEAAVLFLRKNEAAKLYRARLAKRHGKAKSLTILAHKIARAVYYILKRRTVFQPETFFA

SEQ ID NO: 169535 - protein, 350 aa, unidentified
MNEQKKRDKVTIGLDLGERRHRFCVLGREGEIVEEGSLLNERVALSALISRYPAALVVMEAGCHSPWISRYLEEGGWEAIVSNPRKVRAIYQHERKSDRRDALMLARIARMEPALLYPVKHGSQEAQQDLLRIKLRDSLVRARVGVINSIRSTIKSLGYSVPRCSSERFHKVIKAALPVELSEVIAPSVQVLEELSLRIRVLEREISALARTKYPATARLEQIAGVGPITALYFVLKIEDPRRFAKVRDVGAFLGLCPRRNQSGENDPQLRITKRGDPYLRRLLVSAAQYILGPFAPASALRQYGLTLAAEEGTARAKKRAVVAVARKLAVLLLSLWKNERSYVPFPQFS

SEQ ID NO: 169536 - protein, 338 aa, unidentified
MKRYLGVDLHRNCFTVYTRQEDGSGESREWSIRSLKAFAKTVTANDAVAVEATGNVRLFCEALKGCGCRIVVVNPHQFEVISRSVKKTDEHDAKVLAEFLAKDMLPEVRMKDEAHARVASLAQTRDKLVKLRTTLKNKVNNLLAARGILIRKESLASEKGLAGVLATPVSELEHLELEILVGEIRHLNESIKKLEGLLHGQGPKLPGWENLTSIKGIGDTRASILLSTIGKIEDFADEGKLAAYFGIVPRVSNSNETEHSGRITKRGCKLGRTTLVQCALIAARYSPYLQAYYRRIAAHRGTGKAIIALARKFLGIIYKTLKNNWVFEDFPNFVLAKT

SEQ ID NO: 169537 - protein, 345 aa, unidentified
MSEFYEGQQFVGMDLHRRRSVLVRMTETGEHLETVRIVNDRDQLADVMSRAGESPEVVLEATYGWYWAADALAEFGATVHLAHPLGVKAFSYRRVKNDQRDASDLADLLRMGRLPHAWIAPPETRELRELVRHRAKLVAMRSQCKAHVHAVLAKGGIWVPMTDLFGVEGNLLLDRVTMPAPYKARIASLRRLIEALDFEIGLFTNLVRGRLAHDPGYTAIQQIPGIGPVLAAVFVAEIGDVHRFPGPAQLTCWAGLTPSHRESDTTVHRGRITKQGSRLVRWAAIESVKILPDTSRIGAIREQVAHRRGNRNIGAVAAARRQLELVFYGLRDHHVRALHRSPRAA

SEQ ID NO: 169538 - protein, 320 aa, unidentified
MAKQVAERTIGVDVAKRWLDIHTAGQEGCERIDNTAGAIHAWLRSLEPSARVAVEATNRYHEAFTEQAHAMGHRVYVVDAFRLSRYRDAVGRRAKTDRGDAELLARYLQQEYPHLSRWQPRDPRQTRLWRLLRRRATLVQTTVRLRQSLVDLGNLDAAVKDLIAHCQQLARRIDRELLEQSRRLGWQPDLERSRRVPGLGPLTSLALVATFHRHNFRSADAFVAFIGIDVRVRDSGRYRGRRKLTKKGDPEIRRLLYNAAMAGCRDPHWRDYYQSLRDRGLSGTAALMILARKIVRVCFALITKKVDFNPDRRNTPCHAT

SEQ ID NO: 169539 - protein, 338 aa, unidentified
MPAGIAAEVLGLIARIKARVTRRLGTTPRVACCYEAGRDGFWLHRVLEAEGIASHVMDPTSLQVDRRARRAKTDRLDAQALLRALMAWSRGERQVCSMVRPPSPEHEDERRLSRERGTLLKERLRLSNRIKGLCAAQGIYDYEPLGADRRERLARLVTGDGRALPGRLAAEIGRQLDCLELVLRHLAEVEAVRDARAEQARKEGGSKLATLLRLKGIGPEVATVLELEVFRRHFANRRDVAAYAGLAPSPYASGGMSREQGISKAGNRRARKALIELAWLWLRHQPESALARWYRDRVGTATGRVKRIAIVALARKLLVAIWRYVETGLVPAEAAVRT

SEQ ID NO: 169540 - protein, 363 aa, unidentified
MHYVNNTELSSHEETRCQFNGGRCAIKLGIDVHQDFYVVVEQVGGSNSKPPQRFAKAAFLHWAAKLKSEAREVYAVYEACGFGFSLHRKLSALSIKCYVVCPQKLDEQNRRVKTDGLDAKALCLKLDRFVQGNHDALAIVRVPSEEEEQARAIHRQREQLVKARKQLEAQGRSLMVNHGLEPVQNWWKPRTFAALPVPQWMKELLANSQPILVALQQKIAALTVQLQSAASPEQPCGLGKMTSVIIDREIGDWNRFSNRRQIASYTGLCPGEYSSGNTRLQSCVTKHGNPRLRAALVELAWRLVRFQPNYHPVRKWRQILAKGALATGAARKKAIVAVARQLAVDLWRIKTGRLSAEELGLIN

SEQ ID NO: 169541 - protein, 373 aa, unidentified
MPKLGCQKTSLGEPSLKEVSTIGLDIAKNVFQVHGADCAGAVVIRRALRRSQMLAWFAKLPRCLVGIEACGTAHYWARELRQLGHEVRLIPPAYAKAYVRRNKNDPADAEAICEAVSRPAMRFVAIKTEQQQALAAIHRVRDLLIKQRTMLKNQLRGLLAEFGIVAAQGRRGLIELLAILSDGEDRRIPSLLREGLKAVMETLHGIERKLEGVDRQIVTTGREDATCRHLITAPGYGPILSSAMAALVSDPGAFKRGSDFAASLGLVPRQDGTGGKVRLGPISKRGNGYLRRLLVNSLPSGLTRWGATSLIKAQHARRDPWVARLLAVKPRKVVAVAPVHARGRLGQQAGAHRLGADETPGGLPRPAGDGVSC

SEQ ID NO: 169542 - protein, 355 aa, unidentified
MNSEKYIGLDVHQATIVVAVTDSSGKLIMESILETEAATILQFFAGLRGTLAVTFEEGTWSAWLYDLLDPHVDKLVVCNPRKNALLKDGNKSDRIDARKLAELLRGNQLKPVYHGETGVRMLRELSRSYLTIVKDLSRVMNRLKAVYRSWAIPCAGRDVYYRRHRAQWLDKIREVGVRRRAERLYEQLDMLQKLRQQARRELLAEARKHAITAKLRQVPYLGPIRSALAVALIQTPHRFRTKRQLWAYSGLALETRISAEYRMVEGQVRRSKKLLCIRGLNKDHNHDLKGLFKGAATMASVRPGPFQDFYQAALAKGIKPTMARLTLARKIAAITLTLWKKGESFDAEKLKSQAA

SEQ ID NO: 169543 - protein, 316 aa, unidentified
MTHGTANRRNLFGIDVSKTALDLAQWGQKAVTRFENNAAGIAALVERLLSATAIAAIVVEASGGFEQTMVTELAAVSLPIVVVNPTRIRNFARAKGQLAKTDAIDARLIAAFAEAIRPEVRPLGTEAQQLIKALVTRRRQLIDMQTAEKNRRATTNPELLPRLQKHLDWLETELAEIEDDLNNWIDQNAQWREKRASLESVPGVGPVTSFTLLAELPELGTLSRQKIAALVGLAPFNRDSGRFRGHRHIFGGRSDVRSILYMAALSGIRYNPVLKAFYDRLIAKGKLPKVALTACMRKLLTILNAIIRDEATWQIA

SEQ ID NO: 169544 - protein, 343 aa, unidentified
MRIASIGIDIGKITFHLVALDEQGGIVARKKFSRQQLLAYTANLSPSLIGMEACGGAHCLARVIGGQGHQVRLIPGQFVKPFRKSNKNDYLDAEAIAEAVTRHNMRFVPIKTEDQLDLQALHRVRERLVHNRTEVINQLRGFLLERGITFARGPMSLRKEMPSLLEDAEQSLTPRLRRLLDHLWHEWQSLDEQVEQLADDIEAIAESDAACRRLRKIPGVGPLVSTATVAAIGNGAAFKRGRDFAAWLGLVPRQHSTGGKAKLLGITKRGNPYVRKLFVHGARAVLLRVKYDTGGFGQWVHSLAARAPRNKVIVAIANKLARIAWVVLSTGNEYQHPPRTAAA

SEQ ID NO: 169545 - protein, 352 aa, unidentified
MIIIGVDYHPEFQQIALLDQDTGELQEKRLSHPGEAEKFYRALAVSQKVRVGMEASGHARWFERLLGELQFELWIGDAAAIQSQRGRKQKTDRQDAEHILKLMLKDDFPRIWVPSGENRDLRQLLWHRHRMVQARTRIMNQLQAVAINEGLRCKKRLWRTGRQQLALLRLAPWASRRRHDLLELLDRLNPTIAELSQAIEQEAAKCAEARRLMTHPGVGALTALAFVLIIGDTERFQCGKQVASYLGLVPLEKSSGNRRRLGHITKQGNSLLRFLLVEAAQVTVRSLPEWRSQYFHLLMRRGRKTAKVAMARRLGVDLYWMWREQRDFQWKSSVRTQDSPEQAMVCSRTPRN

SEQ ID NO: 169546 - protein, 389 aa, unidentified
MKRKTKISTAGVDVHYKFSKVALCDERGQLIRRERLDHVDREALRRRLSQWPAKTTAVMEASFGWGWLSDLMDAVGIDVRLSNCFKVEQMRKARGWVKTNDKDALLLGQLPQEMSDWWEVWRAPWEVRDRREWMRYRGDLVRVQTQTKNRIHAIFHRHGVFHEFSDLFGGGGRLFLGELCREGGGLLTGGSLAALRGQVRLLDHVRRQLADVARRLRKELEQDPLIRRLMGIAGFGLILSHVIVAEIGRIERFRNHRALASYSLLAPRSDDTGEADPRRAPLGRHLGQRGNRTLKWAMIEAAHGAVRRGGKWRAIFDRHTDGGKMNRNRGYIKVARELIKVVFVVWSKNVAYTDTPPSRPGQSKTTRKTRKEKSRSGTGQLQRPMVVAG

SEQ ID NO: 169547 - protein, 391 aa, unidentified
MIYVGIDVAKDKHDCFITNSDGEVLFKSFTIPNNRDGFETLFQKVQSVSDDLTKVKVGLEATGHYSYNLLGFLLDKGLPTYVINPLHTNLYRKSLSLRKTKTDKVDAHTIASMIMSDVNLKSYSDTSYHNEELKSLTRYRFDKVKERAKLKSSVSRLICILFPELEKLVPTLHMASVYALLSEFPGAKQVANAHLTRLTNLLSEASKGRYSKDTAITFRDAARTSIGSNMPAKSLELKHTIKLIKELDSEIDEIENEIKIIMDEINSPILSISGINYRMGAMIIAEIGDFSRFDSPDKILAYAGFSPSTYQSGHLYGAYAHMEKRGSRYLRYALYNATKYVCHWDPTFAAYLAKKRAEGKHYNVAISHAVKKLIRVIYHLEKTNQQYIKAS

SEQ ID NO: 169548 - protein, 324 aa, unidentified
MASKKQEVTFEQVVERGCGLDVHKKEIVATVTGTGIEGETRTFQSTTRSLTELKEWLLSLGVTHVAMESTGVYWKPVMNILEPGGFTILVVNARHIKYVPGHKTDKKDSAWICKLLRAGLLKGSFVPSREQRDLRDLTRYRRKLVQQQSAEHNRMIRIFEDANLKLSSVFSNIRGKTCTRVIDAVIAGETDPEKLAAVCTHWRLKHSQEEIALAVEGCFSEHHKFMIRAIRTSIRNIEAEIDHLDCEIERRMRPLEDRIRQLCEVPGMDTTSVRELLAEIGVDMEVFPTADHLKSWAGLAPGNNESAGKKKAHTPTTATKPPKR

SEQ ID NO: 169549 - protein, 353 aa, unidentified
MSEKPHSAIAVIGIDIGKNSFHVVGLDDRGAIVLRQKWSRSQIEARFANMPPCLIGLEACVGAHHLSRKLQGFGHDARLMPAKYVRPYSKGQKNDFRDAEAIAEAVQRPTMKFVATKTADQLDLQALHRVRERLVSQRTGIINQIRAFLLERGIAVRQGQRFLRAGLPGILAAPSNALSPRMVRMIEGLTGDWRRLDERIEGLSGEIEAIARQDAGCERLMSVPGVGPIISSAMVAAIGAGDAFSKGRDFAAWLGLVPRQMSTGDRTILGKISKRGNRYLRVLFVQAAWVVLIKPKSWERYGLKPWLEAAKKRLHHNVLAIALANKLARIAWSVLAHGRSFEVSKIEVDAQPA

SEQ ID NO: 169550 - protein, 397 aa, unidentified
MYIVGIDIAKRKHEAAVIDGEGAVIIKPFSFTNNCSGYNRLLAMLTKAKLPLDEVSFAMEATGHYWLALFTRLQKEGFRVQVINPVQTNSIRSFYIRQAKTDPRDALLIAEVIRFGHFSESTLHPENIYELRELCRGRHAIVSMQADVKRKVVALLDQVFPEYETAFTNMFSDTSMAILQNCPTPKELSEMPLEELCHLIEVSSHKRFRMAKAQELQELARNSFGFAMAGDVFSTMIRLYAKHLVFLKQQVQEMDRKIAEIMDTLDTPITTITGIGPTLGAYILSEIGDISRFSSAAKLAAYAGIDPTMRQSGEYNGVRNRMSKRGSPYLRHAIWLATSSAVLHDPALKLYFQKKRDEGKPYMASVGHACRKMVSIIYAVMRDNKAYTPYIPNEISA

SEQ ID NO: 169551 - protein, 342 aa, unidentified
MKHYAGLDVSLKETSICIVDETGAICREMKVPSHPEDLVRALQDPAWRLARIGLEAGPLSQWLFSGLAQAGLPVVCIETRHTKAFLKAQVNKTDRNDARGIAQMMRVNLFRPVHIKTLTSQHRRALLTARKLLQEKAVAIENDIRGLLRNFGLKVGMTGAVGFDVRIRELVDGRPELADITASLLAARRMLREELSRLHRKVLEITRDDGVCRRLMTIPGVGPVVALAFTSTIDVPARFRKSKAVGPVLGLTPVLKESGESKRVGQISLCGDGMMRGLLYEAAQVLLTRVKKWSWLKAWATNVAKRRGIRKAIVAHAPDLERWNGVPLDERSSHAAVHLIAR

SEQ ID NO: 169552 - protein, 363 aa, unidentified
MNCVIENTELSSHEGTRSQFNGSTGAIKLGIDVHQDYYVVVKQEGGTNPKPAQRFRKEAFLLWVAKLRSQGSDVHAVYEACGFGFGLQRQLSALGITCQVVCPQKLDERNKRVKTDGLDAKALCLKLDRFVQGNRDALALVRVPTEEEEQKRAIHRQREQLVKARKQLEAQGRSLMVNHGFEPTTSWWKPRTFVLLQVPAWMKELLSNSQPILVALHEKIRTLTQRLQAAAEAGQARGIGALSSVVIDREVGNWNRFTNRRQVGSYTGLCPGEYSSGNTRLQSCVTKHGNPRLRAALVETAWRLVRFQPHYKPVAKWRQILAKGALATKAARKKAIVAVARELAVDLWRIRTGRVQVEALGLF

SEQ ID NO: 169553 - protein, 319 aa, unidentified
MGKIIGIDISKQVFDVSFLEGNLWKHKVLSNKLLGFEKLITFIEKEDIVVMEASGTYYLPLAEYLYSQGINVVIENPLSIKRYAQSRLKRAKTDKADSKVIAEYGKKNLDELSLWNPESKTCIRIRQMHTRIQMIQKQTSQNYNQLEAFRSSGFLDEKLEIEMNNSIEQLRLGKEILESEIERLALEEFEQTIECLTSIPGIGIKTAIMLIVITDNFKKFEHHKQLIAFVGFSPRIYESGSSVRGRSSICKMGKSQIRKLLYLCSWSAKRWNKKCKEMYERLITKGKAERVAKVALANKLLKQAFAIGKNKEKYREDFC

SEQ ID NO: 169554 - protein, 409 aa, unidentified
MERIIERGCGLDVHKKSIAACVRIPGANGQRTQEVRTFGTTATELLALRDWLQGHGVTHVAMESTGVYWKPVFYVLEEVLTCVLVNPVHMRQVPGRKTDVQDCAWIAQLLEHGLLRGSFVPPVPMRELRDLTRYRKTIVQERSRAINRLHKVLEDADIKLASVATDVLGVSGRAMLDALVGGTTDPDTLADLARGALRKKLAALRQALSGRFRAHHAFLLSQILAHIDYVEEAIEAISQQVGLLLAPFTEDLERVSTIPGVKQRTAEVVIAEIGVDMSVFPSAGHLASWAALCPGNNESAGKHRSGKTRRGNPWLRTALTEAALGAIRHGRGALAARYRRIMRHRGHKKAVIAVAHAMLVAIYHMLTRHTPYQDLGDDYYDRRHAERAKHRALQTLERQGYRVSLEPAV

SEQ ID NO: 169555 - protein, 414 aa, unidentified
MGGFPVFSLLQFQGGVALSSLYIGIDVSKDFSTAQAIDGKGNKCFYLELAMTADGFDKLLKAITTHGEDIDRVTVAMESTGCYHINLFSFLTHKGIRCIIINPLLTANFARLSLRKNKTDKKDALTIAQFLLAHKDSFLKTDLSPDRQDLKDLAREHESLTNLIAGMKNDIRRMLQIAFPELESLGNLFSETILDLLRQFPSARLIKIAKPNTIAKALLHEDKRKKTSVSAEDIIKAAKASVASHGAAKEIILPEKISTLQHLIEKKVGMKKALVEACEDMMVEDIEIITSIGGISNITASRLLAEIGDYRTFSTYKHLIAFAGLDPSVHQSGKFEGISRISKRGNRHLRYIIYLMTTCVVRGENIFRTYYQKRRAEGQPFKKAIMATAHKLIRVLFTMLSKRTTYKSKEVNAI

SEQ ID NO: 169556 - protein, 428 aa, unidentified
MNCTQNEKLNQVTSHTLIVGVDIAKFKHVARAQDDRGKILGKALTFTNTKEGFDAFFAWLEEMQHKHEKADVLVGMEPTGHYWLNLAYTLKERLVSFRVVNPLHVKRSKELDDNSPTKNDIKDARVIAQLIKDGRFSYPRLPMDQDAEVKAGITIRNQIVGDLQALRGRIHNWLDKYFPEFLTVFKDWGGKMALATLEHIPLPGQLNQTTPERVAEIWSTYGGVQRPSHKRIQRLQEAAARSVGLTVGLQMAQREIATNIKRYKMLKEELHALEKQLEDLVLTLPGIAEMLTVPGVGMVTVIELYSELGDIKNFENPRQILKYAGLNLRESSSGKHKGQTRITKRGRSKLRALLFRTVMPLVRHNRAFKALHQYYTTRQENPLRKKQSLIVLCGKLVRVLHTVGQKQCPFDEERMIRDIPHLSLALGA

SEQ ID NO: 169557 - protein, 427 aa, unidentified
MKKRIKIDHLSTLCVGLDIGSRNNYITALDFDSNRLINMKPVPNAASGVEQMESMILAVLEANAQFKYLLIAMESTSFYGVHVANYLSTSDRLKPYDVKVFCLNPKEVANYKKSFTGLGKNDGLDSFIVADYVRVGRVDIDPWRGAQYLALQRLTRQRRHVTEAITREKNYVLNNIFLKFSEFALLGGEESPLTNKFSATAEAILTEYKTTEDIANASLEDLVAFVSSSGRGRFSDPEQVAKLLQKAARDSYRLDKSLYEPITTSIACSFNCIRAFEHEQKVLNKAIAETVVGLNPVEYQILKSIPGIGPVYAAGILAEMGSIRCFPSNDSLAKYSGIVWRDNQSGEFDSDDTPMIKAGNRYLRYYLIEAAGSVATYCPEYTAFYEKKFAEVSKHQHKRALALTARKLIRLIFGLLGKNQLYSAAKG

SEQ ID NO: 169558 - protein, 371 aa, unidentified
MKQNTVSEAVCDNGQGQASGERRSKGVLRLGLDVHYRQVTVAMQEEAGAIKAVGRMGHDGFGNWVEKKLKAGWELYSCYEAGASGYWLHRELVKLGVKNLVVAPKAMGQDKRQKTDRRDSAELADQLDRYLRGNRKALSPVAIPTTEQEEKRALIRYHRQIMADRTRYEARGKGLLCAQGIEVQGRWWQPEAWKELKTHGRFQAWMQTQLQGWRRKLLSAEQEQQKLRKQIEALAPALLPKGVGAYSAVALEYELKGLARFKTARALSSYTGLCPGIHSSDRRGKEGSINRCGNAAVRWNLVEMVWRLLKWQPDYQVVRQLGTGLVRSRRARKRLVVKAARQLAIDLWRLETGRVTAQELGLVMQPSLKAK

SEQ ID NO: 169559 - protein, 460 aa, unidentified
MNSKRSKSRNSSKMPMVHPNAAAIDVGATMHMAAVRADRAPDPVRSFGTFTADLHRLVYWFTECGVETVVMESTSVYWIPIFELLDARGFTVFLVNARDAKHVPGRKTDVSDAQWLQRLHSFGLLRASFRPKGQIAELRAYVRQRERLLEYAASHIQHMQKALTEMNLQLHHVVADITGATGLRIIRAILAGERDPEALACLRHYSCHSSAETIAKALTGSYRAEHLFALEQALALYDAYHEKASACDVRIEAVLKELSIRRGHGYGSAPRASRRRNRTDQANALAFDVREALFALLGKDITTIDGLGPYLSLKLIAECGDDLSSWPSAKHFTSWLGLAPSNKVSGGKMLSSRTRRSGGRAAALLRLAAVTVGRTDTALGAFYRRLSARIGKAKAVTATARKIAVLFYNAVRYGMDYVDPGASSYETRYRTRVVNNLHRRAKAFGFVLQPLEPKVGAAVS

SEQ ID NO: 169560 - protein, 340 aa, unidentified
MEKRYIGIDLHRNRFTCCLRLENGRTYVTQWGLEQLARFVEKLRPTDEVAVEITSNTRLFYDAVAPHVARVVVVDTNQFRVISRSVKKTDPNDARLLALYLSKGLLPEVRMKDKELAQLASLTQTRDTLVKQRSALKNKVNNILSARGLNLAKEALSSEKKLQEVLELPFDAVVRIELRVIVAQIRSLNQSIAELEKTIGEEGSKREGHQSLSSIKGIGNITGAILLSVIGDVNDFPDEGRLASYFGIVPRVSNSNETERSGRIHKRGTKLGRTALVQSALIAANYSSYLKRFYEQVKARRGAGKAIIALARKFLGIIYRTLKNKWVFEDFPNFVLAEAP

SEQ ID NO: 169561 - protein, 363 aa, unidentified
MKIIGCDFHPSFQQIAMVDLETGEETQLRLSHSNGEAKRFYESLSQPVLVGVESSGNMRWLQRLLAGLGVELLIGDATAIQASNRRQQQTDKRDAQHILKLLLEKRFPAIWVPSMEELDLRQLLKHRHTLVQMRTRVKNQLQHIAMNEGFQKKRKLWTEEGMEFLRHLELGPWTKRRRDDLLEMLAELNRHIRELSRAAEDQAEKQPKVWLLMSHPGVGPILALATVLTLGKIQRFQSGKQVASYVGLIPREASSGMRRWLGAISKQGNSFMRFLLVQAGIVAARKDAELGRFYKRLAHKKHHGVAKVAVARKLLVRLYWMLRTNTPYPEVVVRMQGSSSHPVARKAQAEVLSGRPASRGKKQ

SEQ ID NO: 169562 - protein, 353 aa, unidentified
MIVIGVDPHKSTHTATAVDPATNSDIGSLRIEASLAEYRRLIVWAKAWPERTWAIENADGLGHHLALWLLALGEVVLDIPTTATARVRELSRGGRRKNDRIDAAAAASVAALQGDARQVHPETTSDSLALLDERRVNLSHSRTRTVNQLHALFRELMAGGAPTSLTSTSATAALRGFRPRTGPDRIRVELAKELIADVRRFDEQLKANATKIAVLLDEHGTRLREIDGVGPVLAARLLGRTGSPGRFASAAAYANYTGTAPVQIASADSSQHRLSRYGDRQLNSAIYTIAMIQIRMPASAGRVYYDKKIAEGKSPRYATRALKRHLASHLWRIMLTDENRTTRTPSEVVAHAS

SEQ ID NO: 169563 - protein, 344 aa, unidentified
MKKITTIVIDLAKQVFQVAVYNKHGVLKSNKAMNVKSMMRLVHQHPEAQIITEACGSAHHFARRFIQLGHDAYLIPPHICAKYRTGNKNDKNDTIAIYEAAKNQRTYFVSVRNLIQQDIALLHKLRKGHVDQRTKVANRIRGFAMEYGVSFPLGINKLRQQLPDALENADNELTDIARSSLRALLDMLLQFDVLEAKVKLQIEQLGKQLKPCKALVKIPGIGWLGATMIYARFGSGEAFKRGRDASASIGIVPSHSGSGGKNRLGSISKRGDTYLRWLIIHGARSVVNNIRDKQDGMSCWIRKQLITKHSNITTVAVANKLIRMAVAILKSGEAYRTPVAQRVS

SEQ ID NO: 169564 - protein, 340 aa, unidentified
MNITTIGLDLAKNVFQVHCVDGVGNVVLKKKLRRAEMLTFFSGLPPCQVGIEACATAHHWAREIATLGHDVRLMPPSYVKAYVRRQKNDAADAEAICEAASRPTMRFVPVKSAEQQSVLVLHRSRELLVRQRTMLINAIRGHCAEFGIIVAQGARRACELVEKIRQGEASELPDLARSALLVLANQLDALAAEIYALERQLQVWHRKDQASQRLATIPGVGIITATALAASIPDPSMFRSGREFAAFLGLVPRQNSSGGKERLGRISKMGNGYLRKLLVVGATSVIRRARTSTSASATWINALLERRPARVVNVAMANKNARIAWAVLARGEVYRPHVPA

SEQ ID NO: 169565 - protein, 363 aa, unidentified
MPVRPVARIESTHVREDGAMVTIGIDTHKATLAVSAIDEAGRERAAETFPNDREGHARLLHWARIHGPERRFGIEGSGSYGAALARRLVASGEQVVEVPAVLTDRERRHLRRAGKSDPGDALAIARVALRERSLGPAPMPGITEDLKLLVDAREHCLAERTRVANQLHAHLVVLTPGYKDEIKNLSAARYLAAVTRLLRRVGSVRAELARADLVRLRALDVESDALEGRIRALVQLSGSSLPTIRGVAALTAAKLLGETGDPRRIRSAPAFALMSGTAPIPASSGQTSRHRLNRGGNRQLNRALYTIALTQARTDPRAKTYMARRIAEGKSWLDALRCLKRHLADVIWRTMLADAQRPAEFGA

SEQ ID NO: 169566 - protein, 350 aa, unidentified
MPMLAEVVDAVVGGDTHRDVHFLEMVTPAGVTVATTTISNSDDGFADALAWIVDHALGPRVVIALEGTRGYGIGLTRALQAAGLQVIESEPPQRGARRRGKSDPIDAHLAAIGALGLDTTRLPIPRTDGDREALRILLSARQELTTTRTRQINRLRALLLTGDDTDRTLARTALTTQTLTTLAQRRARRGEAREHAIRRSELRRLARSIHSLGQELTDNKRELSELVTALAPTLLETTGVGPISAAQAIVSWSHPGRCRNDAAYAALAGASPIPASSGRTVRHRLNRGGDRALNNALHAIMLTRWRICPRTKHYITKRRQHGTSDREIRRLLKRYIAREIYRKLNTELAS

SEQ ID NO: 169567 - protein, 412 aa, unidentified
MQVLYERCAGIDVHKKSVTVCLTTPGPRGEVKRETRTFGTMTRDLLQLLDWLVEAGCTHVAIESTGVYWKPIYNILEGACEVVLANARDIKNVPGRKTDVCDAEWLADLLRHGLIRGSFIPPKPVRDLRDVVRYRKALIRERASEINRVQKVLEGMNIKLASVATNVLGVSGRAMLEAIVAGCTDAEALAEMARGRLRNKIPELEKALEGRVDPHHRFLLAQQLRHIDYLDELIEACNVRIEEMMRPFEEKVALLCEITGVEKKTVQAVIAEIGVDMSRFPTDKHIASWAGVCPGNNESAGKRKSGRIRKGSPWLKEALVEAAQAASRAKGTYLYALFHRVAARRGRKRALIAVAHAILSIIYHMLKERSHYRELGQDYFDRLNRDAVSRRLVRRLESLGYQVELKDLEAAA

SEQ ID NO: 169568 - protein, 344 aa, unidentified
MQITTIGLDLAKSVFQVHGIDAAGQVVVCKSLRRMQMLPFFSKLRPCLIGIEACGTSHYWARKLIELGHEVRLMPPAYVKPYVKRGKTDAADAEAVCEAVTRPTMRFVPVKSPEQQAALSIHRTRDLLVKQRTQLINMLRGLLAEFGVGIPKGLERALLMARQVIDGKAPEVPIEAARIATTLSQQALDIHARLCEIDRDLAIWLRGNDIARRLMTIPGIGPVGATALAASVTDPHQFRSGRQFAAWLGLTPLQKSSGGKERLGRISKMGDKYLRKLLIVGMTSLVRRAKYAPGKVDPRLADLLARKPTRVATVAMANKTARVIWAIMARGETYRTSHQPALAA

SEQ ID NO: 169569 - protein, 337 aa, unidentified
MDTSKHIFQLHGVNAAEEPVLRKKLRRKEMFAFLEKLAPTLIAIEACGASHHCARLLQSFGHSVKLIAPQLVKPYIKRGKNDAADAEALCEAMSRPTMRFVPVKTAEQQAALMLVGVRDRLIRNRTQLTNAIRGYAGEFGLTAAKGKAHLASLLERIQGDESLPALARELFAAQAKEYAQLQAQIDLVDARLIAWHRADECSQRLTKIPGVGPIGVVLLTMKTPEPELFRSGRRFAAWIGLTPKDHSTAGKVRLGGITRAGDEGLRSVLVVGATTVIQHAQRGGRPSPWLTELLKRKSPKLAAVALANKTARVAWKLMVTGENYAAKAAPAALAGAA

SEQ ID NO: 169570 - protein, 357 aa, unidentified
MVDRKCLGFSSPYFSVGRHDASLLSPDSCLGPDRIPYFSQGRVKEIMNTPEQFVGIDVSKDTLDVGPWPTGERRTFANSEDGVAMVMDFIRPFAPLRVVLEGTGGWETLAAFTLSTQGFPVVVVNPKRVRDFAKSIGIVAKTDALDALVIARFAAFTRPEVRPLKSEETQQLEALVTRRRQLTQMLAAEKNRLSTAPKWTRKNIEVHIKWLEKQIAQVHTELHALIKKTPLWREKDEILQSAKGVGPVLSSTLLCEVPELGTLNRRQIAALVGVAPFNRDSGKYRGRRRIWGGRASVRNALYMATRAAIRFNPIIRAFAERLLKSGKKRKVVVTACMRKLLTILNIMIKNRCRWQTA

SEQ ID NO: 169571 - protein, 354 aa, unidentified
MDKNTPYACVATIGIDLAKKVFQIHGIDSSGKEIVRRSVKRRDVLAFAEQLPPCVIGMEACATAHHWARELGRLGHAVKLIPPAYVKAYVRRQKNDAADAAAICEAVTRPAMRFVPVKSAEQQAVLMLHRVRELLVGQRTALINALRSHLAEFGVVAPQGARHVVELIAVVADAGDARLPDIAHAALAPLVLQMQRLEAEIDHLDRRLLAWHRADASSRRLATIPGIGPVTASAIVASITDPSMFSSGREFAAFLGLVPRQSSSGGKERLGRISKMGDRYIRTLLVVGATAVLRYARKGGSPSKSWAEALLQRKPFKVAAVALANKTARIAWAVLTRGEPYQAGNIGAAAPGAA

SEQ ID NO: 169572 - protein, 341 aa, unidentified
MVVPEQPLEPGLAPEFACARQGESMAPAFYVGIDVSKSQLDVALGQSTTRSFRNTTAGIDDLIAWLGQQEVGRIVIESTGIYSSLAATRLTRAGFAVCVVQPGRIKQFARSQGQLAKTDRIDARIIARFGEASPELVVYQEPRLQQARLRALVDRRDQVVEDRVREEGRLEACQDAIIRKRLETSIKRLRKETVSLEKQIAALVGKDPDLGSSSACLQTQTGVGACTAAVLMAHLPELGRVNRQEIAALAGLAPYNNDSGSRNGKRSIFGGRERARGALYMAAVTAARSDDHLSGFYRKLRAAGKAAKVALIAVARKLIVRLNSLMAQHRASQPSAQATPA

SEQ ID NO: 169573 - protein, 425 aa, unidentified
MNCKQNERINQVKESTLVVGIDIGSTTQYARAFDWRGIELGKVFKFSNSREGFDSFKRWMQWLQDKYKKSDVIVGIEPTGHYWFDLGAYLEDGGILLVMVNPYAVKQTKELDDNSQSKNDCKDPKVIAKLVIEGRYSAPYTPDGVYADLRVLTNNRKRIIRELTQIKNRFARWFAIYFPEFRDVFKDYEKEGSMIVLRNACTPEAIVKLGPDGINQLWRNAKLRAVGLKRATTLCETAKRSIGLKKGMTAAEFEMKMLLQDYDYKMAQLEIIMEEIESLCKKIPESEQLLAIKGIGLITVAGFLAEVGDVRRFESPRQIQKLAGLSLRENSSGKHKGQTTISKRGRSKLRAVLFNAAIPLIATNPEFRALHDYYTNRANNPLKKKQSVIAISCKLIRVFFAILTKGVSYDPNKMMSDIHRQPLVA

SEQ ID NO: 169574 - protein, 299 aa, unidentified
MLTTKFQNNAEGLKAFKKYLVDNGVAFNENSLLVIENTGIYHRLIWQFCSDYSLPIYIGNAADLKWSFGIARTKNDKVDCMRLCDYAYKNQEDLKPTPALNKNFIILKDLLTNRTKLIRQQNAISQTIKELKISNDKATQKMLEDINKAAIEVLKKSIKLIEAQMRKMVKADPQVLANYTLMISVPGVGEISAIFILCCTNNFAIKISGKQLASYAGVVPCEHTSGTSVKGRNKVSHVANKELKSILSMGALSAVQNYTEFGDYYERKKNEGKHHSKIMNAIKNKMLLRVVSVVNSRTP

SEQ ID NO: 169575 - protein, 356 aa, unidentified
MSKSITADRGVTIGLDLGDKHTQCCSLDDSGEVEETFRVRTTTAAVSKRFSSMASCRIVLEVGTHSPWVSRLLSDLGHDVIVANPRRVLLISANHSKNDSVDAELLARLGRADPKLLSPITHRGLEAQKDLVLLRTRDGFVRSRTQLINQARGFAKSLGDRLPSSSSVGFPKRVRGARKEKLFSGLETLLQLIDTLTAAIGDMDRKIERLSRERYPETMLLRQIKGVGPLTALCFLLTLENPYRFKKSRAVGAYLGLRPKQRDSGEQQPQLRITKAGDEMLRRYLVTASHYILGPFGPDTHLRRVGLKLAERGGKAAKKRAIIAVARRLAILLHRLWVTGEEYQPLGYGSATPKAA

SEQ ID NO: 169576 - protein, 337 aa, unidentified
MSVAGIDSHKDTLAVAVVDDQGRELDRTEIENSSRGHHTLIGWLGRHQVTRVGIEGAGSNGRVAALGLRDAGYEVVEVPPQLTAQGRRRQRTPAKSDPIDALLICRIALREPELPQIRPSGDIEDLRVLVHHRRELQSERTRAASRLHADLEQLQPGYQTRIGRLTAERNLDRARRLLSGDGRVRAEVARERVRRLRQLNRQIARITEEIGVLSATFGSGLTTITGIAELSAAELLAEIGDIGRYRTKAQFAMANGTAPLTASSGRIDRHRLNRGGNRQLNRIIHFVALTQISRSPEGRAYYERKRAQGRTTKEAIRCLKRRISDRIFVTLRASMLT

SEQ ID NO: 169577 - protein, 440 aa, unidentified
MNNDDNTLQVINPNAAGIDIGSRAHYVCVPQDRDKECVRKFSSFTDDLHKMADWLKKCGIKTIAMESTGVYWIPVFQILEQRGFEVYLVNAKYVKNVPGRKSDVQDSQWLQKLHSCGLLHSSFRPEDNICILRSYIRQRERLVKSTTMHVLRIQKVLTEMNLQLRNVITDITGTTGMAIIRAIIDGERDPVKLAKLRDYRIKSSEETIVKSLQGDYRKEHLFVLKQEFELYMGYLKKIEEIDIQIEEHYKDFAPKGNEVIKDDSKRSGSNRPKFNLKQELYKMTGIDFSTIPGLNVLTIQTIISEVGTDMSQWKSESHFSSWLGLSPANKITGEKVFSTKSRKVINRASTAFRIAAAAAGKTNTAIGSFMRRIKISKGAPKAITATARKIACLFYRLLKFGQVYVEQGMACYEQTYKAKLVYGLEKRAKELGFTLIAKSA

SEQ ID NO: 169578 - protein, 397 aa, unidentified
MIAVGIDISKAKSTVAVIDSDGTVLASPFAMAHTQPEMEAFVTYLKGLGEPTTILMEYTGHYHYPVLKKLQDEGFPVCIVNPYQMKKYGDVEIHKAKTDKKDALRIAAYALEKSYKLVPYSPMEQKYEDLKFLSRQYNQRISYVAKLKVQLIALLDQTMPGITRILPLNSRNPEKCALLLFVKRFKSFDEIHRIGKARFLASYDVLAKKASERSASSKGLSIYEFAVDSITTRGEDPYIWLSQNQCVDLLSTTQNAADEIISQMRNIAETIPEYKVLRAMHGVGDRLGPIILAEIGDVHRFHSGKALNSYAGNDAPPYQSGQFESRNRHISKRGSSTLRKACYEVMQALKLTKPQDDPVYLFMLKKEQEGKPFNVAKMAGVNKFLRIYYARAMELYK

SEQ ID NO: 169579 - protein, 414 aa, unidentified
MEQIHDRVAGLDVHRDSVAGCVRVTGPRGGVSSEKERFATTTTELARLRDWLADRQVTLVAMEATGVYWKPVYYALEHSFEVWLCNAHHVKNVPGRKTDMSDAEWLADVAAHGMVRPSFVPPPAIRELRELTRYRKTQIDARVSDIQRLEKLLQDAGIKLTSVASKVNTQSGRLMVEALIAGQRDPAALAEMAKGKLRPKIPQLTEALDGHFGAHHAVAAQRIYGHLDYLDASIAALTEQIDARMQPYAATRALLAPIPGFDRLTIDMVIAETGADMSKFPSAGHLARWSGVCPGNHESAGKRRRVGVVPGNRWLRRSLIEAARAAARTKGSYFGAQYRQIAKRRGPNKAAVAVAHSLSDLIWHMLTTGECYTDLGADYFQRRRDPQREADRLLRQLQALGFQVAVTSSPTSAA

SEQ ID NO: 169580 - protein, 355 aa, unidentified
MVMIGIDPHKGSDTAVVIDRDEMVIDEIRVRTSTGQARELQRWASGYPDRVWAVESARGLGYLVSQQLVAAGERVIDVPAMMASRVRQLGSGKSQKTDPNDARSVAIAAFRHSGLALVRADDHVRVLGLLAKRHRDVARMKNKAACRLHALLMELVPGGLATEMTVNKAVSLLEQVEVADQVGRQRVLIATELVEDITRLEAQMRASKKRIRLAVAASGTTLCDIRGIGPIGAAIILGSVGDITRFPTAAHFASYNATAPIETSSGDKKRHRLNPRGNRKLNHVLHIAAVSQLRYPSEGRDYYQKKIAEGKTTKEAIRAPETEDLRRRLPASSGRRQTPPRLNDRRVREDTQGRL

SEQ ID NO: 169581 - protein, 321 aa, unidentified
MTSQTESPCFGIDVSKRWLDIAEHGRSPVLRIDNTAAAIRGWLRTLPPGALRFACESTGTYHRLLVRLLIGAGHQVYLIDGYTLSRYRDTLGQRAKTDRHDAGLIARYLAHEGARLRAFSLPPRAVTELRALLRRRATLVRGLGRIRQSMEELPGFAREVRAVTERIQALIKRLEQRIAALIGASGWSDPYRRILKVEGIGALTAAGLCATFHRARFSGGDAFIAFLGLDVTVRQSGTQRGRGALSKKGDAEMRRLLYNAAMAASRSSTWQPFYQRLLQRGFSRTQALVALARKLARIAFSLMKNESDYLPQQHENACART

SEQ ID NO: 169582 - protein, 336 aa, unidentified
MSKKVTLKQCMGIDVSMKKIDCCLAFYTEDLKIKVVATSGFENNPDGFVKLREWLNRKQDNGLALHVNMEATGTYHEEAAYFLAGVGYRLSVIQPTKGKQYAKSLDEKNKTDKIDASMLARMGLERELMPWNRPNEQLRCLKRMSRERIGLIRDRNALTNQLHALNHSFDAFRDSVERLKERIALATKQLSEIEAQMRELTESDPELSKRTKHVITIPGINFVTAITVIAETDGFANVGNRRQLVSYVGLDVVMKESGTLTWRPHISKRGNAYIRAGLYMAAVSSIIHNKTLKTYFNRLKDNGKPGKTGIVALERKLLVLIYTLYKNEQDFRLDYQ

SEQ ID NO: 169583 - protein, 407 aa, unidentified
MQVLYGVCCGLDVHKKEITAALMTGADEVVVKTFGTTTSALRSMVDWLKVAGCEQVAMESTGVYWKPVYNILELEGIPSMVVNASHMKAIPGRKTDVNDAEWIADLLRHGLLRASFIPEKDQREYRELVRYRSSRTEERAREINRLQKMLEGMNIKLGDFVSDITGKSAGKLLGLTLSNDELTDDQITKASHGNLKATLDELKESLSGIITPLQRELVSIVLDVIAEQTRQIAKVEVLIRKYTKEAYEEAAKKLDVMPGIGTKSAQAIIAEIGIDMSRFPTANHLCAWAGVVPGNNESAGKRKNAKARKGNKHLKKTLTQCATSAVKNKNSFFHAQHQRLVVRKGSNKATIAVAHTMLIAIYHILSGSEFKDLGADYYTQFNRDKKIQSHLKQLQKLGWTPPESKVA

SEQ ID NO: 169584 - protein, 459 aa, unidentified
MKDLLMKDKKKIAKRKKSLRISKHLEQVNLYAAGIDIGSHEHYVAVPESLDEKPVRNFGCFTEDLNALADWLIKIGITTVAMESTGVYWIPVFEILESRGLEVLLVNARHVKNVTGRKTDVQDCQWIQQLHTYGLLSGAFRPEDDYCVLRSYMRQREILVSSLSTHIQHMQKSLRQMNLLLDNVVSDITGLTGMKIIRAILSGERNPETLAQYRDGRCKNSLEVIAKSLHGNYREEHLFSLRQAVELYDFYHQKLSDCDIAIEKCLAQLDKQANTSNFQAAKRRKKNNQNALRFDVVNYLYELCGTDLTQIDGMDEHSVLKVISETGINMGKWKTAKHFVSWMGLSPNNKISGGKLLSSKTLKTQNKAKQVFKMVAFALANSKSGLGAYYRRLRSRLGSPKAINATARKVASIFYHMIKHKVPYITQTQEEYNEANKHRIIKNITNKAKQFGLTLVPVT

SEQ ID NO: 169585 - protein, 341 aa, unidentified
MDQYAGIDVSLEQSSICVVDATGRIKREGKVSSDPQGLIAWFASLGMNLTRIGLEAGPLSQWLYVGLKQAGLAVELLETRHVRAAFKTMPVKTDRTDARGIAELMRVGWFRPVHCKSLAAQEIRAQLTARKLVQSKLFDIEMSLRGILRGFGLKVGPTTPKRFAERIQELVSGHATLEAVAAALLAVHAVLLREFAGFEKRVRQAARSDDRVRLLMTVPGVGAIVGLTYASAIDDPGRFKSSKMVGPHFGLTPKKYQSGETDYTGRISKIGDGSVRLALYEAAHVILTRAVKGSALKSWAARLAKRAGLKKATVALARKLAVVMHRMLADGTPFNAAAAAA

SEQ ID NO: 169586 - protein, 389 aa, unidentified
MKLLDSTIEQTAIRTDLGAIFVSLELSTVKWVVSSIQPGRQKISKHEVKAGATDELWALFSKLQAEALAREKKLYPIITIQEAGYDAFWVHRVLVNKGIESHVVDPASIAVPRRRRNAKTDKVDGLALLRTLLSFKRGEPRMCSMVVPPTPDEEDRRRISRERKVLKGACIEHCNRIKGLLSAQGISDFDPKLRNRRAQLEGLRTGDGRILPPRLKTQILREIDRLELVLTQIAAVEQERDAEQEACGATDAPAMLLKLKGVGSEIAEILHAEAFYRQFGNRRQLGAYAGLAPTPWQSGKVDREQGVSKAGNPRLRRILVQLAWLWLRHQPGSDLSRWFHDRVNQANGRQKKTLIVALARKLLVALWRYVAHGVVIEGAVMKAVPASAS

SEQ ID NO: 169587 - protein, 421 aa, unidentified
MKKVTNLNKKVKAKSIAGLNRASRVVGIDISKEKLSCVLMDITETIICRFTVEASLSGYKDMLDRVKTATRGRGKVVFALEPTGHYWMVLGQFLEDHNQAYVLIHPLVVARSREVNRLNKAKTDPMDASLIGKLACRGDVTRTQIPGDYWGTIRFFAREFMDREKDCAREKNRITSYLETTLPGFFEIFPDPLTTTGRACLRALANFKEAIKGDFGSFENRVRTHFKGKRLLISRVRRLYEILRHKNVLGLRSGRNAMFFRIINALDRLELYERQKDAAEQSLLAVYSKTEFKQYLDSIWGTTSTVNALALAFIGDPTCYDSPKALVKLAGSDLVVNESGKFRGKTTISHRGRNLLRKAGDRIAFLLEKRNAIFRAFFHRLMTRPKNRLTKRQARVACINKYFRTIWVLCNHRVPFNPALA

SEQ ID NO: 169588 - protein, 371 aa, unidentified
MKSILSVGMDVHKNSFSLCAYDGYTGEIVSESTFASDVKLVIKFIETLKSRYENDVEIKCGYEAGCLGYSLYKSLTSRGVDCVILAPTTMQVSAKNKMVKNDRMDALNIAKNLASGSYKAVYVPDEEDVEIKEYIRMIHDFKKELKRVKQEICAFVLRHGYQYDGKSKWTIRYMNWIRELEMSEIQRETLDEYLAEMDNLNDKIERFMNRIDEMYQSDRYNEKVSELRCFKGIDTFAAMTIQVETADFERFPNAKAYASYTGLTTGEHSSGDKNNRIGITKQGNTVIRKTLVECAQSLVKGNVYTPKSKRLKSRQKGMDVNIIAYADKATERLKKKYQKLIERNVPRNKAIVAVARELACFIWGMETGNIH

SEQ ID NO: 169589 - protein, 343 aa, unidentified
MTKITTVGLDLAKLVFQVHGADQDGRPVVRKKLRRGQVLGFFAELPPCLIGLEACASAHYWARELQALGHEVRLIPPQYVKPFVKTNKNDTSDAEAICEALIRPTMRFAPIKSAEQQSVLMLHRARELLVRQKTMLINALRGHCGEFGIVVAQGASRVAELIAIIEDQEDDRIPALACEALGYLVGQLRMVQAQVLGLEKKLKTWHRANEASRRLETIPGVGVITATALVATIGDASQFRSGRQLAAWLGLVPRQYSSGGKERLGRISKRGDGYLRKLLVHGARGVLLWSRRKKETRSLWLEALLARRPTNVVLVAMANKTARVVWALLSRGETFRTDPQLAA

SEQ ID NO: 169590 - protein, 391 aa, unidentified
MIYIGIDIAKNKHDCFITNSDGEVLFKPFTISNNSDGFNDLYQKVSSLTNDFSNVKVGLEATGHYNYNLLGFLINKGLPTFVINPLHTNLFRKSLSLRQTKTDKVDAHTIALMMMSGVNLRSYSDTAYHNEELKSLTRYRFDKVKERAKLKTSVSRLVNILFPELEELVPTLHIVSVYALLTELPSSSQIASCHLTHLTKLLERASKGRYGKEKAMEIRNAAKQSIGSAIPAKSLELKHTINLIQELTFEIDEIENSIQSIMDSIHSPILSIPGINYRMGAMIIAEIGDFSRFSSPDKILAYAGLSPSTYQSGQLDSSYSHMEKRGSRYLRYALFNATKFVCIWDNTFASYLAKKRAEGKHYNVAISHAAKKLVRVIYQIEKSGLPYNRTV

SEQ ID NO: 169591 - protein, 459 aa, unidentified
MRSKNKNFLELEEGEGKRKKGSVMGIDVHRDIMAYCIVNEDKILKEAELLNNYDGINRLTKIIRRYKVISVAVESTAQYHFKLVFEMINNGIDILVANPQQTKTTQGKKTDKFDARRIAVAHRDGRLKPSLIPPVELYNLRKAVRYRYKIINDKTRIKQRVNQIFHQKDFKYKKLLNSKQGLELLRLVSIRAVDDKNLSEIKRKYSHLAKDEALIKELKMFQDRLDEVEAVTFENDIIQLQFLSIIEKKQESTYYIIAKNNKQFKRQIGLLLTIPGVGPNTAVAIMAEIADVSYFPSPKKLVKWAGLAPKVYQSGHKKHITGKIHKGGNKYLRRAVVLACQSIYAKGKKTNPIKKYMLKIRERTDNYWKAICAGARKLLTIIWYMLKRNEYWGNFKIDDEIKEKLKEIFQHKIQLFQSKIGRYRKIMRRLNYGCDELLEGLNKIELNQRAAFKILVNSV

SEQ ID NO: 169592 - protein, 363 aa, unidentified
MYDSTTTVTVGLDVHARSIRLAAVRAEELLEERTLPYDEEAVERALRRWPVVRCCYEAGPTGFGLHRFLVERGIDCQVVAPGLVPQRPGDKVKTDSRDARKLARLLAGGLLEPIHVPAPTLEAARDLVRAREDARLDRMRDRHRLSKFCLRHGRRLPGLSWGVVRRKWLSEQRFEFAAQQQTFDTYLHAVDLVDARIEQLERAIRETADEQPWSGLVARLRCLRGVETLTALALVAEIGDFGRFKRAEEFMAFVGLVPSERSSGEQRRRGSITKVGNAHVRRLLVESAWHARPRPSVGYRLARRQRGQDAVVIERAWRCQGRLHARWQRMAGRGKPQQKIVVACARELAGFVWAIANDQPLRS

SEQ ID NO: 169593 - protein, 438 aa, unidentified
MRKKKSKASKSVQLQGLPLIHPNAAGIDVGAKEHVAAVPFERDPQPVRTFPAFTPDLHELAAWLKRCGIESVALESTGIYWISLYEVLEQQGFEVRVVNARHVKNVPGRTKTDVLDCQWIQKLHSFGLLKGSFRPDQQIRKLRTYMRLRDNLVVERTQAVHHMQKALFEMNVQLSNVLSDITGESGLRIIEAILAGERDPEQIAALCGTRIKASRQTVAKSLHGNWDEALLFCLKTALESYRFSENKIQDCDQCIERQLATFENRAPLPNARQTLRTQLHQVCGVDLTKIPGIKEQAAQIIISEVGLDMAPWNTEKQFSSFLGLCPNNVITGGKILHRATRKVYNRAADTLRLCAQSLTHSKSALGAKYRRLRARLGAPKAIVAMAHHLARLVYRMLRYGETYVEKGMEHYEQKFRLQRIKWLKKEARSLNLQLVAAQ

SEQ ID NO: 169594 - protein, 469 aa, unidentified
MPVRVTLGIDLACRAPHVASLADDQGRLVWTGRTFQSRVRDLEALWADLGCDPGELTVVMEPTRNAWAPVAAWFKSRGVKVVLVPTTQSADLRAYYSKHTKNDRLDSALLARLPLLHPEGLRPHTGDGPADPLRRATKQRSSVVKRRAAVFARIDALLELLGPGWYEELGTEYGNASLHLLARYGDPRTLLRLGRARLGQFLIRYSHGQWRHDKAEHLLAVAHESIALWDGAGMDFAQLGADLAVEAEQALVFTAQIRGLDERIAGLYRQADPLQIARTAPGVGPVLAAAITARLGDPHRFTSLAAIRSYSGLVPKVTQSGQTGQSEHRGGITKAGDTLLRQSLWMAADMARRADPQLAAHYVRLMNAGRHHDTAICHVATTLLTRIAACLRAGQPYVIRDVDGTAITEADGRRIVKEHHQVDPAVRAKNASRRNPQRLKHRTSRVPQKSLSASTSRPVTTHPTSRPAA

SEQ ID NO: 169595 - protein, 358 aa, unidentified
METQITAMPKLYIGLDIHKKSWSVHFRTDLSDHRGFTMPPVPGKLLDYVALHFPDHAVTICYESGSCGFSAARFFVSRGWITVVVNPADVPKIQKMQFRKTDRIDCRMLCTALQQNQLNAIHIPDIEQDELRSLVRHRNAVVKQVRQVKLQIKSMLLYHGVTIPAEYDNPNWSKIFQQWLFDLSWSYQPARISLHSKLRILSTLHKEYLQSANELRSYCRRNHKTDYYLLKSIPGIGGYLSAAILGELGDIRRFENEDQFSSYIGLIPAIRNSGSTESTLGITPRSKTLLRSYLIEAAWVAIRLDPEIQSYYRRHIGKNIKNVIVKVAHKMAKRILSVIKKGQPYRISHKIHSALEPV

SEQ ID NO: 169596 - protein, 450 aa, unidentified
MSKGHKTSLSLPVVHQKAAGIDIGSRFHVITVPPDMCPEPVQTFQAFTTDLQKMANWLVSLGIETVAMESTGIYWVPVFEMLESAGIEVILANAREAHAVPGCKSDVNDAQWIQRLHACGLLRASFRPEQNITALRTYLRLRDRFLEYAAAHIQHMQKALNYMNIQLHHVVSDLTGVTGMQMIRAIVQGERDPAYLARFRDVRCRASTEVVIKSLTDNYQPEHVFALEQALMLYDAYQERILACDAQIERILADLNQSKPLPKQPLTQTRKRSKQGNAINFDVRTALYQLTGVDLTQIHGIGPYLALRFIAEWGTDFSKWRTAKHFTSWLTLSPGCKISGGKVLSAHTRKSANRLTAHFRLAAVTVGRTSTALGAFYRWLAARIGKAKAVTAIARKIAILFYNMMRYRIAYEDLGADRYELEYRERIIKNLHRRAKEFGYTLQAASECVS

SEQ ID NO: 169597 - protein, 353 aa, unidentified
MEQFIGCDAHKKFSIFASIDEKGEYGPTFRVGHAREVFRAFLKDLPAGSKIALETSGCYYWMVDEMEQARHIPLLAHALTAKRRMEGRHKTNERDARGLAMLLRNGTLPVVWIPPAELRDQREMLRWRMCLSRMRTRVKNRIHGVLQRYNIDIAVSDLFGDGGRVKLLERVDALPTNSRLSLLDQLQMVDTVETEISECEQVLQEMLYPSAERDLLDSLPCVGKILSAVLALEIGDVRRFGGPDRLVSYAGLVPVARESADWKRKDRCPRDCNTYLKWAYVEAANLISMQRKRWPERHVVQLYERVKQSTKMHGKATLAVARHLAEASYWMLRKQEVYQEPNSKRQLLSSTHG

SEQ ID NO: 169598 - protein, 321 aa, unidentified
MMKQHTVGIDISKAHLEAHRLVDGQSARFANDRGGFQALIDWIGTPVECVAYEATGPYHRDFEEALSQAMLPLARVNPWKARRFAEATGSRAKTDTVDARMLARMAATLDLRRTPAPSKTQRQLQELQTSRDSLMRQRTAALNRRAQLRNPLLKRQTQTQINLFERQVRAVDRNIQQLIQSDPERARKLEILTSIPGIAATTAAGLLAEMPELGTLTGKAAASLAGLAAVPRESGTWQGRAFIRGGRQRARRLLYMPAVSTLRWNRDLAAVYRRLTERGKPGKVALVAVMRKLIVLANTLVRQDRTWLPEAPRGSAGQIMC

SEQ ID NO: 169599 - protein, 400 aa, unidentified
MSRRKARVWAGVDAGKGHHWAAVVDETGATLWSKKIDNDESAILTAMGEILDLADEVRWAVDISGTSSALLLALLAAHGQQAVYVPGRTVNRMSGAYRGEAKTDARDAYVIAETVRHRADFTAIDVPAQLAADLALLTAHRSDLVADRTRMINRLRDVLTGIFPALERAFDYSSQKGALVLLTGYQTPTAIRRRGRARLTAWLANRSVRSADAVAATALEAAQAQQTELPGEDVAAQIVADLAAQILALDDRLKRIDKQIRETFRSHPQAEIIESLPGMGPILGAEFVVAAGDLSAYEDAGHLASAAGLVPVPRDSGRRTGNFHRPKRYSRRLRRVFYMSAQTSIIREGPNRDFYLKKRGEGCKHVQAVIALARRRASVLWALLRDGRVFTSAPPVTQTA

SEQ ID NO: 169600 - protein, 410 aa, unidentified
MEVLFDRVAGLDVGKESVTVCLRTPGPRGGRRSETRTFQTMFGSLRVMRDWLVEAGVTIAAMESTSTYWKPPFYCLEEVMVVWLLNAAHMKAVPGRKSDVRDAEWIAQLLEHGLLAPSFVPPPQIRRLRMLTRYRMQLMGDRSREMVRLELMLEDASIKLSSVASSLKTVSARAMLTAMINGESDPLRLADMAKGRMRRKIPDLAQALTGTFEAHHAQLARSMLRRLELVEQALAELDAVIAEACRPWQHHIELLQTIPGVGETVAQVIVAETGADMSRFPTAAHLSAWAGLAPAMHESAGRQTPAGKRHGNKWLTAMLVEAAGSVGRMHGRNYLAAQHARLMKRRGMGRAQVAVAHSMLVAAYWMLKRDEPYHDLGADWHRRRSDEAHTRRLVAQLEHLGHTVIIDPAA

SEQ ID NO: 169601 - protein, 427 aa, unidentified
MTDKHSIPDGAVLVAIDIAKARNDVLIEIPDRSRRRRLTVPNTRDEHDRFVELLSSFDRPVVAGFEATGNYHRAIAWRLLEAGVEARLISSMALARTREAIHNGWDKNDPKDAQVILHMLRNGMSQRYYDPLAQGISDLQELSKTHEVTSKAKTEILHRIMTHYLPLYFPEIERFRNNSRSDWFFALLDAFPTPASITAYDKEGFVAAAWDVVGRKVSKARLIADIYETARKSIALPVPLDSKAIAMFRMVIAEARSLIRQRDVIEVEAEEMLKGQRDYELLKQIPGIGPINALTILAEAGDLRRFAHHRQFLKFCGLDLATHQSGAFRGQTKLSKFGNARLRRTLWMAAQVAIRQRENSFRQKYERYIAKDRDNADLKRKALTAITAKMARVVHAVIKSGGQYRPFFEGTAPSGRTPLRSAVRASA

SEQ ID NO: 169602 - protein, 351 aa, unidentified
MNIIGCDLHTRYQVVAWVDEETGEIRTRRLEHENGEAGAFYAQWPRGAVVGVETTFPALWFERLLAECGHEQWVGDAARIRASEVRQQKTDTRDAEHLLDLLRTDRFPRVWVPSVAERDLRQLLVHRMKLVRTRTAVKNQLHALAMSQGVCRKRKLWSARGRAELQSLTLLPWATRRRKELLAMLDQLDGSVAELDQAVEEAARDRTEVARLRTHPGVGAVVGLAFVLTLGPVERFANSRKLVSYLGLNPREHSSGGRQRLGAISKQGNSMMRWLLVQAAQTAARYDPELRRVYQRLKFRRASGVAKVAIARRLAVRLYWMLRAPMDYAQLVRMSGSPSSAMVPPTAGSRV

SEQ ID NO: 169603 - protein, 346 aa, unidentified
MRHIGIDLHTNSFTVCFLEAGQPERLATLALQGDGLETFINELLPTDEVAFEATGNSTWLKKQLEPHVGRIIIIPPWQFEVIRRSVKKTDKHDARAIAFFLSKDMLPETRVKDERLTRLSSLIATRHQLVNTRVSLINKVHGLFVRNGLKAKKEVLTSKTGFARSIALHEWDELERVELEVIASQLESLHTACKRLEKEIRAYAETLPGYDSLISIKGIGPLSAAVFLCTIGNIEDFAKPGKLAAYFGITPRVSQSNDSHLVGRITKRGNKIARKTLVQCTLIAKRYSPYLQEFYERIKARRGAGKAIIATARKLLNTIFHTLKNKWVFEDFTTFKVQKSQIKAGH

SEQ ID NO: 169604 - protein, 363 aa, unidentified
MLKIVYPICCGMDVHKSFVVACIATTNDNGVTNYKSKRFSTFTGDLRRCADWLSENNCKDVCMESTGKYWIPIYNILEHTCNIVLAHPKYVKAIRGKKTDKRDAKWIADIFKHDLVSGSFIPPADIRQLRDLVRYHWKLTNFNVGEKNRAQNCLTVSNIKLDDVFSDVFGKAASAITTRLLESNEPFDVKPYLTKNIKKPIEQIQAAVDGEMCAEQAEKLRIIRSHMDSLQLCKLDLESLILATAEKYLPQLNLVMTAPGIQSFAAIGIISEIGVDMSVFPTSKHLCSWAGLTPQNNESAGKKKTTRISRAGAYIKPLLVQCALCAIRTKQFPEVRNRYLALKKRRGHKKAIIAIARMLLTGI

SEQ ID NO: 169605 - protein, 343 aa, unidentified
MQVVRIGLDLAKYVFEVHGVDGQGNVVIRKTLRRGSVSTFFANLPPCLVGMEASNGAHYWARVLTELGHKVRLISPQFVAPYVKSNKNDRNDAEAICEAVGRPTMRFVPPKSPEQLAIQALHRIRQRLVRSRTKLVNQIRGILAEQGIVIARDIWRLRRALAEITGHATDDLNKLVRVLILETQAELMELDRRIASCDRQIRELYRTSELCQRLGEIEGIGPVTATALVAAVGDRTCFKNGRQFAAWLGLVPKQRSSGGRHRLFGISKRGDRYLRTLMIHGARAALGKAGGKQDPRSRWLASLRQRRHANVAAVALANKNARIVWAMLAGNVSYEPERTVQAA

SEQ ID NO: 169606 - protein, 566 aa, unidentified
MNTIGVGIDTARYGHRVTFLDEHRQPAAPALSIQETRDGYAALEAAFRRLQGKFPEATFRIRIDAAGQYAANLESFLRQLPERLEISFGQPKQNKDYRQVHFPKRKSDDTDSQAAARYAVVETPPAEAGCPPELLALREVASWLQSQAVDCTRAKNQLHNLLARVFPELATLTKSIASARILRLLSKYPTPALLARARLATVQRIPHLPSDLAERLQQAARGSVASLRGEVAAQLVQHQVRQLQLRLQAKRQLEQLLQETFLKIPASACRQVATIPGIGLPTAAALVAKIVEIDRFASPAQLVGYFGCFPEERSSGVDQAGRPLPSKSCRMSRKGNDLVRHYLWMAAQCACLHNPAIRALYRRQRQAGKRGAVALGHCVRKLLHLVYAVWKTDRPFDPQHHAWEAAPAPQSPAVAESPKAERAAETEVTPATTLTVPPASPTSKLLPSPIRPRQRRGKSIDYRYLREQLSIAQVLELLHYPHSLQGTGDQVRGPCPLHAEERRRSTFSVNLKRGVFRCFASECGAHGNALDLYVKATGLSLHDAALELADKLHLQLQRNREEEPVT

SEQ ID NO: 169607 - protein, 347 aa, unidentified
MALATISVLGVDLGKNVCSVVGLDASGAVVMRRKMRRETLIGLAEKLPACVVGMEACCGAHHLGRVFAAHGHDVRLMSPEYVRPYVKAQKNDDRDAEGIAEAATRPTMRFVDLKSQDQLDIQTLHRSRDRLVGERTALINQLRAILLERGMVAPQGKRKLEQFLTVLMDEQGGEGLSPRMILLVADARAQWAELDRRIAAFDTEFIRWAKENDNARRLTTIPGFGAIVASALVAAVGHAESFDHGRDLAAWLGLVPRQFTTGGKPKLLGISKRGNKYLRKQLIHGARAALPYVAERDTPLGRWAKALMARTHHNVAVVAFAHKLARIAWAVLRRGEPFAVTGIPAAG

SEQ ID NO: 169608 - protein, 311 aa, unidentified
MELYVGIDVAKDSLEVATSGGESFSARNDRAGIAQLIERLRKLSPGLVVLEASGGYEQALVVELVAAQINCARINPTDVRYLARMQRQFAKTDRLDARVLAAFAAQRASELIPARLDAERDELKLLVNRRTQLLQMLTAERNRLALAPKWLRKSIARTIRALERDLGAIDHEIAARVNASARLKPLQLQLTSVPGVGQVLASVLLARLPELGRLNRREIAALVGVAPFSRQSGRWQGHESIFGGRAAVRSVLYMATLSAVRCNPALRAFYRRLRQSGKPAKVALTASMRKLLTVLNAMLKTQTTWSPLCPA

SEQ ID NO: 169609 - protein, 351 aa, unidentified
MLIIGCDYHPSVQQIAFVDLETGETGERQLLHKDGEAERFYRDLKLRGISVRVGIEATGHARWFERLLAELGFELWIGDPAQIKAARVRKQKTDRQDAQLLLKLLVEERFPRIWIPSPENRDVRQLLWHRHRLVQMRTRVMNQLQAVAMNEGVRRKKALWSKSGRAQLESFVLSPWASRRRQDLLEVLDRLNPTIDELSTAVEQEAKKRPEVLRLMTHPGVGPLTALAFVLIIGSAERFACGKQIGSYLGLIPCEDSSANRQRLGHISKQGNTLLRFLLVEAAQAAVRCDAEWRRKYVHLAMRRDPRIAKVAMARKLAVSLFWMWRKEWNYEQVIKFGSHAGQSDYVHGVK

SEQ ID NO: 169610 - protein, 364 aa, unidentified
MKLVKDIVNRVVRYIGMDVHKDSTTAVVLDAQGKLAMQVTLRTEGSVLVDFLRGLSGTLHLTLEEGTYSAWLYALLSPCVAKLIVCNPRQNALLKQGNKSDPIDARKLAELLRLGSLTAVYHGSPGMRTLKELAASYDSLVSDGTRVMNRLKSLYRGRGIRCGGTQVYSPRHRARWLEQLGEPGAHQRAKLLYQELDLLLQLRPQARRALLAESRKHPAQKILRTIPGLGPVRVARLLALLQTPHRFRNKRKLWGYGGLGLLTRGSAQYRLQQGELVVSPKGVTVRGLNPAHNAQLKDIFKGAALAACQRPGPLREAYERCLREGMEEHLARLTIARKIATLVLTLWKKGERFDAQRLRREQAA

SEQ ID NO: 169611 - protein, 399 aa, unidentified
MGQQLWAGVDAGKSEHHCVVIDGDGQRLVSQRVANDEAVLLELIDAVTTLADGEEVTWAIDLNHGGAALLITLLITAEQRLLYIPGRTVYHASGGYRGDGKTDAKDAAIIADQGRMRRDLQPLRPGDEIAVDLRILTARRSDLVADRTRAINRLRAQLLEYFPALERAFHYSHSKAALILLSGYQTPDGLRRAGVARLEAWLRKRKAYNAAAVAARAIEAADAQHTTVPGQQIAAAMVARLAKEVMALDTEIGDTETMIEDRFRRHRHAEIILSMPGFGVALGAEFLAATGGDMSAFDSVDRLAGVSGLAPVPRDSGRISGNLKRPRRYDRRLLRACYLSAQIAIRTDSASRTYYDRKRSEGKTHTQAVIALARRRLNVLWAMLRDHAAYQPTTTAAAA

SEQ ID NO: 169612 - protein, 320 aa, unidentified
MSSIVPICTVGIDVSKDSLKLAVRPSGEHWSINHDAQQFPGLIEKLTQLAPSRIVLEATGGLETLVATHLAAARLPVCVINPRQARDFAKATGQLAKTDRVDAHLLAHFGEALQPELRELPSTQTQLFEALLTRRRQLVQMRTAEKNRLSISGHPRKIVKDLEAHIGWLDRRIRQCDDELKSALQASPVWRANDRLLRSVPGIGQVVSRTLLAELPELGQLSDKQIAALAGVAPFACDSGGWHGKRHIRGGRSSVRSALYMATLSAIRSNYRIRSFYERLLAAGKQKRVALTACMRKLLVILNAIVKQQKPWRDYTLLNA

SEQ ID NO: 169613 - protein, 437 aa, unidentified
MDEVTDEPLYRDRVCGIDIGKAGLAATIRVPSDQNPARRAAETRSFGTTRREVLALADWLRSWQVPAVVMEATSDYWKGPFYRLEAEGFDCVLADAKQVKHLPGRPKHDPGDSRWLAACFERGAVTSCFVATPEFRVIRLHTRYRRDLTGERTREKQRAEKLLESAAIKLSSVVTDLHGVTGRDIMNQLIAGERSPKVLAQLARGRARRKISELEAALEGAGFFTAEHATLLAAMLARIDRVNEEIARLSEVIERLLAPHEEQLQQAESMPGWGRRAAEDAVAETGVDMTRFPSGAHLASWAGRTPLDNSSGKRAGRAKSKKGNRYLGGLLGETAVAAGKTQTREGARYRRLARRRGKAKALVAVGNTQLKVYHKLLSSPGMRYEDLGPDYYDRQASTRRQIAHHVGKLGALGFDVTLCRIPGADPDPSEPANTHAA

SEQ ID NO: 169614 - protein, 341 aa, unidentified
MNEVSTIGLDLAKHVFQAHGADAGGVVVFRKQLRRDNVLAFFAQQPACLVAMEACASAHHWAREIGKLGHTVRLIPPSYVKPFVKRQKNDMADAEAICEAAQRPTMRFAAVKSEDQQASAVVFRARDLLVRQRTQIINALRGHLAEYGLVVAKGASNVAALVEHAQASGSSVPTAAQPALDILVKMLAVLEEQIKQLDIEIARRAREEEVARRLMTVPGIGPITATALMALAPEPENFKRGRDFAAWLGLTPLQRSTGGRQKLGQISKMGERTLRRLLIIGASAVVKLARRRGQSQGAWLERMLARKPPMLVAVALANKMARTVWALMVNGGVYKAPVAAA

SEQ ID NO: 169615 - protein, 336 aa, unidentified
MSKSYLGIDVHKKVCVFTEIDSKGKILHRGKFGNTLEGVSDFASSLSPNVHLVLEPVLNYLWLLDQFEPYVGSVHVATPHKVRVIAESKCKTDKYDSRILAELLRTNFLPESWAPPSEIRLLRGLIRQRYHLIKSVVMDKNRIRHLLFQHGIDLRVFNIASPKARLEIRKLCLPDITRQTIDQCLKIIAMLGDQVAEIDKRIQERVKGNPTVELLQTIPGIGRLRSAVIYAEVGDVRRFRSAKALASYIGLTPIVRSSGDSVWTGGITRLGSRPLRHALVEASINAIRKSPELNRMFCRILYRSNVQKARVAVARELAVIIYAMLRHNEPFRAEAA

SEQ ID NO: 169616 - protein, 397 aa, unidentified
MYIVGIDIAKRKHEAAVIDGEGAVIIKPFSFTNNCSGYNRLLAMLTKAKLPLDEVSFAMEATGHYWLALFTRLQKEGFRVQVINPVQTNSIRSFYIRQAKTDPRDALLIAEVIRFGHFSESTLHPENIYELRELCRGRHAIVSMQADVKRKVVALLDQVFPEYETAFTNMFSDTSMAILQTCPTPKELSEMPFEELCHLIEVSSHKRFRMAKARELQELARNSFGFAMAGDVFSTMIRLYAKHLDFLKQQVREMDRKIAEIMETLDTPITTITGIGPTLGAYILSEIGDISRFSSAAKLAAYAGIDPTMRQSGEYNGVRNRMSKRGSPYLRHAIWLAASSAVLHDPALKLYFQKKRDEGKPYMASVGHACRKMVSIIYAVMRDNKEYVPCIPNEISA

SEQ ID NO: 169617 - protein, 390 aa, unidentified
MIYVGIDVASQKHDYYMMSDQGEIYTSRSITIPNNNEGYKKLHKSIQEFCGATKDYKVRIGLESTGFYHKNLVSYLLANKYEVMVINPLLTNMYKKSRKIHIQKNDNIDSIYICKYLMDTETVFKPYTTISYHTDALKALSRERFSLVDELRLAKISIYKLLTQLFPEYLKLFTNVYQGTALDILEKYNSPSKLSKAHYKTISSMIHGKCSVTANKLIEAAKSSIGIKDDYLAFQLSQGIKRLKSIQSTIDEYNEQISKYVDMINPNILTISGIGYITAGLILGEIGDINNFKNSEHLISYAGLDVKIYESGKYKATNLSISKKGSVYLRYAIYQVAKVCWIHDPMFYKYYLKKQAENKHYYVILGHIEKKLVKVIYSILKNNKPYSPQI

SEQ ID NO: 169618 - protein, 370 aa, unidentified
MKKHSTTPKSPKQASACKGGPITIGLDLGDKTSRYCVLGANGEVMSEGSVATTRKAMAEKFAKMRRCRVAMEVGTHSPWLSRWLSSLGFEVIVANARQVQLISASSRKNDRLDACLLARLARVDPQLLRPIRHRSETAQADLMRIRVRAALVEARTRLVNAARGFAKAMGERLPACDTDSMGVERMESLPEGMRDTLKPLLEQVESLTEKIKESDVKIEQIARTQYPETELLRQVSGVGTLIALTFVLTLEDRERFRKSRDVGCYVGLRPKQSESGQSQPQLRITKEGDVYLRTLLVQAAHCILSRRGPDTDLKRWGLKLASRGGKNAKKRAVVAVARKLAVLLHRLWVCGEVYEPLRNSQASGSSKKAA

SEQ ID NO: 169619 - protein, 393 aa, unidentified
MSGLSLQYGGWRAWVEFARERQFMMGWTPRPTASMCQSGGAEHHLREASVSEVSMIGLDISKHVFHAHGVDGRGRAMFRKRISRGKLLDFFATQPSCTVALEACGGAHHWARQLAQLGHQVRLIPPAYVKPFVKRQKNDAIDAEAICEAAQRPSMRCVAVKSEEQQAAGMVFRTRDLLVRQRTQLMNAIRGHLTEYGWVAPKGPSHVAMLAGLIDEEEMANSLPGAARMMFRVMLDLLSGLSRKIADLDKEIARRAREDEVSRRLMTVPGIGPISATAIVALAPPAESFAKGRDFAAWLGLTPLQRSTGGKQKLGAISKMGERTLRRLLIIGSSAVVKQAGKRGAPRGSWLEQMLARKPRMLVTVALANKMARIVWALLVKQETYRAPVAARA

SEQ ID NO: 169620 - protein, 369 aa, unidentified
MDEGIKFFVGLDVHKDSIAVAVAEAGRTPARLLDSIAHDVGKLRKLLARYGEPGAVQVVYEAGPTGYGLQRELARRGYQCQVIAPSLIPKRAGDRIKTDHRDGVRLAELARAGELRAVWIPDPVDEAIRDLARAREDAVNARTQVRQQLKGFLLRHDVRYADKTSWSKTYYRWLATLNFGLSGAQTAFTEYWQAVTAADERVARLTGALANSIEGWRFESVVRALQALRGIDAVSAIGLVAEIGDIGRFAHPRQLMAYLGLVPSEHSSGERVVRGSITKTGNTHARRLLTEAAWNYRFQPRIGRRAQQRAEDLPQAIRDVAWKAQLRLAGRFARLRARGVQINKICVAVTRELAGFVWAIASAQAKLTN

SEQ ID NO: 169621 - protein, 355 aa, unidentified
MESTQANSTRLKLYIGLDVHKRQWSVSIYSDESHHRTFSQPPLPGALKSYLNQHFPDAQVSCAYEASKFGFWIQRELTSYGYHCLIVNPADIPTTSKEASDKTDPRDSRKIAKSLRAGLLSSIHVPDQETEGDRQLFRYRKKVWSDLVKVKNRIKDKFIFTGTPIPPEFDNSFWTKAFLQWLKDAQLPDTHTRLTLNLLLDQYHFLYRHFLRVSVEVRKLQRLERYKTDAKLLRTIPGIGPLTTVQLLTEIEDINRFDNFKKFNSFVGFKPSTHASGEHDWRGRITLRKHRALRSALVECAWTTVSADPVMLQRFEELKKRLTAKRAIIIIARKLLSRIYFVLKNQKPYELGLVR

SEQ ID NO: 169622 - protein, 410 aa, unidentified
MIKENYMYVGIDLHKETHTAVIIDCYNQKLGEITFPNRPADFPKLVTKVKKCNTDGKEVVYGLENAYGYGRALAVWLIDKGYFVKDVNTAISHRQAKHRGAMYRKSDSDDAKAIALATLNMLDKLQDACPNDAYWSLGQLVHRRDNIMKQRTRLVNQLHEQLCIVYPSYKQFFNDISRPTALYFWEHYPSRKYLKGKSVEDLRAELVPVSHNKCSTKTCEKILDAVASDKVKNNNFQDARDMVTLSIVSDIQHYDKQLVEVDKMLEQMYKMLGCTLTTIPGVNVITAVKILAEIGDIKRFGNANKLAQFAGIAPLHLSSSGKGKDVATKQGNRRLQATIYFLAIQMVQVSSKGTPRNPVVRAYYEKRKAEGKTSQQALICISRRLISVIYGMLKNGTEYRMPVVENAGEK

SEQ ID NO: 169623 - protein, 347 aa, unidentified
MEQQSHYVGLDVSLETTSICVIDDAGAIIWRGKCSSDPDTITAIVRQHAPGAVRVGLETGQLSNWLTLSLRRRGLPVVCMDARHAKAALSLQINKTDANDAFGLAQVVRTGWYREVAVKSMDAHTLRMLLVARSRLVSQRQATANTIRGLLKTFGLVVARGSKGLFPVRVREQIAGNPALIAIIEPLLAVWSAIREQVTMLDRQILARARNDQVARRLMTIPGVGVVTALAYTAVIDDPARFRRSVSVGAYLGLTPRCYQSGEVDATGHISKCGDSLLRGYLYEAAAVLLSRDARASTLKSWGLGLAKRIGMRRAKVAVARKLAVIMHRIWSDRSEYRWTAMPPTVA

SEQ ID NO: 169624 - protein, 350 aa, unidentified
MDTVSLVGIDLGKHCFHLHAQDASGRMVFRKKLTRSQMFALLGNFPSCTVVMEACAGAHWIARRLQALGHEAKLISPHFVKPFRQGNKNDFADAQAICEAASRPSMRFVSPRNEAQQVVSALHRVREALVRERTGTINQIHAFLLEFGISLPRGMAVIRRLPAVLETQALPPRLVAVLERLQAHFKYLDEQIGQLEHELLTQLHEDERSERLLEIPGIGPITASVLMSELGDAHQYGSARQFAASIGLVPRQYSTGGKPTLLGISKRGDKELRRLLVQCARVIMLGIERRTDSLGTWVRSLLARRHSNVVACALANKLARIAWAILAKGTHYRSAPRLLRPDASDRLRLQ

SEQ ID NO: 169625 - protein, 316 aa, unidentified
MPATPSPPPVFVGIDVAKDHLDVHLRPSGEAFSLPHNADPFEELVTRLVGLAPELIVLEATGGFEAAVAAALASAGLRLAIVNPRQVRAFARAIGRLAKTDRLDAEVIALFAERVRPEARAIPSTQVRALADLVARRRQIIDMITAESNRQRPTHDPRLQKSLERHLAWLQHELREIDRDLDGTVRGTPAWRETEDLLASVPGIGPITARTLIAELPELGLLDRRRIAALAGVAPINRDSGSMRGRRMIMGGRTTVRNALFMATVSATRWNPIIRVFYQRLTQAGRPAKVARVACMRKLLTILNAVLRDRRAWNVA

SEQ ID NO: 169626 - protein, 373 aa, unidentified
MFHFTTLFIGMDVHKESFSLCYYDMMANQFKHSTKVGPNVNYIVNYVNELRRLYGQDAEVLCGYEAGCLGFTLYHQLQAHGIPCIVMAPTTVMKEGSKRVKTDKKDAAQLAKALAFRSYRPVHIPTVEDEQVKEYIRMRTDHKVALKKIKQQILAFCLRHDFRYTEGSSNWTQKHVRWLRSLNPDGLYAEILTEYLLTYEKLVDQIERYDARIEQLGQSDSYQEKVSRLSCFIGIKTLTALSIVTEIGDFNRFATAQHFASYLGLTPSENSSGDKERRGAITKAGNSHVRRLLIEAAQSLAKGTIGYKSKELKRRQSGNRVEVIAYADKANERLRRRYRTLVLGKNKKQNVAKTAIARELSGFIWGMMTGRIA

SEQ ID NO: 169627 - protein, 455 aa, unidentified
MLKPQVIPDEDHEVVYERVAAMDVAKASGVVCMRTPDPARPGRFVNRIWDNVPATRARIAELGRELLSCQVQMVTLESTSDYWRVWYYVLESIGLAVQLVSASQAKNLKGRPKTDKLDAMWLARLTQWGMLRPSFVPPAAIRRVRDFTRARTDLVRERTRVLQRLEKLLEDAMIKITSVARDGLKAKSVVAMVAALTAGERDPRTLADLAKGPLRGKRDQLAEALDGMFDSHHGVIAQMLLDQVAFLDQRIKQMEDQAIAALAQVTESWGVDAAGQTGPGCGTGPDSPVLAAAYRLAEIPGISVWLAIVIIAEIGLNMTCFPTPAHLVSWMGLCRSAASSGTRHGKGKQKKGNSYARAAAGQAALGAAGTATFLGERYARIARRRGKAIAQVAVARSIMIIAWHLLSDPAARYRDLGPDWHASRTNRDKKIRTHIHALKALGVTVAITDAEQQAA

SEQ ID NO: 169628 - protein, 343 aa, unidentified
MKLYCGMDLHSNNVVTRVIDTNDKTLYKKKLPCELDIILNALQPYKNSIVGIAIESTFNWYWLVDGLKEQGYEIHLVNTAAVKQYEGLKHTDDDSDAFWLAHLLSLGILPTGYIYPKEQRAVRDLARKRSQLVQNRTTQILSLQTLHIRNTGRPLSCNAIKKLTLEDIKKQFTDTNIILAMTSNLVIYEALKQQIKIVENAIENQIKLDPRYQNLMSIDGVGKILALTIMLETGDISRFESVGNYASYCRLVGSTKLSNGKRKGKGNSKNGNKYLSWAYVEAANFCIRYNEHAKRYYQKKSAKTKSAKTKSVVALKALAHKLARASYYVMRDNVEFDSRKLFC

SEQ ID NO: 169629 - protein, 464 aa, unidentified
MVLSTFNHIQGNNGSHWNRLMRGANAEKICIVAIDAAKFVNAAMICNVYGDILVKPFEFNAASAGFEKLVKEIEQAREGYGFEEVVVGIETTGHYYEDLVRLCEQEKFIVRIINAATTAKERETVLNYTKTDNVDLMAITQSLLHGRGQTRQEALPLLEQLKTLSRAHRTLIDARSRTVNHIRLYMDHIFREFQGVVETVEGEQVTLKIFWTFDSKSSLYLMRHYPHPSDILELGEEGLRRLSIEQNLKLRDQSIERLIRFARQSVSKSKADLQAELLLLRLKLDELEMETAQVTRVKAEMERVLLQTDGGILLSIPGVGVTTACELTAEIGDLSLFNRPEQLIKMAGTNPIIRQSGGKKATTHHISKQGRADFRAAVYRAGKAMKGQNPAMQKKAEEMKAKGKKMGQIYIALGNRLLRLAFAMMKKKQVYQPESGGKSLQSVIASKLRNKEKQALFFNRYVLT

SEQ ID NO: 169630 - protein, 351 aa, unidentified
MAHQSIPPDEARVTVGVDTHADLHVVCVLDRRGRILGTSAFPTTTAGYTALEAWVVGFGAVDTFGIEGTGSWGAGLTRWLAARGHALVEVNRPNRSARRRSGKSDATDAEQAARAVQAGTATGRPKSADGPVEMLRTLRVARRSAVKARTQAANQIRALLVTAPDELRRRLAAPTLTKLVPLAAALRPASTPTIIDTTKLALRSLARRHQHLGEEIALLDVQITKLITHSAPHLLAVKGLGVHTASALLIAAGDNPDRLHSESAFAHLCGVAPLPASSGRTQRHRLNRGGDRAANHALYILAVTRMAWEPRTRAYVARRLGEGLTKPEIIRCLKRHIAREIYPLLQALHAP

SEQ ID NO: 169631 - protein, 309 aa, unidentified
MEQQVKFDQIIKCGCGIDVHKKTVVATIRRSDTDFETREFSTYTRSLKSLREWCKNEGVTHIAMESTGIYWKPVYNIMEEDFETILVNARHIKNVPGHKTDKKDSRWISKLLLSGLLKGSFIPPREIRELRDLVRYKKKIIGEISSEKNRVIKILEDCNLKLSSVFSDVNGASASKMINDIIEGNEEVEGLMQHIHGKVQAPRAEIRQALEGTLTDHHRSMLRIVKMSIEGKEKIIEEIDKQIDASVEKYAVEIDLLQTIPGVGKESAIRIISEIGVDMSKFPNENHLSSWAGMSPGSNESAGKKKVPE

SEQ ID NO: 169632 - protein, 410 aa, unidentified
MIKENYIYVGIDLHKETHTAVMIDCYNQKLGEITFPNRPADFPKLVTKVKKCNTDAKEVVYGLENAYGYGRPLAVWLIDKGYFVKDVNTAISHRQAKHRGVMYRKSDSDDAEAIALATLNMLDKLPDACPNDAYWSLGQLVHRRDNIMKQRTRLVNQLHEQLCIAYPSYKQFFNDISRPTALYFWEHYPSRKYLKGKSVEDLRTELVPVSHNRCSTKNCEKILDAVASDKVKNNAYQDARDMVTLSIVSDLQHYDSQLAEVDKMLEQMYKMLGCTLTTIPDVNVITAVKILAEIGDIKRFSNANKLAQFAGIAPLHLSSSGKGKDVATKQGNRRLQATIYFLAIQMVQVSSKGTPRNSVVRAYYEKRKAEGKTSQQALICISRRLISIIYGMLKHGTEYRMPVVESAGEK

SEQ ID NO: 169633 - protein, 343 aa, unidentified
MTIVGGLDVHRQQITFDYLDNDGLVHWGQTRPATRKTLRGWLAEHCPDGDGEFVLEGCTGWRYVSEELAAVGLGVHLGDLAEIAALRGPKKRAKTDLADARLVRTLQLAGGFPKSWVPPAHVVEIRTLGRLYCALMEERRGWQQRIHAHLLHQGRPPVKALLSEAGREALAGAQLSAAGRQCVDTALRRIEELTIEIDPLRMQLESFARRQPRCRALQAHYGIGWLCAAIMWAGDGDARRFSSSDQLVRFARLDVTVYSSDRKREPGHLSRQGSPELRWAAVEAAKCAVRRSSPDYADYHTLAAKHDGHNRMNPTLAVEHRSCAAVITRRVTHSPRQYRRNLT

SEQ ID NO: 169634 - protein, 316 aa, unidentified
MTASIAPVAGIDISKDHLDAATHPGGETRRFTNDRTGHTALLRWLERNDVQQVVFEATGPYHRTLERRLAVAGRPFAKINPRQARRFAEATGTLAKTDRIDAIGLARFAAVLQPECRPLRSETLDQLAELVAARRMLVRDRTATTNRAKTLTLDLLKRQAAVRLKQIARQLDALDAQARALVVADPLLARRLVVLTSIPGLGEITAIALIADMPELGQMDAKHAASLAGLAPVARQSGTWRGKSFIRGGRAHLRQALYMPALVAARFNPDLKARFNAMTAAGKPAKVAITALMRRLIVLANALLRDDRTWTQRASA

SEQ ID NO: 169635 - protein, 358 aa, unidentified
MRIIGVDLHTRQQTIAMLDTETGELVEKTLQHDGDEVRRFYSALPGQVLVGMEATGSMHWFLELLDELGIDHQVGHPSEIRKAEARKQKHDRRDAVLLLKLQVENRFPSIWLPSTALRDLRTLLLHRHQWVRMRTRVQNALQAIALSRGLRRGKTLWSQGGQHSIESLSLPPNAAHRRTELQRLYRNLNEQIDERDKGVNDQALQRPGAKLLMTHPGVGPVTALATDVFLGAPARFEDGKAVVSYVGMIPSEYSSGGQQRLGGLSKQGNPFLRFLWCEAAVHAVRRDPELQRFYRRKLAQKGLGKARVAAARKLGIRLWIMLRDQIDYQEFCRRGQMRQKNGGACAGMPEVGHSPAMQ

SEQ ID NO: 169636 - protein, 355 aa, unidentified
MTNTKYIGMDVHKESISMAVRNVDGKIVMECVIETKANMILQFIEGLRGDVYVTFEEGTWAAWLYDLLRPHVTKVVVCDPRRNALLQEGNQNDRVDARKLAELLHHNQLRAVYHGDHGLRTLKELVRSYLTITQDLTRVMTRVKAIYRSWGIPCSGKQVYAPGHRSEWLGKINEPGVRRRAEFYYQQLDALRLLRQEVRRDLLAESKKHKAWKLLWQIPSIGPIRAAVLLGILQTPHRFRTKRQLWTYGGVGIETSSSADHQVIKGQLERKKKQVEIRGLNRNYNHDLKNLFKGAAIVAASKPGPFAEFYAELLAKGMRPEMARLTLARKIATIVLIVWKRGVRFDAHHLKPQTA

SEQ ID NO: 169637 - protein, 384 aa, unidentified
MRSVCGLDVHKDSVYLCILSEDGELIEKVFGVLTFQLHQMRDLLLAHHVEKVSMESTSVYWIPIWRILAPNFHLQLVNPYFIKQLPGHKSDVADAQWIAECTMKNLISSSFVPPEDIQQLRQYDRRIFDLDEEIVRKLSKLDAVMQRCNIRLSNYVSNVDCKSYKDVVRKISEGVTDPEILIEEIHGRIIKHHGRETILASLTGVVSQAEIDVLRQLREELDLAEEHKQECLERMLDICKEKYPDELRRLQTIPGVKERTATSLIAEIGTDMSKFETANHLAAWSGLRPRNDESNRKFKSRRITHGNVYLRKNIIQCAWAASRTKNCFFSRFSYHQTQVRKKNKMKVIVSVARKLLVAAWHVIHDKTDYVDFQKQDRQSPASNG

SEQ ID NO: 169638 - protein, 370 aa, unidentified
MLDTTTFIGLDVHARSIKAVSLDVMTGEVRAATFGYDAGAVAEWVRSVDPRARCVYESGVTGFDLQKRLSGLGVDCVVGAVSKMIKPSADRRRKNDRNDAEFLARMLSVGNVVEVWVPDDECEAARDLTRALEDARDDLSRSKQRLSKFLLRHGLVFDERTPTGRRKGNWTRAHWSWIESIRFAERADNDVLAYYVDAVRRAAEEKARLEGLVEAEARKPRWRKRVDSLRCLKGVDTASAADLVFEAGEFSRFGNARSFAAWVGLTPSEHSSGESDRRGAITKAGNKHLRKTLVEAAWHYLTCSGRPKGLAKGQAPDRGARRHAAKGVRRLVERREALLARGVHGNKANVATARELACWVWAVGLMAEEA

SEQ ID NO: 169639 - protein, 362 aa, unidentified
MFRPHTLYIRIRIVRKVSEPAFAMKDQDVSDVVRTKKRTAMRHIGIDVSKATFVVAYSSDKGGEIRTFNNTTAGIRQFIGTLPKDGSIHCVMEATGNYSALLLYMLNVAGITVSMENPLKIKNFARAMLSTVKTDKIDARLIALYGEKMNPQPFKIQGEAILRLRQKRTVIRQLTKQITAMSNLRGSLACLPVPDKGATHTVDETIEFLEKRRDRLQSELTDLVEVEFSRQLALLTTIKGIGITLATALIITTGGFTYFQNAKQVSRYLGICPTYEQSGTSVNIKGHINRNGDAYTRGLLYIAAWPASRFNAQCKETYTRLRQNGKSGKLAMIAVANKLVRQAFAVVAHDKEYVDGFVSNRP

SEQ ID NO: 169640 - protein, 352 aa, unidentified
MFYVGLDIHDKRIAICVLGETGPIVRRAQVRSIDEMMRVLEALPDRFEVCYEASCGYGHYHDTLSPVAARVTVAHPGQLRLIFRSKDKNDRKDAERLAKLLYLGEAPAVHVPSADVRTWRELITCRGRVIAKRTRAKNSLRTLLRCAGVVPPSRPALWTKKGLEWLRRLELPTASQRLRRDLLLEEIEALTNQVRRIEQQLNHQAGRSPAVSRLRTIPGVGVRTAEAVAAFVDDPHRFRDAKAVGRYFGLVPGQDQSGDRNRLGHITREGPAVVRQLVAEATWQALRRSPTVRAYFERVRRGDPQRKKIALVATAHYLVRVMWALLKRGTTWEEGLAPADEPKEVALASAVI

SEQ ID NO: 169641 - protein, 401 aa, unidentified
MPTLQDNGQRIKRFRELKTTLRTKRDRLLVGLDVAQAAHVVHLRHAHTRIVVPQLTIPNTTAGFAQLWARLQQAQRATGCREVVCGLEPTGTYHEAVAQFLEAHGVDVVLISSSIAYWNRRTQDGTWDKHDPKDAANCADLLEQGKVLFYSQPTGPLAELRRLVKVLRRARGELAACKARWRTTLRPTLGPMGEPLPNRLRVEVPAVLQAWEPAAPGRPAVAKGRLPLGLATACTDLGAQVEAVQARITAIEQALTPLAERLPAYALLRTIPGVGPTVAAILLAEIGDVAWFTQFSQLRKLAGLDIIRAQSGQFAGQARISKCGRSLLRWACYHAAMGLARTTAGQARLAALKAKRRGDRYAGFKAITELAAKQLRVVWGVWRSGQPYDPRRAGGLQRQPR

SEQ ID NO: 169642 - protein, 383 aa, unidentified
MAKKSKSNGNLKVAQFDADKRFYVGLDVATKKTQICILDESGKLYQQREIATHPAAIASYLRKYCRSNVEVIGLETGSMSNWLYHGLKASNLPVVMLDALHIHRFLSVKRNKTDVNDARGIADLVHKGLDWLNVVHVKSAMCHEIRSLLTIRNQLVKQRGQSEMMVRSILRMHGSLISCKGAGNKTFREEAMSIMSEIWDTQNMDLRPRLVPILELCEEITKRMQQIEVELKLLAESEPVVKRFTEIPGVGAIIALSFYTAIEDPTRFNRVEDVGAYFGLTPRVYQSGETETVGKISCRGNQMTRTHLVQAANVILTHTHSFSSLKAWGLKLSKKAGYNRAKVAVARKLAIIMLSMWKDDLPFYFNNERLAEYKATRAIAATA

SEQ ID NO: 169643 - protein, 339 aa, unidentified
MRLYAAFDLHSSNSYLGIIDENGKRIFKKKLRNDPAMIRETLKPFKTEIEGIVVESTFNWYWLVDLLKEEEYRVHLANPSKIQQYSGLKYSDDKHDAFWLAEMLRLKILPEGYIYPKEERPIRDLLRKRGHLVRLRTALIVSLQNIIARNLGVKLKANDIKFLTTDRVTPLLQENQDLSLAGKVSKESIDFLSRQINAIESTITGRIQLSNPYDRLLSIPGVGKILAFTITLETGPIDRFPKVGNYVSYCRKVPSARFSNDKKKGTGNRKNGNKYLAWAFSEASDHARLFDSEARRYYQRKLQKTNAPVAHSALAHKLARAAYYIMRDGVLFMPNKAFV

SEQ ID NO: 169644 - protein, 405 aa, unidentified
MRYYIGVDWADAAHAVWVEDDEGTRVVSRAVPHTAEGLAEWGRWLDEQRATGIELWAAIERPDGRVVDSLLDHGVVIFPVNPKALDRARDRFRTSQSKSDPFDAHVLAAFLRTDHPHLQALQPSSEAAQELKLLTRDYARLVREQTRRLNQLTVTLKEYYPRALELCPDLTTQRAWALLRAYPTPQAVAALTRDQWQHFARAQRWTAEQATALWELLCQPQVPVPAHVVRAKSRLVSALVTQLEAVVVAVAEYREAVTECFAGMPAAEWATTLPAGHGILVPTIWAELGDVVGRWASWQHLQGHSGVVPVTVRSGKTQYIQFRFACNRHLRTVLHLFALCSLTRSEWARAYYDRQRARGHRHHEALRALAAKWLKIIFVLWQRQIPYREEYHLATMARQHLRQVA

SEQ ID NO: 169645 - protein, 423 aa, unidentified
MMKLKYSICCGLDVHKNVIVATIVTTNKDGISEYLQKSFSTINSDIQRFHNWLIENNCYHVCMESTGKYWIPIFNYLENDIDVFLTHPKYVKAIKGKKTDKKDSKWIADLYKFDLVRCSFIPPKDFRQLRELSRYRFKLVCMKSSEKNRIQNCMTISNVGIASVLSDPFGKTATEIISYLLEHTADSMDEKAVRKLIKKGAKSKSDEIIEAIKGYTIETDQAKKLELARGHLEYLDDMITQTEVELYVRIKPYYEFVEFVSTMPGMTELSSTIVLAETGVDMDIFDDAKHLCSWCGLSPANNESAGKKKSVRIAKAGDYLKPMMVQCALAAIKSKKQPYFAIKYGRIKKRRGHKKAIIAIARMMMVCIYHMVSEKKPFTPTDYEELMDPQNHVESVVLNENNVFAYLESLGYDSSKLVKRNDN

SEQ ID NO: 169646 - protein, 394 aa, unidentified
MNSMDRSETVKIAKSAWNRNLVDEKPIVVSCDVHTQNTYIFGVDTRSGEIKMEHNVFGGIQEVCRAVSKIGRKEDMIILYEAGCFGFSFYRKLTEAGYSCKIIAPNSIPRINGPKTDRDDAIRNFDYFCAGLLRFVWIPSKTAESARECLRYRYQLVWERTGEKQKVQAMLKRQGVIFTETKKPWSKKHYAWLKIVVLPAEVRIVLDMRRKKIERLNEDIDELDIKLRALMDGNANYRRLYEAYLKMTGIGPLGAVTWVLEGHDLNRFARPSNLMSYLGLVPKKNSSGGKDPALRITKAGNAYLRYVTICAARCYGDRRLTQKTEDIVKYPKPIGDLVKRSQDRLCNRYLHLRQNKKNGNKAKVAVARELCGFIWEMATIVLVQCEAEEMKKAA

SEQ ID NO: 169647 - protein, 315 aa, unidentified
MSTISTMSFYVGIDISKTRLDVHVRPTGTAFSVSRDPDGLADLVKRLLFLMPTLIVLEATGGFEITVSAALAGAGLPLAVVNPRQMRDFARACGQLAKTDALDAKAIALFAERIQPEARLVPDEQARALADLVARRRQVVDMITAEGHRKREAREPKLARRIGTHLTWLRQELTDIERELDGAVKASPAWRADEKLLISVPGVGNTTARTLLAGLPELGTLDRRKIAALVGVAPLNRDSGTMRGKRMVQGGRGSVRAALYMAALVAARRNAAVRALYERLRAAGRPAKVALTACMRKLLTILNAILRSRQPWKTA

SEQ ID NO: 169648 - protein, 320 aa, unidentified
MRNAVGLDISKTTFDATAIIGGIEKSAKFDNDSKGFEQFKDWLDKLNCPDAHICMEATGNYYEGIADYIGSLYKVSVVNPLKISKYAESRFARTKTDKQDAKLIAEYCQTAKAQDLVIRKPIIDDGYKLKRLSAFYVQLTADSTAQKNRLEAAKDTFVVKICQSNIKHLQRQIKAVKKELEKLTNQPALKAQTDRLATIPAIGRLTAVMLLNYLSGADFQTSNKFAAFAGLTPQIKDSGTSVRGKPSLTKYGNRRLRALLFMPAMVAYRIKAFPDFIARLEAKNKPKKVILAAIMRKLAVIAYHVHKKGENYDPTRYRAA

SEQ ID NO: 169649 - protein, 391 aa, unidentified
MSMYFIGIDISKYKHDCCIISAADQKVVSKVTIKNNKAGFNELLTIIHSLANPADIRIGFESTAHYALNLELFLENSLLTFMEVNPVLISEYKKSKTLRRTKTDSVDCESIARWLMTVEYKPHSKGFYHAYSLKSLTRLRDKLIRQRSFYLVKITNVLDHTFPEFKPLFNERLSKTALYLLENYGSAEKMARMNSASYEKLRSVSRGKFSPQQFLRLKELAANTVGVNNSIFDVELNSLLSLYKSLVKEIDTIEKEINKLIEEVHPHYMSVPGIGPLSAAVIYSEYGDISNFTNPGQMLAFAGIEPGINESGTESHGGKMVKRGSSQLRYTLINCCLPLIRFDMTFATYYAKKRGEGKPHRVAITHVAKKLIRVIYALESQDIDFNAQKLR

SEQ ID NO: 169650 - protein, 493 aa, unidentified
MDRNGEQVQVDSIEEEILARVAAIDVGKDAGMICTRVPHPNQPGKRASTVSSVPARTGTILALADRLVAEGIERVVLEATSDYWRPFYYLLGARGLLVWLVNARDVKNVPGRPKTDKLDAIWLAKLNERGMLRASFVPPVEIRQLRDYTRLRVDLIGERSRHIQRLEKLLEDALIKLSSVATNMMGVSGRAMIEALIAGERDPHALAELAKGRLRVKRSALVEALNGRFDEHHAELAELLLDQIDGLGAQIDHLDARVEQLIAELPAAQALPEPAGPGGPDTPHHLAALDRLDEITGVGRHTAQTIIAELGLSMAIFPTAGHLVSWAKLSPRAIQSGAKTRSCKTGKGNPYLKAALGEAAASAARTNTFLGARYRRLVNASANSKPSSRSPDPSSSSSGNYSPSPPAATPTSGPSSSISAYAPNAASRTTSASSKPSATRSPSNRQPHEHQPPARLFPISTSTRSSTSPRPDVRAGSCPTTSPSPGPPPINGS

SEQ ID NO: 169651 - protein, 487 aa, unidentified
MGIDRRLVGIDLGIASAHTVRVLNESGEIVAKRKAWPTVESLSEVESAALADAPAGTRLEVVMEPTGPAWLPIAVFFTRRGHVVHRVSSAKAADLRRFLSRHTKTNGIDADTLARLPLFDPAGLQPLQLPGAERAALDRRVRACDRLTQAGAEHKKRIKDLVRQLLPMTPLAGDLGAADLAVLERCADPHALLKAGVKRLSALIAKASRNHQGAERAAEWIAAAEASIDLYAGHPGVAFADLAAEVATEVRLLRAVQAELAAHGDERETCYRWVDTAGLARSLPGLAEVGGPALVACMGAPGRFRRGKQFRAFTGLAPRASETGDTDRKGQPMSKAGSSLLRTTLVRAADHARKQDPQLARIYYVQMVERGKDHLGALCVVAANLAERAWAVMARGMPYVICDTDSRPVTPDEAKAIIAQHWTVTAEVRARRRSKKAGKAPQKVLAGQSKPHAQDAGTRGDLPRPASSAQRPSPVNNKNTSSTRRTA

SEQ ID NO: 169652 - protein, 410 aa, unidentified
MTAVYSVGIDVALRSHRVAVLGGDGEAVGKSFTIESTAGGFAALVETLHARGAGAAQSVIGLEATGHLWENLEAHLTRVGYRVVVLNPVQTRRYRDVLRRKAKTDDIDAYVIAGLLRSGAAAASYVPAETIQSLRELARLRARLMRDRQNYLRQLGAQLSVVFPEHAEALGDLLTARARGILRACPTAYHLAAATPRTIHHAAHSAGARGFTREDATRVRDLGRASIYSGKAATARGNVVRTLVTQLERLTAAIEDLDTAMAEELPPPAGGGPPSDAELLHTLPGVGTHTVATLLGELGTLSRFTSSKALVAYVGFYPQLAQSGERAAAPHLVRLGSRLVRRTAYLMAVNAIRGSAEFRTLYLRKKAQGKKPKQALIVVAVKLLHTMYAMVRDRHAYTAGRVLVAPPAGA

SEQ ID NO: 169653 - protein, 447 aa, unidentified
MLQEGMKAATWRELETNGKFTKNDKLTFISDDMLIIGCDIGSEMHYVRAIDSRGRELSQDAFPFSNSSEGFQSAKAWALELAAANDKHQIVLGLEPTGHYWFCLAAWMVSNDISVVQVNPYAVKQTKEIEDNSQRKDDRKDPKLIANLVKDGNYGMPYLPEGLYADLRRLSMLRDQLTEDRIRNINRLHREMKIYFPEYRDAFGKLDGAFTLEALKAAPFPEDIVRLGVDGLKDIWHRAKLRGRGYSKADQIVQYAKESIGLEHGRAGGRKAVKILAEQIESLSEALEEIEAELHQKCREIPYAENILEIRGIGENILAGILAEMGDITRFDDASEIQKLSGLGLVACSSGKHKGETKISHRGRKRLRYWLFQAAKSAVSHGEEFKELHAHYTTRKDNPLKKMQSLIVIACKLLRIIFTLLRTGCRYDPMKMLRDIKRPERAAAQAA

SEQ ID NO: 169654 - protein, 423 aa, unidentified
MTSMTATVAQANQSCPPGLLVAGIDTHKHTHHVAVVDHLGRPVADQQFGTTGRGYTQIVQFLRAHGTVTRVGVEGTGSYGAGIARVLTASGFTVVEVARPNRQARRLRGKSDPLDAHQAALAMLTGAKGVAPKSGDGAVECLRILISERRSAVKARTQTINQMQALLITAPQPVRATYRALPADRLVATLARTRPGTTGTGQPEQIARQTLKRLAIRFQNLQAEIAIIDEQLDALIRVVNPALLSRNGVGVVTAATLLVAAGDNPDRLTSKASFAAMTGVAPIPASSGQRIRHRLSRAGDRHANSALPRIVLLRKRHHEPRTMAYIARRRAEGLTDRDITRCLKRHIANEIYAVLMNPGTDNPVGQQLRIHRQRIGIPITTLAATLHVPYQQLRRLEIGIRSDPELEQRAKAVLDQISPQSAA

SEQ ID NO: 169655 - protein, 514 aa, unidentified
MKSIYQNQCAELRQLFAQVSPDRILAVAIDFALDQHVVLFCNGQGEQVLKPFPVHNNTAGFLFLKERILSTCRRLQIDPSHVVLAGEDDPPYALNFLWALNQEWLVLRVNARIAKEHRENLKASTDLLDLLGIAKALLSRQAHRVFPLNLEANDALQSLKTLGRDRDAIVKDATRLKNRIHSHVKILFPGFLEAHKDNPIQAFGKPSLALMAKDDFCATTYARKKAAPLARCLKSLRLRLSQEKAVELIKRASEVLAPPPHRIESEQLALGSLLVAYQALEEAAYQLELQQSRILATHSAAMLTTLPGAGIITVSAMAGELGQPEELGSRAQMASYAGIVPQVEQSGGPNSATQTKPTGHRCNHRLKNHLVRAAMNIGTLFGPTEIRQDYRALRDQGRHANFIHARRLLGQFKALTSSGSCWLPPSLREGVVDQGEAAKARYRNELHEYFSYLWPKLVAKWAVFKLEGIFEDPQSPLGQWRDMIQNIYRISLPMDGPPILKDEEESDVSVGTSN

SEQ ID NO: 169656 - protein, 335 aa, unidentified
MEPTTIAIDLAKRVFQIHYVEPDTGTIRSKVLKRAQLVPFFANRPASRVVMEACGSAHHWARVLARLGHDVRLIAAQFVRPFVKSNKNDAADAAAIWEAAQRPGMRFVAVKTEDQQAMLALHHIRQQLVRIRVMQINQLRGLLYEFGVVLPQGRRASVEAAKVALASLADQLPAMLTDSLQDQVSRLRTLDEQIARIELRILDWRRNDEACRRISEIPGVGVLTATAAVSVIGQAKTFRSGREFAAYLGLVPRQNGSGGKVKLGGISKRGDVYLRTLLIHGARSVISAAKHLPERLRALLTRRPTNVVAVALANKMARTIWALLAYGRTYQPTPA

SEQ ID NO: 169657 - protein, 430 aa, unidentified
MKSNTQNAKIEAITEKTLVLGIDVGSETHYARAFDYRGIEYSKKPFKFSNTEAGFVTFKEWILDLKERHEKDKVVPGMEPTGHYWFNLGKFLQDNEMKPVLVNPHHVKKSKELDDNHPTKNDRKDPKVIAGLVREGRYMIPYLPDGVYADLRTASNIRFQLQAELTRIQNRISRWFNIYFPEYKTVYGKPDAKSGILILKAAPLPEDILTLGIDGVNQIWRDAKLRAVGKARAKTLIEAAEHSVGSKEGAVAARMEIRMLLEDYESRNIRLQEVMTLIEGLVKQIPMAEKLLEIKGVGIRTVSGFLAEVGDISRFNNPKELQKLAGLALVENSSGKHKGETTISRRGRKRLRYLLFEVAMSLVAKNPEFRELHNYYTTRRLNPLKKMQSLMAIAAKLIRVFYVMLTKGVNYDPKKMVNDIKRPAVYLQTA

SEQ ID NO: 169658 - protein, 435 aa, unidentified
MEEVEDEPLFCDRVAGIDIGKATVMVTIRVPSEARAKGRQQETREFGTTRRELLALADWLRCWQVERAGMEATSDYWKPVLFTLEQEGFDCLLYQASQVKALPGRPKTDKLDSVWLARITEQGSLAGSFVPPEEIRRLRTHTRYRRKLVQMRTAQKERCEKLLEDAHLKLSSVISDIHGVSGRDMLRAIAAGERNPKVLAQMARGVMRSKIARLEQALDCSFFTGEHAFILTMMLDSIDSLTAQAGVLDARIADMCQPYQRQLEQLDEIPGFGTTTAQDLIAEIGTDMNVFPTAGHLASYARQAPRVKESAGQRKGKNATGRGNPYIGGALGEASISAGRTHTFLGEKYRRLTRRMPKRKAQVAIMRSQLVIAHALLSDPDARYQDLGPDYYERKADIRRRARNHARALERLGYKVTLEAIDPGTGELHLVATAG

SEQ ID NO: 169659 - protein, 347 aa, unidentified
MKILALDLGKYKTVGCDYERESGAHRFRASFTTPAALQQLVKEVKPDRVVIEVCNIAGWVCDLLRELGVEVQVANTSEDAWRWRKVKKKNDRCDALKIAQLSAVNQIREVHIPRIEIRQWRALIAFRQQLVRRRGRMKNHIRDLLVSEGQILPRGASCWTQLGVARLEGMARPLSEVGLQELWRGQLHSELRQLREVQQEISAAEEKLDAIAASDPRIKLLRTIPGVGPRLAEAIVALLDRPERFRHAREVSAYIGMVPKELDSGETVRRGRITKQGSRLVRSLLVEVAWAGLRYNPWVRETYQRISGGKKSRKKIAIVAVGRRLLVRCWAMLRDGTNWRPPVAKAA

SEQ ID NO: 169660 - protein, 338 aa, unidentified
MKLKRIGIDLAKCVFQIHGVDSHEQVKVRKALKRRQVLDFFRQLEPCLIAMEACGSAHYWGRELTKLGHEVKLIAPQFVKPYVKSGKNDANDAEAICEAASRPTMRFVALKTPDQQAGQALHRVRSRLVRARTALVNEVRGLLGEFGIIGTAKGISACRRLIAAVLEDAESGLPGTMRELLAQRSEELTQQDAHLAQLDARIKQQCREDKRIERLLAIEGIGPISASAMVAAIGDARQFKSGRNLAAWLGLVPSQHSSGGKERLGAISKRGDTYLRTLLIHGARAVVNACKDKTDRKSEWIKALMTRRNKNIATVALANKNARIIWSVLSREESYRTV

SEQ ID NO: 169661 - protein, 343 aa, unidentified
MQDVATVGLDIAKQVFQAHGADASGETLFNTKIKRENVLEFFSRLKPCLIGMESCATSYYWARQLLEFGHDVRLIHTRYVKPFVKRGKTDANDAEAINVALTQKTMRFVPIKTLSQQAAITIFRTRSLFVSQRTQLVNALRGHLAEAGLIAAKGIQNYSKLVNLMETAADTVLPTVMKQALTDICDQIHRLNDLVTKLDKEIERRVQHDENACRLLTIPGVGPKTAMCVIATIPDIHRFPSGRHFSSWLGLTPRTHSSGGRSVLRRITKMGNSELRTMLYLGGTVIMMRDKKTPIGRWAARLRARRPYKVAAIAVANRLARIIWALLTNGGVYDLTHGREASA

SEQ ID NO: 169662 - protein, 369 aa, unidentified
MKQLITYIGLDVHKETIAVALAEADKRSDVREYGKIANTPAAVKTLVAKLARNGHELRFCYEAGPCGYGIQRQLTALEHDCIVVAPSLIPRRPGERIKTDRRDAINLAKLHRAGELTPVWVPDAAHEAIRDLVRARLAAVRTLRQARQQLSGFLLRHGHHYNRPAWTLMHRRWLAGLRFEHAAHHIVLEDCIAAVEAATARRDRLEAHIAAALSDWSLAPVVHALQALRGMALVAAATLVAELGDITRFANPRQLMAYLGLVPSEHSSGGTRRQGGITKAGNGAARRMLIEAAWSYRFPARISREQLLRQEDLAKPIRDIAWKAQERLCRRYRKLARAGKPPTVVTAAIARELAGFVWAIARQTLPTGA

SEQ ID NO: 169663 - protein, 400 aa, unidentified
MTADGEIDIYLGLDVGKGEHHATALAPAGKKVFDKRLPNTEPKLREVFTKLQAKHGIVLVVVDQPASIGALPLAVARDAGCRVAYLPGLTMRRIADLYPGEAKTDARDAHVIADAARAMPHTLRAVEPADETVAELEMLTGFDDDLATEATRTKNRLRGLLTQIHPPLEKVVGPRLGHPAVLTLLERFGSPAQLRKAGRRRLVTLLRPKAPRMAERLVEDIFTALDEQSVIVPGTDAAALIIPSLVSTLGSVLDQRTLLASRIEELLEAHPLSAVLTSMPGIGVRTAARILIDVGDGSAFATAGHLAAYAGLAPVTRASGSSIRGEHPARRGNKQLKRAFYLAAFASLSQPESRTYYDRKRREGKHHVAALIALARRRIDVLFAMLRDGTFYEPPVTAAA

SEQ ID NO: 169664 - protein, 411 aa, unidentified
MEVVHARCAGLDISKKDAKVCVRIAGAGRRKTVETVTTWSSMTSQILALREHLIAERITCAVMEATSDYWKPFYYLLEDAGFDVLLVNSRHVKNLPGRKTDVADATWLAQLGAHGLVRASFVPPEPIRQLRDLTRTRTALTRERSREVQRLEKLLEDAGIKLSAVASDIVGVSGRAMLESLIAGNSDPAALADLAKRRLRSKIPALTEALSGRFTDHHAFLARVHLDLIDQHTAAIDEITIRIEEMIAPFHGFRDLICTIPGISTLTADVIIAETGADMTRFPTAAQLASWAGTTPGNNESAGKVKSSRTRPGNPYLQGALGAAAMSCAQNPRTYLGARYRRIASRRGPQKANVAIQHSILIAIWHMGTNGCLYDDPGADYFNRLHPDRAKKRAINQLEAMGYQVTLTHAS

SEQ ID NO: 169665 - protein, 411 aa, unidentified
MEALIERVAGLDVHQGSVVACIIIGAAGRRPAKEVRSFGAMRQDLAALRAWLLERGVTHVGMEATGVYWRPVHAALEGAFTVIVGNASRMRNVPGRKTDVKDAEWIADLIRHGLVRASFVPPPEVRVLRDLVRHRKALVGTLAAERNRTIKLLESAGIKLAGVMSSVFGVSGMLMLRALAAGTAAPAAMADLAKRRLRSKLGQLTLALDGSLALHQRLLLGMHIRRLEEIGRDVTEVEAAIVAAMRPFAAQQALLVTIPGVDALTAAAIVAEIGTDMAAFGTAQRLAAWAGLCPANHESAGKQKRRGTRKGDPYLKATLVTAAVCAARTNGTYLRDKFHRLRARMGAKKAAVAVAHKILLAVFHMLQRAVAFADLGGDYLDRVDKHRTAKRLIRRLDALGYDVMLRPKAAG

SEQ ID NO: 169666 - protein, 339 aa, unidentified
MKLYAGTDLHARNHHLAILDEEDQKIFHKKLPNDKKAVLKTLKPFKQDLQGVVVESTFNWYWYVDLLMEAGYKVHLANPGGMQKYKGLKHSDDKHDAFWLAHMLRLGILPEGYIYPKQTRPVRDLLRKRAHLVRLRTSLILSLQSNVQRNRAYHLTSNEIKGCQIGTILKFFQAHECLELTGKVGKATIDFLSERIKEVEKQVRVFFKPYKPYKQLLTIPGVGDILAFTILLETGSMARFKKVGNYVSYCRKVSSRWTSNGKVKGKGNKKNGNRYLAWAFSEAAEYARRYNVFCRAFYNKKLSKKHPMVARNALANKLARAAYYIMRDEVSFDVTKLFA

SEQ ID NO: 169667 - protein, 367 aa, unidentified
MSEGSTYVGIDAHKRELHVAMLIGAAAAPVSWTVANEPKAIDRLHRKLEREASGPVRVCYEAGPCGYALQRALTGGRLSCIVIAPALMPRKPGDRVKTDKRDARKLAELFRAGLLTEVHPPTPADEAVRDLCRARDDAREDVQRARHRLGKLLLRRGLHFPGRKNWTKAHRRWITTIEWEHAAERAVVNDYLLAIDHVESRLVELDARLVETAQSEPYCQPVAWLRCFRGIDTLTAMLILAELHDFRRFPTARALMAYLGLVPSEDSTGDRHRRGRITKTGNSLVRRVLIETSWHYQHRAGVGPALAGRRKGQPARVIAIADRAQQRLCRRFRRLLAEHKPAPKVVVAVARELAGFIWAALQCPTAA

SEQ ID NO: 169668 - protein, 485 aa, unidentified
MAKRRMSTFERLESGRLNRKQRRELGRQVAVADPGLTIVHANAGGIDVGNESHYVAVPPDRDPNPVREFGCWTAALNQIAEWLQSCRIDTVAMQATGVYWIALYDVLEQHGIQVVLANAQHTKNVPGRKTDVQECQWLMKLHTYGLLRDSFRLAQEMESVRTIWRLRDRHVKEAGRAVQHMQKALTKMNIQLANVISDINGLSGQEIIAAILQGERDPWKLADLKHYRVRASREEVARSLEGNWREDVLFELQQAVDSYHFAHRQMQECDRKLEGYLASLPARMLDIPVQPEDTQATTPKKKTKKAKRPRGNQPHLDLKTELKRICGVDLTSIDGIDVMTALTIVSEIGTDVSRFQDETHFASWLGLTPAKDITGGKTIGRGKRKVKNRVAVALRTAATTLLKSDSYLGARYRSLRRKLPSFASAVKAMGRYLAVLIHRLLTKGEAWMDRGATQFERRHTEQELASLSFKARAKGFKLIPITEAS

SEQ ID NO: 169669 - protein, 344 aa, unidentified
MNTSMNHIVGIDIAKDTFTARLLALGESPTPIGEVESFPNSSEGYAQLKRWAVGTGAEPESSQVVMEATGVYWEACALYCHGEGFAVSIVNPAQIKFFARTTLMRGKTDTLDADLIARFGAAIKPRVWNPPGEAFEELQLFSRQRDAYVAMLTQERNRLHALSHRVHCPRQVIRMTKAHIRFLEKRIEELEQAFKDHLDQSPEWRRSVDLLTSMTGIGVVTAGVFLTETLAFSTMVDARQLTAYAVLAPAPHTSGTSVRRRSRISKIGNPRLRRAAYMASISGIRANPVLKAFYKRLREKGKPAKVALVAVARKLLTIAFALVQSQRPFDPLYISTKPGAKVCA

SEQ ID NO: 169670 - protein, 428 aa, unidentified
MNPEDGTRLEEFRQFRKEVRGSGEYLLVGIDIAKEKHYAFFGTAQGKTLLRRLVFENNLEGFRRLLAQAKALRDQNGLKRIVFGMEPTGNYHKPLGEHLIQCQHLVVLVSGVAACENRKTLDGRWDTNDTRDAANVADLMSQGKCLFYEFPVGPLQDLRNLLSLKRRFKRVEHGYQVRIRNHLLAKYFPELDRYYRGSSQTDLAIVRWCLDPSVIAGLEYKRFAEMVSSSRGRYSQEKRLQTIWKLAVDSVGCEAGETVTFEAQVMVEGLKQIRESLRQIEEKIHETCLQFSEYEYLLSLPGFGRDVASKVLGAIGNPFRFQSGRQVLKLSGFDLWAKRSGKKSENVVPVISRRGKADLRFALYQAALIASVKNPGFIAYYTDKLRGREREPGIKHKMRVKLAAKLLLIAWTLMKKKEPYNPDYLVIE

SEQ ID NO: 169671 - protein, 326 aa, unidentified
MSSVLGVDVSKTKLDVALLREDGKYRSKVFANTGAGFAALHQWLQTHLPQGLDELHVCMEATGAYHEPLALYLHDQGLCLSVVNPIRVKRFIELEGSRNKTDAGDAKSLARFCRMTAPEPWQVPTPGVRALQALVTRLDALQEMQQSEANRLSVAHAAVQPSLHEMLATLDKAIAEVKDQIRQTIDDDPDLRQRNGLLQSIPGLGERTIPQLLAYIGNPERFKNVKALIAYASLSPMIRQSGTSLDRRRGTHPQGHRQLKRALYFPAMVAGQYNPVISAFWQRLKAQNKPGKVIVVACMHKLLAIVYGVLKSRIPFDAGRLIQTSA

SEQ ID NO: 169672 - protein, 372 aa, unidentified
MSANAITWVGMDAHQNSIKVTALFPDRPEGVEWTEATTPEAIRRLARKLRREAPGEVRACYEAGPTGYALQRQLETAGVICEVVAPSLIPVKPGARIKTDRRDARKLAELFRAGLLTEVHAPSESEEALRDLCRCRDDARTDLLRARHRLGKFLLRRHCLYRQTKHHWGSRHLRWLEELRFDDPISQSTFDSYLLAVQQLAERLAQLDARLAEYGGEEPYREPVAWLRCFKGIDTVTAVCLIAELHDFRRFRSARELMSYVGLVPSEHSSGERERRGSITKTGNRHVRRLLVEAAWHHRHRPALSAPLRKRREGQPARVLVIADRSQERLCARYRRMTARGLSQPKTIVAMARELVGYLWAVLHPAAMATRN

SEQ ID NO: 169673 - protein, 490 aa, unidentified
MKMLYSRCAGLDVHKKSVCACIRISQGQQTSQVMRTFGTFTEDLEGLRDWLREHKVNHVAMESTGVFWIPVWNVLEQCEMEFALTLINPQHVHALPGHKTDRKDGQRIAELLQYGLLKGSFIPPPPIRELRDLSRRRTHLQGDRNRVINRIRRLLETANIKLGSVVSDITGRTASLILGEICRGNQIPEELVKLAQASLKNKRAELISSLKGFYSEHFRWLLTEAVQDLAHLDRKLQPLDRQLAQRLRAHPDLIRRLCTIPGVNFTTAAVIVAEIGSDMSRFPDAAHLVSWAGVCPGNNESAGKRFSSCMRKGNRYLRRVLTQSAWSITHKKDCFLTSLFWRVAARGGRKKAAMAVANRILTIAWHIINNEGTAYREIGGNHHDRLHPERSARRLMRRLEQIGFEVSVKSKSAEPPPIPESVTPPTYSEGRRSRRSRTATPAHRPTPKPGVIPADPSICRRCARWRIACIHARNAGRSSPALTQPAESVT

SEQ ID NO: 169674 - protein, 388 aa, unidentified
MRYFIGIDISKFKHTAAVIDQDGVVHIKPFDFDNDIIGFNSFFTSVSSFIQDDFIIGMEDTGHYADNLQKFLLSKNLKVAMFNPLATNHIRLAFNLAKNDRLDSLTIASALAMPRLYRIIEDEHFTYHEIRELSRYHQSLSKTMNRYKNRLQKFIDIAFPEFNKLFDTKYSKTYLKILKDFQSAQNIANTDIRTLRKALLSKGRCVSITAEELKSAARDSIGHSHIALDLEIQQTVEMIEKIDSNLNIVDKKIEEFSLQLNSPILAIPGISHISAMSILSELGDFTQYESAKKIIKLSGTNPYIYESGTYSMPRTRLEKKGSKYLRCTLYNIIQTVINNNPVFKDYYDRKISQGKSHRCAQGHCVRKLLRVIYHILTTGCEFNPSLLR

SEQ ID NO: 169675 - protein, 476 aa, unidentified
MKNQNIYRNNNYALKETLSNYKPEQLLYIPIEVGKFNHKASIVNFFGDIVVKLFEFPNKKHGLDFFVKKLNFATTSSNAQKIFLGCESCGHYHLNLVHHLKQLNFPIEIINPRDTRKENPNKNSKTDNIDLGAIARVLISNKGGRQIVPEGVYYNLQRAARTRRKFVQRKTSSKNIITGLLDRIFPGLWDKDDPIFSDRWGKASMLLLERYPHPHRIIRLGEERLARFLRKNNTKLGIDSAHKIIDAAKDSLTKPLSELHMDIFALKSHIKCLNLYNETIAQLEQEIACLLVQTPGIYLLSIDGISVIFAGEFTAEVGDINRFAYANQIISFAGSCSKVFESAEYQAQGLHISGRGSKFLRSTLNQVALALNAWCEPFHLYYTNKALQKPDKPGIARIATGNKFVKLAFALMKYEQLYKPRGLLLDEKNYYSNLWSKIIRKLSGFNLTNISQENNYLLKIKKYLEEKYALTLPTKL

SEQ ID NO: 169676 - protein, 309 aa, unidentified
MSAYAGIDVSKATLQVALYPEVSELCVTNDAAGLEAITRYLKAHAVERVLVEATGGYERLSVKLLAKAGLKVQRINPVRARQFALAMGKRAKTDPIDARMLALFASALKDKHFVVPDDAREELTELVNQRDSLVQQRDDNRRRIRQASLPVVLEHYKTLESTLRILIKACDKQIAEQSRRVDADLLERLSEIKGVGNVTIASLFCFLPELGDLNRSQVAALAGVAPYNNDSGAKNGKRHVYGGRAKLRRAAYMCALVMTRVNPDFKARFARLRASGKPAKVALVACMRVLLVRLNAMVRDGKPWCDQPV

SEQ ID NO: 169677 - protein, 371 aa, unidentified
MQHDIKVFVGLDASKMKISVALAEEGRQGEVRFLGEIDNTPDAIKRLVNKLSGRFRELLFCYEAGPTGYGLYRQITSLGHACSVIAPSLIPKRPGEHVKTNRRDALSLARLHRAGELTTIWIPDPGHEAIRDLVRAREAAMEDLREKRQQLQSFLLRNGRIYRGLRSWTLLHTRWLSNLNFEHPTQYLVLREYRQAIDEAEARLERLTQQVTDVVATWSMAPVVAAYQALRGVAFLTAVTFVAEIGDVRRFETPRQLMAYLGLVPSERSTGEQTRRGGITKAGNPRARRVLIEGAWTYRYPARLSRSLQIRQERLSKNVRDIAWKAQVRLCARYRRLMATGKRQCVITTAIAREMAAFLWAIGHEVQPALV

SEQ ID NO: 169678 - protein, 442 aa, unidentified
MPNRSVNRLSRGDRRRNAKLRDLRSLVRPDLAILAVDLADANQAAVVADHDSVVLGRRMFRCSAWGIDQILDWAIPIAQQAGFAGVVVACEPTGHRWKPVAERARARALNVVCVQPLLVCRAREAEDFTRDRSDYKDATIIARLTSERRCYRPEVTTPRWARLRHLGQRRAAVLGAATAARQALRDLLGVSWPSVLDAAAQPLDSLTFRACLAVATDPARIVAMGYDAFAHAVAAELPRWGGKRRRHQILRAVFAAAQAPGGVAAERAGAAERAAFAVGDWHRALQELGEVEGRMVAVLDQLHLTRLVTTITGLSAVGAAAILAETGDPARYDIARTWAKHAGLCPRDNTSGRFQGQTTTSGRGRPGLRTAAWRAIWGLLPHNPVFAARYAHLTGRAHNPLNDGQARAALAAGLLRQLHAVCTHRVAWDPKIAAGEVTATAA

SEQ ID NO: 169679 - protein, 347 aa, unidentified
MNHYAGLDVSMEETSVCIVDEKGTILREGRVASEPEAIASFLGAFRLPLTRVGLEAGQMSPWLCHELIAAGLPAICIETNHAKAAMQAQQVKTDRNDARGIAHMMRTGWFKAVHVKSHESQKLRVLLGNRRCLLDKRHDIENRVRGTLKVFGLKVGRITVNTYEARVRELMTGDEPLALCVEPLLEARRHLLEQFRKLDKAILDLVKQDEVCKRLMTIPGVGPLTAPVFRTSIDRPERFGKSRNVGVALGLTPRKYASGQVDYDGHITKSGDAMARTHLYESAKVLLSRVTRWSSLKAWGLRIARRSSMRNACVAVARKLAVIMHRMWLDGTEFQWGREPEAAQAAA

SEQ ID NO: 169680 - protein, 403 aa, unidentified
MNNVAGIDVSKGKSMVSVLRPFGEVVAKPFSVGHTGSELKELADYLKSLDGETRVVMEHTGRYYEPVARFLHDEGVFVSAVNPKLIKDYGNNTLRKVKTDKADSRKIARYGLDNWAELRQHTPMDTIRMQLKTLNRQQSLYTKTKTMMKNNLIALLDQTYPGVNALFDSPVREDGSQKWVDFATTFWHVDCVRNMSLTAFAERYRKWCKRHGYNFSQSKAVEVHAGAQDLIAMLPRDALTKTMVRQAIDALNAVSASLERLKAEMCTLAAQLPEYPVVMAMHGVGDSLGPQLMAELGDVTRFTHRNAITAFAGVDPGADQSGTHEAKSTRVSKSGPPELRRALFLVMDCLLKTQPQDDPVYRFMDKKRAEGKPYLVYMTAGANKFLRIYYGRVKEYLAQLENS

SEQ ID NO: 169681 - protein, 401 aa, unidentified
MFLLSTPSFFVGIDWASRAHDLCLLSEHKPRTLHTEHSPAGFARILSWLRQSGALPEDTAIALERPDHPLVDMLLEHGYAVFSINPKQADRFRDRHSPSGAKDDRRDAFVLADALRTDLHKFTPCPSLSPEAIALRHASRRHAALQEDLGRLTNRLWQHLQDLAPQLLTLSSGAHDPFFWDLLLARFGSGSPRSLRPRVTRILAQHRIRRVSPDAALALLSLPPLPIPPARHAALVADILALLPILAATHQQLSTARLELRRLTTAAGDDARIIDSLPGADLLVTATILAEAGPLLASPDAALLRARSGTAPVTRRSGTSLAVSMRRACQPRLRDAFFDMARTAVVHDPWAKHLFRTMRARGLGYHRALRGVADRLVVCLVALLRNRCLYDPSKRANCFPA

SEQ ID NO: 169682 - protein, 342 aa, unidentified
MDHFAGMDVSVKETSVCIVDEAGKIVREVKVASEPEALLAALKNPVYHFKRVGLEAGPLSQWLFSALAEAGLPVICVETRHMRAVLKAQINKTDRNDARGTAQMMRVGLYRPVHVKTVRSQKVRMLLTHRQLLLSKAIALENDLRGTLRNFGLKVGMVGKAKFEARIRQLVENFPDLAVLVEPMLIVRRVLREQIVILHRRLLAIVRDDEVCQRLMTTPGVGPVVSLTYRATVDIPARFRKSKSVGAVFGLTCAKYQSGEADWDGRISRCGDEMMRTMLYEAAQAMMRSKKWSWLKAWAMQIARRRGMRKAIVALARRLAVIMHRIWVDGTEFQWTREQIAA

SEQ ID NO: 169683 - protein, 363 aa, unidentified
MPMLADLIDAVVGVDTHRDIHHVEIALPTGTPIATCSINNDTSGYAQLLVWILDHAPGPRIAISIEGTRSYGIGLARAATTAGLPVLECEQPHRKTRRGKGKSDPIDAHLAVLSALRLNTSQLPIPRADGDREALRILLGARHDLTVTSTAQINRLRALLRDSQDNTDTDRHLARAALTDATLTGLARRRLRRDASREHAIRHAEIRRLALAIHDARQALKDNRAQLQSIVDDLAPGLTQRPGIGPVTAAQAIVAFSHPGRCRNDAAFASLSGTCPLPASSGRTVRHRLNRGGDRALNRAIHTIATVRMRDCPTTKAYIARRTAQGKTISEIKRCLKRYIARQLDRTLTATMATPTTNNPVAA

SEQ ID NO: 169684 - protein, 344 aa, unidentified
MDHFAGLDVSVKETSVCIVDDTGEIVREVRVASEPEALLEVMRNPAYHFKRIGLEAGPLSQWLFSALAEAGLPVICVETRHMRAVLKAQINKTDRNDARGMAQMMRVGLYRPVHVKTIRSQKLRMLLTHRKLLQSKAIAIDNDLRGTLRNFGLKVGMVGAARFEARIKELIEDLPDLAVLVEPLLVVRRVLREQLGILHRRLLFVVRDDDVCRRLMTVPGVGPVVALTYRATVDVPARFRKSKSVGAVFGLTCAKYQSGEIDRSGAISRCGDEMMRTMLYEAAQIMLVHSKKWSWLKAWAMKIARHRGTKKAIVALARRLAVIMHRIWVDGSEFRWTREATATA

SEQ ID NO: 169685 - protein, 385 aa, unidentified
MKNVYENVACAGVDVHYKSSDVTFRDWQAQVVRRERLDHRDREKLRRQLSRWPEGLPVVMEASFGWAWLSDVMLEVGLEPHLSNCYKVEQMRKARGLAKTNKKDADLLSLLWFERSNWWEVWLAPPAVRQQRELMRYRSGLVRVQTGTKGRIHAIFHCHGIFHEFSDLFGVAGWRFLRQLCAQGDAELPAVTVRVLGGQLALLEQLRKQLGEVGRDLQKQLETTPLTRRLDMVPGFGLILSHTVRAEVGVLGRFRGHRRLASYSLLAPMSHDTGEMDGRRAPLGRHLGRRGNLTLKWAFIEAAHGAVRTGGRWRAMFDRHTQGGKSNCNRGYIKVARELVKVIYAVWKNGTTYMATPPPRPGSGRRRRKSRSGTGQPSRPMVAAE

SEQ ID NO: 169686 - protein, 335 aa, unidentified
MKEITTVGVDLAKSVFTVHGVDAMGRVVLRKTVRREQLVELIAGLPPCLIGMEACGGAHEWGRKFQIYGHRVGIMMARFVAPYRKSSKNDSNDAEAICEAVARPNMRFVPVKSAEQQAILSLHRVRQGFIEQRTATINRIRGLLAEFGVVLPQRAEQVRRAAVVMAEGLPVLAREAIADLRAHLTYLDERITRYERQLVSLARQREAAVRIQRLPGVGPLTASAITASISDGHEFANGRQFAAWLGLVPRQYSTGGKARLGRITKRGDPYLRTLLMLGARAVLQSAGPKTDRLSRWALALRARRGYHRAIIAVAAKNARIIWSLLANNREFVLPV

SEQ ID NO: 169687 - protein, 478 aa, unidentified
MPTVTKSREKRKSQVKGAAPVTALASRDRVGVPTGKRRAGRRSEPTPPSVDAPQKGAENEAIPPPPGENPGSAPTRSVTQLIGAQGEMAMRIVALDLGTKKVCYCELSQGQVIQRATVSEVRSLEHLLGPAQPGAKVAIEACREAWYVHDLLVLWGNEVVLIDTTRSRQLGIGQHGKKTDRIDAETLARALEAGRIPKAHVLSPKRRELRRVLSVRRALVESRAQLVTTVRGLVREQGAKIPSCQTSSFVNKVREQRLPADIVQLVNPLLSLVQGIDAQLSNTEGQLAALCEKEPIVGALTTIPGVGTVVAACFVAVLDDAKRFTRAHQVESYLGLVPCEDSSGGKRRLGAISKRGNSYLRALLVQAAWSIVRSGDKSNPLVLWTQQVADRRGKRIAIIALARRLAGVLWAMWRDGTVYDPEFLAKQNARGVRRAIQTLEKQTQALAQAAKKDSVLRSKSLSSASTNKKSKTLAASAA

SEQ ID NO: 169688 - protein, 414 aa, unidentified
MSYKVAGIDVHKKVLMVVVIDATTPEEKTERRRFATMPSEMRRLSVWLRGQGVEEAVMESTAQYWRSVWLELEPYMRLHLAHAFSNRAPRGRKHDFKDAERLVRRLIAQELILSFVPDGEQRTWRSLTRMKLQLRRDRVRLQNQMECLLEEMRIKLSIVVSDLLGASGQRMLRALAEGETDPKQLAQLGDERLRCTEEQLVDALTGRVQPMHRAMLGLQLERLQLIDGQIAKLNALIAQAMKPHQEAVLRLAEVPGLGVDSAQQIIAEVGVQASTFPSAAELTSGVGTCPGKDESAEENHSSRSAKGNKYLRRVLNQAAHAAVKKKGSHFQVVFRRLLPRLGYQSAIWAIAHRLCRVVWKILHEGVRFIEQGCEPDPKAKNKRARMLARALRKLGYEVTITPINLAIAENGMQI

SEQ ID NO: 169689 - protein, 348 aa, unidentified
MTTVADKFEHVVGIDTHARTHTYCLVETRTGGTIDTATFPTTAAGTNRAISWIARRSHGTTTLAAIEGTSSYGAGIAAALSANGFEVTEIRPIARPSRARTGKSDPIDAEAAARSVIREDVEKLAQPRRNGDRTALRVLLAARALVDQQRTANRNALTALVRSIDLSIDARKPLTDTQIATISAWRTSRDDTTTRVFREEARRLARAVLEQTEVLRDNHRQLAQLTEALAPGLQSVPGVGAVTGAILVAAYSHHGRVRSEAAFAALGGIAPLPASSGNTTRHRLSRSGDRQLNRAVDVVVRTRLSYDPVTREYASRRRAEGLSNREIRRCLKRYVCRALYRELRTRMT

SEQ ID NO: 169690 - protein, 391 aa, unidentified
MVCVGIDVAKDKHDCCILDSDGTVRADCFTIPNNMDGFKKLLQTIQDCTRKTDKIKVGLEATGHYSYNILGFLLDNGLPIYVINPLHTNLYRKSLSLRKTKTDRVDARTIATMLLSDVDLKSYTDTAYHNEELKSLTRYRFDKVRERAKLKQSVSRLVTILFPELEKLVPSLHIASVYALLSEYPGAKQVSEVHLTKLTNLLTTASKGRYEKDKAIQIRDAARTSIGSVMPAKSLELKHTIKLIKELTSEIDEIEDSIQQIMDELHPPILSIPGVGIQSAAMILAEIGDFSNFESPDKILAYAGCSPSTYQSGKLTNCYAHMEKRGSRYLRYALYNATKYVCHWNPVFAKYLAKKRAEGKHYNVALSPATKKLVRLIYALQKSGKAYLTAA

SEQ ID NO: 169691 - protein, 389 aa, unidentified
MKIYVGIDIAKLNHFAAAISSDGEIILEPFKFTNDADGFQLLVSKLESFDKNSIIIGLESTAHYGDNLVRYLVAELYQVCVLNPIKTCQMRKNNIRKTKTDKVDTYVIAKTLMMQDDLRFISFYDLDMMDLKALGRFRQKTIKQRTRLKIQLTTYVDQVFPEIQYFFKSGLHQNAVYALLKEAPSPKEISSMHMTHLANLLKVNSHGHFTKEQAKELRVLAQKSVGANDSAISIQITQTIQQIELLDSQLDKIEAEMTDIMKFNDSVIMTIPGIGYINGGMILGEIGDIHRFSNPNKLLAFAGLDPSVYQSGNFQAKTTRMSKRGSRVLRYALVNAAWNVVRNNATFKAYYDAKRAEGRSHYNALGHCAGKLVRVIWKMLTDELEFNLE

SEQ ID NO: 169692 - protein, 352 aa, unidentified
MQSQITAIPKLFIGMDIHKKSWSVHVRTDLFDHKGFSMPADAEKLWEYVNHHFAGYEVSLTYEAGCCGFSAARYFLSVGWQVKVVNPGDVPRSDKQQYQKTDKLDCRNLCKQLQQDQLQGIYIPPEKMEQLRSLLRQRNQIVKQLRKAKSHIKSLLLFHGIIVPEQYDNPHWSKDFIKWLTSIKWEHTTGAACLQSKLRILALLNSEYQQTSNELRAYCRKHYTKDYYLLKSIPGIGGILAAAILSELGDIRRFTNEKAFSNYIGLVPSIHQSSETDNKKGISPRCKALLRSYLIESSWVAIRTDPQIQAYYRKHVGRNPKNVIVKVAHKMCRRILSVIKNETPYQVNYSKG

SEQ ID NO: 169693 - protein, 288 aa, unidentified
MLQVTATPQGVAQLARFCIGHGVELVVMEATGGYERLAFSLLWEAGVPCAIANPRQVRRFAEAMGFLEKTDRIDAGVIAEYGRVKRLVAQSPASAEQQRLRALVGRLRQLTAQKVSQTNQRRLVQDADVLASFDEVLQTIRRQIRGFEAKIAELLSSDPLWLELDAAFREIKGVADRSVANLLAELPEIGTLSGKAIAKLVGVAPIARDSGKRSGKRYIRGGRSQVRSLLFVIASVVRRHNDDFAEFHRRLIAAGKPKIVVRIALARKLLVQLNAKARDARNAAATPA

SEQ ID NO: 169694 - protein, 421 aa, unidentified
MTPPNEVVWAGIDTHTDTHTIALLDERGRPLGAETFTADPDGYDRLIGMLPGPGRVAAVGVEGTNSFGAALARRLTAAGYEVREVLRPRRSVRRRDGKSDPLDAVAAARSVMAGDDAGLPKSSDGWVEALRHLNARRSQLVSAMTAIPDSTNGLLAAAPEPIRERYRGLRSETRMNRLAECRPAGGLVERSVLAALKSAAKAWKALKRQAGLLEERMRLILEEHARPLLDMYCAGAVIAATLAIVAGDNPERIRSEAAFAKLRGVCPIPASSGRTNRHRLNKGGNRQGNMALHRIAIVRLRYHKPTRDYMAKKTREGKGKLEIIRCVKRFIAREAYRALISIRNGEVGRGTPAERGAKLRELRVSRNITQQQIGEALCVPSSRISEIERGARDLPELEQRAIQWIHSTTNPKQHTQTLDNV

SEQ ID NO: 169695 - protein, 426 aa, unidentified
MDRRQRLESFRQLKSEVRGSEMYLLVGIDVAKDRHHAFFGTPNGKTISKRLTFDNNKNGFENMRNKARDFLGQNGLSKAVYGIEPTSRYHKPLAEYLICQGEDVVYVSNVAVKRNRELLDGRWDKNDKKDAANVADLVGQGKCLYYEMPDDNVTQLRSLLALRMQMRRQEHALRMRIRNNIVAQYFPEMDRHYKATDDLILSIVKDCLDPKEIAQLDFETFINRIASRRRCGRLQQKKAHAIWEAAKDSVGCDVTASVQWEAQSLVAQLKGVRETISETDKRIKQISEQIPEYKYLLSLPGFGPTVSAIFLAAIGNACHFEDRRQVLRLAGFDLCAARSGKKSEKVKPVISKQGKAALRYALVQAAIVSSVKNPTIRAYFGRLIKGRESERGIKMKMKIKLAAKLAVIAWTLMKRKEFFDPDRFSK

SEQ ID NO: 169696 - protein, 504 aa, unidentified
MNDNREAGRRRTKGSRQRKSPGLLERIQPDAAGIDCGAEYHYVAVPPDRDPEPVRPFRTFTADLERLADWLAACGVKTVAMESTGVYWIPLYELLEARGFQVVLVNARDVRNVPGRKSDVADSEWLRELHSVGLLRASFRPAGEIAALRAYLRHRETLVHGAATHIQRMQKALVQMNLQLHTVIADLTGVTGQRIVRDILAGVRDPHALAAHRDHRCRASADVIAASLTGHYRAEHLFALRQNFEAYEFLKRQIDACDAAIDAHLTTLAERQAPPPHTLPTPRRTRKPRDNDPRFEIRAPLFRLTGTDLTQIDAIGPSTALQLIGEIGTDMSRWRSEKHFTSWLTLAPHNKVSGGRLLSSKTPPSANRAAAILRRCAMSLGRTATALGAYYRRLAYRVGKPKAITATARKLAILVYRVLRGDLVSTPARSPTNSSIAPAPFAVCASARTNSASASSTSRPARCSMQQFLRSLDVTKNHAAKRRSRRLKRSLMAAAGPTSSVARP

SEQ ID NO: 169697 - protein, 410 aa, unidentified
MQVLYPRCCALDVHKKSVVACLRLAVDGKVVKEVRTFETTTASLMALSEWLAENKCTHTAMEATGVYWKPVWHILADSEFQLVLANAAHVKNVPGRKTDVSDAEWLVDLLAHGLIRASFVPDTPTQELRALLRTRKQLVREQSSHVLRVQKTLEDANIKLDSVISDLMGKSGRAMLEALIAGESDPAKLVRLAGPRLKASPAQLREALRGRVTKNHRFLLRLHLKQIDALDAAIVTIDQQVEADIAPFRAAVRQLISTPGIKALNAQVILSEIGLDMSRFPSDRHLISWAGICPRNDESAGKRRSNRLRKGAPWLKTALVQSAWAAVRKKDSYLRAQFHRIKARRGARKAIMAVAASILTAIYHMLKNGTKYQDLGAHHFDRRSKEQQTHRLIERLGDLGYAVALAPLAS

SEQ ID NO: 169698 - protein, 360 aa, unidentified
MANATRFVGLDVHARESACALFDLTSGEVQTRKISGRPAATVRWLEQLERPFYAVYEAGPTGYGLARAARERGIRIDVCAPGHIRRHPTDRIKTDKRDALKLARLLAAGDLHLVRVPEPKEEQLRDLVRCREDLRVDLMRTRHRLSKFCLRRELHYPGGRNWTLAHREWLSSLRFEDRASELCFEDYLHAHDVLLSRRDRLEAELAGLIADSPWAAIVARLRCLRGIDTLSAIGLCAEVGDFERFAHPKLLASYLGLVPSEDTSGEQRRLGQITKAGSKHARRLLVEAAWHYRRPPRVSAALHRRQEGQNPAIVDLAWRAQRRLWRRWQRLEHERGKRGAIVAIAVARELSTFVWELAKA

SEQ ID NO: 169699 - protein, 346 aa, unidentified
MKKIFIGIDFSKEKFDVVIIMAENLEEKAPRVHEQFANDKAGYRKFLKWVKENSHGVDLSLWLFCGENTGDYSKGLSNFLYGKGCDMWLENAKCIKDSCGIRRLKSDRADAAMIAEYAMRNHDRMTLYEPLSGPLAQLRELFLFRQMNVRKRSGYIVRKGEKGRTLDSSPAKSFMARKCKHMIAELDKTIKECDKMIEALIASDRDLQETYEIVTSVPGIGAQNAVCMMVYTDNFKRFDCNPRKIACYYGIAPFGHDSGTSVHCDPHVHYMANKTIKGILTQAALCAINHCPPVAHYYARLIERGKKTMVALNNVKNKLVRIVTALVRTKQKFIPEYEFAKRYAMD

SEQ ID NO: 169700 - protein, 412 aa, unidentified
MRVLYQTCAGMDVHKKDIKVCLVTRDNQGQRQEDVRSFRTMTRDILAMRAWLQAQGCTVIAMESTGVYWKPIFNLLEGDFTVLLVNPTHMKQVPGRKTDVKDCRWIAELLEHGLLRGSFIPPIEIRDLRDLTRYRRQLVNTHSAEVNRLQKVLEDANIKLASVATDVMGVSGRAILRALLAGVVSPEELAELAKGRLRKKKPDLHAALQGRFRPHHTQLLTHILAHIDFLEESIAACEAQLETLCRPFAEAIALLDTIPGVSQRTAQDLIAEIGVEMAWFPSAKHLCSWAKVSPGNNESAGKRQSGRTGKGNKWLRAVLVECAHAAGHTKGTYLGTKFRRFASRKGKKRAAVMVAHRILEAAYFIIRDKVPYRDLGDQYLDVHHREHVIRHHVRRLESLGLHIDIRELPLTG

SEQ ID NO: 169701 - protein, 358 aa, unidentified
MDGSKEHPLMTAGLDLGDKYSYLCLIDQHSGEVIEEGRLRTTPEAFRRRFASEQPMRIAIEAGTHSPWASRVLEECGHEVLVANARKLRLIYANKRKTDEIDAENLARLARLDPKLLYPLKHRGEESQAHMAIIRSREALVSCRTQLVNHVRGAVKSFGARLPKCPAVSFHNKAAEHIPEALMPALGPILEQIGALTQRIRDYDRQLETISKERYPETELLRQVEGVGPLTALTFVLTLEDPYRFEKSRSVGAYLGLVPARDQSGDRDPQRRISKEGDELLRRLLVSGAHYILGPFGSDSDLRRHGQKIATRGAKNSKKRAVVAVARKLAVLLHSLWISAEVYEPLRNTQRSSGGQAA

SEQ ID NO: 169702 - protein, 482 aa, unidentified
MKKRTIFSCQSQELNTLFEEAGNNAKVMCIPIDYAKKEHVVMFCNGHGNILRKPFPVKNSPEGLEYLTQQVLSSCRHRGIDPKHTFFGGEDVGSYAQNFINTLRSGGWLIAGVNAHDAKKQRTNAQASTDTLDLMGIASMLLNRRANCSPAQTGIYHNLRGLTRHRKKLVDMSTEEKNRIYTVVDQIFPGFLDEKNTGISPFSNSSLYLMADRFSPAQIRRRKRQKLIETLRKYGTAKPEIAADKLQLYAAHVLNTPTEYLSALQVSLAQHIKHFSCLQESTEHLEREMALWLAQTQGAFLTTLRGIGIVLASGTTAEIGDPNRQKPVANLVSYSGIIPRVKQTGGPEGQTRTGKVSKRCNRILKNYVVQSAHHIGLHGPEDLMADYKKRDANGQHADFGIGRRYIRTAMCLMRNSQIYIPKRLREKGINPEERAGYFLMIWPFLRDKWAKLCALETAFTNDNPLCRWRNMVQELYEIKLKL

SEQ ID NO: 169703 - protein, 340 aa, unidentified
MQHVAIDLGGRESQLCVRASDGQILLEQKVATRTLETFFKRQPHSRVVLETCSEAFHVADLALSHDHEVRVVPATLVRSLGVGARGIKTDRRDAQVLSEVSCRIDLPSVHVPSDIARQRRTLCGMRASLVDARTALTNTVRGWARTQLLKVAPTTTAHFPKRIREAALALSDGLPECVERLLKVLDSLNEQITKADQELLALAENDPVCKRLMSVPGVGPVTSMRFVAAIDDAMRFATAHAVESYLGLTPGENSSSERKQRTGITKAGPPAVRGALVQAAWNLRRTRPKDPIAVWANGIEQRRGKFIATVAVARKIAGILFAIWRDGSVYSPQHEAKRTS

SEQ ID NO: 169704 - protein, 452 aa, unidentified
MVYPSFNHIQGKMGSCWANFVRNTGSENLLLVAIDAAKYTHKATICTFYGDILVRPFEFDASSTGFTKVKQFIQAEKQRHHMKEVVVGIETTGHYYEDLVWACKAEGYHVRVLNAATTAQERQALLNWSKTDNLDLMAIVQSIMHNRGTSSELSSGDIHKLQTLTRARRALVEEESAVQNQIRVYVDHIFREFQGKSVWINGKRKHIQPFSKLFGKAPRYLMRHCLHSTDILELGEEGLRAVSVRENLKIRDKSIEILLDFSRDSISKPKEAVEAEQFLLDQKLDQLEQLMKQISELEKEIQDLFIQTEGAVILSVPGIGVVTGAELYAEMGNNSDFDHAGQLIKMAGTNPTVIQSGGRSPSYYAVSKQGRRVFRNVVYQVGRSLASNNPEMKQRFETMKARGKHHRQAYIALGNRMIRLAFSMIRYQTLYRTEQKNYTLHDQLSKKLYSKM

SEQ ID NO: 169705 - protein, 334 aa, unidentified
MNYIGMDIHKQFTVAVAKDRDGNLLSEEKFDNHKGNFERFLKDFCPQETKIVIESSSIWEYIYEMLEEMKFEIKLANPIKTRTIAEARIKTDSIDASTLCDLLRANLICESYIPPKEIRNLRSIMRQRKAIVKGRTQIKNKIHAVLLMNGIKLPYTTLGKTAMKWIIDEINTTSIKSILVSYINILEQYDFELKKIDERIIQIASKNNEAKLLTSIYGIASVRALELVSEIGDIKRFNSSQKLCSYCGLVPSIKQSGSTLRFGRLVKQSNKILKSTLIESSWTLIRLKGENPYREFYKKLSKKKGKQKAICAVARKLCCTVYTMLSKNQEFMFL

SEQ ID NO: 169706 - protein, 403 aa, unidentified
MKHVIAFDVSMGKSYMVIYNVQKQCVFESEIKHTKPDFKKLQEKIHKLTDETGESPEIVFESTGIYSRQLERFMQNNQYTYCLLNPLEAKIQCDSLRIHKTDRSDAHRLALTHFTVTRRVSTRTDNLFYQLKSLSRLYSELDDELSIIRGRMHKVIQLTFPELEIIFTSKSDLFLNFVQLFPHPDYVLGLSKTIIKNRIRANTNKKISNITAEKKAIQILEIAKICYPAVSQNDVLCDQLKLYARRYQELLHQKESCISKMVYVAEQRAEYDIIRSLPGIGPNTAVRLMAEIGDITRFNNNKQLNAFAGIDIRRFQSGKTFFKDKINKRGNKHLRKLLFLIIQNMIKQRRYGQNHIVEYYDKLKTQPYNKCHKVASIACVNKLLKLLFYLITHNIHYDYRLTA

SEQ ID NO: 169707 - protein, 373 aa, unidentified
MPKYSTAFGMDVHLRSTTVCALDADTGEAVTRRFPGNPWGEIAGWMDGFPGPSLAAYESGYLGFAPQRELAGLGVECAVAAVSKIPRSAADSASKNDRNDAARMAKAILAHDISPAWVPSPEVEGIRDLAGAYDGATARLATAKQRLLAFLARRGFAYGGTTPAGNPRKYWTYDFLRWLDKVRPEDDGGVRTLAALRNEVEAAAEARADLLSEYRAAADASPIAAEVAALQSIKGCAFALAAAFSAEVGDFTRFRSGRQVTAYFGLAPSQRSSGDSVRLGGISGAGNALVRKLAVEGSWCYAAARHQPKLMPRDTGVPLEIRMHGRKGSERLLRRREEMLARGMPAAKANAATAAELVRWLWALGMMCREGAE

SEQ ID NO: 169708 - protein, 361 aa, unidentified
MKKPAQHLIAEVPRRQAKVEMTMGIDLGDVWSHYCTLNQDGEVVDRGRFRTTPKAIEKWFTDVSPARVAMEAGTHSIWISAQLQELGHEVIVANVRELRAISHSDRKSDQVDAEKLARYARLDPNILRPIAHRTVQQQEALTLIRARALLVRLRTAAVNAVRGLTKSCGYRMPASATTCFAQRSLAVMPLGLAQALSPVLQQIAEMTMKIKQYDRQIQQLGQTEYPETQALLKVHGVGHLTALTFVLTLGSKERFGRSRDVGCYLGLRPRRSQSGDHDPQLGITHAGNAYLRSLLIECSNHILRPHGRDSALRQWGLRLAARGGKQAKSKAVVAVARKLAVLLHHLWSTQQPYMPFYEQAA

SEQ ID NO: 169709 - protein, 346 aa, unidentified
MVHVGLDLSRKRIDVCLISDQAELIDRFEAIPDRDGLHGLARRVAVYGEPVRGVVESMNGARFVHDELVAHGWEVLVADAQKVKGLAPLACKTDKIDSRVLAELSFRDLVPAIWLPTFELRREREISRWRLHLVKHRSTLKNRVHSTLITFGHQRHMSDLFGVAGRRLLGELEMPEPWRSHVDASLVLIDDLEARITAIAKELRRSGADHPYIPILMSAPGFGWITSFTVACELGDINRFASPVKLTGYTGLCPRVKQSGQMDHRGPLSKHGPKYLRWGLMEAAIAASTHPRYRERYQRTKRRLGRQRGPKVAQIDLGRQLAEAIWYMLTRNQPFAPAGAIIRLAA

SEQ ID NO: 169710 - protein, 346 aa, unidentified
MEKSISNLSSVTTVGLDLAKLVFQVHCVDASGHVVVAKAVKRKNLLAFFAALPRCLVGLEACGSAHHWARELIKLGHDARLMPPAYVKPYVRRQKNDAADAAAICEAVTRPSMRFVCVRTLENQTTLMSHKTRELLVAQRTQLLNSLRGHLGEIGVIAAQGPRHARQLADRIEAGDESIPLPVCAALAPLVVQLRHLDDAIARLDRTIVKMANKDDMARRLMTIPGVGPITASAMVASIQDPSGFSGPREFAAFLGLVPRQNSSGGKERLGRISKMGNRYLRKLLVVGAHAVLYHRKPHTDALRMWAKKLLEKKPFKLVAVALANKMARIAFAILREKTSYKAVAA

SEQ ID NO: 169711 - protein, 345 aa, unidentified
MKIVGCDLHTRYQQVAMLDQETGELVERRLEHESGEARAFYASLEGGVRVGIEATGHTRWFERMLAELGHELWIGDAAQIRAAMVRKQKTDARDAAHLLELLESGRFPRLWRPTLEERDLRQLVWHRQKLVWMRNAVGNQLHALAMGEGVCRKKKLFTKKGRIELEGLKLDPWASRRRQELLRMLDQLDASLREFDQAVSEQAKQNPAAVLLMTHPGVGPVTSLAFVLTLGPVGRFQRSKQVVSYLGLNPREHSSGGRQRLGAISKQGNPMMRSLLVEAGHTAARLDHELRQDYQRLKLRRGSGVAKVAIARKLAVRMYWMLRSPASYAQLVRMQGSPWATLVKE

SEQ ID NO: 169712 - protein, 317 aa, unidentified
MSKSELFIGIDVSKSELEMAMRPEGKAMTFSNTEDGIALLIDFLKPLCPSLVVLEATGGLEISLANALAIKEIPIVVINARQVRDFAKAIGRLAKTDRIDAEVIAQFAEAVRPSVRPLKDEETQRLHALNSRRRQLVGMIRSEQNRLSSAPKWTQKEIQNHLQWLKKALGKIDKDIADLIKGSPIWREKEAILRSFKGIGPVTSATLLAALPELGTISSKPLSALIGVAPLNRDSGQFRGKRAVWGGRDNVRSALYMATMSAIRFNPAISSFYNRLKGAGKPHKVAITACMRKIIVTLNSMIKNKTYWNPLVAEKCI

SEQ ID NO: 169713 - protein, 389 aa, unidentified
MKIFVGIDIAKLNHFAAAISSDGEILIEPFKFTNDADGFQLLVSKLESFDKNSIIIGLESTAHYGDNLVRYLVAEFYQVCVLNPIKTCQMRKNNIRKTKTDKVDTFVIAKTLMMQDDLRFITFFDLDMMDLKALGRFRQKTIKQRTRLKIQLTTYVDQVFPEIQYFFKSGLHQNAVYALLKEAPSPKEIASMHMTHLANLLKVNSHGHFTKGQAKELRVLAQKSVGASDSAISIQITQTIQQIELLDSQLEKIEAEMTDIMKFNDSVIMTIPGIGYINGGMILGEIGDIHRFSNPNKLLAFAGLDPSVYQSGNFQAKTTRMSKRGSRVLRYALVNAAWNVVRNNATFKAYYDAKRAEGRSHYNALGHCAGKLVRVIWKMLTDKVEFNLE

SEQ ID NO: 169714 - protein, 425 aa, unidentified
MNLLILKGVPMSLKIVYKICCGIDVHKTFVVACIASTNDIGVTSYESHRFSTYTSGLKTLLQWLLKHNCKDVCMESTGKYWIPIYNILENDCSIVLAHPKYVKAIRGKKTDKKDAKWIADLFKHDLVAGSFMPPADIRQLRDLMRYRFKLTCFQSSEKNRLQNCLTVSNIQLGNVVSDTFGKSAQAILDKLLENPADTSFDLEPLVYKSLKKKLPQLRDAIDGYITPEQAGKLKVIKSHYENLESRKAELEELILALAAPYQQELAILQTAPGIRSDFTAIGIISEIGTNMEAFPSAKHLCSWAGLTPTNNESAGKKKSVRVSKAGCYIKPLLVQCANAVVTSKKHPEIRNRYLRLKKRRGHKKAIIAIARMLLTALYHMLKNGENYNAELYRKSYLPPVDREITVEQAVIIARNQGYKIKSTTA

SEQ ID NO: 169715 - protein, 385 aa, unidentified
MKEQNFVPYEFDIFGGLDVDKKSIAVTFMNHEGVLQSFSVPYRAEHLLSYVSKHFAGQKVAFAYEAGPTGWGLYDRLTAEGHPCVVAAPSMIPKVPGQRVKTNRLDSQRLSEHLRGGQLKSVHVPTEPYRQLRHLTQLRDTFVKDVVAMKLRIKGLLLFEGLEFPPAPAGSQWSYLVRGKLKQLPCSGSVRFKLDRLMESLESSEKQALETIREIRRFCQQDAELSQAIKHLKSISGIGEIVASHLLARTGDPDQITNVRQLGGFIGLAPREHSTGDRIARGGIMRTGDGRLRSKLIQAAWSAIRHDPELREFYRSVSQRHPRDRAARKAIVAVARKLTTRIYAVLKQKRPYVVREKVNSAPLTQEETSPQGTTRRLKEPGEIIS

SEQ ID NO: 169716 - protein, 373 aa, unidentified
MPRYSTAFGMDVHLRSTTVCALDAETGEAVTRRFRGNPWGEVAEWMSGFPGPSLAAYESGYLGFAPQRELSGLGVDCVVAAVSKVPRSAADLSSKNDRNDAARMAKAILSHDVTPVWVPSPEIEGLRDLAAAHDAATARLAAAKQRLLAFLARRGYVYGGTTPAGNPRKYWTYGFLRWLDGIHPADDGGIRALAALRNEVEAADETREALLAEYRAAVAAGPLSAEVEALQSIKGCGFALAAAFASEVGDFSRFRSGRQVTAYFGLAPKQRSSADSVRLGGISGAGNALVRKLAVEGSWCYAQACHQPKLMPKGSGVPLEIRMHGRKGSERLLRRREEMIARGMPQAKANAATAAELVRWLWALGTMCREGAE

SEQ ID NO: 169717 - protein, 355 aa, unidentified
MNIVNKLDFTGQHIYVGLDVHKKSWNVSIHSANLEHKTYSQPPDPQILVNYLRRNFPGASYHCVYEAGFSGFWTYDRLKEQGIDCLVVNPADVPTNDKERVTKSDRVDCRKLARSLRNGELRGIYVPSSIKIEDRGLLRIRHNLVKKQTRCKNQIKSLLHFYGKSIPEEMVLSHWSRRYIQELENIRMERPAGATALQTLLSELIYLRDLIAQTTREMIALSRTEDYRESVQLLKTIPGISTLCAMTLLTELVDISRFSTFDHLACYVGFIPNIHDSGEKERHTGLTNRRNPALRTLLIEAAWITVRKDPAMMMAFNHLCVRMKKTRAIIHIAKKLLRRVRFVLKNRTAYQVAVV

SEQ ID NO: 169718 - protein, 298 aa, unidentified
MDMTTLGIDIAKSVFQLHGIDADGAVVVQKKLRRGAVLNFLGKVGPCLIGMEACATSHYWAREIAALGHEVRLIPPTYVKPYVKRQKNDAADAEAICEAVTRPNMRFVPIKTEEQQSVLVLHRARDLLMRQRTMILNAIRGHLAEFGIIAAQGPRQVMGMIAQLRDDGDASLPEIARSALLALGAHLEALAGEIRALERQLIVRHRADPTSQRLETIPGVGLITATALAASVSDPSVFKSGREFAAFLGLVPRQNSSGGKDRLGRISKMGDRYLRKLLVVGATSVIRRAGSNPTKTGT

SEQ ID NO: 169719 - protein, 342 aa, unidentified
MTFVGCDLHTRMQQAAVLDTETGEVSERRLPHDGLAVEEFYAALPGPVTVGIESTGYAVWFHALMQQLGHTLLVGDAAKIRAMVVRKTKTDRRDALHILDLLRHDRFPAIWIPDPATRDLRTLLMHRLRLVRIRTMVKNGLHAIALNSRLTCGSTLLRQAGLIQLQALALPPHTAQRRDQSLELLAGLTSQIRELDEAITTAALAHPDAPRLITHPGVGALTALATVVVLGPVARFHDSKHVVSYVGLAPAVHASADKAHLGRITKQGSPLLRFVLGQAAAHAARMDPDLKRTYGALVHRRGRPKAKVAVARKLLVRLFIMLRDQIDYDEFCRRGRAARAAA

SEQ ID NO: 169720 - protein, 424 aa, unidentified
MKVTYQTCCGVDVHKSFLVATIIKTNGGIEPSYQKKRFSTFNNSILEFKQWLLDNNCHDVCMESTGKYWVPVFNLLEDEINVVIANPKWVKAVKGNKDDTKDSKWIGDLFRLRLVKGSYIPCKIVRILREYTRYRYKLVSCHSSEKNRYQNALTVCNVALDSVVSDIFGKSSTSIIDYLLEQSGASINHEEIASKLLRSLKSKEDAVIESVKGYQMTDAPKYRMRLVRAHMDYIIAEINDVDKMIENMISSNSDFENAVQLLYTIPGVKRDSAITIISEIGTDMSQFSSSKRLCCWAGLTPGSNESAGKKKSVRITRAGVYLKPALVQCAHAAVKSDKSPYYKKKYESLVKRRGKKRAIIAIARMILTAIYQMLSTGEQWNPSDLYKIDMPVALVEKQKAKAIKEARKLLQREGMLPPDEPLAS

SEQ ID NO: 169721 - protein, 398 aa, unidentified
MKKRHASVACAGVDVHYKFSTVTFRDTAGRVVARERLDHLDRAALRRQVGRWPKGIAVVLEASFGWGWLSDLLEEVGLEPHLSNCYKVERMREARGDVKTNRKDADLLSRLPAEPTPWWEVWRAPPQVRQRREAMRHRAALVAVQTETKNRTHALLHRHGVFFLEGTDLFGGRGRRFLAALSQDGRHAGGVLPEEARQGLADLVALTTHLRDRLHAVARRLRQGLERDPLTRRLDGIPGIGLILAHTLQAEVGEIGRFRSAKALASYACLAPRAQDTGEADPGRTPLGRHLPERGNRTLKWALIEAAHGAVRHGGRWRALWDRATDGGRKNRGRGYIKVARGLVNVVFLVWSRNVAYTETPPPRPGSRSATRRARTSRPGTGQPCHPMAEVSGPQASV

SEQ ID NO: 169722 - protein, 417 aa, unidentified
MKIVYPICCGVDVHKTFLVATIITTQGITPYYQKKRFSTFNNSILSFKQWLIENNCYDVCMESTGKYWIPVYNLLEDTIRVTIANPKWVKAVKGNKDDTKDSKWIGDLFRIGLVPSSYIPDKPIRALREYTRYRSKLVACKSSEKNRFQNAFTVCNVALDAVVSDMFGKSASSITDYLSSTDSFDPKHCVSLLQKSLKKKANEVIESIEGYQMSQEQKERIVFIRKHIDFIQVLLESIDEKIDKMSAPYESAINLFCTIPGIKRQSAITIISEIGTDMSHFDSSKRLCCWAGLTPGNNESAGKKKSVKISRAGVYLKPALVQIAHAAVKSKDSPYYRLKYERIAKRRGKKRAIIAIARMILTAIYNMLITGEIFNPCDLYKLDIPQEMMEKQKNKAIQQAIKLLKSQGVLKDFDMSA

SEQ ID NO: 169723 - protein, 338 aa, unidentified
MFFIGVDPHKTSHTAAVLDAHEHLVSEVRVGADRSQRARLMAFAAGFEPRCWAIEGATGTGALLAQQLVAAGEIVLDVPPALSARVRLLDNARSDKTDAHDARSAAVVALRHSKLRTVGLEDHSALLRLLAKRHHDLVAHRTRAVCRLHTVLCLLVAGGLPKGLSAARAARELRRIRPTDQVGIERRRLAGELLAEVRRADADLIELKARIAVAVTASSTTVTDVVGVGPIMAAYLIGYSGDVRRFPTAGHYARYNATAPIEASSGPNPRHRLNPRGNRQLNHALHIVAVTQVRNDTPGRAYYLRKQAEGKTRKEAMRALKRRISDAVYRQLLTDTPR

SEQ ID NO: 169724 - protein, 361 aa, unidentified
MSDGIRERMKMTAGMDLGDKYSHLCLIDTQNGEVIEESRLRTTPEAMRCRFDLEQPLHIAIEVGTHSPWISRLLTECGHEVLIANPRKTRLIYGQRRKTDKLDAEKLARLARADPQLLYPVEHRGEDSQAHLAVVHSREALIRSRTQMINHVRGTVKSFGHRLPKCSAPSFHKKVPGRLPSELAEALGPMVETIGSLTEKIKDYDRRIEELATEHYPETRLLRQVPGVGSLTALTFVLTLEDPRRFAKSRSVGAYLGLAPAIDQSGEQDPQKRMSGEGDEMLRRLLVSSAHYILGPFAVDSDLRRHGEKIAERGGKNAKKRAVVAVARKLSVLLHRLWVSAEVYEPLRKARGLGIQGEEVA

SEQ ID NO: 169725 - protein, 324 aa, unidentified
MTNHLKEPVYVGIAVSKAHLDIALLPGDQSWQEDNDLEGNAGLVEKLRELQPALIVMEATGGYEMAAACSLGAAGLPVAVINPRQARDFAKSLGRLAKTDKIDARMLARFGQSVHPEVRPLPDEQALELQALLVRRRQLIEMLVAEKNRLHTTHRKVRPHLQEHIEWLKQELKDIDADLHNQLQQSPLWREKEDLLRSVPGVGPVTCTTLLAELPELGHLNRKQIAALVGVAPFNCDSGFFRGKRAIWGGRACVRHALYMATLTATRWNPIIRVHFQHLIDRGKPAKVALVACMRKLLTILNAMILTMSLWQPALASPKLLVIP

SEQ ID NO: 169726 - protein, 327 aa, unidentified
MAQVVLGIDVAKETLDVALIDEKRVLFTQVENTPTGHQRLVLWQRKQGLDQVHVCMEATGQYGDGVAEYLYQQGYQVSVVNPARIKYYANSKLSRNKTDKADAKLIAEYCLREKPALWCPPPVSFKRLQTMVRHLDDLQVELTRETNRLSSGVRTDEVIAHLKALIAVLKQQIQETKAMIQAHINSSPDLKRKQILLMSISGIGALTAAKILGEIRDTADFDNARQLSAYAGLTPRNFFSGTSVHKKSCLSKTGNSNLRKDLFLPAIVAKRYNQIVKAFCVRLEESGHRPMEVIGAAMHKLLHLIYGVLKTGRPFDENYLVKTQVHS

SEQ ID NO: 169727 - protein, 310 aa, unidentified
MEKFVGIDICKDSLDLCIDPDDELLHLAYDDKGIAQVVKRLRQVAPTLIVMEATGGLEMRLASELVAKGLPVAVINPRQARDFAKATGQLAKTDLVDAAVLARFARAIRPAARPLKDADTRELDELLTRRRQLIDMRVQETLRLGTASKVQRKSLAAHIAWLDKRIVKLDDDLSKRLRASEAWRTKDDLLQGIPGVGAVTTLTLLAKCPELGALNRRQIAALVGVAPRANDSGKHRGKRFVWGGRADVRAVLYMATVSAIRCNKDINAFAQRLRQAGKPAKVVIVACMRKLLTIMNAMVKNNAQWTPKTA

SEQ ID NO: 169728 - protein, 350 aa, unidentified
MDIIGLDLHQRESQLCLCDEAGTITERRIVTSRERFTAVLGNRRRTKILLEASTESEWVARHLESLGHEVLVADPNYAPMYATRSRRTKTDRRDARTLMDACQTGAYRLAHRLSDPRRHVRAELAVRDALVRTRTRYVSLAKTLVRRDGLRVASSESHLVAQRIRALSLSPALAAELQPLFTVLAPLNEQIAAADGRIARLAATDPLVARLATAPAIGPVTASAVVATVDDIGRFRSAHQFEAYLGLVPGERSSGEKRRVGPITKAGNSRVRWLLVEAAWRLLRTKSAEAAALRAWAHGVAGRRGKKIAVVALARRLAGILYAMWRDGVPYDASRIRGPRIAAEVTARAS

SEQ ID NO: 169729 - protein, 424 aa, unidentified
MQFLLSPIEQFRQLKNDLMLGKKILIIGIDVGKTRSVACIVDSHERCYMKKFIFSSTVEGMEALSNKISEFQKQNEFHTTVCGLEPTANYHKPIASYLINKGYQLVGISTTGAKENRKSLNGRWTKNDTKDAFNITDMIRQKKMFFYQNDMQLETLKSLTKLQHALTKKISSCKTRLRNNHFAQFFPEIDTIYKDILHREILQILKHFPTAYDIKKTSLVQFCDILKSNHPTKQKKERINQIWHLAHSSIGRLPLESTYLEVQCLIQEIELLEKQDSVISRKVNALCINMEGYNLLLTIPGFGPILSSIFISEVGNINNYKHSGQLTKLAGIDLEYAQSGNFHGKASISKKGKSLLRYALSQAFNKTLANCKVKKYFEEKLKTKGDSAESKAKLKIKFVEKLIRTIFTILKTKQPFNIDMFLCR

SEQ ID NO: 169730 - protein, 373 aa, unidentified
MKKNSTSRKNTNPEAKSWKSPLTIGLDLGDRTCRYCILDRDGEIVQEASVNSTNAAVRQTFSRIKKCRIALEAGTHSPWLSRTLKALGHEVLVANPRQLKLISTSSRKNDRVDAQMLARLARVDPKLLRPIRHRGEEAQMDLMAIRARAALVEARTSLVNAARGFSKTCGERLEACDADQMGTEKAAELPKGLQQVLRPLLEQVEALTMAIKECDRKVEQIAKDKYPETTLLRQVSGVGVLIALTFILTLEDKERFERSRDVGCYVGLRPKQSESGESQPELRITKEGDSYLRKLLVQGAHHVMSERSPDTDLKRWGTKLAGRGGKNAKKRAIVAVARKLGILLHRLWVTGEVYEPLRNSDMQSSKAQSRKAA

SEQ ID NO: 169731 - protein, 387 aa, unidentified
MPQPAAVLPHASPDYDRTLVLAIELSSKSWVLAAQVPGLAQVKAKRTIEPTKEALLGALASYRARAAAAGHQIERVVSIYEAGWSGFWLARWLITQGVQVHVVQPSSVLTDRRMRRAKSDGIDAELLLRTLLAWLRGEPRVCSMVPIPDQSDEDARRAVRERGELVSERVGLVNRIGAVLATLGAGDYNPLLQSRRRRLNELRTGLGEPLPPHARAKIERLLARLELVLAHITELERERNAVAETAAPDHAARMIQQLAGLRGIGVQSATVLVREAFVRRFANGKALGSYAGLTATPYSSGGLEREQGIGKAGNRRLRSVMVELAWLWQRYQPGAAQVVWFRERVGKTGRRLRKVMVVALARKLLIALWRYVTDGVVPEGAAMKPAI

SEQ ID NO: 169732 - protein, 317 aa, unidentified
MAQKSRLVGIDVAKGKIDAAIRSGAEAAFANSVEGHRELLAWLQEHGVGKAVMEASGGYERKWMGLLRQAGIEVVIVEPKRVRHFAKSAGRQAKNDAIDARMIAWFGEVFDDLESQAGDAEREELDHLVTTRLAVMQLRDQVENWTEHERPKAVQKIHQALLKTIQAQLDTLQQLIAGRIARTERFARRAEIIRSMPGVGEASTAGVIAFLPELGRVDRQVAAALLGVAPFDDDSGTRRGERHIQGGRRKLRTLLFMPILAAATRHNPVLKAYYQRLIARGKKAKVALTACMRKMIGILNTMLARGEKWDPTKHAIA

SEQ ID NO: 169733 - protein, 353 aa, unidentified
METIVAIDLGKRKSVVCTMERGSLKTQYRTVRTRPELFHDIFAELDVDHSIVLFEVGNQAGWLSDMLGAMGLTFKAANTNDPAWKWTNNPTKSDKKDAHRLAMMYHHGFFPEVHIPRKEVRQKRSLIGYRQKMVGRMTQVKNSIRALMCMMAIDLPAGRNCWTKKQLKALSEHAAPLETIDDPCELWRGQLYAELQHYAALEEQLNAVETKLGAVNKQNTAVTLLQTAPGVGPRTAEALVAVLDDPHRFKSCRQVCNYVGFTPRRYQSGEMDRTGRISKRGNPLLRMLLVQASWASLQFAWARDIYKRVGRGSVKRRKIAIIAVARHMLMRCWAMLRDNQPWRCSVEKVAAWK

SEQ ID NO: 169734 - protein, 409 aa, unidentified
METMIARCCGLDVHQGSVVACVVITETRRKVRREIRTFGTMTRDLEALRDWLTAEGVTHVAMESTGVYWRPVHNLLHGSFVLVVANAHHIKNVPGRKTDAKDAEWIADLLRYGLINPSYVPTPEIAELRDLTRYRRKLVGGASAERNRTLKLLETANIKLASVAADVFGVSGLSMLRALASGQSTVAEMASLARGRLRRKLAPLALALDGRMTDHHRFLLTVQLHRLEAIDHDIALLDRRITEKTAPFERQIALLTQIPGVDRLSAIAIVAEVGIDMSHWPTAQKLAAWAGLCPGNYESAGRSKGAGLRRGNVHLKAALYVAASAAARQRGSYLKNKYHRLKSRRGARRAGIAIAHKILVSAYRMLTGDLPYQELGETYLDRLAERRVTHNLTRRLRALGYEVTLTKAA

SEQ ID NO: 169735 - protein, 395 aa, unidentified
MFIVGIDIAKRSHEAIIITEDGQVVRKAFSFRNNCTGYNLLLEQVRRLTLVKSQIVFAMESTAHYWLALYARLLKDGYTVMVLNPIQSHSLRELYIRKAKTDARDSLIIADLVRFDRCKASNVPQDKILALRELCRSRAYLVDMAADLKRKLIALLDRIFPEYESLFDSVFSKASIAVLRKYSTPQKVNNANLRKLTDILMESSNGHFGEWKAHQLKEAACSSFGIDDSDGVYSTLLGMFLEQILSLTAQADSLEKQISVFFQEFNNPLTSIPGVGTVLAATILSEIGDITRFSSADKLLAYAGLDPSVKQSGEFKSNQNRMSKRGSPYLRRAIWLASTVAVHRDPMFQTYYEKKLSEGLHYMNVIGHVSRKMTAVIFAVLRDGQPYQPILQSAG

SEQ ID NO: 169736 - protein, 353 aa, unidentified
MTSIKYIGMDVHKESISIAVRNAAGKIVMECVIETKANAILDFIHGLRGELQVTLEEGTWATWLYDLLKPHVTKLVVCDPRKNSRDGNKNDQIDARDLSNRLYMNKLSSVYHGGAGVRTLKELARSYLTISKDLARVMCRMKAIYRSWGIPCAGKQVYAPRHRAEWLAKITEVGVLRRAEFYYQQLDALRLLRHDVRRELLAESKKHKATKLLCQIPSIGPIRAALLIALIQTPQRFRTKRPFWKYSGFAIETHSSADYRSVKGELQKSRKQVSVRGLNRDCNHDLKNLFKSAATIASVKPGPFQEFYAALVAKGMRPEMARLTLARKIATIVLIVWKKGVRFDAQYLKPQTV

SEQ ID NO: 169737 - protein, 313 aa, unidentified
MAQMVTNAGIDVSKQWLDVALWPKRDEVSRFKRDAAGLEELAFWLRERHVVRVGLEASGGYEREVIDALEAQGLEVALLNPLQVRRFAQAKGRLAKNDRVDARTIAQFTAVMIEAPQPGRRRELDSLSEHLTFRRQLRAWIDDCTNQLEHLRDKALRRTAEALRVKFQRALAAHDKALAKLTAEHADWNVLARRLRTVPGVGPVLSQTLIALLPELGHLSRRAIASLVGVAPFDNDSGQRSGKRHIKGGRGAVREVLYMAALSARTHNPIIAEFAKRLAGKEPKVMLVACMRKLLVILNAMVRDGMDWQVKTA

SEQ ID NO: 169738 - protein, 427 aa, unidentified
MSYRIAGIDVHKKMLAVAVADVEVDADFQFEREKVGTTPIELRRLADWLVEHEVDEVVMESTAQYWRPVWEALEQQWRPQRRALKSAPPLAGTLHLAQAQSNRGAGGRKRDFPDAERLVKRLVAQELTLSFVPDAEQRLWRTVMRRKYQVTRNRVQLQNRLEALLEEAHIKVSSLVSDLLGISARRMLQALADGETDPAALATLATARLRATPEQLCDAFQACPTLHPVYRRLLQLTLEELRVIEDHLGQLDQQMADLLAAHHDAVQRLAEVPGLGVDSAQQIIAEVGATAATFPSAKHLASWMGACPGNEESAGVNYSHRCPKGNQHMRRVLNQAANAAVKAKGSIFAIVYRRLVPRLGHAQAIGAIAHRLCRLIWKILHEGIRYEERGPAVSVEAKQVRTRKMIRELRTLGYRVELLPAPSSNPA

SEQ ID NO: 169739 - protein, 319 aa, unidentified
MAQNDLVVVGIDVAKEKVDACIRSLSQRHAFPNTAQGHRKMIAWLHKHKVNKAVMEASGGYERDWARVLRLASIEVRIVDPKRVRSFALSAGRLAKNDTIDAEMIAWFAETFSAAPGQPHDAAREELRALVKARKHLLDLQMRLKSQNEHAAPEAVQKAHARILKSLATEVARLEAAISAKVKATPDFAERAEIIESVPGFAETTSANLIAGMPELGQVSDEIAAALIGLAPYDDDSGKRRGERHIKGGRRWVRNAIYMPCLGAATQNNPVLKVFYQRLIAKGKEPKVALVACMRKLIIILNTMIARRQKWDPSRYALN

SEQ ID NO: 169740 - protein, 475 aa, unidentified
MNSTVLPASVQPNIDCNYIGLDVHSDNVVVCVRRNILKVGGELQGKTIKLKKVSICDSQDSLTQLLSEYADGQQHVMTAESTFNWYWLADIAEEHGWNFRLADPCTVSQANIKAANDETDAQYLAERLRMGSLKSTTVLPRALRGARDLTRHRMRVMQEVSEKKIRLSNLYHNHCAHPLHGKQLQDLQFAYEENGIDAVLASGISGNGSELIIADLLAGLHDAQMRLERIEAQVYERLDQIDTYREGRLLLKNSMKGCGDVLSAVIITEIGDISRFRTMGEFVSYCRLAPASKLSNGKSKGQGNAKNGNAYLSWALTELATLMARYNKPIQHYLERKVKKTGLRVIGIRALAAKLARCVYQVLRKKEAFDLLLAFGGSHPQEPSASRDKTEESSQRKTATKSSETKVTGMTRTVVTDKKKIPGKKPALAVTQTQRLKSAVGQKTASVASRLKAPCALTTTKPAYADRGCVKSRRE

SEQ ID NO: 169741 - protein, 355 aa, unidentified
MSQEKYIGMDIHQATVSAAVRDRNGNLLMECILETKADTLLEFVQGLHGTLSVAFEEGTLAAWLHDLLKPHVNRVVVCDSRKAALLRDGNKSDRIDARNLSELLRTNQLKPVYHGEHGLRTLKELGRSYLTVSKEMTRTMNRIKSLYRSWAIPCAGTTVYAPRHRRQWLAKIAEPGTRLRAEHLYEQLDHLQPIRVRARRELLQESNKHDAVKRLRQIPSIGQIRAALLVALLQTPHRFRSKRQIWAYSGFAIETHDSGEYRYVRGKLQRNRERITVRGLNRNHNPDLKNIFKGAAISASSRPGPLQDFYETRVAMGMRPTMARLTLARKIAAITLTLWKKGENFDPQQLSRQAA

SEQ ID NO: 169742 - protein, 399 aa, unidentified
MSRRCIGLDVHRDFCEVAIWDQGEVRSAGRIDSRPKTLAEFAATLGPGDEVALEATSGARQVAEILRPCVARVVIANTHRLAAISEAKCKTDRNDARTLAQLLAAGMLEGSWLPDEQTRALRRRVSRRHNLVVARTRAKNEAMSVLHRNLSQRPPMSDPFGVKGRKWLGALELPDDEVETLSASLRLIDFHGAEIETIERELARFAASSAEARRLITVPGVAMVTAVTFLAHVGEIGRFAAPKQLVGYLGLDPRVRQSGNGTAFTGRISKEGSVLVRHVMVEASHSAIRTPGPLLAFYQRVRSRRGHAVAIVATARKMVVLFWHLLTHGEDYRHSIELVTNKKLRKVELLAGAPRRRGGGRCEGPNRDQRREIDRDRAQRAADDYRRVAERQTDWAPTR

SEQ ID NO: 169743 - protein, 357 aa, unidentified
MESQEVKYVGVDCGKKSIEVVRINSENSLERRQFSTTESGINNLLQWLTLNDIVGLEAGSQSFRIAKSILNKGVQVIVLNPGNLATIYQSLKKTDKEDSLKIARLIQRHPIEELPTVPIPNDEEEDNRRLCTEQENWTRQLTQSKNRLHSLFTQAGLTQITKKHLRTKVSREASVTLLSDRYKKEAERILKVLDLVEQNLKLIEKEIQEALKKNKAYVQTIMSMPGIGMITSLAIMSYMGDCKRFSSAKQAAYYAGLVPRVDISGDTVRYGRIINRGCHSIRRVIVQAAWSLVRCQHGGKVKEFYQRLYLKKGAKKSIIATSRKMIEVLYVMIRTGKLFDSMPENILNRKLTQYGLM

SEQ ID NO: 169744 - protein, 415 aa, unidentified
MYYYVGIDIAKSFHVACVVDSDDKVIKRSWKFNNDKRGFEEFLLLLNSIDDASRFTIGMEATNLFFENLYLYLKEKGFKVILLNPYQTNRFREMDSMKKVKNDNIDALMIAALIKSGRYSKAYVSEELYQSIKALYRHKQSLQEEMKKHKCQISTLLSVVFPEMEQVIKDPFNVTGLALLHKYPTAKHYEYASEERILKIFRGIKGNNFSEEKAKRLLELARHSIYQGNGKEERAYVIQSHIRVIRLLQEELQELDKEMLRLFNQAPKLDKDEEQEVIDIINNLRTIPGVSDKTIFALMSECGDLSRFKNASHFIGYLGLYPTMEQSGNRLINGHLAKRGAKLAKKALYQAAIAAIRHNAELNKLYRDKTSQGRANKEAVVIVARKLAQIILSIYKNNVAYNPQRVFQAQRSKAS

SEQ ID NO: 169745 - protein, 363 aa, unidentified
MAKARADVVQPAMRYVGIDWAYRRAAWCALSAGGEILDEGLVGADEDGLARLVLGLGADVRACVEMMSGAVWVRDQLAAAGWQVQVAHARKVRDIAPLACKTDRVDARVLAELCRRDLVPELWIASLDDRALRERLKRRMHLVRLRTSAKNRIFGLLTQWGLRLSLKRLREHDAIELLEARGVPAAWRDSIAEALAVIDLLDARIAPIDRELRPFAQADARATLLATIPGIGPLLSLTIASEIGDVTRFGSPPKLVGYAGLAPRIKQSGDRSRTGALSKAGSRTLRWAAIEAAQQAWRWTNPWHGLYVDVAKRHGRNPAKSAVARKVLIAAWHVLARNEPFKPSRPRGGNTPVSASSSMFLAA

SEQ ID NO: 169746 - protein, 401 aa, unidentified
MREFTATEGRIESASAMASVRNAEAGERYAAYLGLDVHKDTIAVAVATPGREDPAYRGEIANTPKAVQKLLVKLGEAYGGGLLLFCYEAGPCGYVLYRQILTCGHDCQVVAPSLIPRAAGERVKTDRRDALKLARLLRSGDLTPVWVPDQEQEQMRDLSRARDDMKAQERKARQQLNAFLLRHGHHWPSDKARWSKAHESWLTGLKMERPWQQVVLEEYIQAERAASQRVAQLTDHLLRALPEWSLAPVVSSLIALRGVDKLTAIVLLAELGDISRFESPRQLMAFLGLVPSEHSSGQRRRKGGITLTGNGHARRVLIESAWTYRFPARQTRHLKAKAHEASETARRIAWKAQTRLCGRYRTLTRAGKNTKLVCVAIARELAGFIWDIVRQEMPRVVSQAA

SEQ ID NO: 169747 - protein, 403 aa, unidentified
MNNVAGIDVSKGKSMVSVLRPFGEVVAKPFSIGHTGSELKELADYLKSLDGETRVVMEHTGRYYEPVARFLHEEGVFVSAVNPKLIKDYGNNTLRKVKTDKADARKIARYGLDNWAELRQHTPMDTIRMQLKTLNRQQSLYAKTKTMMKNNLIALLDQTYPGVNALFDSPVREDGSQKWVDFATTFWHVDCVRNMSLTAFAERYRKWCKRHGYNFSQSKAVEVHTGAQDLIAMLPKDALTKTMVRQAIDALNAVSASLERLKAEMQALAAQLPEYPVVMAMHGVGDSLGPQLMAELGDVARFTHRNAITAFAGVDPGADQSGTHEAKSTRVSKSGPPELRRALFLVMDCLLKTQPQDDPVYRFMDKKRAEGKPYLVYMTAGANKFLRIYYGRVKEYLASLEGN

SEQ ID NO: 169748 - protein, 360 aa, unidentified
MTLPVVADAEVAVTLGVDTHADVHVAVALDQLGRRLGACTVATTPAGARQLLDWASQFGPVQRVGCEGTSSWGLGLARFLRGQGLAVLEVNRPSRQTRRRRGKSDPLDAEAAARAVQAGTATTVAKTADGQVEMIRALRVVRRSAVKARTQAANQLQSLLVTAPDELREQLRGLPGDRLVTAAAQLEASGQVATILAASQLALRSVAVRYQQLTAEMSALDQQLGRLVTQAAPALLALPGVGIDTAAALLITAGDNPDRLTSEAAFAHLCGVAPIPASSGKTTRHRLHRGGNRDANRALWVVAMGRLRWDARTRAYVARRTAQGKTKREIIRCLKRFIAREVYHVLVATSPAGGKDHPAG

SEQ ID NO: 169749 - protein, 348 aa, unidentified
MEHIAIDLGGRESQICVRSEQGTIVDEQRVQTCALKRWLKARSPGRVIVETCAESFGVADAAMAAGHEVRVVPAALVRSLGVGQRGIKTDRRDAQVLSEVSTRIDLPSVHIPSELSRQRKTLCGTREALVECRTKLLNTVRGWLRSQTARIRSGNADTFARRVREHFAARAVELPNFVQRQLLAIEQLTAQVIEADKELEQTASADPITSRLMTAPGVGPVTATRFVATLDEVGRFPDAHRVESYTGLTPGENSSSNRVRRTSITKAGSTQLRWALVQAAWAARRFRPHDPMVLWSLEVEKRRGKRVAVVALARKLAGLLYAMWRDGTTYDPYRAADPPLLVGQAPIG

SEQ ID NO: 169750 - protein, 338 aa, unidentified
MELKRISIDTSKHVFTIHGVDDRERPVLRRELRRAQVVPFFAKLAPTEMALEACAGSHHWGRVLGSMGHRVKLIPPQYVKPFVKRSKNDRNDAEAISEAASRPTMRNIPVKSVDDQAVAIVVKHRELMVNQRTQAINALRGHATEFGIVASQGCTNVTALLAVLSADEAVPAIAKAMFEQMGQHVADLDVKINALEKQLLEQHKANPVSKLLTAIPGVGPITAITMALTVNPANFETGRHFAAWLGLTPREHSTGGKHRVGKISKAGNERLRQLLVVGAMAVIRYAKPGSKSASAWLLQLLERRPRKVAAIALANKMARIIWAMMGRGEAYRRQLVVA

SEQ ID NO: 169751 - protein, 410 aa, unidentified
METLIKRCCGLDVHQATVVACLRIARPGKKVSREIRSFATTTAGLLELRDWLTAAGCTHVGMESTGVYWRSVHAILEDAFTVIVGNAQRIKNVPGRKTDVKDAEWLAELLALGLIPPSFVPDRGLRALRDLVRFRRSLVEARTDCRNRILGVLEGAGIKLASVATDVFGVSGTAMLQAIVAGHLTPAEIADLAKGRLRKKRAALELALHGSVTDDHRLMLDLLLGSLNDTEGRIAAIETHINVRLEPYRQDHLNLTTIPGVDWAGAASIVAELGTDMAVFGTAGRAAAWSGVAPGNNESGGPRRPAGARKGNVHHKNTLHTAAVAAGRTKHTYLADKYHRIRARGGPGIAGGAVAHKILIAAFHILARKVTYRELGADYLDRRAKQRVQRTIVRRLERLGYDVTLRPKAA

SEQ ID NO: 169752 - protein, 360 aa, unidentified
MRTITIGVDLAKQVFSVCSVDAAGRIADRRDLRREAFMRWLPSVAAGTTVAMEACSGAHHWARRCQDYGLEPRLMAAQFVTPFRKSRTAKNDRNDAEAIATAARQGNMRFIAVKTVDQQVRLSWHRVREGYKVEALATGNRLRGLLAEFGVVVAQSDSALRRTLADLDALSLPSALVELLRDVDAQWQQLRARIAAADRRIQAHAQADEACKRLREIIGVGPITADAVVATLGSAHSFANGRQFAAWLGLVPMQHSSGGRTRLGHISCRGDGYLRTLLIQGARSSLQRAKAVTWDKGTPEQRWIQDLERRLPFGKVLVAIANKHARQLWAMLARGEHYDAEAWLKHPMVQRTASRQSVSE

SEQ ID NO: 169753 - protein, 449 aa, unidentified
MSDRSGVSRGDRNRNARLARLREAVPVTNAIAGIDLADSKQMVVVTDHESRVLARRVFRRRAWELGAALDWAAARAAAAGFAGVSVAVEPAGHRWRVVGQLATERGMAFVCVQPLMSAWARRAEDLTFDKTDDKDAVLIARLAAQLRCYLPEPVDETWGRLRHLGIRRARLVAESVSQVQQMRDLLECAWPAVLDAARQPFKSTTWHAALTVALARADGGDLHRVTRLGRRRFEAAARRQVARWDAVNPWRKIIDGVFTACADPAGVKALRRGALERVALLLADWRDTQARLADTEQRMVAVLAELGLAELATSITGLSAVGAASVLAETGDPARFTTGRALVKHSGLAPRQKNSGNSTGRTRTTGQGRPALRLAAWRAVWGALKSNPVYAARFTHLTSRDHNKLSTGQAHAVLAATLLRHLHAVITSGQRWDPAIATGGRPGQPLIAA

SEQ ID NO: 169754 - protein, 381 aa, unidentified
MRQVCGLDVHKDSVFVCILNENGIVFQEKFGVLTPELEQMLSVMLQYHVEEVCMESTSIYWMPVWRVLENYVSLKLVNPYFIKQLPGKKSDVKDAEWIATCLLKDLIKGSYVPEDLIQQLRQYDRRISDLNAEIVRKLGKLDAALQRCNIRISNYVSSTDGKSYKEVVRLISEGIRDPSELTKVIHGRTVNRVGRDVVLASLTGVISDTDIDVMRQLREEVELVEKHKDECQSKMDAICRQYFPDQLKNLQTIPGIKGRSATAIIAEVGTDMSSFEDAAHLVSWCGLKPRNEESAGKIKARGITHGNRYLRKTLIECAWAASKTQDCYFSKFSYHQVVVRKKSKMKVQVAIARKVLTAVWYVMHDNVAYRDFTPDIAPAAE

SEQ ID NO: 169755 - protein, 424 aa, unidentified
MTQNQSYAAFIGLDKSDKKINVSLQQCAKNKMERSIVKGGAEALHAWVAALCARFPGQAVAICLEQPASGLIHALMSYDFVVLFPINPVTLARYREAFTPSRVKDDPTDADFLCELVALHREQLKAWQPDDVCTRKLRHLTQARRRSVNMRTRLSNQLKALLKTYFPQALELCGDDLTTPMACALLQKWPSLQQLKRARLETIRRFYYAQNARRGDVIARRLALIAQALPLTDDPALIESSIVSVQALTLGLRAVHTAISRYDREIARTFAQHPDASLFAALPGSGTAYSARLLAAFGSRRELFESAQAMLNFSGIAPVLKRSGQATITHRRYARPLFVHQSFIEYANESIRHSLWARAFYQKHKGAQKSHWVIIRALAYKWIRILFRCWQQRTPYDEIRYLKSLQKSRSPLLQYLAQPAIQTA

SEQ ID NO: 169756 - protein, 350 aa, unidentified
MEITTIGLDLAKSVYQVHAINDAGEVVVRRTLRRAQVLRFFEQLSPCLVGIEACGTSHYWAREIRRFGHEVRLMPPAYVKPYVKRGKTDASDAEAICEAVGRPTMRYVAIKSAEQQAALAIHRTRDLFVKQRTQLVNMIRGLLAEFGIEIRRGLEQALMHAKGIAAGEMPVIPPLAAKMIAGLAGQVLDLQARLREIERELLAWHRSSDVAKRLATIPGVGIVSATALAASVTDPHQFRSGRQFAAWLGLTPLQHSSGGKERLGRISKMGDKYLRRLLVVGMTSLIRRAKYKPDDVDPRLTALLSRKPVRVVTVALANKTARVIWAIMARGGTYRMPAAANTALIGRAAI

SEQ ID NO: 169757 - protein, 316 aa, unidentified
MSERECAIGIDVSKATLDVAVRPSGDWWQERNDPEGCATVVARLQALAPTVIVLEATGGYEAPVAAALTAAGLPVAVVNPRQVRDFGRASGKLAKTDAISAAILAHFGAVMHPPVRPMPDALTQELQHWLARRRQVVEMMTAEQNRFAGAPPPVQKQIRAHLGGLRRQLKSVERRLKELMQRSPVWREHEQLLVSVPGVGPVLATTLLADVPELGRLNRKEIAALVGVAPLNRDSGTMRGQRTIWGGRAPVRAVLYMAALVASKSNPLIRPFYERLVAKGKPKKVALTACMRKLLTILNAMLKHCTTWNPILALCA

SEQ ID NO: 169758 - protein, 428 aa, unidentified
MRSIGLDVHRDFCEVAIVEDSEVRSAGRIATSPESLGLFAQSLCPTDQVVLETTSGAIAIARLLRPHVARVVLANAADVRAIAHARVKSDRFDAAILARLLAAGMLDGVWVPDERIGALRRRIARRAALVRQCTRAKNEIHAVIMRCLLGRPPASDLFGKKGRSWLATQQLPPAEQETVEGCLRQVDFLGAEIAAIDAKLADFALTSADAKRLITIPGVDVAAACTLIAAIGDIRRFDSARKLAAYLGLDPRVRQSGEKPARHGRISKRGNPHARHVLVEAAHQAMRTPGPLRAFGERIRARKGPQVAAVAVARKIATIAWQMLTNDEDYAFQSPSLVRKKLRNAELKSGAPRLSTRHAGTCQRVTPDERERDRELQQQAEHGYRRLIADWQATGPKAGAGATPGRASSRPSTRQATRQTTEPQGSAL

SEQ ID NO: 169759 - protein, 402 aa, unidentified
MNCVGIDVSKGKSMIAVMRPFGEVVVSPFEVRHTANELSELAGLLKSLDGETRVVMESTGNYHAPVAWLLHDAGLYVSVVNAMLVHDYGNNSLRRAKTDKKDAVKLANYGLDHWLTLPRYIPEEDTRLMLKICYRQYQQYSKVQTMLKNNLISLLDTTFPDANRLFTSPPRADGSEKWVDFVATFWHWECVCGRSEKAFTTQYQKWCRKHGYNFSEDKALDIYASACRHFGVIPKTDTAKLLVEQAISQLQTTSSALAALKQEMQSLAASLPEYPVVMGMFGVGPTLGPQLLAEIGDVRRFHSKKALVAFAGIDAPPYQSGQIDVRSRSISKRGSASLRRALFLVMGVILQCAPGDEPVYQFMNKKRSEGKPYRVYMMASANKFLRIYYASVKAYLDSLEHA

SEQ ID NO: 169760 - protein, 324 aa, unidentified
MISKTYAGIDISKLTFDAAIYQPSGYQYHKFTNDEKGFRALSELLPAGCHVVMEASGPYYLKLAGYLYEQGFALSVVNPLVIRRFCQMRLSRTKTDRKDAMMIAEYGRAEQPAPWKPQERYVLHLRQMQAAVDLLNKSRTAFIRQLEAFDACKEISLEAVSAAAKAKSAVEKQITVLEQKMEQLIEQHHKDMFQRLQTIPRIGKKSALLLIVLSGGFTRFENSRQLSSYIGLCPRIFESGTSVKGKARITKMGMSRIRAVLYVCSWAAKKYNKACSELYGRLVAKGKAKRQALIAVANKLLKQAFAIAVNGMDYQENYMKNTCF

SEQ ID NO: 169761 - protein, 462 aa, unidentified
MPFEGFYEAASAARPGEGREFLKGGMTMLFGGIDWSDRFLDFHLRTADGQVLTEGRVEPTVDGLAELFATIEAHGRPEEIAIAAETSHGAWVQPLLDRGYVLYPVNPKTVERFREALSAAGHKSDKIDRKILAMFLVTFHQENTPLRPDVPEIISLRIACQDRVRLVEERTAKLNELQAILKCYYPAFLGLFGGVNSQIALQFLERFPTQGQMQHLTQSRLESWLKRHHYPWSKRVDEMMQAIKQPALCVAEHLQQTQAPLIRYLARTIQGLKAEIADRNTWITEHLNGLPEADWLRSLPGAGTVLAPALLACLGRDPQRFASTTDARALMGTAPVTKASGTHRAVSFRRGCWKFARRTLQLFADKSRHQCDWAQAFYQKQRNSGHNHHAALRALAHKWLKILLAMRRTGTRYNEQISLDSQRRYAAQTSHAATPHGGHFMANTSHRPSLFISTRLGSSPCR

SEQ ID NO: 169762 - protein, 354 aa, unidentified
MKQQAIQYLAFDVHQATVVTSVRDESGKVVMRATVATEAKAILRLVQSAGPRVHVAFEEGTQAQWLHDLLIDHAERVIVCNVRGRSETTNKSDRIDADGLSELLRLGALKPVFHGVPEILTLKELVRCYTALVNDSTRVMLRIKAIFRARAIPTPGVSVYRTSQRKQWLAKLEGGARIRAASLLTQLDMLLELRPKAKAAMIGAARRQPGWKILRSIPFLGPVRVALILAIMRTPFRFRTKRNIWPYAGLAVVKRSSADHEFKDGRLQRSKKAPVTRGLNRNHNPLLKSVFKGAATAAVSKPGPLRDYYQASLGRGVKDDLAKVTLARKIAAVTLRLWKKGELWDPKKLTMQAT

SEQ ID NO: 169763 - protein, 396 aa, unidentified
MTYDVFCGLDVGKEFHHGTGLGRDGKKLVDRVVANDESALRKLYSQLQSVGVALVVVDQPSSIGSLPIAVARAMGIDVAYLPGLSMRRIADLHPGNAKTDARDAFIIADAARTMPHTLRRVDLDDAQLAELEVLVGHDDDLAAQSTAVTNRIRGLLLQIHPALERAIGENASHPGVLDLLTRFGGPTGLRSAGQTKIRNTLKKNAPRMGDRLAAEIWAALAEQTVTIPGTVASQKVLTRLAGQLDILGTQRKQVAAEIEEALDALPLSKVLISMPGVGVRTAARILVEVADGSNFPTAGHLAAYAGIAPVTRRSGTSIRGEFPSRSGNKNLKNAFFMSAFASLRADPTSRAYYDRKRGEGKKHNAAIICLARRRSDVIYAMLRDRREYQAPLPVAA

SEQ ID NO: 169764 - protein, 356 aa, unidentified
MSILAHTRPFVIGVDAHARTHALAVLACPTGEVLDEAQFPATTAGLARAVAWVARRTGADLDALWVIEGIGTYGARLARAAADAGYAVAEAPRMNARANRGVGKSDPLDARRIAQAALPLDHTQLRLPRTDEGARAALRILIASRDHITNERTAAINALIALLRVVDLGIDARGTLNTGRISEIAAWRARAEELSIGVARAEAVRLAKRVRTADRELGDLTRQMTTLLNESPAAGLLDQPGIGPVTAAIAYAAWSHPGRIRSEAAFASLAGVNPIPASSGNTVRHRINRGGDRRLNRALHMAVVTRMRMDPETRAYVDKRTAQGRTPREIRRSLKRYLARQIYRQLNATITPAAAA

SEQ ID NO: 169765 - protein, 322 aa, unidentified
MIAMVDDKSRRVRPRRLECREPERIVKLMQDHRPFKVVIEASGSYRWLYDLLAPHGEVVLAHPLRLKAIWSGRAKTDKLDAKVLADLLRGDLIPESYVPPERYQTLRDITRARSRLVCGRTDAGNSIHAILARANIEPRYKTCLGPRGLKWISSVEFGRVSAFIRDELVERLAHFNAAIKRTDKLLGEIAADYPEVEALLDMRGIGLYSALLIVAEIGEPDRFTNPGQVSASTGLTPRVRQSGQCDFHGPVSKQGSRWFRWILVEAAMKVIKGDRKLNNLYLRVKRRAGFARARVAVARKLSEICWKRLRDWHVANQTGEAK

SEQ ID NO: 169766 - protein, 406 aa, unidentified
MKLFVGLDVSSFDIKVCFLNGEGKQLSSFTVANDLPGATQLRDEILRITSNQSVRELRIGLESTSVYSFHPSMFLHNDESIRALGGQVLVMNPKQIANFKKSYSDMDKTDEIDAFVIADYLRFGRLPMSVVKEEQYVALQQLTRARYQIVRQITQEKQRFLQYLSYKCNTFTEEVESSVFGKAMMDLFLENYSLDELSQMSLEDLANYLQSKGKNRFPDPKHVAKSIQKAVRSSYRLDKVVEDSIDAILSTSITLIRTFEKQIKELEKSIERIMKGVPQTIQTIPGIGPVFTAGIIAELGQIDRFSDETKIAKYAGLYWRKHQSGRFTADDTSLSRNGNQYLRYYLVEAANSVRRQIPEYSEYYAKKYQEVPKHQHKRALVLTARKLVRLVDALLRKNQIYTPKGA

SEQ ID NO: 169767 - protein, 407 aa, unidentified
MEVVHPKCAGLDVHQHTVVACARVAAGSSVTRDVRTFGTTTQELWALSDWLTAHGCTHVAMESTGVYWKPVWHVLEESVELVLANAMHIRHIPGRKSDVNDATWIAELLAHGLLRGSFVPPAPIQELRDLTRTRKQLVREITQHTLRIQKTLETANLKLTGVLTDILGVSGRAILQALVAGETNPDRLAELARGRLKASRADLVAALHGRVTAHHRFLLQLHLAQIDALEGAVRAVEARLGDALAPFRAAVDRLITMPGVSETVARVLVAEIGVDMTRFPTAGHLISWAGLCPRLDESAGKRRSTRTRPSNPWLKTTLVQGAWAAARKKDGYLRAQFLRLKSRRGPKKAIIAVAASMLTAAYYMLKDGADYRDLGADHFDRRDKAKLAQRLLARLHDLGFNVELRAA

SEQ ID NO: 169768 - protein, 360 aa, unidentified
MPSIALGRSDVIVGVDTHKDEHVAVAIDGLGGTLGDPLFVPASPDGYADLLAWADSLGAIYAFGVEGCGSYGCGLARFLRRQDQKVFEVARPRRTDRRLSGKSDALDAERAARSVLSGTGNATPKLADGKIEAIRLIKIARDTAVKAHTATLITLKAVLVTASDELRGRLEALTDHKLVVASAAFETQESVSDPEAAMRHVLSHLARRWLDLHEEIKVHSSHLKILTKAVAPQMLERFGIGFDTAAELLITAGDNSERIRSEAAFAKMCGVCPIPTGSGKSSGRHRLNRGGNRQANAALHRVVIARMQWHAPTIAYFARRTADGLSKKDVIRCLKRFVAREIYRLLPETSNSSESGELAA

SEQ ID NO: 169769 - protein, 346 aa, unidentified
MTIVEATRSVVGGIDTHSQVHVAAVLDDLGGLLGSDAFAADPHGYAALLSWFCSFGTLSKVGVEGTGSYGAGICRFLMRAGIEVVEVDRQNRQARRNAGKSDPLDAVEAARAALSGKASGRAKSRDGWVEALRVLLVAKRSARSARVKALTQMRQVTYSAPDELRTRLEGLSISAFVSTCQGLRASRPRDRVLAATKASLSSLAHRVAGLEAEIDELDAKITPLVRSNAPKLLAVGGVGIDTAASLLVAAGDNPERLRSEAAWAHLCGVSPLEASSGKVTRHRLNRGGDRQANCALWHIVITRLASDPDTQSYMERRVKEGRSKREAVRILKRYVAREVYRVLPRV

SEQ ID NO: 169770 - protein, 343 aa, unidentified
MGIVEVVGGVDTHADFHVAAAVDANGGVLDVERFPASVEGYEGLLAWLTGFGRIVRIGVEGTGSYGVGLARFLIDADIEVVEVDRQNRQVRRKKGKSDPTDAVTAARAALSGAAAVVPKLRNGPVEQMRVLLVARRSARTQRSQSLNQLRHLVFCAPEPIRTRFKDRPQIGLVKEAAAMRPNPTSDPVVYTTNLMIRNLARRIRALTGEIKEIDRMLRDLLEQTAPDLLSLYGVGPDGAATLLVTAGDNPERIRSERSWAHLCGVTPIPASSGKTIRHRLNRGGDRHANSALHRIVLTRMSNQPETKAYVARRRTEGLNTFEIMRCLKRYVARQVFKHLPTAA

SEQ ID NO: 169771 - protein, 403 aa, unidentified
MNDCVGIDVSKGKSMIAVMRPFGEVVVSPFEVRHTANELSELAGLLKSLDGETRVVMESTGNYHAPVAWLLHDAGLYVSVVNAMLVHDYGNNSLRRAKTDKKDAVKLANYGLDHWLTLPRYIPEEDTRLMLKICYRQYQQYSKVQTMLKNNLISLLDTTFPDANRLFTSPPRADGSEKWVDFVATFWHCECVCGRSEKAFTTQYQKWCRKHGYNFSEDKALDIYASACRHFGVIPKTDTAKLLVEQAISQLQTTSSALAALKQEMQSLAASLPEYPVVMGMFGVGPTLGPQLLAEIGDVRRFHSKKALVAFAGIDAPPYQSGQIDVRSRSISKRGSASLRRTLFLVMSVILQCAPIDEPVYQFMDKKRSEGKPYRVYMMASANKFLRIYYASVKAYLESLEHD

SEQ ID NO: 169772 - protein, 402 aa, unidentified
MNAVGIDVSKGKSTIAILRPFGEIVASPFEVNHTAAELSKLAEMLRGLDGETKIVMECTGSYHLPVAYALHEEDLFVSTVNPIITHNYDNNSIRKSRNDKSDAIKIANYTLSNWLDLPQYVPEEDVRHMLKAYSRQYNKYKKILTMLKNNLICLLDSAFPGANELFSSPPRKNDGHEKWVDFVLTFWHCKCISSQSQKAFVERYRKWCKRIGYNFNQSKAEDVYIDSLGHSYVIPMNNTTKLLITQAALQINTISETIETLAAEMKQLASSLPEYPVVIEFRGVGDIIAPQLIAEIGDVFRYFKKSSLVCFAGLEPVENQSGKFKGIETISKQGSPHLRRVLFQIMDCLIKHKPDDDPIYQFLDRKRFEGKHYRSYMCAGSAKFLRTYYARVKEYIQNNYDD

SEQ ID NO: 169773 - protein, 448 aa, unidentified
MQNRNVKMEVVNPNAAGIDVGSRSHFAAIGQGKEEIKEYGVYNEDHQQLIKWFLENEIETVAMESTGTYWQNLYSDLIAAGFQVILCNGKFTKNIKGKKTDVKDAQWIQKLHTIGLLTGSFLPDEATEQLRTYCRHRTNLVHQAADTTRKMQKYLRLLNLRLDVVVKDVTGLTGLAIIDAICKGEKSPEKLAELRHGNCKKSEEEIAKALQSNGRKDYLFGLKQEYQLYVNFQQKMKECDIEIEKLLNEQINSDNEKKQHFIDKKVYKKINKNTPKNLDINLLSYQYFGGVDLLAIEGVSHATALSLMSEVGNGIHKFETAKQFASWLRLAPNNKISGGKMLSSRIPKGSNRLKIALRNAANAIGNLKDTALSNFFNRIAYRKGRPAAISATARKLAVIIWNMIVKGVPYKPEGDYEFLDQKRKRKVQEMKKLIHKFDIRVSDLGLQP

SEQ ID NO: 169774 - protein, 403 aa, unidentified
MNNVVGIDVSKGKSMVSVLRPFGEVVAKPFSIGHTGSELKELADYLKSLDGETRVVMEHTGRYYEPVARFLHDEGVFVSAVNPKLIKDYGNNTLRKVKTDKADSRKIARYGIDNWAELRQHTPMDTIRMQLKTLNRQQSLYSKTKTMMKNNLIALLDQTYPGVNALFDSPVREDGSQKWVDFATTFWHVDCVRNMSLTAFAERYRKWCKRHGYNFSQSKAVEVHAGAQDLIAMLPRDALTKTMVRQAIDALNAISASLERLKAEMQALAAQLPEYPVVMTMHGVGDSLGPQLVAELGDVTRFTHRNAITAFAGVDPGADQSGTHEAKSTRVSKSGPPELRRALFLVMDCLLKTQPQDDPVYRFMDKKRAEGKPYLVYMTAGANKFLRIYYGRVKEYLAQLENS

SEQ ID NO: 169775 - protein, 382 aa, unidentified
MENRPLKFGARRIFGLDLSKKTLKACRLDEDSGFEKQNIFDEKMTDDGRHHLASRLRKGDYVAMEGGSSTSFLARYLMENTEAEIFVLNPCKLHIIFESACKTDRQDCIKIAKYIRDTNPSNWCLIPVPTYEETSLRSLINSHISTKQERTRAINQMHAFFNLNGVSFLKKSDLKESGRRHDLVDHYFPDGIRGMQARLMLQDLDNIELTEEAYGELVRQALLSRPRETLIWMSIPGVGPLTALACVAYIGDGKRFSTPQQLRNYVGLVPRIDQSGIREVIYGVNHYGCMPVRRNIVQAAWSVANLSFDCRFKRRWTELRAAGKNGQKIAVKVANDMLTIGWTLLKKGELYNGLGDFSYLKRKLRIYKMTAIDSRCFGECLK

SEQ ID NO: 169776 - protein, 363 aa, unidentified
MNYIGVDLHKKSITVCVLNENLKVLARKTVFCDQADQIVEFFRQFRPFKVVVEATASYLWFVELVEPLAEEVVLANPKKLRVIAESTKKTDRLDAQVLAEFLARDQIPRAYMPTPRQRQHRRLVRHRQYLRQRMTSVRCKIRHILSDYNADRKDLFSTQCGPAYFKEIALSDADRFVIKQLWSEWQDHQSRLLALTKKIKAFIVKAPNREKETRAILKTAPGVGFVTAEVIVSEVGDVSRFRNAKAICAYAGLVPTVRQTGGKKSKDLRITKEGSGLLRWALVESAWRLVKTSPKWSAFFSQLRKRSGSKRAIVAVARKLLCVLYAMLKTSTPYKIIATQTKAPKPTRIRLVRKSSPKETVTT

SEQ ID NO: 169777 - protein, 388 aa, unidentified
MSKQTAAASVMEITSPTPTLMLAFELGEAGWLLGFSGGYGERVLRRKIASRDTAALEREIEHAKQQLGLPAEVPVRSCYEAGRDGFWLHRFLASRGIENVVIDSASIEVNRRSKRAKTDRLDVLGLVDLLARHLAGSRKPVFSIVTVPGEEDEDLRHLGRELKLLKKDRTRVSNRIKGLLANHGLTIDRKKAMAAQLSRLRLWNGGPLPRHLRGRLERYVSDYRYYTERIGALERERKALLRTHEGAATEKVWRLLSLRGVGIETAWCYGTELFGWRAFRNRKQVGSIAGLTPTPHDSGGQEREKGIAKDGIRWVRGMAIELAWGWLRFQPESELSRWYQARFGGGGKRLRKIGIVALARKLLIALWRFVETGLVPEGAVVTSAIRLA

SEQ ID NO: 169778 - protein, 415 aa, unidentified
MKSLYHCVAGLDVHRMLYVLTVLTEQADGSLSKQQRQFAGFQRDVRALVAWLQSLGVERVIMESTGIYWKSIYAALEASGIPAHVVNARHVKNVPGRKTDMADSEWLAQLGRFGLVRPSFIPPKDLRELRLVSRYRQKLSQMQASEKNRLHKILDDAGIKLGAVVADIDGVSARAMVEGLIAGHPIEQLADLAKGVMRHKREVLELSLEGELTARHRFVLEHIQTHNRYLEAELATLDAYLIEAMAPYREYWQLLQTIPGIDEIAAAMILIEIGDDLSAFANAKHLASWAALCPGNHESAGKRKTGKTRKGNHAIRYLLCEAANAARRTKSALHEKYQSLVARRGHKKAIIAVAHQIIRTIYVLFTRRQAYRDSGFDYQAALVKKNAPRWIKALKKFGYWPTSDSTTHPVLVPAR

SEQ ID NO: 169779 - protein, 360 aa, unidentified
MEVGQTVADHGVVGGVDTHKDLHVAAVVDELDRVLESRCFATTRHGYQQMLTWMRSFGQLRRIGVEATGTYGAGLLRYMQNAGVEVLEVTTPDTHDRRKRGKNDDLDAQNAAHAAFAGRRTVTPKSRDGMVESLRVLKACRKTAVAARRVALQMIHNTIVCAPDDLRETLRRMTRMQLIRTLAAWRPDLTDYRSVVSAYRITLKSLGRRYLELHDEIADLDTMIVAIVDELAPALVARNSIGHGSAAQLLVTAGDNAERLQSEASFAALCGASPVPASSGKTTRHRLNRGGDRAANSALHIIAIGRLRTDPRTKAYIAKRVAEGHSKLEAIRCLKRYIAREVFSLISQRKREINQGRNAA

SEQ ID NO: 169780 - protein, 369 aa, unidentified
MNHFTEVFVGIDVAKARNAVAIADGERGGEVRYLGEVDASEENMRRLVKRIAAKHHRVHFCYEAGPTGYGLHRLITTLGHPCTVVAPSLIPRKPGDRVKTNRRDAMALAKLLRAGELTSVWVPDEGHEAMRDLVRARSGAVETLRVHRQQVSGFMLKHGRIFPRKTAWGARRLRWLQEQRFDHPAHQIALQEMVEAVRTSKERVERLEAAIKEFARAWSLAPVVQALQALRGVDLIVAVTFATEIGDMRRFDSPRQLMGYLGLVPSERSTGDTVRRGSITKTGNGRVRHMLIESAWTYRHPPRIGKMKLYRLEAVSPRMREIAWKAQTRLTARYRALSGRGKKTTVVCTAIARELVGFMWSVAREAQTA

SEQ ID NO: 169781 - protein, 343 aa, unidentified
MVHYVGLDVSLKQTSICVVNQLGSIVREGVVDSEPEAIAAFVRFNAPGAVRIGLETGPTATWLWTELKQLGLPVICIDARHAKAVLKMQINKSDRNDAAGIARIMQTGWFKEVRVKDLDSHSVRALLASRALLVKIKRDLENQIRGLLKNVGLVIGRAKFNVFTVRAEELIEDRPELMAVVRPLLKARQAIEQQTDDLDRKVLKLARYDAQVRRFMTVPGVGPITALCFKATIDDPTRFKRSRSVGAYVGLTTRRHASGEVDWTGRISKCGDAMLRSYLFEAAGVLLTRVPKWSALKAWGIRLAKRSGLRKAKVAVARKLAVILHRMWIDGTEFNWSTKKAAA

SEQ ID NO: 169782 - protein, 340 aa, unidentified
MKRYLGVDLHRNCFTVCTLKEDGQSELRKWSIHSLCDFAQEVQATDAVAVEATGNARYFCQALKERGCRLVVVNPHQFQVVSRSVKKTDAHDAKTLAEFLAKDMLPEVRMKEALPAEIASVLQTRDKLVKLRTVLKNKINNLLAGQGILIRRESLSSDKGLEQVLQAPVSDLERVELEVLVGQIRHLNDSIRRLEAAIKEQGPKLPGYESLKSIKGIGDIGGSTMLSTIGDINDFASEGKLAAYFGIVPRVQNSNATERSGRITKRGSKLGRTALVQCALIAMRYSPYLAHYYARIKAARGTGKAIIALARKFLGIIYKTLKNGWVFEDFPAFVLAPATG

SEQ ID NO: 169783 - protein, 349 aa, unidentified
MPSISEQTIRVVGIDIGKNSFHIVGLDERGAIVLRQKWSRGQVSTRLANLPPCLIGMEACVGAHHLARRLQALGHHARLMPAKYVRPYSKGQKNDFRDAEAIAEAVQRPTMKFVAVKTADQLDLQALHRVRERLVSQRTGIINQIRAFLLERGIAVRQGQRFLRAALPRILAVACEVLSPRMARVIEALADDWRRLDGRIDELSAEIQALADADSACERLMSVPGIGPIISSAVVAAIGTGEAFTKGRDFAAWLGLVPRQMSTGDRTILGRISKRGNRYLRVLFVQAAWVVLIKPTSWHRHGLKAWIEAAKKRLHHNVLAVALANKLARIAWSVLAHGRAFEVSRPQAA

SEQ ID NO: 169784 - protein, 332 aa, unidentified
MSAVYCGLDVHKETTYATVLDHTGQVVTQRKMRNEEVPEFLEPLEVEKVAMEASTYIIPMYRRLVDEGYDVTVSHPKKTRYIAEARIKSDRVDSKALAELLRLDSLPESYIPPKELAGLRERVRRRAFLVRQRAKLKVKIRDVLAYEGVKPPADYGLYTRKGVEWLRGLGLEPVDCYLRLMAPLSREVLLLSKELRGLARDDSDVRLLMTIPGVGYYIALLVKAEIGDISRFSSCDHLASYAGLVPSTRSSGGVERHGRITREGSRWLRWAMVEAAMVHLRYDTPVTRFYHRVAERRGRKAALVAAARKLVTVCYSVLVNGSPYYNPLHAQA

SEQ ID NO: 169785 - protein, 354 aa, unidentified
MNSVRYVGMDVHRDTISVAVLDESGRLTMQLVLATRAGAVLDFIHGVRGTLHVTFEEGTHSAWLYDVLVRRVEKLMVCNPRKNALMKSGSKSDAIDARKLAELLRAGMLSPVYHGETSALEVQQVARSYSQLTEDTTRVMARLKAVFRGQAVSCAGKKLYGKRHRGEYLAQLGGGLRRRAEHLYQELDALQPLRHEVRRELIVECRKHAAARWLQSVPFLGPIRAALLIGRVQTPHRFRTKRQFWTYCGLGLETRDSGQYRMVNGQVERRRKPVLIRGLNWNHNHEMKNLFKSTATAASVREGVWREFYLGLLDKGMRPEMARLTLARKIAAITLKIWKKGETFDAEHLKLQAA

SEQ ID NO: 169786 - protein, 341 aa, unidentified
MSIMTVGIDLAKNVFAVHGVDENGKAVLVKPKVSREQLPALIAQLPPCLIGMEACSGAHYWARLFRPYGHTVKLIAPKFVTPYRMSGKRGKNDAADAAAICEAVTRPAMRFVPIKEEHQQIILTLHRTRQGFVEERTAVYNRLRGLISEFGIVLPQKIACLRREIGAHLEDLPGYANQCVGDLLAHADRLDVLVTEYDRAIAHAAREDARSQRLMHLPGLGPTTASALLASLGGGHDFANGRQVAAWIGLTPGQYSSGGKARLGHITKAGDAYLRSLLVMGARAILSGLGDKQDRFSRWARSLIERRGYWRAVVAIAAKNARLAWAVLKYGEDFRLPPDVA

SEQ ID NO: 169787 - protein, 381 aa, unidentified
MKKNNIGKLQVTKSQLRRKAAKQRLTVGLDLGDRTSRYCLLDEAGEKAGENQLPTTRAGMDAAFAKMAPSRIALEVGTHSPWVSRQLVGMGHEVIVANPRKVRLISQSVKKNDRMDAEQLARLARVDPKLLSPIRHRGAEVQADLAVIRARAGLVECRTGLINTARGLVKPMGERLKKCDADQVREALGEGLSEEAQNVIGPLLKSVEEISKQIQVYEQKIEEIEKRYPETKVLKQVSGVGRLVALTFVLTVEDPERFEHSRDIGPYLGLTRKQRDSGEREPELGISKAGDELLRWLLVQAAHCILRRGAPDSDLREWGLKKVQAVGGKKGGKTRKKKAAVGVARKLAVLLHRLWVTGEVYDPQYNRKARETAKGKRKAAA

SEQ ID NO: 169788 - protein, 412 aa, unidentified
MEVLYACCCGIDVHAKMLVACLMKAGRKEVRTFSTMTEDLLRLLDWLTQAGCTHVAIESTGVYWRPVFNILEGTLEVILTNARDAKGYKARKTDVIDAEWLADLLRHGLLKPSFIPPLPIRELRDLTRYRESLGREQTALANRIQKLSESANIKLGQVASDALGVSGKLMLRALAAGETDAEQMSHLAQRTLKRKQPQLQQALEGRFTPAQRWILAELLDQYDHVEAALQRVEARVRQEVENSTDPFVPEAVPLLDTIPGVGETVAQIIVAEIGVDMERFPTDHHLASWAGVCPGNNESAGKRKSGKTTKGSRYLRAALVQAAWAASHQKGTYLAAQYKRLVKRLGKKKALVAVGHSILVIAYHVLQTRTPYQELGSDYFERRNVDKQRKRLIRQLESLGVKVTVEEIKEAA

SEQ ID NO: 169789 - protein, 451 aa, unidentified
MAVGVCAGVDWAKDTHDVVVEDQDGNRLWAATVAHDEQGLTRLCAALVRLEVKRVAVERPDGLLVERLLDAGLAVIAMHPNQVAAARARFRPAGGKSDRFDAFVLCELARTDSHRFRVLVPDGDQTKALRALTRGRAVLVEQRVALCNQLRAELERFWPGAVQIFADLDSPISLAFLARYPSPHDARGLGAKRLAQFLARHHYSGRKQPAELLERLRNAPSGRAAELEADARRGIVLALVAALTPIVEQIRELTSEIAHAVRAHPDGEIFLSLFKDPKSVITAAELLAEIGDCRARYPTAEHLAADAGMSPVAVESGRRKVACFRRGCDKRLRDAFTTLADSTRHWHPWAASHYARATSRGHDHPRATRTLGRAWCRVIWRCWQDHTPYDPDRHRALQQHCTVTIPTPSGPRPDTAATQRMLGAAVTQRAARRAEREALDRKPTSANTTRG

SEQ ID NO: 169790 - protein, 345 aa, unidentified
MDKIIRIGMDTSKHVFQLHGVNAEEKPALREKMRRKEMIDFFTTCPPTLVAIEACGGSHHWARLLSSFGHEVKMIAPQLAKPYVKRNKNDAADAEGLCEAMSRPTMRFVPVKTVEEQAALMLISVRTRLITNRTQLANAIRGYANEFGVSAAKGLAHIPLLLERIQADATVPELAQELFMSQAEEYAELEKKIADVEAKVKAWQRKDERSRRLNTIPGIGPIGSALLIMKTPAPELFHSGRQFAAWIGLTPKDHSTGGKLRLGGITRAGDEALRAVLVAGATAVIHHARRSGKASQWLAELLRRKPPKLAAVALANKMARIAWKLMISGQTYSAQSGAVLTGCAT

SEQ ID NO: 169791 - protein, 403 aa, unidentified
MTEKFCGVDVHRDLLVATILCDQTKQTKHFQNDPDDINKLREWLKTNECKKVVMESTSIYWVPLYLALEETGYNVTLANAHQVKGIPGRKTDQSDSEWLAHLLRGNQIKPSYVPAKHLRELRELTRLRVKYVQNRTQYKNRCQKVLNRVNIRLRSKLSDVFGKAGMEILNGLMAGKTVEAILEHTKNKQLKNRCEEIKSVAKGALSENDIFVLKHLTETIEHLNGQIRDVEARIEMLANQRDVEIVSSVPGVGKRSAAAILAEIGDAKRFSNGKQIASWTGLAPSLHQSAGLTVLGSITKQGSKWLRWNMVEVAHCAVRVRDSRLRALFLRIRAKKGSQTAYVAVARKMLTIIWHLLVSGEKYVEEGFSKTAVKARSSYAGHVPLEVMAEVLRNAGYTVVANG

SEQ ID NO: 169792 - protein, 315 aa, unidentified
MDKATAEIFVGIDVSKSWLDIAVHAQEAAFRTGNDDPGIASLVKRLKKLKPTLIVLEPTGGFEMLVVAELTHAGLPVVAINAKRVRDFARATGQLAKTDKLDAKVLAHFAAAVRPVLRNLKSEEEEQLTALLTRRRQILDMLTVEKNRLVTVRAKMRSDIEAHIQWLSSSLKELDKEIEDFVKGSPAWKEKDELLQSVPGVGPVTSATVLGMLPELGQLNRQEIAALVGVAPLNKDSGKKRGRRRVYGGRADVRSVLYMAALAAKKFNPVIKKFYDRLIQHGKEKKVALTACMRKLLVILNAMMRSHQPWRTQAA

SEQ ID NO: 169793 - protein, 352 aa, unidentified
MEKYIGIDVHSESCTIAVVNSAGRQLRQQVVDTQAKVLIEFLKGLSGNRYVCIEEGQLAEWLVETLEPYTKEMAVVQPKAHQGHKSDAADAWALAEQLRVRAKGVYVFKPTRQYRPLREAVRTYGVAVKDMTRAKNRFRSLLRARGVANFDSSIYEPEQRSAWIRKLPTAYRRRAEWFGRQIDSMCEAHEIAESWLKEEAEKCPEVERLQTLPGFGPIRAAQVVALVVTPHRFRTTRQFWNYCGLAIVTRASSEWKRDSSRDGWQHVRGNVQTRGLNRNCCSQLKAVFKGAATTVIAKPNPLREHFEQLVANGTKVQLARLTIARRIAAATLAIWKKKEDYDPTKHQSIKPA

SEQ ID NO: 169794 - protein, 330 aa, unidentified
MGAAATAFVGIDVSKATLDACLLGPEGRARQAAFANDPKGHAALIAWADRHAAGAELRFCLEATGPYSEAPAAALAEAGRYVSVANPARVKAHAAASGQGNKTDSADARALAEFARDRHPPAWQPPAPEVRELQALVRRRDDLREMAAREKGRLDSPALTRAARRSIQRAVQFLGREADRMQTEADALIAASPALRADRDLLESIPGVGRQTASTVLAELPPVDRLPSAESAAAYAGLSPREFRSGASIRRRTRLSKAGNARLRKALFLPTQAAVRFNPLLKAFFARLVGAGKPKMQAVGACMRKLVMLCYGVLKNRARFDPAWASKKPT

SEQ ID NO: 169795 - protein, 341 aa, unidentified
MEQVTTIGLDIAKYVFQAHGADAGGHTLFRKRLVRRKLLEFFAPQAPCVVAMEACAGSHYWAREIGKLGHTVRLIPPAYVRPFVKRQKNDVADAEAICEAAQRPNMRFVPVKTEEQQANGVVFRARDLLVHQRTQCINALRGHLSEYGYVFPQGIAQVAALIAHVEDPNAALPDNARTILKLLIDTFTTLEAQIHELDGEINRRSKADPVARRLMTIPGVGPITATAITALVPAAEGFRVGRDFAAWLGLTPLQKSTGGKQKLGAVSKRGERTIRRLLIIGACAVIQQVSRRGAPAGSWLAQMLLRKPKMLVIVALANKMARVVWALLVKGGVYRAPAAAV

SEQ ID NO: 169796 - protein, 338 aa, unidentified
MNIVFPGIDLAKNVFQLCGLNQAGKPVYTKRTGRKELLQTLANIPACLIGIEASTGAFYWQREFEKLGHKVKVISPQYVNPFVRGQKNDGNDAQAIAVALMQPTMQFVPPKSPEQQDIQALHRARQRIVNHRNATVCQIRGLLLDRGIPIGSAVSRARRAIPLILEDAENGLSSRMRRTIAELYDLFNDLGRRIHFFDKEIETVFRQSEACQRITKVKGIGPKTATAVVAAIGKGTEFKNGRHFAAWLGLVPRQHSSGDRQVLMNMTKKGDKHLRTLFIHGARAVVRVATNNNDGHMNQWVNQLKERRGFNKTTVAVANKNARIIWSMLRNDTGYQVV

SEQ ID NO: 169797 - protein, 364 aa, unidentified
MTTVANRKREGKRNSQPWTPATGERIHVGLDVHKKSIHVAVWSVTAGQVVRQWVTPADYGRLVEQLEPLRSAIVRIVYEAGPTGYRRARLLAEAKFPIQVIAASKTPQVADRTAKSDGLDCRQLAEFSAKGLLHPVAIPTEQQEADRQVVRLRDSWTNKRRRVQQQIKSFLLQHGLAEPAGLANWSAKGVAALSQLPLGSQLRFALDLLVEELVRLNEQLARIRQEIIGLSKTDRHGPAVAVLTSHPGVGLTVAMAFRTELHQAEQFRDAAQVSQYVGLAPRVSQSGPTRRDGPISRTGRGPLRALLVQAAWVWIRYDSAARAVFARLAGNTGSAQKAIVGMARRLAIRLWRMMVTGEVYRVAA

SEQ ID NO: 169798 - protein, 371 aa, unidentified
MTTVIYIGIDVHKDSYSLCAFNFRNNQAFAQARIQSRDELVVKYIHRLVDEHEDAEILCGYEAGPSGFGLYRHLQCAGIPCVLMAPTSLPKAPGKRVKTDRLDALELAKHLAYGTYSAVSIPTVEDEAVKDYTRMRNARVEALKKAKQNVLSFLLRKGKSFSEGKSYWTQIHYRWLRAQQFTDPLDQETFNEYLQEVIDQQEKVDRFNQRIEEIAQDERWSERVGKLRCFRGIDTHTALSLVSEIGDFSRFRTPQQFSAFLGLVPSEASSGQRELRGGITKTGNVRLRKLLVESANATLRGNVYGQKSKRLKARQAGNEVQVIAYADRANRRMHRRYNQLTSRGVHNNKARVAVARELSCFIWGMMNDKTE

SEQ ID NO: 169799 - protein, 441 aa, unidentified
MGRRCIGMDVHREFAQLAVWENGTVRQAGQIGLTAESLRVFCDSLGLEDEVAIEATCNTHAIVRLIAPHVARVVVSNPQKTRAIAEAKVKTDKVDAAILAELLAADFLPSVWVADEATHALRRQVARRANIVRQRTRLKNQVQAILHRNLIPRCPAADMFGVKGRCWLADQHLPADEELAVEALLRQIDFHSQELRIIDAALGRVALERKEVLRLMTIPGVDATVALSLVAAVGEFRRFSRPEQLVSYLGLNPRVKQSGGSPANHGKITKQGRAHARGMLVEAAFTAARTPGPLRAFFERVRSRRGVQIAIVATARKLAVLCWTMIERGEDYAFARPSLTDKKRRALELRAGLESRRGRKGTAAAYSLKDVRQRELELAQQAENAYRLQVADWQARRPSKEGVVAASGTRLKRPSVGQAARQASVPEPALRSGVDHAHHQA

SEQ ID NO: 169800 - protein, 410 aa, unidentified
MEPLIERCCGLDVHQGTVVACLLIGKADERPKKELRTFRTVTADLIELREWLQKAGCTHVGMESTGVYWTPVYALLEDVFDLTVGNAQHIKNVPGRKTDVKDAEWIADLLRHGLIRKSFVPPKPIRELRDVVRYRRKLVQSRSTERNRLLKLLETANIKLSSFLSNVFGASGMAMLEALLEGGSTPQQMAQLSKGRLRKKLADVELALDGRLQEHHRFLLRMQLERLKQADAQVDALDLRIEQMLAPYREEVTHLASIPGVNTVVAPQIIAEIGVDMTAFKSEAHLASWSGACPGNHESAGKRQRGTKRKGNIHLTTILVEAAQAAVKTKGSYFHDKFHRLKARRGYKRALLAIAHKILIASYHVLLDRTDYRDLGESYLDGLSKHRTTNTLVRRLERMGYTVRLEATMN

SEQ ID NO: 169801 - protein, 350 aa, unidentified
MEKFSKTQKPMRQETVGIDLGDKMSRYCIVNQEGDVVEEGSFRNQVSSLEKHFRGEPRRIALEAGAQSAWISREQERLGHQVIVANARQLKWITASDTKNDPGDARKLALLARADVRLLAPIEHRTAEQQAELAVIRARDAILRARTLLINSARGIAKGFGVRLPKSITLTFGTRALAELPEMLRTALGGLLRQIDALSEAIGSSDQQVGALAQQHPEVEPLTSIPGVGQLTALTFRLTLGRAERFAHSRDVAGFLGLRPRQRQSGARDPQLGISKSGDPYLRKLLVQCAHHILGHYGRDSALRRWGLAKAEGGPKATLRAIVAVARKLSVLLHRLWVTGESYKPFPQIV

SEQ ID NO: 169802 - protein, 389 aa, unidentified
MSQSFDSRKSLTAFEQDSTLVAVIEMSQSKWLVAAVVPGVERRALKKLDADAGALLKLLQRWRDEARKAGRTIGRIVCAYEAGRDGFWLARWLQAQAIEAYVIHATSVAVSREHRRAKSDRIDTELLMRSFLGWLRGEERHCNMVAIPTVAEEDARRPSRERESLVGEQTRIVNRIKAILAMFGIGGFNPKLRNAAQKLERLRTVEGTPLPENAHAELHRDLARLRLVRDQTRAIEGERLRRLAAAPAATGTHAMVRLIARVIGVGIETADMLVNEALARNLRDRRAVARYAGLTGAPDESGKRRRERGLARAGNGRVRRGMIQLAWRFLIFQKDSRLVRWFRGRTADGRSTTRKTMIVALARKLLIALWRLVTTGEMTEGIKLRPAGT

SEQ ID NO: 169803 - protein, 338 aa, unidentified
MRTYAGIDLHSSNCYLAVIDEQQRRLFSKRLPNSLDQVKAALQPFKDQLAGVVVESTYNWYWLVDGLQEDGYRMHLANPSAIRQYEGLKHTDDQSDAFWLAQQLLLGILPQGYIYPKSERPTRDLLRRRSLFVRHRTAHILSLQSMVQRCCGHGISANEIKKLTSQEASAMFSDPQLGLTARFQVETIGFLTQQIRAIEKAVLPQVKLRPEFVILLTIDGIGQILALTIMLEVGDIRRFAKAGNYASYCRCVKSQKISDTKKKGEGNRKNGNRYLSWAYVEAANFTVRHSARAKAFYQRKCAKTKKVVAIKALANKLARASFYILRDQSAFDEKRLYG

SEQ ID NO: 169804 - protein, 407 aa, unidentified
MRRCIGLDVHREFAEVAIWEDGIVRLAGQIATTPEALRLFAESLCELDEVAIEATCNTHAIARLLERHVGRVVVSNPMKTRAIAEAKVKTDKVDARVLAELLAADYLPSVWIADDETHALRRQVARRAHIVRQRTRLKNRVQSILHRNLIPRCPAADLFGHKGRSWLAGQELPLDERQAAEALLRQLDFHGEELKLIDAELARVALRREEVKRLMTIPGVDATVALSIVAAVGDFGRFRSPEKLVSYLGLNPRVRQSGGQPASHGRITKQGRAHARGMLVGAAAKTPGPLCAFYERLRARRGMQIAVVATARKLAVLCWHLIAKGEDYAYGRPSLLAQKLRRLELRAGMPSRRGQRGSTHAYNLKEVRARERALSEQGEIAYKQLVADWQAKRPARAGAGAATGVRL

SEQ ID NO: 169805 - protein, 368 aa, unidentified
MMGCVHSRCCVCDLTAAIAGIARLHAMIGEHLGEDEEEPTVVVGIETERRPWVAALIAAGNQVHAVNPLQAARYRERHSVSGAKSDTGDAHILADMVRTDRHQLRAVAGDSAEAEAVRVLSRAHKTLIWERTRHLQRLRHALLEFFPAALVAFDDLAAADTLQLLAAAPDPVSAAGLSIEAITAALNNARRRNRASKAEAIAAALRAEHLGQHAAVAAAYAVTVRVQVAILAVLNTQIAGMEQQVEANFSQHPDAEVYLSQPGLGVVLGARVLAEFGDDKVRYADAKARKNFAGTSPITRQSGKKKVVMARYVHNDRLLDALNRQAFAALRQLGNRLVGILHGCLKTGTEYNEIKAWSQTTHDQQLAA

SEQ ID NO: 169806 - protein, 395 aa, unidentified
MFIVGIDVAKRSHEVCMITSDGQTVQRPFSIRNNCTGYNLMLEKIRKHTNIKSQIVFAMESTAHYWLALFTRLRKDGYHVILLNPIQTSAMRDMFIRKIKTDAKDSFIIAELIRFGRYAESNVAQDRLLALKELCRNRFYLVDMAGDLKRKLIALIDRVFPEYEAQFDTIFCKSSVALLKKYPTPQRLSNAHLDKLTELLWNSSNGHFGEWKARELRELARNSFGVEDCDGAYSTLILLMLDQIQSLSGKADALEKEISRLFQSFDTTVTTIPGVGPIIGAVILSEVGDISRFSSADKLAAYIGVDPSVNQSGEFQAAHAHMSKRGSPYLRRCIWMASQVAVQRDPMFRAYYEKKAAEGLKYMTIIGHVTRKMTAVVFAILRDHKVYEPVLPTAA

SEQ ID NO: 169807 - protein, 437 aa, unidentified
MKKPRLQAGIDISKNKFDLCLLTSEGDILVRHRVFSNTRSGYQGLRDVLLEAWQAGDFAGIDIGGESTGPYWMPLFLQMQADSVLAAYDFHIYLLNARHVYWFKKGAAEAEKTDAKDSFFIAEKLRTQNNKQPWSFDPEWLRLRFYTRYRFHLGQQRTRLKNAFWATMFLWCNLYAPRQPFADGLGACGRMLIRTYPDWQRLQEMSSEALGAQLAECSRRRLSDPTGQAEQIQQIIQESFPVPPALTQVLHHLLTLHLDHLAFIEQQIRQVERLIKIEVDTHHPEVKCLMSTQGIGLVLAAGIASEIGNLSRFFAGEKWDRRKQRFRRKNLRDVEDAVSKYAGLWWPRKESGNFRAEDRRLNKQGNAYLRYYLVEAADKLRQYLPEYRAYYERKYREVKTHQHKRALVLTARKSVGLFVGLLHRKEAYRSPEERLNN

SEQ ID NO: 169808 - protein, 420 aa, unidentified
MEGPAVTVTWVRVDTFSVPSRATKVRLVPMSKLRFIGLDVHKDSIVIALAEAGQAPAEVLKRIDWSEPRLLTELRRLGPLSELRVCYEAGPTGYGLQRFLATAGVDCVVVAPSLVPRTQGTRIKTDRRDARKLAHFLRSGDLVCVWVPDEQTEALRDLERARDDARLAERRIKQQLLKFLLRNGRRFTEGKEHWTRTHWNWIRRQQFGQEAQRRVLADAIKTAEEAQARIARLTQDIADCLHDWALADVVRNLQAFRGIKELTAAGIVAEIGDFRRFERASRFMAFTGLVPWESSSGQTRRQGGITKTGNRHVRRLLIEAAWHYYHAPAQASGALLKRREGVPEEVVAIADRAQRRLRQKSLKLQLRRKSATQIVTALARELAGFVWAAALASVPGGAAMNGADRQRPRRSRRRPATAIA

SEQ ID NO: 169809 - protein, 324 aa, unidentified
MQTQSIGVDVGKTELVASIRDSDGNSAMPALFPNSSVGFKKFLVYLKINNISSDDPILFESTGPYHWRACRTLADEGYFIKVANPLHTKQIARLSIRKRKTDKVDSQNLAFLASQNYGYRFVETEAMAKSKAMVRHYWKLRQSATDHLRHDRYMKEYRGINDESVSKFMIKRCEALKKIIVKEWSKGNDVKYLDSIPGITPFLAATVLAELLPLERFKTIDQIVAFSGLDPSVRQTGGKAGHHGHISKRGSPTLREALFLAAFGSFQREPMKSIYVRYKARGLHHNTILCILGRKILRIAVSLLKKRRVFDPSKLSPTDDLTGT

SEQ ID NO: 169810 - protein, 316 aa, unidentified
MSQLERVIGIDVSKKLLDVAVVPENDAWSVDNDEEGIRTLIKDAKRLRPRLIVLEATGGLETAVVALLAAARLPVVVVNPRQVRDFAKSLGKLAKTDKIDALVLAHFGEATKPEIRSLKDQQAQQLSALVARRKQLVEMLTAEKNRLMTAPEPVDSDIKAHIAWLEQRLDDINKDLRKAIKASAVWRAKEKLLRTVPGVGPVLSVSLLAGLPELGKLNRKQIAALVGVAPFNRDSGKFRGRRSIWGGRAHVRAVLYMGTLTAIRFNPVISAFYQRLCAAGKAHKVALTACMRKLLTILNAMMKNHAPWQPYFRETA

SEQ ID NO: 169811 - protein, 386 aa, unidentified
MLYVGLDVHQKRSSMCILNDDGKVVKQELIKGPWPGVIDRLKRIDEPFRVCYEASCGYGHLHDRIAPLPRASQVSVAHPGQLRLIFKSKKKYDRIDANKIAKLLYLDEVPAVHVPNIDVRGWRKLIEFRQTLLRRRVALKNQVRAILRGEGLTAPRGLWGKKGMTWLGQVELPAGSKLALDLAAEDIAQVNEKMKRVEKELAKIAQKHAGVQLLMTIRGVGIRTAEAFCAYVDDVRRFARTHQVGSYFGLVPCQDSSAGKDRFGHITRDGPPTVRKLLCEATWMGIRHNPQLREFFERVMNDDPDRKKIALVATAHYLCRIMAAMLRSGEVWRDPRKQEPQQEQEQKQEQKQEQKQEQKQEQQDGLRPAVEGAPPRKTPRQKAVVF

SEQ ID NO: 169812 - protein, 384 aa, unidentified
MSVDHTVTARPAPTGGVDWASDNHAVCVVDSDGDVVHRLTVAHTAAGLRRMTDLLARHRVDAVAIERPDGPVVAALLAAGLIVYVIPPSQVRNLRGRYGSAGNKDDRFDAFVLADTLRTDRRRLTPLSLDAEATTALRQLCRARRDFVAHRVAAANQLRAHLQIAFPGAVGLFADIDSQISLTFLARFPTQDAADWLSPKRLTTWLSSVGYTARSTAATLHAHLATATRGATASHGQALAAITTAFLAALTAISAQIDTLAKQISDALDTHPDSAIFTSLPRAGTVRAARLLAEIGDARGRFPTPNSLACLAGAAPSTRESGKTPVVSFRWAVDKQLRDAVCDFAGDSRRANPWAADLYNRARARGHDHPHAVRILARSWINII

SEQ ID NO: 169813 - protein, 320 aa, unidentified
MSQPNLQCMGIDVAKLSLDIATTDTIEPFTVGNDEDGFAVITDKLKHTKINLILMEATGGLEAAIACKLQSEGYDVVVINPRQARDFARSMGYLAKTDKLDAAMLAQLALVIDRHPDRSRYIRHLPDEARAVLAAMVVRRRQLNHMLVAERNRLYPSHPQSRKSIDNIIDALQNELDRINEQMKQHMTAFFQEQARLIGSVKGVGDITVASLIAELPEQGKLNRREISALTGVAPLNRDSGKMRGKRTTFGGRAGVRATLNMAALVATQFNPAIKLFYQRFLAAGKPKKLALVACMRKLITILNTMLRKGEEWNASFQSR

SEQ ID NO: 169814 - protein, 344 aa, unidentified
MTTEASGKLYAGLDLHANNTFCAVINHAGQPVFQQRLRNELPAICQALRPFQSQLQAVAVESTFNWYWLVDGLQAAQFPVQLANPAKIQQYNGLKRTGDASDALWLAEMLRLKILPTGYIYPKEQRAVRDMARRRMLVVQQATRTLLSLQSMVMRHTGQTVRGRGLEDWTLVEVRAAFPEPATQETAVALLELLREQRRIQRALEKNVLARAKWAGAWERLLTLPGVGNILGVTILLETGPIARFASAGDYASYCRAVDSRCDSNGTKKSENNRKNGNQYLAWAFVEAANYAVRYNARAQTWLARKTARALRVVAIKALACKLAKAAYYILRDDVAFNEQKLFG

SEQ ID NO: 169815 - protein, 386 aa, unidentified
MAHSTNILPRSVDYDQTLVLAIELSNKSWVLAAQVPGLSQTKAKRTIDPDKNDLLAAIDGYRTRAAAAGRSVKRVITSYEAGWCGFWLARWLMAHGVEVHVVQPSSVPVDRRMRRGKSDGIDAELLLRTLLAWLRGEPRVCSMVPIPDEADEDARRCVRERSELVSERVGLVNRIGAILATLGADDYNPLLQSRRRRLTELRTGLGDPIPPNALAKITRLLTRLELVLAQTAELELERDAVARTDAPDQAGKMIQQLISLRGIGVQSATVLVREAFVRRFANGKALGSYAGLTSTPYSSGGIDREQGIGKAGNRRLRTVMVELAWLWQRYQPGTAQVVWFRERVGSTGRRVRKVMVVALARKLLIALWRFIIDGVMPEGAVTKPSI

SEQ ID NO: 169816 - protein, 358 aa, unidentified
MNEGSCVGLDVHARSVVAGVIDMGSGEVRSLRVPPGPEAAVAWLKTLPAPVRVVYEAGPTGYGLARGCAEAGISCVVAAPSKIRPAADRVKTDRRDAERLARLLRLGEITPVRVPGPEEEAARDLVRAREDARGDLMRARHRLSKLLLRHGVVYEATAWTRAHDAWLRRNRFGGGPLAIVFDECYARMLDAKTRRDSLDAAIAELAASDSYVDVVERLVCLRGVSTLTAFALTVELGDWNRFRPESLGAFLGLTPSENSSGERRRQGGITKAGNSHARRLLIEAAWHQRSAPRLSVTLERRRTGKSLAVRAQADRSARRLHGRWGALEARGKPRLIVVVAVARELAGHCWALATMTME

SEQ ID NO: 169817 - protein, 430 aa, unidentified
MKSNTQNTKIEAITETTLVLGIDVGSETHYARAFDYRGIEYSKKPFKFSNDEAGFVMFKVWILDIKEKHGKDKVVPGMEPTGHYWFNLGKFLQDNEMKPVLVNPHHVKKSKELDDNNPTKNDRKDPKVIAGLVRGGRYMIPYLPEGVYADLRTASNMRFQLQAELTRIQNRISRWFNIYFPEYKTVYGQPDAKSGMLILKVAPLPEDILTLGIDGVNQIWRDAKVRAVGKARAKTLIEAAEHSVGSKEGEISARMEIRMLLEDYESRNTRLQEVVALIEELVKKIPMAEKLLEIKGVGIKTVSGFLAEVGDISRFNNPKELQKLAGLALVENSSGKHKGETTISRRGRKRLRYLLFEVAMSLVSKNPEFRELHSYYTTRKLNPLKKMQSLMAVAAKLLRVFFAMLTKGVDYDPKKLVGDIKRPAVYLQVA

SEQ ID NO: 169818 - protein, 338 aa, unidentified
MPLYGGIDLHANNSVVVLLNEQDQVIYQRRLANHLPTILEPLAPHQADIMGVVVESTYNWYWLVDGLMEAGYRVHLANPAAMQQYNGLKYTNDHSDARWLAHLLRLGVLPEGYIYPKAERAVRDLLRKRAHLVRQHTAQVLSVQNLMARNTGSRFSAKRLVDLTPADLQGMLPEAAHVLAVTSSLAVVHCLGQQIKTLEKTVNTCLKPTPAYAQLQTVDGIGTTLAQTIVLATGERGRVPPVGHSAAYCRWGGSTTIRHGKRQGQGNSNQGHPYLEWAYMEAAQFAIRFSPTVQRFYQRKPAKSHLMIARKAVAHKLARACYDILRDLVPFDVHKAFG

SEQ ID NO: 169819 - protein, 396 aa, unidentified
MTIIGVDAHKRSHTLVAIDPGGRKLAEKTVTTTPSGHAEAIDWVLKNFGADVEWAVEDNRSFTHLLERDLLAAAPWRVVRCPPALMARTRASARTPGKSDPIDALAVARAALRETDLPVAVHDDVSWQLRQLVERREDLVTQRAGVMHRVYAHVHLLDPTRPTPTGLDKRNRRDALGRFLRTQSGLLAELARDEVDDLEYLTRRIDSLTERIVERVDELHSSLLTIPGCAHLTAAKFIGEAANMDRFRSEAAFAAYCGVAPVPRWSGSTAGTLRVSNGGNRQLNTALHRVALVQLAKIPVGRTYYERRRAEGDTGAEAIRRLKRKLCRLVFNRLRADYHVRTAADTVGPAVAAADVGQVPAWLELVDIAHSMREERKSPRRSVGEHRMIQPGDAEP

SEQ ID NO: 169820 - protein, 412 aa, unidentified
MDVLVERVAGLDVGKSIVVVCVRTPGPDGRRVSETRTYRTMSRSLEAMADWLAEQGVTLAGMESTATYWKPVFYALEDRMGTWLLNAAHMKAVPGRKSDVRDAEWIAQLLEHGLVAPSFVPPPEIRRLRNLTRYRVQLMGDRTRDAVRLERILEDASIKLSAVASSVTTVSAREMLAELVAGNTDAAAMADLAHGKMRRKLPDLAEALTGHFDDHHALLVGAMLHRLEHVESALAELDARIAAAMAPWAHQLELLQTIPGVGLKTAQVIIAETGADMDRFPTASQLAAWAGVAPAMHESAGKRSPAGSRKGNKFLASMLVEAASSVSRSKNTYLAAQYARIAARRGRKRAAMAVAHSILVSAYYMLQRDEPYREVGNDWFDQRHADAHARRLVAQLQRLGHTVVLDPVVSLA

SEQ ID NO: 169821 - protein, 310 aa, unidentified
MEWSGRAPAPAAREAGEGGRTKEHAISAKLDTAIAVIGIDIGKNSFHVVGHDKHGAIVLRQKWSRGQVETRLANLSPCLIGMEACVGAHHLSRKLQQLGHDTRLMPAKYVRPYSKGQKNDFRDAEAIAEAVQRPTMRFVATKTAEQLDLQALHRVRERLVSQRTGIINQIRAFLLERGIAVRQGLRFLRAGLPDILATRGDVLSPRMLRVVEDLAEDWRRLDARIEGLSSEIVALARQDQACVRLMTVPGIGPLISSAMVAAIGAGEVFSKGRDFGAWLGLVPKQISTGDRGKISRRGSAFCSCRRPGSC

SEQ ID NO: 169822 - protein, 340 aa, unidentified
MTITTVGIDLAKNVFAVHCVDQHGKTVLVKPKVPRAALPELIASLPPCVIGMEACSGAHYWARLFRQYGHEPRLMAAKFVSPYCMAGKSGKNDAADAQAICESVRRPHMRFVPVKDESQQAMQCLHRTRQGFIEEKTATYNRLRGLISEFGVIAPQSTDALRHMVSEQKKSLPLQVQQCVDDLLEHIDRIENNVTEYDRILSRMAKADHRSQRLMELKGIGPTTACALVASIGNAHDSKNGRQLAAWLGLTPSQYSSGGKSKLGRITKAGDSYLRTLLVQGALSVLIGAEKKTDSFSRWVCSLVERRGYWRAVVAIAAKNARLYWASLHYGDDFRLYSVS

SEQ ID NO: 169823 - protein, 399 aa, unidentified
MSGEALAGVDWASEVHAVCVIDGDGEVTDRFDVTHDAGSIRALVGRLGRAQVSRVAIERGDGPVVEELLEAGLEVFVVPSRQIKGLRTRYGSAGNKDDRLDAYVLGDTLRTDGHRWKPLRADHDDTRALRALCRSRKDLVETRVQIVNQLRANLELAFPGAIGLFCKPDNAITLAFLTRFPSAEKARWLSPKRLGSWLSAVSYTGGIPATVLFGRLENAAPGLFGSEGVARGRITLGLVAMLETLNAEIQALEHDMEELFRAHPDQRIFTSLPRSGMVRAANLLVEIGDCRERFPTDDALAALAGASPSTRQSGKREQTVFRWACNKKLRAAVMDFANGSRSADPWAADIYKRAIDRGCRHPHAIRILARAWLRVIWRCWQDGVAFDPALHGARQQLAA

SEQ ID NO: 169824 - protein, 376 aa, unidentified
MKNLRFVGLDVHAQTLAVAVAEADGEVRSLGVIPNEPQRLQRVLKKLGKPEQLRVCYEAGVTGYALYWQLTRVGIHCEVIAPTLVPKKTGDRVKTDRRDAQKLARCYRAGDLTPVWVPDAAHEALRDLVRAREAAKADQLRARHRVSKFLLRQGRRVPAGMRAWGVRHLQWLRQQSFEQPAQQCTLEDYLHEVEHQSQRVARLERSLDSAVQSVPEKMGAVIAALQSLRGVAQVSAVTLVAELGEIARFSHPRQLMSYCGVVSKEHSSGTRIRRGAITKAGNAHVRRIVVEAAWAYRHRPAIGKTLAGRQREQPAGITQIAWRAQQRLHDRYRKLSARGKSAQLIVTAVARELLGFIWAIGVQVERPQRHLLRQAT

SEQ ID NO: 169825 - protein, 400 aa, unidentified
MDRIEQGWVGIDAGKGHHHVVLIDRDGRQLLSRRVDNDELALTGLIETVRDRVMEPTWAIDLADGAAALVIGLLLHRDQPVFYLPGIAVNRASAGYRGEGKTDAKDAAIIADQARMRRDLRRLQVLDEDIAELRLMTAYRADLAADRTRCINRLRSLLLGVFPALERVLDFTCHGPLVLISGFQTPTAIRRLGATRLLRWLERRGVRRPGRLATAAAEAAGQQTIQLPGEAAAASLVARLAQTILELDRQLADVDRKVAASFHTQQDAAIITSLTGIGDVLGAQFLAAVGGSLSGFASADHLAGYAGLAPTPRDSGYRTGNLHRPQRYNRQLQRVFYTSAMISIQRSPASRAFYDGKRAQGKRHTQAVLALARRRVNVLWAMLRDHQPYQERRQPFILAA

SEQ ID NO: 169826 - protein, 404 aa, unidentified
MHEGQLDVTGGVDTHGAQHVAAAVDAAGRILGTAAFTADAAGYRRLLEWMRSFGPVARAGVEGTGSYGAGLARYLAAQGVPVAEVNRPNRQARRRRGKSDPADAEAAARAALNGDASGLPKAADGPVEAIRALRVARRSAMKARTQAANQIRDLVLTAPDDLRARLSGLGTGARVRACAGLRPGPACRRPAQAVRQALRCLARRHQALSAEIGELDASIARLCQQAAPALLAARGVGPEVASALLIAAGDNPGRLRTEASFAALCGASPVEASSGQVTRHRLNRAGNREANNALWRIAMVRLTCDQRTRDYAARRRAEGKTDREVIRCLKRYIAREVYKLITSPPPVIDGAGLRAARTAAGITLAAAAGQLGTWPIRVSELERGLKHDAGLARRYRKWLDQNTA

SEQ ID NO: 169827 - protein, 353 aa, unidentified
MKAKMESNQASLAVIGVDIGKEVFHIVGLGVDGKIAFRRKIRRSGLRDAFEKLPPCIVGMEACLSAHFVSRLLRALGHKPRIIPAIYVKPFVKGQKNDYNDAEAIAEAALRPNLRVVEEKSQDQLDLQACHRVRSRLVSRRTATINQIRAFLIEQGIPVRAGARALRNSLFAILENRRGEISPQTASLILGLYEDWCGLDKRIETVTGAIEELSQVEPKCRRLMSVPGIGPIIATGIVAAIGRGEAFERGRDFAAWLGLVPRQHSTGGRTILGRISKRGSKYLRTLLIQAARVLLMRPHNWSRYSFGAWLKTASQRLHKNKLAVALANKLARIAWSVLHNEKAFDTQPEAVAI

SEQ ID NO: 169828 - protein, 407 aa, unidentified
MHEGGFDPTAIEVFVGVDMAKGDHYAQAITTTGEALFDRAVANDEAAIAGLIRDAAAHGAVALVVDQPASGAQLLLAVARDAQVPVAYVTGLQMRRAAELYAGAAKTDPRDAWVLADFARRNADRLTWLAISDELLAELRVLNGRDVDLAADANRIVNRCRDALVAISPALERAVGDRLDKPGVRDLLARYPTPTALRAAGPARIRKTIAKRSPRLADKVTAAVIDALGSQTLTLPAESTWGQVIAELAADLDRVHARRAELAAQIEEVFLKHPLAEVLVSLCGFGPRTGARTLAEIGDPARFANGGRLAAYAGLAPIDRRSGRSINTATRARNGNHRLKNALFLAAFIAARHDPIARGYYQRKRAEGKDHNAAITCLARKRCDLILAMLKHATPYDPTRHQPALAA

SEQ ID NO: 169829 - protein, 411 aa, unidentified
MEAIIEKCCGLDVHQATVVACVFVGEGKKRAKKEVRTFRTIGRDLRALRDWLTELGVTHVGMESTGVYWLPVFRVLEGSFELIIGNAQHIKNVPGRKTDVKDSEWLAHLVRCGLIRPSFVPPLPIRELRELTRYRRSLMNDQARIRNRVQKLLETAGIKLASVASDVFGLSGRAMLRALADGETNPTVLAQLAQSTLRRKLPALVEAFEGNFEDHHRFLLRFQLDRLDELERAMTSLDEHIDCKLQPYQAELELLMKIPGFSRVTAASFIAETGGDMSVFPTSRHLAAWTGIAPGNNETGGKRRPAGMRKGNYHLVTTLVQAALGAARTKGSYYKDKYWRLRARRGPMRALVAIAHKLLLAAYEVLRHRQPFVDLGDQYLTRRSQTDATRKHVRRLEALGFNVALTPRDVT

SEQ ID NO: 169830 - protein, 383 aa, unidentified
MKKTQETLRLKDTLKGSILYIAFELSNSKWKLAFSDGSKIRYKTITAGNLAQLQVEIDLAKRKFKMIEDVRVVSCYEAGRDGFWIHRYLESQGIENLVVDSASLEVNRRKRRAKTDRIDAGKLLRMLLRYWGGEKQVWSVVRVPSEQDEDARHLHRSLESLKKERTMHRNRIKGLLIQQGIKVSNPSQKKFLEVLEKVRTWNGQQVPPGLKSQVVRGYERLQMVENQIKALEKEKTERLKNPDTVSLQKVAKLASLYGIGSVSSWTFVMEFFGWRQFQNRKEVGALAGLTPTPYNSGKSLREQGISKAGNQRVRALAVEIAWAWLRFQPQSKLSQWYMKRYANGGKRMRRIGIVAVARRLLIDLWRYLEYDKIPEGARLKSAI

SEQ ID NO: 169831 - protein, 367 aa, unidentified
MSSVASPEGLIHLGMDTSKNTIVVATLLPGEESPVTDRIANEEAAIRRLVGRFADRSVLRAWYEAGPGGYELYRLLTSMGVACQVVAPSLIPKGGSDKVKTDKRDSRRLARLGRAGELTAIRVPSPAEEAVRDLARARDALLADRRRAQQRLGAVLMRHGRIWRGGSYWTAAHRAWIAAQRYGEPALAAAIGYYQASLDTREAELAAVEAELMPWAGREPLAGPVARLGCYRGIAELTALTLAAEIVDWRRFPAARAFMSWTGLVPAEYSSGERTRRGHITKAGSEPVRSALTEAAWAYRHAPAIGAGLRRRQAGASPETLARSWTAQRRLHTRYVHLVHAGGKAAPEAAIAVARELAGFTWAEMTA

SEQ ID NO: 169832 - protein, 350 aa, unidentified
MIIIGCDYHPGVQQISFVDTDTGEFQETRLQHREPAEQFYRELALRGMQVRLGMEASGQARWFERLLAELQMELWIGDAAEIRARRVRKKKTDREDARHILRLLMEDRFPRIWVPSWENRDVRQLLWHRHRMVQMRTRVMNQLQAVALNEGMRCKKRLGGERGRQQLESFPLAMWGSRRRHDLLELLDRLNPTIAELTQAIEAEVANYPAAQRLMTHPGVGALTALAFVLIIGETERFQCGKQIAAYLGLVPEENSSGESRRLGHISKQGSGFMRFLLVEAAQVTVRSDGQWRSRYFHLAMRRGRKIANLAMARRLAVRLYWMWRRQWDYEQWKEFGPHAGQPGMSDGVK

SEQ ID NO: 169833 - protein, 349 aa, unidentified
MWIIGCDYHPRFQQIAYVNTEGGEWGQRRLAHGGEAEGFYRSLRGQTVRVGMEASGHSRWFERLLEELGYELWIGDAARIRAAVVRKQKTDARDAEHLLELLLSGRFERLRVWVPGAEARDVRQLVLHRHRLIGMRTRVKNQLKAVALNEGLGPKPGLWSKPGQEQFRALVLPAWTERRRQDNLELLAEWERRTDPLDEAVMQQAQQRPEAVRLMTHPGVGPVTALTYVLVLGDPRRFACGKQVASYVGLIPSEGSSGGRQRLGHITKQGNALLRTLLVEAGHVAARREPELGRCYRRLAMKKNCGVAAVAVARKLAVRLWWMWMREVDYGQWRASGSHAGTGPVQPVG

SEQ ID NO: 169834 - protein, 403 aa, unidentified
MSINGAPVMAATVVAVDVGKNTASLSVTDAGRHRLLGPVDFAMTAPALAAVLERVCAVLPAVAVKVGIEAAGHYHRPLLAAGVWPAGWQVLELSPARVAEQRRVQGRRRVKTDAIDLEAITELVLAGHGVPVTARAARLIELAGWAAHRSRRVQTRTATKNQLLAQLDRCFPGVTLALPDVVGTRIGRLVAAEFADPQRLAALGVSRFVSFAANRGLRVRRSAAERLVAAAGTALPTSEAAVARQVLADDLVLLADLDVQILAAEVQMAKLLPDTPFAPLITVPGWAVVRAGNYAAAVGDPQRWPGARQLYRASGLSPAQYESAGKRRDGTISREGSVALRRALIDLGLGLWHADPAARRYGQQLRARGKKGGVIGCAMAHRANKIAYALVRDQTGYDPSRWA

SEQ ID NO: 169835 - protein, 345 aa, unidentified
MKVTTVGIDLAKNVFQVHGIDERGKAVLRKQLRRAQVAVFFGNMPPCVIGMEACASAHHWARTLQGFGHTVRLIAAQFVKPYVKTNKNDVADAEAICEAVGRPNMRFVPIKSIEQQAILSVHRVRQGFVKARTAQANQIRGLLGEFGLVIPQGIYNVAKRVPELLEDAGNELPVPFRHLIDRLTEHLKELDRQVKEFEQEIIAWHHSSELSRKLEKIPGIGPLAASALVASIADAHSFDNGRQVSAWLGLVPRQSSSGGKPTLLGMSKRGNAYLRTLLIHGARSAILAAKNKVDNTQGWLTNLLTRRHPNIAAVALANKNVRTVWAILAHGREFKADYVPTRMAA

SEQ ID NO: 169836 - protein, 340 aa, unidentified
MDMTTLGIDIAKSVFQLHGIDADGAVVVQKKLRRGAVLNFLGNVGPCLIGMEACATSHYWAREIAALGHEVRLIPPVYVKPYVKRQKNDAADAEAICEAVTRPNMRFVPIKTEEQQSVLVLHRARDLLMRQRTMILNAIRGHLAEFGIIAAQGPRQVMGMIARLRDDGDASLPEIARSALLALGAHLEALAGEIRALERQLMVWHRADPTSQRLETIPGVGLITATALAASVSDPSVFKSGREFAAFLGLVPRQNSSGGKDRLGRISKMGDRYLRKLLVVGATSVIRRAGSNPTKTGAWVRSLMERKPARVVTVAMANKTARIAWAVMTRGEAYRASPIA

SEQ ID NO: 169837 - protein, 346 aa, unidentified
MEYIALDVHKKYTWARVENTQGERLYESRLAHVHGTIKNFVHRWAAGSPVAVETVGNWYWVVDEIETGGGKPQLVNARLAKLMMGSVNKSDKLDCKGMNRLQRTGTLPTVWIAPSSVRDARELPRTRMVLSRQRTQLKNRVHATLAKYGYGVEGASDAFGKRGRKIVSELLSKLPPHTQQALQCILDQLDHVRENLKWIEGQMIEAFAPCPQTNWLKTLPGVGDILAVVIGTEIGTIERFGRGEQLASYSGLVAREHSSGGKIRFGAVRRDVNVYLKWAFVEAANSAILNGERSGYHHISRLYQRIKARRGHNKAKVAVARHLAEASFWILKKGEPYREPMSSTQR

SEQ ID NO: 169838 - protein, 381 aa, unidentified
MRTTYDEQHKADDRVLAVALELSKASWKVALSDARHNPRIKSADAQQPLERLEQVLALIKDARARWALPEVARLVVLYEAGQDGFWIQRALAMRGIETLVIDAASLPVERKARRAKTDRLDACRLVEALLGWLRGERQRFRVVRQPSVAQEDSRHWGREREQLQREMQQHRDRMVKLLVTQGCWEKLDRRFAQRLANGELRDWEGKPLGATLQARLQRELTRWQQARDQFKQLEQERAERFSAQQQAQLTQLVQLRGVGPVSAQRLVLELFWRHFANARQLGACVGLVPQPYDSGTMRKDQGISKQGNRRVRALLVELAWMWLRYQPNSALSRWFTSKVQGDSKRSRRVAIVALARRLLIALWRYLERGVPPEGAQLKAVA

SEQ ID NO: 169839 - protein, 351 aa, unidentified
MQIIGVDLHTRQQTVAMLNVETGEIVEKTLRYEGDSVREFYSALTGPTRVGIEATGSMPWFLELMEELGIDCQVGHPAKIRAAEPRKQKHDRRDAALVLQLLVENRFPSIWMPSSEQRDVRALILYRHQWVRIRTRVQNALQAIALSHGLRRGSSLWSKAGQQAIASLSLTRYTAERRTALQSLYRHLEAQIEDLNRKVEELAWQRPQARRLMTHPGVGPITALATETFLGEPKRFVDGKAVASYVGLIPSEHSSGGRQRLGGLSKQGNPLLRFLWCEAVGHAVRKDADLQRFFQHKLVQKGLGKAKVAAARKLGIRLWILLRDQIDYQEFCRRGQLRQKHGGAHAGMPAR

SEQ ID NO: 169840 - protein, 345 aa, unidentified
MPIVGGLDIHRKQITFDYLDTVTGEVRRGQIAPADRGHLAAWLAGRFTGQDAHFAVEGCTGWRYVAEELAAAGVTVHVAEPADTAALRGRKRHAKTDRTDSRHLRQLLADGRLPECWIPPWHVLECRALLETYHDLRVEHTAWVQRIHAVLFHQGAPQLGEQSMRTGEGLAALQAIAAAQLSPAGQLQVAVALDKLAELDRHLDLLRRRLLAAARQLAGAKELHARLYGVGPITALALTCWLGGAGRFSSARKAVRFTGLDITVWSSDRKGPPGRLSRQGPEVLRWCVYEAGKTHARGSAPDHRYYAAVKDRIDGKRAAISEARKIIRQAVHILAELGDGALAPA

SEQ ID NO: 169841 - protein, 343 aa, unidentified
MEHTTIAVDLAKSVFQVAVSHRAGRVDEERRLTRERFLTFFAQQPPATVVFEACGSAHYWARQLQPFGHTVRLLPAHDVRRYVRRNKTDRTDTKGMLEANRNEEIHPVPVKTIEQQAIASLHRLRSTWLATRTARLNTLRGLLREFGIFIPVGAHHVVPRVRELVAESTDTVPAAVQSTLAHACAELDILETNMRDVERQLTALARQLPDVTLLQTVPGVGVLTATALLALVGDIRRFRSGRHFASFLGLTPREDSSAGRRRLGAISKQGDIYVRMLLTHGARSFVWHAKATAQPTSLQRWAVQTEQRRGHNVATVAVANKLARIVWAVWVQQRAFATDHRPR

SEQ ID NO: 169842 - protein, 370 aa, unidentified
MSVRRILAKTINTDLEYEAIGIDLAKNCVSAALLTTDGEVVCIDRLDYSELEKSAQALSPTTFAMEPCTEMNYLVQKLEAWGHRCLVIGGKNVQNYVENHFSGQKTDLNDAQALAFLAQDTQLRTIKAKDVEQQKYASLTTLREQYIKQYRQTIVSLKGICQAWGLNISKGISGKARLKDLIENHAAFPEELKESLVDMVTHAQTAQKALNKITKTLEELAKSDKVCQLIQTIPGLGSICSCRLRATVGDIKRFKSPKDFPAYYGLVPRSIATGHNERKGKITHRGDRTMRSLMVQAAGSLVNMATKGKLKSKQLTKWILKKQKEKMPWGKLVCAVAAKLLRIVRAVLISNKPYNSKIAGVAKCSLPKGS

SEQ ID NO: 169843 - protein, 389 aa, unidentified
MKRKIYVGMELISTKSRAFDNAPLSQAASLLMGVRHHKETIQVAYLTGKTKEIVKEQQIKHDEGQIKKFINKLKSEYNEIHCCYEAGVTGYPLYRYLKSLGAHCTLVAPGKIPRQSSDKIKTDKRDAIKLAKLIRSGDLESIHVPSEEDEAVRDYLRSGDSLRLDLGRNRQRLMKFILRKGNVYSATKYWTVSHYKWLNNLHFENAILQETFNDYYSRVKVQEENLKAMDQKIKEIAESELYREEVGILRCFRGVDYLTAMFLLCEVCDFKRFKTAGSFMSFLGLVPGEYSSGSKRKQTGITKTGSPRLRRILTEAAWQHRFPGTGSKIVAARRTGQSALVVSLAEKASLRLHKKFRNLQLKGKTSQVMITAVSRELSGFLWAAMNLVA

SEQ ID NO: 169844 - protein, 321 aa, unidentified
MTRIICGVDIGSSSLAARIGQDGAAATFANTPEGIAELAAFCESHRVALVAMEATGGYEQRAFAQLSEHGLPVAVVNPRAVRQFAQSMGRLEKTDAIDAGMIAWYAQTRKSQPLCLAPPTQLELRARVTRLRQLTEVRTAQLNQQRLVTNDAVEKSFRAMLTFLAEQIRELEQAIAALIQADPLWRELNQAFRTIKGVADRTVARIMAEMPEIGTLSNKTVSKLAGLAPLANDSGKHQGKRAVRGGRATVRDILFLVGSVVSRYEPDFVTFQQRLRAAGKPPKVVRIAVAHKLLVRLNAKAREVRQQSVNLQLICSASQQP

SEQ ID NO: 169845 - protein, 346 aa, unidentified
MLYAGLDLSRKRLDVHVLREDGTTALVTAISPDGDAMRSLVRRVAAEGEPVRATIESMNGARFIHDRLEFLGWEVLIADAQRVRGLAPLAAKTDKIDARVLAELTRRALVPEIWLPTPEVRAERERARFRLHLVRHRTALKNRIHAILIAFGRACPMSDLFGVAGRELLDHLALPEPWQTNLVESLALVDDLTARIDALEVELKELGADHPSMRLLMTVPGVGWVLAYTIASEIGDIARFASPKKLAGYTGLCPLVRQSGGKDRRGPLAKNGPTYLRWALIEAATHAARDPRYRERYERTKQRLGRQRGAKVARVDLARQLAEAIWHVLTKNEPFHPAGPAMGLVA

SEQ ID NO: 169846 - protein, 292 aa, unidentified
MKVLIGVDPHKASVAVAVVDEVVGELVECATFPQNRAGLRALERWAKRFPERRWAVENAGGLGRHLAQMLSAAGESVVDVAPKLSARVRVLSSFAGNARKNDELDALATALAAWRNKRLPTVASEAGTEVLRLLSERREDLVAERTRGLNRLHGLLRDLVPGGVPGTLSTHRAARIVRGIRPQGVSARVRRRLASDILRDIRTLQRKIADPNERIETEVEASTTSLTQIFGMGPILAAKIMGTVGNATRFPTKAHFASYCGTAPVEVSSGEVVRHRLSLAGNRKLNNALHMG

SEQ ID NO: 169847 - protein, 344 aa, unidentified
MGDQWSHYCILGLVGETLSEGQLRTTQADVAEFFQAITPARVVIEVGTHSAWVQEIIAGCGHDVLVANPRLMEGSKRRKRKNDRIDANQLARLGRVDPQSLHPMQHRSREVRQDLVLLRARDALVAARTELINTTRGLVKSLGTRLPKCSSRSFAHKVGEAIPEEVRDALLPLVQLAEGLSACIQGYDRRIEELAGEKYEHTKLLRQVKGAGPLTALAYVLTLEKPERFAKSRDVGPYLGLVPKQEDSGEIQPQLGISKAGDTMLRKLLVGSAQYILGPFGPDTDLRRYGLRLCERGGKNAKKRAAVAVARKLAVLLHRLWVSGEVYEPLGYRVSGTMVQPAAA

SEQ ID NO: 169848 - protein, 384 aa, unidentified
MKTSNVCTPTNGNDGTIYVALELSRRTWLVTMHSPDRDRISRHKVDGDDHAGLLKLIAKIRERATRKLGLEPVVVSCYEAGYDGFWLHRLLTAAGITNHVFDPASITVEQRARRAKTDRIDGERLLRTLRDYCRGELRVVRIVRVPSREQEDVRRDTREQDRLTTEQGAHTNRIKALLRLQGMAVGDPRQRDWLNWLAKQRDWEGNPVPPRLLEEIRREHARLMVVIEQLAALAQKQTAPAQLSPAAAEMARRRDLLFQLKSLGPAFSRKLVNEAFYKDFRNRREVGGYFGLDGSPWRSGQTNREQGISKAGNHRARHAAVELAWLWLLHQPDSALSKWFRQRTANASKRIRRITIVALARKLMVALWRFLTAGLIPEGAVFKA

SEQ ID NO: 169849 - protein, 328 aa, unidentified
MTMNPALSAFNHVVAFEVAKDSLVIHVLPAGKQSFSANKPKAIREALIAEMRRNAEASLGPLLVVCEATGGYERHVLEVCQKLGIAAHKAHGSRVRYFARYLGLLAKTDPIDARVLALYGLKTTDLRLYVPPAPEALALRDLRTRRDQLQQMLFAESNRLEHARHLSVSRSLKAHIASLRKALAALEAEIAACLKASETLARKARLMQTLKGVGPATVAAILAYMPEIGAFTKAGAACMAGLAPINDDSGKLKGPRHIEAGRAAVRKALYMAALVAIQHNPVIRLFADKLKRNGKPAKVVIAAVMRKIIVTLNAIVRSGEPWSHAKIA

SEQ ID NO: 169850 - protein, 358 aa, unidentified
MRIIGCDLHARQQTIAMLDTDTGELEEKTLGHEGETVREFYSALPGPILVGIEATGSMQWFVEMMEELGIECRVGDPAKIRKAETRKQKHDRRDARLLLTLLAENRFPTIWMPSTEQRDLRTLLRHRHQWVRLRSRVQHTLQSMALNHGLRRGHSLWNQAGQHAPRVLPLAPHASERRAALLSLYPRLQESIDELDQQVSQQAQQHPQARRLMTHPGVGPITALATEVFLGDPLRFIDGKALASYIGMIPSEHSSGRRQRLGAMSKQGNALLRYLWCEAAMHAVGRDPELKRFYRRKLVQKGMGKARVSAARKLGIRLWIMMRDQIDYQEFCRRGKARQESGSVCAGMSDITNGPAEA

SEQ ID NO: 169851 - protein, 403 aa, unidentified
MTTFFAGLDWATQTHAVCIIDAAGTIHESFDIAHDAAGLAELRRRLAAAGSPPVAIERPSGLIVDTLLEAGFSVVPIHPNVVKATRPRYRSHGAKSDASDAYLLADLLRTDGHRFRPLAPQGDEIRALRALVRGRDDLVATRVQLANQLRSLLDSFWPGAAAIFADVDSPIALAFVERYPTPESAARLGPKRLAAFCAQHAYCGRRSAEELLARLRHAPLTACGELEAEAKGELARSLARTLCPLVEQIRRLTSRIEHHVACLDDGQIIMSFPRAGRICAAQILAELGSVRERFNSNEQLAAEAGVAPVTYQSGKSKAVTFRWACNHRLRAALTCLADNSRHASAWAARIYAQARARGCDHPHSIRILARAWVRVLWRAWTDRNPYDPAKHCAAQLVLKTAEG

SEQ ID NO: 169852 - protein, 454 aa, unidentified
MTAYRFYVGIDWATEAHRVVVLDADRRSLHDRTVRHEGVALETFAHWLAQDVAAGVASDVAVALEVPRGAVVDTLLARGFHVFALNPKQLDRFRDRYTVAGAKDDRRDAQVLASALATDQPAFRRLEPEDPLIVELRELSRLEDDLRQELGRLTNRLREQLHRYFPQLLQLVPAANEPWLWALLERAPTPSAAQHLPRATLRTLLTRHRIRRVDAETVRTLLRTPALAVAPGTVQAARRHLAVLWPRLRLVHQQQAECATLIDGLLERLAESQEHRDVPILRSVVGVGRVVAATMLAEASRLLAARDYHGLRAQAGVAPVTRQSGRRTLVAMRHACNPRLRHAAYHWGQSAARHDPVSRAHYAQLRARGHSHARALRGIVDRLLRVLIAMLTAGTTTQLEGGWWPMPLDTTWGIRSRQAATDATRLNGAQPHRTSARVPRGPLDPCRTKLPKSR

SEQ ID NO: 169853 - protein, 392 aa, unidentified
MSQHFRFDASRSLTALEQDSTIIAVIEMSQTKWLVAALVPGVERQPLKKFDAQEEMLLKFLHRWRREAGQAGRNIKRIVVAFEAGRDGFWLARWLRARDVEAYVIHPTSIAVSREHRRAKTDRLDTELLMRVFLGWLRGEKRHCSMVAIPTIEEEDARRPNRERQNLVTEQTRIINQIKAIFTRFGLRTLRPTTRKVAEKLEHLRTAEGTPLPQNTLSELRRHLTRLRFVRDQIRAVEQERLRKLAVAHPAEKNSADAMVRLIARVFGVGIETADMLVNEIFSRHWRDRKAVARYAGLTGSPDESGSRRRERGLARAGNVRVRSGMIQLAWRFVRFQKNSALAQWFATRTADGRTSTRKTMIVALARKLLIALWRLVTRGEVPQGVVLRPAS

SEQ ID NO: 169854 - protein, 356 aa, unidentified
MLPITPDDTTIEVFGGVDTHQDTHTAAMIDLVGRVLGTQQFPATASGYTALLAWMRGHGWLRRVGVEGTGAYGAGLARLLRDEHVDVVEVDRPDRKTRRFQGKSDPIDAIQAARAALAGERTGTPKQRDGRVEALRNLRVARRSAVEQRADTQRQMKTLVVTAPNELRAQLRGLSTKQLIDTCANLRPDRTDAATPVTAVKLALRSLARRHQQLSTEITDLDELLEPLVAAINPGLLAANGVGAEVAGQLLVSAGENHDRITSEAAFAMLCGVAPIPASSGKTTRHRLNRGGDRQANAALYRVVLCRLRWDPRTRDYMQRRTKQGMSKKEIIRCLKRYIARELYQIITANDLELAA

SEQ ID NO: 169855 - protein, 419 aa, unidentified
MTKKSKNSTLIQIVHPICCGLDVHKDKISACLITVDDNGKEQHEIREFSSFTQDLQKMKTWLIGNNCPVVAMESTGVYWHPVYNTIEDTIEVVLVNARHIKNVPGRKTDICDSKWLAGLLRHGLVKGSFIPPEQVREWRELSRLRKIYTESLADYKRRVHKLFITANIKIDSVVSDLFGLTGLNLINLLCKNDEVTLEKVQECTKGSLKKKIPELYLSLHGYFKDHHRFQLIGMMEAIEMFQRQIEQINSRLEILTRDHENLLERIDEVPGIDKKSAQSVLGEVGVTLDEFKSMVAFVAWAGLCPGNNESAGKRKSGRNAVRNHPFKTILIQIAWAAIKTKGSYYKAKYYQLKARRGAKKAIVAIAHRIAKAIYNIIKNGDRYKDLGEEYLSKPNKQRMLKNLAKKADELGMKLVPCEG

SEQ ID NO: 169856 - protein, 414 aa, unidentified
MELLHERCAALDIGKKDLKACVRTPDPGRKRSRRQEIRTFATTTNALLELRDWLVAEQVTLVVVEATGDYWRGAFYLLEEDLNVILVNAAHAKGLPGRKTDVSDAAWLCQMGECGLLKASFVPPEPIRQLRDLTRYRACLAAERTREAQRLEKELEDAGIKLSSVATDILGVSGRAMLTALIEGERDVHVLAEMAKARMRSKIPQLTEALTGNFGDHHRFLCRLHLERIDQLSAAILELSRRIEDETGPFTRRLEHLVTMPGIGRATAEVVIAETGGDMTRFRTAGHLASWAGVCPGHHESAGRRRSGKTRHGNRWLGAALGTAAMAASRTKDKTYLGARYQRLVPRLGKKKAIVALEHSMLTAVWHMLTHDVDYHDLGGDYLTRRDPEQAMHRIIRQANALGFTVRFDPIQAA

SEQ ID NO: 169857 - protein, 389 aa, unidentified
MLLDHPFDGPTAIRTHIAAIFISLELSRSNWLVTSLSPGKGEKMSKHSVAAGDTAELLALFAELRRKAEVRTGQSYPIVTIQEAGLDGFWLHRVLQQNGIESHVVDPASIATPRRRRRAKTDRLDGETLLRALLAYKRGEPRVCAMVVAPSPEEEDRRRLCRERRTLIEERITHVNRIKGLLFAQGISDYAPLRRDRRARLEALRTGDGRELPSHLKAQLGRALDRIELLVDQIKAVEAAQEALLAAARKPASEEAVPNPVTMLLALKGMGANFAAVLWSEAFYRQFANRRQVAAYAGLAATPWQSGGIRHEQGVSKAGNPRLRTTMIQLAWLWIRHQPQSALTRWFKERSQQGRKRAIVALARKLLVALWKYVTQGVVIEGAVMKPAA

SEQ ID NO: 169858 - protein, 362 aa, unidentified
MPMLAELIDAVVGVDTHRDTHEVELALPTGTPIGIRKISNDNSGFAELLAWILDHSPGPRVVVSIEGTRSFGVGLARAVAAAGLTVIECEQPNRKARRGKGKSDPIDAHLAVLAALRLDADRLPVPRADGDREALRILLGTRHELTVVTTAQTNRLRALLLGGQDSERDLARATLTDPVLLAMVRRREPPQASREQAVRHGEIRRLAHAIRAGRHALAANRAQLQAIVDQIAPELTERRGIGAVTAAQAIVSFSHPGRCRSDAAFAALSGTSPLQASSGKTVRHRLNRGGDRALNSAIHTIAVTRMRCCPTTKNYVARRTAEGKSSREIQRCLKRYIARQLYRALNASTTLTTQTSAAPTPA

SEQ ID NO: 169859 - protein, 407 aa, unidentified
MGATTREGYHRCLAKQVMERPMKRNDLSQSLVVFEQHSTLVAVIEMGLKSWLVAGLVPGLVRQPLKRQAADEKLLVKQLYRWRDEAIKADSTIKRIAVAFEAGRDGFWLARWLRAHGIEAHVIHPNSVPVPREHRRAKSDRLDTALLMRAFLGWLRGEAKHCSMVAIPSLAEEDARRPNREHEHLVGERTSIINRMKAALVRLGVRGFNVKLRKAAEQLEKLRTAEGEALPPNTLAELRRDMARLKLVHEQIAAIEKERLARLRRAPRQDAHPMVLLLARVMGIGVETADMLVHEALTRPLRDGRAVGRYAGLTGAPDESGQRRREKGLAKAGNARVRRGMIQLAWRWLMFQKGSALAKWFTARTAHAPREVRKTMVVALARKLLIALWRYVTTGEVPAGARLRPAV

SEQ ID NO: 169860 - protein, 313 aa, unidentified
MAIAVSKITLGIDVSKDQLVVFNWDTEERATLENQPADIKAWLKSLYGPVRIAVEPTSSYHLELVEQAHTLGFEIYLINPRQLVHYRKAVGERNKTDEADAWLLARYLDRECASLRPFKPQCAKAQRLWALIKRRGVAVSARQKIQQSFRGTKIRTTALVTEIQKLIVRIDWHIQCLIRQLAWQTDYQRCLSIPGIGPVNAAALTAVFHRGAFAGSDAYVAFIGLDVRLRESGKFKGKRKLTKCGEAEIRRLLFCAAQAARSYPPFDNYLQKQLEKGLSKIAAKVILARKLARIAFSLMANQQSFKIQEIAYS

SEQ ID NO: 169861 - protein, 389 aa, unidentified
MKIFVGIDIAKLNHFAAAISSDGEILLEPFKFTNDADGFQLLVSKLESFDKNSIIIGLESTAHYGDNLVRYLVAEFYQVCVLNPIKTCQMRKNNVRKTKTDKVDTFVIAKTLMMQDDLRFITFFDLDMMDLKALGRFRQKTIKQRTRLKIQLTTYVDQVFPEIQYFFKSGLHQHAVYALLKEAPSPKEVASMHMTHLANLLKVNSHGHFTKELAKELRVLAQKSVGANDSAISIQITQTIQQIELLDSQLEKIEAEMTDIMKFNDSVIMTIPGIGYINGGMILGEIGDIHRFSNPNKLLAFAGLDPSVYQSGNFQAKTTRMSKRGSRVLRYALVNAAWNVVRNNATFKAYYDAKRAEGRSHYNALGHCAGKLVRVIWKMLTDEVEFNLE

SEQ ID NO: 169862 - protein, 347 aa, unidentified
MVIVGIDAHKRSHTAVAVDASGRRLGQRTIGTTSQDHLALLGWAEQFGPQRRWAIEDCRHLSRRLEADLLAAGESIVRVPTKLMAHARDAARSYGKSDPIDALAVARAALREPDLPTAQLDGPARDVRLLSDHRDHLIAERTRVINRLRWHLHELDPGHEPPARTLWRPKHLTAIAARLAEFDSVVARLARTEIEDCRRLTHQIQALEEELQTTVKQLAPTLLDICGCATLTAAKIIGETADVRRFRSRHAFARHNGTAPLPVWSSNKPRHRLSRTGNRQLNAAIHRIAITQAHYHEPARQLLDRRREGGNNKAESLRVLKRRLSDVVYRALLSDAEHAASPVPLAA

SEQ ID NO: 169863 - protein, 352 aa, unidentified
MKSKSPEDIAVIGVDIGKDTFHLVGFDHAGERILRKKIKRLALKPTFEKFARCVVGMEACMSAHFVSRMLRRLGFEPRIIPAIYVKPFNKGQKNDYNDAEAIAEAAMRPNLRTVTEKSQDQLDLQALHRVRSRLVARRTATINQIRAFLIEQGITVRSGRHALQSSFEAILENRRDEISSRMRAILMGLYGDWLWVDERIKAISSKIEEISRSEENSVNIMTIPGIGPLISTAIVAAIGKGEVFDRGRDFAAWVGLVPRQFNTGGKTILGRISKRGNSYLRMLLVQAANVILMRPHRWDSLGLGPWLRGVVARMPHNKAAVALANKLARTAWSVLRYGSKYEVERDEALAAI

SEQ ID NO: 169864 - protein, 460 aa, unidentified
MSQRKRRIRKRKKLAAAQTPLNPTHHPDAAGIDVGAEELVAAVPPGRGEGPPVRTFSAFTEGLHALRAWLLACHIKTVAMESTGNYWLCACAILEDAGIEVCLVNARHVKGVPGKKTDVCDAAWLQQLHAAGLLRGSFRPQKEILPLRYLLRHRGDLVAQSGQQVQLMQKVLTEMNLHIHHVFSDVDGVSAQAIITAILGGERDAAKLAALRDRRCRAPLDKIKAALAGDYRDEYLFVLKQCQTRWQQIHESVVECDAEIARRTAAISGVTDAPLPAAPAAPRRVQKNMITAMPVYEEAHRLLGVDLSAVPGISGGVLCVLLSELGTATHIRQKFRSAEAFASWLGLCPDNRISGGRILKAGTRKVSNRIANILRMAANALSREQGRMGEFVRRFKGRLGKAEGIVVGAHKLARILWALIVSGQPYDEAKAFAITPASTARRLRNLQNQAKALNMTLVPA

SEQ ID NO: 169865 - protein, 355 aa, unidentified
MNQEKYIGMDVHQATISVAVMDSSGKLIMECILETKAATILEFIAGLRGTLSLTFEEGTSAAWLHDLLKPHVSHLVVCDPRRNALLKDGSKSDRIDARKLAELLHGNKLHAVYHGEHGLRTLKELGRSYLTITKDLTRVMSRIKALYRSWAIPCSGATVYAPRHRAEWLAKILEPGVRLRAERLYQQLDLLQPVRQEARRDLLVESHQHHAVNLLRQIPSIGPIRAALLVALLQTPHRFRTKRQLWAYSGFAVETHDSGEYRFVRGKLVRNRERITVRGLSHNHNHDLKNLFKGAALSASTRPGPLCDFYVALIEKGMRPTMARLTLARKMAAITLTIWKKGVEFDAKPLNRQAA

SEQ ID NO: 169866 - protein, 502 aa, unidentified
MSFEPSRSVTVVALMRLKSCSFYRLVPVGARVLFGELSFPLERIVFFSQPAGHGGTNTQSMVKTMNALPVIDPRAAAIDVGSEQMHVSIAGGEPKVFGSTTAQLHALRDYLLGQGVRSVAMEATGIYWLCPYEVLEKGGLEVIMVNGKYVKNLPGRKTDMKDCQWQATLHAHGLLKGGFVPAEQIRRIQDYQRLRADHIAAAASCEQHMQKALERMNIKFHDVISDLTGVSGLRVVRAILAGERDPAVLLGFCDEQIQKKKASRVLESLVGTWKTEHLFALRQALEAWEFYRRQISECDKALEQVLQECTADKPEPPDRLPTWGRRKKPNTPEINQLRQMLWKLCDGKDPTALPGVTDYTLLQLVSETGTDLGKHWKTEKQFTAWMGLAPGAKQSGKRQGNQKRSRNRAGRILCVVARSVGKAADRALGGFYRRLRARRGGLVANVALARKLAQMYWRVMVHGVAYVEHGLEKYQDRVAETEQRWLRKLAKKHGMTLQPKAA

SEQ ID NO: 169867 - protein, 338 aa, unidentified
MEQEVVTVGLDLAKNVFQVHAIGADGAVLIRRKLRRTEVIRFFAELPRCLVGMEACASAHHWARELMAIGHEVRLMPPAYVKPYVKRGKTDAADAEAICEAVTRPTMRFVAVKSVEQQAVLMLHKSRDLMVRQRTMLINALRGHLAEYGIVTGLGAAGVVASLKALHEEQDRFPAHARSALHGIAAQLRALASEIERLEAQILDWHRNDETSRRLATIPGIGPITASAIAAAVPDASLFRSGRQFAAWLGLTPRANSSGGKERLGGITKQGDGYLRRLLVVGSTAVMRMTRKSPARQPWMAGLLERKPTKIATVALANKTARIAWAVMTRKEVYAPAA

SEQ ID NO: 169868 - protein, 325 aa, unidentified
MDKITNYYGIDISKDVFDVMDNLKVHHQFSNNKSGFTEFLKWLKPNGCCVMEATGVYHTQLADYLYEKDIFVSVVNPLVIKRFIQMNLRRIKTDKADAEMICKYAQLNELNAYKPEAVYIKESRVISESLSLLLKSRTMFKNRLHALIHKQSKHRSALIKPIKDTIKNLCKQIEVLEGELQKLIIENESDLYYNLQTIPGVGKSTAMHMIVISDGFRKFESAKQFICYADLSPVEKRSGSSVRARSHISKQGNGKLRNLLFMCSFNACKSNKSCKLMYERITAKGKSKKLALIAVANKLIKQSFAIARSGLVYDSEFVSVKPSIR

SEQ ID NO: 169869 - protein, 361 aa, unidentified
MNATTVAVDLAKSIFQLAVADDQWRLTESHRLTRKQFEAWFANRNVSLVIMEACGSAHHWARWLTSLGIEVRLLPAAYVRAYVRRNKTDAADARALLEAARASDIEAVRVKSVEQQALQGLHRIRSLWMATRTARINALRGFCREFGLVIPVGARTGMEAISRVLADPASAVPTLIRESMKLLVEEIRLLEARIARLEQELSSLARHSDACTRLLTIPGIGLITATAMVAATGGSVAHFKDARHFASWFGLTPKEFSSGSTRTLGHISKRGDRYLRMLLTHGARACLRAAALAAKADRALDPLRQWAVTLSARTHHNKAACALANKLARICYSVLRDATRYGDPQPRLARKIERTTWPVAA

SEQ ID NO: 169870 - protein, 406 aa, unidentified
MEIVYERCCGIDVHKNLIVACLMNGRKREIQDFGTMTEDLRKLTTWLLEAECQMVAMESTGSYWKPLYNILELSGLDAIVVNAAHMKALPGRKTDVKDAEWIADLLRHGLLRASYIPDRHQRELREIARYRKSLTEERSRELNRLQKMLEGANLKLSSVVSDINCKSSRRLLNKIVEGESLDEEKVKDLIYVKMHKKIDQIMPAIDGIISPLQRRLFESIIRHIDDMTGRINEMSSIIGDYLKEYETAIVAITALPGIARTSAEMIIAEIGIDMSRFPTAAHLCSWAGLCPGNNESAGKRTSGRTTKGNKQLKSTLVQCAQIAKRVKRSFFSAQYQRLVVRRGKNRATVAVAHSMLIAIYHVLKTGEPFSDLGADYYLQFNREQKINSYLKKLQSLGWEQPAVAIV

SEQ ID NO: 169871 - protein, 327 aa, unidentified
MNPTKVILGIDVSKAKLDACLRLPQPRTLTVPNTPAGHAQLLAWAAPAGPLHLCLEATSTYGFPVARLAHAAGHTVSILQPLAVHRYAQATLARNKTDRLDAALLADFGHTQQPRPWVPPTQAQAILQAQSRLRTELVQHRLGLLNALATAHPAVQPNLRAVLRSLQTQITKLDGQLAATLQADPELALQAKLLRSIPAVGPVLCAGLLAELPAHLRDARAATAYAGLNPRHRESGSSVRGRTALSKIGNARLRRHLYVPTLAGLQFNPVLRAQAQRLAAKGKPGKVRVGAGMRKLLCLCVGVLRSSQPWNPTGRPSPKASDQKPSP

SEQ ID NO: 169872 - protein, 365 aa, unidentified
MNQDTLHVGLDTDKRHIDVAVAEALPGGEVRYWGKLANEPVALDRVLKRLQRGGRRLVVCYEAGPCGYGIYRRLSGQPGVSCQVVAPSMTPRRAGVRVKTNRRDCLTLAKLLRAEELTAVWVPDRAHEAMRDLVRARSAAVEDLLRCRQRIGGFLLRQEIRYAGKPWTKKHRAWLGGLELVEPAHRLMMGELIEALDQAQARRDRLRDHILEQVPLWSLAWLVEALQGLRGFALINAVTLVAEIGDPRRFDSPRQLMAYLGLVPSEHSTGNTVRRGGITKTGNARARKALVEAAWTYTRPAKLPKPADQLGALRAIADKARHRLSGRYRRLTARGKRPSVAVVAIARELAGFLWAIAQAAAKHPH

SEQ ID NO: 169873 - protein, 381 aa, unidentified
MARAPSPLKKTRRSSPSRAATSAGTLAVANNRQSRKRGPDVSERQYVGIDLHRRRSVIVRVDAQGKHLSTVRVANEWPEVAQAIEEAGPNPEVVLEATYGYYWLVDLLKELGASIHLANPSGLNWGNRRVKNDERDALDLVKKLRLGELPEAWIPPPQVRELRELVRYRAKAVRLRSGLKAQVHAVMAKNGVLPARYDMFGPGGNAQLDSLGPQLPVNYVIRIESLRDLIEIYDREVAQLEREIHRQLKDDPGYKAIQQIPGVGPTLGAIFVAEIGDVSRFSSAEKLCSWAGLTPKHRESDTKVVRGRVTKQGSKLVRWAAIEAISKNRGGTRLQADYRRLSERRGKHKARIAVARKLLVYVYYGLRDGVIRSLIRTEEAA

SEQ ID NO: 169874 - protein, 451 aa, unidentified
MPASKPRRANSAAQISVVHPHAAAIDIGAQFHVVAVGPERDPEPVRSFRSFTKELHDLANWLKHVGITTVAMESTGVYWIPVFEILEAYGFEAVLVNARDVKNVPGRKTDVKDAQWLQKLHTHGLLRASFRPRHDVATLRSYLRQRERLLEYAAAHIQHMQKALTLMNLHLHHVVEDVTGATGMKIIRAIVAGERNADELAKYRDVRCRASVETIRNSLIGHYQAEHVFELTQALALYDFYQTQVAQCDERIELALKHLQTGVEPPTAPMPAARARTKQPNGFAFDVRAALYGMLGVDLTQIHGLGPYVALKLFAECGNDMSRWPTVKHFTSWLCLAPGNKISGGKILSSKTRRSSSKAAAALRLAATTVGRTDTALGGFYRRLSARIGKTKAVTATARKIAVLFYNTLRYGMDYVDPGAAYYEERYRQRVLSNLTRRADSMGYVLQPKAG

SEQ ID NO: 169875 - protein, 441 aa, unidentified
MKNEPTQSNNSIPAADPIAAWVGLDWADKKHSLFVRPTDGAATTACELEQKPQALDQFFLQLHQKHPQGRIAVCLEQSRGPVLYALMKYDFVVIYPVNPRCLADFRRAFKVSGAKADPTDADLLSELGCKHHERLRALVPEDLATRQLRFLVEARRDFVNKRTALVNELTATLKSYYPLAPEVVGENLEGPMGLEFLRRWPNLAKLQGAKPSVVRAFFYAHNSRSEEKIAARLEAIKTAVALTEDPAIVGSLQLQAAGLARQLAAVQKTVAEYDQQIRVVFEGHSEKWLFEKLPGAGPVLAPRVAAAFGTIRTNLGAALDLLCLSGVAPVKRQSGQQETVHFRFARPKFLHQSLVEFAKCSIGQCDWARLLYEKQITQGKSAYAAIRVVAFKWVRILWRCWKDGQAYDEVKYLRSLKKRGIKLYESLYNALPAETGPVNNS

SEQ ID NO: 169876 - protein, 366 aa, unidentified
MKKNSTIAVGRKQIFKQAKLTIGLDLGDRSSHYCMLDEAGNVILERSLPTTWNGIRQAFGRIPRCRIALETGTHSPWVSRQLSELGHEVIVAHARNVGLIGESSRKDDRVDARTLARLARIDPGLLGPVRHRSAQAQIHLTVIRARAALVSTRTALVNAARGLTKSYGQRLNKCGTEQMNRDSAKGLSQELREALDPLLREIESLNERIAEYNDRIEQIAKEVQPEVARLKQVKGVGTLIALTYVLTLDDPQRFRRSRDAGCFLGLRPGRRNSGQSEPQLHISKEGDRYLRTLMVQGAHYILGPFGQDSDLRRWGLKLAERGGKNAKKRAVVAVARKLAVLLHKLWVSGEAYEPLRNNHKVPSAAA

SEQ ID NO: 169877 - protein, 432 aa, unidentified
MHRKAYRASAVNYVNEAELTSGREGQSLLVGVDVGKYEMMAVGRWSDGDWERPWRVGNPEQIPALVALLVRLAQDRRVTVALEPSGTYGDALRQALSDAGIAVQRVSPKAAHDYAEVFDGVPSQHDGKDAAVVAELAAHGKCSPWPYRAPEGWEQSLSRWVDWMDAQRQIEVMWLGRIEALLARHWPEATRVLKKRSSPTLLRALATYGSPAALAADAQADARLASWGRSFLKAEKRQQLLASAAHTVGVRVGAGEQRRIKAYAKRALAARRQVQRAQKRLRRLARGQAVMQAQGRAVGMGTACVLWTYLGDPRQYTSGPAYRKAMGLNLTERSSGIYQGQLKISKRGPGAVRRWLYLAALRLVGQGGLRAWYRAKKRRAGGKKSKRIVVAVMRRLPLALYQVSVRQTVFDVRKLFPGKQRKAAEPIGAQRR

SEQ ID NO: 169878 - protein, 345 aa, unidentified
MDQISRIGMDTSKHIFQLHGVNTAEEPVLRKKLRRKEMFAFLEKLAPTVIAIEACGASHHCARLLQSFGHSVKLIAPQLVKPYVKRGKNDAADAEALCEAMSRPTMRFVPVKTAEQQAALMLVGVRDRLIRNRTQLTNAIRGYAGEFGCTAARGKAHLAPLLERLRADESLPALARELFAAQAKEYAQLQAQIDEVDARLMAWHRADECSRRLAKIPGVGPIGAVLLKMKTPEPELFRSGRQFAAWIGLTPRDHSTAGKVRLGVITRAGDEGLRSVLVVGATAVIQHVRRGGRTSPWLIELLKRKSPKLAAVALANKMARIAWKLMVTGEHYVAKAAPTKLAGAA

SEQ ID NO: 169879 - protein, 400 aa, unidentified
MTVFCGIDWAEDHHDVALVDDTGTLLARCRIGDDAEGLQHLLQVLADQGDDPDHLIPVAIETSRGLLVACLRATGRQVFSINPLAAARYRDRYSVARKKSDHGDAMVLANILRTDLAAHRPLPTDSELGQAIAVLARAQQDAVWDRTQAGNKLRSHLRGYFPGLLAAVSHMREGLCTATARTVLAAAPTPAEAARLTRTQLKSLLKKAGRRRDVDSAAESLREAFRREQMHQPPLVEAAMGRQALALLRQLEAACISCDELAEAVETSFHQHPDAPIITSFPELGTLTGARILAEMGDDRTRFANAAALKAYAGSAPVTRASGKIRAVLARKVKNQRLAAVGYVWAFSALTKSPGARAHYDRRRATGERHTAAQRNLFNRQCHEVNAAAAKSSPSRFCRQ

SEQ ID NO: 169880 - protein, 431 aa, unidentified
MQDAQDEPLFVQRAAGLDIAKAEVEVTIRVPSDTSPGRRQQETRTFGTTRRELDSLTDWLRSWGVTTAGMEATGDYWKPVFFLLESRGLGCELYNAAQARALPGRPKTDRADSIWIAKITERGMIASSFVPPEPIRALRTHTRYRRHLTQARTAEKQRVEKLLEDGHLKLSSVISDIHGVSGRAMLAAIAAGQRDPKALAQLARGTMRGKIRRLEEALDCSFFTSQHAAVLAMMLAAIDHYSAQIDVLTAAIEELAEPWLHQIAQLDEVPGIGTICAQDIIAEIGADMTVFPTAAHLVSWARFSPQVKQSAGKRKGSNSTGRGNPYLGAALGEAGISAARTQTFPGARYRRLTRRMPKKKALVATGNSMLTSVHALLSDPAARYQDLGADYYEQHMHTRRQARNHVKSLERLGYKVTIQAINPDTGELAAS

SEQ ID NO: 169881 - protein, 346 aa, unidentified
MENCAGIDVSLELSSVCLVDATGKIVKETKVESDPKALIALFNGLGVAVTRIGLEAGPLSQWLYAGLTQAGFEAVLLETRHVKAALSAMTVKTDRKDARGIAHLMRMGWFRPVHAKSAGSQEVRALLTARKLLQDKLKDVELSIRGILRGFGLKVGKVTTKIFETRIRQLVSGQPTLEQIAEAMLSARASLQRQFNMLHKAILKVVRKDKVCRQLMSVPGVGPIVAITFKTAVDDPNRIKRSKAVGPLFGLTPKKYQSGETDVTGGISRVGDAMVRTILYEAANILLTRITRFSALKRWGMDVAKRRGMKRAKVALARKIGVILHRMWIDGTTFRWTKSQSTAARA

SEQ ID NO: 169882 - protein, 316 aa, unidentified
MSEKLLQSFVGIDVSKASLDVRIEPPDESLHLAYDEAGVAQIVRRLVEVAPTLIVLEATGGLETRLASELAAQGLPVAIVNPRQVRDFAKASGQLAKTDRVDAVVLAAFARAIRPAIRPLKDAETRALDDLVTRRRQLVAMRVQETLRLGSAASKPLQKNLKAHIAWLDKQIAKLDDDLTKCLRASEIWKTKDDLLRGIPGVGAVTSLTLLAKCPELGVLNRREIAKLTGVAPLANDSGKHRGKRFIWGGRADVRVVLYMAAVSAIRCNPAIRAFADRLKRAGKPPKVVIVACMRKLLTIMNSMLKNNTPWSVQTT

SEQ ID NO: 169883 - protein, 358 aa, unidentified
MKYIGCDFHPSFQVIAMLDQETGELTERRLGHENGEAKAFYESLPGPVVVGIEASGNTHWFESLLARCGHELWMGDATAIRKQDSRKQKHDRRDARLILQLMEEGRFPKVWIPTVEERDLRQLLMHRHHLVRMRTRVKNQLQHIALNQGVQKKYKLWTKAGMELLRQLELEPWTRLRRDTLLEMLEELEQKIRPLERAVEQEAEARPAARLLATHFGVGLVIALATVLTMGEVQRFADSRSWVSYLGLNPSERSSGEKRRLGAISKQGSPFLRFLLVQGAASAARGDKSLARVYARLKAKKHHGVAKVAVARKLAVRLYWMARTQKPYPEVVRMQGSQSLPVAEVKAVRLSRPPASPQ

SEQ ID NO: 169884 - protein, 397 aa, unidentified
MYIVGIDIAKRKHEAAVIDGEGTVIIKPFSFTNNCSGYNRLLAMLTKAKLPLDEVSFAMEATGHYWLALFTRLQKEGFRVQVINPVQTNSIRNFYIRQAKTDPRDALLIAEVIRFGHFSESTLHPENIYELRELCRGRHAIVSMQADVKRKVVALLDQVFPEYETAFANMFGDTSMAILQTCPTPKELSEMRLEELCHLIEVSSHKRFRMAKAQELQALARNSFGFAMAGDVFSTMIRLYAKHLDFLKQQVREMDRKIAEIMETLDTPITTITGIGPTLGAYILSEIGDISRFSSAAKLAAYAGIDPTMRQSGEYNGVRNRMSKRGSPYLRHAIWLAASSAVLHDPALKLYFQKKRDEGKPYMASVGHACRKMVSIIYAVMRDNKAYTPCIPNEISA

SEQ ID NO: 169885 - protein, 364 aa, unidentified
MKKTDYLSTLFVGIDIGSRTNVVSAIDFNQDFFIRMKPVPNAKEGAETLESLLVDVLSAHHEFNHVIIGLESTGFYGVHIANYLSASGLLAPFGTEVYCLNPKEVAKYKESFNSLDKNDGIDSFVIADFARVGRISIKPWRGAQYLALQRLTRHRLHITECIAREKTYVLNNIFLKFSEFAMLKKEDHPFSNKYGATAEAILEQYVTNDDIIGASIEELVELIESKSRGRITDPEETAKILKTAANGSYRLDKVVAEPITLSISSSFNCIRAFEKELKAIEKAIEHTVQGLNPVEYQVLKSIPGIGHVYAAGILAEIGTIKAFTGNGALAKYCGIVWKENQSGNFRAEDTKMSKAETVTCVTMS

SEQ ID NO: 169886 - protein, 414 aa, unidentified
MDTEPLVFVGIDWASTEHQVCLVGADGPLQKAFAHDADGIGAMVDWLCTQAEQPGQVAVAIETPHGPIVEALMDRGVAVFAINPKQLDRFRDRFSPAGAKDDRRDALVLASSLRTDRHCFRRVEALDPVVVELREWSRMAEELKQERVRLTNRVRQQLWRYYPQMLDLTEDVGADWLLALWTKAPTPADAMRLTEVKITKVLAAHRIRRITAHDALAILRRPALTVAPGTTDAACAHITAVAERLSLVNRQIKTVTRRIDGLVEQLAGPETGPGQDTEQRDAAILRSLPGVGRIVLATLLAEAHQAIQARDYHALRTLTGVAPVTKRSGKSCRVEMRQACSGRLRTAVYHWARVATQHDARSRSRYAALRGRGHSHGRALRTVADRLLGIACVMLTKRTMFDPEKLPTDRPKSA

SEQ ID NO: 169887 - protein, 325 aa, unidentified
MKSRVQIKHDSGILYVGIDVSKDKLAVYAGDLFEEEIDNTRRAIARMVKTIGRGVDRPIRFVLEETGCYSLPVHLELDRLGQQVCVVNPSRVRHYAIGCGVMAKTDRIDARIIRRFAEANNCEPTPIPSETRMLLRELIRTRGLLVKIRTMIQTLRKMTVSPSSRTLLGEVDRFLRTKIDKLEAEIVRHGKEDEEIERVSRKLDELPGVAALTATTIATLAPELGTLGKRRAASLIGLAPFVHDSGKYKGQRRIGGGRWDLRHALYMPVLTAVQKDATLRAFYRHLVDDRGKRKKIALAAAMRKMFIHMDRLIAGLNGKEEAMPT

SEQ ID NO: 169888 - protein, 408 aa, unidentified
MEVVYRCCCGIDVHKKIIVACLDQGGEQSLREFGTTTSEIKSLATWLTESGCEMIAMESTGVFWKPLYNLFELMDLDAMVVNAAHMKALPGRKTDVKDAEWIADLLRHGLLKASYIPSREQRELREITRYRKSLTEERCRETNRLQKILEGANIKLDSVVKDINGKSARKLLEKIIEDDVPTSEEEISKVVHGRMRSKLGQLVTAIEGITTPLQRKLLAQVIDHIDDLTRRIADLDKLVQDYMDEYEAAIAALCDIPGIARRSAEVILAEIGLDMSRFPSAAHLCSWAGVCPGNCQSAGRRKHGKTTKGNKPLKTILTQCAKSARSVKGSYFSAQYQRIAARRGKNRATLAVAHSMLIAIYHMLKNSAPFRDLGSDYYDSFNRDRKIHSYLKRLKALGWEPDVLPGSA

SEQ ID NO: 169889 - protein, 348 aa, unidentified
MLIIGCDYHPGFQQIAFVDTETGEFGERRLTHREEAEEFYDTLKERSVRVGMEASGHARWFERLLNGLQFELWIGDAAEIRTKRVRKQKTDRQDAQLLLRLMVEDRFPRIWVADAANRDLRQLLWHRHRLVQMRTRIMNQLHVVALNEGVRRKKALWRPAGRNELESLNLAPWASRRRQDLLDLLDQLTPKIQESTRALEEEAEKRPVARRLMTHPGVGVLTALAFELVIGTPDRFHCGKQIASYVGLVPSEESSGDRRRLGHISKQGNSLLRFLLVEAAQVTVRSQMQWRSKFFHLAMRRGRKIAKVAMARKLAVHLYWMWRQGWDYGQFEKLGSHAGEPGNRHGVQ

SEQ ID NO: 169890 - protein, 331 aa, unidentified
MFPVGIDVSKNTLDLCMLYDGIKGRIKTRNIQNNRHSVENILRWLRLQHCSPEDVHVVMEATGVYHKQLATELHDAGFRVSLANPHRSREFARGMGIMTKTDKVDAYMLACYAFLKKPHRWEPPAPEIRYLGALLRRRDVLLGDALREENRLEKYLSTDTPADIISSCRRMAQLLREEISNIERQIKAHIKASPALRRDYTLLTSIKSVGPQLGMHMLIVLRSHNFVSAEQAAAFLGVVPIEKRSGTSVRRRPRMSKIGPPQLRAKLYMSALCGKIYNKRMRNIYDEMCLRGKPKMVAIGALMRKLVHWCYGVLKTGTVFNDEDLKPVLST

SEQ ID NO: 169891 - protein, 417 aa, unidentified
MKCFVGLDISSTKLDVCIMLSDTSTPVTASLSNDLSGATEIKNHILDLNHTYHFERIVIGMEATSLYSFHPAMFFHEDRQLKELHVEIMVEQPNKIKKYRDAFEENKNDTIDAFYIADYFRIERFSPSFLKEEKYMALQHLTRTRLQIIEQLTRTKQHFIENIYYKCNTLAYQFKKEELSTNLWSSTMMTLMTDEMTLDELANMPLQELDDWLQKLGKGHFKDSEKLAQTIQAAIRGSYRLSKLQQDSVNVILGLLAREIRNLEKMIKEIDKAIEDMVETIPEYQCLTSIPGVGKVYAAGIIAEIGQIERFKDHPQVAKFAGLNWREKQSGNSNSQHTSLVNRGNRYLRYYLVEAANSVRRYDDEYKDFYKKKYHEVPKHQHKRAIVLTARKFVRLVVVLLRNHQLYTPPRRIMEDN

SEQ ID NO: 169892 - protein, 330 aa, unidentified
MKFKNIIGIDVGKTSIDFSVLENGEQKLQSQVENTIKKLNVFLISLKIDFKETLFCMEHTGIYNYHLLTVLQEHDANVWLENPIQIKRSIGLTRGKNDKIDAVRISQYAYLHQEKVKLWEPTRQVIQSLKVLMGQRSRLNKAKKLIEIPLTESKEFIPKEHFKLMKQNCRSALAGIKKDLELITIKIKEIIDSDNTLKVLFSYVSSVPNIGLITATAIIVSTNEFQKIESARKFACHAGIAPFEHKSGTSIKGKTRISHLADKELKTLLHLATLSAVSRPGELRDYFDRKVKEGKNKMLVINAIRNKLIHRVFACVRDQKNYLKNHLTLA

SEQ ID NO: 169893 - protein, 387 aa, unidentified
MSTQYFCGADVSKNSFSIAVKNETFILENSFSMDSKGFESMDKILSPYKDKLLIGMESTGIYHSNLFYFLKNKSYNCFVMNPYKMRQFFNFISDKPTKTDKKDAKAISMCVEFNRDKIETLSSQQKYQVWYLVREKETLAHQIAKTKTEIRTILCLVFPEIEKFSIFGSGMLSLLYNFPSAACIRSIPEKEFIKTGEKLINTRGRKLNIAMTSIYQLATTSIACCYPVYEQLLKMKIDTLNILTQQAQIIKQLIEKQAEKYFHREIEILTSIPGIGKESAMYFLSEVVDIKRFNGWRKLIGFCGLDPVIKQSGNYNGKWKLSKRGNKHARRIAFIMAGCVKRSCPYFRQYYIKKRNEGKSYTEAVVATSTKLLRTIYTLLKEDRLFI

SEQ ID NO: 169894 - protein, 361 aa, unidentified
MNRIAAQGAGQIIGLIDGRQVVGLDIAKGVFQLHTVDMSTGEIVNMQLKRAKVLEHFANRAPSLIGIEACGGAHHWARELAAQGHSVRLIHAKAVRPFVAGNKTDATDARAIWLAVQQPGTKFVGMKTLAQQATLVLHRQRDLLMRMKIMQTNALRGLLYEFGATFARGKNALFSEIDATLESLAGDIPQYVADSLREQVQRIKNLAADIKAIEVRLVAVLRGDGDMKRVAAIPGVGLLTATAAIATMGDATAFKSAREFCAWLGLVPKQRGTGGKVQLLGISKRGDTYLRTLLIHGARSVLTHTKEPGPWLEQLKARRPANVVVVAQAAKMARTIWAVTARQQDYQRGCRNTQAANGLSW

SEQ ID NO: 169895 - protein, 422 aa, unidentified
MLAESDDQEEIIAKVAALDIGKAELVCCARLPAPDGRRKRLQEVSTHSTMTASLTELANHLVELGVQRVVMEATSDYWKPVFYLLEAHGLDPWLVNARDVKHLPGRPKTDVIDAVWLCKLAERQMLRPSFVPPLPIRRLRDLTRYRVDLVAARTAEKNRVEKLLEDACIKLSVVASDIFGVSGRAMMAALIAGERDPKVLAQLARKRMRTKIAQLEDAFNGHFDDHHRFLLARMLGRIDSIDADIAAVDEQIEAHLAPFAEATARLDEIPGIGPIAAAAIIAEIGLDMSRFPTAGHLCSWAKFSPGINSSAGKTKGNGSTGHGNRYLARSLGEAAVVAGRTDTFLGERYRRIAKRRGKKRAMVAVGRSILVIVWHLLANDHATFTDLGPDHFTRHLNPDRHKRNHIRQLEALGYTVTLTPAA

SEQ ID NO: 169896 - protein, 427 aa, unidentified
MNCTQNNKLMQITPETMVIGVDIGSEFQYARAFDFRGFEFSKKALKFANTKEGFETFDVWANDLMKKHNKTQVFVGMEPTGHYWYGFGCHLQSMGVKFGMVNPYHVKRSKEMDDNTPTKNDRKDPKTIAMLVKDGRYLIPYMPEGVYRELRNLMELRRQCVVQLISIQNRVKRWLDIYFPEFCTVFKKWTGKAAMLTLRHFPTPEAVMKTGEEKIVATWKQEVKRAVGHKHAQKLIKAAEDSIGLKDGLESATLEIETLLDEYMIYGHRHQRIMQKVEEQVKQVPSASKLLGIKGIGIVAVAGFLAAVGDVGRFNAPEQIVKLLGLNLRENSSGKHKGQTTITRRGRSDGRYAIFQAVLPLVAKNPEFRKLHQYYIRRENKPLKKMQSIVALCGKLIRVFYAILKTGTDYSAEKMMSDIKRPMMKAA

SEQ ID NO: 169897 - protein, 354 aa, unidentified
MKKSSRMSVIHPHAAGVDIGAEFHLVAVPPDADAAPVRTFQRFTGDLHRMSDWLKTCHITTIAMESTGVYWLPAFEIPEAAGFNVILVNARDAKNVPGRKTDVNDAQWLQKLHSFGLLRASFRPEHDISVLRSYLRQRERLTEYRAAHIQHMQKALMQMNVQLHHAVSDITGVTGLSIVRAIVSGERAPSVLIQYRDVRCKKTPEVLQQALTGNWQPEHLFAPEQSVAFFDFYQEKIRECDDQIETSLLQLSTGTEEPEGVLPSARHRTKQPNQLSFDVRPLLWKITGADLTQIHGFGPYLALKFVAEYGTDMNRWPDASHFTSWLCLSPGNKISGGKYCPRKHGVHPVELLLH

SEQ ID NO: 169898 - protein, 442 aa, unidentified
MRLLNANANEHPLRIKLSAHIRTGTIMELQRNKVCGIDVHKRFLIATILCRDGKKDTQRFSVTLEDLLKFRDWVIENGCEQVAIESTGIYWHPVHSVLEGKIDLIVANSYKIKHTPGRKTDVNDSEWIAELCLNGMIEPSRIFPKDDRELRRLTRAREGYVKQMTQEKNKIHQSLDSACIKLASVISDIFGKSGMYLLNCVLEGRDIDEIIDGIPSGRLKKKADQIKESIKSRLEISQVILIRGSLSLMRSIQERIDELDGEISARIQYRKNDLAIAMSIPGTGFVSATAILAEIGNYIDFKKPEQLAAWCGLVPSLYQSAEKTILGGITKQGSKHIRRMLIQVAYAISRTKDSKLKKFFLRIQAKKGSKVAAVALARKVLCILHHLLMNQEMYLEDRDRKNMRQKPLKQPSPIEMSIQEMIDCIVRAGYVVTKSDSIGGFG

SEQ ID NO: 169899 - protein, 482 aa, unidentified
MKKRNIYQNQSQEIVNLFEAAGSNEKIMCVPMDYAKKDHLVMFCNGHGDILRKPFSVKNTPEGIAYIDDQVMRSCRRRGIKKEHVFFGGEDANSFAKNFVSTLRSKGFVVANVNARDAKKQRESVQASTDRIDLMGIAAMLLNCRGNCCPAQSGTYRNLRLLVRHRRKLVQMLTEVKNRVHGIVDELFPGFLKEKNTGIVPFTQSSLYLMEDRFSPKQIRRRKRQKLSEILKRFGTSKAEKTAAKLQHYAAKVLHAPVDYVDTMQLSLAQHVKHIRCLKESVAQMDKEIALNLAQTQGAFLTSVRGIGLVLAAGVTAEIGNPNEQKPLNNLSSYAGIVPRIKQTGGIDGKTYTGPVAKRCNRILKDYVVKSAYHLGLHGPPDLMVDYKRRDASGQHADFGMGRRYLRMAMCLMRTSQVYLPPDLRKDDYTPEDKACYYLMNWPYLREKWKKVGALEEAFASDRPLGLWRLIVQELYDIKLKL

SEQ ID NO: 169900 - protein, 410 aa, unidentified
MPNSLLVGIDVSSCDNKVRVLDSLGNSLSKFTVSNNYPGARILADKITGIMTLNQFDSLVIGLESTSVYGEPLVHFLKQDADIGSFKPHIHVLNPKQVHAFKKAYPDLPKTDDVDAWIIAENLRFGRINQEVYMDDKIIALRKLTRARFYTARNLTREKNHFLNHLFLKFSSLTQEKVFSDKFGATSLAVVEEFLSVDEIAYMSIEELSAFVYEKSKGKFSMPDDIAKLIQKAARSSYRLPKTVNDSVNQVLAISLIAIRALKDQLRLFDKAIEEQMKVIPNTLTSVKGIGPVYAAGIIAEIGDIGRFKNHAALAKFAGICWSKYQSGKYTADNTRLISSGNRYLRYYLMEAANKVRVHDPEFKRFYDLKYRETPKTPHKRALALTARKLVRLVYALLRSNRLYIPPAEH

SEQ ID NO: 169901 - protein, 377 aa, unidentified
MNAPGAAHGKDTGTAGELYLAFELGQKSWKLSLSDGAHSPSRYTVAAADTAAVLECIAKTKARCRVAAAAGVHSSYEAGRDGFWLHRWLIAQGIDNIVVDSSSIEVNRRARRTKTDRLDGDKLLAMLLRYRAGERQVWSVVRVPTREQEDARRAHRERGRLGQECTAHINRIRALLVLHNLRVKYVGGRLWQRWWSAHAGDLLPGVRAEIEREGERLSLVRAQMRAIEAQQHRAVAADAEPQVARLARLGAIGVGSAWVLVKELFGWRRFRNRREVAGCLGLAPSPYASGDCQIEQGISKAGNKRSRTLLVELAWSWLHHQPESALSQWFTRRFAGGGKRMRRIGIVALARRLVIALWRYLEDGVIPAGAKLKPISG

SEQ ID NO: 169902 - protein, 328 aa, unidentified
MKHFIGIDIAKQKIDCCYYNGDLSSCVFDSFINNADGFFEFFSFITSISDIKNIRIGFEATSTYMIPLQKYLDSLKIKYILINPQKLHHYIKYKHKNSKTDKQDAFYIAEYITTLEDKAFNSSHSEIKQLMQSYHSFVKFLTKSETHLKALDDSIFSSQFTSSALLKEVQLFKSQVKSVRNKAIKEQINLVRSYIPEYDFIKSDLIGVSDMTLLSVLPLIYDNSEKYTLKQFQSFFGLNPVQFDSGKSVSKHQRISKAGKEQVRSLLYMSSLSSITYNEESREKYQTLLARGKPKKVALTAISAHILRAIIKKLNYYKNQGLGDYEKH

SEQ ID NO: 169903 - protein, 339 aa, unidentified
MYYGAIDLHKNNSVLGIIDADGQRLCMRKIPNDLDLIKKALGPFAENLEGIVVESTYNWYWLVDGLRDAGYRMHLANPTAIQQYSGIKHTDDVTDAWWLAELLRTKQLKEGFVYPRAERAVRDLLRKRAHLVKQRTQNILSIQNLTCRNTGGRLNANQAKQLTEEAVQKFYDKEEERALAINCSLRVIQTLKREITIIEKHVKSKLKLSQPYQVLQSVPGIGELLAMVIMLEAGDMSRFPSVGDFSSYCRCVDSVRLSNGKKKGSGNRKNGNKYLSWAFMEGAHYAIRYYPVIRKFYQRKSTQKGMIVAQMAVAHKLARASYYVLRDQVPFEESKSFVH

SEQ ID NO: 169904 - protein, 343 aa, unidentified
MNEYDGKQFVGIDLHRRHSVIVRQTSTGERLSAVRIVNDPDSLALQLEEAGEHPDVVLEATYGWYWAVDALQAAGATVHLAHPLGVKGFRYRRVKNDVRDAGDLADLLRMNRLPEAWIAPPPTRELRELVRYRAKLVALRSGLKAQAHAVLAKAGVLIAVSDLFGVEGRQRLARVPLGAAYAQRMSSLLELIDVLDTHERRFAEQIAAKLYDDRGYGAIQQLPGVGPVLGAVFVAEIGDVHRFADPSHLCSWAGLTPQHRESDTVVHRGHITKQGSKLVRWAAVEAIQRQPAGTKISVDRKRIEARRGKNIAKVAAARKLLTLVYYGLRDGHIRALTRQRAAA

SEQ ID NO: 169905 - protein, 346 aa, unidentified
MKFYTGQHKFYCGVDLHARTMFLCVLDQRGYPLLERNIKTDPELFLKTVAPYREDLVVAVECMFTWYWLSDLCSREKIPFILGHALYMKAIHGGKAKNDRIDANKIAVLLRGGMFPVAYVYPPKMRSTRDLLRRRMFLNRKRSALITHIKCTFAQYNLPEPEQNVSRVSRRDGVAEQIPDPGASRNVRLDLDLLDFYDQTLTKLEQELTVIAKDHDPDAYFRIRTVPGIGKILTLVILYEIHDINRFPSVQDFASYCRLVKPAKESGGKRLGSGGAKIGNVHLKWAFSEAAVLFLRKNEAAKLYRARLVKRHGKAKSLTILAHKIARAVFFILKRRTVFQAESFFA

SEQ ID NO: 169906 - protein, 408 aa, unidentified
MERVVERGCGLDVHKKSVTACVRAPGAGGGRGQEVRTFGTTTAELMLLRDWLEAPGVTTVAMESTGVYWKPVFYVLEDGFHCVLANAGQIAQVPGRKTDVQDCIWIAQLLEHGLIRSSFVPPRPIRELRDLTRYRKAIIEDRTREVNRLHKVLEDAGIKLAAVASNVLGKSGRDMLQALVAGTTDPETLAQLARGALRKKLPALRQALAGRFRPHHAALLTHVMAHVEYLDEAIARVGIEIDAALRPFAEAMTALDSIPGVRRRTAEVLLAETGGDMAVFPSARHLASWAGLCPGQHESAGKRRSGKPRPGNRWLRATLLEAAWAATRTDTALAARYRRVMRRRGHKKAIIAVAPAMLVIAYHVLHDRTTYRALGANYDEQRQAPRARRRAIHTLEAQGYRVVLEPAA

SEQ ID NO: 169907 - protein, 359 aa, unidentified
MSKQKLNQKRNKDNPKLTKQNVLQSYDHYIALDWSIKNMAIARLKPKTNEPKIIDVPSDIKELKLYLKNLQGTKIITIEETTTSHWLYVELYDYADKIIICDPYRNRLLSDGPKNDKIDAGKLCLLLKNGMLKEVFHSNDRLYELRKLVSYYDDEVKAGVRLMNQKSALYRAENKSYKKKETIKDDCINKFIVSQLDEKINLYIDKKENYEKEFYKITKGNKVIKSLMSIPGIGIISGVTILSMVIDARRFKSGNHYLSYCGLANHKKMSGGRNYGKRLPRYSRKLKSVYKSAAVRVISTNNPIREYYDYLVKEKSLTEQNANNAVARYIARVSLGIIKSGKKYKPYNWRENKKRNDAA

SEQ ID NO: 169908 - protein, 485 aa, unidentified
MKAKRAKASRSRHHRRGHQKGPIKPAASLPVINPHAGGIDAGSIEHWVCVPEDSVPEGQSNVRAFGAFTADLDGLVEWLLACGIKTVAVEATGVYWLGLAQKLEAAKIELVLVNARHVKNVPGRKTDVKDCQWIQMLHSYGLLNGSFRPTEDICRVRSLMRHRENLTDSCSREVQHMQKALQQMNVHLHHAVSDLAGATGLRILDAMLAGERDPKKLAELRDNQCRKTTREELEKALEGDWREEHLFVLKQSLETYRHLLKQVSECDGQVEAALAKVVIPPPVEPESPAPKNPPAKASSTRKKKRFQPRQHGPSLKRDLTKELQQICGVDLTQIIGVNVLSVLIILSEVGVDMSRWRNAKAFCSWLGLCPGNKISGGKVLDSRTVHVVNRVSILLRTLAPTIGKTDTWLGIFHRRMKGRLGPGGANTATARKLACLIYHLLKYKEEYIDVDQLVQLEKIRKHRIVRLRKQAEELGLQVTEKQQAA

SEQ ID NO: 169909 - protein, 430 aa, unidentified
MTNREPTPPDVVLVAIDVSKLRNDILIELPGKIRRRRLIVLNARGEHDRFVELLAGFAHPVIVGFEATGNYHRPLAYRLLEAGFTLKLISSVALARTREALHNGWDKNDPKDAQVILHMLKIGATQTYLDPLRSGINDIQELSKTHEVISKAKTELWHRLLTHYLPLYFPEVARFAGNSRSDWFLAFLERFPTPASITALSKEAFIDAAWDVVGKKVSKARLLGDIYETALSSIGLPVPIGSSAIAMFRMVIAEGRSLIRQRDAIEEQANAALADNADYRRLRQVPGIGPIIAMTVLAEAGDLRRFQHHRQFLKFCGLDLATYQSGQFRGQTKLSKFGNARLRRAFWMAGQVAIRQPNNSFRAKYERYIARDRDNADLKRKALTAITAKMARTAHAVIKSGSDYRPFVEGPMPSGRTPIRKGREGASATL

SEQ ID NO: 169910 - protein, 354 aa, unidentified
MKILAIDLGKVKSVACDYESQTAAHRFETVRTEPEILEDLFRRHGPDRVVIEVGPAAGWVTDLAARMKIELQVANPSHQAWRWRGVKNKTDRVDAVKLAELSSVNQLPLVKLPSKEVREWRSLIHYRQALVARRTMIKNTIHAILTRQAISMPSGKRAWTNAGRKWLESQAGVGDDPTEFWTKLDPTEWWRGQLAEELRQLREVDCSISSVEKKLDAYAATKQRVKRLRSAPGVGPRLSEAVAAIIGDPHRFKNGRQVAAYAGLVPRIFQSGKMDRKGGITGAGNRYLRSILVEVSWLGLRTNPWMRQVFDQVCRGCPSRRKIAIVAVARRLLIWCWAMMRDDQDWNPRALEAA

SEQ ID NO: 169911 - protein, 339 aa, unidentified
MMYGAIDLHLRSSEIRVMDAEGRVVREKRVVTSRETLTAAFAGLGVLRVLLETGTESEWVAQALEQAGHAVVVADPNYAPMYGEVRRRVKTDRRDVAALAEANRRGWYRATHRRSRAQRTLQQILRSRRQLVAMRTGSISVVRALLRQEGYRLPSVSAAQVPARLARVPLPDELAATLAPLRQVIDTVTRELAAIDTRLRTTAAADPVVTRLQTVPGVGPVVALTFRATLDEVTRFQAAGQVSAFLGLVPREDSSAERRHRGHITKAGSGELRSLLIQAAWACWKSRGSGTLRAWAERLAGRRGRRIAVVALARRLSRILYAVWRDGTTFDGARVAAAA

SEQ ID NO: 169912 - protein, 417 aa, unidentified
MKNPLLVGVDVHRKQNVLSLMNNDGEEISERLSVDNNRPGTMQLIEQLTELMETSEYDALQVGAEATGYYWLHFFRMLQEDEFLNQWPLELYPFNPRVIAHYKKTFVDLDKTDGIDAYVIADRLHLKRELPTPFRLDEPYLALRLLTRYRYHLVHNLAREKSYCLAILYLKASEYTHPERKPFADVFGAASRAVLLEFTSIEEIAALPFEQLQEWIDEKGKRHFADPSDNTRKLRQVAQDSYALSPLLLPSVNLILATAFQQISQLQRAIKRVDTAIAEQLQTIPQTLDSIPGLGPVFTAGIIAEIGDIARFSFNQAKVAKFAGFKWHKHQSADFRADETSLTRTGNRYLRYYFCEAANIIRVHDLDYKAFYQRKFREVRKHQHKRAIVLTARKLIRLVVRLLTTNQTYRPRRIAIA

SEQ ID NO: 169913 - protein, 373 aa, unidentified
MEYTTVYVGMDVHKESFTLACYTNEKEKAEYVQKTEAHYSKVISYLEAMRFHYGKEVAFVCGYEAGCLGFTLYHQLTEHNIQCEVLAPTTMLVTRGKKKVKTDRRDAELIGRCLAHRDYSPVHVPSAKDEETKEYLRMRNDHKQALKKVKQQILAFCLRHNFQYPVGRSYWTEAHLKWLRSLETGSMYQEILEEYLLTYQTLSEKIVRMDKRIEGLATGEEYAEKVKKLTCFVGIKTQSALSILTETGDFNRFATPQKYASYLGLVPGEDSSGEDQIRLHITKAGNRLLRTILVEAAQSYSRGRIGAKSAELKKRQAGNPPAVIVYADKANERLRRRYYRMVLSQNKRHNVAKTAIARELACFIWGMMTDNVA

SEQ ID NO: 169914 - protein, 395 aa, unidentified
MDYLKYGIGIDMAMKKFDVCFSVIDTLQKVTVKASSSFTNNAKGFTDFLKWVNKHAKLDLSKVFLAEATGVYYEQLAWFLYLQELPISIILPNKAKKYKEALGLKSKNDKIDALGLSRMACEQSHQKWDPLSKNIYTLRLITRRIEGINHQLTMSKNQLHALAYGMFRDAGVEKMLKKDISLFESQMASLKKRVESIIKDDPLLKAKFDKLTTIKGLGIQAAAVIISELNGFALIENQAQLVSYSGYDVIENQSGKHSGKTKISKKGNGHVRRTLYFPALNVVRYKQRPFVQLYERIFERTAIKMKAYTAVQKKLLITIYALWKNDESFDANKAVKKKVTFRDEELAPSFSSTSQKSSINDKKLAPDISRAKLDGHSSKLRRMPSFSYHKFNKLL

SEQ ID NO: 169915 - protein, 329 aa, unidentified
MKIQHIIGADLSKKSIDLVCHLQNTHIQIENSFPGFKSLLQWLEQQEINLSETMIVMEHTGLYSFCFEKFLHQYQIAFCKVNALAIKRSIGLVRGKTDKLDAARIAAYGYEKRDKLVVDVPTSDALKRLQILYSTRERLVKQRASLTCAVKEYKNIGIPEKDIIMQTQLQLIKKFDTQIERLMNEIESIINEQETMKQNFHLLQSIRGVGKIVAITTIIKTHNFTRFVNARKFACFCGTAPFEHSSGTSIRKKSRVSHLADKQMKSLLDLSAKSAIQYDKELREYYLKRTEGGKSKMSTINVVRNKILYRMFAVIKRQTPFTENYLQAA

SEQ ID NO: 169916 - protein, 348 aa, unidentified
MSQLLSSVTVIGIDIGKNSFHVVGLDGHGAPVLRQKWSRGQVEARLANMPRCLIGMEACVGAHHLSRKLKTLGHDARLMPAKYVRPYSKGQKNDFRDAEAIAEAVQRPTMKFVATKTAEQLDLQALHRVRERLVSQRTGVINQIRAFLLERGVAVRQGFRFLRAELPRILAAPPEVLSPRMVRLIEGLAEDWRGLDERIDCLSGEITALARQDAGCERLVSVPGIGPIISSAMVAAIGTGEAFSKGRDFAAWLGLVPKQFSTGDRIILGKISKRGNRYLRVLFVQAAWVVLIKPQSWERHGLKRWIEAAKKRLHRNVLAVALANKLARIAWSVLARSRIFEASKLRAV

SEQ ID NO: 169917 - protein, 471 aa, unidentified
MTPRKQKNFQQPSSTEPLRMTNAHAAGIDIHAAIHWVAVPPEQAPPPPPNHPPNLPPHVRSFGTCTAELIRLADWLTQCGVTTVAMESTGIYWIPLFELLESRGFEVFLVDPRQSRHAPGRPKSDVRDCQWLQRLHSYGLLTASFRPNEQVVVLRSYLRQRQMLLRYAGQHVQHMQKALEQMNVKLAEVVSDITGVTGMAIIRAILAGERDPHALAKRRNEHCKRTEAEIARALQGNWRAEHLFALRQAVALHEFYHGQLQDCDAQLQAHLGTFGDRSQGQPRPPRQQRRALQKRRNDPAFEVGAALYRMAGVDLTVLEGIDETTALVILSEIGPDVSRFPSVKHFTSWLGLCPQHQSSAGKIKSRRVRRGAHRAGRALRMAVQACYRAKHALGAFYRRIQARAGAPKAIVATARKLAERVYRLLKYGEDYVRQEMHAYEAAYRERLVRGLARRAAELGYKLEPTTAAVPT

SEQ ID NO: 169918 - protein, 392 aa, unidentified
MIYIGIDVAKDKHDCHIMRDGGAVVVDNCSFENSKEGFERFDSLIKTNKRRKEEVKVGLEYTGHYSNNLMEFLKEKEYKVIALNPLKVNLYRKSKSLRNTKTDKSDARYIAEVTAKTDPEKRRHVNNDVRILRSLTRYRYRVQKTVQITKNRYRRVLQLVFPEFEKHFNVNYRSAIELIGRYSSPREVLSANRDQLIKNLDKMSYGRYGKRADELIEAAENSIGTNNAGDAYELKHIAKHIAFLEGELLSVEEKLRRILERINTPILTIPGIGVNTGATILAEIGNVKNFDSDAKLLAYVGCEPTIYQSGKFVLTRTSMVKKGSKYLRNAIFQATKAAYVLDPVMRAYIDKKRAEGKHFFVALSHGMKKMVRILFAVLTSGKPYTKPQQNVT

SEQ ID NO: 169919 - protein, 313 aa, unidentified
MAQMVTNAGIDVSKQWLDVALWPKRDEVSRFKRDAAGLEELAFWLRERQVVRVGLEASGGYEREVIDALEAQGLEVALLNPLQVRRFAQAKGRLAKNDRVDARTIAQFTAVMIEAPQPGRRRELDSLSEHLTFRRQLRAWIDDCTNQLEHLRDKALRRTAEALRVKFQRALAAHDKALAKLTAEHADWNGLARRLRTVPGVGPVLSQTLIALLPELGHLSRRAIASLVGVAPFDNDSGQRSGKRHIKGGRGAVREVLYMAALSARTHNPIIAEFAKRLAGKEPKVMLVACMRKLLVILNAMVRDGMDWQVKTA

SEQ ID NO: 169920 - protein, 419 aa, unidentified
MSFKIIKNNCCGLDVHKTWIFACIGITDSNNRTEYKQARFSSFTKGLNELCDWLAKYNCNDVCMESTGKYWIPVFNILEQRSLWVTLSHPKYTKPMKGNKTDRKDAKWICDLYMCGMVKPSFIPPADIRELRDLVRYRFKLTCMITGEKNRAQNCLTVSNLKLDDVFSDVFGKSSRSITEQILQHPGETFDVAPFVNSRCKTPIVEIQAAIDGAVSKEQAVKLRQCLDHIDELNKHISEVEQEILRLSDKYEVALNLIRTVPGFDKNPLTAIQVLSEIGGDMSVFPTAKHLVSWAGCCPRNDQSNQKIKSTRISRAGSYFKPVLVQVANALIKSKKHSEFTNRYKRIKARRGHKKAIIAICRMILTAIWHILSDLKPYTPEGFLESRPVKEEKVLSTSQALNLLKQRGYIIKDKPLAVF

SEQ ID NO: 169921 - protein, 324 aa, unidentified
MDPNATPTLGLDISKSKVDCVLRLQNEKCKSKVIANSEAGFHTLGAWLAKQKVEQVHACCEATGTYWEALAQWLADHGHKVSVVNPARIAAYAKAHNHARAKTDKVDARLIATFCAREQPPLWTPQPVEERVLLALLRRLHDLEQVRQAEANRLGVAHPSVRPTIEQHLHFLNQQTAQLKKTIEDHIDRNDNLRGRRDLLDSIPGLGEATIPWLLAYLGDGQRFERSKQAVAFAGMAPKVHQSGTLNRKAHIDKSGHADLRYVLYMPAVAAYRCCKAYAPFVQRLKAAGKPPKVIIVALMRKLLAIAQAVLKSGQPFNPELHRA

SEQ ID NO: 169922 - protein, 404 aa, unidentified
MQQQLFAGIDWATKTHAVCVVDDQGQIRARFEVANTGKSFAGLIRRLGKLPVVAVAIERPDGPLVEAMLEVGLRVVVITPRQVKALRSRYGAAGAKSDPGDAYVLADALRTDGHRLAALTPDSDQTKVLRALSRTRKDLVKARVALCNQLTAQLERCFPGAVGLFARLDSKVAIAFLRRYPTSAAAAELDAATLGAFLRRIGYCGRRPVAELLARLSVAPAAGISPLEQAGRAVCVASLLDAIQVLAGREAELQAEIIERLELHTDRQIFVHLPKAGHGVRAARLLAEIGDVRARFPDEEALAALSGVAPVTRASGKTRSVGFRWACDKQLRDALIDFADDSRHASPWAAKVYADALARTRRHPHAVRILARAWVRVIWRIWQDHTSYDPAKHRGAVRLQATQA

SEQ ID NO: 169923 - protein, 409 aa, unidentified
MDVVHEVCCGLDVHKKSVTACVLWASGRRRQTRAFGTFTRELLELGDWLRACGVTHVAMESTGVYWKPVWNLLEGQFEMLLVNAQHIKAVPGRKTDQKDSEWIADLLQHGLLRASFVPPTPIRELRDLTRYRASLAQEINRIANRIQKVLEDANIKLASVATDALGASGRAMLEAMIHGEQDSQRLAEMSRGLLRNKIPELQEALQGRVTAHHRFLLRELLDHLYFVQSKMQRIEQEVAERLGPFQSEVARLCTIPGVDRVTAWGLLAEIGLSMKQFPDAQHLASWAGLCPGSHESAGKRKSGKIRKGSLWLRRCLCQGAWAVSTKKNNYLSALYRRLAVRRGSKRATIAVAHKLLVIAYYILRDGTCYSDLGADYFDRLNPEGLRRRLTKRLEGLGFKVTLEPSAQVA

SEQ ID NO: 169924 - protein, 416 aa, unidentified
MAELLVGIDVSRDTHHVAFTDATATQRWGRLTVPNDAGGALQLAQAIGDQAAMYGCEAVRIGCEATGVYAWHLALWLSQPTDPPRPWTVYLLQPRTVHRYAATFASKRAKTDRQDPWRIAEVLSHPAWLPRPFQLAERTIALQRLTRHRHHLVRQLTRLKNYAASYLFLKANGLACHPPWSDPWGAAAEAVLLQYQTVEDIAAAPLAELVACLQRAARGHLADPDRIAQAVRQAARDSFRLPEVLKEPVHQILSWTLQDIRYLEAQIKVVDQRIAREPAARTNRLLTVPGLGPVFAAGIVAEIGDITYFPDDDHLAQFAGLTWPPNASGQHTSEDPPLARTGNTYLRHYLVEAANSVRRHDATYAAYYQRKLTESTPPAHHRALVLTARKLTRLVVALLRDDRAYDPAHRPVRSHG

SEQ ID NO: 169925 - protein, 300 aa, unidentified
MEYYVGLDVSLKQTSICVVDQSGSVVREGVVDSDPEAISVYVRSKAPGAVRIGLETGPTSTWLWTELKRFGLPVICIDARHAKAVLKMQINKSDRNDAIGIARIMQTGWFKEVRVKDIDSHSVRALLASRALLVKIKRDLENHVRGLLKNLGLVIGRAKFNVFAVRAEELIEGRPELIATIRPLLEARTAVEQQVSELDRKVMKLARHDAQVRQFMTVPGVGPITALAFKATMDDPARFARSRSVGAYVGLTCRRHASGEVDWSGRISKCGDAMLRSYLFEAAGVLLTRVPKWSAVKAWG

SEQ ID NO: 169926 - protein, 354 aa, unidentified
MLIIGCDFHTRYQQIAMARKETAEMLAERRLDHESGEAHAFYRSLQNLQEPVRVGIEATGPIHWFERLLTELGHELWIGDSARIRASEVRKQKTDERDARLILDLLLSKRFPKIWVPTPAERDLRQLLWHRHKLVSMRTMLGNQLHALAMSQGLCRKKKLFSQKGRVELQHLGLAPWASRRREELLKLLDQLEPPIAELDRAVLEEAKRREDAVLLMTHPGIGPVTSLAFVLAIGPVTRFPGSRKIASYLGLNPTEESSGGRRRLGGISKQGNSMVRWLLIEAVYPAVRKDPALRQDYHRLKFRRGHAVAKVAIARKLAVRMYWMLRTGADYAQLVRRQGSPGGTLMNASSSLA

SEQ ID NO: 169927 - protein, 338 aa, unidentified
MRAYAGIDLHSSNNYIGIMDQDYKRLFGRRQPNDLNNVLKVLEPFKADLEGVIVESTYNWYWLVDGLQEHGYTVHLANPSAIKQYEGIKHTDDKWDSFWLAHMKHLNILPEGYIYPKEQRSVRDLLRRRLFFVGHRTANILSLQSTITRNLGIKMSSNEIKKLNMDDACDLFDSSNLVFMAQNNISTIKHLGKIIKGIEKEVKSQGKLRKEFVMLTTIPGIGLILGLTIMLEIGDIGRFFKVGNYSSYCRCVGSKRLSNGKKKGENNKKNGNKYLAWAYVEAAHFAKRHIPKAQRFYQQKMAKANGAVATKALANKLARASYFIIRDQVPFDEDMLFK

SEQ ID NO: 169928 - protein, 478 aa, unidentified
MVAARKELNRKQRKELARRLRIEDPGLSVMHPHAAGIDVGNSAHYVAVRPDRDPNSVRRFECFTADLHRLADWLQQCGVTTVAMQSTGVYWIALYEILDARGLEVYLVNARHTKNLPGRKSDVQESQWLLKLHTYGLLRNSFHPPVDIRIVRTYWRQRGEHVHAISTCIQRMQKALTQMNIQLANVISDLSGWTGQRIVRAILAGVRDPATLAALSHPGVHATQDTIAKSLEGTWQPDLLFVLQQEVAMYDTYQQRIAECDHELEQHLKGFADKVADPGADRESSPTTPCKELRSGPKRRRKAGSHAPQFDLGRELHRISGVDLTRIDGIDVGVAQTVISEVGVDMTRWKTEAHFASWLGLCPDNRITGGKVIRKGTRHVVNRAATALRLAATTLLRSQSYLGAQYRRLRARLGAPKAITAMAHKLARLVYRMLTWGHEYVDKGLQYYEDRHRAQQVQLLKKKAAKLGLQIAEPTAAA

SEQ ID NO: 169929 - protein, 410 aa, unidentified
MYKICCGIDVHKTFVVACIASTNDKGITSYESHRFSTYTSGLKTLLQWLIDRNCKDVCMESTGKYWIPVYNILEKGCSIVLAHPKYVKAIRGKKTDKKDAKWIADLFKHDLVAGSFMPPSDIRQLRDLMRYRFKLTCFKSSEKNRLQNCLTVSNIQLGNVVSDTFGKSAQAILDKILENPADTSFDLEPLVFKSLKKKLPELRDAIDGYITPEQAGKLKVIKTHYEDLESRKAELEELILALAAPYQQELAILQTAPGISSDFTAIGIISEIGTNMEAFPSAKHLCSWAGLTPTNNESAGKKKSVRVSKAGCYIKPLLVQCANAVIKSTKHPEMRNRYLRLKKRRGHKKAIIAIARMLLTALYNMLKNKEPYNTELYRKSDVPPVNREITIEQAILMAQFQGYKIKSAAE

SEQ ID NO: 169930 - protein, 461 aa, unidentified
MVRVFLPLDGSIGIVRPVPSDASIANRNRRRADRFVGKGRRGVQGPRVRTVSHREAEVTMDAAKPMVRAKAWVGVDVGKEFHWAVVVDAEGEILLSRRVENEEADLSALVEEVLAVSGGELCWAVDQPGGGAALLLALLWGGDQRVLYIPGLAVDRARDGFRGETKTDRRDALVIAEQARMRRDLKPLEPADELLSELGLLLSRRRDLVADQSRALQRIRDALLASFPGLERALPDMRYRGALELLCRYQTPRAVLRSGRRRIETYLKGRGARNAAGLAGAAVAAAKAQRVVASAEGVAASIVAELAREVLALKERISALDAQIEARFRAHPLSGVLTSLPGMGALLGAEFLATVGDPRDGFASADQLAAFAGLAPAARDSGKRTGNDRRMRGGNRRLKQVFYQAAFASLRGSPESRAFYDRKRAEGKRHNQALIAWARRRVNVLWAMLRDGTEFDPALAA

SEQ ID NO: 169931 - protein, 320 aa, unidentified
MSRKKSKAFIGIDVSKQHLEVAAHESDYQFRCANKASAFAELIAELSALRPALIVLEATGGLEIPIVNALHAAGLPVVVVNPRQVRDFAKALGQLAKTDRLDARVLAHFAAAIKPPLRPIKSKEERELEGLTRRRGQLIDMLTDEKNRRVSAANDTVREKIKEHIDWLEDCIAEIDKQLKALLQTSTCWQAKDQILQSVPGIGPVTSFSMMADLPELGTLNRQKISKLVGVAPLNRDSGQQRGTRHIYGGRARLRSVLYMAALTASRHNPVIKEFFERLCANNKPFKVAITACMRKLLAIINVMVRDNNPWKVGDEPVSA

SEQ ID NO: 169932 - protein, 300 aa, unidentified
MSVYAGLDTSLDAVAICVIAETGEMLWQGKVLGDPDAVTAAIQRWRDDLVRVGLEAGATSEWIGGHLVDEGFPVVCLESRHVKAALGAMTVKTDRNDAQGIAQIVRTGWFKAVHLKSAAGQRLRTLTAARKAAVRTVTANEQVIRGLLRPLGLKIGAVTRVRFEARVRQLVAADRLLLGIFEPLLQMHRCLRENLADLHRLVLRAVRVDPICRRLMTMPGIGPVTALTYRATIDDPKRFRRSGSVGAYLGLTPRRYQSGEVDRVGRITKVGDSETRTALFEAANVILRPTTRWSSTRLGQ

SEQ ID NO: 169933 - protein, 476 aa, unidentified
MPAASSPHTSEELASQAPLHESVYVGIDVGKLTHVAGFVSTTLLARHGRFEGCPVLKFENSREGFRTLADRLRSYVALEQVFVLLEHTGHYHKALEQYLLELDVSVYLVHVQKRQQGLLKTDKRDALGLANHLYNQLEKGIQVAEKSQLVRPAIPPTEAASLLQGLIRHRYELIQESTQRKNKLTAICDELFPEFTQVFKDANHPAALVLRLQFPTPQAVAIASLEALRGAGAKARGLDTKLIRLQDLARASIGTKDLGRQRGLALEQTQVIKELQLMQQHLAQLEEEIHHIVAQSREGQILTSIPPIGPLPAATLIAKIGHINNFPNAASLRAYCGWAPNVLQSGRSVDASHLGKGGNHMLKHTLFLIVWRAIRMDGEFAKLYARLVPRKCNYDERTQRYQGRLKVMGRIAGQMLSLIYGLLKQDVEVLAATPPGQLPPDPVLYDPAKHQAHRQGSYRPMKPPPQRDRITKLPHL

SEQ ID NO: 169934 - protein, 346 aa, unidentified
MMKVHVLGIDLGKNVCSLVGLDEAGAVVLRRRAKRETLIALAAKLPPCIIGMEACCGAHHLGRLFADQGHDVRLMSPEYVRPYVKAQKNDDRDAEGIAEAATRPTMRFVDVKNQDQLDMQTLHRSRDRLVAERTALINQIRAVLLERGIIVPQGKRALDQHLTSLTDGSGDARSLSPRMLTLVADARAQWLELDRRIAAFDAEFVAFVKENEDARRLVTIPGVGVTIASALIAAIGNAEAFEHGRDLAAWLGLVPRQSTTGGKPKLFGISKRGNKYLRKLLIHGARAALPHVSGRDTPLGRWAKGLLARAHQNVAVVALANKLARIAWAVLRRGNTFDVAGSPMAA

SEQ ID NO: 169935 - protein, 346 aa, unidentified
MEHYAGIDVSLELSSVCVVDTQGKIVKETKVASEPEALIDFFGSQDFAVKRIGLEAGPLSQWLHAGLKRAGFDTLLLETRHVKAALSAMMVKTDRKDARGLAQLIRMGWFRPVHAKSMGSQEVRALLVARKQLLGRLIDVELSIRGILRGFGLKVGVVTRKGFEGRIRELVTGHITLERIAGAMLSARATLKVEYEKLHKSVLTIVREDAVCRRLMTVPSVGPLVAITYKTAMDDPNRIAKSKAAGALFGLTPKKYQSGEKDLTGGITRAGDEMVRTALYEAANVLLARIIRFSKLKRRGMDVAKRRGSKRAKVALARKIAVILHRMWVDGTTYRWTNAQPTAVQV

SEQ ID NO: 169936 - protein, 347 aa, unidentified
MTIVEAPPGITGGVDTHLEVHVAAALDPLGRLIGSESFTTDAKGYRELLEWLRSFGDVTKVGVEGTGSYGAGLARFLRRQGVHVVEVTRPNRQARRNSGKSDALDAIEAARAALSGKASGHAKTRDGAAEAIRALVVAKRSARQARVKALVQMRHLVVSAPDELHQRCKGLSVAALIDEAVSMRPDRSPDPVTAATKSSLSSLAKRIRFLSAELASLDEKIAALVAAAAPELLALFGLGPDTAASLLVAAGDNPERLHSEAAWARLCGVAPIPADSGKVRGHNRLHAGGDRQANSALWRIVMVRIAHDPETRAYFERRVKEGRTKRDVIRILKRYVAREVYRHLPRG

SEQ ID NO: 169937 - protein, 406 aa, unidentified
MSVYMGIDWSQDKHDIAFMNAAGAIIARLTISHQPAGFRKLEATRKQLGVEEADCLVGLETAHNLLIDYLWERGYSQVYVIPPSVVKSSRGRYGNSGAKDDRKDAQLLADLLRTDRARLQPWRPDSQLTRQIRAKVGFINSVTHSSNRLANRLRAVLLRYYPVALELFSGLLVPTTLAFISAYKRPQALAALSYEEFAAFARQQGYTKRQGMLDCFARIQQSQLQASSETVAVYQDEAQLLARQLRELIITKRKLVKELKLLFDQHPDQAIFASLPGAGDFLAPALLAKFGDDRERFPSAASVQALAGTCPVTKASGKSKRVVFRRACDREFRQIAQQWARSSLRQSPWAVAYWQQVRPRCAGDHDAHRRLANRWLAVLWKLWFSRLPYDEAYHLQQRHLRSHPRS

SEQ ID NO: 169938 - protein, 393 aa, unidentified
MAQVDDLSLSLVALDQDSTLIAVIEMGLNAWLVAGLVPGVRRQPLKKIEPEPAALLRVLRRWREEAVKAGGAIRRIAVAFEAGRDGFWLARLLRREGVEAHVIHPTSVAVSREHRRAKTDRLDTQHLMRAFLGWLRGEPKHCQMAALPSLEEEDARLPGRERETLVKERTRIVNRIKSVLIRFGLRSFKPLLRNAEARLAALRLPEGGPLPANTLCLLKRELERLRLTQGQIRTIEAQRAAEVAAAKAAAARGERSRREAAMLYLLTRIVGLAVETAQTLTHEIFARRLRDRRAVARYAGLSGAPDESGKRRREKGLARAGNLRVRKCMIQLAWRFTRLQKQSALAQWFFARAAAAKTLRKTLIIALARKLLIALWRYVELGVLPEGVALRAA

SEQ ID NO: 169939 - protein, 424 aa, unidentified
MQNTAARKRKQVPEGYLVIGVDPHKKRHAAVAITQDFTTQAKFKFDNTREGLEMMLDRAKVEMSKSGCQGVMFAIETGGHYWRNIAYYLDERGIPFRFINQYTLKRRREGKDLNRRKNDYRDSEVAAQLLCTGEFVESVIPQGVYAELRTSHNAYQRLVKERTRITNLVKGLLDALFPEFTGVFKDPGGLTALSVLSTCPIPRVIAGMMEDEFVATVEARHKGRRLMRKKLKDLHYSAKTSIGIDAGARSLSSEIAFLVDKFELIRRQICIMEGTLVRLVDETEEGKYLLSIRGLNYIAVAGLLAELGCFKLYRSAKQMIKMAGSNPTESESAGKKRSKTPMSKQGRPLLRYCAWTSVIPMLRFNSDFRAWAKQRRERPAHANPLSGREVVGAALNRLLRLAFALVKNQTYYQYVKPALIPVAV

SEQ ID NO: 169940 - protein, 355 aa, unidentified
MESVKYLGFDVHQTTISVAVVKADGKLVMQSVIATHAATILDFIQGLRGTLHLTFEEGTHSAWLYDLLVRRVARVVVCNPRQNALLKAGNKSDRSDARKLAELLRAGLLSPVYHGESSTRTLQELVRSYAALTEDTTRVMGRVKALYRSQAIACAGKKPYGRRHRPEWLSKLCEPGLHRRAERLYEELDALQGLRRVAKRELVMESRKHAAAKLLRTVPLLGAIRAALLIGRVQTPHRFRSKRQFWAYCGLALETRSSADYRFEDGQLVRAKKPVFIRGLNRNHNHDLKNLFKSAATTASAIHGPFREFYEGLLAKGMQPAMARLTLARKIAAITLSVWKKGESFDAEQLKPQAA

SEQ ID NO: 169941 - protein, 350 aa, unidentified
MLIIGCDFHSRFQQIAMLDTQTGEIVERRLEHESGEAERFYRSLPHPVRVGLESSGHAQWFERLLAELGHELWVGDAARIRAAVVRKQKTDTRDASHILDLLMTNRFPRVWRPSPAERDVRQLLVHRQKLVWARIKVKNQLQTLAMNQGVCIRRKLWANAGRRALESLTLGPWTSRRRKELLQMLDQLNGSVEELDRAVEEEAQKRADVVRLMTHRGVGPVTALAFVLTLGPVERFRRSKQVVSYLGLNPQEHSSGGRQRLGSISKQGNTMMRYLLVEAAQTASRFHPELRRNYQRLKSRRGSAVAKVAIARKLAVRLYWMLREKADHAQLVRMQGSPRGTLVDASPSRF

SEQ ID NO: 169942 - protein, 314 aa, unidentified
MTLHPCCIGIDISKAMLDIFEGDTGRHARIANSDEAIAAACRPWSERGATVVFEATGCYDTRLRTALDRAGIRHVRVNPERARHFARYAGFSAKTDRIDARMLAEMGHRGGLMPEPPIDPSREALRALHRRRDQLVADRKAERQRIADAIDDTERGSIDRHIAFLDTEIETLDRAITRQLADDPNLRRLEIRLRSIPNIGPVAATTLIALMPELGTRSPKAIACLAGLAPINRDSGTHLGARSIAGGRKRVRDALYMAAVSASRSNKGFGAFYKKLREAGKPPKLALIAVARKILTTANAVIRDDTPYRYTSPT

SEQ ID NO: 169943 - protein, 358 aa, unidentified
MAQMGEVMNKVSTLTANGNAENVPVTIGIDLAKNVFAIHGVNRFGKPVLVKPNVRRDQLLELMAQLPPCVVGMEACSGAHHWARELTGLGHTPRLMAPKFVIPYRMQGKRGKNDANDAAAICEAVTRPAMRFVPIKSIDAQAILTLHRVRHGFVEERTAIINRIRGLMSEFGVILPQRAEVIRKQAQLAAERLPGWAASAVYDLLAHMVTLDMRVAEYDEHIKRMAHADERCKRLMALPGIAHVTASALVASISNGHDFKNGRQLAAWLGLVPGQYGSGGKVKLGHITKAGDRYLRTLLILGARAMLANAARKSDHISRWAVALQARAGYGKALVAIAAKNARIAWALLAKGETFKPA

SEQ ID NO: 169944 - protein, 356 aa, unidentified
MKKVSTVATRQSRNISQQKLTIGLDLGDRNSCYCVLDETGRIQVEQRVRTTAKALQEVFSTMPRSRIVLEIGTHSPWISRLLSELGHEVIVANARKVRLIGESRKKDDRLDAQTLARLARIDPELLSPVRHRSAQAQADLMMIRARAGLVRTRTGLVNTARGLAKSYGQRLRGCNVRNMNAEKAESLSPELQSALEPLLAAIESVSERIAEYNERIEKLAQERYPQVALLTQIKGVGTLIALTFLLTLEDPHRFPKSRDVGGYLGLQPGRRNSGERTTNAYQQGGRSVFADAAGAGSAAYLGTIRSRLRSQALGPEISGMGRKKREEASYRCDCEKAGGAAASPLGERRNVRTVTQ

SEQ ID NO: 169945 - protein, 416 aa, unidentified
MLFIGDDWAEDHHDIEIEDGDGRRLARARLPEGLEGITGLHALVAEHAPASWATLDPEQVAGQVVVGIETDRGPWVRALRASGYLVYAINPLSSARYRQRYSTSGAKSDVGDAHVLAEIVRLDRGHHRPVAGDSDLVDALQLVARAHQTAIWERTRHVLRMRATLLQYFPAAVQAFGDLSARDALQVLGRVPDPDRAAKLTRTQLVAALRAARRQHVQAKAQALQAVLRAPGLRQPPATQGAYAAVVSGQVRVITALNEQIAQLRQVLSEHLGRHPAAEIYLSQPGLGVVLASRVLGEFGDDPERFQDVGARKNYSGQSPITRASGRKRVVLARYATNRRLGAALHQQALCSLRASPGARAYYDALRARNIGHHAALRQLANRLVGILHGCLKTGTFYDENTAWGHRQTDTHRAAA

SEQ ID NO: 169946 - protein, 347 aa, unidentified
MLHVGLDLSRHRLDVHALDDEGETVEVVASPPDAAGLRSLAERRWARGQRVRATIESMNGARFVHDQLELAGWEVAIADAQKVKGFAPLACKTDRIDAWVLAELTRRDLVPEIWLPSPEVRAERERARWRLHLVRHRVALKNRIHATLLAFGKPCVMSDLFGVGGRDLLERLEFPEPWASNLDAALTLIDDLSDQITDCERELRRLGADHTYVPTLMTTPGIAWVLGYTIAAEIGDVDRFASPKKLVAYTGLCPRVHQSGGSDHRGPLAKNGPKYLRWAYIEAATHAARHPAYRDRYQATKARLGRQRGAKVARVDIARRVAEANWHMLTKGEPFAPAGPARSALVA

SEQ ID NO: 169947 - protein, 340 aa, unidentified
MVIVHDEREIMKHNHVGIDVSAKTFTTIIDYEGERTEAFDLPNDAKGFKKLIRMITKKGFTAQVVLEATGNYSLDLALALHRTKRIEVMVANPRAIALFAGAFLRRSKTDALDANVIVEFSIRMPFEAWKPPEAHCFNLRAISRRIEALTKNATQEKNRLHAATTFDEMTDVVRNDIEVNIRHLERRIERLREQARELIREYPDLESAFLHLISVKGIAQAAGIQILAELSILPKDMDVRQWVAHAGIDPMQFQSGTSVNKPSRISRRGNVHLRRALFLPALVAAQHEPHVTAFYQKLLGRGKTKMQANVAVMRKLLHAIYGMLKHDQDFVGEKFYVLGA

SEQ ID NO: 169948 - protein, 349 aa, unidentified
MVTLGIDAHKRTHTVVAVDELGRELGSKTTAATTSADHLELLGWAQRFETPRLWAVEDCRHLSRRLESDLLAAGERIVRVPPKLMAQARESARTYGKSDPIDAAAVARAALRHPDLPAAQLDGPARELRLLVDHREDLVAERTRCINRLRWHLHELDPSWDPIARSLTSYKHIDRVVARLAHLDGLVARIASEVAIQVRDLTVRERALAREIGSRVRVLAPALLAVVGAGELTAAKIVAEVADVRRFKHKDAFARHNGTAPLPVWSGNQERHRLSRSGNRQLNAAIHRIAITQMRCHPDAIAYLERRRAQGNTKPEARRALKRRLSDVVYRALLEDAQPATATELAVAA

SEQ ID NO: 169949 - protein, 350 aa, unidentified
MLYTGIDLHRSFSYITTMNDKGEVLGQKKLPSNGEIAEFLKEFDESMEVAIEASPSWYWLYDHLEDEGFDVKLSHPLKTKAIGYAKVKTDKVDSATLAHLLRSDLLPLSYVPEGTVRLNRELLRYRASLVKIQTRLKNKIHTILAKNNVNHSYTDLFGKQGMVFLRSLTLAENYKIALEGYLTVLDTVRQEIRVVSKKVKQLAEEDADTLLLMTIPGMGYYSALLTKSEIGDINRFPSAKQLCAYAGLVPSTYASGNTCFHGHITKQGSRWLRWILVEAAIHAVKRPGVLRRFYFKIERKKGGQIAKVAAARKLLEWIYHILRDGRTYPEMEKIADLLGRGELGNHSGRA

SEQ ID NO: 169950 - protein, 313 aa, unidentified
MTEHNIGVDISKSHLDVFRLQDEAARRFENSAAGFRALVKWLGKAAVARIVFEPTGPYHRAFETALSGKFPLVKINPLQARRFAEACGTRTKTDAVDARMLARMGAALALEPDAPVNEKLNELKDLQVARTGLIKERTRLHNRGHVQNNPVLKRQTKARLTLVERQIAELDAEIARQIAQDQPTARKRQILCSVPGLGPIAAALILTFLPEIGTLDRKQAGSLAGLAPHSRESGQWKGKSFISGGRKPLRDALYMPALVAMRFNPDLKAKYTALRHVGKPAKVAIIAIMRKLLETANALVKGDHLWAKKSSCS

SEQ ID NO: 169951 - protein, 307 aa, unidentified
MFVGIDVAKDRLDVHVRPAGETFTVARDGEGIEELAKRLNAVAPTLVVLEATGGFETIVAAGLAAAGLPVAVVNPRQIRDFARATARLAKTDTLDAAVIAHFAEAVNPPPRPLADAQSRLLGELMARRRQLIEMIGAESNRRRMLTVRRTLKSVDRVLATLKAQLEQIDDDIDIAVRGTPAWREAEDLLISVPGIGPRIARTLIAELPELGRLDRWQIASLTGVAPFNRDSGTLRGRRTIAGGRPVVRAALYMSVLVSIRRKLPLAQTYHRLRAAGKPAKVAIVACMRKLVTILNAILRDKKPWATA

SEQ ID NO: 169952 - protein, 387 aa, unidentified
MPQPNDLSRSPAALDQDSTLIAVIEMSQSSWLVAGIVPGIERHPAKKLEPDEAALLRLLHRWRDEATKAGRTISRIAVAFEAGRDGFWLARWLRTHDIEAHVIHSSSIAVSREHRRAKTDRLDTALLKRAFLGWLRGEPDHCSMAAIPTIEAEDVKRPSRERESLVGERTRIGNRMKSTFARLGIRGFKPTLRKASQRLEGLRTPEGTPLPTNTLAELRRDMARLRFINDQIREIEAGRLERLAQCADEGAHPMVRLLARVIGVGIETADMLVQEVLSRQLRDRRAVARYGGLTGSPDESGARRREKGLARAGNARVRRGMIQLAWRFLMFQKDSALAQWYRARTADARGATRKTMIIALARKLLVALWQLVTTGEVPHGVILRPAV

SEQ ID NO: 169953 - protein, 451 aa, unidentified
MSKRKQVEGLAIVNPNAAGLDIGSAEIWASVPADREGETVRCFGTYTTDLLDLATWLETMEIQTVAMESTGVYWIPVFEVLEERGLQVLVVNARHIKNVPGRKSDIKDCQWIQRLHSYGLLSGSFRPQAEIASLRAYLRHRDGLIEHRAAHIQHMQKALLQMNLQLTQVLSDITGETGLAILRAIVAGERNPYTLAKMRHGNCAHSIADLVKALTGHYRPEHIFALKQALALFDAYTEQLRECDEEIERQFENYKPDLPNDLPPLPPNPKPGSHSKNGPDYDARALIYRKVGVDLFAIPGMNAVLVQTILSEVGMDMSRWPTAKQFCSWLGLAPHNGISGGKVLYSHVPKTHNRAGQAFRLAAQAVSRGKSVYSEFYRRVRARSGPAQAIVATAHKIARIFYYMLLRRQPFQSMDIQEYYRRQSEKDIQRLSRNAARLGFQIQPVTAGNML

SEQ ID NO: 169954 - protein, 388 aa, unidentified
MNVGADKSEPLTAIHTDLGAIFVSLELSRSSWLITSLSPGGGEKMSKHSVPGGDFAGLMERFAQLQEKARLRTGQSFRIIVVQEAGLDGFWIHRALQNEGIESHVVDAASIATSRRRRRAKTDKIDGETLVRALLAYKRGEPRVCAMVKAPTPGEEDRRHLCRERKALTAERVRHVNRIKGLLFSQGISGYQPLRRDRRQRLEELQTGDGRAFPQHLKALVNRELDRLELLLKQIKTVEAARDALLAVGQTAKPAPAAMLLDIRGIGPEFAAILWSEGLFRHFENRRQIAAYAGLAPTPWQSGAVDREQGVSKAGNPRLRTTLIQLAWLWLRNQPRSALSLWFHERVRRNGGRLRKTTIVALARKLLVALWKYVTAGVVIEGVTMKVA

SEQ ID NO: 169955 - protein, 358 aa, unidentified
MYFIGVDHHKQYSQMTVLDDSGGEVKSGRVVNLRREVEEFLRDLASESRAVIEAGRASYTMVDLLGELGVEVKMAHPAEVKAIAKARIKTDKRDSGILAHLLRTDLIPEVYQRGALNREGQRILRLRAFYVRHQTQVKNKIWALLAQQREEIRLEVEEERHLFTKRGLEFLAGLELGGKDTEILDSLVRAYHNLEELIQESNGLVKALYEEMEEAKRIDTVPGFGAYLSVLVAVELADVGRFERVEELHSYAGLIPSTRSSGEKTYHGRITKQGNGWLRWALVEAVYPAIVADHDLKVFYQRLARRKGANVAKVATARRLLTIIYKILKEKRGYIPYRRDLNRLPKTHTNGPVGPRSR

SEQ ID NO: 169956 - protein, 361 aa, unidentified
MSDATTSEGTKVTVGLDLGDRHIQVCVLDEAGEVIEEARLATKPQALRRRFCGADPLRIVLEAGTHSPWVSRLLAELGHEVIVANPRKLRLIYQNDSKSDRVDAEYLARVGRLDPALLAPLTHRGAETQADLALLRSRNALVRARTSLISHARGTTKSLGARLPACSTDSFVAKAGACVPDELRPALDPVLVVIAELCAQIHALDERVEEMARQRYPETALLTQVPGVGTLTATVYVLTLEDPKRFPRSRSVGSYLGLRPRQRDSGSLQPQLRITKAGDEHLRWLLVGAAHYILGPFGPDTDLRRWGLKLAAQGGRSGKKRAAVAVARKLSVLLLRLWVTGEVYEPLRNARLRGELLPSPA

SEQ ID NO: 169957 - protein, 409 aa, unidentified
MTTEASSNVFAGLDWAVHTHAVCVIDATGAVRARFEIAHDREGLAELMRRLARFGVSVRIAIERPSGLIVDALVEAGHQVFPIHPNAVKASRPRYRSHGGKSDASDAYLLADLLRTDGHRWTALSPQSDSIRALRALVRSRDDLVATRVALGNQLHSTLEAFWPGAACIFADITSPIGLAFLKRYPSPASAARLTEAQLQRFCHAQHYSGRRSPAELLARLHAAAQGLVAPLTAESMAQVVRSLVAVLNPLVAQISALTRRIERFVESLPDGQIIMSFPRAGRVCAAQILAELGDVRERFPTLERLVADAGAAPVTYQSGKTRSVAFRWACNHRLRQAITCLADNSRHANAWARSIYAAARARGCDHPHATRILARAWLGVIWRAWIDRKPYDPKLHNAALKLASGGGG

SEQ ID NO: 169958 - protein, 347 aa, unidentified
MNGDYAGRQVVGMDLHRHRSVLVRMTEDGQKLGTARIVNSPAALRAELARAGDNPRVVLEATYGWYWAADTLAAAGAEVHLAHPLGVKAYGYQRVKTDARDAANLADLLRMGRLPEAWITPPGIRELRELTRYRQKLVGLRTSCKDQVHAVLAKLGIAVACSDVFGVRGSAWLDGLALPQPYAGKVTSLRQLIGELTTEITMLSEVIADLLAGHPGYRVIQQLPGIGPVLAAVIIAEIGDVTRFKTAAQLASWAGLTPGHRESDVKVTRGHVTKQGSRLLRWALIEAIQHAPAGFPARDAKDAIIARRGRQARNIAKVAAARRLLALVYYGLRDGQIRCLPQPARAA

SEQ ID NO: 169959 - protein, 373 aa, unidentified
MPKYSTAFGMDVHLRSTTVCALDADTGEAVTRRFPGNPWGEIAGWMDGFPGPSLAAYESGYLGFAPQRELAGLGVECVVAAVSKIPRSAADSASKNDRNDAARMAKAILAHDISPVWVPSPEVEGIRDLAGAYDGATARLATAKQRLLAFLARRGFVYGGTTPAGNPRKYWTYDFLRWLDKARPEGDGGVRALAALRNEVEAAAEARADLLSEYRAAVDASPIAAEAAALQSIKGCAFALAAAFSAEVGDFTRFRSGRQVTAYFGLAPSQRSSGGSVRLGGISGAGNALVRKLAVEGSWCYAAARHQPKLMPRDTGVPLEIRMHGRKGSERLLRRREEMLARGMPAAKANAATAAELVRWLWALGMMCREGAE

SEQ ID NO: 169960 - protein, 405 aa, unidentified
MYYVGIDVAKEKHYVCILDEDAEFAVKPFWIYSDILGLLELEKRLASLSLDRDDFIIGVESTGAFSENLYGHFTDSDYKVILLNSYQTAKYRDFSTMKKIKNDTIDAYVIAQLLSTGKYKSSHISNDDYHSLKVLGRLKSSLDRKIKTIKREISTVMATVNPEITKVFPNLFSKTGLETIKAYPTATMLQKATPKKLTKLFRHIKGNNFSEDKAKFLIELASSSVYTGRAQKSRALMIQTNIRILELYIQEKSKVESQINDLINNQIDNSPDSPIENLQTIDGVAIKTIATLLGECGDISRFESSKSFIGYLGLYPTQYQSGNSLSVGRLAKRGIPTAKHALYMAAVASVRHNTQLNKLFRDKVSSGKSKKEALIIVAKKLATIIYSICKYNKPYEPNRVFIPRK

SEQ ID NO: 169961 - protein, 382 aa, unidentified
MTTAAATHNAQSNTTEATLFVAFELSEKTWKLGFTTGHGQKPRERTVTARQQEHVLDEIAQAKRRLGLPETAPVVSCYEAGREGFWLHRFLQGHGITNQVVDSSSIEVNRRRRRAKSDGLDVRKLLSMLIRYHHGERQVWQVVKVPSVEAEDQRHLHRDLETLKQERASTTTRIEGLLSSQGLRVTSLTKLPEQLDALRLWDGSPIPPGLRRRVLRVYAHHTFLSEQIAEVEAERRAQLQTSSEASIDKVRQLMQLKGVGINGAWLLVMEFFGWRAFKNRREVGGLAGFTPTPYQSGESAREQGITKSGNRHVRWMTTELAWSWLRFQPDSALSCWFRERFGGGGKRLRRIGIVAVARKLLIALWRFLETGVLPAGAVLKEG

SEQ ID NO: 169962 - protein, 387 aa, unidentified
MEQSKQRVVGLDVHPDSFAGAILAGNDPWSARVVRTSTRVALAELEAWAARQTSEYDTLVLEASGNAFAVAERLRAIGRKVEILDSHGAGKIGKTYCATDRVDAIKIARIYLSALSPIVWQPDPKTRERREVFSAYQAVVKEATRLQQQLKSMLNEHCVRLEKGFRLCHPSALGRLLARREWTPAQAMLLSQLHAGLVNARSRRQQLRHYMAGEILAAPELLKLTRLCGISLITLYGLISSIGEITRFAQSKKLVAYFGLNPSVSQSGNYEGSTALQRHGRGAMRALLVQSAKKLLQVENPLRKWGLAVAARRGRNKAAVAVARKLCVAVWHLLQGHSIGALERLDTLQTKLFKLATELGVPTIKAQGFESKEAFVQQKLYLLKAYP

SEQ ID NO: 169963 - protein, 355 aa, unidentified
MNSEKYIGLDVHQATISVAVLDATGKLVMESILETKAATILQFFAGLRGTLSVTFEEGTWAAWLYDLLRPHVAKLVVCNPRKNALLKDGNKSDRIDARKLAELLRGNHLKPVYHGETGVRMLRELARSYLTIVKDLSRVMNRLKAVYRSWAIPCAGRDVYYTRHRAEWLDKIREAGVRRRAERLYEQLDMLQHLRQQARRELLAESRKHAITAKLRQIPYLGPIRSALAVALIQTPHRFRTKRQLWAYSGLALETRTSAEYRYVEGQVRRSKKLLSIRGLNKDHNHDLKGLFKGAATMASVRPGPFQDFYQASLTKGMKPTMARLTLARKMAAITLTLWKKGEDFDAEKLKPQAA

SEQ ID NO: 169964 - protein, 328 aa, unidentified
MQKNKEYVGVDVSKESLDMVVYSTGEIRSFGNDDASIAKATTWLKQVNPAIIVMEATGGMEVSLYVALQEASLPVAVINPRQIRDFAKSMGILAKTDKVDAKVLARYAATIQPEARPLPDEEARQLNTLVTRRCQLVEMIIAETNRATITRDKTMKQRIHAHIDWLKQELADIDKDVSQMIKENPAWHAKDKLLQSVPGVGPVLSATLIAELSELGILNRKKIAALVGVAPLNRDSGKHRGERSIWGGRCRVRQPLYMAALNAVRFNPTIRIFYERLLANGKEKKVALTACMHKLLTILNVMLRHNSYWSCNYAILNNTCIPNAKTVA

SEQ ID NO: 169965 - protein, 350 aa, unidentified
MMIIGCDYHPSFQQIAFVSTETGELQERRLEHREEAEKFYRDLAAQGLKVRVGMEASGHARWFERLLSELQCELWIGDAAAIHAKRVRKQKTDRQDAQLILRLMLKDDFPKIWVPSWENRDLRQLLWHRHRMVQARTRVMNQLQAVALNEGLHCKKKLWRERGRQQLESFALAPWASRRRHDLLELLDRLNPVIADLTQAIEREVENYPAAQRLKTHPGVGVLTALAFVLILGDAERFHCGKQVASYLGLVPLEESSGKRRRLGHITKQGSSIVRFLLVEAAQVTVRSLPEWRSKYFHLVLRRGRKIAKVAMARRLAVQLFWMMRKEWNYEQLKKFGSHAGQPGHRHGVQ

SEQ ID NO: 169966 - protein, 313 aa, unidentified
MAQFAPSVGIDVSKERLDVAVQPSGEYFSVSNDAAGWRELVRRLTPLGARAIGIEASGGYERDVTCALVAKDLPVRNVNSWKLRQFAKAAGVLAKNDRLDARTIAWFVVTLPCREIRHDPARTHLAELVTARRQVLDAKLRLTNQLEHLRDPELRRVQARRIRQLEADEVRLAARITEAVMATPAMAERHKLLCSMRGVGPVLAATLIAMLPELGSLTNRQIGALVGVAPYDFDSGKMRGLRCIFGGRAAVRRVLFMAAQAAAIWNPTLKAFKQRLVANGKPPKVAIVAVMRKLIVTLNAMARENAAWRPVAA

SEQ ID NO: 169967 - protein, 367 aa, unidentified
MNQRNQAIDGEAKAKPKVIKLGLDLHVRQVTECRQLDGSTPKPAQQWDPWKLLAQVKDWVQAGIKVYSSYEAGACGYWYHRELIKAGALNFVVVPRVLENQRTRHQKTDRLDARALLDRLENYLNGNLHAMSIVRVPSLQEEQQRSVVRYREQLMRDRRRAEARGRAIALVQGIEVPVGWWREARWQEFNRQLPEWMSLQVRHWREQAVALDYQERTIRRELQKSLSIELPLGIGALSWITLERELRGWDRFHNRRQIASYTGLCPGIHHSNGRGREGSINRCGNSVVRYTLIEMAWRLLRWQPNYGPLQKLRKAFVSKRAKRRLIVALARRLAIDLWRWATGRATAQELGLQLASSMEQKNQALKA

SEQ ID NO: 169968 - protein, 368 aa, unidentified
MSSVRQRGDRIYLGLDVHKDSISAGILGEYDDTVDVDKIFHDEDSVRRLIGRFPDPGLLRVCYEAGPTGFGLFHLLRSMGVRCEVVAPSLVPKGSGDRVKTDKRDARRLTRLHRAGELTAIRVPTPAEEAVRDLCRARADLLDDQRRARQRLLALLLRHGQVYRGGTYWTIAHEQWLGARRFTETAVQTTFDRYRAVVLERDAALAAVSADLLPWRDREPFADAAHRLGAYRGVAELGALSIACEVGDWRRFPRAQTFMGFTGLVPSEYSSGASVRRGHITKAGNAHLRTQLVESAWAYQHRPAVGVGLRTRQQGVPPQTVARSWAAQQRLSARFRRLAARKNVKTVVATAIARELAGFLWAEMTATS

SEQ ID NO: 169969 - protein, 429 aa, unidentified
MPYRIAGIDVHKKMLAVVVSNVEVDGDFHFERRVFGSNPEQLRSLAAWLLEQEVEEAVMESTAQYWRPVWGALERYWKPICEKREGAKRRSGTLHLAQAQSNRGRRGRKRDFADAERLVKRLVARELILSFVPDAEQRLWRTVTRKKYQLTCDRVRLQNQLESLLEEVHIKLSSLVTDLLGASARRMLKALAEGETNPATLAALADQRLRATPEQLCDALGACTDLKPVYRRLLKMVLEQLQFLEQQISQLDQETASLLSQHQDAVERLAAVPGLGVDSAHQIIAEVGPTAATFPSEKCLSSWVGACPGDEESAGVNYSRRSPKGNRHMRRLLNQTANAAARTKGSIFEIVYRRSVPRLGHNQAIGAIAHRQCRLIWLILHQGVRYEERGPAVTKQSKQKRTARMIRQLRSLGYRIESPNPQPGQAQPQ

SEQ ID NO: 169970 - protein, 312 aa, unidentified
MAMLSFCGIDVSKDRLDVVVLPEGWFFSVSNDTAGWAELVVRLRPLAVSAIGLEPSGGYERGIIRALLAAALSVRRINPNKLRQFARARGVLAKNDRLDARLIAEYVAIMPTRVVQRDAAVERLAEIVTMRRQLCDEHVAAENQAAHLEDAMLRRLSKRRQMRLEADIRLLDKGLAEMVAANVALAQRYELLTSMPGVGPVLAFTLIALLPELGKMSRKQIAALVGLAPYDFDSGKLKGHRSIYGGRMPVRNVLYMAALSASRYSPALKAFHKRLAAADKKSKVIIVAVMRKMITTLNAMLRDRAAWQPRSA

SEQ ID NO: 169971 - protein, 334 aa, unidentified
MNYQFVIGMDISKHSFDLAILSADSPKDIFHNAFNNDAKGFNEMMSFINETIPGFDVTRTLFCMEATGLYCNTLLQFFESQQANVWVENAVQMKRSMGIKRGKTDKVDSISIAKYAFKNAELVRLWKPGGAVLEKIKHLATLRERMVVTQKRLLTPIEELKDAGQGKMADLLYKSIKKSINAIDADLKSIEAKIMECLREDASLNHLFSLITSVVGIGFVTAINLIIHTQGFNVMCDSRKLACYCGVAPFPYQSGISIKGKTKVNHMANKKLKTNLHLAALTAIRYDPELRTYYDRKVLEGKSKMSVINAVRYKLLARVVSVVKNDKEYVKKTA

SEQ ID NO: 169972 - protein, 385 aa, unidentified
MTIQVPGAKFVPREYDVFAGLDVDKKSMAVVFTDHAGAMRSLRMAHSSGLLLNYVRKHFAEQRVAFAYEAGPTGFGLHDELVTQAYTCVVAAPSKVPRARGERVKTNRLDGRKLSESLRGGQLHSIHVPTRPYRDLRHLVQLRDTHVRQLTASKLRIKSLLLYEGIAFPDPQEKWTAQAMRELQTLPCSETVRFKLDDLLNTLHFHFQAAASAIKQIRRYCLNDPELQQSINLLQSLPGIGWIVASHLVARLGDPQQITNGRQIAGFLGIVSSEHSTGEKENRGEITRSGDSRLRNKLIQSAWTAIKKDPELRTFYQRIYHRHPQKVAARKAIVAVARKLTTRIYVVLKEQRPYVMRPDSSIAPLTAEETVGPRERLVGAQNDQP

SEQ ID NO: 169973 - protein, 348 aa, unidentified
MRNQPRGAAVYGIDLGKTWFHVVGLDASGRPIHRLKLGRATIFQFFANATPALIGMEACPGSQWLARKLQALGHTVRIIPAQFVRPFVKSNKNDTVDAEAIAEAVGRPTMRFVQVKETEQVDLQALHRARDLAVNTRTRLICQIRAFCLEYGVALRTGVGLFRIDLPKALADEHNDLTPAMRHLVHDLWDQLQQLEERIRATTREIESIAHRSDVARRLTTVPGIGPISATAIVAAVGDGKQFRRARDLSAWLGLVPAQYSTGGKAHLLGISKRGNAYVRRLLIHGARSCLLHLDRSRDRLGAWLTDLQRRMPVNKVVVALANKLARVAWVILTHPGALYQRRDPQFA

SEQ ID NO: 169974 - protein, 339 aa, unidentified
MRREEVECIGVDVSKKTLDVALYRGKVDWNDGHLKVDNNGSGYRELKKWLRLKNAEKSRLRICMEATGLYTHDFRSWLEQEGITYYVVDPKRMHHFAPPQSIKGIRQTKTDKADAFRIAIYCSLFHDSMEPSRLPSAAYFKLKRLLAERRQYVKQSVLYKQQLSDISIYDTVSSRMRKEKEVENLKDNIRQTDKEIKSVIDTDPAIKKNYDLLTSIIGVGIVVAVTTIVLTENFTTFTDPRKYASYIAIAPFPHESGTSVRGATRVSKQGFRQAKADLSISVLNAITHDAELREYWQRKKAEGKHTGVILNAIKFKIVLRMFAVVKRGKPYVNTKGYKG

SEQ ID NO: 169975 - protein, 421 aa, unidentified
MHRKERIKTYSELSHFGGLDWAKHHHDICILEPQGQIVERLRFEHSGPGWETFREQIQKYPALGIAIETSQGAVVEQLLGSGVTVYPVHPKAAKEYRKRQAPSGSKDDELDSWSLADALRMDGRHWRALSPQDPMIEELRLLCRDEAELIEQRTALVNQLQAALGEYYPAALEAFEDWTVPYTWEFIACFPTPQQLAGATVHRRRVLLHTHKLRRPGSADKRLAIFARADQFCGGVAAKRAKSRLALSLVKLLQAVQKQLDEYRVAIEHLFAEHPDHGVFGSLPGVGEKLGPRLLGSIGADRGQYPNAQGLQCVAGSAPVSFKSGQMRRVKIRWHCDRFLRHTVHLWAGCSLKTCTWAAAYYQAKRAAGQSHACALRCLAQRWLKILWKMWQTHTPYDPELHARNQQRHGSWILQLNPKKT

SEQ ID NO: 169976 - protein, 399 aa, unidentified
MLDDGSQPTKLFNVDNNQLGAEVLVERIYSIAKEHCVSSILIGTEATSMYDWHLLEYLAESKLAPEFNLKLYRFNAKWIKNFKKSLVPRGKTDPIDSFAIAERLRMGRLPKEYVPDIKYQPLRKLTRFRFHLMQQIAREKDFFLANLFLKASAYSAVKPFGSTFSATSLSVINDFFSVDELAAMPIEELTEFILEKGKSHFSQPSEIVDNLKRVARESYRLKPELAPTINLILASTFNNIRCYKEQVKLVDQAIAENLKAFKHTLDSIPGIGPVYAAGILAEIGDVHRFPGDSALAQFAGLTWPKHQSGKFQAEETRMSHTGNQYLRYYLVEAANSVKRCDATYKAFYEKKYAESSKHHHKRALVLTARPAKGGVWTLLTRQVLYQLGYCSFEDLSKIS

SEQ ID NO: 169977 - protein, 372 aa, unidentified
MNYNTVYVGMDVHKESFTLCAYTIDAEKGSHFQRTEADYKNVLKYLEFLRTVYGNDANFICGYEAGCLGYTLYHQLTEHDVNCVILAPTTMLEQRSKRRIKTDRRDAEIIGKCLAQHNYSPVHIPTATDEETKEFLRMRDDHKLALKKVKQQILAFCLRHNYRYDGNSHWTAAHIKWLKSLNPEALYKEILDEYLLTYTTLSDKVERLDKRIEELASKDEYRESVKKLCCFIGIKTHTALSVLVEVGDFQRFASAQNFASYLGLVPGEDSSGDGQTMLGITKAGNRYVRMLLTEASQCYARGQIGFKSKELKSRQAGNSPQVIAYADKANERLRRRYYKMVLGKSKKHNVAKTAIARELACFMWGMMTEHIV

SEQ ID NO: 169978 - protein, 390 aa, unidentified
MSKNKKVSKRVIGIDIHPRCFAAAALTVNKKRLWLHARVEMIDLEKWLEKNILPGDILILESGCNSFSFAQKVIAYNAECIILDSVKVGKVSSAYLKNDKVDAVKIAKVYLSELAGEVWKPDTKTVLRRQVLSKYNQTNRNVNKTKNMIKSFLVENGINFPKGKKIYSEKSKQWLLIHKELEMTQKLLVGLLYDDLAHALKTKKALAKIMAQDLLNDDHAMGLIKLCGIRTICAFALVAAAGDIKRFPTPKKFAAYLGLVPSVSQSGDNTRYGGVGKGGRKETRTYLVQGAQAVLKSGDDYGGGFKQWGLKTAARKGRNVAICGLARKMAIAAWYQLNGHRTNIHIPERNLNVKIQKISVEIGKEVLKEIGYESPMAFRLKMKEKLVEVA

SEQ ID NO: 169979 - protein, 339 aa, unidentified
MMEHFVGIDLHKYVSQLAVLRESKPASQLRIANDVVTVERVLKKLPQGSKIALEAMGSWWWLVELAQKSGHEVFLSHPKQTKAIASARLKSDKVDALMLAKLLKADLLPTVSIPPRHQRHVRELLAHRARLVRQRTAVINELRAVYAKRNIDPQARLQRMHPVVTGANELGGYGPRIVDEDLKLLGFINAQVGGLDTELKNIAHEDGQAKRLMTIPGVGPVSAVAMSCWIGEIQRFSNAKKLASYFGLAPRVRQSADQERHGHITKEGNRMVRMLVIQAALVHTRRGQGPSRKHYLGVLKRRGKQIARVAAANKLLGAIFHMMRERIDYQEFLRRSGAQ

SEQ ID NO: 169980 - protein, 406 aa, unidentified
MQVVHERCCGLDVHKRVIVACVLSGRERTIRSFGTMTEDLEGMAAWLEECDVTHVAMESTGVFWKPIHNVLEGHAFELLVVNAQHMKAIPGKKTDVKDAEWIADLLRHGLLKPSFVPSRAQRELRELVRYRKALVRERAAESNRVQKVLEGANVKLASVATRVLGLSGRAMVEALSSGVTDPTELADLARGRLRAKHADLQRALRGMVGPHQQMLLAAQLRHLHYLDGEIESLSQEIASREQPDEAALAQLQTIPGVGRRTAEVILAEVGADLSRFPSAGHLASWAGLCPGQNESAGKRRSGRTRKGSAALREALTEAARAAARTRRCYLAAQYRRIAARRGANRAAVAVAHSILVIAYHLLTKGGVYEDLGSNYFDDRDKVATVNRAVARIKRLGYEVTVTPHAA

SEQ ID NO: 169981 - protein, 388 aa, unidentified
MGVIIGMDPHKSSATIEVVDERGRVLAMGRYGTDTAGYAQMLAAGRRFAERVWAVEGCNGIGRHIAHRLVHDGETVLDVPAKLSAQVRVFATGNGRKSDPVDAHSVAMVALRTPNLVRVQVDADLQVMGMLVDRRDELGRARTQTINRLHRLLLELLPGGAKRFLSAPQARALIAAVKPRDVVGKTRRRLAVELIGELEGIDKKIKVAEKDLKALVVARGSTLIGLYGVGPSGAARLLADVGDIRRFADRDRFASWNGTAPLDASSGQQQRHRLSRAGNRRINRTLHIMAVVQLRHRSTQGRVYFDARKAAGKTSMEAMRALKRRLSNVVYTRMVADQNRRQAAGPGGHSGTTLQSSVTDLTPDIGSSDKPLPGPASTQPRTLIPATS

SEQ ID NO: 169982 - protein, 414 aa, unidentified
MSHYKQTHIYVGMDLHKANHTAVIINCWNERLAEIQIENKPSAFDELMKFVKKHTPKGLTPVYGLEDTGGNGRAIAVHLVENKQIVKEVNSALSYNERMSNATTQKSDSWDAFCIAKVLLARLDELPEANPQDIYWTIGQVVARRNSIVKHAAMLKNQLHQQLSYHYPSYKKFFCDIDGKAALAFWEKYPAPHHLESVGAEELAVYLRKASHNTCSTRKAEEILELVKQDGATKRNLQEQRDFLVINMVHDMRRSRELIKQIEEQLRQVLSLTEYKLESMDGISTVTAAELVAEIGEIRRFSHADKLACFAGIAPKYFGSGGKGRNEASGQGNRVLNSIFHNLAVQQIQVAKGKNKTQRNPLMYEFYQRKLAEGKTKKQALICVMRRLVNIIYSMMKNKTEYRAATPLTELKAG

SEQ ID NO: 169983 - protein, 477 aa, unidentified
MFVAVVAVASVVLVSLFVSMVRRVATRTVDCCLEHERQTSKICLGPPRVERVDRFDNDGRKSIMEIVHSRCAGMDVSKRDAKVCVRVAGRGRRKTVETVRTWGSTTNAILALREHLINEQVSLVVMEATGDYWKPFYYLLEDADFEVMLVNARQVKNLPGRKSDVSDAAWLAQLGAHGLVRGSFVPPAPIRQLRDLTRARTARTRERGREIQRLEKLLEDAGIKLSSVASDITCVSGRLMLQALIDGQHDPAVLADLAKRRLRAKIPELTEALTGRFSDHHAFLAGMYLESIDQRSQQIAELTARIEVVIEPFRAFCDLIGTIPGIGERSAEVIVAETGADMNIFPTAAHLASWAGTCPGSNESAGRVKSTATRPGNPYLKAALGAAALSIANTRDTYLAAKYRRIAARRGPKKALVAVEHTILVAIWNMAHTGALYDDPGADYYTHRDPARARRNAVNQLQRLGYQVTLTPAVASA

SEQ ID NO: 169984 - protein, 369 aa, unidentified
MKKVACRVQKVNGESLGLDVHQGMTAYCLLGRNGDEVESGRIGGGRKTLEELLDRVVGRKKSHVSLEASGGSLWVYDLLVARYGAARVHIAHARKVAAIANSREKNDANDAFWLAYLTREGRLPEAYIPQGVYRELRVATRERHRTVRALATDLRVVKSHFRQMGVVPPVKHLNSEKGAAFVRALAARTEGSRGLALQAAVRRLDAAAEEVGRWNERIGDLTKDLPEVQAIEDAIPGMGRVLAATVVAETGPIGRFHSPGALAKYTGLTPTDRSTGGKMIHGGISREGNPSLRWALVQAVTICGRMRWGPGGAIRTWVESRQRRMGSKAKAKVAAAHKLVEAIWRLAHHPEGFDIAKPFGGVPVQSEAA

SEQ ID NO: 169985 - protein, 425 aa, unidentified
MNSNTNQKINQVSEKTLVIGIDIAKRTHYACAVDERGRVLQKSFSFSQTREGFDTFYERIMALRATHEKSDVLVGFEPTGHYWMNLAAYLCAHGIPFIMVNPHHVNRSKELDDNLQTKNDQKDALVIARLMRDGRFSYPRILEGVEAELRNGATLHAKIQEDLNALQNRIIRWLDRFFPEFTQVFKNFGKMAYAALEKTPLPMDIQGKTPEELLFLYRQVDGMKSPQLPKAKQLVEVAQSSIGLTEGLVMARIEIATLLSQYQLMQAQLDELTAQLIELAKQMTDYAYLASVPGIGDVIIVELLSEVGSLTQYEHPRQLIKLAGLTLRENSSGQHKGQKRISKRGRRRLRALLFRVMMPLIRHNEAFKKLHEYYTTRTVNPLRKKQSMVVLCGKLLKILHALCKKKVQFDEQQMMKDLYCLQEAA

SEQ ID NO: 169986 - protein, 345 aa, unidentified
MKKVMAGIDLHSNNVVIGIMDTDGKRVTSAKLPCELKEIAKFLAPFKKRLEQVAVESTYNWYWLVDGLQGLKYPVVLANPAAMQQYSGIKHADDTNDAFFLAELVRLKILPTGHIYDAQLRPVRDLLRRRMTLVHQRTALMLSFKSLYTRTTGQEMTLSQLKELEIKEAQDLYAHPANQMIAGMQIKQMDQLTESIEKIEKVVMASARELPSYAKLTTLPGVGIILGMTMTMEVGDIKRFASPGDFASYCRTVQAQRTSNSKKKGENNSKCGNKYLAWAFIEAANFARRYDEQCRKWYDRKAAKTSKVIATKALACKLAKAAWFLMSQGTEYDAQRMFGQPATTK

SEQ ID NO: 169987 - protein, 364 aa, unidentified
MNQLTHIGLDVHKDTIAVAVLRPGVTECDERVIPNTPEAVRRLLSRYPDPSSLSTCYEAGPTGYDTHRLITSLGVACDVIAPSLIPKRSGVRVKTDRIDARNLARLHRAGELTSVRVPTPGEEALRDLVRAREEVKSDKRIAQQRIRSFLLRYGKRYPKPSARWSARLEVWMRALRFEEPCAQAAFEHLLGAYFVRDSQLSAVDRQIEELAALDPLAEPVACLAAFRGIATLSAVTIATETCDFRRFPTAGSYMAFTGLVPSEHSSGASRHQGSITKTGNQHIRRVLVEAAWSYRYAPAVRDKLKKRQEGQPPEVIAYSWAAQCRLHATYRKLAAKKNANKAAVAVARELSGFVWGVMTGNMGA

SEQ ID NO: 169988 - protein, 366 aa, unidentified
MKKTSTVQALKNELFKGRKLTIGLDLGDRWSFYCVLDEAGQIILEQTLPTTPEAMKQTFGKIPRSLLALETGTHSPWVSRLLSELGQEVIVAHAQKMQLITKSNRKDDRHDARTLARLARVDPELLGPVRHGSAQAQLHLTVIRARAELVRARTALVNAARGLVKSYGQRLPKCGTYQVSEKLGEGLSAELREVLVPLFQEIESLNGHIKEYDERMEKLAKEVYPEVSLLKQVKGVGTQIALTYVLTIEDPHRFPKSREVGCFLGLRPGRRNSGESEPQKGISKEGDRYLRTMLVQGAHYILGPFGEDSDLRRWGHKLAERGGKNAKKRAVVAVARKLAVLLHRLWVGGEVYEPLRNSQKAMRGVA

SEQ ID NO: 169989 - protein, 342 aa, unidentified
MESVQGLVVGVDTHKDTHSAAMVDEIGGVIAALDVGANRNGYRSLLEWARCQSSRRIWVVEGTGSYGAGLAAFLSAEGEVVFEGDRPQRRKRGAAGKSDQLDAIKVAREALARPHPAVPRRRGQREAIRILLTTREGAVQAYRQGLNQLYALVVSAPEPIRERLIRLKGEQLIHACMRVRGASGLESSVTATTMRQIARRLNLLLSEAADYERQLAELVGAAAPSLLAEPGVGPITAAQLLISWSHAGRIRHEGAFAALAGVAPVPASSGRVVRHRLNHQGDRQLNRALHVVALSRSGFHRPTRAYIARRTAEGKSTREIRRCLKRYLARRFFRLLQRLDNP

SEQ ID NO: 169990 - protein, 403 aa, unidentified
MNSVGIDISKGRSTIAVMRPFGEVVISPFEVRHTGSELSKLARQLKSLDGETRVVMEATGNYHASVAKLLHDAGLYVSVVNAKLVHDYGNNELRRVKTDRKDAVKLANYGLDRWLTLPRYIPEEDTRLLLRNCYRQYRQYSKVQTVLKNNLISLLDTVFPNANRLFSSPIRGDGSEKWVDFVAEFWHCRCVSEKSERAFTSKYLRWCRKHGYNFSEAKAHTIYAEASGHIGVMPKSETTKLLVEQAVAQLRATSTALAALKLEMQTLASQLPEYPVVMDMFGVGPTLGPQLIAEIGDVRRFYSKKALVAYAGLDAPPNDSGDVTGRHKSMSKIGASSLRRTLFLVMSVYLQNAPLDEPVYQFMDRKRAEGKPYRVYMMASANKFLRIYYATVKAYLESLEHTA

SEQ ID NO: 169991 - protein, 361 aa, unidentified
MFTERTSVGLDVHARSVVAAAFDGDTGEVFKKRLTPGNDDVIAWVRSLPGPSAVVYEAGPTGFGLARAFDTAGIRCEVAAPSKIQRPPGDRVKTDARDAMLLARLLRLDDIVPVTVPTVEREAARDLVRAREDVRGDLMRSRHRVSKLLLRQGIVYYDGTAWTGTHLRWLRKQHFDTPGLQLAFDAEHEAVLQAEARRDRLDAAIEAMAADSEYTPVVHRLGCLRGVATLTGFGLAVEVGDWERLTGSSIGAYLGLVPTESSSGQSRSQGSITKTGNTHARRLLVEAAWQHLKPYRTPGATMRARWELAPAAARARGHAGNRRLHERWLHFNDRKKDPVIANVAIARELAGWCWSLAVMDD

SEQ ID NO: 169992 - protein, 483 aa, unidentified
MAKRKMSTFERLNSGEMNRRQRRELARKVAADDPELLIVNPNAAGIDVGNESHFVSVAPDRDPNPVREFGCWTAALRQMAEWLKSCGIDTVSMQATGVYWIALYDILEQYGIRVVVSNAQHTKNVPGRKSDVQECQWLRKLHTYGLVRDSFRLPEQMQSVRTIWRVRDRLVKDAGRAIQHMQKALTKMNIQLANVLSDINGVTGQAIIGAILKGERDPYKLADLKNYRAKASREEVARSLEGNWREDVLFELQQAVDSYHFLHQQMQECDRKLEGYMASLPTRTLNAPAQPESAPAGTPPKKKKAKKPRGNEPAWDLSAELARIYGVDLTTIDGINVMTAQTVLSEIGTDMSRFENEHHFASWLGLTPSKDKSGKTVRKGKKKVKNRVAEALRMAATTLLKSDSYLGARYRHLRRQLPTAAAAVKAMAHYLALLVYRMLTRGEAWVDRGRQHFERKRNQRELASLKSKARVHGFQLIPISQAS

SEQ ID NO: 169993 - protein, 338 aa, unidentified
MKIYVGIDIAKLNHFAAAISSDGEIIIEPFKFTNDADGFQLLVSKLESFDKNSLIIGLESTAHYGDNLVRYLVTELYQVCVLNPIKTCQMRKNNVRKTKTDKVDTYVIAKTLMMQDNLRFVSFFDLDMMDLKALGRFRQKTIKQRTRLKIQLTTYVDQVFPEIQYFFKSGLHQHAVYALLKEAPSPKEIASMHMTHLANLLKVNSHGHFTKEQAKELRVLAQKSVGANDSAISIQITQTIQQIELLDSQLEKIEAEMTDIMKFNDSVIMTIPGIGYINGGMILGEIGDIHRFSNPNKLLAFAGLDPSVYQSGNFHATKTRMSKRGSKVLRYALNQCST

SEQ ID NO: 169994 - protein, 321 aa, unidentified
MTYVGIDVSKATFVVAYSSAKSSETKTFKNTTKGIREFIRTISPEENHCVLEATGNYSMLLVYLLSKAGFTVSMENPLKIKNFARVMLSVVKTDEIDARLIALYGERMQPAPFKLRSDSLLLLKQKRTVLRQLKKQLTANRNLEGSLKILPFIDSKCKKVLEKTIKFLEKQIEEMEEELTSLAEIEYKKQMDLLTSIKGIGATLAAALIIATGGFTYFDNAKQLTRYLGLSPTYQQSGTSVNVKGHINRNGDAYLRSQLYVGAMAALRCNTECKACFDRLRSNGKPGKVAIVAVANKLIRQAFAVVTHEKKYIDGYKSVKP

SEQ ID NO: 169995 - protein, 416 aa, unidentified
MERIVERCAGLDVHKASVTACVRVVTTGGELRQEIGQFATTTRGLLQLRDWLASFEVTLVGMEATGVYWKPVYYLLEDDDFELWLLNARHLKNVPGRKTDIKDAQWICQLVDHGLVRPSFVPPREIRELRNLTRYRKRQIEERAEEVQRLEKVLQEAGIKLSSVATRVLGASGRAMIEALVEGTTDPEVLAELAKGRLRSKIAALKEALEGNFSNHHAFMVGNILAHIDYLDESIARLGAEIERVIAPFSDEVELLSTIPGVDRRTAETLVAEIGVDMSRFPSAAHLASWAGMCPGNDESAGKHRSGKTRKGSKWLRSALTEAAHAAARTKGSYLSAHYARIRGRRGSKRAAVATGHTILVICFHLLKRKVPYEELGEDYYARNRRCSSEAHTKRLVRQLERLGHKVVLEPLVQSA

SEQ ID NO: 169996 - protein, 389 aa, unidentified
MKIYVGIDIAKLNHFAAAISSDGEIIIEPFKFSNDADGFQLLVSKLESFDKNSLIIGLESTAHYGDNLVRFLVTELYQVCVLNPIKTCQMRKNNVRKTKTDKVDTYVIAKTLMMQDNLRFVSFFDLDMMDLKALGRFRQKTIKQRTRLKIQLTTYVDQVFPEIQYFFKSGLHQHAVYALLKEAPSPKEIASMHMTHLANLLKVNSHGHFTKEQAKELRVLAQKSVGANDSAISIQITQTIQQIELLDSQLEKIEAEMTDIMKFNDSVIMTIPGIGYINGGMILGEIGDIHRFSNPNKLLAFAGLDPSVYQSGNFQAKTTRMSKRGSRVLRYALVNAAWNVVRNNATFKAYYDAKRAEGRSHYNALGHCAGKLVRVIWKMLTDEVEFNLE

SEQ ID NO: 169997 - protein, 358 aa, unidentified
MMKSKRTKTAFVVGGVDTHKDIHVGAVVDEHDRVMGSAFFSTTRSGYQQMLKWMNNFGVVSRVGVECTGTYGAGLVRYLQQMKVEVLEVTAPDKMERRKRGKSDTIDAESAAHAAFSLIRTVTPKTRNGVIESLRVLKTCRKSAITARKIALQMIQTNIVSAPDKLREQLRRMTRMLLIRTLPSWQSEPRKYRNIENAYRIALKSLAQKYLELHNETADLNNMIISIVDEVAPELIKQRGIGYESATLFLMTAGDNPTRLSSEAGFAALCGVSPAPVSSGKTNRYRLNRGDDRAANSALHIDALTRLRTDGGTQEFVTKKITEGHTKLEAIRCIKRYISREVYKLICHQYHSVNLLLA

SEQ ID NO: 169998 - protein, 366 aa, unidentified
MDAIYIGVDFHSRQQTICYLTTETGELVIRELKHKDKEQVRAFYRQFQGSVIVGLEASGYSPWFEALLEELGCVVWLGDATEIRRRARWRYKDDRRDAELIWDLMVHQEFPRLHQPTRQSREILRMLRYRQKLIKVRTMTKNSLQAIAMQAGLAKGHQLFTAAGQVEFKAVAMSPVLQYQRDHWFELLKPLNQELLETMKWCKAAAKGEAAIARLRTHPGIGLLTSLCLLHTLQPVSRFRNQRKVVAYAGFDPMVRRSADSAIHLGISKAGSRMLRYLLVEAVHTAIRNDEDLKRFYQRLAERRGRPKAKVAAARKLLIRAYILLRDEIDYAEFKRRAVAARLARRSQGPPSVPEVLIGQSASPGA

SEQ ID NO: 169999 - protein, 410 aa, unidentified
MEVLYPHCAGLDVHKETVVACARHIVNGTVTREVRTFGTTTKDLLALSEWLGSQDCTHVAMEATGVYWKPVWHILSDGEFTLVLANAKHVKNVPGRKTDVNDATWLADLMAHGLIRGSFVPDAQTQELRGLLRTRKQFVRERSSHIQRLQKTLEDANIKLDSVISDILGLSGRAMIEALIAGETDPDALAALAHRRIKAPPAVLREALRGRVTNHHRFLLQLHLYHIKALDMAIDAIDREVDTQIEPFRVAVLLLTTIPGVNELGAQAIRAEIGGDMTRFPNEAHLLSWAGFCPRNDESAGKRRSNRMRKGAPWLKTTLIQCAWAATRKNGSYLQAQFRRLRARRGAKKAICAVAASILTAAYHMLKDGTVYHDLGPDHFDHRAKTMQTRRLLTRLQKLGYAVQITPLAA

SEQ ID NO: 170000 - protein, 412 aa, unidentified
MVLFVGDDWAEAHHDIEIEDDSGHVLTRKRLPEGLAGMTGLHELVAEHLDPDGEPDQVLVGIETERGPWVQALLATGYVVYSINPMQLARYRGRHATSGAKSDAADAHLLAEIVRLDRAHHRPVAGDSELAEHVKVATRAHQMMIWSRVRQVNALRSLLREYYPAALAAFGTDLADRDALAVLAAAPTPEHGRRLSQIRIETLLRKAGRQRNLTAAAGRIRAALQSEQLSARPGMVPAYAASASALTAVLTAMTEQTEVLAGQVEQGFGQHPDVEIYLSQPGLGMILGARVLAEFGDDPHRYADAKSRKNYSGMSPITKASGTKQVVLARYARNRRLGDALFLQAYSALRSSPGARAFYDRHRARGATHYQALRAVANRLVGILHRCLRTRTLYDENQAWHLRNDKLTTLAA

SEQ ID NO: 170001 - protein, 342 aa, unidentified
MNNSVYHTELSSHEGTRCQFNGGRCAIKMGIDVHQEFYVVVEQEGGSNPKPPQRFHKEAFLHWAAKLKEKSGGAELYAVYEACGFGFGLQRKLTALSIHCYVVCPQKLDEQNKRVKTDGLDAKALCLRLDRFVQGNRHALALVRVPTEQEEQARALHRQREQLVKVRKVLEAQGRSLLVNHGIEPVQQWWKKRAFAALRVPQWMSVLLGNSQPVVLALQQKIDQLTLQLQSAAQCEAPHGLGKMTSVIIDREIGDWRRFDNRRQIASYTGLCPGEYSSGGKRLQSCVTKHGNPRLRAALLELACPESFRGSSLITAPCANGKSVWPKAHSPRAPRAKKPSSL

SEQ ID NO: 170002 - protein, 369 aa, unidentified
MNQNILFIGMDVHKESIEIAVVDGANQEVRRYGKIGGTRDAMRKALRKLVSQGKVLHFCYEAGPCGYELYRYLVSEGHACWVVAPSLIPKKAGDKVKTDKRDAIQLARLLRAGELTPVYVPNREDEAIRDLSRAREDAMLVQKAARQRLKSFLLRHDIRYQGKTAWNESHLRWLADEVSCSSPAQQIVFQEYVNAVTEADHRLKRLNEQIEIFASQWRLYPVVEALMSMRGVKMTVAVTVVSELGDLSRFENPKQLMSFLGLTPSEYSSGPRQTRGRITKTGNGHVRRILIEAAWCYRFPAKVSREMQKRQETLPLSIRAIAWRAQLRLTQRYRHLQQKGKSHNVTVVALARELVGFMWAIAKEVNYPR

SEQ ID NO: 170003 - protein, 369 aa, unidentified
MPHVTSIGLDVHARSVAAAAFNPFTGEVVHRDFGTDAAEIAEWALGFEEPRACYESGPTGFHMARELRALGLDCAVAAVSKMQRPAADARRKNDRRDAEFIARMLATHNIVEVPLPDAAVEAARDLDRALDDATAEYRRARQRLNMFLIRLGHVWDERNADGARKGSWTRAHWRWISGIRLEGPQRDVLEYYVTAARCAESDRRQLEKKVLALARTDRWRPAVEALSCIKGIDTLTAFRLAAEAGSFTRFRTAPAFASWCGLVPSERSSGETERRGGITKTGNRLARTALVESAWHYLTCTPRPKAPAPGADVPAAIRARADDCTARLCRRREALAAAGKSSCKANAAVARELACWVWEIGRRAEGTLG

SEQ ID NO: 170004 - protein, 427 aa, unidentified
MKKADLLSTLFVGIDISSRENVVAIMDFESTKPIASFAVPNNEPGAEEMVTRIYEYLTPKSGLDRLVIALESTSFYGVHIANYLSTCPRLMPFHTEVYCLNPKSIANYKKSYIGLSKNDYIDAFVIADFARVGRITTKPWRGCQYLALQRLTRHRLHLVKALSREKTYMLSNIFLKFSEFNLLDVEEQPFSNEFGATASAVLTEFLSTEEIVDMPIEKLVEFICEKSRNRFPEPQKTAQLLQAAARNSYRLDKCLYEPLTVAIASSFTMISTYYAEIKKVNKAIENTIKGLNPNAFQSLMSIPGIGPVMAAGIMAEIGDITVFKSQESLAKYAGLVWRETQSGQFRADDTSMSKAGNSYLRYYLLEATSHMKLHCKEYSEFYYKKYAEVKTHQHKRALALTARKAIKLIFGLLAKNQLYSGNRVVQA

SEQ ID NO: 170005 - protein, 348 aa, unidentified
MNTPEYFVGIDIASSSFTVSAGQVRERRWVIVVEPVEFPNQYDSFARFLHWLQQQQIRADNSVLCMEATGVYNEALAHFLVANHYPLAIDPPLKVKRAFKPEGHKSDPVDSRQIAEYAYRYCDQLAFWQPRQELLEQIKVLLTTREQFVTQVTAHHNHLHALKRKVVRTPLAEKLHEDAIRQLRSHIHTLEQEIERLIDQDPGWRQMVGLLVSIPGVGLLLAAHLLVVLQAAAQPPSAKQLAAYAGVCPYENTSGSSLHAPATSRHYGPPTLRKLLFLAALSLRTHHPQFQTYFLRKVAEGKPKKLVINNIINKLLKIVCAIWRSQTPFIPNYRSVNPRLLKKALTVS

SEQ ID NO: 170006 - protein, 369 aa, unidentified
MQKGITHMALDDSKNSIVAGILRPKTTEPKLRQFPNEAKHLRRFFTRLQGEGPVTSCYEAGPSGYDLYRQLTALGVPCQVMAPALTPRKPGERIKTNRRDAAKLVRLFRAGELTPIRVPDEAQEAVRDLLRCREDVQEDLLRWRHRLLKFLARHGRVYREGRNWTGRHWAWLRGQRFADPVLARTCQEYRFTVEQLLARRAELEREIAAIAEQEPYRTPVGWLRCFRGFDTLGALTVLIEIGDFPRFGHPRALMAYLGLVPSEYSTGEDARRGSITKAGNCHARRVLVEAAWHYRHPPRLGRALTRRTQGQPQAVRAQAWKAQQRLHRRYRHLVGHGKRPPVAVVAVARELVGFLWAALTRAEPVALAA

SEQ ID NO: 170007 - protein, 340 aa, unidentified
MSKKYRLAGIDVSAGKLDVVIDNSRGAEMHKVFENNPKGHAAVCRFIRPGKTPARVVLEATGKYGVDLALALVEQDIEVCVINPLAARRYMQFRMRRGKTDKVDATLLKDIAGSKEFARWTPPASAVLELRNIVRRVRGVTKQMVSDKNQLHAARATATTPDYILEDMLDAIATHKKRIAGLLKHAKAVVEASQELQDRFDAFQSLSGFGAPTSLMLLGELYGLDRSLSTRQVVAYAGLDPRPTQSGTRDPARRISKLGNAHLRSSLYMPALTAIRHEPVVKAHYEAVLERSGVKKVAIVAVMRKLLHTAWGMVKSPAAFDPEKYSPKYAQLIEKSEKAA

SEQ ID NO: 170008 - protein, 414 aa, unidentified
MKRQENKACGADIHKRFLMACILSKDGSKVLNRFDMTVEGVLGFASWLKDNNCKKVAVESTGNYWHLVYQVLDDEFEFILGNAFKTRRHSGAKTDKRDAEWLAELCLNNQIEPSMILPKEDRELRALTRARKGYVDFRSKLKARTIQELEACTIKLASELSDVFGKSGRHVLQGLVDGRSADVIVESIPSKKVKKNKEKIKQVIIAGLSPISIFLIKSHIQMIDEVDKKLVQLDAQISRLLKARKRDVEIAMSIPGIGFVSAAAILSEIGDYRNFASGKKLAAFSGLDPSVYESAGKRYNGKITKMGSKYLRRMIIECAHALSRTKAKTQLKRFFLRIMARRGKNIATVALARKMLVVLHHLLINQEMYKDDGLAKPKNVKVSFSEESNYPSLDEMIEVLVGAGYFVKKDSQGG

SEQ ID NO: 170009 - protein, 389 aa, unidentified
MRAVFGIDVSKASSEVAILVNGEKVHGYTMSNDALGFARLLGDLRTVHKPEIIFEATGVYSRPYTRLNPLEAKKQLDSLRVRKTDQIDAEKLAQSQFVLSRKPTYVQEEVYQNLRDLSRFYQNLTEDIVRAKNRLHKVLQVTFPELETILSTPSGEQYWNLVIAFPCKDFVLELSKDKLSESIRQSTSKRISDKRVAYLAEKLIGLANQSYCAVKKNSPMLEEVRYYTKELLRLSEQRQTVLDQMVELAQPLPEYDILLSIPGIAETTATSIIGELGDIRRFQSANQINAFIGIDLRHYESGNFLAKEHITKRGNPYARKILFKCIHNIASASHTKPCHIADFYEKRKRQSQTTSTKPHTIASIHRLIRTMYYLITHNKLYDYTSTQNR

SEQ ID NO: 170010 - protein, 387 aa, unidentified
MQASTVSTPITDRTSTIFVAIELSQKTWLVTIHSPDKDKISRHKVPGGDHVSLLALIDRVRDRAARTLGVAPAVVSCYEAGYDGFWLHRLLQAAGITNYVFDPSSIAVDQRARRVKTDRIDGEKMLRTLMAYLRGEPRVVRIVRVPAPEQEDARRDTRERDRLTKEQTAHTNRIKALLRLHGFAVGNPRRRDWLIWLAAQRDWQGQAVPPRILTEIEHEHARLMLVRKQLEALAQAPAAADLTPAAAEMARRSELLLRLKSLGPAFATTLTQEVFYKDFHNRREVASYFGLAPSPWQSGGTDRDQGISKAGNPRARCSAVELSWLWLRHQPDSELSQWFRQRTLNASKRTKRIAIVALARKLMVALWRYLTTGLVPAGAMLKSAEAQ

SEQ ID NO: 170011 - protein, 344 aa, unidentified
MLYVGLDYHVNGSSLCILDHGGKLVKQFRVNGRWPAVVEAVRRLAEEGDHRVAVAFEACGGCAVLYEELCKVAVRVGVAHPGHLRLIFKSKRKNDRVDAGKLAKLLYCDAIPRAHIPKAEVRQWRRLVELRRVLVSRRTAVKNQLRGLLRTLGLESPRGLFTGKGVAAVEGQAMDDASGLERDLLIEELKAAGERIRRVQRELNRLAKDDPRVSLLMSVPGVGQRTAEAFVAYVDHVERFGRANQLGSYFGLVPCQDASAGRDRLGHITKEGPSSVRWLLIEAAWQAVRRDPGLKEMFQRLCGGKQERKKVAIVAIARHLGCAMGAMLRSGERWRSPDVKTKAA

SEQ ID NO: 170012 - protein, 354 aa, unidentified
MKRTTKYVAFDVHQATTVASVREESGRVIARSVLPTDRGALTEFVRGMRGARHVTFEEGTQAQWLYELLAPLVDRVIVCDRRGAPRQGNKGDQVDADHLSELLRRGALRAVYHGSADRATLKELTRTYRNLVEDATRVMLRLKALFRARGIATAGTAVYHPRHRTRWVAQLLEDGARFRAEALYAELDVLRQLRPKAKAVMVTEARRDPAWRVLRSIPFLGPVRVALLLATMQTPWRFRTKRHLWAYAGLAVVTRSSADYTIVAGAPRRRRRAPMTRGLNRNHNRVLKDVFKGAATAATARPGPLQDFYHGVIARGTREELARVTLTRKLAALTLRLWKKGERYDPTKLTMSAR

SEQ ID NO: 170013 - protein, 329 aa, unidentified
MDTRAFSPHDKHRILEKMIDYTIGVDISKAHLDVHLLPDGIAVQFTNDRPGFSALIKWIGTRKIGRIVYEPTGAYHRAFEDALSKAGLPLAKVNPLQARRFAQARGTRAKTDKVDAEVLAVMGVALRPGICVVPSKTLRDLKALQIARQALIKDRTAARNRSKSLALAMLKRQNANRLHQIERDLLRIEEEMLALIDSDKKMARTFKILCSIPGIAKITAATLIVEIPELGTLTSKAVASLSGLAPFARESGKWKGSRFIGGGRKFLREALYMPALVAMRFNPDMKAKYQQLKEAQKPSKVAITAIMRKLIVLANALVKNDRMWVNNRT

SEQ ID NO: 170014 - protein, 340 aa, unidentified
MVLIGIDPHKATHTAVVIDDAEHELARIKVRADKSQVAALLEFADSYRPRRWAIESAGGLGFLLAQQLVRAGEDVVDVPATLAARVRLLGSGRGSKNDPNDALSTAIAALRDPHLRTVMVEDHAMVLRLLADRHQDLTSLRTQAVCRLHALIAAMVPGGVQRRISADGAASRLRTIHPSNAVEVARKEMALELVADVRRLDKNIAEVKKRITVAAAASGTTVTEVYGVGPIVAALLIGHSGDITRFPTKGHYASYNGTAPIEASSGKVVRHRLNQRGNRQLNHALHMAAVTQISRDNPGRTYYLTKIEAGKSTKEARRALKRKISDAVFRQLRDDARPQT

SEQ ID NO: 170015 - protein, 379 aa, unidentified
METIYIGVDFHARQQTICYLTTNGGEILLHVLKHQDKEAVRSFYAQFTGRVIVGLEASGYSPWFERLLEELGCEVWLGNAMQIRRRARGRHKNDRRDAELILDLLLHDEFPRLYLPPQQSREVLRMLRYRQKLIKIRTMAKNSLQALALQAGLAKGSHLFTKAGQQELLTAPMSPAMQWQRTQWLQLLEPLNERLLETMLWLKQQSLNDQRIGRLRTHPGIGLLTSLCLVHSLEPVSRFRNTRKVVAYAGFDPLDRSSAEKTRFLGISKAGSRVLRYLLVEAVHTTVKHDADLKQFYQRLAERRGRPKAKAAAGRKLLIRAFIMLRDEIDYAEFQRRAVAARLARHSPGPTMPGTLIGQSASAEHREELTDHELSESRK

SEQ ID NO: 170016 - protein, 356 aa, unidentified
MSQQSNCEIAVIGIDIGKNSFHVVGHDHRGAIVLRQKWSRGQVEARLANLPPCLIGMEACVGAHHLSRKLQLLGHNARLMPAKYVRPYSKGQKNDFRDAETIAEAVQRPTMKFVATKTADQLDLQALHRVRERLVSQRTGIINQIRAFLLERGVAVRQGLRFLRVELPGILATRTDVLSPRMSRVIEELAGDWRHLDARIEDLSGEIETRAHQDQHCERLMTVPGIGPIISSAMVAAIGTGDVFSKGRDFGAWLGLVPKQISTGDRTILGSISRRGNRYLRALFVQAAWVVLVKLGPKQWERYGLKSWIEVAKKRLHYNVLAIALANKLARIAWAVLNKGRAFTCVKTDAMASRPA

SEQ ID NO: 170017 - protein, 398 aa, unidentified
MNPCVSIDISKGKSYYQGFASLNEPMTKATPIGHDRDGYEELTATGDELKRRYGDVVYVFEATGIYHRSLQNHLESQNERYVILNPLEAAKVRKSKLRSTKTDAKDCASIALAYYTLSSPDHDRKTARYETLQTMNRHYGHLVQVLRLEKVRFRNLLDIVFPKWDEAYPDPYTGVSLAVLKQYPHPEKLRSPKEETIARRLEKTTVHRHETSLNEARKAKRYAEQAASGCAEDACEVALLSESIARIEEESQMIASRLNDMTVLVRNDPFYDQLRSVPGIGDVLAVRLIAELGDPNRFQSKRQLVAYAGIDPIVYQSGKRTGEHLPITKKGNKTLRTLLYLAVTSNIRSRKANPILDFYNKKRQQASPMAYRAAVIACANKLLRILFSMNRSGEKFHF

SEQ ID NO: 170018 - protein, 427 aa, unidentified
MLKHNTEPDPAQEFAAFLALDWADQEHAFRLQVVGQSKIETGRLEQKPAVLGPWVAQLRERFGGRPIAVGLEQSRGALIHALMAYDFLVLYPIHPTTVAKYREAFKSSGAKSDPLDAGQILEILTKHQDRLHRFNPDTVETRLLGRLVEDRRKAVGLRTTQVQALGANLKEYFPQALELTSDNLSSRLACDLLLKWPTFADFQQAKPSTLKSFYYGHNIRSPEVIERVLALAEKSQALTTDPAIVESGSRLTQMYVRLIQALHPVIEKYDQRIQQVFDAHPEVKIFTGLPGAGPALAPRLLAFFGTDRSRYAAALNVQSFTGIAPVTKSSGKSRVVYARAACPKFDRQTFHEFSRLSVTHCQWARNYVQYYTDKGKKYHTIIRALAYKWIRILHKCWQERTPYNEDLYMEILKKRGSIFATLHLQTK

SEQ ID NO: 170019 - protein, 345 aa, unidentified
MDHFAGLDVSVKETSVCIVDETGRIVREIKVTSEPETLLQVLANPTYHFKRIGLEAGPLSQWLFSALAEAGLPVICVETRHMRAVLQAQINKTDRNDARGIAQMMRAGLYRPVHVKTLRSQKLRMLLTHRKLLQSKAIAIDNDLRGTLRNFGLKVGMVGKVKFEARIKELVENLPDLAVLVDPMLIVRRVLREQIAVLHRRLLAIARDDDVCRRLMTVPGVGPVVALTYRATVDVPARFKNSKAVGAVLGLTPSKYQSGEINRSGAISKCGDEMMRVMLYEAAQVLLTRINKWSWLKAWAMQIARRRGMKKAIVALARRLAVIMHRIWVDGTEFQWAREQAAVAA

SEQ ID NO: 170020 - protein, 418 aa, unidentified
MAFKIFRKNCCGLDVHKTWIFACIGITDANGRTEYFEKRFSSFSRGLRELSEWLAKHHCVDVCMESTGKYWIPVFNILETTCNVVLAHPKYTKPQKGNKTDRKDAKWICDLFMCDMVKPSFIPPADIRHLRDLVRYRFKLNCMITGEKNRAQNCLTVSNLKLDDVFSDVFGKSSRSITEYILGHPGEIFDVSPFVDCRCKHPIEEVQAAVDGAISKEQAVKLRQCLDHIDELEKHKTEIEREIFCLSDSYSDALDLIRTVPGFDKNPFTAIQILSEIGGDMSVFPSDMHLVSWAGCCPRNDQSNFKIKSTRISRAGNYLKPVLVQVANALIKSKKHPEITERYRRIKSHRGHKKAIIAICRMLLTAIWHILTDLKPYSADGYLIVKPVTEKKTLTTAQALNLLKSRGYVITDDIVTTT

SEQ ID NO: 170021 - protein, 426 aa, unidentified
MKSNNSPEFAALIGLDWGDKSHAVAVEPADGSTETSTLEHSAESLHHWLDQLEQRFGARQVAVAIETDQGAVVYALMERPWITIYPIHPATSKRHRAAFRPSGAKDDTPDALVLLSLLQYHRQRLRPLQLDDEATRTLARLVEARRKAVDRRTLLLNQLVSTLKNYFPQALELVGEDLCTDMALDFLAKWPRLIDAQAAKPATLKTFYHRHNVRRPQLIQKRLDRVRSARSLTRDSAVIEVSVRIVRLLVAELRVLVEHIIAFEIAIAQDFAQHPEKAFFSELPGAGPTLAPRLLAAFGTLREQYPEAASMQRYFGVAPVTEKSGARAWIHWRWNAPTFTRQTLVEWAGQTIVFCPWAKAYYERQRAKGSTHHATLRALAFKWLRVLWRCWQKREPYKEELFLRQLEKRRSPIAARARQLAVTMAN

SEQ ID NO: 170022 - protein, 342 aa, unidentified
MEVTTIGLDIAKSVFQVHGVDANGKVIVRRQIKRRYVLAFFEKLPPCLVGIEACASSHHWSRELKALGHRVRLMPPAYVKPYVKRQKNDATDAEAICEAVTRANMRFVETKTPEQQGCLMLHRTRHLFVRQQTAVINAIRAHLAEFGIVAPVGRHGVEELLNVAADGSDKRVPEVARACLVALGAQLQMLKTQILQSDRLIMAWHRSNETSKRLDDIPGVGPALATALVASVANPKAFRSGRDFSAWIGLVPRQHSSGGKDRLGSISKQGDRYIRGLFVAGALAVIRYAKIHGANHRPWLTALLARRPTKVAAIALANKIARMAWAMMARDEHYKEPFALAR

SEQ ID NO: 170023 - protein, 411 aa, unidentified
MDVTYERCCGIDVHKRSIVACLRCGKKQEIRTFGTTSKEIRALAKWLWDEQCQMAAMESTGSYWKPVYNLFETSHLGVMIVNARNMKNVPGRKTDVKDAEWIADLLQHGLLSASYIPKREQRELRELSRYRKSLIAERARELNRLQKMLEGGNIKLSSVVSNINGKSSRSLLQKLLKKDAPLQKDEVEESLHGALRHKVEDVMQALDGFLTPLQKQLILQVVDHIDDMTKRIGQMDKLVKQYSSGYEDAIEKLDEIPGIGRQSAETILAETGLDMSRFATEKHLSSWAGLSPGNNESAGKRQSGRTTKGNATLKTTLIQCAKAAVKKKDSFLSAQYDRLVVRRGAKRATVAVAHTMLIAIYHILKLGEPFIDLGADYYNKFNKERKINSYLTKLKKLGWQPETATFSAAST

SEQ ID NO: 170024 - protein, 316 aa, unidentified
MAEVTNLSNVGIDVSKDWLDIVVIPSGETWRTENIAEAIDVLVEKLEKQKPERIIIEATGGYERLVVSKLYVAKQPVCRVNPKRIRYFARSVGQLAKTDKLDAKVLARFGEVVKPALTQLPSDQEEQLSALLARREQLTDIRVAESNRMDLAPTRVRPSLNEHITWLKNQIKALDKEIDDFIDQDPDLKEKDEFLQEVQGIGKKTSAKLIADVPELGHCDRKQIAALIGTAPYNHDSGYKKGQRSISGGRPDVRRILYMATLAATRSNPVIMAFYQRLVKAGKKKKVAIVACMRKLLTILNAILRDRIHWNTAFSS

SEQ ID NO: 170025 - protein, 356 aa, unidentified
MSHEVKYIGMDVHKEAIVIAVLDGSGKQVMETIVETKANSILEFLYGLRGELRVTLEEGTWAAWLYDLLQPKVQEVVVCNPRRNALLKEGSKSDKVDARKLADLLRTGMLRPVYHGENGLRTLRELARSYQTINKDLTRVMNRLKAAYRSWGIPCGGTQVYAQRYREEWLGKLPQAGVRRRAELLYQQLDGLQALRREVRKEFVAESRKHKATKLLRKIPCIGPIRAGLLIALMQTPYRFRSKRQLWTYSGLGVETHDSAQYRFVRGQLQRSKKPQQLRGLNRNHNHAMKEIFKGAANRASCSTGPLHDFYAALLAKGMKPEMARLTLARKIAAITLTLWKKGERFDGEQLKTQAA

SEQ ID NO: 170026 - protein, 400 aa, unidentified
MVGIDGVGVLLELDVGKQTHHGYGLTPTRKKVFDKQLPNSEPKLRAIVDKLTAKFGTVLVVVDQPASIGALPLTVARHAGCQVAYLPGLAMRRIADLYPGEAKTDAKDAAVIADAARTMPHTLRSLDLADEVTAELTMLVGFDQDLAGEANRTSNRIRGLLTQFQPSLERVLGPRLDHPAVTWLLERYGSPQALRRAGRRKLVEVVRTRAPRMAERLVDDIFTALDEQTVIVPGTGTLGVIVPSLAKSLAAVHEQRRALEARIEALLAAHPLSKVLTSMPGIGVRTAAVLLATVGDASSFPTAAHLASYAGLAPETKQSGTSIHGEHAPRGGNRQLKRAMFLSAFAALHDPASRTYYDRCRARGKTHTQALLRLARHRISVLFAMLRDGTFYEPRSPRTA

SEQ ID NO: 170027 - protein, 372 aa, unidentified
MNYNTVYVGMDVHKESFTLCSCKYEDEKASHYQRTPASYKNVLRYLAFLRTIYGEYTRFVCGYEAGCLGYSLYHQLENFNVECVILAPTTMLEQRSKRRIKTDKRDAEIIARSLAQHNYSPVHIPTETDNQTKEFIRMRDDHKAELKKIKQQILSFCLRQGYQYDGSGNWTAKHVKWLRSLKPAGLYKEILDEYLLTYTILTDKLNRLDQRIEELASEEEYKEPVSKLTCFLGIKTHTALSVIVEVGDFQRFASARKFAGYLGLVPGQHSSGDDRNGLGITKAGNTHVRRLLVESAQSYTRGKIGYKSRVLRSRQAGNSPQIINYADRANERLRRRYYQMVLKDGKKYNIAKIAVARELACFIWGMMTDNIY

SEQ ID NO: 170028 - protein, 367 aa, unidentified
MEAAGKPWVVAPLYNLPAEPEQLPGPEILPPSPYPQGRASEPVEKRRSTLNATEKVHVGIDVCKARLDVALLPSGETFTVANDEDGIQTLVEKLLEADPVLVVLEATGGLQRPLVAALAASRLASAVVNPRQSRDFAKAIGRLAKTDKIDALVLARFAEAVRPEPKAPPEAEAMEFQAILARRRQLVQMMTAEKNRLGASASGKVRSRLEAHIRWLEKELARTDRDLGEAIEESPTFKENETLLRSVPGVGPVLCRTLLAELPELGSLSSRELSALVGVAPINRDSGAFRGRRGVWGGRARVREALYMGALVATRYNPAIKEFYERLVAAGKPKKVALVACMRKLLVILNAVTRDRTPWRCPHALNS

SEQ ID NO: 170029 - protein, 338 aa, unidentified
MKLYAGIDLHSNNSMVAIIDEQDRVVLQKRFANALQQILLALASFKEHLLGVVVESTYNWYWLVDGLMEAGYTVHLANTAAIVQYEGLKYSADEHDARWLAHLLRLGILREGYIYPREARAVRDLMRRRMQLVQTRTTQLNSMQTQYMRSTAQRPSTNELKRMLPEDVDAHLHQPNVASGIRANLAVVHTLSGEIARLEREVLEQVRLAAQFEPLLSIPGVGRILALAIMLETGEIERFESVGNFASYARCVQAKRMSNDKKKGEGNSKCGNKYLAWAFVEAANFAVRYNARIKRFHQRKTAKTNQIVATKAVAHKLARAAYHVMRERVPFDETRAFA

SEQ ID NO: 170030 - protein, 343 aa, unidentified
MQTITTIGLDIAKSVFQVHGVDAAGQVVIRRQLKRRYVLAFFQKLPPCLIGIEACASSHYWSRELQALGHTVRLMPPAYVKPYVKRQKNDATDAEAICEAVARANMRFVPTKTPEQQSCLMLHRTRHLFIRQQTAVINSIRAHLAEFGIVAPVGRKGVTELLHIVADPSDKRVPEVARACLAALGNQLLSIKEQIVEFDRMIMVWHRSNETSKRLHYIPGVGPMLATALVASVADPRTFRSGRNFSAWIGLVPKQHSSGGKDRLGSISKQGDRYLRSLFVAGALAVIRYAKIHGTKHRPWLTALLARRPTKVAAIALANKLARMAWAMMAKGERYKEPVALVA

SEQ ID NO: 170031 - protein, 415 aa, unidentified
MSLKIVYKICCGIDVHKTFVVACIASTNDKGITSYESHRFSTYTSGLKTLLQWLLKHNCKDVCMESTGKYWIPIYNILENDCSIVLAHPKYVKAIRGKKTDKKDAKWIADLFKHDLVAGSFMPPADIRQLRDLMRYRFKLTCFKSSEKNRLQNCLTVSNIQLGNVVSDTFGKSAQAIPDKLLENPADTSFYLKPLVYKSLKKKLPELRDAIDGYITPEQVGKLKVIKAHYESLESRKAELEELILALASPYQQELAILKTAPGIRSLFTAIGIISEIGTNIEAFPSAKHLCSWAGLTPTNNESTGEKKSVRVSKAGCYIKPLPVQCANAIVTSKKHPEIRNRYLRLKKRRGHKKAIIAIARMLLTALYHMLKNGENYNAELYRKYDLPPTNWEITVEQAIIIAKNQGYKIKSATA

SEQ ID NO: 170032 - protein, 418 aa, unidentified
MKRVIGMDIHRTFAEVVIWEAGQLRPAGRVDMSRAGLEGFGRTLSKEEDEVVIEATGNAMAVVRALEPHVARVIVANPMQVKAIAYAQVKTDKIDAGVLASLRAANFLPEVWLPDTDTERMRRQVARRNQVVRHRTRIKNEVHAILHAHLVPCCPHDLFARVGRDWLGRQTLPDDERAAVARHLRELDRLGEDLDVLDRDIAQAAINDPVVKRLLTITGVNLIVAAGLVAAIGDVRRFASSEKLVSYVGLNPRVRQSGLGLAQHGRISKQGRSHARAMLVEAAWAAAKAPGPLRSFFLRIRARRGHQVAAVAVARKLAVLCWHLLTKEVDYQWARPALVANKIRAMELQAGQPARKGNKRGSTYVYNVKELRDREIEVARHAEQAYEQFVRGWQRRAPAKRRTGAANEEATMKAARSG

SEQ ID NO: 170033 - protein, 417 aa, unidentified
MISAVIERCAGIDVGKKFLAVCVMTGPATENARAEVRKFGTIRAELERVREWLRSEGCTHVVMESTGCYWKPVLNILEDDPEYQLEIVLANAQQVKAVTGHKTDPQDARWLAHLLRHGMIRPSFIPPRAQRELRELTRRRKQMVRAAADERNRVQKVLEDANVKIGDVLSDIFGLSGQLMLEALVAGQSSVVEVAQLARGSARKKIADLTAALQGHQMRDSHRFLITRAMRHMAFLADEMEALDREIATRIGSPDLREPNQLLQTIPGIRTQGAAAMLAEGGPNMNQFPSASHFSSWSGVAPGNNESAGKRKRAPTLRGNPHMKMALVESAWSASRTNGSEFQNRYQRLQPRIGHKRAIMAVAHTLALRIHEVLESGVAYQKGRSPQAESSVKRLIRHHSRRLKHLHRWLKDADSIQ

SEQ ID NO: 170034 - protein, 348 aa, unidentified
MLADQLDYVVGVDPHRDSHALAVVHVLSGAVVFEANVAASSEGYADALRLVEQHAVGRRAVAIEGAGSFGAGLTRFLMSRGERVLEVGRLRRERRSGGKTDALDAARAARSVLAQERPATPRAGGERQALQALVAAREGAVNAKRAGLCQLRDLLITTPEPLRGELRPLTRARLLQRLAATRPAGRRDPELRGSMLALRSIARRVLQLTAEERELAREIETITRKLAPQLLDQPGVGPHAAAQLVLSWSHHGRIESEAAFARLAGTAPIPASSGQTIRYRLDRRGDRKLNRALHMILVTRKRSHPATIAYIERRLQEGKTRRETNRCLKRYLARSLYRLLEHGAPLAT

SEQ ID NO: 170035 - protein, 339 aa, unidentified
MELYAGMDLHSRNTLVGVIDSSLKRVFEQRVPNDLSLIVDKLEPFGDRLAGIVVESTYNWYWLVDGLMDRGYRVHLANPSAIKQYEGLKHTDDRHDAFWLAHMLALGILPEGYIYPKEDRPVRDLLRKRSFLVKHRTAHILSLQSMLEREKAYKLRGNEIKSLRAEDIGRIFSEEHLVLSAQANRASIEFFGHHIKRIEKAVRKRVKLSKSFEYLLTVPGIGDILALTIMLEVGDIARFPRVGNFSSYARCVSSQRLSDGKKKGQGNRKNGNRYLAWAFVEASHHARRYNERLRSYYQRKCAKRNQAVATKAVCNKLARACYYIIRDQVAFREEALFCS

SEQ ID NO: 170036 - protein, 341 aa, unidentified
MSLFAGLDISVKTTAICILDANGRILLETMADSAPEAIAIRLRELDQPFERIGLEAGPLSRWIYAALVDMGLAAICVETRHMHAALSARINKTDRNDARGIAQMMRVGLFKAVHVKTPASQHRRLLLTSRKLLQRKIYDIENDLRGSLRNFGLKVGVVGSVKFEDRIRKLVEGHALVAAIVGPLLEARAALRTQFAKLHRMLLELVRVDPVCRRLMSAPGVGPIVALTFRTCVDNPARFSRSKSVGAHYGLTPRLYQSGEVSRTGRISRCGDVMLRSSLYEAALVVLTGPGRWNPLKAWGVAVARRRGMQKAIVAVARKLAIILHRMWRDEADFRWTATAA

SEQ ID NO: 170037 - protein, 465 aa, unidentified
MKRQIRRRTPKARQSPAALERLHPDAAGIDCGSAEHFVAVPPDRDPTPVQSFPTFTADLHRLADWLTACRVTHVAMEATGVYWIPIFEILDARGFRVILVNARHVKNLPGRKSDVSDCEWLRDLHILGLLRGSFRPADGIVALRGYLRHRSTLIESAGALVQRMQKALVQMNVQLPLVVSDITGVTGLRILRDMVAGQRDPYQLAQHRDYRCHASEAEIVAALTGNYRPEHLFALQQNLELFDIYQRQLTACDVAVEAHLAQLAATTTPPAVPLPAARRRQKPRDNEPRFDVRTPMHQLTGVDLSQIDGIGPYNALRLLSEIGTDMTRWPTDKHFTSWLTLAPLNKVSGGRLLSSRTQPSANRAAAIFRLGAMNLGRTQTALGAFYRRVAFRIGKAKAITATARKLAILVYRTLKHRLVYIDPGADAYNAQDRTRLVRRLRHRAEHLGFALVNLSTGAVVEGSVS

SEQ ID NO: 170038 - protein, 394 aa, unidentified
MTATYADCITRSRPVLYLAFELGAKDWKLGFSIGLGVAVRLRAIGAGNLAMLRREIELAKKKFKLTDDVLVCSCYEAGRDGFWMHRWLVEQGIDNVIVDAASIEVNRRYRRQKTDSLDAAKLVAMLIRHHAGEKLWSVVRVPAREEEERRHLHRDLEEMKAEVTQHRNRIRGLLAGVGARVAEINAVFVELLPTAKTADGREVPGALRERLVREFERLRFVQQQIGSLERERNRKLRDDDHEEHVVKARKLMQLRAIGPHSAWVCMLELFGWRRVHNRRQLASLVGLTPTPYSSGEDEREQGISKAGNRRLRTLLVEIGWCWLQYQESSALSQWYRRRFAGGGKRQKKIGIVALARKLLIALWKYLERDEIPEGATLVDWRAKLAGFSARPLPA

SEQ ID NO: 170039 - protein, 428 aa, unidentified
MKYNKQNEKIEMITEDFLIVAIDVGSTTHYARAFDYRGIEYSKKAFSFKNTDQGFKTFKSWACAIAVQNKKKIFLVGMEPAGHYWFNLGKFIQNSGMILAHVNPAAVKKSKELDDNDPSKNDRKDPKVIAGLLKDGRYSFPYMPEGVYAKIRDISYLRDDAQKNLVRIKNRLARWLSIYFPEYKEVYGQIDAKTGMLILEEYPLPKDIVTLGVEGVIKIWKSHKAKGAGQRRAEKLVNAAKRSIGRTESDEIARIELKVLLKDLKEYQKRVQVYEDLAFEALLEVPNAEKLLNICGVGVVSVMRFVAEVGDISRFNNAKEVQKLAGLSIKTNSSGKHEGVGKITYRGRKRLRYGMYELAISLVSRNKAFKSIHQYFMTRENNPLKGMQSMVAISCKVIRIFFGILVNGYEFDENKMLQDIVRPEATIA

SEQ ID NO: 170040 - protein, 399 aa, unidentified
MAQDSVPVEVFVGVDVGKSAHHAVALDAGGRVLLDRALPQDEAKLRALIGELRRHGKVLFVVDQPATIGALPLAVARDEGVLVGYLPGLAMRRIAEIHAGEAKTDARDAAVIAHAARTMPHALRPLRQDDDATALLGMLAGFDEDLAAQVNQLSNRIRGLLTHIHPALERVLGPRLQHPAALELLQRYPSPHSLRAAGRARVAARLRRRAPRLADRLADQIIAALAEQTVVVTGTDAAALVLPQLAEQLSLVLMQRQRAAEQLEELVDNHNIGSRLLTMPGVGFRTAARIVVETSGRHFRTPGHLAAFAGLAPVTHRSGTSIRGERAPRRGNRRLKRALYLSAFAALKDPTSRAYYDRKRAERKTHQAALLALARRRSDVLFAMLRDDADYDPAHTLAA

SEQ ID NO: 170041 - protein, 447 aa, unidentified
MRHERVGQSLLTGGAPRPRPGGNAVQVLHRICCGLDVHKKLVVACLRVQEADGRARTEVRRFEAMTDALVELRGWLEEAGCTLAVVESTGPYWKPLYNLLEEREGLAVWVVNARHVKAVPGRKTDQNDACWLAELGAHGLVRPSFVPDRVQRELRELVRDRSSLLRERAAEVNRLQKVLEGANIKLASVLSDVTGVSARAMLAELVAGSTDAAALADLAIGQLRAKRDLLERALTGVVGAHQRFVLAEQLGHIDELDARVGRLDAEVAARMAAPDAATGERPFEDAVRRLDTIPGVGRRTAEAIAAEVGVAMDRFPSARHLASWAGMCPGQHESAGKRRSGKTRPGSPFLRAALAEAAWAASRTKTETALRAQYRRLAARRGKKRAIVAVGHSILVCADHMLRDERDYADPGPAHRDTDALQRRLVRGLERLGLKVTVEPLTQTEAA

SEQ ID NO: 170042 - protein, 344 aa, unidentified
MKRVSTIGLDIAKNVFHAHGADERGAMVFSRKLARSKLLDFFAGQPACTVALEACGGAHHWARQLQTMGHDVRLIAPAYVKPFVKRNKSDAIDSEAICEAAQRPGMRYVTVKSEEHQAAGLVFRTRDLVVRQRTQLINAIRGHLAEYGWVAPRGTAHMTLLADLLEEDEVTSTLPAAAQPMFKLMIDMLVELDKHVAVLDREIARRAKEDEAARRLMTIPGIGPISATAIIALAPPIDTFRKGRDFAAWLGLAPRQHSTGGKQRLGSITKMGERTIRRLLIIGASAVVLQANRRGAPRGSWLENMLARKPRMLVSVALANKMARMVWALMTKNEDYRAPTAVAV

SEQ ID NO: 170043 - protein, 338 aa, unidentified
MKLYGGIDLHSNNSVIALLDEQDSVVLRRREANDLERVLGDLEPYGDGIEGLVVESTYNWYWLVDGLMAAGYRVHLANTAAIVQYEGLKYADDDTDARWLAKLLRLGLLPEGYIYPKEERPVRDLLRRRSHLVHQRTSNIHSIQNLMARNRGRSLSANQIKRLTEEDVERLLPNADLALAVKGNLTVTHTLDEVIGALEKRVKARIKLRPEFKLLLTVSGIGQILGLTIMLESGEMTRFAKVGNYASYCRCVGSEHLSNGKRKGRGNTKNGNKYLAWAFVEAANFAVRYNPQIKRYYQRKCARTHPVVAIKTVAHKLARACYYILRDQVPFDVNRAFA

SEQ ID NO: 170044 - protein, 355 aa, unidentified
MLYLGIDQHARQLTISLRDEDGDVLQARQVSTEPEKINAFFEYLTRECLQSDESFVAVVEVCGFNDWLIRMLRDYHCHKVILIQPEERKRQKTDRRDAAALSELLWVNRDRLLAGKSVHGLRQVDISSTTDQENRRLTTLRKDASRARTRLINRIKHILRRHNLQWEMPTKTFPTQPAIAWLKQLVLPEIDQLEMNYLLIDLEHAQQRMQELEEKLGERCGTSEAATLLVSMPGVGYFTATALACRVGSVERFPRSRSLANYWGLTPGCRNSGENNQRLGSITKAGSSMARWLLAQVAYQALRKDAKLREWFKRIKRRRGSSIARVAVMRKLATIIWHMLTKRKAYAACRALATD

SEQ ID NO: 170045 - protein, 420 aa, unidentified
MSKVIETRKLRIVNAKTLIVTIDIGKETDVGYCRCPSGKDIKPFEFSNNIEGFEKLWNCVCCTKMSHDLEEVVVGFESTGSYGEPLVHYLKGKPVKLVQINPMHTKRMKELEGNSPGKTDRKDPKVIADIIGLGHALSVVIPEGAAAELRRLTLARERSIQRRTALYNQLQDLVFILFPEFLQVMKDVKTKTVQYLLRHHPMPHDIVKCGLETLVSILKRVSRGKLGRGRAQALYEAAGRSVGIQEGKRGILLEMEEVLCGLEGCNRFIEKVEEETVRYLQEIPYRDSLLSMKGIGAVTVAGLIGEVGDFRQFHTLGEILKLSGLNLFEISSGKHKGNRHISKRGRPLLRKLLYFAAINTVRKGGVMHACYQRHLDKGMPRIKALIAIARKLLGILFALVRDHSHYVEDFSQKEDLKLAA

SEQ ID NO: 170046 - protein, 397 aa, unidentified
MYIVGIDIAKRKHEAAVIDGEGTVIIKPFSFTNNCSGYNRLLAMLTKAKLPLDEVSFAMEATGHYWLALFTRLQKEGFRVQVINPVQTNSIRSFYIRQAKTDPRDALLIAEVIRFGHFSESTLHPENIYELRELCRGRHAIVSMQADVKRKVVALLDQVFPEYETAFTNMFGDTSMAILQTCPTPKELSEMPLEELCHLIEVSSHKRFRMAKARELQELARNSFGFAMAGDVFSTMIRLYAKHLDFLKQQVREMDRKIAEIMETLDTPITTITGIGPTLGAYILSEIGDISRFSSAAKLAAYAGIDPTMRQSGEYNGVRNRMSKRGSPYLRHAIWLAASSAVLHDPALKLYFQKKRDEGKPYMASVGHACRKMVSIIYAVMRDNKAYVPCIPSEISA

SEQ ID NO: 170047 - protein, 342 aa, unidentified
MQTKRYIGVDLHRNCFTACVRLENGREYLKEWKLQDIEKFVAKLRTTDQVAVEVTGNTRLFHDAVALHVERVVAVDPNQFKVITHSVKKTDPNDARNLALYLAKDLLPEVRMKDKTRAQIASLTQTRDTMVKLRTALKNKVNNICSAHGVNLNKESLASDKGLNAVLETDFDLLTNLELKIIVEQIRSLNKSIAQLEETISREGQKLEGHKNLTSIKGIGGLSGSILLSIIGNIDDFAHEGKLAAYFGIVPRVSNSNETEHSGRITKRGTKLGRTTLIQCALIAQRYSPYLKTYYERMKGRRGTGKAIVALARKFLGIIYRTLKNKWVFEDFPNFVLAEEAA

SEQ ID NO: 170048 - protein, 365 aa, unidentified
MSTITMGVDLAKNLFSVCAVDGAGHVQRRQDFGREAFALGLAQVPAGTVVAMEACSGAHHWARRCLEVGLQPRLMAAQFVTPFRKSRTLKNDRNDAEAIATAARQGNMRFVPVKSVEQQARLAWHRVREGYKTEGLEISNRLRGLLAEFGIVMAQGDRALRIALADLDAAASLPAELKELLRDLSAHWAQVRDRIAACDARIEAHAKADERCVRLRALIGIGPLTADAMVASVGSAKEFKNGRQLAAWLGLVPTQHSSGGHTRLGTISCRGDAYLRTLLIQGARSSLQRAKVTAQDRATPEQIWIRQLACRMPFGKLLVAIANKHARQLWAMLAREEAYDAEAWLKHPMVQRPAGKRAVRIAGMA

SEQ ID NO: 170049 - protein, 339 aa, unidentified
MTMIGIDPHKATHTAVAVDRDEQVIAEFTLEASNNQAERLCDWAGGLGKREWAVESANGLGYLIARQLVACGETVFDVPPVLAARVRVFGSGKSQKNDPNDARSIAIAALRSDRLATVRPDDHVTVLRLLVKRHRDMARLRNKHCSRLHALLLEVEAGGIGVKISVTNASGLLDRIDVAGEATRYRVLVAREVVDDIARLDERLRASKNRIAVAVDASGTSLTDIVGVGPIGAATIIGYTKDITRFPTRGHYATYNATAPIEASSGGHTRHRLNPRGNRILNHAIHIAAVTQLRHDTNGRIYYDKKIAEGKTPKEAIRALKRRISDAVYRRLIADTDRQ

SEQ ID NO: 170050 - protein, 395 aa, unidentified
MFIVGIDVAKRSHEVCMITSDGQTVQRPFSIRNNCTGYNLMLEKIRKHTNIKSQIVFAMESTAHYWLALFTRLRKDGYHVILLNPIQTSAMRDMFIRKIKTDAKDSFIIAELIRFGRYAESNVAQDRLLALKELCRNRFYLVDMAGDLKRKLVALIDRVFPEYEAQFDTIFCKSSVALLKKYPTPQKLSNAHLDKLTELLWNSSNGHFGEWKARELKDLARNSFGVEDCDGAYSTLILLMLDQIQSLSGKADALEKEISRLFQSFDTTVTTIPGVGPIIGAVILSEVGDISRFSSADKLAAYIGVDPSVNQSGEFQAAHAHMSKRGSPYLRRCIWMASQVAVQRDPMFRAYYEKKAAEGLKYMTIIGHVTRKMTAVIFAILRDHKVYEPVLPTAA

SEQ ID NO: 170051 - protein, 420 aa, unidentified
MKSFVPVAGVDVSKRFSDLCVLSPDNNVLLRQKIYHDMVSMKLAEKKLHEIELECGARPVVVMESTSHYHLILFQFFTDAGFEVVVVNPIQSGALKNINVRKVKNDRVDAYRIAMLHRLKVLRPSQIPTSSLRGLRLLTRQRSELKGDVARFKNRMTAYLDQIFPGYGEVFSDVGGSASRAVLHMCPTPEELLNADGSLLAKAICEAGNKGPKFGAEKAAKLREAAGSAQVIGVRSASNASLIKNVLDIIEGLLAAIQRIEGEIKELVTQDTRLDEDVKLLCSIPGIGFSSAVVIVAEMGDISLFRKPKQLAAYFGLDPGERQSGTFKGRKNKLSKRGSPQVRAALHMAAVSSVSRNRDGTYRNPVLAEYYERKCAEKPCKVARVAVMRKLSNIIYAVLRDRRPFELRTPQEHMALLAAA

SEQ ID NO: 170052 - protein, 461 aa, unidentified
MARRNPGIPTPVSPAPRGPALRITHPHAAGIDIGGSSHFVAVPPDRDDEPVREFRAFTSDLISLADWLRACRVDTVAMESTGVYWIPLFELLSSRGFEVLLVNARHVKNVSGRKSDVLDCQWLQQLHSYGLLRGAFRPGDGVVALRAFARQRHALLRAQARAVQHQQKALVQMNLQLTSVIADVAGATGQAIVRAIVAGERDPWALAALRNCRIKASEADIALALQGHWRREHLFALKQALEAFDFCGQQLAELDAQIEAQLQRLQVTAGEPAKGRKRSVARNAPKFDLRARLFSMCGVDLTAIPGVDVTTALAVVSETGSDLTAFPTGKHFASWLGLAPGTKISGGKKLSGRTLPSSNRAAQALRLAAAALRTSQSALGAYYRRLCARMDKPKAVTAAAHKLARLIYAMLTRGQPYTDQGQAYYEERYRERVVANLTRRAQQLGLQLVPLAGAAPQAATA

SEQ ID NO: 170053 - protein, 351 aa, unidentified
MPRRSTVRAVTTIGIDMGKNTLHMVGLDSLGAIVLRERVSRGRITSRLANLPPCLIGIEAGMATHYVARELAALGHDVKQVPPAYAKPFRQGHKNDFRDAHAVAEAVQRPTTRFVPAKTNEQLDLQALHRVRSRLVSQRTAVINQIRGFLLERGIIVRQGPRFLRHLLSDILARRTDVLSPRMVRIVSDLAGDWRQLDERIETVTDEIETLAKADDSCRRVMTVPGIGPIISSAMVAAIGSGAAFARGRDYSAWLGLVPKQMSTGDRTILGHISKRGNSYLRMLFIQAARVILVRPANWPKHGFGAWLLRAIQRLHPNVLVAALANKLARIAWTVLTQERSYEARITKAAA

SEQ ID NO: 170054 - protein, 449 aa, unidentified
MSTLCSAEEKPSYAARIGLDWADQKHFWTMLTADGKRTRGELKHTPEAIEIWAVELARSFDGRPIALALEQKRGALVAILSKYAHVHLFPIHPTKLGHYRKSVCASGAKSDPSDADLILDYLVKHPEWLFCLMPDTVETRSLQFLVEERRKLVDQHTSQLQILIYWLKQIFPQMLEWFDGMSTPLVGDLLKRWPQLPALQKASQKTLRKFFAQHNCRSEERIQQRLDEIGQAVPATTDAALLNTGDLCIHIAVQLLAALRAGIAEFDRQIEAVYQTHPDRSLVASLPGAGPALEPRLIAALGTNRERFESASSMACCFGIAPVTESSGNAHWVHWRWACSKFVRQTFHEWANCSIRSCGWAREHYDKQRLKGKGHHASVRSVAFKWIRILFRCWRDRVPYSEQRHVEALRKHGASTSTPVAVIVNSTSMLSGVQWESCGGFSKLAKVSS

SEQ ID NO: 170055 - protein, 376 aa, unidentified
MAQTDVQYPTIHLAIELSRSAWLVAARLPGVEKPSLHRIEGGDTAALLALAAALRARAAARLGTPVRVACCFEAGRDGFWLHRLLTAEGIAAYVLEPTSILVNRRARRAKTDRLDALGMLRVLAAYLGGDRQACSMVRVPTPEEEDAKRPHREREELVRERVRLENRIAALLATQGVRERPSLRSWERDLAALRTGDGRPLPPHLRAELDRLRRRLVLTLGLIREVEAERDAALAAGPRDAAGRKIAALCRLRGVGANFAAVLTREVFYRAFDNRRQLAGYVGLAPVPHQSGEADRDRRISRAGNARARTTLIQLAWLWLRYQPDSAPARWFRDRVGALRGRTRRIAIVAMARKLLIALWRYAETGLVPEGVEVAA

SEQ ID NO: 170056 - protein, 338 aa, unidentified
MAVATVGIDLAKNVFAVHAVGESGLVELRRPEVRRAKLLELVASLPPCLIGMETCSGAHHWAREFEKHGHTVRLMAPKFVAPYRMAGKRGKNDANDAQAICEAVTRPTMRFVPVKTIDQQTELFLHRARQGFIEERTALINRVRGLLSELGIVLPQKAAAMRKGVLQVLEDLPGWSNTVIADLLSHLARLDERVAEYDRHLQQAAKDNERARRLMQLAGIGPTTASALVATVGNGNDFQSSRQFSAWLGLVPGQHSSGGKARLGKITKAGDRYLRTLLILGARSLLMKAAGHTDPVSRWAMRLKERRGFGRAVVAIAAKNARMCWAALRLGDAFKVPA

SEQ ID NO: 170057 - protein, 333 aa, unidentified
MEHVAIDLGGKQSQICIRASDGTILEEKRIPTEALFAYLARRARSRVVFETCAESFYVADEVMKQGHEVRVVPASLVRSLGVGARGLKTDRRDAQVLSEVSCRIDIPSVHIPSTRSRDWKSLLSMRGGLVASRTKLINTVRGYLRGRGLRVKSGSSKYFHARVRALGIELPLALDLQLETLETLSAQIRRADAEVARLAKADPVCRRLMTIPGIGPVTALAYVATLDAVDRFRYAHHVSAYLGLTPGERSSSERQHRLGITKAGSPSLRALLIQAAWSTWRRQHDKPIGRWADQIKQRRGKFVAVVALARKLAGIAFALWRDQTTFVAERAAR

SEQ ID NO: 170058 - protein, 370 aa, unidentified
MRHGSTLYVGLDVPKDSIAVAYATTDGPSDPVHVGAIGTRQCDIDALVRKMQSKSAPLVFIYEAGPCGYWLYRDLTRKALTCVVVAPSLIPRKPGDRVKTDKRDAVTLARLARSGDLTPVYVPDVPDEAIRDLARAREDALRDLNTGRFRLKALLLRHDIRYVGRANWGPEHVRWLARLVLPTPAQQIVFQEYVRPVTERTQLLHRLEAELLEQAKPWRLYPVVDALQALRGVQFTVAITTIAELGDLTRFDNPRQLMSYLGLTPSEYSSGDRRRLGGITKAGNGHARRVLIEAAKAYRHRAKVSEPIQARQQHLPAPIRDIAWRAQVRLCGRYRKLLARGKHPNTIAAAVARELAAFMWAIARTQAVSA

SEQ ID NO: 170059 - protein, 420 aa, unidentified
MIDAVIECCAGIDVGKKFILVCSLCGPSDQAPQIQIRTYATTTHALQTLEKWLYELGCRHVVMESTGDYWKPIFNILEERMTVVLANPVHVKNIPGRKTDVKDCQWLAHLLRHGLVRSSFIPPRPIRELRDLTRRRRQLLSAATSERNRVQKVLEDANIKLASVLSDLFGASGQEMLEALLAGDPDPEQIASFARCRLKRRVPEIKAAVEQHRLRDHHRFLLRQSIAHIGFLEEQIFELDRQIMQLLLPYQEGFDLLQTIPGIRRDAAAILIAEIGPDMSQFPTPDHLAAWAGVCPGNNESAGKRRSAHVRKGNRWLRGILTQSAWGATRKGNSYFRERYARLAARRGSKRAVIAIARILLITVYHVLSRRIPYRDLGPNYLDERQRNRQIRYHLKRLAEFGITIPPDHLQPAPATSAVN

SEQ ID NO: 170060 - protein, 353 aa, unidentified
MWIIGCDFHPGFQLVAIFDKETGEITVKRLQHREEAERFYREQVPGGSVVGLEACGHTHWFENLLYEVGIEMWMGDAAQIRAAVVRAQKTDRRDAEHILRLLLEKRFPRLWVPSAEERDLRQLLVHRHKLVRMRTQVKNQLQAMALNQGMQKKRQLWTAKGQAAFTALPLLPYARRRRQELLETLEGLDRRIEELNRVGQAEAAQRPAVRHLMQQPGVGWQTALGMVLTLGPVERFRHAKQVASYLGLIPREHSSGGKQRLGHICKQGSTYMRFLLVEAGQSVARHDPEMKKKYQRWTQRCGRAKAKVAVARSLAVRLYWKLREHTETAQLAVVRHAGGPESSRGELVEAPGA

SEQ ID NO: 170061 - protein, 359 aa, unidentified
MQVQSNKLNFEGQNIFVGIDVHKENWTVCIFSEQLEHKKFSQPPTVDALKSYLHRNFPGAKYHSAYEAGFCGFHIHHNLLEAGIHNMVVNAADVPTTHKEKDNKTDKRDSRKLGRSLRAGELTGIHIPTRKTQEDRSLLRLRYTVRKDLTRIKLRVKSLMSFYGIDHPEQFSSTNKHWSRRYMEWLKTIKMEEDSGGAVFQTLIREVEEMRKVQLEVTRKIRDLSRTPSYEKDYGLLFGVPGIGLITGMTFLTEIEDINRFSSTDHFASYIGLVPSCHSSGEKENNGDITSRAKKILRDLIIECAWSASRKDPALHMIFCKLCKKMEPNKALIRIARKLLNRIYYVLKTKTEYVYGVVK

SEQ ID NO: 170062 - protein, 417 aa, unidentified
MQSASTSLPAVAPDGVTAGVDWASTDHVACVVDAAGKVVTRFTAAHTADGLKALVKGLARVRAAEVAIERGDGLMVEALLAAGLTVVVISPNQVKNLRSRYGSAGNKDDRFDAFVLADTLRTDRARLRPLTPDTPATITLRSAVRARRDLVAHRVAMCNQLRAHLALVFPAAVGLFADLDSPVSLAFLARFDCQDRADWLSPRRMAAWLKSAGYSGRTRPGVLHGRITAAPRGATGDDGTARTHVTRALVTVLVTLVEQIKALAAQIAEQLDLHTDGHVFTSLPRSGTVRAARLLAEIGDCRQRFPDPSSLMCLAGVAPSTRQSGKIKAVSFRWAVNKQLRDAVCDFAADSRHASPWAAQLYDQAIARGKDHPHATRILARAWLYVIWHCWQDHTAYDPAQHRALQRLLAQDQLAAA

SEQ ID NO: 170063 - protein, 413 aa, unidentified
MLKIVYPICCGMDVHKDFLVACIASTNSQGVTSYKSRRFSTFTGDLRLCAQWLAANSCKDVCMESTGKYWIPIYNILEPTCKIVLAHPKYVKAIRGKKTDKKDAKWIADIFKHDLVSGSFIPPADIRQLRDLIRYRWKLTNFTTGEKNRAQNCLTVSNIKLDDVFSDVFGKAATAITTRLLENPTEKIADVSGFRTKGMKATNEEVLAAVDGEICPEQAEKLHIIRSHMNSLDLCKANLDSLILSVAEKYIPQLNLVMTVPGIQSFAAIGILSEIGVDMSVFPTSKHLCSWAGLTPQNNESAGKKKTTRISRAGVYIKPLLVQCALCAIRKKSNPEIRRRYENLKKRRGHKKAIIAIARMLLTAIYNILKKNEPYNPELYAHLNTPPKQRTVSVEEAIFILQRQGYLVTPSAT

SEQ ID NO: 170064 - protein, 355 aa, unidentified
MSQEKYIGMDVHQATISVAVMDAQGKLIMECLLETRAVTIVEFIRGLHGTLSLTFEEGRSAAWLHDLLKPHVSRLVVCDPRKNALLKDGNKSDRIDARKLAELLRGNQLHPVYHGEHGVRTLKELGRGYLTITQDVTRVMNRIKALYRSWAIPCAGTPVYSPRHRAEWLAKIAEPGVRVRAERLYQQLDLLQPVRLEARRELLAESHKHSAVKLLRQIPSIGPIRSALLVALLQTPHRFRTKRQLWAYSGFAVETHDSGEYRSVRGKLQRNRERMTVRGLNDNHNRDLKNLFKSAAISASTRPGPLRDFYVARVEKGMRPTMARLTLARKMAAISLTVWKKGVEFDPQQLQRHAA

SEQ ID NO: 170065 - protein, 339 aa, unidentified
MGLYTGFDLHSSNTYVGIIDEDGGRLWKKKLRNDPSLISETLRPFKKDIEGIVVESTYNWYWLVDLMMEEGYQVHLANPSRVQQYSGLKHGDDEDDAFWLAEMLRLKILPEGFIYPREQRPLRDLLRKRGHLVRLRTSLILSLQNILARNIGAKMNANHIKALRKDQVTPLLAGNDDLSLAGRVSKDAIDSLTRQITAIEVVVEKKMNLKRPYDLLLSMPGVGRVLALTIMMETGPIARFADVGNYVSYCRKVPAARFSNDKKKGTNNRKNGNKYLSWAFAEAGELARRLDPEARVYYDRKRRRTNAPIAHSALAHKLARAAFYIMRDGVPFMPEKMYA

SEQ ID NO: 170066 - protein, 341 aa, unidentified
MENCGIDLHQKSSQVTVVDQEGEVLERASIPTTRAGLERWFGRRERMRILVEASGSSPWVVRLLLELGHEVDVVDPRRVRLIAQSTLKTDRIDADILAELARLRTKLRTLVWQRSETTQRQRGHLRVRRALVEARAGFIVTVRGLLRSFGVRVASCRSDRFAARCQATAIPPELAEVMTPLLDAIHDLDARIATMDAVVEQVGHLYPAVGSLQDIPGVGPVVALAYVLSIEDPSRFRRSRDVPGYLGLRPTLRSSAATVRQGRITKEGDADVRRLLVQAAHAHLRSHADTALKSWAESLIPRIGKRKTIVALARKLAVLMHRLWITGEVYQPFPHDTAKAA

SEQ ID NO: 170067 - protein, 411 aa, unidentified
MDPVVGLDVSKGESQVQAFLDKKKPYRKSFSIDHTREGLSSLLEFLKHLKELTGQYPSVILESTGHYHTPVVQFLEEHNYLLIIVNPLISFRAKGSNLRKVKTDAVDAYVLCELYYKEELDSHKKRGIKLLNLRNLTRQHENITSNHMQTKLQFQAVLEQVFPEYNGVFGDLYSDVSLRTLQEFPASEDILNTSENQLANRISNLCTSRSQKWAYEKAQKLREAATRNPFKKTIYHSHLLSLELYIDMLLQFKEHLSKLEAQIDALAKDIEEYKVIQSIPGIGEKIAATIISEIGEIDRFNHPKKLVAFAGVDPSVFESGRFSATRNRITKRGSSRLRHALYLAVRCAIRDKRKTKTSKETFPRNKKLREFYDKKREEGKPFRLAVIACVNKLLHWIFALLKNKTTFQDIA

SEQ ID NO: 170068 - protein, 318 aa, unidentified
MDAAFETFVGVDIAKDSLDVCFLATEKRFTTTNDPAGFRQLLQDLPTVGSCLVVVEATGGYQREMVAELITAGHQVAVVNPRQVRDFARGLGILAKTDRLDAEVIARFGQQANPRPTEKMPEKQDELQQLVVRRRQLNDLRTAENNRLPLARSRSVINSIRSMVEQLQKKIRQIEKEITDLVKSDDQLQCQATLMKSVPGVGPVTAASLLAELPELGRLNRQEIAALAGLAPFNRDSGKFHGRRSIWGGRANVRKSLYMAALTARRCNPVIQAFAQRLEATGKPFKVVITACMRKLLVILNAIVKNNSTWNHKLLISS

SEQ ID NO: 170069 - protein, 348 aa, unidentified
MKIIGCDFHPSYQQIAMVDTETGELWEVRLEHEQGQARRFYEALRGQAVRVGMEAVGNSQWFEQLLAELGHELWIGDAAQIRRLVVRTQKTDRRDAEHILTLLRDGRFPRLWVPSPELRDLRQLLRHRHKLVQIRTQVKNQLQHLALNQGVRRKSRLWSLAGRAVLEQLPLRGWTARRRDELLAMLDQLEKQVGELDLAVRTEAARRPEVRLLMTHPGVGPVVGLAYALTIGPVARFPRGKQVASYLGLIPREHSSGGRQKLGSISKQGNVMMRTLLVEAAQTAARLDEELRRDYCRLAARKHSALAKVMVARKLAVRMYWMLRENKPYWQCSVARRQGSPSHSVVAR

SEQ ID NO: 170070 - protein, 428 aa, unidentified
MASETDPIAPRTWVAIDIAKGVNVVLVEHSDGRQQRFRFVHQRDDYDRLVAFLKGCASPCRIALEPTADYHRTVAYRLVSEGLDLVLVSSVAGARLREAIFNSWDKNDPKDAQVIMRLLKQGMTQRYCDPVITQTHDLQELSKTFLHISRARTRLQHVLLTHYLTLYFPELERFWTTQRNEWFIHLLMLFPTPASITAVGLSGFREAIWKPMGRRVHKEAKIAEIYALAERSIALPMSAGSPAVTTFRVQLERYLQLSEAKTAMERQADQLLADRADFQCLKTIPGIGSVIALVILAEAGDLRRFPHHRQFLKFCGLDLAKSQSGNFRGKDKLSKRGNARLRCALWMAAMSAARMRENAFRDKYTRYTAGAPDDTDLKRKARTAITAKMARVVYALVKHGQPYRQRFDVDLPSGSIPLKGAVEAFGTS

SEQ ID NO: 170071 - protein, 473 aa, unidentified
MAQRNRSLRLKPGQSRVALTITHPNAAGIDIGSAAHFVAVPPDRDDEPVREFPSFTVDLNAIADWLQACRVDTVAMESTGVYWIPLFELLESRGFTVLLVNARHVKNVSGRKSDVLDCQWIQQLMTYGLLSGAFRPAERVCVLRSLWRQRGMLLRSQGRHVQHMQKALTQMNVQLANVISDVVGETGQKILRAIVAGERDGQVLGAMKNVRVRASVDEIAKSLQGNWRAEHLFALKQALAAFDFIGTQLAECDQEIEAQLKRLEVHEGDPAKGKKRSRPRNAPKFDLRTQLFKMCGVDLTRIDGIDVTTALAVISETGADMSRFPTEGHFASWLGLCPGTKITGGKVMSGKTKRCANRAAQALRLAAAALRSSQSALGAYFRRMCARMDKPKAVTAAAHKLAADLPMLTKGQEYTDQGQAYYEERYRDAFSAIWHSAPKKWVCNSSPPNNPHETRITNQSLGRCFLRDIIDSR

SEQ ID NO: 170072 - protein, 370 aa, unidentified
MNSIIYVGMDVHKASFTLSCFSVTTQETFATVKISPDAKDIKKYLDGVSLSRSEECEFVCGYEAGCLGYTLYHQLTAMNIRCVIMAPTTILRNGKRVKTDRIDAENLARCLAYGGYKSVYIPTAQDEAVRDYLRMRDDHKLMLKKIKQQINAFCLKHNKIYPGNKSKWTQAHVKWLNVLEFDGYLQDAFNEYMITYRELADKVERLESQIEQLAELEEYRDKVKKLICIKGIKTHTALSLIVETGDFSRFQSAERYASYIGLVPGEHSSSEDQKRLGITKAGNRHMRMLLIEAAQCYSRGVPATKSKDLKSRQKGASPEVIAYADKASIRLRRKYIRMELVNKKKANVAKTAVARELACFIWGMMTDNIA

SEQ ID NO: 170073 - protein, 369 aa, unidentified
MGEQIAAFIGLDVAKAKHAVAIAEEGRTGEVRYFGEIGAEPASVRRMVAKLDKPGTRLHFCYEAGPTGYGLHRQLTAMGHACDVIAPSLIPRRAGDRVKTNRRDAIQLAKLLRAGELTPIWVPDEVHEAMRELIRSRDVAVADLRRKRQAISSMMLRYGLIYAGKKTWGPRHRQWLQAQKFAYPAQQLVLQDLILAAEHAAERLKRVETSIMEFLPKWSLAPVVDALQALRGIQVVTAATIMAEIGDLRRFDTPRQLMGYLGLVPGEDSTGESVKRLGITKAGNGRVRRALVESAWTYRHLPRTGKVKHYVHERVSPDVRDIALKAQSRLCARYRNLSGKGKKPTVAVTAIVRELAGFVWAIGRLVQTT

SEQ ID NO: 170074 - protein, 338 aa, unidentified
MKKYSGIDLHSNNSVVVVSDADDRVLYRRRLPNELGKILEALEAYREELVGVVVESTYNWYWLVDGLQAAGYKVHLANPAAMKRYDGLKHSGDDTDAAHLAHLLRLGILPTGYIYPVAERGLRDLARRRAQLVRHRTMHVLAVENVQARETGARMTSERIKRLGVQAIEALGLSQDVTLSMQANVAVIDTLNKEIAKLEKRLAQCLRPRPEHALLGTAPGIGRILGPVILLETGSIARFECVGNYASYARCVDSVHLSNGKKKGEGNVRNGNKYLAWAFIEAANMARRHCAEARRFHERKRAKTNAIVATKALAHKLARACYHMLKTGQPFDMKRCFG

SEQ ID NO: 170075 - protein, 322 aa, unidentified
MALTVLGTDISKKDFHVSLLSESRATKPKKFTNNTQGFESLYNWLKQQSVVELHAGRSATSIYGETLAEFLYGEGFQVSTVNSARVKWFAKSELLRTKTESVDAALFARFCAAMKPSLWTPTAPKVKELQALLRRLESVTEMIASEQNRLETARPNVAVLTQEHLDYLQQQQLIKKLISDHFNQHQHLKQQRELLTSIPGIGDLIASILLAEIGDVSDCDNARQLAAYAGLTPSERSSGTSVKGKTRLSCTGNVRLRKALYMPAVVEMRHNPLLKAMSDRLLGRGKVKMQVIGALMRKLVHLAFGILKFQKPFDPNYLLATP

SEQ ID NO: 170076 - protein, 323 aa, unidentified
MTRIICGVDISSQSLDARIGREGALARFPNTAEGIAALAAFCHAHQVELVAMEATGGYEQQAFALLSQQGLPVAILNPRAVRQFAQSMGSLEKTDSIDAAMIAWYAEVKNSQPACLAPQSQQHLRALVTRLRQLTDIRTAQLNQQRLVTDRAVQASFKKLLAVLASQIGAIEKQIAALLEKDPLWRQLNQAFRTIKGVADRTVARMMAEMPEIGTLSNKTISKLAGVAPLANDSGQHQGKRSVRGGRASVREILFIVASVVGRYEPDFIAFQQRLRAAGKPPKVVRIALAHKLLVRLNAKARQVRQRMVALETGRMALTVECM

SEQ ID NO: 170077 - protein, 385 aa, unidentified
MNVGIDAHKRTCTVCVIQDGAVRESFTFPTTREGVSEFMERIPSPATVVIEASTTGKVISRMLADKYLIHMVAPPERKRPIKTDRRDAERIVREDMLQYLRRCYIPSASIEEMRFLVFQQIQVGRKIGRVKNQVHALLERNMIHDLDGFSDIFGVQGLKRMVMVQLLAQEKVALARYLEELKLHAAHHRQLETELARLAESDANALLLMSIPGIDFFTALAMKGRIGDIVRFPTKKHLCSYGAVVPGASNSGEYISRHNRVKHGDMILKSALTCAVRGAVSAEKNSAVKRFYLKHSKRMGAQKAEVAAARKMACIVWKVLTTQQPYREEDKRLTARKRKILSWKAKRQDSAPSDIRQLAEDLVGDVTVLERYPVGFNQEFEGRLT

SEQ ID NO: 170078 - protein, 417 aa, unidentified
MAEEIEWFVGIDWASQSHQVCLVDARGECLGERSVAHGGPGIEELCDWLIARTGATPEVIGVAIEMTQGPIVEALLERGFCVYGINPKQLDRFRDRFTVAGAKDDRRDAQVLGDSLRTDRHAFRRLSNDEPVIVKLREWSRMADDLQQERTRLASRMREQLWRYYPQMLELADDLAADWFLDLWNQAPSPAKAARLRQTTIERFVKAHRLRRWQAPEVLRILKQKPLSVAPGVVEAASDHIRTLTVRIRLINQQLKAAHRKLDELCAQLIPSEENEPGQHCEQRDVVILRSMPGLGRIILAVLLAEVWQPLRRRDYHALRSLSGVAPVTRRSGKTCVVVRRYACNKRLANALYHWARLATQHDALSRRRYAALRQRGHSHGRALRTVADRLLSVACTLLEQQTLFDPTYEVGDAAGA

SEQ ID NO: 170079 - protein, 372 aa, unidentified
MVANFTFDEYAVQCVGIDISMDKFTACLFTYNTASDLGWWTDVIEFRNNKTGFNQLVRWSRKNANKDYPIRYLMEPTSTFHEPLAYHLNAIGCTVFLIFPAKAKEFAKYEGIRSKTDEIDARTLSTIGCTNRKLKPWTPPKPIFRKLKQMCRFNNRMERMRTELTNQQSALKSGANAEASLMNRYEALLNELDKQVENNKKLIKKTVESDSDLKERVARITTIKGVGYLTAVAIIAETDGFSLIGNRRQLASFAGLDVIAYKSGTIDTNHRISKKGSSYIRAALYWPSIAASMHNPQMKVLYNRIASKNTRTKMIAITAVMRKLLLLIFTLWKSGEEYDSKRSVSCTDVVTLSLDQMYKDEPGATLKESALV

SEQ ID NO: 170080 - protein, 417 aa, unidentified
MNEEIDTRTSRRYVALDIHKHYCVVAGVDREGRVVLQPVRVEHADLEGWLKKNLRASDYVVIESTTNAWHVYDLLVAGVERVLVANPIQVKQIARARVKTDIRDTLILARLLAANLVPEVWVPPVHVRQLRQLLSQRRQFVETHTQIVNRMHSVAHRHHLHHPAGKRFNEKNTVWQKDQRLSQIEQFQLGLEMENRVYIEKQINKIGKEVAKMSHQKPWAESMYLMQLPGFGVITGMTVLAAIGEIQRFESARHLASYSGLTPGLEQSGTKYREKGITKEGRKELRWAMVEVAQRAVKSDPHWKQRFQELQQRMHRNQAMVAIARRLLELVWYVLTRRQPYRHFSQERIAYKYLTWAWQMDDEARAGLTRQQFTRYYLMRLGIGQDLTRIALDPKHPRRISSEAELLALRPELNHIE

SEQ ID NO: 170081 - protein, 356 aa, unidentified
MQRNVAGVDTHRDSHSIVIIDPVGRVLKRFTIAATADGYNQAIAEAAGFDDVVWGIEGTGSYGRGFAGSLLRSGAVVYEVPGNLTKRHRSHASRKGKSDEQDAHAIAEVVLREGERLPRCAQSDDQDAVRLLYDRRDRCVRARTEAINRLRAGALRLALRNLPSDLTTDPALDRYDDALQSLSILSHTTRALVEEAADTIEDVRRLNSTIAKLERQLIPFVKRLVPSLVQLRGVSTVVAAGLYGHAGSLKNCRNANAFAMRAGVAPVPCSSGRSETVRVNTGGDRQLNRCLHIIAITQIRSQGHAGRAYYDRKRSEGKAHRSALRALKRQLATIVFLRLKLVPNDAQETSLNNVAA

SEQ ID NO: 170082 - protein, 348 aa, unidentified
MEHYAGIDVSLECSSVCVVDAQGRIVREGKVASEPAALTKWFKDLGIELTRIGLEAGPLSQWLYAGMSQAGLAVELVETRHVRTAFKIMPVKTDRKDARGIAQLMRLGWFRSVHCKSLPAQEMRALLTARKLLQGKLHDVELSLRGILRGFGLKVGKTTPRTFDGRIRELVAGQPTLQVMADALLAARTVLAREFAGLDKRVHLTARQDERVKLMMSAPGVGTIVGLSFVSAIDDPTRFKSSKSVGPHFGLTPKRYQSGETDVTGRISKCGDASVRAALFEAAHIILTKPVKAAGALKRWAMAIARRAGPRKAKVALARRLAVILHRMWINWTPFDADKTTSPVATKA

SEQ ID NO: 170083 - protein, 346 aa, unidentified
MSEAFDASRSLTVLEQDSTLIAVIEMSQSAWLVAAVVPGFKRQPLKKLDADAEALLKLLHRWRKEAGTAGRQIKRIAVAYEAGRDGFWLARWLRMRNVDAYVIHPTSVAVSREHRRAKTDRLDTELLMRAFIGWLRGEKRHCNMVAIPTVDEEDARRPNRERGNLVTEQTRIVNQIKAILARFGIRTFRPTLRKAEEKLEKLRTAEGMVLPHNTRAELCRYLARLGVVRQQIRAIEQGRLRQLAMAPAEQEGPHAMMRLIARVLGVGIETADMLVNEVLSRHLRDGKAIARYAGLTGSPDESGKRRREKGLARAGNARVRCGMIQLAWRLSENRARKRSGRTGASR

SEQ ID NO: 170084 - protein, 374 aa, unidentified
MKSIIYIGMDVHKKTYSLCALLKETGEIIGETKIPADVSLIIKFIENAKKSVDSDDVQIKTGYEAGCLGYSLYWQLAAKGIECDILAPSTMHRSAKNKVVKNDRRDAKNIAANLANGTYKSVYVPTDEDVEIKEYIRMMHDFKIELKKVKQHINAFLLRFGHHYLGKSKWIPAHIKWLKELELSDMYREILDEYLSQLEILSEKIERFKYRLEELSQKETYNEKIGQLRCIKGIDTTAAMTMHAETSDFDRFPTANAFASYCGLTPGEDSSGESYHRLGITKQGNSMIRTTLVEAAQVLVRGTIGKKGKKGKKVKSKQKDQDVKVIDYADKAVIRLQKKYHRMIFRGVKRNVAITAVARELACFVWGIETGHIS

SEQ ID NO: 170085 - protein, 341 aa, unidentified
MQITTVGLDIAKNVFQVHGIDAEERVVVRKQLRRGQVIRFFEGLSPCLVGLEACATSHYWARELTKLGHEVRLMPAKDVKAYVKRNKNDAADAEAICEAVRRPTMRFVQVKSAEQQAQLMQHRARDLLMSQRTQLINAMRSHLAELGIIAPQGREGVKELLAIVANDATSHLPNDARASLLVLAAQLQALQTTIGAIEKRIVVQHRADKQSKRLQTIPGIGPIGASAIAATVTNPKIFRSGRDFAAWIGLVPRQMSTGGKLKLGPISKQGDRYLRRLLVVGAVSTLRRAKQNPQKFPWITRLLARRPFKVVAVALANKMARIAWALLISDKTCRSAWFAAA

SEQ ID NO: 170086 - protein, 441 aa, unidentified
MAMRAADEEIVFPKAAGIDVGASSHWVAVPRHAADDPVREFGAMTGDLNAMADWLIACGVDTVALESTGVYWIPVHEVLEQRGLRVWLVDARQMKYVPGRKSDVQDCQWLQKLMSLGLLRAAWRPDGEVCVVRAVARQREVLITEQASWVQRMQRALVQMNIQLTEVLTDVMGVTGQAIIRDIVAGERDPKALARHRDGRVKAKTEEIIKALTGNWRDEHLFVLRQALAMYDDIGRHVAECDAKLQALLTDLGQSKVDLGKAPRTGSKLRQEFDARQILANWAGVDLTRINGRGLAAVMKILCEIGPDLSRFETVKHFCSWLGLCPGTKISGGKVLSAKTKRSANRVRQALKLAAMSLWHSDSALGAFYRRMCSRMDKPSANTAVAHKLARMVYFMLTRGEAFVDKGQQHYEEQQRQRSVAALKRRAAALGFEISPVAMPA

SEQ ID NO: 170087 - protein, 355 aa, unidentified
MSSEKYIGLDVHQATICVAVMDAKGKVVMESILETKATTILEFLAGLRGTLSVTFEEGTWAAWLYDLLKPHVANLVVCNPRKNALLKHGNKSDKIDARKLANLLRLNDLEPVYHGETGVRMLRELARSYLTIVKDVSRVMSRLKAIYRSWAIPCAGRDVYYTRHRGEWLGKIPEAGCRRRAEQLYQQLDMLQPLRQQARRELLAESRKHTITAKLRQIPSLGPIRSALAVALIQTPHRFRTKRQLWTYSGLGLETRDSGEYHYVEGQVRRRKKQVFIRGLNKDHNHDLKGLFKAAATRASVQPGPFQDFYQRSLAKGIQPTMARLTLARKIAAITLTLWKKGENFDAEKLKAQAA

SEQ ID NO: 170088 - protein, 373 aa, unidentified
MKYTTFVGLDVHKDTIAVAIAKDGREAAESLGTIINRTEAIAKLVRKLGPAKNLYFCYEAGPCGYGIYRQLTVAGATCMVAAPSLIPRKPGERVKTDRRDAKKLAQLLRSGELTPVWVPDEKQEAQRDLLRAREDTQEDIVRKRNQISKFLLRLEKRPPHGVKAWTIKYWQWLNGLDFNQAAQGIVLKEYIHALEEAEARKKRLEEEITELVKYSEQAPVMAAFQALRGVGLITAATVVAEAGDLNRFDSPKQLMSYVGLVPSETSSAGSRHQGRITKSGNAHIRRVIVESAWHYRRQPAIGAELKKRQEGQSEEIKAISWQAQHRLNLKFRRLSGRGKPSQTAAVAVARELLGFMWAIAQEIRQKNNLQKIS

SEQ ID NO: 170089 - protein, 338 aa, unidentified
MAIVGGIDVHRRQLTFDYCDRATGELCRGRIAPADRQGFRSWLSQLPPGGDFALEGCTGWRYIVEELAAAGFVAHLAEPADTAALRGNKQRAKTDRADARHLRELLMSGTLPESWIPPAHVLEARTTVRLYKDLSDERGAWTQRIHAALFHQGAETFSGTLASDLGRVFLDKADLSPAARRAVETGLAHIETLNKTLTPIKRDLSKFSLAQPGCSALREYFGIGGLLSVAIWAEMGDTRRFSSSSDAVRHTGLDITVYSSDTKRAKGHLARQGPSVLRWALYEAAKSAAKPAAPDHEYYVSVRERLGAQRATLSVARKIARWVHHRLRELGDEAFAPV

SEQ ID NO: 170090 - protein, 456 aa, unidentified
MSSKLKVKPRLSGRMLPIMHPDAAGIDIGAEEIFVSVPPDRDIDSVRRFDTFTRDLFALTDWLRQCNIRSVAMESTGVYWIPLYQILETHGFEVFLVNAHHVKNVPGRKSDVSDCQWIQYLHSVGLLKASFRPPDEICFLRCLGRHREGLVQMAAEHIQHMQKALSQMNLQLHHVLSDIVGVSGIAILDAILAGERDPVKLASLCNRRIRSSRQTVAKSLEGDYRPEHLFALRQSLSAYRFYKQLMAELDFELEQNMRKLPGAAHALHKRPVGTKKRIYQHAGNEPSFDLKEELFRIAGVDLTDVPGISTLTAHTILMEVGADVSRFRHASAFASWLGLCPEKQVSGGKVLYTRTRKVKNRAAIALRLGAHCLYHAQNYLGDFYRKMKWRLGAPAAVTATAHKLARIVYHLLSTRQPYSDEVFSRCDQQASVRAEKRLRKQAAELGFQLAPINETT

SEQ ID NO: 170091 - protein, 355 aa, unidentified
MKQFFGCDAHKHYSVFVAMDENGKKTKPVRIPHDLDTYRRFLAQLPERSHIAIEATGHWYWMVDEMERARHIPHLTDALEAKKRVGKTHKSDPIDAGGLSLLLRCGTLPEVWIPPAPLRDQRELLRTRMALRDLRTALKHRIGAAIDRYNLHSQGFSDLFGLRGREYLNTCLAKLPPITASMIVVQLDAFDQLEVKIEALEKRIRAEIAPTPAVQRLMTLPGVGETLGPVIAFEIGDVARFSRAECLASYAGLVPRLISSGDRVRHGHTPEKKINPFLKWAFVEAAVCSLHPAGPRYAHVKSLFARLAPTKGFGRAVVAVARHLAEASFWVLSKHQDYRPPQPPRLALAASRGSR

SEQ ID NO: 170092 - protein, 342 aa, unidentified
MAAIGIDTHKATLAACAIDDVGRPIAEATFDNDPRGHDTFVAWARAVAPEATIGIEGSSSFGALLARSVQGAGLCVREVPPHLSRAERRRTRQPGKSDPGDALAIARVTARETNLPPIRLPDRSTELRLLLEAREDLVAEATRARNRLHAHLLVLVPGYGGTVANLVAARHRTTVGRLLRGNHTVQAELACVLLHRLTGLEREIEAFTRRIGALVEGHPLLGLPGAGPITVARLIAEVGDVRRFRSADALASLAGVAPVPASSGQVQRMRLNRGGNRQLNRAFYVIALSQWRFHPPAKAYVARRMQADHKTWQEAIRALKRQLVRPVFRLLVEGADALGAAA

SEQ ID NO: 170093 - protein, 364 aa, unidentified
MKKISTVKIKSQAASKKVTIGMDLGDRSSRYCMLDEEGVVIGEGSTPTTTAGMAKVFGAMARCRIALETGCHSPWVSRQLQGFGHEVIVANPRNVRLIGESTRKDDRLDARTLARLARIDPNLLSPVRHRGAEAQTHLAVIRARRVLVRARTILVNAARGLTKSFGERLGKRGAGQVGPTLAAELSPEIRAAVSPLLAEVEALNQRIAAYDRKIEQLAKEHYPEVERLTKIKGVGTLIALTFVLTVDDPSRFQKSREVGCYMGLRPGRRNSGKSEPQLHISKEGDRYMRTLLVQGAHYILGPFGSDCDLRRWGLKMSERGGKNAKKRAIVAVARKLAVLLHKLWVSGEAYDPLRNSRQVAAHAA

SEQ ID NO: 170094 - protein, 356 aa, unidentified
MVMVLGVDVHKDTHTVVAVDEVGRADGERTVRATDTGHRQLLDWARRQVPQDRMWAVEDCRHVSTRLERALLAAGETVVRVPPKLMAGARSSARTRGKSDPIDALAIARAALREPDLPLARHDDTSRTLKLLVDHRDDLVIERTKMANRLRWHLHELDPELDVPARGLNRLNLLDRLITWLAEQSRPDRLGQVLARLAAELLTDIRAATVRINALEREINTLARQAAPRLMTLPGAGGLTTAKIVGETANITRFRSEACFAMHAGVAPIPASSGRTQRHRLARGGNRQLNAALHRIAITQVRITASPGQLYYQRRRARGDTAMEALRALKRRLARVVFNLLQADTTIAINDLSTAA

SEQ ID NO: 170095 - protein, 356 aa, unidentified
MISSRVVNVPKIIVGVDTHKEEHVAVVIDKVGARMGQLTLPTTNMGYVALERWARTLGEIEAFGVEGTGSYGAGLTRFLRGQGHTVIEVNRPDRSTRRRLGKSDPTDAEMAARSVLAGVARDQPKSGVEDVEMVRMLKSTKDSAMKGRTQAINQMKALVVTAPVELREVLRGLTSSRLVARCSGWHRGQLDTPTTAAKFALRSLARRYTRLTEEIKDLNKELARLTVAFAPMLIDSLGIGPDTAADLLVTAGSNPERLKSEAAFAALCGVSPIPASSGKTNRYRLNRGGDRRANAALYRIVIIRLRYDVRTRTYLERRTSEGKTKTEVIRCLKRYVAREVFGILHEIGMRHTFQNA

SEQ ID NO: 170096 - protein, 338 aa, unidentified
MVLIGIDPHKATHTAVAVDTEEAALGELTVKADCHQVERLLKWAIDFPERRWAVESANGLGFLLAQQLVAAGEDVVDVPPTLAARVRVLGSGKTQKNDPNDALSTAIAAMRAKRLRSVVAENYGGVLRLLVDHHHDLGSLRTQAVCRLHALVRCLIPGGTGLRLSAARASVVLRSVRPTNAVDAERKRMALGHVADIRRLDAEIAASKARIVTAVAASGTSVTELYGVGPVVAGFLIGHSGDMARFVNRDHYASYNATAPIEASSGPRVRHRLNPRGNRRLNHAIHVIAICQIRHPGEGRRYFDRKVAEGKTTKEALRALKRQISNAVYRQLVNDSTR

SEQ ID NO: 170097 - protein, 488 aa, unidentified
MESMNTRRPATNSCRKSLEDFSETFERDGALWSNNEYSVVVHTLDLTIRPSQDQSQRVLNIKESTMNTEQPELGAYIGLDWADVEHAVCLRVAATGEVRKYTVQQQPEKLHSWIISLLNEFGDSKVGVAVESSRGGLVYALMQYDFVIVYPINPKTLAKYRESTCVSGAKDDPSDAALLMDLIWRHRDRCRPWCPDTVETRAIQMLSEHRRKLVDDKTALTNRLEALLKGYFPQALEWAGALDTVQACDFLSKWPSLQSLQRSKPAQLRKFYLDHGCRRGEIIEKRMKDMRDAQLLTEDPAVIQASVLMVQATVDTMRPVCAAIKRFDDELAAAFQQHPDHELYESFPGAGPVMEARLLAAMGSDRSRFETAEEIQKFSGIAPVTRKSGKMHYVHRRYACPRFLRQTFHEWARITIGFSDWARCYYEYQRSIGKRRHSAIRALAFKWIRIVFHCWKERVPYSEDLYLASIHRDKPTWAVRTGLVKKIA

SEQ ID NO: 170098 - protein, 339 aa, unidentified
MNILKQTVGIDVSYKTFDARFGTIDPQQNTIISQAKSFKNSPAGFKLFLRWIKILIVSHDVPLIFVMEATGVYYEHLAHYLLKHGCHVAVVLPNKVRNYAKSLESKSKTDPLDAAVITRFGLERQLSLWTPPSETLKTLRDLCREYHCLKTNITQIKNQLHALNASFKPHRESFKRKTQLLKFLERQVALIKKELHALVKTEPDLAQRLKKIKTAKGLGDMTILTVLAETRCFELVTNQKQLASYAGFDIVFNDSGLKKGKTSISKKGNSFIRKALFMPALSACRANPRMKELYLRLVSKGKNKKLAIIAVARKLLLLIYTLWKSNSVYIPNYKSIQLV

SEQ ID NO: 170099 - protein, 297 aa, unidentified
MQTQVTKKIDFKDQNLFVGLDVHKKSWSVTIIVDGIEHRTFTQPPDPGSLCNYLHRMFPGASYHSAYEAGFCGYGIHRELNFLGIKNIVINSADISTTQKDKLQKRDPVDSRKIARSLEKGSLHAIHVFDRELEELRTLNRTRFYLMRDLRRSKNRIKSFLQYYGEPIPEEFDNNQWTLKFVSWLKQVKMKTISGQDAFSHLIESYEHHRGQLVDVSRLVRQRIREYDNELYSLLKSISGIGPLTSSALITELGNINRFNNIDQLSSYVGFIPRIRESGETTHTGGITFRCNTFLRT

SEQ ID NO: 170100 - protein, 355 aa, unidentified
MDNRKYIGMDVHKEAIAIAVLNAAGKLVMESIIETKANTILEFLKGLRGELHLTFEEGTWASWLYDLLQPHVKRVVVCNPRRNALLKEGSKSDRVDARKLAELLYTKMLRPVYHRDNGMRAVKELARSYVTISKDQARVMTRVKALYRSWGIACSGKQIYTVRHRASWLGKIKEPSVRRRAEFYYQQLDGLRSVRRQVRRELLLESGKHKASKLLRQIPSIGPIRAALLLALVQTPHRFRTKRQLWTYSGFGIETHDSAEYRYVAGQLERSKKPQQVRGLNRNYNHDLKNLFKSAATNAVAKSGPLQEFYLALVKRGIRPEMARLTVARKIAAITLAIWKKGVSFDAEHLKQQTA

SEQ ID NO: 170101 - protein, 317 aa, unidentified
MEVSLIFVGIDVCKAQLDVAIRPSGEEESFANDKVGIKALVKRLAKIGPTLIVLEATGGYERQVTRALVSADLPVVVVNPRQVRDFAKATGQLAKTDSIDAAVLAHFAEALRPALRPLPDAVTLELRALTARRRQILEMIAAENNRLAMTSKAVRKHIDAHVHWLEQGLERVEKDLDRSIKQSPIWKENEELLRSAPGIGPVTSHTLLAELPELGTLNRKQISALVGVAPFNRDSGSLKGRRSIWGGRAPVRCALYMATLVATRRNPVIRDFYKRLKAKGKPFKVALVACMRRLLTILNSMIKHKTYWSETFSLQTT

SEQ ID NO: 170102 - protein, 459 aa, unidentified
MNRKQRREMMRKMQSEDLSLEVVHPHAAGIDIGNQSHYVAVPVSLDPQPVRCFGCTTAELKKMGEWLTQCGIRTVAPQSTGVYWIAVYDILEEAGLELYLVNARETKNLPGRKTDVQESQWLMKLHTYGLLRNSFRPSQEIRTLRTYWRQRQDLVRSSGRHIQRMQKALTQMNIQLANAISDLSGVTGQAILKAILNGERDPRELAAYRDCRIEASEEEIAQALEGNWQADQLFVLRQEQAGYEFCQKQITECDQQLAHYLAQLQDRTQGATLPEETRKGRRKKKKGNPQFNLREELFRMTGTDLTQIDGIDVMAAMTVVSEVGWDMSKWKTENHFVSWLKLSPDNRISGGKIIGKGRMPTNNRATTVLRMAASTLLTSESYLGAQFRRFRTRLGPPVATKAMAAKLARLLYRMLRYGMKYVDQGAQFYEAQHRKQQVIHLRRKAAQLGLQIIELAPAA

SEQ ID NO: 170103 - protein, 412 aa, unidentified
MELIVERPAALDVHKAQVTACVRIPDAHGHREEHIAEFATTVRGLLRLRDWLAAHRVQQVVMEATGVYWKAPWAILEDEFDCLLVNARHVKQVPGRKTDVSDAAWLCRLAEAGLLKASFVPPKAVRQLRNLTRYRKTQIQERSREVNRLHKALEDAGIKLDCVAADVLGKSGRDMLDALVAGTTDPEVLAELARRQMRKKIPLLREALEGHFDAHHALWIGAILAHIDFLDEHIDRLSNAIEEQIRPFAAAVELLCTVVGIQRRGAECILAEIGTDMTRFASARHLASWAGQCPGNDQSAGKRRSGRTRDGSKWLDFALEEAAMAAIRVKANYPAAQYQRLKPRRGHKRALGAVKHTLLSAIWHMLSTGETYRDLGADYFTQRDPERQTKRLVKQLERLGHTVTLAERAAAA

SEQ ID NO: 170104 - protein, 412 aa, unidentified
MRRSKGRVVGLDVHPDSFAAAVVEGSDSASARVLSSSTRVELKGMEQWALRHSGQGDVLVMEASGNAFAVAKRLRVFGRNVEILDSHRAGKVGKVYCANDRMDAVKIARIYLSGLSPIVWQPDGQTLERREVFSAYQAVVKEATRAKQQLRAMLNEHCVRLEKGFRLSHPGAITRLLKLREWTPARVLLLKQLHAGLVVARARRTTLRRHMANEIVADEDLLPGLTRLCGISLITLYGLVAAIGDVRRFSHSKKLVAYLGLNPSVSQSGQFEGGGALKRHGRGPLRALLVQSAKKLLEVNNPLRKWGLTVAARRGRNKAGRRRSAQTLRGRLACAHGSRHRRDRTARHAPDQTEQTGHRARTRRPPRLRLPQQSRLCGEETLSAQKLPLRSKACSRGTENLMRYLTYKQHLT

SEQ ID NO: 170105 - protein, 427 aa, unidentified
MKKADLLSTLFVGIDISSRENVVALLDFESSKPILSFAVANNQPGAVDLAQKLADFLSSHRDLSRLMIALESTSFYGIHIANYLSSCQLLMSFHTAVYCVNPKMIANYKKSFIDLGKNDYIDAFVIADFARVGRITTHPWRGSQFLALQRLTRHRLHLAKSLTREKAYMLSNIFLKFSEFSLLDEEAQPFSNNFGATATSVLTDFLSTEEIADMPIDTLISYVCEKGHNRFPDPKKTASLLQQAARNSYRLDKCLYEPLTISIASSLNLITTYMAEMKSVNKAIEKTLKGLDPNAYQCLLSIPGIGPVMAAGILAEIGYIEAFKSQDALAKYAGLVWRENQSGQFAAEDTRLSKAGNAYLRYYLIEAVSHVKNHCGEFAAFYQKKYDEVKTHQHKRALALTARKFVRLIFGLLAKHQLYSQSGVSQS

SEQ ID NO: 170106 - protein, 321 aa, unidentified
MTYVGIDVSKATFVVAYSSAKNSKTKTFKNTTKGVHEFIQTLSANEHHCVLEATGNYSSLLVYLLSRANITVSLENPLKIKNFARVMLSVTKTDETDARLIALYGERMQPAPYKLRSDAILTLKQKRTVIRQLKKQLIATQNLKGSMEALPFFDPKCKKAIEKTIVFLEKQTKGLEEELAALAQSEYKKQIDLLTSIKGIGVTLAAALIMATGGFTYFDNAKQLTRYLGLSPTYQQSGTSVNVKGHINRNGDSSLRGQLYIAAMASLRCNAECKACFDRLRSNGKPGKVAVVAVANKLVRQAFAVVTQEKPYVDGFKSEKP

SEQ ID NO: 170107 - protein, 376 aa, unidentified
MEHDSTLYVGLDVHKDSITAAYALGAGEVELLGKIGTTKSDIDRLCKRLQSKARHLRVVYEAGPCGYGLYRQLVQKGFDCTVCAPSLIPRKPGERVKTDRRDAIKLVRALRAGDLSAVYVPSVEDEAFRDLSRAWVSAKDDLKRARQRLKAFLLSHGVHYVGRADWGPAHRRWISQYSFGNAWQQLAFEEMRRTIEDRLAQCDRLEAALREAVVNWRFYPVVLALQTMRGVQFTTAVGVLAELGDLSRFAHPRQLMAWLGVTPSEHSSGEKRRQGSITKNGNSYARKLLVEAAWSYQHPARVSPDIQRRHEGIPKPIVDRAWDAQVRLCRRFRKLVARGKQKNIAVVAVARELSGFIWDISRLAMSLAVPHEARPT

SEQ ID NO: 170108 - protein, 362 aa, unidentified
MFRPHTLYIRIRIVRKVSEPAFAMKDQDVTDVIRRKQQTAMKYIGIDVSKATFVVAYSSDKGGEIRIFNNTTTGIKQFIGALPKDGSIHCVMEATGNYSALLLYMLNVARITVSMENPLKIKNFARAMLSTVKTDKIDARLIALYGEKMNPQPFKIQGEAILRLRQKRTVIRQLTKQITAMSNLRGSLACLPVPDKGATHTVDETIKFLEKRRDRLQSELTDLVEVEFSRQLALLTTIKGIGITLATALIITTGGFTYFQNAKQVSRYLGICPTYEQSGTSVNIRGHINRNGDAYTRGLLYVAAWTASRFNTKCGETYTRLRQNGKPGKLAMIAVANKLVRQAFAVVTHDKEYVDGFVSNRP

SEQ ID NO: 170109 - protein, 338 aa, unidentified
MKLYAGIDLHSNNSVIVIYNPLDKKVVFKKRLPNDRDEILSALEQYKSNLECVTFESTYNWYWLSDLLHKANYTVKMANVSAMQGLKYKKHTNDFTDALWLADMTAANRLATGYIHPSEQREQREHIRQRMKLVQVHTKVTLIMQSMLTRYANVTFNSNALKSMDELTLAKYIASPDLSGCFLEQQKVLQQLSISIQNLEKQSLKMVKGCPKFQGLRSISGIGEILSQVILFETGPVNRFKNAKHYASYCRKVNTVRESNGKNKGQNNRKNGNQYLSWAFNEAAVHAIRSNPIIKKFYQRKCAKVHKVSALNAVAHKLALASYYILKDGVIFDVNKAF

SEQ ID NO: 170110 - protein, 365 aa, unidentified
MQKISTMQASGKNIFEGQLTIGLDLGDRSSAYCVLNEAGEIVLEHKLATTPEAMKQVFGSLPRCRISMETGTHSPWVSRLLTALGHEVIVGHAQKVRLITKSRRKDDRLDARTLARLARIDPELLSPVKHRSAQAQLHLTELRARAVLVSARTALVNAARGLVKSYGERLRKCGTQQFRRETTSELSTGLREALEPLLREVESLNERIQEYDRRIEKMAKQTYPETALLKQVKGVGDLIATAYVLTIEDPHRFRKSRDAGCFVGLQPGRRNSGESEPQMRISKEGDEYLRTLLVQGAHYILGPFGKDSDLRRWGQKLSARGGKNAKKRAVVAVARKLAVLLHRLWVSGEVYEPLRNSQKAMSAAA

SEQ ID NO: 170111 - protein, 372 aa, unidentified
MNTIAYIGMDVHTTNYTLCAISENSNNFYGRVTVPPEFKELERYFKNLHEKKGITHFICGYEAGCLGYYLYYALTEHQWKGFSVECLVIAPTSLPMPKGGRIKTDTRDALMLAQSMFNGTCSYVYIPDQSDEAVKEFIRMRDDTQQQLVQTKLRINAMCLRQGYDYKEPSRWTQKHLEWLKKLQFKEKLFRETLDEYLFTLNQQTESVARYDRRIEELAQAKRYNERVRMLCCLKGIGVHTALSLLVEVGDFNRFPAAKNFSHYLGLVPGENSSSTSTHRLGITKSGNNHLRWLLVEAANCYSRGNGLKTKAMKAKQEGCPKEIIAYADRAALRLRKKYVRIQLRSKACIAKVAIARELACFVWGMMTGHTA

SEQ ID NO: 170112 - protein, 346 aa, unidentified
MNKTDYGGIEVSAEKLLVALERDGARQPQREFTNTPSDHAVLCRYLLRAGRTVRVCLESTGVYGLDLALALSGHPGLQVRGANPRAVRHFATALMPRSKTDPLDAEVLREFAQRMPFQPWRAPSPAALALQALARRLAALTELQKQEKNRVHAARVSETTPAAVLRDLQRSLRSQCRALARLTREALQLIAQDPELQLRFQLVLSTPGIAETSAVQILAELAVLSPNLQVRQWVAHAGLDPRQYSSGSSVHKKTRISKTGNRHLRRGLYMPALVAVRHDPHVRAYYEHLLARGKLKMQALVAVMRKLLHAIYGMFKSRQPFDGSKLYRLPGEPSLLQPTFSTGEAA

SEQ ID NO: 170113 - protein, 504 aa, unidentified
MKTKPSSQQPAASIYRNQNALLRALFERASDPRKVLCVALDYAKRKHVALCCDGNGDILRKPFAVDNTVEGVAFLSEQISATARRRKIPKCDIFLGGEDEPSYVANFTQALRARQYLVLRVNAAEAAENRENQIASTDLLDLLGIAKTLLSRRARATGPVVSAGAKGKNAAEDIYFEIREITRSRRNLVRQQTAASNRIHASVDQLFPGFLDHAKSGLTAFCEASMALMKERFSATEIARRRPRTLAAFLARHGVRAPDEIAAKLIALASGALPPAPHRLAALQGSLAATVDLRECLARNANDLRQHAAILLASTPYSMLTSIPGIGFTLAAGMAGELGAPIRLSPVDSLCAYAGIVPHTFQSGGPDQPACQGHPPARCNHILKDWTVQSAQKIHLYGPPELKDRITRWNANGQHGIFAGARRYLRLLRSLVLNQVPYLDPRSRASTASDQDRADAALQAWLILIHKWRTIPDGIALISKESNPLGFWRCLVMESRAVHLPLRP

SEQ ID NO: 170114 - protein, 462 aa, unidentified
MTVPKTKGSRTKATPLPTSLPAIRPLVAGLDVGSSEHWICGPARADGQPNVRGFGTTTDQLQALADWLAEQGVESVAMESTSVYWIPIYELLESRGIEALLVNARQLHNVPGRKTDVTDCQWLQLLHSCGLLRGSFRPSEAITRLRALQRQLANLVAERTRCVQWMQKALDQMNVQVHRAVTDLTGTTGLAIVRAIVGGERDPARLALHRDYRCRKSAAEIARYLTGTWRDEHLFNLTSALRLFDALEAEIAAYDAQLLTAVESLQPPDRQADPVPPHPNPAKEKAIKARGEQQARTTLWRFAGVDLTRIDGISAGAAQVVLTEVGPDLAAFPSEDQFVSWLRLCPRTPISGGKPLKKRRNGLGANRIAGVLRMAATSLQRSKTALGAAFRRIARHKGGAVAVFATARQLAQLIYRMLRYGHDYVDIGEQAYDQRFLVRRFAALTESARSLGYTLVPTAATE

SEQ ID NO: 170115 - protein, 341 aa, unidentified
MHISVLGIDLGKNSCSVVGLDGSGKVVVRRRMRRETVIAFAAKLPTCVVAMEACCGAHHMGRTLAVQGHEVRLMSPEYVRPYVKAQKNDDRDAEAIAEAATRPTMRFVELKSEEQLDMQTLHRVRDRLIGERTSLMNQIRSLLLERGHIVPQGRAKLTARLTELLDTQEPLLRPRIRLLIQDMRERWRALDQRIASLDAEFAEQARSDDRARRLLTIPGIGALNATALVAAVGDANTFGRGRDLAAWLGLVPRQATTGGKPRLLGITKRGSRYLRKVLIQGARSAMPTLRKSETQLGAWLRGLLARSHPNVAVVALAAKMARIVWALLRHERTYQPIALAV

SEQ ID NO: 170116 - protein, 358 aa, unidentified
MKEETAGRPGVIGGVDTHKDLHMAAVVDEHDRVLGSGCFATTRHGYKQMLIWMRSFGELLRVGVECTGTYGAGLLRYLQQAEVRVLEVTAPDRSDRRKRGKDDTLDAENAAHAAFAGVRTVTPRTRDGMIESLRVLKVCRKTAVAARRVALQVIHNTIISAPDELREALRTMTRMQLVRTLAAWRPDLTDYRNLVSAYRITLKSLGRRYLELHDEIADLDVMIAALVNELAPDLVSRNSIGYESAAQLLLTAGDNSERLQSEAGFAALCGVSPVPASSGKVTRHRLNRGGDRAANSALHIIAIGRLRTDSRTKVYVERRVSEGHSKLEAIRCLKRYIAREVYYVIRQRNRQIGQVQVA

SEQ ID NO: 170117 - protein, 342 aa, unidentified
MDHFAGLDVSVKETSVCIVDDTGRIVREVKVASEPDALLQVLSKPAYHFKRIGLEAGPLSQWLFSALAEAGLPVICVETRHMRAVLKAQINKTDRNDARGIAQMMRAGLYRVVHVKTLRSQKLRMLLTHRKLLQSKAIAIENDLRGTLRNFGLKVGIVGRVKFEARIKELVENLPDLTVMVEPLLVVRRVLREQLGILHRRLLAIVRNDEVCRRLMTTPGVGPVVALTYRATIDVPARFRTSKAVGAVFGLTPSKYQSGEINRTGAISRCGDPMMRVMLYEAAQSMLRSAKWSWLKAWAMKIARHRGMKKAIVALARRLAVIMHRIWVDGTEFRWTQDIATA

SEQ ID NO: 170118 - protein, 313 aa, unidentified
MSQNNPNILYVGLDVAKLSLQLHLAGRFHLLANDAKGHAQLLKRLRGHPHAHVVCEATGGYEQAVVRALQSAGVPVSIVEAGRVRYFARAQGQRAKTDPIDAAVLSEYGTTFQPAATAPASPQQQQLADLAQRRRQLIHLLVSERNHAEHYTDSFRVRQSRQLVKALEKQITQCDEAITTLIAQDTELARKAERLKAIPGVGPVVAATMLAEMPELGKLTTQTAAALAGVAPYNRDSGGQNGVRRINGGRAAVRCALYMATLSAVRHDRILKEFYLRLRAAGQKPLVAMTACMRKLVILMNRLLKNNDFQLAS

SEQ ID NO: 170119 - protein, 427 aa, unidentified
MKQEAPEQQEFGAYIGLDWADRTHVISLRGTDSGKVEHYQLVHKPEALAEWVSDLQRRFPGQRVAVALEQARGAVVHALMGYDFLVLYPVNPKTLAKYREAFSPSGAKDDPTDADLLLELVTLHRDKLRAWLPDDELTRTITLLVEYRRQLVATQTSLSNRLTSLLKLYYPQALAWAGELTTVQACDFLQRWPTLAQVQQAPPAKLRQFYLAHGCRKADVIEQRLQEIKLAQPLTRDGAVISASVVMVQATTTQLRPLMEAIARMEKQIAELFRQHADHDLFSSFPGAGPVLAPRLLAALGADRGRFAAATEVQQLSGIAPVMERSGKTCWVHRRWACPKFVRQSFHEFAGQSIRWSTWARAFYDQQRQRGNGHHAAVRSLAYRWIRIIYRCWQMRVPYCEETYCRALQRRQSPLARVLAAPMQNAS

SEQ ID NO: 170120 - protein, 304 aa, unidentified
MNGIGIDVSKRQLDIGTTDGETLQVGNNRSGFSELDVWLKKRPTSQIVLEATGGYEQPVLDFLHKAGHPVVRANALRARKLAQGLGQIAKTDRLDAYALAQMAALVKLPPYQPLQSWQQKMREFVRARRQAMDALTIARQQQEMVLDRELRRLLQGNITRLQTLVERLGKQIVEQVGQQPQLKMLKSMKGVGPVLQAVLASYLPELGRITGKRIASLVGVAPMSHDSGTMRGKRSIHGGRAEIRQVLYMAAMSAMRHEPRLRDFYQSLRARGKEGKVAIVAVMRKMLVILNARVRDAESGLVPA

SEQ ID NO: 170121 - protein, 344 aa, unidentified
MKITTIGLDLAKSVFQVHGVDATGQVMVRKSLRRSQMLAFFAKLPPCLVGIEACGTSHHWARELIKFGRDVRLMPPAYVKPYVKRGKTDAADAEAVCEAVTRPTMRFVPVKSPEQQAALSMHRTRDLLVKQRTQLINMIRGLMAEFGVDIPKGLERALLLARQIVEDNAPEVPFEAAKIVGTLSQQALDTHVRLREIDRDLVVWLRGNDVARRLMTIPGIGPVGATALAASVTDPQQFRSGRQFAAWLGLTPLQKSSGGKERLGRITKMGDKYLRKLLIVGMTSLVRRAKYSPGKIDPRLVDLLARKPIRVATVAMANKTARIIWAIMSRGEIYRTGHRPVLAA

SEQ ID NO: 170122 - protein, 388 aa, unidentified
MLPSIHHASTEQTASDSPDLTLYASLELSRATWLLTCLLPERDRMSKYSTPGGDGGALLGLLERMRARAQQLTGRPAKVVMIQEAGLDGFWVHRLLEANGIESHVVDPASIAVPRRRRRAKTDAIDGETLLRTLLAWTRGEPRVCAMVVPPTPEEEDRRRVCRERAILLQERIRHTNRIKGLLAGQGITDFNPLHKDRRQLLDAARTGDGRPLPHQLKAEILREIELIELLLRQIADVEAAREVLAGPKAAKAPSPVVLLEQLKGIGPEIASVLYLEGLFRSFGNRRQLAAYAGLAPTPWRSGTVDQEQGISKAGNPRLRSTMIELAWLWQRHQPASTLSRWFHTRVGNERGRIRRISIVALARKLLIAVWRYVTQGEVPEGAVLKAA

SEQ ID NO: 170123 - protein, 358 aa, unidentified
MKKQILKLSLGVDVSKDNLAVCLCRLTASLTKEFEDPFEVSNDQRGFKKLVNWLAKNAGSPEDISIVMESTGIYHEALVYHLYDKGFPVSVMQSGRVKRYAQSLNQRSKTDALDSRMLAMLGCERELALWTPPDPMLRQLKGLSRERSFLLKEKQMEQNRLHAVEHSVYKSNPELKRYGQRLKLIEKQLLEIEKEMKLLVESDPQMNQRIKHLESIPGISFKSAATVIGETLGFTGFTNAKQLTSYAGFDVVLKESGAYKGKTRISKKGNKHIRRALYMPAMSAIQWNPTLRKFYERIKPHKVKPIIALVAVERKLLVLMFSLWKNEIDYDPKHEQKKTARTEVLAAQDRSNLALTTS

SEQ ID NO: 170124 - protein, 323 aa, unidentified
MDKDIKYFGIDISHLVFDVTDSDGNYHQFKNNSLGFRKFSKLLGTDSHCVMEATGYYHYQLAYHLLESGMRVSVENPLAVKRFIQMRLSKIKTDKSDSRLICEYAQQVAPKPWKGNSRHQMECLQMSRLLDVYTKQCTMLKNKVHGEEVLGKPNRAVVRSLKRSLKHIEKEMEGLERELLAMVRKVHGDVLARVRTVPGIGMKTGLALVVLTDGFERFTSGSELCSYAGLTPVTRKSGSSVNGRSRISKMGNRKLRNLLFMCSFNACKYNRACREIYERIVAKGKSKKLALIAVCNKLLKQAFAIAKSGRVYDERHRSALVEN

SEQ ID NO: 170125 - protein, 345 aa, unidentified
MKIIGCDFHPSFQQIAMVDTESGETTERRLLHADGEAQQFYESLSGPVLVGIETSGNTLWFERLLEKLGHQLRIGDATAIRAAAPRHQRCDPRDARNVLQLLLEKRFPTIWVPTLAERDLRQLLKHRHTLVQMRTRAKNQLQHIAMNQGMQKKRQLWSKAGLEQLKSLALEPWTKRRRDDLLKILEQMDSHIAELSKAVEAEAQHWPQAALLMSHPGVGPIVALATVLTLGDVSRFARGKHVASYLGLIPREDSSGEHRRLGSITKQGNSFMRFLLVQAGMSAARGDAELGRVYKRLAQRKHHGVAKVAVARRLVLRLYWMLRTNRRYPEVVRMQGSSSHPVAEV

SEQ ID NO: 170126 - protein, 432 aa, unidentified
MKEAPLGGGRCTPAEGRKMKRIVERCCGLDVHKKSVTACVRVPAESGGSHHQQVREFATTTRGLLQLRDWLSSFEVELVGMEATGVYWKPVYYILEDDFELWLLNARHLKNVPGRKTDVKDAEWICQLVEHGLVRPSFVPPKEIRELRNLTRYRKAQIEERTREVQRLDKVLQDAGIKLSCVATRVLGVSGRAMLDALIEGTTDPEVLAELARGKLRSKLPALRDALAGRFSPHHALMVGKIVAHIDYLDESIADLSADIERVIAPFSDKVELLDTIPGVNRKLAETIIAEIGADMSQFPTHRHLASWAGMCPGNEESAGKRRSGKTRKGSKWLRSALTEAARAAARSKGTYLAAHYARLKGRRGSKKAAVAVGHSILVIAYHILEREVPYEELGEDHFDQRRSNEAYAKRLVRRLERLGHKVALEPLPQPA

SEQ ID NO: 170127 - protein, 422 aa, unidentified
MSKKRNKVCGIDVHKRFLVASILDNEGNCETKRFEQDLDELILLKNWILDSGCESVAMESTAEYWRPAYGILNPEINITIGNAYHMKGIPGKKTDVLDSQWIAELELNNLITPSRVFTGDLYELRTLTRARNKMVNNSTVFKNKILHQLDVCSIRLCTVLKDVFGKSGYALLKGIVERKTQDEIIKALPAKTRKIAPVFFEQIPEYIPDSAIFLIDSMLKIYDNLQVEIKRIEERIKFYLKDKENELRILMSVPGIGIVIGSNLLAEIGDIRDFPTADKLAKWAGLTPSVYQSANTNYTGPITKQGSKYLRWALIEAAHSAIRRPGKLNDYFNGLLPRKGYKKAIVAVARKILRIVWHLLINNEIFEDGIPRVKTVKIPKFPEKIERVGIAKIIQLLSRGAEIIVQEEGKEIMRINGSSQPT

SEQ ID NO: 170128 - protein, 427 aa, unidentified
MEVIYPKACGVDVHKSFIVAVICDSTSITPKYLKKRFSTFNNSLVQFRNWLLENDCCNVCMESTGKYYIPVYNALEDFISNVVVANPKWVKCIKGNKDDNKDAKWIADLFKLGIVRSSFIPSKDFRVLRELTRYNYKLTCNRTSEKNRFTNALTVGNCKLDMVFTDIFGKSAQSIINIIMNNDSFSDEDILSCLRKNCKSSNEDILSSVNGISFTNEQKLRINIVQDHIDYLNNQILKIRSIIDDFITPYESYISLLSTIPGVDRNSTITILSEIGIDMSQFSSHYRLIAWGGLAPGCNESAGIKKSVKISRAGVYLKPCLVEVAHCAVKDKNNPYYAHKFDKISKRRGKKRTYVAIARKILVAIYHMLSTGEVWNPSDLASVETPVKDRIKYTKNNFLQSTKQLFSLGLTSEEILDLINQNAILTT

SEQ ID NO: 170129 - protein, 347 aa, unidentified
MLHVGLDLSRNRLDVCLLGDDGEHLDQLAVAPDPDSLRTLARRIEEVYRQPVCAVIESMTGARIVHDTLEQEGWSVEIADAQKVKGLAPLAVKTDRIDSKVLAVLSQRDLVPAIWLPDPAVREERELARFRLHLVKHRSMLKHRIHSTLINFGRPCPVSDLFGVEGRELLARLEVPEPWRGNVVASLALIDDLEVQIAEANTRLKDGHAEHPYIPLLISAPGIGWVLAFTIAAEIGEIERFPSPEKLTGYTGLCPRVVQSGESDRRGPLSKHGPTYLRWALIEATMHALKHPAYAERYRRNKRRLGKQRGAKVAQIDVARRLAHAIWHMLTRNEEFAPRGAAFRLAA

SEQ ID NO: 170130 - protein, 451 aa, unidentified
MKTTKSRGAANAAQITVVHPHAAAIDIGAQFHVVAVGPERDPEPVRSFRSFTQELHQLAQWLKQVEVTTIAMESTGIYWIPAFEVLEAYGFEVVLVNARDVRNVPGRKTDVNDAQWLQKLHAYGLLRASFRPRHDIATLRAYLRQRERLLEYAAAHIQHMQKALMQMNLQLHHVVQDVTGVTGMKIIRAIVAGERNPEELARHRDVRCRASIETIRDALVGHYQDEHVFELTQAVALYDFYQTQVKQCDERIELVLRQLQENATPVSTPLPAARRRSKQSNDFSFDVRAELYDVLGVDLTQIHGLGPYLALKLVAECGTDMSRWPTVKHFTSWLCLAPGNKISGGKVLSSKTRRSSSKAAAALRLAAVTIGKTDTALGGFYRRLSARIGKAKAVTATARKVAVLFYNTLRFGIKYVDPGAEYYEERYRQRVLKNLTRRAESLGFVLQPKPA

SEQ ID NO: 170131 - protein, 364 aa, unidentified
MTSMTLQRSDVIVGIDTHKDEHVAVAIDGLGGIVGNPQFMAANPDGYAELLAWADSLGDVYAFGVEGCGSYGSGLAKFLRRHDRTVHEVARPPRKGERRMSGKSDSIDAEHAARVVLSEKGTSTPKLADGVVEALRLVKIARDTAVKNRAATMVTLKAVIVTATDELRHSIEDFSNPNLIKACAALQPVGDIADPETAMRYTLASLAHRYIDYSDEIDLHTRHLKTLTKQAAPQLLERFGVGFDSAAEMLITAGDNSDRIRSEAAFAKLCGVCPIPAGSGRTSGRHRLNRGGSRQANAALYRVVIVRMRWHPPTIAYVERRTAEGLTKKDIIRCLKRFVAREIYNHLPKPSNPKTPPKESLITP

SEQ ID NO: 170132 - protein, 424 aa, unidentified
MKRHPDVEFAAFAGIDWSDTKHDICLQAANSEERELAVVPHRPAAIDAWASALRQRFGGQPVAVCLELAKGPLVYALQKYDFLVLFPVHPATLAKYREAFAPSHAKADPTDAQLALELLLRYRVKLKALTPQSVPMRMLLRLVEQRRRLVGDQNRISNRLTDALKQYFPDVLVWFPDRDTPLFCDFLTRWPTLKQLKRARRATLQSFFHDHHVRSPSRIEERLRAIKSATPLTDDPAVLRPNQLLVLALVEQLRVTLQAIESFDAEIATLSETLPDYALFRALPGAGAILAPRLLAAFGEQRERYQSAAEIQRYTGIAPVTESSGKKHWVHWRLQCPSFLRQTFVEWAGATIPRSFWAAAYYRQQRDKGCSHQAAVRALAFKWIRILYRCWQTRTPYDESTYLNALKRRGSPLLASIATTAKNT

SEQ ID NO: 170133 - protein, 350 aa, unidentified
MNHKEVSMDRYYYIGLDIHKKVIAYCIKALDGSMIDQGTIVADRQSLGVWVKGLPGPWVGAMEATLFTGWVYDFLKPHAVALKVAHPAMLQAITVAKKKNDRADAEKIADLLRVNLLPECHMLSEEIRELRRILRYRNHMVRTAVKMQNKMSGLLMEVGITYSKKRLHGKKYFHELLERVDEIPPSVKELLQLSRSGYEMFRSFQKRLVETLRADSLIRDRVHHLMTIPGVGEITALTWVLEIGDPDRFSSIRKAVSYCGLCSAQKESAGKEQRGPISKKRNKHLQTMLIEAAKLAPRWNEQLAIVHERELKKGNRNRATLAVARRLVAYMLAVDRKGADFTPSSEIRAA

SEQ ID NO: 170134 - protein, 415 aa, unidentified
MALKIVYKICCGIDVHKTFVVACIASTNDKGVTSYESHRFSTYTSGLKTLLQWLLDRNCKDVCMESTGKYWIPVYNILEKDCSIVLAHPKYVKAIRGKKTDKKDAKWIADLFKHDLVAGSFMPPSDIRQLRDLMRYRFKLTCFKSSEKNRLQNCLTVSNIQLGNVVSDTFGKSAQAILDKILENPADTSFDLEPLVFKSLKKKRPELRDAIDGYITPEQAGKLKVIKTHYEDLESRKAELEELILALAAPYQQELAILQTAPGISSDFTAIGIISEIGTNMEAFPSAKHLCSWAGLTPTNNESAGKKKSVRVSKAGCYIKPLLVQCANAVVTSKKHPEIRNRYLRLKKRRGHKKAIIAIARMLLTALYHMLKNGENYNAELYRKSDLPPVDREITVEQALMMARNQGYKIKSVTA

SEQ ID NO: 170135 - protein, 388 aa, unidentified
MQIITDRPQAPTAIRTDLGAIFVSLELSRSTWLITSLSPGGGEKMSKHTVLSGDVAGLWARFCQLKDKVQVRTGHVVPIIVIQEAGLDGFWIHRFLQDERVESHVVDPASIATSRRRRRAKTDKIDGEALVRALLAYKRGEPRVCAMVRAPTPQEEDRRRICRERKTLTAERVEHVNRIKGLLFAQGISDYEPLLRKRRERFEELRTGDGRPLPEHLKAQIGRELDRLELTLQQIKSVEAERDAMLSPSDEGTPAPGAMLKNLKGIGPEFAGVLWSEGLFRNFSNRRQVAAYAGLAPTPWRSGSVAHEQGVSKAGNPRLRTTMIQLAWLWVRHQPRSILTLWFHQRVQLNGGRVRKVLIVALARKLLIAFWKYVTAGVVLEGAEITAA

SEQ ID NO: 170136 - protein, 359 aa, unidentified
MYFAGLDAHLKYVSLAVLDRRGQVARETSVSTREPEQLLAALAPYRPLDVVVETCPFWPWLYDLLVPAGIRFHLAHAKQLRAIAAAPQKSDAVDARLLARMLLAGLIPEAYPRPADQRELLRLLRHRTTLVRYRTRLAGRIHSQLHQQRLSLPREQLLRQATRVWLEETAWPRLTVEQQAIVTTHLELIDRLTPLVQALERRIATAAAGHATAPLLATIPGIGPYRSLLLAAELSPITRFPRAEHLVSYAGLAPVTRSSGGHTHHGSIPQGANRWVRGALVSAIPTHVRWAPTSPVTMAYAQLKARLGWRVARVAAARKLARVVYVMLTRRTPWCGAPVAGDVRDEVQNSHVAATTSFC

SEQ ID NO: 170137 - protein, 423 aa, unidentified
MMKLKYSICCGLDVHKNVIVATIVTTNKDGISEYKQKSFSTINSDIQKFHIWLIENNCYHVCMESTGKYWIPIFNYLENDIDVCLTHPKYVKAIKGKKTDKKDSKWIADLYKFDLVRCSFIPPKDFRQLRELSRYRFKLVCMKSSEKNRIQNCMTISNVGIASVLSDPFGKTATEIISYLLEHTADSMDEKAVRKLIKKGAKSKSDEIIEAIKGYTIETDQAKKLELARGHLEYLDDMITQTEVELYVRIKPYYEFVEFVSTMPGMTELSSTIVLAETGVDMDIFDDAKHLCSWCGLSPANNESAGKKKSVRIAKAGDYLKPMMVQCALAAIKSKKQPYFAIKYGRIKKRRGHKKAIIAIARMMMVCIYHMVSEKKPFTPTDYEELMDPQNHVESVVLNENNVFAYLESLGYDSSKLVKRNDN

SEQ ID NO: 170138 - protein, 399 aa, unidentified
MLAVGIDISKSKSVAAILNQDGSMHTSPFEFHHTQPELDAFIKYILNSNQSATILMENTGHYHYPVLKAFQEAGLPVCMVNAYQIKKFGDMDLRKAKTDKKDAVRIARYALEKSYSLVPYTSMGQKYEDLRFLARQYNQRMLTLKTNKVFLLNLLDETMPGITNILPLTTRTPETSLSVLFINRFKSYDRIKKMGKNRFLDAFEKIARKSRNRQTKTYGLAIYETALYNITTRGENEYTLGAQDQCLELVCESQKAADSIILKMQTLAETLPEYAVLRSMAGVGDRLGPLILAEIGDIRRFHSGKALNAYAGNDAPPYQSGTFESHNRHISKRGNAALRKYCFEVMQALKLTQPQDDPVYLFLLKKEQEGKPYNVAKMAGVNKFLRIYYARAMETLKQQ

SEQ ID NO: 170139 - protein, 407 aa, unidentified
MLFVGDDWAEDHHDVCLQDAAGRVLASRRLPEGVTGITRLHELVAGHLDGDDPGQVVVAIETGRGPWVRALVAAGYRVFAVNPKQAARHREVVAVPGKKDDTFDAAALADMVRTRRHQLREVAADSDEAEAVKVAARAHQKLVWERTRHALRMRSALREYFPAALAAYAPLTLTGPDTLELLAKAPTPAAAAKLTITQITAALKRARRHDVAGKARQIQAALRERHLGQPEIVTEAYAASVTAAAAVIAVLNEQIKKMEAKVESLFHRHPDAGVYLSQPGIGVITGARMLGEFGDAPGRYADAKARRNYAGTSPLTIASGKKKTVHARFIHNDHLVNAMHDQAFAAISASPGARAYYDELRSREIDHTDALRRVANRLAGILHGCVKPGTVYDEHTAWGHRSQPAAA

SEQ ID NO: 170140 - protein, 430 aa, unidentified
MTDSIQGTPTRNLVAIDIARYWNYVLIENSTGKRQRFKMANTAADFDRLIQHLQSLSGPVRIGLEPTGDYHRSLAHRLLSAGFEVVSINSVAQARYREAMFNSWDKNDPKDAAVILEMLRRDAFQRYVDPMVAGTHDLQELAKTYYQVSKARTKVQHALINHGLPLYFPEMHRYWACTRNEWFIRFLLQFPTPRHVRALSKKAFVLAAWDVVGRKVNKQAKLEEMWEMAGATTALPHAPDCLAVEMFRVTLTRYQQLNQLRNELEARATQALGGRPEFEYLQTLPGVGPIIALTILAEAGDVRRFSHHRQFLKYCGFDLAKQQSGSYRGKERLSKRGNARLRLAFWLAGVGAVRMRENSFRDKYERYIQSAPDDADVRRKALTAVAAKMARVAYSLCKTNQPYRQFFEQSLPSESIPLSAAVGALVRPRR

SEQ ID NO: 170141 - protein, 444 aa, unidentified
MPNHFQHLNPHAAGIDVGSRSHFAAVPEDADEKPVREFSCFTKDLHHLADWLHACGVKTVAMESTGIYWIPVFEILEHRGFEVKLVNAHHVKNVPGRKTDVLDCQWLQRLHSYGLLEGAFRPPDQVCVLRSYIRQRMNLVRYASSHIQHMQKALNQMNLLLHNVVSDINGVTGMRIIKAILAGERDPKVLAGFRDPRCKNTVETIARSLEGHYKPEHLFSLKQAVELYEFYQAKIADCDRQIEKQLGVFDDHSGGEQIPPSRKQGKAAGNGPGFDVHKDLYRMTGVDLTRIDGIDVYTALKVISEVGTDMSRWKSSKQFASWMGLCPGNKVSGGKKLSGKTKPVANRAALALRLAANSLYRSKSALGAYLRRQKARLGAPKAITATAHKLARLIYSMLKHGTQYVDAGQEYYEQRYRTRVVENLKKRALEFGFELVKTSLPCTI

SEQ ID NO: 170142 - protein, 356 aa, unidentified
MAVYVGIDVHKKYCQAALMNDNGRITHELRFDNNQQGATSLVDLAKSVDPQIKAVLEPSANFWIRIYDKLEDEGVEVKLSNPLRTKAIAEARIKTDRIDAKTLAFLLRGDLVAESYVPSRKNRERRALIRHRASLMRIRVDIKNRVHALLDKHELTHSYSDLFGKEGTEWLRSLQLPTPDHQILQSNLQVLETVNAEVRNADIQIAKDATTEDQAKLLMTMPGVDYYAAMVLLSEIGDVHRFNSDEKLVSWVGLAPQVHQSGETNWTGHITRKGSKRARWILGQCAQSARQHDPRMREFYERIERKHGHQKAIVAVARKMLAIMYVMLIRNEPYRGENPELTEQKHKRLDTLANSA

SEQ ID NO: 170143 - protein, 373 aa, unidentified
MDEDRAVCVGLDTHKARIAVAVAEPGRAGEVRFHGEIANRPEAVRRLIERLGAKHGQLKVCYEAGPCGYGLHRQITALGHECTVVAPSLVPRKPGDRVKTNRRDAVTLARLHRAGELTGVWIPDPTHEAMRDLVRARTTAMEAVRRARQQLQGFLLRHGRVFTGRRAWSPAHRRWLAGLRFEHPAQQIVLQEQIDAIEEAERRRDRLGEQIRELARDWSLAPVVAALQAMRGVAFLSAVVLAAEVGDFRRFATPRQLMAWLGLVPSEHSSGSKVERGGITKAGNGRARRVLVEGAWSYRLPARVTGELQARLEGVPDAVRTIAWKAQLRLCARYRRLVAAGKNANLVTTAVAREMAAFAWAIACQVQPAVAAA

SEQ ID NO: 170144 - protein, 411 aa, unidentified
MLEVKVEKCAGIDVGKKFLAVWVLIGLANQKPVGEVRRFGTSVKELERLRAWLLESGCTEAVMESTGSYWKPVFNILEGSLKIILANAEQVKALRGKKTDPNDSRWLASLLRHGLVQGSFIPPRDIRELRDLTRRRRRLVGDGAAERNRVQKVLEDANVKIGNVLSDVFGTSGQAMLEALLENKRSAAEIAELGHWSLAPKIPQIVEALEGHRMSDHHRFMIRQSLRHRRNIEEMIEELDKEIAVRLKPYQQQMKLACTVPGIKPTAAASILAETGMDMSPEGPFPDCHHLASWGTVCPGNNESAGKRKSGRTRQGNRWLRATLTQTAWAGAADKKSLFQMRYQRLKLRRGGQRAVIAIAHAQLIAIYGALRNGTPYPEQVQRLQEDRREAQIRHHLQRLTKLGYEPNMHG

SEQ ID NO: 170145 - protein, 424 aa, unidentified
MKVTYQTCCGVDVHKSFLVATIVKTTGGIEPSYQKKRFSTFNNSILEFKQWLLDNHCHDVCMESTGKYWVPVFNLLEDKINVVIANPKWVKAVKGNKDDTKDSKWIGDLFRLGLVKGSYIPCKKVRILREYTRYRYKLVSCRSSEKNRYQNALTVCNVALDSIVSDIFGKSSTSIIDYLLEQSGTSINHEEIASKLLRSLKSKEDAVIESVEGYQMTDAQKYRMRLVRAHMDYITAEINDVDKMIENMISSNPDFENAVQFLCTIPGVKRDSAITIISETGTDMSQFSSSKRLCCWAGLTPGSNESAGKKKSVRITRAGVYLKPALVQCAHAAVKSDKSPYYKKKYESLVKRRGKKRAIIAIARMILTAIYQMLSTGEQWNPSDLYKVDMPEALLEKQKQKAIKQAQKLLIREGLLPPTEPIAS

SEQ ID NO: 170146 - protein, 347 aa, unidentified
MLHAGLDLGRRRLDVCLLSNQGEHLDQLVSPPDVDALRTLARRIDEVHGEPVCAVIESMTGARLVHDTLESEGWDVEIADAQRVKGLAPLALKTDKTDSLVLATLSQRDLVPAIWLPDPRVREERELARFRMHLVKHKSALKCRIHSTLINFGRPCPVTDLFGAEGRRLLAKLDVPEPWRSNVGASIELIDHLEDQIDQINRRLRAEHADHPYIPLLMSVPGIRWVLAFTIAAEIGEIGRFASPEKLTGYTGLCPRVSQSGERDRRGPLSKHGPTYLRWALLEATMHALRHPAYSARYQRTKRRLGKQRGAKVAQVDIARRLAHAIWHMLTRNQEFAPRGAAFRLAA

SEQ ID NO: 170147 - protein, 359 aa, unidentified
MNKHKYVGMDVDQATTVVAVEDAGGNFLMETFLPTKAADLREFFKGLKGTVHVAFEEGAQATWLYDLIEPLAEEVVVCDPRRNKLIHAGNKGDRADARKLARLLRLGELHAVYHGERGTRGLKELVHGYDYLVRDVTRTKNRLKGALRSRAIGCSGTKVYGADDRKEWLAKVDVPAVRTRVNSLYEQLDCLRKLRDQAHKEMIKEAHKHRAYKLLIKVPGLGPVRTSQIIAAVGSPHRFRTKRQFWPYCGLAVTTHNSSEYEIVDGHRRRRNKPVQTRGLNRNFNRTMKAVFKGAARTAITDEPFKQYYQRMIDEKMRPEMALLTVARKISAITLAIWKKGENFDPEIVTQAARDSGDQ

SEQ ID NO: 170148 - protein, 391 aa, unidentified
MTKPKTKMVNDLSRCLDPLDMDATLIAVIEMSQSSWLVGGIVPGVERQPLKKLEVDERALLSLLNRWRAEAEKNGHRITRMAVAFEAGYDGFWLARWLAAQGLETHVIHASSVAVTREHRRAKTDRLDTELLKRGFLGWLRGERGHCKMVAVPTLAEEDAKRPSRERETLVGEATRIIARVKAAFVRLGIRGFNPKLKAAAARLKTLRTPEGEPIPPNTLAALRRDLERHWIVKKQIRELEQTRLDVLKQAPEKGPHAVVRLLARVIGIGIETADMLVQEVLSRHMRDRRAVGRYAGLTGAPDESGSKRREKGLARSGNARVRRGMVQLAWRFLRFQDDSALARWYRQRTADAPAMRKTLIVALARKLLIALWQFARDGVVPEGLRLRPVA

SEQ ID NO: 170149 - protein, 465 aa, unidentified
MKTKASPSKKRKPKISIDQRWEIINPHAAGIDIGAREHWVCVPPGAAPDPVQPFGTFTADLEALADWLQQCGVTTVAMEATGVYWIPVFQILEGRGLKPVLVNARQTKNVAGRKSDVQDCQWIQRLHTYGLLQGSFRPADTYCVVRTYLRYRDELVSARSTQAQHMQKALQQMNLALTQVLSAVTGVSGLAIIGAILQGERDPVKLSQLADRRVRATPATLQKALVGDYRPEHLFVLQQAFDLYHTYEEKIQACDQEIVRALAQLPDRVDLSRQPLPKRKEGRQPSQDRMADQDLREALYRKTAVDLTAIEGIGSLTSLVVFTEVGPDVSRFATEKHFCSWLGLCPDNRISGGKVLSSRTRRVVNRASDALRMAATTLERSQSALGGFYRRMKARLGAAEAVTATAHKLARIIYRLIKYGEAYVRQGLQAYEKQFQSRRLQALQRTAKTMGFQLVPTPTLPAGVS

SEQ ID NO: 170150 - protein, 321 aa, unidentified
MAELSFCGIDVSKDRLDVVVLPAEYVFSAGNNLTGLVELVSKLRCLSVATIGIEASGGYERSAVRALLAAGFSVRQINPFKLRQFAKASGVLAKNDRLDARLIAMFVATMPTRPVQRNAATERLAEILMARRQLSEQKVAAENASRLFEDVVLMRLYRRRIARLEADIALLNKRLTELVAADSALAQRYALLISMPGVGPVLAITLIALLPELGQMSRKQVAALVGVAPYDFDSGKLRGVRCIRGGRAPVRRVLYMAALIASRCNPALKLFHDRLDSAGKRSKVVMVAVMRKILTMLNAMVRDDVVWADQLRGRHIMPTAR

SEQ ID NO: 170151 - protein, 391 aa, unidentified
MFYIGIDIAKNKHEASIIDSNGKLVSDSFSFSNSIKGLEKFQKLISSFSIDSNNCIIGMEATGHYWLSLYSFLIDLGFSSVVINPIQSDAFRKMYIRQTKNDSVDSFVIAQILRFGEFSVSHFSDEDTFALRNLSRFRFALVDEASDWKRKLVAILDQVFPEYSSLFSNIYGVTSKELLSKYPLPEDMISIPADELAMLLSKCSKGHFGIDKAKEIQDKATNSFGVKFALKSFSFQIKQIIAQISFLEDQILEIEDEISSMINSLCPVITSITGIGDVLGATIFSEIGDISRFERANQLVAYAGLDVAVKQSGNFNATDTKISKRGSPYLRRAIWLAASVAAFKDPALSVYYQRLRQRGKAHGTAIGAVARKLTNIIFAVLRDNKAYIPNI

SEQ ID NO: 170152 - protein, 400 aa, unidentified
MRVVFGIDVSKASSEVAILVNGEKVHGYTIPNDAIGFNRLLGDLKTVHQPEIVFEATGVYSRRLQTFFEDNSYAYTRLNPLESKKQLDSLRVRKTDKIDAEKLAMSQFILNRKPSYVQEALYQELRDLSRFYQNLTEDIVCAKNRLHKVLQVTFPELENILSAPTGEQYWNLVMTFPCNSFVLELDDAALTAIIRQSTSKRISEKRVTYLVDKLTKLANQSYCAVKKTSPVIEEVKYYAGELLRLSEHRQGVLEEMVTLAQPLPEYEILLSIPGIAETTATSIIGELGDIRRFHSANQINAFIGIDLRHYESGDFLAKEHITKRGNPYARKILFKCIHNIASASHTNPCHIADFYEKRKRQSQVTSTKPHTIASIHRLIRTMYYLITHNKLYDYTSTQNR

SEQ ID NO: 170153 - protein, 418 aa, unidentified
MDRILCVSIDVHKYFHVVMIHNALGEIVTPTFEIDIFQTGFEQLCRAIDEAIARTKAQVVLTGMEPTGHYFENLARHLRQRPQPVTLINSYAVRKNRDQQMMHHEKDDEIDTASIGDLLRRGEGTPFKPASGVYLQLQHLDRVRLSKIKIRTMLQNQVLGHLDRIFPGLVIIAKEAKARYTPLFATDFWKCQTLQHLIRVCPDPRQLAAMSPQDLIDAFHAHHYAMGPITAAKIIAYAQKVLLPDAELIAIRCELLAHDLALLEAVEGHIAQLEDRLRTLLAETPYQIWVKLKGLSDIQVASLAAAIGDPANYSYAAQVFRRSGLVSGRDDSGIRQRKGKGKRVVKVGDVYLRRALMNALATLILHQPVLQQYLNKLRKSKPAGVARVATARRATGILWATLRDQQAKTLILKKGAAM

SEQ ID NO: 170154 - protein, 354 aa, unidentified
MSQIPNTAIAVIGIDIGKNSFHAVGHDARGAIVLRQKWSRGQVEARLANIPPCLVGMEACIGAHHLSRKLASLGHDARLMPAKYVRPYSKGQKNDFNDAEAIAEAVQRPTMKFVATKTAEQLDLQALHRVRERLVSQRTGIINQIRAFMLERGIAVRQGIGFLRTELPTILATRTDALSPRMLRVIEELAGDWRRLDQRIDGLSGEIEALARQDQACSRLMTVPGIGPIISSAMVAAIGTGDVFSKGRDFGAWLGLVPKQISTGDRTILGKISRRGNRYLRVLFVQAAWVVLVRIKDWERYGLKSWIEAAKRRLHHNVLAIALANKLARIAWAVLAKGRAFELTRTDDAGVRSA

SEQ ID NO: 170155 - protein, 364 aa, unidentified
MMILAIDLGKAKSLFCWYQTDDQSQVMRTVPSTPAAFHDTLIQRKVDRVVIEVCDMAGWVQDMCQTLQIPIQVVNVNCEGWRWKNVKNKTDQTDGLKLARLSAANDLKLVYLPDRPTRHWRSLILYRHKLIERRTAIKNSIHALLVVEGRAMMGGREVWTGESMAKLRKLAKTIKECSKDELWSGHLQMELDSLDHLVEQIEELDRKLDALGDADSRVIRLKTIPGVGPRLSELVVAVIDDPHRFKNARQVGAYAGLVPRRYQSGQMDRSGRISKAGCGKLRKLLLEIAWGMLQHNAHGQKVFNRISKGQKTRRKQAAVALARRVLCWCWAMLRDGTDWHEPVDRLEPAPARPVASPAAALCTS

SEQ ID NO: 170156 - protein, 408 aa, unidentified
MEVLYTHCAGLDVHRDTVVACVRIAEGRHVTEECKTFATTTSELERLREWLLEHSVTHVVMEATGVYWKPVWVVLEDGLELVLANAAHVKNVPGRKTDINDATWLANLLAHGLVRASFVPDTQIQQLRALTRTRKQLVREKVQHVQRIEKTLQEANIKISSAVSDIMGQSGRAILEALIAGETHPDQLAALCNYRVKASRQKLREALRGRVSTHHRFLLRLHYEQIRSLEAAIAEIDREVGEAAAPFQHLVELLKTIPGVSDTVAEVILSELGPDMWRFPTVGHLLSWAGLCPRNDESAGKRRSTRLRYGAPWLKTQLVQSAWCAARTKRTYLRAQFTRLKARRGPKKAIMAVAASILTAVYYMLRDGVAYQDLGPDYFDRLDAGKLTKRLVRKLEDLGYDVALKKAA

SEQ ID NO: 170157 - protein, 342 aa, unidentified
MEQIATIGLDIAKSVFQVHGIGKNGSVVVQRRLRRSQVLGFFSKLLPCVVGIEACASSHFWAREIGALGHDVRLMPAAYVKPYVKRQKNDAADAEAICEAVTRPTMRFVPVKSPEQQSIMVLHKTRQMVMRQRTRLANTIRAHMAEIGIVAPIGRKGLELLLEIIGQDEDGRLPEVSRSCLRMLADQFSMVKAHILELDRAIVADVRRNESAKRLMAIPGVGPLLASAMVAAVPDPAMFRSGRNLAAWIGLVPRQNSSGGKERLGGITKQGNRYLRQLLFVGAMAVIRYAERHGTRRPWLVRLMARRQTKVAAAALANKTARMIWAIMTTGERYREPLLQAA

SEQ ID NO: 170158 - protein, 366 aa, unidentified
MKKSITPIGTPVGVDVHKRRCKVVELDHGEIKVRKPMANTREEWLEMLTELPPDAEIGLEVSTAGYFAMSVLEEAGWRERTHWVHTAGMDSHRRQKNDRLDAERLARKLAAHHLDPLPEAWFPPPEIRALRLRARARCWLALLRTQCKNHLQSLLQMHGLLLPGSDPLGAAGQKWLAQQTLPLPLIESLPQIQRLLKLLEEEIKISEKYLQAVEAQFPELALLRTIPGIGAILAPVIWSELGSRERFPSAKALANDTGLVSSFYDSGDVKVSGPITHQGSRWLRWAFVTAANVAIPYRNPFARRYHRLRRGKKPNVAKAAIAPSLARCVYGVLKHGCPYREDRWGRKVGALEQEARGSARSTKTVL

SEQ ID NO: 170159 - protein, 326 aa, unidentified
MHRRRSVIVRKTGAGEPIETVQIENGALALTEVLARAGECPEVVLEATYGWYWAADVLAEAGATVHLAHPLGNNWGNRRVKNDERDAADLVDLLRLGRLAEAYIAPPALRERRELVRHRAKLVAVRSGLKAQVHAVLAKEGVAVTVSDLFGLGGRGLLAEIPLADAYRRRVDSLLGLIDAFDTEVAGFANLIAATLAGDAGYHAVQAVPGVGPVLAAIFVAEIGDVTRFAGAAQLCSWAGLTPRHRESDTHVRRGHITKQGSRLVRWAAVEAVGRQRGATPIATVHHRVGDRRGRSIGRVAAARKVLTLVYYGLRDGHIRCLDPTG

SEQ ID NO: 170160 - protein, 412 aa, unidentified
MPKIVYPICCGIDVHKSFVVACIATTDEKLVTTYKSKRFSTFTGDLRRLSDWLSQNNCHDVCMESTGKFWIPVFNILEPTCHVVLAHPKYVKAIKGKKTDKRDAKWIADIFKHDLINGSFIPPADIRQLRDLVRYRFKLTNYTTGEKNRAQNCLTVSNIKLDDVFTDVFGKAASAITDRLLESNEPFDVRPYLTKGIKASPEEIQAAVDGVMCANQAEKLRIIRSHMDSLELCKTNLESEILTVAEKFLPQINLVLTVPGIQTFSAVAIIGEIGVDMSVFETSRHLCSWAGLAPQNDQSAGKKKTTRISRAGVYIKPLLVQCANCAIRSKKHLEVANRYNAIKKRRGHKKAIIAIARMLLTAIYNILKKNEPYNAELYLADKPPIQREVTVEQAIFILQRQGYLVNQGASAP

SEQ ID NO: 170161 - protein, 333 aa, unidentified
MENIALIGIDLGKNSFHIHCQDRRGKAVYRKKFTRPKLIEFLATCPATTIAMEACGGSHFMARKLEELGHSPKLISPQFVRPFVKSNKNDFVDAEAICEAASRPSMRFVQPRTESQQAMRALHRVRESLVQDKVKTTNQMHAFLLEFGISVPRGAAVISRLSTLLEDNSLPLYLSQLLLKLQQHYHYLVEQIKDLESQLKRKLDEDEVGQRLLSIPCVGTLTASTISTEIGDGKQYASRDFAAATGLVPRQYSTGGRTTLLGISKRGNKKIRTLLVQCARVFIQKLEHQSGKLADWVRDLLCRKSNFVVTCALANKLARIAWALTARQQTYEA

SEQ ID NO: 170162 - protein, 416 aa, unidentified
MNEQLNVVCGADIHQRFLVATILCRDGRKWTKRFLMNVNGLLDFKAWLMSYGCQKVAVESTGRFWIPVHMILDGTVDVIVANAYKIKHTTKKKTDLKDSEWLAELCLNDMIEPSRIFPKEDRELRNLTRAREAYIRDLSKEKSRVHHVLESCSIKLSSVISDVFGKSGMHILNGLMNGVSIEDILKGIPDKRVRDKKAEELREALMGKLEVSAIILIRQSLQIINQFNMRIEELDQEIRSRIASKPMDLKIAMSIPGIGIVSAYTILAEIGNYLDFKTPEQLAMWAGIVPSVYQSADKLITGSITKQGSKHLRWILVQVAHAISHKKGGKLKKFFLKIRAKKGHLVVIVALARKVLCILYHLLVNQEMYEEDGLAARKDALILKKTDRQIPPIEEMIRYVVQAGYEVKKIKPGVGE

SEQ ID NO: 170163 - protein, 381 aa, unidentified
MRNDIRFVGLDVHAETIAAAVVEPDGELRFVGTIPNRVEAIRRLMKRLGPAARLRACYEAGPTGYVLYWQLTELGVHCDVVAPSLVPVKAGDRVKTDRRDAEKLARCYRSGDLTPVWVPDAAHEALRDLLRAREAAKSDQLRARHRLGKFLLRHGRRPEPGIRPWTCKHMEWIKRQVHFEVAAQEATLTDYITEVEHVGLRIERLERAIDEAVSMVPDRMRAVIDALQALRGIRQISAATIVAEVGELSRFARARQLMGYSGAVPREHSSGERTRRGGITKTGNAHLRRIVGEASWAYRHRPNLSRLLRQRQEGLSEPVKEIAWKAQHRLHQRFRQLTARGKAKQQVVTAVGRELLGFIWAIGTTVERGLTEQADQRRRVA

SEQ ID NO: 170164 - protein, 325 aa, unidentified
MRQPKSQVKPQTQVGLDVSSQTLDAHIRVDGKAFSVPNTDAGFDQLCDVLSAYDVSMILMEATGGYEDNVACYLQLQGFDVVVINPRFARRFAQSMGRLAKTDRIDAAILAQMAFMIDSGPDRDRYIKPVTDEQRKQLSRMSSRRRQVVDLITIEKQRLTHADEYARESINEIISLLNAQLKRIESDILRYVKKNFSELANRLLSVPGVGSQAVTVLIADLAELGHVNRRRISALLGVAPFNHDSGKFKGQRRIRDGRQSVRNVLYMGVIAATRFNPVIKAFYDNLLLRGKPRKVAIIACMHKLIRIINAMMRTGKPFDTSLHGV

SEQ ID NO: 170165 - protein, 314 aa, unidentified
MMFYLGIDVSSNTLDVAFFSPEQGTTRCEQYANTAAGAKKLLRALAPLDVRHVVLEATGGYENRILDAVAASYPTTRIASHRGTAFARSLGLFAKTDRVDAMVLARMAQAMPAQPYVPLAPAVRDLRGLVKGRDQLIQQRDDNRRRIKQCDCAISLASLTRVGRVLANEIKALEVHIREAVKAADAERAAQLLEVPGVGKIAVATLLAFLPELGQRGNRQISALVGVAPYTKQSGRKDGPRQIMAGRPFVRRILYMATLAAIRSAKSSLRGHYQALIARGKPKKVAIVACMRKMLITLNAMVRDGTSWNAPMTA

SEQ ID NO: 170166 - protein, 465 aa, unidentified
MTPHKDSFPEPCPPAPPLPQPSVLSDALQVCHPHAAGIDIGEAEHWVAVPPGCDPQPVRRFGTFTVDLDALADWLIDCGVTTVAMESTGVYWIPLFELLEARGVQVLLIDPRQAKRAPGRPKTDRLDCKWLQRLHAYGLLAGAFRPADQVCVLRSYLRHRQMLLTSAAHHIQHMHKALQQMNLKLTQVVSDLTGVTGMAIIKAIVAGERDPVTLAKLRNPHCQHDEDEIAKALQGTWRAEHLFALRQAVELYEVYHQQIAQCDQQIKKHLETFADKSAGQPLPPKARRHKKTNEPRFDARTPLYRMAGVDLTTIEGIEENTALILLSEIGTDMHRWPSVKHFCSWLGLCPQHQISGGKVLSRRVRPGAHRVTVALRLAARSLHHSQSALGAFFRRMKARLGTPKAITATAHKLARLVYSLLQHGSAYVQQGLDAYEAHYRERKVTTMAKQAKALGYTLVPLPAQG

SEQ ID NO: 170167 - protein, 356 aa, unidentified
MAKPKYLGMDVHKDTISVAAIDSTGKLITEAVLETKAEAILSFVNGLRRNIHITFEEATWATWLYELLQPHAEEIVVCNPRMNALLTYGNKADQSDARKLAELLRGNFLKPVYHGGTGMQALKELTRSYNAISKDLVRVMTRLKAIYRSRGISCAGTRVYRKRYREEWLAKILEPGARRRAEHYYQQLDALTQLRLEARHDLLNESRKHSATELLCQIPCIGPIRAAQLIALIQTPHRFRTKRQLWTYSGLAVDSDDSAQYCFVNGRAQLSPKKLRRVRGLNRNFNHDLKDIFKGAAVMASITAGPFRDFYQAQLARGRRPAIARLTLARKIAAITLVVWKKGVKFDAQQVAQKAA

SEQ ID NO: 170168 - protein, 415 aa, unidentified
MKKDYIQFEQVVERGCGMDVHKKEIVATIRGKGIKTMTKSFKTFTNSLEELKKWLKRHGITHIAIESTGVYWKPIFNILGDDFQILLVNARHVKNVPGHKTDKTDSRWLAKLLLSGLLKGSFIPTQEIRELRDLTRYRRKLIQQVSSDKNRFQKILEDANIKLSVVLSDVFCVTGKKLIQEILSENYNPENLLRHVHGRVKASREDIKEALTGNITEHHRFMLRTILENMKRIESTIAEIDQKIAQKTEQYKDIIELLKTIPGVDYNGAIGIISEIGVDMEKFPSHKHITSWAGVCPGKNESAGKNKSGRITYGNIHLRSLLTELAWSASRTKNTYLSSKYKSLVKRRGDKRAIIAVGHKILIAAYFIIKDKTEYKELGADHLNNFRKDKLIAYYQKQLETLEPNIDFDKQKQIA

SEQ ID NO: 170169 - protein, 429 aa, unidentified
MKYKHSKKQNQRIQQITDSTLVVGADIAKTKHVARAVDFRGIELGKDCVFSNDHHGLTKLVTWMRELQQQHHKTDIVFGIEPTGHYWFPLAEFLGREGVKVVVVNPHHVNKSKELEDNSPTKNDYKDAKVIADLVRNGKYSEPKLPVNVYADLRILMNLREKVMENFGQVQRRIQNWLDRFFPEYGQVFKDWEGKASIITLSEFPTPSEIVVLGARAIVQRWKEDVKRAVGTKRATQLVEAANTSIGLTQGLAAAKIELKTLLEQYELFAKQLEEIMMEVERMLAQIPGTKEMLTIPGIGVVTLAGFLAEVGDLSGYDHGQQIIRLAGFNLKENSSGKKKGKSTITKRGRSRLRALLFRAVIPMVAKKFKSLHHYFTKRSHNPLKKKQSLVALCGKLIRVLYTLGTKCISYQASDVLGPVRQAQLQMAA

SEQ ID NO: 170170 - protein, 370 aa, unidentified
MKKNSTTSGKSPKEEQKTWKSPLTIGIDLGDRTSRYCILDGDGEVVKEGSVGSTNAALKQTFGQIKKSRFALEVGTHSPWVSRLLKELGHEVIVANPRQLKLISQSSRKDDRVDAEMLARLARVDPKLLRPIRHRGEAAQMDLMAIRARAALVEARTSLVNAARGFSKTTGERLAGCDADQMGMEKASELPKGLQEVLRPLLEQVEALTAAIKECDRKLEQIAKDKYPETTLLRQVSGVGILIALTFVLTVEDKERFQRSRDVGCYVGLRPKRSESGESQPQLRITKEGDSYLRKLLVQGAHHVMSERSPDTDLKRWGQKLAARGGKNAKKRALVAVARKLGILLHRLWVTGEVYEPLRNSSPQQSRKAA

SEQ ID NO: 170171 - protein, 426 aa, unidentified
MSIAQNAKICQVSEETIVVGVDIASETHYARAFDWRGIELAKIFKFDSNAEGYARFDEWLRKLCVENNKTTVIIGAEPTGHYWFTFGEHLKKQEIKFVFVNPMHVKRTKEIDDNRAGKSDRKDPKTIAQLVIQGRYLEPYIPEDIYAELRVMNDNRLRITKELVATENRIKRWFAIYFPEHKTVFGDWACESSLIILAAAPLPKDVIELEAEGVNALWRERKLRAVGMKRAKSLFEAAKMSVGVTSGENAARHTIAILLEDYLRKKEQLDRVLEILETLCIQIPFAEKLLNMKGIGLLTVATFFAEVGDIKRFKSPKQIQKLAGYAIAENSSGKYRGRTGISKRGRKRLRCALYQAVTSLLIHQPNFNALHKNYMHRTNNPLKSKQSKVALCCKLIRIFYAIINKGTDFDSKKMMDGIKSDLPLAA

SEQ ID NO: 170172 - protein, 339 aa, unidentified
MSKLSNPTQATVFCGVDVSAATLAVAVLQQDQPLEQCEFANSASGHKALVAWLRKRKAAVRVSLEATGIYSLDLALALDAADGIEVAVLNPKVVNRFAQTLRRSKTDSADAQALAEYSRRMPFVAWRAPEREGLRLRTISRHIAGLTVEHTRESNRLHAVRGSAATPRCVVADLKRSLASLERRMVRLRREAVTLVQADDAMRQRFELLTGIPGIAEISALQLLGELAPLSPEMSVRQWVAHSGLDPAHEVSGSSVHKRSRISRAGNRHLRRALYMPALVAVRRDPHLKAFYSALVSRHKAKMQALIAVARKLLHAIYGIFKSQTPYDGQKLFPTLLPA

SEQ ID NO: 170173 - protein, 357 aa, unidentified
MRLKGGAVQTIYIGVDFHARQQTICYLTTDSGEILLQQLKHQDKAALRAFYAQFSGHVIVGLEASGYSPWFERLLEELGCEVWLGHATEIRRRARWRHKNDRRDAELILELMLHDEFPRLYLPPLQSREVLRMLRYRQKLIKLRTMGKNSLQALALQSGLAKGPHLFTKAGLQELRTAAMSPAMQWQREQWLQLLAPLNQRLLETMLWLKQQSQADQRINRLRTHPGVGLLTALCLVHSLEPVSRFANTRKVTAYAGLDPLERSSAERQRFLGISKGGSRVLRFLLVEAAHTAIRKDAALRRFYQRLAARHGRPKAKVAVSRKLLIRAYIMLRDEIDYAEFQRRAVAARSAPPAHGL

SEQ ID NO: 170174 - protein, 325 aa, unidentified
MTGQPSATEESVTVGIDVAKHTIEVAIGADGPILSLANDAAGFEALLEHLAAHRVALVVVEATGGLESALACTLQLAAYALAVINPRQARDFARAMGQLAKTDRIDARMLAQLAQVLARHPERDKFIKPLPTAEQQALAALVRRRRQIIAMLVAEHNRLAQAHARTKKSIHTIIQVLRKELERIDTDLAAHVRSHFADLSSLLDSVKGVGKNTISTLIAEVPELGKLRGREISALVGVAPINRDSGVMRGRRTIFGGRASVRHALYMAALVASRHNPVIKLFYERLVAAGKPKKLALVACMRKLLTILNAMVKAGKPWDASLHAA

SEQ ID NO: 170175 - protein, 346 aa, unidentified
MEHYAGIDVSLEWSSICVVDALGKIVKEAKISSEPATLVAFFEALGFAVKRIGLEAGPLSQWLHAGLKRAGFEAVLLETRHVKAALSAMTVKTDRKDARGLAQLIRMGWFRPVHAKSIRSQEVRALLVARKQLLGRLIDVELSIRGILRGFGLKVGPVTRKGFEARIRELVTGQATLERIAGAMLSARVALKAEYEKLHKTVLAIVRDDAVCRRLMTVPSVGPLVAITYKSAMDDPNRITKSKAAGALFGLTPRKYQSGEKDVTSGITRAGDEMVRTALYEAANVLLSRITRFSKLKRWGIDVAKRRGSKRAKVALARKIAVILHRMWVDGSTYRWTETQPIAAQA

SEQ ID NO: 170176 - protein, 391 aa, unidentified
MVCVGIDVAKDKHDCCILDSDGTVRADCFTIPNNMDGFKQLLQTIRDCTKKSDKIKVGLEATGHYSYNILGFLLDNGLPTYVINPLHTNLYRKSLSLRKTKTDRVDARTIATMLLSDVDLKSYTDIAYHNEDLKSLTRYRFDKVQERAKLKQSVSRLATILFPELEGLVSSIHGTSIYALLSEYPGAKQISEVHLTKLTNLLTTASKGRYGKEKAIQIREAARASIGSVMPAKSLELKHTIKLIQELASEINEIEDSIQKIIDELNPPILSIPGMGVNSAAVILAEIGDFSNFSSPDKILAYAGCSPSTYQSGKLTNCYAHMEKRGSRYLRHALYNATKYVCYWNPVFAEYLAKKRAEGKHYNVALSHAMKKLVRLIYALQKSGKTYLTAA

SEQ ID NO: 170177 - protein, 363 aa, unidentified
MFTERTSIGLDVHARSVAAAAIDGMTGQVTQTRLTPSYEHIQDWIKQMPGPVAVAYEAGPTGFGLYRALTSAGIRCEVLAPSKLQKPAGDRVKTDARDALHLARLLRLDEVTSVAIPSLNQEACRDLVGAREDCRGDLMRARHRLSKLLLRHGIVYYGGHAWTGTHDRWLRTDAVTRLQMPATRMAFDADYEHVLMLQARRDRLDAAIHEVAADSEFTPIVRRVSCLRGVSTLTGFALAVEIGDWNRFTGNTIGSFVGLVPSEHSSGSARVQGPITKTGNTHVRRLLVEAAWHHRPRYRVGPVMRSRWDLAPVAARARGDEGNRRLHHRWVGFLARRKRSTVANVAVARELAGWCWSLAVMDD

SEQ ID NO: 170178 - protein, 375 aa, unidentified
MENTTTVGLDLAKSVLQVHGITEEGAVIMRRALRRSQVLNFFRKLQPCLVGMEACGSAHYWAQEIQALGHTVRLMPPVYVKACLKRNKTDAADAEVICEAVTRPTMRYVPVKTQDEQSAGMVLKARDLLIRQRTQTINALRAHLAELGIVRATGLVGIISLAAIVRDNSDLRLPDAARLASEELVEQIETVTARIERLDRKILETVRKDESARRLTTIPGVGPIIAATVRAVVPDPTGFRTGRDFAAWIGLTPRAHSSGGKERIGSISKRGNQQLRTLLVPGATSVLKLARRGLQPSLWIAAMMLRRPVQSYRDRTRKQDRSHYLGASRSWRHLSRREDDRTSLEIRISGRPVGKAGKVPIVMTQRDDIPKQLRP

SEQ ID NO: 170179 - protein, 397 aa, unidentified
MRTRNVYDMVSAGGMDVHYKFSQVTMRDEQCQVVRRERLDHPDRKQMRDRLAQWPKGVPFVLEASFGWGWVADLMKEVGLTPVLSNCLKVEQMRKARGLAKTNKKDADLLSLLPAEKSDWWKVWQAPPEVRDQREWMRYRSGLVKIGTQTQNRIHAVFHRHGIFHEFSDLFGAKGRAFLAGLCKDGRAPDVQLAPGALTGLRGQIRLLGQVRGQLADVAKKLRGQLNRSPLAKRLDGIPGFGLILAHTLMAEIGEIVRFGNHRKLASYSLLSPIADDTGEDEPGRPPMGRHLGQRGNLTLKWAFIEAAHGAVRSGGKWRKIFDRYTDGGKKNRNRGYIKVARELVKVVYVVWSKGVEYTDNPPARLKASRRNKARRFFGSTRPGTGQPCRPMTTAQS

SEQ ID NO: 170180 - protein, 343 aa, unidentified
MDHFAGLDVSVKETSVCIVDDVGKIVREVKVASEPEVLLAVLKKPAYRFKRIGLEAGPLSQWLFSALAEAELPVVCVETRHMQVVLKAQLNKTDRNDARGMAQMIRAGLYRPVHVKTLRSQKLRMLLTHRKLLQSKAIAIENDLRGTLRNFGLKVGIAGTVKFEARIRELVENLPDLAALVEPLLIVRRVLHEQISVLHRRLLAIVRDDAVCRRLMTIPGVGPVVALTYRATIDVPARFKNSKAVGAVIGLTPSKYQSGEINRTGAISKCGDEMMRVMLYEAAQVMLTRTNKWSWLKAWAMKIARQRGMKKAIVALARRLAVIMHRVWVDGTEFRWTRKVVAA

SEQ ID NO: 170181 - protein, 410 aa, unidentified
MAQFVKPQLAAPDYDSTIIGALELSEKKWVLTVQVPGVKWHSRHVVEARGDELSALIERLRARCAEAGHRIKRVILTHEAGRDGFWLARFLARRGVEVHVMQPSSLPVDRRARRAKTDIIDVEMLLRTLMAWLRGEPRVCSMVPIPSEADEEARRAYREREDLTCERRSIANKIDGILATLGVKGFKALRRDRREQLTSLRQPDGDPCPRMARARIERLLDRLELVLKLIEQVEAARDAVLKKAAPADEAEQMIRSLTDLRSIGPDFATLLVREAFVREFRDRRALGGYVGLGGTPFSSGGSAREQGIGKDGNRRLRAGMVELAWMWLRWQPGSALSIWFRARVGQVGGRMWGRGAPCLRSPGAIPARRCARHRSMITGRRASRRPSTPCRRSAAMRKSMPPAIASVACC

SEQ ID NO: 170182 - protein, 342 aa, unidentified
MRAIGIDTHKDSLAACAVDELGRVLAEATFDNDPAGHVALGSWACRVAPGARLGFEGSSSYGAAAARSLAAAGLEVREVPPQLSRRERSRTRRPGKSDPGDALAIARVTAREADLPPIRRADPTTELGLLIAAREDLVAEATRIRNRLHADLVVLVPGYGATVANLVWAKHLDRATRALRRVPGIHGELARERLAALRRCHARIRTLGERIGRLVAGHPLLGLTGVGPLTAAVLIAETGDIGRFRSADAFAMLAGVAPIPASSGQRQRMRLNRGGNRQLNRALHVVAIVQARVSPLAKAYIARKIAEGHNWKDAIRSLKRQLARVVFGLLRQGGSEFHALAA

SEQ ID NO: 170183 - protein, 392 aa, unidentified
MVVSVGIDVAKDKHDCFIQSSEGEVLADVFTISNNMDGFHTLLEKIQACTTPQDKIRVGLEATGHYSYNLLGFLLDNGLATYVLNPLRTNLYRKSLSLRKTKTDRVDARTIAAMLLSDAGLKPYTDTAYHNEELKSLTRYRFDKVKERAKLKSSVSRLVCILFPELEKLVPSLHMASVYALLEEFPGAKQVAGAHLTSLKSLLEKASKGRYKRDMALSIRDTARMSIGSRMPAKSLELQHTIRLIRELDAEIHEIEAEIETMMDEIRSPIMTIPGIGCRMGAMILAEAGDLSRFDSPDKLLAYAGMSPSTYQSGQLNNCYPHMEKRGSRYLRYALFNATKYVCLWDPTFAAYLAKKRAEGKHYNVAISHAAKKLVRLIFAMEKSRQPYCSAA

SEQ ID NO: 170184 - protein, 325 aa, unidentified
MQHFVGLDVSVKETAICVVDEQGRVVARATVESEPAAIVAWLLDRRIRYGRVGLEAGPMSPWLYAGLVEAELPAVCVETRHMHAALSARINKTDRNDAHGIAQMMRVGLFKAVHVKTPASQRRRLLLTSRKLLQRKAQDLENDLRGGLRNFGLKVGVVGAAGFDRRVRELAAGEPFVAAVVGPLLEARAMLRLQLAKLHKMLLDLVRDDPVCRRLMTAPGVGPVVALTYRACVDNPGRFDRSKCVGAHYGLTPRLYQSGETARVGRISRCGDAMLRASLFEAGLVLLTNPRIRWSPLKAWGMAVAKRRGMQKAVVAVARKLAMTC

SEQ ID NO: 170185 - protein, 408 aa, unidentified
MEVLHPRCAGLDVHKDSVVACARIVSESGVRQDVRTFSTMTTGLMELSDWLSDHGCTQVVMEATGVYWKPVWHILEESFDLLLANAMHVRNVPGRKTDVNDAMWLADLLAHGLVRGSFVPPTSIQEVRTLTRTRKQLIREKSQHVQRIQKTLEDANIKLDSVVSDIMGTTGRAILNALSEGEADPQVLANMARGNLRAKRQLLGEALHGRVTRHHRFLLKLHLDQVAAIEQAISTVETELGALLEPFREKVQRLITMPGVSNVVAQVTVSEIGLDMARFPTVGHLISWAGFCPRNDESAGKRRSTRVRKGAPWLKTTLVQAAWAAVRTKGTYLRAQFLRLKSRRGPKKAILAVAASMLTAMYYMLRDGVDYRELGDNYFDRLDEKKTVTRLTRRLEQLGYAVELKPAA

SEQ ID NO: 170186 - protein, 456 aa, unidentified
MKEKELSMQIVHPNAAGIDIGSKTHWVAVDQIPGNVREFGVYTRDHQRLIDHLKTYQITSVAMESTGSYWQTLFHALQKAGFEVILVQGNQTKNVQGKKTDVLDCMWIQKLHSLGLLSSSFLLSDYFQTLRSYYGHREHLIEQTAMYINKMQKALRLMNIRLDVAIRDLAGKSGRAILDAILAGHRDPNYLASLAHFRVKKSPDEIAAALHGNWREDLLFELRSCLAFYDAYRKEILICDQKIQAIMLEFIPDAEALTLESNAGEKPIRKQVNRNSPSFNIRHLAFAHFKIDLFQIPGVSHSTALCILCNMGNDIKRFASAKRFASWLRLVPNNKLSGGRIISSKTPKGKNAIALALRQAANSIGNQKEHPLTPFFKRIAYRKGRNAAITATARKLAVIIWNMVTKTQPYRQPNFELLLEKRKYAQVRNIKSRLFRLNLSDSEMMELFQKTSFPST

SEQ ID NO: 170187 - protein, 343 aa, unidentified
MEITVLGIDLAKSVFQLHGVDKGHRATLRKKLSRAQLPAFVANLPPCLIVMESCIGAHAWARKFRQFGHEVKLIAPEFVRPFVKSNKNDANDAEAIVEAAVRPSMRFVSINTVDQQDIQVIHRVRERLVRQKVALMNQIRGLILEYGVAFPKGKTSIEKSLPSVLSSEMTELTVMSKQLFTELLGELRGIKEKLAEYDHKIQAIHKAHPVCQRLATIPGVGPLTATAILASIGDPKSFKNGRQLSAYMGLVPRQHSTGGKDRLLGISKRGDPYIRKLLIHGARTVVQWVDGKTDSKSEWLKKLIARRGINRATVALANKNARVIWVLMAREENYREPVQVTAA

SEQ ID NO: 170188 - protein, 349 aa, unidentified
MNKHKTIGIDLAKRVFQVCVVDTRSSRVQVNKELKRHQVLDFMRRQPACRVFMEACGGSHYWARQLQALGHTVALISPQFVTPFRKGHKTDANDALAIVEAGLRPDMRFVPLKSVEQQDIQSLHRIRERYIHQRTQLINQVHGLLQEYGVISGRGQKALKQRVWLALEDADNELSMLMRDLIAEQMAELDRLNERIQSLDKRVEQMSRAVMPCRQLLAIEGVGPVVATQLYSALGNGNAFKKGRQASAYLGLTPTQHSSGGIAKIKGIGRTGQVSLKAALIRGAHSAINTVGDKQDAKSRWLRALVARVGKNKAAVALANKTVRTAWAVLHRGQAYRQEFHESSALMAS

SEQ ID NO: 170189 - protein, 350 aa, unidentified
MDSLSEIVEVVIGVDTHADTHSAAVLDARTGGVIAEITVEATPGGYEQLVEFADAHSGLRAWAIEGTGGYGAGLTRHLIAGEEVIVELDRPERAKRRNGVKSDRVDAVRAAREALGRAHLGAPRSMGARQALSVLLAARRSAVEGAADAQRQLLSLVIAAPEAIRAKFRGQTTAATVRTAARLRDRHELDLETRTALTVLRDLARRAGQLSAEASRHEKQILAIVRSWRPELLERCGVGPIVAATVLCAWSHPGRIRSESAFAMLSGTAPIPANSGQVTTHYRLNRYGDRRLNQALHTIVICRAQHDEATKNYIKRRTTEGKTPREIKRCLKRYVARELFRLLENGPNAT

SEQ ID NO: 170190 - protein, 358 aa, unidentified
MAGKVTETAVVGGVDTHKDLHVAAVVDQNNKVLGTQFFSTTRQGYRQMLAWMTSFGALKRIGVECTGTYGSGLLRYLQNAGLEVLEVTAPDRMERRKRGKSDTIDAECAAHAAFSGIRTVTPKTRNGMIESLRVLKTCRKTAISARRVALQIIHSNIISAPDELREQLRNMTRMQLIRTLGSWRPDASEYRNVTNVYRISLKSLARRYLELHDEIADLDVMIAAIVDELAPELIKRNAIGYESASQLLITAGDNPQRLRSESGFAALCGVSPVPVSSGKTNRYRLNRGGDRAANSALHIIAIGRLRTDDKTKEYIARRVAEVHTKMEAIRCLKRYISREVYTLLRNQNRQINSIPITA

SEQ ID NO: 170191 - protein, 393 aa, unidentified
MQRDTKEVLAELVGKLKAKLDPTKVAATSAGEKHQRGELRPNLDRLTVGVDLGDQWSHYCILGLEGERLAEGQLRTTQEDLATFFQGLNEARVVVEVGTHSAWVQEVIRGCGHEVLVANPRLMDGSKRRKRKNDRIDANKLARLGRVDPESLYPIQHRSREVRQDLVMLRARDALVAARTEIINTTRGLVKSMGTRLPKCSSRSFAQKGEEAVAVEMREALLPLVRLAATLSADIKEYDKKIEELGREKYGHTALLRQVKGVGPITALAYVLTLENPQRFAKSRDVGPYLGLVPKQEDSGESQPQLGISKAGDTMVRKLLVGSAQYILGPFGPDTDLRRYGLRLCERGGKNAKKRAAVAVARKLAVLLHRLWVSGEVYEPLHYAMSAPIVAAA

SEQ ID NO: 170192 - protein, 389 aa, unidentified
MYYCGIDIAKRKHDIAILDQEGNLQDKFLKITNTASGFEQLLSKLQTLDQDVLIGMEATGHYWLALFDALSAAGYKIVVLNPLQISAYRRSGIRKVKNDRKDAWWIADYLRIANLSPTDRQLPVLLQLRELSRFRYSVMDQVGDLKRKIISILDRVFPEYETLFSSVFIKTSRSLLKEAVTAQEIADFDLSELTALLQSNSRGRFGLEKANHIQDLARQSVGVGFLQDAVRIEMGCLLDQLELLLAQIAHLDDSIAEIMDSIPQHITTIPGIGAVTGAAILAEIGDVNRFESSEKIVAYAGIDPSVYETGQFKATKAHMSKRGSPYLRHALWQAASMAIFYDPELKSYYEEKRQEGKHHGTAVGAVCNKLISRIFVILKEQRPYIIRDC

SEQ ID NO: 170193 - protein, 349 aa, unidentified
MTGETAMTLYIGVDFHPHQQTLAWCDTRTGETRTLDLGHDPEKVRHFYSSLPEPATIGIEASARATWFENMLFETGHKLFVGNPVLIRKRATSRHKNDRRDAELILELLMRDEFPTIWRRPPTSNQIIDILGLRQKLVRQRTQVYNRLQGIAHDVGLPKGKMSTLCFQALIKAADTDEATSIRRSHLFSLLEKLNEQIDELSRWLKQKAEAETAVKLLLSQQGVGYLTALVTVHTLGDMSRFTRVSKQVASFAGLDPVERSSAGKTRFGGISKAGSSLLRYQLGLAAHIAARSDPKLKSFRKRLAKKKAKGVVRTAAARKLLVKLAIMLRDGITADEFDRRGRTVGNAR

SEQ ID NO: 170194 - protein, 430 aa, unidentified
MEVIHPRVAGIDVHKKIVWVAVRLPGERPGERTVTAKRFKTFWRSLRKMAAWLSELGVTDAAMESTGVYWWPVYHALAQAGIQVCVCNAAHMRNVPGRKRDVMDCQWIAELHEHGLLRPSFIPTGAVAGLRSRTRYRKKLIEQRTSEGQRLAKVLEDAGIKIDSVASRLLGVSGRAMIEALIAGERNPGLLADLALGRLRRKTEELQLACDGRFTAAHGQMCRLHLDAYDHLTVKIAELDALVAEAAAPFAALIARLETIPGIGRRTAEVIVAETGGDMARFATAARLAAWAGLAPGDNESAGKRKHAAARKGNRHLRVAMVEAAWATARTRTRPGARFRRLARRFGKGNEKKAAVAVAHTLICIAWAVLSRGEDYAEAGQDYYEQRDQRNREHLTRHHQQALARLGYQVTLIPPGDGSPPPSATSQQPA

SEQ ID NO: 170195 - protein, 348 aa, unidentified
MKNKSFVGIDISKKVIDVSIFREDTNIKMFPHEVFNNTRKGFGDMCSWLKKSRVVLSQALFGMEFTGCYSLDLEKFLTSKNYSFCMLSTRIVKHHPMGTIDKSDKNDSAKIADFLYRYDGTECAKPYKLPSKAMQQLKQLVNERKFLVEQRTNFMNRMQMFETKEDSAMYESYIKKLNHDIEKIDQEECELMSKEEDVLDTFQNLLTIPGIGFVNATNIIAITRNFTAFDTARQYARYVGVAPCSHTSGTSVKWRARPSAHCNGQVKADLSMAALRSVEYDVEMQIFYNRKLGGRKDSDTKRKALNAVKFKLIRRMFAIGKQKRKWEVLNTSDDRKNLHIEKSKASEL

SEQ ID NO: 170196 - protein, 344 aa, unidentified
MTITTVGIDLAKNVFAVHCVDQHGKTVLVKPKVSRAALPELIASLPPCVIGMEACYWARLFRQYGHEPRLMAAKFVSPYRMAGKSGKNDAADAQAICEAVRRPHMRFVPVKDESQQAMQCLHRIRQGFIEEKTATYNRLRGLISEFGVIAPQSTDALRHMVSEQKSSLPLQVQQCVNDLLEHIDRIEDNITEYDRILSRMAKTDHRSQRLMELKGIGPTTACALVASIGNAHDFKNGRQLAAWLGLTPSQYSSGGKSKLGRITKAGDSYLRTLLVQGARSVLIGAEKRTDLFSRWVCSLVDRRGYWRAVVAIAAKNARLCWHHCITVMISGCTQPAKARNKITI

SEQ ID NO: 170197 - protein, 359 aa, unidentified
MSSEIKYIGMDVHKEAITIAIRNGSGKLVMESIIETKAATILQFIQSLRGELHVTFEEGTWAAWLYDLLQRHVHELVVCDPRRNALLKEGNKNDKVDARKLSELLRAGLLRPVYHGENGLRMLRELARSYSTLSKDMTRVMNRLKALYRGWGIPCGGIQVYDPRYREQWLEKIPEAGVRRRAELFYGHLDGLHALRQQARRELLSESRRHKASKRLREIPCIGPIRAALLVALMQTPHRFRNKRQLWNYSGLGVTTRDSAQYRYVCGQLQRSKKPQQLRGLNQNHNHQMKEIFKSTATSATYCAGPFQDFYTRLLAKGMAPEMARLTLARKIAAITLTIWKKGDRFDPNQLNQLNLQAA

SEQ ID NO: 170198 - protein, 449 aa, unidentified
MAKKKRKYRKLERSLPVMRPNAGGIDIGATEIFVAVPADRDTESVRSFPTFTQDLHALADWLQQCRVDTVAMESTGVYWIPLFQILEARGIEVHLVNAQHVHHVPGRKSDVLDCQWLQYLHSVGLLRASFRPEHAVCEIRSLMRHRENLVQMACVHVQHMHKSLDQMNLQIHHVISDITGVTGLAIVDAIVAGNTNPKELARLRDHRIKASIDTVTKSLVGDYRPEHIFTLKQSLTAYRHYQKLIADCDQEVQQRVEAFQSNDDGPTAAADSSSATSPTAPRFDLHTHLERIFGVDLTAIPGFDVLRIQTIFSELGADMSPFPTDDTFCSWLNVCPKDGTSAGRRIRAPKVKTKNRVTQAFRMAALSLHNNKSYLGDYYRSQRARHGALKATKNAAHKLARIFYHLVKTRQPYDETVFAKLEARNQKHRLHKLQTLARQMGYSLVQANA

SEQ ID NO: 170199 - protein, 404 aa, unidentified
MRFIGLDVHRDWCDVAIYEDGSVRSVGRIGTAPDQLQLFAQSLGPDDRVGLETTGNALSIARIIEPHVAGVLVADTRNVRAMTHAKVKNDRVDARMIAKLLAAGMLPGVWICDEQTRVLRRQIARRTQLVRGRTRARNQIHATLIRNLGGRGPARDILAKKGREWLQSLELPADERATILSCMREADFLARELAQVDREIARYAVGCPEIRRLMTIPGVDVTTAATLMATIGRIDRFASPRHLVGYLGLDPRSRQSGLGAVQHGHISKQGSATARHVLCEAAHATMRSPGPLRAFGQRVRARRNNKIATVAVARKLACLTWQLLTTEQDYIYERPALTFRKLRQLELAAGAPKRHNPRGSRPPAATPDTPAQWKTERQDAQRVEDDYRAAVADWKPQRPPSPVT

SEQ ID NO: 170200 - protein, 319 aa, unidentified
MQSIGIDMAKETFHAAFDDRTVMKFENTPAGIEEFMTTLEDDDFPITDTRIGVEATGVYHLLFAVTLTENSWDVVVINPLESHRMITQGLRTVKTDRLDALKIRTMTGMGKGYLFTDTKDVLALKALVVERQALVEMRKMTKQRMDVHRLKEAATGFAFYDSFTTVLEALSEEIKHIERSMRGYETETETQELLRSIPGVGSTTAAILVAFIGDIHRFATPEKLVAYIGLDCRVYQSGTSVHGKGYISKRGNGYLRHILFNAAFVARRNNPDLKRYHEQKMREGKHYFSALCAVERKLVHLIYAVWKRGTPFVRRSQSA

SEQ ID NO: 170201 - protein, 339 aa, unidentified
MQLYAGLDLHSRNTYIGIMDKKLQRVFSKRVLNKLPLILKTLAPFQDQLKGIVVESTFNWYWLIDGLMDAGYQCVHLANPSAMKQYEGIKHTDDQHDAFFLAQMLILGILPQGYIYPKEDRPVRDLARKRLFLVRHKTAHILSLQSLITRCCAQRISANEIRKFTVEDLQQLLKEEHIVLSAQANLDTIVFLKQQIQRLEKTIQKKVKLNTTYQQLLTVPGIGLILAMTIMLEVGDIGRFAQVGNFASYCRCVSSQRLSDGKSKGHGNRKNGNRYLSWAFTEAAHLSRRYNEHFRRYYNRKLAQANTSLATKALSNKLARICYYIMRDRVPFRQELLSH

SEQ ID NO: 170202 - protein, 483 aa, unidentified
MADYFLGCDVSKGYADFTILDSKKHVAESDFQLDDTFEGHSCLCNILERFFKAHPDSTLYAAVESTGGYENNWLNLFYRLSGLMNVKAARLNPVGVNAYNKASLNRNVNDSISAKNIAGYLISYPEKIPYSQEDTRSSLRKQWNFIAMLKKQRTQLFNQLGFHIYTANTAILKYCKNGLPRWVLYLLERYPTSLKLSRARVSAVSKIPYISQERARDLILAARKSIASSGDEVTEFLIKETVKQIINLGKSIELQEKYLEKHCDIPEVNILTSFKGIGTLSAVGLSLNIVTIERFPTVKHLASYFGLHPVYKESGDGMWGFHMSKQGRIEPRAILFMAARSAINSNPLIKEIYIKHVQRGMSKMAALGVCMHKILRIVYGMLKNQKAFDPEIDRENSRKVLSTKETRESKKKDARRRYQKQDDSAPVSRRQGIKRKERKKSQSNNVTKNGIIASSPSIQEAMHLKGGKRPYQIFKERANELTH

SEQ ID NO: 170203 - protein, 340 aa, unidentified
MRMFAGLDVGFKRTSVCIVDQTGKIVWRGSVDTHPEMIAAALHRWRGGLAKVGLESGPMSPWLARALGALGFAVVCMDARRAADAIKSRRVKSDKADAYALAEMLRTGWYSAVHVKSEESHRLKALLGSRDQLVRAKRALGNQVRGVLRPFGVRLPSRQGTKKFSMAAHHAVRHDATLNASVTALLEALAAIEAQIARLDQQLKELARRSPVCWRLMSVPGVGPIVALAFMATIEDVGRFRRMRDIGAYLGLTPKRYQSGETDVVLGISRQGDAMARHYLYEAANVLLTTVRSTSALKSWGLKVLKRRGPKRARVAVARKLAALLGRIWKDETHFDAVTA

SEQ ID NO: 170204 - protein, 471 aa, unidentified
MGKGSGMTRGDRRRNARRERLRELLPRDGAVIGIDLAEDKQALAVIDHDVRVLARKTVRVKAFRLGEALDWAVAQARAKGFAQVTVACEPTGPRWMQVRRLCAERGLPLVCIQPLVSHIAREQQDYTTHKTDESDCVLIARLAVELHCYIPEELDESWADLRHLGRRRAQLITAATASVQRIGDFLSVAWPTVTETCAQPFESNTWLAAMQLVTSRCGGQPARLAAMGEEAFTAAVRAAVRDWGGQKAWGPISRRIFAALTDTEGVVAWSRRGLLRRVADELGDLQRTRAQLRAVEADMVAVLGELGLSRLADIPALTAVGVAAILAETGDPRRYDSSSSLVKHAGLSPSDNASGAFSGQAHISRRGRPGLRLTVWRAVWPMLQHNPVMAAKYQAMTRAADAAAADAGPQQGTAAERAARARRAKARVACAASLLRWIYCMVVHDTSWDPAVASGAASCHDAAPHNQAEAA

SEQ ID NO: 170205 - protein, 345 aa, unidentified
MSHITRIGIDTSKAVFTLHCVDDTGRAVLRTNLRRAQMVPFFRKLPPTEIAMEACGSSHHWARELSALGHTVRLIPPQYVKPFVKRAKNDRNDAEAICEAAGRPGMHFVPVKSAEQQANGMVLKVRETLIGQRTQLVNTLRGHAAEFGVVAGKGISCIAPLLEAIEAEAAIPLEAREMLALLGREIEHLNTKLAELEVKLTAMHKANPLSQRLATIPGVGVIIALTLTIEIDPTAFKSGRHLAAWIGLTPKEHSTAGKQRMGGISRAGNERLRQLLVTGATAVIRFADRPGNKQANEWLLNLLQRRPRKLAAVALANKIARTVWAMMKSGETYRRQPVAAGAVSV

SEQ ID NO: 170206 - protein, 422 aa, unidentified
MEDERNWFVGVDWASETHHVRVSDARGRKLGERAFAHSGEGLAAMAAWILEVTGAAPEAVLVAIEVPHGPVVESLMERGFRVHSINPKQLDRFRDRFSPAGAKDDSRDAEVLGDALRTDPRCFRALQPLDPVVVELREGSRMAEDLKQERNRLGNRVRELLWRFYPQMLGLTDDVAAPWFLDLWRLIPTPEKAARVREATVDRLLKRHRIRRHSAADVLERLRTPAIPLAPGTVSAATAHLEAVAKRLDLVNRQMLAVDERLDRLTQSLAGAQEGAEGQRPEPCDVTILRSLPGVGRIVLATLLAEAFEALQRRDYQALRCLSGVAPVTKRSGKSRIVLMRQAAHVRLRNAVYHWARVAAQHDPRSQAKYAALRARGHGHGRALRSVADRLIGVACAMLEAKTIFDPNLASQRALNLGKPTC

SEQ ID NO: 170207 - protein, 449 aa, unidentified
MERRQPQVKNWEGLKVIYPNAAGLDIGSEEIWAAVAPASAPAAVRQFGTFTPDLHALADWLATCGVDTVAMESTGVYWIPVYEILEARGLQVYVVNARHLKNVPGRKSDIQDCQWIQGLHSVGLLRGSFRPEGEIVALRAYLRHRAALIEYRGAHIQHMQKALQQMNVQLTQVIADITGVTGLAIIRAIVAGERNPQQLATLRQHGCKRSEETIAKALTGNYRPEHLFALQQALALYDFYTEQLRACDVEIEHQFVNLKPIDDDLPPLPPTTKTDSHSKNGPAYDARTLLYQLTGIDLVAIMGLNASTVQTIIAEIGCNVNAFPTEKHFSSWVGVAPHNDISGGKRLRSRTLKTNNRAGQAFRIAAQSVAKSDSAFGAYYRRMKARLGAKQAIVATAHKIARTFYFVLKHRVPFHDLGGEEYERLANQRERKNLQKRAAKLGMVLVSAT

SEQ ID NO: 170208 - protein, 424 aa, unidentified
MQNTAARKRKQLPEGYLVVGVDPHKKRHAAVAITQDFTNQAKFKLDNTREGLEAMLDRAKVEMVKSGCRGVMFAIETGGHYWRNVAYFLDEQGVPFRFINQFTLKRRREGKDLNRRKNDYRDGEVAAQLLCTGEFTESKLPQGAYAELRTAHNAYRRLVKERTRITNLVKGLLDALFPEFTQIFKDPCALTALSALSTCPIPRVIAKMTEDEFVAIIEARHKGRRLMRKKLRALHYSARTSIGIDAGARSVSSEIAFLVDKLELIRQQICIMEGKLIRLVDETEEGKYLLSIRGLNYIAVAGLLAELGCFKAYRSARQMIKMAGTNPTESESAGKKRARTPMSKQGRPVLRYCAWTSVIPMLRFNPDFRAWAKQRRERPVHANPLGGREVVGAALNRLLRLAFALVKNQTYYQVSKPEPTLVAV

SEQ ID NO: 170209 - protein, 343 aa, unidentified
MIGLDAAKSVFQVHAVNEAGKAEVRRKLRRGEVVPFFAAQPACTVVLEACGAAHHRARVLAGLGHEVKLIAPEAVRPFVRRGMKNDAADAAALCEAARRPEVRFVPAKSAEQQATLALHAARSLLVKQRTMLANAIRGLATEFGLTAPQGMDELARLTALAEADAAVPAGTRQAIRGLLAQCRVLGESVEALEAEIVAHARRDETARRLATIPGIGPVTASLIAATVADIGAFASARSFAAWLGLVPRQHSTGGKTRLGRITKAGNREMRRSLVLGATSMVHRAGVWNSAAGAWVRGVLERRPVRLATVALANKMARIAWAVMTRKEVYRPSGRHPATAQAAA

SEQ ID NO: 170210 - protein, 430 aa, unidentified
MKFNTQNKKIEAITEKTLVIGIDVGSETHYARTFDYRGIEYSKKPFKFSNTEAGFVTFKEWILDLKERHEKDKVVPGMEPTGHYWFNLGKFLQDNEMKPVLVNPHHVKKSKELDDNNPTKNDRKDPKVIAGLVKEGRYMIPYLPEGVYADLRTASNMRFQIQSELTRIQNRISRWVNIYFPEYKTVYGRPDAVSGMMILKQAHLPEDILTLGVEGVNQIWRDAKMRAVGKKRAQILIEAARHSIGAKEGSMAARMEIRMLLEDYESRNNHLQEVMTLIEELVKQIPMAEKLMDIKGVGIKTVSGFLAEVGDVSRFSNPKELQKLTGLALVENSSAKHEGQTTISRRGRKRLRYLLFEVAMSLVAKNPKFRELHNYYTTRRLNPLKKMQSLMAISAKLIRVFYAMLTKGVDYDPKKMVSDIKRPAVYLQAA

SEQ ID NO: 170211 - protein, 369 aa, unidentified
MKKHSKKESKQVCASATKGQPEVTIGIDVGDQYSHFCWLDAEGEIVKRGRVSSTQAGLKKVFGKIPAGRIALETGTHCHWMSEVLSQLGHEVIVADARELKSISGSRRKNDPRDAEQLARLARVDVRLLHPVMMRKRKTQQDRSVLRARDLLVASRTQLICAIRGMVKADGSRLGDCSAESFPEQVGQSIPEGLRRALAPLLETLDVLNEKIRYYDELVTHIAGEEYPETCLLKQVPGVGPVTALYFRLVIENAQRFQHSRDVGSYLGLVPKQQDSGESTPQLRISKAGDEGARRLLVNCAHYILGPFGPDSDLRRWGLRLAARGGKNAKKRAIVAVARKLAVLLHRLLVTGEVYEPLRNSQAAERAAA

SEQ ID NO: 170212 - protein, 348 aa, unidentified
MSIVEDTRAVTGGVDTHADVHVAVALDELGALLGTAEFARTPEGYAALLGWLDGFGPVAKIGIEGTGSYGAGLARTAAAQGMTVVEVDCPNRQDRYRFGKSDTVDAVSAARAAQSGHAAGLPKGGTGPVESMRVIMVAKRSASAQRVRTINQMRHLIFAAPDTIRGRFYGLNIYHLTRVAAAMRPRPADDVDYVTLYTLRELGRRARLLDGEIDRLDALLKPIVTAHAPALLNVFGCGLLNTATLCVAAGDHPERIRNEAAWANMCGVAPIAAGSGKTNGRVRLNRGGNRQANSALHRIVLVRMGHHEPTKTYVARRRAEGRNNLEIMRTLKRYVARETFKHLPRSTD

SEQ ID NO: 170213 - protein, 370 aa, unidentified
MSVRRILAKTIDTDLEYEAIGIDLAKNCVSAALLTTDGEVVCIDRLDYSELEKSAQALSSTTFAMEPCTEMNYLVQKLEAWGHRCLVIGGKNVQNYVENHYSGQKTDLNDAQALAFLAQDTQLRTIKAKDVEQQKYASLTTLREQYIKQYRQTIVSLKGICQAWGLNISKGISGKARLKDLIENHAAFPEELKESLVDMVTHAQTAQKALNKITKTLEELAKSDKVCQLIQTIPGLGSICSCRLRATVGDIKRFKSPKDFPAYYGLVPRSIATGHNERKGKITHRGDRTMRSLMVQAAGSLVNMATKGKLKSKQLTKWILKKQKEKMPWGKLVCAVAAKLLRIVRAVLISNKPYNSKIAGVAKCSLPKGS

SEQ ID NO: 170214 - protein, 338 aa, unidentified
MKLYGAIDLHSNNNVTVLIDEQDKVVYEKRLPNDLGVIAQQLAAYQSSLEGIVVESTYNWYWLVDGLMDKGHQIHLANTAAIQQYEGLKYTDDHSDARWLAHILRLGVLPEGYIYPKEERAVRDLLRKRGQMVRQRTANLLSLQNLITRNTGSSISSNRIKTLDSETVDALLLNPDLALAVKANLAMIQCADGQIDILERTVTDRVKLRAEFSFLKTVPGIGQILALTIMLETGEIRRFSTVGDYASYCRCVGSQKLSNGKKKGSGNTKNGNKYLAWAFVEAANFAIRYNARIKSFYQRKKAKSHGVLAIKAVAHKLCRACYYIVKNRVAFDIAKAFA

SEQ ID NO: 170215 - protein, 346 aa, unidentified
MREITRIGMDTSKHIFQLHGVDAAEQVVLRKKLSRKQMLEFFAKLPATVIGMEACGASQYWARELCRLGHEVKLMAPQLVKPYVARNKNDWRDAEALCEAMSRPNMRFVPVKTAEQQAALMLMGIRDGLIARRTQLGNTIRGHAAEFGLIAPKGLDKLEELLTRIAQDETLPALARELFTVLGREYGGVDSELKEIEAKLMAWHRADAVGRRLAQIPSIGPIIATTLVMKTPDPRAFRSGRHFAAWLGLTPKDHSTAGKTRLGKITRAGDEDLRRLLVIGATAVIQQARRGRGQHSRWLLALIKRKPPKLAAVALANKVARIAWKLMVTGESYDVARMHAEPALAA

SEQ ID NO: 170216 - protein, 358 aa, unidentified
MHVPSRFTISPKRSMDHFAGLDVSVKETSVCIVDDTGRIVREVKVASEPEALLTALKNPSYHFKRIGLEAGPLSQWLFSALAEAELPVVCVETRHMQAVLKAQINKTDRNDARGIAQMMRVGLYRPVHVKTLRSQKLRMMLTHRKLLQSKAIAIENDLRGTLRNFGLKVGIAGKTKFEARIKELVENLPDLAELVEPMLVVRRTLREQIVILHRRLLAIVRDDEVCRRLMTTPGVGPVVALTYRATVDVPARFRKSKSVGAVFGLTCSKYQSGEIDWSGRISRCGDEMMRTMLYEAAQVMLTRTNKWSWLKAWAMQIARRRGMKKAIVALARRLAVILHRIWVDGTEFRWTREQAVAA

SEQ ID NO: 170217 - protein, 310 aa, unidentified
MGLFAGIDVAKDTLAVALSSGQEWSCANDARGIALLVERLEAANPALVVLEATGGYEEELLATLMAAGIETRRVNPREVHHFARAAGQLAKTDRIDARMLALFAERIRPPARALSDPEREQLKALVGRRSQLLQMITAERNRRAHAQRWLARSLQRTIRALERELKLIDREIAERLGRSTTLKPLHDLITSLPGAGPVLGATLIARVPELGRLSGRQIAALIGVAPFTRQSGQWRGRDMIFGGRAPVRATLYMAAVSAVRHNPPLIAFYRRPRGRGKPAKVALTAVIRKLLTILNAMLKHHTVWSAPCPV

SEQ ID NO: 170218 - protein, 340 aa, unidentified
MIEKISVGIDVSKKTFDVAIQISSKNKPIEKQFQNTNKGVKGLIKTLEKTRQNRDPKQIHICMEATGRYSRSIKNQLLETTTYTVSEVNPAQISAFGKTVLLRTKTDKIDARLIAEFCTKINPKASQQMPKWKYELKEYTRFSSKLIKERASLKVYLESVDILDIKTKVSTQIKCYDKQIAKIESKIKSIIASEPALKKECDLLTSIPGVGEKLAVTVLSELIQEDPSPLNSPKYSKRKQSAHSGLAPSKRQSGTSVNGQARICKTGNSVLRKALYMPTLSAIRFNPIVSSFFHRLVSKGKSKMVALVACMRKLLVIMIGVLNTQKPFSQDWVSKPYYAK

SEQ ID NO: 170219 - protein, 335 aa, unidentified
MQSVTTIGLDIAKSVFQVHGVDAGSQVVIRRKLKRRYVLAFFQKLPPCLVGIEACASSHHWSRELQALGHTVRLMAPAYVKPYVKRQKNDAADAEAICEAVTRTNMRFVATKTPEQQSGLVLHRTRHLFIRQQTAVINAIRAHLAEFGIVAPVGRTGIEELLKVIADPADRRVPEIARVCLSALGVQLRMFKEQILEFDRMIRAWHRSSEMSMRLDDCPGVGPALATALVATVADPKAFRSGRNFSAWIGLVPKQHSSGGKNRLGSISKQGESLSAQPIRGRCARRHPLCQDPWHQASAVAYGIAGATADESRRHRARQQDRTDVLGHDGQGRAL

SEQ ID NO: 170220 - protein, 401 aa, unidentified
MINNSILYVGIDVSKDKCDVCIKNRDGNELTKRFQVSNTKADIAKLYETIEWIKSKNSVNSDVVFGLEATGIYYLPLYLALKRDGNNIKLYNPIQTSAFRKTNIRKTKTDPIDSALIADMLRYSEPPLASEIKDLNLYQLRELVRVRRRLIEKRTICKVQLVRDLDLIWPGYKTIMPRVFGKTSLIILKKYSGPSKVISLQIDQFHELVSKVSRSRISRTKAEEIYAHAGSILTAPELESIISIDMKNLITQIELLDEQIYSIEKKTDRIAVKIDSKIMSIPGISGILGPIIIGEIGNIDRFPSAKKLVAFAGLDPVISQSGQIQNSTGPISKRGSPLLRQALFLGANVARQNDENLRGYYEKKRSEGKHHYSALNATAAKLLRIVFWVLKNNKEYQLILK

SEQ ID NO: 170221 - protein, 371 aa, unidentified
MEHTRFVGLDIHKERISIAVAESGRSGAVEYLGEISNDPDAIGKLCDRLRRPGKTLAFCYEAGPCGYGVYRQLTDIGHRCDIVAPSLIPTKPGDRVKTNRRDATMLARLHRAGELTPVWVPDADHEAMRDLIRLRSVVRQIVTRARQHLQGFLLRHGRKHGRGTAWRMAYRRWLSTLAFKHPAQQVAFQDYVDAVMDAERRLQRVEEQISGLLPEWNLRPVVDALQVMRGIALINAVVLVAEVGDFTRFSNPRQLMAYFGLVPGERSSAETIRRGGITKTGNAHARRALVEGAWAYRMKARIGRHKVDRIEALPKVVRDIGWKAQVRLCTRYRRLSARGKTANVVNVAIAREMVGFIWSIACTVQSAPKTA

SEQ ID NO: 170222 - protein, 410 aa, unidentified
MSVLEVALDPATVIVAIDPGKAFHRVWISNGSGTLVDPMSLSVSREGISQLELALNKHGPGAPVIAIEATGSLHRPWVTELERRHPGSVRLFAPSETKSARMQLGSGRFKTDDRDCAALTYMARQGGGRRYGQQVSVEALRTAVRHRRGLVADRKVAQQRLHDQLNALCPGLSAPAGHGRSLALETPTGLAVLACAAAFSGRPPQLRSLMCRAPGRLTPNTAHYWLRRWRECLPPPADADQRAQRLNRDLDRYRRLRTDIDALDVEIGALLAETDGQILTTLPGVASIRAAAFAAHSLSIERFPDAEHLYSATGLAPALYQSATLNRRGRISRQGLAEHRDALMGIAWGLSQSSPSFAERNAQLRARGMAPIQARVALARHACRVAFRLLRTQQPFDEQRYRQGRLSGER

SEQ ID NO: 170223 - protein, 359 aa, unidentified
MIVIGIDPHMKTHTAVAIDAVTGASVGVRTVSSDGEGHDELLTWARGLDAERCFAIEDCRHVSGRLERHLLPRGERVVRVPPKMMAGARDSARTYGKSDPIDAACVARAALREPGLPEASLAGPEQDARLLADHRDDLVDERKRIQERLRWNCHDLEVGLDLPPRVLDRYVWLDRLETALLALPQSTRRRIAIEQLSRCRELTVEIHSLQRELRSLMRTLAPDLLAIPGCSALLAARLVGQTAGASRFSGEAAFAKHTGCAPLPVSSGKSDRHRLNRCGNRHLNSTIHMIAITQARMHPPAIVYMERKKAEGMSYREGLRCLKRHIARMVFKTMQRTERRAAGTVITASFQGARVGVAV

SEQ ID NO: 170224 - protein, 354 aa, unidentified
MVTVGIDPHKHVHVAVAVDAGGKRTGKPLTIRNDGQLIIALLKWIRSITGGAPVTWAIEDGRGFARRLADGLLLAGQDVVWVPSRLMAAHRKLHAATGSKSDAIDAIAAAHAAIATPDLARHRIDERVRELRVLTDYRSDLVKRRTMTINQLKAQSHLWLDYTPGDLARNKALALLRARLDTAQTSPHVRHVLTEMITEIAEVNRRVGDLDALIKELISPLAPNLLQITGISHISAAVLVAEIGDITRFSSSAKLARYTGCAPIPVYSSDHERHRLHRGGNRRLNSVIYTAAIVQKRFNPAAEELTKRHQPTKGTRGARRILQRHLVDVIHRAMHIDQTSWQHQITKYQPAALT

SEQ ID NO: 170225 - protein, 396 aa, unidentified
MTTIGIDIGGRMHAVARCRDGQARADREILRIGQDRAGFAAFDAWLERQAEPVTLVTMESSGHYWMPLASHLRRRDIPVAVVNPLAAKYFAKSRLARTKSDPADARSLAEMAMRDTPPARDPLAGVELRQAARFAMTLVTEQAKVCQRLIRLVELGFPELGELFDDPTCRTAREVLRIAPTARAATRRRATTLANANAGPGHRRLGVAKAERLQAAAADSIAVPELDVEVAFEVGLLLDQYDLLEGQIEDADRRVAGLLDGETARRLQTIPGVGPSIAATLLAEIGDIARFDDFDQLLAYAGVHPAERSSGRKGSNPETAWHMSKAGNAHLRAAAYRMALVGVQHNPVIAAHYARKRAAGKSKMNALGHCMRKALAIVWGVWRNGADFDPNWGVET

SEQ ID NO: 170226 - protein, 354 aa, unidentified
MKAASNKEDHRYADSFSWHRPGQDDLSPCGARCSGKVLVKKKFTQRQLLTYTANMQTSLMGLEACSGAHFLGRALRKQGHDVRLIAAQFVKPFVKSNKNDFVDAEAIAEAVERKNMRFVPIKTDDQLDLQAIHRVRDRLISRRTAVINQLRAFLLERGMVFAQTPAKLKAAMADILENAEADLTPQMRNLIDMLWDEWKTVEQQIEELSMQLERIAASDAGCTRIRQIPGIGPIVATAIVAAIGNGAAFRKGRDFAAWLGVVPRQYSTGGKTKLLGISKRGNVYLRKVLIHGARAAVLRIKRDRAPIGPWLDRLDARAPKNVVVVAMANKLARIAWAVLSSGQDYRPLPSISAA

SEQ ID NO: 170227 - protein, 333 aa, unidentified
MNKITLIGIDTAKQIFHLVGVDARGHYIWRKQVSRARLLSTLAQIECCEVVLEACGASHHWARSIKALGHTVRLIAPQHVKPYRRGQKNDYRDAEAIISAALSPGMHFVGVKRVDQEAEQALHRVRSRLMSHRNAAANELRGLLGEYGVVFGRGLKPLRAGARCFVETEEAHALGLVELVNDVLDEIAVLQRRMDHYECQINQRVQADETSRRLREELSGVGKLGASALRVKVADVRDFGNGRHFAAYLGLAPGHSGTGGKVHIGHLKRGHDRYLRQLLIHGARSALRHLGDKQDAQSCWLRGLLERRGFNIASVALAHKNARQAWAIMAREQ

SEQ ID NO: 170228 - protein, 417 aa, unidentified
MRIVRPICCGADIHKNLIVATIATTSQDGITEYIQSSFSSQNFDLNRLKAWLKEHHCFEIAMESTGKYWIPVFNVLEDEIKVFVVHPKYTKAIKGKKTDKKDSKWIADLFKHDLLKFSFIPPKEIRELRELSRYRIKLIAMRSSERNRYQNSMTISNIGLASILSDPFGKSSRAVMKEVIRSSSVTEEKISKLLERNAKKKVKEVLQSLEGSHIESDQRLKMSISSQHMDQIDSHVKRLETEMAIRCIPYATQINLLLDIPGISYLSAMTIIAEIGTDMSVFETSKQLACWAGLAPANNESANKKKSVRISKAGSYLKPLLVQCALAAINSKSNLYYRIKYNRIKKRRGHKKAIIAIARMILVNIYHILSTGEAYNPCDMEQIINPKPVKKVMTIQNAIEFLQSQGFDTSKLISSSS

SEQ ID NO: 170229 - protein, 370 aa, unidentified
MEKYKYVGLDVHKETIAVSVADPDGGEVRYLGEIPNTAESVVELVKRLRREGAKLSFCYEAGPCGYGLHRQFLDLGQVCQVAAPSLIPKKPGDRVKTDRRDSLNLARLHRAGELTAVWVPDGAQEALRDLTRAREDMKHLQRQAKQRLLGFLLRHGKRFGGKDNWTQAHFRWMEEVKFEQPVQQIVFQEYVDSVQAMTRRVAAFDEQMESAARDSVFWPVIEGLMALRGVKLITATTIVAEIGDLRRFATAPQLMAYLGVVPSEHSSGESKVRGPITKTGNGHVRRVLVESAWQYRYPARKTAVLQRRAERASEQIQEIAWKAQKRLCARYRLLEARGKLKVQVCIAIARELAGFIWAIGQTLPQPAARA

SEQ ID NO: 170230 - protein, 320 aa, unidentified
MSPNTTNTMTETNSVVHAGLDIAKAQLQLHLENRQHVLPNTVTGHQRLIRLLRVVAGVHVVCEATGGYERKVVSALHSANLPVSVVNPAQVRHFALAQGQRAKNDPIDAALLTAYGHALRPNATPVPQAVLAELRELVQWRDHLKEQLVRARQPAEHATLAFVHRQQSKEVTHLEKQMAAVEKELAAALTRHPRWREQVQRLAELDGVGTLTAVSVLSQMPELGQLNRGQAAALAGLAPWTRQSGPWEGQRHIGGGRAVVRRALYMSAVALARQTGSTLGKFYARLRAAGKPAKVALTAVMRKLLLQMNQVLKYHVPDPA

SEQ ID NO: 170231 - protein, 269 aa, unidentified
MSSSPVYIGVDVSKFTLAVAGPGLRLEYPNTPQGHAAILKALPHGAHVVMEATGDYQREFALALHRTTIKVSVVNPRHVRDFAKAMGELAKTDKIDAAMISRYAASKAPDPDPLPSIVQLRLAEMVSRRAQLVEARIMETNRLEHHSTPVVRKQAQKTIKFFKQQIAEIEKLIKKEIDSDETLKKNFERLCQVDGVGLIVAATLLADMPELGKLSRSEAAALAGVAPHACDSGQFKGTRRIYGGRAAPRSVLYMAALTAARKNPILMAF

SEQ ID NO: 170232 - protein, 338 aa, unidentified
MAIHAGLDVSDKSTHICLVDGGGAIAWRGVCATDPEVIAKTLDRHAGALGQVVLETGPLSAFLYHGLVERGVAVTCICARHAKGVLAARVNKSDPHDAEGLAQLARTGWFKAVRIKQEATHLERAQLKVREQLCRSHRMMANQLRGLLKLFGLRLGQVTTSNKRAERLAALFTQKPELAPVLRPLVESLEALETQIRRTTRLLTASAAADPVASRLMSVPGVGPMTALTFKNSIEDPDRFDRGEDVGAFAGLVPRRNQSGERDYKGRISKAGDPLLRSALYEAANVLLVRVKRPSALQAWGKALAETRGPKRARVAVARKLAILLHRLWRSETEFCWN

SEQ ID NO: 170233 - protein, 316 aa, unidentified
MAQEQVVVGIDVAKDKVDVAIRRGAGGSFANDPQGHRQLRAWLKKHAVGQAVMEASGGYEKSWTQLLRKAGIEVVIVDPKRVRHFAKSAGQLAKNDPIDARMIAWFGEAFEHRGKPEDAAREELDQLVTARRGLSRLKEKIDNWGEHEQPRAVQKVHQALLKEIMRQQDWLEALIADRIEQSEHFAERAEIIQSVPGLAGNSAAALLAFLPELGQVDRQAVSALLGVAPFDDDSGKRRGPRHIQGGRRKLRCLLFTPILGAATQHNPVLKDYYRRLLAKGKEHKVALVACMRKLICILNTMLQRGEKWDPDRHVLA

SEQ ID NO: 170234 - protein, 460 aa, unidentified
MQNNGSCTNRAAAGPVEAPVRVQVGIDAAVTAHHHVSVRTVDVTGREHTERFMAAPTLSGLAALTGRLAPYRGVVAVAEPTSMTWLSLSVAVAQAGGQFTLLGSRHAARLRGAIAGKNKSDVIDADVLARAGEVFTLRPMPVLTPAQLALRRAVTRRGAAVIEGNRSWRRLMSLARWAFPDVWTAFGGSLPTAIAVLDRWPHLAQLGSARRASVTAVVAEHTRAVGDVPARVEQIRAAATAWARFWDGRLDLDALAWDVSEHLTDYHQALQRVDRATRQANAYWQQLFGDDPLLHSVPGIGPATGPTMRAFLGDGSMFDTGKQAACYAGIVPSNWSSGTVTQPSRAITKEGPAVLRLACYQAANAARQTDPQLAALYYRLMTERGHCHTQANVAVARKLVERVWTVIARGQPYQLRDPAGQPITARAAKALITERFTVPAQTRTRARAHSAATHRAKLTR

SEQ ID NO: 170235 - protein, 338 aa, unidentified
MKVYVGMDLHATNTYVGMVDEENEVLHKQRFRNELPLILASLDPFRKDIQGVVVESTFNWYWLVDGLMAEGYRVHLANVSAIKQYEGLKQIDDKRSALWLANLLRLGILPTGYIYPKEERPTRDLLRKRLHLVRHRTSHILSVKNILARNLGLRMKSEDVKRLEDPEVKRFFPDEEMQTAVLASVGLIRHLEVEISGIERMITKKLKIRKEFAKLMTVPGIGKILTLTIMLEVGNIRRFPTVGDYSSYCRCVKSVRTSAGKIIGYGNRKNGNKYLSWAYIEAAQAARRFHETVRSYYEKKMAKTNRIVAIKALSHKLTRASYYVMRDQVDYDPARLFR

SEQ ID NO: 170236 - protein, 343 aa, unidentified
MNTKVLGIDIAKNVFQLHGVDGPGKAVLKKRLSRNQLAAYVANLPECLIVMESCGGANYWARVFQRSGHTVRLISPQFVKPFVKTNKNDANDAEAIVEAASRPSMHFVPIKQVEQQDIQSIHRVRSRVVKNRTALINEIRGLNLEYGITVAPGAARVKRSLCAIIADNINELTPLSRECMQNLYDELVAIEARLKNLDKTIRQLCQQNETCRRILKIPGVGELTATAMVAAVPNANEFNNGRHMSAWLGLVPRQSSSGDKRVLLGISKRGDRYLRTLLIHGARSALSHYKNTDNDYGRWLTGKRARLSFNKAAVALANKNARIIWSLLNTGEEFNCNAQMAAT

SEQ ID NO: 170237 - protein, 347 aa, unidentified
MTTLARSVTGGVDTHLDVHVAAALDEKGTLLGVEYFETTRAGYKKLLAWFENFGPVVLVGVEGTSSYGAGLTRHLHAEGVAVVEVDRPNRQRRRRKGKSDPEDAISAARAAFSGDASGAAKTQDGNVEAIRVIRLARLSARRSRTLALNQMRSLISTAPDPVRDELRHLSVPRMLERAASYRPGTKTDLVSLTKWTLRTLARRAIALENEIKSLDDILKPLVVETAPKLVSTLGIGTDSAAALLVAAGDNPHRLRSEAAFAHLCGTSPIDASSGKHQRHRLNRTGDRQANSALWHIVITRMVYDARTTAYIERRMKEGLTKKEAFRCLKRYIAREVYGLLPMDRLTA

SEQ ID NO: 170238 - protein, 359 aa, unidentified
MPTQFKHLDFSGQNIYVGIDTHKKQHTISVLSEEMYLKTFTQPPVAQTLSNYLRKNYPGANYFAAYEASYCGFWLQEQLQSLGVNCIVVNAADVPTSDKERRQKRDPMDSKKIGRELRSGNLSPIYVPSKKTQCDRSLIRARKKLVGDLARSKNRIKSHLAFFGIDFPPQFEKTGTHWSKRFISWLNTLQMEYPTGELALKAQIHEAEQLRELLLKLERDIRKLSRTSHYKKNVDLLMSVPGIGRITAMTLLTELENITRFKGTDQLCAYIGLVPNVSASGEVERTGKMTKRSNRMLRNLLIESSWTAIRNDPALTLKYNELCKRMKPNKAIIRIARKLVSRIRAVLINEIAYQNAIVA

SEQ ID NO: 170239 - protein, 367 aa, unidentified
MRGENWSSEVLVGGKGVFIGIDVHKENWHVTVRVKEEEVFHGSIPSQYHALRRLLDHFKDCKIKVAYEAGPCGFWLYDRLTEDGIETIVVPPSLIPIESGNKVKTDKRDSRKLAKLLESDMLKRVYVLTEGDRADRELLRTRRQVLEHRNDVARQIRSKLLFYGIRSPFSAKQGWSKQYLRWVKGLVFEREVLKASFQSLMELYEYLSAQLVKMNKRVIGLSRSEKYLDRVRLLWSVPGIGILIGMELLVELPEMERFKSGDELASYIGLTPSEYSTGQYVRQGRITRCGNKRVRMFAVEGSWVLITKDPLMWDRYRRLKALKGAKRAIIAIARMFMIRVRRILLSREPYRVGTPGVIRQRLVDSTA

SEQ ID NO: 170240 - protein, 320 aa, unidentified
MSQVVIGVDIAKKKFDVASLSDGKYKHKTFTNDEQGFANFVSWLLTLFINDKPLICMEATGAYSIPLADFMVSQGYPVSVVNPAKIKAFAKSELSRAKTDKADAKLIARYAFTMHPPLWIPPPQNIRVLQALVRRVEHLLEMIQMERNRLDTANANITDSITTVLATLETELEATRKAIHDHIDNNPELKRRRDLLITIPGIGETSIAHLLVVLSDHHGFLTAKQAVAYAGLAPALRESGQWTGKTHLAKSGDPALRKALYMPALVAWRHNPLLRIFCQRLKANGKNGKAIACAAMRKLIHLSFAILKSGKPFDPLFALK

SEQ ID NO: 170241 - protein, 269 aa, unidentified
MEYFAGLDVSMAETQICVMGRNGAVIHKAKVPSTPADIAAELAQLPTCRRIVFETGRMAPMLYHGLRQLGLPVICVESRQADQALKLLATHKTDHNDARGLAHLARTGFFKPVHVKSLPAHAVRSLIIARKKLVGQRVTLENQIRGLAVVFGVRLPRALSSTFIRQALQASEGIPGLSAAMQGLVAARTAVLAAIVAIDGDIRRMVRASDACRRLMSIPGVGQLTALAFTAAVDDPGRFRRSRDIGAYLGLVPRRHQSGEIDYTGSISK

SEQ ID NO: 170242 - protein, 375 aa, unidentified
MHLTQNDRIKQVTTDTMVVGVDIGEETHYCRAFDWMGVEFSAKAFKFSNTSGGFHTFLLWSRELMQRHGKSKILVGCEPTGCYWLTFQRYLKKQNIQLVVVNPYSVHKAKELDDNSPEKDDQKDPKTIAGLVREGRYSISYIPEGIYSEIREASRCRDRLMKDHVRLSNQIQEWLQKYFPEYLECYAKYDSASGITLLEEAPLPEDILRLGVTGIVQVWRDRKCRKVGLKKAKELLEAAQESVGIPGGEAARLDISILVTDYQTNLKQLERVEALLEEDVRKVPNVEKLLAIKGVGLNSVEGFLAEVGDIGRFTDPKQIQKLAGLEITKISSGKRKGQPGISKRGRAKLRCVMYELARAWRKRSRLKPGLIFAPA

SEQ ID NO: 170243 - protein, 331 aa, unidentified
MKKIIIGIDVSKLKLDVGHYTSEGRVKSNCVEIENNTTGYNDMLTWFKKKKFKLKDILICMEHTGIYTDQLTKFLEKKKIPYTLQSPLHLSKSLGIVREKTDPIDAFRLSEYADEKKGKIKVSRRAPENQIRLKQLASERKQAVYALAKVRQVKTEITVHQKVSSQKRKEKQIKLFNKIILEIEKEIQSIINSDNELYKNYSLLCSIPGIGLVNAINIIVFTRNFTLFPDARSYACYVAIAPFEHQSGSSIHKKTSVSKIGNHYLKAILGQAARSAINCDPQIRKYFNRKFNGKKGPESNYGQVLNAIKFKLICRMFAVIKRQTPYIRLDF

SEQ ID NO: 170244 - protein, 420 aa, unidentified
MTEDIEWFVGFDWASQTHVVCLLDRNGETIGERKVAHGGAELGEFGDWLIAKTAAPPARIGVAIETPHGPIVEMLLERGFAVFAINPKQLDRFRDRFTVAGAKDDRRDAHVLGDSLRTDRRAFRRLSVDDPTVIELREWSRIADDLSQERTRLANRIRQLLWRYYPQMLQLADDLTAENFLALWECAPTPARAAQIDEAGLAKVLKAHRVRRIGPAEALRILRQTPLRVAAGATEAAVAHIEFAAERVRLVNRQLKDAHQKLEALCARLERPTAGERENEPGQQSEQRDVTILRSLPGVGRTGLATLLVEATEPLRRRDYQVLRVLSGVAPVTRRSGKARLVTRRMACNERLREAVYHWARVAMQIDPESKRRYAALRQRGHSHGRALRTLGDRLLAMACAMLRSQTLYDPDRKAVSPAA

SEQ ID NO: 170245 - protein, 339 aa, unidentified
MNAITLIGIDIGKHTFHVHGQDAKGHAVLRRQFNRTHLLRALANLPACTVVMESCAGAHWLARQIQALGHSVKLIAPQYVKPFVQGNKNDFRDAQAICEAASRPSMRFVAIKTVEQQTLSATHRLRDALVSQRTVAINQVHGFLLEFGIALPATKTALQRLPGVIDDPALPLRLRAVLLRLHAHIQSLTQEIQAIEAELVAQVKADDAGQRLLSIPGIGPITASALAANAGDASQFRSGRDFAASLGLVPRQYSTGGRANLLGISKRGNKHVRRLLVQGARAVMQHAERRTDGLGVWIRQLLQRRHSNVVACALANKLARIAWAVLTKHSCYAARPAMS

SEQ ID NO: 170246 - protein, 355 aa, unidentified
MNSEKYIGLDVHQATIVVAVTDSTGKLVMESILETEAATILQFFAGLRGNLAVTFEEGTWSAWLYDLLNPHVEKLVVCNPRKNALLKDGNKSDHIDARKLAELLRGNQLKPVYHGENGVRMLRELSRSYLAIVKDLSRVMNRLKAVYRSWAIPCAGRDVYYRRHRAQWLDKIREAGVRRRAERLYEQLDMLQHLRQQARRELLAESRKHAITARLRQIPYLGPIRSALAVALMQTPHRFRSKRQLWAYSGLALETRISAEYRMVEGQVRRSKKLLSIRGLNKDHNHDLKALFKGAATMASVRPGPFQDFYQAALAKGIKPTMARLTLARKIAAITLTLWKKGESFDAEKLKSQAA

SEQ ID NO: 170247 - protein, 346 aa, unidentified
MSRTECLVTVGVDSHKELHVAVAVDQLGRRLGTTAVATTRRGFGQLERWAQRLGVIQRFGIEGTGSYGAGLARWLAARGHQVVEVNRPNRQTRRRQGKSDPIDAEAAARAALAGQGLVRPKAADGTVEMLRVLRMARRSALKARTQTVQQLDSLVVTAPDQLRARLRGLSLEQLVPVAAGLRPGELVGPLAATKLALRELVRRHQALSAEVVRLDQQITRLTATAAPRLLARGGVGPQVTTALLIAAGDNPGRLRSDAAFSMLCGAAPIPASSGKVVRHRLNRGGDRQANSALWTIAVCRMSYDPRTIAYVRRRTQEGKSKREIIRCLKRYIAREVHRDLKAALVM

SEQ ID NO: 170248 - protein, 410 aa, unidentified
MQSHYTTLFVPLDIGKNVHWCAAYAGFDLKPVVEPFKVRSDRSGFERVTTLIDDLLGNGQYDRLVLGHEPTGIYHQAWSRALYDRYEPHRTGQAQPRLDYQFLNPLLTKRQREQLARGRKRKTDAADLRAIAFCLRDGHGQPAFLPTDQAVRFQLWGQAYDHTRQALLRQSIQLISQLDRLWPGLVVNVKRFRQMHPDLETPTPLVLSKPLQRQRVRALLAYCPNPHDFLALGQTGIQNFYRSHIGRCGSATAQLAFQLVQNAVLPPPDIAALLADRLQADFAYFLSLQQRLDTLAAQADTLVPGSPAAVLATIPGVSPLLAARYLAHLGHPQRFVSAAQIWSFAGFDLVSQESGDFRRVGHISKKGDPGLRDTLYLIGLHTSQYLPAIAQAKQRTLKRGVKCRPHVYHQ

SEQ ID NO: 170249 - protein, 324 aa, unidentified
MAKTISAYVGIDVSKKTMDVTLLKATGGKKRKRFANTTAGILSLLKWLQWQTDGSVHICMESTSVYWEELAETLYEEGYIVSVVNPVRIKGYAMSQLRRSKTDPLDGDVIADFCRTQEVAPWMPPSSEQKKLRALVRHLEALKKSRTQQCNRLATCKDEEVKASLEALTNAINAEIEQIEKRIDDLIDQDPDIKEKKELLESIPGIGKKTAIHILAEMFDIESYENAKAVAADAGVTASHYESGTSVRRRPKISRMGKAAIRSALFYPAMTALRHNPAVQKLARRLEARGKKKSVIRVAAMRKLMHLAYGVIKNRKPFDPAYTG

SEQ ID NO: 170250 - protein, 348 aa, unidentified
MTEAYDGRQVVGMDLHRRRSVLVRMTEDGRKLETVRITNSPAELRKVIARAGENARVVVEATYGWYWAADVLGEAGAEVHLAHPLGVKAYTYRRVKNDERDAADLADLLRMGRLPEAWIAPPEIRELREITRYRHKLVKARTSYKDQVHGVLAKLGVPVSHSGIFGVHGQAWLDGLPLPQPYAGKVASLRQLAGELGAEIALPDKVPGDLLDGHQGYAAIQQLPGIGPVLAAVIVAEIGDIRRFPGPGQLGSWAGLTPRHYESDTKVIRGHVTKQGSRMLRWAVTEAIQRQPAGSRPREVKDAIIARRGKEAKNIAKIAAARELLTLVFYGMRDGRVRRLAAPRRPAA

SEQ ID NO: 170251 - protein, 343 aa, unidentified
MDHFAGLDVSVKETSVCIVDETGKIVREVKVASEPDALVEVLTSPSYDFKRIGLEAGPLSQWLYNALAEAGLPVICVETRHMRAVLKAQINKTDRNDARGMAQMMRVGLYRPVHVKTLRSQKLRMLLTHRKLLQSKAIAIDNDLRGTLRNFGLKVGMVGTAKFEARIKELVENLPDLAVLVEPLLVVRRVLREQIGVLHRRLLAIVRDDDVCRRLMTVPGVGPVVALTYRATVDVPARFKNSKAVGAVFGLTPSRHQSGESDRPGSVSRCGDEMMRMMLYEAAQTMLVVSTKWSWLKAWAMKIARHRGMKKAIVALARRLAVIMHRIWVDGTEFLWTREVTAA

SEQ ID NO: 170252 - protein, 321 aa, unidentified
MNKSTIFVGIDISKDVFDVYDSEDGHFQFTNDEKGFKLFRKELTSAHCCVMEATGCYHQRLAIALFEKGIRVSVINPLIIKRFIQMKLNQVKTDKSDSKMICRYGEEQALDLWSPEPDYIVQCKTLQGVVRLYFKQRTALKNTFHSMSTSKRGKGKLTRSIQRQLKCLDKEIGLLETEIENLIRANEQDLFTRLNTIPGVGKKTSMLLIVSTNGFRDFESSRQLSSYFGLAPNERSSGSSIRGRSRISKRGDSLVRNHLFLCSFTACVHNPQCKALYDRIVLKGKSKKLALIAVCNKLIKQAYGISRSGLEYDRNYVGRLS

SEQ ID NO: 170253 - protein, 373 aa, unidentified
MLNTTTFVGLDVHARSIKAVALDAMTGEVRSATFGYDAAEVAGWVSSVDPSAKCVYESGVTGFDLQKRLSSMGIDCVVGAVSKMIKPSADRRRKNDRNDAEFLARMLSVGNVVEVWVPDDGCEAARDLVRALDDARDDLKRCKQRLSKFLLRHGHAFSETTPSGRRKGNWTAAHWAWIKSISFAEKADDDDVLAYYIDATRRAMEDKARLERLVEAEASKPRWKRRVDSVRCLKGIDVMSAADLVFEAGEFSRFKNARSFAAWIGLTPSEHSSGESVRQGGITKAGNKHLRRVLVESAWHYLGCSPHSKDLAKGQAPGPGARRHAAKGVRRLVGRRAAMLERGVHKNKANVATARELACWCWAIGRMAEGADA

SEQ ID NO: 170254 - protein, 316 aa, unidentified
MNQPLYWIGIDVAKAHLDVHIRPTAELFQVPNTDAGIAQLVQRLEPLQPRLVVLEATGGLEFPAAVGLSRVKLPVAIVNPRQVRDFAKATGKRAKTDALDAAVLAHFAEAIQPSVSTIADEDSQRMAELVARRRQIVEMLTAEKNRLGTVRGSVRQDIEAHLEWLEKRLEELEAQLQQAIRQSPLWLERVNLLRSVPGVGEVTSSTLLVNLPELGSLSHKQISSLVGVAPLNHDSGKHRGKQVIWGGRAQVRAVLYMATLVATQRNPVIKAFYERLCQKGKPKKVALTACMHKLLIILNAMVKSATPWQPNLVEQA

SEQ ID NO: 170255 - protein, 344 aa, unidentified
MSTPTATPTRSRSPCPAAPRSPCTTISNDTSGYAELLAWIVDHTPGPRLAVSIEGTRSYGIGLARAAAAAGLVVLECEQPHRKARRGKGKSDPIDAHLAVLAALRLDADRLPTPRADGDREALRILLGARQELTTASTAQTNRLRALLLGGDDTDRTLARGALTEARLASLARRRPPREASREQAVRHAEIRRLALALREAARALKANRAQLQTIVNDVVPRLIERPGIGPVSAAQAIVSFSHPGRCRNDAAFAALGGVSPLPASSGRTVRHRLNRGGDRALNRALHTIAATRMRSCPTTQAYVARRTAEGKNPREIRRCLKRYIARQLYRTLATAMTPAAETS

SEQ ID NO: 170256 - protein, 420 aa, unidentified
MKDFSVDNFAALVGIDWADKKHDICELPTGTKNYQWSVISSKPEQLHAWAMALEKRYPGQHIAVACELKKGPLIYALSQYRNLVLFPINPTSLAKYRKAFFLSGAKDDPGDAFLQTEMLEKHMDRLKPIEAESVEVRALAQLLEYRRKLVQDRVDLTNGVSATLKNYYPQVLDWFNEKDTHIFCDFVIKWPSLTRVKRAHKNTLIEFFNAHNARYTQVNLKRIDAIKAAIALTDDKGIIEPNLMLIEILIPQLKQLLDGIKRLDDEIKRRYMLLDDRYLFDSLPGAGVQFAPRLLVAFGSNRARYQTASELQKYSGVAPVIESSGQKSWTHWRYSCPTFLRQTFVEWAGQTVRYSFWARAYYQQQEAKGKPHNTIIRSLAFKWIRIIFRCWQDHKPYDESRYLEALRKRRSPLLQFAVKS

SEQ ID NO: 170257 - protein, 351 aa, unidentified
MNILAMDLSKSNTVFCLYNKDSAKSRYGKVKTTPQQIHDLIVKYSPDRIVFEVCSAAGWVFDTADGLCSEVQVANPNTQAWRWKNVKNKNDKKDALKLAQLSAMNQLPTVHMPKPQVRQKRALIQYRQTLVSRVVGIKNSIRSILDKQGYSITAGKSGWSKRQVEILERLSLPFERCDIDNLWRGQLYVELEMMRSARKALADVTGKLDELAKSDKNIVLLQTAAGVGPRLAEAIAAFIDEPARFTSGKQVGSYVGLTPRQYQSGSMNRQGKISGQGNKLLRALLVEVSWLGLRHNAWISRTYHRLLRGSPSRKKIAITAVARKLLVRCWAMLRDGQPWRDIEAETERQAA

SEQ ID NO: 170258 - protein, 384 aa, unidentified
MKNSTARKLKQVSKGYLVMGIDPHKKRHAAVAMTQDFTTHSKFKFNNSKEGFEVALERIRAEMVRTDSRGVIFAIETGGHYWRNLAYFLDERGIPFRFINQFTLKRRREGKDLNRRKNDYRDADMAAELLRTGKFTETKLQHGVYAELCASYNAYRRLVKERTRIINLVKGLLDGTFPEFTQVFKDPCGLTALSVLSICSMPGIIAQMMGEEFVNVIRAKHQGHLMRKKLCALHYAAQVSIGIEAGAWSVSSEISFLVEKHRLIKRQVRSIDETLARLMDEAEEGKYLLSIIGLNYTSVAGLLAKSGSFRLYQSAKQLRKMAGSNPTESESGGKRASHTPMNKKGRPGLRYCAWTAVIPMLRFNPDFRTWARELRERPAVDRQR

SEQ ID NO: 170259 - protein, 341 aa, unidentified
MERLYYIGLDIHKKTISYCVKKVDGTIVQQGVIAAERKTLLKWIGGLPGPWLGAMEATLFTGWVYDFLKPYAVDLKVAHPEMLKAITAAKKKNDHADAEKIADLLRVNLLPECHMLSEELRELRRILRYRNMIVRTAVKMKNKMSGLLMEVGANYNKEKLHRRKYFNNLLERIEDVPDSVKDMLKLSRSSLEMFEAVQKKLIHTLLEDNLIRERVERLMSIRGVGEVMALTWVLEIGEHSRFSSARQAISYCGLCSAQRESAGKEQRGPISKKRNKHLQTMLIEAAKLAPRWNPQLAALHEKEVNQGNRNRVTISIARKLVEYMLAVERQQKDFVPSVLAA

SEQ ID NO: 170260 - protein, 355 aa, unidentified
MNQEKYIGMDVHQATISVAVMDSSGKLIMECILETKAATILEFIVGLRGTLSVTFEEGTLAAWLHDLLKPHVSHLVVCDPRRNALLKDGSKSDRIDARKLAELLHANKLHAVYHGEHGVRTLKELGRSYLTITKDLTRVMSRIKALYRSWAIPCSGTTVYAVRHRAEWLAKIPEAGVRLRAERLYQQLDLLQPVRQGARRDLMVESHKHPAVKLLRQIPSIGPIRAALLVALLQTPHRFRTKRQLWAYSGFAVETHDSGEYRFARGKLVRNRERITVRGLNHNHNHDLKNLFKGAALSASTRPGPLCDFYGALVEKGMRPTMARLTLARKMAAITLTIWKKGVDFDAQQLNRQAA

SEQ ID NO: 170261 - protein, 364 aa, unidentified
MTLVKDIVDRVVRYIGRDVHKDSTTAAVLDAQGNLVMQVTLRTEGNVLVDFLRGLRGSLHLTFEEGTYSAWLYTRLAPCVEKLIVCNPRQNALLKQGNKSDPIDARKLAELLRLGSLTAVYHGAPAMGTLKELAASYATLVSDGTRVMNRLKSLYRSRGIRCGGTQVYSPRHRDRWLEQLVEAGVRQRARLLYPELDLLLELRPQARRALLAESRKHPGQKILRTIPGLGAVRVARLLALLQTPHRFRNKRKLWGYGGLGVLTHGSAQYRLQHGELVVSPKSLTVRGLNPAHNAQLKDIFKGAALAACQRPGPLRAAYLRCLREGTEEHLARLTIARKIATLVLTLWKRGERFDAPRLSREQAA

SEQ ID NO: 170262 - protein, 341 aa, unidentified
MDYYAGIDVSLECSSVCVVDTSGKIIREAKVASEPQALIDWFRGLGVRLVRIGLEAGPLSQWLHAAMKRESLTVELLETRHVRDAFKAMTVKSDRNDARNIAQLMRLGWFRPVHCKSLAAQEVRAMLTARKLVQSKLLDVENSLRGILRGFGLKVGKTTKTNFASRIEELVKAHPNLKAIAKALLRAHAVLLAEFNAFEKRVRKLSALDAKARLLMSTPAVGSIVSLTFASAIDDPSRFTSSKKAGPLFGLTPKKYQSGETDYSGRISKTGDASVREALYEAAHVMLTKPLKGCSKLKSWAMQIAKRAGLRKAKVALARKLAVIMLCMLKNNMPFNPARAA

SEQ ID NO: 170263 - protein, 401 aa, unidentified
MEKQKLAMDIINPHCAGIDIGSRSHFVAVGQDLEDVKEFGVYADDLTDICVHLKEHDVTSVAMESTGNYWQNLYVELIKHGFDVTLANGKFTKNIKGKKTDVKDARWIQKLPSIGLLTSSFLPDETTEKLRTYCRQRQNMLTLAAEASHKMQKYLKILNFRLDVVVNDICGLTGMAIITDICKGNLDPEKLSGHRHGNCRKSKEEISKALKGNNREDYLFGLKQELESYQFYQKKIAECDKQIGAFLKQQINTYPEKKKLKTTDKTHKRINKNAIKGIDLNQASFQYFGGVDLMNIEGMSHATVLSIISEIGPDGFHKFETAKHFTSWLRLAPNNKVSGGKLLSSKTPKGSNRLKIALRNAANAIGNLKDTHLSNFFNRVCYRKGRTVAVSATARKLKTNR

SEQ ID NO: 170264 - protein, 353 aa, unidentified
MRRPKEKLIAGIDLHSNNVMIGVIDQDGKRVAHRKLGCDLGEVVGFLKPLKPQLQSMAVESTFNWYWLVDGLRAQGYSIDLANPAKIEQYSGMKHVDDKDDAFHLADLQRLNILPKAHVYDPELRPVRDLLRRRTNLVHQHTALLLSFSSLYTRTTGQKLDLGEAKKLEPKQAPKLYEHPANQLIAQVQAEHIQALAKSIRRVEKAVLACAREIPLYDKLLTIPGIGRILGMTITMEVGDVKRFKTDGDFASYCRMVDAKRLSNGKCKGANNQKCGNKYLAWAFVEAANFARRYNEQCRRWYDRKAAKTSKVIATKALGCKLAKAAWHVMAGQCDYDEKRMFPELANKPMKTS

SEQ ID NO: 170265 - protein, 338 aa, unidentified
MKLYGGIDLHSNNNVIHLVDKNGSNVLKKRLSNNLPMILALLEPYSDAIEGLVVESTYNWYWLVDGLMEAGYKVHLANTAAIQQYSGLKYGDDDSDANWLANMLRLNILPEGYIYPKEARMARDLLRKRLQLVQQRTLNLISIQGLYTRHLNIRLNSSKIKQLTPQIIAQNFCDSNVQLAVNGNLAVQQCLTQQIKSIEKSLKQQLKLKSEFIQLTSIDGIGIILALTIMLETGSIKRFENVGNYASYCRCVSGARYSNGKKKGTTNAKNGNKYLAWAFVEAANFAIRHNETIKKFYQRKLAKSHMMVAKKAVAHKLARACFYVLRDHVEFDAKKAFG

SEQ ID NO: 170266 - protein, 452 aa, unidentified
MPAGKDITMHYQKVLKMPESIPYLSVGFDVGADFTWMSIMLPNGILIGKPFKIIHSDPQSRELAISKIKEAQEMYSLESRCFLESTGIYHIPLLCFPRDKGFDCAVINPIITKNSTNMNVRKLHNDKFDSKKAAKVGLDASLKASIVPDDAIIDLRNLVRDYYYFKDLQSAIVLKLHAELKVSFPAYLNVFSKVTTQTSLKLLEAYPLAADMLAAPKDELVETIRSTARFGETYALARYDAICTAAKDAAVFGRALPSNALRIRLYIKMYREYQAHLDSILEELHQAVGKLEGTPDYDRISFIQTLHGVGFLSAVVLIAEMGSFDLFSSPKKLYAYFGLDPGVNDSGKFHGDRVHMSKRGSSLARRILHMVAINNLKVDKATKTPVNPVIYDYYTRKCASKKKSVAVGAVMHKICNIIFAMLRDNKPFELITPEEHRERYAAEHPESVNTAA

SEQ ID NO: 170267 - protein, 344 aa, unidentified
MTTGTERKVYGAIDLHSTNLWLTVVEADGREVLSKRVPLDLKRVLEVLEPYRELLVGVAVESTFNWYWLVDGLEENGFAVKLANPAAMVQYKGLKRTGDKSDARWIAELFRLGILAEGYIYPKAERPLRDLLRRRLLIVRQRTQMILSLQSMLMRECGLSAKKAELLKWEEAEVNGYFPDEFSQQAALALQQTALRQDELVKELEAAALGRMKLTDLFKRLLTLPGVGTVLGLTICLESGPAARFPGPGNYASYCRAVDSCRESNQKKKGENNRKNGNKYLGWAFVEAANFAPRFDPRIRKWFDRKQAKCGRPVAVKALACKLAKAAYFIMRDEVDYDPVKMFG

SEQ ID NO: 170268 - protein, 349 aa, unidentified
MYYVGVDYHKRYSVATVLDAAGTMLARRRLDNRLEDFRNFLKPYDKAEVEAVVESTRSWGIPVDILEQLTGRVILANPGEVKLIAKARISTDKVDSLSLARLLRMNWVPEAYLRPKDNREHQLILRIRCFLVQLRTRVKNRIHDLIDRQEELVRERTTGFSDLFGKKGMTWLRSLELGHPSGKLLGQLLAVYDALDKEVRQSDRLVAELFAADEDCKLLVKTPGIGVFFAVLIKTEVGSIERFANSPRFNSYAGVVPSTESSGGKTWHGRIIKQSNCWLRWALVEAVIPATVADAGLRAHYEYYRRMKGSRVAKVITARRLGCIVYRVLKERKPYYEQSVQSRGYRQAG

SEQ ID NO: 170269 - protein, 331 aa, unidentified
MFPVGIDVSKNTQDLCMLYDGIKGRIKTRNIQNNRHSVENILRWLRLQHCSPEDVHVVMEATGVYHERLATELHDAGFRVSLANPHRSREFARGMGIMTKTDKVDAYMLACYAFLKKPHRWEPPAPEIRYLGALLRRRDVLLGDALREENRLEKYLSTDTPADIISSCRRMAQLLREEVSNIERQIKAHIKASPALRRDYTLLTSIKSVGPQLGMHMLVVLRSHNFVSAEQAAAFLGVVPIEKRSGTSVRSRPRMSKIGPPQLRAKLYMSALCGKIYNKRMRNIYDEMCLRGKPKMVAIGALMRKLVHWCYGVLKTGTVFNDEDLKPVLST

SEQ ID NO: 170270 - protein, 463 aa, unidentified
MSIVEAVEPETSLVLGRGTSDCRYEHEPQIRLSPRSLPGGSVIVNRRKEAAVQQIYGRVAGLDVHRDNVVACFRRLGPRGGVVFEKERFGTTTARLRELEAWLAERQVELVAMEATGVYWKPVYYALEAKFTVWLCNARNVKKVPGRKTDLTDAEWLADVAAHGMIRPSFVPPPPIRELRELTRYRKTQSAARAAEIQRLEKVLQDAGIKLTSVASRVLTQSGRAMIEALIAGERDGARLAELAMGKMRPKVPALTEALTGHFGSHHAVACRRILSHLDFLNESIQALTEQIDARTAAFASVYTSLLPVPGFDRLSIDVVIAETGADMSRFPTPGDLASWVGVCPGSHESAGKRRRVGTTKGNPWLRQALIESARAAARTKGSYFGAQYRQIARRRGPNKAAMAIAHSLIELVWHLLSTGEVYEDLGDDYFTSRQDPERRARRLVAQLEELGFKVTLEAAAAA

SEQ ID NO: 170271 - protein, 331 aa, unidentified
MNTIVSPVCIGLDVSKDTLDACLLKDGKRHEKQFANDDKGHAKLLNWTQALAGDSSCHFCLEATGPYSQSVALFLVEKQQAVSVINPARIRFFALAQNAGNKTDKADARLIALYCQQQKPPLWRVSAPEVRTLQALTRRLHALSELVVQEKNRLQAPGQDKALLSSGKRIVAALEKEMLRLKVAIRAHVKAHEHLGRDSKLLQSIPGIGEITAWDILAEMPDVAEFDSAQSAAAYAGLAPREHRSGSSVRKATHLSKRGNSRLRKAFYFPAVSALTWNPLVKAHYQRLVKQGKPKMVALAACMRKLLMICFGVLKHQRPFDAGWQNQPQTG

SEQ ID NO: 170272 - protein, 360 aa, unidentified
MYYDGIDLHKDNAFISTVNERGETVLQKRVPNRPEAFRLYFASLPGPHRAVVECTGGWYWLDDLLSELGIELILAHAKYLKAISYAKVKTDKVDSLTLARLLWMDAIPQAHKISRELRPLRDVIRARLRLVQRRTSCLISIHNVGQKLNCSDALDIVARTVPENLSSAHALWIRMLYRQIDLLNAQIQELENFLHPLLLPNEDMQRMLWVPGMGAVTALSVYLEIDGIERFPSDKRFVSYCRVVPGAKNSNRTKHHKSGCKDGNKYLKIAFTEMAVHAIRHYPEYRRLYDKMRRRANEAIARTVVAKELARIVYHILSNKSEYRGLKGQPISHVKQSTWAHRYGAPVAAPGKPEHITDPA

SEQ ID NO: 170273 - protein, 409 aa, unidentified
MVVYLGIDWSQDKHDACFVNEKGVAIASLVIPHSIEGLQRLDNTREKLGVLPAECWVGLETAHNLVIDYLWSRDYSQVYVIPPNAVKSTRPRYRQSGAHHDPSDAFVIGDMLRTDQARLQPWHPDSELVQQMRAKVSLLMYLTQEKTRASNRLTAVLLRYYPAALRVFSRPMPEITWHFICAYPTPEAAQALAWAEFEAFARGHHYRQAKAKLRASFARLQASQPSAAPSVVLAYQNEAALLAQHLLSLSRTKTEQLKELASLFDQHVDADLFRSLPGTGEFLAPGLLCKFGDDRRRFPSPLGLQCLAGTCPVTQQSGQRRTVKFRKACDHEFRAITQQWALASLAQSTWAAGYWEHVRPQCDSDSHAYRCLANRWLAIAWRMWQDRRPYDEAYHLQQRAGRQQPRSAN

SEQ ID NO: 170274 - protein, 354 aa, unidentified
MLAELVEHVIGVDPDRDWITAAVVDARTTGVLAKQKFSADSAGYDEAISWAEEFTTAGERAWAVEGTASYGRGLTAALARSGEWVIEFDRPREKGSKDGAKSDELDAVRAAREALGRDRIHQPRAHDGRREALRVHTVTRAGVVRARTAAINELKALVLTAPDDLRQELRHLTTRSLVKRCASFRDALSRPVAERCARNTMRLIARRIICFNDEVAVHDLAMKQLIDEAAPQLVAEPGIGHVTAAMFYIAWSHPGRCRNEAAFARLGGAAPLPATSGQSQDRHRLNRSGDRQLNTALFTVALSRSRIHQPTRDYRDRRRSEGKTDREIRRCVKRYIARRVWRLLEHPPGLEITT

SEQ ID NO: 170275 - protein, 344 aa, unidentified
MEYYAGIDVSLEQSSVCVVESNGKIVREAKVASDPETLSAFFRDLGLPLARIGLEAGPMSQWLHAGLVAAGFVVVLLETRHVKAALSAMTVKTDRKDARGIAQLLRMGWYRPVHCKSPPSQDVRTLLAGRKLLLCKAIDIELGIRGLLRGFGLKVGTVSTGKFAARVRELSAGQAMLEQVTEAMLRAREVLRTEINTLHRQVLVIVRADEVCRRLMTVPGVGALTALTFKSAVDDHARFASSKAVGAHFGLTPKKYQSGETDITGAISKVGDAMARGALYEAAQVMLTRVMRFSTLKRWALQVAQRRGMKRAKVALARKLATVLHRMWVDGAEFRFGKEDAATA

SEQ ID NO: 170276 - protein, 312 aa, unidentified
MTEITIGVVVSKDTVDVHLHPAGDHRQFENTPKGFRAILRWIAGTPVARLVFEATGPYHRAFERAMGEAGLPLCKVNPRQAKRFGEAIGQLAKNDRMDAAMLARFGALVEPGVRAAPSKIISDLKDLHVARTALVKDRTAAKNREKNLTSSLLKRHVRQRLSSIESHLKEIEAAIRALINADDDLRRKFAILVSIPGIAARSAFALLIDMPELGTLAAQEAAALSGTAPMTRQSGKRVGKAFVSGGPVNARQALYMPALVAARFNPDLRDKYKEFTARGKPPKVAITAIMRKLVILANALIRDDREWSPRVA

SEQ ID NO: 170277 - protein, 322 aa, unidentified
MSYVTKPTAIFGADIAKDEVMVQRHGESAKQRLPNTPKPLSAWLAQLAPGALLVMEATNTYHEMLATLAHAAGVQVVVLNPRCTWHYARSLGVRGKTDRVDTDTLTDFGATQWQRLHRWEPPSAGNARVARLLRRRGKLVHAKVALGQSLSAVKELSSVRRQIERALARMIDRVDLLIVKAVSQDEQLAPLHRLLQTIVGVGPIVAAQLAQALTRMRWRNEDAFVAYTGLDPRPKDSGTRRGRRKLTKYGPPMLRHLLFMGAMAAIKTALYKPMYRALRDRGLETTQALVVVARRIARIAFAMFKTGEVFDPRRLSPAPQNA

SEQ ID NO: 170278 - protein, 366 aa, unidentified
MKKTSTVRVNGSMIFKGHKLTIGVDLGDRSSAYCVLNEAGEIVLEHKVATTPEAMKQVFGSMPRCRIAMETGTHSPWVSRLLTALGHEVIVAHAQKVRLITKSRRKDDRMDARTLARLMRIDPALLSPVKHRSAQAQLHLTEIRARAVLVSARTALVNAARGLVKSYGERLPKCGTEQFRRETTSGLSAGLREALEPLLQEVESLNERIQEYDRRVEKMAKQTYPETALLKQIKGVGNLIATTYVLTIEDPHRFRKSRDAGCFVGLQPGRRNSGESEPQMRISKEGDEYLRTLLVQGAHYILGPFGEDSDLRRWGRKLSARGGKTAKKRAVVAVARKLAVLLHRLWVSGEAYEPLRNSQKTMNAAA

SEQ ID NO: 170279 - protein, 341 aa, unidentified
MAIKVIGLDIAKNVFQVHGVDEAGRIVLRRKLRRCDVLKLFTSIEPALVGIEACHTGHYWAREIMALGHEVRLMPPQFVKPYVKSQKNDAADAEAICEAAQRPTMRFVPIKSAEQQAALLLHRTRDLLIRQRSSLISAVLAHFAEFGIVVHRGTRDIDRMLALLDEAQRGLPELAREMLGILAAQLREIAVRVQVVEDQLMAWHRSNEVSRRLSTIPGIGPITASAIVATVADARQFKSGRQFAAWLGLVPQQRSSGGKERLGGISKRGDGYIRRLMIHGARAIVGWRKRSPRIRDRWIDGLLGRRHINVATVALANKSARVAWALMVRESSYNHRLARAA

SEQ ID NO: 170280 - protein, 349 aa, unidentified
MTTQRLSYVGQSVYVGVDVHKDTYAVTCVCNKQIVKTATVKADPAGLTASLSQWFPGARLYTAYEAGFSAFVLHRALTKAGIMNIVVNPASIAVAANDKVKTDRRDSKKLALDLSDGRLQGIYVPTEDEELARLLPRTRAQIVEHRATIARQIKAKLHQFGLIAPASRRLISNRYLREIDAWPLPPDLRVSLTFLAEQWRFATRQLIEMRRLLREQAKAHPAIEQVYRSVPGIGEVVARTLATELGDMTRFANERALFSYTGLTPSEYSSGPSVRRGHISRQGSSRVRHLLIETAWRALPRDAVLKEIFDRIAATRGKKRAIVAIARRLTGRIRACFRQGTTYAVGTYA

SEQ ID NO: 170281 - protein, 438 aa, unidentified
MSTPEVTVRALYRSAIGIDVHLNVLVCCHQRQLSDKNELCESCDFLTNRDGINEFTAWCKERNPEIILMESTDVLWQSPYEALENAGFSSDRLALINARDAKAAVGRKTDRKDAARLAALSRSGHFRRSFVPPKGFRLQRVIAREIQTNRRDLARTVNRYQKLLNQCGCRASTVFSDVRGVAASVILEAKINNAENLEEIVKKNSRRLRASPQEILSALDFAIPEAIAEQIKDCRNKIKELLDYEARSFDRLCTLQQAHERDIDLLVSISGIQERVARLLYAELCENLKEHFSSCDHFTSWIGICPGDNTSAGKQKSGKCPKGNKYLRRILIECTRGFVATKNQLCAREKFLALKLRRGYKRATVAMAHLLARIIYSVLTKKSFYTTYMTKALRDVIVERACRSVRQLAKREDVSVIDGQVVDNETGVILARLDFFSS

SEQ ID NO: 170282 - protein, 350 aa, unidentified
MIIIGCDYHPGVQQIAFVDTDTGEFQETRLQHREQAEQFYRELAIRGVQVRLGMEASGQARWFERLLRELQMELWIGDAAEIRARRVRKKKTDREDARHILRLLVEDRFPRIWVPSWENRDVRQLLWHRHRIVQMRTRIMNQLQAVALNEGLRCKKRLWREKGRQQLESFPLATWGSRRRRDLLELLDRLNPTIAELTQAIEAEVANYPAAQRLMTHPGVGVLTALAFVLIIGEAERFQCGKQIAAYLGLVPEENSSGESRRLGHISKQGSGLMRFLLVEAAQVTVRNDGEWRSKYYHLMMRRGRKIANVAMARRLAVRLYWMWRKQWDYEQLKKFGPHAGQPGMSDGVK

SEQ ID NO: 170283 - protein, 333 aa, unidentified
MLNTDTGELWDQELSHTGDDVERFYAALPPPVTVGIESTGYSLWFHALLQRLGHSLLVGEAAKIRAMVVRKTKTDRRDARHLRDLLKDDRFPLVWIPDPTTRDLRALIKHRLRLVRIRTMVKNGLHAIALNQRLALGPSLWSRQGLAQLQALVLLPHTRRRRDDSLDLLQWLNRHIDELDLQVATAAAADPDARRLMTHPGVGPVTALATVLVLGPVGRFPGSKHVVSYIGLAPTVNASADKCRLGHISKQGSALLRWVLGQAAPLATRGDAGLKRVYFAVLRRRGRPKAKVALARRLLVRLYVMLRDQIDYDEFCRRGRAQHGGLELARTPV

SEQ ID NO: 170284 - protein, 419 aa, unidentified
MKPHALEAFAAFVGLDWADAKHDICLQAAGTERREFLVLEHRPEAIDAWVQTLRTRFNGQPVAVCLELNKGPIVSALRAYDFLVLFPVNPFTLAKYREAFTPSHAKDDPTDAELQVELLLKHRDKLAPLSPQSPTMRALAQLVEHRRRLVGDKVRLTNRLTSALKNYFPHVLQWFQEKDTGIFCDFLSHWPTLKAAQLARRTTLERFFQAHHVRAADGITTRIEAIKSAVALTTDEGVIAPNTLLVQALVAQLRVTLHAIADFDTAIAQRAQDHPDFPLFDALPGAGAVFAPRLLVAFGEQRERYTSAEELQKYAGIAPVTERSGKKAWVHWRLQCPTFLRQTFVEWAAESTRHSFWAQVYYQQQRDKGKAHQAAVRALACKWIRILYRCWQARTPYDEAIYLQALKRRSAPLLRHVAQ

SEQ ID NO: 170285 - protein, 359 aa, unidentified
MDQRENPPRRIVGGVDTHKDLHVAAVVDEQDRVMGTACFATTRQGYRQMLAWMQSFGDVQRIGIESSGSYGAGLLRFMQRAGIDVLEVTAPDRTDRRRRGKNDDLDAQNAAHAARAGKRTVTPRTRDGMVESLRVLSVCRKTAVAARRVALQIIQNTIVCAPDGLRDQLRSLTRMQLVRTLAAWRPDLTAYRDVEAAYKISLKSLARRYLELHDEIADLDAMIGAIVDELAPDLIARNSIGHTSAAQLLLTAGDNPERLRSEASFAALCGVSPVPASSGKTIRHRLNRGGDRAANSALHIIAIGRLRTDPTTQAYVAKRIAEGHSKLDALRSLKRYIAREVFHIISRGHKRINQTRIAA

SEQ ID NO: 170286 - protein, 344 aa, unidentified
MPIVGGLDIHRKQLTFDYLDTVTGEVRRGQIAPADRAHLRAWLARFAGRDDVAFALEGCTGWRYVAEELAAAGVTAHVAEPADTAFARGRKRHAKTDKTDSRHLRVLLEQGRLPQCWIPPAQILECRALLEAYHDLRREHTAWIERIHAVFFHQGAPRLGEGALRTDRGLAALREAAAVHLSPAGQLQVATALDMLAAIDARMDTLRGQLLHAARHLAGARALQAQLYGVGPLAGLAMTCWLGGAGRFSSSRKAVRFAGLDVTVYSSDGKRSPGHLSRPGPEILRWVAYEAGKTHARAGAGHDYYAAVKDRQGGKIAALAQARKLIRQACHILTEPGDDALTAA

SEQ ID NO: 170287 - protein, 388 aa, unidentified
MNYMGIDISKYKHDCFILSDFGEVINEGFSFTNDAEGFRKLEQELNLCGKGNVRIGLEATGNYGINLKLFLEKIGFDFMEINPMLIKKHINSTTLRRTKTDRLDAKAIAGYLLEKGYRPHRTEFYNKFALKQLTRLRSRLVSIRSSYLVRMTNVLDCIFPEFKPLFDNKFSVTSLYILANYPTPEAISNMNARSYDILRRKSRGRFSMDKFVTLKQLAKNTVGVYEKCYGVELQTLLELHSQIDCKIDGLESEISQIVEELNPPTLSIKGVGTVSAAVIISEFGDFSRFENPGQMLSFAGLEPGYFQSGTSEHNGHMVKRGSPFLRNALLTCCRPLRLHNEVFAAYYRKKASEGKHESVALSHMARKLVRIIFTLETKGIPFDPEKLR

SEQ ID NO: 170288 - protein, 378 aa, unidentified
MGVIIGMDPHKRSATIEVIDERAGVLAAGRYGTDKAGYAQMLAAARKFADRVWAVEGCNGIGRHLAHRLVHDGEVVFDVPAKLSAQVRVFATGNGRKTDPVDAHSVALAALRAPGLARVQVEEDLVVMGMLADRRDELGRARTQVINRLHRLLMELLPGGAKKFLSARQARMMIASVRPRDLAGKTRRRLAAELAGELEVIDKKTKAIDRELTELVTARGSTLMQLHGIGPSGAARLLADVGDIHRFASRDRFASWNGTAPLDASSGDQARHRLSRAGNRRINRVLHIMAVVQLRNQTKGRAYYDARRAGGMPSMMAMRALKRRLSNVVFARMLADQKRREASPGGQSGTTTYSSAAGPDPGHRPFGQATSRARHSTA

SEQ ID NO: 170289 - protein, 444 aa, unidentified
MIRKVMDAIYPRVCGLDVHEETVVACRRRLTSDGQAESEVEIFKTTSAGLRLLSDWLTAWEVTQVAMESTGVYWIPVWNVLEGRFKLTLENAQHLKKVPGRKDDISDAEWIAQCMQCGLLGGSFVPPLEVRQWRQLTRHRTKLVDQRTSVINRLHSVLEQGNIKFSNVASDIMGVSGREMIKAMSKGESDPARLAALARGRLKAKYEPLVEALDGQLNENQRWMLGRLLEQVGILDKEIESYSERIKELMAPYQTQLERLDTIGGVGLRSAENILAEIGPDMAPFPTDDDLVSWGALCPGKNESGGKQGSRKTPKGNKWLKRALVEAAWAATHEKDSYLAALYRRLAPRRGKKRAIIAVARTILQSAWHILKEGVVYKELGGDHFDRLNEEKSTKYFVKRLEKFGYEVVLKPKKAGKETVKPKPKRIKKSVAEPKSKKAREATV

SEQ ID NO: 170290 - protein, 345 aa, unidentified
MELHTIGIDLGKTVFHLVGLNLRGEVVVRKRFSRSQLLRFTANVRVGLIGMEACGGAHFLGRALREQGHEVRLIPAQYVKPYVKTNKSDYIDAEAIAEAVTRPTMRFVPIKTDDQLDLQSLHRVRERWVMRRTAVINQIRGLLLERGITLRKGRRYVDDALPLILEDAEAKLSGAVRMLLAQLKMDLDQLAVRIDEADAVIHKTAHENEACQRLLAIPGIGPVTATALIAAVGNGGAFHKGREFAAWLGIVPREHSTGGQQKLLGISKRGNSYLRRLFVQGARAVLQQRTKQSSSLSAWLAQLTSRTHRNVVAVALANKLARIAWAVLAKNEQYRPPVLADGAAA

SEQ ID NO: 170291 - protein, 341 aa, unidentified
MDHYAGIDVSMEDSSVCVVDATGKIVREDKVASEPAALIGWFGSLGLSLARIGLEAGPLSQWLYAAMKQAGLAVELLETRHVRTAFKTMPVKTDRKDARGIAELIRLGWFRPVHCKSVAAQETRAILTARKQMQSKLHDVEMSLRGILRGFGRKVGKTTPKQFDGRIRELVAGHPTLEAIAEEMLCARAALLRAFNGFEKRVRIMARHDPKARLLMSTPGVGAIVALVFASAIDDPARFKSSKSAGAHFGMTPKKYQSGETDYSGRISKIGDSGVRTVLYEAAHVILTRPVKGSGLKSWALRLAKRAGMAKAKVALARKLAVIMHRMLVDGKPFNLAAAAT

SEQ ID NO: 170292 - protein, 341 aa, unidentified
MNSLSVIGLDIAKHVFQIHGVDETGAVLVRRQLRRTDLPRYFAKLAPCLIGIEACSTAHYWGRRLRAFGHDVRLIPPQYVKPYVKRNKTDAADAEAICEAVTRPSMRFVGIKSVDQQAILVLHRVRDQLVRQRTMVINALRGHMAEFGLVEARGIAGAKRLAEIVWDEDDDRLPDIARRALDVLVSQLCDVIEKIDILKQELLAWHKQNEVSLRLAKIPGIGPITATALVATVPDASVFTSGRQFAAWLGLVPRQHSTGGKPRLGGISKRGDGYLRRLLVTGATAALFRSKETRTRPWVNELLKRRPAKVVAVALANKTARTAWALMNSGAIYRAPKSAKA

SEQ ID NO: 170293 - protein, 448 aa, unidentified
MSSHKGNAGLPVIHDRAAGIDVGSRFHVVAVGADLCTESIQTFQAFTNDLHRMADWLVATGIKTVAMESTGVYWVPVYEVLEGRGIEVILANAREARAVPGRKSDVNDAQWLQRLHACGLLRASFRPGRDIAALRVYLRLRERHLDYAAAHIQHMQKALTFMNLQLHHVVADVTGVTGMKIIRAIVKGQRDPQVLAQMRDVRCKASMETVRAALVGNYQPEHIFALSQALALYDFYQARVDECDAQIEVVLASLTTDKASPSAPLPKARHRTVQPNAVSFDVRPVLYQLAGVDVTQIHGIGPYLALRMIAECGTDLSRWRSAKHFTSWLTLSPGCKISGGKVLSARTRKTTNRVAAHLRLAAVTVGRTNTALGAFYRRLAARIGKAKAVTATARKIAVLFYNAMRFGIDYQDPGATHYEQKYRERVIKQLHRRAMEFGFTLQAAASVS

SEQ ID NO: 170294 - protein, 386 aa, unidentified
MQAPSVSTPITERISTIFVAIELSQKTWLVTVHSPDKDKISRQKVEGGDHSELLALIDRVRDRAARTLGAVPAVASCYEAGYDGFWLHRLLMAAGITNYVFDPSSIAVDQRARRVKTDRIDGETMLRTLMAYLRSEPRVARIVRVPTPEQEDARRGTRERHRLIKEQTAHTNRLKALLRLLGMAIGNPRRRDWLSWLTQQRDWQGEGVPPRIMAELEREHARLMLVRQQLDALAQPPARAELTPAAAEMAYRRDLLLRLKGLGPAFATTLTNEVLYKDFHNRREVAGYCGLAPSPWQSGGTDREQGISKAGNWRARHTAIELAWLWLRHQPDSALTQWFRERTANASQRIRRIAIVALARKLIVALWRYLTTGLVPEQAVLKAVKA

SEQ ID NO: 170295 - protein, 335 aa, unidentified
MKEITTVGVDLAKSVFTVHGVDAMGRVVLRKTVRREQLVELIAGLPPCLIGMEACGGAHEWGRKFQTHGHRVGIMMARFVAPYRKSSKNDGNDAEAICEAVARPNMRFVPVKSAEQQAILSLHRVRQGFIEQRTATINRIRGLLAEFGVVLPQRAEQVRRAAVSRAERLPVLAREAIADLRAHLTYLDERITRYERQLVSLARQREAAVRIQRLPGVGPLTASAITASISDGHEFANGRQFAAWLGLVPRQYSTGGKARLGRITKRGDPYLRTLLMLGARAVLRSAARKTDRVSRWALALRARRGYHRAIIAVAAKNARIIWALLAKHREFVLPV

SEQ ID NO: 170296 - protein, 416 aa, unidentified
MEVLHARCAGLDVHKDTVVAGIRIAGGGPAKTEVRTFDTTTPGLLALSAWLAEAGCTHVAMEATGIYWRPVWHVLSDGEVTLILANAAHVKNVPGRKTDVADAVWLADLLAHGLIRPSFVPEAATQEMRALLRTRKQLVREQASHVQRLQKTLEDANIKLTSVLTNIMGKSGRAIIEALVGKQTDPEALLALVQKGVKASPEKIKAALTGRVTDRHRFLLRLHLQQIDALDAAIAAIDAEVDRGLDPFRQAVELLRSIPGVSDLTAQVIVSEIGTDMSRFPTAGHLVSWAGLCPRNDESAGKRRSNRLRHGAPWLKTTLVQCAWAATRKKVSYLQAQFQRLRHRRGPKKAICAVAASILTAAYHMLRDGTLYHDLGPDHLRRTSPETHAKRLTQQIAKLGFTCTIAPAPTVEEVSI

SEQ ID NO: 170297 - protein, 353 aa, unidentified
MDRTTYGLDLAKNVMQLHWVHAQTGEIGRKKLARTKLAEHFAQLHPVRIVMEACGSAHHWARVLGALGHQVELLPARQVKAFVRSNKDDAADARAIWLAAQHSDIRRVPIKSCEQQAVLSLHRMRTHWVSVRTASVNALRGLLYEFGVVLRGGRKAGLKALAAQRADIDARLPGAMQRLVDGQLQTIEQLQVRIDTLECELAALHKQLPKAAELLAVPGIGVLGATALAATLGDGRGWRSGREFAASLGLVPAHCGTGGKTRTGHISRRGDPYLRTLLIHGARAVIQHAEHKPKPKWLEQMQQRRPPNVVAVALANKISRTAWALVAHDRQYQRDWKSVPPARNGVTLAAAAA

SEQ ID NO: 170298 - protein, 468 aa, unidentified
MGHNRSRSRQTSGKKTKHPSLLKRINRNAAGIDCGSKAHYVAVPPERDAEPVCSFKTFTADLHRLADWLEACKIKTVAMESTGVYWIPIFEILEQRGFEVVLVNSRHIKNVPGRKSDVLDCQWIQELHSVGLLRGSFRPAAEIASLRAYLRHREKLVQGAASHIRRMQKVLVQMNLLLHNVISDITGVTGMRILRDIVAGVTDPMVLASHRDYRCRASVEEIAASLTGNYRAEHLFVLRQNLELFDTFQRQIQTCDGEIESLLRTLAAKQRRPKAPVPSPRCKPKFCDNEPRFEIRDPLYRLAGADLTQIDSIGPYTALKLIAEVGTDMSRWPTYKHFTSWLTLAPKNKITGGRLISSKTQPSANRAATVLRMCAMVVGRTSTALGAYYRRIAYRIGKPKAITATARKLAILVYRVLKGDLDYNDPGAQAYEDHHRTRTLRNLRNRASQLGFGLVNVETGELLHGPVS

SEQ ID NO: 170299 - protein, 372 aa, unidentified
MKEETAGHPGVVGGVDTHKDLHMAAVVDEHDRVLGSECFATTRHGYRQMLAWMRSFGELLRVGVECTGTYGAGLLRYLQHAEVTVLEVTAPDRSDRRKRGKDDTLDAENAAHAAFAGVRTVTPRTRDGMIESLRVLKVCRKTAVAARRVALQLIHNTVVCAPDELRESLRTMTRMQLIRTLAAWRPDLSDYRNLTSAYRITLKSLGRRYLELHDEIADLDVMIAGLVDELAPGLVSRNSIGYESAAQLLLTAGDNSERLQSEAGFAALCGVSPVPASSGKVTRHRLNRGGDRAANSALHIIAIGRLRTDARTKAYVERRVSEGHSKLEAIRCLKRYIAREVYYVIRKRNRQIGQVQVASKGSVPDDRQAFAI

SEQ ID NO: 170300 - protein, 343 aa, unidentified
MYYIGLDVHKKTISYCVKNAAGQVLSEGKIGSTRRELDAWVRTLPEPRMMAMEATIFTGWIYDHLLPHAEKVKVAHPLMLRAIAAAKRKNDKIDASKIADCLRCDFLPESYMIPTEMRDRRRFLRYRNLVLRQSVQMKNRISGMLMETGVSYEKLRLHRKGYFDQLMKSNEEVSDSIRPLLKLCREQIDRSILLDRTLLKTLERDPLLSGRLERLRTIPGVGPLTALTWVLEVGDVSRFRSIKQAISYCGLCGEEVRSADKVMRTPISKQRNKHIQSMLVEAARLAPRYSPELAVLYDRERQRGDGNRATLAVARKLVAHMVAVERRQSSFMPAGEFKQTAAA

SEQ ID NO: 170301 - protein, 338 aa, unidentified
MAIVYVGIDLAKNVFAVHGVDEHGKPALVRPKVARDKLRELVAALPPCTIGMEACSGAHHWARLFGDLGHPVRRMAPQFVAPYRLSGQRGKNAAADAAAIGEAVQRPNRRFVPIKSVDQQARLALHRTRQGFVEQRTATLNRIRGLLSEFGVVLPLKAATVRREAAAGLEALPGWARLAVGDPLDEVRRLDERIAEYDRHLVQLAREDERARRLMRLSGVGETTATALLATVGNGHDFRCGRQFAAWLGLVPGQRSSGGKTRLGRITKTGDPYLRTLLILGARAVLALAKTKTDPISRWAVALEQRRGYWKAVVAVAAKNARLAWAVLHHGERFALPA

SEQ ID NO: 170302 - protein, 380 aa, unidentified
MASMHDSVRFKTTVYAAIELSKKSWVVAIAHPDRDRPSIHRIAGGNLAELIARLRKAAGEKQRIVVCYEAGYDGFWLARSLAKIGIDCRVLDPASIQVNRRARRVKTDRIDSLALLRALIAVDRGERHVCAVVRVPTVEEEDARRSHRERQRLVRERTGHINRIKGLLFAQGIRGIEPKRRRTRIDFGKLTTAEGVPLAERLRRELEREYQRLELIESQIRIVEKERDTADAQDPAVEQKRELLCALQGVGGASAAILAREVFARQFASRRQLGSYLGLTPSAYDSGSTTRCQGISKAGNSWARRVLIEVAWLWRKYQPGSPLSHWYARKTADQSPRIRRIMLIALARKLAISLWRYVETGLIPDGAVMAKTTPHMAAAA

SEQ ID NO: 170303 - protein, 329 aa, unidentified
MSAFVCGLDVHKGSTYATILDQNGKIVNQARMNNEKVLSYLSHFDISKVAMESSNQVASLYRQLASKGYSVMVSHPKKTRYIAEAKIKSDRVDSKAIAELARLDALPLAYMPDEETAVLREKVRRRAFLVRERVKLRVKIKSILMYEGLKWPSDYGLFTEKGVEWLHGLNLESVESYLRVLKPLDDEIKLVSKQLRGLAVNDEDVKLLMTIPGIGYYSALLVKSEIGDVSRFPFGERLCSYAGLVPSTHASGNTVRHGGITKEGSKWLRWLMVEAAQTHVRMYDTAITRAYHRIAERRGRRVAVVAAARKLLMCCYSVLKNKRAYQDQI

SEQ ID NO: 170304 - protein, 416 aa, unidentified
MPSAHGTVAGIDVHKKILVVVILRSTDPDHDLATGRFGTTHCGLEQLAAFLRQHGVTEVAMESTAQYWRGVWMALEGEFQLTLAQARSTRAVHGRKRDLADARRIAKRLLANDLTVSYVPPPEQRDWRLLSRARVAMQESVSRLHSQIEVLLEQAQIKLSSVVSDILGLSGRRILHALVDGIGDPEQLAALAHHRIRASKEELRDALWGRLTASQRLVLKLYLAQIEQIEKDMAALEKRLALEQSAEQDPIVRLCGHPGISALAAQQIIAEVGPRAAAFPSAGDLASWTGGCPGSNESAGVSTSDRSPKGNRMLRRVMSQVAWAAIAAKGSEPQRRYRKWLPRLGPQKAAWAVAHYILRVVWHILHDGVPYRPPDQTSLDRCSVLRKAKRVIAELRKLGYSVTVTAPSAQAEPVTG

SEQ ID NO: 170305 - protein, 309 aa, unidentified
MSEKNFIGIDVSKDSLDVAIAHSEEFKNFANTEEGQRDLKDFISSRSPELIVLEATGGFEKGVLRALASARLPVVPVNPRQVRDFAKAMGILAKTDKIDARVIARFAEAVKPEARPLRTEEEERLDSLNARRFQIVEMLTAESNRLAYATKWTKKGIKGHIRMLERLLEEINAEMDDLIKNSPIWHQKDKIMQSIPGIGKVMARTILADVPEIGTMNRKQISALVGVAPLNRDSGKYKGRRSIWGGRSKVRTVLYMCAVTAIRCNSKIKVFYERLRKAGKCFKVAITACMRKLLVIINSMIKTETCWNA

SEQ ID NO: 170306 - protein, 343 aa, unidentified
MAIVILGIDLGKNSCSVAGLDENGAVVLRRRMRRQTVFGFAAKVPACIIAMEACCGAHYLGRLLAAQGHSVRLMSPEYVQPYVKAQKNDERDAEAIAEAASRPTMRYVELKSEEQLDIQTLHRVRSRLVAARKTLLNQLRAILLERGHIFPTGRRTLERALDALLDDPAFALSGRMHQLVVDIRAEWRDLDRRIASLNAEFVELARSDAAARRLTTIPGIGVLNATALVAAIGDAGSFRRGRDLGAWLGLVPKQHTTGGRPKLLGISKRGNKYLRMLFIHGARAALPTLAKSATPLGAWLRGLLARTHRNIALVALANKLARIAWAMLRRDRDFELSHGSVAG

SEQ ID NO: 170307 - protein, 408 aa, unidentified
MQVLYPRCAGLDVHKDTVVACVRCVSPPARHETRSFATTTKGLLALADWIGAHGCTHVAMEATGVYWRPVWHVLEGGVELVLANAQHIKNVPGRKTDVNDAMWIADLLAHGLIRSSFVPPAAIQELRDLTRTRKQLVREISQHSLRIQKVLEDANIKLGSVLSDVLGVSGRAMLDAIIDGEIDPEALAQLAQGTARRKHPDLVEALRGRITPHHRSMLKLHLDLIGAIEGALAEVDAAVGKSLAPIHQRARLLTTMPGISDLVAQVIVAEIGVDMTRFPTAAHLVSWAGLCPRNDESAGKRRSTRLRKSGTWLKTTLVTAAWAAVRVKASYLNAQFHRIKARRGAKKAIIAVAASMLTAAYFMLRDGVAYRDLGPTHLDQRHRDNAIRRLLRRLDDLGYQLPAAHEAS

SEQ ID NO: 170308 - protein, 353 aa, unidentified
MKKIVVGIDISKEKIDASAIDVRGSQLGVVKLDYQVFENRPMGFRRLLVWARHLVKGVGLEDVLFCCETTGGYDRALCDYIYAKGQDIWREGALQIKRSMGVRKGKDDKADSLMIAEYAMRHMDKAVIYETPSQTVRELKALFLYRHKLVQEKTEKTVRMKQMEATAARSKSMSFILRDARKSIRTIEKSIKECERQIKQLYQDNGDLKKNYEHITSVSGISIVNATAFIAYTNNFKGISTANKIASYWGCASYRERSGTSVDKKAYVKCYSSSQLKAYLTQAAECTVKEHGIYRGYFLRLKAAGKPYRVIINNVRNKLIHLVCSLVTNDMDYEQDHELLRAQRKARAACLAN

SEQ ID NO: 170309 - protein, 335 aa, unidentified
MTKKAQSELANFAGIDVGAQQLHLVRRSNGVSSKPQAFANTPRERRELAKKLAKVPNLIVCLEATGVYHQDLALALHDAGMRVMVLNPKVAHNFAKVLRRDSKTDSLDADTLAQYPERMPFEPWARPSTAALQLRAFSRRIEAVKDKKRAAKNQLHALRFSPETPKSVLQDALKEIEQLEQRLVTLTKEARTVIASNPTLHGCYELLLSVKGIAQTSAIALLGELAMLPAGLTHKQWVKFAGLYPRHNDSGTSVHKQPRLSKAGNLHLRKGLFMPALSARTHDPHVQAYFEHLVAAGKKPLQAICAVMRKLLHAIHGMFKNNQPFDNTRFYALPA

SEQ ID NO: 170310 - protein, 346 aa, unidentified
MTIVGCDFHPGWQQVAVFDSETGEIRELKLENGNGEAERFYRELSSGALIGFEACGNTQWFEDLLDRLGHEVWMGDAAAIRASYVRKQKTDRRDAAHILKLLIENRFPRLWRPSAEERDQRQLLIHRHKLVGIRARAKNGLQHLMLNRGVQMKRKLWSEAGQEALRALPLEGWAAQRRQDLLKLLSVLDPQIHQLDVAIQRAAQENPRARLLMTQPGVGAITALAYVLTMGDVNRFKRGKQVASYLGLIPSECSSSKRRRLGSISKQGNSFMRMLLVESAQTVNRLDEGFRKQYQHRCHRMAKGVAKVAAARRLAVRLFWMLRTNTAYPEIAHIEGSPRKGVVGES

SEQ ID NO: 170311 - protein, 427 aa, unidentified
MAAREKVGEPEFVAFVGIDWADQKHVWCLQAANSAKREGGELEHKPEVVEAWVSELCQRFGHGAIAVAVEQVKGALVYMLGKYECLHLYPVPSTMSASMRQALYPSGAKDDPRDADLLLDLLLQNRDKLRRLTPDNEVTRRVQNLVEERRKLVEEKTAQLNRLTGYLKVYFPQMLEWFAKLDTKLACEFLERWPSLEELQAAAPAEVRKFFRQHRGRHPELTEWRLQGIGQAMSAIRDRAVIEAKRMVVQVIARLLRTLLEGIAALDGKITEAAEAHPDFFIFQSFPGAGAALAPRLLAALGSQRDRYASAEEVQKYSGIAPVTERSGKKKWVHFRWACPKFLRQSFHEWAGHSIAQSVWARAYYQQQRQRGKDHHAAVRALAFKWIRIVFRCWQDGVAYDENRYLATLAKRGSPLIPVPAVAAPSL

SEQ ID NO: 170312 - protein, 424 aa, unidentified
MKVTYQTCCGVDVHKSFLVATIVKTTGGIEPSYQKKRFSTFNNSILEFKQWLLDNHCHDVCMESTGKYWVPVFNLLEDKINVVIANPKWVKAVKGNKDDTKDSKWIGDLFRLGLVKGSYIPCKKVRILREYTRYRYKLVSCRSSEKNRYQNALTVCNVALDSIVSDIFGKSSTSIIDYLLEQSGTSINHEEIASKLLRSLKSKEDAVIESVEGYQMTDAQKYRMRLVRAHMDYITAEINDVDKMIENMISSNPDFENAVQFLCTIPGVKRDSAITIISEIGTDMSQFSSSKRLCCWAGLTPGSNESAGKKKSVRITRAGVYLKPALVQCAHAAVKSDKSPYYKKKYESLVERRGKKRAIIAIARMILTAIFQMLTTGETWNPCDLYKIDMPEALLEKQKQKAIKQAQKLLIREGLLPPTEPIAS

SEQ ID NO: 170313 - protein, 381 aa, unidentified
MRNVCGLDVHKDNVFVCIDKENGEKIQFKTGILTKELDALRDTLVANDVTEIAMESTSVYWMPIWRILENDFKLYLVNPYAIKQLPGRKSDIKDAEWIATCLRKELIRGSYVPSSEIQQLRQYNRRIFDINKQSVYIQNKIDAALQRCNIRIGNYISNVRAKSYCEIVDMLSEGKTSPELLIVKVHKRTINKWGRDTILAALEGVVNKTDCRILKQLKEELDMLRRHKVECLVMLRDICMENYKEQILDIQTIPGIGEQGAMQIIAETGVDMKAFMTAAMLVGWAGLKPRNDESNGKFKSRSTTHGNKYLRKILIECAWGAIRTQGCFFNKFSYHQTMVRKKNRQKVQVAIARKILVVIWNILEKGVVYSDVLEKDKTKDK

SEQ ID NO: 170314 - protein, 433 aa, unidentified
MNTSHPYDLVIGLDRSDRKADLCIIDTRTGQRRSEIIDTAPEALWEWLAQLRQQHPQARVALCLEQPAVHLVAFLEAYAWITLFPINPITLQKYREAFVTSRAKDDTKDADYLADLLLTHRARLPVWAPQDSATRAVQQLVVHRRAVVDERTALSNRLIALLKQYFPQALTLCGEDLWRPLATAFLLKWPSLQAVQRAKPATLKQFYHLHGSRSTTLLEQRLALVEKAVPVTDETAVIASFVLRVQLLARELQQVVRTIAAFDREIAAAYSAHPDHGIFASLPGAGPVLGPRLLASLGADRDRFASAASVQCYTGVAPVTKRSGGSCHIHRRYCCPKFQRQSFHEYAKESVLWSRWAGAFYLQQRNKGCPHHTAVRALAYKWQRVIFRCWQDRQPYDEARYEAALRQAGSPVVALFDRVDLGKSPWKNPAKKS

SEQ ID NO: 170315 - protein, 331 aa, unidentified
MAAIATLFIGIDVSKDHLVVAFKNNDQKWIIQKYKNNEQGIAQFIAALADPHNTFVILEATGTYSMKAVFALCQNNIKTAVLNPKQSKGFIQGVLLSTTKTDDKDACALALYGEVNKPKPFVVPSDKILQVKQLQNLVQQLKKQKRSLGNQLHALSFHPFPNEYVVKLTTENLERCEQQISQTQQLICQVSEETFKRAYELAISVIGIGPSIAQAILMATNALHDFDNSKQLAKFIGVCPTQFESGTSIKGRGSIAKTGDPYIRAMLYMGARSAKRFNPTCKLLYERLRSKGKGHKVAMVAVCNKLVRQLFAIVKNEIVFDKEFHLKTTQK

SEQ ID NO: 170316 - protein, 341 aa, unidentified
MKNKSFIGIDISKNVIDVSIFCEETPIKDFSHDVFNNSRKGFGEMCTWLKKNHVVLSNCLFGMEFTGSYSMELEKFLNARNYQFCMLSTHVVKHYPMWPKDKSDKIDSAKIADFLYRYNGTECVKPYNMPDKTMQRLKALMNERKFLVEQRTCFMNRRQLCTTKEDTQLYDGYIKKLSHDIENIELEEQKLLATDDSLLSTYKNLLTIPGIGFVNAINVIVITRNFTAFETARQYASYVGVAPHFRTSGTSVKWRPRPSARCDGQAKADLSMAATVVVQYDAELQSFYNRKLGGKQDSDTKRKALNAVKFKLVLRMFAIGKQNRKWEPLDSKSSNEKLAIS

SEQ ID NO: 170317 - protein, 387 aa, unidentified
MPKHNDLSRCLVTLEQASTLIAVVEMGQSSWLVAGIAPGLDRYPLKKLGPDRDALLQLLHRWRNEAAKVGHAINRIALAYEAGRDGFWLARWLRSQSIEAYVIHPSSVPVSREHRRAKTDRLDTELLKRAFLGWLRGEPKHCSMAAIPTLEDEDARRPGRERQILVGERTRILNRLKANLARLGVHGFRPNLARAPSQLGALRTPEGVAIPTNTLAEMRRDLDRLRFVKQQIKEIEKTRAERLAKAPDERRHAAARLLTRVVGVGIETADMLVQEVFSREIRDRRALARYAGLTGAPDESGQRRRERGLAKAGNARVRRGMIELAWGHLVHQKGSSLTTWYRRRTVDARGGARKTMIVALARKLLIVLWRFATTGEMPAGLLLRPAA

SEQ ID NO: 170318 - protein, 343 aa, unidentified
MEIIKQVTGIDVSMDTLACCTGTINTEQQLDLGPVQTYNNNTTGIKKLYRAAQSQKLPGVSQYFLMEATGVYYEALAYFLKSKGAHIIVVLPNKPKHFAKTLAQKSKTDSIDAKMLTQMGLEKVLQEWEPPSEQMKALKQLTREHQQIMALLTQAKCRTHAKQKAFQPHSSSLKRLKQEIKFYQRQLEDIEAEILTLLKQDHENWNKVQNIQQVKGLSYMTIAKILAETDGFALIRNGKQLASYAGLDVVLRQSGKYSGKTTLSKRGNKYLRMSVYMPALSAMRSNRQMKAYYERILDKGKPKKVGIMAIARKMLLLVYYLWVNDTKYDPDYHPALQANLACF

SEQ ID NO: 170319 - protein, 370 aa, unidentified
MEQYSTDQIWVGLDVHQSSITAAVLYGDSHDPEVVRMRGDLNAVRKFFRRLSQDGTPRSCYEASGAGYVLQRALGRDGFHCEVIAPSLIPRKPGDRRKTDKLDAIRLAKLYRSGHLTPIAVPDEEQEAVRQLVRARLAVQREITRLRHRIVRVLATHGYRFHGTKSNWTKKHRAWLGQLRHELDGPLRTVAGMHLEHLEYLETQQRSMDAEIERFSQMPPWRRGADALRCFRGIKTLTAMTLLTEIGDIRRFPTASGLMAYTGLIPSERSSGEVERRGPITRAGNSFLRRVLVESAWHYRHRAGADLILKRRRQGQNPEVVAIAVKAQHRLSRKFWNLSQRKHTNKAVVAVARELTGFIWAALMAFEEEV

SEQ ID NO: 170320 - protein, 350 aa, unidentified
MTTLPLRITAGVDTHLDVHVAAALDDTGGLLGVESFATTTAGYRRLLAWLRGFGQLELIGIEGTGSYGAGLTRLLLSESVRVVEIDRPNRQRRRRRGKSDPQDAITAARAAQSGDACGEAKTRDGNVEAMRVLRVARFSARKARTQALNQMRSLISTAPEPIREELRHLKAGPMLDCASAYRPGTKRDLVSLTKFSLRLLARRAIALETEIAELDALLVPLVAETAPELLAVMGLGTDTTSALLVAAGDNPERLRNEATFAHLCGVSPLDASSGKNERHRLNRGGDRQANSALWRIVITRMVCDARTRDYIERRMKDGLTKKEAFRCLKRYIAREVYNHLPRAEFALDSP

SEQ ID NO: 170321 - protein, 517 aa, unidentified
MLSARSRAWSEGSATTTLATPRLIGGIPFERLPLNATLSARHAYSIIVEEAMRYNKNAVGRPVGSSDLASEAKSSVLSQVSMNAAGIDVGAESHFVAVPEDRDEQSVREFGAFTVDLYRLADWLAACDIETVAMESTGVYWIPLFGVLEERGFVVKLADPRRLKSVPGRKTDVVDCQWLQQLHSYGLLAGAFRPSEHIRELRSYLRQRSMLIKYAAQHIQHMQKALTQMNIKLQHVVSDITGKTGMDIIRAIIGGERDPQKLSELRDYRIKADHETIAAALEGHWRDEHLFELAQAVQLYEFYHNRITECDGRIEAQLNTFDDLSDGGTVDRKKPGQHNAPSFDLQSYMYRMTGVDLTKIDGIDGYTALRIISEIGLDMSRWPSAKHFASWLGLCPGNKITGGKQYNTRSKPSANRAALTLRLAANSLHNSKSALGAFLRRKKAKLGTPEAITATAHKLARLIYSMLKHGHDYADSGQDYYERQYRERVLYNMARTAKQFGYKLVEVGEPDLQPAST

SEQ ID NO: 170322 - protein, 376 aa, unidentified
MLSAASPENVIYLALELSCSTWLVAARLPGASKSILHRVAGGDTAGLLELIGTLRARSEARYGSDVEVVSCFEAGRDGFWLHRLLSTHGIINHIVEPTSILVSRRARRAKTDRLDAEGLLRVLTSYWRGDRQICSVVRVPTPDEEDAKRQHREREHLVQERVRIENRMEALLMTQGIRGRPSLRSWERDLSALRTGDGRELPAHLRAELNRLHRRLILTLELIREIETERAESMAIGSRDGATTLMAALSRVRGVGENIASILVREVFYRRFENRRQLASYVGIAPMPHQSGTADRDRRIGRAGNPRARSTLIQLAWLWLRYQPGSALSVWFRERVGSLAGRTRRIAIVAMARKLLIALWRYAKTGLVPEGVELKA

SEQ ID NO: 170323 - protein, 339 aa, unidentified
MKLYTGFDLHSTNNYLAIIDEKGKRVYKKKLRNDPENILTALMPHKDEISGIVVESTYNWYWLVDLLMEEGYKVHLANPSGIQQYKGLKYSDDKHDAFWLAEMLRLGILPEGYIYPKEDRPIRDLLRKRGHLVRLRTSLILSLQNIISRNNGFKMTVNDMKALKTDRVAPHLKHNEDLAFVGKVSKESIDFFTRKINDIESIVKKRVTLKKPYTYLLSIYGVGKILSLTIMLESGPMERFKKAGNYVSYCRKVSSKWISNNKKKGKGNVRCGNKYLAWAFSEAAELARRSYPEARAYYNRKMQKTNFMVAHNALSHKLAKAAYYIMKDGVSFIPEKIFV

SEQ ID NO: 170324 - protein, 386 aa, unidentified
MPQVDDLSRCLAALDQDSTLIAVIELSLKHWLVAGIIPGVERQPLKKLDADCDALLRLLERWREEALKAGRRITRVTVAFEAGRDGFWLARWLRARGIEAHVIHPASVAVSREHRRAKTDRLDTELLMRAFLGWLRGERKHCQMSAIPTLEEEDARRPGRELNSLAKEKTRITNRMKAALARLGVVNFKPTLRNAAARLETAATAEGVGVPPNALAELRRDMARLSLIKEQIRAIETARLERVREAPKQGPHALILMLAKIRSIGVGTADLLVNEVLTRRLRDERAVARYGGLTGAPDESGSKRREKGLARAGNARVRRGMIQLAWRFLMFQENSALARWYQARTDNAKGMRKKMIVALARKLLIALWRYVRTGLVPDGVVLRAVP

SEQ ID NO: 170325 - protein, 319 aa, unidentified
MTKEAVYVGVDVAKDTLDVADSGSRETRQFTNDHEGIAKAVQYIASLQPAGIILEATGNLEMPLAVALQAECLPVVIINPRQVRDFARATGALAKTDAIDARILALFGLRIKPEVRPLPDKQAREMGSLLTRRRQLMEMLVAERNRLSRSDEDVQPNIKDHIKWLKEALSDINNDLERRIQSSPSWHEKGNLLRSVPGIGKVVSTTLLIELPELGQLNRRKIAALVGVAPLNRDSGTMRGKRTVWGGRAKLRAVLYMAALVATRRNPIIAAFYRRLLDAGKVKKVALVACMRKLLTMVNAMMRARTAWNPEPIRKITEA

SEQ ID NO: 170326 - protein, 429 aa, unidentified
MVSYNHGIGSPVVFVAIDISKAQHEVLIEPPDGKRKRLRVANTKPDFDELVTVLQRYRIPCHIAFEATGDYHRPLASVLGQQGFQLHLVSSIATSRTREALYNSWDKNDPKDAQVILHLLKTGGTQIYHDPIVSGYNDLQELANTYQQLSLRKVRLYHSILTHFLPLYFPEAERYMGTSRAEWFIHLLLLTPCPAAVLVHSKARFIKAASRVRGRKVDKVRWLGDFYETAKHSVGLPVPASSEAIRMFRLVLEEYAALCERRYQLEEHIESKLGGHPDFRRLQTIPGIGPVLAMLILAEAGDLRRFNHYRKFLKYCGLDLCTDQSGKFRGTTRLSKRGNARLRYAFWMAGTGAIRVRQNSFREKFDNYVRSDPQSADLKRKAYTAVAAKVARVAFGLIKTGTDYRRFPEATIPSGRIPSLGAVEALSTS

SEQ ID NO: 170327 - protein, 419 aa, unidentified
MKVVYPICCGVDVHKTFLVATLITTQGIVPSYKKKRFSTFNKSILAFKQWLIDNDCFDVCMESTGKYYVPIYNLLEDSIRVTVANPKWVAAVKGNKDDVKDSKWIGDLFRLGLVPGSFIPSKNIRILREYTRYRFKLVSCKSSEKNRFQNAFTVCNVALDAVVSDMFGKSASSITDYLVNSDSFDPKHCVSLLQRSLKKKADQVIESIEGFQMTAEQKARIRFVRKHLDFVEQLIADLDQTIARLAAPLESAIALLGTIPGVDRNIAITILSEIGTDMSQFSSSKRLCCWGGLTPASNESAGKKKSVRITRAGVYLKPALVQAAHAAVKSNFSAYYRIKYERIAKRRGKKRAIIAIARMMLTAAYHILQTGEVFNPCDLYHVDTPLELRNKQKEKALKQAAKLLVANGVVCPEHIVLPA

SEQ ID NO: 170328 - protein, 337 aa, unidentified
MTIIRIGLDTSKHVFQVHGVDDSEQPVLRRRLGRSEVAKFFAKLPPSWIGLEACGAAHHWARLLRGLGHAVVLLPPQYIKPYVKRGKNDAIDAAAICEAMSRPGMRFVTIKSAERQAGLMLLKTRDLLVKQRTMVINAMRGHAAEFGLVAAKGPVKVAELLQQAQAEAAGVPGLAVEMLDVLAGQLDALDVKIKGLEAQLVAWHKQDPVSQCLATQPGIGPIGAVSFTLKLTDPTGFRSSRHFAAWLGLTPKEHATGGRRRPGRISRQGDQTLRKLLVLGATARIRFAKAGRASPWLLSLLARKPKKLAAVALANKMARILWAMMVSGEIYRHPKEA

SEQ ID NO: 170329 - protein, 333 aa, unidentified
MTQNQTLSAALESPPVLGIDVSKPTLDTCLLHHGKARHHRFANTNEGIARMLAMLQASGASQALVAMEATGPYSLEAAAASAAAGHPVTVINPRRVLDYARACERRNKTDRVDAALIARFASKESLPLWRPLPAEQSLLRDLLRPQSDLEAQLHAEERRLEMATEAKPLRASLQRSITWLRAELERLEKSLQQHLREHRPLTTQIENLQTVPGLGEKSSRLLAAEVPSHFVNARAVSAWLRVVPQQCQSGLSVRKPSRIGHDAPCLRSKLYFAAVTAMRCSPRFQALAERLRAKGHGKMSIIMAVLHKLVRTAFAILKTGRPYQADHVVALAS

SEQ ID NO: 170330 - protein, 421 aa, unidentified
MQETEEPLEFVQRVAALDIGKSTLMACIRVPHEDKPGRRLQEVGEYATTTRSLLALADRLRCQGVTLVAMEATSDYWKPAFYLLEAEGFECWLLNAKHVKNVPGRPKTDKLDAVWLAKVVERGMCRPSFVPPKPIRQLRDLTRYRRTLVRERSSAKQRLEKILEDAQIKLTSVISNLLTVSGRQMLQAMIDGERSPKVLAEMARGKMRAKLDALQEALTGHFDEHHAFLCTMMLARIDDLTARIGELSQKIEQVMEPFTVQVDQLIEVTGVGRSSAQEIIAEIGVDMTRFSSSDHLVAWARYSPQTRQSAGKTKSSTTGKGNWLSGALGEIGIATSRTDTFLGARYRRIAKRRGKRRALVAVGNSVLTIAWHLLSDPDARFNDLGPGFYESRINKERQTRNLMRQLEQLTGRPVVLGDAAA

SEQ ID NO: 170331 - protein, 413 aa, unidentified
MQVMVERCCGLDVHQETVVACVLVGAPGHRPRKEVRTFRTMTRDLEALRDWLKAAGVTHVGMESTGVYWRPVYTVLEGHFELIVGNARHVRNVPGRKTDVKDAEWIAELVRHGLIAKSFVPPRPLRELRDLLRYRRKLIESQAAERNRLLRLLETANIKLASVASDVFGVSGRAMLKAMIEGNASVEEMAGLAKGQLRRKHDDLVLALEGRVEEHHRFLLALQLRRLETAENDIEALDLRIAERLEPYRFPHALLTQIPGVDWVVAAVMIAEIGVDMSVFFSVHHLAAWAGVCPGNHESAGKQKSGRARKGNVHLRTILVGAAISASRTKGSYLKDKFYRLKARRGALRAALAIAHKILVAAYHMLAKGLAYRELGEAYLDQIDQTRTAANLKRRLERLGYIVTLQTKETVAT

SEQ ID NO: 170332 - protein, 418 aa, unidentified
MKADPETIPIERFIALDIHKHYVLVGGMNSQRDWVLRPRKVRMSRFPEWVQKNLRSTDDVVLESTSNAWEIYDLISPLVGRALVANPLKVGQIAGAKVKTDRLDVERLIILLIADIVPEVWVPPHHVRDLRALISHRWRIHKQISMTKNRLHSFIHRFNLIPPEGPLFSKSNCIWWEEQEFSSMVRLQIEQDLLILEHLTAHKEAIHQELACLSNRKPWAEDAVFLMQVPGLGVVLTMTVLSAIGDISRFEKAKNLVGYAGLGAGVHDSGLKHQGKGITKSGRKELRWAMVEAAWGAVRSNLHWKAQYEQFKKRGKHSNEAIVAVARKLLVAIWHMLTKGEPHRHSTEEDLAYKMLIWSQRMNEDALRGMTRQQFARYGLLRLGKGIHLTRIIRNGLPRRIAPTDEVLALLPELNLLE

SEQ ID NO: 170333 - protein, 332 aa, unidentified
MLYENYVGIDVSKLSIDAFIRESRIHRQFRNEESGFKQLIQWIKKHIGETWESLLVCFEHTGLYSLSLALFLEREHITYAMVPALDIKRSLGITRGKNDQIDAKRIAEFAYRFNDRVMPTSLPVKDIRKLHSLLAMRDKMMRNMGGYITSRNELFRVIPDRELPVLTSVYENIISTLKNEVHELEREIRSIIMANKELKTTFELITTVKGIGFIVASFLIVYTCNFTRFENWRKFACYSGIAPFEYQSGTSVHARTQVSSIANQQMKRLLHLAAMTAIHFDAELHNYYVRRQAEGKSKMATINIVRNKLISRVFAIVKRRTPFVDIQKYTDL

SEQ ID NO: 170334 - protein, 424 aa, unidentified
MKVTYQTCCGVDVHKSFLVATIVKTTGGIEPSYQKKRFSTFNNSILEFKQWLLDNHCHDVCMESTGKYWVPVFNLLEDKINVVIANPKWVKAVKGNKDDTKDSKWIGDLFRLGLVKGSYIPCKKVRILREYTRYRYKLVSCRSSEKNRYQNALTVCNVALDSIVSDIFGKSSTSIIDYLLEQSGTSINHEEIASKLLRSLKSKEDAVIKSVEGYQMTDAQKYRMRLVRAHMDYITAEINDVDKMIENMISSNPDFENAVQFLCTIPGVKRDSAITIISEIGTDMSQFSGSKRLCCWAGLTPGSNESGGKKKSVRITRAGVYLKPALVQCAHAAVKSDKSPYYKKKYESLVKRRGKKRAIIAIARMILTAIYQMLSTGEQWNPGDLYKIDMPVALVEKQKAKAIKQAKKLLQREGLLPPDEPLAS

SEQ ID NO: 170335 - protein, 364 aa, unidentified
MKKNSTVAKNRNEIFKQPKLTIGLDLGDRSSHYCILDKAGNVILEHNLPTTPRGIRQVFGKLPRCLIALETGTHSPWVSRQLSRMDHEVIVAHARNVRLIGESSRKDDRLDARTLARLARIDPGLLGPVRHRSAQAQIHLTVIRARAALVSTRTALVNAARGLTKSYGERLRKCGTEQMNRESSKELSQELRNALDPLLGEIESLNENIAEYDRRIEQIAKEVHPEVARLKQVKGVGTLIALTYVLTLDDPHRFRRSRDAGCFLGLRPGRRNSGQSEPQLHISKEGDRYLRTLMVQGAHYILGPFGQDSDLRRWGLKLAERGGKNAKKRAVVAVARKLAVLLHKLWVSGEDYEPLRNNQQAAVA

SEQ ID NO: 170336 - protein, 402 aa, unidentified
MNFSIGLDWASQTHAVCVLEATGQVGWQGTVEHSAAGLAELLRRLARFGPPAALPVALERPSGLLVDTLLAAGHPVVPIHPNALKASRPRYSAAGSKSDPGDAFILADLLRTDGHRFRRLQPLSDETRALRALVRGRDDLVAERTALANQLRALLERVWPGAAALFAEVESPISLAFLTRYPTAQSAERLGEKRLARFLGQHSYCGRRSPAELLARLRAAPASDVSDLEAEASRDVVHALVAVLTPLGVQIQQLSAAIVAAVAQHPDGPLLQSFPRSGGVNAAQILAELGEDRTRFPTDEQLAAEGGVAPVTRESGKHRQVAFRWACNKRLRQALTTFADHSRHASPWAATIYTAARRRGCAHPHAVRILARAWVRVLWRCWQDRRPYDVTLHRAAQRGAAA

SEQ ID NO: 170337 - protein, 359 aa, unidentified
MSVYVGIDVHRKRSVHRKRSQVAVVTEDGTVQLNKNVVNGSEPMLRLIGGLPPGTPVAFEAAFGWGWLAELLEDYGFEAHLVHPLRCKAIASARLKNDKVDAAILAQLLRADLLPEAWIAPPAVRQLRALLRHRAGLVRLRTQQQNRIHAVVADFGYDRSGSYLSGPGRGWLAGLELPAVSREIVTDALAVIDGLAPLTDRIDGELRQHAKADPRVKTLTTLPGVGQFTALVMLAEIGDISRFPSARKLASWAGLTPTVRGSDLTVRHGHISKQGSAWLRWVMNQAAQTAKRSPEFSATYAAIAQRRGKKIATIAISRKLLTRAWHLLATTAQAPGPAAPDASTATAAHPRPGGSPSPG

SEQ ID NO: 170338 - protein, 377 aa, unidentified
MSETKLFVGMDVHKDSVMVAVFPAGASEPTVVKRLPNEARKLRRFFERLSRQAEVRACYEASGAGYVLQRLLTTWGHTCEVVAPSLIPTRPGDRRKHDKKDAVQLARLYRAGELVVIRIPAAAEERVRDLVRCRETFQREVLRSRHYILKFLRRRDLVYREGRNWTGRHLAWLRGLQCAGALEVEDQEVFTEYLALLEYKLQRREELDRRIEALALRPAYRAAVERLCCFKGISTHAAMVLVTELGDVRRFDHPRQLMAYVGLVPSEHSSGEQRRQGSITKAGNSRCRHVLIQAAWSYRHPPRRGVPLKRRQEGQPAAVVVHSWKAQHRLHKLFGRLAYRRCPQIAVVAVARELVGFLWAVMWELEAETHDRIERAA

SEQ ID NO: 170339 - protein, 415 aa, unidentified
MSVTDVPEPPRPTAGVDWAKDDHAVSVVGPDGEQTHRFSITHDAAGLRSMIKRLLGAGVAEVGIERPDGPVVDALRAAGLVVYVIPPGQLRNLRSRYGSAGNKDDRFDAYVLADVVRTDRRRLHPLLVDQPVTTALRQTVRARKDLVAHRVAVANQLRAHLQICFPGAVGLFRDIDSEITLRFLERFPTPERAAWLSVKRLTAWLASIGYCGRTPPETLYQRLTTAPAAATGADADADTAAAVTAAFVAVLRTLTTQIEALAARISEQLDLHPDQAIFTSLPRSGRVRAARLLAEIGDARGRFPTADSLACLAGVAPSTRQSGKVEVVSFRWGADRQLRDAICDFAGDSRHANPWAADLYQRARNRGHDHPHAVRVLARAWVDIIWACWTSHSPYDPDRHGALQRILNQDQPAAA

SEQ ID NO: 170340 - protein, 345 aa, unidentified
MDQLNNRKCSTPLHWVGADVAKHTFDAALVRCDRHYPETALREIPARTFSRTFQGVERFIDWLDEHGVDHEDVRVVMEATGKYSVELAVWMIAQRPTLSPAIANPQQTSAFITSMGLRNKTDRLEARALGFYGVERRPLAYEAPTPECKELRALSRYRDSLVRQRTALKNQRNELDDSTFVQKNQTKRLRLLTGDITRVEDEMKALVNQHQALKRDIELLTSIYSIAFINATTILAELGDLRRFPLARQLTAFAGMSPRHHQSGTSIHGRSRLCKQGNPRIRQCLYLAAMTAIRGQNQFRHTYQRLLTEGKPRMVALGAIMRKLLILMRAILISGKPYKPLGITR

SEQ ID NO: 170341 - protein, 431 aa, unidentified
MLKINPLSTLYVGIDVSSKSNYVCALDFYKNKYINSSFANNQPGAEELALKILECLKEHPDITTIVAALESTSVYSIHIANYLSSCEELMRFKPYVFVLNPKCTANYKKSYIGLGKSDPIDAFVIADYARAGNIESEPWRGSQFLALKRLTRHRLHLVECMTREKTYLVSNLYLKFSELQMLEGDDQPFCDIYGATSSSVLMEYFSPEEILDSSEEDLIAFLAKKSRNRIKDISKTADLLKKAARDSYRLDKALYEPLNVSIASSFNCIETFKREIKVIDNAIEKEIKGLNPNAFIILQSIDGIGPVFAGGIIAEIGDITAFHSSDALAKYAGLTWKSNQSGDFDGEDTPMIKAGNRYLRYYLGEAANSMRKHNVEYGTYYRKKYNEVPKHQHKRALALTSRKFVRLVYGLLARNQLYSGVSLDTSIKDSN

SEQ ID NO: 170342 - protein, 348 aa, unidentified
MKELMAGIDLHSNNIMVGVVDGEGKRLAHQKLPCELKRILEFLAPFKKRLQRLAVESTYNWYWLVDGLQGAGYPVVLANPAKITQYSGLKHADDKSDAFFLAELLRLEILPTGYVYDAQRRPVRDLLRRRMSLVHQRTALMLSFKSLFTRTTGEQMSLSRLKTLAVAQAQALYEHPANQLIAGLQIHHIEQLNASIARLEKAVLNVARELPYYPQLKTLPGVGIILGLTLTMEIGDIQRFAGPGPFASYCRTVAAQCTSNGKPKGENNGKCGNKYLSWAFVEAANFAKRYDEPCRKWYDRKAAKTSQVVATKALACKLAKAAWHLVAEQTDYEPGRMFPQLAGAAMSK

SEQ ID NO: 170343 - protein, 397 aa, unidentified
MIAVGIDISKAKSTVAVIDSDGTVLASPFTMAHTQPEMEAFVTYLKGLGEPTTILMEYTGHYHYPVLKKLQDEGFPVCIVNPYQMKKYGDVEIHKAKTDKKDALRIAAYALEKSYKLVPYSSMEQKYEDLKFLSRQYSQRITYVAKLKVQLIALLDQTMPGITRILPLNSRNPEKCALLLFIKRFKSFDEIHRIGKARFLASYDILAKKVSERSASSKGLSIYELAVDSITTRGEDPYIWLSQNQCVDLLSTTQNAADEIISQMRNIAETIPEYKVLRAMHGVGDRLGPIILAEIGDIRRFHSGKALNSYAGNDAPPYQSGQFESRNRHISKRGSSALRKACYEVMQALKLTKPQDDPVYLFMLKKEQEGKPFNVAKMAGVNKFLRIYYARAMELYK

SEQ ID NO: 170344 - protein, 400 aa, unidentified
MKQERIVAGLDVHKDSVCLCIMRYDEVIIFEKTYGTLTTELRQMRDDMLAHGVRECAMESTAVYWVPVWNKLCEYMQLRLADPMFIKQLPGRKSDTKDAQWIAEYQLKNLIRKSFVPEPVVQDMHKLNRRIFNLNEDLTYNRNELDATMQRYDFRLSNYVATTGSKSYRSVVRAIADGITDADTLVQKVHGRTINKHGKETVLVAVTGNFSATDIQGIKQYLAMIDLFNGRIEECQQSLTSLYEEHFLSQYKSLQTIPGVKERAATAIIAETGADMSAFEKSSNLVGWCGLKPRNDISNRKMKSRKITHGNRYLHQILIEITWCASRTRNCFFSNFSYVQVTQKHKSKMKIQVPIARKVLVAVWHMLSKGENFIDLYLKRLEERARIEAEIRQMESSMGV

SEQ ID NO: 170345 - protein, 410 aa, unidentified
MDVVKPRCAGLDVHKKTVVACVRRPGQRGERCGETKTFTTTMRGLGELRDWLVAHEVTDVAMESTGVYWRPVYAVLEGTVTVVLVNARHVKMVPGRKTDVKDCEWLAQLLECGLLRGSFVPPQPVRDLRDLTRMRKALIRERSHHVNRIAKTLELAQIKLGSVITDIMGKTGRAILYALSTGIDDPDQLAACAQGNVRKKRAALREAVVGRLTPHYAFLLQQHLSLIETLDAHIATLDTRIEVAMAPFAAELALTQTMPGVAKRAAEAILAETGVDMTQFPTAGHFASWARLCPGNHQSAGTRYNTTTGKGATWLRATLQEAAWAAARTKKSYYCSLYHRIKGRRGAKKAIVAVQHAMLVALWHMLKNRVAHHDLGVDYLDRRNTDHARRHHVRRLERLGYDVVLVEKAA

SEQ ID NO: 170346 - protein, 312 aa, unidentified
MTNTGEWIGVDVSKRFLDVYAASAPAFRLANDADGRSALTERLRALSVRGVVLEATGGLERPVLAALIGADLPGSIVNPARVRAFAEGTGQLAKTDRIDAKVLAAYGAYMQPQPTALPSSARAKLKELLAYRAQIGEEIVARCAQLKLYETDSLRARAQAALEALRRERRELEREIETLVESDALLSAPFQILTSAPSIGTIVGATLVAELPELGVLCRRRIAALAGLAPFPCDSGERRGYRTIRGGRADVRKALFNAARVAIQHNPKIKAFYQRLRATGKPGKVALVAAMRKLLTILNAMLRSGTTWQAQT

SEQ ID NO: 170347 - protein, 412 aa, unidentified
MTVTNQFAAHVGLDWADKKHDVCVQFKNGERVFYVIEHTAEALDVWLTDLHQKVKGRIAIALELKKGPVVYALQKYPFITVFPVHALSLARYRQAFSPSGAKDDPQDAELALELMLRYPQKIKAIEPDNAEIRLLQQLVEQRRQLVEDKRRFVNRMINTLKQYYPQPLEWFSHRGSLLLCELIIRWPSLQQLKRARRDTIRNFMNAKGGRAMALTEQRVVSIDNAIPLTTDPSVIEANALMATALATQIKVVSEIIKTYDERIGTLFDTLPDAGLFKSLPGMGPCMGPRMLAALGDNRDRFNSAEEIQNYAGIAPVTERSGQKSWVHWRWQCARFVRQTFVEWAAKTVNSSYWARLYYQGQREKGKSHQSAIRALAFKWIRIIYRCWKTKTRYEEAKYLLALESRHSPLLKP

SEQ ID NO: 170348 - protein, 347 aa, unidentified
MVTLGADAHKRSHSLVAVDDSGRQLGAHTVAATSAGHLEALRWTQCWPERRWAVEDCRHVTRGLEKDLLSAGEVVVRVPPHLAAEGRRSVRERGKSDAIDALAVARAALREPNLPEAHLEERSRAVKLLLDHREDLVGERTRIQNRLQWLLHELEPGFQVANGALSRGPAIRRVEALLEGRKGIVAELAGELTARTAQLSLRIDELEQELAGMMPALSPSLLALPGCGILTAAKLVGETADARRFRSRAAFAMHNGTAPIPASSGNQQRHRLNRGGNRQINAALHRIAVSQIRRSGRSHDYFQGRLAAGNTKREAYRALRRRLSDEVFKLMLSDLRTRASNAQSAAA

SEQ ID NO: 170349 - protein, 385 aa, unidentified
MRHIEQPAAFRDAAVVFVAMELSKSSWLLAAQASPSGKTLSHRLDGGDIAGLLALLRRLQGRERRANGEEVKIVLGHEAGYDGFWLHRRLAAEGITCLVMDPGSLQVDRRARRAKTDRLDAAMLLRALIAWCRGDRAACHMVQVPSVEREDARRTHRERQRLITERVQHVNRVKGLLATQGIYTFQPLRRDRWTRLAALRTGDGLELPPCLRREIEREFKRLELVLEQIEATEAERDTVAATPAAEDVDAEKVQLLVKLGGIGTELASVLVREGLYRPFKNRKEVAAYAGLTPSPYASGDRHRDQGISKAGNPLLRKSMVELAWLWLRYQPDSGLARWFNERVGATRGRIRKITAVALARKLLVALWKYVTTGLLPEGARLKPAR

SEQ ID NO: 170350 - protein, 366 aa, unidentified
MKTNINSQNRSSATSITQADIIKLGMDVHAETIVVVRLLDNGAPQPPQRFTRGQLLAWVEKQRQLAKQVFSCYEAGPFGYSLHRELEKRGVTNYVVRPRDWDEYGQKVKTDQRDARQLAMELDRYVRGNHGALCVVRVPTTEEEQRRSRARQREALLREKLRLAAQGRSHGLYYGYHIQGEWWKEGGWRVCAKTCPAFLMELLAPLRRLIAAVEIELAQSEKELHAQFPGPLPLGVGELTAHTLESEVGDWNRFQNRRQVASYTGMCPREHSSGNKRLQGHISKHGNGRLRPLLIECSWRLCRFQPGYRPVQHWSDILLNPLASRARRKQLLVALGRRFAVDWWRIRTGRCTAEALGLKLQPAPGA

SEQ ID NO: 170351 - protein, 344 aa, unidentified
MKNYAGLDVSLEETAIAIMDETGRTVREAKVASEIGALDAWLRQTGIAIARLGLEAGPLSSWLYAGLKERGWPVICIETRRLRAVTRAMPVKSDRKDAEAIAQVMRTGWYRAVHVKSLASQQLRVLLRHRKILQAKRQDLENELRGTLKAFGLKLGTVGRAKFAQRVGELVAGEPWLERLAQPMLAARAALLKSFGELHGLVLKIVKADAVCRRFMTIPGIGAVNALAYKTGVDDPARFRHSADVGPHFGLTPRRYKSGETEHVGSISKCGDAMVRSLLFEAAMALLHRVKAASSLKRWARTLAKKTGTRKAAVALARRLAVIMHRMWLDGTDFNPKLIRAAAN

SEQ ID NO: 170352 - protein, 336 aa, unidentified
MTIVAHHHPFVIGADTHARSHALSILASPTGEVVDEAQFPATNAGLARAIAWVGRRTGGDLAALWVIEGTGTYGARLARAADDAGYTTVEAARMNARANRGVGKSDPLDARRIAAAVLPLKISELRTPRADDGARAAVRVLITSREHMSSERTAAVNALTALLRVTDLGIDARRALTASQIATVASWRSRREDLAAAVAREEAVRLAQRVSALDEQLKINTKRITELIAQSPAGDLLQQPGIGPVTAAVAFATWSHLGRVRSEAAFASLAGVNPIPASSGNTVRHRINRGGDRRLNRALHMAVVTRMRMDPRTRAYVERRTAEGRTLREIRRCLIG

SEQ ID NO: 170353 - protein, 343 aa, unidentified
MTVIIGVDPHKASHTAVAVNASEEELGRKQVRAGRTQLEQLVSWAGPFTDRTWAIESAGGLGYLLAQQLVAAGEEVLDVPATLASRVRVLGTGRSNKNDPNDALSVAVAALHSRDLRRVQAVGHSEVLRLLAKRNTDIGDQRTRVVCRLHALLAEIAGGGIAKEIYASDVDRFFLEHKAETPVEQVRYDLAAELLEDIRRLDAQLKASHKRIRDAVRASGTSVTELFGVGPIIAATLIGYTGDVTRFANRDHYASYNGTAPVEFSSGGRVVHRVSQRGNRNLNHAIHMAAVCQLRQTHSEGRAYFDRRVAEGKTGREALRALKRHVSNAVYRQLLEDAKRARK

SEQ ID NO: 170354 - protein, 364 aa, unidentified
MKRSLKYVGLDVHQATTVTSVREESGRVIAQTVLPTDGRMLVEYFRGMRGSIHVAFEEGTQAQWLHDLLQPVVAQVVVCDRRGTTARGNKGDQLDADALSELLRRGALRPVYHGSGERATLKEVARTYRNLVEDTTRVMLRLKALFRARGIKTAGRGVYRPDERADWLAQLDTAAGPGASRGAHFRAATLYAELAVLQALRPTARRALIVEAKRDPAWAVLRRIPFLGPIRVALLLATLQTPWRFRTKRQLWGYAGLAVVTRTTAEWALVDGRAVRRRRPPMTRGLNRNHNRVVKEVFKSAATAAATRSGPWQDWYQEMLKRGMREELARVTLARKLAAITLHLWKTGARYDPSYLMSSAVPAR

SEQ ID NO: 170355 - protein, 336 aa, unidentified
MNIKRIGLDLAKQVFQLHAVDHCERVVLRKTLRRSQMLTFFTRLEPCLIGIEACGSSHYWARELTRLGHTVRIIPPQFVKPYLKGNKNDANDAEAICEAVSRPGMRYVALKSEAQQSMQAEHRVRARLIRDRTALSNEIRGILSEFGLVLPVGLSALRRALPEILSQQEQWDNRFIRLLCELAEELQVLDERLNRYDRRLKQLAQEDVRIRRLQEINGIGPVTASTLVAAVGDAGQFKNGREMAAWLGLVPRQHSSGGKNRLGHISKRGDSYLRTLLIHGARAVLNTCGHKEDRRSQWLQSVAERRNRNVATVAMANKNARIAWAILSREEEYRAL

SEQ ID NO: 170356 - protein, 349 aa, unidentified
MKILAIDLGKYKSVACNYVTATGTARFATVVTHANELDRLLSRESPDLVVIETCSIAGWVHDLCCQRGVKCQVANPSGEAWKWKNVKRKTDRDDALKLAQLAALEQLPTVYVPAPETRQRRALLKYRQSLITRRVAIQNHLRAIVQRQGILLDRGSRAWTVAGLEEIQQLAKPLEECSAEELWRGEVALELLALRAVTKLLREVEHKLETIAASNGSVKLLRSIPGVGRCTAEVVVAYLDNPQRFENGRQVSAYAGLVPKQFQSGETDRRGRISRRGPSLLRKVLVEAGWVLLRYNSWAQRLMQRLSRGQKTRRKQAIVALARKLLVRCWAMLRDGTAWHEPPPATATT

SEQ ID NO: 170357 - protein, 320 aa, unidentified
MTLTLGIDVAKAKLDVALRLPTGQIRSTIIANTDAGFVELQAWLAPHDRTALHVCLEATGVYWEAVAETLAEAGFTVSVVNPARIKAYGAARQVRTKTDAVDARLIADFCASQHPPAWTPPPPAQRELRAWVARREALVVMRTQEQNRLPVAHPSVRPGIEALIAHLDRVIAEVEAAIRQRIDDDPTIKHQRDLLDSIPGLGEKTIPILLSFYGGPERFDHARQAAAFAGLDPRQHQSGSSVHGKPRLSKVGHAGLRKALYMPAMVTLHKTAWGRAFRDRLAAAGKAPMVIIGAMMRKLVHVAFGVLKSGQPFKPALHGA

SEQ ID NO: 170358 - protein, 434 aa, unidentified
METEFAALIAIDWADQKHAWALQIPGSSRRETGTIDHTPEAVDVWASELRLRFAGQPIAVAIEQSRGPLVFTFSKYEHLVIFPVHPTVLVNYRKSFRPSGAKDDPSDARLLLDIVTLHRDKLRRLNPDTPETRTLQFMVEERRKLVHEKTRYSNRITAHLKMYFPQVLNWFDEIGSNIAADFLERWPRLEKLQRAKPTTIERFFIDHKSRNRERIAERLEQIRKAIPATTDAAVVTSCSTAVAAWAALLRQVLAAIAIYDEKIDALARTHPDYALMKSLPGAGAALVPRLIAAMGSQRERYEAAYEIQCYSGIAPVVASSGQQRWVHWRRACPKFIRQTFHEWALHSIAWSPWAREYYEQQRAKGKRHNTAVRSLAFKWIRILFRCWKERTPYDEAAYQRALDARRPKNQLPAQPVELQWKSVAGFSKIAFAGA

SEQ ID NO: 170359 - protein, 451 aa, unidentified
MKNEKVKKGISRISTGLPVFNEHAAGIDIGDTLHYIAISDGDGGHEVKTTTGFTSDLKEIVGYLKQNNITTVAMESTGVYWLPLFILLEQAGIEPYLVNAAHAKNVTGRKKDDTDAIWLHKLHTCGLLQKSYQPENDMRIVRDYTRQRKRLINLSSDAVRRLLKALELMNIKIHTVISDILGKTGMSMVKAILAGQRDPEELAKLCDPRIKASKEEVIKSLEGIWKDEYLLVLRQAVEHYEFHKQQIKECEVVLEKILRERVVKIKEGDLTGMEHPIKKSKKVKRNEFEYEITPYVKEIVGVDISGIPGIGESTAIEIMSEIGVDMKKWKSEKNLCAWLNLAPNTKISGGKILSSKRMKKKNPAGQMLMQAASTLRNSKSSLGDYYRKKRAQLGGKGAVVATAHKMARIIYKMILKQTEYSEEKINFEDQKFKQNKIRKLEKLLENLKKAS

SEQ ID NO: 170360 - protein, 324 aa, unidentified
MTDAVLGIDVSKNTFDTNLGAGTKARSKSFANSPAGWHHLIAWLGEHKIGQVHACLEATGRHGLGIALALHEAGHVVSIVNPAQIRDFARTKLGRNKTDQVDAVHIREYAELFKPRPWTPPSPAMRRLCELQTIRAGTVAGLTEWKNRRGSGIMDDLALSLAKTTIQHFTSQLEAVDQAIAETIDNDVELSAKRDLLVSINGVGEALAGIVLAELPGPDILGSSAAVTAYAGLNPQQHQSGISVNRPVRISKIGNAVLRTALYMPALSAMRYNPAVAALADRLKAQGRLKGKQIVIAAMRKLLVLCFGVLKTGKEFDPAMATGK

SEQ ID NO: 170361 - protein, 429 aa, unidentified
MNSTQNKKIDQVKETTMIVGIDVGSEKHYFRAFNWRGIELTRKPVAFSNSMEGFNSFYNTIVELMQKRELEEALVGIEPTGHYWFDLGQFMGEKNIKFVMVNPHHVHKTKELDDNSPSKNDRKDPRVIAGLVRDGRYFYSYMPTGVYAELRNASNRRFVLVEEQTRAKNRLQKWIAVYFPEYKGIYTHIDAKGGLLVLKQAPTPEEIVRLGVEGIIKIWKDAKLRGNGHKKAMLILNAAMKSIGLKSGLTEARMEIQDLIEDYELQTKRLERVNDLIKELCQQIRYADKLLEIKGIGITTVAGFIAEVGDITRFDSTKELQKLAGLELVSDSSGKHNGKTKISKRGRKRLRYLLFEAAISVVGKNEEFKEIHSYYTTREKNPLKKMQSLIAVACKLIRVFHVILTKGISYDASKMLKDIRHQGEQLKAA

SEQ ID NO: 170362 - protein, 316 aa, unidentified
MTQISRTAGIDTSKAKLDVAIHGGGGHWQVDNTPVGWGGLAAELTSAGVMRIGIEASGGYECGVVGCLRAKGFSVLVLQPIQVKAYARLHLRRAKNDRLDAVLIAACAATIDRPRIEPDERLAKLAHYLTFVEQIEEDIARLKTRLEHIGDARLRRMVVADIARLKARRSAELLRIVAALRAHDDLGRRFDLVLSVPGLGERTALALIIRMPELGQVSREEAAALAGLAPFDDDSGKHKGDRHIAGGRRRLRRSLFAAALPAAFRWNKALIALYTRLIARGKAHNEALIACARKLLIYANTVVQRATPWTERSLSA

SEQ ID NO: 170363 - protein, 422 aa, unidentified
MLEETQDEQEIIQRVAALDIGKAELVCCVRVPDPKGGSRRVQEVTTYSTMTRSLQLMADRLLDLGVTRVVMEATSDYWKPPFYLLEAHGFEVWLVNAKDVKHLPGRPKTDRLDAVWLCKVAERQMLRPSFVPPVPIRRLRDLTRYRIALVSDQGREKNRVEKLLEDAQIKLSVVASDIFGVSGRDMMAALIAGERNPQVLAQLARSSMRTKIPQLEEAFVGYFTEHHRFLLAKMLARIDALDADIADVETQIEAQIAPFAPAVARLDEIPGVGATAAAVIIAEVGLDMTRFPTPAHLASWARFAPGVKESAGRKKGTGSTGHGDRYLARVLGEAAVGTSRTNTFLGERYRRIARRRGKKKAVVAVGRSILVIVWYLLSDEAAQFHDLGPGYYDSRTNPDRKKRNHIRELEALGYRVTLEPAA

SEQ ID NO: 170364 - protein, 414 aa, unidentified
MPLPRWVGRAIGLDVHRDFCAVAICEDGQVRSAGRVPSTPDGLATLAGSLLPSDRVALEVTGSCWEVSRLLEPHVDRVIVVSPDDTGITQARAKTDRLDARALAMLLWRGEVEAVWMPDERCRILRRRLARREQLVQSRSRSKNEIHAVLQRRLQGKPPCTDLFGVKGRAWLAGLELPLEERESVDAGIRHVEFLDAEVAAVERLIAQQALSWPEIRRLMTVPGVNLICAASFIAAVGDPRRFMTSRKLVAYLGLDPKVKQSGEAPARSGRISKRGSPSARWALVEAAWTAVNQPGPLHAFYERTKARRGHGKAIVATARKLAILFWCMLTRGEDYAHQQPSLTKKKLRRLEITAGAPKYTRAAAGIWSANDAVREAERALAEQAERSYRRMVQDQQASSPGRKVGASATPERA

SEQ ID NO: 170365 - protein, 343 aa, unidentified
MVHYIGLDVSLKKTSICVVNQAGSVVREGVVDSEPEAIAAFVRSKAPGAVRVGLETGPTATWLWSELKQLGLPVICIDARHARAVLKMQINKSDRNDAAGIARIMQTGWFKEVRVKGLDSNSVRALLASRALLVKIKRDLENQIRGLLKNVGLVIGRAKFNVFAVRAEELIEDRPELIAVVGPLLKARQAIEQQTDDLDRKVLKLARHDAQVRRFMTVPGIGPITALCFKATVDDPTRFKRSRSVGAYVGLTTRRHASGEIDWTGRISKCGDAMLRSYLFEAAGVLLTRVPKWSALKAWGMRLAKRNGLRKATVAVARKLAVILHRMWIDRTEFNWSKKEVAA

SEQ ID NO: 170366 - protein, 354 aa, unidentified
MNATQVFEKRKIAVAIGIDLAKDHCDVVAYNADNKICFSKANMSYPKLMEWLANCKPAIVLMESCKGCHVRARDIADLGHDARLVKGADVKALRNVCQKNDIRDADYIARLLYVPGTKFVFVKNQRQQSLQFLQNEYKSFQELRIQVGNQIHAGLEEFGCPAPKSQKFIQSRMMAHLEKNAELIPEAVMASFLRRREMWLNLFEHEEEAKKRMEEIAKTDDDAKRIMTVPGVGAQTAVGMLVHIGGDIGRFKNSGQFAASIGLVPKQNSTGGNTTLNGITQCGPKRLRANLVQCGQVILMHADKLKGNFGDWVRKLRDSGKKHGVIVCAIAAKIARIIYRLMKDKVDYIPVPSR

SEQ ID NO: 170367 - protein, 415 aa, unidentified
MERSPTRFVGLDIHKEYFVAVGVNAKREVIFGPQRASNYQLDEWIQRYLTGEDAVVLRSDCDFQSEMTANAYLFYDSLLPHVHSVIVVHPANVALVTKAQVKTDKKAALALAQLHAVGLLTGVWIPPHKIRDLRSLIAQREKMVRLSTIAKNRLHAMLHRKHLIVAENPFAPEQRTWWASLPLSETEQFLVHSDLETLDFAQRQIEQVETCLKQQSAKDDRIPLLVQLPGVAMLTAITILAAIGDISRFETAKKLVGYAGLGARVHDSGMTHTTGRITKAGRKDLRQAMVNAANNAVQHHVHWKKEMARLELRLGRSKAIVAIAHKLLVAVWYVLSKAQADRYADPQDVARSLFAHAYKVGVKNLPNEQSALAFTRAQMDRLEIGKDLKEISWGSKPHRLPPSKLPLEKSKRCPK

SEQ ID NO: 170368 - protein, 373 aa, unidentified
MCHVWTSGNRGRVIIIPVTAIRAECARFAGWEIIMTKYVGLDVSQKTTVLCIVDGEGHRLWRGECSSSPDQIVHTVLQHAGAGASIGVETGPMTPWLVHELRARGLDVICLDARHARAALRMQLNKTDRNDAEGLAQIMRTGWFRAVHVKSFDAHRARALLGARQQLVGMVTRLSNHIRGVLKTFGMLPGSVRGRSFAERVELLVAERLDVAPIVRPMLTAWSKLREQIAAFDKAIRAEVKQSRECRLLMSVPGIGPVTVLAYVSAIERPDRFRRSRLVGAHLGLTPRQYQSGDVDRSGHISKCGDTLARLCLYEAATVIMTRVKRPLGLKIWAMKIAKRSGTNKARVALARKLAVILHSIWRTGEAFCWGAH

SEQ ID NO: 170369 - protein, 327 aa, unidentified
MTKPTLGIDIAKLKFNVCLINDSGKLKHKVFANNSTGFAQLREWLAKQGIECLHACLEATGTYGEALALFLHQSAHIVSVVNPAAIKAFAGSRLSRTKTDRVDAELIARFCLAQAPPAWTPLPAEVRELQALVRRLESLVEMRVAEENRLEAGIIVEAVKASVEELITHLSMQIKHTQLLIRKHIKDHPRLKAQSALLDSIPGIAQTTAATILAEIVEITHYKSARQVAAYAGLVPRERTSGSSVRGRTRLSKIGNARLRRALYFPAITALRCSPFFQAWAQGLQERGKCKMSIIGAVMRKLIHLAYGVLKTGKPFDPEWTREAQNA

SEQ ID NO: 170370 - protein, 407 aa, unidentified
MKVLYERCAGLDVHQREVVACARVQGPKVARELQRFETTTKGLLELVEWLIGRGCTRVAMEATGVYWKPVWHVLEGHVELVLANAAHVRNVPGRKTDMSDAAWISDLLAHGLITASFIPPTPIQELRDLTRTRRQLVREITQHTQRIQRVLEDANIKLASVVSDVLGMSGRRILDAIVAGESDPEKLRALGSERLKCSDHELREALRGCATAHHRFLLRQHLGTIDHLRRAVEDFDAQIARQLEPFRAEIERLLTLPGVQEVAAASILAEIGADMSCFPSAAHLVSWAGLCPRMDESAGKRRVTRLKKGAPWLKPVLVQCAWGAARTKRTYTQVQFLRLKARRGPMKAVVAVAATLLTASYYILRDGVTYHELGPDHFVRRDRSRAAQRLARRIRELGYEVTIRPAA

SEQ ID NO: 170371 - protein, 343 aa, unidentified
MQRYLGIDVHRDSSTICVLSASGKRLSRDIVATNGHALVRYLEQLGGRLHVSIEEGPWSEWLYEILSPHVVELVVYQNEWVPGAKNDAIDAYGLAEKMRIGQAGPGVFKPPQRYRKLREWARVYQALAQDVARVKNRLKSQFLRRGVRCVGTRVYDPQQRDAWLGQLPAALRPTTELWGIELDGLAELKAQAEAALVEESHRHRIAQILETAPGFGPIRTALLIAIVITPHRFRSKRQFWSYCGFGVVTRSSADWLPTPGGWIKAQTVRTRGLNRNHHPKLKGIFKGAALTTLQQTGHPLQATYTRLLEAGTRPPLARLTVARKIAATVLAMWKNEEVYRAGT

SEQ ID NO: 170372 - protein, 351 aa, unidentified
MAMVTEVVDAVIGGDTHKDTHTLEMLSPVGATIACLVIDNDKAGFETAVAWIAEHAPGPRLVVGLEGTRSYGIGLARALTHAGFTVVEVEQPKRQQRRGRGKSDPIDAHLAALQVLRMDVERLPMPRADGDREALRILLVGRRELSDTQTRNKNQLKALLHAGDDVERTLASGHLSDARLSVIIRRRASATETRVQAIRRGEARRLAQTIRDAERELAVNNKQLRQIVESLAPGLLARYGIGPVTAAQAIISWSHVGRCRTEAAFAALAGASPVPASSGKVVRHRLSRGGDRNLNSALHTIAMTRWRGCPRTADYIARRRADGKGDGEIRRLLKRYIARELFRALNAAAAA

SEQ ID NO: 170373 - protein, 377 aa, unidentified
MKRIKFVGLDVHAETIAVAVAEQDGEVRSIGVIPNRCESVRKLVQKLGPVEELRFCYEAGPTGYVLYWQLAALDAKCEVVAPTLVPVRAGDRVKTDRRDALKLARSYRAGELTAVWVPDAAHEALRDLVRAREAAKRDQLRARNRLTKFLLRPGKRPPEGVNPWTLNYMNWVRKDVHFEPLAQQATLLDYLHEVEHMAARVTRLEQAIEEAVQLAPQQMREVIEALQALRGIAKVSAVTIVAELGELSRFGEARQLMAYSGTVSREHSSGESCKRGGITKTGNVHLRRIVVEAAWAYRHAPAVTACLRKRQERVSEEVKEIAWKAQHRLHGRYRKLTARGKNTGKVITAVGRELLGFIWAIGVKVEAEQRKALGQAA

SEQ ID NO: 170374 - protein, 327 aa, unidentified
MQTWIVGVDVSKAKVDVALLLEGDKYKSKVFSNDARGFEALVGWLLALGVQELARVHVCMESTGSYHETLACALFDRGLTVSVVNPLLVKRFAEANRMRNKTDGGDAKCLAQFCRVQSPERWEAPSPGVRALQALVARLETLQTMRQAEATRREVAHSSVLGSINALVAELDQAIAQVKAQIVRTIDDDPDLKRRSQLLETIPGLGEKSIAQLLAYIGRPERFRNVKALIAYASLPPHIRQSGTTLDKRRGTHPMGHQELKRALYFPAMVAGQHNPLVAEFWQRLKAQGKPGKVIVVACMHKLLAIAYGVLRSGKLFNADHLEPNAA

SEQ ID NO: 170375 - protein, 412 aa, unidentified
MAYDFVIGMDVGKYFHHACVLDAQGRQVLSKRINQHEGSLRKIFGKFLANGAEVLVVVDQPNNIGRLTVAVAQAMGADVRYLPGLAMRQLSRIHVGNSKTDVRDAYVIAHAGLNLPDALRSVDRVGEVFLQLKVLNGIDEDLARAYTRLINQMRSALVGTHPAFEHVLHGQMIHRKWILHLLAKYGGPTKIRRVGKARLAAFARGHRARNPEPVIDAMLAAIHAQTVTIAGAEYAELGVAMSAKDALAKLEHRKEIEAQVLELIQDIPQTEILLSMPGIGPRSAAQILMTVGDMSDFPDAAHLASYAGLSPRTNQSGTSIMSNSPNRAGNKKLKNALWQSSCASIRFHERSRQFYERKRKEGKRHNAAVVALARRRLNVLFAMMRSGELYRDTPPPAQTSPPLEKVISLKLK

SEQ ID NO: 170376 - protein, 409 aa, unidentified
MEVIHKRCAGLDVHKAEVVACVRLMEGATVRRELRRFATTTLALMELGEWLREMGCTQVGMESTGVYWKPVWQVLRSEGLELVLGNAAHMKNVPGRKSDVKDAEWIADLVAHGLIRPSFVPPPEIAELRDLTRTRKQLVREIVQHKQRIQRVLEEANVKLATVISDVLGWSGRRMLRAMIAGEQDPQKLAALGSDQLQCSSKVLVEALRGKVTPHHRFLLEEHLSIVEHLEARVRKFEAQIEAALAPFREAVERLKTIPGISDTAAQVIVAETGADMSRFATEGHLVSWAGLCPGLNESAGKHLSRRLRKGAPWLKTMLVQCAWGATRNQDGYLRAQYLRLKSRRGPKKAVVAVAASMLTAAYHVLRDAVPYRDLGADHFLLHDRERSAQRLTRRLRQLGYEVEIKKVA

SEQ ID NO: 170377 - protein, 349 aa, unidentified
MNDVTTYGLDLAKRVFQVHWVDVQSGEVHRKTLPRTQVSVFFARAPRGVVAMEACGSAHHWGRLLQTMGHAVKLIAAKFVRPFVKTNKTDAADAQAIWEAAQRPEMRFVALKSEQQQAVLSLHRLRAQWVKVRTLQANQIRGLLYEFGVVVPLGWRALLNVATEQLTDPTKGSVPVLLRDELLKQLQALRDATARIVALEKQLASWQRTAAECQRIMAIPGVGLLTATAVVASVADAQQFRSARQFAAYLGLVPRQSGTGGRVKLLGISKRGDTYLRTLLIHGARSVLLSQSRHGRSVDPWLGALLQRRPSNVVVVALANKMARTIWALLAQRRTFDANWHRGAIHGVA

SEQ ID NO: 170378 - protein, 341 aa, unidentified
MKHYVGLDVSQKETSICIVDEAGRPIHQGRVKSDPGVLAAVISRKAPNAERVGLETGAMSSWLWHELKRTGLPVVCIDARHAHAALSVRMNKSDENDARGLAELVRVGWYREVAVKSEESQTARSILVCRSRLVRVRRDLENQMRSMLKECGLLFPRAAGGQFQRRVNDLIADGHALGSILRPLLSVHKQTCGELERIDRTIRQLAREDETTRRLMTVPGIGVVTALTYRHTIDDPTRFQNAAKVGAYLGLTPRRKQSGEMDVTGKVSRWGDRLLRTYLFEAASVLLHRTKRWCSLKAWGLRLAKRSGMKKAQVAVARKLAIILHCIWVDGTEFEWGKRPA

SEQ ID NO: 170379 - protein, 422 aa, unidentified
MLEETNDTEELVQRVAALDIGKAELTCCVRVPSPGQPGKRLQEVRTYKTMTRSLLVLADRLRELGVTRVVMEATSDYWKSPFYLLEAQGLEVWLVNARDVKHLPGRPRTDRLDAVWLCKVAERQMLRPSFVPPPAIRRLRDVARYRADLVAARTAEKQRAEKLLEDAQIKLSVVASDIFGVSGRAMLAALVAGERDPKVLAQLARRRMRTKLGQLEEAFCGQFTDHHAFLLAKMLARVDMLDSDIAELDGRVEELIAPFADAVDRLDEITGVGRTAAQAIISEIGVDMGRFATPGHLASWARFTPGTKQSAGKTIGRGSTGHGNRYLARVLGEAAMAVGRTDTFLGERYRRIARRRGAKKAVVAVGRSILVIVWHLLADPQARFRDLGPGFYDARIDAERKKRSHIRQLEALGYKVSLQPAA

SEQ ID NO: 170380 - protein, 345 aa, unidentified
MELHTIGIDLGKTVFHLVGLNLRGEVVVRKKFSRTQLLRFTANIHVELIGMEASGGAHFLGRALREQRHEVRLIPAQYVKPYVKTNKSDYIDAEAIAEAVARPTMRFVPIKTDDQLDMQSLHRVRERWVMRRTAVINQIRGLLLERGITVRKGRRYVDAALPLILEDADAKLSGALRMLLAQLKLDLDQLAVRIDEADAVFQKTAHENEACRRLVAIPGIGPVTATAIIAAIGNGGAFHKGREFSAWLGIVPREHSIGGRQKLLGISKRGNSYLRRLFVQGARAVMQQSTKQSSGLSAWLAQLTSRTHHNVVAVALANKLARMAWAVLAKNEQYRPPVLADVAAA

SEQ ID NO: 170381 - protein, 410 aa, unidentified
MLKIIYPICCGIDVHKKFVVACIASTGDRGITTYRASRFSTFTSGLRKLSGWLCSNSCTDVCMESTGKYWIPVYNILEHTCQITLAHPKYVRAIRGKKTDKKDARWIADLFKHDLVVGSFMPPLRIRQLRDLMRYRSKLTSFASSEKNRMQNCLTVSNIQLASVVSDTFGASSMKIINHLLENPDVKDFDFAPLLHGSMKKKADDIRLATCGMISLEQRQKMHIILGHYSGVQKCKADLESLILSLAEPYTRQLNLVSTVPGIRNPFSAIAIISEIGTDMSVFPTAKHLCSWAGLTPQNDESAGKKHSVRISRAGVYIKPLLVQCANAVVRSDKHPEIRGRYLSIRKRRGHKRAIIAIARMLLTAIYHILLKDEPYNPELYKKAEVLPKTRSITVDQAILLAKRCGYSVA

SEQ ID NO: 170382 - protein, 342 aa, unidentified
MQVTTIGLDIAKNVFQVHGIDVAEKVVVRKQLRRRQVLEFFKALPPCLVGMEACATAHYWGRELTKLGHQVRLMPAKDVKAYVKRNKNDAADAEAICEAVRRPTMRFVQVKSAEQQSQLMLHRTRDLLMRQRTQVINALRAHMAELGMTAAQGNAGLRELLAIIAGAADERLPAEAHASLIVLAAELQAMRTLIASIEKRIIAQHRSDEASKRLRSIPGIGLVGATAIVATITDPKAFRSGRDMAAWIGLVPRQDSTGGKQKLGPISKQGDRYLRRILVVGAHAVLKLARQKPEKYPWLTQLLARKPFKVVAVALANKMARIAWALLVKGGPYRARALVAAA

SEQ ID NO: 170383 - protein, 338 aa, unidentified
MNLYAGIDLHSSNCYLGIIDEQLEKVLGKRVRNSLPLIIDCLAPYKKDLQGVVVESTYNWYWLVDGLQENGYTVHLANPAAIKQYEGIKYSDDKWDSLWLAHLLKLDILPQGYIYPKETRPMRDMLRRRMLFVRQRTADILSFQSMVTRNTGARVSANNIRKLTEANLGQLFSDPDLVFLAQRYLSIIDLLSVQIKLIEKQVMEKIGLTEPFKWLSTITGVGKILAMVIMMEVGDIGRFKKVGNYCSYCRCVRSERISNGKKKGVGNKKNGNKYLSWAYVEAANFCIRHNPRAEKFYQRKKAKSNGIVAIKALSNKLARASYYMMRDQVPFDSQMLFA

SEQ ID NO: 170384 - protein, 338 aa, unidentified
MTILMGLDQHRAQITAEWMDTSTGEISRGRVRPADRAGVSRFVERFRGQQLEVALEATTGWRFVVEELSAINAGVHLAEPAETAARRGTKKRPKSDRADASHLRELLMIGRLPESWIPPEHILDLRARVRLRHTLSEQRGEWQQRIQSVLYHHGCPQRGDLMNKDGLAWLAAQPLPACGREQVTIALAMVNALDTQIAPLDGWLRAYARRQPGCKALLAHYGVGPLTSVTILAELGDPSRFSSSREAVRYAGLDITVHQSDQRRAPGHLSRQGPPALRWALFEAAQCARRRTSPDHQYYLEAAARLGGNRACLAVARKLLKRSYHTLRELGEDALQPA

SEQ ID NO: 170385 - protein, 414 aa, unidentified
MKVVYPICCGVDVHKTFLVGTIISTTNGVQPHYQKKRFSTYNSDLHRFADWLHSNNCIDVCMESTGKYWVPVFNILEERGISVTIANPKWVKAVKGNKDDTKDSKWIGNLFRLGLVPGSFVPSKKIRILREFTRYRYKLVSMKSSEKNRFQNAFTVCNVALDSVVSDMFGKSATAITDYLISEDSFNPEYCVSLLQRSLKKKSDSVLESIEGYSITDEQKLRMRIVRSHLDYITDAIAQVDSAIDSMVMEFENTISLLRTIPGVDRNSAITIISEIGNDMSQFGSSKRLCCWAGLTPGNNESAGKKKSVRITRAGVYLKPALVQVAHAAVKATDNSYYRLKYEQISKRRGKKRAIIAIARMILTAIFQMMTTGEVWNPTDLFKVDMPEALKERQLSKAVKQATKFLEKQGLTVS

SEQ ID NO: 170386 - protein, 322 aa, unidentified
MAMLSFCGIDVSKDRLDVVVLPEQQCSSVRNDAPGWAELVERLRGFSISAIGLEASGGYERGVMRALLAEGMSVRQINPFKLRQFAKASGVLAKNDRLDARMIASFVAVMPTRPAQRQAPAVERLAEMVTVRRHLSDEKIAAENASRLLEDAMLQRLSRRRIARLAADIAQLDERLVEIVAADAVLAHRYRLLSSMPGVGPVLACTLIALLPELGRLSRIRIAALVGVAPYDFDSGKLKGKRCIWGGRAPVRNVLYMAALSASNWNPALKVFHDRLAATGKKPKVVIVAVMRKMITMLNAMLRDDVVWADRLSGRHTVPTAR

SEQ ID NO: 170387 - protein, 416 aa, unidentified
MRGGVMSETPYQFFVGVDWGSETHVVCVLDPDRQLIAERSVPHTGIGLTALADELTALAPAEPGRIAVAIEVPRGAVVYTLLERGMQVFSLNPKQLDRFRDRHTVAGAKDDRRDAFVLADSLRTDRPAFRRVRPDHPRVVELRELSRVEDDLGEDLRRLSNRLREQLHRFFPQALTLCAAADEPWFWALVERVPTPAHAQRLPVKTVAAVLKVYRVRRSTVESIREALQTPAVHVAPGTVEAARAHISLLLTRLRLLQEQPTAVARRIAALMDELGQAAIPGEHRDVTILRSFPGVGRVVAATVLAEAAQPLAERDYQTLRAHGGIAPVTRKSGKKLSVSMRYGCNPRLRNAFYHWARTSVQNDPHCRDHYGRLRSQGHGHARALRGVADRSLGVLVAMLTSRTLYDPEQRRKIST

SEQ ID NO: 170388 - protein, 335 aa, unidentified
MTIITIGLDTSKSWFQVHGVDEDGQAVVRRKLPRSKVLNFFANLPPCTVGLEACGGAHYWARELAKLGHMPRLMPARYVRPYVKTNKHDAADAEACCEAVQRPGMRFVPTKTVEQQSMLMVHRVRDLLIRQRTAAVNALRGHLSEFGIVRPKGTASARELMSLVATDERVPPFAREALDGLVDQIRDTERKIAAFNDRIVAMAKNDDVCRRLMTVLTIGPFVATALVATAGDPNYFSSGRHFAAWLGLTPKQHSTAGKERFGGISKRGDSYVRKLLIHGARATVHNIRSGRVKGAWVAGLLARRHFNVATVALANKTARIAWAVMTTGQNYRVAV

SEQ ID NO: 170389 - protein, 414 aa, unidentified
MNILYPCCAGLDVHKKTVVACRIGQDANGRQVVDVKTFSTMTPDLLRPCDWLLAGHVTQVALESTGVYWQPVYNILEAHFALMLVNPRHFKNVPGRKTDVKDAQWLAELLQVGLLKASFVPPAPQRQLRELVRYRSTLIAERATLVNRVQKLLEGANIKLASVATDVLGVSGRAMLEALIAGERDPAVLADLAKARLRNKKALLEQALTGHFTDTQGFILTHLLSLIDALEASIDAFDHKIEAACRPFAEAVEHLDTIPGVGKAVAETIVSEVGTDMSHFPTPAHLCAWAGVAPGSHESAGKRLSSRVRPGNRALRSALLQAANAAAHQKDTYLSAQYRRIAYRRGPKKAAMAGAHSILVIAYRMLQRQEDYRDLGGDYFDKRRPDDTVKRLTQRLEPLGYQVIPTPQTAAVAA

SEQ ID NO: 170390 - protein, 417 aa, unidentified
MEGSITWVGIDAHKKTLAIAVLAPGKPPEQFTIDNTEKAIRKLARRLKRTARGGEIRACYEAGTCGYSLQRRIESHGIVCDVIAPSLIPAKPGDRFKTDDRDALKLAELNRAGLLTVVSPPTPEQEAIRDLCRCREDARADLHRCRHRLVKFLVRRGFVFNTSQRLWSVAHRRWLEQLSFDNETDRVVVAEYKLAIEQTERRLRALDGELEKAAQLPLYREHVAWLRCFRGIDTTVAIIFLAELHGIDRFESPRALAAYLGLVPTVYASGDGVRRGKITKTGNGHIRRALVQACWQYRHRPGLGAALRKRREGQPEGVLKVAEQAERRLSGRYSRLKARGKHTNKIVIAIARELVGFLWAALLHEEKPARHGPRTSALIEGANASAAPRSGPQLRKTSVSETEVGQRRQARKEKRAV

SEQ ID NO: 170391 - protein, 354 aa, unidentified
MQNDRQSSETVILGVDTHLDVHVGAVISQAGKLLGTHIIQTNQAGYLELLDWARSFGERAGIEGTGTYGAALTRYLIKNSIYVVEVNRPDRSKRRLEGKSDPLDAENAARTVLSGSSKAIPKMQSGACEALRIISVARRSAVKARTQAINQLRALLVSAPQDVRDKLWKSKPRECVAACINSEVSEYSPLRIALCSTLRSLAKRWMALTEELNELDESLDKLTRKYASHLRSQFGVGPQTAATLLAVAGDNPERLKNEAALASLCGVNPLPASSGKTVRHRLNRGGSREANNALWTIALVRMRSDPRTRIYVDRRTGEGLSAEEILRCLKRYIVRELYPLILSDLAYANRPLLT

SEQ ID NO: 170392 - protein, 410 aa, unidentified
MTKIIVAQNAPVLVAIDIAKARHEVLIAIPDKKRRRRLTVLNELADFNRLIDTLRDYGCPVRVAFEATGNYHRALAYHLATAGFEVKLVSSVALARTREALNNSWDKNDPKDAQVILHMMEIGNEQFYHDPLVHGTNDIQELSKTHDIVSKSKTELWHRVLTHYLPLYFPEADRFHRSSRSDWFFAFLERYPSPHFITAMGKDAFTTDAWDVIGRKVAKERLLADIYETAKSSVGLPVAPDSDAISMFRLVLGEGRSLIAQRNQIEDRAVALLKDLPDYQLLTSIPGIGPINALTILAEAGDLRRSGHLRQFLKFCGMDLATIQSGTFRGQTKLSKYGNARLRRTLWMAGQVAILQRTNSFRDKFERYIAKDRQNTHLRRKAYTAIAAKMARTVHGIIKHGEPYRPFFEG

SEQ ID NO: 170393 - protein, 374 aa, unidentified
MKNVCGLDVHKDSIFMCIIKKNGDKVEEKFGVLTPELDRLRDLLVYHSVGDIAMESTSIYWVPIWRVLYSDFNIKIVNPYFIKQLPGRKTDVKDAQWIATVLQKELIKGSFIPDPIIQELRLYDRRIFYLNRNLQHAEQNIDLILQRCNIRLSNYVSDIGGKSMQKVIDSIIEGKTDPDILLLLVHKRTRNKYGDEVIKAALTGVISKTDRMMLKLSREETCMYERQIEECYVEMNSICQTYFSQEIELLQTIPGIKKDSAMRIVAEIGVDMKAFITASAIVGWAGLKPRNDESAGKIKGRKTLHGNKFLRVLLVQCAWAACRTKGSRFFYKYQTLTKRMNHNKALLANARKILVIIWNILSKKQPFTTTYIAA

SEQ ID NO: 170394 - protein, 424 aa, unidentified
MPYRIAGIDVHKKMLAVVVSDVEVADEYEFERCRFSTSPEHLRLLAHWLIEQEVQEVVMESTAQYWKPVWEALERYWRPIYKPAEYNRATSGKIHLAQAKSNRAPRGRKKDFPDAERLVKRLVANELRLSFVPDAEQRLWRTITRRRYQLTRNHVRLQNQLEALLEECHIKLSSFVSDLLGASARRMLKALADGETNPAALAALADRRLRATPAQLIDALGACTELNPVYRRLLQLALEELQLIEQQIAQLDQQIAMLLREHQDAVQRLAEVPGLGVDSAHQIIAEVGATAAAFPSDKHLISWVGACPGDEESAGESRSHRSPKGNRNMRRVLNQCANAAVKHTGGIFQIHYRRLSPRLGHNQTIGVVAHKLCRLIWMILHRGIRYEEHGPAVTERSRKMRTARMIRILRREGYQVELRTTPST

SEQ ID NO: 170395 - protein, 320 aa, unidentified
MLNFAGIDVSKDRLDVMVLPEEHCSSVSNDAAGWAELIEQLRGFSIAAIGIEASGGYERGVMRALLAADLPVRQVNPFKLRQFARASGVLAKNDPLDARMIASFVAIMPTRPAQRQAPAAERLTEMLAVRRQLSAEKVAAENASRLLEDAMLQRLSRRRVARLAADIDLLDQRMAELVASDAALDRRYRLLSSMPGVGPVLACTLIALLPELGSMSRKQVAALVGVAPYAFESGKLKGRRCIWGGRAYVRQVLYMAAMSAGNWNPALKAFHDRLKAAGKLSKVTIVAVMRKMITTLNAMVRDDVAWADRHRGRHSVPTAR

SEQ ID NO: 170396 - protein, 327 aa, unidentified
MYVCILDAAGQVLVHRNVKSTPEAFLEVVAPYRDDLVVAAECMFTWYWLADRCAAEGIAFVLGHALAMKAIHGGKAKNDKLDSYKIAVLLRGGMLPQSYVYPATMRATRDLLRRRLHLVRKRGQLLAHIQNTRHQYQLPAFEQRIAYPANRDGLTERFPDPSVRKSIEVDVALLDHYDTLISELEATLVRDAKRHDADAFHRLRSVPGIGKILALTILDEIHDITRFDRVQEFASYARLVKSKKQSAGKTLGTSGAKMGNVHLKWAFSEAAVLFLCRNAEAKKLLAQIQKKHGKGKALSILAHKIGRAVYYMLARGTVFSMKKFLHA

SEQ ID NO: 170397 - protein, 329 aa, unidentified
MPYSIGCDVGKRTLDVVVMRETHDVEDVFRVPNDPSGHAEILRRLEPFRGCARVILEATGHYHLGLAFALVESGHAVTVLNPLLMKKFASSGIRKTKTDKIDAKLLAKIGFLEPHLKPFTETRVSIERKQLSQLIGKLKRDRRSTVQRLHQIEETKEVCPDVAGYEIASLRAIIRVKDEEIVSLEKRLLAFVRKSAELLATIPGVSRRSGARIAAELGDVSRFTDRDQVTAFAGLDPAVKESGTSVHRRGRITKRGSSELRCVLGQTAWGVMMHNALFKAYAQKKKAEGKHYFSVLVSVAKKLLLVMYAMLRNGTPYDPNYSRAGLTAV

SEQ ID NO: 170398 - protein, 386 aa, unidentified
MQKLNDLSRSLTAFEPDGTLIAVIEMSLSSWLVAGIVPGVERQPLKKLAVDESALLKLLHRWREEAEKAGRRIERIAVAFEAGRDGFWLARWLKARGIDAHVIHASSVAVSREHRRAKTDRLDTELLKRSFLGWLRGERDHCKMVAIPTMKDEDAKRPNREHDSLIGERSRIVNRMKAALVRLGIRGFNPKLKRATTRLDGLLTPEGEPIPPNALAELRRDMERRRLVNNQIRQIEEERLERIEQAPCDGPHVMVRLLARVMGVGIETADMLVHEVLSRNMRDRRAVARYAGLTGSPDESGRKRREKGLARSGNARVRRGMIQLAWRFLLHQKNSALTKWFRSRTENARGTRKPMIVALARKLLIALWRLVREGVVPDGVVLRAAQ

SEQ ID NO: 170399 - protein, 345 aa, unidentified
MKKGITIGMDLGDKKHQVCILDKTGKIIAEEEVAGNRKAMESFFKQYRGAVVAMEMGAHSRWVSQIAAAAGLEVLVGNARKLRMIWQSRNKSDAHDAVMLARVARFDPALLCPIHHRGEQVQMDLEIIRARDLLVRERTRMVNHVRGVVKSTGERLAASSAESFGRKAKIPEALNEAMKPMLEMIRELTDKIRGYDLMIKDAATKKYPETEQLRQVGGVGPVTALAYVLTLEEPERFAKSRMVGSYLGLVPRLDQSGQIDKQLRITKHGDGYLRRLLVGSAHYILGPFGPDCDLRTFGLKLMQRGGKNAKKRAVVAVARKLAVLLHALWRSGAIYEPKRMQPLAA

SEQ ID NO: 170400 - protein, 429 aa, unidentified
MTRISVGVDVSKNRSTVCIMDQDGKVIMRPFLVWHSTEELDFLADTLKRLNGEVRVIMESTSVYQYPIALQLKERGIFISIVNAYEMKQFANIDFRGGKTDKKDSRTIASYGISYWDKLVEWQIPKDTYFNLDLLNRTYMNAKKHRQIILQELQHYIDCAMPGMDKELHSLNLNTKKDFMLDFVEKFWHRDEIVNMTEAEFTEVFTAWAKKKGYRPVEGKAAKIYAIAKSCIPYYPANPTVKTILQCIVDKLSGVNRTLVTIVTQMIEEAKKLPEYQIVREMPGVGDPLAARFFGSAGDIRRFKNSKALVAYAGIDSPPDESGDFSSTHRHITKKGSKVFRDTGYEIMMALRAQKRTWEKVRKNPEVYDHMLKKKAEGKPRKVAKIAALNKFLRIVYARIKELYDNMALAERAKTKTRSKTRAKTKVTA

SEQ ID NO: 170401 - protein, 341 aa, unidentified
MNGSKTVVGVDIAKRVFQLHWIDRETGEIVSLKLRREQFLEHFANRQPCLIGMEACGGAQHWARRLTAMGHEVKLLPGKAVKPFVAGNKNDRHDARAIWTAVQQPHVKAVAIKTEEQQAILALHRMRSQLVKFRTAQINGLRGLLTEYGEVMPQGKAGVRKGIAKALARLEGRLPAMVIDTLREQWARIEKLDEEIATIERRIQLWLEQNEACQRIAEIPGVGPLTATAAVALMGEAKAFKSGREFAAFAGLVPRQVGTGGRIKLLGISKRGDTYLRTLLIHGARSVLTHAKDPGPWVTKLRQRRPLNVAVVALANKMARTIWALLAHERTYQKGFVSQPV

SEQ ID NO: 170402 - protein, 350 aa, unidentified
MKTYYVGMDVHRASIMIVVLNGAGKVVMQSVIETGAERVRGYLKQLRGKVYVTFEEGTQANWLHEVVRPLVTEVVVCDPRHNKLLQSGNKSDRVDAQKLAELLRNGALKAVYHGDNGVRALKELVRTYDCLVSDTTRVMNRLKAIYRGRAIGCAGHDIYRQDRREQWLEKLTERGAKQRASFLYQQLAALRPLRQEAKRLMVQEARRQRAYPWLMSMPQFGSVSVAQLLAIVSTPHRFRSKRQFWTYIGLAVVTRTTADHEVVNGVLRRSRRPVSTRGLNRNHNHALKRVFKNAATGACHSGPFKAGYELRLAQGMVPSLARLTVARQLAATTLAVWKRGEQFNPERMKQ

SEQ ID NO: 170403 - protein, 476 aa, unidentified
MAKRKLSTFERLQRGERLLRRERRDLQRQLECCDPELKMVHPDAAGIDVGNASHFVSVPAGRDQEPVREFGSWTADLHKAAAWLKSCGIRTVAMQSTGVYWIALQEVLEQAGLEVFLVNAQGTKNLPGRKSDVQECQWLMKLHTYGLLRNSFRPPEEIRGVRTIWRQRSRLVEEAGRRVQQIQKALTTMNVQLANAISDLSGVTGMAIVRAIVGGQRDPYALAKLRNNRIQASEEEIAHSLEGHWREEVLFELQQVVEGYDFHQKQIAECDVELEKRMGKLGSHPTQEDKEKEGKGGKKVGKKPRKNQPGFDLRAELHRIFGVDLTRIDGIDVMTAQVILTELGPDLSGFPSEGDFSSWLELTPRNDITGGKTIRKKARKSKNRVANALRMAAEALSRSDSYLGARYRKFRGRMEGQPAVKAMARYLACLVYRLLTKGQEYVDKGAAHFVQKHKQREMANLQRKAAELGLKLVAAQ

SEQ ID NO: 170404 - protein, 390 aa, unidentified
MVYLGIDVGKSHHAAALINSEGNTIATLPSFANTGAGFRKLLRFVSSHVSKEEELSVGIEATGPYWIPLCRWGRKQGWEVTVLNPLKVASLRNYGVRGSKTDRIDAVLVAQALRWEKRPPSEEPSYETLELRHLTRLRSQIIKDRTRISLRLISLLDTLFPELLTLFAKPISPSTLAVLEVAPTPQKVVALGKENLTAILRKASGGKLGQERAQQIIDAAQRSVGVPSETLEEVTALIVAQIRLLGEQLTTLNRRINELYARTGLTLDTLPGVGTVLAATFLGEFGDVNRFKGGTQMVAYAGIDPKLRESGSHQGQVRMSKRGSPYLRHAIYLAAQTAARTDEYFQAILQRQLKRGKSKRKALGAVMNRFIHVLYAVWKDNRAYSPLTPS

SEQ ID NO: 170405 - protein, 303 aa, unidentified
MPYGRRRAAADRVDAHIERSRAVLDRQFIAGPGGYAAALAWARQEAGEAGLAWAIEGTRHYGLGLARYLTAAGEHAGEIDASKHAGKRRNGKSDALDAVRAAREMLARPVAAQMRAAGDREALRLLMCDRDNAVASAKTARTLLTSVIVTAPATVREQLRHLSRDRRATVCASLTSPPGADRQTRVLYQTLARLGQRITTLARTAADLQKQISALVEDMTPGLVAAEAGLGALTAAQLLLSYSHHGRIRSEAAFGMLPGTAPVPVSSGRTDRHRLNRLGDRQLNRALQVIAVARMRSHPPTQA

SEQ ID NO: 170406 - protein, 450 aa, unidentified
MRSKPNLTPVPEEIPDAEHELVIERVAAIDVAKASGKVCVRSPRERRRVSKVWDVAATTGTVSDLAGQLTELGIEKVTVESTSDYWRIWYYLLEAAGLEVQLGNARDVKNVPGRPKTDKLDAVWLAKLTEKGLLRPSFVPPAPIRQLRDYTRLRVDLTRERARYWQRLEKLLEDALIKVSSVASKMDTLSVRDMIEALIAGERDPRRLADLARRRMKAKRLALIAALDGRFDDHHGELARMLLDQIDTLSAQIVTLTTRIEALLEAAEPDDAGDRAHPPDDVGAAPAGPSTVERLTEIPGIGQTGAQIILAEIGLDMTQFPTAGHLVSWAKLCPRTVQSGPVTRGGKTGKGNPYLKGALGEAAAAAAKTDTFLGERYRRIVKRRGKLKALVAVARSILVIVWHLLTDPFARFCDLGSDYHNNLINTERRIRNHIAQLTAMGYHVTLEPAA

SEQ ID NO: 170407 - protein, 346 aa, unidentified
MEYIALDVHKKYTWARVESAKGERLFESRLAHAHGTVKNFVNRWSAGSTVAVETVGNWYWVVDEIEAGGGRPQLVNARLAKLMMGSVNKSDKLDAKGMNRLQRTGTLPTVWIPSSSVRDARELPRTRMVLSRQRTQLKNRVHATLGKYGYTVEGASDAFGKKGRKIVEELLVKLPPHTQQALRLILDELDHATANLKQIEEQMIEVFSPCPEINWLKSLPGVGDVLAVVIWTEIGTIERFNRAEQLASYCGLVPREHSSGGKIRFGAVRRDVNVYLKWAFVEAANSSLLNAERCSYGHISRLYQRIKPRRGHGKAKVAVARHLSEASFWMLKKGEPYREPMSSTQR

SEQ ID NO: 170408 - protein, 402 aa, unidentified
MPMLSIGIDVSKGKSTVCGMKPGGEIVYTPFEVQHTREGMSELVSLLRGSGEEVRVVLESTGSYHCPVVAALLENGIFVSVVNSLRMKRFCSQSIRRVKTDQIDAMQIALYGLAYWQELQPTRLPENTYRELQLLARQYYQMTSLLIKAKVDFNALCDQVLPGMQELMSDHAGRHKLSDFVLRYHHTAHILKMGETRFRKDYCKWAEKKGYRNHERMAALIFATAQNGIPVLPDAPSTQIVITEAIRVLHTVEASRDAILTQMQALAKTLPEYSLVREMPCIGDTLAPRLIAEIGDVRRFHSKRALIAYAGIDAPPYQSGKFCANNRHISKRGNRYLRKTGYEVMQSYVMHKPANDPIFTFIEKKRGEGKSGKLAMVAGLNKFLRVYYGKVTELYRSLPAIE

SEQ ID NO: 170409 - protein, 396 aa, unidentified
MSKRAQRHGQVKEFKGPIPDGVWVLGLDIGSQTHVARFWAAPGQRETARSFPNTAAGAAALLAWEEERTGGDRSRVVVGFEPTGSYWQGFIRRLVAAGVRVRVIAPRHTKKYKELFDNSPNKSDAKDAGVIAERTKRGHGLLLRLPEGGYADLRALSEGDHRATQRITALQNQARDVAFGLFPELVAAIDPFSATGRALWAATPTPAAWLAKRRSTRERLVRQASRGRLGGPWVAQLTEGARDSLGATEGLEARVAELAFLLAERDRWEARRAALEAALTATLDGCPEGASLASVPRLGRASAARILGETGPLADFASVQAVLKHAGLNLYASASGKRTPERVVYRITKRGRSRLRHVLYFAALRLVQRGGAGRFTPTTADWWTTTGWSSSAPWWR

SEQ ID NO: 170410 - protein, 412 aa, unidentified
MYYVGIDIAKRTHVAVIMNEDNSLEVKPFSFNNDKSGFKKLLIHLQTLCCDLSDIVVGMEATGLLFENLYRHLQSLEYNVVLLNPYQTAKFREMDTMKRVKNDNIDSVMIAALLKSGRFSEGYVSQEQLQSLRELYRHRSSIEDQIKSLKRRTSAILTVVFPELETVIRDPFNVSGLALLDKYPTAKHYTNASVERILKTFRGIRGNNFSRNKAQALLDASRRTIYSGIAKDARAFNIRTNIEQIRLLQKQLDQTLEMMQDLFNSKEVKQEDQEVMEDLIDNLRTIPGVADKTILALLAECGNLDRFYAPKALIGFLGLYPTLSQSGDSTRNGRLAKRGASLAKKAIYLASIAAIRHNDEMRTIYMNYRSKGRAKKEAIIIVARKLLTIIYTIYARNIPYDPQRVFVAKPNQ

SEQ ID NO: 170411 - protein, 350 aa, unidentified
MQYLGIDWGIRRAAWCALTAAGELTEGTISADEDGLTRLVARLGPDVRGCIEMMSGAAWVRDRLGACGWTIEIADARKVKAIAPLACKTDRVDARVLADLARRDLVPTVWVAPLDDRAIRERLRRRSHLIRLRTSATNRSFGLLTQWGLRRNLTALRKPGALEALAEHGVPEVWRDSIAMLLGVIEDLDRQLAPLERELRPLARRDPRAALLMTIPGVAELLGLTLAAEIGDIARFPSARKLVGYAGLAPRIKQSGQSSRVGRLSKAGPETLRWAAVEAAQQAWRPTNPWHPIYTDIKRRHGKANPAKAAVARKVLIAAWHVLSLQQPFKPSAPRATDPVPASSSIRLAA

SEQ ID NO: 170412 - protein, 346 aa, unidentified
MRPNLFMEIDHVVSQCVGIDVSKKKLVATMCMFSQAEQAVYSKAAEFDNNKTGFNQLVKWSRREAAKELPLRYVMEATGVYHEHLANHLVRIGSTAVVMMPTKAREFAYWEGMISKNDTIDSRVLALVGCVKRSMRPWKPTNPLYRELRTMSRFSQDAKKLRTELKNHLEALEHSHEAARSVIKHYESLVASLDKRIERNLENMKRKVASDEGLNKKVENIMTAPSVGFLSAVTVIAETDGFALIQNRKQLTSYAGLDVRDNQSGTVNGVSRISKRGNSRIRAILYMPAVQCRLHNKHLRKAYDRIVAKHPDKKMIAVTAMERRLLLLIYALWKGDRPYSEDYDKE

SEQ ID NO: 170413 - protein, 355 aa, unidentified
MTSNIKYIGMDVHKESISVAVMNATGKFVMECVIETKASTILQCIDGLRGDLHVTFEEGTSAAWLYDLLKPHVTELIVCDPRKNASMREDNQNDKIDARRLAELLRIDHLSPVYHGEHGLRTLKELVRSYLTVTKDLVRVKARVKAIYRSWAIPCNGKEVYAARHRAEWLEKIKELGVRRRAEFYYQQLDALRVLRLGVRRELLAESKKQKAWKQLCQIPAIGPIRAAVLLGILQTPHRFRTKRPLWKYSGLAIETCSSADHRSINGQLQRSKKNSVRGLNQNCNHDLKNLFKGAAVIASSKPGPFQEFYTALLAKGMRPEMARLTLARKIATIVLIVWKKGVSFDAQHLKPQTA

SEQ ID NO: 170414 - protein, 337 aa, unidentified
MKYSGIDLHSNNSLIVVTDESDRTLVSRRVPNSLPAVLAVLEPYRGELVGVVVEATYNWYWIVDGLQAAGYRMHLANPAAIKRYEGLKRSGDEEDAAYLAQLLRLGLLPEGYICPKEQRAVRDLARKRMQLVRSRTQHILAVENIQARESGARMNAEQIKRLEAKGVEAMALAPEVKLAMQANLAVIGTLTQQIDRLERRLHERVRLREEFGLLKTAPGIGETLATTIMLETGAVSRFARVGNFSSYCRCVDSERISNGKKKGEGNVKNGNAYLAWAFVEAAQFARRFCPEAKRFYERKRARTNTVVATKALAHKLARACYHVLREHKPFDVRRCFG

SEQ ID NO: 170415 - protein, 408 aa, unidentified
MNAVGIDVSKGKSMVAALRPMGEVALLPQEFLHTEVGLEQMAYAIIALGEDTRVIMEATGRYHEPIAAALHEYGIYVCVLNPLFIKQSGGGSIRKVKTDKADAMKIAKYGLDNWVELREYIPMDMIRQQLKLCSRQYNLYMKTVVSLQNNLISLTDKTFHGVNELFSSPERADGHQKWVDFVMTFWHCDCICRVSEKAFTERYQKWCKRKGYHYSEEKALDIYAGSCGHFTTLPKNDNTKLLITTAAQQLLAGKMTLAALRAEMTRLAKHLPEYDTVRAMYGVGKTTAAQLMDEIGDVRRFPRRSSIVGFAGVDPAVDQSGKHEAKSTPTTKRGSPHSRKTLYQIICTYLRKAPADESVYQFLDKKRAEGKPYFVYMTATQNKFLRIYYARVKACLEAFDAQQNSAQS

SEQ ID NO: 170416 - protein, 333 aa, unidentified
MENFYFIGVNVSKKKLDFCVMFEGKVVHEEETANHQSAIMSLLHHFEEDYGIDNTRMPVCAEHTGQYTFPLACACKTVECKLWLENAAEIKYSSGVQGGGKNDKVDAKRIAIYASRFQDKVRYYEHPTEDIERLKQLESERTLYVTDLTKYKGQMKDQKDYIPKALYERKMKRLQALMDDLKEAIQAITDEMDEVIASCPVLFRQQELLMSIDGVGRVVATNMIIATEAFTRFDDPRKFNCYAGVAPFSYSSGSSQHSKARVSHRADKVMKRLLHLAAVAVTHRVGGELKKYYERKVAEGKNKMSVINALRAKIVARMFAVIKRNEKYKPILS

SEQ ID NO: 170417 - protein, 334 aa, unidentified
MKEITTVGLDLAKNVFQVHAVDPKGIVLVRRQVRRAQVLLFFSRLQPCLVGMEACAGAHYWARELAKLGHDVRLIPPSYVKPFVKRGKTDAADAEAICEAVTRPNMRFVPVKTERQQAVLMQHRARDFLVRQLTQLANAIRAHLGEFGIVVPKGVYNMGRLIAEAETADLPPEARMPLDLLAGQFRDTKQRIDAMTGQLKADAEKDKTACRLQTVPGIGPITASVLAATLPDVSSFRSARDLPAWLGLTPKPHSSGGKEKLGSISKMGNRYIRRLLYLGAMGLISARKRSDPGTDWLGRLMAAKPLKVAAIALANRMARAIWAMLRTGEVWRPV

SEQ ID NO: 170418 - protein, 331 aa, unidentified
MKFKDFVGIDVSKHTLDVFILNVKVHKQFKNERLGFQQLEQWVQRQTCLALSDLLLCFEHTGLYSLSLAQFLEEKRVLYAMVPALEIKRSMGITRGKNDRIDSRRIAEFAFRFLDKIRLTTLPAKEILNIQHMLNLRERMARNLAGYIVSKHEIRSVFHAEELPHMFSCYDTMICTLKHEIKLLEKSIREILHGNKELWTTFELITTIKGIGLIVASHLIVYTCNFTRFDNWRKFACYSGTAPFEYQSGTSVRGRTQVSQIANQQMKKLLHLAAICAIHTDTEIRAYYQRRLDEGKSRMTVINIVRNKLLARVFAVAKRGTPFVDIKKYVA

SEQ ID NO: 170419 - protein, 477 aa, unidentified
MAHRMKQRLDLTPVPLLRNESLYVGIDVGKYQHVAGFVSTTLLERYERFEGCPVLIFEQSRQGFRSLIDRMRSYVPLEQVYVLLEHTGHYHRALVQFLQELDISVYLMPVQKRLEGMIKTDKRDALGLANHLFNQLEKGVQFADKTHLVRRLLPSTETALQLRGWTRHRYELSQECAQRKNKLIAICDEVFPEFTQIFHDPNLAMALAIREKFPAPHAIATAPLTALAALRTRSRPSNAQLVELQYLAKETIGTKDVIRQRGLVLEQNQLIRELRMLQEHIQQLDTEIGKLIEQSREGKILRSMGIGPIQAATTISAIGNILNFRKASELKAYFGWAPVRDQTGITMDRDRLTHAGTRTMKHMMFLIVANAIQQKNSEWAKLYQRLVPRMCRYDEGRQVYKGKMKVIGRIAGQMTEMVYALLKQDAEVLSQAPPGETPPDPILYDPEIHQRHRNGEYRPIKNTPRQRKVIRLPERTL

SEQ ID NO: 170420 - protein, 327 aa, unidentified
MQTVMTIGLDIAKSVFQVHGIDAAGRVVIRRQLKRRFVLSFFEKLPPCLVGIEACASSHHWSRELQALGHRVRLMPPAYVKPYVKRQKNDTTDAEAICEAVTRPNMRFVPTKTVEQQSCLMLHRARHLFIRQQTAVINSIRAYLVEFGIVAPVGRRGVEHLLEVVADADDHQLPELARMCLVALGSQLRALKAQILEFDRRIMAWHRSNATSKRLDAIPGVGPALATALVASIADPKAFRSGRDFSAWVGLVPKQNSSGGKDKLGSISKQGDRYLRSLFTAGALAVIRYAKIHGTRHRPWLTALLARRPTKIAAIAPPINSPGWPGR

SEQ ID NO: 170421 - protein, 352 aa, unidentified
MTMLADQVDLVIGVDTHKLTNTAAVVRAATGGVLADVTAPTTQDGHEAIFEMAVSHGGFRAWAIEGANSYGAGLTRFLHERGEWVIELDRPNRTARRGGKKSDPLDAVRSAREALARPELGEPRSMGDRAALGVLLAARRSAVDARTTAQRQIHALLISAPEALRTKFRGKTGRQIVLGVVRLRVSAHHDTETKTMIGVLRSLGRRILDLETETKEYERQLTEIVRSWRPELLEECGVGPVVAATVLCAWSHQGRFRSDGAFASLAGVSPIPASSGMTVRHRLNRRGDRQLNRVLHVVVINRIRHDKATQTYVERRRAEGKTDREIKRCLKRYVARQLFRQLEGGPSRLDEL

SEQ ID NO: 170422 - protein, 379 aa, unidentified
MQSMNQQDTLVVGGVDAHADTHHAAALDQRGTLLATKQFSTTTRGYANLLDWLRGFGEIAVVAVESTGSYAAGLVRYLREHDVQMVEVNQPHEHTRRRRGKSDSIDAEMAARLALAGKATAVPKQTDGIVESIRLLRVARESAVKARSAAIAQLGGLIITAPQELRDDLACRKTLRGKATLCRRWRPATRELASPTHAAKFALRSVAKRISTLDEEIAQLDRQLEQLVRVAAPRTVQLLGISTVHAGRLLVSAGQNIDRLHSEAAFAALCGASPVPASSGKTTRHRLNYGGDRQANRTLHMIAVCRLRYCERTRAYAARRTAEGKTKREILRCLKRYIAREVYNTLRADLAQAGDPQRPAQITTIMCGAGPIGITRHRT

SEQ ID NO: 170423 - protein, 367 aa, unidentified
MMGWMAPVRHLGARMAVGETHHRGEPSMDEIKTIGLDLAKHVFQVHGVDANGATVLRKRLGRGQVVTFFTGLPRCLVGLEACATAHYWARELRAVGHEVRLMPAQYVKAYVKRNKNDAADAEAICEAVRRPTMRFVPIKTAEQQAALLVHRCRERLVRQRTALVNALRAHLAEFGVIAPQGLRNVAGLIAIIRDRSDARLPAAARRVLEVLATQIEQLEGAVAALEKQLMAWHKSNPVSQRLATIPGIGPIIATALAATVVEASGFRSGREFAAWLGLVPRQHSTGGKARLGGISKRGNRYLRRLLINGASANLLRSKATNADPWVIGLRRRRPSLVVAVALANKTARIAWAVMHRQENYQPMAAAA

SEQ ID NO: 170424 - protein, 342 aa, unidentified
MNEVSIIGLDLAKNIFQAHGAGADGSVVFRRKLSRAQLLKFLSDQQPCVVAMEACASAHHWGRAIGDLGHQVRLIPPAYVKPFVKRQKNDMADAEAIAEAASRPTMRFVAVKSEVQQAAAMAYRTRDLLVRQRTQTINALRAHLAEQGIVAPAGPAHVGRLAAVVDGDDGTLPAAVRELARLLLDQIEDLSEKVSGLDTELRKRAATDDTARQLTTIPGIGPITAAAITTFAPPMETFLKGRDFAAWVGLTPRQHSSGGKERLGRTSKMGQKDIRRLLITGAIAVVRWAARKGALEGSWLARMLARKPKMLVAVALANRMARTAWALMRKGEDYRDPVAMAA

SEQ ID NO: 170425 - protein, 375 aa, unidentified
MKKVRFVGLDVHADTVAVAVAEPTGEVRSLGQIPNRPESVRKLVKKLGSADSLRVCYEAGPTGYVIYWQLTTLGVHCDVVAPTLVPTKAGDRVKTDRRDAEKLARCYRAGDLTAVWVPDAVHEALRDLVRAREAAKKDQLRARHRVGKFLLRHGRRPPTGMRSWTQRHLAWIKTAVHFEQPAQEATLLDYVHEVEHVAGRIERLERAIDEAVQTAPTRMRAVIDALQALRGIALVSAVTIVAEVGELSRFARAPQVMGYSGLGAREDSSGGRTRRGGITKTGNAHLRRIVIEAAWAYRHRPSVGGALRKQQAALSDDVKAIAWKAQHRLHGRYRKLLGRGKCQQQVVTAVGRELLGFIWAIGVTVEHRTSPSIAA

SEQ ID NO: 170426 - protein, 338 aa, unidentified
MRYVGVDLHKTQFSVCWRSGDEEEGGFERYPMTSEGVRSFREKLDGDTEVALEATGNSKYFYDQVVGAAKKVRVINPLQFKIISESVKKTDREDAQVIAKYLSKGLIPEVRVMGKELRELKSLIQTRDKLVKLRSGLKNKIHGILMEHGIQSRREMFSSVKALEEVLKAPVSETSRFELEVIVKQIKGLTEGIKELEGKIKDKGEGLKGQENLQSITGIGKLSSTIILCNIGNIEDFENKKKLGAYAGLVPRVYESNETVRHGRITKRGDKIFRTTLVQVALIAIKYNEYLRGFYLRLKQKKGSGKAIIATARKVLEIIYDTLKNDWVFEDFNNFVLA

SEQ ID NO: 170427 - protein, 412 aa, unidentified
MQVVYARCAGLDVHQKTLSACVLVCEPDGKKRRQVRVFDCFTGDLLLLADWLRGQGVTHVAMEATGVYWRPVWAVLEGQFEQLLVNPQHIKTVPGRKTDTKDCEWIADLLQHGLLKGSFVPPTPIQDLRDLTRYRVELRQSQSRVANRIQKLLEQANLKLSSVASNTLGVSGRQMLEAIVSGQDSPEQLAQLARGKLKSKIPQLVQALEGRVRPHHRFLLAGFLEEWDWFEQRIVRMEEEIDKQIRPFEQAIALWQTMPGVDHVTACSLVAEIGVEMNQFPTAQQLASWAAICPGNHESAGKRKSGKTRDGNKWLRRTLCQAAWAVSRKKNCYLSSQFRRIAARRGPKRALMAVAHSMLVIGYHMLKTGKGYRELGGNYLDQINKDQLQRHFVKRLQKLGFKVTLERSLEAA

SEQ ID NO: 170428 - protein, 306 aa, unidentified
MTKKVFRFSTDINGFNSFYDWVTQICIKHGKNEAMIGCEPTGHYWYTFYQFVKDHGMKLAFVNPASVKKAKELDDNSPKKTDLKDPKTIAKLVIDGRYSFPYVPEGIYAEIREVVSSRDRIMKELNAASNRIQRWLKIYFPEYLTVYKKFDTTTGMMILEKAPLPDMVKALGADHIVKIWRQQKVRGKGASLNRAKTLVDAAHDSVGKPGGQGAVMEIQMLLEDYKVKKQQLEMVTSVMEELTMQIPNADKMLSVNGIGLVTVAGFISEVGDISRFKNPKQIQKYAGFELVENSSGKHKGRTTISK

SEQ ID NO: 170429 - protein, 352 aa, unidentified
MYTLGIDLHKKSSVWVLIDDKYTELWKESVVCHPKYISIALKKIPVPPCEVKVAIEPVAGWRWVTKQLEEEGFEVHIAHPRKIQLIAQSKKKNDTEDARTLAKLLNSGYFPEAHRSPDSIYDLRLLLRERTYLIKLRTSAKNQLHGIATTQGLHLIKGMNPLHKKGKEGIMSSQNFVLKELHQLIEDLDKRIIPFDQELSREVKKYPVADILTTVPGLGILTALTIIAEVDDFSRFKSAKNLTSFAGLVPRQRSSGEIVRHGGITREGSKPLRTALVELAMRIRETNAPELFAFVKRLTPICGAKKARVALGRKILAILWKMVTTNTPYKPSIILSSSSAANVSNLDTGTGA

SEQ ID NO: 170430 - protein, 351 aa, unidentified
MTNCTRWVGIDLHRRRSQIAIVDEHGELTLSRRIVNDPETFKELLGDPDGTHVALEATYGWEWLADLLEEAGYEVHLAHPLRVRAIAAARVKTDAVDAPTLAHLLRAGLLPEAYIAPPELRDLRDLLRHRATLVHLRTSIKNRVHALLARQGILPDHTDLFGTAGREFLAAVELPEGSRRRLDSLLSLIGDFDREIVATTGEIDQRAKTDERVKLLCQIRGIGRYTAMLIIAEVGEVKRFPTARHLCAWAGLTPTVRSSDGKARLGHISHQGSTILRWALTEAAQHTPTGGGPLRATFERIAKRRGRKIAKVAIARQILTLCYYGLRDGEIRCLKHQPIDDHDDDQLAEAA

SEQ ID NO: 170431 - protein, 320 aa, unidentified
MNSEQFVGIDVSKSYLDVAFYESNKVHQWSNDDSGVKKLIKFLKPLSVTLIVLEATGGYEALAASMLDESGLPVVVANPRLVRNFAKSTGALAKTDQLDARNIAHFASAIRPARREFKDEQTKLLSALNARRRQIVDMLATEKNRLHTAPKASKKNIGQHIKWLEKNLKQINKDIQKAIRESPIWRENDDIIQSYKSMGPVSSATLLSDVPELGTLNRKQIAALVGVAPFNCDSGKYRGRRRISGGRAPVRKTLFMAARSAVRFNPVIKSFYERLRESGKPHKVALTACMRKILITVNAMVKNRTYWSQGYKNLDFEHGC

SEQ ID NO: 170432 - protein, 400 aa, unidentified
MRTVFGIDVSKASSEVAILVNGERVYGYTMPNDIIGFSRLLEDLKTVSNPEIVFEATGVYSRRLQAFLEEYSYDYTRLNPLEAKKQLDGLRVRKTDKIDAEKLASSQFVLNRKPTYVQEEVYQNLHDLSRFYQNLTEDIVRTKNRLHKVLQIAFPEIENLLSTPTGEQYWNLVSIFPTKHWVLELSEAELKEAIRNSTSKRISENRVGNLTEKLVGLAKQSYSGISKTSPMVEEVKYDAQELIRLTNCREQVLQQLIALAEPLPEYEILLSIPGIAETTATSIIGELGDIRRFKSANQINAFIGIDLKHYESGDFLGQEHTTKRGNPYARKILYKCIHNIASASHTNPCHIADFYEKRKRQSQITSTKPHTIASIHRLIRTMYYLIMHNKLYDYTLAQSH

SEQ ID NO: 170433 - protein, 309 aa, unidentified
MNSAVVYVGVDVAKAHLDVAWAQRSRRFANGKSGWGALIKWITQSALPVHLICEASGGYERGLLDAAEQNGIKLSLVQANRVRQYARAAGILAKSDKVDARVLCAFGSAMQPEPTLPLSVQQKQLRELETQRRHLSRMLVAEQNRLAQLNDKELQRLTRSLLATLKRQVAAIDARLAGLIAQDQSLKEKAQKLTAIAGVGTRTAVLLLAQMPELGTLNRAQAAALAGLAPFKRDSGTLRGKRTIFGGRRALRCGLYMAALVAARHNLILRNFYQRLRSNGKPHKVALTAVMRKLLLALNHTLKPAASFA

SEQ ID NO: 170434 - protein, 330 aa, unidentified
MSKKQWVGIDVCQKYLDVYIRPKEELFQVTNDEGGITRLVEILKNIQPELIVLEATGGMEIDVAVKLTTAELAVAVINPRQARDFAKATGTLAKTDAIDAKLLAHFADAIRPEVRPISDESARQLEDLVARRRQISDMITAEKNRRRGKTNSVQVDINEHIEWLEKRLKEIESQIKEAIAINQDWQEKLKLLTSVPGVGEVVAVTLISSLPELGTLSHKSISHLVGVAPLNRDSGKFRGKRKIWGGRAKIRCVLYMAALVAIRFNPPIKAFYERLIQKGKLKKVAITACMHKLLIFLNAMMRNNQTWRHEVSAKAYCSAYTLGQPPNRLV

SEQ ID NO: 170435 - protein, 396 aa, unidentified
MAGPLKVVGGVDPHADTIHVAVITMAGKAVADREFATTADGYRSATAFLTATGTVVRVGVEGAASYGAGFTRALKTAGIDVVDVDRPARFDRRRAGKSDRLDAYHAARAVLAGRSNPVKGPAIEGVRALHLARRSAVKAQTAAMNQMIAILVMAPDTIRARYRRLHGDRLAIALTRSRGAPDPVSADTLLALKALADRYRQLAVQVDALTTRLDHAVRQASPALRAAFGVGPDTAAQLLITAGSNPERLYSERSFAALCGSAPVQASSGKTHRHRLSRGGDRAANSALHRIALVRMANHPPTRAYVARQTANGRSKREIIRMLKRAIARQIYRLLTHPADVPNYADLRAVRQAKNITVTLAARHFDVWPAVISRLERGLRRDDDLASQYRTWLAAA

SEQ ID NO: 170436 - protein, 406 aa, unidentified
MELTPIHRCAIGLDVHHNLITACVIAEREEGEIISEVKEFGGFKRDRRALAEWAVQWKPDIVVMESTGIYWKSPYAALEKVSIIPLVVNARHVKQVPGRKTDINDAQWLAMLARCGLLSGSFLPPEELRNLRLIGRQRQKLVSMAASEKTRIHKFLTDAGIRLSVVVSDIHGQSAGRMIECLVEGGTPEDALKFASNRLKATPEELHDALEGELTENHRFILRETLNHIQELEARIARFDDVLRHGLEPFRWAVDLLQTIPSVDEVGASLMIIEIGIDMTAFGRADRLASWAGVCPGNNESAGKRNTGKTRQGNPYVRRRLCEMANAASRSESMFKRKYAGLVIRRGRKRSIIALAHKLLKIIFIMLDRREPYRDSTVDYEAIAVRRNAPRWIKKLIEFGYLSKAA

SEQ ID NO: 170437 - protein, 344 aa, unidentified
MEPMYYIGLDVHKRKISYCVKDSGGKIYAEGSLSATRMDLDHWTKTLPQPWTAAMEATMFTGWIYDHLKPHAAALKVAHPLMLRAIAAAKKKNDRIDASKICDCLRCDFLPECHMAPTAIRERRRTLRYRNLLVRQMVQMKIKISSLLMEAGVSYNKQRLHKAGYFRELLATNPDINEELRLLLRLCRETVVRFEKTESALVRSLERDSLLMDRVERLMTIPAVGPITALTWALEVGEVQRFSSIKKAISYCGLCGAEKSSGTIVQRTPLSKQRNKHLQTMLIEAAKMAPRNSPELAMIYDREKQKGNANRATLAVARKLVAYLMAVDRGQRNFQVVETNGIAA

SEQ ID NO: 170438 - protein, 342 aa, unidentified
MQNMMIGVDLAKNVFQVHGASQTGEVLYRKKLSRKQFSAFMALQEPSLVIFEACGSAHYWAREMEALDHEVRLIAPQYVRPFVKRQKNDAADAEAIVIAARQPEMRFVEPKTIEQQSRAAVFRGRERLVHQRTADVNALRALLYEHGHVFPAGIRHLNRMTALIEDEISGLPMLIREECKDLLAQIAEKTARIIERTAKLKTLAAQSDKARRLQTMPGVGPLTAVAVEAFGPDMAQFKTGRDFAAWLGLVPKQHSSGGKERLGRMTKAGQADIRRLLIIGAMSRLTWLGRRTIPAGSWLSRMLARKPKMLVAIALANKMARQIWAMLTKNENYRDPALAVVA

SEQ ID NO: 170439 - protein, 391 aa, unidentified
MLYVGIDVAKDKHDCHIVDSDGVVWHDNFSFPNSMDGFNALLAAVNDCVRKTGVLVTIGLEDTGHYSSNLLAFLQTNGFAVVRLNPLSVSRLRTAGTLRKTKTDKGDARHIALLLAAKTAKPASPPSNTVAALKSLTRARYRLVKELQPLKNRYRRLLHLAFPEVHGFFSGFYISTALNLFAALPGAKAIADCNVRKLASLLKSFSHGRHSRSSADKLKALAKNSVAHHNAGDAYELSLMAQRILFCEKQLNSLETEIERIMLSLDSPITSIPGIGVVLGATILAEIGDIHAFPTPAKLLAFAGCEPSTYQSGKYVAAKTPMVKRGSKYLRNALYLATSSAFYHNPSFRAYIKLKREQGKHHFVAMSHGMKKLSRIIFAVLTKNTPFSQVL

SEQ ID NO: 170440 - protein, 323 aa, unidentified
MIYFGIDISKLTFDVVVLNNNQISNFKYDNNSKGSKAFIKKISSFDDKIICCMEATGIYGLSLAKAIYKSNHNVIVANPVKTHGFAKIQMLRNKTDRADAQSIAQFCKHLDDQGQIESSLFKPKSECYERLQYMFTRLQQLKKQHNQETNRLEASIDKTCQKSIKAMIKFIEKQMNAIENEIHDCIQLDKELNTQVELLTSIKGIASNTAWAILAYLGDINLFKNSRQVTSFAGLNPRIEQSGTSINKSRLSKMGHRRLRRALYMPAVVACHHNIVAMDLYQRMLKKGKPKNVAITAVMRKLLVIAYGVLKSQTKFDPNYQAR

SEQ ID NO: 170441 - protein, 351 aa, unidentified
MSKQTNAIAASTVGIDTGKNTLHLIGLDKQGTIVLREKLARGRIGTRLANVPPCLIGIEAGMATHYVARELLALGHDVRQVPPAYAKPFRRGHKNDFRDAYAIAEAVQRPSTRCVPVKTDDQLDLQALHRVRSRLVGQRTAVINQIRSFLLERGIAIRQGLRFLRQQLPELLAKRIDVLSPRMIRIIEDLSGDWRRLDERIEHVTKEIEVLAHGSESCRQLMTVPGIGPLIASAMVAAIANGAAFAKGRDFAAWLGLVPKQMSTGDRTILGRISKRGNRYLRTLFMQGARVILLRPASWAKHSFGPWLTAAAKRLHHNVLAAALANKLARIAWTVLAQRRNYEARAIIEAA

SEQ ID NO: 170442 - protein, 361 aa, unidentified
MTKLGLLSAPRQGCHRPAPGERITIGVDLARNTWAYAVHWSGGVRRQLATPGAIEHLQTLVREFQPAHPVCVVYEACGFGYEVAWWAQGAAVEVMVVAPSRVERVPGARVKTDRLDACTLAIKGAARQCKCVAIPTRAQHEQRQLLRSYRQLRRDGARLQTRVRSVLQEHGRLGPAPASGWRAYERWLATQELPAAVAAAVRELCALRTAAHASAARLYAPLLALATDAAYQPIVAALTTQAGVGPFTALRLQLEIGDPTRFRTAEAWVNGLGLTPSEYSTGDGPPRRGPIQKCGNTALRAALVQCAWVAIRTDAGLRTVFDRVAPRAGKKRAIIAVTRRLARRLRARWLAALPTSAAAAT

SEQ ID NO: 170443 - protein, 333 aa, unidentified
MFNYSFFVGIDVSKALIDISYYLNGDVIYLGQYGNSKKDFQLIFDDLSNLTSCPIDHWFVCFENTGAYSKDLFYWLIAQGVPCREENALKISLSLGLRRGKNDKIDSQDICNYAFEKRDKIQPSEAPNSMIIKLKCLLSRRDLLVKHRTALKVSLKEQKSSLEDYFYSELEETNVEMIKYYDKQIKALEDSIQQVIKSDPAAAKNNKLLQSIVGIAKVTSAFLIATTNNFKSFTDSRKYACYCGIAPFSKSSGIKKGKSKVNHMANKKMKSLLSNGAISAIVHDPEISLYFKRKIKEGKDEGVVYNAVKNKLIHRAFAVIRRQTPYVQMMKYA

SEQ ID NO: 170444 - protein, 400 aa, unidentified
MMTPDDIDVWVGLDVGKSAHHAHALDHDGNTLYDKPLKQDEKAIRTMLGKLSKHGRVLLVVDQPNTIGSLPLTVARNMGIAVAYLPGTAMRRTAQLLPGDAKTDRRDAHVIAWAALKLPETLRDAGPDDETLAALKLLAGHDEDLAHESTRHVNRLRSLLLQTHPAFERALKGERITRDATLALLERYGGPMGVKRAGIEDVKDWAKSNGLRAGRIIDDMFKAIGEQTVTVPGTLMAETIVPSIAHDIKTIRDRRREVDRQVEKLLEDHPLLTALTSMPGIGVRTASNILLGIGGDIANFKSSAHLAAYAGISPVTGQSGTSIKGERPSRRGNKRLKNALWQTAFVASTKHPPSVAYYKRKREQGKHHNAAIICLARRRCDVIYSMLKNGTLYQEPALVA

SEQ ID NO: 170445 - protein, 352 aa, unidentified
MSDKISRHTLKPCDGKELLDLCERIRTRVARETKKRVEVVSCYEAGYDGFWLHRLLEAHDIRNYVIDPASLQVDRRARRAKTDHVDAERLLRSLIAYLRGEPKVWSVVCVPSVAEEDDRRLHRERSRLINERIQHVNRIKGLLAIHGIYDYQPLRRDRIQRLERLCTAADGRTLPPRIKAEILRELQRLELAIRMIKTIEAERDAIASAAKTETKHTSAKKIQHLAKIKSIGPEFATTLVGEVFYRSFDNRKQLASYVGLTPAHFQSGAMSRDQGISKAGNAKARTVMVELAWLWLRHQPESPLSVWFRERVGKLKGRIRRITIVAVARKLLIALWRYLETGLVPEGAALKV

SEQ ID NO: 170446 - protein, 390 aa, unidentified
MQASHSHYDNTTAIRTDLGAIFVSLELSRATWLVTSLSPGGGERMSKHTVQGGDVGELLSRFAYLQEKVRCRIGRVVPIITIQEAGLDGFWIHRVLQEHGVESHIVDAASIAASRRGRRAKTDRIDGETLVRALLAFKRGEPRVCAMIRVPSPQEEDRRRICRERRVLIAERVEHVNRIKGLLFAQGIGGYQPLRKDRRMRLDELRTGDGRALPLHLKAQIVRELDRLELLLDHIAVVERERDLLVNAAAENTTITRPAAMLCAIKGVGAEIAAVLWTEGLSRHFDNRRQVAAYAGLAPTPWQSGTIDREQGVSKAGNPRLRTTMIQLAWLWLRNQPSSALSEWFFHRVQSNGGRHKKSTIVALARKLLVALWKYVKFGMVIDGAAMKAA

SEQ ID NO: 170447 - protein, 345 aa, unidentified
MYYCGIDIAMKSSYIYITDSRGRKKTSGEIPTKAGVFRQRLRPYLRHGLRVAIEAGNQTAWIYDLLVDLGAEVTVVNPAKVKLIAESRRKTDKVDARILCELLRLDGLPHPVHVPDKEARSLRGLLVARRQLVSARTKLCNVVRGMLRQEGIQLPARHLTSFVGWQRLLGRSYAHEHIGVVLQAYYQSFVSLTRSIQALDKQLAKRERQDERAARLKTMPKVGRIASLTFLAAVDEVDRFDTSRKLVSYSGLCPTVRSSGERTEYGSISREGRSELRAVWVQIAHLVVRDTSRSSARLRRWYSKVASHRGKRTAIVALARKLLTIAYRLLKDQTVYCSSLVSRAA

SEQ ID NO: 170448 - protein, 426 aa, unidentified
MNTTPPFDLVIGLDRSDRKADLYRIDLPTGAEQRQIIPTSPVALQAWADALHAAHPKARVAICFEQPANNLIAFLTRYPWITLYPINPISLQKFREVFVVSRAKDDGKDAEYLARLLAAHHDRFQPWHPDTQQTRLLERLVVDRRSVVDHRTGLTNRLQAVLKDYFPQALDLAGDELWRPLGTAFLKRWPTLQAVQKAKPLAIRQFYYAQGSRSEKLIQERLNRIAHAVPLTDDPALLDSYALRVCLTVQELELVTRTVKLYDQKIAAVFAEHPDREIFRNLPGAGPVFGPRLLTSFGTRREEYPKATHVQRASGIAPVTKQSGTSKQVHRRYRCSVFFKQSIHEWAGESRLWSGWARAFYEMKRAGGMGHHAAVRSLAYKWLRVVWRCWQDREVYREDRYLAALKKYGSPVIAWMEKHPVPASAS

SEQ ID NO: 170449 - protein, 390 aa, unidentified
MTFYVGIDIAKYKHDCFIADDSGCVIRDSFSFKNDKAGFDVLLSILKGLKPKGQIKIGFESTGHYHFNLKLMLEANGFDYVEFNPLLVHKFVAGQTLRKTKTDKKDAHMIAKYLMTIDYKPYVNSFYHINNLKSLCRLRETLITDRTRYINQITSYLDQIFPEFKPLFENGLNKSAFYLLTHYTTPAKMSKLNLEKYSKMKSELKSPISYQKTCQIKDAAKNTIGNSSQALEYALKTSLDIYLYLDNQIEEMETKIIEIYNSLNCHIHTIKGVGMITAAGILSELTNMDKFKTPAQIQAFAGLEPSKNDSGEKIGNGKMVKHGSSYLRKYLMNSAETFYVHNPAISDFYWKKRNEGKDHRVALSHVARRLINTIFYLEKHNKDFDPKLVK

SEQ ID NO: 170450 - protein, 432 aa, unidentified
MSEGSQEELMSQNQPEIQYAAFLAIDWADQKHVWSLQDANSGTCERGEVDHMPEAVEAWVAQMSQRFAGRPIAVAVEQSRGALVFLLSKYEQLHIFPVPPAMTANLRKAFYSSGAKSDPTDADLLLDLVQRHREKLRRLSPDTEATRLIQNLVEERRRLVDEKTAQSNRLEAHLKIYFPQIPRWFGDLGSPLVCALLERWPTLEALQKARPDTLRSFFRKHHSRKEELIESRIKAIGEAMPALKDRAVVEAKVAVVKVSVQLIQDLHEGIEGLNRQIQEAAEAHPDFFIFDSLPGAGAVMAPRLLAAFGSQRERYQNATEMQTFSGIAPVTESSGKSSWVHFRFACSKFLRQSFHEWAALSIPQSKWARAYYELQCRRGKKHHAAVRALAFKWIRIIYRCWKERVAYDENVYLAALAKHNSPLVTATRAEAL

SEQ ID NO: 170451 - protein, 376 aa, unidentified
MKKYSEAFIGFDTAKKKHAVAIAEDGRNGEIRYLGEIDGEIRYLGEIDSSPATVEKVIGKLAERYAKLHVCYEAGPTGYGLYRQVKALGHECAVVAPSLIPRKSGERIKTNRRDAVTLARSLRAGDLTSVWVPDAIHEAVRDLSRAREAAGEDVRKKRQQLLSFLLRHGRIFSGRKHWSLAHRRWLAEQKFEHPAQQIVFQDAIDAIEDGAARLRRLEEQLLAIAPSWSMAPVVAAYQAMRGVSFIVAVTFVAEIGDVRRFDNPRQLMAFLGLIPSERSTGETVRRSRSRAIGAPDACSSKAPGPTAIQPVSARPCGPGSRDCRKPSATSPGKPRSGSAPGTVASPPPARRRRWSLPQSPARWLRSFGPSHTKSNH

SEQ ID NO: 170452 - protein, 342 aa, unidentified
MQISTIGLDIAKNVFQVHGIDAAEKVVVRKRLRRRQVLEFFKALPRCLIGMEACATAHYWARELTKLGHEVRLMPAKDVKAYVKRNKNDAADAEAICEAVRRPTMRFVRIKSAEQQGQLMQHRTRDVLIRQRTQIINALRAHLAELGLVAAQGNAGVNELRAIVTDEQDTRLPIDARASVIVLAAQLEALESVIGAIEKRIKMQHRSSEASQRVEAIPGIGVIGATAIVATVADPTIFRSGRDFAAWIGLVPRQDSTGGKQKLGPISKQGDRYLRRILVVGAIAVLRRAQENPGKYPWLTQLLARRPFKVVAVALANKMARMAWALLAHGGTYRAPELAEAA

SEQ ID NO: 170453 - protein, 325 aa, unidentified
MRIKGCDLHARQQTLAMLDTATGEVVNVTLTHEGHNVREFYSTLPRPVCVGIEATGSMQWFLNLMEELGIECRVGHPATIRAAEPRKQKHDRRDADLILKLLVENRFPAIWMPTKELLDLRALLRHRHQWVRIRTRIQNAPQSIALANGLRRGPSLWSRDGQNTIASLPLAPHTAYRRSELQAMYGKFEAEIEKLNQRVEEQACGRPGARLLMTHPGVGPVTALATEVFLGDPARFADSKALASYVGLIPREHSSGGRQRLGGLSKQGNPLLRFLWGEAGAHAVRRDPELQRFYRQISPERFGEGARGGGSQAGDPAVDPVAGSD

SEQ ID NO: 170454 - protein, 421 aa, unidentified
MQTILHNCCGMDVHKDSVVACIIKTRRNPVPHINPEVVDTEIRVFETFPESLAKLRSWLESEQCMHVAMESTGIYWCPVYESLEDAFDGKIEILVTNPRHMKNVPGKKTDIKDAEWIAQLLRAGLLSGSFIPPQDIRELRQLTRYRKNVVQDVNTQKNRIEKTLQQAGFKLSTFLSDVFGVSGRNLLGVLVNCGKLSPSDIEDKTKRISKEKKSEIKRAITGQLNEHQRQFLSLQIKHLDELLAHLSVIEASIDKISAKFDEDIQRLGTIPGIAETSATAIIAEIGVDMSKFRTAEHFCSWAGLAPGDNMSAGKKKSTRITFGNPYIKGVICECAWAAVRVRTSYLSKYYWKLKQRRGTKKAIIALARKILVIIYNLIKNSDAYNEEKFELARIKQESIRLNRISAEVRKLGFELVPIEAA

SEQ ID NO: 170455 - protein, 357 aa, unidentified
MLKQNSKLSFKDQTIYVGLDIAKKSWNVTILTEQFFHKTYTQSPVPDVLVAYLNKNFPDAHYICAYEAGLFGFWIYDALTKLGVDCIVVHPADIPTKDKERRNRNDDVDSNKIARNLRSGELTPLYIPSLQAQGDRSLVRMRILMVKKQTRCKNQLKALLTFYGIDIPDELANSNWSKQFISWLENIDFKNNSGKQAFSALLSELKYFRSSICQLTKDIHSLSKQEPYKMPVQYLSSIPGISTTTSMVFLTEIVDIKRFKDFDHLSSYFGLIPGEDSSGDNEIHTGITPRRNANLRVLLIESSWIAVRKDPALLMSFNQLSKRMPKNKAIIRIARKLLNRIRYVLKNQCYYKIGVVS

SEQ ID NO: 170456 - protein, 412 aa, unidentified
MLFVGDDWAEEHHDVEVIDQAGQVLARARLQEGVAGMSRLHALIGQFTADLVDDATGEPVEPVVMVGIETDRGPWVQALIAAGYRVYPINPLQVARYRQRFVVSGAKSDPQDVHVLADMVRTDAHQLRPAAGDSDVAEAVKVVSRAHKNLGWERTRHTQRLRNALREFFPAALQAYPDLDAPDALELLAKAPDPRSAARLTCPQIEAALKRAHRRNRAAKAVEIQAALRSPQLGRTPLVTGAYATAVRAQVAILTVLVEQVTAMETAVTAHFGQHPDVDIYLSQPGMGSVLGARVLAEFGDDPHRYADARARKNYAGTSPITRQSGKKRLVMARYIHNDRLLDTVTRQAFCALQASPGARAYYDKQRARDVGHHAALRQLANRLTGIPHGCLKTGTPYDAHTAWNHTTHAAA

SEQ ID NO: 170457 - protein, 359 aa, unidentified
MSKYITIGMDLGNKKHTVCALGQDGKVLWRRDVKNSPEALTPFFKENAGATVAMETGLCCRWISALAKSCGCEVLVGNARKLAAIWKSKQKNDEKDALLIAELARTSTLLFHPVELRDDERHEMVQIIELRAVAVSQRTQAVNSVRGLCKARGVFIKKCDASCFHKVAGEAIPAGMAWKFKPMLRHLKEIVATVKRYDAMLEKYARAHFKEEVELLQTIPSVGPVTSCAFVAHISDPRRFGSARDAGAYFGLTPGQDQSGDRDAPKRITKTGSTLMRHLLVTAANYILRESSPDTALKRHGERICERGGKVARRKAKTAVARKLAVTMLAMLKSGKPYDDVLAAKKAATVAPTVTGLIA

SEQ ID NO: 170458 - protein, 405 aa, unidentified
MLNAVGIDVSKGKSTIAVLRPAGEIVRKPFDVRHTPKELSILSSYIQHLEGDTRIVMECTGHYHEPILKVLSDSGFFVSAVNPHLIKEYDGDNSLIKVKSDSADAKKIAGYTLDKWHLLRQYSAMDNTRTQLKTLNTQFQFLMRQKTALKNNLISLLDLTYPGVNAFFDSPVRKNGSQKWLDYAYSFWHADCVRTIGLKTFTERYKKFCKRHGYIFQPDKPKSLFESSKELIAVAPKDHIYKDMVLSAIVQVNLISAQIESMRLKMDELASTLPEYEVVMNMFGVGHTFGPQLMAEIGDISRFNHRSALTAFAGVDPGVNQSGKMKIDSNRASKRGAPRLRKTLFQIMQTLMQNAPADNRVYLFMMKKKAEGKPYHVYMTAGANKFLRIYYGTVKAHLASQSQTE

SEQ ID NO: 170459 - protein, 390 aa, unidentified
MIYVGIDVAKDKHDCCILGPDTEELFPVFTIRNNSDGYGELFHKIESVSKDKSQIKIGLEATGHYSYNILGSLLDHGYHTFVINPLHTNLYRKGQSLRKTKTDKVDARSIAEMLVTDKTLKPYTGTSYHSEELKSLTRYRFELVKERAKMKTSVSRLVNILFPELESLVPTLHMNSVYRLLQELPGAYFIASSNLTHLKALLADASKGHYGREKAIEIRETAKSSIGSLMPAKSMELRQTIRRIDTLTSDIKEVEQSIQKIMDECGSPITTIPGIKYRMGAMILAEIGDFARFSNADQVLAYAGLSPSTYQSGQLISSYARMEKRGSKYLRYALFNAAIYASVWDERFRLYLSKKRAEGKHYYVAISHVVKKLVRTIFRMEITHTSYQPL

SEQ ID NO: 170460 - protein, 348 aa, unidentified
MRFYTQQHRYTCGIDLHARSLYVCILDDTGQMLVHKNIKASAEALLKVIADYRDDLIIGVECMFSWYWIADFCADQDIEFVLGHALYMKAIHGGKAKNDRIDSEKIARILKGGMFPYAYVYPCGMRSHRDLMRRQIKLTRERGELMSHIKNTLSQYNLPAHPKNLRYAKHREPLRTAFPDPSVQRSIDLDLARIEFYDGQLSKLKWYLKRTAKSVDPKTVIQLQSVYGIGDILSLVILYEIHDIERFPRVQNFVSYCRLVKCQRESAGKKHGTGGARIGNPYLRWAFGEAAALFLRGNPPALRWLEKKTRKHNKAKAMTILAHKLGRAVYYMLKRGTLFDQDRFLASS

SEQ ID NO: 170461 - protein, 367 aa, unidentified
MKQQTSATTETGIKGRNIIDFTGKTIYVGIDVHQKDYQVAKVLNGFCLGNHRMESNREKLIEHLKSHYPGATFKCVYESCAWGFTLQRTLQASGMECIVVHAADVSTTDKEKRRKTDKVDALKLAHGYASGSLKGIHVPNEETQKDRSLIRYRKQLTGDINRSKNRLKSLLKYQGIDLPPQYAGNNWSRNFLNWVEQQAEKDALLKETLMLLLEQIKLLRQLLLKTERKLREMRKTKYAQKADLACSVAGIGPTTAMFFLLETGDINRFKGFDSLNDFVGLCPDTDSSGDTHRDRGITTRRHKQLRSALIEAAWQAIKTDPALMDSYQTLLKRMKGTQAIIRIARKLLRRLRAVLLSGRPYQKGVIA

SEQ ID NO: 170462 - protein, 315 aa, unidentified
MEKYIGIDISKATLDLYDGEKSYKVNNNREGFTFIRKMAKHKKDLVLIFEPTGVYAHALITYCQKQNIRAVIVGSKEARDYARSIKQRSKTDKIDAKVLYRYHTQVNPSTLTIPSLNTQMIKITQRRNVYNKYRHAITQLNNLIEATPQEDKGLIRSIQKQIASLEKAAGKLLEEIEELLIKQEKNKVALENLQTIPGIGKKSALTLLLEFMRYPHAKSNEMVALMGLDPVLRDSGVFKGKSRISKQGGKHLREKLYMATIVAIKHNDRLKLFYERLISNGKPKMVALLAAMRKLLRIAFAVVKNNEPYRALDMV

SEQ ID NO: 170463 - protein, 349 aa, unidentified
MEAYDGPQIVGMDLHRRRSVLVRMRPDGQKLATARIDNDPAELRKQIARAGECPRVVLEAAYGWYWAVDALEAAGAEVHLAHPLGVKGFAYRRVKNDEKDAADLADLLRMGRLPEAWIAPPEIRELRELTRYRIKLVHIRTSCKDQVHAVLAKLGVTVTCTDIFGAWGSTWLDELRLPQPYAGKITSLRKLASELTAEITLLEKVIADLLEHHDGYHALQQLPGIGKVLAAVIVAEIGDISRFHHPGQLCSWTGLTPRHRESDTKIARGHITKQGSRVLRWAMVEAIQRLPADTPVRDVKDRIIARRGKEARNIAKVAAARQLLTCVFYAMRDGHVRSLTARAAAKEAA

SEQ ID NO: 170464 - protein, 402 aa, unidentified
MNCVGIDVSKGKSTIAVMRPFGEVVVSPFEVRHTANELSELAGLLKSLDGETRVVMESTGNYHAPVAWLLHDAGLYVSVVNAMLVHDYGNNSLKRAKTDKKDAVKLANYGLDHWLTLPRYIPEEDTRLMLKICYRQYQQYSKVQTMLKNNLISLLDTTFPDANRLFTSPPRADGSEKWVDFVATFWHCECVCGRSEKAFTTQYQKWCRKHGYNFSEDKALDIYASACRHFGVIPKTDTAKLLVEQAISQLQTTSSALAALKQEMQSLAASLPEYPVVMEMFGVGPALGPQLMAEIGDVRRFHSKKALVAFAGIDAPPCQSGQMDIHSRSISKRGSAALRRTLFLVMGIYLQSAPLDEPVYQFMDKKRSEGKPYKVYMMASANKFLRIYYASVTAYLNTLARI

SEQ ID NO: 170465 - protein, 467 aa, unidentified
MSEQQGETEEKKKVDEENGSQLPRPGKCCGLDIHKKTCTAAIVSDDKQPIVLADLENTGPGMKYLYQKLVEEGCSTVVMESTGSYWMGAYDYLELRGINTVLICPRSLKAVVGKKTDESDASVLANMYRIGFFEPSYVPPRHIRELRSLTRRLEKITKMTSSVKNSIQSQVNAFSTGVTATYTDPFGLGGTKIMKALAATIKQGESIDVEKIIVQLREEGLSKKRLECVEEMLRISFDPTSNGWLIEQGLETLRGLDEQKELLLDRIAKHIEQHPDLSRYTRVLMTMRGIALVSAASIVAEMGDPTRFPSSKSVASYFGLAPSIEQSGPKTVRGSITKAGSRHMRRILGQIACVVCVRGDPHLKRWYAQISKRRGKHVAKTALSRKILVITWAMMRDNQTYTDPDQADSTDQTLRRNKLRELVKRSQQSERSVSMWKAIQRLATDKKLRAELGLGRILPPGSTKPSK

SEQ ID NO: 170466 - protein, 417 aa, unidentified
MFKIFRKNCCGLDVHKTWIYACIGTTDTNGRTDYKESRFSSFSKGLRELSDWLAKYNCTEVCMESSGKYWIPVFNILEKTCFVTLAHPKYTKPQKGNKTDRKDAKWICDLFMCDMIKPSFIPSPEIRQLRDLIRYRFKLTNMITGEKNRAHNCLTVSNLKLDDVFSDVFGKSSRSITNYMLDHPGECFDVAPFVDGRCKTPVEEIQAAVDGVISHEQAVKLRQCLLHIDELEAHKREIEQEILSIAEPFSAVLDFLYTLPGLDSNPMTAIAILSEIGPDMSVFPSSKNLVSWAGCCPRNDQSANKVKSTRISRAGCYLKPLLVQIANALVKSKKHPEFKERYHRIKTRRGHKKAIIAVCKMLLTAIWNILSKLEPYTPEGFLEHRPVNESKILTRTQALELFRKRGYTIIDDPVVTE

SEQ ID NO: 170467 - protein, 396 aa, unidentified
MRNDVTIYVGIDFSKEKFNACLLMEQGVMGESEFPNSKTGYLKLTKWVKNTSELGRTFDSSLVLFCGEHTGTCSIGLCEYLYAKGMKIWLESALKIKYGSGLKRVKDDKADAEMIAYYAKRFYEPGSCALFEPDSADLKTLRTLYQFRNRVVCDRVAIGNRISSGAFDCSTLVRNRMVKHHKEAQKDEKDIEKEMVKLMETSEELASNYQILISFKGIGPITAAALIIYTSNFKKFDNPRKFACYCGIAPFGKQSGTSINTKPHVSRFAHIGIKAAIVQACKSAMQHNAVIKAYAQRLYAKGKHEGIVMNNVKNKVMHIIFKMIQTQTLWEQEYQQKHMKECKVIPGKNGIGATEAAPIINAILKTSSSVVECTFLEEHSFQKNSKKTSSFSCVET

SEQ ID NO: 170468 - protein, 335 aa, unidentified
MQIYGIDLAKEKFDVSFFDLTSKKVSNQPSHKVVKNNFKSIGRFLETLPSDAVLVAEHTGVYGDTLLKCCMDCNVKIAFVGGYVIHRYRATPDRAKTDVLDCALLREFGERYPDKLKYRKFPEEALYELRQLARHREMLVEQRKQLMTADKSEDCRPIRSLAVKRSMDRIKEMLDTEIAETEKEMLKVINGHDSIHHNYEIVKSVNGVGLVTAVELLVKTDNFTKITTARQYSAYAGTAPYEKSSGKMDKGAHISKIGNRRSKTLLYICAESARLHNKEIKLYYERRTLIDKKPRHYVLNAIANKLLRIIFTLVEKGEYYDANFIRQDPRVVKYN

SEQ ID NO: 170469 - protein, 344 aa, unidentified
MDHFAGLDVSVKETSICIVDDTGRIVREVKVASEPDALLQVLRNPAYHFKRIGLEAGPLSQWLFGALAEAELPVVCVETRHMQAVLKAQINKTDRNDARGIAQMMRVGLYRPVHVKTLRSQKLRMLLTHRKLLQSKAIAIENDLRATLRNFGLKVGMVGKMRFEERIKELVENLPDLAALVEPLLVVRRVLREQIVILHRRLLAIVRDDEVCRRLMTTPGVGPVVALTYRATVDVPARFRKSKAVGAVFGLTCSKYQSGEIDRSGRISRCGDEMMRVMLYEAAQSTLRSKKWSWLKAWAMQIARRRGMKKAIVALARRLAVILHRIWVDGTKFRWTREQATAAA

SEQ ID NO: 170470 - protein, 351 aa, unidentified
MPRTSTVHAVTTIGMDMGKNTLHMIDLDSRGSIVLREKVSRGRITSRLANLPSCLIGIEAGMATHYVARELATLGHDVKQVPPTYAKPFRQGHKNDFRDAHAVAEAVQRPTTRFVPAKTDEQLDLQALHRVRSRLVSERTAVINQIRGFLLERGVIVRQGLRFLRQALPDILAKRTDVLSPRMVRVVADLASDWRQLDEQIEHVTDEIKTLAKNDDNCRRVMTVPGIGPIISTAMVAAIGSGAAFAKGRDFSAWIGLVPKQLSTGDRTILGRITKRGNGYLRTLFMQAARVILLRPASWPKHTFGDWLTRAAQRLHPNVLAAALANKLARIAWTVLAQERSYEARITKAAA

SEQ ID NO: 170471 - protein, 351 aa, unidentified
MRSLSDLKQREPSVEKLIRIGMDTSKSVFQVHGVNASEQVVLRRKMRRKEMVGFFSSLEPTLVAIEACGSAHHWARVLSGMGHVVKLIAPQHAKRYVKRGKNDAADAAALCEAVSRPDMQFVAAKSTEQQAGMMLAGVRSRLIRSRTQLTNAIRSYAAEFGLIAAKGLDKIEPLLARAAADPDLSELAHELFALQGREYARLQAELREVEAKLMAWHRGNECSRRLAQVPGIGPVGGSLLAMKQPDAKACRSGRHFAAWVGLTPKDHSTAGRTRLGGITRAGDPALRSVLVVGAMAVIRQAILNPDKASPWLRALLARKPKKLAAVALANKTARIAWKLMTSGEHYRAVTA

SEQ ID NO: 170472 - protein, 452 aa, unidentified
MSRQSPQWADQPQEIPDAEHEQLVARVCAIDVGKQAGKVCTRVPHPEQPHRRVCKVWDVAATTNAVSHLAEQLLDLGVQKVTVESTADYWRIWFYLLEARGLQVQLVNARDVKNVPGRPKTDKLDAVWLAKLTEKGMLRPSFVPPAPVRVLRDYTRLRVDLTRERSRFWQRLEKLLEDSLIKVSSVASSLDLISTRDMLEALIGGQRDPHALAGLARGRMRTKHAELIEALTGAFDDHHGELARIMLDQIDGLTREIEQLTTRIDELIAAIPAAGIPGHDGDDTGNRAARALPAVQRLAEIPGIGQSGAQAILAEVGLDMTRFPTPEHLVSWAKLCPRTIQSGSKNTSSKAGKGNPYLKGVLGNAAAGASRTNTFLGERYRRLVKRRGKLKALVAVARSILVAVWHLLSDPTTRFHDLGSDYYNSRVDKEKRTRNYIRQLQALGFTVTLTAA

SEQ ID NO: 170473 - protein, 390 aa, unidentified
MVYLGIDVGKSHHAAALINSEGNTIATLPSFANTGAGFRKLLRFVSSHVSKEEELSVGIEATGPYWIPLCRWGRKQGWEVTVLNPLKVASLRNYGVRGSKTDRIDAVLVAHALRWEKRPPSDEPSYETLELRHLTRLRSQIIKDRTRISLRLISLLDTLFPELLTLFSKPISPSTLAILEVAPTPQKVVALGKENLTAILRKASAGKLGQERAQQIIDAAQRSVGVPSETLEEVTALIVAQIRLLGEQLTTLNRRINELYARTGLTLDTLPGVGTVLAATFLGEFGDVNRFKGGTQMVAYAGIDPKLRESGSHQGQVRMSKRGSPYLRHAIYLAAQTAARTDEYFQDILQRQLKRGKSKRKALGAVMNRFIHVLYAVWKDNRAYSPLTPS

SEQ ID NO: 170474 - protein, 360 aa, unidentified
MAKTSLSGLDQFVRALGDEPVWIGVDVHKETYSASLVSTCGARRTWSCRADPDGFVKQLMGFGVSIALVAHEAGPTGFALARCLEKAGLPALVAAPSRIPRPVTAGAKTDSLDSLKLAELAMGGQLRPITIPTEAEEAQRSLIRRIDQIGREVRRTKQRIKSLLLEFGLEEPKGLKNWSKKSVSALKKIKSPGGVALAFGSHLRELEWHIGERNRVMEELKKVLKRAGLLDRVRKLRSAPGVGPLTAQTFCLEVFRPERFARGEELTSYLGLAPMIRHSGSGQKRAYIRPVGQKRLRSLLIEAAWVWVRKDEHAAAIYRRLVSKSGVAQKEITALARRLAVILWRMCLENREYRPGVSAV

SEQ ID NO: 170475 - protein, 404 aa, unidentified
MDETFAGIDWASEEHALCVVDERGMTVAGEFFSHDEAGIRELIARMKALGVCRVAIERPDGLLVDRLLEAGFTVLPVHPNKLKATRPRYEAAGGKSDGFDAFVLAELARTDSHRHRALCPDSDETKALRALTRTREDLVGARVRLANELRAQLDAFWPGAARVFADVDSPIGLAFLERYPGPEDARGLGEKRLEGFLARNGYCGRRSPAELLERLRSAPAGRAGAMEAEARRGAVLGLVAALAPIVAQIRELTSQIAGAVRAHPDGKVFLPLFKDPKSVITAARLVAEIGDDRSRYPSCDSLAADAGMAPVARESGKRKVAGFRWACDKRLRDAVACLANSTRHTHPWARKVYLDARARGLEHPHAIRVLGRAWLRVLWRCWRDEVAYDPAKHGNLIRLQPVGG

SEQ ID NO: 170476 - protein, 344 aa, unidentified
MKALKSHVAGIDVHKEMLAITVLIGELDGEPKEYQFESSTFTDDLMALGLKLKEMGVTDVAMESSGIYWKPVFNVFNPLGLKVVVANAAHIKNVPGRKTDMNDSRWIAELHRFGLIRASFIPDGEFQRMRLLSRHRTNLTEDLARVKNRIQKVLEDGNIKLSIVVSDIFGVSGLKVLKQIAGGYTHPNILITEVTTKIKRMEEMKKALTNCLTTEHCFVINVLMKQYEELKNRIEEDENELCKKVEPYAHLVEELDKIPGIDAILAMGIIAEASANMSSFKDERAFAAWSAVASGNNESAGKKKRAKCRKGNPALRKMLIQAAQKATTARNPFIDLNTTNSAFA

SEQ ID NO: 170477 - protein, 412 aa, unidentified
MKFVNEKTLIVAVDIGKVSNQGYGRCPNGEEVKPFEFFNNGEGFKKFWGRIWQVKETYHLEAVVVGFESTGPYGEPLVHFLSKRPVRLVQVNPMHTKRLKELEGNSPEKTDRKDPKVIADIMGLGHALTVIIPEGAAAELRRLTQARERAVQRKTALWNQLQSLIALLFPEFLQVMKDLKTHSARYLLEHYPTPQEICRLGLEGLTALLKRVSRGKLKLERARAVYEAASESVGIQEGERSLCLEIRELLGAIAATEGFVAVVEQEMAQGLGQIPYSPFLLSVRGVGKVTVAGLIGEVGDFRKFHTLAEIMKLAGLNLFEISSGQHKGRRHISKRGRPLLRKLLFFAALNMVRQNGLMRPFYQRLVGRGMRRIKALVAVARKLLGILFALVRDQRFYIPDYGKKGAVELEAA

SEQ ID NO: 170478 - protein, 292 aa, unidentified
MTQSTTSNTLFIGMDVHQDSIAVAYVASDHGAEVTYLGTIGTRQTDLDQLVRQLQSKAKHLVFVYEAGPCGYWLYRYRSKKGHTGWVVAPSLIPKKAGDRVKTDRRDAIQLASLTRSGDLTPVYVPKLEDEAIRDLTRAREVATQDLKAAKFRLKAFLLRHDIRYTGRANWGPAHLRWLSEVVWLTPSESSSGERRRQGSITPSGNTHARRVLVEGAWAYRYPAKVSRHLQLRLEKQPKALQDLSWKAQVRLCKRFRQLIARGKHANQVVVAIARELVGFIWAIAKQVKVTP

SEQ ID NO: 170479 - protein, 352 aa, unidentified
MKTYYVGMDVHKATIVIAVLDAKGKVVSQSIIETSTQAVRDYFKSWRGVHVTFEEGNQAAWLYDVVEPLVGHLVVCNPKHNHLLKQGSKNDRIDARKLADLLRLKALKPVYHGEHGTRTLKELVRCYECVVKDLSRVQNRLKALYNSQAIGNRGRELYQLSQRESWIQKQENVGRRMRAELCFRQMDELKVLKRGARKAMLAESRRHEAQRILSQVPELGLVRVAQIIATVDSPFRFRTKRPFWAYLGLAVETRSSADHELRNGRVSRRKVKIETRGLNEDYNRRLKSVFKSAATHACSCGVYKEYYDQLVAGGMRPEMARLSVARKLAAAVLAVWKKGQSFDERMIMSRAA

SEQ ID NO: 170480 - protein, 343 aa, unidentified
MKKITTVGLDLAKSVFQVHGIAEEGDVIVRRALRRSQVLDFFRTLQPCLVGMEACGSAHYWAREIQALGHTVRMMPPAYVKAYVKRNKTDAADAEAICEAVTRPTMRYVPAKTQDEHAAGMVLKTRDLLIRQRTQAINALRAHLAELGIVRATGLVGIVSLAAIVRDDSDLRLPGAARMALEELVEQIETVTARIERLDRKILEAVRKDDSARRLTAIPGVGPIIAATVRAVVPDPAGFKTGRDFAAWIGLTPRAHSSGGKERIGSISKRGNQQLRTLLVAGATSILKLARRGLQPSPWIAAMMLRRPFKVVAVALANKIARIIWALLVRGDNFRGAKMIVQA

SEQ ID NO: 170481 - protein, 337 aa, unidentified
MTASPNAYHLFVGVDIAATTFAASWTTATSPRQRALTFAQTPDGFTAFQERVRALGVPPAATLIVIEATGSYWVALAVSLHEAGFAVAVVNPAHIHNYARSLPRRSKTDALDAQVLAQFAAERQPARWTPPPQIYHELRQRLVARDGLLSMRQQARNQRHALLQWPVVIDSVQAHLDKVIAELEERLSALDAEIAQVLSDGAWAEAASLLTTIKGIGMVTTAWLLVGTLNFEACASAEAAAAYAGLVPLARESGSSVRGRAQIGHGGHARLRTALYLATLTATRFNPSIKAQYERLRAAGKPPKVARCAAARKLLHQAYAVVTKRRPFDPHYGIAGA

SEQ ID NO: 170482 - protein, 314 aa, unidentified
MDQYIGLDVSLKDTAVSIRENRKRIWRGKCPSDPKVLSQIIRKHAPHAKLVVFETGPLSTWFYHALKAERIPAICIEARHAQKVLNETLNKTDANDADGLAQLAEAGFYKVVRVKTFDNMVTRTLVAARSQLVSISKQLSNQIRGLLKTFGLIVPKGEGGVFDANVRALLNGNSGLAAVILPLLEAWRDIRKRASNLDHQLLVASRQSRATKLLMTIPGVGAVTAVSYIAAIEDPENFPTSRSVGAWLGLTTRRYQSGEIDYDGHISRRGDGRLRGLLYEAATGCSRPGKHSIHWPAQRLNRSAGLPASAPQSD

SEQ ID NO: 170483 - protein, 347 aa, unidentified
MRFYNNSHPYYCGIDLHARLLYVCIIDSKGEVVVHKKIGASKDDLLLILEPYIGNVIVGVECMHCWYWVSDWCAELGIDFVLGHALYMKAIHGGKTKNDKVDSFKIASLLRGGNFPIAYDYPSEMRAARDLLRRRMKIVRHGAMLKGHVVNTNSQYNLPATELNLKNISARQKLREQYQDPIVQRNIDLDMALLDCYAKELAQVEWFIEKQAKNHNPVYLELLKTVPGIGKILSLTILYEIGDICRFESVQKFASYSRLVKCKAESAGKTYGTNGNKIGNAHLKWAFSEAAVLYLRGNDKARNYLNRLQKRMSKAKALSALAHKLGRCVYFMLKNKTVFDEQRFLKG

SEQ ID NO: 170484 - protein, 332 aa, unidentified
MESFYFIGVDVSKKKLDFCVMFEGEVVHEEKTANHPSAIMALIHHLEENYGIEGSRMLVCAEHTGQYTFPLACACKALECKLWLENPAEIKYSSGVQRGKNDKVDAKRIAIYACRFQDKVQYYERPTEDIERLKQLESERTLYVNDLAKYKGQLNDQKDYMPKDLYERKIKRLQALMEDLEEAIQAITEEMDEVINSCPVLSRQKELLMSIDGVGRVVATNMIIVTEAFTRFEDPRKFNCYAGVAPFSYSSGSSQHSKARVSHRADKVMKRLLHLAAVAVTHRVGGELKMYYERKVAEGKNKMSVINALRAKIVARMFAVIKRNEKYKPILS

SEQ ID NO: 170485 - protein, 342 aa, unidentified
MQITTIGLDIAKNVFQVHGIDSNETVVVRKQLRRGKLIAFFETLAPCLVGIEACATAHHWARELTKLGHEVRLMPAKDVKAYVKRNKNDAADAAAICEAVRRPTMRFVRIKSAEQQCQLMQHRTRDLMMRQRTQLINALRAHLAELGIVAAMGDKGVTELLAIVADEGDARLPVEARATLALLAAQLNALQMLIGSLEKRIKMQHRANPASKRLETIPGIGIIGATAIAATVVDPTVFRSGRDFAAWIGLVPRQESSGGKQKLGSISKRGDPYLRRILIVGAHSVLRWAMQNPERYPWLTQLLARRPFKVVAVAFANKMARMAWALLAYGGTYRAPRLSIAP

SEQ ID NO: 170486 - protein, 365 aa, unidentified
MQKAELSCEADSENNLGGSSETMYYIGLDVHKRTISYCVKDAAGRVHMEGKIGSTRRELDSWIKTLPQPRTIAMEATIFTGWIYDHLLPHAEKVKVAHPLMLRAIAAAKRKNDKIDASKIADCLRCDFLPECHMASTEIRDRRRTLRYRGLLVKQMVQMKNRISGLLLEKGVTHTKRRLHKVGYFAELMAGNEEIDQSIRPLLKLSREHIVRAQKLDYALVSSLERDPLLVERLNRLRTVPGVGPITALTWALEIGDVSRFRSIKQAISYCGLCGAEKSSADKMLRTPISKQRNKHIQHVLVEAAKLAPRQCHELALIYEKEMQRGNRNRATLAVARKIVAYLLAVERRQQDFVPTEEFGGTAAA

SEQ ID NO: 170487 - protein, 801 aa, unidentified
MQIGLQIPIVIRETKDGDKVLVCGSHRLEAAKSMDWSTIPCQVVRIDDRTARLREISENMHRAELTQLEQDEHITEWVRLLCEQETPQGSEKSADTAEFQSAQIGPIESKRKDGRGHRKASGTKAAARALGIERHEAQRAVKRTKSISLEIRNEIRAMPSIAGDCPDFGGLCRFGKDRVFIGDAVKSMPQPGAERAVVDCATDLEQQIGAPLRPSHLLRFVHAPVDQEVCCAFGNRRSDPLTGTVSFGIVDQPHGLASEIFIDRMQRVPQLARGHALRAPAALALEDMHDLADPLDAALSILRLAIPNPPVQTFDFGDDRRLRLRPVGIVGRQICRCQLRVVQTHRDMKPVQNRRPCHSRVCQNHAQTRTTVGESGHRGGVGLAHRFEIPWRLDSDRCSDRVRLLNPLTPETTMQVVSDRAAAPTAIQTDLRAIFVSLELSRSTWLITSLSPGGGEKMSKHSVQAGDIAGLLRRFAQLKEKARARTGRDFPIITIQEAGLDGFWIHRVLLSEQIESYVVDPASIATSRRRRRAKTDKIDGETLVRTLLAYKRGEPRVCAMVKVPTPEEEDSRRLCRERKVLTAERVLHVNRIKGLLFCQGISGYEPMRRDRHERLEELRTGDGRPLPQHLKAQVNRELDRLELLLKQIKAVEAERDALLVAVRIPAAVPASMLLNIKGIGPEFAAVLWSEGLFRHFDNRRQVAAYAGLAPTPWQSGAVDREQGVSKAGNPRLRTTLIQLAWLWLRNQPHSALTLWFRERVSRNGGRLRKTTIVALARKLLVALWKYVTAGVVIEGAAMTAA

SEQ ID NO: 170488 - protein, 319 aa, unidentified
MNKNQEIILAVDVSSNNLEAFISDGKSVLLRKEFQNNKSGCSSLIRTSQKYKVSRCALEATGGYEQLITEYFYKSKITVNILNPARVRRYAQGIGVLAKTDRIDSYVIERYAREVKPKSNFESSKSQLMLKRLVTRRNSLKNMIVAEKNRKRIADKVISKSIDRVTKLLEKEVVEIDKTINNILKTDIELQNKVNALTVQKGVGKITACCLVGLMPELGYLNNKQVASLSGLAPFSRDSGKMKGKRYIQAGRFLVRKSLYMPAWVSVMYDHKMKNIYNRLTDRGKPPKVAIVAVMRKMIITANMNMKLYYKNLKKTVDF

SEQ ID NO: 170489 - protein, 408 aa, unidentified
MADKIAGIDVHKKVLMVVVIDARTPESKPERRRFATMPSELRRLSTWLQERGVEEAVMESTAQYWRSVWLELEPHMCLHLAQAFSNRAPRGRKHDFKDAERLVRRLIAKELILSFVPDGEQRIWRNLTRMKLQLTRDRVRIQSQIECLLEEMRIKLSIVVSDLLGSSGLRILHALANGETDAKSLASLGDDRLKCTEERLVEALTGRSHPMHGQMLALQLERLRLLDEQIAKLNSLIAQAMKPHQDAVIRLAEVPGLGIDSAQQVIAEVGVTASTFSSAAEFTSWVGTCPGKEESAEENSSSRSAKGNKYMRRVLNQAAHAAARSKGTHFQAVFRRLLPRLGYQSAVWAIAHRLCRLVWKILHQGIRYIEQGIESEPKLLIYRAKYLAKQLRKFGYNVQITPANGTPA

SEQ ID NO: 170490 - protein, 306 aa, unidentified
MRFSKQVRTFSTMTHNLQALLAWLQQEEVTHVAMESTGILWKPIYNILEEGQFTLLVVNARHIKQVPGRKTDVKDCEWIAQLLQCGLLRGSFVPARWQRELRDLTRHRTKLTQEHTQVVNRLHCILQDANIKLSSVATDILGASGRDMIEALKRGEDDPKQLAELARGRLRGKIPQLRVALEGLVREHHRYLLGMLLHQLDFLEQNIEQISQRIEEVSPEDFRAAVRLVSTAHGVQQRVAENVLAETGIEMSQFPSAKHISSWAGVCPGNNESAGKRKSGKTAKGNRWLRGALGEAAWAVEKLFQD

SEQ ID NO: 170491 - protein, 411 aa, unidentified
MEAAVITAVGIDVSKSKSTVAVRRPGGEIVLRPFEVHHTNSDLKKLASALKKLGGDIRIVMEHTSTYWRPIALTLKEAGFFVSVVNAMLNHDFSDNTIRKLTTDRADALKIANYALTFWDTLPPFNNEEETRLLLKMQSRANERITATATALRNGLIALADQTFPGVNIAFDPNTKNANGHEKWVDFFLRYWHKDCVCQYSMEAFTASYRGWCKRKNYKFRTDTAHKIYLLAQEGVATLPKCESTKMLITQACKNLNAVCEAKQSTQLEMQRLAAMLPEYEVVMQMEGAGPITRPALMAEIGDVRRFKNKKALVAFAGIDAPPFQSGAFESKSRHVSKRGSPHLRRTIFIVSNIILTRSNPESAVYCFMDKKRSEGKHYYVYTVAGSAKFLRVYYARVTEFLRSQPSPDAC

SEQ ID NO: 170492 - protein, 346 aa, unidentified
MSEKDIAVLGIDLGKNICSLAGFDRAGNIVFKKRMRPSTIPKFTAKLSQCVVAMEACCGAHFLGRRIATQDHDVRLMSPEYVRPYVKAQKNDERDAEAIAEAATRPTMRFVELKSEAQLDMQTLHRARSRLVGMRTMLINQLRAVLIERGLTFPQGRRKLELALDELLADEVPGISERMVLLVKDMREEWRELDQRIAKLDREFLGFARSDEAAKRLTSVPGIGPLTATALIAAVGNASSFQRGRDLGAWLGLVPRQRTTGGKPRLLGISRRGNTYLRTLFIHCARAALPWLAKHETRLGLWLRTLLVRSHRNVVVVALANKLVRIAWATLHHKTPFRNEPGILVA

SEQ ID NO: 170493 - protein, 597 aa, unidentified
MSSSSPLASIGVGIDTARYGHRVSFLRPDRQPATKPLTVLENQQGYQDLRKRLEWLHQQHPQAHFHVRVDAAGQYAANLERFLRTLTLPMTISVGEPKRNKDYQKAHFPKRTTDDTESQAMARFAVVEQPQATLPLPPALALLREVAGRLQAQVKQTTQAVNRLHNLLARVFPELATITRDVATTWVLELLARYPTAPRIAQARLSSLEKIPFAPADKVKKLHEAAPQSVGSLQGELAETLVRELVARVRQAQAGEQKLRSLLRSAYAELPAAGYVHLSSIPGIGVATAAVLVAKIIDIGRFATPEDLVGYFGIFPRENTSGVDPLGQPLPPGTQHMSHKGNDLVRMYLWNAAFSAMQNNPAVRCLYRRLRAKGKRGDVALGHCMRKLLHLVFAVWKTGKPFDPNHYPWEQGAAAPEVDRPGAEGDAVGHKREPVPTEPVVTTASPRVEAVPSSVNANAAANPAPATPRPRVDFDFLRQQITLEQVLRHLGLFEDLRGRVPQLRGRCPLHEGDRRQRTLSIHLGKNAFHCFHADCQRQGNALDFWAAYHRLPLYEAALHLAETFRLYRNREEAPVNPPSKGPQPTGAKTAVITADGP

SEQ ID NO: 170494 - protein, 426 aa, unidentified
MHCTQNYKIDQVTEQTLVVGIDIAKRTHYACFVDDRGRVLRKSFPIFQSKEGFRQLYEAIQEAMQAFGKPQVIVAVEPTGHYWLNLAYFLEEHGVPLVMVNPAHVCRSKELDDNLPTKHDAKDALVIARLAKDGRFLVPRLLHEIEADLRVGSTLKEKLRKEQAAVKNAIVRWTDRYFPEFWTVFRDVGKTALSVLEWTPLPADMAGRSAEELIEVYRQSEGLKSPQKTKIRALINAAKDSIGVTEGATMARFEIAALVRRYRQLEGEIAALDAELKVLVQTTMEYQWLKTVDGLGDATIIDLLAEIGSFAHYRDPRQLVKLAGLTLKENSSGQRKGQKQISKRGRKRLRSVLFRAMIPLIRHNEAFRELHDYYTTRPVNPLTGKQSIVALCRKLLNVLFAICTKKQAFDAERMKQDVLSQVHRAA

SEQ ID NO: 170495 - protein, 341 aa, unidentified
MEYIGIDVHKNVSTVCVLDADGSVKNELIDIETTEEGYQALLEITETCSCTILIENSTRSHFVYHFLKGKGYDITVAHSADLKTIGNSKVKNDRIDAKKLAEYAMRRHHGETQFSVCNMTDPENMMLKSLCRLNASLIRTRADTVRRIREYVSMQNIMMPPGYVSVRSRRAIKFLDGLGDPVLANMMSFVRDLNARIEETEYGIEHIAVSDEDMALLMTIPGVGIKTAATVMTAIDCIGRFDSPDKLVSYFGADPVTDESAGKRKRGHVSKEGDAMVRYILRNAVIAHVYRFMDTDLSIFFHRLKGRMEHGKALMAAVRKMICIMWAMLTHRETFRSHPSS

SEQ ID NO: 170496 - protein, 414 aa, unidentified
MTETAYALYVGIDWGTATHQVAVLDTLRAPLGERVVAHDGAALQTFTEWLTLLAGGEPARVAVALEVPRGAVVDTLLERGFHVFALNPKQLDRFRDRYTVAGAKDDRRDAFVLATALATDRPAFRRLELEDPLIVELREWSRAEDELREEWGRLANRLREQLHRFYPQALALCPAADELWFWSLVGLAPTPAAARRLRRAAVVALLREHRIRRLTADQVLAALQTTPLRVAPGTVEAASAHAALLIPRLELVERQRRDCARRIERLLDALATTGEHQGHRDVTILRSLPGVGRVVAATMLAEASRLLAARDYHGLRTQAGVAPVTRQSGKRLLVGMRYACNPRLRNALYYWGFISVRYDAHSRHHYQRLRGRGHSHGRALRGVVDRLLTVLMAMLADQTTYDPARRQAVLAPAH

SEQ ID NO: 170497 - protein, 331 aa, unidentified
MTRLPNRANDAPLTIGVDVAKATLEVGFSDGESTLALNNDEAGHEMLIKRLAALRSNGATIGLIVLEATGGLELEVATTLQLAGYAVVVINPRQARDFARSMGYLAKSDHIDARVLAHLGQTLLQRDDLRKLVKPLPDERQRMLQAMVTRRRQLVGMRIAEQQRAGAPDKRMRRSLNIIMKALDREIARLDKEMQAFIGEHHAELAALLDSVKGVGKATISTLLAEVPELGELNGREISALVGVAPINRDSGTMRGKRTIFGGRAQVRKVLYMAALVASRYNPVIKAFYARLLGAGKPKKVALTACARKLLIILNAMVRTRQPFDIARHLA

SEQ ID NO: 170498 - protein, 355 aa, unidentified
MTHYVGLDVSMEVTSVCVLGGDGAIVWRGVCASRPEAMAAAVAKHAPDAARVVLESGPLSHWHWHGLHALGVPVVCIDARHAHGVLSARLNKTDANDAEGLAQLARSGWFVPVQVKSAHAHHDRTLLAARDRLVKIKRDIENQVRGSLKVFGLLIGKVASGGYEARVRELLAGAPALAAIIEPLLAVRRTLLRQYDVLHKQLLAVVKESGVCRLLMSHPGIGPVTSLAYRAGVDEPARFAKSSSVGAYFGLTSRRYQSGEVDWSGRISKCGDTMVRSLLYEAANVLLTRVKKSCALKTWGLKLKKRIGGRKAKVAVARRMAVILHRMWRDGTAFDWGCPESGATEVTDLSIAAPA

SEQ ID NO: 170499 - protein, 376 aa, unidentified
MERGSLMLNTTTFVGLDVHARSIKAVALDAMTGEVRSATFAYDAAAVAEWVGSLDPAAKCVYESGVTGFDLQKKLTALGVDCVVGAVSKMIKPSADRKRKNDRNDAEFLARMLSVGNVVEVWVPDDECEAARDLVRALDDAREDLKRCKQRLSKFLLRHGHAFSETTPSGRRKGNWTAAHWAWIRSIEFPEKADDEVLAYYVDAVRQATENKKRLEKLVEAEASKPRWKKRVDSLRCLKGVDAMTAADIVFEAGEFSRFKSARSFAAWLGLTPSEHSSGESARQGGITKAGNKHLRRVLVEAAWHYISASPHPKDLAKGQAPDPAARRHAAKGIRRLVKRREEMLGRGVHKNKANVATARELACWCWAVGRMVENG

SEQ ID NO: 170500 - protein, 452 aa, unidentified
MLWIGLFLLPHDGLEEAPTTALCEFVDQLDTVRRFISNEVTRAKYPVGPNSIEIFLSEVSHMICVGIDVSKNKHDCFIMDSEGHVLRDVFPVTNDQIGFNHLYQTLCSVVPDLSKVKVGLEATGHYSYNLLGFLLDKGLTTYVLNPLHVNLFRKSTSLRRTKTDRVDARTIAAMMLSGIALQPYSVTSYHNEQLKSLTRYRFDKVRERGKLKQSVSRLVTILFPELEKLVPSLHMASVYALLLEMPSAKQIAGCHLTHLTHLLDQSSRGHYKHFAAETIREAARHSIGISMPAKSLELQHTIRLIRELDSEIAEIEREIKRLMNEIDPPLLGIPGMGFRMAAMILAEIGDISRFDSPDKLLAFSGFSPSTYQSGKTDNAYAHMEKRGSQYLRFALYQAAKYVSHWDPLFAAYLEKKRSEGKHYNVALSHVVKKLVRLIYALQTSGKAYCPIT

SEQ ID NO: 170501 - protein, 349 aa, unidentified
MKFYTKQHRFYCGVDLHADAMYLCILDATGEIVLHKNIATRPKDFLKQIKPYRDGLVVGCECMITWYWLADLCADEEIDFVLGHALYMRAIHGGKAKNDKIDSHKIAVLLRGGSFPLAYVYPKEMRATRDLLRRRNHLARKRAELFSHIQNTATQYNLPEPLGRIAKPSDRGDLLTKFRDPIVRRMVEIDLLTIEHYEELLGTLERQLEKVAEHHDPISLALLKSIQGVGRILGMVILYEIENIARFPREQDFASYCRLVKPAKESNGKSYGHSGKKIGNAHLRWAFGEAVVLMLKGNKPAQAVLQRLASKHGKGKALAILSHRLGRAVYYMLKNQEPFDQDRFLRLGA

SEQ ID NO: 170502 - protein, 377 aa, unidentified
MRNVRFIGLDVHAETIAVAVAEARGDVRSLGTIPNRPESAARLVKKLGKPEQLRACYEAGPTGYVLYWQLSELGVKCEVVAPTLIPVKVGDRVKTDRRDAEKLARCYRGGDLTAVWVPDAAHEALRDLVRARLAGKRDQLRARNRLGKFLLRHGRRAPEGTKAWTAKHLLWVKTQRFEQAAQQMTLEDYRHEVEHAAERIARLERSIDAAVEKLPVKMRAVVEALQSLRGVAQVSAVSIMAELGEVSRFARARQLMGYSGAVPWEDSSGQRVHRGSISKAGNAHLRRIVVEAAWSYRHRPAIGHSLKVRQRHCSARVCELAWKAQHRLHQRYARLTARGKSKQHAVTAVARELLGFIWAIGVEAERSHDTKEIKHAA

SEQ ID NO: 170503 - protein, 416 aa, unidentified
MNAVGIDVSSRKSTVAVLRPLGEVVCLPFDVTHDIAGLASLAEKLKAIDGETRVVMEHTGRYYEAVAKALHEAGFFVCAVNPLLIKEYGANSLRRVKTDKADAIKIARYALDNWADLRDFTPMDAIRYDLKTLNRQFQLASKQRTASANNLIALLEQSFPGIRKCFDSPVRSDGTQKWVDFAHSFWHVDCVRKQPFPAFCERYRKWCKRHAYLFKLSNAEEVYALAKRAVVLTPKSKVVKVLVQEAANQLISISRSVEVYRAEMDRLAAMLPEYPVVMAMYGVGKSYGPQLMAEIGDVRRFERKQALVAFAGIDPMPNQSGDKNVRSNKSSKRGSPYLRKTLFNVIRTYLQCAPQDEPVFQFLNRKRAEGKPFYVYMLAAANKFLRRYYAKLRDYFASLDTLQPVAPIPTILKATL

SEQ ID NO: 170504 - protein, 343 aa, unidentified
MQTVTTIGLDIAKSVFQVHGVDAEGNVLIRRKLKRRSVLAFFQKLSPCLVGIEACATSHHWSRQLKRLGHTVRLMPPAYVKPYVKRQKNDAADAEAICEAVTRANMRFVETKTPEQQSCLMLHRTRQLFIRQQTSVINAIRAHMAEFGIVAPVGRKGVEQLLAIVTDASDQCVPEVARACLIALAAQLRMLKAQILEFDRRIMAWHRSNETSRRLDAVPGIGPALATALVASVADPKAFRSGRNFSAWIGLVPKQHSSGGKDRLGNITKQGDRYLRSLFTAGALAVIRYAKINGTQHRPWLAALLARRPTKVAAIALANKIARMAWAMMAKGERYKEPVALAA

SEQ ID NO: 170505 - protein, 389 aa, unidentified
MPYFVGVDVSKWKHDVFIMDGLGEAIKGPFEVKNDSDGFSALLESLKPLGDKASVSICMESTGHYHKDLSGFLKLHGYIPSIVNPYLISRFAKGVTLRKEKNDRYDSIAIARYAFERKPTPSLAGSENLIKLRRLTRVRDKLVRERSDKTVIITDCLDEIFPEYAKIAKVDSALSLALLERCPTAKEISSMSVSFREKLRKVARRASSLKIQNIMDAAKKTVGRPDESLSAIIASQIPIFKAVDNSIDTIENEIKAIMAGLDEHVSSIPGIGINSAAAILGEYGGIKRFSSPSKMLSFAGLEPSHYQSGQMDAHGKMVKHGSPHLRYVLMNVAVTVKHYSPIFAAYYLKKREAEGKKRRVALSHVAKKLIRVIWKLETSGCDYEEANMR

SEQ ID NO: 170506 - protein, 343 aa, unidentified
MQIRSVGIDLGKTTFHLVALGASGKVLVKKKFSQKQLLAFTANMQASLIGLEACSGAHFLGRALKQQGHDVRLIAAQFVKPFVKSNKNDFVDAEAIAEAVERKNMRFVPIKTDDQLDLQAMHRIRDRLVSRRTAVINQIRAFLLERGMVFAQKPAKLKAAMADILENAENTLTPMMRNMIGILWNEWKTIEQQIDELTDRLEQIAASDAGCCRILQIPGIGPIVATAIVAAIGNGAAFRKGRDFAAWLGLVPRQYSTGGKAKLLGISKRGNTYLRKVLIHGARAAAMRIKRDRFPIGAWMNALEARAPRNVLVVAMANKLARIAWAVLSSGEDYRQAVSIAAA

SEQ ID NO: 170507 - protein, 400 aa, unidentified
MNPVVGLDVAKGESQVQAFLDKSKPFGKSYSMKHTREDLDRFIGFLHEIEVMTGQMPKVILESTGHYHSPVIQCLEENEVLYILLNPIISYQAKRSSLRKVKTDAIDAYQLCMLYYKEDFEPHKKRGIQLLNLRNLSRQQEIVTNMYVEAKLQFHTILDQVFPEYRKVFGDLYSKVSLLMLKKYPTSEDVITAGESKVAECVMEFCPRRSSQWALEKAKKLMDSAYRNPFQKVVYHSHLINLQMYIEMLFQYQGHLSELEIRIVTLANELEDYKIVQSIPGIGEKIAATIISEIGEIERFNHPKKLVAFAGVDPSVHSSGKFTATTNRITKRGSSRLRHALYLAVLCGIRSSRNNKRKEFYDKKKSEGKPAKVAIVACINKLLHWIYALLNSKETFQDIA

SEQ ID NO: 170508 - protein, 544 aa, unidentified
MRLERGVNAPRRPPKTKAFSLFPDTVSKVIHPTTRRTLRSSPQESVNNFAAPVMKSSEKDLRSRHSRHGRIALGGSRSSVSYPARIQRSLPARPAASVLTSERTIACEAPGIRSTHDGATMQRRKIKRMKSWQDLTHYAGFDWAKDHHAVLILNQQGEIVADFEFEHSLQGWNSFAEKTSAWPNLAVAIETSQGAAVDQLLQKDYTVYPVHPVAAQSYRERKAPSGTKTDHLDAWALADALRVDGHGWKTLQPMDPMTQQLRLLCRDEVVLIEQRTALVNQLQQALLEYYPAALEAFDDWTDSFTWEFLLAFPTPQALVQAGKRRWEKFLHTHKLWRPETAEKRLKLFAQADQFKASDPIVRAKSQLAVSLAKLLCTLGQQLKLYRKQIEALFQDHPDHDLFGSLPGAKKMLAPRLLASVGGDPDRYGSHEVLQCIAGTAPISYQSGKLNKVRVRWACDKFMRYTVHLWADCFRKASAWGQTYYQQKRQEGMTHACALRCLGQRLLKILYRMLVTKKPYDAEFHAQNQQKHGSWVLSLVKKSAT

SEQ ID NO: 170509 - protein, 358 aa, unidentified
MRKKNNELDFTNQIIFIGIDVHKRQWSITINISGQQIKTFSMNPNPEELNKYLRKNYPGGKYRSVYEAGFSGYWIDRQLQLLGIENIVVNPGDVPTSNKEKSRKTDRIDSRKLARELSGENLTCIYIPTKEQEAARTLSRLRIQLTKDQTRVKNRIKSLLNFIGVHLPENIEGKHWSGMFIKYLHSLDFDQQELKQTLEQQLKQLSALREQLSDVLKLLRNMINQNEKKQKTIAQLMTVPGIGFITAVTLYTEIMEINRFRSFDHLSSYVGLAPSIYSSGQKEMVLGLSQRQNTNLRNILIEAAWIASRKDPVLTMTFGRLIKRMKKQAAIIRISKKLLRRIMHVWKQKEDYVFAVVQ

SEQ ID NO: 170510 - protein, 353 aa, unidentified
MIIIGVDFHPEFQQIALVDTDSGECQEKRLAHREEAENYYRALAGQKVRVGMEASGHARWFERLLAELQFELWMGNAAEIQSKRVRKQKTDRQDAQLILKLMLKDDFPRIWVPSWENRDLRQLLWHRHRMVQARTRIMNQLQALALNEGLRCKKRPWREHGRQQLESFPLAFWGSRRRRDLLELLDRVNPTIAELSQTIEQEAEKQGDAQRLMTHPGVGPLTALGFVLIIGKAERFQCGKQVASYLGLVPLEKSSGNRRRLGHITKQGSSMLRFLLVEAAQVTVRSLPEWRRKYIRLTMRRGRKIAKVAMARRLAVALYWMWRNKWNYEQSKSSVRTRASSEQAMVCSRTPSK

SEQ ID NO: 170511 - protein, 373 aa, unidentified
MLGSEGWTLAVQRHQGAKWWRAALHGETGGSEMKTNRNVVGVDTAKRVFQLHWVNMETGEIVDVKLTRAKFMEHFANRSPCVVAMEACGGTQHWARRLRELGHDPWLLPAKAVRPFVAGNKNDAHDARAIWTAAQQPGVKTAAIKSEAQQAVLAMHRMRQQLVKFRTAQINGLRGLLTEYGEVMPRNRAGINRGIAAALEQVVERLPAMVVETLREQWARIIQLDREIGEIESRIKLWHRSSRASQRVAEIPGVGVLTATAVVSAMGDPAAFKSGREFAAWLGLVPRHKGTGGRVRLLGISKRGDTYLRTLLIHGARAVLSRAKVPPEWVVRLAARRPPNVVTVALANKTARTIWALLAHNRAYQANFASQPT

SEQ ID NO: 170512 - protein, 338 aa, unidentified
MKTYAGIDLHSSNNFIGVIDAKDKRLYSKRHDNRIEDVLKVLGKFKASLQGVVVESTYNWYWLVDGLMDQGYKVHLANPNAIQSYDGLKHTDDKWDSFWLAHMLRLGILPVGYIYPKQQRSVRDLLRRRLMFVRQRTSQILSLQSMITRNRGLNFSGAQIKRFRDEFIDKLFSDRHLVFTAKRNMETIRFLDRIVSEIEIEVLSQIKLKKEFIKLLTTPGIGNILGLTIMLEVGNIGRFPKAGNYSSYSRCVESKKTSNGKKKGENNKKNGNRYLAWAYVEAANHAIRCCPKAQKFFQRKMAKSERVLATKALANKLTKATYFIMRDQVAFDEDKLFQ

SEQ ID NO: 170513 - protein, 416 aa, unidentified
MRRVVMDAIYPCVAGLDVHQKVIVACRRRLIGDGQAESEVEKFGTSTRELKRLGRWLQEWGVKQVAMESTGVLWQPVWNVLCDEFELMLINAQHLKKVPGRKTDVTDAEWIGQCLQCGLLRGSFVPNEQIRQWRDLTRQRTKLLDQRSSIVNRIHKTLEGCNIKLSAVASDVMGVSGRAMLKAMSEGEQDAGKLADLARGRLKSKYDELVESLEGKVSEHHQWLLKHMLKQVEFLDEEIAAYDSRIEELMLPFEEALERLDTIDGVGRRTAEVMLAEIGPEMSQFPDDEAVSSWAGMCPGNNESAGKRKSGRTSKGNKWLRRALVEAAYAASRKKDSYLAAQFARLARGGKKRAAVGVGHTILVAAYHMLKEEVDYKDLGGDYFQKRNEEKTTRRLVMQLEKFGYEVELRRLKAAA

SEQ ID NO: 170514 - protein, 320 aa, unidentified
MKWLGIDIAKRKFDLAVLNNGKIRSKVFENTLEGYEALLDWLATQGYAREELHACMEATSVYYEKLATFLHDAGIRVSVVNPLQIKAFGESLLTRQKTDRADAVLIARFAEQQSPMLWQPASCEIRELQRLRARLEAVQQMSVQEQNRKHEAEGEALESVLRILTQLKAEEEKLRQMIRDHIDQNPNLREQHALLTSIPGVGDQVSSHFMAWLRPERFDDARQAVAFVGLSPRHRESGDSVRGKSRLCKVGHARLRKILYFPAMSAIRYNTAAKALAERLTASGKSGKVVIGAVMRKMIHWMFGVLKSGQAFDPALALAK

SEQ ID NO: 170515 - protein, 334 aa, unidentified
MHKSLGHYKGFVGVDVSEARLAICLLPDGARAEFSRDRRGIARLLAWLASQERLLVVVEATGGLERGLTVALEQAGIAVAVVNPRQTRDFARAAGLLAKTDRLDAYALALYGERLRPVPRPPRAAADQALAALVMRRRQLAQLAEAERSRARRSEDRVVVASIEALLAWLRTALAELEEQIATRLAANPLWQERATLLASVPGVGTVTVSTLLALLPELGQLDRRAIAAWRSEATTEVAPGSQPRVGVAPFARDSGLMKGRRTIWGGRAPVRAVLSMAALVAVRHNPILRAFYQRLVAAGKAKKLALTAAMRKLLVILNAMLRDHQPWRAPQSA

SEQ ID NO: 170516 - protein, 334 aa, unidentified
MGIDLHRRRTVIVRTTEAGEVLEAVRIVNDVQRLASVMARAGDCPEVVLEATYGWYWAVDALQAGGANVHLAHPLGVKAFEYRRVKNDVRDAQDLADLLRMGRLPEAWIAPPPTRELRELVRHRAKLVGLRSHCKAEVHAVLAKCGVQVLMSDLFGLAGTELLDRLELPAPYAARIASLRRLMDDLDFEINLFAGIIRGRMAHEPGYTAVQKIPGIGPTLAAVLVAEIGDITRFASASKLTCWAGLTPKHHESDTHVRRGRITKQGSRLVRWAAIESVKTISKTSEVGVLRERVADRRGRNIASVAAGRRQLELVFYALRDGHVRALEHLPRVA

SEQ ID NO: 170517 - protein, 342 aa, unidentified
MQSTKATELYAGADLHGNNVFLSVCDADGNAQFKRRVKTNLTAVNAALDPYWSRIKAMGVESTFNWYWLVDGLREQNRDVRLGNPAKMKQYKGLKHADDASDARWLAELVRLDIFPDSYIYPKDVRSVRDALRRRQLFVRRRTQVLLSLQSLLERYGLNAPGSRAIQQWTEAEIVATGLDPFVQLQLRTLLEAVHCSDRLAKQIETEVLKFVEPNESFDRVQIVPGIGKTLGMCIVLESGEFSRFPNAGCYASYCRAVKSERSSNSKKKGENNKRNGNPYLAWAFIEAASFAPRYYPEIQSWYDRKKKKRNTIVAKKALASKLSKAVWHVMNGEEFKMEMMF

SEQ ID NO: 170518 - protein, 309 aa, unidentified
MTEPSTFVGCDVGKTSIVVFDSRTGKTRTVANQPAMLAELAASIDPCALVICEATGGYEAALLDAMVAAGRAVHRADARKVKAFIRSFGTLGKTDAIDAGALARYGEERHQRLTRWQPAERHRLELTALVMIRQDMVASRTAWSNRRNAPRAMTMLIDPICQTLDVQIRAVEAAIETLLGSCEPLRASIATLRTIKGLGPVTAPALIALMPELGSLDRKQAAALAGLAPHPNQSGNRDGYRRVRGGRSDVKRLLFIPALTAARYDPKLSAFYQRLVDSGKKRIVALVAVMRKIVIIANARLRSQSPQLS

SEQ ID NO: 170519 - protein, 468 aa, unidentified
MKLEIKAIQLPACGLDVHKDFIEACVFDKDGDGVLKTFSTMRGALFALRDWLLSLKCFNVLMESTSVFWIPIYEILEVVSGMDVGVGNARHMKNFPGRAKTDKSDAAWIAKLSAIGHIQKSFVVGRKFRELREYTRYHKKLVEDRARHINRIEKLLQMNGFKLSSVLTDITGVSALRLLKKLRDNGRVTLAEVKAALDPRCKKTPEEIESAINGEMKLTSRALLGMQLKKLEALGNDIAEVYDEMVRLAEPYESTLNIIDSIPGIGPLSAIYILAEIGNDLSSFNSVKHFTAWAGVAPKDDESAGKMKSSKTKKANKYIKTVLIECSWSATKMRGVRVSNWYWRSVGRLGKKKAITGVARRLLSYVYTLLKNGELYDKSLDEAEAKKIEAQKLESARKLVGQSESSNEEEYSRKPAKAASEKPARSSRKKTHDEVAEADTPPSPQQPKKRGRPRKVKTPPDDPSGTNK

SEQ ID NO: 170520 - protein, 363 aa, unidentified
MADSTTKTVGVDLAKQAFAICETNHSGQVIRRLELRRDAFCHYLSQLPPASDVAMEACSGAHHWARLCQRHGLTPKLIAAQFVTPFRKSARNKNDHNDAEAIATAARQGNMRFVAVKDVDQQARLCWHRVREGYKVESLAISNRLRGLLAEFGLAIAQSDSALQRALADDRLRAQLPSTLLPLIDDLHTHWQQVKQRIAAIDRQVAAHAKADARSVRAQQLVGVGPLTADALVASIGNAHEFTNGRQLAAWLGLTPTQHSSGGKAHLGGISCRGDNYLRTLLIQGARSCLQQAKLANPQTATAEQIWIKSLASRLPFGKVLVAIANKHARQLWAMLRRGEDYDSEAWLQHPMVQRSRKKAIAA

SEQ ID NO: 170521 - protein, 316 aa, unidentified
MLPHDPSSRHAFLIGIDVGKESLAVFIAGDAQSLTIPNQTRAIRALIRRYPQASFALEATGGYEMAFITAAASAGNTVFRVNARRVRAFMESRGILAKTDAIDARAIADYARANLDTLQPFALPDKASSRLRQFTRRRDELIAMRTQESNRRGAPDNKALQASINAVLVCLNAQIARMDAAIAAVVAACPELTRKRAVMTQVKGIGDGTAAMLLGALPELGTLSGKQIAALAGLAPHPRDSGKTRGYRRTGRGRADVRRALFMAALSAARYHPTIKIFYERLCKNGKKPMVALVAAARKLLVILNAKLRDATPKPA

SEQ ID NO: 170522 - protein, 409 aa, unidentified
MEVVHARCAGLDVHKKSVFACVIWCEADGEKQQEKRSFGTMTADLLNLVDWLSEHVVTHVVMESTGVYWRPVWAILDGQFELMLVNPHHVKAIPGRKTDAKDCEWIAELLQHGLLRGSFVPPTEIQDLRDLTRYRVELTQAQNRVTNRIQKVLEQANIKLSSVASNALGVSGQQMIEAIISGEEDPERLADLAQRRLRQRIPELQLALEGRVRDHHRFLLREFLEEWRALAARIRRIEEEIDRRMAPFEEAATLWQSIPGMDHLTACSLVAELGVNMAQFPSAQHLASWAGLCPGNNESAGKRMSGTTRDGNKWLRRTLCQAAWAVTRKKDCYLSAQFRRLAARRGVKRAVMAVAHTMLIIAYTMLKTGRNYLDLGGNYLERINRDQLQRYFVKRLQKLGLTVTVAPAV

SEQ ID NO: 170523 - protein, 387 aa, unidentified
MAKVNDLSRSLAALEQDTTLIAVVELSAKRWLVSATVPGVERQPLKKVDPDAAALFGMIERWRGEAKRAGRPIARVVVAYEAGRDGFWLARWLLARGVEAHVIHSASVAVSRERKRAKTDRLDAAMLMRVVLGWLRGERGHCSMVAIPSMAEEDARRPSRERQILIAERARIGNRIKGTLIRFGIRGFNPLLRRAAQRLAGLRTAEGGELPPRTLEELERELARQAVVREQIAAIEQARLQRLERAPDSGPHAMVRLLARVLGIGIETADMLVREILSRNLRDRRAVARYAGLTGSPDESGSKRREKGLTRAGNARVRRGLIQLAWRFLMFQKTSALSQWYRARTQGANPARRKSMIVALARKLLIALWRLVTTGEVPQGVVLRPAA

SEQ ID NO: 170524 - protein, 356 aa, unidentified
MIAMKYYTSTTEFNCGIDLHARQMYICVMDRSGKKLVHTNIRNNDFAYFLKLVAPYRHDLTVCAECMFGWYWLADACQAANIHFVLAHALYLKAIHGGKNKNDRIDSEKITHLLRTNLIPPGYVYPAAKRPLRALLRQRLLYVWNRSELLSRIQSHQLAHNRPTTRQTLYNRASWSEQLLTAEPDPVRQLALQNDLALIGHYDNQLASLEKELLQLTKQTAGRDFTLLKTTPGIGDYLGLTILHEIGDIARFPSVKDFLSYCRLVKGTVASAGKIKGLRGAKLGNPYLRWAFGEAAIIAKRDALLGPLAQRLETRLNNKFKANTVLAIKLARAVYFMLKTKTVFDPERLVAALSNN

SEQ ID NO: 170525 - protein, 322 aa, unidentified
MSQPNPLCVGIDVSKAFLDIAANCDIAQFTTSNDADGFDAIITELKKYSVVLVLMEATGGLESSVVLSLQAEGFDVAVINPRQAKDFARAMEYLAKTDRIDARVLAQMAEVINRYPDRQRFIRDIPDAERQILTAMVVRRHQLTAMIVAERYCLYPSHPQNRKSINIVLKTLVDEMARIDNEMAAHVRRHFHDLSELFISIKDVGANAVAVMLAEVPELGKLSRREISTLVGVAPVNRDSGAMRGRRTIFGGRADVRSALYMAALVTARHNPVISAFYQRLVHAGKAKKVALVACMRKLLTIMNAMLRKDEGWDESYHLIAS

SEQ ID NO: 170526 - protein, 379 aa, unidentified
MNATTIGVDLAKHVFAACEGDSRGHDARSSVMKRGEFLKWLCTLPAGTVVAMEACSEAHSWGRTMRALGLEPRLIAAEFVRPYRKNQRVKNDARDAEAVLTALHAPGMRFVAVKTEEQQQRLAWHRLREGWKAERTALFNRIRGLLTEFGIVVEVGASKIRRKLAELEGDDAYPQSIRLMTQSVREQVAVLDQRLAECERQIARQSRDDPVVARLRSRPGIGPLTADALVATVGDARQYKNGRQFAASLGITPRQHGSGGKTHLGAITRRGDSYLRTLLVQGARCVLLAALRLSKNSPDTLNRLQLWMVKLNDRVGYHKAGVAIANKHARQVWAMLARGEAYNPDAYKDWEAAHAAVRPGDMREASDHHLSTAALAAGV

SEQ ID NO: 170527 - protein, 343 aa, unidentified
MSIVGGLDIHRKQITFDYVDTETGEVRRGQICPADRAHLAKWLARFAGQDAHFALEGCTGWRYVAEEIIAAGLTPHLADPAEAAHLRGPKRRAKTDRADARHQRVLLEQGRLPECWVPPSRVLECRALLETYLDLREQRTGWVQRIHAVLFHHGAPHIAGQQLGTAEGAAALRAAAAHCSPAGQLQLAIAAQMLLVYDERLHQVRRQLLDRARHTRGAAELTARLYGVGPVTGLALTCWLGGAGRFSSSRKAVRFAGLDITVYSSDGKRSPGHLSRQGPEVLRWCVYEAGKAHARASAPDHAYYAQVKERIDGKRAALSEARKIIRQAAHILAELGDDALTAC

SEQ ID NO: 170528 - protein, 326 aa, unidentified
MKNISDVVGIDVSKLKIDVCIYHAGKHQSFTNDNKGFVKMYEWIKSVGLLNDIFICFENTGYYSLSLAVFLEQNSLTFCMIAPIEIRRSLGLVRGKNDIIDAYQIARYAWLHRDELESTPLAGRKVLSLTQLLKVRDQLVKQKNAFENMLHAFEQTKGLSDKTAITLIKQQIGHIEKQVKKVEVAIEQLLNEQEFITNYTLLRTIKGVGLILAAQLIAHTNNFQSFKQWRQFACYCGLAPFDYQSGSSIRGKTKVHPIADKKIKSLLTMAAISAIQYEPQLKAYYKRKVLAGKAKMSALNAVKCKLVARAFSVIKRQTPYVLLQAA

SEQ ID NO: 170529 - protein, 448 aa, unidentified
MFIMHYKRLLTFIDGVSSYLSVGLDVGADFTWMSIALPNGSFVGKPFKIIHSDSRSRDLAVTKIKEAQETYSLKSRCFLESTGIYHIPLLCFLRDKGFDCSVINPIITKNSTNINIRKLHNDKFDSKKAALVGLNVSLKTSILPDDSVVDLRNLVRDYYYFKDLQSAVALKLTAELKVSFPAYAKTFSKVTTQSSLKLLSSYPLPADMLAASKEDIVDIIRSTARFGEAYALRKYDAIIAAAQDAAVFGRALPSNAVRIRLYIDTYQEYQKHLDALLKALHETVEKLQDTLIYDQICLLQSLRGIGFLSAVVLIAEMGDFKLFSSPKKLYAYFGLDPAVKQSGKLNGDKVHMSKRGSSLARRVLHMAALNNVKVDKGSGTPVNPVIYDYYTRKCSGKKKPVAMGAVMHKICNIIFAMLRDNKPFEIITPEEHCRRFATEHPDKIRKAA

SEQ ID NO: 170530 - protein, 346 aa, unidentified
MMHVGLDLSRRRLEVQLVNEQGEPVERLAAVPTVDGLRDLAARVARHQESVRAVIESMTGARFIHDQLELLGWDVAIADAVKAKGLAPLTCKTDRIDAWVLAQLSRLNLVPEIWLPDPAIRADRERARWRLHLVRHRTALKNRIHQTLISFGHACPVSDLFGARGRELLRGLALPEPWQGAVIASLQLIDNLDRQIDACEAELHSLGEEQPYVSLLRTVPGIGWVLAYTIAGEIGDISRFASPAKLVSYTGLCPSVRQSGDRDYRGPLTKQGPKYLRWALIEAAQHAAMTSRYRERYQTIKRRLGRQRGTNVATVAVARELAKAIWYMLIRNQPFAPRGANVSVAA

SEQ ID NO: 170531 - protein, 385 aa, unidentified
MDRTPCSTPSGGTLHCALELSKNSWLLAIQFPGREQPSLYAIEGGDTEKLMAKLSAARDCCAKVSGALPGITLCYELGYDAFWLARFLKARGIECLVIDPGSVQVNRRGRRVKTDRVDVKVLLRTLIAWCRGERHVWSLVRIPSVDEEDFRRSHRERSRMIRERTAHINRIKGLLFAQGIRGIKVKTQYKTLAVDKLLTGDGHRLPPRLASEIAREIQRLAMVQEQIAEIERERDTAQTPCEATERKRQLLLQLKSIGPAISALLSREVYYRQFANRRQVGSFLGLTPSPYNSGEEERCQGISRAGSGHVRAIMIETAWLWTRHQPRSALTRWFVQRTAGQSTRMRKIMIVAVARKLAIALWRYVEQGLVPQGAILNPPTTAKAR

SEQ ID NO: 170532 - protein, 416 aa, unidentified
MEVIYPRCGAIDVHKKMVVAGVRLAEESKVTTDIRTFATTTKGLLELSDWLSAYGVTDVVMEATGVYWKPVWQVLSAREEFTLALANAAHVKNLPGRKSDMSDTGWLMELHAHGLIRPSFVPDLATQEMRTLMRSRKQLVHEQTRHVQRIHKALEEANIKLDSLLSDILGKSGRAILAALIAGEDDPVRLAALAHRGVKASQEQLRDALRGRVSEHHRFLLRLHLEQIDRLDAAIAAIDQRVEANLGSFRDAVEVVRSAPGIRDISAQAIVAEIGTDMSRFPTAGHLLSWAGLCPRQDESAGKRRSTRLRHGNPWLKTALIQCAWAAKNKQGSYLQAQFLRLRGRRGPQKAICAVAASLLTAIYHMLKNGTFYTDLGPDHFHNRSRKNHAQRLVRQLERLGFAVELNPTQVEPIPA

SEQ ID NO: 170533 - protein, 423 aa, unidentified
MMKLKYPICCGLDVHKNVIVATIVITNRDGVSEYRQKSFSTINSDIQKFHNWLIENNCYHVCMESTGKYWIPIFNYLEKDIEVCLTHPKYVKAIKGKKTDKKDSKWIADLYKFDLVRCSFIPPKDFRQLRELARYRFKLVCMKSSEKNRIQNCMTVSNVGIASVLSDPFGKTATEIMSYLLEHTADSIDEKAVRKLIKKGAKAKSDEIIEAIRGCNIETDQAKKLELALGHLEYLDGMITQTEVELYVRIKPYYEFVEFVSTMPGMTELSSTIVLAETGVDMNIFDDARHLCSWCGLSPSNNESAGKKKSVRIAKAGAYLKPMMVQCALAAIKNKKQPYFAIKYGRIKKRRGHKKAIIAIARMMMVCIYHMVSEKKPFTPTDYEELMDPQNHVESVVLNENNVFAYLESLGYDSSKLVKRNDN

SEQ ID NO: 170534 - protein, 369 aa, unidentified
MPHVTSIGLDVHARSVAAAAFNPFTGEVVHRDFGTDAAEIAEWALGFEEPRACYESGPTGFHMARELRALGLDCAVAAVSKMQRPAADARRKNDRRDAEFIARMLATHNIVEVPLPDMAVEAARDLDRALDDATRELRRSRQRLNMFLIRLGHVWDERNADGARKKAWTRAHWRWVSEIRLEGPQRDALEYYVTAARCAESDRRQLERRVVALAGTDRWRATVEALSCIKGVDTLTAFRLAAEAGSFSRFRSAPAFASWCGLIPSEHSSGESERRGGITKAGNALARTALIESAWHYSTCSPRPKAPAPGTDVPPAIRSRADDCTARLHRRREALAAAGKSACKANAAVARELACWVWEIGCRSEGTVL

SEQ ID NO: 170535 - protein, 402 aa, unidentified
MNTEDIEVFIGIDVGKSEHWATALSREGRKVFDKALPNDEERLRALYKKLVDHGHLLVVVDQPATIGALAVAVAQDMGITVGYLPGLSMRRIADLTPGSAKTDAKDAAVIAGAARTMPHTLRAISTSDEDAAALSMLTGFDLDLARQVNQTANRIRGLYTQIHPTLEQVLGPWLEHDAVLEVIAAWPTPADLKRAGKARIDARLKKHGCRRHATWAGQIVSALEHQSVVVAGTDAAAVVLPHLARQLISLHAQRADVAAQVEALVEAHPLYEVLISMPGIGVRTAAVFLAETLGKTFDTGAQLASYAGLAPVTRRSGSSIRGEHVSHGGNKRLKRAMFLSAFASLRSDPVSRAYYQRKRDQGKRHNQAVLALAHRRILTLHAMIRDGALYDPQPATKLPAAA

SEQ ID NO: 170536 - protein, 389 aa, unidentified
MPTIADRHDAPTAIQTNLAAIFISLELSRSIWLITSLSPGSAEKMSKHSVRAGDVAALLARVSELKRKASERTGKSFPIVVIQEAGLDGFWLHRVLQSEGIESHVVDPASIATARRRRRAKTDRIDGEALLRALLAFKRGEPRVCAMVKAPTPEEEDRRRLSRERKVLVADRVKHVNRVKGLLFSQGVSGYEPLRRDRRQRLDNLTTGDGRSLPMHLKNQISRELDRLELLLDQIKRAEAERDALLAAQQAAAPAPTGRMLLEFRGIGAEFAASLWLEALFRHFDNRRQLASYAGLAPTPWQSGSVDREQGVSKAGNPRLRTTLIQLAWLWLRHQRQSALALWFKERVNRNGGRLKKTTIVALARKLLVALWKYVTAGVVIEGAVMKDA

SEQ ID NO: 170537 - protein, 341 aa, unidentified
MKNLFIGVDFSKEKVDVAIIFADGLTETAARVFNEFKTTVSGYKQLVKWVEQNSYGIDSSLWLFCGENTGDYSKGLCNFLYGKGYDMWLENAKSIKDASGLRRLKSDRADASMIAEYAMRNYDKAIMYEPLSESLAQLRELFLYRQMVVRHRCSFQVRRGEKRLTMEKSPIKTMISQSGRHIVSELNKEVEKIDKRIAELIKSDEELTEVFTIVTSVPGIGTQNAVCLMVYTDNFRRFNYDSRKIACYYGIAPFGKDSGTSVHSDPHVHYMANRQIKAMLTQAARAAVNFNPVMARYYMRLVERGKKKQVALNNVKNKLIHLVTAMVRNRQLFSPEYKISA

SEQ ID NO: 170538 - protein, 408 aa, unidentified
MQKKENQTYRFLLRLDSGAGIDVHKEFFQVAVCREKSPPVEKQFGTFTKDLLALRDFLIDHQIKDVVMESTGVYWMPLYHVLTEAGINVRVANPLKVKQIPMEKTDKKDAVWLGKLLMNGMVEPSFIPGEQQQAMRSFTRLRTKYTQQTTRVKNQVVKVLETCNFKIRSIVSDISTKTAQKLVEAISKGETNTGKLIELCHKSVRKRQGDERLALALEGRLTNKSQQLLIMLLKDLAYFEGQKKEADAQVKKLMNEQQQKTIDLLDKVEGTSVEQAEIVMAEIGAGIASFPHADKAAKYGGLTSGQATSAENKKPVRAVPGNKHLRTVTVQIAWSAIKVKDGYWAAEYQTLKKRIGAKKAILATARKIFKAMYKILTTGYKYEKWDAKRYYDNRTKTMAYKAALQKAV

SEQ ID NO: 170539 - protein, 342 aa, unidentified
MQITSIGIDLGKTTFHLVALEERGKVVIKQKFSRKQLFAYTANLPSSLIGIEACSGAHFMGAALRDQGHDVRLIPAQFVKPFLKSNKNDFLDAEAIAEAVARENMRFVPIKTDDQLDLQALHRVRDRLVHRRTALINQIRGFLLERGITFAKGPANLRHQIPAILEDAEQNLTPRLRRLLDHLWQEWKTLNSDIECVSDEIDAIAGQDAACQRLRQIPGVGPLVATATVAAIGNGAAFHRGREFAAWLGLVPRQHSTGGKAQLLGISKRGNVYLRRMFIHGARAVLLCVKHDTGRLGQWMRQLELRAPRNKVIVAVANKLARIVWAVLSSGNEYRTVPVAAA

SEQ ID NO: 170540 - protein, 357 aa, unidentified
MKVTTIGIDLAKDVFGLHGVDGQGRVAFKKRLVRRRLLEFMSQLPPCLVGLEACSSAHYWARKIERLGHRVKLMSPRFVKPYRKSDKNDANDAEAICEAVTRASMRFVPIKSEAQHEVQALHRVREQLLKSRTALVNQVRGLLAEHGIVAPLGIARARRLLLEILADPERHGLSGLFRETLQEMAERLRFFDERVGAYDDRIERRFKEDERCRRLAKIEGVGPLVATAVVAAVGNASEFKSGRELSAWLGLVPRQHSSGNRSQLLGISKRGDRYLRTILIHGARAALRRADHKRDQRSRWAMRIKLARGYNKAAVALANKNARIIWALLTRGENYRPPAISVASPTADRISLTQVQA

SEQ ID NO: 170541 - protein, 361 aa, unidentified
MRIIGCDLHARQQALAMLETTTGEMVAMTLKHEGDNVREFYSKLPRPVRVGIEATGSMQWFVNLMEELGIECQVGHPANIRAAEPRKQKHDRRDADLILKLLVENRFPKIWLPSKEQQDLRALLRHRHQWVRIRTRIQNALQAIALANGLRRGPALWSQDGQKTIASLPLAPHAAYRRSELQAMYAKFGKEVEKLNQRVEEQACERPGARLLMTHPGVGPITALATEVFLGDAARFADSKALASYVGMIPSEYSSGERQRFGGLSKQGNPLLRFLWGEAAIHAVRRDPELQRFYRRKLVQKGLGKTRVAVARKLGIRLWIMLRDEIDYNEFCRRGQMQQKSSEACAGMPERGHGAKQSPAF

SEQ ID NO: 170542 - protein, 457 aa, unidentified
MICECLCGKLVELSAGGVLLELMVPSLRVELGEPAPELRELGWGKSLNCLLDGPNVTHRKTPLARLSQSASARAARRCLLLANEWKGLPRPELSACAETGNECHDGKCEVSSTHSEGEVMAILNVGIDLAKNVFALHGVNERGQVDLRRPSVPRAKLHALVAALPPCTIGMEACSGAHHWARLFAQHGHTVKLMAPKFVAPYRMSGKRGKTDAADAAAICEAVQRPNMRFVPVKTAEQQSRLMVHRARQGYVEARTALFNRIRGLLAEFGVVLPQKAEVVRREAARHMETLPGYGKTVIEDLLAEVRHLDERVAQYDVHVRAMARDSTPAQQLMQIVGIGEVTATAIVATVGNAREFSSSRQFAAWLGLVPGQYSSGGTTRLGRITKAGDAYLRGLLVMGARAVLNAAGNKTDSISRWATNIALRRGYWRAVVAVAAKNARLAWAALTKGESFTLPA

SEQ ID NO: 170543 - protein, 346 aa, unidentified
MMIIGCDFHPSWQQVSWLDTETGDCGERKLVHASGDAKMFYQQLALPVLIGMEATGNSQWFVELVEDLGHEIWIGDAAQIRASYVRKQKTDKRDAAHILRLVVQGRFPRLWTPDREQRDLRQLVLHRHKLVEIRSRVKNELQHLSLNKGMQRKGKLWSQAGQKLLRELPLKPWAACRREDLLGLLAMLNQQVGQLDTAVQHAAEENPQARLLMTQPGVGPNTALAYVLTLGDVSRFPRGKQVASYLGLIPREHSSGGKQKLGVITKQGNRMLRSLLVEAAQIAVRFDPGMKKQYLHRCHQKPKGVAKVATARKLAVRLYWMLRTNVAYPEIVRIESSPRVPLVGAS

SEQ ID NO: 170544 - protein, 339 aa, unidentified
MAILYVGIDLAKNVFAIHGVDEHGKPALVRPSVPRARLHQLVAALPPCTIGMEACSGAHHWARLFAKQGHTVRLMAPKFVAPYRMSGKRGKNDAADAQAICEAVQRPNMRFVPVKSQDEQARLCVHRVRQGLVEQRTATINRIRGLLSEFGIVLAQKAATVRREAAAHLEDLPGWANTAVGDSLSELHRLDERITEYDRHVVHMAREDERSRALMQLSGIGSTTASALVSTIGNARDFKNGRQLAAWLGLVPGQYSSGGKTRLGGITKAGDGYLRTLLVLGAKAVLAAARNKHDRLSRWAMALEVRRGYWKAVIAIAAKNARMAWAVLAKGDEFKPLVA

SEQ ID NO: 170545 - protein, 411 aa, unidentified
MRLFAGDDWAEDHHDIEVMDEAGKVLAKRRLPEGAAGMTQLHALIGRFLPEDAEDAEVVIGIETDRGPWVAALVAAGYTVFPVNPLQASRYRERHGVSGAKSDGGDAHMLADMVRTDSHQLRPAAGDSPEGQGIKVVARAHKTLIWDRTRATQRLRHQLREYFPAALEAFEDLDAPDVLELLAKAPDPERARRLTRAQVAAALKRARRRDIAGKADAILAALRGEHLGQPAALTAAYAATARSLIAVIITLNAQVKIMEEQVREHFGRHPDAEIYQSQPGLGPILGARVLGEFGDDRCRYATARNRKNYGGTSPITRASGKKKVVAARFIHNDRLVDALMSWAFSSLKASPGARALYDEQRAKGHNHSDALRRLANRLVGILHGCLKTRTLYDEATAWGHRENLPQSCTAA

SEQ ID NO: 170546 - protein, 418 aa, unidentified
MSVLNSLFVGIDVSKNSNQVYAMNFDQKKLLSFSASNDSEGASKIEAKLIECLNKNNYEHVVIVLESTGMYSFHIATYLSSSELLAKYSVLVYCINPKTSQNYRKSFSEMDKTDPKDSYILADMARVGKVKDLTPVKGPQKLALQRLTRHRKHISEQIVREKLYVLNNIFLKFSAFDRKYDGLSPFSDPFTATAQAILLEYKSPEEIVNTSIEDLTSFISTASRNRFADSKKVAETLTKCARMSYRLDKAAYEPINTAIASSLAILRCLENELKHIDKEIANLSKGFNSDEYNCLISIPGIGPTFAAGILSEIGSIKQFDDEEALAKYAGLTWRRHQSGDDEYEDTPMTKTGNSYLRYYIVEAATMAVLHNPVYTQYYQKKFTEVKTHQHTRAIALTARKLVRLIYGLLSKNQLYKVN

SEQ ID NO: 170547 - protein, 395 aa, unidentified
MQNSSPPPGAVVIGMDPHKRSVTIEVMNSDEQVLDGGRFNTDSDGFTRMLAHVAAYPERVWAIEGCAGIGRHVAARLITAGESVVDVPAKLSYRVRLLTAGNGRKTDDTDAHSIALIGVRVTGLRPVVSNEQIELLRVLVDRRRMLGEEHTRKISQVHRLLLELIPGGAKIYLSARQARKLLSPVRPKDPAGKARKQLAMELITDLEKVYTRTKQADKDLLAALAETGTHLTELHGIGPTGAAMLLVEVGDITRFPDHNHFASWTGTAPIDASSGDTVRHRLSRGGNRQINRVLHTMATVQLRNPTEGRAYYDRKKRDGKSSMEAMRCLKRRLSDIVYRTMLTDLTQPAATGPGGQPGDDSDSSATGSQPTTGSSDKPLPGPATTQPTRPLPAAS

SEQ ID NO: 170548 - protein, 369 aa, unidentified
MTNQNDLSRSVVAFEQHNTIIVVIEMSLSSWLVAGMVPGIERHPLKKLNCDQEMLLKLLFRWRDEAVKAGHTITRIVVAFEAGRDGFWLARWLLARDIEAHVIHPTSVAVSREHRRAKTDRLDTESLKRAFLGWLRGERDHCSMAAIPNLQEEDAKRPTRERENLVGERTRIINRIKACMVRFGIRNFNPTLLRAIERLNALCTPEGVTLPPHTLAELRRDLARLRLVMDQINEIEADRLRRLEQAPAEGPHAMVRLLARVIGVGVETADMLVHEILSRKLRDRRAVARYAGLTGAPDESGNKRREKGLAKAGNARVRRGMIQLAWRFLLFQKNSALSQWYRARTESAGKKRKTMIVALARKLLIALWA

SEQ ID NO: 170549 - protein, 359 aa, unidentified
MGKPSKGQRKTVGLDLGDRFSHVLVIDAQGQVVEEARVATREEALRQRFSGCSPMLIALETGTHSPWVSRVLKDCGHEVLVANSRKLRLIYENPSKDDRVDALYLARLARVEPALLSPVQHRGASVQKDLALLRSRDVLVAARTQLINHVRGLVKSVGSRLPVCSTRAFSKKVSEHTPQSLQPALLPVLDQIASLNDRIKALDRQIQALADEGYPPTKLLRQVSGVGPITSLAFVLTLEAPERFRKSRTVGPFLGLVPGRKQSGNSDPDRRITKHGDRCLRRLLVNAAHYILGPFGPDCDLRRFGARIASRGGKNSKKRAIIAVARKLAILLHHLWRSGEVYEPLYQQNHPAGRRAAVA

SEQ ID NO: 170550 - protein, 420 aa, unidentified
MNNRVTIRKEDLIYVGIDLHKETHTAVILDCWNNKLGEITFANTPAEFPKLVRKVMKYCIENKEAVYGLENAYGYGRSLAVWLIAKGFIVKDVNTSLAHRQAKCRAMYKKSDSDDAEAIALATINMLDSLPDACPNDAYWSLSQLVNRRDNIMTQRIRLKNQLHEQITMAYPSYKLFFQDISRQTALYFWGNYPSEKYLKGKTPESLAEELRQRSHNQCSISKCQIILDAVQKDHTKPMEFQDTRDVITRGLVKDLLHYEEQLKEVDNELEQMYHAMGCTLATIPGVNITTAVKILSEIGDINRFPNPAKLAQFAGIAPIKLSSAGKGKDKASKQGNRRLQATLFFLAIQMIQTSTKGKARNPIFRDYYDRKLTEGKSAKQVLICIARRMVNIIYGMLKNQTEYYMPELETVTTTENVSE

SEQ ID NO: 170551 - protein, 342 aa, unidentified
MDEYDVRQFVGIDLHRQRSVIVRQSESGDQLSAVRIVNDPVALRLELERAGTDPEVVLEATYGWYWAVDVLRDCGAQVHLAHPLGVKGFRYRRVKNDVRDAGDLADLLRMGRLPEAWIAPPQTRELRELVRYRAKLVAIRSGLKAQVHAVLAKAGVLIAVSDLFGVGGRQRLAKVPLGAAYAERVRSLLELIDVLDGHEARFAGLIANRLCNHRGYQALQQVPGIGPVLAAVFVAEIGDVHRFTSPAHLCSWAGLTPKHRESDTVVHRGHITKQGSKLVRWAAVEAIQRYPTTSKIALDRTRIESRRGKNIAKIAAARKLLTLVYYGLRDGHIRALDRPRAA

SEQ ID NO: 170552 - protein, 375 aa, unidentified
MSKIRFIGLDVHADTIAASVAEPDGEVRPLGIIPNRLESVRKLVTKLGPVKEIKACYEAGPTGYVLYWQLTQLGVACEVIAPSLVPVKAGDRVKTDRRDAAKLARSYRAGDLTPVWVPDAAHEALRDLVRAREDARQDQHRARQRLGKFLLRHGQRPPADVKKNWTQKYMTWIKEKVHFDQPAQEATLLDYVHEVEHMAERIERLEKAIGEAIEKAPAEMRAVVEALQALRGVAKTTAVTIVAELGSLSRFAKPRQLMGYSGLVSSEFSTGNRIQRGRITKTGNAHLRHVIGEAAWAYQHRPWVGGALLKRQQGLDQEIKDIAWKAQWRLHTRYKKLSARGKNKNQVVTAIGRELLGFIWAIAVRTEARYAGRTA

SEQ ID NO: 170553 - protein, 397 aa, unidentified
MLTQTEIRVCMDIGSHQHRVLIGLSNGEILEEFDLAHTPSAIKQFFHKTEAYQNKYSAQIVLAMEGYNGHARPIDKFALMRGYRLFNVNNNKLAKFKEIFPGPAKSDEIDTRKIFELLTLQEHLPMAKKVLNEVAHIPEVNEKLKRLTRRRQALIQEKIRASNRLHSDLNAVAPSLSGITNDICNVWFLNFITARSDLCKLSRLQLSSILKIKGVGKKYAEQIMKWQKEAAFSPDLEWVNPMILSDAHRIMSLKNEIRALESELEALVDQSDIAKRIKTINGFGLICASELAGEIGSLDRFGGESSLSLYLGMTSLTNQSGQYFGTKRANHVNTNSKKAMMTAVARHIDNIDESKAYYNKKRAEGKKHNQAVRALGRHLVRVIWSMLKNGRDYEIRK

SEQ ID NO: 170554 - protein, 355 aa, unidentified
MSNEKYIGLDVHQATISVAVTDSQGKVVMESILETKASTLLEFFAGLRGSLFVTFEEGTWAAWLYDLLKPHVTEVLVCNPRKIPLVKQGNKSDKIDARKLAERLRLHDLKSVYHGETGIRMLRELARSYLTVVKDLSRVMNRLKALYRSWAIPCAGRDVYYRRHRSQWLDKIQEPGVRCRAERLYQQLDLLQPLRQQARRELLAESRKHAITARLRKIPSLGPIRCALAVALIQTPHRFRTKRQLWTYCGLGLETRDSGEYHFVQGQPRRRKKQVFIRGLNKDYNHDLKGLFKGAATRASVKPGPFQDFYQRSLAKGIKPTMARRTLARKIAAITLTLWKKGEDFDIKKLNSQAA

SEQ ID NO: 170555 - protein, 474 aa, unidentified
MSTELNPKKQAKRRRKNKASATQHQINTGTNPHAAGIDIGADELVVAIPPDRCAENVRTFRSFTANLYQLRDWLLEHKITTVAMESTSNYWVNCYDLLAEAGIDCYLVNARHVKGVPGKKTDVCDAQWLQQLHAAGLLKKSFRPDQEILSLRYLTRYRDSLIREAGNHLRRMQKVLTEMNLKLHHVFSDIDGVSAQTIIQAILAGERDPKTLAALRNGRCLSSEADILAALQGKYRPELLFVLGQLQKNWLEQQKHIADLDDQIHNLLQKIAPAEKAPQAPGDQAPKSQKRRQLGKNALNLDYCQESQHYFGIDLTEVDGLGPSVILALLSEIGNRQQLLDSFKSADSFCAWLGLCPCNAISGGRVLRSATRKTKNPLNEALRLAAFGISRARSRLGEYCRRMKGRLGKAQGITATAHKLARILYALIQSGSPYSENTAFPPKPQNESKQRRQLEILAQKLGLQVTPIPATTLT

SEQ ID NO: 170556 - protein, 339 aa, unidentified
MQVTTVGLDLAKNIFQVHGITADGTVAFNRALRRAQLLEFFEKLEPCLIGMEACGSGHHWARQFQKLGHEARLMPAMYVKAYVKRGKSDAIDAEAICEAVTRPTMRFVAIKSEEQQGVLFLHRARDMVVRQRTQLSNMLRGLLGEFGIVIAQGVGSAVKFARAVLDGERPNIPEVAVDVLANLSNQMVALHLRILWYDKRLQLEARQDPRVMLLRTIPGVGPITASAIVATAGDGHQFRNGREFAAWLGLTPLNRSSGGKEKLGRISKMGDRYVRRLLVAGMTARLRQMKINPERVDPWAIALLERKSPRLATVAMANKTARIVWAVLTRNEYYRPRVA

SEQ ID NO: 170557 - protein, 345 aa, unidentified
MLVGVDADTGQVLSGRQIAATDDGHLGAVRWARELHSERVWAIEDCRHVSRRLEQALIAAGERVLRVPPKMMGASRRGEREAGKSDEIDALAVARAVVKDGVERFPAAYLDERAMDIRLLSDHRDQLVRERTSIQNRLRWHLLALCPELEAQLPKGGLTRHVVQERIARRLRSFGADQRARVAREQLSRIRTLTRQAGELERELHRLVEAHRPALLAEQGCGTLTAATLIGRTAGAERFPTDAHFARQAGVAPIPASSGEVVRHRLHRGGDRRLNSALYMIAITKARIDPQTKAYLERKRAEGKTKREALRCLKRHIARKIHRLLSMPALDPDPVHSMPLFPGGA

SEQ ID NO: 170558 - protein, 345 aa, unidentified
MPIVGGLDIHRKQITFDYLDTETGQVQRGQVSPADREHLRAWLARFAGREDVAFAVEGCTGWRYVAEELAAAGVAAHLAEPADTAFARGRKRHAKTDKTDCRHLRLLLAEGRLPECWIPPGRILECRALLETYHDLRREHTAWAQRIHAVLFHQGAPALGEGTLRTGQGLAALRDVSAACLSPAGQLQIATALDMTDALDTRLHELRHQLLHEARHLAGAKVLAARLYGVGPFAALAMTCWLGGAGRFSSSRQAVRFAGLDVTVYSSDRKGPPGRLSRQGPPVLRWAVYEAGKTHARSSAPDYRYYAQVKDRCGGKRAALSEARKILRQACHILAELGDDALAAA

SEQ ID NO: 170559 - protein, 400 aa, unidentified
MDLDTSRTPVGIDLAKDSFAATVSDGDGEVVRAFPLSREGLADLIRFLEPYGPFPDAFLFGLEASGPYTEPLLSWLLQRNARVFQLNPLLISRFRRAQSLRRTKTDAIDARTILHFIGQLPPSVQPCEPGDDLQALAAEYEQITQQVARLKTQIRQQVHALFPELAGSSTLFSQRILRLLLAFPSAHAIARATPAQLEAACKDLPSGRRSRITAQYLYNSACASIGCSTPQREAVLQSKIRQLQHLLQESCTMRNALIQAVRAAHPTPWRLLLSIPGLGPITTALFLAQIRSLSRFPSHRQLSAFIGIDPTTYESGQFKAQGHISKRGSPHLRRTLYLMAQSVARYSVTFRLYMDQLRARGKAYRVAVIACANKLLRVVMALLRSLTPFTDSSLQEVSHS

SEQ ID NO: 170560 - protein, 429 aa, unidentified
MNYPPVAGIDVGKNFSEMCILSPNNEIYHRIKIYHDSIDSIQKAIGLLQKAEKDFAIRPVVVLESTGHYHKILFHYLSDSGFEVSIINPIQFDSIKNIGIRKVKNDKFDAHKIALLYRFSFIKTTAVPDDVIDCLKSLCRQYYKLGDELTTYKNRLIGIIDQVMLNFTEVFQNVYSKTALAVLDRYPSPNQILKANKKTLISLIEKTSKKGLGWSTEKYELLVLKAKEFKDLSISNPGNLAILKVNISMVRTLQEAQKNILDAINEIILADSLKDDPVLSPIINLLCSIPGIGVLTAATILAEVGDFSAFSSPNKLVAFFGIDPSVNQSGEFTGTRNKMSKRGSRLLRRVIFTTALANVRSKRNGNKTNPVIYEFYQKKCMNKPKKVALGAVMRKLVNIIFAVMRDEKPFELRTPEEHKELLLTRSLVA

SEQ ID NO: 170561 - protein, 478 aa, unidentified
MKRYLPLACGLDIHRDTIEACIAVSNAYEEPEMIRQSFTTLRGDLIKLRTWLAQHGCKNVAMESTGVFWRPVYEVLEEVEGINLCLVNAQHMKNLPGRKTDVNDAQWIAELFMCGLLEYSFVPDKRIRDLRECTRYYRKLKQERCRALNRMGKLLQTHGFKLSSVLSSIDGVSAKRILERLCECGEVSVADVRTALARGVKKSAEEIAFAVNGRLPETARALLRHMLYALNTKDYELEYLNEIMESTRAPYNAQIELLSTIPGVDTLAATYIIAEIGVDMSRFSVTCDWKKPASRICAWAGLSPKNDTSAGIVKSRKIKKGNNYVKTILVQCAWAVTNCRNKRLSHWYWSHVGKLGEKTAIIAVARKLLVYIFHMLSNGCAYNNNLDCEAADRIKAKKLESAKKLLSKDVQNDASNEDPATQNTKNTKSLKNHSVVESEVNLSDLPSGIKSPMSSPCETTTSHPHKKRGRPRKTTAIA

SEQ ID NO: 170562 - protein, 351 aa, unidentified
MENGITVGVDMGDKKHNVCILDAEGEVQHRGTVTNTATAIRRYFGKLDPCRIALEAGTHSAWVSRILDEMGFEVLVGNPRKLRVIWDSDEKNDDRDAEMLARIARFDPHLLYPIHHRGAQAQCDLAIIKARDMLVKSRSMLSTHARGIVKSTGERISGGTSETFHIRLQEELPGELRPALEPIMKIIEDLTQRIRHYDRLIRKVSEEKYPETAHVRQISGVGPITGLAFILTLEDPSRFIKSRDVGPFIGLTPRQNQSGKINMQLGITKAGDGHLRRLLVGASQYIMGPFGPDCDLRRFGLELAARGGKNAKRRAVVAVARKLAVKMHHLWKSGEEYEPLHREIRTKKKAA

SEQ ID NO: 170563 - protein, 433 aa, unidentified
MSNNVQVVYERCCGLDIHKRKIEACALVNEKMRRNSFGTTSEQLHKLADWLKKHEVEIVAMESTGVYWKPVINVLEAEGIKAIIVNAQHIKNVPGRKTDVKDAEWIASLLRHGLLKPSFIPERRQREMREITRLRTAKIQERAREIQRLQKFLEGCNIKLSSVVSDINGVTAKEIIKAIAAGVNDPKKLAELSRGRLSASQEELETALDGIVSPDIRTLIQIQLEAIEALDKQIASLDLMMERIEREDENFKEALELIDTIPGIGKRIAQVILAEIGLDMSRFPSDKHIAAWSGLAPGNNESAGKRRSGKAKPGNPQLRSQLVQAAHTIARMKNCYLSSLYHRIAARRGKKRAAVAVAHAIIVAIYHMLIRKEPYKDLGENYLSEQMRRSKIKSLVNLVKNIKKLDDDVQFIISDQSIRIIIGEEVKEFSMTG

SEQ ID NO: 170564 - protein, 439 aa, unidentified
MPISSLTVLDATAAAVDVGSEELHVSIAGGPPKVFGTTTRELNALRDYFLAQGVRSVAMEATGVYWLCPYEVLEKAGLEVVVVNGKYVKNLPGRKTDVSDCQWQSTLHAHGLLKPGFVPPEHIRRMQDYLRVRTDHITMAGAHEQHMQKALDRMNLKIHDVISDLTGMSGLKMVQAILAGERNPVALLALCDPQIQKNKAQRLCAALEGTWKPEHLFALRQAYELWQFYQAKIAECDQAIEEVLKATAGPEDPNNPAPPATKRGGVNAPNIQALHGMLWRLCGGKDPTQLPGIADYVLLQLLGEVGTDLGKNWKTEKHFTGWLGLAPGSHNSGKRRRSQRRHRNRAGRLFCVIARSVGRSVDKALGGFYRRLKGRKGGLVANLALARKLAELFWRLMVQGINYVEKGLKKYEEKVAQTEQRLLQKLASKYNMVLQTKVS

SEQ ID NO: 170565 - protein, 397 aa, unidentified
MRFYNRQHRHYCGIDLHVKTMYVCILDAAGQVLVHRNVQSSPEAFLEIVAPYREDLVVAAECTFTWYWLADLCAAEGIAFVLGHALAMKAIHGGKAKNDKLDSFKIASLLRGGLLPQAYVYPAGMRATRDLLRRRLHLVRKRGQLLAHIQNTQAQYNLPAFGRRLAYPANRDGVAEHFPDPSVRKSIEVDLALLGRYDTLITDLELTIVREAKRHDADAFHRLRSVPGIGKVLALTILYEIHNVTRFDRVQEFASYARLVKGKKQSGGKTLGTSGGKMGNVHLKWAFSEAAVLFLCRNAEGKRLLAQIQKKHGKGKALSILAHKIGRAVYYMPARGTVFSMEKFLHASRGGKRRRELVSQTSNSSHGTELAEIAPRRAPQSAARPSIMSQRSGSDMR

SEQ ID NO: 170566 - protein, 344 aa, unidentified
MKKSNVIGIDLAKNVIQVCKIDKHGELLSNKAMSPSKLKELLAKSVPSIVAMEGCGSCHYWARLARAHGHDVRVISPKKVKAFLQGHKTDANDALAIAVASIQVGMIFSQIKEVEQQSLQTLEKSRKFLDKELTALSNHIRAYLYEYGITMNKGRKSLRETIAVVFDDLDTRLPRCLKNTLRILWERYQQTVTQLEETEQHKAALVKQLEPCKRLMDLEGIGTVCASMLYANIGDGREFKNGRQASVYIGLTPKQHSSGGKTYMRGIDKQGGNRELRAALYQGALAVISRLPGEPRTSKEAWLLELVKRAGVKRACIALANKSVRTAWALLATGKSYEPVLLKS

SEQ ID NO: 170567 - protein, 442 aa, unidentified
MAAGRLWAGVDVGREYHWVCVVDDTGAVVLSRKLVNDEQPIRELVAEIDQLAEEVSWTVDLTTVYAALLLTALAAADTPVRYLSGRAVWQASAVYRGGEAKTDAKDARVIADQSRMRGADLPVLAPDDDLITELRMLTAHRTDLVADRTRTINRLRQQLVAVCPALERVAALTSDRGWVMLLSRYQRPKAIRNSGVSRLTKILGDAGVRNAASIADAAVTAAKTQTVRLPGEEVAAHLVAELAQGVIALDARITATDADIEGRFRRHPLAEVITSLPGIGFRLGAEFLAAVGDPARIGSADQLAAWAGLAPVPSDSGKRTGRLHTPQRYSRRLRPVMYMSALTAIRCDPQSRAYYQSKRDEGKQSIQATICPARRRTNVLYALIRDNRTWQPDSPRSRIRGLTSSLRARREITANPRLLKTIFDNIPLGLYRETRLDENDCR

SEQ ID NO: 170568 - protein, 428 aa, unidentified
MKITHAAEKINLNNVVDIAVDVHKDTLCFFFEIDGKEFSDECRNRTTIIEKRLRSYHEIAKEHGRKTLRIICEPTGQYQNSLFRTARRLGFFTCYVNAESVAKFRLVESNDNNKTDKKDPRVIGTLGKLNKVIKYRLLGEDYLMLRKLHKMYDECDVAITSMRCRVAKLLVELFCDYSFKKDFLYSNSGLALIEQYGCNPYRIVEDGFKAFSQKMRRKAPRIRKDTLERLWADAVSSALNEMPAGYVEVLEMHFYDLLDDYFRQVDRKEDITRQMVEILARLREKDPNIPPPTPHVISDKNLARLLGETGPLSDFDNWRKLMRYAGLNLRTRQSGTFQGQNKISKKGRRLLRKVLQGIALPLVRKGQLYGEVYHKKKDETKMPGNKAMTVIARHMLKKLYGWYRSGEEFDEQRFFTSKSRYKKIAEAA

SEQ ID NO: 170569 - protein, 348 aa, unidentified
MYYIGVDYHKKYSYMVVKDQEGNLKDKGTVNNLQEEVEEFLYPYRCGKAVIEATRNWGVMYNWLEELLEDVALAHPLKVKAIASARIKTDKISADVLCDLLRTNLLPQSYVPKKETREAKNILRQRMFLVRLQTMVKNRIYDMLDRHPEITSQAPNVSDLFGPTGMKWLNQVELPGSDNSLLSSELELLRVVRQLISKTNGLIKDLAKDDKRITLLRSIPGLGPFFAVLVAMEIDDITRFCDEKKLCSYAGLVPSTYASGGKVFHGRITKTGNKWLRWAIVEAVAPAVNCDSDIKAYYYRLKTRKGANAAKVATGRRLLTIIYRVLTQERFYRKNIVPDPVPVALMSS

SEQ ID NO: 170570 - protein, 409 aa, unidentified
MDVVMTRCAGLDVHQATVVATVRVPDDQGGRRVVTDTFGTMTADLLALRDWLHAYGVTHVALESTGVYWKPVYYMLEDAFTLLLINMQELKRVPGRKTDVKDSEWLAQLLECGLLRPSFVPPPPIRELRDLTRYRVQQVRDRSQEVNRLCKVLEDAGLKLTTVITDVMGKSGRAMLQALVDGTTDPAVLAELARGKLRKKLPELRRALQGRFRPHHAFLIEQIFAKIDFLDEALERLTTAIDQRLVPFEPMLTALDTIPGVDRIGAISIVAETGGDMTRFLTAGHLCSWGAMCPGQNESAGKRRSGKTRKGNRYLRGTLIQAGLGAMRKNGSALQARYHRVARHRGHKKAVVAVGHQILEIAFYIMRDGVTYDELGADYFNRRHAEKAVRRHVRQLEALGFHVTIEKAA

SEQ ID NO: 170571 - protein, 443 aa, unidentified
MCGGSVTASLFPNGRRSSMGKTIPVCCGVDVHKKFLIATILTGDYLIPQCKQKHFGTSYRNLLAFRQWLLENDCKDVCMESTGKYWVPVWNVLEGFVRVVIANPKWVSAVKGNKDDKKDSKWIGNLFRMGLVPASYIPGKDIRILREFTRYRSKLVSMRSSEKCRFQNAFTVCNLTLDAVVSDMFGKSATDIENYLLTTDSVDPAHCVSLLQGSLKKKADAVVEAVEGFNMTLEQKERVRIIQGHFADIDKRIGQIDEIVNHLVDEYDSQISLLCSVPGIDHRLAITILSEIGTDMSEFGSSRKLCAWAGLAPGSNQSAGKKKSVKITRAGVYLKPALVEAAHAAVKSTEKHPYFRIKYERIMKRRGKKRAIIAIARMILTSIYAMLSSGEVFNPSDLLKYDMPDELKKKMTLASAKDALKLLVSLGVVAEGSISLDSLALAG

SEQ ID NO: 170572 - protein, 373 aa, unidentified
MIVIGTDTHKKTHTCGAVDALTASARGELTALARKGSFGKLLRWARALDPERVWAIEDCRHVSGAFERFLVARGERIVRVAPKHMAGARRSARERGKSDSIDAFSVARAALREGLETLPGAHLDGRALDIRLLSDHRDDLVATRTEDQQRLRWHLHDLWPQFEIPSGALDTGKWLGKTSRRLARAEQTTRVRVARDLVRQIAARTTRIRELESELAQLVSAYAPQLLAERGCGPLTAAKLIGEIAGADRFSTDAKLARTSGTAPIPASTGQTNRHRLDRGGNRELNCALHRLAVNKAHWDPDTAAYLERKQAEGKSRKEALRCLKRHLARRIWKLLHTPPAPTTPSSPTPIAPRTTAAPTATGTAPAVMPCLT

SEQ ID NO: 170573 - protein, 406 aa, unidentified
MRGPVITVDVSKGSCHYQPFLENGKPLRKPKVLHDTIEGFNQLMETIEMTREKSSEEKVPVVFEATGVYHRCLQKYLDDNGISYYIISPLLSAAYRKTNLHSNKTDPLDCAHIAKAYYCEGNLLPFQQQEDIYVKLQKMNRYYETELIHLKKRKVSFRSFMDIVYPRLDKSFGSNATLYDPIPMEVLKKYPHPSLLLKHREETIVKAIEKKVNHDKRFIEKIVHKMYECARHCYSGAEVTDIEVIKLPEMIEKLQDQMKLCDSLLNELICEAEKIPYFNCVVSIVGIGRNLAARIIAELGDMSRFPNRRAISAFAGLNPKILQSGDVDGIHLKISKKGNRHLRCLLYLGATCNFRLKKHDPLYEFNQKKRQQSQSPLKPKAANTATAHKLLIMIYAMSQSGEAYRF

SEQ ID NO: 170574 - protein, 410 aa, unidentified
MSLFCGIDWATEHHDVAVINDDGSVVARGRISNDASGFAALLSLLAEAGDSAADPIPVGIETDRGLLVAALRETGRVIYPINPLAASRYRARYAVSGAKSDATDAVLLANIVRTDPGAHRPLPADTEAAQAIRVLARAQQDAIWARKQVGNQIRDLLKDFYPAALVAFAELSEGGWARRDARTILAAAPTPVQAAKLTPARLRRLLIKAGRRRDLARDVERLREVVTGTYLHQRPAVENAMGIHLTAMLRQFDAACTAADELAEAAIAHFEQHPDAEIITSFPGLGMLAGARVLAEIGDDRSRFADARGLKAFAGSAPITRASGKKTVVLHRHIKNRRLAAVGPIWALGSLRASPGARRHFDARRAAGDWNHQAQRHLFNKFLGQLHHCLQTGQHYDEHRAFPPPLELAA

SEQ ID NO: 170575 - protein, 353 aa, unidentified
MKSDKYMGLDVHQAMTVAAVLDAEGKVVLETIVATEAAALTRLVKGLSRPLHVVLEESTQADWLQGILGSHVSEMVVCDPRRNKLLSEGSKADKIDARKLADLLRTGMVRSVYHGHQATRKLKELVRAYETFSLDTQRAMNRIKAIYRGRGIPTPGRGVYQPKQREQWLQKLTESGLRQRAAWLFEQLDQLKPLRKKAKQAMLTESRAHRAVGLLRTIPQLGPIRAAFIVATVDTPHRFRTKRQLWSYVGLAVVTHMSSEYEMKAGKVVRRRKPVATRGLNRNCNHRLKDVFIGAATGGVRDGAYKAYLERLEHHGMSAEMARLTLARKITAVALAVWKKGKEFDPKELNKTT

SEQ ID NO: 170576 - protein, 416 aa, unidentified
MFAVGVDVANGRSRVAVLDGMRNMVAKPFEVVHTAQGFAALVEKLRQLDGEVRIVMEHTGRYYESFAMSMHRAGFFVSAVNPLLIKNYQGGINVRKVKTDKADAQKIAQFALDKWTILPHYTPMDTIRYNLKTLHRQFQLASKTKTALSNNLIALLEQSYPGANRYFDSPVRTDGSQKWVDFVDTFWHVDCVARSSEHAFVERYRKWCKRHGYIFSEQQAIQLHADARQKFPLVPKSDTCKLLVREAVSQLNAVSRTVETYRAEMDRLASQLPEYETVMGMTGVGKSMGPQLMAEIGDLRCFAHQKSLVGFAGTDPIKEESGDKVSQSAPSSKRGSPYLRKTLFVIMSILLQLQPQEDPVYQFLDKKRSEGKPYYVYMTAGGTKFLRVYYGKVRDCLKAKGLWEVPASASQEVNPG

SEQ ID NO: 170577 - protein, 341 aa, unidentified
MSKVSVDQGAWTSCGVDVSAATLAVAVERVGMDGFDEREFANTAAGHRQLVAWLLKRGPNVRVALEAAGIYSLDLALALDRAEGIEVAVLNPKTVHRFAQTLRRSKTDRADAVALAEYSRRMPFVAWRQPSRQVLELRALSRHIASLTEEHTRSSNRLHAAEGSATTPGCVRQDLKRSMALQQKRILRLRRVAMELVRREENLARQFEQLIGIPGVGEVSAVQLLSELAALDPQMTVREWVAHSGLDPAHRTSGTSVNKASRISRQGNRYLRRALYMPALTGARCDPHMKAFYELLQTRRKTKLQAIIAVARKLLHAIFGIFKTGTAWDGAKLFPQLIPTS

SEQ ID NO: 170578 - protein, 387 aa, unidentified
MPQPNDLSRSLVALDQNSTIIAVVELSQSSWLVGGVVPGIERQPRKKLEPNPERLLGLLHRWRDEAVRAGRTITRIALAFEAGRDGFWLARWLAARGIEAHVIHASSVAVSREHRRAKTDRLDTELLKRGFLGWLRGERGHCTMARVPTIAEEDAKRPNRERDCLVGERTRIVNRIKSTLARLGIRNFKPTLRKAAERLAAVHTPEGVPLPPNTLAELQRDMARLGFVVSQIQEIEKARQKRLEQHPETGPDAMVRRLVCIVGIGVETADMLVHEVLSRPMRDRRAVARYAGLTGSPDESGARRREQGLARAGNARVRRGMIQLAWRFLMFQNESALALWYRARTADSRSGTRKTMIVALARKLVIALWRFVTTGEPLEGVVLRPAS

SEQ ID NO: 170579 - protein, 456 aa, unidentified
MSNGSRQLSRGDRRRNDRLERLRSVVTRQSAVLAFDLAGDKQVCALTDQDSRVLARRTVSAKAWQLREVVEWGLARAAAAGFSSVVVACEPTGHRWRVLDQIAAEAGVRLVCVQPLLVRRARESEDFTRNKSDETDAVIIARLVTELRCYLPERAEPVWARLRHLGARRAGLVTDATAARQQVRDLLECAWPAALEAAAKPLESASWLAAMTVLLDRVGTNGDLTVIRRWGWSRFAAAVRREVPRHGATRWYSKIVRAVFDAATDPARAAAGVADQRAGALERTRFALADLAHARAETAVVETRMVQVLHELGLVTLATSIPGLSAVGAAAILAETGDPTRFSSARALVKHAGLCPRDNASGAYQGKTGISGRGRPQLRLAAWRAVHAALRNNSVLAARYAHLTGRADNKLTKTQARVAVAGSLLRQLHAVITTGTAWDPAIAGGLNPKTKEAAAA

SEQ ID NO: 170580 - protein, 312 aa, unidentified
MEKLSYGGIDVSKDRLDVVVLPEGWFFSVSNDTAGWTELVARLRPLAVRAIGLEPSGGYERGIIRALLAARLSVRRINPNKLRQFARARGVLAKNDRLDARLMAEYVAIMPTRAVQRDDAVDRLAEVVSMRRQLCDEHVTVENQTAHLEDAMLRRLSKRRLVRLEADIRLLDKRLAEMVATNAAFARLYELLTSMPGVGPVLAFTLIALLPELGKMGRKQIAALVGLAPYDFDSGKLRGHRSIYGGRMPIRNVLYMAALSASRYNPALKTFSNRLAHANKKSKVIIVAVMRKMITTLNAMLRDNAVWQPQSN

SEQ ID NO: 170581 - protein, 438 aa, unidentified
MSNKVIFNLDELFISVGIDVGADFSWMSIALPNQQFVGKPYKILHNSIDSLATAVSKIKEAEELYSLESHIFLESTGIYHYPLFCYLRDKGFNCSVINPIITKNSTNINIRKVHNDRFDSKKAALVGLKPNLKVSLMPSDLALNCRNLCREYYDLMDNRSAYVNKLQGELRMAFPQYLGIFSKVTINTSLTLLGTYTSPSAFLEADKQEIIDIIKSTARFGLTYAQNKYNAIIQAATDANQFGYIIDSNIKRIRLYISFIRKFDEEINSILESLHELVDANKDTDFVKQIHLIETFKGAGFLSAVSIMGEIGDFSAFSKPKQLFAYFGLDPAVKQSGKFEGTKVQMSKRGSAIARRVIHTLTLQSISISRNGETKNSVLREYYIKKCDSKPKLVAMGAVSHKVCNMIFAILRDNKPFKIIAPQEHIKQYNAAKCDIAA

SEQ ID NO: 170582 - protein, 316 aa, unidentified
MISYFVGLDVSKATLDVGFLPESIPQFQVRNDSEGFAQLIACLNELEVERVLLEATGGYEQAVFKALRLEGLNVVRVNPRRCRDYASAMGKIAKTDKIDAQMLARFARDFEDLPQIEPNQDRDELGELIKLRGNLVQHRDDDKRRMKQTTSATAITVYTEHVAYLNDQIKALDKAIERASNVLDRTTAMRLRSVKGIGVISCGTFMAYLPELGSVTGREIAALAGLAPYNKDSGKKSGPRKIEGGRYRVRKAAYMSIWSMIQHVPEVRTRYEALIARGKRAKVAAVACMRVLLVRLNAMLRDGTEWKELKPQVPAP

SEQ ID NO: 170583 - protein, 340 aa, unidentified
MKVTVIGLDLAKSVFQAHGVDESGRTVLVKKLHRKQMLPFFSNLPPCLIGVEACATAHHWARTLSAMGHEVKLMPPSYVKGYVKRGKSDALDAEAICEAVQRRSMRFVPTKTVEQQAILMAHRTRSLLVRQRTMAANALRAHLAEFGLVANPGIANLAKLSEKALAEPDGLPAYARRALAILVRRLAELTEEIGALDRELCAWHAQNEASQRLAAIPGIGVITATAIAATVTDPGQFRSGRQFAAWLGLTPQQQSTGGKTRLGGISKQGDRYLRRLLVVGATAVMRHSKDKATRLADWLRELLAKKPFRLVSVALANKLARIAWAVLTSGDTYRPQAPAA

SEQ ID NO: 170584 - protein, 352 aa, unidentified
MTMTTLTRQITGGVDTHLDVHVAAALDERGGLLGVESFPTTPKGYGQLLSWLESFGEVDLLGVEGTGSYGAGLTRHLHRRGVKVVEVDRPNRLRRRRHGKSDPQDAISAARAAQGGDAAGEAKTRDGNVEAMRVLRVARASARKGRGQALNQMRALIATGPDCIRAELRGLNVYRLLERASSYRPADKRDLVSINKLTLRMLARRALELEAEVSAIDAILEQLVIETAPALVAMTGVGTDVASALLVAAGDNPERLRNEASFAHLCGTSPIDASSGKHERHRLNRSGDRQANSALWHIVITRMVCDPRTRHYIERRMKEGLTKKEAVRCLKRYVAREVYNHLPIEDLALDSP

SEQ ID NO: 170585 - protein, 429 aa, unidentified
MRAVGLDIHRDFCEVAIMEAGELRSAGRVKATPEELELFAGSLGPDDWVAMEVSGNAAQIVRIIEPYVARVVVVSPSDTGIRQARAKTDRLDARTLARLLAAGSLDAVWMADERTRVMRRRLARRAQLVGSRSRCKNEVHAVLMRGLIERPGFSDLFGQAGRRWLAGLELSLEERESVDSSMRLVEFLDTEISEVDRLIALDALAWPETTRLMSVPGVNVICATSFLAAIGDIRRFPNPRKLVGYLGPDPKIRQSGPGPGTSGHISKQGSASARWALVEAAWSAVRQPGPLRAFYQRVRARRGHQVAIVAAARKLACLFWCLLTREEDYAYQQPSLTKKKLRRLEIAAGAPKYQGRSNIWSTNLAMREAERALAEQAELAYRNTVRDWHATQTKRAKAAAAVELGASATPGRASNRPSKGKAARQTTSP

SEQ ID NO: 170586 - protein, 342 aa, unidentified
MKQYVGLDVSQKETSICVVDEVGQVLFEGKAKSDPGALSALLRKRAPQAERIGFETGAMASWLWHELRRVDLPVVCIDARHAHAALSVRMNKSDQNDARGLAELVRVGWYREVKVKSEESQKIRAILVARSRLVAIRRDIENQVRSLIKEYGLLLPRAIGLQFRKKVCELLGKDHQLLGVIAPLLSIHEQICKQQSKFDNEVRQLAKADETTRRLMTVPGVGVVTALTFRHTIDDPSRFRSASSVGAYLGLTPRRNQSGETDINGKISRWGDRLLRTYLFEAATVLLYRTKKWSSLKAWGMKLAKRIGMRKAKIAIARKIAIVLHCIWVDGTSFDWGHAKEA

SEQ ID NO: 170587 - protein, 347 aa, unidentified
MTIVEAARGVTGGVDTHLDVNVAAAIDPIGGLFGTEAFPTTPAGYQALLSWLQSFGEVRKVGVEGTGSYGAGLSRYLRAAGIEVLEVNRPNREERRRSGKSDPLDAIEAARAALGGKAKSIAKAKDGAVEAIRALVVAKRSGRVARTAALVQMRHLIVTAPDQLRSPLRNMTVHALVTEAARLRPTGGGDPVLCATKASLRSLARRIQRLDDELADLEARIEALLIEHCPELLGRFGVGPDTAAALVVCAGDNAERLHSEPAWAHLCGVSPVPAGSGKTSGHVRVDFAGDRQANSALWRIVMVRIAHHPETKAYFARKVEEGRSKHEIIRLLKRYVAREVYRYLPRR

SEQ ID NO: 170588 - protein, 401 aa, unidentified
MQDTQQHGAVDVFVGVDVGKGQHHAVALDRNGKRLYNKALPNDEVKLRALIAELKTHGRLLFVVDQPSTIGALPVAVARAEGVLVAYLPGLAMRRIADLHAGEAKTDARDAAIIAEAARSMPHTLRSLRLADEQLAELTMLCGFDDDLAAQVTQTSNRIRGLLTQIHPALERVLGPRLDHPAVLDLLERYPSPCALAAASEKTLANRLTKLAPRMGKGLAAEIVQALSEQAVTVPGTQAATIVMPRLAQQLAALRKQRGEVAAEVERLVLAHPLWPVLTSMPGVGVRTAARLLTEVAHKAFASAAHLAAYAGLAPVTRRSGSSIRGEHPSRRGNKVLKRALFLSAFAALRDPVSRAYYARKIQQGKRHNQALIALARRRCDVLFAMLRDGTIYQPKSAPNA

SEQ ID NO: 170589 - protein, 338 aa, unidentified
MEHFIGIDLHKYVSQLAMMRESRSASQLRFANDVVTAERVLRKLPKGSKIALEAMGSWWWMVELAQKSGHEVFLSHPKQTKAIASARLKSDKVDALMLAKLLKADLLPTVWIPPENQRHVRELLSHRARLVRQRTAVINELRAVYAKRNIDPQAKFQRVHPNVSGAENLSGYAPRIVGEDLELLGFVNRQIGGLDKELMKIALEDAQAKRLMTIPGVGPVSAVAMSCWIGEIARFGNAKKLASYFGLAPRVRQSADTERHGHITKEGNRMVRALVIQAALVHTRAGKGPSRKHYLGVLQRRGKQIARVASANKLLGAVFHMLKERIDYHEFLRRSGAQ

SEQ ID NO: 170590 - protein, 373 aa, unidentified
MHYTTVYVGMDVHKETFSLCCYTNEKELAEYPQKVEGHYSKVLNYIEAMRFHYGEDALFICGYEAGCLGFTLYHQLTDHNVKCVILAPTTMLQQRGRKKVKTDKRDAALIARCLAHHDYSPVHIPTDQDEQTKEYLRMRDDHKLALKKVKQQILAFCLRHNYRYDATNNHWTQAHLKWLRALKPEGIYEEILKEYLLTYDTITDKLERLDKRIEELAGGEEYYENVKKLSCFLGVKTVTALSVLTEVGDFNRFASAQHFASYIGLTPGEDSSGEGQTRLGITKAGNRHVRCLLVEAAQSYTRGQIGFKSKALKARQEGNPPEVIAYADKANERLRRRYYRMVLKNNKKTNVVKTAIARELACFMWGMITGNVA

SEQ ID NO: 170591 - protein, 309 aa, unidentified
MEHFVGIDVSKDRLDVHLRPSGESFAVARDGEALAGLVERLRTLAPALVVMEATGGYETVVASAIGAAHLPLAVVNPRQIRDFARATGRLAKTDRIDAAAIAHFAEAIRPPARPIAEPEAQALGELVARRRQVIEMIVAEGNRRRMARQRRVIRAIERHLALLQTELSELEDDIDGAIRNSPAWQAEADLLTSVPGIGPATRRVLIAELPELGRLTRRKIAALVGVAPINRDSGTLRGRRTIAGGRATVRAALFMAALVASRKNPIIAPYYRKLRAAGKTGKQALTACMRKLLVILNAILRDRKPWQPA

SEQ ID NO: 170592 - protein, 348 aa, unidentified
MKQITVNVPAQVIGLDLSDEKADFCMMDGRKKILRQGSIELARPALEQFLGAIEPSRVVLETCGQSAWVAKVIRSCGHEVVVVNPRRLELLTKSSKKTDRNDARLLAELGRLDVEMLQPVHEKEDRTMAIQVELRARAQLVCTRTRLINLVRSSLKLFGVKPPKCSADVFHQKIQLPESLAPALGPILAILAGLKAELERYDEQVVEHCKRFPQTELFRGVHGVGPIVALSFVTAIERVERFKSSRAVGAYFGLTPKKDQSGKSDPNLRISKEGDGVVRSLLVSAATHTLRRSAPDSDLKRFGRRIAQSGTQRDKGRARIAVARKLAILMHRIWVTGEIYQPLRAQSK

SEQ ID NO: 170593 - protein, 477 aa, unidentified
MNDVQKKLKVENGAEVSPMYAYGVGVDTHKDFIQVCVFVRVGNVIKQYESEHRTAWQSLVNAGVWARKIISEKSIPTIEPEPLRYCIESTSTYHLPVIKAFQGKPCIVNPVLAGNTKRKTDVLDARLLAYHNMTGLWPESFVVPSMVHSFRLMMRQREYHMREGAAISNRINNYIMRFGHTLGSYKSIRSIENRSMLEDMCKDDYVYTDNILNLEVGKFVCPEGLPDEVKEIIMNMFSEYDIHVEKAKNYENLAYKYAKEIHWETDSGFIEGSQLIKNLTTVPSVGIITALVWLAEIITPLRFKTASQLAAYCGCDPSLKVSAGKVTSQTKRRGNTKIHRQLGTIARTCVNRHSEPFGQWGYSIKKKHAKGGYKKASGAVARRIAVSLYYVHKKNMPFSYDKYNFYKINVPNVLTENMGFSKRVMNLLVSNDLMDSKAITESYIIGTIYDIKGLGKKAAQEINLWIQNNKKRKEIYT

SEQ ID NO: 170594 - protein, 346 aa, unidentified
MNSVGIDLHRNRSHIAVIDEQGELTLSKRIINGRETFLELLGGLEGESQIAVEATYGWEWLAELLEDSGYDLHLAHPLRTRAIAAARVKTDAVDAKTLALLLRADLLPEAYVAPRELRDLRELLRHRIALTAMRSALKNRVHAILAKHGITREHSDLFGKGGRQFLAGLELREAPRARLDSLIALICDFDREIDATSKEIDQRAKVDDRVEVLCQIRGIGPYTAMLIIAEVGEISRFPDARHLCAWAGLTPTVRSSDGRARLGHISRQGSPALRWALVEAAQKCTTGGGPLRDQFERIAKRRGRKIAKVAVARQILTLSYYGLRDGEIRCLARRSRASAKEQLAAT

SEQ ID NO: 170595 - protein, 454 aa, unidentified
MARRKQRRKQLAVTDLPEHLQHVNLNAAGIDIGSDRHVVAVPVGRDEVSVREFAAFTAELNALADWLARCGITSVAMESTGVYWIPLFELLEQRGFEVKLVDARQVKNVSGRKSDVLDCQWLQQLHTYGLLAGAFRPTDQVCVLRGYMRQREMLVQASSMHIQHMQKALQQMNLLLHNVVSDITGVTGMKIIKAIITGERDPKVLARHRDQRCHSSAATIAKSLLGNYREEHLFALTQAVSLYETYQAKIAECEAAIAGYLSSQPNRTDEEPPPGDKSSRNRDRLRGGLDVRSQLYRMTGVDLFNLPGLGADTLLTLAGEVGFDMTPWRSEKHFTSWLALCPGTKKSNGKVLSRKTKRSANRAAAAFRIAAASLTRSKTALGAFYRRIRVRVGPAEAITATARKLAVLYYSLLKYGSAYVEIGQTVYEQKYQQRRLNSIQKQALALGYQLIPTA

SEQ ID NO: 170596 - protein, 387 aa, unidentified
MPQPNDLSRSLAALDQDSTLIAVVEMSQTSWLIGAIVAGVERHPLKKIVPDENELLRLLYRWRDEAIKAGRRITRITVAYEAGRDGFWLARWLRARGVEAYVIHASSVAVSREHRRAKTDRLDTELLKRTFLGWLRGERDHCKMAAIPTLAEEDAKRPSREREALVRERTRLTNRMKSALARLGIRNFKPQLRKAAERLAAVRTPEGEPLPPHTLAELHRDIARLQLVKGQIEQIERARLERLRQPPTDAPHAMLVQLAQVYGLGIETADMLVHEVMVRDLRDRRAVARYGGLTGAPDESGARRREKGLARAGNARVRRGMLQLAWRFLRFQKQSALVKWFEARTADGRMATRKTMILALARKLLIALWRLATVGEIPPGVKLRPAA

SEQ ID NO: 170597 - protein, 419 aa, unidentified
MDVVVERCAGLDVHKDTVVACVRIPAPGGGRRSETRTFGAFTVDLLALRDWLLAHGVTLVGMESTGVYWRPVFYVLEDVVECWLLNAAHMRNVPGRKTDVADAAWITQLIEHGLVRPSFVPPPPIRELRALTRYRKTQIEERTRETQRLDKVLQDAGVKLSSVASDILGKSGRDMLDALVTGTRDPDVLAELARGRLRAKIPMLGQALTGRFGPTHALVVGEILAHIDYLEEAIGRVSARIEEVIAPFTAERDLLTTIPGVDQRLAEALIAEIGVDMTRFGSASRLASWAGMCPGQHESAGKSRSGRARHGDSWLQRHLAVAAMAAGRTKDTYLAAQYARLVGRRGKARARKAVGHSILVAAFHMLAGGVPYEDLGGDYYLKRNSPERRARKSLSDLKAIGWTVTENPDSVTCRPPRAA

SEQ ID NO: 170598 - protein, 344 aa, unidentified
MFYAGLDLSRKRLDVHVLDEAGEAVAERAICPDADGLRSLATTLGLSPVRAAVESMTGARFIHDQLELHGWDVEVADAAKVKGLAPLACKTDKMDAWVLAELCRRDLVPAIWLPSPEVRAERERARFRLHLVRHRSSLKNRIHATLLTFGKPCPVSDLFGHAGRELLARMQIPEPWKGSITASLELIDDIDRRIHDCERALRSLGASHPYVSLLQTAPGIAWVLGYTIASEIGDISRFATARKLVGYTGLCPRVYQSGERDRRGPLAKNGPRYLRWALIEASTHAARHPCYRQRYERTSKRLGKQRGPRVARVEVARSLAEAIWHMLTRNQPFAPAGAFETSVA

SEQ ID NO: 170599 - protein, 331 aa, unidentified
MDEVRRFVGIDVAKAALEVFIGSAGAAFSVANDEAGIRELLRQLTPPDFVILEATGGLETPVASALATSGIAVAIVNPRQVRDFARATGRLAKTDRLDAEVLARFGEAVRPEARPLANEQAQALEALVTRRRQLIEMLTAEKNRRARAPKVLHRSIDEHIRWLEKRLSGLDAELAELIRDTPLWRERDELLRSVPGVGKVLSSTLLAQLPELGMLNRKQIAALAGLAPFNRDSGKLRGSRCIWGGRAQVRRVLYMATVAGVRSNPAIRTFYLRLRANGKHAKPALIACMRKFLVILNAMLHNKTRWQTPAPSFLTSSLSPLLGAVSEHGCC

SEQ ID NO: 170600 - protein, 413 aa, unidentified
MRTGLTIFCGIDWAEDHHDIAIIDEAGTQLAKRRIGDDAAGYATLLGLLAEYGETGEHLAPVAIETGRGLLVACLAAGGRDVYVINPMAAARYRERTAVARAKSDAGDALVLANILRTDRHAHRPLPNDSDLVRAIAVLARAGQDAAWSQQQIANQLRSVLREYFPAALRAFCVKHVGLASAEARTILAAAPTPTAAARLTKARLRSLLKQADRQRNVEVWVERLHGIFRAEALHHSPRVEDAFGQQARALLLQLDAAVRATEQLLAATEAAFLEHPDAEIITSFPGLGTITGARVLAELGDDRDRFADPRALKAYAGAAPVTRASGKVRRVLHRRVKNDRLSAAGYVWTFAALTKSAPARAHYDRRRAAGDRHNAALRNLFNRFLGQLHHCLQQRQKYSEDKAFPTPQAAAA

SEQ ID NO: 170601 - protein, 340 aa, unidentified
MIEITTIGLDLAKSVFQVHGIDEQGRVVVRKRLRRSQVLGFFAGLSRCLVGMEACATAHYWARELMALGHEVQLMPPHYVKAYVKRNKNDAADAEAICEAVNRPTMRFVPVKTAGQQSALMMHRARDLLVRQRTMLINALRGHLAEFGLVEAQGAHKVAALVALIRNSTDERVPDGARQVLAVIADQIDDVGAKVAALEAQILAWHKSNPVSRRLATIPGIGPIIATAIAATVPDPSVFRSGREFAAWLGLVPRQNSTGGKARLGGISKRGDSYLRRLLVNGAHAVLFWAKTAKTNPWLISLRARKHRLVVAVALANKMARTAWAVMSKGEVYRPIAAAA

SEQ ID NO: 170602 - protein, 354 aa, unidentified
MNKYITESFVGMDIGDREIRFCILDPDGSVMDSGSVDTTIRGLNAFLDRFDTPKTVLVALETGTHSPWISHLLEAREFRVLVGNARKLRAIWDTDNKFDDRDAEMLARIGRFDPALLYPIHHRSRKAHADLAVIKARDTLVRCRSTLIAYLRGICKTAGARLPSCTAEAFARRVVEHLPKDLLAAAIPCVNTIQELDSEIRQLDSHIEKLCAEAYPESKTLRQIAGVGPITALSYLLTLEDPNRFLKSRDVGPYLGLTPKRDQSGQSDKPLPITKAGDTYLRRLLVGSAQYILGPFGADCHLRRYGMRIASRGGKAAKRRAVVAVARKVAVLMHHLWKYNAPYDPWYQPNAKPA

SEQ ID NO: 170603 - protein, 392 aa, unidentified
MSMYFIGIDISKYKHDCCIISAADQKVVSKFTIKNNKDGFKKLLTSINSLSSPEDIKIGFESTAHYALNLELFLEKSLLTFMEVNPVLISEYKKSTTLRRTKTDPIDCESIARWLMTVEYKPHSKGFYHAYSLKSLTRLRDRLIRQRSFYLVKITNVLDHTFPEFKPFFKERLSKTALYLLENYGSAEKMSHMNSNSYEKLRCVSRGKFSPQQFLELKQLASNTVGVNNSIFDVELNSLLTLYKSLSKEIETIENEIIMLIEEVHPHYMSIPGIGPLSAAVIYSEYGDISSNFNKPSQMLAFAGIEPSVNDSGTESHGGKMVKRGSSQLRYTLINCCLPLIRFDMTFAEYYAKKRAQGKPHRVAITHVAKKLIRVIYALERQDVDYNSQLIR

SEQ ID NO: 170604 - protein, 386 aa, unidentified
MPVETDLSRSLTTLEQDSTLIAVIELSQKSWLVAGLVPGLSRQPLKKLDPVPEKVVQVLERWRSEAVKAGRRIDRITVAFEAGRDGLWLARWLRVRGIEAHVIHAASVAVSREHRRAKTDRLDTVLLMRGFLGWLRGEPKHCQMVAVPTLEEEDARRPGRERDSLVRERTRLVNRMKSTLARFGVRGFNPKLRRAAEKLCGLRTPEGVGLPARTLAELKRDMARVALVREQLKEVERQRLQRLAAPQPTPEKTMVLLLAKVIGIGIETADLLVHEVFCRNLRDRRAVARYAGLTGSPDESGSRRREKGLARAGNARVRKAMIQLAWRFTSFQKGSALVQWFEARTLAGKGTRKPMIVAVARKLLIALWRYATTGVVPEGIALRRGA

SEQ ID NO: 170605 - protein, 322 aa, unidentified
MSDTSMIVAGIDTGKAELHVCVLPAGERFSVNNDKAGIARLVARCIAAGVVRAGIEATSIYHRAALKALRAAGIEAIELQPRQAHGLAVALLRRAKNDTIDASIIARLVEVLNGPWKQPPPAHLEALAEALTYIDMLDDRLVVLKTQRERFSSKRLLDRFDKEIKALEKRQRSELRCLIARLRDHPEMSDNLDLLLSIPTVGERSAAAMLIRMPELGSMTREQAASMLGVAPFDDKSAKRDGQRHIAGGRARLRKTVYMAAFAGSQRWNEDLRRFYLRLRARGKVHNAAVTACARKLIILANTILMRRTPWQDRRGTPCLAP

SEQ ID NO: 170606 - protein, 418 aa, unidentified
MSKTLYVGIDPHQKENFCCLLDQEGNKIINVFSVANNLEGAKELEDRIDLIMKEHCFTELKAATEAVSFLDLHIVDYLASSKLLSKYSPSIYQFNPKITSGFKKAYPDKDKTDAIDAFVIADRLRFGRLPEPYEDSQPYFPLKRLTRYRYHLVSTISREKNYFLTHLFLKYSSFSDVKPFSNVFGKTGIAVITEFFSSDELASMSLEELVEFLIKEGKNRFSDPEAVAQKVKQVARESYRIRPALANSVNLILSSTVENIRALTSSLKEVNEAIANEFKAFPNTLESVKGLGPVYSAGIFSEIGNIKRFSSHAKLAKFTGLTWRKSQSGNFEAEETYMTRTGNKYLRYYFVEAANSLRVHNEEYRLYYQSKYKEVPKHQHKRALALTARKLVRLVFALLTKNRLYQENVAFSKNGVNF

SEQ ID NO: 170607 - protein, 348 aa, unidentified
MVMVIGIDPHKASHTAVAVDSTGKVVGQVTVKARDQGHTQLLSWGRRVAGDERVWAVEDCRHVSGRLERALLVHGERVVRVPPKLMGRLRREQRGYGKSDPIDATAVARAALREGDLPVATLAGRSLDVRLLVDRREDLVGERTREINRIQWHLHDLDPDLPAKGRLTTRRGLQHIADRLDQLDGVRAQVCRESVERVDQLNHVIDEYQREIEQLVRQHWPELLDIDGCGVLSAAKLVGEIGDPRRFSREQKLAMHAGVAPLPVSSGERQRHRLNRHGNRQLNVAIHRIAVNQCKKHGSAGRAYRDRKMSEGKTKLEALRCLKRQISRTIYRTLREASVETAIAAALT

SEQ ID NO: 170608 - protein, 473 aa, unidentified
MTPDLTRTTFPDFLIAKELCMKKFLGIDVSKGYADFALIDERKQPVVGSFQLDDTPDGHTRLGDFIRQLFKEYPNLSLLAAAESTGGYENNWLDCLKKLQRCYTIKVTRLNPNGVHHYQQAKLNRAITDAISARMIAEYTLTHQEIIRFDQPDQTYSLRKQWTFINLLSKQRTQLLNQLDNLLYQSNPELMIYCRRYWPVWLLELLSIYPTAKDLAQASIKQLAKIKYLGHDRAQLIVKQARQSVASATDAVSGEMIKMVADEIIHKDKLIATSKKSLIENCSLPDAKLLGSITGIGKFSAVGLTIEIGAWLRFTSAAKLASFFGLHPVLRQSGDKTWVARMSKQGSSEVRALLFMCALVAIRHNPVIKQLYAHSLQKGKCKMSAIGICMHKLLRIIYGVLKSGKPFDPDIDQANRAKRFVQQKTTIRQSRRLYPLDENAPVSARQNKKRKEQSQSQRERVTVCEIKAPALSH

SEQ ID NO: 170609 - protein, 392 aa, unidentified
MFFLGIDIGKNTHVASLIDDNGKTVFKAFSFPNSTIGATSLLDKLTPFSNEIEIGMEATGHYWLALYSFLVEHGFVIHVINPIQTDGWRNATEIRKHKTDIIDSLIIADFIRYGEFLETSLANEDILSLRNLTRFRNYLVSSIGDLKRKTICILDQIFPEYESVFSNIFGKTSKEILLHFSSPAEFESITSEQLETALEQVSFKKFASKKISCISNIAKTSFGITFGLQSLTLQLKLLIQQINFIEQQVHDVEIQIKQLLHKINTPITTIPGIGDIIGATILGEIGDIERFSNPSKLVAYAGIDASVHQSGDYISTNNKMSKRGSPYLRTALFRAALIASVHDPVFKAYYQKKRSEGKHHLTCLGAVARKLCYTIHAILKNNCEYKVQLPTE

SEQ ID NO: 170610 - protein, 427 aa, unidentified
MTKEKMDREPEFAAFVGIDWADRKHVWCLQAAGSKKREAGELEHKVEAVEAWVAELCQRFGHRPIAVAVEQVRGALVFLLNKYECLYIFPVPSKMTAKMREALYPSGAKDDPRDADLLLDILGQHRDKLHRLSPDDEATRRVQNLVEERRKLMAEKTAQGNRLTSYLKIYFPQMVEWFEKLDIPLVCDLLERWPTLEELQKVSREELRTFFRQHHCHRGLMERRILAIGGAIPARGDRAVIEAKSAVVKVIVQLIRSLLQGIAELDQKIEGVAAEHPDFFIFASLPGAGAVMAPRLLAAFGSQRDRYSRADELQTYSGIAPVTESSGKRKWVHFRWACPKFLRQSFHEWAGHSIAQSTWARPYYQQQRGRGSDHHAAVRSLAFKWIRILFRCWKDRVAYDESKYLAALARRGSPLGKLAVVGMGASL

SEQ ID NO: 170611 - protein, 332 aa, unidentified
MSISYLLLGQKNLLMTKIVKKVGIDISKESFDVAYIENEKMRTKKYSYTAADIKQFIASLDSDSQCVMEATGIYHLRLAHALYDAGIGLCVVNPLSVKRFIQSKLHRTKTDKSDAIMLVEYGRIMEPDLWKPDSEHYTQAQQLLNIQAQLVKNRTSINNQMEAIELSVNQSKMGLNLLRKQLKFVENQLKQIEAELEQLIENDEDVTNIQTIPGIGRKTAIALMVYTKGMQSFDNHRKVSSYFGLSPRIVQSGTSVRGRGSICKMGMGHMRMLLYMCARSAKKYNKSCRELYERLLAKGKAKKLALIAVANKLVKQVFAIVKNKSVYVENFA

SEQ ID NO: 170612 - protein, 457 aa, unidentified
MRPRSKGNPPKVKTSTPQLPMLHLHAAGIDLGAREIYVAVPPGTCARSVRAFPTFTEDLHTLRDWLKDCGVTTVAMESTGVYWIPLFQILEAAGIEVCLVNARHCKNLPGRKTDVQDCQWLQHLHSVGLLRGSFRPADQVCAVRTILRHRDALVRGASRCVSHLHKALTQMNVQLQHVISDLTGVTGQAILTALLEGERDPQKLAALKDHRIKASRDVIAKSLHGDWRPEHLFTLKQTHALWQQHQSLIAECDQEIAALLQAFDARVDVPTTPLPPAKTSHKKAQRNEPQFAARQECYRVLGVDLTAVPGFQTPTVLVLLCELGPEFADKFPTANHFGSWLGLCPDNRITGGKIYSVHTRDVKSRVAEALRLAAQSLWRAQNYFGDLYRRWKARLGGPKAITAMAHKLARILWHLLKYKEAFNPEVFAKEEQKMKRKKLAHLHNLAAALNYRLVQNQ

SEQ ID NO: 170613 - protein, 355 aa, unidentified
MNSEKYIGLDVHQATIVVAVLDSSGRLVMESILETEAATILQFFAGLRGTVSVTFEEGTWSVWLYDLLKPHVDKLVVCNPRKNALLKDGNKSDRIDARKLAELLRGNQLKPVYHGETGVRMLRELARSYLTIVKDLSRVMNRLKAVYRSWAIPCAGRGVYYRRHRAQWLAKIREAGVRRRAERLYEQLDMLQHLRQQARRELLAESRKHVITAKLRQIPYLGPIRSALAVALIQTPHRFRTKRQLWAYSGLALETRISAEYRLVEGQVRRSKKLLSIRGLNKDHNHDLKGLFKGAATMASVRPGPFQDFYQASLAKGIKPTMARLTIARKIAAITLTLWKKGENFDADKLKSQAA

SEQ ID NO: 170614 - protein, 341 aa, unidentified
MQVTTVGLDLAKNIFHVHGVTETGDVAFNRPLRRAQVLAFFQRLSPCLVGIEACASSHHWARELSKLGHTVRLMPPMYVKPYVKRGKSDAVDAEAICEAVTRPRPTMRFVEIKSKEQQALLSLHRARDFVVRQRTQLINMVRSLAAEFGITIARGVARAIEFAKSIIDGKQPGPPDLAQDVLRVLSRQLIDLHNRLGWYETMLRIQARLSRQAQLLQTIPGVGPVTASAVAATIGSGRQFRSGREFSAWLGLTPRNHSSGGKERLGKITKMGDRYLRQLIVVGMTSRVRQVAPHPERADPWLTKLLQRKPARLATVAMANKTARIMWAILTRDEPYKPHAV

SEQ ID NO: 170615 - protein, 346 aa, unidentified
MTIVEAARGITGGIDTHGEVHVAAALDELGGLLGTESFDATPDGYAALLSWLAGFGRVGTVGVEGTGSYGAGLARFLARAGVDVIEVDRHNRQARRRQGKSDPIDAVEAARAALSGRALGKAKSRDGSVEAIRVLVVAKRSARQARVKALTQMRQLSFTAPDQLQCRIKGLATPQFIAAAKGLRPTRSADPVTVATKAALSSLAHRIGELDHEVAELDARITPLLQAHAPELLAVYGVGIDTVATLLVTAGDNPERLRSEAAWAHLCGVSPLQASSGKVARHRLNRGGDRQANRALWIIVISRLASDPETQAYMERRVKEGRTKREVIRMLKRYVAREVYRQLPRS

SEQ ID NO: 170616 - protein, 313 aa, unidentified
MRPSNVYVGIDVAKERLDVAQRPSLEGWRVANDERGIAELVARLVQLKPALVVLEATGGMELPLVGALAAAGLPVVVINPRQAREFARATGRLAKTDAIDAQVLAQFAEAVRPQLRPLPDAAAQELSALMTRRRQLIEMLTAEKNRLRAAARAVRPDIQEHIHWLERRLADLDGDLSQTIRSSDIWREKDDLLQSAPGVGPVVSTTLLADLPELGTLNRKEIAALVGVAPLNRDSGTLRGRRTVWGGRSKVRAALYMATLVATQRNPVIRTFYQRLLSAGKPKKVALTACMRKLLTILNAILRSRTPWPAHAI

SEQ ID NO: 170617 - protein, 414 aa, unidentified
MEQKLIYLGIDWADDHHDIVITDDSAKTLNQFQIDHTPDGFALLHANIANYQKSPADVLIAIETNRGLLVHELIRTGYTVYAINPKAVNRYKDRHVLSKAKSDILDAQALAHLLRTDRHRFKALVPLPEDYRLLDRFCGDLRKLIDEKSRIVNQTISCLKEFYPKALELFSLNSQIFIDFLKAFPDHDTLRACKKKTFLAFIKKHRYPYPGKIEELWETIQSSTLQADTVTTRAGKLRLLMLLDQLENLKIHCTHYEQEIQKILDTLPESNSIQSLPGVGDRLAPELVAALGPNGKDTHHRFHSAEEIAKLSGCVPIIKQSGKWEKVSIRHACVRSLRRTFHDWAFTSLKSSTWARAYYDYHKARNQSHFTILRNLGKKWIKILFAVWSKGTTYDEALHIQNLKARNIPWAMAL

SEQ ID NO: 170618 - protein, 401 aa, unidentified
MLDAARRIVSERSFAHAGDAVAAFAEWLNELAGDDPGGVAVAIEIPRGAVVETLVERGFHVYAINPKQLDRFRDRHSVAGAKDDRRDAFVLGDSLRTDRDSFRRVRLDDPVVIQLRELSRVDEDLGRENNRLANRLREQLHRFYVQALKLCPAADEPWLWSLLELAPSPVAAHGLRIKRVERLLREHRIRRVSAEEVIAALRAPALQVAPGVVEAATEHIGLLLPRLRLVHSQRQRCGERLEALLDQLQATPDQGPKQREHRDVEILRSLPGVGRVVAATVLAEASWALAERDYHALRAHAGIAPITKQSGKHRVVLMRHACNGRLRNALFHWARVAATCDPASKTYYAALRGRGHSYPRALRTLGDRLLRVLIAMLKNDSLYDASKRCSRSTPSSLEAVA

SEQ ID NO: 170619 - protein, 348 aa, unidentified
MAIIGGLDLHRQQITFDCLNTDTGEIRTGQLRPATREAFRAWLAKSFQGREDVRLAVEGCTGWRFVVEEMQRAGVEPHLAEPADTATLRGRKRRAKTDKADARLLRQLLGQERLPESWIPPQHVMEVRTLARLYIALMDERRAWQQRIQAQLYHQGVPPVRGLLTLEGRKAIEAAQLSPTARQMTETALVTITALDEQIEPLRAQLKAIGRCQPGARALMAIFGIGALCGVIIWAELGDCRRFRRSDQAVRFAGLDVTVWSTDGRRPPGWLSHQGSPVLRWALFEAAQAASRSQSPDYDYYAQQRERQSGKNPTLSVARKLLRRCHHILRELGDEAWLPLEEQKDKAA

SEQ ID NO: 170620 - protein, 341 aa, unidentified
MSTNIYIGADVAKAKFDVATWSGQSGTLLNTFPNTPSGFAQLGEQLRTLWPSRETQIVLVLEPTGGYEMGLVAYAYDQGWEVCLPNPKQVRDFAKGRGRRAKTDVLDALVLAQFGVEQQPEPQEELPAEVQELSELLHRREDLEQLKRSERNRLLGFQQRPAPTPAVLQSLERTIAALDAELDAVEKAIKDLLNRHPDLKREAKRLDSVSGIGEKTVLPILVLLHRWKVRTSGRGTAKGLTAFAGLDPQRHDSGSSVHKRARISKMGDHSIRHYLYMGALGGIRGNNPLRTFYRRLVSRGKAKRLALVAAAHKILTWAWAVFTQDVDFDPSRFSSEATAAA

SEQ ID NO: 170621 - protein, 436 aa, unidentified
MSDSNVRYVGLDVHKRVVEACLLSPEGKILRRDRLALSRSYLETYAREVLRPTDHVALESTTNTWAVVRILTPHVAEVVVSNPLATKAIAAAKVKTDKVDACVLAQLLRCDYLPRVWRPDESTLEMRRLTARRAGLVSDATRLKNRVHSVLAQRLIQPPCHDLFSVEGRAWLAALELDAEGRLYLDSDLRLLKHAEEELALLDQMLAEKGYQEERVKLLMTLPGVSLAVAQTLLAALGNIGRFSSPDEAASYLGLVPSTRQSADHCYHGPITKAGRGHARWMLIQAAHHLHNQPGPLGVFFRRLVRKKSYNVAVVATARKMVVIAWHMLKHNEPYRYAQPKQTEIKLARLRVKATGRRRSTGPAKGTKRQAKRPGGSQTIKSLTTVYEQEGLPELPPPKEAERRMLRSHGVAPFADSLATEHILPGGRAKHRVAKT

SEQ ID NO: 170622 - protein, 371 aa, unidentified
MKQQSKSSKITVGLDLGDRRHRFCALDERGEVVEEGSICNERDSLRKLAGRYHGALGVMEAGAHSPWISRFLEALGWRVVVSNPRKVRAIYQHERKSDRHDALMLARIGRMDLALLYPVRHGTAEAQQDLLRIKLRDSLVRARVAVINSVRFTLKSLGYTVRNPSSARFHKVVMEEVPESVREMITPSVQALAELTARIKMLELEINTLAQMKYPQSAQLQQIPGVGPITALYFVLKIEDPNRFAHVRDVGAYAGLCPRRDQSGESDPQLRISKRGDAYLRRLLVSAAHYILGPFGPQSALRAYGLMLAADGTAQAKKRATVAVARKLAVLLLSLWKSQQPYQPFPGARLNGQQEDRRSGTIALHRMEATD

SEQ ID NO: 170623 - protein, 384 aa, unidentified
MRADFIPTEYDIFTGLDVSKKKMSVTFTNHQGFIRSLNMPHKAEHLVNYVRKHFADQKIAFVYEAGPTGYGLYDGLATQAYRCLIAAPSMIPRAPGQRVKTNRLDSKGLSENLRGGQLKSIHVPPPIYRQLRHLTQLRDVLVSELAGMKQRIKSLLLFEGIDFPPAPPGSQWSFIVKHQLRKLPCSGTVRFKLDQLLDSIEFHEKQVLKTITEIRRFCRNDPELSQCIKYLMSIPGIGWITASQLVGRIGNWRELKNIRQLAGFLGVVPTEHSTGEKVDRGSITRTGDERLRSKLIQASWSAIRQDTELREFYRSVYRKHNREIASRVAIVAVARKLTVRISVVLMKQRPYEVREKVHSAPLTQEETSPQGTTRRQAEPGEETP

SEQ ID NO: 170624 - protein, 435 aa, unidentified
MRKVHKNAAGADLGSKEIFIATHLPEVKTFKTYTVDLKAAVAYLLESGVQTLAMEATGVYWYNIYHMAKEAGIDVFLVNPYDSRNLPGRKTDVLDCQWIQKLHTHGLLRRCFVPEESIQQMRHYMRLREDHIQMASMHIQHMQKALISMNIQLTGLISQVQGKSGMAMIDAIINGERDPDHLLALCSTQIIRKKGEEVRKALEGNYLPQYIFALRQARDLYRFYDKQISECDQQISDLMAELNAGKPLPRKSKAKPVRHHAPEIKNLHEHILLLCNGNDVTRIPGLTDYSALKIISEVGTDMTLWPTVKHFTSWLGLAPKQNQSGKMRKRSKRRPSNNAGQVFRVSAQSLIISKHNALGAFGRRIKSRKGPFAANKALARKIAEMYYRVLTQGLEYVEQGVKIYNEQFAQNRMKYLLKATKKLELEIAMNQCVNK

SEQ ID NO: 170625 - protein, 322 aa, unidentified
MSQPNPLCVGIDVSKATLDIAASSDVAQFTVSNDSDGFNAIITGLRRLSVALVLMEATGGLEVAVACSLQAEGFEVAVVNPRQARDFARAMGYLAKTDRIDARVLTQMAEVINRHPERKRFIRALPDAERQALAAMVVRRRQLIAMLVAERNRLHPFHPQNKKSINTIIKALEDELVRLEKEMDSHIRNHFKEIAERLSSIKGVGTMTVSAMLAEIPELGTLSRREISALIGVAPVNRDSGTMRGRRTIFGGRAGVRSALYMAALVATRFNPVIKTFYVRLLAAGKAKKVALVACMRKLLTILNAMLRKNEEWDESYHHVAP

SEQ ID NO: 170626 - protein, 352 aa, unidentified
MRTSQKTPETITTIGIDLGKNTFHLVGLDKRGAIALQRKVSRSQLEHRLSNVPRCLIGMEACSGSHHIGRQLTALGHDVRLIPAQYVKPFLKGHKNDYRDAEAIAEAVQRPTMSFVAIKTPEQMDLLALHRVRSRLVGQRTGTINQIRGFLIERGIIVRQGVVPLRKALPDILSSSSDILSPRMVNLIAELMQDWRRLDERIETVSTEIEALARQDDSCQRLMTVPGVGPIISSAMVAAIGNGAGFKQGRDFGAWLGLVPKQESTGDRTILGKISKRGNKYLRTLFVQAAHVVLVRRPSTAKRGLRPWIEQASKRLHRNMLAIALANKLARIAWAVLARGQAYQPRIAANAG

SEQ ID NO: 170627 - protein, 406 aa, unidentified
MTPKFVASWIYLYTMNWKHINGNRDYRIQIGGHYMNYNTVYVGMDVHKESFTLCSCKYEDEKASHYQRTPASYKNVLRYLAFLRTIYGEDTRFVCGYEAGCLGYSLYHQLENFNVECVILAPTTMLEQRSKRRIKTDKRDAEIIARSLAQHNYSPVHIPTETDNQTKEFIRMRDDHKAELKKIKQQILSFCLRQGYQYDGSGNWTEKHVKWLRSLKPVGLYKEILDEYLLTYTTLTDKLNRLDHRIEELASKEEYKESVSKLTCFLGIRTHTALSVIVEVGDFQRFASARKFAGYLGLVPGQHSSGDDRNGLGITKAGNTHVRRLLVESAQSYTRGKIGYKSRVLRSRQAGNSPQVINYADRANERLRRRYYKMVLKDGKKYNIAKTAVARELACFIWGMMTDNIY

SEQ ID NO: 170628 - protein, 338 aa, unidentified
MEFYGAIDLHGKNNVLVIMGGKKKHLEKRMPNDLDYVLKELKPYREDLTGIAVESTYNWYWLVDGLMEEGYKVHLTNTSAVKQYEGLKYTDDRHDARWLAQMLQLGILPVGYIYPKEDRAARDLLRKRSSFVRQRTANILSIKNLIARNTGRTISANKVKQLTDEDVERMFDNQDHAMAIKSSLHVMWSLDEEIKSIEKRVKEVASLRPEYRHLLTVPGIGEILAMTISLETGDIGRFRKPGNYVSYCRGAKSTKLSDGKKKGKGNRKNGNRYLSWAYIEAATHCMQWSESARKYYQRKSARANAIVARKSLAAKLTRACYYIMRDQIPFDPKKMFGF

SEQ ID NO: 170629 - protein, 356 aa, unidentified
MVKSNRLDFTDQPIYIGMDVHKKSWTVSIHSAICEHKTFTQPPEVEILVNYLRRNFPGASYHSVYEAGYSGFWIHDQLKEKGVACTVANPADVPTKDKERRKKRDRVDGRKLARSLRAGVIEGIYVPCRPKLEDRSLVRTRQSMVRKRTRCKNQIKGILFFYGITLPEDGAEKGWSGQFVRWLENIQMERASGDTALKIHLEELGYLRQMIVKLDREIRVLARTEEYASQVRLLRTIPGISTLTAMILLTELQEISRFASLDELASYVGLIPDTHESGESEHTGGITKRRHAQLRASLVEAAWIAARKDPALLMAFERLGKRMRKTRAIVKIARKLLNRVRYVLKNQRPYLLGVVE

SEQ ID NO: 170630 - protein, 341 aa, unidentified
MNIKRVGIDLAKQVFQVHGVDYQDKVVLRKQLRRNQLLSYFATLPPCLIGMEACGGAHHWARELQKLGHTVKLIAPQFVKPYVKSNKNDANDAEAICEAVGRPTMRFVSVKTIAQQDLQAIHRIRSELVRQRTAKVNQIRGFLAEYGLVVGRQVATLRRALPELLEDAENGLSFDFRALLEDLRQDLIRLDERVAEMDKKVHTLADSMPATKLLQSIPGIGPISATAIVCAVGDGKQFKRGRDLAAWLGLTPRQQSSGGKDRLLGISKRGDTYLRTLLIQGAKSVLKVVDKKTDPRSLWLQNLCARKHKNIAAVALANKNARIAWALLSNETSYLPEGKPA

SEQ ID NO: 170631 - protein, 389 aa, unidentified
MYYLGIDVAKRKHTAMVVDEQGQVFTRAFSFSNDRAGFGQLLAKIQTLTAAVTVALEATGHYWLALYDYLTSRDYTVLVLNPLQIAAYRRTGIRKRKTDRHDAYWIADFVRIGGGQPCHISQQVILQIRELARFRFRLVEQIGDCKRKIISVLDRVFPEYETLFSNIFIRTSRRLLQEAVTAEEFADFPLDELHSLLSSTSRGRFGLSKAQQIIDTAAQSIGVSFLADAARLELHCLLQQIEFLEAQVADVDAALNTLLQQTEQYLTTIPGIGATTAAAILGEIGNIKRFPSLEKLVAYAGIDPTLYQTGQFEAKVAHMSKRGSPYLRHALWQAASAARQYDPQLKAYYQRRRAEGKAHGVIMGAICRKLLARIYAVLSENRPYVIDQL

SEQ ID NO: 170632 - protein, 343 aa, unidentified
MTRFVGLDVSQKLTAICVVDDSGRRLWRGQCASDPDQIERTIRRHGGEDARIGIETGPMTPWLVHELRGRGLAVTCLDARHARAVLKMQINKTDQNDAEGLAQIMRTGWYRSVHVKSFDSHRARALLGARAQLVGMTTRLSNHIRGVLKTFGMLPGAGRNLAFDRRVETLLTDRAEVAPIVQPMLAAWRQLRQQTATFDKAVRVLVKSSPTCRHLMGVPGIGVLSVLAYVSMVEDPARFGRSRSVGAHLGLTPKQYQSGEIDRSGRISKCGDALARTLMYEAAVVLMTRVKRALGLKDWARSIAKRSGAGKARVALARKLAAILHSMWRSGEPLHWSEQPAAV

SEQ ID NO: 170633 - protein, 372 aa, unidentified
MKEDSVIFIGLDTSKLKISVAVAEGERNGEIRFFGDISSEPASVASLVNKLSKRGAKLHFCYEAGPTGYGLYRQIVELGHDCVVVAPSLVPKRAGDRVKTNRRDAVSLARLHRAGELTAVWIPDEAHEAIRDLVRAREAASDALKQARQQLQSFLLRHGRIYTGRKPWTRAHTRWLTCQAFDHPAHHILLAEYCQAIEDADVRLGRLTELVVETAASWSMAPVVAAYQAMRGVAFMTAVTFVVEIGDVRRFDNPRQLMAYLGLVPSESSTGERVKRSGITKAGNTRARRVLIEGAWTYRFPARVSPTIQARLEGLPRSVREIAWKGQVRLCARYRKLMAAGKPKVVAVTAIAREMAAFLWAIGQEVAPTAKI

SEQ ID NO: 170634 - protein, 393 aa, unidentified
MVYVGIDVAKDKHDCFIVNSDGEVLYDVFTIQNDMDGFEDLFFKIKTASKDLSKVKVGLEATGHYSCNILGFLKNKGLTTIVINPLYTSLSRKSVSLRKTKTDKVDARTIANMIMSDVSLKPYSDTVYHNEDLKSLSRYRFDKVSDRSKLKQSVSRLVNILFPELEKLVSTLHAKAIYELLSEFPGAHQVASANLKHLAALLYSASKGHFGREKANEIREAARRSVSSYLPAKSLELRHTIKLIREMNDEISEIEAEIRKIMDSIDSPTLSVPGISYSLGAVIVSEVGDFSRFENPDKLLAFAGCSPSTYQSGQLYSTHAKMEKRGSRYLRWALLNAAKYVCKWEPTFAAYLRKKLAEGKHYNVAVSHAAKKLVRLLYHLETTGEKYIPQTLS

SEQ ID NO: 170635 - protein, 412 aa, unidentified
MTGNMEVVYERACGIDVHKNEIAVCLITGQRKTDTRKFGTLTKDLREMVEWLKSENVQMVAMESTGSYWKPLYNIFELEGVEAIIVNPQHMKAIPGRKTDINDAQWIAKLLRHGLLRASFIPDKEQREYRELTRYRNSRIEERAREINRLQKFLEGANIKLASKISDITNLTATRMIRLIIGDEEMTIDKISEVRSNRCNSSAEEFLDAMTGIVSDLQRHLLREVLQVIEEQTKQIERIEAMVKAYTNKEYDIAAKALEVIPGIGRISAEQIIAEIGVDMTRFPTAHHLCSWAGLSPGDNESAGKRKSGRTRKGNKTLKKTLVQCATTAVKNKETFFHAQYQRLVVRKGGKKAVVAVAHSMLIAIYHVLLGCEYRDLGADYYTQFNRDKKIQSHLKQLKKLGWEQPCPVIAS

SEQ ID NO: 170636 - protein, 352 aa, unidentified
MRRRPDEILHPSPTFYCGIDLHARWMYLCILDPQGEVLLHRNLRACPEAFLKAVEPYRQDLVVAVECIFSWYWLADLCAQEGIEFILGHALYMKAIHGGKAKNDKIDSQKIAVLLRGGMIPVAYVYPPEMRSTRDLLRRRTYLMRKRAELLVHVQNTNSQYNLPEIGKKIAYRANRSGVAQRFSDPAVQTSIAADLSLIDFYDTLLNRLELFITSQAKQQDHHSFYLLRSVPGIGKILALTLLYEIHDIARFPRVQEFVSYCRLVKCSRQSAGKNYGFSGKKIGNVHLKWAFSEAAVLFLRHNPEGQKLLARLERKHGKAKALTILAHKLARAVYFILRREKAFDLTQFLAA

SEQ ID NO: 170637 - protein, 331 aa, unidentified
MNYSHFVGLDVGKKTFDASLMSAAEKELSHKSFDNTPEGIQSLLDWIAGYHLSLSKLLFCAENMGSYVTELSVSSVSMGFSLALVCPLTIKKSIGLQRGKNDRIDAKRIANYAVLHYRKLELYKLPNKDLVRLRGWIIIRDNLVKQKVSSIKLLETFSQMAKLADVTESISFLEEQLKSIKEKILEVEEDMEQLIAASSSLCTNYLLLRSIKGIGIINAIVLLCVTNNFQRFDNPRKFACYCGVAPFEHTSGISIRGKTQTSSLANKEVKVYLTRAAITAISWDPQMKAYYKRKIAEGKHKASVINAVRAKIIARSFAVIRRQTPFVTLAV

SEQ ID NO: 170638 - protein, 326 aa, unidentified
MQGKESSEQETNGKSYVGIDVCQSWLDVHILPAAQTFRIPNTDQGHRLLKRKLEGHEVELIAIEATGKWHRKLHRSLHAGGYRVAVVNPLRARLFAKAIGFLAKTDRLDARMLAMFAMSLTPAVRPPAPESFDAIKELVRARESAVDEQTALKNQQASAETAFLRRQLVSRLARIAKDIKALDAEIVRSIKADEGLAHRYAILLSIPGFGSVTAVTLLVCLAELGSCDHKQIALLAGLAPIADQSGKREGRRTIHGGRAAVRRILYLAALSAARYNRDMKVLYARLVAAGKLKKVALIAVARKLVVLANILIRDDRPWQISPPSHA

SEQ ID NO: 170639 - protein, 349 aa, unidentified
MDDIAPAAAVAVAAAAAPAAAPAAAGASGCFVGVDVSKAALDAFADSPGRGAGRSFANTPEGFAALAEWLRPLGVTLVVIEATGGYERAAAVALMDGGFEVAVVNPRNVRDFARSAGRLAKTDALDARVLAEFGRRIGPRPTPRPSEAQLRLEALVARRRQVVRMRAMELNRLQQTTEKFSLRLIKGHVAQLDGQVGKLEKEIASLIERDDDWRGKAELLAGVPGVGPATAAALLAEMPELGAPGAGARRLCALAGLAPYPDDSGTVKGARRVRGGRAAARAALYMAALSARRCNPAVRAFAERLKAAGKPFKVLMTACMRKLLVILDAVVRSGKPWEDRCPQSEAANA

SEQ ID NO: 170640 - protein, 319 aa, unidentified
MQANAQFIGIDVAKAELVIGCAGQVSTLANEPAQIERWVRSVPAGSVLAVEASGGFEQALLGAAHTAGLRCYLLNPADVRHYARAVGLRSKTDRVDALVLARYVQAEHAHLHPWQRPAALQRELDVLLKRRAMLVKTRQQVRLALADQHDLLRSAKALLAQYAKLLGAVERQIRDKIGLLSGGAAQLRLLRSIPGIGWLNAAYLTNLFNRIAFVRSDSLVAFAGLDPRACDSGTMRGRRRLSKRGPALMRQLLYNAAMAAARSETFQSMKQALAARGLPITAIYNIIARKLLRIAWAVFKTQSPFDPAKVGPAGPAQPT

SEQ ID NO: 170641 - protein, 305 aa, unidentified
MDDQSKTQCLANADADIAALVKELVPRSEEIGAIVLEATGGFERQVVASLCAAGLPVMVVNPRQARDFAKSMGYLSKTDAMDAQVLSHFARTLHQSAQRERLLMKLPDANQEALEALLVRHNQLIGMRVAEENRLAMSHRSQHKSIKAVIQMLDRQIAAIDKNMAGMLKEHFADKLALFKGFKGVGPCTQASLMGALPEWGQLTHAQIAKLVGVAPLNADSGRHKGKRITWGGRATVRTALYMAALSAIRYNPVIKTFYERLLANGKLKKVALVACMHKMLTIMNAIVKSGIPWNPEHQNVPKSA

SEQ ID NO: 170642 - protein, 451 aa, unidentified
MSRSRAYKRTDVKQIDLAVLRERTLEFGNAGVTVGLDIGKSEIVACLRWPHGEFERPWSVRNPDQIPVCLDVLKLVKSVGDSLTVGMESTGTYGEAIRRGLTEEGIEVHRISGKATYDYQEIFDGVPSQHDGKDAAVIAELTAYGKGTAWPWQADSELLASVKHQVFRAEAYRGQQTQWSGRLEGLLARHWPELTNLLQLESPTLLRMIGHYRSPARVAAEAEAAGRLAGWGGAKLAESKIRQVLQSARSTRGVPPSDAESAWLAEVASNTLLAYRQVQSAKSELEALLAAEPTWSRYTTIGASTLAAIWTHAGDPRDYDSGGAFLKALGLNLKERSSGHRQGELAIAKRGSSRARRWIFYWALRTVQREEVSGWYADFTQVGRKSSNHGKREARRMKGVVALMRKLARGLRYAMIREEDFDYGKLFEDQPVKRKRRRQRRGCRGSSAGVL

SEQ ID NO: 170643 - protein, 410 aa, unidentified
MELLYPHCAGLDVHKETVVACIRHMADGKVTTDVKSFNTTTQELMELSDWLSSQGVTHIVMEATGVYWKPVWHILSDGEFELVLANAAHVKNVPGRKTDVNDATWLADLMAHGLIRASFVPDEPTQQMRDLLRTRKQFVRERSSHTQRIQKTLEDANIKLDSVITDIVGLSGRRMIEALIAGETAPEVLAALAHGRIRATATEREAALRGRVTAHHRFMLQLHLDHLDAVNATIARIDKEVDGQIEPFRVAIQMLTTIPGVSSLAAEVMVSEIGIDMSRFKTEGHLISWAGLCPKNDESAGKRRSNRMKKGAPWLKTTLIQCAWAASRTKGSYLQAQYLRIRSRRGPKKAVGAVAASILTATYHMLKDGTLYQDLGANHFDNRDKDKQALRLVNRLQSLGFAVQITSMAA

SEQ ID NO: 170644 - protein, 324 aa, unidentified
MNYLGVDISKNNFDCCVFVDDTKKKNKKFENNKIGFTKLIDWLTKLDINLLNLTVIMEATSIYHENLAYFLNNQNIKVCVANPARVRKFAAGISVLTKTDEVDAQVLVKYGQLAPYSLWQPDSFSLRLLKQLMLRRDAYLSELNREKNRLDQSKCNDTDLEIIEIILDDIESLQNRIKFIDRRIDDLISEDAVLTHKLSLLESIIAVGKRTALLLLVLFSKDFTTASQAASFCGLIPIQKQSGTSVRGASRISKNGSSKVRSKLYMAAVVAIQHNPHIKIMYNRLINNGKSKMSALCAAMRKLIHIAFAVLKHNTPYDEKYAFF

SEQ ID NO: 170645 - protein, 337 aa, unidentified
MVYVGVDLHRKSSHVAVLADDGEVLASRRIASQPHEFLRVFGELEEEPVGVAFEATYGWGWFADLLQDVGIPAHMAHPLATKAISSARVKNDRVDAKTLAHLLRTNLLPEAWAAPPEVRDARRLARSRISLARISSRLKCQIHALLADQAITPPLTDLFGPGGRRFLQTVHLRPIPQARLEANLRLVDLIGPELASADAELRALFRGDHRIRRLIPIPGIGFTTAAVITAEVWDVSRFPSPRQLCSWAGLTPTERSSAEHTHRGHISKQGSRWLRWAMVESASRPRLNDPSLRRFRDGIARRRGAKVAKVALARRLLTLCFYALRDEDGCRAYPVQP

SEQ ID NO: 170646 - protein, 358 aa, unidentified
MYKFMKKFFIGVDVSKDTVDVSFFDDDRMKSPEYLAQYSNSPKGFREMVKDLRMCCHGISSGQWLFCCETTGRYDHPLCHWLVDHGMVVWRESALQIKWSSGIQRGKNDRVDSLRIAEYAWRHQDKMQKFVKPSESLSNLKAAFTHRRRLVEKRTATRCQLKSMSSEKGLSASVARMIVRDLSREIERLSASIATMDESIQKIIRSDSELDRNYRHIISVKGVGPITAVALIVCSGNFKAITSAKKMACYCGVASFRSQSGTSINRKASVSNLSNRQIKSLLSMAARSASRSNPVFAEYFNRTLSRGKPVALVYNNLRNKIITVVYKLIERNCDFDVDYKRMHSTGQRANEPAIRETV

SEQ ID NO: 170647 - protein, 389 aa, unidentified
MKIFVGIDLAKLNHFAAAISSDGEILIEPFKFTNDADGFQLLVSKLESFDKNSIIIGLESTAHYGDNLVRYLVAEFYQVCVLNPIKTCQMRKNNVRKTKTDKVDTFVIAKTLMMQDDLRFITFFDLDMMDLKALGRFRQKTIKQRTRLKIQLTTYVDQVFPEIQYFFKSVLHQNAVYALLKEAPSPKEIASMHMTHLANLLKVNSHGHFTKEQAKELRVLAQKSVGANDSAISIQITQTIQQIELLDSQLEKIEAEMTDIMKFNDSVIMTIPGIGYINGGMILGEIGDIHRFSNPNKLLAFAGLDPSVYQSGNFQAKTTRMSKRGSRVLRYALVNAAWNVVRNNATFKAYYDAKRSEGRSHYNALGHCAGKLVRVIWKMLTDEVEFNLE

SEQ ID NO: 170648 - protein, 312 aa, unidentified
MDAIYVGIDVSKDRLDVAVRPSGESFVVSRTGAGIDELIERLKPLSIKLVAIEATGGFETVVAAGLAGAGLPVVVVNPAQVRAFAQALGKRAKTDPIDAAVIAHFAEATKPQLRQLPDATTQLLADLVARRRQIVEMIAAESQRARHVTLPRLKKSIARLRKALEKELSELDNDISDHVRGSPVWAEKDQLLESVPGIGPTVARTLIAELPELGSLDRRQIAALAGLAPWTRQSGKWRGKSFIGGGRSSVRRALFMGAMVAARHNPTLKLFRDRLVAAGKNKLVAIVAVARKLLTILNAILRDKTPWQPKTA

SEQ ID NO: 170649 - protein, 339 aa, unidentified
MSAIVTIGIDLAKNVFAVHGVDATGKSALVRPSVPRGKLLELIASLPPCLIGVEACSGAHHWAREFEKFGHTVRLMAPKFVIPYRLSGRRGKNDAADAAAICEAVTRPNMRFVPIKSIEQQGQLMVHRARQGFVEQRTATFNRIRGLLSELGIVLPLKAAVVRREAMARLEDLPGWANTVIGDLLSEVSHLDERIAQYDRHIALMARQSIEAQRLMQLCGVGETTATALLSTIGNGRDFKCGRQLCAWLGLVPGQYSSGGKQRLGRITKAGDPYLRSLLVLGARAVLAAAKTKSDPISRWAVSLEQRRGYWKAIVAIAAKNARMCWAVLSRGEAFRLPA

SEQ ID NO: 170650 - protein, 405 aa, unidentified
MGKVFVGHDWAEAHHDVHIEDEQGRRLAKARLPEGVEGVARFHELVAPFVEDPAEVVIATETDRGLFVGALVAAGYTVLAVNPLSTSRYRERHSTSGAKSDPGDALVLAELARTDAHNHRPIAGDSDLAEAVKVLARSHQSMIWTRQRQTNQLRSTLREFYPGALTCFDDLDGRDALAVLAVAPTPVLGRSLSRSKIASALRRGGRQRRVEERTAEIQAALRADQLAAPDLVSEAMGVTVAALVAVIVELSAQIARLEESLADRFEKHPAAEVIRSLPGLGMILGARVLGEFGDDPNRYADAKSRKNYAGTSPITKASGTRRVVLARFVRNRRLADACYMWAFASITASPGARAFYDQRRAAGDTHHRALRALANRLVGVLHGCLRHGVMYDEDTAWGHRMEQAA

SEQ ID NO: 170651 - protein, 416 aa, unidentified
MNAVGIDVSSRKSTVAVLRPLGEVVCLPFDVTHDIAGLASLAEKLKALDGETRVVMEHTGRYYEAVAKALHEAGLFVCAVNPLLIKEYGTNSLRRVKTDKADAVKIARYALDNWADLRDFTPMDAIRYDLKTLNRQFQLASKQRTASANNLIALLEQSFPGIRKCFDSPVRSDGTQKWVDFAHSFWHVDCVRKQPFPAFCERYRKWCKRHAYLFKLSNAEEVYALAKRAVVLTPKSKVVKVLVQEAANQLISISRSVEVYRAEMDRLAAMLPEYPVVMAMYGVGKSYGPQLMAEIGDVRRFERKQALVAFAGIDPMPNQSGDKNVRSNKSSKRGSPYLRKTLFNVIRTYLQCAPQDEPVFQFLNRKRAEGKPFYVYMLAAANKFLRRYYAKLRDYFASLDTLQPVDPIPTILKATL

SEQ ID NO: 170652 - protein, 468 aa, unidentified
MLHAAIDLGGQESWICVRSETGEILEERPHRTASLPQYLRRQPPSRVVVESCSEAFHVADAALESQHQVRVAPATLVRSLGVGSRRTKTDQRDARILSEVSCRIDLPSVHVPTNQARERRSRCAVREQLVTSRTGLVNAVRGWSRQHGVCIPTGTMARFPDRARAAALQTPDGLPEFVGRILLVIEVMNAQIAAADDELQRLAKSDPICQRLMTVPGVGAMTALRFVAAIDDPTRFAHAHSVSAYLGLTPGEHSSSKHKQRTGITKAGPAPVRRVLVLAAWQFQRCRPLDPLVQWTKGIAERRGKFVATVALARKLSGILYAIWRDGSRKRHGQGTGSRTDLHDFGPAMNTGLHDQKRGVLRVNDPAFPRSLHHEVFHCGFQKITPSMFANDFLTERLPDPVIHGKRFPAMDGDALPAHDIDHVSALVIEPEENEIAFLDTLLRLHLIFHNIFLTILKPGFRMVVVRG

SEQ ID NO: 170653 - protein, 343 aa, unidentified
MQTVTTIGLDIAKSVFQVHGQDDAGQVVIRRQLKRRSVLAFFQKLPPCLVGIEACASAHHWSRELQALGHNVRLIPPAYVKPYVKRQKNDAADAEAICEAVTRANMRFVPTKTAEQQSGLVLHRTRHLFIRQQTAVINAIRAHLAEFGIVAPVGRHGVEELLNVLADPNDKRVPELARACLSAFGAQLRRIKEQVLEFDRLIRAWHRSDEMSMRLDEAPGVGPVLATAVVATVADPKSFRSGRNFSAWIGIVPKQHSSGGKNRLGNISKQGDRYLRGLFVAGALAVIRYAKIHGTKHRPWLTALLARRPTKVAAIALANKLARMVWAMMVKGERYKEPVALAA

SEQ ID NO: 170654 - protein, 412 aa, unidentified
MKDLLEISCGLDIHKEKIVACILTGPLGKPTHSEIREFTTLIPDMLALRDWIISENCHHVAMESTGIYWIPIYEILEDTFSGDITLLVVNARHMKNVPGKKTDMRDSEWISTLLRAGLLNASFIPEKRIREFRDLNRYRKSIIRDITSQKNRVEKFLQSSGFRLSSFISDIFGASGRNIILHLMEHGRIDKISLDSYLKTKTRKRIDEILMSVNGTLSEHQKSFLKILMCHYDSMKEHLIEIETHLQEDMLPFALQIEQLNTIYGISTTASCAIIAEIGTDMKPFKTAEHICSWAGLCPGNNESAGKRKSTSITKGNPYIKSMLCEIAWVIAGKRNTYLSAWYWRIKQKKGARKAIVALARKLLVIIYTMLKQGTNFDENCFEVRRKNCEQKQLSRYIRELEEHGYTVEAQV

SEQ ID NO: 170655 - protein, 322 aa, unidentified
MRYIGIDVSKATFVVAYSSDKGGGIRTFNNTTAGIRQFIGTLPKDGSIHCVMEATGNYSALLLYMLNVAGITVSMENPLKVKNFAKAMLSTVKTDKSDARLITLYGEKMNPRPFKVQGEAILRLRQKRTVIRQLTKQITAMSNLRGSLVCLPVPDKGATHTVDETIKFLEKRRDRLQSELTDLVEVEFSRQLALLTTIKGIGITLATALIITTGGFTYFQNAKQVSRYLGICPTYEQSGTSVNIRGHINRNGDAYTRGLIYVAAWNASRFNAKCGETYTRLRQNGKPGKLAMIAVANKLVRQAFAVVAHDKEYVDGFVSNRH

SEQ ID NO: 170656 - protein, 341 aa, unidentified
MMLYAQVESVDMLINVGIDVGKESLDLCVLLDKTTGKMKSKKFRNKKEGFDSAFEWITKTTCNAPGKTLITMEATGVYHEGVAYYLYSQGFQIFLSNPGKAKKFAQSLGFVHKTDKSDAAMLAKYGSIQLDSIAFWIPEDDDVRVIKTLIRRLNALEKDKLRESNRLEASTISDAAERVIQSTVYLISVLDGEITEIQDEIDRLISCNPEMNKNRELLLSVIGIGKVMARELVYLFSAKKFTSAKQVAAYVGLIPRLNESGVFKGRSSLSKSGPSRIRSKIFLAAVCAGTHNPDIKAQKIRLTHAGKTKMQALGAAMRKLIQICYGVIKNQTRYQPQIVLI

SEQ ID NO: 170657 - protein, 316 aa, unidentified
MAGGLCIGIDVSKAALEVAMGSAGEVRAIANEDRAIGELAAELVALEPGLVVMEASGGYERLAAALLWEAGLPVVIANPRQIRQFGQGMGQQAKTDWLDARMIARWAEHRRPAVRALPDAQGRELREILIRRRQLSEMLVAERNRLGQVLSKPIRKELTASIGSLQRRLKQLDDELEQRIKKSDLWQRTRELIQSVPGVGKLTSFMLIAELPELGQSDRRHLASLVGVAPFARDSGQLRGKRMIGGGRGAVRSALYMAALTASRYNPVLRPFYQRLLARGTAKKAALVAVIRKLLGILNAIVRDRTPWRPPCPVKT

SEQ ID NO: 170658 - protein, 332 aa, unidentified
MKTFLETVGIDVSKSTIDVTLHCGNAHSKFDNNEKGFKSMIKWTKKNTTMKLNQVLFCFEHTGLYSVSLSCFFTEKGMSFALVPAIEIKRSMGLVRGKDDKVDSKRIAEYAYLRKDTLKPTEIPSKNLSELSRLINLRERLVVERAGHKGTSRELKQTIGQTTAKEIINVHEKMIEHLTTEIKKLEKTISKVIEADPEISKVFNLTTSVKGVGSVVACHIIVATNCFQSFDDPRKFSCYCGIAPFPYSSGSSIRGASRISHYANKKLKALIDRSALSAIVHDKELREYYERKIGQGKKPRVVINAVRNKIIHRIFAVVKREEPFVEKFINVA

SEQ ID NO: 170659 - protein, 400 aa, unidentified
MRVVFGIDVSKASSEVAILVNGEKVHGYTIPNDAIGFNRLLGDLKTVHQPEIVFEATGVYSRRLQAFFEDNSYAYTRLNPLESKKQLDSLRVRKTDKIDAEKLAMSQFILNRKPSYVQEALYQELRDLSRFYQNLTEDIVCAKNRLHKVLQVTFPELENILSAPTGEQYWNLVMTFPCNSFVLESDDATLTAIIRQSTAKRISEKRVTYLVDKLTKLANQSYCAVKKTSPVIEEVKYYAGELLRLSEHRQGVLEEMVTLAQPLPEYEILLSIPGIAETTATSIIGELGDIRRFHSANQINAFIGIDLRHYESGNFLAKEHITKRGNPYARKILFKCIHNIASASHTNPCHIADFYEKRKRQSQVTSTKPHTIASIHRLIRTMYYLITHNKLYDYTSTQNR

SEQ ID NO: 170660 - protein, 461 aa, unidentified
MVTKKWSRRKKRGAVKTDWELGLSVMHPRAAGIDVGQGEHYVAVPPHLDRDQEPVRRFETFTADLHRLVGWLKACGIETVAMQSTGVYWIPLYELLAQERVQVFLVNARETKNLPGRKTDVQECQWLLKLHVYGLLKNSFRPTEEICVLRALWRQRQQHIADASTCIQRMQKALIQMNVQLANIISDITGKTGMAILKAILEGERDPEKLAGFRDPNIKASRQQIAHSLEGNWRKEHLFVLGQEVALLETYQDKIQECDQAIQEHLQSLPVKGDLRQLPPAQKRATGNVPRHFDLRDELYAISGVDLTRIDGINVLVAQTLIAEVGLDMNRWPAEAHFASWLGLCPDNRISGGKVLKRGTRKVVCRAATALRQAASTLLRSKTYLGAQYRRLRTKLGAPKAITAMAHKLARLVYRMLKFGEEYVDRGMQYYEQRLRQQRILALFRTANELGLEVIQPTGGH

SEQ ID NO: 170661 - protein, 415 aa, unidentified
MDAIYERCCGLDIHKKTVAACVIVPGSGRHAQKEIRTFGTMTDDLLALADWLAAEEVTHVAMESTGVFWKPIFNLLEDRFDLLLVNARDIKQVPGRKTDVKDCEWIADLLRHGLLKASFVPDRPQRELRELVRYRTKLVRERTAEVNRLQKTLEGANIKLASVASDPLGLSGRQMLDALVAGSTDTVAMADLARGKMRAKRGLLERALAGRMAAHQRFLLTEQLCHIDALDESIGRLSAEIAERVRPFADALERLDTIPGIGPRMAEILVAEIGVDMSRFPSAAHLASWAGMCPGNQESAGKRKSGKTRKGNVWLRWALIESAHSLGRGRGTYLAAQYRRLTARRGKKKAAVALGHAILIIVYHLLTRAEVYQDLGVHYFDESRRERVERGLIQRLKDLGYKVTLEPAEPNTSAA

SEQ ID NO: 170662 - protein, 403 aa, unidentified
MNNVAGIDVSKGKSMVSVLRPFGEVVAKPFSIGHTGSELKELADYLKSLDGETRVVMEHTGRYYEPVARFLHEEGVFVSAVNPKLIKDYGNNTLRKVKTDKADARKIARYGLDNWAELRQHTPMDTIRMQLKTLNRQQSLYAKTKTMMKNNLIALLDQTYPGVNSLFDSPVREDGSQKWVDFATAFWHVDCVRNMSLTAFAERYRKWCKRHGYNFSQSKAVEVHTGAQDLIAMLPKDALTKTMVRQAIDALNAVSASLERLKAEMQALAAQLPEYPVVMAMHGVGDSLGPQLMAELGDVARFTHRNAITAFAGVDPGADQSGTHEAKSTRVSKSGPPELRRALFLVMDCLLKTQPQDDPVYRFMDKKRAEGKPYLVYMTAGANKFLRIYYGRVKEYLASLEEN

SEQ ID NO: 170663 - protein, 316 aa, unidentified
MEVIHRRCAGLDVSKKDAKVCVRVAGAGRRRTVETVRTWASTTNAILTLRDHLLSEEVTLVVMEATSDYWKPFYYLLEDAGFELMLVNARHARNMPGRKTDVTDAVWLAQLGAHGLVRASFVPPAPIRELRDLTRTRVMLTRERGREIQRLEKLLEDAGIKLSSVASDITGVSGRLMLQALIDGHRDPAALADLAKRRLRHKIPELTEALTGRFSEHHAFLAGIFLDTIDQRTRQVEELNHRIDQAMAPFRAFCDLICSIPGIGRQTAEVVVAETGADMTVFPSPKHLASWAGVCPGSNESAAGSSPPGPDPATRI

SEQ ID NO: 170664 - protein, 368 aa, unidentified
MEEIVTYVGLDVHKNSIVIAPAEGERGGEVRFYGTIENRVSALDPVIRKLQSDGKRHFEFVYEAGPCGYGIYRHLVSKGFECMVVAPSRIPRAKGNRIQTDRRDAKELARLLRAGDLTPIYVPNVEDEAMRDLTRAREDAKTAQCKARQRLQGFLLRHGFRYGKKSWSKAHLRWMSDIAMAHPAQQVALQEYIDTVRCSSERVDRLTRQLCEFVSQWRMAPVVEAIQALRGVSLITAATTVAELGDLSRFDTPGPLMAFLGLVPSEHSSGAHVRRGSITKSGNGHVRRVLVQSAWAYRFPARVSRALLRRQEHLPRAVCEIAWQAQLRLCTRYRRLAARRKPSQVIVTAIARELSAFMWAIAKQVPVN

SEQ ID NO: 170665 - protein, 349 aa, unidentified
MTTMTLTAAAVIGGVDTHADVHVAAACDHIGTVLGTASFPTTTAGYRQLLAWLRTFGDVSVVGIEGTGSYGVGLTRYLLEAGVELREVLRPNRQVRRRHGKTDIIDAIAAARAVINGDAKARPKSHDGAVEALRALKIVHRSANKARTQALNQIRDLITTAPDELRAELRGLRRRERLAICAAYRPGDRDDLLAITKLTLRALARRIAELDDEIALLNARRRRITNAIAPDLVAAHGIGPDTATGLLLSAGDNPDRLGSERSWAALLASNPIPASSGKTIRHRYNPGGDRQGNSALWRIVMVRMANDPRTKAYVERRTKEGLSKPEIIRCLKRYVARETYALLPKQLLV

SEQ ID NO: 170666 - protein, 421 aa, unidentified
MAESEDNEEIIARVAALDIGKAELVCCVRLPAPRERRKRLQEVSTHSTMTAPLTELANHLVELGVQRVVMEATSDYWKPVFYLLEAHGLDPWLVNARDVKHLPGRPKTDVIDAVWLCKLAERQMLRPSFVPPRPIRRLRDLTRYRVDLVTARTAEKNRVEKLLEDACIKLSVVASDIFGVSGRAMMAALIAGERDPKVLAQLARKRMRTKIAQLEEAFNGHFGDHHRFLLARMLGRIDSIDADIAAVDEQIEAHLAPFAQAAARLDEIPGIGPTAAAAIIAEIGLDMSRFPTAGHLCSWAKFSPGINSSAGNTKGNGSTGHGNRYLARALGEAAVVAGRTDTFLGERYRRIAKRRAKKRAMVAVGRSILVIVWHLLANDDARFTDLGPDHFTKHLNPDRQKRNHIHQLEALGYTVTLTPAA

SEQ ID NO: 170667 - protein, 348 aa, unidentified
MMIIGCDLHTRYQQIAMLETETGELVERRLEHENGEARAFYAALVGAVRVGIEATGHTHWFEAMLAELGHELWMGDAAKIRAAVVRKQKTDARDAAHLLDLLCSDRFPKIWRPSPAERDLRQLVWHRQKLVWMRGAVKNQMHALAMGEGVCRKKKLFTAKGRQELEGLALGPWASYRRQELLRMFDELQASVARLDQAVEQAAKSQALAVRLMTHPGVGPVTSLAFVLIIGPVERFAGSRKVVSYLGLNPQEHSSGGKQRLGSISKQGNPMLRSLLVEAGHTAARFDPQLRRVYQRLKFRRGASVAKVAVARKLAVRMYWMLRSTADYAQLVRMQGSPRGTLVETAHR

SEQ ID NO: 170668 - protein, 454 aa, unidentified
MKPHYRSRAAGSTRRLYPDAAGIDVGASVHYVAVPADRDSQPVRHFTAFTEDLFALADWLSSCRITSVAMEATGVYWIPLFEILERRGFEVVLVNARHVKNVPGRKSDVIDCQWLQELHSLGMLSASFRPSDAVVALRGYVRQRKMLVQYAAAHVQHMHKALVQMNVLLQNVVSDVTGTTGMKIIRAILAGERDPKVLAQHRDYRCKASVETIEKSLIGNWRAEHLFALRQAVELNDFYHRQITDCDHMIESYTSSLQKVAEVAALPPSTKLRKTPERNEPQFDLRSRMFEIVGVDLTQIDGIRAYTVLQLIAEIGTDMSRWKTASHFASWLGLCPPINITGGVRHRGWIPSKAHRAAAIFRMAAVNVRNSRSAIGTFFRRKRSQLGPARAVVATAHKLARIVYTVLSTRSQFIDPGEHAYEQNSRERALRALHRKAHAFGFVLAPINTQGAVT

SEQ ID NO: 170669 - protein, 407 aa, unidentified
MELATIYKRVIGLDIHQAQITACALIEMPDGTTRAEQRQFGGFKRDRRELAEWAAAIGPEEVVMESTGIYWKSPYAALEEAGIRAKVVNARHVKNVPGRKTDIGDAQWLAMLARAGLLRRSFVPPSQLRELRLIARQRQKLISQLVGEKNRLHKILADGGVRLGVVVSDLHGQSARAMVKAIIKGDSPQDVLDYASRRLRASREELFDAVQGELTDSHRFVLGETMQHIEEIEARISRFDARLLDALKSEHNTLALLQTVPGIDLIGAAMLLVEIGSDMGAFGSADRLASWIGICPGNNESAGKRKPARARKGNPYVRRLLCEFAHAACRTKCVFKPKFESLMPRRGYKRSIVAIAHSIMRTIFFMLLRREHYKDRTVDYEAMAVERNAPRWIKALTKFGYIHPASA

SEQ ID NO: 170670 - protein, 342 aa, unidentified
MQVTTIGLDIAKNVFQVHGIDAAEKVVVRKQLRRRQVLEFFKALPACLVGMEACATAHYWARELTKLGHRVRLMPAKDVKAYVKRNKNDAADAEAICEAARRPTVRFVQIKSTEQQGRLMLHRARDLLMRQRTQVINAMRAHLAELGIVAAQGRDGIKELLKIIASEADARLPVDAHTSLVVLAAELQAMQTLIGSIEKRIMVQHRLSEASKRLKSIPGIGLIGATAIAATVPDPKVFGSGRDFAAWIGLVPREDSTGGKQKLGPISKRGDRYLRRILVVGACAVLRYARHKPEKYPWLTKLLERKPFKVVAVALANKMARIAWALLAKGGTYRAPALTVAA

SEQ ID NO: 170671 - protein, 498 aa, unidentified
MTRPSLGIDLSINGAHDCTVLDATGQLTQRFTFDSSDAGMRKFEHHIRAIEASHGAPVVVMEPTGLAWFLPCLYLRAHHPEIKIVRIKTSKVAALRRYLKQDAKSDRLDSFTLAKMPFVDPEKLYAVDLPPAVLQGLDRMTRQRARLVEDITRRKNRLQALLRGYLPGLMQAVGKPWEPAFRAVLAVSLNPLALADRDAATLRKALQNKLSRTGHLEELMPQLRTVCVQLAQLYRSIVEAGRLTEGFFEDVQDEVARELRLIDGEEREVKELEAAIARRYQEAAPQDHLGTMKGLGDVTAPTILAAVGTPQRFQSQAAFRGWTGIVPHASQSADSDAKGLTMTKAGPKRVKLALYQAAEIARQWDPQLAKIYYDQMVNKGKPHYKAVGAVMSHLASRIHAVLTEQRDYVLRDVDGREVTTREARAIILTRYQVPAEIRAERRTSKRRKQDVSTPHHRGSANRSSQRSSTSSTLHSTRAQEMQQTKAVAVRPDWVLFGK

SEQ ID NO: 170672 - protein, 311 aa, unidentified
MTYIGIDVSKATLDVAVHEGPLTQVANDATGIATLVAQLGPAAPTLIVLEATGVYHHSVTSALVAAQLPVAVVNPRQVRDFARSTGQLAKTERLDAQLLARFAADVHPTPRPVPDEATHELVALVDRRRQLIDMLTAERNRLAIARRSVKPSVTRHITFLEKAIASAEDDLDRWVQQSPVWRAQEDLLVSVPGIGPQTARLLIAKLPELGQLPGRQIAALVGVAPLARESGRWRGARYCAGGRAQVRAMLYMATLAAVRFNPVIRACYQRLLAAHKPKKLALIACLRRLITIVNAMVKTQQRWQAPTPTTA

SEQ ID NO: 170673 - protein, 346 aa, unidentified
MTIVEAARAVTGGIDTHGEVHVAAALDEVGGLLGTQSFRADPDGYAELLSWLHAFGEVSKVGVEGTGSYGAGVARFLARAGVHVVEVDRQNRQARRQAGKSDPLDALEAARAAQSGRAHGVAKSRDGSVEAIRVLVVAKRSARGARIKALGQMRQLTFSAPDQLQSRLKGLPIAAFVAAAQGLRPMRSPDVVTAATKASLSSLAHRVADLEEEISDLDAMITPLLKEAAPELLGVYGVGIDTAAALLVAAGDNPDRLRSEAAWAHLCGVSPLEASSGKVTRHRLNRGGDRQANWALWHIVITRLASDPRTQAYMERRVKDGRSKSEAIRMLKRYVAREVYRYLPRV

SEQ ID NO: 170674 - protein, 404 aa, unidentified
MNMNAVGIDVSKGKSMVAILRSYGEIISKPFEVKHTVSGIRSLIEQIQSIDGESRIVMEHTGRYYEPLVRELSKADLFVSAINPKLIKDFGDNSLRKVKSDKADAVKIARYTLDNWAELRQHTPMDTIRMQLKTLNRQQSLYSKTKTMMKNNLIALLDQTYPGVNALFDSPVREDGSQKWVDFATTFWHVDCVRNMSLTAFAERYRKWCKRHGYNFSQSKAVEVHAGAQDLIAMLPRDALTKTMVRQAIDALNAISASLERLKAEMQALAAQLPEYPVVMAMHGVGDSLGPQLMAELGDVTRFTHRNAITAFAGVDPGADQSGTHEAKSTRVSKSGPPELRRALFLVMDCLLKTQPQDDPVYRFMDKKRAEGKPYLVYMTAGANKFLRIYYGRVKEYLAQLENS

SEQ ID NO: 170675 - protein, 364 aa, unidentified
MKRKVYVGMDVHKETIQIAYLTSNSKEILKEQQIKHNEVQIKKFIKKLKTEWNEIYCCYEAGVTGYPLYRYLKSLGVNCILVAPGKIPRQNTDKIKTDKRDAIKLARLMRSGELESIHVPSEEDEAVRDYLRSRDSLRLDLGRNRQRLMKFLLRKDIKYSTTKYWTVSHYKWLNNLHFNNEILQETFNDYYSRVRVQEENLKAMDKKIQEIAESEPYREKVGILRCFRGVDYLTAMFLLCEVNDFKRFKTAGSFMSFLGLVPGEYSSGSKRKQTGITKTGSPRLRRILTEAAWQHRFPGTGSKIITARRSGQPALVVALSEKASPRLHKKFRNLQLRGKTPQVMITAVSRELSGFLWAAMNLVA

SEQ ID NO: 170676 - protein, 336 aa, unidentified
MIAVGVDTHEHEHVAKALDGLGQVLGGLQIKANLHGYLELLRWLRALDDDVVVGIEGAGSYGAGLCELLLAEGIAVVEVERPRRQERRRGKSDQIDALAAAKKVLANQGLSTPRAGGTRQALSALLVAYGSCISERTRLLNQLQALHTTAPVALRERVGPGNGRKLVARLHRMRARQSAPEAEQLILAVLRDLARRARELGGRAEAYKRELSHLIGSLDPTLLDEPGVGPISAAKLLACDPQRLKSEAAFARCNGTAPKPASSGQTIRHRLSRGGDRQANNALHTIARIRARHNEQTRAYLDRRISEGKTPREAMRALKRHLSRSLYKRLITVPLT

SEQ ID NO: 170677 - protein, 429 aa, unidentified
MSEQTPVELRVSVDVGYRRHSVAMGLSSGEVLEEFEIEHRIEGFQEFFSRIEKQRQEKNYPVAVAMEGYNGYARPLDSMVRERGYRLYNLNNLKFARFKEIFPGAAKSDRIDARKGLELFQLSDHLPLAKEVLQEVTGTAPENEVLKRLTRRRRRLVNERVRVVNNLQADLQAVCPGLLEITREASNQWFLNFLLSADTLPRLVRLRRSTLLKIPSVGVKTAAIIEGWQKHAHFSQEIEWVGEMIQEDARRCVELDEKIKRLEAKIAAVSRASTIAKSLRSIPGFGAVCSAELAGEIGTIERFASEGSLSLYLGMSTLDNSSGKYQGTKAPKHVNTRAKAAMMIAVDRHRKYVAESQRYYEKKRSEGKKHNQAIRALGRHLSRIIYKMLKEEREYELRPEKGNTKTKVSPRSLIKTQIRRSKISVQGKQ

SEQ ID NO: 170678 - protein, 335 aa, unidentified
MSLELLAIDLGKRSFHCHGIDSDGVILSRKVSRAKLLETIKELAPKAVAMEACASAHFWGRRLLADGRRVLLINPWFVKPFVKGSKNDAADAEGIYEAAFRPTMRFVPVKSTEQQDLQSLHRARERVVCARTALINHMRGLLGEYGVILPQGAWRFLKQAQDAIAAAELSELTRDLFGDLLVELRALDLQLDKLDQQLVRICRTNEACRRLSKLPGVGPVIATALVAAVDDGRHFRSGRELAAWIGLVPRQYTTGGKPRLGGIGRRANHYLRRQMIHGARAVMFRLTKHEDRRSQWLKGLAARRGFNRAIVALANKTARIAWAVLTRKEDYLAAA

SEQ ID NO: 170679 - protein, 350 aa, unidentified
MLHAGLDLSRNRLDVCLLSDQGEIVEEFAAPSDHDGVRALARRVLGYGEQVRGVIESMTGARFVHDTLERYGWDVLIADAQKVKGLAPLACKTDKIDARVLAVLSERDLVPAIWLPDPAVRSEREQARFRLHLVKHRSMLKHRIHSTLMTFGEPCPVSDLFGAAGRELLDRLQIPQPWRGTVDASIALIDDLDCQIAEVNRQLRAGSAEHPYVPLLLTVPGIGWVLAFTIAAEIGDVTRFPSPKKLCGYTGLCPRVSQSGESDRRGPLSKHGPRYLRWAMLEATMHALRHPAYAERYQRNKRRLGKQRGARVAQIDIARKLTEAIWHMLTNNQPFAPTPASGGATLRLAA

SEQ ID NO: 170680 - protein, 421 aa, unidentified
MVPPLHFHQKEQLLMSNTTRFSVGIDISKGKSTVSVIDPFGNIVKSPFEIRHTSSDLKKLAGLIKSLDGETRIVMEYTGIYYQPVARFLSESGLFVSVVHAKILHDFANNSIRRIKTDKADAVKIANYGLLHWDSLKCYSKEDDTRLLLKSANRQYYYFLKQYVAANNNLIAVIDQTCPGLNDLFTSPRREDGHIKWVDVAIRFWHCEYITGFSLNKFTELYNDWCKKNKYIGSNSKAEELYLLAKECIPTLPKNESTKYIVKQAAEHLLTISEALGALQKEMLYLAEQLPEYPVVMSFTGVGKVLGPQLMAEIGDVRRFHKKSCLIAFAGVDAPPFQSGNFDSKNRHISKKGSGGLRKTLFQVVTVLLQNTLVYDPVYQFIDRKRQEGKPYYVYMVAGCNKFLRIYYARVKEYLVAQEAA

SEQ ID NO: 170681 - protein, 352 aa, unidentified
METANKHGSPLHSCNEARTVAWALLGEARIQEPEFCCDGEHIMGVHVGVDVSKHHLDWAIGAEGEANRLPNSPAGVRRLVSGLRELDLASIVVESTGGYERLLTTALAEAHLPVVLVNPWRVRRFGEGLGILAKTDPLDARVLALYGERARPPRRPQASRKQREMADLVRRRRQLISIIVAEKSRLETASKAIRKDIEAVVRMLERRVAKLDEKIDRAIQDDDEKAALWSRLQSVPSVGPGVARALVVDLPELGQLTRRQICSLVGLAPFAKDSGKKIGARRIRAGRAAPRSALYLAAMNGARFNPVLKRMYERLLDAGKPKKVALVALARKLLTILNAMARDGKDWQEVHA

SEQ ID NO: 170682 - protein, 367 aa, unidentified
MRKDNTVRKSAVNRKRANRKLTVGIDLGDRSSRYCILDEQGEVLAEGSVATTKKGFAQVFGSKPRSLVALEVGTHSPWVSRYLADLGHEIIVANARRIRLITDSTRKDDRLDAKTLARLARIDPELLSPIRHRSAQAQADLMVIRARAVLVEARTMLVNAARGLTKSYGERLPSSGTGQVREKLAESLSEPLQNALKPLLAEVASVSERIREYDEQIENTGKSRYPETALLRQVQGVGMLTALTYVLTVDDPYRFRRSRDAGAYFGLRPRRRESGDSRPQLRITKEGDAYVRKLLVQCAHHILGPFGQDSDLRRWGLELAGHGGKNAKKRALVAVARKLSVLLHKLWVSGEVYEPLHIRRGGKTVAA

SEQ ID NO: 170683 - protein, 309 aa, unidentified
MEAIVVGIDVSKDRLDVHVRPAGTVLSFGRDAAGIEGLIGELLRVVPQLIAVEATGGFETVVVASLAAASLPVVVVNPAQVRAFAVAVGRRAKTDPIDAQVIAHFAAATKPQVRPLPDAATQALADLVARRRQIIQMIVAEGQREKRASPRARKSIVRLLKTLRSELSALNADIDESVRGSPLWREKEDLLASVPGVGPTIARTMLAEMPELGSLDRRQIAALAGLAPFTRQSGKWRGKSFIGGGRASARAVLFMGAMTAMRWNPTLRVFHQRLRSAGKPKMVALIAVARKLLVILNAILRDKTPWQIA

SEQ ID NO: 170684 - protein, 327 aa, unidentified
MKMSIGIDVSKDKLDVSIYDGINYKYYQFDNSRKGIEQLLNETNQFNHEAVFTMEATGVYSLLASNMLYERKYSVSVVNPLIIKRYSEYKMCRAKTDKIDSRIIADYGFNNPPSCFIPKPIEMQYLKQYLKLVYDFKQEITRYTNRLKALKINPKVNNSLLQLYNEHVLYLKNKIKQAENEIDKIISENFKKENELLRSIPGVGKRISAIIISNFHTFEDFENSKQLSSMLGINPSPYKSGSSVNRRAVISRKGNSYIRKILYMGALVASKNNKECREFYNRLLLKGKDKKLALIAVENKLLRQIFTVLKNKREYIENYYFNNQKIA

SEQ ID NO: 170685 - protein, 316 aa, unidentified
MWTVFGIDVSKASSEVAILVNGERVHGYTMPNDIIGFSHLLKDLKTVSNPEIIFEATGVYYRRLQTFLEENSYDYTRLNPLEAKKQLDSLRVRKTDKIDAEKLASSQFILNRKPTYVQEKVYKNLHDLSRFYQNLTEDIVRTKNRLHKVLQVAFPEIEILLSTPTGEQYWNLVSIFPTKHWVLELSEVELKETIRNSTSKRISENRVGNLAEKLVGLAKQSYSAISKTSPMIEEVKYNAQELIRLANRREQVLEQLIELAKPLPEYEILLSIPGIAETTATSVIGELGDIRRFKSANQLNAFIGIDLKHYESGEIS

SEQ ID NO: 170686 - protein, 327 aa, unidentified
MAKRTTICAGIDTGKRKLDVALDGSSEQLQIDNAPEGYKVLLDWLRCHRVKRIGIEASGGYEQAVVAELRRKRVVVVVFQPAQVRAYAKFHLQRAKNDKIDAALIAACTAAVKKIHPPPDARVLPFAEHLTMIDQIGEDIALLKNRLETCRNPRIQQVWKEDLARLAKRERIEFKALVAAIREHRDLAERLDLIYSVSGAGLPTAVAILVRMPEIGQLTREQAAALAGLAPYDDDSGKHVGVRHIDGGRERLRRALYTAALPASFRWNPQLITLYKRLIAAGKGHKRALIACARKLLIFVNAVVARGIPWDHERPPTVAATALPQTG

SEQ ID NO: 170687 - protein, 350 aa, unidentified
MNPTQVSSKSQVAVVIGIDLAKDHCDVVGYGANNKICLTKCGCSYPKLMEMLSNMPSAVVLMEACKGSMFRARAIANLGHDARLVKGSDVKALRNVNQKNDIRDADYIARLYYVPGTTYVYIKNEHQQTLQFLQNEYKSLQDMRINVGNQIHAGLEEFGYPARKSSLFIKKRLVEHLDKHAEHIPEEAIAALKRQRELWLMLLDKEEDAQRRMEKIANTDADAKRIMTVPSVGPQTAVRLLAHIGGNIARFKNSRQFAASIGLVPKQNSTGGNTTLNGITKRGPKRLRANLVQCAGVALQNAEHLGGNLGEWIRKMKESGKKYGVITCAIAAKLARIIYRLMKDKVVYVP

SEQ ID NO: 170688 - protein, 474 aa, unidentified
MTAKTKAKPDLKAIPMLLNESMYIGVDIGKFKHVAGFVSTTLLQRHQRFESCPAFTFEQSREGFQAFLDRVRAFVPLEHCFLLMEQTGHYHRALQQYLVEQDLPVYVIHVQRREAGMIKTDKRDALGLANQLYNQLELGVQVTDKLQVVHRAIPPTEAAAQLKGFMRHRYELVNEETQRRNKLTAICDEMFPEFAHIFRDPSRPIALDLREKFPTPQATATASPVALREVRRRNHPSEAQLIQLQACAAQSIGTKNVARQRGLVLEQSLLIKELRLIQEHMERLDTEICQIVEHSREGQILLSIPPVSPLFAAAILSTLGHIANFPSAGHLKSYFGWAPKRAQTGVSFDRTNLTRGGSREMKKTMYLVAWQAIQTETEWATLYKRLIPRLCSYDERTQSYQGKGKVLGHIIGRLITLIYALLKQDDETLSHLAPGTKPPEPVLYDPEIHHQHRMGHYQPLKKKQSGNRIVLVQQ

SEQ ID NO: 170689 - protein, 345 aa, unidentified
MKITTIGIDLAKNVFQVHGVDERGKNVLRKQLRRSQMALFFANLPPCLIGMEACASAHHWGRKLQSHGHTVRLMASQFVKPYVKTNKNDAADAEAICEAVGRANMRFVPIKSVEQQAILSVHRVRQGFVKARTAQANQIRGLLGEFGLVIPQGIYNVAKRVPELLEDASAELPAAFRQLIERLTGHLKELDVQVKDFEQQIIAWHRSSELSRKLEAIPGIGPLAASALVASIADPRSFESGRQVSAWLGLVPRQHSSGGKPTLLGMSKRGDAYLRTLLIHGARSAILAAKLKVDNTNGWLTNLLNRRHPNIAAVALANKNVRTVWAILAHGREFKPDYVPNHIAA

SEQ ID NO: 170690 - protein, 363 aa, unidentified
MFTERTSVGLDVHARSVAAAAIDSVTGRVFQTKLTPSYEHIRSWLTDLPGPAAVVYEAGPTGFGLYRDLSAAGIRCEVAAPSKLQKPAGDRVKTDARDALHLARLLRLDEVTSVAIPTVDQEAARDLVRAREDCRGDLMRARHRLSKLLLRHGLVYYGGAAWTGAHDRWLRTEAAPQLTWPATRMAFEADYEHVLTMRARRRRLDTAIEEMAAASEFTPVVHRMCCLRGVSTLTGFALAVEIGDWTRFTGNTIGSFVGLVPSEQSSGASRVQGSITKTGNTHARRLLVEAAWHHRPRYRVGSVLRSRWEQAPAAARVRGDEGNRRLHGRWVGFLERRKRPVTANVAIARELAGWCWSLAVMDC

SEQ ID NO: 170691 - protein, 344 aa, unidentified
MPIVGGLDIHRKQITFDYLDTVTGQVHRGQVTPADRAHLRAWLARFSGRDDVAFAVEACTGWRYIAGELASAGIAVHLAGPADTAFARGRKRHARTDKTDSRHLRMLLAEGRLPECWIPPGHILEARALLELYHDLRAGHTAWVQRIHAVLFHHGAPALGEGTLRTERGLAALRAAAAHLSPAGQLQVATALEVIEALETRMHAVRHQLLAAARHLTGAKVLAARLYGVGPVTALAMTCWLAGEGRFSSSRKAVRFAGLDITVRSSDRKGPPGRLSRQGPPVLRWALCEAGKTHARASAPDHGYYAAVKDREGGKRAALSEARKIVRQARRILAELGDDALSAA

SEQ ID NO: 170692 - protein, 421 aa, unidentified
MGKIIERCAGIDVGKRFLFCCVLTGAANEEPHSQTIRFDATVPALERLREWLHTERVTHVAMESTGSYWIPIFNVLEDQVAIILANPEEVKNRKGHKTDRNDAKHIADLLRHEHIRPSYIPPKPIRQLRDLTRRRVQLTQDATRERNRVQKLLEQVNVKIGNVLTDVFGVSGQDMILALLEGHSTPEQIAGLARGQAQRKIPQLIEALEGHRMSDHHCLVIRSSLRHLGCLQEEIETLDDEILRRMQTPPFESAFGLLQTVPGVGRLSAAAILAETGTDLSPFPSPEQLASWAGLCPGNRESAGIQKGRQTTHGNPYLRTALVQCAWAATRKHGSVFAVRFQRLAPRRGEKRAIVAVAHLMLIVVYCMLKRGMEFRGAECVHQQRRRERRAHHHMRCLRRLGLTVQVISGPAPLPGEPSSP

SEQ ID NO: 170693 - protein, 457 aa, unidentified
MKKKRQSPNGASKLDPIHLNAAGIDIGAQNHWVCVPSGRASECVRRFGCYTADLYAIADWLTECGIETVAMESTGVYWIPLFQILETRGFEVKLVNAHHVKTLPGRKTDVLDCQWLQQLHSYGLLSGSFRPEDEICVLRSYIRQRDSLIRSASVHIQRMQKALTQMNIQLHQAVSDITGTTGMAIIRAIVSGERDPQVLAAKKHHRVKRSEAEIAAALNGDYRQEHLFVLQQELQLYDVYQTQIAACDRQIEECLSQFNDKVDISESPLVQPKHPRHKPQGNEPAFDLRTHLYRMSGVDFTRIEGLGVLTVQIILSEVGLDPTRFPTVKHFISWLGLCPGNRITGGKVKSSQTRPVVNRAANAFRIAAQTAGKSHSALGAFYRRLRSRLGAPKAITATAHKIARIFYKLWTTGGDYTDPGMDYYEQCYRERMVNNLHKKAQAFGFELLPKPSANTVS

SEQ ID NO: 170694 - protein, 390 aa, unidentified
MRYFIGIDVAKFKHTACVIDTDGIALVEPFDFTNDIIGFQSLLKNIKPFLKKKHLVGMEDTGHYGDNLRNFLLEKQYKVVMLNPIVTSHIRKASNKAKNDRIDCFVIANTMMNPNFYRDQHVQSIDYATVRQLTRMHHTHTEEINRYKCQLQKSIDIVFPEFNSLLNTKYSKTYLEILDTYRGAYTIANTDIRLLRNTLKNVGVGRSVSISAEQLKKSAKESIGQHNLAIEMDIPFLISLIRRLTSILGEIDKKIEEFSHQLNSPILDISGISHFSAMSIISELGDITYFSNEKKLIKFAGVNPCVYESGTYSMTHTRLEKKGSKYLRKTLYQIIDSVIRFNPIFQAFYQKKISQGKSYRCAQGHCIRKLLRVIYKIISTGEGFDSAKLK

SEQ ID NO: 170695 - protein, 409 aa, unidentified
MNAVGIDVSKGKSMVVGLRPLGEVALSLHEVSHTEVDLEHLGYQIIGLGENTRVIMEATGRYHEPVAEALHEMGIYVCVLNPIVIKQSGAGSVRKVKSDKKDALKIAKYGLDNWNTLREYTPLDAVRQQLKLFSRQYNHYMKISVIVQNNLISLSDKTFPGVNELFTSPARADGHQKWVDFVATFWHCDCINRISQEAFTKRYQKWCKCHGYNFSAFKAEDLYVSSLGHWLTLPKNDAAKLLVTSATDELFATTKVLMTIKAEVIRLAKLLPEYGVVKAMYGVGEITAAQLMAELGDVRRFDNRGAVVAFAGVDPGVNQSGSYDKASNPTSKRGSSHLRKTLFQVVNTYLKRSPVNEPVYQFLDKKRSEGKPYYVYMTAAANKFLRIYYAKVKEYLNKLDEKSDNQLKQ

SEQ ID NO: 170696 - protein, 346 aa, unidentified
MIIAKLSYTPAATAKLVRKLSVKYKRLTFCYEAGPTGYGLHRQIKDLGFECVVVAPSLIPKRPGDKVKTNRRDALSLAKLLRADQLTPVWVPDGRHEAMRDLTRARETAMLDLRTKRQHVSAFLLRLGRPYPESRKTWTKAHASWIASQKLEHPQQRLVLEEMMLAIRQAQERLQRLEQAIAAAVPEWSLAPVVTALMAMRGIDLVSATTLLAEIGDLSRFQTPTELMAYLGLVPSENSTGDTVKRGPITKAGNRRARRMMVECSWSYQHPPRVGQAKQPKVDAAPPAVREIAWKAQCRLYRRYRTLIRKGKLKTVAIVAIARELAGFIWAVARAATTAPVAAAPA

SEQ ID NO: 170697 - protein, 431 aa, unidentified
MIAAPAPTGSEALVGGKTQMDRLYDCCCGLDVHKQTVVACLIHPTPGIGQTKMIRTFATTTGELDALADWLAEAGCTHVAMESTGVYWKPIYNRLDGRFTIIVANAQHIKAMPGRKTDVKDCEWVADLLQHGLITPSFIPDRAQRELRDLTRTRTTLIDERSRTVLRLQKVLEDANIKLSGVATDIMGVSGRAMLDALVAGTTDPARLADLAKGKLRAKRQQLERALAGRMGEHHRLLVGGHLAHIDFLDEQIEQLSQAIAERLRPFEAELERLETIPGVKRRTAEVLAAEIGLDMSHFPTAGHLASWAGMCPGNHESAGKRRTGKTRKGSKWLRRALVQAAQAATRKKGCYPAVQYRRLIVRGGPKKALVAVGHTLLITVYYLLSRQDVYHDLSPLQLDAELRARAQNRATQQLQALGYDVTLTLKSQAA

SEQ ID NO: 170698 - protein, 346 aa, unidentified
MDQIIRIGMDTSKHFFQLHGVDAAERPVLRRKLRRNDVLAFFAKLPPTMIGMEACGASHFWARELRKQGHEVKLIAPQHVKAYVKRNKNDGRDAEALCEAMSRPTMQFVAVKSEEQQAALMLLGLRAQLIARRTQLSNAIRGYAAEFGLTTARGLDKIEPLLSRIAQDETVPALARELFVLQGKEYVRLQEELKAIDAKLLVWHRADACSRRLAQIPGVGPIGATALVMKAPDPRAFASGRDFAAWLGLTPKDHSTAGKTRLGKITRAGDEALRSILVAGATAVIQQARRGRGSSSSWLTALLARKPPKLAAVALANKTARIAWKLMVSGDSYNGARMPATSASAA

SEQ ID NO: 170699 - protein, 374 aa, unidentified
MMDYNEVFVGIDTSKLRNAVAVAEGGRNGEVRYYGEIENTEAATSKLVKKLAAQHRRLTFCYEAGPTGYGLYRRIKMLGHECVVVAPSLIPKKPGDRVKTNRRDALNLAKLLRAGELTAVWVPDARHEAMRDLVRAREAAVDDLKSKRQQVLSLLLRLGRHFTGKRTWTRAHMNWLVSQKLAHSEQRITFEEMLLAVRQANERVIRLERAIVAAVPDWSLAKVVTALMAVRGLDLISATIFLAEIGDLSRFATPRQLMAYLGLVPSEKSTGDSVWRGGITKAGNHRARRILVECSWSYRHPPRVGKKKLAKVEAAPSAVQEIAWKAQARLTARYRALARRGKRPTLVVTAIARELSGFIWAVSRAVGTPATPAM

SEQ ID NO: 170700 - protein, 350 aa, unidentified
MRDVSITHYNVGVDFGSEQMDAKLAAQYKDGIRKILFSRGFENKEAGFKNLDGWLKEKCRYKDVEIRISCEATGVYHERCCYFLDGLGYYVTVEVPSRVKSYKKSLGFNSKNDKIDATALAYMGLERNLRKWEPINSFYYELRTLTRYRESVQQMYTSACNQLHAMQAGMRVSKLVVKQLKANIKLYEKQLAELEKAIEQKIQSEPEVKRKIDNIIEDMKGVNVMTVAVVIAETNGFSWFTNRRQVVKYSGYDVIEDQSGKRRGKTKISKKGNAHIRRALYFPAINLATYNVKPFVDKYERIFERSRITMKGYTALQKDLLLMLFTLWKKDQKFDPNYQNQQKKKIISGD

SEQ ID NO: 170701 - protein, 460 aa, unidentified
MNEYFIGIDASKGYSDFVMINEKKQTVIENFQLDDTFQGHTRLYELLHGFNQDYPEATIYAAVESTGGYENNWFQSLLKFQASLPIKTAHLNPLGVSHNSKADLKRNNTDKISAKNVAEYMIAHPEKVSYQHQDSLASLRKQWGFVTMLTKQSTQLLNQLESLVYNANPEILIYCKGDTPQWILKLLTSYPTALRLSRAKVKLLARIPYISLDRAKQLIATAKKSVASASDKVTEQLIVATVKQIVHLKKTIKVQSEVLANECQIPEVALLKTFTGIGDYSAIGLMLQIQSVNRFLTSKKLASFFGIHPEYKKSGDGTYKYRMSKKGRKEGRRVLFIVAMSAIQSNPLIRDVYQQAVERGMEKMSAMGLCMHKILRIVYGMLKHNKAFDPQVDLKNRQKKPSRQRKVGQDKDRRYQNFDSNAPISRRQKMKRKERKQSQNVINVEYGISEASVPSTQLAN

SEQ ID NO: 170702 - protein, 408 aa, unidentified
MLKVQVLYERCCGLDVHKKSVTACVITPEGKEIQTFGTMTGDIIALAEWIKAKGCTHVAMESTGVYWKPLYNLLEVERIEVLVVNAKHIKAVPGRKTDVKDAEWIADLLRHGLLKGSYIPDRDQRELRELVRYRRSLINERSREVNRLQKVLEGCNIKLSSVASDITGVSAKAMLKAIIDDAGDPVVIAKLAKGKLKNKRQELEKALAGLVGAHQKMILTAQLNHIEFLDQQVVELDQEIEDRLRPFELELELLDSIPGVGRRTAEDILAEIGANMDRFPSSAHLASWAGMSPGNNESAGKRKSGKTTKGNKSLRVTLVLAARAAAKSKTTYLSAQYHRIAARRGGNRAAVAVGHSILVMAYYILKRRVPYLELGADYFDQRKKDKVIKSSIKRLESLGLKVTVEAAA

SEQ ID NO: 170703 - protein, 319 aa, unidentified
MSYLHFFGLDVSKSWFDVAIAGSMSRPKRFVNSTEGIAAFLQEFAGQLPSGLVVLEATGGYETALIVALVTGRIAVHRAAPWQAHSFSRSLGKPAKTDGLDARSLARMAAERHESLRLFVVASQEQGQLSELLMRRADLLAIQVAEKNRAGHPRYTEAIATVRQSLAASLDFLAAQIARLDDQIKALVATAPELHARFKIMTSVIGVGDKTALLLQGLLPELGSLTRRQAASLAGCAPHPRDSGLTRGHRSVFGGRALVKRALFTAAMSARTHDPAMRAFFERLTKAGKPKMVALVAIMRKIIVQINAKLRPPAIAPSW

SEQ ID NO: 170704 - protein, 402 aa, unidentified
MTRSVFVGLDWAYRSHAVCVIDAQGSVLKHLTINHDRDGLGELRHALAAFGKALPVAIERPSGLIVDALVEAGHRVFAIHPNAVKASRPRYRSSNAKSDAGDAFMLADLLRTDGHRWHALQPQSAAIRALRALVRTRDDLVTTRIRLANQLTALLDAYWPGATGIFAAVDSPIALAFIEQWPTARKLTARQIAAFCKRHGYSGRRSPGVLLERLQAAAPSFCEPTLAQAQATAALALVALLKPLAAQIKSLDGHIAQAMGQLPQAVSVMSLPRAGCICAAQILAELGDVPERFASAEQLCSEAGVVPVTYESGKSRAVTFRWACNHRLRRAITCLADNSRHASPWAASVYHAARKRGCDHPHAVRILARAWTRVLWRIWTDGTVYDPAIHSSACRIEISQEG

SEQ ID NO: 170705 - protein, 416 aa, unidentified
MTDEIRWFVGIDWATERHRACLLDAEGTRVAEHDVRHDGAGLQELCSWLLKMTGAGAQEIAVAIEAPRGPVVEALLERGFQLFAINPKQLDRFRDRFSMSGAKDDSRDAEVLGHSLRTDRHAFRRLTIDDPLVIELREWSRIHDELKQEQGRLTNRVRDQLWRYYPQAAELGDLNANWFLDLWEKAPSPAQAARASEKTIARILKTHRIRRFDATEVLRILRQPPLVVAPGTVEAATAHIRTAAARLRLVNQQIKEAEHRLDELCAAIEAAAETTPGQICEQRDMAILRSMPGLGRIITATLLAEACEPLRLRDYQVLRGLSGQAPVSRRSGKKWIVLRRYACNRRLQNALYHWARGAMQHDPISKQRYAELRQRGHGHARALRTIGDRLLYVLCTLLERQVLYDPNHTTSHLAAA

SEQ ID NO: 170706 - protein, 355 aa, unidentified
MISTKYIGMDVHKESISIAVRNSAGKVVMECVIETKASMILQFIDGLRGDVQVTFEEGTWAAWLYDLLKPHVSKLVVCDPRKNKSMREGNQSDKIDARRLAELLRLDHLTPVYHGEHGLRTLKETVRSYLTITRDLARVKSRVKAIYRSWAISCTGKQVYARCHRAEWLGKINELGVRRRAEFYYQQLDALRALRQEVRRDLLAESKKQKAWKRLCEIPSIGPIRAAVLLGILQTPHRFRTKRQLWTYSGLAIEMHSSADHRSIDGQLQRSRKNVLVRGLNRNCNHDLKNLFKGAAAVASSKPGPLEQFYAALVAKGMRPEMARLTLARKIATIVLIVWKKGVCFDAQHLKPQTA

SEQ ID NO: 170707 - protein, 350 aa, unidentified
MSESYEGRQIVGMDLHRRRSVLVRMTEAGERLETVRISNDPEYLRQVMARAGENPEVVLEATYGWYWAADTLAELGARVHLAHPLGVKMFSLRRVKNDERDAADLADLLRMGRLPEAWIAPPATRELRELVRHRAKLVGLRSNLKCQIHGVLAGAGVQVPVSDLFGVDGLQRLARVELRAAARARVDSALRLIEALDFEVELFAKLAAGRLRTHDGYRAIQAIPGIGPVLAAVFVAEIGDITRFDRPAQLASWAGLTPKHHESDTTVHRGRITKQGSRLVRWAAVEAVQRVGPHTRLGQVREQVGARRGRNIGVVAAARELTELVFYALRDGHIRRLPAAPTTAPAPPAA

SEQ ID NO: 170708 - protein, 427 aa, unidentified
MSIDLIDRYCQAVPDRDRGVVFGLDISKDTITYRAHRPESCSKAFTVRQNQVGFRKIEAALEEFKGKGHDVWVGYEPTGPYSCCIFEYLVDKGWRVVQINPKHTSRYNEIMDNVPGKSDPRDPRGIAGLIWQGCYRTPVHLVGTYAELRAASVEWAMLSVEGTRLRNQLHSLLQLWCPELGLVFKNTLCKSARGIVRKYSSAETIANAGVARVRSVLAKSSRGRTAYRAEAVLEAVSQSKAPKSGQKTRHRSILHLLARLELLEGQRNQLKADMAHMLSLLPESSRLLSVPGIGVVTSAILLGECGNIGDYGSRQLEKLVGLNLHEFSSGKHTGRRKISKCGRANVRYALCVAATLMTTRSGIYHDVAEKMRSHGKKFGEIRIAVARKLLRLLHSLALREQDFDLRRFVARRGTGDDLLVHQDRCAA

SEQ ID NO: 170709 - protein, 355 aa, unidentified
MSQEKYIGMDVHQATISVAVLDSRGKLIMESILETKAATILEFLQGLHGSLSVTFEEGTSAAWLHDLLKPHVTRLVVCDPRKNALLKDGSKSDRIDARKLAELLRGNQLTSVYHGEHGMRTLKELGRSYVTITKDLARVMSRIKALYRSWAIPCSGTSVYGPRHRAEWLDKIPEPGVRLRAERLYQQLDQLQPVRQQARRDLLTESRKHHAVKLLRQIPSIGPIRAALLVAQLQTPHRFRTKRQLWAYSGFALETHDSGEYRYVRGKLQRNRERMTVRGLNNNHNPDVKNLFKGAAISASTHPGPLYDFYIALLEKGMRPTMARLTLARKIASITLTIWKKGVDFDATQLHRQEA

SEQ ID NO: 170710 - protein, 354 aa, unidentified
MKVLPILGIDIAKRKFDVCLRPAPTVAGARHNATFSNNLKGFRALLRWLAKQQAPCVHACLEATSRYGDELALFLHQHHHEVSIINPRRIRHYADSRLVRTQNDRVDAGLVADFCASEDPRRWEPMADDKRQLQDLMRARGFFVDQKQQCANRLETEGVHTRTHLRQLVGQLEKAIVKIEKQMAALLKECPLLAAQVELVDSISGVGLITAAVAVAELPPIGQFEHAGQAVAFSGLDPRRKTSGDTIATAPHQSKMGSRLLRKTLYMAALCALRKNPVVAALGKRLAAKGKTGKLVVGAAMRKLLRLIFGVLKNQKPFDPNWQNQSRAVDSGRRASGGDELSSLQLAAPPVAAA

SEQ ID NO: 170711 - protein, 325 aa, unidentified
MKSRVQIKHDSGILYVGIDVSKDKLAVHAGDLFEEEIDNTRRAIARMAKTIGRGTDRPVRFVLEETGCYSLPVHLELDRLGQQVCVVNPSRVRHYAIGCGVMAKTDRIDARIIRRFAEANDCEPTPIPSETRMLLRELIRTRGLLVKIRTMIQTLRKMTVSPSSGTLLGEVDRFLRTKIDKLEEEIVRHGKEDEEIERVSRKLDELPGVAALTATTIATLAPELGTLGKRRAASLIGLAPFVHDSGKYKGQRRIGGGRWDLRHALYMPVLTAVQKDATLRAFYRHLVDDRGKRKKIALAAAMRKMFIHMDRLVAGLNGKEEAMPT

SEQ ID NO: 170712 - protein, 329 aa, unidentified
MKKKHFFGIDVSKETLDVVHHATSGYLRISNNADGFEKLLTWFKSLKATKSNSWVVFEHTGMYAQALLDFCETNDFAYTQIPGLVIKLSSGIKRGKSDKIDAKAIAAFAYEKRNTLKVNDPQDKVIERFKTLMNLREKMVIERAGYKGRIKEMTSVLKLEDANVIISSQKAMVAALSIHIKAIEQEVKDLLEANPQMQKNYDLLISIKGVGFVLAMYTIIYTVNFTKFVNARKFASYCGTAPFDKSSGKQKPRYHVDNLANKRMKSLLDQSARCAIVWDKELKAYYGRRIDERANKMSTINIVRNKIIYRMFAVVKRQTPFTEEYKKAA

SEQ ID NO: 170713 - protein, 367 aa, unidentified
MKQSSKVFVGMDVHKESIDITLAEQDGEVGRFGTVGGDRVSLLKAVRKLTSRGRALVFVYEAGPCGFWIYRELTALGHACLVVSPSLIPRRSGDHVKTDRRDSENLARLARADELTGIHVPDVRDEAIRDLVRARDDALITQRRARQQLKALLLRNEIRYLNKSSWTAAHLRWLGELKLPQPAQQIAFQEYVDAITAATGRIGRLVQAIGNEAATWRFAPVVAALQAMRGIQFLHAVTLVSELGDLTRFGSARQLMAYLGLVPRENSTGEHRHQGAITRAGNAYARRALVEAAWAYRFPARVSRLIATRQSGLPKVACDIAWKAQLRLCTKYRRLSARRVNPNKIVVALARELSGFVWAIGQCVKPH

SEQ ID NO: 170714 - protein, 384 aa, unidentified
MQKPNDLNQSRTVLKQDSTLIAVIEMSLSSWLVAGIVPGVERQPLKKLAVDESALLKLLNRWREEAEKAGRRIERITVAFEAGRDGFWLARWLRARGIEAHVIHASSVAVSREHRRAKTDRLDTELLKRAFLGWLRGERDHCKMVAIPTTKDEDAKRPNRERQSLVGEQTRIVNRMKAALIRLGIRGFNPKLKKAAGRLEDLRTPEGEPIPPNTLAELHRDMERRRLVSDQIHQIEKARLERMEQAPGDGPHAMVRLIARVIGVGIETADMLVHEVLSRKLRDRRAVARYAGLTGAPDESGSKRREKGLAKAGNARVRGGMIQLAWRFLLFQKDSALAQWYRTRTEGGRNRKTIIVALARKLLIALWRLVTTGEVPAGVVLRAA

SEQ ID NO: 170715 - protein, 320 aa, unidentified
MLSFCGIDVSKDRLDVMVLPEEQCCSVPNDASGWAALVERLRNFSIMAIGLEASGGYERGFMRALLAAAMSVRQVNPFKLRQFARASGVLAKNDPLDARMIASFVGIMPTRPAQRPTPATEQLVETLAVRRQLSAEKVAAENASRLLEETILRRLSRRRIRRLAADVEVLDERLLEIVATDAVLARRYRLLTSMPGVGSLLACTLIALLPELGRMNRKQVAALAGVAPYAFESGTLRGRRCIWGGRANVRQVLYMAALSASNWNPALKAFHDRLEAAGKKPKVTIVAVMRKMITTLNAMVRDDVVWADRHSGRNSVTTAR

SEQ ID NO: 170716 - protein, 411 aa, unidentified
MELLVARCAGLDVAKDEVVACVRVPDGRGGRDQEVRTFPTFTSGLEALAGWLAGEGVTQVVMEATGQYWKPIWYVLEEGGFELLLVNARHVKILPGRKTDVCDAAWLAELLEHGLLRGSFVPPAPIRELRDLTRYRKRLIQAHAAEGQRVQKTLEDAGIKLDSVAADVLGVSGRAMLAALINGERDPQVLAELARGRLRAKLPQLRQALRGRFRGHHALLIRLALGHLEQLEGAIATLDHRVDEVIAPFAWARDRLDTVTGVGKRAAETIIAEIGTDMAVFPTAGHLASWAGRCPGNNRTGGKRRSGKPTKGNRWLGEVLIECAWAAARSRDTYLSAQYWRLARRIGKKKAALAVGHSILVIAWHLLTNDCDYADLGGDYFVRRDTDRQRQRAVAQLQALGYRVVLEPVAA

SEQ ID NO: 170717 - protein, 409 aa, unidentified
MDVIVERQGALDVHKEQVTACVRVPDEGGERISHVAEFKTTVRGLLVLRDWLKAHRVTQVTMEATGVYWKPVWHVLEDEFELVLVNARHVKQVPGRKTDVSDAVWLCQLAEAGLLRASFVPPKPIRALRQLTRYRKAQVSERQREANRLHKALEDTGIKLDCVATDILGRSGRAMLDALIGGTTDPEILADLARGRMRAKIPALREALEGRFEPLHALLIGAILAHIDFLEEQIQRISDAIEEQLAPFAPAIELLCTSPGIQRRTAENIVAEIGLDMGVFPTAGHLASWAGQCPGNDQSAGKRRSGRTRKGSKWLDAALKDAALAAIRTDGSYLQALYRRKKPQLGHGRAIGAVKHSIICACWHMLTTGEIYNDLGGDYFSRRDPERQIRRLVAQLERLGQNVTLQTAA

SEQ ID NO: 170718 - protein, 359 aa, unidentified
MMSMNHDQSPCRVVIGVDTHKYVHVAVALDELGTVRGDTAVPADRSGYERLLAWASDMGKIAAFGIEGTGSYGAGLASLVRRRGHKVIEVARMDRRDRRLRGKNDLLDAHNAARVVLAGTATAIPKAADGVVEMLRQVKVAKDTAVKARTAAMITLRALIVNVAPELRESLQGLPKMALIERCAGLRPGQVDTPLAASKHALRSLARRWRELSAEVKEHEALLERLTREVAPQLVDAFGIGPDTAAEVLIVAGDNPQRIRSEAAWAKLCGVAPLPASSGTTTRHRLNRGGHRQANAALYRTVIVRMQHHEATLAYVARRTTEGRTKAEIIRCLKRFLAREIWALMRPLREGSTALSEAA

SEQ ID NO: 170719 - protein, 342 aa, unidentified
MNATTVGLDIAKNVFQIHGVEATGKTVLRKQLKRKEVLAYFANLPKVKIGIEACAGAHYWARELIKLGHDARLISPQFVKPYLKGNKNDANDAEAICEAVGRPNMRFVPVKTPEQQDIQMLHRVRQSLVKSRTALANQTRGLLGEYGFVIGKGLSQVRRRLPELLEDAENGLSASARAVFAESYERLVSLDREIKGYDDKIQAVYRLSPVCQRLGTIPGVGPITATAMVAALGDGQAFENGRQVAAWLGIVPRQESSGGKPKLLGISKRGDTYLRTLLIHGSRSVVKAAAKKDDPWSRWINALAKRRNANIAAVAVANKNARIIWALLTRGEAYRAPVSQPA

SEQ ID NO: 170720 - protein, 309 aa, unidentified
MNTQNKNIVAIDIAKSTLQVQTENSSFVIGNDKGGFKRLDKQLSKLSKPHVVCEATGGYERPLVRHLFEQEVSVSVVNPSTVRAFAKGEGIKAKTDPIDAKMLLKYGQTRELKPSSRPDPAREELAALMDRRSQLSGSLTREKNRLDKDPAFTRKLIEKSVRFLEKQIEEVDKRIEGILASNDSLTKLVDRMTEVKGVGKTTALTILAYLPDLDSLSRGEMVSLSGLAPFNRESGKTRSRAFIQGGRAKVRKCLYMAAQSAAQHNDVIKTYVTRLMDSGQPYKSALVAAMRKILICLRSLLINPKFRLA

SEQ ID NO: 170721 - protein, 478 aa, unidentified
MTLEGNVQPENPPTAKFSKQLDIINPHCAGLDLHKDIIWACTAPFRDGIAPEVVTFPTHTEGLQQLVSHLKTRRVTTVAMESTGVYWLMPYLTLLDADLAPCLVNPSDVKNIKGRPKSDRADSVWICRLHTYGLLRASFIAPPQILNLRNLCSTREKLIVEAGSAIQRMNNELVKMNLRLDGVLTDIGGKSGMLVMEAIIRGERSPDALYALLASQIKDRGKEKIIPLLTGRYDEFSIFSLETWYSLHKSIQQNIERVNEKIYQLLQSLPKKASASNLPPVKKNYREDYLNFPHPLRPIFYEIFGHDLTQLPGVGADLLLTLVSTVGTDLSAWPDSKHFTSWLGLAPVNRESAGYRKSGKTRRTSNPLANAFKMAAMSAARTQTYLGENARRLRIRITPKKAKVATARKLAEIVFNIIRHDMPMHVKTMEEYEMRRKKREIQHFVKSLNKFSKDGELMPEVLEEIQRQNTNFTTTVAI

SEQ ID NO: 170722 - protein, 448 aa, unidentified
MTIMEGSAAVAVGIDAAVVANHHVVVRRPEAGRPGTMVDDFVVPPTLAGMERLTKRLVSWPGAVAVAEPTSMTWLPLSIALRNAGVELSLVGNRHSARLRSALAGKNKSDPIDAALLSRAGEFFELHPARIPTTLELALRRAAQRRGKTIVDANRCLRRVVSQARWAFPDVWNAFAGSRPTALAVLDRWPHLEALARARVSSITEVVAVHTRGVANVEGRAQQIRSAARDWVEFWNGHLDLDALAWETAELLADLTAADARVDRATEATRRYWEQLWGDDPVLLSVPGMGLLTAPTVRAFLADGTHLDDAKAAQSFVGLNPSNWSSGQMESPSREITKEGPPVLRLAFYQAANVARTHDPQLADFYRRLMVERGHCHTKANCAVARKLVARTWATITSGTPYELRDLNGTPVTRREATKLAAALAVPDDIRRRTRAHSAATHRARLTR

SEQ ID NO: 170723 - protein, 392 aa, unidentified
MYIVGIDIGKNHHEASIVSPEGKQIGRSLRFATTHKGADSLMSFIFKNIGNSPCVFGMEATGHYWYPIYSFLKAKGYTIYVINPIQSDSLRKMYIRQTKNDSIDSFLIAEVIRFGQFGTTSMADENILAMRQLCRYRDSVISSRTEIKLRIGTIMEQIFPEYEKQFSSLWLSTSMGILEKYLTPENIENAPIDELFEIIKDKSHNRLTKAKAISIKEAAADTFGIKIAQDAFSFQLKQLIDRMNFHDKQIEALDIEIMKYYEQFDCYLHTIPGIGIIGAATILAEIGDISRFKNSSALVAFAGIDPTVRQSGEFNSTHNHMSKRGSPYLRHAIFLAATTCSFHNSPLNAYYKKKRDQGKHHLTATGAVARKLTTVIYAVLRDSKPYEPKKFC

SEQ ID NO: 170724 - protein, 413 aa, unidentified
MSQKAYLGIDLAKGPSKVAAIDEDGDEIVSPFSISNSREGVEKLMSKLHSYKKSDIICAMEVSSNYWENMYSYLNQKDISCILLNPYQVKKYRQALGSKIKTDSIDAAAIASLVRAKKYDSLCVSDEAVLELRELVRMKHSFGRRVKDLKRSVLALLYLTFPEYTKIISYPFSKVSMQILSKYPTSFHMAKDGTVGRLVKIFRRYQGCNFGADKAKELIAVAKDSFYSGKASRSRGMSICMQIEEIASLSLKISEIESEIKSILNPDDPKDGYRQDFDILNSIKGVGIGTIAAFIAAVGDVSRFSSSDKLVSFIGFYPKIFESGKYKKKNPTIVKAGPKDLRYMLYMSSVAAVKHNSHLKKYYYDMVSAGMPVKKALIKVAVKIARMMYSMLKYKQYYDPFRVFLQQAPAVAA

SEQ ID NO: 170725 - protein, 340 aa, unidentified
MGYYVGLDVSLKSTHICVLDGERRVIWRGVSDTQIAMIAEHLARWGEQIVLVGLETGSLTPWLYHGLSDLGLPMVCMDARRTSDALKARAEKTDKADARALAEMLASGWYSAVHVKSLESHQLKALLGARDQLVRVKRQLYGQVRGLLRPFGIKISQRVGAKSFDEAVRMACNKEDVLYIAVGALLDTLANVASQIAVLDKQVRTLAQKRKACWHLMSVPGVGPITALAFTAAIEDPHRFSSNRDVGAYLGLTPKRYQSGERDVSLSISRQGDEMVRHYLYEAANCLLTTVTGASALKSWGLKMVRRCGAKRARTAVARKLAVLLLRLWKQESHFEAQSA

SEQ ID NO: 170726 - protein, 335 aa, unidentified
MKYAGIDVSAKQLVVALEPTPGDVRTLNFENSPKGHKTLIQILACRKDAVRVCLEPTGSYHLDLALALARTNGCEVMVANPRATRNFAKAMMTRGKDDPLDANVLLQFAKRMEFQVWNPPSDCILSLRAITRRALQLTHDLTMEKNRLHAASASISTPKSAIESLQAHIVFLTQVIERLNRSAVEQALATPELHVPFGLLLSVKGLGEVSAARLLPELLILPKDMEARQWVAHAGLDPKPMKSGSSLNRPSHISKAGNAYLRQILYLPALTAIKWEPSIKAYYLHLTSDRHKKPLQAQVAVMRKLLHAFHSMLFTKTVFDGSLFYAAPRAPLTAN

SEQ ID NO: 170727 - protein, 505 aa, unidentified
MNLVEAPKRRSCSMAVLSIGALVPDCESGSGGWAWYFGAGGRLVPPSPFSRITALTPIGPAVATVFFTMLTTLNAHAAGIDAGSTKFFVATPDGEVAVFESFTLELYRLRDHLLARGVTTVAIEATGVYWLVLFEILEAAGIDVCVVNGAHVRNVPGRKSDVQDCQWLQQLHAHGLLRKSFVPPEQIRALRSYTRLRDDHIRQSAMHVNLMQKALDQLNVKLHTVISQLNGASGLAVVRAILAGERNAAKLADLCDPRILKTKRAAVEHSLQGRWRKEHLFALGQALAGWEFCERQIRECDTQIAEQLKALTRDLPPPPKTQELPKGGRHHVPQVPELHQSLLTLTGGCDAAQLPGFTDTNWLKLLSEVGTDLSRWPNEKAFTAWLGLAPGKHQSGKTARRARRRPQSSAGQIFRLAAHSVAKSRYLALGGFYRRLKARTNAAVAIVATARKLAVLYYNAMRHGLAYVEQGLEQYEQLYRERQQRYLQKRAAELGLTLVPNSSPA

SEQ ID NO: 170728 - protein, 427 aa, unidentified
MAYRIAAIDVHKKMLAVVVADVAGEGEYQFERRKFGATPDQLHLMAQWLVQQEVEEVVMESTAQYWKPVWGALEQYWKPARQKREGATKKSGTLHLCQAKSNRGRRGRKNDFVDGERMIKRLVAQELVLSFVPDPEQRLWRTVTRRKHQLTRHKVRFQNQLESLLEQAHIKLSSLVSDLLGVSARRMLKAMAEGETDPAVLAALADYRLRATPEQLCDVFGACAQLPGVYRRLLKMALEELKLVEDQIEQLEQEAFDLLKEHQDKVQRVAEVPGFGVDSALQMIAEVGPAAAAFASEKALASWVGVCPGDEESAGESKSTRSPKGNRPMRRLLNQAAQAAVKANGSIFQVTFQRLLPRLGYKQAIWAIAHRLCRLLWMILHKGIHYEERGPAVSAKSQRRRAARMIKELKAIGYRVEGGPPLASVHA

SEQ ID NO: 170729 - protein, 405 aa, unidentified
MEIIIERGCGLDVHKETVVACIMGTGIKKEVRTYTAMTNDLLRLKGWLQEAGVTHVAMESTGVYWKPVFNILEDNFEVILVNARHVKNVPGRKTDVQDSEWLCRLLRSGLLKGSFIPPRGIRELRDLTRYKRKLIQTIVAEKQRVEKVLEDANIKLSSIASDTFGASGKKIIDELMKGKLEAEEMAELSKGRLRQKREGLKEALVGEVREHHKFMIRASLKHIRAMEKILLGIERKIQEKIEGDYKEEDELLQTIPGVKENASTIIAEIGVDMDIFPNEMHLSSWAGMSPGNNESAGKKKPGSTTYGNKCLKAILTEFAWVASRMKDTYLRSKYHSLVGRRGKKRTLVALGHKILIMCYHILKYRCVYKELGGNYLDERRKERITKSYIKRLNHLGYEVILREAA

SEQ ID NO: 170730 - protein, 362 aa, unidentified
MSQSSWLVAGVLPGIERQPRKKLEPNAEGLLGLLHRWRDEAIRAGKEITRIAVAFEAGRDGFWLARWLSARGVEAHVIHPSSVAVSREHRRAKTDRLDTELLKRGFLGWLRGERGHCSMARVPTIAEEDAKRPNRERECLVGERTRIVNRIKATLARLGIRNFKPTLRKAAERLATVHTPEGMPLPPNALAELQRDMARLRFVVSQIREIEEARQKRLEQQPETGPHAMVRLLARIVGVGVETADMLVHEVLSRPMRDRRAVARYAGLTGAPDESGAKRREQGLARAGNARVRRGMVQLAWRFLLFQKESALALWYRARTADSRIGTRKTMIVALARKLVIALWRFVTTGETLEGVVLRPAG

SEQ ID NO: 170731 - protein, 344 aa, unidentified
MYWIGVDHHKHNSYVTSLEDDGTVYVRRNLSAQAATLQAFFAQHPRPFTVGIEATYAWEYVADIVEDLDATIQVAHPLLLKAFARRHKKNDKIDSMLIAQLLWQGHLPVIAHPPKAARQKRDLYRQRMELVSRRTGAACRAKAWGDRLGFQTSMNLSTLKGIAELASLPVQAEHHDVLASHVSMLRFLWDEIGRLQRVIDHVAQVTPDTQRLMTIPGIGAYLALLIASEVFDITRFPNARHFASYAGVTPGVALSGGKSYGGHRHPACNKYLRWALTETVYHYIVANPWAALKYERLRSAKGWKTARVAIARHVAGAVYAVLREDRPYRIARSGPDERGRRKGL

SEQ ID NO: 170732 - protein, 363 aa, unidentified
MEQQNRRFVGLDFGVRTYEMCMYDENGKIIRSNGLTTPEGRQKLFSKLKPTDRVGIEMCSLTMKVAREMKSAVGCDVLLLHAGKLAVIYKSLKKTDKEDALKLARLVKTHEDEELPIVPLPSEVDLKRRRMIREAKQLRSDRTKEVNRLHALFVECGITDIKKKNLATKTSREKSLLSLEKTQKKQAERICQVINLIESQIAEVKKEIAIEVESDNNIKNLQTVPGIGELTAVAYSGFVGDGSRFDNGSQVSNYLGLVPKLDISCDQVHYGNITKAGNPEVRSLLIMAAWSHVRFAKEDTVLKSKWQYLTQVRGMSKKKAIVCIARKMAEMMLAILKSGKPYSPKKFSVAQFSELAEKALKSA

SEQ ID NO: 170733 - protein, 339 aa, unidentified
MVKHKIIGIDLAKNSFYLFILNKDGKAESKKKLTRTKLLAYLAQQTKCTVAMEACATSHYWAREIQKLGHSVQLLPAQHVKGYLRGQKNDYNDALAIAEACLHGAIRPVPIKNIKQQDEQTFLQMRRHLSAERTRLINHVRGLLSEYGLILNKGSTVLQSALPGILEDANNNLTDKMRALVNRQYYQLVALEDELSWYDKQLKLDAKNDEVCQRLIKIPGFGPVVSKVVKSWMGDGKQFQRGRDASAALGLVPKQFSTGGRDRLLGISKRGDSYVRSQVVHGARAVVCRASEKNDPLSLWINRLVEARGFNKAVVALANKLTRVAWVIIARNEQYIAVK

SEQ ID NO: 170734 - protein, 365 aa, unidentified
MTIAASESPATASEVILGIDTHLDVHVAVALDGLGRRLGELNVPTTVKGYKKLLHWAEDFGPVCCAGVEGTGSYGAGLARYLKTAGISVMEVERPKRRHLRRNGKSDPIDAEAAARAVLANDTAGEPKSGDGQAEMIRTLRSARQSAVKARTQAANQLQALLVTAPEHLRHRLRKLSTTNLVDTCARLRPGAAPSDVQTATKFALRSVARRYQLLSEEIAQLGEQLDRLVADAAPELIAPVGIGTDHAATLLSVAGDNPQRLKSEASFASLCGVSPIEASSGKVVRHRLNRGGDRDANRCLHLICVVRMRHDKRTREYVARRAAEGKSKREIMRCLKRYIAREIYRLLAPLAAASAPSAPRSQAT

SEQ ID NO: 170735 - protein, 349 aa, unidentified
MISNTTKESAVYAGIDYHKRTIAVAVGDKEGRVLERFNLLNQTELVTKFFQQFSKIECVVESCRGYEWFVEMLQKQGHTVHVGDSRSIKLIAHSRCKTDKVDSQILMELLAIKYLPTTYIPTAKEREYRELLRHRSSLVQTATRSKLRVHALLDKENKGIRFPFSKNGRKQLEELDLSESRRRIIQHELDVIDFAEEHAHEQQLRIHLLASYEPEIKRLRSIPGFEVLMAAAFLAEVGDVSRFKNGDQVAAYFGLVPRVYASGNTMRCGRITKAGSKFMRWMLVQAAWAAIKASPNLRQSFGAIGRRRGQKVAIVAIARKLATIAFRVLRDKTTYKEELLDAGLARASF

SEQ ID NO: 170736 - protein, 351 aa, unidentified
MPRTSTVHAVTTIGIDMGKNTLHMIGLDKRGAIVLREKVSRGRIASRLANLPSCLIGIEAGLATHYVARELAALGHDVKQVPPTYAKPFRQGHKNDFRDAHSVAEAVQRPTTRFVPAKTDEQLDLQALHRVRSRLVSERTAVINQIRGFLLEHGIIVRQGLRVLRQALPDILAKRTDVLSPRMVRIVADLAGDWRQLDERIEPVTDEIETLAKSDDGCRRVMTVPGIGPIISSAIVAAIGNGAAFARGRDFSAWIGLVPKQMSTGDRTILGRITKRGNGYLRTLFVQAARVILLRPASWPKHSFGVWLARAAQRLHRNVLAAALANKLARIAWTVLAQGRGYEARITKPAV

SEQ ID NO: 170737 - protein, 433 aa, unidentified
MLKLNYMSTLFVGIDVSSKTNAVYAMDFEENKYISSSFGNNQPGADQLVNMIAECMQKHKNLDTILIVLESTSVYSVHISNFLSTSEVLMPYKPYVFCVNPKATSNYRKSYIGMEKTDPTDAYLIADFGRVGRTKKLEPWRGGQFISLKRLTRHRMHLSECITREKTYMVSNLYLKFSELQLLEGDDKPFGSLYGATSSAVLTEFLSPQEIIDMPEEELLTFLAGKSRNRISDLSKTSELLRKAARDSYRLDKCMYEPLSISLASSFNCIHAYQKEIKLIEQAIEKCINGMNPNALLILQSIPGIGPVWASGILSEIGDITVFHSSDALAKYAGLYWPKGDSGDFTSEDNKMSKAGNPYLRCYLGEAANSVRKHIPEYADFYARKYAEVTKHQHKRALALTSRKLVRLVFGLLVKNQLYTGEKLDTEYNIESN

SEQ ID NO: 170738 - protein, 384 aa, unidentified
MSTRRRGPGPSSVLTTPDHAGNVVGVDPHKRTLTATVADPRGGIVASGHFRVSGDGHRALEAWARQFGQIARWGIEGASSWGRHTAVFLIARGYDVRDVCANRTPRSDRARQRGKSDTLDSERIARETLAHPLLPRAFKRAGHDSGPDEHHELLSLWHNQRRSILTSRQHLLNEAEHLLSSLPLELREQLPDTKAVRPRLTALAARNRRRRYDQPTALRLTLLDDYRAQIATLDAHDKQVTAELAALVKASGSTLVELCGLSTVLVSELLVEVGDPRRFTIGGFARFNASAPLAASTAEGPGEPIRHRYNPGGNRRVNRTLHLMAVTQLRCEPRALALYENARSRGHTKKEARRILKRHLSDVIYRRMIRDLAQRAADHSLLAA

SEQ ID NO: 170739 - protein, 411 aa, unidentified
MGLFCGIDWATEHHDVAVIDDDGHVVARGRVSNDAPGFAALLTLLAQAGDSAADPIPVGIETDRGLWVAALRETGRTIYPINPLAASRYRARYGVSGAKSDATDAVLLANIVRTDPGAHRPLPADTELAQAIRVLARAQQDAVWARQQIGNQIRDLLKDFYPAALTAFADLPEGRLARRDARTVLAAAPTPAQAAKLTPARLRRLLIKAGRKRYLDRDIARLCEVFTDTYLHQPPVVENAIGIHLAALLGQFEAACTAADALAEAAVAHFEQHPDAEIITSFPGLGMLVGARVLAEIGDDRSRFADARGLKAFAGSAPITRASGKKTVVLHRYIKNRRLAAVGPIWALGSLRASPGARRHYDARRAAGDWHQQAQRHLFNKFLGQLHHCLHTGLRYDEHLAFPPPLQDQLY

SEQ ID NO: 170740 - protein, 469 aa, unidentified
MFGKAEMMQDSDQRKDNADSSKQIAGLPVVQHKVAGIDLGSERHWVCAPTVEGSGREVADFGATTCELIRMAKWLNARKIESVAMESTGVYWIAPHEVLEAEGLKVMLVDTRQLARVPGRDKKSDPFDCEWIQRLHSCGLLMGSFRPKEAVCMLRTLVRDKGNLVAEAGDWLRRMQKSLDQMNVRVHRAVSDIDGVTGMAILRAIVDGERDARQLAKLRNRRCHKSEEEIAEQLSGHWREDHLFSLRQALKMYDAIQERITDYEKEILQTLAEMEREECRGQAVPKSKNPQKGRAIQSRGEEPMRQALYRMSGVDLTGIDAIGVETVQVVLSEYGPDLSRFRTERQFVSHVTLTPHKPTSAGKPVKKKKRNSASTRVAAALRMAASSLRHSETALGAYYRQIARRIGGDVAVFATARKLATIIYRLLRWGQPYVDEGAQTYEQRYRENRIKSLTARAKQLGYQLTPTPA

SEQ ID NO: 170741 - protein, 392 aa, unidentified
MTAAYSVNGSTQGGVLYLAFEVGWTDWKMAFTIGHGQKPRQRRIAARDLVALEQEIARAKKRFQLADGVPVVSCYEAGRDGFWLHRYLRARGIANVIVDSASIEVNRRKRRVKSDKLDATKLVNMLIRYHAGERKVWSVVWVPSVTDEDQRQLHRELQELKDDRTRHNNRIKALLASQGLAVEVDGLLPSWLERARLWDGSTLGADLQRRLVREYERWQFVHRQILDVSRERRRRILCDDTAHVDLVRRLLGLAGIVNGAWLLVYEFFGWRKLQNRKQAGALVGLTGTPYQSGGSEREQGISKAGSKRMRKMLVELAWCWLRWQPESALSQWYARRFASGRGPARKIGVVAVARKLCIALWKLLERGEIPAGAKLIDWRCKLIKHKAKKSAA

SEQ ID NO: 170742 - protein, 341 aa, unidentified
MKQDISVLGLDIAKRVFHAVGLDAMGKIVLRKPLSRHALMSFIAQLPPVLIGMEACGGAHDWARRFREHGHEVKLMAPQFVKPYVKSNKNDARDAEAIGEAVTRPTMRFVPTKEVDQQDIQALHRVRERLMGARTALVNEVHGLLHEYGIVLPKGVAKFRQAVVGILESEKDKLTPLSREMFWKLVDEFAAVEEQLAYYQEKLETVATTHPECRRLMTIPGIGPLTATALLAAVSDASAFKNGRQFAAWLGLVPRQHSTGGKERLLGISKRGDGYLRKLFVHGARAVVRGVREKTDRRSGWIRGLIARRGFNRTTVAVANKNARIVWALLTSHQDYQPTTG

SEQ ID NO: 170743 - protein, 349 aa, unidentified
MLGEVVDAVVGVDTHRDVHEAELAAPSGSLIAQLQVPNDSAGFARLLTWIVEHAPGPRVVVAVEGTRSYGIGLTRALIAAGLQVIECEQPARKDRRGRGKSDAIDAHLAVLFALRQDADRLPTPRADGIREALRILLAARQEMVTTCTGQINRLRALLLSGDDADRGASRGAFTDATLSALARRRLRPDTDRHEAVRHQEIRRLAIAVREANRALKTNRRELQELVDEIAPGLTDRPGIGPVSAAQVVVSYSHPGRVRSDAAFASLAGTSPIPASSGQTVRHRLNRGGDRALNRAVHTIALTRMRSCQRTRDYVTRRTAQGKTTREIRRAIKRYITRELYRTLTAAMTP

SEQ ID NO: 170744 - protein, 343 aa, unidentified
MTLVGCDLRTRKQQVAALDTETGEMCERELGHEGSVVEEFYAALPRPVTVGIESTGYAIWFHALMHRLGHTVLVGDAAKIRAMVVRKTKTDRRDARHLLDLLRHDRFPTVWVPDPATRDLRALLTHRRRLVRIRTMLKNGLHAIALNERLVCGSKLLRHAGVVQLQALPLPPYTAQRRDHSLELLEHLHTQIQQLDGAIATAALAHPDAPRLLTHPGVGPLTALATVVVLGPVTRFADAKHVVSYVGLAPSLNASADKYRLGHITKQGSSLLRWVLGQAAPHAARLDADLNRTYGTLRHRRGRAKARVAVTRKLLVRLFIMLRDHIDYAEFRRRGRPPVPVAG

SEQ ID NO: 170745 - protein, 452 aa, unidentified
MRKKRSPRNRKKNKRVLEQINHNAAGADMGSDAVWISVGEHLTEETVRVFGTTTAQLRASAEWMRSLGVDTVALEATGVYWVAAYEIYDESGLRPILINSQAIRSFNGLKKSDFIDCQWIQLLHTFGILQASARPESAMIELRGYMRQRKTLTEQCSEQIQRMQKALTLMNVRLDQAVTDITGVTGMSILRAILEGERDPAKLAKLRDPGCAKSESQIAEALTGHWREEQLFVLEQTIQLWDFCQDLMRKCDQKIEALVKTLPVRTSAESNKSRAKRRKNQVSFDGRSLLHERLGIDLTRIKGLDVLTILTVMSECGMDLSRFPTDKHYVSWLGLAPGTKKSGHRVLNSRSRRTTNRAATALRLAAQSLLKSQSELGAFGRALRARIGAEKAITAVAAKLARRIYLSLQAGRVYEDRGVPYHDQQHHDRQVASLHKRARRLGLQLVPLQPSA

SEQ ID NO: 170746 - protein, 350 aa, unidentified
MIIIGADYHPGFQQIAYVDTETGELQERRLQHREEAEKFYRELAAQQMKVCVGMEASGHARWFERLLSELKFELRIGDAAEIRTKRVRKQKTDRQDAQLILKLMLEDRFPQIWVPSWENRDLRQLLWHRHRMVQARTRIMNQLQAVALNEGLRSKKRLWREAGREQLLAIRLAPWASRRRQDLLELLDRLNPSIAKLTEAVEQEAEKCPEAQRLMTHPGVGPLTALAFVLVIGTAERFRCGKQIASYLGLVPSEDSSGERRRLGHISKQGNSLLRFLLVEAAQVTVRSNQEWRSKYYHLTMRRGRKIAKVAMARRLAIRLYWMWRQGWNYQQLTKFGSYAGQPGNPHGVQ

SEQ ID NO: 170747 - protein, 341 aa, unidentified
MGEYIGLDVSMKDTAISVRCDGKRVWRGKCASDPEAIARTIRKHAREPERVIFETGPLSVWFYHALQSAGLPVICVDARHAKAALDMAANKTDANDADGLAHLAEVGFYREVRVKGFDSMLTRTLVAARTKLVRIQTELSNQIRGLMKTFGLVLPAGKGSTFETNVRGRLDENPELAAIIKPLLEAWCSIRLRAAELTRRLINDARQSEACQLLMSIPGVGVVTASAFATAVEDPANFRSSRSVGAWLGLTTRRYQSGQVDYNGHISRRGDHQVRSLLFEAACVILTRSTADSALRDWGLKLRERIGFKRAAVAVARKLAVIMHAMLKSGEMFDRKVVTPA

SEQ ID NO: 170748 - protein, 358 aa, unidentified
MNNVSHKTKKIYFGLDISQKTIEIFALVGENGVPFGKIPNTHEGLTDFFGKVSVPAGEITVVLETGTHAPWISLFLKQRGYEVIVAHARDLALIYKGDKKSDRIDAEKLARLARADKKLLHPVELMSRDRQESLVAIKARDSLVRTRTDIINTIRGLLRSLGIDDSGYSHETINDLYATLPKEIRLNLRGLFAALTTVNNLVKNCDKRIAKIAQKYPETQTLQQIKGVGPLIALTFALVIGDPKRFTSAGCSSYTGLAPKRDQSGEVDKQLGISKCGNKLLRRLLVQGAQYIMGPFGEDCDLREFGERIAGRGGSIAKRKAKVAVARKLAITMLALWRNPEVAYDSHFKTNRKKRKTA

SEQ ID NO: 170749 - protein, 395 aa, unidentified
MFIVGIDIAKRSHEAIIIAEDGQVVRKAFSFRNNCTGYNLLLEQVRRLTLVKSQILFAMESTAHYWLALYARLLKDGYAVMVLNPIQSHSLRELYIRKAKTDARDSLVIADLVRFGRCKASNVPQDKILALRELCRSRAYLVDMAADLKRKLIALLDRIFPEYESLFDSVFSKASIAVLRKYSTPQKVKNANLRKLTDILMESSNGHFGEWKAHQLKEAACSSFGIDDSGGVYSTLLGMFLEQILSLTAQADSLEKQISVFFQEFNNPLTSIPGVGTVLAATILSEIGDITRFSSADKLLAYAGLDPSVKQSGEFKSNQNRMSKRGSPYLRRAIWLASTVAVHRDPMFQTYYEKKISEGLHYMNVIGHVSRKMTAVIFAVLRDGQPYQLILQSAG

SEQ ID NO: 170750 - protein, 369 aa, unidentified
MHGPIADHNEGTDLDTIADDELEVTLGVDTHLDQHAAAVLDPIGRLLGATSVPATVAGCEQLLTWASSFGLVTRAGVEGTGCYGAAVARFLQAAGVHVVEVTRATRVEGRHRGKSDPLDAQAAAMAVLAGRSAAVPKDRSGIVESIRLLRVARQTAVKARSQAVIQLKAILVSAPEPLRQLRALNTRELIKRCASARPGRDRDPVTVTRRVLRSIARRYGDLDAEIHALEAELDELVTLAAPRLLAEHSVGRETAAKLLTVAGDNPERLRSHAAFAALCGASPVEASSGKTARHRLNRGGDRQANNALYTIAMVRMQHHPETKAYVTRRTEEGKTRREIRRCLMRNLARRLYPLLIADLQDAKTIPLLT

SEQ ID NO: 170751 - protein, 384 aa, unidentified
MNKDSIIFIGLDTHKSFIQVTVLQEHRGANPQHLGRIKSNKSALIKLAKQLQSKYPKATLHFVYEAGPCGYWTYRLMTSLGHCCYVVAPSLIPKKPGDRVKTDKRDAAKLAKLLKAEELTPIYVPEAEDEAIRDLSRARETAMKDLKDAKFQLKGFLLRNNIQATVNDNWSKKHLRWLTDLILPHHSQQIVLQEMIITINERMQRLQRLDNELLHQVKNWRYYPVVKAIQAMRGVRLLVALGTIAELGDLRRFDHPRKLMAYLGLVPTENSSGGQTRRGSLTKCGNSRARRLLVEGAHTYKHKANISVELQLRQEGLPKEIVDIAWQAQQRLCRRYQRLLQKGKHRNVVVVAIAREMIAYIWAIAREVVISDVDPKTRIARLPA

SEQ ID NO: 170752 - protein, 350 aa, unidentified
MSKVTPDLSSVTVVGLDLAKSVFQVHCVDAGGKVLLNRALKRREVMDFFRKLPNCCVGIEACGSSHHWGRQLLALGHDVKLMPPAYVKPYVRRQKNDATDAAAIAEAVTRPTMRFVAVRSIDNQALLMRHRVRETLVGQRTQLLNSLRGHMAEAGLIAAQGARNARALAGLLAEGHPDIPSCVAQALLPFARQIAELDAAIDVLDREFAAAAKADVEARRLMTIPGIGPQTAHAIVATLGPDGIGQFSGPREFAAFLGLVPRQNSSGGKHRLGRISKMGNAYLRKLLVVGAHSVLHHRERHNDPLRNWAKALLAAKPFKLVAVAIANKMARIVFALLSSQSAYAAPVAAA

SEQ ID NO: 170753 - protein, 385 aa, unidentified
MLKIVYPICCGMDVHKSFLVACIASTNECGVTTYKSRRFSTFTKDLRLCADWLSANNCKDVCMESTGKYWIPIYNILEASCKIVLAHPKYVKAIRGKKTDKKDAKWIADIFKHDLVSGSFIPPADIRQLRDLVRYRWKLNNFIVGEKNRAQNCLTVSNYKLDDVFSDVFGKAATQITSYLLEHLNEPLSDVSNFRTKGMKATDAEIRDAADGNICAEQAEKYTSQLSLVMSVPGIQTFSAISVIAEIGVDMSVFPSSKHLCSWAGLTPQNNESAGKKKTTRISRAGAYIKPLLVQCALCAIRAKRNPEIRNRYLSIKKRRGHKKAILAIARMLLTAIYNILKKNEPYNAELSHKVDVPPAHRSVTIEEAVFILQRQGYLITPCTS

SEQ ID NO: 170754 - protein, 321 aa, unidentified
MSEAMVVGIDVSKATLDVRWSDGRVEQVANDDEPIAVFVEQVRAAAPRLVVMEASGGYERLVLVALYRAGVPAVAVNPRQVRDFAKALGRLAKTDQIDASTLCEFAARMRPEVRAVPDAAAQELEALVHRRHQLVQMLVAEKNRLKQRPTDAVRRSLETHIAWLSKQLDKTNGDLDKAIKLSPLWREKVELLESVPGVGRTTALVLTASLPELGHLNRKEIAALVGVAPLNRDSGQHQGKRSCWGGRGDVRASLYMAALVGVRHNPILRAMYAALRGRGKLAKVALVACMRRLLTILNAMARSGIPWTAPSMQIETAEATA

SEQ ID NO: 170755 - protein, 464 aa, unidentified
MRAIGIDLAFTAAHKAVVLDEQQHYVTPVISFHTRAAELDSLLAGARQGADSSEVQVVMEPTGMAWFPIAVYLEQQQVPVYLVNCQEVSDLRKYYQRHAKSDRIDARVLAQLPSVNPEHLHRLTPASAKLLACQRGCKELDRLSRAMVALQNRLHAIDRFAWPELTPLVFKDPFSATARWFREHWYDPAQVLQAGASRIRQNSPDPADSPENQGDWATDLVRLAHQVVELYGTENRFLHFEELQAEIIRLQATLAFLEGQFDTVRFRIVRPLYRQLHPSRNLETIKGIGQDSAAVYLSFIGDPQRFQTARRLRGWSGMVPNSKQSAHTEAKGLHITQAGPALIKKYLYLDAEIARQWDPQLAALYYDQMVNKGKHHLQAICTCATHLLDRIRIVLRDDRPYELRDVQGQPVTVAEARAIIMERYTVPEEVRQRTNKRTRHERAANLIEKQHARQTKKEKSPKIG

SEQ ID NO: 170756 - protein, 357 aa, unidentified
MHATPNYTLATTVAVDLAKNVFELAFSDAHGRIVRRARLGRTAFAHAFDNHTPLHILMEACGSAHYWARRFSALGHRVSLLPAHAVRPYVRGNKTDRTDAAGLLEAARCAAIESVPVKTTLQQGIQAQHRIREHFKSQRTAAINLLRGLLREFGIIIPLGAARVRPAVLGALEDAGNDLPMALRDSLSQVLDQIQACEQAMTDIERHLAAFAVDDGRSQRLLQAGGIGLITATALSASVGELDRFRSGRHFASYLGLTPREYSSGARHRLGRVTKRGDRYIRMLLIHGARAVLRSAKVAQRKGQPLDRTRAWALALSERVGHNKAAVALANKTARRLWAAEHHRTNFDPDHVSALTH

SEQ ID NO: 170757 - protein, 418 aa, unidentified
MTKKLDTTFIQIVHPVCCGLDVHKKKISACLITIDEQGKEQYEIKEFGTFTNDLFVMRKWLTDNNCPIVAMESTGVYWRPVHNVLEGFMEVILVNARHIKNVPGRKTDISDCKWLAGLLRHGLLRGSFIPPKEIRQWRELTRLRRSYTESLADYKRRIHKLFETANIKIDSVVSDLFGVTGRNLISLLCDESELSLSNIKKNAKGTLKSKSNELHSSIHGFFEDHHRFQLIGMMEIITNFEQKITEITKRSNSLTAGHQNLLDRLDEIPGINKKSAQSIVSEIGVILDDFICMAALASWAGLCPGNNESAGKRKSGRSSVRSHPFKTILIEVAWAAIKKKGSYYRAKYFKLKARRGAKKAIVAIAHRISKAIYNIIKHGATFKDLGEDYLTTQTKQRAIKNIKNRAKQLGYKLVPCMN

SEQ ID NO: 170758 - protein, 411 aa, unidentified
MRLFVGDDWAQDHHDVEVMDQAGTVLAKRRLPEGVAGIAQLHGLVGRYLGEDADDAEVVVGIETDRGPWVTALIAAGYLVFPVNPLQASRYRERHGVSGAKSDSGDAHMLADMVRTDSHQLRPAAGDSPQAEGIKVLARTHKTLIWERTRAVQRLRHQLREYFPAALEAFEDLDAGDALELLAKAPEPASAAKLTRAQVAAALKRARRRSIADKTTAILAALRGEHLGQPPALTAAYAVTVRSLIAVIVTLNEQIKTLQGQVEEHFRQHPDAEIYLSQPGLGAILGARVLAEFGDHPRRYADGKARRNYAGTSPITRASGKKKVVAARFIHNDRLIDALQAQAFAALNASPGARAFYDTQRAKGLEHNDALRRLANRLVGILHGCLKTGTLYDEATAWGHWANLPQSSVAA

SEQ ID NO: 170759 - protein, 337 aa, unidentified
MKNYTLLNISIGLDVSKESISVYIPINNLDYEIKNTLDGFNKLISKLKKLYKKEYDNLVFVYEPTGSYSELLKKFCSKKSIRTFALNPKRSHNFAKASGSRNKSDMDDAKVLSGAIVLAKSEEISIPIISAVAEDIKELMSYYKFIVKQRVMASNHLESITVKDGNNYVISSLEDEIKTLKKRENDIVVNIKKIIDSDEDLSAGYENIKSIVGIGELGAIVLLHLFLKYPDANKKQIISLVGLDPTRFDSGSSVHKKSKISKAGAKIYRGVLFMGAMMATRYNPEMKLFFDRLKANGKQTTQAQIAVMRKMITIAHSLYKKKQKYSSDVYQKACGML

SEQ ID NO: 170760 - protein, 343 aa, unidentified
MKASIIGLDIAKSVFQAHGADANGKCVFKRKLGRSEVSAFFAKLDPCEVVLEACGSAHYWARVISRIGHDVRLVPPDRVKSFVKKGKKNDAVDAAAICMAASHPDTMCVPIKSEEQQGILSLHSTRALLVKQQTMLSNALRALASEFGLIAPLGTRHLPELMAKIETSADLPAAMKQSAMLLFDHYEKVAQSIDTLEVQIRARAKSDEDARRLMTIPGVGPITASLIVASVADIGSFASARHFAAWLGLVPRQHSTGGKTRLGRITKTGNRQIRTLLVLGATAMLHRAHKWDSAAGQWLCELMARRPRRLATVALANKMARIIWALLSRKEIYRPAGVSVSAG

SEQ ID NO: 170761 - protein, 330 aa, unidentified
MAIGADEEPLRQVRVRASAAQAPKLVAWAADWPERTWAVESASGLGYLLAQQLVAAGERVLDIQPKLGARVRLLATGASGKNDPNDARSVAIAALRPKTAAEVAVAGHAAVLKVWSKRHRDLGRAPNQLACRLHAVLCDLVPGGFGKEITAGQAFGLLERIRPSGAVAQARYGLAAEFIEDLRRLDAQLRDTRNKLTAAVKASGTSLTGIFGAGPVIAATVIGATGQVSRFASRGRFAAYNGTAPIEVSSGNRRIYRLSRRGNRRVNHAIHMAAVTQIRNKHSEGRAYFDHKLAEGKTRKEAPRSLKRHVSNAVYARLQDDARRTRPAAI

SEQ ID NO: 170762 - protein, 428 aa, unidentified
MDEVDRNRLEEFRQLRQEVRHSEEYLIVGIDVAKERHHAFFGTATGQTLLKRLVFSNDYEGLRKLLDQTEALRVRHGLKKVVYGMEPTANYHKPLGEFLINLGRTVVLVSGVTVKKNRETLDGRWDKHDVKDSANVADLISQGKCLYYEYPCAKLRGLRGLLALKKRLKKQEHGYKVRIRNQLIAQYYPEMDRDWERLGAEGLSIMRWCFPPSEMTILDIEPFIERVTSGRIRMEKRRRLEEVWEKAGETIGCDSVPGVDHEARLMVEGLRQIREMIKETEDKIRELCEQFPEYPYVLTIPGFGPDVSAKVLGAIGDPDRFDNRKQVLKLGGLDLSADRSGKDSDKAVPQISKRGKADLRYALYQAALIASTRNRDFMRYFTNKIRGRDKEQGIHRKLLVTLSAKMLLIAWTLMKKKEAFDPTYLNIE

SEQ ID NO: 170763 - protein, 352 aa, unidentified
MTTITTIGLDLAKKVFQVHGVDAEGVVVVARKLRRKEVLAFFAKLPPCLVGMEACGSAHYWAREITKLGHTVKLMPPRYVKAYVKRGKTDAIDAAAICEAVTRPSMSFVPVKGLEQQGLSMLHSARSQLIGQRSQVINAVRGHMSELGIIAERGLLGLAELAAIVRDESDQRLPVLARAALMVLVRHIETISTEIAALDSVLSKENKASELGPRLETIPSVGPVIASALRARVTDPKLFENGRHLSAWIGLVPENDSSGGKVKQKGLSKKGDRYLRSLLVNGAMAVVRQAQKRPDKHPWVTKLLGRMSAKQAAIAIANKTARIAWALMVKGGVYEAGHRAPQYLAQACAAAE

SEQ ID NO: 170764 - protein, 385 aa, unidentified
MPKLNDLSRSLTRLDPDGTLIAVIEMSQSSWLVAGIVPGVERQPLKKLAIDESALLKLLNRWREEAEKAGRKIERIAVAFEAGRDGFWLARWLRARGIEAHVIHASSVAVSREHRRAKTDRLDTELLKRAFLGWLRGERDHCKMVAIPTMEDEDTKRPNRERESLVGEQTRIVNRMKAALSRLGIRGFNPKLKKAAERLEDLRTPEDKPIPPNTLAELRRDMERRRLISDQIRQIEDARLERLEGMPNEGPHAMVRLLARVIGVGIETADMLVQEVLSRTMRDRRAVARYAGLTGAPDESGAKRREKGLARSGNARVRRGMIQLAWRFLIFQKDSALAQWFRARTENARGTRKTMIVALARKLLIALWRLVTTGEVPPGVVLRAA

SEQ ID NO: 170765 - protein, 466 aa, unidentified
MTPPTDFFLHPRPSTPPPPQPPARTGPLQVFNPHAAGIDIGEAEHWVAVPPDRAPQPVRRFGTFPADLDVLADWLIDCGITTVAMASTGVYGIPLFELLETRGVQGLLIDPRQATRAPGRPKTDRLDGQWLQRLQTSGLLAGALRPEAQGCVLRHSLRHRQRLRTSAAPHIQPMHKALQQMHLTLTQVVSDIPGATGMAIRKALVAGERDPQRLAALRHAHGQHDADDSAKALQGPWHAAHLFAFQHALSLSACSHQPLALCDQQIKTHLETFADKSAGQPLPPKARRSKKTNEPRFDARTPLYRMAGVDLTTIEGIEENTALVIRSEIGTDMHRWPSVKHFCSWLGLCPQHKISGGKVLSRRVRPGAHRVTVALRLAARSLPHSQSALGAFLRRMKVRLGTPKAITATAHKLARLVYSLLQHGSAYVQQGLDAYETQYRERKVTAMTKQAKALGYTLVPLAAQGS

SEQ ID NO: 170766 - protein, 371 aa, unidentified
MSTTSTTRERMVIAIDPHKASWTAAAVDASLQPVATIRVPVSRDGYRALRRFANRWTDPTWAIEGASGLGAPLTARLRTDGIDVLDVPAKLAARVRLLSTGHGRKNDDADAVSVAVAARSAPRLNSAPVDGTVTALRAIVEHRDDLVKTRTQTVNRLHVVLTNLIPAGADRDLTAERAAELLRGIRPRDAAGKTLRGLAADLVAEIRQLDRRITKAAADIQTAVTESGTTLTDLCGIGSLTAGKILGRVGTIDRFRSAAAFATYTGTAPIDVSSGDVVRHRLSRAGDRQLNLCLHVMALTQVRQDTQGRAYYLRKRTDGKGHKEAMRCLKRRLSDVVYRQLRHDANRLEAGPGGHSGAALKSSAASSNPAR

SEQ ID NO: 170767 - protein, 359 aa, unidentified
MNATTVAVDLAKSVFQLAVADEHWRVVEIQRLTRTQFERWFVNRDVSLVIMEACGSAHHWARWLGSLGIEVKLLPAQYIRAYVKRNKTDAADAAALLEAARASDIRPVRVKSVEQQALQGLHRIRSLWMGTRTSRINALRGFCREFGIAIPVGARTGIEAISRVLADPATAVPDLIRGTARLLVEEIRLLEARIAQLERELAQVAKLSPACTTLLSIPGIGLLTATALVAATSGDVSHFKDARHFSSWFGLTPKEYSSGNSRYLGRISKRGDRYLRMLLTHGARSVLRSAAVAANAGREVCGIRHWALQVQSRTNHNKAACALANKLARICYATLRDKERFGEDARPHKKMNRESFVMP

SEQ ID NO: 170768 - protein, 388 aa, unidentified
MQVIADRPETPITIHANLGAIFISLELSRSIWLVTSLSPGGGGKMSKHSVPAGDVSALLHRFSELRQKALSRIGKSFAIIVIQEAGLDGFWIHRVLQNEGIESHVVDPASIATSRRRRRAKTDRIDGEALLRALLAHKRGEPRVCAMVKAPTPEEEDRRRLCRERKVLTKERVLHVNRIKGLLFSQGVAGYEPLRRDRRQRLEDLKTGDGRPVPPHLKSQISRELDRLELLLKQITSVEAERDALLAAQQIAAPKPAAMLLAIKGVGPEFATILWSEGLFRHFDNRRQVASYAGLAPTPWQSGAIDREQGVSKAGNPRLRTTLIQLAWLWLRHQPQSALAIWFKERVNRNGGRLKKTAIVALARKLLVALWKYVTAGVIIEGAIMKAA

SEQ ID NO: 170769 - protein, 392 aa, unidentified
MYIVGIDIGKNHHEASIVSPEGKQIGRSLRFATTHKGADSLMSFIFKNIGNSPCVFGMEATGHYWYPIYSFLKAKGYTIYVINPIQSDSLRKMYIRQTKNDSIDSFLIAKVIRFGQFGTTSMADENILAMRQLCRYRDSVISSRTEIKLRIGTIMEQIFPEYEKQFSSLWVSTSMGILEKYLTPENIENAPIDELLEIIKDKSHNRLTRAKAISIKEAAADTFGIKIAQDAFSFQLKQLIDRMNFLDKQIEALDCQILEYYEKFDCYLHTIPGIGIIGAATILAEIGDISRFKNSSSLIAFAGIDPTVRQSGEFNSTHNHMSKRGSPYLRHAIFLAATTCSFHNSPLNAYYKKKRDQGKHHLTATGAVARKLTTVIYAVLRDSKPYEPKKFC

SEQ ID NO: 170770 - protein, 433 aa, unidentified
MSMQRVYPNCTGLDVHKKFVVACRLTVDMRGQTHQETRTFSTMADDLEALADWLTEGQVTHVAMESTGVYWQPIYNILEECFEIFLVNAQSIKRMPGRKTDMKDAEWIATLMQHGLLQRSFIPNRDQRELRDLTRYRQSVIQERSRFANRLQKVLEDTNLKLSSVATDLQGVSAQAILRALISGQEDPKLLAELALGRMRNKRDDLERALKGKLREHHRYLLSDLLVHLDFLDEQIAKVEERIEAKLAQVPPFLTAVRLLDTIPGVDRHLAILIVAEIGVDMSRFPSDRHLTAWAGISPGNNETGGKQRSGKTRKGNKYLKRGLVLAAHCAAHKKHCYLRSLYYRLSARRGKPRAAVAVGRTILQMAYHMIRRGEEYHELGDTFLDQINRARTVKRLVKRLESLGFIVNVKDQIMAPEAEKLSVLSSPIPLAA

SEQ ID NO: 170771 - protein, 430 aa, unidentified
MKSNTQNAKIEAITEKTLVLGIDVGSEMHYARAFDYRVIEYSKKPFKFSNTEAGFATFKEWVLDLKERHEKDKVVPGMEPTGHYWFNLGKFLQDNEMKPVLVNPHHVKKSKELDDNNPTKNDRKDPKVIAGLVREGRYMIPYLPDGVYADLRTASNIRFQLQAELTRIQNRISRWFNIYFPEYKTVYGKPDAKSGMLILKAAPLPEDILTLGIDGVNQIWRDAKLRAVGKARAKTLIEAAEHSVGSKEGAVSARMEIRMLLEDYESRNTRLQEVMVLIEELVRKIPMAEKLLEIKGVGIRTVSGFLAEVGDISRFNTPKELQKLAGLALVESSSGKHKGETTISRRGRKRLRYLLFEVAMSLVAKNPEFRELHNYYTTRRLNPLKKMQSLMAIAAKLIRVFYAMLTKGVDYDPKKMVSDIRRPAAYLQAA

SEQ ID NO: 170772 - protein, 356 aa, unidentified
MSRDIKYIGMDVHKEAIVIAVLNGSGKLVMESIVETKASSILEFIHGLRGELHVTWEEGTWASWLYDLLQPQVEQVLVCNPRRNALLKEGSKSDKVDARKLAELLRTGMLRPVYHGENGLRTLRELGRSYQTISKDLNRVMNRLKALYRGWGIACAGTQVYSLRYREEWLNKIPHAGVRRRAELLYQQLDGLQGLRRTLRPELLAESRKHKAVKLLRQIPCIGPIRAARLMALMQTPHRFRSKRQLWTYSGLGIETHDSAQYRYVGGQLQRSKKPQQIRGLNQNHNHEMKEIFKGAATRASCGRGPFHDFYAALLAKGMKPEMARLTLARKIAAITLTLWKRGERFDAEQLKPQAA

SEQ ID NO: 170773 - protein, 390 aa, unidentified
MILVGIDVAKDKHDCCIINSDGKFPEEVFSILNNREGYETLYKRICSLAVDFTKVKVGLESTGHYSSNLLAFLLDKHLTAYVINPLRVNLFRKGQSLRRTKTDKIDSRNIAHLLMADSSLKPYSLSSYHMEELKSLTRYRGTKVRERTKLKTSIARLVTILFPELEQLVSSIHIHSIYAMLEKFPGAAYIAAAHLTRLAALLLKASRGRFGRETAIRIRDTAKQSIGAVSPAKSMELQHTIAHLRVYDQEIGEVESEIEKIMDDVNSPITSVPGIGMQMGAVILAEIGSFRRFDSPDKILAYAGMSPSTYQSGKLTGSYSRMEKRGSRYLRYALFNVTRYVCHYDPGFTAYLSKKRKEGKHYYVAISHAVKRLVRVLYAMEISGNRYQMA

SEQ ID NO: 170774 - protein, 333 aa, unidentified
MQPFKTVVGIDVAKDSLAVSIYNGKSHEVLEFDYTQTAIRKNLLNRFKKEKESVVFVMEATGIYHTQLAYMLCENTFKVSVLNPFVIKKYAEMNLMRVKTDSVDAKLIAQYGYEYQHKLLFYKLKNDARVHVDNIIKAIDDLLQQKTMSKNQHHALKKQAHHSKDILSSYDRHIKFIGKEIIKLEKLLEGLLNESFAEEYKLLRSIPGIGLKTSSMIIAIFDSFKAFENPKQACSFAGIAPNPYQSGTSVKGRGRISKRGNPLARKILYMGALSATIHNPMIRSQYKRLIENGKPKMVAMIAAANKLLRQAFGVLKSGITFDKEYMKVYKIMV

SEQ ID NO: 170775 - protein, 458 aa, unidentified
MHQAPPKGSSTNVSTLNSAEEKPFYAARIGLDWADQKHFWTMLTAEGKRTRGELKHTPEAIEIWAVELARSFGGRPIALALEQKRGALVAILSKYAHVHLFPLHPTNLSHYRSSVCASGAKSDPSDADLILDYLVKHPEWLRGLRPDTVETRSLQFLVEERRKLVNQHTSQLQILIYWLKQIFPQMLGWFDDMSTPLVGDLLLRWPQLPALKKASQNTLRKFFVQHNCRSEERIQQRLDEIGQAVPATTDTALLNTADLCIRLAVQVLAAQRAGIAEFDRQIEAIYEAHPDRFIMASLPGAGPALEPRLIAALGTNRERFESASGMACCFGIAPVTESSGKSCWVHWRWACSKFVRQTLHEWANCSIRSCGWAREHYDKQRGKGKGHHASVRSVAFKWIRILFRCWRDRAPYCEERYLKALRMHGGAVAALVGQPMPVPPPVQWESCGGFSKIVELSS

SEQ ID NO: 170776 - protein, 413 aa, unidentified
MKLFVGIDVSSQKLDVCFLDSNGVVLKESALVNSLHDAYLIKKDVLEFHKQYGYEHIVIGMESTSVYSQHPSTLLHEDDELKSLGILNVVVLNPFPIKQYTRIFDEDKTDRIDALRIAEFLSMGKYKTSIIREEKFAALQRLTRSRLQLVSQLTECKLHFLENLYYKCNTLVKELKVDSKSSVFGASLMDILTDSLTLNEIASQELEDLAALLQEKGRGRFKDPEKLAKTIQSAIRNSYRLGDMMQDSVNTVLAMYAEMIKALKKQIKILDKSIERLVEAIPEADCLRSVPGIGPVYAAGIIAEIGQIDRFDDDTKIAKYAGLYWKKKQSGNYESQRTPLTRTGNRYLRYYLIEAANSVKLREPIYKKYYYKKYAEVPKHQHKRALVLTARKLVRLVDTLLRNRQLYTPERSG

SEQ ID NO: 170777 - protein, 350 aa, unidentified
MTATTDHYLGIDVHKRQAQVAVLDDEGEVTEEIRVAKADLDEIVQKYAGSSAAPEAGSNYFTIYDRLDEELDVTLANPVKADWLADQKQNNDRKDAKNLARYLRLGKVPESYVRPEEYRRYRALARGRKKLVDKRSDFKNEVSSLLDQNGVTYDESLWSDQGREFLRELTLDDASELLLGQWLEAIDEFTVKIKRMQRRIEEVAAEVDELDTLMSAPGIAAFSGLMIHGEIGEVGRFDRAAEVVSYAGLDPVIRESGDSRREGRISKEGNGYLRWILVQCANTAVHNAEDPYLSQFYWRLRKNRNKPHKVAIVATARKLLVALFNMLSKNEPYDHAHNARIETISTTSGQ

SEQ ID NO: 170778 - protein, 337 aa, unidentified
MKVTLIGIDLAKNIFQVCGVNQAGKSIFNRQVRRNRMMELLLQHPNAIIAMEACSGSNYWGRTLQNEGFKVMLIPPQHVKPFVKGNKNDRNDAFAITEAAKRPGLQCVEPRTLEQTDMMQLHRALERLTQQRTALMNQIRGFLSEYGVVVRPGKEALLSALPDIVEDANNGLSMVSRALFNRQRDEWLVLNGAIRQFDNDIKQRAKNDEAAVRLTKIRGVAERIATATIGHIGNGSAYKNGRHFSANLGLVPKEHSSGGKQKLGSITKRGNEYLRRILIQGAWSVIRYADRSDDRLSLWARKIIERRGKHKAVVAVANKLARIMWSMLYHKTEYRTA

SEQ ID NO: 170779 - protein, 467 aa, unidentified
MAARKQKQKRLSAQVVEDEDYQLRYEVAAGIDVAKDSAVVCVRMPPAAGRKHRTSHLQTVPAIVPAITQLAEELRAAGVQMVSMEATSDYWRIWFAVLEDAGLAVQLVSSSQARNLPGRPKTDKEDARWIARLTEMGMLRSSFVPPPEIRALRVYTRHIWDLTADRTRYWQRLEKLLEDALCKLTSVISRLAGHQTARAIIEAMIAGERDPRVLAALGQGRMRNEKLPALAEALSGMRFGPQHAHAAASLLRSIDLLDAELRALHERVAEHLAAIPGSWGVDADGVTGPGAGQAADAAALPAAERLDEIPGLGRESAMALIAEIGLDMSRFPTPEALVSWAGLTPTARQSGPRSGRGKKGHGNTYAKRIAVLAAYAAANTDTFLGERFRRLSSRPGGGGRKKAGCAVGRSVLIIVWHLLNDPAARYRDLGSDWHARHTDRSRKARNATRQLEALGYDVIITLREDAA

SEQ ID NO: 170780 - protein, 320 aa, unidentified
MQSPSAVLNIGADVAKDAIVVACSEGSFPVREVANQRPAVLAFLKGLPAGSRIGVESTGTYHELFAETAHQLGFRVFLLNPKDTHHYAKAVGLRGKTDRVDAELIARMIAHEHTKLHVWNPPTPQQREIDRLIKRRATLISLREAVEMSLHDLGGFADELKALRTRFNQLIARIDLRTKALVEASPERKQNFTRVCTITGVGPVIGTALVNTLERVPVKSADAFVAFTGLDPRPDDSGQHRGKRRLSKRGPGELRRLLFLAAMSAAKTKTWRPRYEHYRAKGLSGTAALVILARRIARTAWSIYTYKTEFDPARLTNPLT

SEQ ID NO: 170781 - protein, 402 aa, unidentified
MNAVGIDVSKGKSMVAIMRPFGEIVSTPFEIKHTASDIRSLVELINSVEGESRIVMEHTGRYYEVLAHQLSEANLFVSAINPKLIKDFDNDSLRKVKSDKADSVKIARYALDKWHNLKQYNVMDELRNQLKTMNRQFGFYMKHKTAMKNNLIGILDQTYPGVNTYFDSPARSDGSQKWVDFASTYWHVDCVRKMSLNAFIDHYQNWCKRKKYNFSQSKAEEIYGKAKELVPVLPKDAITKLIIKQAVDQLNSASTTVESLRTLMNETASKLPEYPVVMAMKGVGTSLGPQLMAEIGDVSRFTHKSAITAFAGVDPGVNESGTYEQKSVPTSKRGSSDLRKTLFQVMDVLIKTHPQDDPVYQFLDKKRAQGKPYYVYMTAGANKFLRIYYGRVKEYLSSLPES

SEQ ID NO: 170782 - protein, 345 aa, unidentified
MKNTMVGVDLAKEVIQVCIYTNKKVRSNVEMTHHEFLTWLFKTKPVIIIFEACGTSNYWKQKAIEAGHKPRLISEKLVASVRQNQKTDKNDALAIIQAAQLPDINFIKGKNVEQQQLQSIMRLRELAIKHQTAISNQIKGLLLEFNVRVSAKNGGLKGAVQSFIEDAENELSFEFRESLNTAHEQYVLLVKSIKTYESCLDKVVGQHSDCKKLLSLEGVGTINAVNLYIALGCADLGVFSKGKNASACIGLTPMQYSSGGKIKLGSIGKYVKNSLLRSQLITGAMAAVHQATRITAVTKKDVWIQALVARKGKKCAAVALANKTVRTAFAMLTQGTQYKAELLPA

SEQ ID NO: 170783 - protein, 391 aa, unidentified
MSLYFCGIDISKYKHDCCIICAANQQVVAKLTFKNDRTGFEKFLSTLNSLQDSKDIRIGFESTSHYALNLELFLESSNLSFMEVNPVLISEYRKSSSLRRTKTDSVDCETIARWLMSVEYKPHTRGFYHAYSLKSLTRLRDRLIRQRSLYLVKITDVLDHTFPEFKPFFNEKFSATALYLLETYGSAQKMSHMNQASYEKLRSISRGKFSIQKFLSLKELAANSVGTNNTIFDLELSSLISLYKNLQIEINKIEAEIIRLVDELHLHFTSIPGIGPLSAAVIYSEYGDISSFSTPAKMLAYAGLEPGIDESGTESYKGRMVKHGSSMLRFTLLNCCLPAIRFDLTFAQYYAKKRREGKSHRVAMSHVAKKLVRVIHALERQGIDYDPIKLR

SEQ ID NO: 170784 - protein, 399 aa, unidentified
MDDDTFWVGLDLGLTRTSVCIMNGQGFPLNEFECDSEVATLTEALAAVAIDRIGGIAVEAGTGTYIVRKLRGAGFPVVVFEARKAHKFLALRRNKSDASDARGLADLVRIGQNSVSQVHLKTDECQRLRSFLVVRQRFVLMKLAVEGVLRCNFALHGRRLESSHTRKALLRRTETIFASLRSEEGIDLEPDLAPLVMVCDSVRAYLEKSDRDLQAIASSHPVCRLLMEVPGVGPICALSFYSAIGDPNRFRVASHVGAYLGLVPRRYQSGAVSRTLGITKNGNRLTRSHLVMAAAVFARRAPDCPLKDWYLALRGRAGPKRARIALARKLAVILLAMWKQGTHFELDRTGPSGVLSERGPTETVPVAPVGGDWRRQSGTEKVTSRSHLRQGSGDNTPGA

SEQ ID NO: 170785 - protein, 463 aa, unidentified
MTKKNKQQYGQRRQPVKVNQRLPLLNPHAAGIDVGASEHYVAVPADRDEQPVRRFGAFTEELHALAQWLLQCGIKTVALESTGVYWIPLFQILESYGLAVKLVNARHVKNVPGRKSDVQDCQWLQQLESFGLLRGSFRPEAKICVLRSYMRQREMLIRSAGRYVQQMQKALTQMNIKLHHVISDLSGQTGLAIVRAIVAGERDRLKLAAMKDRRVRSDVITIAKSLEGDYRAEHLFALKQALELYDYYQQKIAECDVAICKEMQTLQTRAAAPAAALKRKPRSKHNPLPFDSQAELYRIMGVDLTRIDGLHESTAQLIISELGLDICQKWPTEAQFTSWLGLSPNNEISGGKVLKRGTRKVVNRVANALRMCAQSLLNSKSALGAYARRMRAKRDSKVAITATAHKLARLIYRTVKYGQEYIDIGQEQYAAKYKAGILKSLHRKARQLGYQLVSCQTLEVVVP

SEQ ID NO: 170786 - protein, 347 aa, unidentified
MIFRSEDTRVITGGVDTHADMHVAAALDPVGGLLGVREFPATATGYADLLSWLSGFGTVALAGVEGTGSYGAGLARYLAAAGIRVVEVDRADRQDRHRQGKSDPLDAVSAARAAQSGRAAGAPKGRDGAVEAIRALMVAKRSARAERTQAINQARALLVTGPDDLRARFAGLTAAALAEAVAALRPRPGDAVEYAVRIALRELGRRAGFLDAQLERLDDLIVPLVTARAPGLLSLYGVGPDTAAMLLVAAGDHPERLRSEAAWAHLCGVAPIPASSGKVRRHRLNPGGNREANHALWRIVITRMSAHPATRAYVARRTKEGLSKKEIIRCLKRYVAREVYHHLRTGG

SEQ ID NO: 170787 - protein, 367 aa, unidentified
MKKGSTATVKQSRNISQQKLTIGLDLGDRNSWYCVVDETGQIQLEQRVRTSAKALQEVFGAMPRSRIALEIGTHSPWISRLLSELGHEVIVANARKVRLIGESRKKDDRLDAQTLARLARIDPELLYPVKHRSAQAQADLMMIRARAGLVRARTALVNTARGLAKSYGERLRGCNVRNLNPEKAEGLSPELQAALEPLLNAIESLSERIVEYNERIENLAQESYPQVALLKQIKGVGTLIGLTFLLTLEDPHRFRKSRDVGCYLGLQPGRRNSGQSEPQLHISKEGDPYLRTLLVQGAQHILGPFGIDCDLRRWGLKLAERGGRNGKKRAIVATARKLAVLLHHLWVSGEVYEPLHNSSRTTVAAAA

SEQ ID NO: 170788 - protein, 502 aa, unidentified
MTEYSTCTVGIDLGDRKSVACIYSPGVVVDWFEFAMTPDGVRAAFAGKGYRTVAMEAGAQSGWVTRLLQDLGYKPLVANPRKLKAISANERKSDRNDALILAKLVTADASLLHPIEHRSEARELGMTVLRSRDTLVRTRTKLISTVRAMCKGVGARLKSGGADGFASREAEVPEVLAPATAGLFAALRVLNEQIAVYDTQLEVMLETQFPEGRLVRQVRGVGPVTALAFVLTIEDPKRFPDGRTAAAYLGLVPRRDQSGAVDKQLSISKTGNTFVRRLLTQCAQYILGPLGHDCDLRRWGHTLMERGGKSAKKRAITATARKLVVLLFRLWKRDEVWIPLYNAGSSSAPLADADRPKPAVLADCACDFDDTGDRGRRRIDCSATDGSDPSMHQPQAGQPKSANRSVGNGTTSSAKKAPKKNPARHAGLPAPHPATANGDRGGPKPGDGVAPSPGPTTPSSAAGSHGGPQNKDRGPVRPATCVGPQPPRGKLTPRSEKDHPHP

SEQ ID NO: 170789 - protein, 347 aa, unidentified
MIIIGCDLHTRSEQIAMLDTETGEFEERRLEHEDGEARRFYTGLKERALVGVESTGYTRWFAEMLAELGHQLVVGEAGKIRAKETRKQKHDRRDAEHILNLLLRGDFPQIWLPSAEERDVRVLLEHRHQLVELRTRAQNGLQAIALSYGLRRRRRLWSERGQEELKKLPLREGMGRRRADLLRLVRQLDIWVQGLDRRIEQEVAQREEAQRLMTHPGVGPQTALAAVLVLGPVERFPDDRHLTSYLGLIPQEDSSAGRQRFGHLTKQGNRLLRWLLVEAAQTASRYDPRLRRAYRRLAFRKGRAVAKVAIARKLAIRLYIMLRDRIDYQEFCRRGSHAGMLGDVALV

SEQ ID NO: 170790 - protein, 377 aa, unidentified
MSMTRPILYVGLDVHADSISIATADASRDGEVRHYGTIPATLRALDSVLTKLGHPGTELRVCYEAGPTGFVIARHLTKKGIACLVAAPSLIPSPKGNKIKTDCRDSIKLTRLHRAGELTAVHVPDATDESIRDICRARTDAVDDKRRAMCQLKAFLLRHGHGIADKTPWSEARMRTLRSIALQLPAMNIVLEEYIQAIDTAHQRIARLEHQMENVLATWEQAPVVRALMGLRGIRLVSAMILVSELGDIHRFAHPRLLMAYLGLVPSEASSGGKRRVGGLTKTGNAHVRWLINESAQHYRLPPRVSPNLSKRQEGIAREHRAEVQKISWKCQQRLYDKGRQMAGRLKIRQKVQIALARELCGFVWAIMKAVQPVTAR

SEQ ID NO: 170791 - protein, 421 aa, unidentified
MAVRKREDEVFPSAAAVDVGGSSHWVAVPPRSTDDAVREYGAMTDDLNAMADWLLACGVDTVVLESTGVYWIAVYEVLEQRGLKVWLVDARQMKYVPGRKSDVQDCQWLQKPMSLGLPRATFRPDAEVCVVRAVARQRDVLIADQASWVQRMQKALVQMNIQLAEVLTDVMGATGQAIIRAIVAGERDPQALARHRNGRVKASQADIARALTGNWRDEHLFVLRQALAMYDDIARHLVECDAKLQALMAKLGQAKVDIGPPPRAGSKLRAEFEARQILANWAGVDLTRINGLAVTSVMKLLTEIGPDLSRFASVKHFCSWLGLCPATKISGGKVLSWGTKRSANRARQAFKMAPRVCRAVARRSARSTGACALAWTSLVPILPPRTNSPGWCTSCSRAAKSSSTRASSTTKSNSASAASMP

SEQ ID NO: 170792 - protein, 337 aa, unidentified
MKFSGIDLHSNNSVVVVSDEEDRIVYQKRLANNLEQIRAALAPYRDELAGVVVESTYNWYFLVDGLMDAGYRVHLANTTAIKKYEGLKYSGDFADAAYLAQLLRLGLLPEGYIYPREERAGRDLGRKRMQLVRCQTAQILAIENILARQMGGRMSGNQVKRLTAKQVEGLGFVPDVALALEANRAVSEALQQQIAVLEKRLKERVKLRPEYRLLKTVPGIGEVLATTIMLETGTIARFARVGNFSSYCRCVDSRRESNGKKKGEGNVKNGNKYLAWAFVEAANFALRYCPEAKRFYERKKRKTNRIVAIKAIAHKLARACYHMLREQKSFDVQRCFV

SEQ ID NO: 170793 - protein, 354 aa, unidentified
MKRTTKYVGLDVHQATTVASVRESSGRVLVRAVFPTEDSAITEFFAGMRGAVHVTFEEGTQAQWLHELLASRVDRVVVCNQRGQPRHGNKADQGDADQLSELLRRGGIRPVYHGDAHRTTLKELTRTYQNLVEDSTRVMQRIKALYRARGIKTAGTSVYRPRHRAEWLAQLPERGARFRAETLCAQLDVLQELRPKAKAAMVAEARRDPAWAVLETIPFLGPVRVALILATMQTPWRFRTKRNLWAYAGLAVVTRSSADYVMVGDRPVRRRRAPMTRGLNRNHNHVLKDVFKGAAAAATGKPGPLQDFYLGMVARGMREELARVTLARKLAAITLRLWKRGERYDPTNLTTQAS

SEQ ID NO: 170794 - protein, 435 aa, unidentified
MSVFSHPAPIIRNREAKFILGRFVMQVVYERCAAIDVHQETAVTTILITQANGHVQKETRTFTTMTSDLLRLDDWLQERGVTVVAMESTGVFWHPIFNILEEGREIILVNAQHMKAVPGRKTDVKDSEWLADLLRHGLLQASFIPPKPIRELRELTRYRKTLVQERNREVNRLQKVLEGANIKLAVVATDVLGKSGRDMLEAMMGGEQDAEVLAALARGRLRAKLADLRLALEGRMQPHHRFLLQRILAHIDFLDQSIAQVEQEIEQRLRPFEEAVKLVQTITGLQATTTAGILAEIGIDMTRFPSDKHLASWAGVCPGNKQSAGKRLSGKTTQGNTHLRALLGEAAWAAARTKGSYLSAFYHRLARRRGKKKALVAVEHKLLIIIYHVLRTKKPYSDLGAEYFDHLEKGRLERQHIHRLEQLGYTVTLTPKEAA

SEQ ID NO: 170795 - protein, 327 aa, unidentified
MEQRVLGIDVAKETLDVALSDGFHVKYDQFLNTQKGHEELELWLRKQTDTRIHICLEATGQYGDGVAEYLFAQGFPVSVVNPARIKHYANSKLRRNKTDKADAHLIAEYCIRENPAIWTPPPASFKDLQALVRHLDDLQGAFRQESNRLQSGVHTTFVVNSLTSICDFLDEQIKQTKKAIQDHIDQHEELKRMQTLIVTIPGIGKLTAAKLLGEIRNILDFQSARQLAAYAGLTPRNFLSGTSVHKKSRLSKTGNANLRKALFMPAVVAKQCNPIIRSFCSRLSNSGLLPMEVVGAAMRKLLHLVYGVLKTGRSFNPNYLDRMQVSS

SEQ ID NO: 170796 - protein, 344 aa, unidentified
MNATTVGVDLAKNVFEIAVADVRGHIVERHRLSRARFDRFFVNRATCRIVMEACGSAHHHARRLRSEGHDVVLLPAQYARAYVRRNKTDAADAAALIEAARCPDIRSVPIKSIDQQALQYLHRLRSQWMGARTSRINFLRGCLREFGVCMPLGAQRAILSVRDALAHPNCPVPALLHDSLIELLTEIDALEKRCKLIERELARLHANDPVVERLLKIPGVGPLTSTALRASVVDIQRFPSARHFASWLGLTSREHSSAERRRLGRISKQGDPYLRTLLIHGARAVLIAARCAQRRGSSLDRLRSWALEIQDRRGHNKAAVALANKLARIVWATWHFDRDFENRI

SEQ ID NO: 170797 - protein, 431 aa, unidentified
MLKINPLSTLYVGIDVSSKSNYVCALDFYKNKYINSSFANNQPGAEELALKILECLKEHPDITTIVAALESTSVYSIHIANYLSSCEELMRFKPYVFVLNPKCTANYKKSYIGLGKSDPIDAFVIADYARAGNIESEPWRGSQFLALKRLTRHRLHLVECMTREKTYLISNLYLKFSELQMLEGDDQPFCDIYGATSSSVLMEYLSPEEILASSEEDLIAFLAEKSRNRIKDISKTADLLKKAARDSYRLDKALYEPLNVSIASSFNCIETFKREIKVIDNAIEKEIKGLNPNAFIILQSIDGIGPVFAGGIIAEIGDITAFHSSDALAKYAGLTWKSNQSGDFDGEDTPMIKAGNRYLRYYLGEAANSMRKHNVEYGAYYRKKYNEVPKHQHKRALALTSRKFVRLVYGLLARNQLYSGVSLDTSIKDSN

SEQ ID NO: 170798 - protein, 404 aa, unidentified
MNAVGIDVSKGKSTVAVLRPYGEVVVSPFDVAHTGSDLRALADLIKKLPGETKVVMEATGNYFESIARYLHEQNIFVSVVNPVLISDFGGNTLRKPKTDKKDSVKIASYALTYWLDLKEYTPQEDLRKSLKLLNRQYQQSIKLKTMMNNNLISLLDLTFPGINKLFTSPSRESDGHEKWVDFVLEFSHCDMISKLTIKAFAKKYKKWSDKNSYHFIESSCKKIYAFAKDCVSSVSSDKAIVFSVVQAAKMLISATENCHAIQSEMNRVASKLPEYDTVMNMYGVGKAVGPQLMAEIGDPRRFHSRKAITAYFGYDSENNDSGQKTTRSNPMTKKGSGALRRTLFILMQVLLQTKPQDNPVYDFLIKKKSEGKHYYSYINAAANKFLRIYYARVKEVLNVSEQMT

SEQ ID NO: 170799 - protein, 340 aa, unidentified
MTITTIGLDLAKSVFQAHGVDETGGTVLVKRLHRKQMLPFFSKLAPCLIGIEACGTAHYWARMLVAMGHEVRLIPPSYVKAYVKRGKSDALDAEAICEAVQRPSMRFVPVKTVEQQAILMTHRTRSLLVRQRTMLANALRAHLAELGFVANPGIANLAKLAEQVLADKGALPSDACIALETLIRQIMTISSEIGGLDRQLIAWHAQSEASRRLAAIPGLGVITATAVVASVTDPSQFRSGRQFAAWLGLTPQQQSTGGKTRLGGISKQGDRYLRRLLVVGATAVIRHIKDKPTPMAIWIRKLMEKKPFRVVSVALANKLARIAWVVLTRQEAYRAYAPLT

SEQ ID NO: 170800 - protein, 387 aa, unidentified
MPQPNDLSRSLVALDQDSTIIAVVEMSQSSWLVAGMLPGIERQPRKKLEPSAERLLGLLHRWRDEAVKAGRKITRIALAFEAGRDGFWLARWLRARGVEAHVIHASSVAVSREHRRAKTDRLDTELLKRGFLGWLRGERGHCTMARVPTIAEEDAKRPNRERECLVGERTRIVNRMKGTLARLGIRNFKPTLRKAAERLGTLHTPEGSALPPNVSAELQRDIARLGFVTRQIKEIEEARQERLEQEPETGPHAMVRHLARVVGVGIETADMLVNEVLSRPMRDRKAVARYAGLTGSPDESGAKRREQGLARAGNARVRRGMIQLAWRFLRFQKESALARWYQARTADSRAGTRKTMIVALARKLLIALWRFVTTGETLEGVILRPAG

SEQ ID NO: 170801 - protein, 337 aa, unidentified
MHAPAPSERLFVGVDIAATSFAAACSVNASSPQRAQTFSQTPEGFAAFQAALATTGVEPAQSLLVLEATGSYWITLAVTLHQAGYLVSIVNPAHAHAFARSLPRRAKTDLLDAQLLAQFAAERQPPRWTPPEQVYHELRQRLLVRDGLLTMRQQARNQRHALSQRPVRIAGALDQLDAVIADLNTRIATLDAELTRVLRDGAWARSAALLSSITGIGLVTTAGLLVATLNFEACASAERAAAYAGLVPLAHESGSSVRHRARIGQAGHARLRTALYMASLSAARCNPLIRAQYERLRAAGKPKKVARCAGARKLLHLAYAVVSKAEPFDPHYGKAQG

SEQ ID NO: 170802 - protein, 400 aa, unidentified
MNRTRTVAGLDVHKDSIYLCIMGYDQAIIWENTYGVLTPDLRQMHHDMRAHGVTEAAMESTAVYWVPVWTELCESMELRLVNPYFIKQLPGRKSDVKDARWIAECLLKNLIKGSFVPEPIVQDMRKLNRRIMDLCEDTTYNSNKLDAALQRCGFRLSNYVATTKSKSYRSVLKAIIDGQTDPDELLRLVHGRIINKHGRERVKAALTGSFSETDLIVLRQLKETLDLIEEQTADCQQELVRLCKEHYPKPYERLQTIPGVKERAATAIIAETGVDMKMFATAASLVGWCGLKPRNDVSNGRFKSRKVTHGNRYLRQILIEIAWAASRTRNCFFSHFSYLQTTVKKKNKMKIQVAIARKILVALWHMLSKEEDFIDIYLKRQEELKRTEGQIKLLESYMAD

SEQ ID NO: 170803 - protein, 392 aa, unidentified
MIAQALGWDNHRKFSKVSLMEQTPDGQILAVERARLEHDDKDAMRAWLSRLDPEIPVALEATFGWPWVADLLEELGHPVHLGHPPIIRALAKHEAKTDRCDSDRLGKFQLRGILPESYLAPPEVRQRRERIRYRMALSSLRTSVKNRSQAILHRHGILHDFSDLFGKAGRRFLDNLELPDGSRQALKGCLELLDRLTLLIGEVEQWMAENLEEDETVRLLMTIPGIGLILAHVIRAEIGEIERFPTIRHLASYSGLAPISNDTAGREGPRHCSMACNHVLRWSFVEAVHGVQRTKGSHGLRLRQLYLRLCSHGTRRGCKSSAKVAVAHELSKLVHVVWSKRVPYTDSPSPRPGSREDRCQPKETLTVKTTLRSDQPRPPRVRRRATVGQTRL

SEQ ID NO: 170804 - protein, 338 aa, unidentified
MTIETLGIDIAKNVFQLHGVNRNGRVVLKRRVMRDQLLAVLAQIHPCTVVIEACTGAFYWARKFEALGHRVKVISPQYIKPFVRRQKNDGNDAEAICIAARQPHIPLVPKKTVEQQDIQALHRARQRMVNHRTAVVSQIRGLLLDRGFAIAKSITRARRAIPEILADLKNELTAMAREALSELYDLFRDLDRRIASFDKKIEQIFRASEPCQRIAKIKGVGPKTATAVIAAIGDGSGFKNGRHFAAWVGLVPRQHSSGDRKVLMGISKRGNQHLRSLLVHGARAVVRTAPSKTDPNNEWVNQLRERRGFNRATVAIANKNARIIWAVLRTGEAYRAAR

SEQ ID NO: 170805 - protein, 317 aa, unidentified
MNSQNALYLGIDLSKAWLDAHMLPGDQTWHVATDAAMLEAWVKSLPASLTLVVMEATGGLETTVAALLASRGLPVAIVNPRQVRDFAKAMGLLAKTDRLDARVIALFAERIRPEPRALKNEQQQELDELMARRRQLVEMLAAEKNRLGQARSKRVRQSIEKAIVWLERQIEQRDKELDALIKASPLWREREELLISVPGVAHGTARTMTSDLPELGQLTRRQIGALVGIVPFVHQSGKWCGQSFCSGGRAAVRAMLYMAANSARQHNPVIHEFFERLRAQGKPFKVAMVACMRKLLTILNAMVRANTKWGQNLLQTT

SEQ ID NO: 170806 - protein, 367 aa, unidentified
MTIVAHAHPFVVGVDTHAKNHALSILATPAGVQVDDGEFPTTAAGMARAIEWVARRTGGDLAVLWVIECAASFGSQLAHAVTAAGYQVVEAARMSAKANRGVGKSDPLDARRIAAAVLPLELDRLRHLRKDDGVRVGLRVLIAARDHMTGERTATVNALIALLRVLDLGIDARKPLTAAQIIEVSKWRTRTEDIGAAIARAEAVRLAKRVIVLEAELAENTKTTTDLLRRSPARVLLDKPGIGPVTAAVAMAAWSHDGRLRSEAAFASLAGVNPIPASSGNTVRRRLNRGGDRRLNQALHIAVVVRMRMDPATKAYVERRLTEGHTKKEIRRCLKRYLARQIYRTLTAVTRADEALAAVTSATPIPA

SEQ ID NO: 170807 - protein, 335 aa, unidentified
MQSAKLVVGIDVGKEWLDVCYPNGKKEHVRNIKSRRTKVVKKAAALGAIVCFEATGPYEEPLADECLARNVRAVRLDAWGTRRFAESQGRIEKTDKIDCEMIRDYALSLKDEKLHFIKQRSDAQKRLKKGVRTRRNLKKARNIIANQFEDDLDPETAKHLRNALKSIDRNIKRIEEECAAAIASDERLKDLDRRFREVKGVGPCLSRTMLAECPDIGEFNDKSIAKMCGNAPISHESCTIKGKARPRRGRSELTKALYMAAVSASRNNHVLREFYQRLVANGKARKLALTAVARKIAVLLNTIAKYPDFKPAQDPKDIAKANRAKRGRGRPRTTA

SEQ ID NO: 170808 - protein, 416 aa, unidentified
MNAVGIDVSSRKSTVAVLRPLGEVVCLPFDVTHDIAGLASLVEKLKALDGETRVVMEHTGRYYEAVEKALHEAGLFVCAVNPLLIKEYGANSLRRVKTDKADAVKIARYALDNWADLRDFTPMDAIRYDLKTLNRQFQLASKQRTASANNLIALLEQSFPVIRKCFDSPVRSDGTQKWVDFAHSFWHVDCVRKQPFPAFCERYRKWCKLHAYLFKLSNAEEVYALAKRAVVLTPKSKVVKVLVQEAANQLISISHSVEVYRAEMDRLAAMLPEYPVVMAMYGVGKSYGPQLMAEIGDVRRFERKQALVAFAGIDPMPNQSGDKNVRSNKSSKRGSPYLRKTLFNVIRTYLQCAPQDEPVFQFLNRKRAEGKPFYVYMLAAANKFLRRYYAKLRDYFASLDTLQPVAPIPTILKAAL

SEQ ID NO: 170809 - protein, 352 aa, unidentified
MEMIALDCHKRYSIASVQTPEGRCLGERRIEHRRRSIRAFLGPYSPGCPVAVETVGNWYWIVDEIEQAGKVPRLVHARKAKLMLGSINKTDKLDVRGLNKLQQTGTLPTVWIPPALVRGQRELPRTRMVFATARTRLRNRIHSVLDKYGLQDQFEGVSDIFGVGVRERLEGCLQRLPPQAAYTSGLLLAQLDQVQETIQALEERMAEVFEPTAEMERLDTLPGVGLILGVVLALEIGDIQRFRCAEHLASYAGTVPRVHASGGKTHYGRTRPDVNHYLKWAYVEAGNAVALHRERFPQRRVSQLYNRIRSRRGHASAIGAVARHLAEATYWMLTKKESYHERGIAEVSSKGV

SEQ ID NO: 170810 - protein, 343 aa, unidentified
MSITMIGLDTSKSVFQIHGVNEAGKVELKRKLRRSDLITFFEKQERCTVVMEACGAAHHWARILTGLGHTVKLLAPEAVKPFVKKGKKNDAADAAAICEAASRPDVKFVPVKTVEQQGILALHTVRSLLVKQQTMLANAIRGLASEFGHVVPKGLNNLEPLVDLVDADEDMPKQARQAIAELHERFGELAKGIQSCEAEIVKHARNDVTARRLATIPGIGPITASLIAATVVDISLFNTARQFAAWLGLVPRQSSTAGKARLSRITKAGNKEIRKLLVLGATSMVGRAEGWHSALGAWLRDILQRRPVRLVTVALANKMARIAWAVMTRDEVYRPQGGVAAKA

SEQ ID NO: 170811 - protein, 354 aa, unidentified
MLKYALGIDVSKKDIHASLSVIDLGQQVKVKASSKFANQLQGFKDLISWVNRHKKESTIPLIIAMEATGVYYEACALFLFKAGFEVAVVLPNKAKKYLQAVGLKTKNDKIDAMGLARMGAEQCLEAWQPMDEFFYTLRALTRHHQSLQELKNNINNQLHADEHSIYSSKKVTKQLKKLILSIEKQLKEIGQDIHDHLYSKAEVAEKINYITDIKGLGYMTVAAILGETNGFALFKSIPQLVSYAGYDVIENQSGNHRGKTRISKKGNSHIRRALHLPAFNMIRYNIGNFKPFFERILERHHQKMKAYVAVQKKLLALIYTLWRKNEGFNINTFGNEDTVSSFALARGQNEVAPA

SEQ ID NO: 170812 - protein, 354 aa, unidentified
MAKTKAVHSSYVIGGVDTHKDLHVAAVVDQNNCVLGSEFFATTRQGYRQLLAWMASFGTVKRIGVECTGLRYLQSAGVDVLEVTAPDKMERRRRGKSDTIDAESAAHAAFSLIRTVTPKTRGGMIEALRVLKVCRKTAVAARRTALQMIQMNIVSAPDELRDQIRSLSRMQLIRTLASWRPDVTAYRNVQDAYRIALKSLARRYLELHDEIADLDVMLASIVDELAPELIKRNSVGYECASQLLITAGDNPQRLHSEAGFAALCGVSPVPASSGKKNRHRLNRGGDRAANSALHIIAIGRLRTDTKTQEYIGKRVAEGHSKMEALRCLKRYISREVYTLLRNQNRQINSTQITT

SEQ ID NO: 170813 - protein, 347 aa, unidentified
MKFYTKQHQYYCGIDLHTKNMFVCILDSGGNIRVHQNTRTDPGALLRILAPFREDIVVAVECMFTWYWIANLCTQENIPFVLGHALYMKAIHGGKAKNDKIDSLKIATLLRGGMLPQAYVYPARMRATRDLLRRRNHFMRKRAELFAHIQNTRSQYNLPDPLGCIAKPQNREGIVERFDDPSVQKSMAVNLEMIEAYDRLLTRLERDIIASAKEHDLRSYALLQTIPGVGRILALVILYEIESIHRFPTVQDFASYGRLVKCLKESNGKSYGPSGKKIGNAHLKWAFSEAAVLFLKGNEPGKRYLERLSRKHGKAKALSILAHKLGRAVYFMLKNKEAFNQKKFLGL

SEQ ID NO: 170814 - protein, 342 aa, unidentified
MLYVGIDVAKNKHDVTALNVPGKTVLKPLTFSNNKAGFELLDLSFRQLNQDCLIALENTGHYAFNLLNFLHEQGYKVYTCNPLLIKEFAKSLSLRKTKTDKKDAHGIALKLLSDPNREQFQHDNRQVELKILARHIHRLKKKQSDWKVQYTRCLDIIFPELDKIVGKHSEYTYQLLTCYPNPQKRLEAGFDKLIEIKRLTASKIQDILSVAPRSIGTTSPAREFEIIEIIKHYKRLIDKAETCVNDLMAEFNSVITTVTGIGGRLGAVILAEIRNIHAFDNPAQLQAFAGLDSSIYQSGQIDLAGRMIKRGSPHLRWALIQAAKACARFSPAFKAYLKTKLE

SEQ ID NO: 170815 - protein, 344 aa, unidentified
MQITTIGLDLAKNVFQVHGVDATGQVVVRKSLRRSQMLPFFAKLPPCLVGIEACGTSHHWARELIRLGHEVRLMPPAYVKPYVKRGKTDAADAEAVCEAVTRPTMRFVPVKSPDQQAALSMHRTRDLLVKQRTQLINMIRGLLAEFGVDIPKGLERALLVARQIVDGKAPDVPLEAAKIVATLSQQALDTHVRLREIDRDLAVWLRGNEVARRLMTIPGIGPVGATALAASVTDPHQFRSGRQFAAWLGLTPLQKSSGGKERLGHITKMGDKYLRKLLIVGMTSLVRRAKYNPGKIDPRLADLLTRKPTRVATVAMANKTARVIWAIMARDETYRTGHQPALAA

SEQ ID NO: 170816 - protein, 315 aa, unidentified
MTKINTTTAGIDTSKAKLDVAVHNRTERWQVANTLSGWRILTANLAKAGVTRVGIEATGGYERGVVEHLRAAGFTVLVLQPMQVKAFGRVHLRRAKNDDLDSALIAACTATLDQPRIASDPRLAELAGYLTFLEQLEEDIVRFKTRLEHVDEPRLRRLVISDIARLKVRRAAQIRDIAKHLRGHDDLAKRLALVLSIPGIGERTALALIIRMPELGQISREEAAALAGLAPFDDDSGQHRGQRHIAGGRGRLRRSLFAAALPAAFRWNKALIALYARLTAKGKAHNAALIACARKLLIYANTVVQRGTPWTEKAA

SEQ ID NO: 170817 - protein, 408 aa, unidentified
MRRVIGMDIHRTFGEVVIWEDGKLRHAGRVDMTRTALEGFGKSLRVTDEVVIEATGNCMAVSRVLSPFVARVVIANPLQVKAIAHAHVKTDKVDAGTLASLYAAGYLPEIWTPDAVTERKRRLVARRYQLVRHRTRIKNEVHAILHAHLIPPCPHADLFSKVGRAWLERQPVPDDERVAIERHVRELDRMGEDLAALDQEIAGAALDDASVARLITITGVNLTVATGLVAAIGDIRRFSSPQKLVSYFGLNPRVRQSGLGAAHHGRISKSGRSHARAMLVEAAWAAAKAPGPLHAFFVRIRAKRGHQIAAVALARKLTILCWHLLTKETDYRWVRPALVATKRRAMELRSGQPQKKGNTPGPAHAYNVKALRDQEMDVARHAEQAYEHFVAQWKTRPKVRGRSKSEGL

SEQ ID NO: 170818 - protein, 324 aa, unidentified
MGEVSTIGLDIAKSVFQIHGVNAAGAVVMRKRITRAKLLEFFAALSPCLVGIEACPTAHHWSRQLQALGHTVRLLPPSYVKAYLKRSKNDANDAAAICEAVTRPSMRFVATKSEAQQSGLMLHRSRQLLVCQRTMLSNAIRGHMAELGIISAKGRNGTAELLKIIANEQDDRIPEAARFSLDVLARQYAAVRAEIVAIERRIHAWHRSSEESRRLEEIPGVGPIVATALVAEVGDWKVFSSGRSLAAWIGLVPRQHSTGGKERLGRISKQGNRHLRWLLVAGAMAVIRYARQHGTKRPWLARLMDRRPIKVAAVALANKIARMA

SEQ ID NO: 170819 - protein, 398 aa, unidentified
MSQDVWAGIDAGKIAHHCVVIDAEGTKLLSRKVSNDEADLLGLIDDVGQVADGGRIRWAADLNSGGAALLIALLCEREQELLYIPGRTVHHASAAYRGDGKTDAKDAAVIADQARMRRDLHPFRQRDEITVDLRMLCARRTDLAMDRTRAITRLRTQLLEYFPALERAFNYAHRRAALTLLTRFQTPAAIRQAGPTKISAWLRKQGAYGPDVIARTAVTAAESQYTVVPGEHTAARIVAQLARQVITLDAELDTLEAEIAERFREHAYAPAIESMPGFGPLLGAEFVAAINGDLANYETVDRLAGIAGLSPVPHDSGRITGNLKRPRRYDRRLLRACYMAAHNSLRTSPASRAFYDRKRAQGKRHSQAVLALARRRLNVLWAIIRGETTYEPVHLKAA

SEQ ID NO: 170820 - protein, 392 aa, unidentified
MIYVGIDVAKDKHDCFITSSDGEVLFKSFTIPNNREGFETLFQRIKSVSDDLTKVKVGLEATGHYSYNLLGFLLDNGLPTYVINPLHTNLYRKSLSLRKTKTDKVDSRTIATMMMSDMNLKSYSDTSYHNEELKSLTRYRFDKVKERAKLKSSISRLVCILFPELEKLVPTLHMASVYALLSEFPSADAVANAHLTRLSNLLSESSKGRYGKDTAVMFRDTARRSIGSHMPAKSLELKHTIKLIRELTIEIDEIEAAIKRIMDEEIHSPILTIPGISYRMGAMIIAEIGDFSRFDSADKILAYAGMSPSTYQSGQLDNCYSHMEKRGSRYLRYALYNATKYVCHWDESFGAYLSKKRSEGKHYNVALSHATKKLVRLIFAMEKSGKAYLPTA

SEQ ID NO: 170821 - protein, 341 aa, unidentified
MEEVTVIGIDLAKSVFQLHGADASGRPVFRKKLSRAQFTRFVAEHPPCLVAMEACASSHYWEREFMKLGHEVRLIPPIYVKPFVKRQKNDANDAEAIAEAVVRPTMRFVPVKSAEQQARSMVFKTRDLLVRQRNALINALRGHLMEYGFIAPPGRTFVRKLEAQLDAPESMLPSGVTELCRLHLEQIGSLDVRIIRIEKRLKEEAKNDPETIRLQTAPGVGPVSAMAIQAFAPPMEGFRRGRDFAAWLGLVPVQKSTGGRQILGRTSKMGQRDIRRLLIIGAMTRVRWAVKNGPPKGSWLEQMLGRKPRMLVAIALANKTARAIWAMMTKQEDYRDPVLAA

SEQ ID NO: 170822 - protein, 408 aa, unidentified
MKRYYMGVDWGDRLHQIYVGDQEGKKVREMEVQESPQGLAEIGRWLDEKRAEGFELWAAIEKPAGRIVDFLLDHGVEVYPVNPKAVDRVRDRYRMSGSKSDAFDAYVLAEFVRTDQAHLRVLRPSSEKAQELKMLSRDQRRVVRHKTRFLNQLTTTLKEYYARPLEVFDDLETEIALDFLQQYPTPAHLSALKRKEFNRFATKQHHLSKQRCEQLWEKLNQPQLAVPEHVVRAKAQLVEVLIEQLRASIKAVKIYNHKVESFFASSPAAQFAKTLPGGKSGTLVAAIWAELGDAQGRWESSGHLQAEAGAVPVTKASGKSRVVHFRFACNKHLRHTMYWFSFVSLNHSEWANLYYRGQRDIGHSHHQALRALGAKWLKIIFVMWRDHKPYDENYHLANIARQKMRQAA

SEQ ID NO: 170823 - protein, 312 aa, unidentified
MILPITPVYAGLDVAKATLQLHLQAKSIDLDNTPSGHALLVKRLSAIPGVHVVCEATGGYERAMAAALHAAHIPVSVMNPARVRQFARALGTHAKTDPIDAQVLSAFGSALAPDSTPPRTPLELKLTAYVNRRTQLIEIRIAEEQRAEVCIDSILAKTFVVALRNLENAIAKIDLLIKELVAAEAKLAEQVRRLSEISGVGLVTAVSVLAQLPELGTLSRGQAAALAGLAPYNRDSGTASGKRCISGGRPEVRRCLYMAALSASRSNRILKPFYERLIAKGKSGKVALTAVMRKLIILMNHILKNPSFALEK

SEQ ID NO: 170824 - protein, 298 aa, unidentified
MNDAKYIGLDVHQATISVAILDSAGKLVMEAILETKAETILQFICGLRGSLHVTFEEGTCAAWLYELLQPRVTQVVVCDPRKNALLKSGNKNDRIDARKLADLLRTGLLSPVYHGEHGIRTLRELARSYLAITRDLTRVMTRIKAIYRGWGIPCAGQQVYAPRHRPEWLAKLSEVGVHRRAEFYYQQFDALAAVRQEARHELLAESHKHSAVKLLRQIPSIGPIRAALLVALMQTPYRFRTKRQLWAYIGLALKTHTSGEYRSLRGPRDEATHGTPDAGAQDCRDHFAHLEERSIFRR

SEQ ID NO: 170825 - protein, 337 aa, unidentified
MIIIGCDFHPSFQQIAMLDTETGATKGHKLMHTSGEAESFYWKLASPAVVGIETVGNDQWFLQLLQKLGHEVRVGDAAQIRASYVRKQKTDRRDAKHILQLLVEGRFPRIWIPDAGMRDHRQLLIHRHKLVQIRTRVKNELQHLMLNQGMQKKQKLWSTEGRAALASLPLEPWTDRRRKDLLNLLAMLDAQLESLDDAVTRVAKEYPGVPLLMSQPGVGAVTALAFVLTLGDVHRFPRGKQVASYLGLVPREHSSGGKQRMGGISKQGNRLLRFLLVEAANIAVRFDPELRKEYLHRCHQKHFTVAKVATARKLAVRMYWMLRTQTPYPQVLSSRVA

SEQ ID NO: 170826 - protein, 314 aa, unidentified
MRNCIGIDVAKQVFDLHSLKTGQDRRMENSTEGIRQCVALCRTLRPELIVLEATGGYELTLAATLQAGGLAVCVVNPRRIRDFARAAGQIAKTDKLDARIIAQFAATMEPIPTERINENTQKLKALVARRSQLVGLHTAESNRLEHAESKAIQRSIAAVLKAIEAQLKTMDRQIEEHIHNTPSLRQRSEILDSAPGMGPTTAHMLVTELPELGRLNRRQIAALVGVAPMARDSGTFRGKRMTGGGRKGIRSRLFMPTLVAVRHNPILRAYYTRLIRHGKCKMVALVAVMRKLICILNTMVKNNQEWNPNLIKIA

SEQ ID NO: 170827 - protein, 343 aa, unidentified
MTQYKRIAIDTSKSVFTIHCIDAQDRPVLRTNLRRGQLLPFFRKLAATEIAIESCSGSHHWARELTGLGHTPRLVPPQYVKPYVKRGKNDRNDAAAICEAAGRPGMHFVPVKSATQQAQGMVLKVRETLIAQRTALGNTVRGHAAEFGIVAGKGIGTIAPLLSAIDQEAAVPPEAKEMFALLGQQIGEIGARIKEIDVKLNAAHKASAVSTRLATIPGVGPVIALTLATEIDPAAFESGRHLAAWVGLTPKEHSTGGKQRMGKISRAGNERLRALFVSGATSVINAAMKPGSRQMTEWLRALLLRKPRKLAAVALANKIARTAWAMMTSGEVYRRTSAAAEAA

SEQ ID NO: 170828 - protein, 404 aa, unidentified
MPTYFVGIDVSKFKHTCCIINENGEVIKKSFDFSNSKEGFDSLIEIFKSIDQSESLFQIVMEATGHYHECLFRYLVANNYLVQIKNPVVIARFKQSEYLDKAKTDNLDALLIAQYASKHPFSPSMLKSYNIERIRRISRAKYFLYQDKERTINHLHRYLDESFPELIPFLRKRGDIKRYQGRNFFDSKTTLWFLENFPSAKKFSNARSETAEKLRRMSKGAFSLIKFNELRNIAKNSIGVSFQETEEIIIQLVQELRSIQARNDRLDELLIPLIDETSPNLLTVPGIGYRLAGLLISEIGDASQFPSADKIIKFSGLDVRVYESGTVKKHGAIRKRGSPLLRYALFQAAEKARIHCPEIAEFYSKKKSEGKHPICALTHTARKILRIVWALLKTGQNYSQSISD

SEQ ID NO: 170829 - protein, 338 aa, unidentified
MNITRIGIDLAKQVFQLHGVDRHGKVLVRKQLRRAQMLAYFGKLTPCLVGMEACGSAHYWARELGRLGHDVRLMAPQFVKPYVKRGKNDANDAEAICEAVSRPNMRFVTVKTVEQQVMQAEHRIRARLIKTRTALSNEIRGLLAEFGIVVPPSLGQLRRALPELLEDGENGLLGHFRMLLAELAEELRSLDDRLKIYDVRLAQHARADDRVKRLLAVEGIGPVSASALVAAVGDGKQFGKGRDLAAWLGLTPREHSSGGKQRLGGISKQGDKYVRMLLIHGARAAMNAAVNKGDPRSRWVISLAARRNKNIATVALANKNARIAWAILSRGEDYRVSV

SEQ ID NO: 170830 - protein, 409 aa, unidentified
MQVIHPRCAALDLGKDGLVAAVRLQDAAGIRRECRTFETTGQKLLGLATWLESEGVTHVVMEATGSYWKAVWHVLESRFELTLANPAHIKNLPGRKSDVNDATWMADLHAHGLVRGSFVPPAEIVALRELTRTRKQFVREINRHTQRIQKTLDIGGIKLTGAVSQVLGVSGRAILTALIAGETNPKKLAGLAHPRLKASPGRLEEALQGRLTPQQRRLLGMHLGLIQTLDEAIAELDAEIVKAVDPFRGIVERLHEVPGLSEINVPAVLAEIGVDMTRFPTHSHLVSWARLCPRLAESAGKVHSTRTMKGAVWIKELMIQAAWAAIRTKDSYLRAQFLRLRARRGSKKAIVAVAASILTIVYHVIRDGTPYRDLGSNHFTTRDRAQIARRLVGRLQQLGYNVSVTAEVA

SEQ ID NO: 170831 - protein, 352 aa, unidentified
MAGVMIGVDPHKASHTAVAISGAEEPLGELRVRACAVQAQRLLAWAAAWPERTWAVEGAGGLGHLLAQQLLSAGERVLDVQPKLGARVRLLATGNVNKNDPNDARSVAVAALRSPGVREARPDDHAAVLKVWSKRRRDLGSSRTQVVCRLHAVLCELVPGGVPKKIIAAHAARLLASITPPDAVAAARCELAAALIDDLRGIDGQLRETRKKLDTAVRASGTSLTSLFGVGPVIAATVIGEVRDVSRFKNRDHFAAYNGTAPIEVSSGQRKVNRLSRRGNRRVNHAIHMAAVTQVRQRHSEGRAYYDKKLSEGKTRREALRALKRQVSDAVFTRLRADARRAAAQIRDPGGQ

SEQ ID NO: 170832 - protein, 415 aa, unidentified
MALKIVYKICCGIDVHKTFVVACIASTNDKGVTSYESHRFSTYTSGLKTLLQWLLDRNCKDVCMESTGKYWIPVYNILEKDCSIVLAHPKYVKAIRGKKTDKKDAKWIADLFKHDLVAGSFMPPSDIRQLRDLMRYRFKLTCFKSSEKNRLQNCLTVSNIQLGNVVSDTFGKSAQAILDKILENPADTSFDLEPLVFKSLKKKLPELRDAIDGYITPEQAGKLKVIKSHYENLEARKAELEELILALATPYQQELAILQTAPGISSDFTAIGIISEIGTNMEAFPSAKHLCSWAGLTPTNNESAGKKKSVRVSKAGCYIKPLLVQCANAAIKSKKHPEIRDRYLRIKKRRGHKKAIIAIARMLLTALYHMLKNGENYNSDLYQKSDILPTTREITVEQAILMAQFQGFRIKSATE

SEQ ID NO: 170833 - protein, 408 aa, unidentified
MDLTPMHKRVIALDVHQAKITACAVVEHDDGRVEVTKRDFGAFKRDRRALAQWALEMAPEVVVMESTGVYWKSPFAALEAVGLIAWVVNARHVKAVPGRKTDMADAQWLATLARAGLLRASFIPPVQMRQLRLVARQRQKLVGMCSAEKNRLHKVLVDAGIRINVLVADIHGQSARAMVKALIEGQPMHEVLDHKGRLRARRQELCEALRTEQFSAVHRFVAQEIVQHIEQIEQRIARMDQYLLQGLQPWQPQLRLLQTLPGIDEQGAAMLLVEIGADMSVFGSAERLASWVGICPGNNESAGKRKTGRIRKGNAWVRRLLCEFAQAAARTRCALKAKFDALTIRKGHKKSVVALAHKMLRTIYAMLTNGSHYQDKEVDYEALNVQRNAPRWIKMLRKHGFIATPAAA

SEQ ID NO: 170834 - protein, 422 aa, unidentified
MSCLPALTGVCPTQRTVRRDITILTETTLLVAGADTHADTIHIAAVSMTGVMLGDREFPTTRAGYAAAIGFLSSLGQVQRIGVEGTASYGAGLTRALLAAGIEVFEVARAVKSTRRLKGKSDPLDAYSAARSVLAGQGLAIPKDEATAGLRALHIARRSAVKHRTAVINQIKAMLISAPDAVREKYRGLTTLKLIEAIARCRPDTQSQPWAVSLLTAAKMLAQRVQFLDAQAAELQAQIDVLVSAANPALRAAYGVGADTAAQLLITAGANPHRLHSEAAFAALCGAAPIPASSGKTTRHRLCRGGDRAANNALHRIALVRLAHHQPTKDYAQRQRLKGHSKREILRKLKRAIAREIFKLLTRQIAIPEYADLRQARQAKNITLTAAAKHFGTWPTTITRIETGRQRDDAFADTYRTWLTTA

SEQ ID NO: 170835 - protein, 416 aa, unidentified
MKYAQILVLAETPPGGLSAGIDWGSADHAVCVVDTAGQVRARFTVAHDRAGIGKLIAGLRAAGVSEAAIERSDGVLVEALLEAGLTVVVVTSRQMRNLRSRYGSAGAKDDRFDAFVLADALRTDRARLRPLVVDTPATAALRAAVRARRDLVAHRIAACNQLRAHLAVAFPGAVGLFASLDSPISLAFLARFGSHDAAGQLTEDDLAAWLHTVPHRGKAARPGQLRARLQAAPRGATGPDGAALVPVTGALVATLATVSAQVQALEAEIAVQLAAHPDAHIFTCLPRAGTVRAARLLAEIGDCRARFPDPESLAGLAGVAPVTRRSGKHISIGFRWAVNRQLRDAVCDFAGDSRHASPWAAAIYDAARARGKDHPHAVRILARAWTYVIWRCWQSGSAYDPAKHAALQRVLEQRKS

SEQ ID NO: 170836 - protein, 314 aa, unidentified
MSALCYLGIDVSKASLEWATTLDRSTTGTVTNDESGWAELVAQCHALQPTLIVVEATGGYEIGIATALTVAGWSVAVVNPRQVRDFAKAAGLLAKTDALDAHVLALFAARMQPTPRPLVDELQADLIALVTRRRQLVDMLTAERHRLGLARASVQTSLKAHIRWLEARLRDTERDITTRIQQSPVWRVRDRVLRSVPGIGPNTSARLLASLPELGRLTQRQIAKLVGVAPLNDDSGTRHGHRAIWGGRTAVRNTLYMAALVAVRHNVVLAAFYRRLRCAGKAPKVALVAATHKLLTIINAMVKTETTWAPQTGS

SEQ ID NO: 170837 - protein, 411 aa, unidentified
MELIRERVAGLDVHRDQVAACLRAAGPRGGVQVEKARFTTTTGGLAVLAGWLAEHEVALVAMEATGVYWKPVYYALEDRFELWLCNAHHVKNVPGRKTDMSDAEWLADVAAHGMVRPSFVPPPAIRELRELTRYRKTQIDVRAAEIARMEKVLQDAGIKLTSVASKVLTQSGRAMIEALIAGERDPRALAGLAKGKLRPKIPQLAAALDGHFGSHHTVAAARILAHLDFLDATLAELNAQIAGRVAAGYGSAARLLREVPGIDQAAAEVIIAETGADMSRFPSPAHLAAWAGLCPGNHESAGKRRTVATRPGNPWLRHTLIESARAAARTKGSYFGAQYRQIARRRGPNKAAVAVAHSLLDVTWHLLTTGEAFTDLGEDYFNSRYDKQHQTRRLISQLEKLGYTVELTPAA

SEQ ID NO: 170838 - protein, 374 aa, unidentified
MSIVMGLDQHRAQVTAEWIDLVSGEISRARVCPADRAGVRRFLERFAGQELEVALEATTGWRFLVEELRAVGAVVHLAEPAETAALRGNKKRAKTDRADARHHRELLMAGRLPESWIPPDHILDLRAQVRLRHTLMHQHTEWQQRIQAVLYHHGCPSRRKLMRGDGRDWLDAQPLPDAAREQLTVALAVTDALEVQIAPQDRELRSYARRQTGCKALIEKYYGIGELVAVTVLAELGDCRRFSNSRDAVRYAGLDITVYQSDRHRAPGHLSRQGPPALRWALYEAAQRARFPTSPDRDYYLQTAARLGGNRACLALARKLLKRCYHTLRELGDDALAPPTHQPAGSAAARRASSGSPPGTGPAVSPERADALAA

SEQ ID NO: 170839 - protein, 320 aa, unidentified
MQTKLTSQPIMNLGADVASAHLDIAVHGGQVQRIANDAKPIVQWLRQIPRGSRLAMEATGRYHLLLARLAHEHGLQVYVLNPRDVSHYGRGVGQRGKTDRLDAQLIARYVANEHAQLRCWQPLAPELSELDNLLRRRAAVVRHQSALRQSMRDDPLTSQMLPQVMAPLEQVLQALDKAIAKAGQRIEGSAQALRSITSVPGLGALNGAALLSLFTRLKCARADAVVAFTGLDPRPMDSGNKRGVRRLSKRGPAELRRLLFNGARAACKAACWRGIYERELAKGLPRTAALVVLARKLVRVAFCLFKSQTTFDPNFHQQSA

SEQ ID NO: 170840 - protein, 326 aa, unidentified
MSNILGIDVSKDKLDLVLLSEEDKYHKVIRNDLSGFKELDQWLISRHIDRVHVCLEATGQYGDEVSEYLYERGHDVSVVNPTRIKRYGESKLHRNKTDKADADLIAEFCLKEKPALWEPLNPDLKHLRALVRRLTDLQANYRQEGNRLTSGEKDDWVIRDISVHLEYLKASIEATEAEIQNFTNQTPGLKAKQELLVSIPGVGKKTSARLLAEIGEINRFENAPQLAAYAGLNPKGFSSGSSVHKKTRISKQGRNELRACLYMPAIVAMTHNPVVRALKERLRKKQLPTMAIVAACMRKLLHIVYGVLKSQMPFDPDYDRQFYFSS

SEQ ID NO: 170841 - protein, 318 aa, unidentified
MKSSMFAGVDVAQRTLDIALENDAQVRRIDNDLGPIRRWLRSLPEGCAIGVESTGNLHQLLVRAAIAAGRTVYVLNARDLSHYARSLGRRAKTDRLDAQLILRYLQREHEQLHPYQLPSLRQAELDELIGRRHRVVRAQGALRQSFASSSRKPRALGRTLRALKALIAELDARMQELVTAENTLHTAATHLRTVVGFGPLLSASMAHAITRRPFKKADAFIAYIGYDPRVRDSGQWRGRRFLSKRGPAELRRLLFTAAMSACKTRLWQPFYQRYRARGLSTTAALVVLARKLARVAFSIVKHNLDFRPEMVKVPCAQP

SEQ ID NO: 170842 - protein, 388 aa, unidentified
MPAAETPVAYLGIDVGKSSHSACALDAGGGVAFRAELANRPDDIDRLLERAGSGALVVVDQKRNIGALVLARAHAHGNPCAYLPGYAEKQARGMFPGIAKTDAIDAEVIARTALGVPRALRPAPEEPEGAASLRILSSQREFASSARTRAKNRLRATLLEADPALEGAVDPSSRWQVSMLAEFGGATGCSAAGWRRFSNAARRAGAPAAGARRLWEALLASSRSGRRLPAGEDVAVRILAREIASLDADIEELDSLVADSLAGDEVYECLLTVPGIGPKTAAALVTSIDISAFRGHDELASYCGVAPSDRRSGSSIRSTSPQHGGNRRLKNLLIFSCNSLIGTDNRFGRYYGECRARGMRHGKALKAVARKRLKVIYAIMRDAVPYAA

SEQ ID NO: 170843 - protein, 369 aa, unidentified
MSASIIDLQKRSTLMNCEKYIGLDVHQATISVAVMDLTGKLVMECILETKASTILEFLGGLRGTLSVTFEEGTWAAWLYDLLKPHVAHVLVCNPRKNAALKQGNKSDKIDARELANRLRLNDLKPVYHGETGVRMLRELARSYLTIVKDLSRVMNRLKALYRSWAIPCAGRDVYYTRHRSQWLEKIPEAGTRRRAEQLYQQLDMLQHLRHQARRELLAESRKHSITAKLRQIPSLGPIRSALAVALIQTPHRFRSKRQLWKYSGLALETRISGEYVYVHGERRRSKKQISIRGLNKDHNHDLKGLFKAAATRASVIPGPFREFYQRSLAKGIKPTMVRLTLARKIAAITLTLWKKGENFDVEKLKSQAA

SEQ ID NO: 170844 - protein, 360 aa, unidentified
MTQRTSVGLDVHARSVAGAAIDGQSGEIHRRKLTPDRGEILAWIVSLAGPVRVVYEAGPTGFGLARFLLAAGVECVVAAPSKLQRPAGDRIKTDARDALHLARLLHLGEITAVTVPSVEQESARDLVRAREDVRADLMSARHRVSKLLLRQGIVYYDGKAWTGGHDTWLRQQRFELVGLQTAYDTAYETMLATTARRDRLDKAITAMAADSSFTPVVDRLGCLRGVSTLTAFGLAVEIGDWQRLSGRSIGAYLGMVPTEHSSGQSRSQGGITKTGNGHARRLLIEAAWHHRQPYRAPGLELRRRWERAPAVAAARGHVGNRRLHQRWQGFIDRKKTPVIANAAIARELAGWCWSLAVLET

SEQ ID NO: 170845 - protein, 329 aa, unidentified
MFYLGIDIAKAKIDCCLILEDSAGKKKTKTFPNTPKGFEQLQAWLNHHAAGPAQAIALMEATSVYHERLAGYLFDAGFQVCVANPARARYFAQSMSKLNKTDKADSEVLARFAMTADLHFWQPLPGHIQLLNALLDRRAVLGEDLQREENRLEKAESTFTIEPVLQSIHKNIKQLSRHIQDLDRQIDDHIDQHPDLKNDKALLSSIPAIADRTSLLMLSFLRSHAFERASQAAAFAGLVPIQRQSGSSIHGRSRLSKAGPSKIRAGLYMAAIVATRHNPHIKGMNDRLLANGKTKMMAVGAAMRKLIHLCYGVLKHQRPYQENYCANSQ

SEQ ID NO: 170846 - protein, 373 aa, unidentified
MKKTTRWVGLDVHAETIAVAVADKDGTVQSVGTIPNRPDAVRRTIKKLESGGKLHVCYEAGPCGYGLYWQLAEMGVECDVVAPTLIPVKAGDRVKTDRRDAEKLARLLRSGDLTAVWVPDAEQQALRDLVRARHAAKRDQLRHRNRLGKFLLQLDRRRPEKIAAWGTKHMTWLEGQKMSHASHQAVLTDYLNEVKRAKERVELLEQAIDAGIARAPKHLQELIAALQSLRGVAKIGAATLVTEVGRFSRFESARQLMAYVGVVPSEHSSGGSTHRGSISKTGNARMRHVVGEAAWSYRHRPANGPALKKRQEGQDEDVKAIAWKAQHRLNQRFQKLSAQGKHHGRVVTAISRELLGFVWAIGRAVEAKIDAAA

SEQ ID NO: 170847 - protein, 316 aa, unidentified
MEREQRNTKIGGIDVGKFWLDVAIHGQDGARRFENDETGLAALLAWLGEQGVGRVGLEATGGYERLARSGLERAGLEVVIHQPLEVKLFARLKRWKAKTDRLDAALIAAATAQVEAVRAAQDPRLVELAQRLTAYEQITDQAAELKTFMEHVDLPDLVEALEDQIRSLSRLKAKLAAEILTRIKACSDLLERYRLLLSLPGIGPIVAASLVIRMPELGALRRGQPAALLGVAPFDRQSGQWKGHSFIGGGRRRPRRMLYLAAIAAKRCDPGFKAFADRLLGIGKPPKVAIVAVMRKLIEAANLILARRQPWLRQTT

SEQ ID NO: 170848 - protein, 345 aa, unidentified
MAKTSVPRAVIVGVDTHNDVHVAVAVDQDGRLLDQRFETANQAGYAALFTWASQLGPTTRFGVEGTGSYGAGLSRYLSGRGVEVTEVRCPSRQMRHDRGKSDIVDAEAAPRAVLAGTATGVPKAGDDWVEMVRVLRVARTSAMRQRTQVSNQLQAVIVSTAPSLRDELQQLRKVDLIAKLSSFRIRCISSPHDATRLTLRLLAQRHRSLTAELEILDLELRKLIEEHAPPMLAIRGAKTEVAGTLLAIAGDNPGRLKSEASFAALCGVSPLPASSGNTHRHRLNRGGDRQGNRALWWIVISRLRNDPRTQAYARRRTAEGKSTREIIRCLKRYVAREVYRALTAT

SEQ ID NO: 170849 - protein, 341 aa, unidentified
MNVTTIGIDLAKTVFSIHGTNQHGKVMVRKRLNRPKLLAFFAQLPPCLIGMEACSGAHYWARELTKLGHDARIIAPRFVAPYRKSSKNDDNDAEAICEAVSRPNMRFVPIKTADQQAVLCLHRIRRGLTKERTAQINQIRGLLAEFGLIIPQGRYHARHRIPEILEDAENGLPMLARRLLNNINQRILQLDEEILAYDREIEAMARRDEQAKRLMAIPGIGPQTATAILASAPDPRQFKSGRHFAAWLGLVPRQYSTGGKPRLGRITKRGDKYLRMLLIHGTRAVIAKLADKHDQLSQWAKGLVERRGYKRAAVALAAKNARIIWALLMNQTEFKTQPAEG

SEQ ID NO: 170850 - protein, 368 aa, unidentified
MSILYVGLDAHKKTLAVAVAEDGREGEVRSHGTIENTPANVDKLIKRLVKPGIDLHFCYEAGCCGYGLQRQIVAAGHLCTVVAPSRIPRKPGDHVKTDRRDAIKLARLNRAGELDAVWVPDAAHEAMRDLIRSRGDAMEHLKACKQQMQSFLLRHGLIYSGPGNSWTRAHYRWLAEQKFEHPAHQIVFQDYINAIHDAGKRHNQLVKQIEALLPYWSMKPLVKALCMMKGINLIAAATILSVTGDLRRFPTPIQLSAYFGLVPSEHSSGDSVKRFKLTKAGNIEARRVLIQGAWCYRFPARITEKKALKQPATEACIRDVAWRAQLRLCGRYRRLITLGKKSPVVCAAIARELATFVWEMGQIVPIAT

SEQ ID NO: 170851 - protein, 429 aa, unidentified
MNCTQNKKIEQVKETTMIVGIDVGSEKHYFRAFNWRGIELTRKPVAFSNSMEGFNSFYNTIVELMQKSELEEALVGIEPTGHYWFDLGQFMGEKDIKFVMVNPHHVHKTKELDDNSPSKNDRKDPRVIAGLVRDGRYFYSYMPTGAYAELRNASNRRFVLVEEQTSAKNRLQKWIAVYFPEYKGIYTHIDAKGGMLVLKKAPTPEEIVRLGVEGIIKIWKDAKLRGNGHKKAMLILAAAMRSIGLKAGLTEARMEIQDLIEDYELQTKRLERVNDLIKGLCQQVRYADKLLEIKGIGITTVAGFIAEVGDITRFDSTKELQKLAGLELVADSSGKHNGKTKISKRGRKRLRYLLFEAAISVVGKNEEFKEIHRYYTTREKNPLKKMQSLIVVACKLIRVFHAILTKGIRYDASKMLKDIRHPGEQLKAA

SEQ ID NO: 170852 - protein, 329 aa, unidentified
MKAIKATSKFYCGIDVSGDTLDVCYQAPGGNLEWYKCTNNAEGFKQIWQHTGKLYHFVMESTGVYQLPFCFFLESKKARYSVVNALQIKRYIQMKLERNKTDKKDAFHICMYGVDHNPEYYEMPSHLYFECRAINNAIETITTEITSFKNKLHALSKLDIDSKVIVTGYKKILRELQAELKKFEVELYKKLEAWQPALVKQVRSVVGIGKRATAILIVATQGFKHTETYQQLISYAGLSPREYSSGSNIRGKVRICKQGGSLMRHTLYMCALNAKETNGACKELFDRLVAKGKNKKLAIIAVANKLLKQVFGVVKNKCLFDRNYYKKTA

SEQ ID NO: 170853 - protein, 334 aa, unidentified
MSQEKYIGMDVHQATISVAVMDAGGKLIMECLLETKAATIVEFMEGLHGTLWLTFEEGTSAAWLYDLLKPHVSRLVVCDPRKNARLKDGNKSDRIDARKLAELLRTNQVKPVYHGEHGVRTLKELGRSYLTITKDVTRVMNRVKALYRSWAIPCAGTTVYAPRHRAEWLAKIAEPGVRVRAERLYQQLDLLQPVRLEARRELLVESHKHSAVKLVRQIPSMGPIRAALLVALLQTPHRFRTKRQLWAYIGFAVETHDSGEYRYVRGKLQPNRERITVRGLNDNHNNELKNLFKGAAISASTRPGPLRDFYVGLRKGCGRPWPVSPWHGRLPLSV

SEQ ID NO: 170854 - protein, 342 aa, unidentified
MDHFAGLDVSVKETSLCIVDDAGRIVREVKVASEPEALLAVLTNPACHFKRIGLEAGPLSQWLFKALAEAGLPVICVETRHMRAALKAQINKTDRNDARGIAQMMRAGLYRPVHVKTLRQKLRMLLTHRKLLQSKAIAIENDLRATLRNFGLKVGVVGTVKFEARIKGLVDNTPDLVVLVEPLLIVRRVLREQIGILHRRLLAIVRNDAVCRRLMTVPGVGPVVALTYRATVDVPYRFRNSKAVGAVFGLTPSKHQSGESNRTGGISRCGDEMMRMMLYEAAHIMLVRSAKWSWLKAWAMKIARHRGLKKAIVALARRLAVIMHRIWVDGTEFRWTREVAAA

SEQ ID NO: 170855 - protein, 416 aa, unidentified
MEVLYRRCAGLDVHKDTVVAGLRLAEAGSVITEIRSFATTTPGLLALSAWLGEHGCTHVAMEATGIYWKPVWHILSDGDFMLILANAAHVKNVPGRKTDVADAIWLADLLAHGLIRASFVPPPATQELRALLRTRKQLVREQASHVQRLQKTLEDANLKLASVLTDILGVSGRAILEALIGGECDPDALLGLVRRGVKASPDTLRAALTGRVSERHRFLLRLHLRQIEALDGAIAEIDREVDRDLAPFHDAVRLLCSIPGVSDLTARVIVSEIGTDMTRFPTAGHLISWAGLCPRNDESAGKRRSTRLRKGAPWLKTTLVQCAWAASRKKDSYLQAQFRRLRHRRGPKKAICAVAASILTAVYHMLRDGTFYHDLGAGYLHRISPEGQANRLAKLITKLGFTCTLALIQSNSSVSV

SEQ ID NO: 170856 - protein, 332 aa, unidentified
MLDTETGELTEKVIRHEGNTVREFYASLGKPVVVGIEATGSMQWFLELLEELGIESRVGDPAKIRAAKTWKQKHDRRDARLILDLLERDRFPAIWMPTSEQRDLRSLLRDRHQWVKMRARLQHTLQAIALNHALRKGSSLWSGTGQEALAKLPLPAYTCQRRNELMSLYAQLQRRIQQLDKQVEEQAQHRPQARRLMTHAGVGPVTALATDVFLGDPSRFTTANEVASYIGMIPSEHTSGKRQRLGKMSKQGNSLLRYLWTEAGMHASGKDPELKRFYRRKLIQKGMGKSRIAAARKLGIRLWIMMRDEIDYEEFCRRGKLRQIGESPCRSA

SEQ ID NO: 170857 - protein, 420 aa, unidentified
MKAKKKAKLDLIDENTLIVGIDIGKRKHHARFINLRGYELGKVFSFTNNRDGMEKVVAKIEEAKKQNNLAKAVIGLEPSGHYWKAAAHYLSSQGYKLALVNPYHIKKTKEIDDNCQTKNDRKDPILIAKLVRDGDFFDPGLSSGVHADIRRMYRLRLKVKKSFVRQKTALKVLLDEYFPEYEDFFCDVLGVTSEYLLRNYFLPKKIAKENILALAGKIKKVSRDRIKIDRIIKLVEASKCSIGITAGLEAASLEKIYILDEIKDLKGKLAYIDKRLKQYLTQIEYSKYLLSIPGVGTVTAAGFLGEIGDISKYSSAKEIIKLAGLNLVEISSGEKKGSKKLSKRGNSILRCLLYQCAVVAIAKNAQIKKYFDYQIKTKNKMKMLVAVQCKLARIMFALLKYKKYYDPLVVAQNIFEQAAA

SEQ ID NO: 170858 - protein, 453 aa, unidentified
MDRRAVEVDLWGYAMGSDQAFTVFVGIDWADAKHDICMQAAGSSRREFSCIAHEPAQIESWACSLRERFGAPVAVALELTKGPIVYALQKYDFIVLFPVNPATLARYRQAFKPSGAKDDPSDAELALDLLVCHRDKFAPLQPQSAPMRTLIHLVEQRRQLVNDKLRFTNRIGNALKQYYPQALAWFEQRDTTVFCDFIERWPTLAQVKRAHLAGLERFFQNHNVRFANVIEERLRAIKAATALTTDEAVIGAYRLQVEVLIEQLRTTLRAIDRFDRQIAKLAPTLPDYALFSALPGAGPHLAPRLLVAFGEQRERFRSADELQRYSGIAPVTERSGKKSWVHWRWQCPTFLRQTFVEWAAQTINKSFWAGAFYRQHRDQGSTHQAAVRALAYKWIRILYRCWQTRSAYDEVTYLNALQRRGSPCLNTSLPLAKLVDGPAQGVKPPVRLPDSGR

SEQ ID NO: 170859 - protein, 340 aa, unidentified
MKGVKNCFLGIDISKEWFDVSMIIVTEQGKGNMISEKFSNDKPGFELFTSWLSLHEVPMNSDTLIVVENTGIYHRMMWEYCSSKNLSLHIGNAARIKWSLGITRGKTDKADSQRLCTYCYRYADELKVSAALDPVILQLKDLVTSRNRLISQKNSIKNFLSELKNSNDKAVQKMLEKSHAAALKGLQQSLEQIELQIKKVVRENMSIKKNYDLLLSVPGIGPVTAVYIICCTANFASKISGKQLACYAGVVPFEHSSGKSIKGKTKVHRMANKELKKLLHMGARSVTNHHPEFKAYYERKLKEGKHDLAIINAVRNKIALRAVAVINKQTKYVDNYKKVA

SEQ ID NO: 170860 - protein, 355 aa, unidentified
MSQEKYIGMDVHQATISVAVMDGSGKLIMECLLETKAATIVEFIQGLHGTLSLTFEEGTAAAWLHDLVKPHVSRLVVCDPRKATLMKEGNKSDRIDARKLAEMLRTNQLHSVYHGEHGMRTLKELGRSYLTVTQDVTRVMNRIKALYRSWGIPCSGTTVYASRHRAEWLAKLVEPGVRVRAEHLYRQLDSLQPLRLEARRELLQESQKHAAVKRLRQIPSIGPIRAALLVALLQTPHRFRTKRQLWAYSGFAVETHDSGEYRYVRGKPQRNRERITVRGLNHNYNKDLKNLFKGAAISASTRPGPLHDFYVARVEKGMRPTMARLTVARKIAAVSLTIWKKGVSFDPKRLQQQAV

SEQ ID NO: 170861 - protein, 343 aa, unidentified
MEAYSGKQFVGIDLHRRRTVIVRTTAGGEVLETVRIVNDVERLASVMARAGECPEVVLEATYGWYWAVDALQAGGASVHLAHPLGVKAFEYRRVKNDVRDAQDLADLLRMGRLPEAWIAPPATRELRELVRHRAKLVGLRSHCKAEVHAVLAKCGVQVLMSDLFGVAGTALLDGLNLPAPYAARIASLRRLMDDLDFEVDLFAGMVRGRMVREPGYTALQNIPGIGPTLAAVFVAEIGDITRFASAPKLTCWAGLTPKHHESDTHVHRGRITKQGSRLVRWAAIESVKTLPAGSLAGVLRERVADRRGRNIGAVAAARRQLEFVFYALRDGHVRALEHLPRVA

SEQ ID NO: 170862 - protein, 404 aa, unidentified
MDTLYIGIDWSEAKHDVCIVNNEGAILKEFKIAPTPKGQADLEQEIKSFGMAADHCLVGLETSNNLVMDFLESRPYQSYVIAPNQVASSRGRFSSSGRRNDRSDAHLLADMLRTDHHRFTPWQADGVTVNQMKAGLRLIDDLTQSITRYNNRLRAALLRAYPLALGLFNDLTTQIGLQFLIEYPLQTAAQQLTYADFAAFCRQHGYSHPKMIPQRYAHLQRDVAQPATTTILAYQEQIPILATLLLSFVQQKQQTKRRLQQLFATHPDQHIFASLPGAGDLLAPKLLVMFGDHRQRFPQPAAIQALAGTCPVTSQSGKKKVIKFRRACNHEYRQTAQLFAIASVPQSTWAATYFSLAKARGLADSHAYRCLANRWLAIIWTLWQREQPYDETYHLEQVRRHRHP

SEQ ID NO: 170863 - protein, 345 aa, unidentified
MDHFAGLDVSVKETSVCIVDDTGKIVREVKVASEPEALLAVLKNPAYHFKRIGLEAGPLSQWLFSALAEAGLPVVCVETRHMQAVLKAQINKTDRNDARGIAQMMRVGIYRPVHVKTLRSQKLRMLLTHRKLLQSKAIAIENDLRGTLRNFGLKVGIVGRVRFEARIKELVENLPDLAVLVEPLLLVRRTLREQTIILHRRLLAVVRDDEVCRRLMTIPGVGPVVALTYRATVDVPARFRKSRAVGAVFGLTCSKYQSGEIDMSGRISRCGDEMMRVMLYEAAQSMLRSKKWSWLKAWAMQIARRRGMKKAIVALARRLAVIMHRIWVDGSEFRWTRGQAAAAAA

SEQ ID NO: 170864 - protein, 324 aa, unidentified
MAKRITICAGIDTGKRKLDVAIDGSSLQLQVENTAEGHEVLLVWLRRHKVKRIGIEASGGYELPVVTKLRRKRFVVVVFQPAQVRAYAKFHLQLAKNDKIDAALIAACTAAVKKIHAAPDPRLQPFAEHLTLIDQIGEDIQLHKNRLETCRDPRIQKLWEEEISRLAKRQRVELKALAAAIRQHPDLAQRLNLIYSVSGAGMSTAVAILVRMPEIGTLNREQVAALAGLAPYDDDSGERSGARHIDGGRKRLRRALYTAALPASFFWNPHLIALYKRLKAAGKGHKSALIACARKLLIFVNTVVARGTPWQEQQPARATNPAAA

SEQ ID NO: 170865 - protein, 358 aa, unidentified
MVDKVTEAAVVGGVDTHKDLHVAAVVDQNNKVLGTQYFSTTRQGYRQMLAWMTSFGTLKRIGVECTGTYGSGLLRYFQNAGLEVLEVTAPDRMERRKRGKSDTIDAECAAHAAFSGIRTVTPKTRDGMIESLRVLKTCRKTAISARRVALQIIHSNIISAPDELREQLRNMTRMQLIRPLGSWRPDASEYRNVTNVYRISLKSLARRYLELHDEIADLDVMIAAIVDELAPELIKRNAIGYESASQLLITAGDNPQRLRSESGFAALCGVSPVPVSSGKTNRYRLNRGGDRAANSALHIIAIGRLRTDAKTKEYVARRVAEGHTKMEAIRCLKRYISREVYTLLRNQNRRVNSIPITA

SEQ ID NO: 170866 - protein, 425 aa, unidentified
MRVKDGAHWAGVDWGQRVHDVCVLDTDGELLEERRFDNSSKGLGELSAFLSGFADVQVAIETPRGPVVEALLDRDLAVFAINPKQLDRFRDRFYPSGAKDDRRDAFVLAHSRKTDAHAFKAVSAEHPVIVELREWSRMHRELSEERVRLTNRLQAQLRRYYPQLDGFDVPLWSAWILDLFVAAPTPERARSLRRQTLVRVLRGNRMRKWTLEEVREALRAPGFTVSAGTVAAASAHAETLVERIRVVSAQHQRAVKRLDELTERYRLDALTERYGATELGEVDSDEDSSEQHDVDILRSLPGVGKLVLAVLLAEALEPLQRRDYHGLRALSGVAPVTRRSGRKLVVLRRHACHQRLAWAVFQWARAAMSNDPEWHARYAALRARGHTHGRALRTLGDRLLRIACAMLEQGAMYDAARLAPVQRAA

SEQ ID NO: 170867 - protein, 411 aa, unidentified
MDLLYARCAGLDVHKTTVVACVRRPGPRPDARHAETQTFATTLRGLAALAAWLTAHAVTHVAMESTGVYWRPVFAVLEGTVQVQLVNARHVKMLPGRKTDVRDCEWLAQLLECGLLRGSFIPPAAVRDLRDLTRLRKTLIRERGHHVNRIAKTLELANIKLGSVVTDIMGTTGRAILQALSVGLDDPAQLAACAQGSIRKKQAALREAVEGRLTPHYAFLLQQHLALIDTLDAHLATLDTRIEAAMVPFAETAALMQTMPGVATRTAEAILAETGVDMSPFPTAAHFASWARLCPGNHESAGKRRSTRTGKGATWLRATLQEAAWAAVHTKKSYYRALYYRLKARGGPKKAIVAVQHAMLVALWHMLKRRVSHQDLGADYFAQRNTERTLRHHVRRLEQLGYQVLLAKEAA

SEQ ID NO: 170868 - protein, 344 aa, unidentified
MLNSNVIGIDLAKNILQICIISKEGELISNKKTSRQKLKEVLAKSSPSIVGIEGCGSSHYWGRLAESFGHDVRIINPKKVKAFLSDHKTDANDALAIANAAMQIGLKYSKPKNEEQQSLQSLETSRVFLSRSITSLSNQIRAMLYEYGIVSAKGFAGLRKVVQDTLDEKNILPTCLIPALHQLWAQYLNLKDEFTKLEKTKNVLVRQLEPCKHLMALEGVAEVCASMLYSTIGNGKQFKNGREASAFIGVTPKQHSSGGKVFMMGIDKKGGVKELRAALFQGAMSIVTHLPDVPTTVKQAWLIQLLKRVGIKRTCIALSNKTIRTAWAMLRYESKYVQQQLITE

SEQ ID NO: 170869 - protein, 366 aa, unidentified
MKKTSTVRVKGNMIFKGHKLTMGLDLGDRWSFYCVLDEAGQIILEQKLPTTPEAMKQTFGKIQRSLIALETGTHSPWISRLLRELGYEVLVAHAQKVQLISKSNRKDDRHDARTLARLARIDPELLGPVRHRSAKAQIHLTVIRARAELVSARTALVNAARGLAKSYGERLRKCGTQQVSRELAAELSVELREVLEPLLQEVESLNERIQEYDERMEKIAKQVYPEVSLLKQVKGVGTQIALTYVLTLEDPHRFPKSREVGCFLGLRPGRRNSGESEPEKRISKEGDRYLRTMMVQGAHYILGPFGQDSDLRRWGLKLAERGGKNAKKRAVVAVARKLAVLLHRLWVSGEVYEPLRNSHKAMRAVA

SEQ ID NO: 170870 - protein, 323 aa, unidentified
MSKDSIYYGIDISKEVFDVTNSEGVYIQYKNNVTGFKKFLKKLGNESHCVMEATGYYHYQLAYFLLENGIKVSVENPLSIKRFIQMKLSKIKTDKSDSRLICEYAEQVELKLWIGNSAHQIDCLQITRLLSVYTKQSTMLKNKLHGESVLGNPCKAVLQSLNRSLKQVKKELKVLEEKLLVLVKKEHQDLLTRLETIPGIGRKTAIMLVVLTDGFDRFKSGSELCSYSGLTPIIRQSGSSVKGRSRISKIGNQKLRNLLFMCSFNACKYNKACREIYERIVAKGKSKKLALIAVCNKLLKQAFAIAKSGLIYDQEFRSTLVKN

SEQ ID NO: 170871 - protein, 347 aa, unidentified
MRFYTQQHRHYCGIDLHARSMYICVLDRSGKTLVHRKLDCDGDELLRILRPYRKDLVIAVECLFCWYWIADLCAEQGIAFVLGHALDMKAIHGGKTKNDRLDSYKIASLLRGGNLPYAYVYPRDKRATRDLMRRRNFLVRKRAELLTHIQNTNTQYNLPAFEERIDKTKDRGAIIEHFDDSSVQMSMAADVTLIGAFDEVIRDLELLLLHEVRKDHGHGFSLLRSIPGIGEILALTLLYEIDDLGRFPSVKDFLSYSRLVKGRHESAGKTTKTTGSKVGNVHLKWAFSEAAALFLRWNAAGRKYFSRIEKKHGKGKALSILAAKLGRAVYYMLLRKKPFDMQRFVNV

SEQ ID NO: 170872 - protein, 416 aa, unidentified
MEVVHLQCAGLDVHKKTVVAAIMVPDGQGGVRKEVRTFATMTADLLGLSDWLVSLGVTHVAMESTGEYWKPIYNILEDNFEVLLANAQHIKKVPGRKTDVMDAEWIADLLRHGLLRGSFIPPVGQRELRELTRARTNFVRERATLVNRLQKTLESANIKLASVASNVMGVSGRAMLEAIIEGVANASEMAGLAKGRLKEKREQLDKALEGRVKPHHRFVLSELLCQIDNLDEAIARFDAEIEKYCRPFEQAVALLDTIPGVARRSAEVIVSEIGSDMSRFPTANHLSAWAGVAPGNNESAGKRYSGTTRKGDRALTVALVQAAHAAAHGHNTYLSAQYHRLAGRRGKKRAIMAVAHSILVISYHLIQRNEPYRDLGGNYFDQQRPEATAQRLLKRLQQLGYDVSHIQYPAALPMAA

SEQ ID NO: 170873 - protein, 415 aa, unidentified
MALKIVYKICCGIDVHKTFVVACVASTSDKGITSYESHRFSTYTSGLKTLLQWLLERNCKDVCMESTGKYWIPVYNILEKDCSIVLAHPKYVKAIRGKKTDKKDAKWIADLFKHDLVAGSFMPPADIRQLRDLMRYRFKLTCFKSSEKNRLQNCLTVSNIQLGNVVSDTFGKSAQAILDKLLENPADTSFDLEPLVYKSLKKKLPQLRDAIDGFITPEQAGKLKIIKDHYENLESRKAELEELILALAAPYQQELTILQTAPGISSNFTAIGIISEIGTNMEAFPSAKHLCSWAGLTPTSNESAGKKKSVRVSKAGCYIKPLLVQCANAVIKSTKHPEMRNRYLRLKKRRGHKKAIIAIARMLLTALYHMLKNGENYNPELYRKTDLPPAGREITIEQALMLIRNQGYKIKSATT

SEQ ID NO: 170874 - protein, 307 aa, unidentified
MKTINYIGIDVSKKTLQIDTAQAALSCPNQAKALMTWLQQLPADSHLVLEATGGYERTLVTLAHAAKVPVSVVNPARVRAFAKARGQRAKTDSIDAAMIRQFALAMQPPAARPPSPVRQRVVELVRARQVLVKERITWTNMLEHVVLPRLKRLYQKRRRQTDALLEELEAQIATEIASCPELSARYQRLLAEFGIGLVAASTLVAELPELGQSNRKQMAALCGLAPFPKDSGQKHGLRFVQGGRAQLRRVLYMATLSAIRKKSSPLADFYQRLRANGKPGKVALIACARKLTTHLNSILKTPDPLAA

SEQ ID NO: 170875 - protein, 397 aa, unidentified
MNEPTDNKHTMKKSLLFVGLDVHAQNITIGLAPGEGSAARLYGTIPNDLHALEKVFAKLRKAHPGVELRVCYEAGPTGFVLARRLGQLKTACTVVAPSLIPTRPGERIKTDRRDALKLARLHRAGELTAVHVPEASDEAMRDLCRARTDAVQDLRRGRAQLKAFLLRNGYRYTGQSAWTEAHRRYLRELVLPHPAQRVVLEDALAAIASAGERIARLEEQMSALLPSWPMQPVVAALMGMRGFAQVGAMVLTSELGGAWRFAHPRQLMAYLGLVPSENTSSEKRRQGGITKTGNSHARWLLIEAAHHYRLSPKVSKELSLRQQGLSPDIKACAWKAQTRLHQRMMALQARGKQRNKVTVAVARELTGFVWQIFQLMAPRMTPPQGAAVLDESRFGGN

SEQ ID NO: 170876 - protein, 373 aa, unidentified
MPRYSTAFGMDVHLRSTTVCALDAETGEAVTRRFRGNPWGEVAEWMSGFPGPSLAAYESGYLGFAPQRELSGLGVDCVVAAVSRVPRSSADLSSKNDRNDAARMAKAILSHDISPVWVPSPEIEGLRDLAGAHDAATARLAAAKQRLLAFLARRGYAYGGTTPAGNPRRYWTYDFLRWLDKVRPADDGGIRALAALRSEVEAAAETRDDLLAEYRAAVAAGPLSAEVEALQSIKGCGFALAAAFASEVGDFSRFRSGRQVTSYFGLAPKQRSSADSVRLGGISGAGNALVRRLAVEGSWSYVQASHQPKLMPKGSGVPLEVRMHGRKGSERLLRRREEMLARGMPQAKANAATAAELVRWLWALGAMCREATE

SEQ ID NO: 170877 - protein, 416 aa, unidentified
MRVVHERCCGLDVHKKTVVACVLITQPDGTVQRQVRTFSTMTADLLALGDWLDDQDVTQVVLESTGIYWRPVFNVLETDERTITLVNPQHLKAVPGRKTDVKDSEWLADLLRHGLVQPSFIPPAPIRELRELTRYRKALVQARTQEVNRLHQLLEGANIKLAAVVSDLMGKSGRAMLAALLAGEQDPAVLAELARGPLRGKRPALRQALEGRVQPYHRLLLTELLAHVDYLEAAIARVHGEIERVLAPFAEAQELLQTIPGLREVAAATIVAEIGVDMTRFPSAKHLASWAGVCPGNKQSAGKRLSGKTTKGSRWLRGVLTEVAWANTRSANYFGAQFRRLARRRGALKAVVAVAHSIVVVIYHVLRDRQPYTELGADYFATQDTSQAQKHHVKRLNALGYSVTLTPLPPAETVSA

SEQ ID NO: 170878 - protein, 328 aa, unidentified
MTYFTGIDVSLRSVSICVIDEEGAIKFEAKVASDVEAIAAVLKKLGGQIRQVGLEAGTLTQYLTYGLRAAGYEVICLEARHVAATLAAMRNKTDRNDARGLAQILRSGWYRTVYVKSVQSHQSRALLTSRKAVLSKCIDLENELRGLLRVLGVRLPMRVGHGSFDALVRRHLQHHPDWAAALFPLLDARTMLYQTFLKLDYAVRSVARQDPVCQRLMTAPGIGPVSSLTFKSAVDDPARFRSSRTVAAHFGLTPRRFQSGESDSPGRISKAADAGVREALYTAAHALLRRSDAWSTLKAWGLRLAKTRGHRRAVTAVARKRAVILHQM

SEQ ID NO: 170879 - protein, 320 aa, unidentified
MQTPTEVLNIGADVAKDEIVVACSQGSFPVRKLANQRSALLAFLKDLPAGSRIGMESTGAYHELLADAAHKLGFVVFVLNPKDARHYAKAVGLRGKTDRVDAELIARMVAHEHTKLHPWIPPTAEQREMARLIKRRAKLSSLRQALAMSLKGLEGFATDLKALRARFDQVLVRIDQRVKALVEASPDRKQHVTHLRTICGVGPVVSAALVNTLERVPLKSADAFVAFTGLDPRPDDSGQHRGKRRLSKRGPAELRRLLYVAAMSAKKKQAWKPLFEHYRAKGLSSTAALVIMARRIARTAWSIYTYKTDFDPARLTKSLT

SEQ ID NO: 170880 - protein, 343 aa, unidentified
MQTITTIGLDIAKSVFQVHGVDAGGQVIVRRQLKRRYVLTFFQKLSPCLVGIEACASAHHWSRELQALGHTVRLMPPAYVKPYVKRQKNDATDAEAICEAVTRANMRFVPTKTPGQQSGLLLHRARHLFIRQQTSVINAIRAHLAEFGIVAPVGRHGVEELLNVVADPNDKRVPEIARACLSAFGAQLRRIKEQVLEFDRLIRAWHRSNELSMRLDEAPGVGPVLATALVAAVADPKSFRSGRNFSAWIGLVPKQHSSGGKNRLGNISKQGDRYLRGLFVAGALAVIRYAKIHGTTHRPWLTALLARRPTKVAAIALANKIARMVWAMMARGERYKEPFALAR

SEQ ID NO: 170881 - protein, 411 aa, unidentified
MSAGVITAVGIDVSKYKSTVAARRPGGEVALLPFDVGHDVTGIKNLLEKLQGLDDEGSEIRIVMEHTGMYWRPVALALQQAGFFVSVVNAILIHNFSDNSLRKVKTDKADALKIANYGLTFWMDLREYSAEDETRQMLKIQNRLYERTTTTGTMLRNGLISLLDQTFPGANKLFLNEGRNSKGHVKWVDFVIRFWHKECVAALSLHTFADTFQKWCKRTGYRFSTSDAERIHTAARNAVATLPKNDSTKLLITQAAISLNTVYDSLHAFRTEMNRLASLLPEYELVMGMEGVGKITGPQLMAEVGDVHRFSHKGALVAYAGVDAPPYQSGTFDAKNRHVSKRGSPHLRKVLFEIASMILVHGNPDNSVFCFMDKKRAEGKHFYVYTVAGAAKFLRIYYARVKEYLNTQEIA

SEQ ID NO: 170882 - protein, 338 aa, unidentified
MKTYAGIDLHSSNNYIGVIDAKDKRLYSKRHPNRIEDVLKVLGKFKASLQGVVVESTYNWYWLVDGLMDQGYRVHLANPNAIKAYDGLKHTDDKWDSFWLAHMLRLGILPEGYIYPKHQRSIRDLLRRRLMFVRQRTSQILSLQSMATRNRGLNFSGAQVKRFRDEFIEKMFADPHLVFTAKRNIETIRFLDRIVGEIELEVASQIKLKKEFIKLLTTPGIGNILGLTIMLEVGDIRRFDKLGNYSSYCRCVESKKISNGKKKGENNQKNGNRYLAWAYVEAANHAIRCCPKAQRFFQRKMAKSKRVLATKALANKLTKATYYIMRDQVAFDEDKLFH

SEQ ID NO: 170883 - protein, 453 aa, unidentified
MPKRTSPGTKRKKHSRILEQINHSAAGIDAGAEWHFVAVPEERATPSVRKFATTTGGLYALADWLAAAGIDTVAVEATGVYCMPLLDVLDGRGLAVVLAKPASLKSVNDRRKTDMLDCQWIQMLHGFGLLRASLRPTQMVAAFRTYSRQRRMLIEQASTAIEHMKKALTSMNIRVELAVSDITGRTGMHIIRAIVAGERDPMVLAGMRDERCAKSEQAIAEALLGKYSDEQLFALDQGLRTWDHYQLLIAECSQRLAEQSNAFEKKADRKNLPKARQPERERKNGLPLDSRAIYYEILGQDLTQIDSIGTSTTCAFIAEVGTNVDAFPSVKHFTSFLRLSPGSNISGGKNKSGKNRRTTNRLATALRLAAQTLTRSQSALGAFYRRKRAQLGAEKAITAAAHKLARMIYFTLKEQRPYLDPGPDHYLQRHRERIIRSMEKRAQQLGYQLVRAA

SEQ ID NO: 170884 - protein, 362 aa, unidentified
MQSTPLVAFDQHAATTVAAVLLPGQRTPALHTLTSDSPTILRFVKRLQREVGPVRCCYEAGPCGFELQRAMTAQDIPCDVIAPALIPRRAGDRIKTDRRDASQLAVLYRAGALTAIHVPTEQEEAVRDLLRCREDIRTDLLRARHRLGKFLLRHGRRFTATKSTWSLRHHAWLRAQTWPLPALTQTHEAYLRAVDEAVARLRAVEAQLQELVMLAPLRTSVQRLRCFRGMDDITALTIAAELGDARRFPSARGLMAYVGLIPSEHSSGPRRVRGAITKTGNAHVRRVLVEAAWHYRHHPFIGKQLRRRQQDGPESARITGWHAQQRLYRRYQRLAARGKPKQHVVTAIARELTGFVWAALTQ

SEQ ID NO: 170885 - protein, 334 aa, unidentified
MQFDFFIGVDVSKATLDFAVLKANQVLFHQQVSNDKKGITAFCKQLRQQTKAGIGQCLFCMEHTGIYNNPLLKVLHQQAAPIWVERAAHIQESMGLTRGKTDQVDARRIALFAYKNRDEARLWKPKRPVMAQLDRLTAQRARLVKVIKMLQTPLTDSAGFVDKADRKAAQQACKASLQALKADLKLADKAIAELAEQDPELKRLFERVTSVVGISQITAAQIILTTNEFQDITDPGKFACYAGVVPFERSSGQRKGRPQVSQIANKKVKSLLHLGAMSAIQHCTQLKAYYQRKVSEGKNKMLVLNNVRNKLVLRVFACVREDRNYDKNYTPALV

SEQ ID NO: 170886 - protein, 407 aa, unidentified
MEVLHPRCAGLDVHKDTVVAAVRCVSAPRHHEVRRFATTTAGLLALAEWLTAHGCTHVAMEATGVYWRPVWHVLEAAVTLVLANPQHIRTVPGRKTDVGDAAWIAELLAHGLIRGSFVPPAPIQVLRDLTRTRKQLVREVAQHTLRIQKVLEDANLKVASVLSKLLGKSGRVMLDALIAGETDPERLAALAQGRARTKRLQLVEALRGRITPHHRGLLRLHLQLVDALQAALREVEAAVGDALAPIQQRADLLTTMPGVSDLVAHVIVAEIGVDMTRFPSAAHLVSWAGLCPRNDESAGKRRSTRVRHGAPWLKTTLVTAAWAAVRTKGSYLRAQFLRLKARRGAKKAILAVAASMLGACYYMLRDGVAYRDLGADHFARHDKLKTLGRLVRRLHDLGYEVELKQVA

SEQ ID NO: 170887 - protein, 341 aa, unidentified
MQITTIGLDIAKNVFQVHGIDGDEKVVVRKQLRRNQVLQFFDELPPCLVGLEACATSHYWARELARLGHEVRLMPAKDVKAYIKRNKNDAADAEAICEAVRRPTMRFVQIKSADQQAQLMQHRARDLLMQQRTQLINAMRSHLAELGIIAPQGREGVKELLAIIAHDDNRHLPVDARASLVVLAAQLQALQTMIGAIEKRIVKQHRASKESKRIQTVPGIGEIGASAIAATVTNPRIFRSGRDFAAWIGLVPRQMSTGGKPKLGPISKQGDRYLRRLLVVGAISVLRQAKLHPGKFPWVTQMLARGPFKVVAVALANKMARTAWALMMSGKTCRAARYAAA

SEQ ID NO: 170888 - protein, 443 aa, unidentified
MNPLTPYDLVIGLDRSDKKADLSVIDIHTDQRRTVVIDTAPEALWQWLLQLRQQHPQARVGLCLEQPAVHLISFLEAYQWITLHPINPITLQKYREAFVTSRAKDDTKDAEYLADLLLSHQAKLPVWSPEDSATRAVQQLVFHRRAVVDERTALSNRLIALLKQYFPQALTLCGEDLWRPLATAFLLKWPSLQAVQKAKHATLKQFYHLHGSRSAKLLAERLALLAKAVPVTDESAVIESFVLRVQLVCRQLQLVQQSVTAFDRQIAAAYAAHPDRALFASLPGAGPVFQPRLLASLGSQRERFDSAASLQCYTGVAPVTKKSGGSGYIHRRYLCPKFHRQSFHEYAKESILWSRWAAAFYLQQRTKGSPHHTAVRALAFKWQRVIWRCWQDRRPYDERIYEAALRRAGSPLVALLDRVELGKSPWKNPVKKTKKSLVGLPQR

SEQ ID NO: 170889 - protein, 383 aa, unidentified
MQPTRANDFTPEVEVFAVALELSSKSWKIALHDGKREKPAIQTVSGETAAGRLNETVQEIEKFKAKWGLAAEVRTVVLYEAGQDGFWIERALSKLGYEVVICDPASIPVERHKRRAKTDRLDAIKLVLTLRGWLRGEYDRMHVIRVPTVEAEAQRHVVRDRGELQKETQQHRDRIRKLLRTVGCWDGVGGDVGARLNKRELCCYDGDPLSAQLQQRLEQECKRLELAQQQLAALEKGMAEQLPPEVRQRIADLERLKAVGPVGATRLVLELFWRKFENRRQVGACVGLVPQPYDSGESRVDQGISKQGNRRVRALLIEMSWFWLRYQPDSVMTKWFARRTQGGQNKRGKRIAIVAVARKLVVALWRYLEHGIVPEGAQLKRAA

SEQ ID NO: 170890 - protein, 434 aa, unidentified
MDEVTDEPLYRDRVCGIDIGKAGMVATIRVPSDASPARRMAETRSFGTTRREVLALADWLRAWQVPAVVMEATSDYWKGPFYRLEAEGFECVLADAKQVKNLPGRPKRDPSDSRWLAACFERGAVTPCFVADPEFRVIRLHTRYRRDLIGERTRDKQRAEKLLESAAVKLSSVVSDLHGVTGRDIMNHLITGERNPKVLAQMARGRARAKIGQLEAALDGAEFFTGHHAALLKLMLERIDRLAAEIAALTEVIEQLLAPYEEQLAQAESMPGWGRRTAQDALAETGPDMTRFPTGAHLASWAGRTPLDNSSGSRTRRSKSKKGNRYLAAVTGETAVAASKTQTREGARYRRLARRRGKLKAQVALGNTQLKVYHKLLSTPGLRYQDLGPDYYDRQRGTRRQIAHHVAKLGALGFEVTLCRIPGPDPGPETHQAA

SEQ ID NO: 170891 - protein, 338 aa, unidentified
MIVVGLDVHKQSVTAVAVDEAGRPLSEKVIEVGSVELLGWAVALDRERLWAVEDCRQLTPWLERQLLGVGEELVRVPPKLTVPERRAGRTRGKSDPIDALAIARAALREPDLARPRAGEQVLRDLKLLVDHRDDLVDQRRRCQQRLRWHLHALDPTFEVPLRKLSRPSELERVGRWLARQPKQMQMRLARELVRSCRSLNRTITALDQELEQRAAQLAPALLELPGCAAVTAAKLLAEIGPIDRFRSDAQLARHSGVAPLEASSGRTQRHRLDRGGNRQLNAALYRIAITQARYHPPARDYLDRKQAEGKSRREAIRCLKRLLIRAVYQSLKTSPTLT

SEQ ID NO: 170892 - protein, 434 aa, unidentified
MQVTRGMRRQSMKLARRRDRLPADALIAGVDLAKRESVVVFSRASDRGRLGRLTITTDRAGVERLIARAGELRERHRLGPLVVAMEPTSHFWKLIARALDAAGVRYVLVQSFVVATSRELDNLTRDKTDIRDAGLIADLAAELRFTDTRLPEGPWAELELLAEARDARSVERRSALQEQRALLELVWPQLLGACPDLDGSHLQALLRSGLTPQQIAGLTEARFLALLRRNHPRRFLRWMGRRLRAAAMGVEPTPETLGGTLRWRLAGERVALADAAIASLDRRMAELLEATGYGRLRGQIKGLGDVTLANLLALAGDPARFDDARCLVKLAGSNPTERSSGERQASGGIHRRGRSTLRLIAYQAAVSLVRNNHDFGARFVELTADGRPRRLAKKQAYVAIANKLLRTLWSLAVHGEGYRSEVARGEVRPNAIAA

SEQ ID NO: 170893 - protein, 411 aa, unidentified
MSTSVKRYVGLDVHKHYVVIAAVTAAHEVVLRPQRVNLTTLPAWARKHLRPSDEAVLEATSNAWYVHDLLEPLVSRVVVGVTQQIKLIAAALVKTDRKDALTLARLLAVNMIPPVWVPPQPVRDLRALINHRQRLVQAQTRLKNRLHSVLHRQQVVPPEGEVFALANRPWWLALDLPAGEKLRTRQDLTQLEQLVPLIAEVDAELHRLSLADPWADQMPYLVQLPGIGLLTAMTVLAAIGDITRFPTAKKLVGYAGLGARIHSSGETHYTGGITKQGRRELRTSLIEAAWVAVRYSPFWQAQFARLVARKEPNKAIVAIARMLLVVIWHVLSQQVADRHANPAKVAAYFLQWARQIKAPTQFGIRTATFARQQLDKLGLGQNLMTVKLGCLYKLPPSSLLPTTKDNAAHTA

SEQ ID NO: 170894 - protein, 411 aa, unidentified
MEVIYKRCCGLDVHKEIVVACLLIREGGKVLKEIRTFLTMTVDLVVLHDWLKAHQVTHVAMESTGIYWRPVFNLLEEDFTVLLVNAAHIKAVPGRKTDVKDCEWITDLLSHGLLRGSFIPPEPIRDLRDLTRYRKSLTDERVREVNRLQKFLEGANIKLSSVASNVMGVSGRAMLEALTAGSTDPQVLSELAKGRLRKKLPELKKALEGRFRAHHRFLVAEILTHLDFLDEAIERVSQEVSNRIAPFSKKVELMDLVPGINQRVAEGVLSEMGVDMSCFPSHGHAASWTGLCPGNNESAGKRKSGKTRKGNQWLRRYLIEASWAAVRKRGTYLSALYYRLVPRRGKNKAIVAVAHALLVMIYHILKHQVSYRELGADHFNKLNAAYVQRHHVKRLESLGFKVILEPLSEAA

SEQ ID NO: 170895 - protein, 345 aa, unidentified
MEHTTIAVDLAKSVFQVAVSHRIGQVTSEHRLRRSQMMPFFAQQPAARVLLEACGSAHHWARELQRLGHTPRLLPAHDVHRYVRRNKTDRDDAKALLEADRNDEIRAVPVKSIDQQAIASLHVFRATWLSTRTARLNALRGVCREFGITIPVGAKRVIPAVRAQLTSDGPVPPVLHPALEALCAEIATLEAAMVAIEHQLAALADQMPDVTRLQTIPGIGLLTASALVARIGDASRFPDGRHFASSLGLTAKEDSSGMQRRLGGISKRGDVYLRTLLIHGARSVLWNATTKRDPDPLRAWALRTQDRRGHNVATVALANKLARIVWAVWTRRCNYDRALPRPLTT

SEQ ID NO: 170896 - protein, 374 aa, unidentified
MKDHSEAFVGLDTSKLRNAVAVAEAGRTGEVRFLGEIENSAAATAKLVRKLAAQHGHLTFCYEAGPTGYGLYRQITSLGHACIVVAPSLIPRRPGDRVKTNRLDALDLARQLRAGELTAVWVPDGRHEAMRDLTRARGAAVEDLRAKRQQVSSFLLRQGLHYPGRKTWGKAHMRWLASRTLAHPEQRIAFEEMMLTVRQAQERVERLEQAIQAALADWSLREVVTALMAMRGLDTIAATTFLAEIGDLSRFRTPRELMAYLGLVPSESSTGDRVQRGPITKAGNRRARRILVECSWSYRHPPRVGKDKQEKVAAAPQAVREIAWKAQHRLYKRYRALVRKGKLPTVAITAVARELAAFIWAIGREVATAGAVAR

SEQ ID NO: 170897 - protein, 353 aa, unidentified
MMVYVAVDVGKRRCVTCVMGEDGSILDASSYPNTMLDASHYARQTVEKYGECEAVVESTGNMCMKTYDAFESNGVEVKLANPVKTRAIAEARVKTDKLDSKVLAHLLRADLIAECYVPSRDVRLSRALLTHRVNITQEETRIKNRIHSLLDKYDLKCEYDDIFGAHGMRWLHTLQLNGHDHEILQSLLRQLEFLQDEEEKANTTIAKDALHSQYVPIIMSMTGFDYHSASVLAAYIADISRFPSPSQLVSWVGLCPSVYQTGESLYMGKMKSGSRKVKWIMIQAANAAVRTDPRMRTFYERKLRRHHHNVAVTHVANKMLRIIWHMLRENRLYNERKEQLYQSKLKRMTHTAQ

SEQ ID NO: 170898 - protein, 335 aa, unidentified
MDRQYVGLDFHRRRSVIVRKNAAGEKLASVRVASDPLAIAAVIADAGPDPEVVIEATYGWYWIVDWLQAQGATVHLANPSGLNWGTRRVKNDERDAIDLVDMLRLGRLSEAWIAPPATRELRELVRYRAKLVGLRSGLKAQVHAVMAKEGVLPQRDDMFGPGGQRLLDEMILGDAYTIRVESLRDLIELYDREVVMLETQIRSRLRGHDGYRAIQQINGIGPTMAAILVAEIGDVSRFRSAPALCSWAGLTPKHRESDTTVHRGQLTKQGSRLVRWAVIEGTVRYHGGGKLAADWQRIAQRRGKHKATVAIARKVLTLVYYCLRDGEIRCLAKTA

SEQ ID NO: 170899 - protein, 450 aa, unidentified
MAQSKKRKHRKLERSLPVMRVNAAGIDIGATEIFVAVPADRDGETVRSFPSFTQDLHALADWLQQCRVDTVAMESTGVYWIPLFQILEARGIQVHLVNAQHVHHVPGRKSDVLDCQWLQYLHSVGLLRASFRPEQAVCEIRSLMRHRESLVQMACVHVQHIQKSLDQMNLQIHHVISDITGVTGLAIVDAIVAGNTNPTELAQLRDYRIRASLETVTKSLVGDYRPEHIFTLKQSLKAYRYYQQLIADCDQEVQQRIESFETKDGGSASTGDVTSSSNSATAPFDLRTHFERIFGVDLTAIPGFDILRVQTIFSELGADLSDFPTPASFSSWLNLCPKDGTSAGRTIRGPKIKTKNRVTQVFRMAGQSLHNNKSFLGDYYRGQRARFGGMKAVKNAGHKLSRIFYHVVTTRQPYDETIFGKLEARHQQRRLRKLQNIAKQMGYSLVPTPA

SEQ ID NO: 170900 - protein, 423 aa, unidentified
MNRLHYELHVGIDLGQWLHQACVVDANGELLEERGFEHSVDGLGTTLAWLLSLAGKDAERIAVAIEKPHGAVVETLLESGVAVFAINPKQVDRFRDRHSMSGAKDDRRDAFVLADALRTDGHRFQRLQLPPPEMVALRELLRTRDQLVKNHVALSSQIRDLLARCWPHLVTLAPKDKALDAFFCELLQLFFDHHPTAELSLQNIQKLVHQHHIRRLQPEHILEVLRKTPLRVAPGTTQATSAHLNLLLHQLLLVRQHRRDSDQHLERWFKQLQPTSDQPYSDAAILASLPGVGAVVLASVLSYAHDPVRLRNLDAFRSLGGIAPVTKKSGKRGQQRPQILMRRARSLPLNNALHHWARIAVLRDPHFREHYHRLRAKGHSHARALRGVMDRILAIAVAMLRDQTLYDPARRVGGHDVRKKTFS

SEQ ID NO: 170901 - protein, 402 aa, unidentified
MNAVGIDVSKSKSVVAIMRPFGEIVSTPFEIKHTASDIHSLIELINSVEGESRIVMEHTGRYYEVLAHQLLEANLFVSAINPKLIKDFDNDSLRKVKSDKADAVKIARYTIDKWQNLKQYNVMDELRNQLKTMNRQFGFYMKHKTAMKNNLIGILDQTYPGVNTYFDSPARSDGSQKWVDFASTYWHVDCVRKMSLNAFIDHYQNWCKRKKYNFSQSKAEEIYGKAKELVPVLSKDAITKLIIKQAVDQLNSASTTVESLRTLMNETASKLPEYPVVMAMKGVGTSLGPQLMAEIGNVSRFTHKSAITAFAGVDPGVNESGSYEQKSVPTSKRGSSVLRKTLFQVMDVLIKTHPQDDPVYQFIDKKRAQGKPYYVYMTAGANKFLRIYYGRVKEYLSSLPES

SEQ ID NO: 170902 - protein, 338 aa, unidentified
METKKQTINWFLGIDISSTTLDVSILTSGNEKEFAHKRFSNDVPGFKEILSWLKSSGVKVKQSWFCMEHTGIYGWELCCFLSKKKLSYTMYSPLHIKRMMGIVRGKNDKADSKMIAQFAYLYRDRLKPSEMPSKTLISLRILINHRQSLVKRKSELKQQSHKIDRMELIVNVSFVARCITREIDWLEIEIEKTEQEMVQLINQDNLVKTNFDLLNSVPGIGLVVASSFLVQTKNFEAFETGRQLACYTGSAPFEYQSGSSIRGKTKTHPIANRQLKALLTNSAYAALRYDPEIKTYYERKTSEGKAPMSVINAIRCKQIYRMFSVVKRGTPFVKSSQG

SEQ ID NO: 170903 - protein, 338 aa, unidentified
MIYVGLDVSLNSVAVCAVDETGKLIREGTTLADAPSIVQYLEPWAGQVERVGLEAGPMSEWLTANLIELGLPAVSLEARQVKAALSAMPVKTDRNDARGIAQVVRTGWFKPVHVKSIGSQRARTLAAARKHIIRSIAATEQVIRGLRPLGLKVGIVSRTLFATRVRELVSDDALLEAIMNPLLAGREALMREYARLHRLVLKAVRSDPACRLLMTMPGIGPVSALTFGSTVDDPRRFLHSQSVGAYLGLTPRRYQSGEVDRVGRITKVGDGETRTALFEAANVVLRPSTRWSPMKAWAVRVAHRQGIKRAKVALARKMAVVLHRMWVDGTEFRWTAVA

SEQ ID NO: 170904 - protein, 388 aa, unidentified
MLPSIHHASTKQTASDRLDPTLYASLELSRATWLVTCLLPERDRISKYSTPGGDGGALLGLLERMRVRAQQLTGRPVKIVVIQEAGLDGFWVHRLLEANGIESHVVDPASIAVPRRRRRAKTDAIDGETLLRTLLAWTRGEPRVCAMVVPPTPEEEDRRRVCRERAILLQERIRHTNRIKGLLAGQGITDFNPLHKDRRQLLAAARTGDGRPLPPQLKAEILREIELIELLLRQIADVEAAREVLAGPKAAKTPSPVVLLEQLKGIGPEIASVLYLEGLFRRFGNRRQLAAYAGLAPTPWRSGTIDREQGISKAGNPRLRSTMIELAWLWQRHQPASALSRWFHTRVGNERGRIRRISIVALARKLLIAVWRYVTQGEVPEGAVLKAA

SEQ ID NO: 170905 - protein, 343 aa, unidentified
MKLTRVGVDLAKQVFQVHGVDRAERSVWCKRLKRNRWIEEIEQNVEAGAEIGMEACGGAHHWGRLLQSKGYRVRLIAPQFVKPYVKSNKTDANDAQAVCEAMSRPSMRFVAVKSIEQQDIQAVHRVRASLISERVAKANQLRGLAYEYGLVAPREIAALRRAVPAWLEDATNGLTVRLRTLLSGLYADLQALDERVRELDKEIRAIGQENEAVGRVQQLRGIGPLIASALVAMIGDARQFKNGRQVAVALGLTPRQHSSGSKERILGISKRGDSYVRTLLIHGARSALRTAAGKNDRLSRWALALAQRSHANVAATALANKMARVAWAMLKHGTTYEPNGLAA

SEQ ID NO: 170906 - protein, 450 aa, unidentified
MTVKQKEKFQGFPVVHPRAAGIDVGNTSHWVAVPLDVSDSTVREFGTFTADLQTIADWLIGCGVTTVAMESTGVYWIPLFELLESRGLKVCLVDTRRLKSVPGRKSDYQDCQWLQKLHTFGLLSSAFRPDDQVVRLRSYLRHRAMLIRYASHHIQHMHKALQQMNVKLANVISDLTGTTGLAIIRAILGGERDPQKLAAMRDPRCRNNEATIAKSLEGNWREDHLFELAQSLDLYETYRQKTQQCDLEIERCLGEFPDLSDGQPLPPKKDHGGHRNAPTFDARTYLYRICGVDLTVIDGIEANTAMKLLGEIGTNIRRWPTVKHFCSWLGVCPKNKKSGGKVLSSRSRSSGNRAAAALRMAVQSLEHSASAMGAFYRRMKARLGAPAAITAAAHRLARTIYALLRYGQPYVDQGQEAYEQQYQKRALENLERRAHKLGFRLTPAKALSPA

SEQ ID NO: 170907 - protein, 319 aa, unidentified
MSDQVRTSYVGVDVSKERLDVAFRPAGGHCRFPNDPGGIDALVSRLAEERPALVVLEASGGYERPAAAALADSGLAVAVVNPRQARDFAKATGRLTKTDALDAQSLARFAEAVKPEPRALPGEEALLLGEILDRRRQLIGMLVAENNRLPVTASEPVRRRIRAHVRWLEKEISRTDGELKEAIERSPAWRENEALLRSVPGVGPVLAGTLLAELPELGTLPHKRLSALVGVAPFNFDSGTLRGKRMVWGGRARVRSTLYMASLAAARHNPAIRAFYERLVAAGKPKKVALVACARKLLAILNAVIRDRVPWSPTHVLSP

SEQ ID NO: 170908 - protein, 448 aa, unidentified
MTQIRGFVTGGVDAHAEAHHAAALEEQGRLLGVAAFPATAQGYRQLLAWLEGFGQVGLVGVESSGSYAAGLVRFLAARGVALVEVNQPHAHTRYRRGKSDAVDAEAAARKALAGEARAIPKERGGIVESIRQLRVARAGAVKAHTAALNQLGQLIVTAPAELREQLAAAKTSAGKVSLCLRLRADRACLHEPAQAARLALRSVAGRARALERELELLDQKLGELVATAAPRTVSLLGVSTQNGGQLLVTAGENIGRLASEASFASLCGASPIAASSGRTTRHRLNPGGDRQANRALHMVAVCRLCHCPRTRAYAARRTAEGLSKKEILRCLKRYIAREVYHSLRADLAALSPRAAATPKRRARRAVTITCSGGPIGITRTRAGSPARTAKDDAGVAGPGPYPARKRQQRAQSPEGRRPAPSAQRLTGPAAAATAPNPGTKSHQFVDAP

SEQ ID NO: 170909 - protein, 345 aa, unidentified
MEHYVGIDVSLQLSSLCVLDSAGKVIREAKVASEPEALVAFLRALELPIARIGLEAGPLSQWLYDGLHKAGFEAVLLETRHVKAALSAMAVKTDRRDARGIAQLLRMGWYRPVHRKSVPSQEVRALLAARKQLQIKVMDLEQTLRGLLRGFGLKVGDVSRGKLAARIRELAAGHPMLERIVEPLLTARETMWHEFAKLHREVLVIVKADQVCRRLMTVPGVGAVISLTYRAAVDDPGRFAKSKSVGAFFGLTPKRYQSGETDVTGGITRIGDASVRTALHDAANVLLSRVTRFSTLKRWAMAVAQRRGMRRAKVALARKLATVLHRIWADGTDFVWGKDPTAAAA

SEQ ID NO: 170910 - protein, 355 aa, unidentified
MDSLKYVGLDVHRDTISVVVLDEGGKLVMQSILATHAAALLDFVRGLRGTVHLTFEEGTHSAWLHDLLARRVERVVVCDPRQNALLKAGNKSDRIDARKLAELLRAELLSPVYHGENGTVTLKHLSRGYAALTEDTTRVKGRIKALYRSQAIASAGKKAYGRRHRGQWLAQLTQAGMHRRAELLYEELDALLSLRREARRELIVESHKHDAVKLLCTVPFLGPIRAAVLIARVQTPHRFRTKRQFWAYCGLALETRSSADYHFQEGQLVRARKPVFIRGLNLNHNHDLKNLFKGAATSASAMPGPFRTFYENLLVKGMQPAMARLTLARKIAAIALCVWKKGEPFQAEYVKPQAA

SEQ ID NO: 170911 - protein, 394 aa, unidentified
MLFVGIDVSKSKHNCYIVDFEGTIYEDNLQIKNNIQGFKTLSQTITSICKNNNLIKVKIGLESTGHYSTNITNYLYDEGFEVTNFNPIITNNKRKGNTLRKNKTDITDAKVIATMLFTDNSKSYSPITISYQIIELKSLTRYRFRVVRQRSKAKQSIVRLVTIIFPELTSLVWSLHQKSIQALLLELPTAKDIANCHLTKLTNLLKKYSKGKYSKDKAIKIKKLAAESIGSFNRAIAFELQQTIKLIQYLDTEIKTIDQKIKEIVDEIDTPLITIPGIGYTLAAIIIAEIGNIHRFVNPAKLLAYSGLDPSVYQSGQYNASHTRMVKRGSKYLRWAILQAVKTVAMRDRTFKDYLNKKLAEGKHYFVALSHAGKKLIRVIFYLLKNNTTFVAQS

SEQ ID NO: 170912 - protein, 426 aa, unidentified
MNDKQTTEYVALVGLDWGHQSHAIAIQPAGGSTQTLTLEHSAESLHQWLDQLEKTYGSKPVAVAIESCKGAVVYALLERPWITIYPIHPATSSRQRSAFRPSGAKDDMPDALVLLFILQHHLERLRPLQPDDQATRMLARLVEARRKAVDRRSLLSNQLKSTLKDYFPQALDLVGEDLTIPMALDFLDKWPRLTDVQAAKDLTLKNFYHRHNVRRAERIQSRLDLRRSARLLTRDAAVIEVSVRVVRLLVDELRVLAEHITEFETTIAEGFAEHPEKNLFSELPGAGPTLAPRLLTAFGTARDLFPDAASMQRYFGVAPVTEKSGGRVWIHWRWNAPTFTRQTLVEWAGQTVVFSAWAKAYYEQQRLKRTGHNAILRALAFKWLRILWRCWQKREAYNEQKYLQQLEKRRSPIAARARQLALEMAA

SEQ ID NO: 170913 - protein, 417 aa, unidentified
MDAQFRWFVGLDWASTLHRVCVLDGKGERVAERDVSHGGAALAEMCAWLCQVTGAAPAQIAVAIETPRGPVVEALLEHGFAVFAINPKQLDRFRDRFSLAGAKDDSRDALVLGHSLLTDRHAFRRIALEDPLVIELREFSRMYDDLKQEQNRLTNRVRDQLWRYYPQMGAFSEDFASDWFLDLWHAVPTPDQAARASEQAIARILKDRRIRRFDAATVLGILRQPPLTVAPGTIAAATAHIRAVAARMRLVNAQIKEAERRLDELCAAIEASAETVPGQICEQHDIAILRSCPGLGRINVAVLLAEASEPLRRRDYHALRALTGAAPVTKRSGKKCVVLQRHACNTRLQTAVYHWARVAVQHDPISRERYAALRARGHNHARALRSVADRLLYVLCTLLERHVLFDPSYGAPSTAAA

SEQ ID NO: 170914 - protein, 317 aa, unidentified
MTAPACFGGIDVAKATLDVAVRPGGERWSAPNDEAGISALVARLRPLAPALIVLEATGGFETAIVAAVAAAGLAVVVANPRQVRDFARATGQLAKTDVLDAQVLALFAERVRPEPRPLPDAAVQALDAFLTRRRQLLEMLTAEKNRLGFAAAPVRRDITQHIHWLERRLRDVDADLEQAVRSSPVWRAKEDLLRSVPGVGPVVSRTLLGELPELGTLTHKQIAALVGVAPRARDSGTLRGKRMVWGGRAPVRAALYMGALVAARHNPVIRAFYVRLRAAGKPAKVALVACMRKLLTILNAMLRTGIPWRPVGAGATS

SEQ ID NO: 170915 - protein, 363 aa, unidentified
MTSITTTTGPVTGGVDTHGETHHAAVLDQVGRELGDREFPTTPSGYRALLGWLAGHGQLDRVGVEGTGAYGAALARHLRAGGVTVVEVDRPDRKARRTSGKSDPLDAYAAARAALSRRATGAGKSRDGRVEAIRALRIARCGAVKARAAATNQLKSLLISGPAELREQLRHLSTTVLITTCANLRPTNDLADPVQATKAALRRLARRHQNLSKEITEADVDLKNLVTAAAPCLLALHGVGIEVAGQLLTTAGDNPDRLRSEAAFAHLCGVAPVPASSGRTHRHRLNRGGDRAANNALYIVVLSRLCYDARTREYVDRRTKEGLSKPEIIRCLKRYVAREIFTLLTARTASEQSHQVLPMSTVA

SEQ ID NO: 170916 - protein, 401 aa, unidentified
MVKSALIAPAAREEVAILFVGLELSKKTWLIGLYAPELGKTISRHKVDGGDVNAAIGLITTAKQRLEKLGRPVRVASVYEAGYDGFWLHRRLTAVGIENRVVDAASIPVDRRSRRAKTDRIDLEMLIRMLLALERGETRICRVVQVPSPAEEDAKRQHRERATLVTERTAHGNRITGILMALGIRGVNPRGRDFVTRLEKLVTGTGEPLPPHTKHALVREYERLGLVEHQIKEIEATQIAAIRAAAAKLSGQRQEGTGVADAAERSAAQAAALIRFKGIGQISAVPLCREVFYRGFNNRRELGGYVGLSPSPYNSGSMRVDQGISKAGNWRARTIAIEIAWLWVRHQPGSAVTKWFVQRVGDAKGRIRRIAIVALARKLMVALWRYLTTGLIPEGAVMTTA

SEQ ID NO: 170917 - protein, 386 aa, unidentified
METDVGKLAERSVASFPTAAGDRSFIPRSNKTVEKLDRRRFHEISPNSRKSRRGAGRRASSHSQGRDIVMDVAFTSFVGIDIAKRTLDVHVLPERRSLQHSNDSKGRRQLREQLPPPGLCLIVVEATGGYERALVAELIDAGYHVAVVNPRQARDFAKACGHLAKTDRIDAAVLAQFGETIKPRTQAKIPEKQLELQDLVARRRQLVALRAGEMNRKEKATSKLVRKSLQETIDLLTKQIRRFEKQIAALVQSDDEWKQKTQIVQSVPGVGSQVSACLLADVPELGQLNRQQIAALVGIAPFNCDSGQFRGRRTIRGGRISVRCALYMAALTARRANPVIRAFADRLAALGKKPKVILTACMRKLLVILNTMVKNKTHWNPAISTT

SEQ ID NO: 170918 - protein, 465 aa, unidentified
MATDNKPWRNRKERKEWARRLQAEDPGLEVVHSHAAGIDVGNGAHYVAVRPDSDPQPVRRFECFTADLHRLADWLESCGVKTVAMQSTGVYWIPLYEVLEERGFKVYLVNARHTKNLPGRKSDVQESQWLLKLHTYGLLNNSFQPPAEIRILRTYWRQRAEHVRGAATCVQRIQKALTQMNVQLANVISDVSGLTGQTIVRAIVAGERDPVKLAELSQPGIQASREEVAKSLEGNWRPELLFVLQQEIAMYDVYQQRITECDQELQKQLAGFAGTVPLHAPKAEQKRKRIKPAKNAPRFELRGELQRITGVDLTRIDGIDVMVAQTLVSEVGLDMCQWKTEAHFASWLGLCPDNRTSGDKVLKRGTRRVVNRAATALRMAANSLMRSRTYLGAQYRRLRTKLGAPKAITAMAHRLARLVYRMLKYGQQYVDKGAAYYEQRYRQQQFEFLTKRALKLGFKVIPLQS

SEQ ID NO: 170919 - protein, 378 aa, unidentified
MTTQSAIEPAPISESITVIGGVDTHKNTHYAAAIDDHGRLLGHQEFQANDRGYADLLKWLHGHGEVVAIGVESTGSFGATLTRYLTAHTVHVIEVNRTNRLARRMDGKSDRLDAEQIARAVLGQTSTATPKAKSGMVEVIRTLRVTRSSAVKARTSAFNTLSGVIIGAPSPLRDDLVVLSKRTLVNRCLRLRPESENLLELANDPDRLLMAGTKTALRDLARRWKQLDEEVKTLNKQIEALVRATAPKLVEMHGVGIEIAGQFLVTAGDNAERIHGEAAFAKLCGAAPQPASSGRTSGRHRLSRGGDRAANSALYIITIVRMRRHQPTRDYVERRTAEGLSKREIIRCLKRYIAREVYANLPRPDTSTGSAIPLQPAA

SEQ ID NO: 170920 - protein, 346 aa, unidentified
MALFVGLDVSLKTVSICIVKADGTVVWEGKALSEPVSLVKALARRRKHIQLVGIEACPLSEWLYGALVDSGFTTVCIETRHAQRFLSSRPNKTDRSDARGIADMMRLGHYRPVHVKSREAQLLRTTLIARRKFVTHMLAIEQTIRGLLKVYGLKLGQVHRCTFAAKVLALLENKPELRVAIEPLLEARNVMRRQHVVLDRHLSQIARKDEVCRRLMTISGVGPIVSLAFKATVDDPTRFKNSKAVAAHLGLTPRVYQSGELDISGHISKCGDRFMRHALYEAANSHLRISKKWSSLRAWGLKLGKRVGMKKACVAVARKLAIIMHRMWLDESDFQYGRRAATAAGR

SEQ ID NO: 170921 - protein, 463 aa, unidentified
MAAVMIGVDPHKASHTAVAVSAAEEPLGELRVRACVAQTERLLAWAAAWPQRTWAVEGAGGTGHLLAQQLLAAGERVLDVQPKLGARVRLLAAGDVNKNDPNDARSVAVAALRSAGVREVRPDDHAAVLKIWSKRYRDLGRTRTQVACRLHAVLGELIPGGVPKAITTARAARVLRAIEAAGAVEAARCELAAALLDDLRRVDTGIRETRRKLAVTVAASGTSLTRLFGVGPVVAAAVTGDVRDVSRFGGRDHFAACNGTAPIEVSSGQRKVCRLSRRGNRRLNHAIHMAAITQIRHRHSQGRAYYDKKLAEGKTPREALRSLKRQVSNAIFACLQADARRAAARAGGPGGQQGNDSAACAAGSHPRHRLFGQATPGPGPHTTTVASSGRGRAGHSPVAATLPPPMPQVQAERPQRSEDERPGAAARRRPHPAARKAESQGSLVKTQRPKGTSLPAKRTDGTP

SEQ ID NO: 170922 - protein, 349 aa, unidentified
MKKIIIGIDVSKENLDATAICEKNSEFSLQSVAYSKFENRPMGFKRMLVWARKLVEGVDLSQILFCCETTGGYDRALCEYIFAKGYDIWRESALQIKRSAGVQKGKNDKNDSLTIAEYAMRHMDKAVLYVSPDRNIVQIKQLFLYRVQLVKEKTAKSVRVREIKCTAQKSKALSFIIRETEKRIRHLKKEIVECEKRIVEIIDSDENLKRNYSHLNSIKGISIVNATALIVYTNNFRNITSGRKLASYYGVAPFREQSGTSIDRKINTASFSNHMLKSYIIQAATSTITPKGIYRQYYTRMIQKGKHHNLVMNNIANKLLILAMALIKSDRDFEFNHEYIREFNKSKSA

SEQ ID NO: 170923 - protein, 342 aa, unidentified
MEKIATIGLDIAKSVFQVHGIDAAGEVVVRKRLSRARVIPFFAKLPRCLVGIEACNTSHHWARELIALGHDVRLMPAQYVKPYVKRGKNDAADAEAICEAVTRPTMRFVAVKTPEQQSVMMLHRVRLMLNRQRTQLSNAMRAHMSEFGIVAPVGRMGLERLLAIIADRDDESIPADARICLEMLGAQLAVVKEQILENDRRIRSSARETEVGRRLMEIPGVGPLLASAFVASVADPRMFKTGRDLAAWIGLVPRQNSSGGKERLGGISRAGNRYLRQMLVVGAMAVIRHAERHGTKRAWLLQLLSRRATKVAAVALANKTARMVWALMTSGEHYREPVVAHA

SEQ ID NO: 170924 - protein, 349 aa, unidentified
MRKLYVGIDLGCKTCAGAVRDFKGKLLETCGFPTSAKNLIDFVGKQKGEVRVLIEECELAGWVYRTLLPHVQSVEVSDPKHNAWIARSKRKSDPVDAAKLAELLRGGFYRAVYHPEDEEMANFKIAFQHYDQMTRTTTRLQNQVKARFRQQGIMTTGKGVYGLAGRQKVISLVKSEAIAEILRQDFRLLDHAQKERAGARVLATKLSRDLPAVKRLKRIPGVGTISACRFVAYVQNPHRFNTKGLVNFSRLAVVKKESGDSIVCGEHLSREGNGAMKDLSRTVFNGAMRTRRTNGIRNYYLKSVNRTKNETHARLNTQRKILAVMNAVWRDETEYRDDLVTGNGAKRPL

SEQ ID NO: 170925 - protein, 352 aa, unidentified
MARELNTVIAVIGIDIGKNSFHVVGLDERGAIVLRQKWSRGQVEARFANLPPCLIGMEACVGAHHLSRRLRALGHDARLMPAKYVRPYSKGQKNDFRDAEAIAEAVQRPTMKFVATKTADQLDLQALHRVRERLVRQRTGISNQIRAFLLERGIAVRQGLRFLRTELPGILATRCEVLSPRMVHLIENLAGDWRRLDERIDGLSGEINALARQDAGCERLMSVPGIGPIISSAMVAAIGTGDAFDKGRDFAAWLGLVPKQISTGDRTILGKISKRGNRYLRVLFVQAAWVVLIRPKSWERYGLKPWIEAARKRLHHNVLAIALANKLARIAWSVLAHGRGFEARSIATAQPV

SEQ ID NO: 170926 - protein, 331 aa, unidentified
MSTQNYAGIDIAKRHFVIGIHGKDKTKTETNNPKGFTHTIDYLHKHNVGLVVMESTGGLEIPLAKTLHRAGFQVVIANPRCTKNYANGFSLAKTDHLDAKMLADYAQALEIKGLVANMLYIPPSEAEEKLEALVKRRSQLVDIRAAEKNRLEQIHESQQQSVKDLIAHLDKLIAELDKDIDSNADAFGGKGQVLTAIKGIGSTTSATLLSMLPELGTVPHKRIAMLAGVVPPPNQSGDTDKKTGCIGGRMAVRNMLYMAALTASRFEPKIKAFYERLRAKGKPFKVAINACMHKLLRILNARMRDYLASLQTKSERQSEQQSEQQPAPQCA

SEQ ID NO: 170927 - protein, 395 aa, unidentified
MFIVGIDIAKRSHEAIIIAEDGQVVRKAFSFRNNCTGYNLLLEQVRRLTLVKSQIVFAMESTAHYWLALYARLLKDGYAVMVLNPIQSHSLRELYIRKAKTDARDSLIIADLVRFGRCKASNVPQDKILALRELCRSRAYLVDMAADLKRKLIALLDRIFPEYESLFESVFSKASIAVLSKYSTPQKAKNAHLGKLTDILMESSNGHFGEWKAHQLKEAACSSFGIDDSGGVYSTLLGMFLEQILSLTAQADSLEKQISVFFQEFNNPLTSIPGVGTVLAATILSEIGDITRFSSANKLLAYAGLDPSVKQSGEFKSNQNRMSKRGSPYLRRAIWLASTVAVHRDPMFQTYYEKKISEGLHYMNVIGHVSRKMTAVIFAVLRDGQPYQPILQSAG

SEQ ID NO: 170928 - protein, 372 aa, unidentified
MNEPRVPIVRVGVDLAKQVIQVHAVDASGRRVVARAFKREQFFAWCTQLPVGCLIAMEACSSAHYWGRKLRTLGLDARLIAANFVTPYRMEGQSGKNDATDAAAICEAASRPSMRFVPIKTCEQQGVMSLHRVRESLKEERTACINQIRGVLTEFGLTFGKSPKVLRSVLTDVIEDASNELSPTARLVMQRAFEHWRELDEHMRWCDRQIGQHVRSSSAAKRAAKIIGIGELCASAFTAGVGDFKQFKSGHQFGAWLGIVPRQDTSGGKIRLGRITKRGDDYLRTVLIQGAKAAVMTAEKRDDPNSRWLAQLTARVGWQKACVAMANKNARILWAVMTREEGFDPNHVSVKPQAKQSELHHYAAPFGATCTT

SEQ ID NO: 170929 - protein, 351 aa, unidentified
MPLVVLGVDPHKQSHTATALVAGSHQQLASLRIPASPAGYRQLLAWARQFPQRRWAVENARGLGCHLTRWLLARGETVQDVPTTATARVRELSRGRGRKTDALDAAAAAAVAAAQGDAATVQPEDATMVLAVLEERRSNLVGQRTRSVNQLHAVLRELIAGGAPRKLRADRAAQLLRPVCPATAADRTRKQVAWELVAEVRGLDRQLAAIGKRIQDTVAALGSRLPQTVGVGPVIAGRLLGRTGRASRFPTAAHFASYVGAAPVEVASGERARHRLSRAGDRQLNHALHLIALVQARSPGCAGYRYFHGKLAEGKTRREALRCLKRRIADHVWRVMLADEQARQQPELQAI

SEQ ID NO: 170930 - protein, 457 aa, unidentified
MKRDKPSGSRSSDLTTVHVNAAAIDIGATMHMAAVGADRSSEPVRSFGTFTADLCRLADWFAECGVTTVVMESTGVYWIPIFGLLDERGFEVFLVNARDAKHVPGRKTDVSDAQWLQRLHSHGLLRASFRPKGEIAELRAYLRQRERLLDYAASHIQHMQKALTEMNLQLHHVVSDVTGATGLRIIRAIVAGERDPAVLAMLRDTRCHADAETIQKALGGHYRSEHLFALEQALGLYEAYQERAQACDVRIEAVLKALSTLRDRQTVPMPPPRQRGSRQSNGPGFDVRGALYGLLGKDLTQIHGMGPYLALKLIAECGDDLSAWPTAKHFTSWLCLAPSNKISGGKVLSSRTRRSGSRAAALLRLAATTIGRTDTALGAFYRRLSTRTGKAKAVTATARKIAVLFYNAVRHGMDYVDPGASSYEARYRARVIDNLQRRAKTFGFVLQPAGLAVDAVS

SEQ ID NO: 170931 - protein, 428 aa, unidentified
MEVIYSKACGVDVHKSFIVAVICDSTSVTPKYLRKRFSTYNNSLIQFRNWLIDNDCQNVCMESTGKYYVPVYNALENHISNVVVANPKWVKAIKGEKDDNKDAKWIADLFKMGLVRSSYIPHKDFRILREFTRYRFKLTNTKSSEKNRFTNALTVSNCKLDMVFSDIFGKSSKSIIDIILNNDSFSDEDIINCINKNCKSSHEDILSSVKGIQLTNEQKLRINIVKDHIDYLNSQIIKLNDIIDFLVKPYESYIDLLCTVPGIDRNSAIGILSEISNDMSQFKSHYRLTSWAGLAPGCNESAGKKKSVKISRAGVYLKPYLVEVAHCAVKDKTNTYYAKKFEKISKRRGKKRAYIAIARKILVAIYHMFVTGEVWNPTDLASVETPIQDRIKFTKNNFNQSFKQLLSLGLTSEELIELINQNANKLPV

SEQ ID NO: 170932 - protein, 346 aa, unidentified
MMIVGCDFHPSWEQVTWLDMETGETGEQKLVHSEGDAERFYRQLSAPALVGLEATGNCHWLTDLLDELGHEVWVGDAAQIRASCVRQQKTDKRDAAHILKLLVEGRFPRLWVPDREQRDLRQLLVHRHKLVEIRARVKNGLQHLAMNQGVQRKARLWSAAGQQVLRALPLQPWAARRRADLLGLLEALSGQIRPLDEAVQQAAEGNAEARLLMRQRGVGPITALAFVLTIGDVTRFQRSKQVASYLGLIPREHSSGGRQKLGAISKQGNRMMRMLLVEAAHAAIRYDQEFQQEYRRRCHSRPKQVAQVAAARKLAVKLYWMLRSAPPRPQSVAIESSPRVPLVGAS

SEQ ID NO: 170933 - protein, 341 aa, unidentified
MAIVAGFDVHRAQITFDALDTETGEVGRGRIDATPAAVARWVERFEGEIDVAVEACTGWLFVCDALVAAGAAAHLAEPVETRALRGRKRRAKTDREDARWLRELLAEGRLPEAWIPPEHVRQWRSRARLRHTLIGERTQWMQRIQATLFHHGVSGAPDKLRTRAGRAFLDGLQLPDDALERIEIALAMVDAIDAQIAPLERELRQLARRQTGCEALMGLYGMGELTSLVTLCELGDVGRLSASRKAVRMAGIDIGVHRSDRRARAGKLTRQGSPQLRWALYEAALAACRPSSPDHADYLALKTRGLSHTRASLTIARKLARRSYHVLRELGPAALEPIATP

SEQ ID NO: 170934 - protein, 410 aa, unidentified
MDTLIERCAGLDVHKDTVVACVRVPARGGGREQSIQTFGTTTAQLLALRDWLVAHGVTRVGMESTGVYWKPVYYVLEDAVECWLLNARHLHNVPGRKTDVADAAWICQLVEHGLVRPSFVPPKPIRELRNLTRYRKAQIEERTREAQRLDKVLQDAGIKLSSVASDVLGVSGRAMLRALIAGTRDPETLAELARGTLRRKIPALRQALHGRFGPHHALLVGTILAKLEFLDEALGHLSAEIEQVIAPFAAEAALLRTIPGVDRRTAEAVVAEIGVDMSRFRAAGRLASWAGWCPGNNESAGRHGSGKTRKGSKWLHTYLTEAAKAAARTKGTYLGAQYARLRGRRGSARATVAVGHSILVAAYHILDRHEPYRELGPDYFRRRHSREHQTRRLVSQIEALGYHVRLEEVA

SEQ ID NO: 170935 - protein, 406 aa, unidentified
MAAVMIGIDPHKASHTAVAVDGREVPLGQLRVRASAAQAERLVAWAAPWPERTWAVEGAGGLGYLLAQQLVAAGELVLDVQPKLGARVRLLATGASNKNDPNDARSVAIAALRPAAPRAVAAENHAAVLKLWSKRHRDLGRTRTQVACRLHAVLCELVPGGIAKEITAAQASNVLEEIEPSGAVQTARCELAAEFTGDLRRIDAQMRDTKKRLTAAVRASGTTVTDVFGVGPVIAATMIGYVADASRFPSRDRFAAYNGTAPIEVSSGNRKIYRLSRRGNRRLNHAIHMAAVTQIRHPHSEGRAYYDRKLAEGKTPKEALRCLKRRVSDTIYAHLQADARRAAAAARTRGPGGQPGNDSVASAAGSHPAHRLFGQATPGPEHTLRPPNRHTAASPAPAPKKTRQGH

SEQ ID NO: 170936 - protein, 403 aa, unidentified
MEVMHRRVAGLDVHKETVVACVRVMAGRRPTRECRTFATTTQGLLELLGWLTASRVTHVAMEATGVYWTPVWKILSEGDFTLIVANAAHIKQVPGRKTDINDAMWIADLLACELLKASFVPPEEIQELRSLMRTRKQLVREQTRHVQRLEKTLEEANIKLGTVLSDLMGASGRRMIEAMIAGECDPHRLAGLAERTIKASHKALYDALHGRLREQHHFLLQLHLQQWDAIDAAIRRIDQRVAEQIERMDAEAADGQPPFRELIPRLCAIPGVSFLSATAILAEIGRDMSRFPTAGHLIAWAGLCPGQNESAGKRKSSRLRRGAPWLKTMLVQCAWAAKRAKNSYYSAQFHRLRSRRGPQKAICAVAASILTAIYHMVKSGAPHRDLGADYFDRRAPEAKAKRL

SEQ ID NO: 170937 - protein, 424 aa, unidentified
MRFIGLDLHKRSLEVCILSEKGSVLARHSVVCERFALKRFAEKHLEETDKLAVEATTNTWAVADILRPFVAAIVVGNPLQIKAIAQAKVKTDKIDAEVLANLLRCDFLPDVWNPDPITQRLRHLTGVRSALVADRTRLKNRIHSILAGLLTVLPEGGLFTEKGLNWLRKLTLSDDARCTIDRFLRLYSAVETELESLDVVLRTLAYHDDRVRLLMTLPGVAHGVALTLIAAFGDISRFRDGDHAASYLGLTPIVRQSAGKCYRGSITKAGSSTSRAMLTQAAQHAASHPGPLGAFFRRLSKRKTRNVAIVATARKLVTIAFLMLKNNEPYRYAQPERVRAKLRHAERAAEESHPEGSGAKPEVSSESMNRLNRTYSRFGLPTAKSPEEWSPGERRILKESETLTFATQVHATPPKRGRKPKTSL

SEQ ID NO: 170938 - protein, 347 aa, unidentified
MTIVEDKRAVTGGVDTHADVHVAAALDPIGGLLGVQEFPATTAGYARLLGWLGGFGTVALVGIEGTGSYGAGLARHITAAGVRVVEVDRSDRQDRRRQGKSDPLDAVSAARAAQSGRARGAPKGRDGAVEAIRALMVAKRSATGERTRTINQARALILTGPDDLRTRFAKYAPAALVAGIASLRPRPGDTAGYATRVALRELGRRAVFLDGQLERLDELIVPLVTDRAPGLLALFGIGPNTAALLLIAAGDHPGRLRSEAAWAHLCAAAPIPASSGKVTRHRLNPGGDRQANHALWRIVFTRMGSDPATRAYVERRTKEGKSKAEIIRCLKRYVARQVYPHLRPAAD

SEQ ID NO: 170939 - protein, 351 aa, unidentified
MNANAKLTYCVDLAKNKFQVHTFSARGEVLQRRTLTRAKFDELFSSQKTPRGMVVMEACASSHYWARRFMRQGFDARLLPAQFVAKHRIGNKNDGNDADAIWVAHQDARVRSVPVKSVEQQDACAWHRLRERLVCERTQCVNQIRGLLAERGRVAAKGGSGLMALVASADQLSDEVTPVLARMIGMIHQQIEQIDQQLEAIECELHATAKRDPVAKRVMTIHGLGVVTSTAMAAETGGNVDRFADARQFAAGIGVTPKENSTGETWRLGPITKRGNPYLRRLLVQCAQSVIQNCRSRPDAISKFARRLLDDKNKKHNTVVVAVANHLARIVYAVIKHGEDYRPEGRAAARA

SEQ ID NO: 170940 - protein, 353 aa, unidentified
MSKDITLTVDYHDRACVVRWLDHSTGKDQVFTEVLTTKEALSRIVDQARLAAGPKGRVIWIQESTTGWARVQELHGDRVQFRLANVLQMPLPPKGRRRKTDKIDTARIQREHLNGSLPLAYQPPAQWRQLRRLVAYREGLVNRRTAVRNWINRYLAHETWFDSTGLWSPTGQKRLRTLLKHLPRTDALIIVQKLDELSRLEEQLRVALKELSSAYGDYSEAQRLDAIKGVDVVSAISMVARIGPVERFPDADGLIAYAGLAPGISESDQTRRDGRIGGGGTDSHLRHYLIEATVWARKLPRYKPTEERIKKRRGSKVGRLVVARMLIRSIYKMLKEGVAFDAGAPTPAVAAVH

SEQ ID NO: 170941 - protein, 467 aa, unidentified
MAARKQKQRRMSAQVAVDEDYQLRYEVVAGTGVAKESAVVCVRLPPARGRKHRTSHLQAVPATVPAITELAAELTAAGVQMVSMEATSDYWRIWFAVLEEAGLAVQLVNSSQARNLPGRPKTDKEDARWIARLTEMGLLRPSFVPPPEIRALRVYTRHIWDLTADRTRYWQRLEKLLEDALCKLTSVVSKLAGHQTARAVIEKMIAGERDPRALAALGQGKMRNDKLPALAEALSGMRFGPQHAHAAASLLRAIDLLDAELADLQEQVAAQLAAIPASWGVDADGVTGPQAGRAADAAALPAAERLDEIPGLGREAAAALIAEIGLDMSRFPTPEALVSWAGLTPTARQSGPRKGRGKKGHGNTYAKRICVLAAYAAANTDTFLGERFRRLASRPGGGGRKKAGCAVGRSILVIVWHLLNDPAARYRDLGSDWHARHTDRNRKARNARRQLEALGYDVIITLREDAA

SEQ ID NO: 170942 - protein, 346 aa, unidentified
MKYSVGLDVSVKETAICIVDEAGKVVRESKVATEPQAIIAFLNGAEFEYARIGLEAGPLSQWLVNGLAEAGLPVICVETRHMKAVLKAQQVNKSDRNDARGIAQMMRVGLYKPVHVKTLASQQKRMLLTSRQLLCDKLQDMENELRGTLRNFGLKVGVVSAGHFEARIKELVAGQPPLEMIVVPLLTVRRVVREQLAKLDKMVLDQVRDDKLCRRLMTVPGVGPIVALTFRATVDQAQRFARSKTVGAHFGLAPRRFQSGERDYDGRVSKCGDAMMRTALYEAAQVLLTRTRTWSWLKAWGMQVARRRGAKKAIVALARRLAIVMHRMWVDGTEFLWRKEADTAAT

SEQ ID NO: 170943 - protein, 438 aa, unidentified
MPTIAYVGLDVSQDDASVCFLLADGAEPVPRWIIPNTQPGADALATTLAHLAQTYQVDQLRIGMEATGLLWWHLACYLKDAPALAPFAPRIYALNPHLIKTFRANYGALPKSDHADAFLIAERLRFGRQLPSPFQLDARYAPLQRLTRFRCHLAQNLAREKSYFLSFLFLTFSTYGQIAPFGDPFGATSSAVLDEFTTEELAQQELSDLAAYLQAKGRNRFADPDALAATLQRAARDSYRLDKVLQEPLRLLLGTTLATIRTLQTQLKTLDKTIAQELAAIPQTLASVPGLGPVWIAGLVAELGDISRFDDQAAIAQFAGLTWETKESGDFQAEDTALTKRGNSYLRYYLVEAANSVRIHCPEYAQYYAAKYAETPKHAHQRALVLTARKLVRLIDVLLREGKRYRPPEERVRGQASTTPHHARPGRQRRSKRAQALD

SEQ ID NO: 170944 - protein, 499 aa, unidentified
MNPSLNEVEHKNPDLSDNADARNINEGEAMQLKKQKQMTMEFDVVNIPACGLDVHKDMIEACVISEDGERHLKTFDTMRKSLYALKDWIVSLNCFHVLMESTSVFWIPIFEILEEVTGMDVGVGNSRDMKKTPGRPKTDKEDSKWIARLCAVNFILKSFVVGRKFRELREFTRYHKKLVQERTREVNRIEKILQLNGFKLSSVLSDITGVSAMKLLKKLRDIGFVTLEDVIAARNSGVKATAEEIEYAINGKMKLTSRILLGKMLRRIEACDKDIAEVYGMMVEASKDYESEIKIIDSAPGLAELSAMYIIAEISTDLSSFKTANHITAWAGLAPKDDKSAGKSRSSKTKKANIYIKSILIECAWAAIKVRNTRLSNWYWTNVNRLGKKKAITAVARKLLVYIYAMLKSGEMYDDSLDVADTAQRKAQKLESARKLVDNQINIPNELNSRVPVDPSGIDTKAVSLEAKELSLKEAGPKVPRKRGRPKKSEQKPTEGNMA

SEQ ID NO: 170945 - protein, 397 aa, unidentified
MSAVVGIDVGAYKHAAAVCRTGEREAERSVFRLSADRAGFDELDRWLGRQGTVERVVLESSGHYYWLLASHLHRRGYGVAVVNPLQAKYFAKSRLQRSKSDPADARTLAALGMSEEPRVTDPLLGAEAKEAARFWGGLVKEQTQVRQKLLRLVEIGFPELKECFEDPLCQTALAVLREAPTARVAARKRVSTLADTTRPGGRRRLGENKARRLHDLAANTIAPPELDAQMSFEVGMLIQQFDLLDKQIEIAEQRVAEVLDLELARRLQTIPGVGPALAASFIAEIGDIWRFDDFDQLAAYAGVHPKELSSGTKGQNPETSWRMAKTGNSYLRSAAYKMAVVGTQHNPVIRAHYLRKRAQGKSAMNAIGHCMSKALAIVWGVWRSGRDFDPTLGGPKA

SEQ ID NO: 170946 - protein, 416 aa, unidentified
MTFKVVRFICGGMDVHKNLIVATIGTTDRQTLITEYIQQSFSTFYSDLIRLKEWFISHDCYDVCMESTGKYWIPIYNVLETELNICLTHPKYVKAIKGKKTDKRDSKWICDLYKCDLVKHSFIPEKEIREMREIARYRCKLVYMRSSERNRYQNCLTVSNISLASAVSDPFGKTATNIMKEIMHSEVIDDDKILKLIHKNCKDKDKILDSLQGYHIESDQRFKMDTVMNHIEYLDKQIQACEAELIKRAYPLRDYFQHITHIKGISALSAILIVSEIGTDMNQFESDKQLVNWAGLSPANNESANKKKSVRISKAGQYLKPLLVQCALSSIKDKNSYFGIKYCRIKKRRGHKKAIIAIARMMLVCIYHMILTGEEFNPCDYESLTNPKPKKEPIMTVESALQFLKDSNFDFSSIQL

SEQ ID NO: 170947 - protein, 337 aa, unidentified
MEYFAGLDVSMEETHICVLDRDGTLIREGKARSSPDAISDFLAAGPTCVGVVFETGRMAPMLYHGLTERGIPVQCIESRQAYQALKSLAGHKSDRNDARGLAHLARTGFYKPTHVKSLSAHAIRSLIAARKKLVGQRVTIDNQIRGLVVVFGVRLPRALSPAFKDAALKVSNGVPGLHAALNGLFAAREAILAAVAAIDADVKKTARKSKTCSRLMTVPGVGPITALAFAAAVDDPSRFRRSRDVGPYLGLVPRRHQSGEVDYVGSISKRGDTRVRTLLYEAANVMLTRYAGPLKLKEWALATGARSTMRKARVALARRLAIVLHAMMRDQTEFQFA

SEQ ID NO: 170948 - protein, 316 aa, unidentified
MSEPVYVGIDVAKRTFEVAATGQAQTFSLGNDEAGHARLCQLLAPLSPRLVLLEATGGYEQDLALALSAAGLRVSVINPRQARDFARCMGKLAKTDRIDAQALRGFAALLDAQGHEPRMLADEQQRELTSLVVRRRQLVAMLVAERQRLALAHPKAKPSILRIMATIAEQLNDLDGQLKEHVLAHHADLAALLTSVKGVGPTTASTLLAQLPELGQLHRKQITSLVGLAPINRDSGTLRGQRHIFGARADVRRVLFVAALVGTRFNPVLKAFYARLLAAGKPKKVALLACMHAQAVGHLERYRSHQVAWAQRTGLT

SEQ ID NO: 170949 - protein, 429 aa, unidentified
MVNLPLWSFGMNAELSQFTAVIGIDWADKKHDICVQTIDSDVCEFSQVSNKVEKIHEWAQSMIGRHGGQMAVAVELSKGPIVSALQKYNFFVIYPINPTTLAKYREAFNPSGAKDDPTDAELALDILFNHPNYFTPLNPQSVEMRSLMILVEQRRRIMSDRIRITNRLRNALKQYYPQVLDWFDHIDTPLFCDFIKQWPTLAQVKRARRTTLQKFFHEHNMRRKPLLERRIETIKSSQPLTTDDAVITPYRLQALTLVDQLTVALDSLRLYDREIATLAPKHADYELFSSLPGAGPLLAPRLLVAFGEQRERFANAAEVQKYSGIAPVTERSGQKSWIHWRWQCPTFLRQTFVEWAAQTINKSYWAGIFYYQQRAKGCTYQAAVRALAFKWIRILYRCWKTNTPYDETKYLKALRDRGSPLLSANHLTE

SEQ ID NO: 170950 - protein, 323 aa, unidentified
MNKYSETFGIDISKDVFDCYGSVQGHLQFTNNEIGFKKFQERLSNDSLVVMEATGYYHYRFAQYLYKKKAAVSVVNPLSVKRFIQMKLAKVKTDKSDAKAICEYGLIQEVPLYNALTDTQSECLQLFRLMDSFIKKRTATKNKIHGEEVLGVPSSWVYRSLKRDKKHLDKELKGIEQKLLSLVKQDQQQQLTLLQSIPGIGMKTALFLIVITDGFKKFESASQLCSYVGITPTIRASGSSVRGRSRISKVGNRKLRNLLFLCSFTACKHNKGCREIYERIVNKGKSKKLALIAVSNKLLKQCFAIAKSGHPYDPTFVSVLAVK

SEQ ID NO: 170951 - protein, 319 aa, unidentified
MNTTINANSRKTERNVGIDVGKDILDIYIYELEKHWQAANTLEGIKQLIKQLNRYQLTRVLVEATGGYERRLVEACAEKGQPVIIVQPIQVRQFAKAQGLFAKTDKIDARLIAEFGVLMQPEPRALPSKKVRLVRDLLARKRQLNETRTQELNRQHKAEKILIPSHRRMIKLIDKDIVWINEKLAKEVSVITEWQRIYEVLSSVPGIGDGVAYTLLGELPELGQLSHRQIAALTGLAPFNRDSGYMKGRRRIKGGRAPIRTVLYMAMMCAIQHNPVMKQFYQKLVAQGKHKKVALTACMRKMITILNAMVRDDKEWQMS

SEQ ID NO: 170952 - protein, 459 aa, unidentified
MKVPKSRGATGGADISVVHPHAAGIDIGAQFHVVAVGPGRDPEPVRSFRSFTKELHDLANWLKQAGVTTVAMESTGVYWIPVFEILEAHGFEVVLVNARDAKNVPGRKTDVNDAQWLQKLHSYGLLRASFRPRQDVATLRSYLRQRERLLEYAAAHIQHMQKALMQMNLQLHHVVQDVTGVTGMKIIRAIVAGERNAEELARHRDARCKASAETIRGALIGNYQAEHVFELTQAVALYDFYQTQVAQCDERIELALKQLQANVEPVTAPLPAARHRTKQPNSFGFDVRAALYGMLGVDLTQIHGLGPYVALKLVAECGNDMSRWPTAKHFTSWLCLAPGNKISGGKILSSKTRRSSSSVAAALRLAAVTIGRTDTALGGFYRRLSARIGKAKAVTATARKIAVLFYNTLRYGMEYVDPGAAYYEERYRQRVLNNLTRRAESLGYTLQVKTATPRAEGVS

SEQ ID NO: 170953 - protein, 459 aa, unidentified
MGKGVGKQAGLPVIHERAAGIDIGSRFHVVAVAPDLTDEPIQTFQAFTADLNRMADWLVSVGVRTVAMESTGVYWVPAFEVLESRGIDVILANAREARAVPGRKSDVNDAQWLQRLHACGLLRASFRPARDIAALRVYLRLRERLLDYTAAHIQHMQKALTFMNLQLHHVVSDVTGVTGMNIIRAIVGGQRDPNELAKMRDVRCKASIETIRAALVGNYQPEHVFALTQALALYDFYQTRISECDHQIENSLAILNADKTTPAAPMPKPRHRTKQPNEVCFDVRAVLYQLTGRDLTQIHGVGPYLALRLIAECGTDLGKWRTAKHFTSWLTLSPGCKISGGKVLSAHTKKTTNRVTAHLRLAAVTVGRTNTALGAFYRRLAARIGKSKAVTATARKIAVLFYNAMRFGTDYRDPGADHYESQYRERVVKNLHRRAAEFGYVLQHGACQGSCRLIHAANC

SEQ ID NO: 170954 - protein, 402 aa, unidentified
MRKFKLRRYKVNAVGIDVSKGKSMVCIMRPFGEVVQSPFEVMHTGSELNSLAKRLKSLRGETKIIMEYTGRYYEPVAFALHKAGLFVSAVHAQLIHDYGNDTIRKVKTDKADTVKIANYGLSAWLKLQAWRPEEDLRRQLKVFSRQYNKYSKQRTVLINNFIALTDQTFPGVNELFTPQPRKSDGHLKWVDFTARFWHCECINNSSLAVFEKRYLSWCKKSGYRFSKKKSAEIYAAARECCCALPKDDVTNLLIQQAVKQLNAASETLFAFAGGMLSIAQQLPEWPVASAFYGVGALLGPQLMAEIGDVRRFPKKGSLVCFAGLEAPPYSSGKFESKECKISKQGSPHLRKTLFQIMDIVLKNAPPDDPIYKFLDRKRTEKSIITPIWPLAAPSFCASIMDA

SEQ ID NO: 170955 - protein, 432 aa, unidentified
MKYKLKQKQNQRITRITEKTLVVGADIAKKIHVARAVDFRGIELGKECVFHNDQEGLTKLAAWMKELGRIHEKTDIVFGIEPTGHYWFPLAAFLKEQDIRVVVVNPHHVNKSKELEDNSQTKSDYKDAKVIADLIRSGKYSEPNLPTKEYAELRILMNFREKVMVSLNQVKARITNWFDRYFPEYPQVFKDWEGKASLMTMRQFPTPEEIVSIGARGVLTHWKTEIKRGVGIKRAEQLYAAATVSIGLTEGLTAARIELAALLQQYDLYCKQEESIMTEVLQILEKIPGTKQMLSIPGIGILTVAGFLAEVGDLNNYDHGQQIIRLAGLNLTENSSGKRKGKTGISKRGRSRLRGILFRCMLPMVAKNKEFKALHEYYTTRSQNPLKKKQSIIALCGKLVRVLYALGTKQKEYNANEVLGPIRQAQLQQSAA

SEQ ID NO: 170956 - protein, 343 aa, unidentified
MTSYVGLDVSLKSTSICVVDADGAVAVEQAVTSDPDAIADFVRSNAPKVKRIGLESGPTSAWLWRELAERSLPVICIDARHAKAALSMQINKSDRNDAVGIARIMQTGWYREVQIKSSGSHAIRALLTSRALLVKITRDLENQIRGLLKVEGLVIGRAKKGVFSARVEVLLADRSDMAAIVYPLLSVREGVRQQLAALDRRVRRLANETPSARNLMTVPGVGPITALAFIATIDDPTRFKQSRSVGAYLGLTPRRHASGEVDWNGRISKCGDTLVRTYLFEAAGVLLTRVQKWCALKAWGLRVAKRSGMKKARTAVARKLAVILHHMWLDDTEFRWTTESTAN

SEQ ID NO: 170957 - protein, 348 aa, unidentified
MTITMIGLDTAKSVFQVHGVDAAGKPQLKRKLQREDVILFFEQQERCTVVLEACGAGHHWARMLTQLGHEAKLLAPEAARPFVKKGKKNDAADAAALCLAASQPEVTFVPVKSPEQQGVLALHSVRSLLVKQQTMLANAMRGLAAEFGLVVAKGIHKLDELDALVQAEAGMPATAKQAFAELHGYSQAAATRIAGLEAQIVTHARRDATARRLATIPGIGPITASLITATVGDAIGSFKSARHFAAWLGLVPRQHSTGGKTRLGRITKAGNGEIRKLLVLGATSMVHRAAQWNSAVGAWLRGVLERRPVRLATVALANKMARIAWAVMTRGETYQAKGRARAAAAAVA

SEQ ID NO: 170958 - protein, 478 aa, unidentified
MEEQEGQPVLRRLVGIDLGIASRHSVRVLEADGQVVCRSSCVPTAQSLTAVERAALAGAPVGTKLEVVFEPTGPAWMPVAVFFARRGHAVFRVSSAKAADLRRFLRRHAKSNGIDAETLARMPLADPGGLQPLELPGPDAAALDRRVRACGRLIRAGSEHKVRIKDLVRQLLPMTPLTADLGKVGLAVLERYADPRALAAAGEAELTRLITSASNKQQGQERAGQWLAAAAAAIELYGDHPAVPFGELAAEVATEIRLLRAIQAELATHAAARERHYLQIDPGQIARSLPGFAEISAPVLVAAMGRPGRFRDGARFKSYVGLTPRASETGETDRKGQPMSKAGPSLLRSAFVRAADTGRKQDPQLAKIYYQQMTERGATHLKASCVVASHLAERAWAVLNRGTPYVICDNNGNPVTPGEAKKIIAAKWTVPEDVRKRRRSRKIAGKAPQTALTRPDRRGDPPRPRSSRHPSKAVNPIT

SEQ ID NO: 170959 - protein, 458 aa, unidentified
MLVETNSEPVMPAGLTGVRVQVGIDAAITSNHHVCVRQVGADGAVVTSRFVVPPTLAGLSRLTTRLADYPGVVAVAEPTSMSWLPLAAALTEASGQLALVGSRHAARLRGAITGKNKSDVIDADVLARAGEVFDLVPLRVPAPGQLALRRVCTRRGAAVIDGNRYLRRLISLARWAFPDVWNGFGGSLATAKAVLSRWPHLVQLAAARRATLTAVVAEHTRDVPDVPARAEAIRDAAGAWVKFWTGRLDLDELAWAVGEHLGDLQVAAGRIDRATALATDYWERLYGDDPLLASLPGLGPVTTPTIRAFLADGATFHSAKHAASYVGLAPSNWSSGTVTQPSRAITKEGPAVLRLAFYQAANAARRVDPQLAAIYHRLMVTRGHCHTQATVAVARKLVERTWIVLDRGQPYQLRDPDGQPITARAAKTLITEQFTVPDTVRARARAHSAATHRAKLTH

SEQ ID NO: 170960 - protein, 434 aa, unidentified
MRQQNISTPSTPPVYAAFVGLDWGDEKHALSLCAADATVIERTTLPQTPEALADWANVLRSRFPSGKIALCLEQARGALLAGLMQYEHIVPYPVNPKTLARFREALYPSRSKDDPIDADLLLDLLLKHREHLRAWQPDTVQTRQLALLNEQRRHFVDHRTALTNELLSHLKAIFPQALELVGQSLASRLATDFLKKWPTLQAVQKVKPAVLRQFYYGHNSRSQELIAGRLERVKNAVALTSDPALLAVHSLAIQTLAGQLQALRPFLDQHEQQIAELFAAHPDAALFDSLPGAGSALAPRLLAALGSDRSRFPDALSIQCYSGIAPVTERSGKTQYWVHLRWSCPKFMRQSWHEFANCSLKFSTWARACYEDLNKRMDHHEAIRKLAYKWQRIVWRMWQERQPYDETRYLRSLQKRGLKIYADLVPQPVASAGE

SEQ ID NO: 170961 - protein, 344 aa, unidentified
MSEVIIIGLDIAKHVFHAHGADERGRAIFSKRISRGKLLDFFAAQPSCMVALEACGGAHHWARQLTQLGHEVRLIPPAYVKPFVKRQKNDAIDAEAICEAAQRPSMRFVAVKSEQQQAAGLVFRTRDLLVRQRTQLINAIRGHLTEYGWVAPKGPSHVTMLADLIEEEEMARSLPEAAHAMFRLMLDLFASLNGKIADLDKEIARRAREDEVSRRLMTVPGIGPISATAIAALAPPVETFAKGRDFAAWLGLTPVQRSTGGKQKLGATSKMGERTLRRLLIIGSSAVVQQASKRGAAKGSWLEQMLARKPRMLVAVALANKMARIVWALLVKREVYRAPVAANA

SEQ ID NO: 170962 - protein, 338 aa, unidentified
MIVIGLDVHKQSVTAVAVDEAGRPLEERVIPVGSDELLDWAAALDGERLWAVEDCRQLTRWLERQLLGAGEELVRVPPKLTVPERRAGRTRGKSDPIDALAIARAALREPDLSRPRPDERVYRELKLLVDHRDDLVDQRRRTQQRLRWHLHQLDPTFEVPLRMLGRASHLERVRRWLARQDKELQVRLARELVSTIAQLNRTIAALDQELEQRTAEIAPALLELPGCAAVTAAKLLAEIGPVDRFKTDAQLARHGGVAPLEASSGRTQRHRLDRGGNRQLNAALYRIAITQARYHAPARDYLERKRSEGKSKREALRRLKRQLVRVVFQTLKASPALT

SEQ ID NO: 170963 - protein, 370 aa, unidentified
MAEYSEAYVAFDTSKTKHAVAIADGGRRGEVRFLGDVASSPARVERLTRKLAERYDKLHFCYEAGPTGYGLYRQIRELGHDCTVVAPSLIPKKPGERIKTNRRDAVTLARLLRAGELTAVWVPDAIHEAVRDLVRAREAAAQDLRRKRQQLLSFLLRHGLIFDGRQHWTLAHRRWLAGQSFAHPAQQIVFQDAIEAIEEALARLRRLEQQLVAIVPSWSMAPVVEAYQAMRGASFLVAVTVAAEIGDLRRFDQPRQLMAFLGLVPRERSTGDTVRRAGLTLAGNRRARRVLVEAAWSYRHPARVSETLRARLEGLPKPVRDIAWKAQIRLCARYRRLSAAGKKLPVVIAAIAREMAAFLWAIARQVAPVA

SEQ ID NO: 170964 - protein, 453 aa, unidentified
MKRKRSYAAVDVEQLDVEALLPLVTVGCIVAIDVAKTKFVAAIATAGGEVLKLVKFEHPRQTIAFLGLLRALQQAERKPVVVMEPTGTYGDALRYQCHALGLRVHMMPPKHSHDFAEVLDGVPSMHDPKAATVLAKLQAIKPARAWQPESDTRRDLRAWVDQRHPIARTLAIYHGHLEAMLARHWPELEAHVDVYRQRSWFALLTKYPGPQAVAAAGEAAAITLRKASRGHFGPARLQAILDAAKTSTGVPMTAGEQDRLRAIAEQIELQTRRLDAVDATLADLVAEDVVLSRLATVVGPACAAAVGSLVGSPLDFPNARALEKAFGLNLKEKSSGNTRGQMSITKRGPGPVRHLLFMAALRLMKDDAVALSWCRARRGYKADQKIKAVVALMRKLARALWHVARGEAFDATKLFDIRRLDLTSDTTHRKNTAAPTSPSARAAGPYQGGAATA

SEQ ID NO: 170965 - protein, 400 aa, unidentified
MLSIGIDVSKGKSTVCGMKPEGEIVYAPFEVQHTREGMSELVSLLRSSGEEVRAVLESTGSYHCPVVAALLENGIFVSVVNSLRMKRFCSQSIRKVKTDRIDAMQIALYGLAYWQELQPTKLPEDTYRELQLLARQYYQMTSILIKAKVDFNAICDQVLPGMQELMNDHAGRHKLSDFVLRYRHTTHILEMGETRFRKDYCKWAEKKGYRNCERMAVLIFATAQNGIPVLPNAPSTQIVITEAIRVLHTVEASRDAILTQMQALAKTLPEYSLVREMPCIGDTLAPRLIAEIGDVRRFHSKRALIAYAGIDAPPYQSGKFCANNRHISKRGNRYLRKTGYEVMQSYVMHKPANDPIFTFIEKKRSEGKSGKLAMVAGLNKFLRVYYGKVTELYRSLPAIE

SEQ ID NO: 170966 - protein, 375 aa, unidentified
MEHHSEAFVALDTAKLRNAVAIADAGRNGEIRYLGEIDNTEAETRKLVAKLASKHARLTFCYEAGPTGYGLYRLIKSIGHDCIVVAPSLIPSKPGDRVKTNRRDAVNLVKLLRGGELTAVWVPDERHEAMRDLVRARDAAVKDYRIKRQNVSSLLLRLGRHYPGKKTWGRTHIDWLTGLKLEHREQRIAFEEMLLAVRQVRERIERLEQAMREAVADWTLAPVIEAVQAMRGIDMIGAIAFLAELGDLSRFENPRQLMAYLGLTPSERSTGESVKRGGITKAGNTRARRLLIEAAWSYRFPPRVSKDMQTRIGAAPRTAREIAWKAQMRLCGRFRTLTRKGKRPTIVVTAIARELSAFIWAINREIVGSYAMANQ

SEQ ID NO: 170967 - protein, 334 aa, unidentified
MQNVTLIGIDLGKNSFHIHCQEKHGNTLLRKRFSRIQLTQFLATCPPCIVAMESCAGAHFMARHISQLGHQVKLISPQFVQPFVKSNKNDFIDAEAICEAASRPSMRFVTPRTEDQQAMSALHRVRDALVRERVKATNQMHAFLLEFGISMPRGIAVIKRLATVPEEHELPPYLVRLLTRLHQHYGYLCEQIEEIERELKNHLADDETAQRLLTIPGIGTSTASLLATKLGDGKNYLSSRDFAASTGLVPRQYSTGGKSTLMGISKRGDKNLRRLLVQCARVYMQRLEYQSGRLAEWVNGQLTRHHSNVVACALANKLARIAWAVTTQGTVFSK

SEQ ID NO: 170968 - protein, 357 aa, unidentified
MLSKYEYEIGLDLHKKFSVLAVNKSGTCIETIKLPNDRSVFDTYFSNLKKHTYRVTFESSSAYYWLVDYLNENKIPFIMSNPFLNRAIANVRTKNDKYDAQTLAELTRADLIARCFVPEQPIRHLRSLVFYRSKLIAMRTRLKNMVHTMLAKYNYQAPYQDIFGTLGRQWINSCQLPDVFRTLLTDTLDILDDLEQRVAPYRKMLYHRIKAHPYYRILKTVSGIDVINASVLIARIGTIDRFKDVSKFIRYAGFAVNTRASAGVLHAGHINKKSDHFIRTALVEASWLVIRKDAALAAFYEHIKAQKGSGCAIVAVGRKLARSIYFMLKTGRPYRVRKMQPQWLSSVSGSTAGSVCE

SEQ ID NO: 170969 - protein, 408 aa, unidentified
MNAVGIDVSKGKSMVAALRPMGEVALLPQEFLHTEVGLEQMAYAILTLGEDTRVVMEATGRYHEPVAAALHEYGIYVCVLNPLFIKQSGGGSIRKVKTDKADAMKIAKYGLDNWVDLREYTPMDTIRQQLKLCSRQYNLYMKTVVSLQNNLISLTDKTFPGVNELFSSPERADGHQKWVDFVMTFWHCDCICRVSEKAFTDRYQKWCKRKGYHFSTEKALDLYAGSCGHFTTLPKNDNTKLLITTAAQQLLSGKMTLAALRAEMTRLAKQLPEYDTVRAMYGVGETTAVQLMAEIGDVRRFPRRSSIVGFAGVDPAVDQSGKHSAKSVPTTKRGSPHLRKTLYQIVCTYLKKSPADEPVYQFLDKKRAEGKPYFVYMTAAQNKFLRIYYARVKECIETFDAQQDTVQN

SEQ ID NO: 170970 - protein, 345 aa, unidentified
MPIVGGLDIHRKQITFDYLDTATGEVRRGQIAPADRAHLRAWLARFAGRDDVACALEGCTGWRYVAEELAAAGVTAHVAEPADTAFARGRKRHAKTDKTDARHLRVLLEQGRLPECWIPPAQILECRALLEAYHDLRREHTAWIERIHAVFFHQGAPRLGEGALRTDRGLAALRQAAACHLSPAGQLQVATALDMLAAVEARMEVLRQQLLHAARHLAGARALQARLYGVGPLAGLAMTCWPGGAGRFSSSRKAVRFAGLDVTVYSSDGRRSPGHLSRQGPEILRWVAYEAGKTHGRAPAPGHDYYAQVKDRQDGKIAALSQARKLIRQACHILAELGDDALTAA

SEQ ID NO: 170971 - protein, 409 aa, unidentified
MELLIARCAGLDVHQATVVATVRVPDEQGGRQSVTETFGTMTADLLALRDWLQAYGVTHVALESTGVYWKPVYYVLEDRYTLLLINMQELKHVPGRKTDVKDSEWLAQLLECGLLKASFVPPPPIRELRDLTRYRVQQVRDRAREVNRLCKVLEDAGLKLTSVVTDVMGASGRAMLRALVDGTTDPTVLADLARGRLRKKLPLLQRALQGRFRPHHAFLIEQIFAKLDFLDETLDRLTAEIDRRVAPFEPMLAALDTIPGVDRIGAISIVAETGGDMTRFPSEGHLCSWGAMCPGQNESAGKRRSGKTRKGNRYLRGTLIQAALGAMRKNGSALQARYHRVKRHRGHKKAVVAVGHQILEISYFVMLNGVTYEELGSDYFDKRHAERAVKRHVRQLEALGFHVTIEKAA

SEQ ID NO: 170972 - protein, 335 aa, unidentified
MLYVGVDAHKSISQITVMNEAGVILRRKSVNSTSEGFKGALAGFNEPFKAVLEASYSWGPMYDWLDDVSEEVLLAHPLKVRAIASARIKNDRIDSEVLAHLLRANLIPAAHAPSREIRALRRVLRQRMFFVQLRTMLRNRVRALLAQHSVKLPANERIYTREGRAWLDRVALPGSDAHLLQADCELHDSIEVQIASTDTLINKLAAQDPSVKWLISLPGIGRFLSVLIRWEADDIHRFPDAKHFVSYTGLAPSTYASSSRLVHGALTKQGNKWLRWAFIEAVTPAVRTSEFVRNHYMKVKSRRGTKDARCSTARKIAEITYAVWIEQRCWEETRS

SEQ ID NO: 170973 - protein, 364 aa, unidentified
MINVGIDIHKKRCQACLKDEKGRMIEELSFPRDEEGIGSFRRLLQNHGEAKIVLESTGNLWIPIYDTLSEDPANRVILANPRKTKLIAEAKIKNDKLDARVLADLVRADLVAASYVPDEPIRQQRELLRQRRSLVEYTVAVKNRIHSLLDRYNLRHEYSDLFGKSGREWLRNLQLPSIEKTILSVELKQLESLEDAIDELTRKIAVEAAEEPRVKLLMGFTGIDYYSAMLLLAEIGDIKRFSSPKKLVAYAGLAPGMRSSAGRTIRGHITKEGNKYLRWILIEAAQHASRFDPKLQGFYQRVSARRGRQRAIVGVARKLLVSIYHVLSRNEIYHGQRSELLERKIRNLQRIVDSSLQEERDNQQ

SEQ ID NO: 170974 - protein, 367 aa, unidentified
MTNLQVKADFTGRIMFIGIDIHLKNWHVSLYYEQKLIKSFRQEGCPKTLSNYLNEHYPGAKYVCAYESGFSGFWAQRQLEQLGIECIVVHAADVPQTNKGKHFKTDKMDSKRIGAALGSGMLRGIYIPEAEAESDRQLVRCNVKLGNDVTACKHRIKSMLYQLGISIPQQYNNGNWSNKFMTWLKDLRFENESTRLALDLYFQTLLNLRQEKLNALRQIRRLQNKDRYSKLFKLLTSIPGIGPMTAITLLTEIVDMKRFNNFDELNSFIGFCPNEYSSGDKERKGRMSFRQHKRLRSLLIENAWIAIRNDPALLLYYSETKAKLGEKRAIVKIARKLVSRIRMVWNNEKPYEIGVVATNKIKKTQSN

SEQ ID NO: 170975 - protein, 420 aa, unidentified
MKVTYQTCCGVDVHKSFLVATIVKTTGGVEPSYQKKRFSTFNNSILEFKHWLLDNDCLDVCMESTGKYWVPVFNLLEDEINVVIANPKWVKAVKGNKDDTKDSKWIGDLFRLGLVKGSYIPCKAVRILREYTRYRYKLVSCRSSEKNRYQNALTVCNVALDSVVSDIFGKSSTSIIDYLLDQSGTSINHEEIASKLLRNLKSKEDAVIESVEGYQMTDTKKYRMRLVRAHMDYITAEINDVDKMIENMISSNPDFENAVRFLCTIPGVKRDSAITIISEIGTDMSQFSGSKRLCCWAGLTPDSNESAGKKKSVWITRAGVYLKPALVQCAHAAVKSDKSPYYKKKYEALVKRRGKKRAIIAIARMILTAIYQMLSTGEEWNPSNLYKIDMPVALVEKQKAKAIRQAKKLLQREGTLPPVV

SEQ ID NO: 170976 - protein, 356 aa, unidentified
MSMMHQSVVPDQSYFAGLDAHERHVAVAVVDKQGGLVHRASARSAEPARLVETLTPYHTPAHPLAVVVETCPFWPWLYDLLVPVGIRFHLAHAQELEAIAKAARKRDERDASLLARMLAGGLIPFAYPKPPAQRENACLVRHRAALVRHRTMLANRIHSQLHAVGLTLPRERLLRRATRAWLRETAGPVLRPEQRRLVASHWALLRRLTRMLRQLEPAITAAAAREPAAGLLTTIPGIGAYRGLLLATELLPMTRYASEGKFVGYAGLAPITQCSADTVHHGPLPNAANRWVRGALISSIPTHLRCAPASALSQYYARQKARLGWQIARVIYHMLRTGECWRATPALEAPARGPRA

SEQ ID NO: 170977 - protein, 452 aa, unidentified
MNETVQAAFEEIRRNVAGIDIAGHADHYVCGPRRDDGSCEVEHFGTTTPELHRMLGWLKDRRVESVAMESTSVYWIPVADLLEANGMEVVLVDTREVRMVPGRKSDVKDCQWLQKLHSCGLLRGGFRPPENVAAVRTVLRERANLTQMRTQCLQQMQKSLDQMNIRVHHAVSDIDGKTGMDIIRAIVAGERDPSVLAKLRDRRCKKSEAKIAEYLTGTWRDEHVFNLTQAYLTLQFIDERINAYEQKVVAMFNSLAADSDHPQPPVPPADTRSKKESQNMDGKADLERIVGFRMTDLAGIGYDTAATLVSELGYDFSSFPSEKHFAAYLGLAPRLGKSAGKNVRQKKRCKNTSRAGQALRMAASTLYKSQSELGAYFRSVSRRADRKTAVKATARRMAHLIYRGVRYGQAYVEQGAKAYEERMRERTVRAVRNLVKIHNINVLELNMASVVA

SEQ ID NO: 170978 - protein, 465 aa, unidentified
MQNHNKRKGSPGSPRPIEGLPVVRHKVAGIDLGSERHWVCAPMVEGSGREVADFGATTPELIRMAQWLQARQVESVAMESTGVYWIAPHEVLEAEGLEVLLVDTRQLARVPGRNKKSDPLDCEWIQRLHSCGLLMGSFRPKEAVCMLRTLVRDKGNLVAEAGDWLRRMQKSLDQMNVRVHRAVSDIDGVTGMAIMRAIVAGERDAGKLAKLRDRRCHKSEEEIAEQLSGHWRADHLFSLGQGLKMYDSIQDRISDYEKEILRRLAAMEREACRGQAVPPVNNPQKAKLIQRRGEEPMRQALYRMSGVDLTGIDAIGVETVQLVLSEYGPDLSRFPTEEQFVSHTTLAPHKPTSGGKPVKKQKKRGGASSRVAAGLRMAALSLRHSETALGAYYRHIAYRKGGDVAVFATARKLATLIYRLIRWGQPYVDEGAAAYEKRYQEARIKSLTAAAKNLGYQLTPNASQA

SEQ ID NO: 170979 - protein, 317 aa, unidentified
MEHYAGLDVALKETSVCIVDGAGKIIRETKVASEPEALVGYFSSLEIKVVRIGLEAGPLSQWLYAALTQAGFAVVLLETRHVKAALSAMTVKTDRRDARGIAQLLRMGWYRPVHCKTLPSQEVRAIITARKTLLGKLIDIELSMRGILRGFGLKVGAVTRKSFEIRVRELMAGQSTLTAIMESLLNGRATLVAEVAKLHRALLTIARADGVCRRLMTVPGVGALTALTFKTAIDDPTRMAKSRDVGPLFGLTPGRYQSGETDIIGKITKVGDVMVRTALFEAATVMLTRTTKSSRLKAWALDLVKRRGTKRRAPNPG

SEQ ID NO: 170980 - protein, 453 aa, unidentified
MCLEDRPVLEPNAAGIDVGAREMFVAVPPGRDEHPVRVFATFTEDLERLTDWLEQCGVTTVALESTGVYWIPLFEILEQRGIRPCLVNARHMKNVPGRRTDWHECQWLQFLHSVGLLRAAFRPGQDICAIRTLLRHRSELVSAASQHVQHMHKALTQMNLQIHHVINDITGVTGLAIVDAILAGQRDGAELAKLRDPHIKADTDIIRKSLEGNWRPEHLFTLGQSRDLYRIYQQQIVNCDLEIEKRLPDFEPRIDPTEKPLPPDGKRNRAGRRRRRKSGHPHPEFDLRTETYKLFGVDVTQIPGLEENALPLFSEVGRDMSRWPTAAHFVSWLALCPDNDISGGKLLWRGARRVKNRAGHLFRIAAFSLHHSLTPLGNYLRRMKTKLGPKAATMATAHKIAVIFYAMVKNQVEYDETLWATRDAQREKRWEAKLKRQAKQLGYELVPIEPKAA

SEQ ID NO: 170981 - protein, 435 aa, unidentified
MPLVNPNAAGIDIGDTIHAVAVPEGRDNLRVRSFGAMTCDLLEIIEWLHKCKVDTIAMESTGIYWKPIFGMLVKEGFEVYLVNSKQIRNVSGRKNDEDDAIWIQKLHSCGLLKSSYLPDDEQETLRTLVRYRRTLTSDCNRFILRIQKSLELMNVKLHTVIRDITGKTGMAIVEAIINGERNPENFLIYVDKGIKADNATIVKSLQGNWRIEQLFILSECYHSYRYYRERIAMCDAEIERQLQAYQAAYYPDMPVDKNVRSKKQATKNKPKFNTSSYLKAIYGVDVMAIYGISDILALEILSETGTDMSKWQTEKHFVSWLNLCPNNKISGGKLISSMIMKKKPNVASQAFRNAANAVQRSDNWLGDYFRRMKAKGGNKYASVATANKIATVFYKMVRQKQEFNPVELQEYRERYKLAKINYLERKLTDLKKDVA

SEQ ID NO: 170982 - protein, 412 aa, unidentified
MIYCGIDWAERTHDVALVDDTGQLLAKRHITDDAAGYKILLELLAEYGDSEEDPIPVAIETSRGLLVAVLRTGTRKVYAINPMAAARYRDRHSVSRKKSDPGDALVLANILRTDMHAHRPLPDDSDIGRAISVLARAQQDSLWNRQQLANQLRSLLREYYPAALAAFAAWANGLCRPEARELLKTAPTPARAARLTRTQIQAALKRAGRQRGIEAEAERLREVFRAEWAHQPPLIEEALGKQMLALLIQLDAACTAADQLAEAVEEAFPQHPDAEILLSFPGLGIQLAARVLAEIGDDRTRFADARGLKAYAGSSPITRASGKKSAITRRWVKNDRLNHAGYLWAFASLRASTGANAHYRRRREQGDWHAAAQRNLFNRMIGQLYHCLKQGRTYDESLAFGAPSSEAVVRAA

SEQ ID NO: 170983 - protein, 397 aa, unidentified
MIAVGIDVSKAKSTVAILNGDGSIRAKPFDVHHVADELQALVDYVKRTSEPPTILMEPTSHYHYPLLKAFREAELPVCLINPYQMKKYGDTELRKAKTDKRDSLRIAQYALEKSYSLIPYTPQDQKYEDLRFLSRQYSQRISTLTAAKVQLLSLLDETMPGITTILPLKSRDPDNCVLLRFIKRFKSFDVIRKMGKTRFLDSYQVLVKKTKDRFAGSKGLAIYELVLNSITTRGENPLSAMTQDQCVDLVSTAQNAADEINLQMRIIAETIPEYKVLRSMAGVGDRLGPIILGEIGDIRRFHSGKALNAYAGNDAPPYQSGQFESRNRHISKRGNPALRKACFEVMQALKLTKPQDDPVYLFLLKKEQEGKPYNVAKMAAVNKFLRIYYARAMELYK

SEQ ID NO: 170984 - protein, 340 aa, unidentified
MEEITTIGLDIAKHVFQVHGVDAAGNVAIKRRLRRGEVLTFFAKLQPTLIGIEACATSHYWARELSVMGHNVKLMPPHYVKPYVKRQKNDMTDAAAICEAVTRPSMRFVPLKSEEQQAVLMLHRSRELLVRQHTMLVNALRAHLAEFGIVMKQGKAGAAEVASLVQDADNSALSSSVREALLPLVEQLRHTEERVTRLEQSIVDWHKSNPTSQRLASIPGIGPITASAIVATITDARLFSSGRHLAAWLGLVPRQNSSGGKERLGGITKKGDGYIRKLLVIGANAVLRFARKGGASSTMWASSLLTRKPHKVVAVALANKMARISWALLARNEAFRAKGA

SEQ ID NO: 170985 - protein, 338 aa, unidentified
MDQVTTIGLDIAKNVFQLHGVDAAGNVLLRKQLRRGDVLRFFSGLSPCLVGMEACATAHYWARELVKLGHTVRLMPPAYVKPYVKRGKTDAADAEAIAEAVTRPTMRFVAVKTAEQQAVLMLHRVRDLLVRQRTMLINALRGHLAEFGIIAARGPGGVTAAIVALHETQDSLPVLARVALHGLVDQLRIVRDEVVKVEKRIVAQHRADDASRRLATIPGIGPITASAIAAAVPDATLFKSGRQFAAWLGLTPRTHSSGGKERLVGITKQGDGYIRRLLVIGATAVIRLARRDNASKAWAAKLLERKSARLVSVALANKTARIAWALLARNQSYVAPAM

SEQ ID NO: 170986 - protein, 449 aa, unidentified
MSRPQVIDDEQHEQVHERVAAIDVAKDSGMVCTRTPHPSRPGARRSTVWTVKARMNAVRALGRQLHKDGIEIVTLESTSDYWRIWFFTLEACGLAVQLVNAAQAKNLPGRPKTDKLDAQWLARLTEMGLLRASFVPPKAIRDLRDYTRARTRLIQERTRCWQRLEKLLEGALVKVSSVASKLTTVSAQDMIKAMIAGERDPHVLAGLARTRMRAKHDDLVQALDGMFDDHHGELAGMLLDQIAFLDGRIARLSARAAELTAAMPEAWGINADGTTGPDAGATPDAPVLPAVARLAEIPGISEDLARAIIAETGLDMSRFPAAAHLVSWAGLCPSARQSGPRTRAGKKGQGNGYLRGSLGQAATGAARTATFLGERYHRIARRRGKAKAQVAVARSILVIIWHLLADPAARYTDLGASYYQTRTDTDRKLRNHIRQIQALGFEVTLTKTL

SEQ ID NO: 170987 - protein, 403 aa, unidentified
MWTLGIDIAKFKHNATLLDEDGNKVFANFSFTNDQAGLTQLLDKITAAGQAPDQVVVGMEATGHYWILLFEHLVKEGFEVKLINPLVTRARRNITIRGSKTDALDSLLIARLLRDEALKVSAVPDAEISRLRTLTRLRYECAQEATALKLRLIALLDVVFPEYQEHFTDIFGAASREILSQFPTAAELAQVDVRRLTKLMNHASHGRKGRRDAQMLQQAAQNSFARDCTNRNLALEIRIIVERLNLTLEHIKELEREMQNYFVDLQNLLKSIPGIAEVWAPTILAEALPVFDPNRRDGGTAFVAIAGIDPRLRKSGKYAGKAKMSKRGSKYLRTAVIQAAGVAANISHDPLFKSIYDKHISKGKSHLEALSHVANQMLHVIFSVLKNKKPYVPIINHNVINIC

SEQ ID NO: 170988 - protein, 414 aa, unidentified
MENSYRVAGIDVHKKMLAVVITDAAVIGEFRFERRKFGTGADELRSLGNWLTEQGVKEAVMESTAQYWKPVWQGLEDSFRLHLAQAHSNKAPKGRKRDFADAERLVRRHIAGELILSFVPDQEQRLWRTMTRTRQQLVRDRVRLQNQLEGFLEETRIKLSSHVSDLLGLSARRMLQAMADGETDPAKLATLATSGLRATSGELRDALSAATTLRQMQRQILRLFLERLTLLEAQIDTLEKSAAEGLRQHQDSVRRLSEVPGLGADSAQQIIAEVGPQAATFPSPEQLSSWVGCCPGREESAEVSTSDRSPKGNRHMRRILTQAANAAVKAKGSVFELLYRRLVRRMGHAKAIWAVAHRICRITWKILHQGVIYEERGQRTNPQAVRQRTNRLVRDLRRLGYQVQLTPLNQVATA

SEQ ID NO: 170989 - protein, 347 aa, unidentified
MPYHAQEEVQVFAGIDVSAGELNVACLRPEKGKETTATFTNTRSGHNALLAFLLRGNQRVRVCLEVTGNYSLDLALALQAHSQFEINVVNPRRARRFAESLGERSKTDPVDAHVLCEYALRMPWVPWQPPSSTALHLRAVMRAVEDLTSILTQEKNREHALAASHALPSLVLTELKRHQRYLKNRLTRLRREALRLVARDPQLSRRFQLMQTTPGIGENSALQILGELAVLPDTLDARQWVAFSGLDPRRFKSGTSVEQRPRISRAGSRHLRRALYMPALVALRHDPHLGSFYQHLLKHGKARLQAVVAVMRKLLHAFFAMFRSDQPYDGSRLCPFELANKTVDSCG

SEQ ID NO: 170990 - protein, 342 aa, unidentified
MKQYVGLDVSQRETSVCVVDDAGKTVFQGKAKSDPGALTELLRKRAPHAERIGFETGAMSSWLWHELKRVGLPVVCLDARHAKAALSVRMNKSDENDARGLAELVRVGWYREVKVKSAESQATRSMLVARSRLVEIRRDLENQTRSMLKEYGLQFSRSIGSQFRRKVWELVADGHPLQSLVQALLSVHEQVCCEQEKLDRRVRHLAREDETTRRLMTVPGIGVVTALTFRHTIDDPARFRSAANVGAYLGLTPRRKQSGETDVNGRVSRWGDRLLRTYLYEAASVLLHRTKKWSTLKAWGVRLSKRIGMKKAKVAVARKIAVLLHCLWVDGTSFEWGGEKMA

SEQ ID NO: 170991 - protein, 314 aa, unidentified
MQLPKDVGVDVAKDFIVAALADQSSSPRQIQNQARALRAWLRTLPAGSRIAMEATGRYHGLLADLAHEAGFTVYVLNPKDVWHYARALGRRGKTDRIDAEVIASYVADHHPKLKPYTPISPEQRAIDRLLKRRARLIVLQGAARATTGDLTECRRQVKALLDRFDSLIAEIDRQLQDLPPSLDPLRKSQARLQKIVGIGPLTGLTLASTFLRIPFRDGDAVVAYSGFDPRPHDSGRMVGRRRLSKRGPSELRRLLYVAAKSAAQSPVWKPTYERYLERGLSKTASYVILARRILRVAWSVHSHQTDFDPGRLAA

SEQ ID NO: 170992 - protein, 379 aa, unidentified
MESITQNEKVLYIGIDVHKDTYALCCFDFQRNELSDEMTVKATTKAVIKYLEALKKKHKEEILFVCGYEAGPTGYGLCRGLQKADFACVVMAPTTMANPEGKRRVKTDRIDARAIARILAYKSYSQVHLPSEEMEALKEYTRARDAKKRMLKKAKQELLSFLLRNGKTYPESGNYWTAKFFTWIKTVQFSEKWMQEAFNEYLAEVYSLKAKIEIMDAKIREIAELEIIKDKVDKLVCFAGIDVTTAVETVVEIEDFTRFATAAQFVSYLGLCPGEDSSGKTKIMLPLTKAGNRRVRALFCESAKAMKRTNPYGEKSKRMKVRQKNASAEIVAYADKATKRIRTKMKQLEGRGKNYNVASAAGARELACFVWGMMNGKIA

SEQ ID NO: 170993 - protein, 340 aa, unidentified
MGQVVRIGLDLAKSVFQVHGVDEAGEIVVRRKLRRSQLLTFFAKQPACLVGMEACASSHHWARELIALGHEVKLMPAQYVKPYVKRSKNDAADAEAICEAITRPTMRFVAIKSPDQQCAMMLHRVRLVLCRQRTQLSNALRAHLAEFGIVAPVGRLGLERLIEIVADPEDRRLPGRARISLRMLVAQLAVVKAQILENDRRIMADARSTELGRRLMTVPGVGPLLASALVATVADPRIFRSGRDLAAWIGLVPRQNSSGGKERLGSISKAGHRYLRQMLVVGSMAVIRHAGRRAEQRPWLTQLLARRKVKVAAVALANKIARTVWAMMISGERYREPVAI

SEQ ID NO: 170994 - protein, 340 aa, unidentified
MEDVIYQRCAGIDVHKRMITVCLRIGRKTQVREFGTLTHELREMAAWLKDNGCQMAAMESSGSYWKPLYNIFEAESLPAMVVNAQHMKAVPGRKTDVKDAGWIAKLLSQGLLQPSFIPDREQREFRELTRFRKSQIEERARNLNRLQKMLEGANIKLASVVSDIDGKSATALLELIIGNDEFTVDDVAKHRHGGLKASAEELFLSLEGVITPVQRELFKHVMQVIRGQTIQIEHTDTLIRDYMAEPYRKAVDAIDTIPGIGQVSAQQIIAEIGHDMERFPTAAHLCNWAGICPGNNESAGKRKSGKTNHANKTLKSTLVQCAQSVKKTEKASSPHNTNEL

SEQ ID NO: 170995 - protein, 322 aa, unidentified
MPEIVTPPTLTRFIGCDVGKSFIVVFDSRDGSFRTVANTPQALAAFAASLEPTCLVVCEATGGYEDALLAALLVAAIPAHRADARKVKAFIRSFGTLGKSDTLDAKALARYAKERHARLPRWQAPDPQRERLQTLVLTRADLIAQRTACTNRLKAPGAEPVRPYLEALRACLVGQIQALEAAIAELVAGAHDLVRAERVLRAIPGIGATTAAALIALMPELGRIDRRQAAALAGVAPHPNQSGASDAYRRTRGGRPEVKRTLFLAAMAASRHHPGLRDAYQRLCKAGKKPIVALTALMRRLIVIANARLRDAFAQNQTADAN

SEQ ID NO: 170996 - protein, 347 aa, unidentified
MDSIIIGVDTHKDTHTAVAINSQGVRLGSMTIATTHKGFRDLEGWANAFGTITAFGIEGTGSYGAGLSRELLATGHTVLDVMRPNRQSRYLHGKSDNLDAENAARSVLNGQAMALAKTQAGTSEMIRHLKVARDSAAKSRSQAMVTLKALIINAPTKLRDTLDLINGPITLIRHIAAFRPGKLTSPTASAKAAMRAIARRWLILNEEIQAHMQELKRMVGEKTPSLMRSHGISTLTAAEMLIVVGDNPERIKSEAALAKICGVCPIPASSGKTNRMRLNRGGNRRANAALYLIAITRMRDHEATKEYVIKRTAQGKSKREITRCLKRYIVREIYRELCAPKHPISAH

SEQ ID NO: 170997 - protein, 346 aa, unidentified
MNKHSMIFIGLDTHKEFHEVAYCEEQRGATPVHYGRIPSLKVSVKKLIRQFESKYPGATVHVVYEVGPCGYWIYRLITSLGHCCYVVAPSLIPKKPGERVKTDRRDALKLVRSLKSEDLTPIYVPEPENEAVRDLSRAREVAMKDLKEAKYQLKALLLRNNIRHEGTANWSKKHLRWVTELILPHPAQQIVLQEQLQTIEERIRRLERLDNELTHHVHQWRYYPVVKAIQAMRGVRLLVAVGVVAELGDLHRFDHPRKLMAYLGLVPSEQSSGGKRHLGAITKAGNGRARRLLIEGAHSYRYPANVSTELQLRQEGLPKDIVDIAWKAQLRLCKVTVHQGPIDRQL

SEQ ID NO: 170998 - protein, 375 aa, unidentified
MLRLGHQARTIAPGGRPRLNYLRQNTRLLRFALLLRAVTGGVDTHADVHVAAALDPIGGLLGVAEFPATAAGYARLLGWLGGFGTVCLVGIEGTGSYGAGLARHITWAGVRVVEVDRSDRQDRRRAGKSDPLDAVSAARAAQSGRAAGASKGRDGAVEAIRVLMVVKRTARSERTQTINQARSLVLTGPDDIRVRFIHHTTSGLVADLAGLRPRPGATVGYATRIALRELGRRAQFLGGQLESLDQLILPLLTAHAPGLLALYGVGPDTAALLLIAAGDHPERLRSEAAWAHLCAAAPIPASSGKTVRHRLNPGGDRQANHALWRIVITRMSSHPPTRAYVERRSKEGLSKTEIIRCLKRYVAREVYPHLRPPAG

SEQ ID NO: 170999 - protein, 332 aa, unidentified
MSYQLFVGVDIAARTATVQWRDQDGHWGPSEVIAQNPAAYAALVAQLATLAAPKATLVVMEATGTYWQPLAWALYQAGLVVSVVNPAQPCHFARMYLKRAKTDAIDAHLLTDFAFFVRPAPWTPPPAVCEQLYQRLALREDFLKTAAQDRNRLHALCHAAHPDPTLVTRLEDHLAFLQAQVDDLTREIAALLETDPAWAVHARHLRSVPGLGPISVAWILVATLAFARCDSPEQAASFAGLAPHARDSGTSLHGHRSVGGAGHAALRHTLYMAAASACRFNPVIQPFYQRLLARGKPKKLARLAAARKLLHIAWAVVVKNCDFDPAFSISGS

SEQ ID NO: 171000 - protein, 377 aa, unidentified
MMRRCYSLPMKTKTTPCIVPTPTPVVTNGFTLGLDLGDRSHHVCVMDDTGQIVREGALPNTRPALAKLLADYPRATIALEAGTHSPWISRYLTDLGAHVLVANPRKLHAISRSERKCDQRDAQMLARLARVDPALLHPIQHGTAQAQHDLLGLKLRDALVRTRVNLINAVRFTLKSLGHSVRNPSSESFHKTVLADIPADCLPVIQPLLTVLAQVTEQIKGMEHDLVQRSRKEYPATQRLQQIAGVGPLTALCFVLKIGDPQRFGRGRDVGAYLGLCPRRDQSGGTDKQLRISKCGDGLLRRLLVSAAHYILGPFGPACALREHGQRLTGTGSVREKKRAVVAVARKLAVLLLSLWKHGTEYEPRATASPVLVMAPA

SEQ ID NO: 171001 - protein, 383 aa, unidentified
MLHIQNIPSGDKTKGDFSLYIFYFQNYLNMRKIVKQVAAIDVAQKELVVCLGYMYDDWSPELYAHKTFANTAKGFEALLAWVKKQSHQEVAVRFVMEATGVYHEAVAYFLVEKGEEVSIVLPNKISSYMRTLDVKTITDKTASEAIARFGLERKLNTWHAPKDIFRKLRQLTRERDQIVQERTIVKNQLHAEEVEAYPNNSSLTRIKARIKILDKQEQEIKKELADLIATDMELKKMVVLICSLPGVGLLTAAIVLAETNGFELIRNKRQLASYAGFDVKEKQSGTSVKGKPKISKKGNKHLRKAMHLPALTAIRHDERFKAIFARLVSKHGIKMKAAVAVQRKLLEMVFTIYKTNKKYDKDYLTKEIKEVQEIAEAEAQEAV

SEQ ID NO: 171002 - protein, 353 aa, unidentified
MELDKYIGVDAHSSTLVVHARDAFGKVILQSVVPTNAEAIVQCIGGLRGRLHVTFEEGTHAQWLYDVLRKRVQDVLVCDARESRLLQDGSKGDFIDAGKMSHLLRMGALKPVYHERHGTAMLKELVRSYDGLVEDSIRVMNRIKAMYRSRAIPTAGQSVYRPGQREPYVEHLQDPGATKRVGLLYEQLDTLIGLRRQAQRAMVREAQRHPAYGILRTIPQLGPIRIGRLIAIVDTPHRFANKAAFWNYCGFAVVLHTSGERKFVDGQLVRTQKVVATRGLNKDHNPKMKEIFKSAAMKAGARGPFAAYYAALIAGGMKPELATITLARKMSAITLAVWKKGEAFDPKKLMPTS

SEQ ID NO: 171003 - protein, 348 aa, unidentified
MTIIGGFDLHRAQITFDYMDTETGEVSTGQIRPATRAALRGWLDKRFCGRDDVMLAVEGCTGWRFVVEEMQRAGVEAHLAEPADTAGKRGPKKRAKTDKADARLLRELLCKQDLPESWIPPQHLLEVRTLGRLYLSLAAQRRAWLQRIHAQVYHQGVAPIVGLLTCEGRDQLAAAELSAAGRQSVQTALSMIEALDQQIEPLRAQLKSLSDRLPGARALKAHYGIGPLCAVIIWAELGDCRRFSSSDQAVRLSGLDVSVWSSDRKRAPGHLARQGPPALRWALFEAAMCAARPGSPDYDYYKAVSDRLSSKRGALSVARKLARWCHHTLRELGEQAMAPPHEPKAQAA

SEQ ID NO: 171004 - protein, 306 aa, unidentified
MVTLGLDPHPGTHTVVALDLNGSLLESLTVLNTTEGLAQLQLFASQFSLRRWAIEGAGNHFIATFVKGLLERGETVYSICPNLTSQYRSRRGRKKNDVVDATNVARALLANPRLPLLRSSHSQRELQELSRAQRRLSEQLKSNRGALKELADDSPVREILEQVIGILVIQLKELRRKLRSIVSRVMPRLLELSGIGAIMAGTLLAEAGDPQRFPSADHFASYCGAAPVERGSGQNTRMQINPGGNRRLNWALHVIAIVRLRVDGGRSRRLVERLTSNGKSQRAALRLLKTYIAREIFRTMRQCHRS

SEQ ID NO: 171005 - protein, 355 aa, unidentified
MKPTTIGIDLAKTVFQVHGVDARGKGVIRKALKRAQMATFFANTPPCLIGMEACGSAHYWARKLQGLGHTVKLMAPQFVKPYVKTNKNDAADAEAICEAVTRSTMRFVPIKSVEQQAILALHTVRQGFVKARTAQANRIRGLLAEFGIVIPQGIGHIATSLPEILEDGENGLPGAFRQLIERLGAHLKELDRQVQELDVQIQLWHRSHAASRRLADIPGIGAITASALLGSICDAKQFASGRQFAAWLGLVPRQHSSGGKQTLLGISKRGDSYLRTLLIHGARAVIRLAENKPGYDGSWLAGVLKRRHKNVAAVALANKKARIAGALLAHDRESATGYTPPASSRCFTAPLAAGQ

SEQ ID NO: 171006 - protein, 355 aa, unidentified
MTSTQYIGMDVHKESISIAVRNAAGKIVMECVIETKASTILQFMDGLRGDVQVTFEEGTWAAWLYDLLKPHVTKVVVCDPRRNALLQEGNQNDRVDARKLAELLHNNQLRSVYHGNHGLRTLKELVRSYLTITQDVSRVMTRVKAVYRSWAIPCTGKQVYAPHHRAEWLAKINEPGVHRRAEFYYQQLDALRCVRQQVRRELLAESKKHPAWKRLCGIPSIGPIRAAVLLGILQTPHRFRSKRQLWTYSGVGIETSSSADHQVVKGQLERKKKPVEIRGLNRNFNHDLKNLFKGAAIVAATKPGPFAEFYAELVAKGMRPEMARLTLARKIATIVLIVWKRGVCFDAQHLKPQTA

SEQ ID NO: 171007 - protein, 288 aa, unidentified
MYFIGLDVHKKTISYCVKDAAGRVHQEGKIASTRRELDGWIRTMPQPRTIAMEATIFTGWIYDHLLPHAERLKVAHPLMLRAIAASKKKNDRIDAGKIADCVRCDFLPECHMASTEIRDRRRTLRYRNLVIKQMVQMKNRISGLLMETGVSYNKQRLHKVGYFAELMMSNEEVHESIRPLLKLSRDMISRSQKLDYALVSSLQRDPVLKERLRRLRTVPGVGPITALTWALEIGDYTRFPSIKQAISYCGFVRRREEFGREGDADADFQAEEQAYPASTDRGCQARAQ

SEQ ID NO: 171008 - protein, 496 aa, unidentified
MYKLSVRASLSGATICALVPLSTSVGLVPWRVGHDGCPVGSRAFERQYRFRQASWWLVQHGSMKIMANDTINWFAAVDWGSEQHQACILDAAGKIRGERAFAHGGAGLGALCDWLVSVADDPGSVAVAIEVPHGPVVDALHDRGLAVYAINPKQLDRLRDRVSVAGAKDDRRDARIAAAGLRTDPQLFRPVRIGDPVVVELREWSRLAAELQQERVRLGNRMRQQLWRYYPQLLELTDDVAAEWVLELWMMAPTPAKAARLRETTLARLLKQHRIRKITAETALRILRAPVLKVATGVTEAAVLHLRSLVARLRLANREFRQAERKLDELCAALTRTETAGATAPSDAAILASLPGVGRTTLAALLTEASGPLARRDDRALRTLSGVAPVTKRSGKTCIVVMRYAAQKRLRQAVFHWARVAVQTDPQSHRRYEALRARGHSYGRALRGVADRLLGIACVLLQRQDLFNPQHDRLTAAASIQTSLCSTAAAILRSES

SEQ ID NO: 171009 - protein, 312 aa, unidentified
MEKLSYGGIDVSKDRLDVVVLPEGWFFSVSNDTAGWAELVARLRPLAVSAIGLEPSGGYERGIIRALLAAGLSVRRINPNKLRQFARARGVLAKNDRLDARLIAEYVAIMPTRVVQRDDAVERLAEIVTMRRQLCDEHVAVDNQAAHLEDAMLRRLSKRRLIRLEADIRLLDKRLAEMVATNAAFAQLYELLTSMPGVGPVLAFTLIALLPELGKMSRKQIAALVGLAPYDFDSGKLRGHRSIYGGRMPIRNVLYMAALSASRYNPALKAFSNRLAHANKKSKVIIVAVMRKMITTLNAMLRDNAAWQPRSA

SEQ ID NO: 171010 - protein, 338 aa, unidentified
MTELKLISVDTSKHVFTLHGVGDRGEVVLRRELRRQQLEGFFAKLPPTEVVLEACGGSHHWGRVLMALGHRVRLIPPQYVKPFVKRNKNDRADAEAMCEAAARPGINFVPVKSAEQQAAAMVLSVRELLVKQHTQLVNAVRGHAAEFGVIAAKGTGHVEPLLARIADDPAVPEPARAMFAELGGRIAALSVRLTAIDRDLIRLHRSNPVSQLLAEIPGVGPISALSFALTVDVSQFRSGRHLAAWLGLTPKQKSTAGKPRLGGISRQGNERLRQLLVLGATAVVRTVKPGSRHASAWLLALLRRRPRKLAAVALANKMARVVWAMMTSGEAYRPATAA

SEQ ID NO: 171011 - protein, 356 aa, unidentified
MRSLRSHTQEPSIDQITRIGVDTSKSVFQLHGVDEQEQPVLLKKLRRQQVLSFFAKLAPTKIGIEACGASHHWARALAELGHEVVLLPPQYVKPYVMRGKNDAADAEAICEAMSRPKMRFVAVKSAEQQAAQMLLGVREGLLRRRTQISNQIRGYAAEFGHVAAKGLSRIEALLAELADDGSLPSLAKEMFAVLDGQYRHVDAQIREVDAKLKSLHRSDEQSRRLAEIPSLGLITATALSVKVADPNAFRSARDFAAWLGLTPKDHSTAGKSRLGKITRAGDEMLRSLLVNGATAVIRQAMSGKGRISAWLAALLKRKPRKLAAVALANKIARIAWKLMVSGERYDASRGILPVSA

SEQ ID NO: 171012 - protein, 419 aa, unidentified
MSFKILKNNCCGLDVHKTWIFACIGITDSNNRTEYKQARFSSFTKGLQELCDWLAKYSCNDVCMEFTGKYWIPVFNVLEKNNIWVTLSHPKYTKPQKGNKTDRKDAKWICDLYMCGMVKPSFIPPADIRELRDLVRYRFKLTCMITGEKNRVHNCLTVSNLKLDDVFSDIFGKSSRSITEQILQHPGETFDVTPFVDSRCKTPIEQIQAAVDGAVSAQQAVKLRQCLNHIDELEMHKAEIEREIFRLSDKYEDILTLIRTVPGFNKNPMTAIQVLSEIGGDMSVFPTAKNLVSWAGCCPRNDQSNQKIKSTRISRAGSYFKPVLVQIANALIKSKKHPEFTNRYRRIKARRGHKKAIIAICRMILTAIWHILTDLKPYTPEGFLEPRPVNEAKTLTTSQALNLLKQRGYIIKDDGVPVS

SEQ ID NO: 171013 - protein, 348 aa, unidentified
MAHFVGLDVSVQETAVCVVDEAGKVVCEQKVATEPDDLVGLLTSIGGDYGRIGIEAGPLSQWLVNGLAEAGLPVICVETRHMNSLLKAQQVNKSDRQDARGIAQMMRVGLFKPVHVKTLASQEKRMLLTGRKLLQRKMLDIEFDLRGTLRNFGLKVGVVGTAGFEARVRDLVAGMSSLSAIVEPLLTVRRVLRQEFARLHKMLLEVVRQDPVCRRLMTAPGVGAVVALTYRATVDQPQRFVHSRAVGAHVGLTPRRHQSGEIDYDGGISKSGDAMLRTMLYEAAQTLLTQSRHWSWLKAWGTRVAQRRGMRRAIVAVARRLAVILHRMWVDGSDFRWGRDPAATVQAA

SEQ ID NO: 171014 - protein, 363 aa, unidentified
MFTERTSVGLDVHARSVAAAAIDGVTGELSQARLTPSPDHIRSWVQGLPWPVAVTYEAGPTGFDLYRVLTAAGVRCVVAAPSKLQKPAGDRVKTDARDAIHLARLLRLDEATPVAVPSVDQEAARDLVRAREDCRGDLMRARHRLSKLLLRHGIVYCDGDAWTGKHDLWLRHQAAAQLTARATRLTFDSDYENVLVAKARRDRLDVAITEMAANSEFTPLAHRLGCLRGIGTLTGFGLAVEIGDWHRFTGNSIGSFVGLVPSEHSSGQSRVQGSITKTGNTHVRRLLVEAAWHHRTRYRVGKTMRDRWELAPVAARVRGDEGNRRLHQRWVRFIDHHKRPTIANVAIARELAGWCWSLAMLEQ

SEQ ID NO: 171015 - protein, 412 aa, unidentified
MAVFCGIDWAEEHHDVALVDGEGTLVAKRRISDDAAGFTALVQLLADAGDTEDQRIPVAIETNRGLLVACLRATGRQVFTINPMAVSRYRDRYSVSRKKSDAGDALVLANILRTDLAAHRPLPSDSPLAQAIAVLARAQQDAVWDRTTAHNKLRSVLREYYPAILDAFADKRGGLLRSEARTLLAAAPTPHAAAELSTAKLRALLTRAGLQRNIDPEAYRLREILQREYLHHPQLVEEAFGRQALALLHQLDAACASAEDLAAAAAEQFDRHPDAEIITSQPGLGSLTGARILAEIGDDRTRFTDARSLKAYAGSAPVTRASGKAITVLHRRVKNQRLAATGYIWAFAALTASLGARAHYDRRKATGDRHIAAQRNLFNRLIGILHHCLQTRQRYDETTAFAATAIPTAAVA

SEQ ID NO: 171016 - protein, 387 aa, unidentified
MKVAGIDVHKKVLMVVVVDANTPEEKPARRRFVTMPSELQRLLTWLREQGVEEAVMESTAQYWRSVWLELEPHMRLHLAQAFSNRAPRGRKHDFKDAERLVRRLIADELILSFVPSGEQRIWRNMTRMKLQLRRDRVRLQNQIECLLEEMRIKLSIVVSNLLGASGLRILHALAKGETDPRKLAQLGGERLQCTEEQLVDALTGRVQPVHEAMLALQLQRLQLIDQQMERLNHMIAAAMKPHQDAVIRLAEVPGLGVDSAQQIIAEVGAQATTFSSAAELTSWVGTCPGLNQAAHAAVCKKGSYFQALFRRLLPRLGYKSAIWAVAHRLCRLVWKILHEGVRFIEQGAEIGPREKKKRAQMLARALRKLGYEVTITPINQLAPKPVV

SEQ ID NO: 171017 - protein, 414 aa, unidentified
MLKIVYPICCGMDVHKSFVYACIASTNEQGVTTYKSKRFSTFTSDLRFCASWLAENNCQDVCMESTGKYWIPIYNILEPTCNIILAHPKYVKAIKGKKTDKKDAKWIADIFKHDLVSGSFIPPADIRQLRDLMRYRWKLTNFNVGEKNRAQNCLTVSNIKLDDVFSDVFGKASTNIINRLLENPTEKVTDVSSFRTKGMKATDEEVLAAVDGEICPEQAEKLRIIRSHMDNLELCRLNTESLILSLAEKYMPQINLVSTVPGIQTFAAIGVISEIGVDMSVFPTSKHLCSWAGLTPQNNESAGKKKTTRISRAGAYIKPLLVQCALCAIRVKSNPEIRRRYLNIKKRRGHKKAIIAIARMLLTAIYNILKKNEPYNSELYAHCNNTPPEHRAVSVEEAIFILQRQGYIVTPCVT

SEQ ID NO: 171018 - protein, 340 aa, unidentified
MNTTQVAVDLAKSVFQVAVSSTPGRVDEQHRLSRARFHRFFAEHRPVEVLMEACGSAHHWGRELEALGHTVSLLPPSDVRRYRDGDKTDRADTKAILEAARNEAIDSVPVKTIDQQAITALHRLRSGYLATRTARINCVRGLLREFGVTIPVGARHLAPRARAAIDDGSVPAYLEPVLLDAITEVEELRRKAKDIEAQLKRLVRHMPDVTLLMSVPGIGVLTATALVAYVGDVGRFPSGRHFAAYLGLTPREHSSGLSRRLGRISKRGNTYLRMLLIHGARSVLRAAKLTEQPDALRAWALSVEGRSGHNVAAVALANKLARITWRVWRDHRSFESRLAA

SEQ ID NO: 171019 - protein, 402 aa, unidentified
MNAVGIDVSKGKSMVAIMRPFGEIVSAPFEIKHTAGDIHSLVELINSVEGESRIVMEHTGRYYEVLAHQLSKANLFVSAINPKLIKDFDNDSLRKVKSDKADSVKIARYALDKWQNLKQYNVMDELRNQLKTMNRQFGFYMKHKTAMKNNLIGILDQTYPGVNTYFDSPARSDGSQKWVDFASTYWHVDCVRKMSLNAFIDHYQNWCKRKKYNFSQSKAEEIYGKAKELVPVLPKDAITKLIIKQAVYQLNSASTTVESLRTLMNETASKLPEYPVVMAMKGVGTSLGSQLMAEIGDVSRFTHKSAITAFAGVDPGVNESGTYEQKSVPTSKRGSSDLRKTLFQVMDVLIKTHPQDDPVYQFLDKKRAQGKPYYVYMTAGANKFLRIYYGRVKEYLSSLPES

SEQ ID NO: 171020 - protein, 338 aa, unidentified
MTSKISILAIDLAKGSFQVCAVGFDGTVLYNRALSRNRLATLPGEQPACVVAMEACATSHHWGRMAQSHGHEVRLVPAAYVKPFVKRQKNDRADAEAIAEAAMRPTMRFVAVKSAETQGRAVAFRTHQCLVRQRTQLINALRGHLAEFGLVAPKGPASLKLLENALADESSDLSDPVREMGTVYLEQIARLTDVIERLANELEDASKTDCELRRLCTIPGIGPVTAGAVVAFAPDLDTFDSGRNFAAWLGLVPRQRPTGGKARLGSVSKMGQTDIRRLLIVGAMSVIRWVVRKGGSSNRWLAALVARKPRMVAAVALANKMARMIWAVSTKQENYRMA

SEQ ID NO: 171021 - protein, 406 aa, unidentified
MSQEKPVPTRFIGLNVHKHYLVAIGVDTELNQVLGPRRVPLVHLDSWMRKALTLQDAVVLEMTTNAFQLYDDLLPHVHSVTLVHPPHVKLITRAQVMTDKIAAETLARLHAVGLLPGVWVPSLEVRDQRALIAQRTKMVRLSTQAKNRLHAVLHRHHLPPLPGDLFTAHNRDWWLGLDVSSLERVRIQSDLDTLVFARSQITLLEETLTALAAQDKRVPLLIQLPGIGLISAMTLLAAMGDIHRFPSDKKLVGYAGMGGRVHDSGLSHRTGRITKAGRRDIRTAMVETAHVASRTHAHWKAELARLEPRLGRNKAIMAIARKLLVAVWHVLSKECADRYADPRQVARKLLQHAYRLGRTHRPHGQTTAQYVRHQLDCLGLGADLTAIRYGSKTIALPPSRLTSADN

SEQ ID NO: 171022 - protein, 371 aa, unidentified
MIGFSRRGRDRPSPPWVFEDRSVASVVAPIPIQEPEQLPGPLEPAYARPGLEDKTLSASSVFVGIDVSKSRLDVAIHPGGEQFSTGNDEAGLARLVERLAGQAIACIVLEATGGLELPAVGALIQAGLPVVAVNPRQVRHFAKAMGRLAKTDQIDARVLAHFAEAAKPQIRPVPDEATLALSDLLARRRQVMEMLTAERNRLIRSKGSVREHIASHIRFLEEEADRLDHELAHLLKESPVWQEKDDLLKSVPGVGPVLSTTLLAELPELGSLDRKKIASLAGLAPFNCDSGLLKGKRMIYGGRAPVRTALYMATLVATRHNPVIRECYGRLIGAGKAPKVALVACMRKLLVILNAMVREGIPWKEQACSLT

SEQ ID NO: 171023 - protein, 339 aa, unidentified
MQHVAIDLGSTESQVCVRSADGTILVEKKHPTRKLEQLLKTWPPSRVVLETSSEAFRVADRAKAAGHDVRVVRSTLSKELGVGDRGVKTDQRDARKLSEVSCRIDLPSVHIPSEQARELRSLARSRELLIETRTKAVSHVRGWMRTQLRTIRRGSTETFPARVRERAVEESQSIPLHIECVLTVIDTLNAQTTASMKQIRKLADSSELCRRLMTIPGIGPITAVSFVAAIDDVSRFKHAYLVQSYLGLTPGEDSSSKRERRTGITKAGPSSVRRVLIQAAWVAFRYRPHDPMVRWATRISERRGKPIAVVALARKMAGVMFALWRDDTSYSPLRAAMRT

SEQ ID NO: 171024 - protein, 416 aa, unidentified
MDVLVSRCAALDVHKDTVMAAVRTPGKGRARRQVVREFRTFTNDLVALRDWLVEERVAQVALEATGVYWKPVWHVLEEAASFELLLVNPHHSKNLPGRKTDVKDAEWLAQLLECGLLRGSFVPPKAVAQLRDLTRYRTKLLQERTREVQRLQKLLEDAGIKLDSVVTDVMGKSAREMIEALIAGERDPLVLADMARTRMRPKIGELQQALVGRFDEHHALMARLHLDHIDQLNVTADRLDAEVDRLMAPFAEPATRLMTVPGIGKRSAEAIVSEIGVDMTRFPTAQHLASWVGLCPGHDESAGKRRSGRARKGNGALRSAMCEAAWAASHTRDTYLSAQYRRFKRRFGTKSEGKAIFAVAHTMIVIVWHILASDTATYEELGADYFERRNDAAARQRYLIRELERLGNKVSLEPAA

SEQ ID NO: 171025 - protein, 320 aa, unidentified
MTYIGIDVSKDSFVAAYPSKSGYSTKSFLNTTSGVRRFIQSLPVESHCVMEATGNFSMLLLYLLQKANILVSMENPQKIKNFSRAMLSVTKTDEIDAKLIAMYGEKMNPAPYKIPSESIILLKQKRTVLRQLKKQLTMMTNLQHSLSVLPKQDPTAKVATEQTVKFLRKQISKMEEEITNLSNKEFKRQMELLTSIKGIGKNIASALIIATGGFTYFSSAKQISRFLGLCPTYQQSGTSVNVKGHINRNGDTHLRSQLYVIAFASIRSNSSCKEMYERLRARGKSGKVAIIAVANKLIRQAFAVVTNNRPYIDGYVSTLA

SEQ ID NO: 171026 - protein, 368 aa, unidentified
MDIIAPGRGDIVVSVDTHKEQHVGVALDGLGARVGEISIPANAAGYAQLLTWNGTLGDVGIFAVKGTGSYGSGLARFLRRNGQRVAEVSRPARKGERRLLGKRDAIDAEHAAREVLTGKKLSTPKWADGIVEAIRLIKIARDSAVRAHSQAMITLKAVLVTADDELRAALEPLSDVRLVLACSELAGEAGTDTPTSASRYGLRALVCRGLALHEEIKSHSAHLRRLMKAAAPDLVAAFGIGPDIAAEMLVTAGDNAERLRSEAALAKLCGACPIPAGSGKTNGRHRLNRGGNRQANAALYRAVIVRMRWHPPTIAYVECHRAPKCGQSWALQNRPVRRGRNGAVSWPLRSSQSAAAGVRACGGSAPAT

SEQ ID NO: 171027 - protein, 352 aa, unidentified
MIVLGADMHKRSHTIAAIAASTGEALGDKTIQVGEAGCIALLDWARGFGDDRAWALEDCRHVSSSFERFLLASGERVVRVATKLMSEARRAGRDRGKSDRIDALAVARAALREGLSGLPSAQLAGVELDIRLLVDHRERLIRSRVALNNDLLWHLHDLWPDLTLPKSAVVSKKWSTRIARRLARAEQTARVRIARDELRRLRELTVAADALEAEIADLVTQAAPQLLDEPGFGPLTAAKLIGEIAGVQRFATEAKLARAAGIAPIPVSSGKTNRHRLDRGGNRQINTTIHRIALTRARCHPETQDYIARKRAEGKTGLEAMRCLKRHLARRIWHLLQPPTPGQATTLSTSIS

SEQ ID NO: 171028 - protein, 361 aa, unidentified
MLKAIKITKKRIEEQILFIGLDVHYKQWNISVIGQEQLYIKGLSVEPNSKKLVEFIKSKFVCNQIKLAYEAGFCGFYLVREFIAEGIDAIVINPADVPTSDKDGRHKTDERDSLKIAMSLRANMLDAIYVPELEDEQNQALFRRRMDLVKKQTRIKNQIKLLLKKFGIKPKEQLDKKKKWTAAYLVWINEVAKQNTLLKNQLDSMLRELDFIKKEKKIIEGQLAELSKSTRYKSKYDSLIKIPGIGTIIAMSIILELIDMDRFQRFSNLASYVGIIPTEHSSGEKRHLGRMTKRSKAQFRTLLIEAVWITVSKDEAFKAYYKTLLLRMKSQEAIIRCAKKLLRRIYFILITGKDYKINYVA

SEQ ID NO: 171029 - protein, 376 aa, unidentified
MKKKRDREGMVTAALDLGDSESLATILSPDGDVVDSFSMSMSDDGYSSFASKVPKDARIAFEATSMAYPVSRRLTALGYSDITVAHSKELAWIVKSKKKNDRIDSLKIARLHMAHMLPESHLLSREEQVKRDLLIQRVTLGKEIGKMKLKLIAYLKREDVYLSLPESSDSFSRERRQAIRSMRFGGDGDDDDGRGLVVGTMMDRLEFLERQCAPLEEKVRTIVKDSEDIRRLMSIKGVDFYLASLASSYVGDVNRFPDDDHLASFLGIVPESWDSANVKRRGHMSKEGPSTARWAFSVMTDTVMRYNPRLKTYYLSVKKRKNSGSLAHVATMRKLVRMIDHMLRYKENWRWEDEASTAKKLANLDRGAEAKTMGGD

SEQ ID NO: 171030 - protein, 370 aa, unidentified
MGNRSMFVGLDVHKETIDVSIAEGHRGGEVRHYGVIASDLEPLDKVVRALRAPDRQLHFVYEAGPCGFGLYRHLTKRGEHCVVVSPSMVPKRSGDRVKTDRRDSLTLARLHRAGELRAIYVPDDADEAMRDLVRAREDAVVVGTQAKYRLKAFLLRQGRRYPGREGWTLPYRRWLTDLSFPTAAQHVTLQEYRDTIDETERRIGRVTEQLRHLAPTWRWAPVVGALQALRGVSFITAVALVAELGDLTRFGHPRELMAYLGLVPSEYSSGPSVRRGAITKAGNPHARRLLAEAAWAYQGIPRIGRQHAYRQEALPKVVCDIAWKAQLRLTTRFRRLVARGKAKPKVATAIARELTGFIWAIAQEVSPASQ

SEQ ID NO: 171031 - protein, 413 aa, unidentified
MLKIVYPICCGMDVHKSFVVACIASTNDHGVTTYKSRRFSTFTGDLHRCAAWLVENNCKDVCMESTGKYWIPIYNILEHTCNIVLAHPKYVKAIRGKKTDKRDTKWIADIFKHDLVAGSFIPPADIRQLRDLVRYRWKLTNFTTGEKNRAQNCLTVSNFKLDDVFSDVFGKAASAITTRILENPTEKITDVSGFRTKSMKTTNEQVLAAVDGEMCAEQAEKLRIIRSHMDSLELCKANLESLILTTAEKYLPQLNLIMTVPGIQSFAAIGIISEIGVDMSVFPTSKHLCSWAGLTPQNNESAGKKKTTRISRAGAYIKPLLVQCTLCAIRAKRFPEVRNRYLALKKRRGHKKAIVAIARMLLTAIYNILKKNEPYNAELYRCCNTPPEHRAVSVEEAISILQKQGYLVTPSAT

SEQ ID NO: 171032 - protein, 307 aa, unidentified
MNKAVVYVGVDVSKAYLDVAWAERSRRFANNKSGLSALMKWIQQSAVHLICEASGGYERGLLEAAEQNAIKLSLVQANRVRQYARAAGILAKTDEVDARVLCAFGSALQPKALAPLSAQQKQLRELETQRRHYSRMLTAEQNRLAQLKDKELQRLTRRLLAALKKQMAAIEARIATLIAQDQALDEKAQKLTSIVGVGTRTAVLLLAQMPELGTLNRAQVAALAGLAPFNRDSGTLRGKRTIFGGRRALRSGLYMAALVAARRNRILRDFYQRLRTKGKPHKVALTAVMRKLLLALNQTLKPTPCFA

SEQ ID NO: 171033 - protein, 339 aa, unidentified
MARYIGVDLHRNRFTVCVLAENGREYLSEHRLEQLPQFVRKLRPTDELAVEVTGNTRLFYNAVVSHVAKVVVVNPTQFRVIRQSVKKTDPHDARTLAFYLSKDMLPEVRMKDTLHAQLASLTQTRDTLVKQRTALKNKVNNILSAHGINLRKESLASDVGLDRVLEMTFDAIVATELRVIVGQIRALNQSIAELEKTIKAEGAKLPGHKNLKSIKGIGDLGATVLLTAIGNIDDFAHPGKLAAYFGIVPRVRNSNETEHSGRITKRGTKLGRTTLVQCALIAMRYSPYLAKFYHKVARRRSTGKAIIALARKFLSVIYHTLKNNWVFEDFPNFVIAGAT

SEQ ID NO: 171034 - protein, 352 aa, unidentified
MEHFIGCDVHTRNQVVAWIDEETGEIKKRRLEHESKEVKEFYAQFPRGTVVGIEATFPAYWFERLMGELGHELWVGDAARIRASEVRYQKTDARDAEHILDLLRTGRFPRIWVPSLGERDLRQLLVHRMKQVRARTQVKNQLHALAISQGVCRKGKLWSVKGRKELESLALLPWAARRRKELLETLDRLDEQIRELDRAVEEAGRERPEVALLRTHPGVGMVVGLAFVLTVGPIERFRNSRKLVSYWGLNPRENSSGGHQRLGAISKQGNTMMRWLLVEAAQTAARLDPQLRRIYQRLKKQKTSAVAKIAVARRLAVRLFWMLRTRNNYAQLVHMSGSPSSAVVPPTAEPNL

SEQ ID NO: 171035 - protein, 343 aa, unidentified
MQDVATVGLDIAKQVFQAHGADASGETLFNTKIKRENVLEFFSKLKPCLIGIESCATSYYWARQLLEFGHDVRLIHTRYVKPFVKRGKTDANDAEAINVALTQKTMRFVPVKTLSQQAAITIFRTRSLFVSQRTQLVNALRGHLAEAGLVAAKGIQNYSKLLKLMESAADTVLPTVMKQALTDICDQIHRLNDLVTKLDKEIERRVQHDENACRLLTIPGVGPKTAMCVIATIPDIHRFPSGRHFSSWLGLTPRTHSSGGRSVLRRITKMGNSELRTMLYLGGTVIMMRDKKTPIGRWAARLRARRPYKVAAIAVANRLARIIWALLTNGGVYDLTHGREASA

SEQ ID NO: 171036 - protein, 360 aa, unidentified
MTGTMTWAGLDVHARSTYAAAVEVLTGEVRRARFGAGVDDVVAWLGALPGPVRAVYEAGPTGFGLYRAARSAGIEIALVAPSKTPRASGDRVKTDRKDALRLARLAMAGELSPVVVSDEFVEAARHLTRTREHVRSDLLRCRHRVSKLLLVHGRVYDGTTWTQAHRRWLAAQRFEHAPTELAYLDRLAAVDGLIARKDALDERLSRLATDKRWWPTVARLRAFRGVDTLTALAIHLELGGDWQRFSSPRRLFAWLGLTPSLEQSGQSSHQGAITKTGSVYARRLLVEAAWHYARPPRIGVGLRNRQTGQPDHVLQIAWRAQHRLYRLYQRLAERRKPHNVATVAVARELAGFLWAAATAP

SEQ ID NO: 171037 - protein, 370 aa, unidentified
MLDTTTFVGLDVHARSIKAVSLDVMTGEVRCATFGYDAGAVAEWVRSVDPKAKCVYESGVTGFDLQKRLSGLGVDCVVGAVSKMIKPSADRRRKNDRNDAEFLARMLSVGNVVEVWVPDDECEAARDLTRALEDARDDLSRSKQRLSKFLLRHGLVFDERTPTGRRKGNWTRAHWSWIESIRFAEGADNDVLAYYVDAVRRAAEDKARLEGLVEAEARKPRWRKRVDSLRCLKGVDTASAADLVFEAGEFSRFRNARSFAAWVGLTPSERSSGESDRRGAITKAGNKHLRKALVEAAWHYLTCSGRPKEPARGQAPDRGARRHAAKGVRRLVERRGTLLARGVHGNKANVATARELACWVWAVGLMAEEA

SEQ ID NO: 171038 - protein, 357 aa, unidentified
MTKITQQTIGIDVAQKELVNTFSQRNEHSEIIIVGHKVFSNNSKGFKELMNWQKKIKLENLSVEFVMEATGVYHENAALFLHTNGLNVKVVLPNKAMHFQKTLDIKTITDKTSANALAQMGLEKNLDNWQPTHEVYNTLKQLSRERNQLIDEQTVIKNQIHAEKSGAWINENSIKRMKKRLLLIKKQIEETISDMQELVKNEPWLHTKLKYICSIPEVGFLTAVTVVAETNGFNLIRNKRQVVSYAGLDVIVKDSGTSVKSKPRISRRGNKYLRKAMHFPALAAIRNNDTMKDIFKRIVVKNGIKMKAIVAVQRKQLELIYTLWKKEEMFNTEFVQEKENSKKIEQATEVLALTELA

SEQ ID NO: 171039 - protein, 368 aa, unidentified
MSNVITSFVGLDVHRDSIAMGVAQTGREPPRFVGTVTPQWAPLSKALGRLGRRQELQIVYEAGPCGYTLARQLRAHGYACEVIAPAKIARRPGDRIKTDRRDALLLARAARAGELVSVTIPDERDEAMRDLSRAREDAVRARLKARQQLKALLLRHGHRYTGKSSWTAAHERYLAEVSFAQPAQDIAYAEYRGAVREAYERVERSTGALGAQLEHWRMRPVVQALMSLRGIDLIAAVTLVAEIGDFTRFARPRELMGFLGLVPSEYSSGTTRRQGAITKTGNSHARRVLVEAAWNYRFPARVSRVLQVRQEGQPKAVRDIAWRAQLRLTRRYRHLCARKLALNKICVAIARELSAFVWDIARQVKPVT

SEQ ID NO: 171040 - protein, 422 aa, unidentified
MKTTKQEMKMDREVWVGIDWGDREHAVSVVSAQAEPLDEFRVPNSPEGYRTLDERVGRLGRVQGVAVEATRHPLLLHLMEQDVALYLINPKLSKAWRSTETVSGAKSDDRDGLTLARGLAFRHATLHPVKQADAELARLSLLCEKECRLIHQRTALVQELQALLKVYYPAALRFFNDWTRPAAWDFLKRFPNAAALTHARASTLIAFLKGHRLGYSAHWKEKVETRASGLDWPVHPQEDVYQLYVGAIIGQLHVLAVALRQLRTVIEKAFDTMPNAQVIASLPGAGPKLAPRLAAIVGSPQVQEGGRTVLRGYTGVAPVTFQSGHRRVVRVRRMCDKGWRNTMHLFAWCSTRFSRWAAAFYRYRKACGDTHSTALRKLGDKWLKILRHMLNANEPYDEDRYLRQLERKNSPVWQFMQQSTCG

SEQ ID NO: 171041 - protein, 357 aa, unidentified
MKRDVSEEASVTIGLDLGDTYSYAFAIDADGVMVEEGRVRTTRAGIMRFLKDRDPCRIALEVGTHSPWVSRFVSDLGHEVLVANARKLRAIYCNELKSDRIDAEMLARIARLDPQLLYPIRHRGAVAQTDLARIRSRAALVRARTLLINHVRGSVKAFGKRLPKCGTRSFSSKAAAHIPEELQAALHPLLSTITELSQQIDRQQRAIVKLAADSYPETASLQQVFGVGPVTALTYVLTLQDPTRFQKSRDVAAYLGLTPRRRQSGDHEPELRISKTGDADLRRLLVQAAQYILGPFGPETALRVWGLTLANRGGKRAKRRAVVAVARKLAVLLHRLWLTGDVYAPAGLPTEQNAEAA

SEQ ID NO: 171042 - protein, 321 aa, unidentified
MTYVGIDVSKATFVVAYSSAKSSETKTFKNTTKGIREFIRTISPEENHCVLEATGNYSMLLVYLLSKAGFTVSMENPLKIKNFARVMLSVVKTDEIDARLIALYGERMQPAPFKLRSDSLLLLKQKRTVLRQLKKQLTANRNLEGSLKILPFIDSKCKKVLEKTIKFLEKQIEEMEEELTSLAEIEYKKQMDLLTSIKGIGATLAAALIIATGGFTYFDNAKQLTRYFGLSPTYQQSGTSVNVKGHINRNGDAYLRSQLYIGAMASLRCNTECKACFDRLRSNGKPGKVAIVAVANKLIRQAFAVVTYEKKYIDGYKSVKP

SEQ ID NO: 171043 - protein, 346 aa, unidentified
MDYFAGLDVSLETVSVCIVDGDGTVLLEQKVEAEPQEIIALLKEFGHPFKRVGLEAGPTSSWLFTELRAAGYPALCLECRHVKAGLSAMRNKTDRNDARGIAHLIRLGWFRVVHVKSDEAQQIRMLLVNRNLLLSKLQDIENSVRGSLKVFGLRLGQVTKRSFESRILDLVKGHPSIAAITEPLLRVRRVLLDEFRNLDRMAIKMARRDAVCRRLMTVPGVGVIVALTYRTGVDVPERFTRSRDVGAHFGLTPRRYSSGQLDYDGHISRSGDEMVRTALYQAAHVLMHHGRWSSLRGWAMRIAKRSGAKLAKVALARKLAVVLHRMWISETEFHWTKSEQALGPAA

SEQ ID NO: 171044 - protein, 408 aa, unidentified
MEVLYPRCAGLDVHQQTVVACARVASGSTVQQDVRTFGTATADLLALADWLAAHGCTHVAMESTGVYWKPIWHVLDGQFELILANALQIRTVPGRKSDVNDAMWIADLLAHGLIRGSFVPPAAIHELRDLTRTRKQLVREVAQHTLRIQKVLEDANLKLTSVISDVMGMSGRAMIEAIIRGEENAERLADLSQGRLKASRPAVIAALQGRVTSHHRFLLRLHLTQIDALEVAVRDVEARLGDALTPFQAAVDRLLTIPAVGRTVARVIVAEIGFDMSRFPTAGHLVSWAGLCPRLQESAGKRLSTRTRPGNPWLKTTLVQVAWVAARTRNTYLRAQFLRLKSRRGPKKAILAVAASILTAAYYILKDEVTYHELGADYFERRDKAHITKRLIRRLEDLGLSVEVRPAA

SEQ ID NO: 171045 - protein, 441 aa, unidentified
MEKAISFEQVNEAAAGIDIGSEKIFVSPDGLLVENFGTYTSEYYRCINYLQEQGIKRVAMEATGIYWISLYNLLESAGIKVSLVNPKETKQKKGKKTDVRDCRWIQKLFSAGLLKESFIPEGKLLEIRYLVRERLDIIEMGSTYVNKMQRCLELMNIKLTQVISQVHGTSGMRMLKAIIKGERNPDVLLLLCDERIKKQKGVEVIKALEGNYNDTWLFMLEQNISLWERHQEQITQIDKRIEVLLEDLTTGKSVEEGVVGKIKPVRHHRPQINNLHETLVKFFGVNVTSISGVNSYTCLRLIGETGADMSRFETKKHFTSWCGLSAGHHQSGKRSKWVKQAPCNKAGQIFKEAAQSLENSKYIAIGSFIRRLKARRGASVAYKAGARKIAEAYYNILTKGTAYVEQGLQQYEQQIKQREIATLKKLAKKHQVQIIEKQEAA

SEQ ID NO: 171046 - protein, 361 aa, unidentified
MSLSSWLVAGILPGVERQPLKKLAVDESALLKLLQRWREEAEKAGRRIERIAVAFEAGRDGFWLARWLKARSIEAHVIHAASVAVSREHRRAKTDRLDTALLKRAFLGWLRGERDHCKMVAIPTIKDEDAKRPNRERENLVSEQSRIINRMKATLIRLGIRGFNPKLKRAAGRLEDLRTPGGEPIPPNTLAELRRDMERRRLVRDQIRQIEEARLERFDHAPGDGSHPMVRLLARVIGVGIETADMLVHEVLSRNMRDRRAVARYAGLTGSPDESGRKRRERGLARSGNGRVRHGMIQLAWRFLLHQKDSALAQWFRARTENARGSRKRMIVALARKLLIALWRLVRQGVVPDGVVLRPAQ

SEQ ID NO: 171047 - protein, 408 aa, unidentified
MNDTRKRYIGLDVHKHYLIAIGVDDELNVVLPVRRVELSHLEAWMKKTLTQQDDVVLEMTTNTWQLYDELCAYAGSVLVVHPPHVALITRSQVMNDKIAASILARLLAKGLLVGIWVPPQDIRELRGLVAQRKKMTGLATQAKNRLHAVLQRHHLVPPEGNLFHESQSDWWLALPLRKLEQINLYSDLETLRFAQGQQERLTSMMEEIASQQEQVTRLLQIPGFGVVTAVTVWAAIGTIERFEDPQHLVGYAGLGTRVHDSGMSTRTGRITKAGRRDLRVVLIEAAQVAANSHPHWKAELARLQPRLGRNKAIVAIARKLLVAVWYILAQHKTDRFAQPEAIAQKFLKFAYQLGKANRPAGQSAAQFVRQRLDALQLGSELTSIAWGSKKPIPLPPSTNKVSDVPNTK

SEQ ID NO: 171048 - protein, 343 aa, unidentified
MGEVSTIGLDIAKSVFQVHGVDDAGTIVMRKRINRSKVLQFFGDLAPCLVGLEACPSAHYWGRELQALGHSVKLMPPSYVKAYLQRSKNDANDAAAICEAVTRPSMRFVPIKSEQQQSGLMLHRTRQLLVRQRTMLSNAIRGHMAELGIISAKGRNGTAELLQIIDNVADDRIPPVARFCLDLLARQYLTLNAEVASIDKRIHAWHRSCEESRRLEEIPGIGPIVATALVAEIGDWKAFRSGRGLAAWIGLVPKQHSTGGKERLGSITKRGNRYLRWLLVTGAMAVIRYARAHGTKRAWLTRIMDRRPAKVTAVALANKIARMAWAITVRGERYTEPKLLLAA

SEQ ID NO: 171049 - protein, 342 aa, unidentified
MQITTIGLDIAKNVFQVHGIDAKEKVVARKQLRRSQVITFFKALPPCLIGMEACATAHYWARELTKLGHEVRLMPAKDVKAYVKRNKNDAADAEAICEAVRRPTMRFVRIKSAEQQGQLMQHRTRDVLIRRRTQIINALRAHLAELGIVAAQGNAGVNELRAIVTDEQDTRLPIDARASVIVLAAQLEALESVIGAIEKRIKMQHRSSEASQRVETIPGIGVIGATAIVATVADPTIFRSGRDFAAWIGLVPRQDSTGGKQKLGPISKQGDRYLRRILVVGAIAVLRRARENPGKYPWLTQLLARRPFKVVAVALANKMARMAWALLAHGGTYRAPELAETA

SEQ ID NO: 171050 - protein, 353 aa, unidentified
MKTKKPAGEKLTIGLDLGDRRHYACVLDASGEILAEEAIVNTPEVLTAWSARYPGATYVMETGTHSPWVSRLLNAQGHSVIVANARKLRAISQSQTKSDREDAQMLARLGRADPKLLSPVRHRSEETQRALVRLKVREALVRNRVNLINSVRFLLKSLGVFVSSSIKAMAFARKVRAQLAPADAALVEPLLAAIEEVNAQVKALDAELETLALERHPVTALLRQIPGVGPITALCFVLTVESPDHFAHARAVGPYLGLVPRRDQSGQTDKQLGITKAGHVQLRCLLVNCAHYILGPFGPPCALRTAGERIAARGGKSAQKRAVIAVARKLAVTLLALWKTGADYQPQPLAQAA

SEQ ID NO: 171051 - protein, 415 aa, unidentified
MAQSRLPSPLDPSPFSYVVGIDIGSQHCSRCVLRPDKRVVHKASLFANTAAGFQLLQNQLAGLGVPASQILIGMEATSRYGDALFHFLQQQGYQLCLLHPAQTHQFAQRRGLRAKTDKLDAVTIAHVLLSGEARVGYVPDELISSYRELVRLHTQLTDEIARYKNEIHALLQVLFPEFSQVFADPCRPTALAVLQCYPSAAALSRVSVEELTALLQRLAPRNYGRQTAQTLLELARASVSPGLAPRARSTSMRILCDQLTHTRVNLAQVEAELEQLQEQDSGSQRLSGVPEFGDKTVAVLRAELGDVARFQRIDQAVASAGLDLAIRTSGKWQGQAKRATRGSGLLRRVLYLAALRSIHMSNSAFGAYYHRLIARGLRKGSALVAVMRKMLIVAVHLLKTGEQYDPARVASACGG

SEQ ID NO: 171052 - protein, 343 aa, unidentified
MVHYVGLDVSLKQTSICVVNQLGSIVREGVVDSEPEAIAAFVRLNAPGAVRIGLETGPTATWLWTDLKQLGLPVICIDARHAKAVLKMQINKSDRNDAAGIARIMQTGWFKEVRVKDLDSHSVRALLASRALLVKIKRDLENQIRGLLKNVGLVIGRTKFNVFTVRAEELIADRPELIAVVGPLLKARQAIEQQTDDLDRKVLKLARYDAQVRRFMTVPGVGPITALCFKATIDDPTRFKRSRSVGAYVGLTTRRHASGEVDWTGRISKCGDAMLRSYLFEAAGVLLTRVPKWSALKAWGIRLAKRSGLRKAKVAVARKLAVILHRMWIDGTEFNWSTKKAAA

SEQ ID NO: 171053 - protein, 319 aa, unidentified
MTQDDLVVVGIDVAKDKIDACIRTVTQRKTCPTTAAGQRSLIGWLRRHRVSKAVMEASGGYERVWARVLRQAGLEVRIVDPKRVRHFAESAGRLAKNDKIDAEMICWFAETFSEAPSQVDNPAHEEIKALVKGRQSLIDVRARLEMQKEHEAPALVRKARARLLKKLADEIAAIETAIATTIKTTPDFAKRAEIIQSVPGFAEGTAMALLGGLPELGQVSDEVAAALVGVAPYDDDSGKHRGERCIKGGRRWVRNALFMPCVGAATLNNPVFKAFYERLIAKGKPPKVAIVACMRKLIIILNTMIARGETWDPKRYSVT

SEQ ID NO: 171054 - protein, 339 aa, unidentified
MNRIVVGVDIAKRVFQLHWVEAATGEIVALQLKRERFLEHFANRSSCVIGMEACGGSQHWARSLQKLGHEVKLLSARMVKPFVGGNKNDAADARGIWTAMQQPGIKAVAVKSEEQQAILALHRMREQLVKFRTAQINGLRGLLMEYGEVMPQGRAGIRRDIPGALGRLSARLPAIVIDTLREQYARLGELDEQIIQIERRLREWQREDAATQRIAAIPGVGLLSATAAVATMGDAKAFKSGREFAAWLGLVPRQSGTGGRVRLLGISKRGDKYLRTLLIHGARSVLTHSTSPPEWLTELVKRRPKNVAVVAMANKMARTIWALSAYERAYQSGYVSRPA

SEQ ID NO: 171055 - protein, 375 aa, unidentified
MKKTLRFLGLDVHAETIAVAVAEPDGEVRSLGTIANREESIRKLVKKLGPPEQLRACYEAGPTGYVVYWQLTQLGVDCAVVAPTLVPTKAGDRVKTDRRDALKLARSHRSGDLTAVWVPDGDSEALRDLVRAREAAKQDQLRARHRLGKFLLRMGRRPAVGMKAWTEPYMAWVRQVRFERPAQQATLLDYLHEVDHMAARVKRLEQAITEAVKLASPQVQEAVKGLQALRGIAEISAVTIVAELGQISRFDTPRQLMGYSGAVPSEDSSGKRKRQGSITKTGNAHLRRIVVEAAWSYRHRPAIGPRLRKRQEGVPEPIKEIAWKAQVRLSKRYARLAAVGKDQRRIITAVGRELLGFIWAIGVKAETSSKQPMAA

SEQ ID NO: 171056 - protein, 355 aa, unidentified
MNDTKYIGLDVHQATISAAVRDSSGSLVMEATLETKAETILEFVHGLRGSLHVSFEEGTCAAWLHDLLKPHVTEVLVCDSRKNALLRVGNKNDREDARKLSELLFLNKLHAVYHGETGIRTLKELARSYLTITRDLTRVMNRLKAIYRGWGIACTGQQVYAPRYRAEWLAKIAEAGVRRRAEVYYQQFDVLAALRQEVRRELLAESRKHPAMRLLRQIPSIGPIRAALLIALMQTPHRFRTKRQLWAYCGLALRTYDSGEYRFVGGQLKRSKKAVTIRGLNKNHNHDLKNIFKGAATRAAATAGPLQNFYEARIANGMKPPMARLTLARKIAAITLLVWKKGVRFDAEQLKQQAA

SEQ ID NO: 171057 - protein, 348 aa, unidentified
MLADQLDYLVGVDPHRDTHALAIVDVRTGGVVFEASVEASGIGYARALELARGQAPGRRSFAIEGAGSFGAGLSRFLSGEGERVLEVGRLRRERRSGGKNDALDAIRAARSVLAASRAAEPRAGGAREALRALMAAREGAVNARRAALCQLRALLITTPESLRGELRPLTRAQLLRRLGSARPERRRDVELRGTLRALRALARRVRQLTAEERELAGEIETLARALAPRLLDQAGVGPLTAAQLVISWSHQGRIRNEAAFARLAGCAPIPASSGQTIRYRLDRGGDRRLNRALHMILVTRRRSHPATIAYIERRVQEGKSSREASRCLKRYLARHLYRLLEHGAPLAT

SEQ ID NO: 171058 - protein, 340 aa, unidentified
MSLYGGIDLHANNSVVVLINEQDEVLYQKRLPNALSTVLEQVAPYQTALKGLVVESTYNWYWLVDGLMEAGYRVHLANPAAIQQYDGLKYTDDHSDARWLAHLLRLGVLPEGYIYPKAERAVRDLLRKRTHLVRQHTANVLSVQNILVRNTGARRSIKQMREFPKRELERLLPEADQILAVTSSLAVLDCLRRQIKALEQTVQTRLKHTPAYEQLLTVQGIGTILAQTITLETGAISRFPTVGNYASYCRCVDSTKLSNGKRKGQGNVKNGNPYLSWAYMEAAQHAMRFQPAAQRFYQRKLAKSNKNIILARKAVAHKLARACYYIMRDLVPFDVTKAFG

SEQ ID NO: 171059 - protein, 416 aa, unidentified
MGRVVIGMDPHKRSATIEVLDEREKVISTGRFGTDRDGYRNLLAAGRRWPERVWAVEGCQGVGRHLAQRLVADNEPVLDVPAKLSARVRVFSTGQGRKTDATDAHSIAVVALRTPGLRAVQVDDATVALRLLVDRRDELGAARTLTVNRLHRLLAELIPGAAKTFLSAMQAKALLATVRPRDVVGKTRRKLAAELIVELEGIDRKIKVATKELRELVAATGSTLLELNGIGPSGAARLLGDIGDVSRFPTRGHFASWNGTAPIDASSGEQNRHRLSRAGNRRINRLLHIMAIVQLRNDTEGRAYYRRKLAAGKTPMEAIRALKRRLSDIVYRQLVTDQKRLRQKVNETDPGGQAGAATGSSAADSNPNVDASEKSLPGPAGFEATPAATAGPDRSSSRSRRPVTAPTRSGRQAQFA

SEQ ID NO: 171060 - protein, 482 aa, unidentified
MPLLVTNIERQTSNVSNKTFEPTELLASKRILRDRPPRLSIRPARNETYAHSIYNFTRWSIKMKAYNVDDFAALIGVDWADKKHDICEHPKNTEQYHYTVIKHKPEALHKWAMDLKQRYPNQKIAVVCELKKGPLIYALAKYDHLVLFTVNPSAVANYRKAFSPSGAKNDPTDAFIQTEIIKLHMDKLSVIEPESSSMRALAQLVEYRRSLVQDSVDLSNKITATLKNYYPQALEWFKEKDTFIFCDFISKWPSLAAVKKARKQTLVDFFNRHNSHYETVNNARLLSIKSALPLTEDEGVIAPNQLLIEVLITQFKVLLKGIEQLDKTIKQLYKKQNDKAIFDSLPGAGPQLAPRLLVAFGHNRERYTDASQMQKYAGIAPVIESSGKKTWTHWRYSCPTFLRQTFVEWAGFSIRYSFWAKAYYEQQKSKGKPHNSIIRSLAFKWIRIIFRCWKTNTPYDESKYLEALKRRGSPLLKFAITS

SEQ ID NO: 171061 - protein, 350 aa, unidentified
MQGNGRWIGLDLSKKTYEMCYFDQQGKVGRSGGETTKGGRAKLYAKVKPEDIVAMEVNSLAFVMEKEMRQIGCTVVILDASQLSVIYASTKKTDKEDALKLARLVKIYEKEDLPTVDVPTDKEYYRRKLTKECKTLKDDRTQEINRLHALFLQCGITTMKRSNLQTDANRQKVLPQLFGYEVGQAQRVCERLTLLDAQIKELEQLIKKECKEDKDIQRLQTIPGVGDKTALAFAAYVGDGKRFNNGDEVANYLGLVPRVDCSGSINRYGHITKKGNRIVRALLYQAAWSIVRSKHGGALKAKYFYMTEHGKGKKISITAIARKMAKLLYLVMKNKQMVYQELPFPDLQAG

SEQ ID NO: 171062 - protein, 475 aa, unidentified
MTNRGLYVGIDVANAKVDVSFLDGEGRPVRGPATYANEPEGWTALRTAIVSASRLVGRGVRVVCGMEATGNMHQRLEQALRAERRCPLEVNVLNPRAVKHFARALLKDAKTDRADSHLIALFLLRMQPKPMAPAPEGFEEFREATRTRRRLVEERTMAKNRLHKLLRYHFPGYRRILGKSLSSSLLALMADLPSPSAILDCTPEELATRSGGRRGHRVGAPLAAKLHHLATQAPHPELPAVSRLLIQTTARRILELNDLIRRFDQAIEEMLDELFPGQVLTTIPGIAKVSAAAILAEVADIHRFAHKTQFVGYCGLYPIVWESGEAKRRYRMTWKGNRMLKMTLLVASAAARQYNPAIASFYERLRRQGKSKKAAGGAIARKLAELVFTLLVTGEPWSPQKAAQGMQRAHAMLAHATQADEAGVPCLIGDVLTPTRSKRAHSRSGNSRTNSIPSAKPPGDPVPLTYHLPQTGRPT

SEQ ID NO: 171063 - protein, 445 aa, unidentified
MISKEKKAFPVLYPNAAGIDISSKEHYVSVNPVVTDEHIRSFGAFTEDLYAIADWLKCCQVDTVAMEATGIYWVSLFLILEEKGFEVILVNARHVKNVRGKKTDMKDAEWIRQLHSCGLLSASFQPDNFTRTLRTYMRHRKNLIEMCASHILMMQKALEQMNVKLQHVIADITGKSGQAIIGAILQGERDPEKLVALIDGRIKASRENLKRSLLGIWKEEHLFELRQSFDFYHLYQVKIHECDRYIQKSLNEKTDAGQPEKQATGRQYVKSNKNNLNFDSKEALMAITCTDLTQIFGISDSTAVEILSETGLDMNKWPTAKHFTSWLNLAPNNKVSGGKLLSSKIHKKKNRAGQIFRMAAYAVQRSKNWLAVFYHRIKSKSSAKKAITATARKIAVIFYKMLKDKVMFNPVNLDHYNESFKERQLKKLHKQAKQLGLTLSPQIVT

SEQ ID NO: 171064 - protein, 343 aa, unidentified
MKLSRVGVDLAKNVYQLHGVDRSGKTVLKRRLKRHQWLNVLLDKTEPGCVIGMEACASAHHWGRELQCRGYTVKLIPPQFVKPYVKSNKNDARDAEAICEAMSRPNMRFVTVKTVDQQDIQATHRIRAELMTQRTAKANQIRGLVAEYGLVTPKRLSSLRAAIPCWLEDAENGLTGDFRALLQGVWEDLRLLDDRVGEMDQKIKRLADNNEDCVRLQQLRGIGPMTSTAMIATVGDARQYQRSRQMAAAIGITPKQHSSGDRDRLLGISKRGDVYLRTLMIHGARAVVARAKHKDDRLSRWVTNIANKKHPNVAAVALANKTARMAWAILRNKTDYDPDFAIR

SEQ ID NO: 171065 - protein, 320 aa, unidentified
MSDNIVVGIDIAKHKFDVAVWAGENHYKMKHFPNDLKGFDAFINWLKPASNYHCCMEATGIYGDPLALYLSDKGLLISVVNPVQIHAFGKAELLRNKTDKIDAKLIARYCASQHPPAWQPAPLCERQLLALVRHRNKLNEMLLTEENRLSVADEVVCDSHAKIITLLKQELKDTELKLKKHIDDSPSLKKNKGLLESIPGIGERLSATLLAYIGDGSRFHHRGQVVAYAGLNPKLHESGQLKGRAHLSKQGSAELRKALYMPGLAAISCNKVEKKQCEQLTARHKGGKVGVCAVMPKLLRLAYGVMKSGTLFNAEIPLAV

SEQ ID NO: 171066 - protein, 411 aa, unidentified
MATMFCGIDWGESRHDVAIIDQAGNVLGRAKITDDAAGFSELLTLLAEAGDCQDERIPVAIEKDHGLLVSALRSTGRAIFPLNPLAASRYRARHQVSGAKSDATDAVLLANILRTDLAAHRPLPADTELAQAIRVLARAQQDMAWTRQRIGNQIRSLLKEFYPAALDAFVPLARGGLAHPEARTILAVAPTPAKADRLTRARLRTLLAKAGRQRRINTEADRIFDALRGKYLRHPSVVEDAMGIQLTALLTHFDAVCRASDDLEVAAREHFERHPAAPVINSFPGMGTLLGARVLAEIGDDRARFAAARGLKAFAGSAPVTRASGKKTVVTYRRIKNNRLAAVGTIWALSALSVSPGAKRHYDARRERGDWNRQAQRHLFNKFLGQLHHCLQSGATYDETHAFPPPLDIAA

SEQ ID NO: 171067 - protein, 314 aa, unidentified
MNASIFVGIDIAKSFLQIACLELKFETQLPNSLAGWNRLVKLLKIHGAKVLVLCEATGGLERGLVDQLQKADLKVCVLNPRQARDFARAANRLAKTDKIDAAMLAEFGRRMEPRPASKVAPWVRTLAALVGRREELTAMRTAENNRLGQNFLSFVAKQLNASIKRFNKDIKALEVQIDRLIESTPELKTKHQLLCAVQGVGSITATTLLATMPELGSLESNQVANLLGVAPLNCDSGQWHGKRRIYGGRRFARRVIYMASLTATRHNEILKAFYDRLVQAGKPKKVALVAVMRKLIIYLNRVLKPKNIAEAPCF

SEQ ID NO: 171068 - protein, 394 aa, unidentified
MLFVGIDVSKSKHNCYIVDFEGTIYEDNLQIKNNIQGFKTLSQTITSICKNNNLIKVKIGLESTGHYSTNITNYLYDEGFEVTNFNPIITNNKRKGNTLRKTKTDITDAKVIATMLFTDNSKSYSPITISYQIIELKSLTRYRFRVVRQRSKAKQSIVRLVTIIFPELTSLVWSLHQKSIQALLLELPTAKDIANCHLTKLTNLLKKYSKGKYSKDKAIKIKKLAAESIGSFNRAIAFELQQTIKLIQYLDTEIKTIDQKIKEIVDEIDTPLITIPGIGYTLAAIIIAEIGNIHRFVNPAKLLAYSGLDPSVYQSGQYNASHTRMVKRGSKYLRWAILQAVKTVAMRDRTFKDYLNKKLAEGKHYFVALSHAGKKLIRVIFYLLKNNTTFVAQS

SEQ ID NO: 171069 - protein, 438 aa, unidentified
MSTYAGVDWASEKHDVLIADETGEKVLAATFAHDEAGVRGLCRALVRHEVTLVAIERPDGLLVERLLDAGLRILALHPNQVAAARDRFRASGGKSDRFDAFVLCELARTDHHRFRVLEPDSDQTKALRALTRAREDLVGTRTALVNQLRAELARFWPGPLGLFTSLHSQISLAFLERYPSPTDARGLGAARLHGFLVRQHYTGRQTPAQLMAKLRRAPEARVGELELGTRRQLVLTLVTTIKTLNEQIKQLERQIATAIREHPDGAIFLSLFRKPNSVITAAELLAEIGDCRARYPTRDTLAADAGHAAVAIESGKRRAACFRWACNKRLRQAFVTLADTSRHHNPWAHDLYAAAIGRGHDHPRAIRTLGRGWCRIVWRCWQDRTPYDPARHRALQRHITVTIPTSSGPMPDLAANPADARRRRHPKGGPQGPSATRL

SEQ ID NO: 171070 - protein, 496 aa, unidentified
MIEIPAVIERCAGIDIGKRDLAVALIVGPADKDGEVTTRTFGTTVPELEKLKQWLIQEGCTSVAMESTGSYWIPVKNILEGSVEIVLVCPRKHKPERGDKTDFRDAKNLGHLHRHGLLTGSFLPDRNIVELRDLTRRRKKLLSNLAAEKNRIQKVLEVANVKIGNIVSDVFGVSGQEMVSALLSGEELEAEQVAQLARRKLRQRIPELTEALERHQMNEHHRWLIGQSVEHAVLLDRQMEELEERIKQRLEPYREQYELLQTIPGIKEMTGASILAEIGPDMGRFETAKNLCNWSGICPGNNRSAGKKKSSRIKKGNRFLLAALGEAGWAAARKRDSIFQRKFHRWVKKLGQNKANVAIAHSLLRVVYAILKAGRPYQAPDPKHMHALERAKLIRHHSKRLRDLGADDELISQMVAKITTPPVCSSGAEKQTEADASAPRIRRISPAKVCRGALGFRARQTRPQEYSIFKERAAGAPSQGRPKSKRINSTHKPKLE

SEQ ID NO: 171071 - protein, 437 aa, unidentified
MKQFLECCAGIDIGKREMTVTILTGSVEVEPIPRVGTFGTTVQELNRCLEWLLGNHCSTVVVESTGTYWVPVWNVLHERVAVIVANPEHVKARRGEKTDPEDSRRLAERLRVGDVRGSFVPSAQIVELRDLTRRRKRLLSAATSERNRIQKLLEQANVKIGNVVSDVFGVSGQRILHALLQQPQLPPAALAELAKGRLRHKRQALIETLQGHRLNDHVRWMIQHSLDHLVFLENQLTELSQRTLQKLQPFEREYELLQTIPGVAAETAAVILAETGGNMAQFPSPKHLTSWAGVCPGNNRSAGKQKSASIKRANKWLLSALVQSAWATVHQRGSIFQKRFYRQMQHRGRKRALIAAARSLLEVVWQVLQRMTPYHEPANEVLQERERGKKIRHHLQRLRQLGIDISALQLPPLSPSDATRLLTGTPHPLGVLGIHAR

SEQ ID NO: 171072 - protein, 416 aa, unidentified
MNAVGIDVSSRKSTVAVLRPLGEVVCLPFDVSHDADGLASLAEKLKALDGETRVVMEHTGRYYEAVAKALHEAGFFVCAVNPLLIKEYGANSLRRVKTDKADAVKIARYALDNWADLRDFTPMDAIRYDLKTLNRQFQLASKQRTASANNLIALLEQSFPGIRKCFDSPVRSDGTQKWVDFAHSFWHVDCVRKQPFAAFCERYRKWCKRHAYFFKLSNAEEVYALAKRAVVLTPKSKVVKVLVQEAANQLISISRSVEVYRAEMDRLAAMLPEYPVVMAMYGVGKSYGPQLMAEIGDVRRFERKQALVAFAGIDPMPNQSGDKNVRSNKSSKRGSPYLRKTLFNVIRTYLQCAPQDEPVFQFLNRKRAEGKPFYVYMLAAANKFLRRYYAKLRDYFASLDTLQPVAPIPTILKATL

SEQ ID NO: 171073 - protein, 317 aa, unidentified
MIGVDVCKDFLDAYARPLGISKRFANNPDGIAQLVAWVRSLAPERVIFESTGHYQKAAVGALLAEKLPAVVVNARQVRDFAKGIGQLAKTDDIDAGILAHFGEVVKTVVRPLPAPEVLEFRELCDRRNQLVRMLAVEKNHRHAAQGASEKVLKNIDKHIGFLEKQIEELEDRMDGIVAKSETFKAKDEILQSIVGIGPQVSRTLLVHLPELGTASRQSIAALVGLAPFADDSGTCKRIRHIRGGRGKVRIALYQAAVAAIRYCPTMKAFYAALKGRGKASKVALIAVARKILVLANALLRDNKTYQARTNSVCPKTA

SEQ ID NO: 171074 - protein, 425 aa, unidentified
MTRPQLTPPAGVLVAIDVAKARNEVLIEVPGSGRRRRLSVLNTRAEHDRLIALLSNLGQPVTCGFEATGNYHRPIAWRLLQAGFAVRLISSVGLARTREALHNGWDKNDPKDAQVMLHMIRIGASQVYHDPLAAGINDVQELSKTHDAVSRAKTEVLHRILTHYLPLYFPEVDRFRHNSRSDWFFAFLDRFPTPACITALSKEAFIAAAWDVVGRKVAKAQLLGDIYETAHSSIGLPVPPDAPAVSMFRLVIGEARGLIQQRDAIEATADALLTDSSDYKLLRRIPGIGPINALTILAEAGDLRRFSHHRQFLKFCGLDLATQQSGTFRGQTKLSKYGNARLRRTLWLAGQVAIRQRENGFRDKFERYIARDRHNADLRRKALTAITAKMARVVHAVIKTGADYRPFVEGPVPGGRTPLSRAVRA

SEQ ID NO: 171075 - protein, 432 aa, unidentified
MSQFLNDFVVGIDVSSEFSIVAMLAPTGELIRKPFRIDHNPAGFNKLLDILKKEEERLNRKPIYFVESTGIFHLPLFFFLKSNDLKGFVLNPLCVHSTKNFDLRKVKNDNKDAEAIARLAKYQDIKVSMMPEPQILALRMMTREYYAVSDMLTEMKNRLCTDLYLLFPGFLNVFSGPFGKTALAILRSYPSPRAVSEADTDVLTLLISKTSRKGLEWASKKVVLLRDCAQLASSMPSEFSLLDTKIKFHIDGIEHMQSSLDGIEAQIHKMIDSKEFPAKAKKNVELLDEIPGVGFLTAATLIAEIGDFSLFNSPKALTAFFGLDPSVNQSGKFNGDRNKISKRGTRIGRRILFTIAMASIRTTRNGAEINPVLREFYKSKCVSKKKKVALVAVMHKLLHYIYAVLRDQKPFVIKRPEDHQTWRTTKPQPAAA

SEQ ID NO: 171076 - protein, 422 aa, unidentified
MRSVALDVHLDFCEVAIVEGGEIRSAGRIETKPEQIQLFAGSLGPDDRVALEVTGNAWEIARIIEPHVAQVLVVSPSDTGIRQARAKTDRLDARTLARLLAAGSLDAVWMPDRETWGMRRRLSRRGQLVRGRSRAKNEIHAVLMRQLVGRPPVSDLFGVKGRKWLADLQLALEERETVDAAMRQIEFLDTEIAEVERLIASDALSSAEIKRLMSVPGVNVIVAASFLAAIGDISRFQNPRKLVGYLGLDPRVRQSGSGPAAHGHISKQGSVRARHALVEACWSAVRQPGPLHAFYERVRARRGHSVAIVAAARKLCCLFWCLLTREEDYAYAQPSLTKKKLRRLEITAGAPRYSAKAAGIWHANEAVRQAERELAHQAEVAYARTVRDWHATQAVKVGASATLGRASNKPSKGKAARQTTSP

SEQ ID NO: 171077 - protein, 330 aa, unidentified
MIKREKIELVRRSIIYAGIDVSCEMHRARFIDNLGQERIRGISFSNDREGFNKLEQHMKKFGIDHNIIFGLEPTGDYWKPIGYYLKEKGYKVVLVNPYHLKRTKEIIDNSQQKDDRKDSYLIADLVKQGKYFFPIIPEGIYGEMRELSISWRRTKQQITRLRCYLSNFLAKYFPEYRSIFSDILGKSSFYILSHYPLPEDIKRLGKERLTSIIKRVSKGKIKQEKIDRLYERAKDTVGIKEGRETAKMFLKEILKELKRLIERRERLRGKMKELLMRSGYGEYLLSIRGVGVVSGCLFLGEIGDPRRYTKSSQIEKLAGYNLVENSSGKR

SEQ ID NO: 171078 - protein, 472 aa, unidentified
MARAARRQGGSQLRKGHSKGARSAQLEQLNLNAAGIDVGADAHWVAVPPDRDERPVQCLGAFTADLYALAEWLRQCQIETVVMESTGVYWIALFEVLEERGFDVKLVEAHYARPVPGRKTDVKAGQWLQELHPYGLLHAAFRPDAQVCVLRSSLRQRGVLVASASRAVQHMQKALEQMNLTLTEVVSDITGKTGMEILRAILAGERDPQRLALYRARRCKHDQATIAKALEGHCRAEHLFALQQALEQYEFLQQQLQACETQIEACLLTFVTHVEVDSPPPAPARTRRSRQRHAPGFEVQVYLDAMTGVDLTQIDGIDALTALKVISEIGRDMTRWPTGKHFASWLGLCPGNKLSGGKRYRMRSKPTANRAATALRLAAQGLVHSHSALGAYYRRMRTRLGAPKAITATAHKLARLVYSMLRYGTAYVDAGQQAYEQKYRDRVLTNLQRRAKAFGYQLVHVEDRDGGVASTL

SEQ ID NO: 171079 - protein, 343 aa, unidentified
MTISILGIDIAKNTFQLHGADSTGKAVMKKRLPRHKLAAYAATLPTCTIVMESCGGANYWARVFQRSGHAVKLISPQFVKPFVKTNKNDANDALAIVEAASRPSMNFVPIKQVEQQDIQSIHRIRTRVVKNRTALINEIRGLCLEYGVMLTTGAAKVKPSLCAAIASCDNELTTSSRESMQDLYEELVDVEARLKKLDSKVRQLCRQSESCQRILKVPGVGELTATAIVAAVPESHEFRNGRHMSAWLGLVPRQSSSGDKQVLLGISKRGDRYLRTLLIHGARAVLSHRKVLDNNYDRWVANKKATLSHNKAAVALANKNARIIWSMLNTGEEFNYGVQRTAA

SEQ ID NO: 171080 - protein, 393 aa, unidentified
MRKPKKQKKPLNDLNRSLTPFDPNETLIGVVELSKGSWLVAGIIPGVERQPLKKLAPDEDGLLKLLERWRAEAEKAGHKIIRIAVAFETGRDGFWLARWLRKRGIEAHVIHAASVPVSREHRRAKTDRLDTEQLKRSFLGWLRGERDHCKMAAIPTFAEEDAKRPHRERETLVGEQTTIINRIKSTLARLGIRSFNPTLKEAPERLEHLRTPEGEPIPPNTLAELSRDLERKQLVAEQIHQIEKARMEQLKQAPKAGPNLMVLVLMRVIGIGIETADMLVQEILSRNLRDRRAVARYGGLTGSPDESGSQRREKGLARSGNARVRKGMIQLAWRFLQFQKESTLAKWFEARTKNARTSRKKMIVALARKLLIALWHLVRDGVVPEGVVLRPAH

SEQ ID NO: 171081 - protein, 335 aa, unidentified
MKEITTVGVDLAKSVFTVHGVDAAGRTVLRKTVRREKLMELMVALPPCLIGMEACGGAHDWARKFEAHGHRVGIMMARFVAPYRKSSKNDGNDAEAICEAVARPNMRFVPVKSAEQQAILSLHRVRQGFIEQRTATINRIRGLLAEFGMVLPQRAEQVRRAAVVMAEELPILAREAIADLRAHLSYLDQRIAQYERQLIELARQREAAVRVQRLPGVGPLTASAITASISDGHEFANGRQFAAWLGLVPRQYSTGGKARMGRITKRGDAYLRTLLMLGARAVLQSAAHKTDRLSRWAMALRARRGYHRAIIAVAAKNARIIWALLANNREFAPPA

SEQ ID NO: 171082 - protein, 436 aa, unidentified
MPESIPYLSVGLDVGADFTWMSIMLPNGILTGKPFKIIHSAPESRELAVKKIKEAQEMYSLESRCFLESTGIYHIPLLCFLRDQGFDCSVINPIITKNSTNMNIRKLHNDKFDSKKAAKVGLDASLKTSIVPDDAVIDLRNLVRDYYYFKDLQSAVVLKLHAELKMSFPAYLGVFSKVTTQTSLKLLEAYPLAVDMLAAPKDELVETIRSTARFGEKYALAKYDALCSAAKDAAVFGRALPSNALRIRMYIKIYREYQAHLDSILKELHKAVGKLEGTPVYERISLLQSLQGVGFLSAVVLIAEMGSFDLFSSPKKLYAYFGLDPAVKQSGKFNGDKVHMSKRGSSLARRILHMVALNNLKVDKGAKTPVNPVIHSYYASKCKSKKKNVAVGAVMHKICNIIFAMLRDNKPFELITPEEHCERYAAEHPESVNNAA

SEQ ID NO: 171083 - protein, 326 aa, unidentified
MRKPGSHTSRLKTQIALDISSKSLDVHFKSDGNAFSVPNTEEGLNRILKSLTAYDVSLVLMESTGGYEDLAACFFQDHGFDVVVVNARHARNFARAMGKLAKTDRIDAAVLADMAFMIDASHDRDRYIKPLTDEQRKRLSVMTVRRRQVVGLISTEKQRLTRADDWTRASIKKTIKALTTELRHIEQQISAHVKKNFVDLSKMLLSIPGIGEQAMTILIGEVPELGKADRRTISALIGVAPFNHDSGNFRGRRRIWGGRQSVRNVLYMGIISATRFNPVIRSFYNRLVSAGKPKKVALIACMRKLLTIINAMMRTGKPFDVGLHGV

SEQ ID NO: 171084 - protein, 393 aa, unidentified
MEGPIVSIDVSNGNSHYMCFIKNNKRFGKVKKIDHDIEGFKRLLEDIQKLEAETNEKVCAVFEATGVYTKPLERFLSKNSIKTYMINPLESARKRTDKLDPISISKVYYDKEEMMELKKKDETYNWLRKKNRLYEDQLNHLRKYKVTFQNQLSICFPGYLDLFKDGYSDIPMTILKKYPHPDLLKNKKAETVARYLEKNTCHNHKVSLEYALKIIEFAKKTYPGCEKDDVEVEIFKILLDKVIETQRECEKTLNEMITVASTLEEYRYISSIDGIGPNLAARIIAEIGDIEEFKSREALVAYAGLDPHIYQSGDQDGKHLKISKKGNKYLRCLLFLAVGCSIRGAKDNPVNRFYQKKKQQSNPLNSKAAKTACTAKLLKIIYGICKNKTTYER

SEQ ID NO: 171085 - protein, 409 aa, unidentified
MKLFVGLDVSSFDIKVCFLNGEGNELNSFTVTNDLPGATQLRDEILNVVQDESVSELKIGLESTSVYSFHPSMFLHNDESIRALGGRVLVMNPKQIANFKKSYSDMDKTDEIDAFVIADYLRFGRLPMSIVKEEQYVALQQLTRARYNIVRQITQEKQRFLQYLSYKCNTFTEEVESSVFGKAMMDLFLENYSLDELSNMPLEDLADYLRTKGKNRFPDPEYVAESIQKAVRSSYRLDKVVEDSIDTILSTSITLIRTFEKQIKEIDKSIKRIMKGLPQTLQTVPGIGPVFTAGIIAEIGQIERFEDETKIAKYAGLYWRKHQSGRFTADDTSLSRNGNQYLRYYLVEAANSVRRQIPEYSEYYAKKYQEVPKHQHKRALVLTARKFVRLVDALLRKNQIYTPERSVNT

SEQ ID NO: 171086 - protein, 249 aa, unidentified
MDQIAENGKAKITLLPCRDFKRNPEGITKFFQWAEKFASEKELHIVMETTGCYSQQLTDWINQSHPEVNVTIENSRNIHAFIESLNLPHKTDKLDAQAIARFGTERQPHPTKRPSKTILTIRELSRERTALIKARVELQNRQDTITSSIVRKINAQTLATLTMQIKRIEKEIKACIVEDEEILSEVHIMTTMPGVNFVSAYSILAEIGSLKQYSIKEISAISGLAPRIQQSGSSVHSSFMSRRSSGRLR

SEQ ID NO: 171087 - protein, 411 aa, unidentified
MLFVGDDWAEDHHDVEVMDASGRRLAKARLPEGVAGITRLHAMISQWLGDDVEDSEDVTARVKIGIETDRGPWVQALVAAGYTVYAVNPLQAARYRERLALSGAKSDAADAHMLADMVRTDSHQLRPIAGDSAEAEAVKVVARMHKTLVWERTRAAQRLRHALREYFPAALAAFEDLDAADTLELLAKAPDPATAAGLSISQISAALKRARRRDIPAKAATIQTVLRAEHLGQPAVVTAAYAASVRALVALLVTLNEQVKALQGQVEAYFGEHPDAEIILSQPGLGAILGARVLAEFGDDHDRYASAKARKNYAATSPITRASGKKRTVAARFVHNDRLIDALMTQAFSALKASPGARAYYDRQRARGASYNAALRQLANRLVGILHGCLKTGTPYDETTAWSHHLNEAAA

SEQ ID NO: 171088 - protein, 363 aa, unidentified
MNYVGVDVHKRYSVLCALDGSGRKLREARVEGNAPSGFGQFFACLDGPSKAVVEACWNWGLIHDELEELEQVEEVVLAHPHKTRLIADAQIKSDRLDAHALGTLLRGNLVARAHVPSRQTRARKNLLRQRLYWARLRTMLRNRMHALLDRQRRLELPQCSDIFGVRGLSFLRALELAQPDATLLREQLALHDLIAQQMKAQEKRIALDFAQEAMHRRLKSVPGIGVRLAAVIACEIDNIARFSNAEKLCAYAGVVPTTRSSGGKTMHGSLLYFCNKWLRWALVEASWVAIGCSPYFGTLYKQHRARGKKSNTAILIVARRMCRIIWQLLHEKRDFEKRPLSPKLNSFPGCSVVRLTAVKATSP

SEQ ID NO: 171089 - protein, 341 aa, unidentified
MPAQRHIGIDLHRNQFTCCVRLENGRNYLTEWKLEELPRFVKKLRPSDQIAVEMTGNTRLFHEAVAPHVKRVVVVDPNQFQVISHSVKKTDPNDARNLALYLEKDLLPEVRMKEKMQAQLASLTQTRDTMVKLRTALKNKVNNILSAQGINLKREALSSEKKLQEILAMRFDAMVQIELEVIIEEIRSLNQRIAKLEKTIVEEGSQLEGHKNLTSIKGIGPLSSSILLSVIGDIHDFAEEGKLAAYFGIVPRVSNSNETERSGRITKRGSKLGRTALVQCALIAQRYSPYLKRYYEQVKARRGTGKGIIALARKLLGIIYRTLKNNWVFADFPNFVLREAA

SEQ ID NO: 171090 - protein, 430 aa, unidentified
MGCIVPTAMYRERDDQCMPYEWFVGIDWGSQRHQVCVLDRDRRLVGERTVDHDGASLAQLVAWLWTLAAGQPERVSVAIEVPRGAIVEGLVERGFHVFAINPKQLDRFRDRHSVAGAKDDRRDAFVLADSLRTDHPSFRRLRLDAPQLLLLRELSRAEETLLEEFRRSANRLRDQLHRFYPQMLQLCSAADEPWLWDLLDLAPTPAQAALLSEEEVRRVLKTYRIRRVKAQEVLTCLQAQALPVAPGATEAAQTHCRFLLPCLRVLAEQLQACSQQVSALLHTLAQEPGAGAGPSDVAIVQSLPGVGRKITAWLFAEAAQPLAQRDYQVLRTHGGVAPVTRQSGKRRQVVMRRGCNPRLRHALYHMARVAMQRDAHFSQVYAALRAKGHRHGQALRTIGDRLLRILMAMLRERICYDASRIHREPVVQMG

SEQ ID NO: 171091 - protein, 337 aa, unidentified
MKITTIGLDIAKRFFHVVCCNDQGRLVSKKMLSRAQVLTFFQNHPSCLVALEACATSHYWAREIQKCGHKVKLIPPQHVKAFLIGNKNDYNDALAIAVAAKQHHIKSVGIKSIEQQDNQAQHKARELAVRQRTALCNQIRGLIAEYGIILNQGVNNIRKNIPLMLDDETKPLSGAFKTILRQLQVQLNALDTCIEAYGKLIVETVKTNDICQRVQTIPGFGPMVSSAYFNEVGNGSNYQRGRDVSASLGIVPRQHSSGGKDTLLGISKRGNSYLRCLLIQGAKAVVSRANTKNDKLSQWINRLVQTRGHNRACVAYANKMARMAWAITVSGEEYSPV

SEQ ID NO: 171092 - protein, 352 aa, unidentified
MKQAKHADFSGQNIYAGLDVHRKSWKVTIYTEAIEHKTFTQPPDPKKLVSYLKRVFPKGTYHAVYEAGFSGFWAYDLLTEMGVNCTVVHPGDVPTTDKERRRKTDARDSRKLAKQLRSGVLNAIHIPSIQERDSRGLIRQRKTASRDAARAKVRIKHFLHFHGIEIPSRYGNTYWSANFLKWIRECKIGNEAGQKTLLSLLRQYEYQRQEITLLNREIRTMSRSPEYADNVAFLCTLPGIGRLSAMIWLTELGNINRFKSFDKLCSYVGLVPLQHSSGETDYTGGLEHRGNKILRTLLIENAWVAVRSDTELLSVYQQYLGRMKGQMAIIRIGRKLLARIRYVLVNQCELAA

SEQ ID NO: 171093 - protein, 312 aa, unidentified
MQTETFVGIDVSKARLDGCVWPAQEYVTMPNDTDGIEKLVSMLREKHPTRVVLEATGGLETAFATAACAAGLPVSVVNPRQVRDFAKAVGALAKTDALDARVIARFAATIKPVPRPLRDAETAALASLVTRRRQLVLMRTQEKNRLGAATGRQRDGIKEHIRWLEAHIDKLDIDLTATLRQSEAWRVKENLLTSVPGIGPVACVTLLSLMPELGKLNRAEIAALGGVAPFNRDSGKYRGQRRIFGGRAEVRAVLYMATLAAIRFNETIRVFHAQLIARGKPTKVAIVACMRKLLTILNVMLKTNQPGNPNIA

SEQ ID NO: 171094 - protein, 412 aa, unidentified
MDVIVERPAALDVHKEQVTACVRFPVPDGSRAEEVREFKTTVGGLLVLHDWLKAHGVTKVAMEATGVYWKPVWAILEDDFECLLINARHVKNLPGRKTDVKDAQWLCQLLEAGLLRASFVPPKPIRRLRNFTRYRAAQIKERQREANRLHKALEDTGIKLDCVASDILGVSGRAMLDALCEGTTDPEVLAELAKGKLRKKIPALKEALEGRFDSYHALLIGAILAHLDFLDEQIERLSEAIEEQLAPLQPAVELLRSLTGIETRSAQNIIAEIGVDMSVFPTAGHLASWAGRCPGNHQSAGKRKSGKPTKGSKWLDEALKNAAMGAIRTNDSYLQAQYLRLKPRIGHGRALGAVKHSILCAIWHMLKNGELYRDLGGDYFRQRDPERQTRRLIAQLERLGHKVTLEALPEAA

SEQ ID NO: 171095 - protein, 412 aa, unidentified
MKDLLEISCVLDVHKEKIVACILTGPLGKPTRSEIREFSTLIPDMIALRNWIVSKNCHHVAMESTGIYWMPIYEILEDAFSGDITLLVVNARHMKNVPGKKTDMRDSEWISTLLRAGLLNGSFIPEKRIREFRDLNRYRKSVIRDITSQKNRIEKFLQSSGFRLSSFISDIFGASGRNIILHLIEHGQIDKTALDSCLKTKTRNRIDEILMSVNGTLSEHQKAFLRILMTHYDSLKKHLAEIETSLEEDMAPFALQVEQLNSIYGISTTASCAIIAEIGIDMKPFKTAEHICSWAGLCPGNNESAGKRKSTSVTKGNPYIKSMLCEIAWVIAGKRNTYLSAWYWRIKQKKGAKKAIVALARKLLVIIYTMLKQGTVFDESCFETRRKHCEQKQLSRYIRELEKHGYHVEAQS

SEQ ID NO: 171096 - protein, 391 aa, unidentified
MFYIGVDIAKNNHEASIIDSNGKLVSESFSFSNSIRGLEKFQKFISSFSIDSNNCIIGMEATGHYWLSLYSFLIDLGFSCVVINPIQSDAFRKMYIRQTKNDSVDSFVIAQILRFGEFSVSHFSDEDTFALRNLSRFRFALVDEASDWKRKLVAILDQVFPEYSSLFSNIYGVTSKELLSKYPLPEDMISIPADELAKMLSKCSKGRFGIDKAKEIQEKASNSFGVKFALKSFSFQIKQIIAQISFLEDQIFEIEDEISSMINSLCPVITSITGIGDVLGAAIFSEIGDISRFERANQLVAYAGLDVAVKQSGNFNATDTKISKRGSPYLRRAIWLAACVAAFKDPSLSVYYQKLRQRGKAHGTAIGAVARKLTNIIFAVLRDNKAYIPNI

SEQ ID NO: 171097 - protein, 431 aa, unidentified
MAEYEQESNKPRRDCAVNNLQRGIVMDVVYERCCGLDIHKASITACVIVNGKKEIQTFGTMTDDLLRLTAFLKERCVQMTAMESTGSFWKPIFNILEVEGIDAILVNAAHIKAVPGRKTDVKDAEWIADLLRHGLLKASFVKPRDQRELCELIRYRGSLIEERAREYNRLGKVLEGANIKLTSVASSISTVSGMNMVRALSEGVIDPELLASMAKGTMRSKQDDLKRALNGLIQPHQQMILKAMLNHIDHLSESISTLDAEIEARMSQDVELVEALDEITGVGKISAQVILSEIGTDMSRFQSADNLASWACMSPGSNESAGKKKSGHTQKSNSTLKKTLVQCGRAAANSKGTYLNSQYHRIAARRGAKRAVVAVGHSILVICYHMIKNRTRYNDLGTDYFQNRNKDAIVRQSVKRLQALGFTVSLEEEVA

SEQ ID NO: 171098 - protein, 380 aa, unidentified
MAVLYVGLDVHNDTIAASLAPGQSTEVRRYGIIGGSHDDVLRLIKKLSAAHPALALKFCYEAGPRGYPLCRFIRSHGAECIVVAPSKVPRQPGDRVKTDRRDADQLARLFRAGELTGIYVPDPQDEAVRDLIRARYQAQKQQHRVRQQLKMFLLRHNLRYAGTKPWTAAHLRFLATVKLPFAEQQFVFQEQVHTLSELSQRLERYEKEIASVVESWRWEPVVKALMSLRGVALLTGATLVAELGDLNRFATAPQLMSYLGLCPSEHTTGNDRQQGGITKLGNGIARKAIIEAAWNNSSPARISRTVLARQEGLPKAVTTAAWSAQLRLHQRYKHLTGMGRKKSQVAAAALGRELAGFIWAIGRMVQPRGVKDEARGKKAA

SEQ ID NO: 171099 - protein, 297 aa, unidentified
MAKSHLDIALCGERWRVANIQTGIGGLVERLKAAAPKKLQVICEASGGYEQALLGALPEAAVPVTLVQANRVRQFARACGILAKTDRIDAVVLASFGQALKPLPSPAPPLHLLRLRELDRQRCHLSRLLVAEQNRLAQLRCAQLRRLARSLIGKVQKQIASIDQRIASLIEQDQTLSAKAKKLTSFTGVGTRTAALLLAQMPELGRLNRRQVAALAGVAPYNRDSGSMRGKRCIFGGRRALRSGLYMAALAAARRNHILAPFYQRLLAAGKPPKLALTAVMRKLLIALNTALSPYPA

SEQ ID NO: 171100 - protein, 414 aa, unidentified
MTNSLDKFSVLIGLDWASKKHDVCIQKSSTATRQFKVIKHSPEDIDDWLCSLRSEVKGPIAIAVELSSGPIVYALQKYSYVTVFPIHAATLARYRQAMFPSGAKDDPSDAELALDLMLKYPEKIKPLKPSSDASRALNLLVEQRRMLVEDKRRAVNRLINALKQYYPLPLTMFSHRGSDLFCEFLLTWPTLKQLKRAREKTIRAFFSKRGGNAVANTDKRIKAINDAMALTEDSSVIEPYSLLSVTLCNQIVLLNKSIKAYDVKIDELFNQMPDADIFASLPGTGSCLAPRLLAAFGEDRSRFTSAQEIQNYAGLSPVTERSGNKEWIHWRWQCSTFIRQTFVEWSAKSVHQSYWAGLYYEKQRAKGKAHQAAVRALAFKWARIVFKCWQTKTPYSEARYLKALKERNSSLLST

SEQ ID NO: 171101 - protein, 337 aa, unidentified
MKLTIIGMDIAKQVFQLHALDPQSGQVERIKLKRAQVLEFFAKRAPSIVVMETCGSAHDWARRLQSLGHEAKLISARSVRPFVLRNKTDAADARAICTAAQQPEVRFVAVKSEAQQTVLAIHRVRAQLMKFRIVQTNALRGLLYEFGEILPEGYRAFSKAFPAALARAAERLPDMLIDSLREQWVRAQDTDREMAVLERRLNSLFRHNPDCQKIAEIPGVGLLTATATVAAIGDVRTFKSGREFAAWLGLVPRQSGTGGRVRQMGLSKRGDTYLRTLLMHGARSVIIQGKRSDWVDGLLRRRPFNVAVAAVANKLARTIWAVLARPEKYRASPTATA

SEQ ID NO: 171102 - protein, 299 aa, unidentified
MQPMYYIGLDVHKRTISYCVKDGSGAIQGEGTLPATRAELDRWMKTLPQPWTAAMEATVFTGWIYDHLKPHAAALKVAHPLMLRAIAASKKKNDRIDAKKICDCLRCDFLPECYMASTAIRERRRTLRYRNLLVRQMVQIKNKTSTLLMEAGVSYNKQRLHKAGYFRELMATNPDINDGLRSLLRLCRETVVRLSKTESALVRSLERDPQLLERVERLMTIPAVGPITALTWALEVGEAMRFSSIKKAISYCGLCGAQKSSGNTTVRTPLSKQRNRHLQTTLIEAAKMAPRYSPTLALL

SEQ ID NO: 171103 - protein, 461 aa, unidentified
MAHPMVQVKPSRRQRDMSPVHPNAAAIDIGARMHVAAVGPDRDPEPVRTFNTFTDDLHRLADWFEQCGVKTVVMESTGVYWIPIYEILEQRGFAVSLVNARDAKHVPGRKTDVSDAQWLQRLHEYGLLRSSFRPQGEIATLRAYLRQRERLLDNAAAHIQHMQKALTQMNLQLHHVVSDITGVTGMRIIRAIVNGERDPDVLASYRDRGCHASVETIRQALIGNDREEHIFALSQALELYDTYQAKVVECDKRIAVVLKRLKEASPTPADPLPAARHKGRSSNPLTFDVREALHAVIGIDLTQIHGLGPYLALKLVGECGTDLSAWPSAKHFTSWLGLAPHNKISGGKVLSSRTRRSGNRAASLLRLAAVTVGRTDTALGAFYRRLSARVGKAKAVTATARKIAVLFYNALRHGMDYADPSASYYEERYQQRVLANLQRRAKSLGYVLQQADTAPAAVGVS

SEQ ID NO: 171104 - protein, 346 aa, unidentified
MRIIKQNVGIDISKSTFDVRFVELCENNKVTYRNYKKFANNTDGINSFYKWCSHLRSNDISLHITMEATGVYHESLAYRMSKKDDLTVHIVLPNIAKKYFESLNVKNKTDKIDAKNLGLLGIERELRIFKPKSDIYIKLRKLSREKAQLVNERSGIKNQRHAEMYSEYPLQRIITRYNQRIKYLDKQILAVEKDLTKIVSKDEYVSKKVKKITTIPGVSFNTIIGVVAETGGFETFTSIKQLTSYSGLDVRMQESGQWKGKSKISKKGNSHIRRLLYMPTLSAVRWAPKYKKKYDRINENKTHKMTGVVAMQRSLLGLIYTLWKNDTEYDDNYTAGVDKEKEHKAS

SEQ ID NO: 171105 - protein, 433 aa, unidentified
MEEVTGEPLYRDRVCGIDIGKAEMYATIRVPSEKNPERRASETRGFATTKRGVLELADWLRSWQVPAVAMEATGDYWKGPYYRLEAEGFECVLADAKQVKNLPGRPKRDPSDSAWLAQCFERGAVTSCFVATPEFRLIRLHTRARRDLTEDRTREKNRAEKVLESSALKLSSVLSDLHGVTGRDIMDHLIAGERDPKALAQLARGRARRKIRELEEALEGSEFFTGAHAALLKSKLERIDVIDADIDRLSRVIEELLAPYEEQLQQAESMPGWGRRSAEDAVAETGVDMTRFRTPAHLASWAGRAPLDKQSGKRSGQAKHKRGNKYLGAVTGETAVAAGKTDTREGVRYRKLARSRGKAKACVALGNTQMRVYHKLLSAPGTRYEDLGPDYYDKRRNHARQVSHHTGKLSELGYRVTLEAIDVETGELISSAG

SEQ ID NO: 171106 - protein, 346 aa, unidentified
MEYIALDVHKKYTWARVENREGARLYESRLAHSRGTIKNFVHRWSEGSPVAVETVGNWYWVVDEIEAGGGKPQLVNARLAKLMMGSVNKSDKLDAKGMNRLQRTGTLPTVWIPTSSVRDARELPRTRMVLSRQRTQLKNRVHATLGKYGYGVEGASDAFGKRGRKIMTELLVKLPPHTEQALRRILDQLDHVGENLKAIEAEMIKVFAPSPETTLLKTEPGVGEILAVVIWTEIGTLERFSRAERFSSYCGLVPREHSSGGKIRFGAVRRDVNMYLKWAFVEAANSALLNAERCGYNHISRLYQRIKPRRGHGKAKVAVARHLSEASFWMLKKGEPYREPMSSTQR

SEQ ID NO: 171107 - protein, 345 aa, unidentified
MRNKLEQLLERPSRPFTPRARPAWPARILEAGVIYHVKEQLVYLGIDIAKSYLDGAIENEKRRFSNDAIGHRQLIQWIKQMPAKVQVICEPSGGYERALVRALVGTQLKISLVPANRVRQFARAKGILAKTDRIDAKLLCSFGEAMQPGTISASQLEQEQLREVESQRRHLTHLLVMEQNRAARMSDLRVCKMNRRLINQIKKQIEQLDLLIQEQIKASPELCTKAEKLTAISGVGTRTAALLLAQMPELGQLNRRQVAALVGVAPFNRDSGRMRGKRAIYGGRRPVRHGLYMAALVAARHNPILRAFYLRLRAAGKPAKVALTATMRKLLIVLNSALKPDPIYA

SEQ ID NO: 171108 - protein, 345 aa, unidentified
MENMYYIGPDVHKRKISYCVKDSGGKVYSEGSLPATRLDLDVWMKTLPQPWSAAMEATMFTGWIYDHLKPHAAALKVAHPLMLRAIAAAKKKNDRIDASKICDCLRCDFLPECYMAPTATRERRRTLRYRNLLVRQMVQMKIKISSLLMEAGVSYNKQRLHKAGYFRELLATNPDINEGLKPLLQLCRETVVRLQKTESAMVRSLERDSLLVDRVDRLMTIPAVGPITALTWALEVGDVQRFSSIKKAISYCGLCGAEKSSGSTVHRMPLSKQRNKHLQTTLIEAAKMAPRNSPELAMLYDKEKQKGNANRATLAVARKLVAYLVAVDRRQKEFLTVERENRTAA

SEQ ID NO: 171109 - protein, 333 aa, unidentified
MLPSNCGTATPYILRNTVGLDISKLTFDASAMVGNAEYSAKFDNDSKGLDQFSDRLKSLGCQNLHICMEATGNYYEEVADYFAQYYSVYVVNPLKISKYAESRFKRTKTDKQDAKLIAQYCRSAQESELVKRQKPTDEQYRLSRMTAAYAQIKSECAAMKNRHHAAKDEEAAKAYAEIIKAMNEQLEVLKEKIKEQTEKPNCKEGVKRLETIPAIGRMTAAVLFHHLTSSKFETSNKFAAFAGLSPQQKESGTSVRGKGKLTKFGNRKLRAVLFMPAMVAYRIRAFPDFIKRLEEKKKPKKVIIAALMRKLAVIAYHVHKKGGDYDPSRYKSA

SEQ ID NO: 171110 - protein, 400 aa, unidentified
METVADRAKPTAIRTDLRAIFVSLELSRSRWLITSLSPGNRDRMSKHSVQAGDIAGMLARFSELRHKTQARTGQSFPIVVIQEAGLDGFWIHRVLRKEEIESHVVDPASIATSRRRRRAKTDRIDGEALIRVLLAFKRGEPRVCMMVRAPTPAEEDRRRLCRERKVLTAERVQHVNRIKGLLFAQGVSEYEPLRRDRRDRLARLVTGDGRLLPNYLKAQIGRELDRLELLLEQIKAVEAERDSLLASTEANKSALPAMLLDLKGIGPEFAAILWSEGLCRHFDNRRQVAAYAGLAPTPWQSGSVDREQGISKAGNPRLRETMIQLAWLWRRHQPRSVLTLWFEERVRHNAGRLKKRTIVALARKLLVALWKCERRHCDRRGYEQNCLIHHSCRIFQSSRT

SEQ ID NO: 171111 - protein, 340 aa, unidentified
MDILDLLGLDIGKSTFHLIGHDAKGKEVLRKKFNRSRLLEFAARLKPCTIAMESCGGSHWLARKLLSFGHQVKLIAPQHVKPYVTGNKNDYIDAEAICEAASRPKTRYVAIKTVEQQVLSTQHRLREALVGHRTQTINRIHGFLLEFGIALPATKAAMNQVHQILDDPAAELPQQLKSFIEHLLEEIKRLNDEIKAIDRSIKEQVDADDAGTRLMSIPGIGPIIASALLADVGDASNFHSSRDFAASLGLVPRQYSTGDQTVLLNISKRGDKYLRKLMIQGSRAVLVHIDKRTDALGTWCRELLIRKHPNKVACALANKLARIVWAVLARGVSYNAQPMA

SEQ ID NO: 171112 - protein, 385 aa, unidentified
MVIIGVDPHKRIHVASVVEPATNRQVAALQIEASLAGYRRLLRWADKFGERSWAVENTRGLGCHLAQWLLARGEAVEDVPSTATARVRELSRGGRRKNDVIDAAAAASVAALHGDATPVLAEDITTVLGLLDERRANVTTQRTRLINQLHAVFRDVLPGGAPKGLTAAIASALLAGIRPVGPVEAARKQLARDLVAEIRDADRRLKLLTAQIAQTVAATGSRLMEVDGVGPVVSGRLLARTHRMSRFATAAAFASYAGVAPVEVSSADRLRHRLSRGGDRQLNLALHIVAVNQIRMPGSAGRAYYDTKIAAGKTEKEARRCLKRRLADHIWRLMIKDEHGAAGPGGQQGATMQSSAAGSTPTTSSSDKSLPEPATPDSTTGQTAA

SEQ ID NO: 171113 - protein, 336 aa, unidentified
MVTITQKGRASVKEVIIIGIDLAKRSFQVHGATAGGSVAFRKKLSRTQLLPFLAAQPHCTVAMEACATAHDWGREIEKLGHTVRLIAPIYVKPFVKRQKNDAADAEGIAEAVSRPTMRFVALKTEEQQARAMIFRTRDLLVRQRTQLINALRGHLAEHGVVAPQGPAHVKRLADAIEDGERSLPAMVRDIGRVYLDQIALYSKKVADLDKKLRVAATSNETTARLQTMPGVGPITAMAIEAFAPPMNSFRRGRDFAAWLGLVPRQKSTGGKQVLGKTSKMGQRDIRRLLIIGAMAVVRSRSGASEGSWLARMLARKPRMVVAIALATRWHGPSGPC

SEQ ID NO: 171114 - protein, 345 aa, unidentified
MEQQRQYVGIDLHRRRSVIVRRSAAGETLEVTKVDNADLLAFEQAVMAAGEHPEVVLEACYGWYWATDLLDELGCKVHLAHPLGNSWGNRRVKNDTRDAEDLADLLRLGRLAEAWIAPPEVRELRELVRYRAKLVCLRTNCKLQVYAVLAKEGVNVPMTDLFGVSGTELLETCRLSTAYRTRVESLRDLIEVFDREIAKLEVDVRHQLRGQVGYEAIQQIPGVGPLFASVFVAEIGDVTRFRSPAQLASWAGLTPKHRESDLTVHRGPITKQGSRLVRWAAVEAAQRQANGTKLRADFARITAHHGDSAGARKIARVAVARKIVTLVYYGLRDGTIRSKAISEAA

SEQ ID NO: 171115 - protein, 433 aa, unidentified
MQDVEDEPLFAERVAGIDIAKAGIEVAVRVPSDTTAGRRQQETRSFRTTRKELLALADWLRSWGVTKVGMESTGDYWKPVYFLLEQQDLDCVLYHAAQVKALPGRPKTDKQDAVWIAKITERGSLPSSFVPPEDIRRLRTHTRYRRTVTQARTAEMQRVEKLLEDAHLKLSSVISDIHGVSGRAMLEAIIAGERNPVRLAQLARGRMRGKIRQLEEALDCSFLTGEHVFILTMMLAAIDDCTARISELTTRIEQLTEPYWHQIDQLDAVHGTGIITAQDVIAEIGVDMTVFPTAAHLVSWAKWCPQVSRSGGKRKGSNATGRGNPYLSAALGEASMAAGRTDSFLGAKYRRLNKRMPKRKALVATGNSILTTYHALLSDPAASYHDLGPDYYDQRAGVRRQARNHLKSLERLGCKVTIEPLTPDTSPALPATS

SEQ ID NO: 171116 - protein, 352 aa, unidentified
MKYALEQESILGVDTHLDVHVAAVINQSGQLLGTQSVSTNTAGYLQLFQWASAFGALKRAGVEGTGTYGSALCRFLSDKGVTVLEVNRPDRSRRRLNGKSDPIDAENGARSVLSGTSKAIPKQQSGACEAMRIVSVARRSAVKAKTQAINQIRAMLVSAPQDVREKLWRVKATDCAKVCATSRSLGDTAVLRALSTTIKSLAKRWLALTEELKDYDRQLEALTQKHAHLLRSRFGVGPQTAAILLSVAGDNPDRLKSEAALASLCGANPLPASSGKTTRHRLNRGGSRAANNALWTITMVRMRSDPRTKIYVERRTNEGLSTKEIHRCLKRYIARELYPLIMGDLGTMNAVP

SEQ ID NO: 171117 - protein, 347 aa, unidentified
MQIIGCDFHPSYQQIAWLNEETGELREVSLHHASGQAQRFYAALPRPVRVGMEAVGNSLWFEKLLAELKHELWIGDAARIRSLAVRRQKTDRRDAQHLLELMTSGRFPRLWVPSVEQRDLRQLLLHRHKLVAMRRTVKNQLQHLALNQGLQRKSRLWTRAGRQQLRELPLVGWTARRRDELLELLDQLDSRIGDLDRAVDEQAAQHPAVGLLMTHPGVGPVVGLAYVLTLGPVERFARGKQVASYLGLIPRESSSGGRQRLGAISKQGNPWLRSLLVEAAQTAARLEPELRRDYRRLAQRKHRAVAKVMVARKLAVRLYWMLREHQPYSPPPAVRMQESPSHSVVAP

SEQ ID NO: 171118 - protein, 338 aa, unidentified
MKLYGGIDLHSNNVVIVVLDEQGVIKARKRINNELHQILLFLSSFKSNLVGLVVESTFNWYWLVDGLMEADHQVHLANTTAIQQYSGLKHVDDNSDAQWLAEMLRLGILPEGYIYPKGQRAARDLMRKRMQLVQQSTSNLLSIQGLYQRHLSYKLSNNKIKQLSHEQVARDFSVPNVVLAVNSNLAVMHCLKGHIKGIEKTLLAQVILAPEFQRLTSMDGIGDILALTIMLETGDMKRFKKVGDYASYCRCIRGAKYSNGKKKGNTNAKNGNRYLAWAYVEAANFAIRYNQTIKRYYQRKAAKTNQIIAIKTVAHKLARACFYVLRDQVPFEVGKAFC

SEQ ID NO: 171119 - protein, 421 aa, unidentified
MAVVMIGVDPHKASHTAVAISAAEEPVGQLRVRASAVQAERLLGWAQAWPERAWAVEGAGGIGHLLAQQLLSAGERVLDVPPKLAARVRLLATGDVNKNDPNDACSVAVAALRSAGVREVRRDDHAAVLKVWSKRHQDLGQARTQVACRLHQVLCELIPGGVPGQITSGQAGQILASITPAGAVEAARWELAAQLTEDLRGIDTRIRQTRKKTAAVVAAAGTSLTGLFGVGPVIAAAVIGDVRHVSRFPDRDHFAAYNGTAPVEVSSGGRKVYRLSRRGNRRLNHAIHMAAVTQIRYRHSPGRTYYDKKLAEGKTGKEALRCLKRQISDAIFACLQADARRAATVAAKSPGGQPGNHSASRAAGSNPGHRRFGQATPGPATHPTAPAAPAAFPLCCHPARAGERVKDRAQPGRAAAPPRRP

SEQ ID NO: 171120 - protein, 315 aa, unidentified
MRSTVAQSVGVDISKDTLDVAIHPGGESFRITNNPKGHRALIKRLKGFDIARIVFEATGAYHRLFQQAMVEVGLPWVKVNPCQARRFAQATGKLAKTDRCDALMLARMGAVLELETRAPASKTVEALRELVNARDALIKDRVAALNRQAIAVSPLIKRQLAQRLRQIDGQIEAIDRRLKTLRNADSDLCQRFDILTSIPGVGEVTANVLVVETPELGRLEHAQAASLVGLAPVPRDSGQTHGKRSIRGGRPRARQALYMPALNAIRLNPEFKAKYEAMVKAGKPAKVAIVAIMRKLLILANALIRDRRKWAPANP

SEQ ID NO: 171121 - protein, 502 aa, unidentified
MTEYSTCTVGIDLGDRKSVACIYSPGVVVDWFEFAMTPDGVRAAFAGKGYRTVAMEAGAQSGWVTRLLQDLGYKPLVANPRKLKAISANERKSDRNDALILAKLVTADASLLHPIEHRSEARELGMTVLRSRDTLVRTRTKLISTVRAMCKGVGARLKSGGADGFASREAEVPEVLAPATAGLFAALRVLNEQIAVYDTQLEVMLETQFPEGRLVRQVRGVGPVTALAFVLTIEDPKRFPDGRTAAAYLGLVPRRDQSGAVDKQLSISKTGNTFVRRLLTQCAQYILGPLGHDCDLRRWGHTLMERGGKSAKKRAITATARKLVVLLFRLWKRDEVWIPLYNAGSSSAPPADADRPKPAVLADCACDFDDTGDRGRRRIDCSATDGSDPSMHQPQAGQPKSANRSVGNGTTSSAKKAPKKNPARHAGLPAPHPATANGDRGGPKPGDGVAPSPGPTTPSSAAGSHGGPQNKDRGPVRPATCVGPQPPRGKLTPRSEKDHPHP

SEQ ID NO: 171122 - protein, 431 aa, unidentified
MNYNQNKKIAQITSQTLIIGVDIAKFKHVARAQDYRGLEFGSPCYFENAHEGFEHFLQWISAIKKEQSMDKVIVGMEPTGHYWFNLAHILKENGIKFVAVNPLHVKKSKELDDNSPTKNDVKDAKVIAQLVKDGRYAEPTIPQGVYAELRVAKKIRDLLTEDLQTVQGQVHNWIDRYFPEFLKVFKKWEGKAALQFLKLYAFPHEIAEFTEEELLVHLRLSVTRSVGLNKIRELKQAASKSIGLRQGAEMARLELKTILAKYELIQLQFEELDAKIDGLLDEIPGVQQMLAIKGVGRDTIAGFFAEVGDLGEYNHPRQLIKLAGLSLKENTSGKHKGKTTITKRGRKKLRALLFRVCMILVAKNSAFKALHAYYTQRQDNPLKKMQSLIALCNKLIRIFFSIGKKQFEFSEEKMLKDIPHMAVTEKTEMAA

SEQ ID NO: 171123 - protein, 344 aa, unidentified
MLYVGLDLSRKRLDFDARLVGGELFERGAVPPDGDGLAGLVRRLGDAEVLAVIESMNGARFVHDRLELHGWDVRIADAVKAKGLAPLACKTDKIDAWVLAELARLDLVPEIWLPDPAVRAERERARFRLHLVKHRSALKNRVHSILIAHGVPNPSSDLFGVGGRRLLERLPLPEPWRSTTTASLALIDTLDEEIDRCERELRRLGADHRYVPLLMTCPGIAWILAFTIASEIGDIGRFATPLKLVGYSGLTPQVNQSGENDRRGPLRKNGPDHLRWALVEAAHTAARHPSFQPILERKRAQLGHKRGTKIAAIEIARRLLRAIWHMLTRGQPFAPAGATRPLAA

SEQ ID NO: 171124 - protein, 359 aa, unidentified
MSQALERVVRVGVDLAKQVIQVHAVAADGQVVARRALARDRFLAWCGQLPPGTLVAMEASGGAHHWARCLREMGLDARLVAAHFTAAYRLQGHTGKNDANDAAAICEAASRPRMHFVPVKTPAQQGLMSLHRLREGFKAERTACLNRVRGLLAEFGLVFARSPQALRGGLGTVLATPPAVVDDNGLLGLRIAAQHLAQLDAQLADCDRAIGAHARRDERVAAVAQLQGIGPLGASALVAGVGDFAAFRNAPQFAAWLGLTPRQHSSGGVARLGRITKRGDEYLRTLLIQGAKSAVLTAHTRQDAISRWVLQLRARVGWQKAAVALANKNARIVWALLWRGGRYEPDHPPRGHVLQPALF

SEQ ID NO: 171125 - protein, 328 aa, unidentified
MPARPHTGEDYLMTELCVAGIDVSKARLDVFVLPQRISLAFDNAGRGIAALRKQLQRRGVQRVVLEATGGLEYPVARALSDAGLQVARVQPGRVRGYRCFLGKRAKTDALDAELIARFARAMPEDDIRPIPSEQAEAVRSLSARRRQLVELLVQEKTRLKMTRDRFVLQSLRTVIAGLNAERARIEAALAAAIAEDDAIRHKCELLRSVPGIGAVVASVLITDLPELGALNRHQVASIAGLAPHPQRSGTSMHGDHISGGRSCVRTALYMAALSAIRYNPTFKAFYRRLLDAGKPRKLAIVAVARKLVVLANAIVKADTPWLPQKALD

SEQ ID NO: 171126 - protein, 462 aa, unidentified
MPGREDSETGESSRRQLQGLPVIRRNVAGIDLGSERHWVCAPTRDGSGREIASFGATTAELLRLAGWLKARQVESVAMESTGVYWIAPHEVLEAQALQVLLVDTRQLARVPGRDKKTDPSDCEWIQRLHSCGLLRGSFRPEEAVCMLRTLVRDKANLVAESGDWLRRMQKSLDQMNVRVHRAVSDIDGVTGMAMLRAIAAGERDAQKLAQLRDRRCSKTQQEIAEQLTGHWREDHLFSLQQALKMYDAVQERIAAYEQEILRQLGEMEEPGQQGQTAPPLHNANKTKAIKKRGQESKRQALYRMSGVDITQIDALGVETVEVVLSEYGPDLSRFPTEKEFVAHVTLAPRVPSSGGKPLKKKKRNSASTRVAAALRMAALSLRHSQTALGAYYRKLAQRLGGDVAVFATARKLATLIYRLLRWGQPYVDEGAAAYENRYLQQRIKSLTAKAKQLGYELTAVNA

SEQ ID NO: 171127 - protein, 408 aa, unidentified
MTTPTLEVTAASHVVAGVDTHSDTHHVAVLDSAGRRLGDHEFPATPAGYEQLHAYVKAFGSIALIGIEGTSSYGAGLTRYLSIRDVPIREIIRPKRAPRRAGKSDPIDAYAAARQALSEPETLPHAKNSDGHTEQIRVLLATRRSAIKARVAAARQIKSLLVTAPDSIRTRWRAVSDKALIAGLAATRPSGAITSVGAATAITLRRLARRCAYLDQEITDVDEELRVLVATAAPAMIATKGYGVVTTATLLITAGANPQRMHSEGSFAALCGASPIPASSGKTTRYRLNRGGDRQANWALHQIALVRLSSDPRTKAYAARLRGTGKTKKDILRCLKRAIAREAFRLLTKPHLVPRTDDLRQLRHERGATLLDVALSLGAEPARISELERGRRPNAELATAYRAWLDVA

SEQ ID NO: 171128 - protein, 343 aa, unidentified
MGTQITGGVDTHLDVHVAAALDEHGALAGTASFDTTVAGYRELLGWLASLGEVVLVGVEGTGSYGAGLTRHLQDAGVRVVEVDRPNRQRRRRAGKSDTHDAISAARAAFAGDALGAPKTRDGNVEAIRVLRLARGSARRDRTRALNQMRSLITTAPDELRAQLRGLSIPQLVRIAAGFRPAARTDVANANRLALKTLARRVVELDHEIEVLDGSLTTLVAQTAPEMIERVGVGIDTAGALLVAVGENTSRIRNERSFARLCGAAPLDASSGKQQRHRLSRGGDRQANSALWRIVITRLSYDPATREYLQRRCAEGKTKTEAIRCLKRYVARELYACLPPETLA

SEQ ID NO: 171129 - protein, 346 aa, unidentified
MVEATTIGLDVAKQIFQVHGVSADGKVTVKRQLRRSEVLGFFGRLARCIVGVEACGGSHFWAREITALGHDVRLIPPAYVKPYVKRGKTDAIDAEAICEAVSRPTMRFIPIKTAECQAALMVLKTRDLLVRQRTQAVNALRGHLAELGIVAAKGLGKVETLIAIVRDENDRRLPPAARTALKMLADQVEVLTERAHTLERQIVAEVRRDDTMRRLATIPGVGPITAATIQALVPDPGAFTSGRHFAAWIGLTPKMHSSGGKERLGKISKMGNPALRSLLVVGATSVLRHARRGATISPWLTALLARRPAKVAAIALANKMARIVWALLTKGGTFIRKNLVAEHAAA

SEQ ID NO: 171130 - protein, 438 aa, unidentified
MQEMTPRQENEFVAFVGIDWADQKHAWALQTSSGVEHGILDHTPEAIEAWATELGCRFAGGPIAVALEQSRGALLFMLTKYAHLVLFPVHPTTAASYRQGFRPSGAKSDPSDAGLILELLVQHRDKLRRLNPDTTETRTLQFLVEQRRKFVDEKTRYSNRLTAYLKMYFPQALKWFGEITSGIAGDFLEKWPTLQKAQKARPETIRQFLAQHHGRVKAIDNRLDEISKGVPATQDTAVISSCSTAVVALIRILRQVREAISCYDTQIEILAREHPDFAIFNSLPGAGRALVPRLIAAVGTQRERYNNAGELQAYCGIAPVSASSGKMSWVHWRWACPKFLRQTFHEWAGISIRYSAWAKTHYQLQRARGKSRHVAIRALAFKWMRIVFRCWKDRQPYNDEVYGQALARRSEATPKGNPIVQFQWKKCAGFSKMTGVTP

SEQ ID NO: 171131 - protein, 367 aa, unidentified
MNQRTYVGLDVHARSILGCAIDGRTGEIKHQRLPSNNAGVVDWVKGLGQPVRVVYEAGPTGFGLARDLEAAGFTCLVAAPSKLQRPPGDRVKTDARDAEHLARLNLLDQIIPVAVPGTSREAARDLVRAREDVRSDLMRARHRLSKLLLRHGITYSGGQAWTNAHHTWLHQQRFGDPNLQAAYETCLETVELTLHRRDRLDARITALAETEPYAPVVHALMCLRGISVLTAFGLTVEVGDWNRFTGNTIGAYLGLVPSEHSSGATRSQGSITKTGNTHARRLLVEAAWHHRRSYQPSREMAARWDKADEASRARGHQGNHRLHHQWENFEARHKRRVIANVAIARELAGWCWSLAAPVQREHPWPDE

SEQ ID NO: 171132 - protein, 392 aa, unidentified
MYYLGIDIGKRNHVASLLNDDGKPVFKAFLFSNTTDGGENLLVKLQNFQTTEVEIGMEATGHYWLSVYSFLVEKGYVIHVVNPIQTDGWRKGTEIRKRKTDIIDSVLIADLIRYGDFLETSLMDENVMSLRNLSRFRHYLVQEISDLKRKTICVLDQVFPEYDSVFSNIFGKTSKEILLNFSAPSDYESITTEALEKALENITFKKLATKKIQQLSSLASNSFGVKFCLDSFTLQLKMLLSQINFIEQQLADLEVQMSAILTKLQSPIMSIPGIGVITASTILGEIGDVARFSNASKLAAFAGIDASISQSGEYQSTQNKMSKRGSPYLRKALFQAAIVASQCDPTLKAYYQKKRAEGKHHLTAIGAVSRKMCNIIHAILTKNENYIGNLPL

SEQ ID NO: 171133 - protein, 361 aa, unidentified
MMNPVNVNNYVGIDVGKRSLEIVRIVQDGSIQRHKTGTTGKELDNLVKWLKTDDMAVLEAGNLSFRIAKKIMSEKGIPVVVLNPGDVATIYKSLKKTDREDALKLARLAQRNPLEELPSVQIPSEAEENWRRLCSEQTFWAREVSKVKNRLHSLFVSAGLTHIKKNDIGRKKNRARIVGLLPEDYSTEAMRIMRQLEMIEENLCSVLNEIITVLNEQHSYSNLVMSMPGIGPVAAITLLAYVGRCERFSRGKQLAYYAGMVPRVDVSGDMVRYGRILSRGCGALRRIIIECANSLVRSKHSGELGAFYRRLRKRKGHKKAIVAVGRKMLEVLFVIIKSGELYRYSNSEFIEKKLHHYGIAA

SEQ ID NO: 171134 - protein, 360 aa, unidentified
MRNERTFVGLDVHARSVTGHAVDGLTGEVWQRKLTPDPGDIGRWVSGLPGPVRVGYEAGPTGYGLYRYLVDHGVRCSVGAPSKLQRPHGDRVKTDAKDAELLARLMMVDQFVEVVVPSVEQEAARDLVRAREDVRGDLMRARHRVSKMLLRNGFVYSGGDAWTKVHDSWLRSQRFDQSCRQLAYESAYETMIMTVDRRDRLDRAIEAMAASSSYTPVVRRLGCLRGISTLTGFGLAVEIGDWARFSGATIGAFVGLVPTENSSGQSRSQGSITKAGNTHARRLLVEAAWHHARPYRVPGKTLRDRWELAPAAARARGHEGNRRLHQRWQAFTARKKRAAVADVAVARELAGWAWSLAILE

SEQ ID NO: 171135 - protein, 339 aa, unidentified
MKEVSTVGLDLAKKVFQVHGVDARGTVVVRRALRRSQLLAWFAKLPRCLVGMEACATAHYWARELVKLGHDVRLIPPAYAKAYVRRNKNDPADAEAICEAVSRPAMRFVAIKSERQQAAAGIHRVRDLLMKQHTMLRNQLRGLMAEFGIVAAKGRCGLGELLAILADAEDQRIPSPLREGLLLIGATLRETDRKLEIIDRQLAAAGREDATYRHLITAPGYGPILSSAMAAMVIDPAAFRRSSDFAASLGLVPRQEGTGGRVWLGPISKRGNGYLRRLLVNGATSLLNSKRAKQDPWLVKLLATKPRKVVAVALANKLARIGWALMVRQEDFRGLPAAA

SEQ ID NO: 171136 - protein, 293 aa, unidentified
MVAFARTLGVDVSKRQLDGQLWPDGGGLSVGNNEAGFAALQRHLVAHPVDAVAVEASGGYERKLVEALRAAGHRVVVLAPREVRLFAEMRRKRAKNDRLDARVIAEFAALFGEERPARSPALERLAAYLTYYEQLSAAVAQAKTQLESVADDEVRALVGDQVRRLTADKRALLVRIRALVEADDDLNGQVRRLQSMPGIGFLNAVTLAVRLPELGRLSRHAIACLIGVAPSMTRVGATKAAAFVAAAGSGSERCSTWPPPRPSAATRPSRPSANGSKPLESLTSSSLSRSCER

SEQ ID NO: 171137 - protein, 363 aa, unidentified
MSESRTVTVGLDVHARSIRLAAIRGDELLEERTLPYDEEAVERVLRGWPRVRCCYEAGPTGFGLYRHLVERGFECEVVAPGLVPTRPGERVKTDSRDARKLARLLAGGLLQPIHVPSRELEAARDLVRAREAARLDRMRDRHRLSKFCLRHGRLLPGSSWTVTRRTWLSEQRFAFAAEQLTFDTYLHAVDLVDLRIAALERSIREAAEEDSWRQLVARLRCLRGIDTLSALGLVTEIADFSRFCTAEEFMAFVGLVPSEHSSGERRRQGSITKAGNAHVRRLLVEAAWHARRRPRVGYELHRRQRGQDAVVVERAWRCQQRLHSRWQRMAGRGKPSQKIVVACARELAGFIWAIATEQPLRSA

SEQ ID NO: 171138 - protein, 428 aa, unidentified
MKYALIQVLPDDPPGGVVAGIDWATADHVACVVDMAGRIIDRFSASHDKAGIDALISRLRESGAAEVAIERGDGVLVEALLAAGLTVVVITSRQVKNLRSRYRSAGAKDDRFDSFVLADTLRTDRARLRPLIPDTPATTALRAAVRARKDLVAHRVAACNQLRAHLAVAFPAAIGLFSDLGSPVSLAFLTRFGSQDAAGQLDEQAIDGWLKTIPARGNTAPASVLCARLRAAPAGAAGQDGAAHARITAALTATVTMLAAQTKILETGIGIQLAAHPDAHIFTSLPRAGMLRAARLLAETGDCRSRFPDPQSLAALAGVAAVTRQSGTHISHAFRWAVSRQLRDAVCDFAGDSRHASAWAAAVYGAARARGKDHPHAVRILARAWIYIIWRCWQAGTAYDPAKHNALQRILHQQQAANAAATDSGDTR

SEQ ID NO: 171139 - protein, 387 aa, unidentified
MKEEAEPVLGVLEYVVNLERLFFPNFHKRSHPMNFIGIDLHKQTISICVVNKERKPLEQRKMACADEEALRRFFAAQPRFQLVVEATASYDWFVKLVEPWADRIVLAHPKKLRIIAESTRKSDKIDARVLAEFLALDMIPEAYRPTPRQREHRVLVRQRVHVQRRVASVKNKIRRILSNYNADIEDLFTREGFEYLAEVEVSAADRFTLEQLTEQYFLFKKHVVAGDKMLRKFAATAPAAEAEARAVLDTIPGVGPLTIDVVLSELGDIRRFRSQKDVAAYAGLTPVCRESAGKIKQGGITKEGSRLLRWILVEAAWRLTGKTRRWSRIYDRLAARKGKKRAIVAVARRLLCVMTSMLQSGKAYSWPEKTSAGKAKKTYTSITPSKT

SEQ ID NO: 171140 - protein, 328 aa, unidentified
MKYVGLDVHKLYIHGTVLDENGKVLKRGRFEYTRDGFEEFFDGIEDAKVAMEAGYCWQPAYELLEDMGHEVKLAHPLKTRLIAEVKIKTDAKASDALAQLLMMGWLPTSYVPPEEIRRLRELVRLREYLVYERTKFKNKVHAALMREGIRGRRGIFAKKRREFLNELEIDEVNRCLSVIDVLDRQINEISALIRKIAGESQEAKWLMSIPGVGYFSAVAILAEIGDISRFPDAEKLCAYAGLVPSTHESGEISVRGRITHQGSPILRWVLVQCVWSHLCHASDTGLTRFFYSVARKRGRHKAAVATARKMLKVMYVLLKEKREFRDFY

SEQ ID NO: 171141 - protein, 438 aa, unidentified
MRAKCNDDLSTVNFSTIGLDVHKNRLVACAVHVQHDAKGREVHEKEYFESSGTYSGRQRLTEWCSSQNADLILMESTGIFWKAPFRDLEKADLHPVLINPRIFNRGSDKRKTDKSDATWLANLARLGLYRASFIPAEPYRSLRLVQSQIKSLVAERQRLKNRLVKVLDDSGFRFTVAFADIGGASSQSLIAGILEDAPREELALMIDPLCKKSIEEILDAVSGELSQINKDIVQSILRLIETHTKEIETLEQTVIRELKKCEKVKQNIRLMTTIPGVSEKSAQLLMSMIGPDFVENFSSPHAFARWLGVCPGNNESAGQIKSGRTPHGQRLIKKVLTECAQAACHTKGSHLAVLFGGWKHKGFCKAVMAVAHKLALLIHWVVVNQKPYIDKEFDYTGVFKQDGQRRPRWIRALRRYGLMTLADVEKEKAARGWIIAKA

SEQ ID NO: 171142 - protein, 313 aa, unidentified
MSLEEQRIVVGIDVSKARLDIAAKGEEWPVNNDLDGIGKLISRLQTLNPGLTVVESTGGLERLVVAELWAAGLPVALVNPRRVREFGKSIGLLAKTDRIDARLLVRFGEAVKPDPVCLPSEEEQKLSALMTRRRQVIEMLTMEKNHLCSSHPAAKESITKIKTVLQQELDELDHQIENFIDQFPSFKKKDEILRSTPGVGKVTAAILLSDLPELGKMDRKKIAALVGVAPFNNDSGRFRGKRRIKGGRPSVRTVLYMATLSATKFNPVIRTFYEHLVLQGKAKKVAIVACMRKMLIFLNSMIRDMQPWRSSIA

SEQ ID NO: 171143 - protein, 355 aa, unidentified
MTSTKYIGMDVHKESISIAVMNAVGKLVMECVIETTASTILQFIHGLRGDLHVTFEEGTWAAWLYDLLKPHVTEVVVCNPRKNVLLKDGSKSDRIDARKLAEQLYMNKIKSVYHGEHGLRTLKELARSYLTITKDLTRVMNRLKALYRSWGIPCAGSEVYAPRHRSEWLSKITEAGVRRRAEHHYQQLDVLRLLRQEVRRDLLAESRKHKAWKLLRLIPGIGPIRAALLVALIQTPHRFRTKRQLWTYSGLGLETHDSAQYRVVDGQLNRSKKSVTLRGLNKNHNHDLKDIFKGAATRVSSSRGPLRDFYEALLAKGRKPTMARLTLARKIAAITLIVWKKEVRFDANYLKPQAA

SEQ ID NO: 171144 - protein, 412 aa, unidentified
MKDLLEISCGLDIHKEKIVACILTGPLGKPTHSEIREFTTLIPDMLALRDWIISENCHHIAMESTGIYWIPIYEILEDAFSGDITLLVVNARHMKNVPGKKTDMRDSEWISTLLRAGLLNASFIPEKRIREFRDLNRYRKSIIRDITSQKYRVEKFLQSSGFRLSSFISDIFGASGRNIILHLMEHGQIDKISLDSYLKTKTRKRIDEILMSVNGTLSEHQKSFLKILMCHYDSMKEHLIEIETHLQEDMLPFALQIEQLNTIYGISTTASCAIIAEIGTDMKPFKTAEHICSWAGLCPGNNESAGKRKSTSITKGNPYIKSMLCEIAWVIAGKRNTYLSAWYWRIKQKKGARKAIVALARKLLVIIYTMLKQGTNFDENCFEVRRKNCEQKQLSRYIRELEKHGYTVEAQV

SEQ ID NO: 171145 - protein, 332 aa, unidentified
MSVYVGIDVHRNRSQVAVIDEGGKVLVNRNVTNGVKPVLSVIGGLPAGTPAAYEAAFGWGWLLELLEDYGFEPHMVHPLQCKAIASARLKNDKVDAATLAQLLRADLLPEAWIAPPEVRQLRAMLRHRAQLVRLRTLLRNRIHAILADHGYGRPAGCWSGPGRAWLASLDLPAVSREIIDDDLALMDALQQPIGRLDQEVRQRAKADPRVTVLTQLPGVGIFTALVLLAEIGDITRFGSARKLASWAGLTPTVRGSDRTVHHGHISKQGPAWVRWVLCQAAQTAKRHPDFAPGYEGTARRRGKKIATTAVARKLITRAYHLLTDAANDGAAA

SEQ ID NO: 171146 - protein, 251 aa, unidentified
MKKIFVGIDVSKKWIDVCVTLGGKTISHCRFDNNTMGFKTMIKWIKEFSKQQDEWLLCMEHTGIYALPLWHFLSEKKISYCVVAGSLITSGLEIRRGKNDKIDASDITKFTMRYADELKPHRLPTQVLQRLKMLFAYRERLVKAKVLIAVPANEAKQFATQESKEVRMDSSSLAQIIEARIEKVEKLILKIINSDEQTAKCYKLIVSVPGFGLVTACYLLIITQCFTVLTKSRELSNFGGMAPHPHESGKR

SEQ ID NO: 171147 - protein, 356 aa, unidentified
MARKLDNSPAVIGIDIGKNSFHIVGQNQRGAVVLRQKWSRGQVEARLANLPPCRIGMEACVGAHHLSRTLRGLGHDARLMPAKYVRPYSKGQKNDYRDAEAIAEAVQRPTMKFVATKTTDQLDLQALHRVRERFVGQRTGIINQIRAFMLERGIAVRQGLRFLRAELPGILATRTNALSPRMLRILEDLSADWRRLDARIADLSGEIEALARQDKGCERLMSVPGIGPIISSAMVAAIGTGDAFSKGRDFGAWLGLVPKQLSTGDRTILGSISKRGNRYLRSLFVQAAWVVLVKIGPKRWDRYGLKSWIEAAKKRLHHNVLAVALANKLARIAWAVLHKGRAFECVKTNEAAYQPA

SEQ ID NO: 171148 - protein, 401 aa, unidentified
MDWADEFHQVWVSDPEGKKVIEKKVIEDVEGLTEFGRWLDETRAKGIELWAAIEKPHGRIVEFLLDHGVVVYPVNPKALDRARDRFRMSQSKSDSFDAYVLAEFARTDHGHLRALEPNSDPAQELKLLTRDQYRLVRQKTRLLNQLSRTLKEYYVRPLEIFSDLETNIALDFLQQYPTPQALAKLTRRQWNRFSKREHHLGEDHCKELWEKLNQPQLEVPEHVVRAKARLLAVLVVQLKTLRDAVDSYNERVKSFFACMPAAELVRMLPGAKTGTIVATLWAELGDAKSRWESFRHLQAEAGVVPVTKASGKSRVVQFRFSCNKIMRHAAYWLAFVSLNRSEWANQYYRDQRAKGHSHHQALRALGAKWLKIIFVMWRDHKPYDENIHLANITRQKMRQAA

SEQ ID NO: 171149 - protein, 357 aa, unidentified
MRIIGVDLHTRQQTIAMWDTETRELIERTLTHDGDEVREFYSALPGQVLVGIEATGSMHWFLELLEKLGIDHQVGHPSEIRKAETRKQKHDRRDAALLLKLQIENRFPSIWMPSTELRDLRTLLMHRHQWARMRTRVQNTLQAMAIGRGLRRGKALWSQTGQHAIESLPLPPHTAYRRTELQDLYQKLDAQIDELDKRVGDQALQRPGAKLLMSHPGVGPVTALATDVFLGDPARFADGKAVVSYVGMIPSEYSSGGQQRLGGLSKQGNPLLRFLWCEAAAHAVRRDPDLQRFYRRKLTQKGLGKARVAAARKLGIRLWIMLRDQIDYQEFCRRGQMRQKNGGACAGMPEVGHGPAI

SEQ ID NO: 171150 - protein, 480 aa, unidentified
MMKRNQSSLGIDLSDRSANFCAMDATSGVLAEGKVPLAVAKLAELWRLHGPVDVVVLEAGTPATWVQELFAGLGAKVIVADPRKLQAVTASVRKSDERDARMLARLGLADEELLSPTHVRAPEHRRAMALLKVRDQQVRIRTALVLEIRAQVKLTGARMPPCDAEALHEHQAAVPEELTDILAPLFDTLRSLAASIDTLDEKVKEEGVKFPVVARLAKIDGVGPITALAFVAVVGNPARFGRTRDIGAYLGLVPRRDQSGQSDPSRRISKAGSGFLRRLLTQCAQVVCRPRGKDTAQRRWAHHRIELHGKAGKRKVIVAVARKLAVLMLSLWKSGETWNPLHRVAAKPAVDAPQPVVLDECGLSLGPQAAAENAPSTTTRTHACTEGPPLEKSADGSTGRSGASTTVPRGASRGTEPRGDAPRERVEPGPGLGTAGRRDPPPAPPGAPARAGRPAPPRSAATRRFDSDAAAGGTKHDATR

SEQ ID NO: 171151 - protein, 409 aa, unidentified
MDLVIARCAGLDVHQATVVATVRTPDDRGGRRRTTETFGTMTPDLLALREWLQAHGVTHVALESTGVYWKPVYYVLEDAFTLLLINMQDLKRVPGRKTDVRDSEWLAQLLECGLLKSSFVPPPPIRELRDLTRYRLQQVRDRAQEVNRLCKVLEDAGLKLTTVITDVMGVSGRAMLRALVAGTTDPGVLADLARGKLRQKLPALQRALQGRFRAHHAFLLQQILTKIDFLDETVERVTAEIDRRLAPFEATLAALDTIPGIDRVGAISIVAETGGDMSRFPSAEHLCSWAAICPGQNESAGKRRSGKTRQGNRYLRGTLVQAGLAASRSNGTALQARYHRVKRHRGHKKAVIAVGHSILAIAYYIMRDGRTYHELGADYFDKRHAERAVRRHVRQLEALGFQVTIEKAA

SEQ ID NO: 171152 - protein, 355 aa, unidentified
MDSTKYIGMDVHKESTSIAVINAAGKVVMECVIETKASMILQFMDGLRGNLHVTFEEGTAAAWLYDLLKPHVTKLVVCNPRRNALLKEGNKSDRIDAQKLAELLRGNQLKPVYHGEHGLRAQKELVRSYLTITKDLTRVMTRVKALYRSWGIPCPGTQVYSRLYRVAWLSKISEPGVRLRAAFYYQQLDALRALRQEVRKELLEESKKHKAWKQLCQIPSIGPIRAAMVVGILQTPHRFRTKRQLWSFSGFAIKTRSSADHRSVDGQLQRVKKRISIRGLNQNHNHDLKNLFKGAAVIASTKPGPFREFYNALLGKGMQPEMARLTLARKIATIVLIVWKKGVCFDAQYLKPQTA

SEQ ID NO: 171153 - protein, 311 aa, unidentified
METYIGIDIAKHTFDLNCLPQQKIQQFENNKKGIRKAVKMITKLRPKLIVMEATGGYEALLAAELHAAKLPVAVVNPRRIRDFARANGQLAKTDKLDAAVIALFAARMQPPTQEQIDHNSRLMRAMVARRHQLIRMRTAENNRREHVLDRAIGQSLNRIIKTIEREIEQVEQSIREQLDGMPELKAKAHILDSAPGIGETTASMLVTELPELGRLNRRQIAMLIGVAPINRDSGTFRGKRMTGAGRRDVRSRLFMPTLVAIRHNPAIRRFYEHLLAKGKTKMTAIIACMRKLITILNTMVAKNEAWNPKFN

SEQ ID NO: 171154 - protein, 349 aa, unidentified
MRFYSKPHQHWCGIDLHAKTMYICMLDREGKVLVHQNLPSSPEAFLEAIAPYRDDLVVAVECIFTWYWLADLCAKEGITFVLGHALYMKAIHGGKAKNDRIDALKIATLLRGGMLPQAYVYPAGMRATRDLLRRRLHLVRKRGQLLAHIQMTSHQYNLPPLGKRIAYPSNREGVVEHFEDRVVKKSIAVDLALLERYDALINDLELYLVRQAKQHDAQAFHRLRTIPGVGKILALTILYEIHDVHRFDRVQEFASYARLVKCAKESAGKKHGTSGAKMGNVHLKWAFSEAAVLFVRHSREGKKMLARLEQRFGKGKALSILAHKLGRAAYFMLARERAFDVQRFAATES

SEQ ID NO: 171155 - protein, 415 aa, unidentified
MSKKNTRNALDTSLSYAVIGLDLAKADCAVAAVPCSDDDLGLIDRMDYESLFEQAEKLKPTLFAMEPCCGYSQISLRLQNMGHEVKVISGHAVKNWIATHKSNQKTDLNDATALAKLALYDHDLQPIRVKNVEECRIASVQAIRIQLRTQATKSLVCFKSLCQCWGIVIRRGSLNTKKMAEAVAAVEKLLGAEVASSLMILRDAYKFTMKQINALDKLLDALVEANEQARTMKTVLGIGTQTAARLAVTTGDIKRFPMPRSYVAYFGLAPRNIITGHSGTPSPSKRGALKPVSSRGQGKVSRRGDRVARSFIIQGAATIYMLYCKDMLPECQLRRWLHEQIKRGKPYGKIIVSLAVRRLSETRHHWTVRFSPPYTEQHSSTDQLIEQWSTITFLQSVLPSPSGSPPPSLPTRNRT

SEQ ID NO: 171156 - protein, 317 aa, unidentified
MYVGIDVSKEHLDVATDDGAFSAQFANDEQGYGELVIRLQEVKPTLVILESTAQYQLEVSLMLATAQIPLAIVNPRQVRDYAKAMGILAKTDKLDAVTIARFGATVKPAAQTLPDAETLELEALLTRRRQLVGMIASEKNRLQAIFGPAKQGAAAQSVRDTLSYLTKQLKQLEKDLQKRLERSPVWKAKEDLLKSVPGIGKVTAMTLVIDLPELGKLNRKQIASLAGVAPFNCDSGKNQGKRRIRGGRATVRTALYMACLASLKHLSEPTASRYERLKTQGKKPHGVAIVACMRKLLTILNAVVRDGKPWNPALASA

SEQ ID NO: 171157 - protein, 353 aa, unidentified
MNNDKYVAMDVHKASVVIGVRDAAGKMIGRSVVETKAQTIKDCVRGLSGTIHLTLEEGTQSAWLYDLLKPLVAECIVCDPRRNKLLESGNKSDDIDVAKLSELLYLGRLRAVYHGDHGTRVLKELVHNYEALVKDNTRVKNRLKAIFRGRGITYEGGEIYELKRQQEWLGKLPERGVRERATQLYEQLERLEGWVVAARQQMLRESRKQKAKKILQQIPTLGEISVAELIATVDTPFRFRSKRQFWTYCGLAVVRHTSADYRFEQGELRRRAKPGPTRGLNRNYNRRLKKIFKSAALTGSVKGPFKQYYERLLARGLNPELAQVTLARKIAAITLTLWKKGESFDPQKMVKPS

SEQ ID NO: 171158 - protein, 427 aa, unidentified
MSEVESIQSEPEFAAFIGIDWADQKHIWYLQTAGSKQRESGELEHTPEAVECWVANLYQRFAPRPIAVAVEQSRGALVFMLSKYELFHLFPVPAQMAASMRQALYPSGAKDDPRDADLLLDLLLQHRNKLRRLSPDSEATRRVQNLVEERRKLVDEKTAQINRLTDHLKVYFPQMLEWFGRLDSELVCALLERWPALEELQKASPASLRTFFRKHRCRDRERIECRIEAIRRALPAIQDRAVIDAKSAVVKVIVQLIRILIGGIEDLDGQIEEAAAAHPDFFIFNSLPGAGPVMAPRLLAAFGSQRDRYRSAHEIQSFSGIAPVTESSGKRKWVHFRWACPKFLRQSFHEWAGHSIVQSEWARVYYQQQRSKGNTHHAAVRALAFKWIRIVFRCWQDGVAYDENTYLAALAKHGSPLSGLVAIGKTL

SEQ ID NO: 171159 - protein, 405 aa, unidentified
MVNVGIDLHKTQFTVCVRTGKESWFAKYPTTPEGYRDFLAQAAEWQKKGEAVRAGVESTGNTRYFKNRMEEAGIGVTVINTLKMKVVNESVKKTDKHDAATIAEFLEKDMLPESQLCSRESEQLRRLLRARESLVTTEVVIKNQIHGLLTSEGMEDVKGSLQSKKGRREVLDALQANKNGLAAQPLFETIERLEENIKGIEKELRLLTKGDRMVELLMTIPGCGEICSWTIRAYTDDIKRFASPKKYASFAGLAPWVQNSNETVHHGSITKRGPKELRTAMVQVVMGLRRMKEKTFSWRFMQRYEAMKKSKGSGRAIIATARKMAVVIWNMLTGDAEFDIGLMVDRKLAKKAESMSGAAGTAEQALNEAQEKQEKPALVEEVKRSEGVKKTVKKSGVARKKIKKV

SEQ ID NO: 171160 - protein, 370 aa, unidentified
MEEGIKFFVGLDVHKDTIAVAVAETGRAPARLVGSIAHDVNQLLKRLARYGEPAQVHVVYEAGPTGYGLQRALARRGYQAQVIAPSLIPKRAGSRVKTDRRDSLRLAELSRAGELRAVWIPDPADEAIRDLARAREDAVNARTQVRQQLKGFLLRHDVRYARRTSWSKTYYRWLATLNFAETGVQTAFTAYWQAVSAADERVGRLTTALVGSIAGWRFASIVAALQALRGIDQINAIGLVAEIGDIGRFAHPRQLMSYLGLVPTEASTGERVVRGSITKTGNAHARRLLTEAAWNYRFQPRIGMRAQRRAEDLPQAIRDVAWKAQLRLSGRFRRLHTRGVHLNKVCTAVARELAGFVWAVARARSELPQS

SEQ ID NO: 171161 - protein, 368 aa, unidentified
MFEHTFIGLDVHAVNVVGHALNPGTGEISCHTTAADPALVLEWIRRLDPPVKVVYESGPTGFGLARYLRAAGINCVIAASSKLLRAPGDHIKTDRRDARVLAEMLAVGSVVEVRIPGQDEEALRDLSRLRTGTAKDLKQARQHVNAILLRHGIRYAKDTKWTKEHGLWLHRQRFDLPALQFTYQADVEQAELLAGQLKRIDRQVATTASQCRYAPLIDALMCLRGIQITTGFGLAVEIGDWSRFTGSSIGSYLGLVPSEESSGQSRHQGPITKAGNTYARKLLIEAAWQHRRPYARPGERLLRQLDLVDPATRIRALEGNHRLHHKWEYFDARKKMPVKANTAIARELAGWCWSLAAPLQQGERVNAA

SEQ ID NO: 171162 - protein, 448 aa, unidentified
MFTMHYKRLLTLIDSVSSYLSVGLDVGADFTWMSIALPNGSFIGKPFKIVHSDPRSRDLAVAKIKEAQETYSLKSRCFLESTGIYHIPLLCFLRDKGFDCSVINPIITKNSTNINIRKLHNDKFDSKKAALVGLNVSLKTSIIPDDSVVDLRNLVRDYYYFKDLQSAVALKLTAELKVSFPAYAKVFSKVTTQSSLKLLSAYPLAKDMLAASKDDIVKIIRSTARFGEAYALRKYDTIIAAAQDAAVFGRALPSNAVRIRLYIDTYQEYQKHLDALLKALHETVDRLQDTLIYDQICLLQSLRGIGFLSAIVLIAEMGDFKLFSSPKKLYAYFGLDPAVKQSGKLNGDKVHMSKRGSSLARRVLHMVALNNVKVDKGSGTPVNPVVYDYYTRKCSGKKKTVAMGAVMHKICNIIFAMLRDNKPFEVITPEEHCRRFAAEHPDKIRKAA

SEQ ID NO: 171163 - protein, 371 aa, unidentified
MQEFSKYVGLDVHKETIAVSVAEAAGGEVRYFGEIRNTPEAMVKLVRQLRKDGVVLSFCYEAGACGYGIHRQLQDLKQECQVVAPSLIPKKAGDRVKTDRRDSLSLARLHRAGELTAVWVPDGAQEALRDLTRAREDMKHLQRQAKQRLSAFLLRHGKRYGGKSSWTQAHYRWMEEVKFEQPVQQIVFQEYVDTVKAMTRRVAALDIQIESAAAESVFWPVVEGLMALRGVDLLTATTIVAEIGDLKRFAGAPQLMAYLGVVPSEHSSGGSKSRGGITKTGNGHVRRVLVEAAWTYRHPARKSAHLQRRAERAPQQVQDIAWNAQKRLCGRYRLLEGKGKLKVQVCTAVARELAGFIWAIGQALPQPAAKV

SEQ ID NO: 171164 - protein, 429 aa, unidentified
MNYTQNAKIEQVTDETMVVGVDIGSQVHYARAFDNRGRELTKRVFSFENDIEGFNTFNQWAGKLMKDNGKTDVMIVCEPTGHYWFAFAKYVSDHQGKLVMVNPFSVKKIKELDDNSPKKTDAKDPKTIAKLVIDGRYSIPYTPEGIFAEIRDLVYSRDRIIKQHNIAANRIQRWLSIHFPEYLGLYTRFDATSGLAVLERAPLPKDVALLGVGGIRKIWHEKKMRGRGVTEDRAKILIEAAHNSVGLDGGNGTKSELFMLLEKYRLWTSQLERINKVLDEAILKVEYVEKLLAIKGVGSITIAGFIAEVGDIRRFKSPKQIQKYAGLELVENSSGKHKGKSRISKRGRRKLRKVLYQVMIPLLARNKEFREIYDYYVTRVKNPLKRRQAMVAVSCKLIRVFYAILTKGVEYDRIKMISDIHRESELQVA

SEQ ID NO: 171165 - protein, 376 aa, unidentified
MNSIGCRDTVGIDLGDTFSYVCILDPQGRVTRRFRHPTTPKAFRAHHERRASSLVVIETGTHSPWISRLLKECGHEVIVANARRVALISRSKKKTDREDCELLARMGRADPALLAPIEHRGEESQLDLTTLRARGAAIRARTLLINAVRGLVKSCGERLPKCGSATFHKVAGKHMPQQLKESLEPLVGLIEANTTLIKAYDKQVKALCTKHQPTGHLQAVTGVGPIASLTFVLTIEDPRRFRRSRQVGAYVGLTPRLSESGDSKPQLRITKAGDVDLRRLLVTSAQYILGPWGPDSDLRRWGLALAERGASKGKKRAVVAVARRLAILLHHLWKTGEVYDPLFLARKRGEADDPTKMRPPRARGGSKKQELLASSS

SEQ ID NO: 171166 - protein, 410 aa, unidentified
MNNPIFVGIDVSKKDNHVQFLNGKGDKLSRFAVPNNQIGVSNLVDNIKKVFSNTDANSVIIGLESTSVYGDHLAASLRQDEFLSHVDGSVHVLNAKQVAKFKESYADLQKNDKVDAFVIADYLRFGRISKEVHMDEKYIALRNLTRARFQAAQNLTREKTRFIETLFYKFSDLQSTEVFSDTFGATSLAVITEFFSVDDIAYMDLQELADFINSKGKGKFADSTVIAKELQAAARSSYRLSKTVNESVNQLLAIRLIGIKAIQNQIKELDKAIKNYMQLFPNTLISVKGIGPVYCAGIIAEIGDVKRFSNQAALAKFAGLAWTEYQSGGFKAANTRMINSGNKYLKYYLLEATNKVRMHDTEFKRFYQLKFKEVPNHQHKRALALTARKLVRLVYCLLSTNRLYTPPTQR

SEQ ID NO: 171167 - protein, 449 aa, unidentified
MVCVGKTERYNKERGCAPTSDPVEASDPARSTLWAGLDTGADISYLSVIDQDLRPCLEIPVPSDPAAISAAFQTLSGSIIEEVAMEATSTSLHIAHGLRDRGFKVSLLHASQASRYLKLWRNKTDKNDARGLAELARLRPPTVKRVFLKSPQIQRIRAKLLFRDRLTGQRVACEAMIRAFLRVNGGCLKRSQSSKALVRHVTEQAARLRQAKGIDIADDIKPLVDLSVSIRLVVSRIDDELAAWVQANPVCARFLDIPGVGAVTAISFYTAVEDPWRFKKENDIGAYLGLTPKVLQSGVSVRHGRINKMGSTLTRKHLVGSATVMFSSRTRDCPLKEWGLILAERAGRPKARIAIARRLAVMMLAIWKSGRAYDPDLARARVRASSVAPMAGNECDPVVGLEALTSPSALGRSIEPAGSTGPDFENRVEARPRLLQRSRTLPHKDRIAD

SEQ ID NO: 171168 - protein, 295 aa, unidentified
MKVSTLGIDLAKNVFQLHGVDHEGHTILRKKLTRAKFVQFVIQLEPCLIGMEACSSSHYFARLFTRYGHEVKLIPPQYVKPYVKTNKTDAADAEAICEAVTRPNMRFVQIKTEEQQAVLALHTERGILIRERIACANSLRATLAEFGITIAAGQSHLTRELPAILEDGENGLSPFVRTSIYRQSKHIRELEEQVKQVEEALASWYRTQEACQRMAKIPGVGMLTATYVVAAVGNARQFSTAKQFASWLGLTPKEYSSGGKQQLGGISKRGDGYFRYLLVHGARALTAWGQPKRRG

SEQ ID NO: 171169 - protein, 370 aa, unidentified
MLNTTTFVGLDVHARSIKAVALDAMTGEVRSATFAYDAAAVAEWVRSLDPAAKCVYESGVTGFDLQKRLASMGIDCVVGAVSKMIKPSADRKRKNDRNDAEFLARMLSVGNVGEVWVPDDEGEAARDLVRALDDAREDLKRCKQRLSKFLLRHGYAFSETTPTGRRKGNWTAAHWAWIKSISFPEKADGDALAYYVDAVRQAMEDKARLERLVEAEASKPRWKRRVDSVRCLKGIDVTSAADLVFEAGEFSRFKNARSFAAWLGLTPSEHSSGESVRQGGITKAGNKHLRRALVESAWHYLGCSPHSKDLAKGQVPDPAARRHAAKGVRRLVERRRAMLERGVHKNKANVATARELACWCWAVGCMVEGA

SEQ ID NO: 171170 - protein, 343 aa, unidentified
MQTVTTIGLDIAKSVFQVHGVDAAGQVVIRRQLKRRQVLAFFQKLPPCLIGIEACASSHYWSRELQVLGHTVRLMPPAYVKPYVKRQKNDAADAEAICEAVARANMRFVPTKTPEQQSCLMLHRTRHLFIRQQTAVINSIRAHLAEFGIVAPVGRKGVTELLHVVADPGDKRVPEVARACLAALGAQLLSLKEQILEFDRLIMAWHRSNQTSKRLHCIPGVGPMLATALVASVADARTFRSGRNFSAWIGLVPKQHSSGGKDRLGSISKQGDRYLRSLFVAGALAVIRYAKIHGTGHRPWLTALLARRPTKVAAIALANKIARMAWAMMAKGERYKQPVALAA

SEQ ID NO: 171171 - protein, 420 aa, unidentified
MTRKMAQIGGANVVWDAEDDGNAGSTAQPVCGLWGTPPSAIVYPFHSSSVGVDGPRRHQACQNEVVVDLRQRRPSVGHVTRIGMDTSKHIFQLHGVNAAEEPALRKKLRRKEMVTFFEKLAPTVIAIEACGASHHWARLLQSFGHSVKLIAPQLVKPYVKRGKNDAADAEALCEAMSRPTMRFVPVKTAEQQAALMLVGVRDRLIRNRTQLANAIRGYAAEFGLTAAKGKAHLDPLLERIQADESLPALARELFAAQAKEYTQLQAQIDEVDARLMGWHRADECSRRLAKIPGVGPIGAVLLKMKTPEAELFRSGRQFAAWIGLTPKDHSTAGKVRLGVITRAGDEGLRSVLVVGATAVIRHVRRGGRASPWLTELLKRKSPKLAAVALANKMARIAWKLMVTGENYAAKSLPAALAGAA

SEQ ID NO: 171172 - protein, 342 aa, unidentified
MSTDYDGRQYVGIDLHRRRSVIVRMTPEGQQLGWSRIDNDPVALGLELAKAGPDPEVVLEATYGWYWAVDALQATGARVHLAHPLGVKGFAYRRVKNDVRDAADLCDLLRMGRLPEAYLASRGERELRELVRHRAKLVALRTGLKAQVHGVLAKQGLLPPCSDLFGVAGMAWLRAAPLDLVYRQRVVSLLELINAYDAEVEMFRTMIAHRFRGHRGYRVIQQISGIGPTFAAIFIAEIGDITRFGRPQKLTCWAGLTPRHRESDTTVRRGPITKQGSTLVRWAAIEACQRTRPGTKLATDRARIIAARGRNIGVVAAARKLLTYVYYGLRDGEIRALAKGAA

SEQ ID NO: 171173 - protein, 433 aa, unidentified
MDIVHPRVAGIDVHKKVVWVAVRLPGQAPGERTVVIKRFQTFWRPLQKMAAWLAELGVTDAAMESTGVYWWPVYHALAGARIEVCVCNAAHMRNVPGRKTDLKDCQWIAELHEYGLLRPSFIPAAEVAALRARTRYRKRLIEQRTAESQRLSKVLEDAGIKIDSVASRLLGKSGREMIEALIAGERNPGRLADLARGVLRRKTDDLQMACDGRFTDGHGQMCRLHLDAYDHLTAKIAELDALIAEATAPFAAVIARLVTIPGIGQRTAEVIVAETGGDMTRFATSARLAAWAGLAPGDNESAGKRKYAAARPGNRYLRAAMTESAWATARTRTRPGARFRRLARRFGKGHEKKAAIAVAHTLICIAWAVMARGQDYADAGEDYYDQRDQRNREHLIRHHQQALARLGCQVTLVPPGDGSPPPGTASPHPGQPA

SEQ ID NO: 171174 - protein, 352 aa, unidentified
MESTKYVGLDVHQEATTIAVMNSAGKLIMESIIETKTNTILQFFQGLRGDVHVTFEEGTWAAWMYDLLKPYVTKVVACNPRMNALLKVGSKSDRIDPKKLAELLRNGALSAVYHGENGVRTLKELARSYLTISKDLGRVMNRVKALYRSWAIPCAGTQVYAPCHRSEWLSKITETGVRRRAEHYYQQLDALQTLRREVRKDLLLESRKHNATKLLRQVPCIGPIRAAQLVALMQTPHRFRTKRQLWTYSGLGLETRDSSQYLYVEGQLQRSKKPQQLRGLNANHNHDLKNIFKGAATTASVSAGPFHDFYQALLTKGMQPTMARLTLARKIAAITLIVWKKGARFDPQHLAA

SEQ ID NO: 171175 - protein, 344 aa, unidentified
MTYYAGIDVSLRTVNICVVDDKGEQVAETKLSSDVQEIISYFDEFEYSLEVVGLEAGTLAQYLTYGLQAADFDVVCMEAQQVKAALSAMRNKTDKHDARGIAQLLRSGWYSQVHIKSMESHHIRMLLTSRRTVLDKCIDLENEIRGLFKIFGIKLPPKLGHGSFDKTVRAVIEADEKLSHALLPMLDARLVLYETFRVLDNRTRHLAWGDEICERLMTAPGVGYVTALTFKSGVDDPTRFKRSRTVAAHFGLTPRRSQSGEFDFDGHISKAGDAEVRRTLYVAANSVLTRSSRWSSLKAWGMKLKKNRGHKKAVVAVARKLAVILHRLWIDETQFQWGMERVRS

SEQ ID NO: 171176 - protein, 337 aa, unidentified
MSVYVGIDVHRKRSQVAVVTEDGQVQLNKNVVNGSEPMLRLIGDLPSGTPVAFEAAFGWGWLVQLLEDYGFEAHLVHPLRCKAIASARLKNDKVDAAILAQLLRADLLPEAWIAPAKVRQLRALLRHRISLVRLGTQLRNRIHAVAADHGYDRSASYWTGPGRGWLAELDLPAASREIVTDCLAVIDGLAPVIERLDGELHAHAKADPRVKGLRTLPGVGEFTALVMLAEIGDITRFPSARKLASWAGLTPTVRGSDLKVRHGHISKQGSAWLRWAMNQAAQTAKRSPEFAATYSAIAKRRGKKIATIAIARKLLTRAWHLLSEMQAADAATPPRRP

SEQ ID NO: 171177 - protein, 339 aa, unidentified
MNELKVRITRKGSKKMAKRTIKCAGIDTGKSKLDAAIDGSSERLQVDNTPEGHKLLLAWLRKHRVKRVGIEASGGYEQPVVAVLRQKKLVVILFQPAQVRAYAKFHLQLAKNDKIDAALIAACTTDVRKIHEAPDPRLAPLAEHLTLIDQIGEDIARAKNRLETCRDRRLKQHWKDEIARLEKSEKAEFKALVAAIRAHADLADRLLLIQSVDGIGLPTAVAILVRMPEIGRLTREQAAALAGLAPYDDDSGERSGARHIQGGRKRLRLALYTAALPASFRWNSHLIVLYERLTKAGKTHKCALIACARKLLIFANTIVARGEPWNKSPPERKPAVAAA

SEQ ID NO: 171178 - protein, 406 aa, unidentified
MKPTYFLGIDAAKHKMRATLSNRSEHVLFEKELSVQATGLRQLLAAIKRQVKDPEQLLVLIEATGLLHLNWSAALTKAGYAVAVINPLIARRLYTLQNSIRDNKSDPIDARGLCTIGLLHGEKLLAHYRFSLRPEQFTLQRAQSVRKALRSALTNLKKTYQSLMDLSFPELGGLLQLDGVGIRQLLIQAPTPAAIAGKRLCTLENNWMVRPKAAALKALAADSMADPDLAAASGPALVALLQSVAAMEGRLHALDQQIAKLACTSVDPQTKALIETIPGFGPVNAAKTLAWLPTEILHSGSNRKVAARLQAFMGNDPRLRQSGQWKGHTKMSKRGVEMLRTAFFQSAFSAAHNDPELRAYYQCKRAQGKTHEVALSHLMRILTRRLVAVLRSGKPYQSHYNLKNAA

SEQ ID NO: 171179 - protein, 341 aa, unidentified
MGEYIGLDVSLKETAISVRRDGKRIWRGKCPSDPSLIAEVVRKHAPEPKRVVFETGPLSVWFYHALSAEGLPAICIDARHAKAALDMAPNKTDANDADGLAHLAEVGFYREVRVKGYDSMLVRTLVAARSRLVQITTELSNQIRGLMKTFGLVVPRSKGGTFEAEVQRLLVGQDELARIILPMLEGLAQRRTRASALGRQLLACARQSAACQQLMSIPGVGAITATSFTAAIEDPANFKTSRSVGAWLGLTTRRYQSGEVDYDGHISRRGDAHLRGLLYEAATVILTRTHADSDLRRWGLMLRERIGFKRAAVAVARKLAVIMHAMLKSGEVFNRAVSAPA

SEQ ID NO: 171180 - protein, 391 aa, unidentified
MIYIGIDVAKDKHDCFITNSEGEVLFNAFTIPNNADGFHDLFQKISSFTNDFSNVKVGLEATGHYNYNLLGFLIDKGLPTFVINPLHTNLFRKSLSLRQTKTDKVDAHTIALMMMSGVNLQSYSNTSYHNEELKSLTRYRFDKVQERAKLKTSISRLVNILFPELEKLVPSLHMVSIYALLAEFPSSAQIASCHLTRLTNLLANASKGHYNKEKAIEIRNAAKHSIGSNMPAKSLELKHTIRLIQELTSEIDEIECSIKSIMDEIRSPILSIPGINYRMGAMIIAEIGDFNRFSSPDKILAYAGLSPSTYQSGQLDGCYSHMEKRGSRYLRYALFNATKFVCIWDNQFSAYLAKKRSEGKHYNVAISHAAKKLVRVIYQLEKSGQLYHRAA

SEQ ID NO: 171181 - protein, 388 aa, unidentified
MRVLYERCCGLDVHKQSITACALTPEGKEIRTFGTLTDDLEELVDWLKEKKVTHVAMESTGVYWEPVYNLLEAEPVEVLVVNAQHIKAVPGRKTDVKDAEWIADLLRHGLLKGSYIPHRAQRELRELVRYRRSLIEERARELNRIQKVLEGANIKLSSVVSDINGMSARLIIRALIEGKDDPAALAQLAKGRLKQKTEELRRALKGVMGPHQRMMLAEQWRHVEYLDEAIARLDREIEERTSPFHEALELIDTIPGVGRQSAEQIAAEIGTDMSRFPTAAHLASWAGMAPGNHESAGKRLSGRTRKGNKKLRSCLVECARAAARTKNTYLSAKYHRIAKRRGANRASVAVGRTILEMIYYILLERNRIKSWEPTTGIGSEKRASCVKR

SEQ ID NO: 171182 - protein, 346 aa, unidentified
MTKVTIGMDLGDQHSQVCIVDAAGATVQTARVRTTPTGLTRWFGAQPPTRVVVEAGTHSPWVSRLLTALGHTVLVANPRRLRLIYASDRKDDRVDAEYLARVGRLDPRLLGAITHRGAAAQAALAVLRSRDALVRTRTGLINHVRGVVKTVGGRLPACSTEVFPRKVAPAVPAALAPALAPVLAQLTLLTQQIHAYDGELTRLGAEAYPDTARLRQVVGVGPVTALAYVLVLEDPARFPRSRAVGAYLGLQPRRRQSGARDPQLRISKAGDPLLRRLLVQSAQYILGPFGPDCDLRRHGLRIAAAGGGNAKKRAVVAVARKLAVLLHRLWVSGARYDPAYGMPRAA

SEQ ID NO: 171183 - protein, 310 aa, unidentified
MEAVRFEQVVSKGCGLDVHKKVVAATIDGVGIRKVTREFGTFTSSLTALRDWLLEQGITHVAMESTGVYWKPVYHILEPTGITVWIVNARHVKYVPGHKTDKKDSAWLCKLLLAGLLKPSYIPPQEQRELRDLTRYRKNLIQSIASNKNRIIRILEDCNVKLSSVLSDTSGVVCTKLINKLIDGKTVTMDDIEEVYHRKLQASKQDIWEACNGYVTEHHVFMLQTIREDIAATQAVISKIDVRIKEMLAPYENVLELLKQVPGLSSKTAEDLVAEIGLDMSVFPNEKHLCSWVGIAPGNNESAGKKKAAE

SEQ ID NO: 171184 - protein, 338 aa, unidentified
MSVTLLSIDLAKNIFQLHGVDERGRPVLSRRVSRTKLLQAVLDMPCCRIVMEACGGAHYWARKFAAMGHHVQIIAPRFVKPFVKSQKNDRNDAEAITEAASRPTMRYVAINSVEQQDIQSMHRIRSLLMRDRIAQINQIRGLLAEYGVVIAQTPLKVRQQLPAILDDPDNELTALTRSMMHDMYERLTLLDTQIARYDDLIRQAHKASALSQRLEKIRGVGPMIATAVIAAAGSATEFANGRQFAAWLGLTPRQHSSGGRQRLFGITKRGNGYLRMLLVHGARSVVQQAVKRSDALSRWIIAVQARRGTNVAVVALANKIARTIWVLLARGREYEPPV

SEQ ID NO: 171185 - protein, 408 aa, unidentified
MDVVYQTCCGIDVHKMKLVACLCKGHKQEIKEFSAKTKDIKAMVDWLEGNKCEMVAMESTSVYWKPLVNIFEMRGLKYMVVNAKDFKAVPGRKTDVLDSAWLADLLRHGLLKSSFIPSREQRELREATRYRKAITEERARALNRLQKMLEGANIKISSILSTMTGKTTMNLLDYVLNNDEMMDEKTAETLIISRISASVKEVTEAMEGIMTPFQKTMMKQVLTHVNELSERIEEMDIIIDTYMAEYWEAIKKLEQIPGIGKKSAEIILAEIGLDMNQFPSAGHLASWAGVAPGNNESAGKRKSGRTRKGNKILKSTLAQAAKSASKNKNSFFHAQYQRIAVKRGKNRATLAVAHSILIAIYHMLKDGQEFIDLGSDYYHQFNTEKKINSYLKKLAALGYRVDEHSTVK

SEQ ID NO: 171186 - protein, 393 aa, unidentified
MHNCLAVDVAKDKSMVTLVSSSGEVLIDPYEVNHSIDGFSNLLNRITSFKLDNISVIMESTGIYHRPIERFFLENNFKVFVINPIYGRMHKRNLRKTKTDKEDCFNLVNLFISNTFKEYIKPDQLYLDLNALSRQYFALDELCVNIKNRYRNLLYLCFPEYETIFKGTLMYSNIALEFIENYPHADIISNTRIDKLQNFFKKREFRYWKSKANLIKEIASKSYPSVNENDELVSNLSQMARLVNEYQKAIDIIKYKITFLSKKSKYFEPINSIYGIGEFTTSIIIAELGDINRFNNIKELTAYCGLDPSIKQSGKSINIRGPISKSGNKYMRKILYIACSNIIRLAAISKQENDFEIYYRKKRNEGKHHYASIVACTTKLLRKILALCKQLDN

SEQ ID NO: 171187 - protein, 373 aa, unidentified
MDRNVIYVGLDVDDTQYHGSALNKETGEVITFQCRPTLAGLLKQLAKLDQVFPDSTLSLCYEASYIGYTLQRDLVKHDYHCDVVAPSSIPSPRGKQIKTDRIDAAQLAQFYANGLLTIVAIPEPEQEQDRDLLRSRKKLVDQRKELRTHILSLLRRNGRHFQQETPNKANWTMPHQYWLEKVVTTSSGSFAVNLSLLVRQLNAVNGILTEYAQEIHAMAKTERYERSVQALTCYKGIKNLFALTMITEIGDIKRFPHPRQLMSWIGMDIREYSSGGKHNRFGITKQGNRYLRSAFIEANQRGYRTARLSNDLKARRKGTEPDLIAIADRCLRRLNKKGNRLLIAGKHPNKVKVACAREMVGFVWESLNKAAVA

SEQ ID NO: 171188 - protein, 321 aa, unidentified
MIVSDSTLPVVGIDISKARLDVACLPVQTRAAVSFDNDPKGHAAMIAWLRDVAPRLIVLESTGGYQRAVVASLAAAGLPVVVVNPRQVRDFARAVGILAKTDAIDASVLARFGVSINPVLRPLPDAQASALVDLLTRRRQLIELRTAESNRLAQATAPKVKASIKAVLAVLKKQIDSIDDELDGLIQQCPCWQEKETLLTSVPGVGTQTARTLLACLPELGDISRQAVAALVGVAPINRDSGTMRGKRTTWGGRKVVRSALYMATLVASRYNPVIRDHYQKLLAAGKVKKLALVACMRKLLVMLNAILRTKTPWRITHVHP

SEQ ID NO: 171189 - protein, 421 aa, unidentified
MKKSQRIVGFDCGEDGHSAVLLDTAGEFGERFGVVNERGQIQELLAKLILAVGPEAQLVVVVESRRSHGRIVADVASELGCDLRQVNTVALNHYRDLEGQPRKDDEWDAYLGARMVFLRMRGCREAIETTEEERALSRLTRTHSRLVEDRKRHVARLRAVLLELAPEVLHSSWEGPQPGSKAMLYLLERWPGFEGLERAQMRSIEKILRRCRYGSRATHVAKLIRKMARGISVATEERSALTLELGFLVQQIRFCNESVDQVHGKIARRVERHPVGKKLLEMHGNGPVITGVLLSELYPVARTSTEPKCATYAGVTPLSRKSGKSLDNDKLTQGVNKRVLHSLYTSSVVAINNSAVDRTYYQKKLRDYAGHPKPHVAAFIALSRQRHKLVYKLMTTDARYDKEILIATHLARLEQERTAAA

SEQ ID NO: 171190 - protein, 412 aa, unidentified
MRKRTIEFEQVIERGCGLDVHRDTVVATVMGKGIQTETRTFGTTTSSLKELGEWLESLQVTDGAMESTGIYWKPVLHVLRDYPLNLLVVNARHIKNVPGRKTDKADSQWICKLLISGLLRGSFIPPESIQALRDLHRYKKKLVGTVASEKNRIIRVLEDANIKLSSVVSDTSGVTATYLINGLVEGRKDLANLVSECYHKRLQASPEQIVEAINGRLTPHLSFLLKSMQKHIQAVEEQLAEIDAEIENHIKDFQAEIELLQTIPGVGKEGAIGIVAEIGVDMEVFPSEHHLASHSGMCPGNNESAGKKKSSRTRQGNKHLKATLTQLAWGATRTKKSYYKAKYESMVARRGKKRALIAVGHKILCASYHIIKNKEPFKELGYEYLAERKKKNRLEYLKRELKEQGYKVEKAA

SEQ ID NO: 171191 - protein, 358 aa, unidentified
MQRNKISFKGQKIFIGIDVHAKNWEVAIAPEIGTVKRHSQKPSAKELFDFLEKKYPDGEYQAVYESGFSGFSTYYALKEVGIGCMVIHAADVPTTQYEEVMKTDRVDASKLARSLKAGLLKGNYILEKQAIDDRSVVRIRKTIQKQLGGYKSRVKHMLHCHGVQMPERFSRKQAHWSRPFIAWLKNDVRLMSDTRVSLDLLIRQVEVLRGTLLEATLQLRRMSGEERYKRRHDLLRTIPGVGLVTAMSILTEVCDVKRFHNENEFAAYLGLIPTSHSSGEKTVHGEKTFRGNKQLGPMIIEAAWIAIGKDEGLGAQYHRYRQRMESQKAIVRIARKLSNIIFSVLKNGKEYVQHQTGI

SEQ ID NO: 171192 - protein, 425 aa, unidentified
MKVTYKTCCGVDVHKSFLVATIITTTGGIEPSYQKKRYSTFNNSILEFKQWLLDNDCHDLCMESTGKYWIPVFNLLEDEINVTIANPKWVKAVKGNKDDTKDSKWIGDLFRLGLVKGSYIPCKKIRILREFTRYRYKLVSCRSSEKNRYQNALTVCNVALDSVVSDIFGKSSTSIIDYLLEQSGNSINHEEIASKLLKSLKSKEDAVIESIEGYQMTDSQKYRMHLVRAHMDYITAEINDVDREIEKLISSDPDFENAIQFLMTIPGVKRDSAITVISEIGIDMTQFSSSKRLCCWAGLTPGSNESGGKKKSVRVTRAGVYLKPALVQCAHAAVKSEKSPYYKKKYESLMKRRGKKRAIVAIARMILTAIYQMLSTGESWNPSDLYKIDIPEALLEKQKAKAIKQAMKLLQREGLYPLPQESKAS

SEQ ID NO: 171193 - protein, 313 aa, unidentified
MTDTTRFVGIDISKSSFDICILPDGRSASFANSAEGIADFLVFIEPFCAIERLVLEPTGGYERHVLAALQAAHLPVARVNAKQARQFAKACGQLSKTDKIDAFILADYARRMETRLVPQRSSQEGALVDLVRRYRQLSHMIVQEKNRREKQNETLKDWIEEILHVLLKQRQAVIDAMEACLKADPQLARKADILMSLKGIGLRTACFLLADLPELGRIGKGQIAKLVGVAPLNRDSGLMHGKRMIAGGRQPVRDALYVAALPAIRFDPAMKAFFMQLKQKGKPGKVALVAVMRKMIIILNAKMRDAYATVLDA

SEQ ID NO: 171194 - protein, 366 aa, unidentified
MDTIYIGVDFHARQQTICYLKTETGELVITELKHQDKEQVRAFYQQFQGPVIIGLEASGYSPWFEALLEQLGCEVWLGHATEIRRRARWRQKNDRRDAELIWDLMVHNEFPRLHRPTAQSREVLRMLRYRQKLIKLRTMAKNSLQAIALQAGLAKGKRLFTQVGQQEFQLAEMSPVLHWQRDHWFALMKPLNEQLLETMVWCKAQSKDDLVIKRLRTHPGIGLLTSLCLLHTLQPVSRFRNTRKVVAYAGFDPVERSSAERQHFLGISKAGSRLLRYLLLEATHTAVRYDEDLKRFYKRLAERRGRPKAKVAAARKLLIRAYIMMRDEIDYAEFRRRAVAVRLARRGQGPPSVPEVLIGQSASPGA

SEQ ID NO: 171195 - protein, 320 aa, unidentified
MQTPAVVLNIGADVAKDEIVVACSEGSFPVRQVANKRTAVLAFLKGLPAGSRIGVESTGSYHELFAEAAHQLGFLVFLLNPKDTRHYAKAVGLRGKTDRVDAELIARMIAHEHTKLHAWTPPTPQQRELDRLIKRRATLISLRGAVEMSLCDLGGFAADLKALRTRFNQLVARIDLRVKALVEASPERKQNCRRLCTITGVGLVTGTALGNTLERVPLKSADAFVAFTGLDPRPDDSGQHRGKRRLSKRGPAELRRLLYMAAMSAMRTKTWRPLYEHYRAKGLSSTATLVILARRIARTAWAIYTHKTEFDPARLTKPLT

SEQ ID NO: 171196 - protein, 306 aa, unidentified
MKGIGIDVGSDWLDVGRSDAMDCLRFANDDQGITQLVAWIATQGAVRVVVEASGGYERDVLAACVAHGIWISRINAARARDFAKGLGLLAKTDRMDARMLAHLAQVHPRLVQALPQAPWREELRAWTQRRQQVVASVQQHRQQRSRCGVPALRALIDATIAQLQQELTTLTTRIAALAAPHVTPALTSIKGVGPTLKAGLLAQLPELGYLDRRQIAKLVGVAPLHCDSGKHRGQRFIQGGRAALRSLLYMATLTAMRWEPVIRATFEQLRARGKPGKVAVVACMRKLLVILNARRRDELRTGIARA

SEQ ID NO: 171197 - protein, 341 aa, unidentified
MDLSRKRLDFHLLDAEGATVEVGAAPPDADGLRGLSERLGRHGAPIRAAIESMNGARFVHDQLELDRWQVEIADAQKVKGLAPLACKTDRIDAWVLAELARRDLVPAIWLPDPQVRAERERARWRLHLVRHRSSLKQRVHAVLLTHGKPCPVSDLFGLRGRQLLAGLGLPEPWQGTIEASLRLIDELDREIGECERELRRLGADHDYVPLLLTVPGIGWVLAYTIAAEIGDISRFPTPRKLAGYSGLCPRVYQSGERDLRGPLSKQGPRYLRWALVEAATHACTSPVYRDRYQQTKARIGKQRGAKVAQIDLARRLAEAIWHMLSRNQPFAPKGATDPLAA

SEQ ID NO: 171198 - protein, 343 aa, unidentified
MHAVTTIGLDIAKSVFQVHGVDAQGNVAVRRQLKRRQVLPFFKKLSTCLVGIEACATSHHWSRELQAHGHTVRLMPPAYVKPYLKRQKNDAADAEAICEAVMRPSMRFVATKTPEQQSCLMLHRTRHLFIRQQTAVINAIRAHLAEFGIVAPVGRNGVEELLDVVADPNDDRVPELARECVAALGRQLHMLKGQILEFDRHIMAWHRSNETSKRLDEIPGVGPALATALVASVADPRAFRSGRDFSAWVGLVPKQNSSGGKEKLGSITKRGDRYLRSLFTAGALAVIRYAKAHGAKHRPWLTALLTRRPTKVVAIALANKIARMAWAIMAKGERYKEPVALAA

SEQ ID NO: 171199 - protein, 426 aa, unidentified
MNTTPPFDLVIGLDRSDRKADLYRIDLPTGAEARQTIPTSPEALQAWADALHAAHPKGRVAICFEQPANNLIAFLTRYPWITLYPINPISLQKFREVFVVSRAKDDGKDAEYLARLLAAHHDRFQPWHPDTQQTRLLERLVVDRRSVVDHRTGLTNRLQAVLKDYFPQALDLAGEELWRPLGTAFLKRWPTLQAVQKAKPLAIRQFYYAQGSRSEKLIQERLNRIAHAVPLTDDPALLESYALRVRLTVQELELVTRTVKLYDQKIAAVFAEHPDREIFRNLPGAGPVFGPRLLTSLGTRREEYPKATHVQRASGIAPVTKQSGTSKQVHRRYRCSVFFKQSIHEWAGESRLWSGWARAFYEMKRAGGMGHHAAVRSLAYKWLRVVWRCWQDRVVYQEDRYLAALKKHGSPVIEWLEKSRLQPSPA

SEQ ID NO: 171200 - protein, 355 aa, unidentified
MIIIGVDYHPEFQQIACVDTESGEFEERRLQHREEAEGFYRELATRGVAVRIGMEASGHARWLERLLNDLQCELWIGDAAEIQTKRVRKQKTDRQDAQLILELLLEDRFPRIWVPSAENRDLRQLLWHRHRMVQARTRIQNQLQAVALNEGLRCKKKLWRERGRQQLESLQLAPWASRRRSDLLQILDQLSPTIAELTQEVEKEAHKRPEVQRLMTHPGVGALTALAFVLIIGEPERFHCGKQVASYLGLVPLEKSSGKRRRLGHITKQGSSLLRFLLVEAAQATVRSDPNWRNKYFHLVMRRGRKTAKVAMARRLAIRLYWMWREERDYEQLIEFGSHAGEPGNRYDVQKTSRY

SEQ ID NO: 171201 - protein, 418 aa, unidentified
MKSNKAEKIKTINEKTLLVTLDIGKKVHYGYFRTPKNKDIKPFRIYNTGQSFNKFWEKLFRFKEKHMLDEVVVGFESTGPYAEPICNYLRKKPVRLVQVNPMHTKRVKELTGNSPNKTDKKDPRVIADVISLGHSLTVVIPEGPAAQLRRLTHARERAIERRTAMNNQLQDLVFVIFPELVSIIKPSTKTGMYLIKNHPDPERIVPIGIETLCNIVKKISRGKFGIDRVEKLYNAAKESVGITEGKESILLETSHLVSNIEAENKYIESLEEQMIVYLEQIPYSHSILSIKGIGNITAAGLIGEVGDFRKFKTISEVMKLAGLDLFEISSGKHKGGHRISKRGRALMRKLLFFAAINAVKSHGIMYARYQKMLDNGTPKIKALIAVSRKLLRIIFALARDNAPYEENYNRKHEFKLAA

SEQ ID NO: 171202 - protein, 310 aa, unidentified
MEHPTVVGIDVSKDRLDVHVLPSEEAWTVSRDADGLAELCRRLAGMSGVVALEATGGYENIVAASLSSAGLPLVVVNPAQVRAFAKALGQRAKTDPIDARVIARFAEATKPVVRPLPDRATRMLADLLGRRRQIVEMMGSESQRLRRSEMPRVRKSIERLLAALKRELADIDHDIDDTVRGSPVWREKEDLLASVPGIGPIIARTMVADLPELGTLGRKQIGALAGLVPFVRQSGRWKGQAHIGGGRPAVRTALFLGAQVAKRHNPVLKAFYQRLIAAGKSKMAATIAVAHKLLIILNAILRDKKPWQAA

SEQ ID NO: 171203 - protein, 357 aa, unidentified
MKIVGCDLHARQQTIAMVDTETGEFTEKTLCHEGDAVRAFYAALEGPVVVGIEATGSMQWFLELLEELGIECRVGHPAKIRAKETRKQKHDRRDARLILELLIEDRFPEIWMPSTEERDLRTLLRDRHQWVKMRARLQHTLQAIALNHALRQGHALWSQAGQSALQALPLPPYTSQRRAELLSLYVQLQKRIQELDKEVEAQARQRPRARRLLTHPGVGPVTALASDVFLGDPSRFASANQVASYIGMIPCEHTSGKRQRLGKMSKQGNSLLRYLWTEAAMSTVRKDPELQRFYRRKLIQKGMGKARIAAARKLGIRLWIMMRDQIDYEEFCRRGKLRQTGKAHAGMPDFNSGPAQQ

SEQ ID NO: 171204 - protein, 401 aa, unidentified
MKKCNAEQIEAKTASALEAVQEASQSKQYSVYVGLDVHKETIAVAIARPGRDDPEYREEIANMRKTVEKLIERLSREFDGALLLFCYEAGPCGYGLHRQIIGTGHDCEVVAPSLIPKKPGERIKTDRRDALKLARLLRAGELTGIWVPDEEQEAMRDLCRARDDMKSQERKACQQLNAFVLRHGHHWPSGKTRWTSSHYNWLESLKFAHDWQQVVLQEYIDAVKAASTRVAEMMGQMLRVLPQWRMAPVVDALTALRGIDKLSAMTLLAELGDISRFQSPKQLMAYLGLVPGEHSSGGRRRQGAITLTGNAHARRTLVESAWSYRFPARQTAHIKRKAAAASDEAKIIAWRAQKRLCGRYRTLTQAGKNTKLVCVAIARELAGFIWDIVCTEMPQLKAMAA

SEQ ID NO: 171205 - protein, 379 aa, unidentified
MDHAIADTSAETVLRGALELSKNSWLLALQLPDRAQPSLYPIRGGDTEGLMAKLTAARDRWAKVSGKAPSIVLCYEAGYDAFWLARFLKARGIECLVVDAASMQVNRRARRAKTDRIDVGMLLRALIAWGQGDRHVWSVVRVPSVDEEDLRRSHRERDRLVRERTAHINRIKGLLFGQGIRDINVKSKYKTLQIDKLVTGEGHPLPPRLASEITREIARLALIQEQIAALERERDQAPTPCKTTERKRVQLMCLTGIGPAIAAVMTREVYYRQFDNRQQVAGFLGLATSPHDSGDVERSQGISRAGRGQVRGIMIQAAWLWLKHQPKSAITRWFVQRTAGQSGRIRRIMLIAVARKLAIALWRFVEQGLVPQGAMLATR

SEQ ID NO: 171206 - protein, 327 aa, unidentified
MTTSAAAVIGGVDTHKHTHYAAAIDAHGRLLGHQEFPANDRGYVALLGWLRGHGTVQTIGVESTGSFGATLTRSLTKAGVLVVEVNRPNRSARRSDGKSDRLDAEQIARSVLGNTATSTPKTKNGVVEVIRALRVTRASAVKSRTQAFNTLFGVMISAPSPLRDELVVLSKRTLVNRCLHLRPETDDLLELTNDPDRLLPAGVKTALRGLARRWKTLNAEITALNRQIEALVTLAAPDLLDLHGVGAELAGQFLMTAGDNAERIRNEAAFAKLCGVAPQPASSGRTTGRHRLSRGGDRAANSALYIVTIVRMRHHAPTRAYGLRLTS

SEQ ID NO: 171207 - protein, 355 aa, unidentified
MKRTTKYVGLDVHQATTVAVVRDGAGRVMARTILPTEAAALTAFVGPWRGRVEVAYEEGTQAQWLHDLLCPLVARVVVCNRRAIRRQGNRSDWRDAEELAAALQRGALRAVYHGGGPRQAELKELARTYVTLVQDATRVMTRVKALYRARAIPTKGRGVYHAGERATWLAKLPAGGAGFRATTLYRELEMLLALRAAAKAALLGAARRDPAWALLQTIPFLGPVRVALLLGIVQTPWRFRTKRNLWAYAGLAVVTRTTAEYTLEGRTPVHRRRAPLTRGLNRNHHGLVKALFKSAATAATARPGALQDWYQQRLAHGMRDELARLTLTRKLAALTLHVWKTGEAYDPAKLTRPAG

SEQ ID NO: 171208 - protein, 378 aa, unidentified
MRFYNRVHRFYCGVDLHARTMYLCILDHGGAVVLHREVPAEPGAFLEAIAPFREGLVVACECLFCWYWLADLCQAENIAFVLGHALYMKAIHGGKAADDKIDSSKIAHLLRGGNLPFAYAYPKGLRETRDLLRRRMYLVHKRAEVVAHVVNANSQYNLPPFGKKLIYARNRQVLKIAQRFGDASVRKNIELDLALLDSLDELIGDVELYLDRTVKVDDADSFYRLRSIPGVGKILALVLFYEIHDIGRFASEGEFLSYARLVRPLKTSAGKVKGGGGAKIGNAHLKWAFSEAACLLARESGQAKRFLARKEKQHGKPKALGILAARLGRAVYHMLRQKRAFDAKRFWNGEPKVPPTPKGKSVMTPGRRRKGARCVLEA

SEQ ID NO: 171209 - protein, 317 aa, unidentified
MSNPELFAGIDISERRLETALTRDGLHCAEEITHRYDPAGVAELISVLADKRVGLVVVEPSGGLERDIVSALVSAAIPVVVINGRRVRNFARSMGLLAKTDKIDARVLAAFGERVRPAVRAIPGEDVQELDALTSRRRQILEMIGMERSRLDRAKQNVAPSIRAHIDYLQGQQKRVEAEIQQRIEASPAWQTANELLMSIPAVGPILSATILGELPEIGSVPAEVITRLVGVAPINCDTGEHRGKRRIQGGRVAVRNVLFMATTCGIRWNPVLRDCYERLRRNGKPHKVAMVACMRKLLVIMNAVLRDGQPWQLAPV

SEQ ID NO: 171210 - protein, 348 aa, unidentified
MRFYTGQHRYYCGIDLHARTMYLCILDQESGKVVLHRNLRCEPERFLRAIEPYRGDLVVGVECIFCWYWLADLCTQENISFVLGHALYMKAIHGGKAKNDKIDAHKIAVLLRGGAFPTAYVYPRGMRATRDLLRRRLLFVRRRSELFTHIRITFHQLNLPAPAERLREPRNRVGLLEAIPDPVVRANVEADLALAERLDEIIRSLELTIRRQAKVDDPDTFRLLKTIPGVGRILALTLLYELHDITRFPRVGDFLSYARLVKSQKASAGKVTGTSGAKIGNAHLKWAFSEAAVLFLQKNPRGQRLIHRLRSKHGKGKALSILAARLGRASYFMLRRSTAFDMDRFVMN

SEQ ID NO: 171211 - protein, 390 aa, unidentified
MFYLIGIDIAKFKHTACVLDQNGESCVEPFDFSNDSIGYSILWEVIKPYVGKEHRVGMEDTGHYADNLRMFLLDKGCTVCMINPLTSTHLRKAEGLAKNDRLDSTVIAGILMNPRLFRSVTKENFNYLTLRQYTRLHHKRTEEMSRYKVQLQKDIDHVFPEYNSIFPTAYSKTYIAVLKEFQSAATIAHTDIRRLRSVMNPKGRGKMISLSAEDLKAAAQKSVGRPDVAIEMEIVHLISFIELIESSLAEVDKKIEEFSKTLNSPILAISGISDFSAMSIISELGDISRFRNEKCVIKFAGVNPTVYESGTYSMTHTRLEKKGSKYLRRTLYQIIDSVIRCNTVFKAFYDKKISQGKSYRCAQGHCVRKLLRVLYKILSTNCRFDPALLR

SEQ ID NO: 171212 - protein, 332 aa, unidentified
MNYNTVYVGMDVHKESFTFCAYTIDAEKGSHFQRTEADYKNVLKYLEFLRTVYGNDANFICGYEAGCLGYTLYHQLIEHHVNCVILAPTTMLEQCSRRRIKTDRRDAEIIAKCLAQHNYSPVHIPTATDEETKEFLRMRDDHKLALKKVKQQILAFCLRHNYRYDGNSHWTAAHIKWLKSLKPEALYKEILDEYLLTYTTLSDKLERLDKRIEELASKDEYRESVKKLCCFIGIKTHTALSVLIEVGDFQRFASAQKFASYLGLVPGEDSSGDEQTRLGITKAGNRHVRMLLTEASQCYARGQIGFKSKELKSRQAGNSPQVLLMQIKPMNA

SEQ ID NO: 171213 - protein, 420 aa, unidentified
MKVYNVNDFAALIGIDWADTKHDICEHPNLTKKYQYTIIKSKPEALHEWAMSLKQRYPNQQIAVACELKKGPLIYALAKYNHLTLFTINPSTVAKYRKAFTPSGAKDDPTDAFIQVEILTLHMDKLSVIEPESAAIRSLAQLVEYRRSLVQDSVDLSNKITAALKNYYPQALEWFKEKDTFIFCDFVSKWPSLVHAKKAKKQTLLSFLNTHNSHYPDVNEARILSIKNAMPLTDDTGVIVPNQMLVEVIITQFKVLLKGIETLDKAIKLAYKARQDNIIFDSLPGAGPQLAPRLLVAFGCNRDRYHDASELQKYAGIAPVIERSGKKMWTHWRYSCPTFLRQTFVEWAGFSVRYSFWAKAYYDQQKSKGKPHNSIIRALAFKWIRIVFICWKTKKPYDESKYLEALKRRGSPLLKYAINS

SEQ ID NO: 171214 - protein, 370 aa, unidentified
MLDTTTFVGLDVHARSIKAVSLDVMTGEVRCATFGYDAGAVAEWVRSVDPKARCVYESGVTGFDLQKRLSGLGVDCVVGAVSKMIKPSADRRRKNDRNDAEFLARMLSVGNVVEVWVPDDECEAARDLTRALEDARDDLSRSKQRLSKFLLRHGLAFDERTPTGRRKGNWTRAHWSWIESIRFAEGADNDVLAYYVDAVRRAAEEKARLEGLVEAEARKPRWRRRVDSLRCLKGVDTASAADLVFEAGEFSRFGNARSFAAWVGLTPSEHSSGESDRRGAITKAGNKHLRKALVEAAWHYLTCSGRPKDLARGQAPDRGARRHAAKGVRRLVERREALLARGVHGNKANVATARELACWVWAVGLMAEEA

SEQ ID NO: 171215 - protein, 404 aa, unidentified
MPPRLERKGPWSTTTHILQPNAAGVDIGATEIYIAVPPDRDSKPVRSFRTFTAELKAAAEWLKQCRIESVAMESTGVYWVPFFQILEAAGFKVFLVNARHVKNVPGRKSDVADCQWLQYLHSVGLLRASFRPQQAVCAVRSILRHRESLVQIGTIHVQHMQKALDQMNLQLHHVISDITGVSGIAIIKAILNGERDPVVLSQMCDKRVKASRQTIAAALVGDYRREHLFTLQQSLHAYRQCQDLIGACDREIEQHLAAFDSKVDLHATPLPKPKDRHKPRRNQMKFDLRAHMYRVYGVDLTAVPGIDALTAHVLFAEIGPDLSQFANAAAFVSWLGLCPDNRISGGKLLSVKTRVVRSRVAKALRMAAQSLHRSQSYLGSYYRRMRTRLGTPKAITAAAHKLAV

SEQ ID NO: 171216 - protein, 461 aa, unidentified
MVATRVRTKRPRLDDLACVHPNAAGLDIGSETIVAAVPPNRDEQAVRAFATFTPDLHTLVAWLLACGIDTVAMESTGVYWIAIYELLEQAGITCYLVNAQHVKTVPGRKSDWNDAQWLQKLHMLGLLRASFRPDAEIRSLRVLARHRAELIQHRAPHILHMQQALKLMNIQLSEVLSDITGLTGQAIVRAIVAGERDPATLAQLRHPGCKHTEAEIIKALTGTWQDAQIFILQQNLQLYDFYTAQLAACDSEMERYYQAMESRHEKDAPLPDLPKAKPGSRSKNEPNFNVRAQLARIVGVDLVGVMGLSASSAQTIITEIGTDMTRFPTVKHFCAWLGLAPRNDISGGKVLRSRTLKVRSRANQAFRQAAESVARSQSSFGRYFRAMRARLGPEQAIVATAHKIARVVYHLLTTKEPYREECAEEADQKRQERELKQLARRAQKLGYTLNPLTAPPPASSP

SEQ ID NO: 171217 - protein, 332 aa, unidentified
MSVYVGIDVHRKRSQVAVIDQDGEVLANRNVPNGVKPILGVIGGLPAGTPAAFEAAFGWGWLVELLEDYGFSPHLVHPLQCKAIASARLKNDKVDAAILAQLLRADLLPEAWIAPPAVRQLRAMLRHRAQLVRLRTLLRNRIHAVLADHGYGRPEGCWSGPGREWLASLELPAVSREVIEDGLALIDALREPIDRLDWEVHQRARSEPAVKVLTQLPGVGVFTALVLLAEIGDITRFGSARKLAAWAGLTPTVRGSDRTVRHGHISKQGSVWVRWVLCEAAQTAKRHPDFAASYQAIARRRGKKIATTAIARKLLTRAYHLLTDASSGGAPH

SEQ ID NO: 171218 - protein, 315 aa, unidentified
MSGPAVCVGIDVSKATLDLALRPTGERWTIANDEAAIQALVHDLRPRAPSLIVLEATGGFEHAVVAALAAAGFPVVVANPRQVRDFARATGQLAKTDAIDAQVLALFAERVRPEPRPLPNEAAQALDALLTRRRQLLDMLVAEKNRLGFARPVVRRGITQHIRWLERRLGDVDHELGQMIEHSPVWRAKDDLLRSVPGVGPVLSRTLLGELPELGQLNRKQIAALVGVAPLARDSGTLRGKRLVWGGRASIRTVLYMSTLAAARCNPVIRTFYLHLRAAGKPAKVALTACMRKLLVILNAMVRANTHWQQAPAVI

SEQ ID NO: 171219 - protein, 425 aa, unidentified
MSEKIVVGIDVSKAFSDICILSPNNDIIKRLKISNDINGMKSLIYVLEKVEDEYKDRAVIIMEATAHYHQILANFFRKHNYEVIVINPIQSGALKNINIRKIKSDKTDAYNIALLYRIKNYNETITHSDTVNSIKKLCRQHKELTDEIVEHINRLIAFLDISFPDFKKVFADLQGKTPLSLLEKYPTIQEVLSPENKQDIIQLIKENSHKSSSYAEVKYEKLFKAAEKSIEVCIVSLSSAVLIQTTVRVIFSLQEALKAIDDEIKRLSLLDEKFHKEIVLLQSIPGVGEYTACVVLSELGDISNFSKPKELVAFFGLDPGVTQSGTYNRKNNKISKRGSPHVRSILHMLAKSNVYPNRNREYLNPVMRAYFEKKIAEKPYKVVMCAIMRKMVQIIFAVLRNQKSFELRTPEEHQKLIREKSKLVA

SEQ ID NO: 171220 - protein, 415 aa, unidentified
MHQQQFAAYVGIDWGDRRHSVHLQVAGDHNTESFELEQKPEALHEWVARLLERFQGRPIAIAIEQRKGAVIHALMMYAFLVLFPINPKALARYREAFLTSGAKDDPIDSELLLDFLSHHSDRLRAWIPDSEPTRKLQTLCEQRRKLVNRRVALTNRITSLLKQYFPQALDWIGDIASIQTCDFLESWSTLDAIQRVSPEIVQSFYRRHNCRKASVISERLDQIARARPLTTDSAIVEPYSLIVETSAGHLRCLLHAIQRLDKRIAELFAQHPEHDLFDSFPGAGAVCGPRLLTVFGTDRSRWTSAVELQSHSGIAPVTEKSGNSCWIHHRLACAKFVKQAFHEFADQSIRYSAWARAYYDLQRSRGKDHHAAVRALAYKWIRIIFRCWKDSKPYDEATYIRSLRRRGSPAVEKLP

SEQ ID NO: 171221 - protein, 411 aa, unidentified
MTKEDFIYVGIDLHKETHTAVMIDCYNQKLGEITFPNRPADFPKLVTKVKKCNTDAKEVVYGLENAYGYGRALAVWLIDKGYFVKDVNTAISHRQAKHRGAMYRKSDSDDAEAIALATLNMLDKLPDACPNDAYWSLGQLVHRRDNIMKQRTRLVNQLHEQLCIAYPSYKQFFNDISRPTALYFWEHYPSRKYLKGKSVEDLRAELVPVSHNKCSTRTCEKILDAIAGDKVKNNAYQDARDMVTLSIVSDLQHYDKQLAEVDKMLEQMYKMLGCTLTTIPGVNVITAVKILAEIGDIKRFANANKLAQFAGIAPLHLSSSGKGKDLATKQGNRRLQATIYFLAIQMVHISSKGTPRNPVVRAYYEKRKAEGKTSQQALICISRRLISIIYGMLKSGTEYRMPVVENAGENR

SEQ ID NO: 171222 - protein, 315 aa, unidentified
MTTAGSFIGIDVAKRQLDVAERARGARWTTANDGAGIAELVERLRAAGPVALIVLEATGGYEIPLVAALTAAQLPVVVVNPRQVRDFARAGGKLAKTDAIDAAVLAHFGEALRPEPRAVPDEFTRELQGWLNRRRQLLEMVVAEEQRLAQAARVIRPQIQAHVEWLRAQLRDVDTALQSGIRNSPVWRENENLLRTTPGVGPVLATTLLADLPELGRLNRRQIAALVGVAPLNWDSGQQRGTRHIWGGRAPVRTALYMATLSAVRCNPVIRAFFERLSAAGKPRKVVLTACMRKLLVILNAMMQRRVSWQPAPAA

SEQ ID NO: 171223 - protein, 341 aa, unidentified
MKKFIRTAVDLGKNYFQFHGLESQGGLSVSRKLKRSKVLEFYSRIEPCHVGMEACGSSHYWARELTAMGHEVVLIPPAYIKPYVKRGKNDAVDAAAICEAMSRPGMRFVPVKSADQQAVLMLHKTRELLVKQRTMSVNALRGHLAEFGIVAAKGIGRVDELLALAQADAALPQVAKSAVTVLAQHLEGLDQSVEAVEDEIARAHKNNRTSCLLDEIPGIGTLIASAVSASVPDPGVFKSGRDFAAWLGLTPRQNSSGGKEKLGAITKQGNRYIRKMLVTGATSVLRVVAKRKGALADWVNALRARKPERLAAVALANKLARICWAIMTTGESFRTDTYLKA

SEQ ID NO: 171224 - protein, 337 aa, unidentified
MNATMIGLDLAKSVFQVHGVDEAGVVLLRKRLRRGEIERFFAKLPASIVGMEACGGAHHWGRVLQGLGHEVRLMPAAYVKPYVKRNKTDSRDAEAICEAMMRPSMRFIAVKSVEQQAVMTLHRTRALLVRQRTMAANALRALFTEFGVVACPGIKGLRVLLAGVPGVLPPEAELAGAALVRQWEGLTTEIAALADRIVAVAKADEAACRLMAIPGVGPLGASAIVAAVPDARLFRSGRSFAAWLGLTPRQNNSGDKRRSGGISKQGDRHIRTLLILGASAHLRQMRGREHKDPWLAKLITRRPTKVAAVARAAKTARIIRAMLVTGQPYRAPARQPA

SEQ ID NO: 171225 - protein, 344 aa, unidentified
MQIARIGLDLAKYVFEIHGVDAHGKTVLRKTLRRHAVSTFFANLPPCLVGLEASNGAHFWAQALSDLGHDVRLISPQFVTPYVKSNKNDRNDAEAICEAVGRPNMRFVPVKSPEQLAVQAVHRIRSRLVADRVRLVNQVRGLLGEHGIVVAKDIGNLRRALARIVGDNEDHALHDLVRSLMGELREELIELDARIGGYDRKIRELYRNSEICQRLGKVEGIGPVTATALVAAVGDRSSFKNGRQFAAWLGLVPKQRSSGGRARLFGISKRGDRYLRTLLIHGARSALGRVRDKQDPRSLWLGKMRQRRHPNVVAVALANKNARIAWSLLASDSAYDASLSVGAA

SEQ ID NO: 171226 - protein, 338 aa, unidentified
MDHVAIDLGSKKSQICVRSSEGEILEEKRWETWELKRYLATRPKSRVIVETCAEAFGIAEAARDLGHEVRVVSATLVRTLGVGARRTKTDQRDARVLSEVSCRVDLPSVHIPRVESRERKTVCGMRDALVGSRTKVINTVRGWLRSQGRRLGPGSRATFTKRARAVCPELPEYLERQLRVIEALTEEINEADKAVEDLAGADETCRRLMTVPGIGPLTAVRFVAALDDVSRFANAHQVESYLGLVPGESSSSERQQKLSITKAGPPALRWVLVQAAWALRTRSKQAAAVPLQLWAHRIELRRGKRVATVALARKLAGILYAIWRDRTEYDGSRGARMI

SEQ ID NO: 171227 - protein, 356 aa, unidentified
MNSVKYIGMDVHRDTISVAVLDEQGRRMMESVLATRAAAAVLDFLHGIRGTLHVTLEEGTYSAWLYDLLARRVAKLVVCNPRKNALLKSGSKSDAIDARKLAELLRADLLSPVYHGESSGLELQHVTRSYTLLSEDTTRVMGRLKAVFRGQAVNCAGKKLYGKRHREEYLTQLGTGGLRKRAEYLYQELDALQQLRREVRRELLVECRKHAAAQWLQTVPFLGPIRAALLLGRVQTPHRFRTKRQFWSYCGLAIETRDSGEYRVVNGQVERKRKPALIRGLNWNHNHEMKNLFKAAATTASVREGVFREFYQGLLAKGMRPEMARLTLARKIAAIALKIWKKGEPFHVEHLKQQAA

SEQ ID NO: 171228 - protein, 350 aa, unidentified
MIIIGADYHPGFQQIAFVDTDTGEFQERRLQHREEAEKFYRDLAAQGMQVRVGMEASGQARWFERLLSELHFELWIGDAAEIRTRRVRKQKTDRQDAQLILKLMLKDDFPQIWVPSWENRDLRQLLWHRHRMVQARTRIMNQLQAVALNEGLRCKKRLWRKHGREQLEAFRLAPWASRRRRDLLELMDRLNPTIAELSQAIEQEVEKCPEARRLMTHPGVGALTALAFVLIIGKAERFGSGKQVASYLGLVPLEDSSGNRRRLGHITKQGSSMMRFLLVEAAQVTVRSVPEWRSKYLHLMMRRGRKTAKVAMARKLAVRLYWMMRKGWDYQQWNKFGSHAGQPGHRDGVL

SEQ ID NO: 171229 - protein, 407 aa, unidentified
MITVGIDIGKEKHAVAAIGAAGEVLLQPRFFDQTAEGFAALLALLGKLGKPAEIRIGMEATGRYWIPLRHALAGKGYRVESVNPLITSAEIAKDVRGRKTDKADALAIATALLRNRHNPAPAENAATDALKSLTRHRTFLVRQRSNAKRCLHAALDVTFPEAGKVFGQLFGATALAVLEAFPSARLLARANLRTLTALASKTSRGRLAADYARHVRAAARASVSTSIVNQGDEAALVSLIEQIRFADSQIDSAEEKIRAMPAPTTAKLLASVKGLGTLLPRVIACEIGDIERFRHPPSGKAPRDMDKRILAFAGCEPRLRESGKWKGRTKISKRGSPALRTALWQASAMCRLHNPLFAAVYDRQTTRGKPHSVALFYVARKLVEVLCGMYKTGMPFSLQAAGVPCCQ

SEQ ID NO: 171230 - protein, 348 aa, unidentified
MEHFVGLDVSVKATSVCVVDDGGKVILEQKVLTEPADIIALLTSLDVSFCRIGIEAGPLSQWLVNELTAADLPVICVETRHMKALLTAQQINKTDRNDARGIAQMMRVGLFKPVHVKTLVAQKQRMLLTSRKLLQRKLLDLECELRGTLRNFGLKVGVVSGFRYEARVRELVAGFPGLAAIAEPLLSVRRVMRQQFAVLHKMLLDVVRGDPVCRRLMTAPGVGAVVALTYRATVDQPQRFVHSRAVGAHVGLTPKRYQSGETDYDGGVSKCGDALLRTMLYEAAHSLLIHSRKWSWLKAWGVRVAQRRGMRRAIVAVARRLAVVLHRMWVDGSEFRWSKDSTAVPAIA

SEQ ID NO: 171231 - protein, 313 aa, unidentified
MIVIGLDPHPKTHTVAALDETGARQAVLTVPNTPEGLEQLHALAKPFESRVWAVEGASNRFIAAFVAQLLARDERVVHIPPGLTSQYRARRGRKKNDVVDAENAARVLLANPELPAFSTSQQRQDLLDLTHTQRRVSQQLKANRAGLNALETRSPVREALTRIVEVLENQLDALEKQLRALVKACLPQLLDLTGVGPVVAGLFLAEVGDAQRFANQDCFASYCGAAPVERGSGQNRRMQVNVGGNRRLNWALHIVAIVRLRYDGGHSRALVDKLKTRGKTDRAALRVLKTYIARELFHVLRQEAAAGEASAAS

SEQ ID NO: 171232 - protein, 327 aa, unidentified
MSKRTVWAGMDVGKDEVWVSVSGAKVRRFDATASGIRTACSFVTERAGGDVIGICMESTGVYGYRVALWCRQNRVAVSVVNPAQIAAFAKAQLRRTKTDRVDAEVIRCFAESQQPRSWEPTRPSLRQLYGLVTELDRLREMKQQLANRDHSHDHLPDLPRQVRSTQRAVHRTLDRQIKKLEEAVAGVLAEDRQMNSQVTLLSTIPGVKMRTAVRLLAYGKDLWTERSQKELTAHVGLAPKEHQSGSSIRRKSRLAKQGDGRLRHVLYMPAMCGIVHNPYLRPHYQRLVADGKPKLLALAACMRKLLLLIRAMLTTNQTFMPPKIALT

SEQ ID NO: 171233 - protein, 342 aa, unidentified
MDHFAGLDVSVKETSICIVDDTGRIVREVKAASEPQALLKVLGNPTYRFKRIGLEAGPLSQWLFSGLAEAGLPVVCVETRHMQAVLKAQINKTDRNDARGIAQMMRAGLYRPVHVKTLRSQKLRMLLTHRKLLQSKAIAIENDLRGTLRNFGLKVGMVGKVRFEARIKELAESLPDLAELVEPLLIVRRTLREQIVILHRRLLAIVRDDEVCQRLMTTPGVGPVVALTYRATVDVPARFRKSKSVGAVFGLTCSRYQSGEIDWSGRISRCGDEMMRVMLYEAAQSMLRSKKWSWLKAWAMQIARRRGLKKAIVALARRLAVIMHRIWVDGTEFRWTREAAAA

SEQ ID NO: 171234 - protein, 385 aa, unidentified
MLKIVYPICCGMDVHKSFLVACIASTNECGVTTYKSRRFSTFTKDLRLCADWLSANNCKDVCMESTGKYWIPIYNILEASCKIVLAHPKYVKAIRGKKTDKKDAKWIADIFKHDLVSGSFIPPADIRQLRDLVRYRWKLNNFIVGEKNRAQNCLTVSNYKLDDVFSDVFGKAATQITSYLLEHLNEPLSDVSNFRTKGMKATDAEIRDAADGNICAEQAEKYTSQLSLVMSVPGIQTFSAISVIAEIGVDMSVFPSSKHLCSWAGLTPQNNESAGKKKTTRISRAGAYIKPLLVQCALCAIRAKRNPEIRNRYLSIKKRRGHKKAIIAIARMLLTAIYNILKKNEPYNAELSHKVDVPPAHRSVTIEEAVFILQRQGYLITPCTS

SEQ ID NO: 171235 - protein, 330 aa, unidentified
MKNYDEVVGIDVSKKTIDAYCHKTQVHKEFVNDLIGYKSLIKWVLKVTNESSVFYCFENTGYYSLKLALYLSSQAIVYVEESPIKIKRSSGVVKEKTDRLDAQLIARYAWLYREELIPSNVKSTSHLELGRLLALRDQIVRNNAGLKGTLKEMKVLLSSPTTDFGCISLKRSIDYLSKQVKVIETRIKEILSEDVSMDKNYELLTSLKGVGLVVACQLIYHTGNFTRFDSWRAFSSYCGTAPFEHRSGTSIHRRKQCHYLGDRKMKSLLSMASVSAIQHDSELRLYYKRKLAEGKDKMLAINNVRNKLIARAFAVVKRGTPYVVLQQHAA

SEQ ID NO: 171236 - protein, 330 aa, unidentified
MNSICLSTDQLTAALPVLGLDVAKKSVQAELRTNGKRVRFGFENNAKGFAQLARMLKEQGAPKVWAGLEATGPYSRALALWLHGQGHRVSLLNPRRVKQYARSAGNRNKTDLLDAAIIADFVCAHLPAAWQPPTLEVAQLQALVRRREELSLMLQAEKNRLEGVASHVRCSLERIIDTLSAEKTRLEKLITQQIRSHQQLSRDHQLLCTIKGIGSLTAAILLAEMARPGQVERARQAAAHAGLAPRREQSGTSVRRNRGLGKEGNRYLRKALYMPALVAIKYNAPLRHFASRLRTAGKPKMSIVCAVMRKLIHIAFGVLKHQKPFNPSLA

SEQ ID NO: 171237 - protein, 389 aa, unidentified
MKNTIVYHEGAASPEAAGTKVKLAGSIIKIGLDVHARLYVAVAQYDHLLPKAARRLRPEQFVPWVEELLRRGHTVHVVYEACGFGFTLYRQLMAAGAHCYVIAPRKLDEECSRVKTDPRDATTLCQRLSRYLEGNTGELAVIRVPSDQEEQARHVSRQRGQLVHHRQKLEAQGRSLLISHALPAPAHWWKEQTFSRLGRHLPVWITTRLQAARPALLSLQEQINALTSELEASAPSILPRGLGKLTSVVLTREICNWHRFNNRRAISSYTGLCPGERSSGSKRVPGSVTKRGNPRVRAALVECAWRMVRFQPHYPPVKKRLAILAKGARTTGAQRKKAIVAVARHLAVDLWRIHTGRCSAAQLGLGQRRDFDCSRGTEKEVRAAPAIIT

SEQ ID NO: 171238 - protein, 416 aa, unidentified
MTFKIVRFICGGMDVHKNLIVATIGTTDKQTLTTEYIQQSFSTFYSDLIRLKEWFISHDCYDVCMESTGKYWIPIYNVLETELNICLTHPKYVKAIKGKKTDKRDSKWICDLYKCDLVKHSFIPEKEIREMREIARYRCKLVYMRSSERNRYQNCLTVSNIGLASAVSDPFGKTATNIMKELMQSEVIEDDKILKLIHKNCKDKDKILDSLQGYHIESDQRFKMDTVMNHIEYLDKQIQACEAELIKRAYPLRDYFQHITHIKGISALSAILIVSEIGTDMNQFESDKQLINWAGLSPANNESANKKKSVRISKAGLYLKPLLVQCALSSIKDKNSYFGIKYCRIKKRRGHKKAIIAIARMMLVCIYHMILTGEEFNPCDYESLTNPKPKKEPTMTVESALQFLKDSNFDFSSIQL

SEQ ID NO: 171239 - protein, 344 aa, unidentified
MEITTIGLDLAKRVFQVHGVDAAGEVVVRKALRRAQVLPFFAKLPPCLVGMEACGTSHHWARELAGLGHTVKLMPPAYVKAYVKRGKTDAADAEAICEAVTRPTMRFVPIKSREQQAALSMHRARNLLVKQRTQLVNMMRGLLAEFGIDIPDGLERALLMARQMVKGTELGVPAAAGRVVLMLSQQALSTHVQLREIDRALASMRRTDDMACRLATIPGIGPVGATAFAASVTDPGQFRSGREFAAWLGLTPLQNSSGGKERLGRITKMGDKYLRKLLVVGATSLVRRARHKPETADQRLVALLARKPVRVATVAMANKMARIVWAVMTRGDVYQASHAPMLAG

SEQ ID NO: 171240 - protein, 372 aa, unidentified
MNNNTVYVGMDVHKESFSLCAFTIEADKGMHYQRTEPDFKNVLKYLDYLRTIYGHDVNFVCGYEAGCLGYTLYHQLTSHNVNCIILAPTTMLEQRGKKRIKTDKRDAEIIGRCLAQHNYSPVHIPTAKDEETKEYLRMRDDHKLALKKIKQQILSFCLRHNYRYDGNSHWTTTHIKWLKSLKPEALYKEILDEYMLTYTTLCDKIERMDKRIEELANQVEYHEPVQKLSCFIGIKKHTALSVLVEVGDFKRFADAQHFASYLGLVPGEDSSGDGQTRLGITKAGNRHIRLLLMESAQCFARGQVGFKSKELKARQYGNTPQVIAYADKANERLRRRYYKMVLGKSKKHNVAKAAIARELACFIWGMMTDNIA

SEQ ID NO: 171241 - protein, 318 aa, unidentified
MLIHYIDIAKRNFVIAVSSLSKTKTETNNPKGIAHTIEYLKKHKVALVVTESTGGLEIPAAKAIRRAGIAVIIANPRQTHQFAQSQPLTKTDAKDAKMPAFFAQMKAQKEDSQTMPYQPPTEAEEVLEALVNRRNQSADMRTAEKNRLHQVHETQVGSVKQLIAHFDRLIDELDKQIDNHTHTHFDGKAQVAEQIKGIGSITTATLMAMLPELGRLSHKRIASLVGIAPHPRESGETKFKSRCFGGRSAVLKALYMATVAATRFEPLIRDFHQRPLSEGKPYKVAVTACMRKLLTISNARMRDYFAENDTAENGIRTA

SEQ ID NO: 171242 - protein, 426 aa, unidentified
MWDAKRRVLKIKSLKHGIIQDKRGNVMRAVFGIDVSKTSSEVAILVNGEKVHGYTILNDAFGFNRLLGDLKTVHNPEIIFEATGVYSRRLQAFLEEYGYAYTRLNPLEAKKQLDSLRVRKTDKIDAEKLAKSQLVHNRKPTYVQEEVYQHLRDLSRFYQNLTEDLVRAKNRLHKVLQITFPELENLLSTPTGEQYWNLVMAFPCKEFVLRLSQSDLCEIIRQSTSKRISEKRIAYLTDKLIKLAKQSFCAVKKNSPMLEEVRYYAQELLRLSERRQVVLNDMVTLAQPLPEYDILRSIPGIAETTATSIIGELGDIRRFQSTNQINAFIGIDLRHYESGNFLAKEHITKRGNPYARKILFKCIHNIASASHTNPCHIADFYEKRKRQSTIASTKPHTIASIHRLIRTMYYLITHNKLYDYSLTQNR

SEQ ID NO: 171243 - protein, 499 aa, unidentified
MPSRRKGKNTMTTAGKQPSKKEGFDPQRSALKRKARGRCCFEGKGKRRKSKLSVINPDAAGVDVGAQAHYVAVPEDRAAVSVRSFGTCTAQLDEIVQWLKDCGIKTVAMESTGVYWIPLFQKLEEAGFEVLLVDARQAKHVPGRKSDVQDCRWLQQLHSYGLLRAAFRPEDGICRLRTFQRHRKNLVECAGMWIQRMEKALNEMNLQLHHVLSDITGQSGLAILDAIVAGERDPSKLASLAHYRVKKSQAQIEAALRGDYRPELLFVLRQSLENYRQMQQQILQCDLSVEKQLAAMSHQSKPSEHLESKAQAEDSAHCRPGKEKPKNGLESTLAAHLKRILGVDLTTLPGLNVLASLTLLSEIGTNMTKWRNHKAFVSWLGLSPNNKISGQRVLSSRTRKVVNRAATTLRLAAMLVGKTDTALGSFYRRKRAQLGAPKAITATARKLACLIYHLIKNGQAYKEPDLRTYELKYQEQILQSLRKRAKSMGFDLVELPKAA

SEQ ID NO: 171244 - protein, 335 aa, unidentified
MTPIAHTRQVTVTRIVCGVDVSSRTLAVRIGRDGAQSVFPNTPEGVARLAAFCRAHGAERVAMEATGGYEQQPFALLAEAGLPVAILNPRQVRRFAEGMGVIEKTDAIDAGLIAWFAEVKCARSSPPPAPDQQHRRALVTRLRQLTQVRTAQSNQRRLIADPVVLASIDELLALVERQIRALEQQIAALIAEDPLWRELDQEFRSLKGVAARTVARLMAEMPEIGTLSNKAISKLAGLAPLARDSGQHQGKRQTRGGRAPVREILFVVASVAGRFEPDFIAFRQRLSAAGKPPKVVRIALAHKLLVRLNAKARDVRQRMAAPPAAIDSHAAPQPV

SEQ ID NO: 171245 - protein, 453 aa, unidentified
MEQPQEIVEDEEHERAWNRVAAIDVAKASGVVCTRVPDEGRPGRRRARVWTVAATMSEVTALGDHLRCQGIEVVTIESTSDYWRIWHAVLEAAGLKIQLVNARAVKNVPGRAKTDKKDAVWLAKLTERGMLQPSFIPDYDIRRLREFTRLRAELVHERTRHWSRLEKLLERALIKVTSVASAIDTMSCRDMIEALIAGQRDPRVLADLARGKMRAKRKALTEALDGKFEDHHAVEARILLRHVDDLTRDIDDLTARASQLIAQIPAAWGIDADGTTGPGAGTEPDAIALPAVARLDEITGCGPVAAIAIIAEIGLDMTVFGTAGRLVSWAKLCPQTRQSGKKATAASPGKGDPWLRGPLGEVAATAARSDTFLGERYRRLARRRGKRKALTAIARSILVIIFHLLSDRLARFHDLGPGYYDDRASTERKVRNHVRQLEALGLTVTITPVRDAA

SEQ ID NO: 171246 - protein, 347 aa, unidentified
MNFYTQQHKHYCGIDLHARAMYVCILDEQGTKLVHKNLPTTPEAFLRLIAPYREDLVVGVECMFTWYWLADLCSQEGIAFVLGHALYMKAIHGGKAKNDKIEAHKIAVLLRGGMFPQAYVYPSEMRATRDLLRRRCHLARKRAELLAHIHNTNSQYNLPEIGKRLANKSNREDVADHFPDPSVRKAIEVDVALIDQYDQLLGEVELYLTRSAKAHDVQPFARLQSVPGIGQILALVILYEIQDIARFPRVQDFVSYCRLVKCAKESNGKRFGTSGKKIGNVHLRWAFAEAAVLFIRQSQPGKEYFAKLEHKHGKAKALTVLAHKLGRAVYYMLSREQAFDLKRFVTA

SEQ ID NO: 171247 - protein, 419 aa, unidentified
MSKTIINDMNVAYECCCGIDVHKDMIVCCLLTGRSKAETKKYGTLTKDLQAMTKWLKESGCQIVAMESTGSYWKPLYNIFELEGMEAMVVNAQHMKTIPGRKTDENDAQWIAKLLRHGLLQASFIPDRRQREFRELTRYRDSRVAERAREKNRLQKFLEGANIKLSSHVSQITGMSAVKLLEMAISGEELTVENIGKARHSRCKSSAEEFLDALTGVITPLQRELFAQVLQTIKEQSVQVDRIEALIRAHTITAYDEAAKALMPIPGIGRTSAESIIAEIGTDMSRFQTAGHLCAWAGVAPGNNESAGKKKKNNARKGNKTLKKTLNQSATNAIRNKNSYFHAQYQRLVVRLGRRKAIGAVAHSMLIAIYHVLSGKPYVDLGPDYYTRFNREKKIKSHLKQLERLGWTPESPAGVNQVA

SEQ ID NO: 171248 - protein, 344 aa, unidentified
MKITTIGLDLAKSVFHVVCFDERHQEVGKRMLRRGQVRAYFAQREPCRVAMEACAGAHYWGRELEKLGHTVKLIPPQFVKPYVQGNKNDYNDARAIAEAATRPGMRLVGIKTVEQQDIQALHRLRAQRIKERTALSNQLRALVAEYGIVMNKGVATVRRSIPLLLEDAENGLSEAFRALLARGYDQLIEIDAHIDYYTRQVEAHGRQSAPVRRLRTLPGYGPILASVFASVVGDGRAFRRGRDVSASLGLVPRQHSSGGKEVLLGISKRGDKYLRSLLIHGARSVVQHAKHKEDALSRWVNRIRERRGSNKATVALANKLARMGWALLRHETTYCPEPGVAEAN

SEQ ID NO: 171249 - protein, 389 aa, unidentified
MKIYVGIDIAKLNHFAAAISSDGEIIIEPFKFTNDADGFQLLVSKLESFDKNSLIIGLESTAHYGDNLVRYLVTELYQVCVLNPIKTCQMRKNNVRKTKTDKVDTYVIAKTLMMQDNLRFVSFFDLDMMDLKALGRFRQKTIKQRTRLKIQLTTYVDQVFPEIQYFFKSGLHQHAVYALLKEAPSPKEIASMHMTHLANLLKVNSHGHFTKEQAKELRVLAQKSVGANDSAISIQITQTIQQIELLDSQLEKIEAEMTDIMKFNDSVIMTIPGIGYINGGMILGEIGDIHRFSNPNKLLAFAGLDPSVYQSGNFQAKTTRMSKRGSRVLRYALVNAAWNVVRNNATFKAYYDAKRAEGRSHYNALGHCAGKLVRVIWKMLTDKVEFNLE

SEQ ID NO: 171250 - protein, 340 aa, unidentified
MGEVTTIGLDLAKHVFQVHGVDAEGATVLRKQLRRAQVLAFFSRLPPCLVGLEACATAHYWGRELRALGHEVRLMPAQYVKAYIKRNKHDAADAEAICEAVGRPTMRFVPVKTADQQAAVLLHRGRERLVRQRTGLVNALRGHLAEFGVIAPQGLRNVGKLIAIVRDEGDARLPDLARQVLQVLANQIEQIETAVTALERQLLAWHKTDPVSQRLASIPGIGPIIATAIATTVADPKVFRSGREFAAWLGLVPRQNSTGGKTRLGGITKRGNRYLRRLLINGASANLLRSKATKADPWVIGIRRRRPPLVVAVALANKTARIAWAVMLRQREYQPRAVAA

SEQ ID NO: 171251 - protein, 470 aa, unidentified
MAARKDKADGAGVPGHGGDGAEVAEELTQVVEYAAAIDVAKGSGMVCTRVPGSRPDRRRQKVWQVGATFGEVTALMDHLRCEGIQRLVLESTSDYWRIWYYLAEAAGVEVWLVNARDVKHLPGRGKSDTADCVWHCKLNERGMLRRSFVPPEAVRDLRMLTRTRTRLAQDQARHQARVEKILEDALLKISVAISDLFGVSGRRFLDALVAGERSPAALAALGDCRLKASQAKLEEALTGRFRDIHATEIAVHLRLIDAINAEIALLDDQIEQHLPSVPRTAPVCTACGLAGGGHAPDCDDLGILLLGLADRLDEVTGIGAVNGRAIIAELGTDPSQFPTPGHAAGWARLTPRSRQSGETSRPGRTGKGNPYLRGGLGQAAMTAAKTDTRLGAMYRRIARKRGKQKAIVAVSRVICEIAWILICDPSARYEELGPDYYHPRSPARQTRDKIREIERLNPGKKVILADDDAA

SEQ ID NO: 171252 - protein, 397 aa, unidentified
MYIVGIDIAKRKHEAAVIDGEGTVIIKPFSFTNNCSGYNRLLAMLAKAKLPLDEVSFAMEATGHYWLALFTRLQKEGFRVQVINPVQTNSIRSFYIRQAKTDPRDALLIAEVIRFGHFSESTLHPENIYELRELCRGRHAIVSMQADVKRKVVALLDQVFPEYETAFTNLFGDTSMAILQTCPTPKELSEMRLEELCHLIEVSSHKRFRMAKAQELQALARNSFGFAMAGDVFSTMIRLYAKHLVFLKQQVQEMDRKIAEIMKTLDTPITTITGIGPTLGAYILSEIGDISRFSSAAKLAAYAGIDPTMRQSGEYNGVRNRMSKRGSPYLRHAIWLAASSAVLHDPALKLYFQKKRDEGKPYMASVGHACRKMVSIIYAVMRDNKAYTPYIPNEISA

SEQ ID NO: 171253 - protein, 352 aa, unidentified
MERYVGLDSHARSCTLGVMSASGQRLKALVVETNGSALIEAVRGIPGRVHLCLEEGTQSAWLYELLRPHVAEVVVAVAPERKGPKDDQRDAWARANELRTGSIETRVYKAPEHLAGLRNAVRAYGFAVTDVVRAKNRLKAVFLSRGMSADTSVYDVKKRPEWLKQLSSPHRELAEWLGKQLDQVEPLRDEAQRWLLTEAKRHPIMRKLATAPGMGPIRTAQVVAIVATPERFRTRRQFWSYCGLGIVTRSSADWARDKGQKWVRTQVTQTRGLSRKRHPRLKSVFKGAATTVIAQLGDDPLHGDYERMLQSGIKPPLAKLTVARKIAAMVLSMWKHQEVYDPKRHSLSPDQA

SEQ ID NO: 171254 - protein, 361 aa, unidentified
MSLASWLVAGMIPGVNREPLKKIAPNPEVLLQLLHRWRDEAIKAGKEITRIAVAYETGRDGFWLARWLRARGIDAHVIHATSVAISREHRRAKTDRIDTAMLRRGFLGWLRGEPGHCSMAIVPTVEEEDAKHPHRERETLIKQRTSTVNRMKSILIKFGVRDFNPALRKAPAKLASVRTPEGIPLPSNAVAALQRHMQRFSIIKEQIKAIERTRLQRLQRDPTEKFNAMVFLLVRIIGFGVETAQQLVHEMLSRSLRDRKAVARYAGLTGSPDESGSKRREKGLSRCGNRRVRNILIQLSWRLLKFQPKSDLVVWFKKRTANARGSRKPMIVAFARKLIIALWRYVNTGLVPEGFQLRSAA

SEQ ID NO: 171255 - protein, 405 aa, unidentified
MEIVYRRCCGLDIHKASITACVYINGKKEKLTYGTMTDDLLQMTAMLKERGIEMTAMESTGSFWKPIFNILEVEGLAAILVNAQHIKNVPGRKTDVKDAEWIADLLRHGLLKASFVKPRDQRELCELIRYRTSMIEERAREYNRIGKVLEGANIKLTSVASSIETASGMSMVKALSEGVVDADVLASMAQGSMRSKIDELKRAMNGLIRPHQQMMLRTMLTHIDELSKLIDLLDAEIAQRMHDDVELTEALDEITGVGKVSAQTVIAEIGTNMDIFPSEHHLASWACICPGSNESAGKRKSGKTRKSNSTLKKTLVQCGRTAGNSKKTYLGSLFRRIAARRGAKRAAVAVGHTILIICYHMIKNRTKFKDLGSDFFQNRNKDALVRQNVKRLEALGFNVTLDVTV

SEQ ID NO: 171256 - protein, 330 aa, unidentified
MDPQVVSRPIVGIDVSKATLAVCYLRQEQVQHLEVSNSKAGFQQLVKACGAHCLFVLEATGTYSLAVAYYLHEQGGHVAVLNPLIIRRFIQMHLSKGKSDRKDAQWLLRYGQQQAVAIWQPDEQVLVECRQLEQVTEQLLKQKTMVSNSLEALQQQPLVSKLALKRLRQLLKALTEQLQVVEAELLALLEQRFQTEMALLCSIPGIGRKTAGLLLLFAGGFTRLDNYRQLIAMAGLSPREHSSGTSIRGKVRITKMGGALIRTKLFMCSFSAKKSNAACQALFERLVAKGKNKKLALIAVCNKLLKQAFAIVRSGVPYQADFSSKLVLNP

SEQ ID NO: 171257 - protein, 346 aa, unidentified
MMLIGCDYHPSWQQICWLDTETGETAEQKLVHASGDAEKFYRGLPGPAVIGMESTGNCQWFVEMAATAGHDVWIGDAAKIRASEVRQQKHDRRDAALLLKLLVEGRFPRIWTPSDEVKDQRQLLIHRYKLVRMRVQVKNELQHLAMNQGVTRKGKLWSKAGEQVLRELPLKPWASRRREDLFKVREMLNGQIDLLDRAVEQAAEQNEKARLLMTQPDVGQITSLAFVLTMGDVSRFQRGKQVASYLGLIPREYSSGGHQRLGSISKQGNRFMRMLLVEAAQVAVRCDPQMRQEYLHRCHQKPKGVAKVAAARKLAIRLYWMLRTNTGYPGVVRVESSSRVALVSAS

SEQ ID NO: 171258 - protein, 342 aa, unidentified
MVFLNPNSCMGLEPEPSKEGSWMMAQNGLVVAGIDIAKDKADGCIRAVSQKQTFPSTTEGRRQLISWLRKHKVTKVVMEASGGYEREWAKALRVKNIEVRIVDPKRVRHFAKSAGRLAKNDVIDADTIAWFAETFGEAPGQAHDAARETLQQMVNARRGLMEMRTMVSNKGEHDVPEAVKNGHARLLKAIAVEIAKLEAAIAAMVKATPHFAARAEIIESVPGLAGTTSAGLIAMMPELGEASNEAVSALLGVAPYDDDSGKRQGGRQIKGGRRKARNLFYMGCMGAATRHNPVIKAFYQRLIAKGKLAKVALVACMRKLIVILNIMIARGEKWDASRYAVS

SEQ ID NO: 171259 - protein, 363 aa, unidentified
MTDGICFVGLDVHARQTAAAAVQLGSGEVFKTKLPGSPAATLQWLATLPGPVRAVYEAGPTGFGLARAARAAGVQMMVCSPGAIPRQPGDHFKTDTRDALKLARLLAAGQLRPVVVPAPEIEALRDLVRAREDLRGDLMGARHRISKLLLRRGEIWDGPGETWAQRHLQWLSTVRFEQPLVEVVFGEYLAHHEVLLARRDRLDGLLLEQSTQGSWAPTVARLRCLRGVDTLTAVGLVAEIGDITAFKHPKQLSSYLGLVPSEQSSGTKRRQGAITKAGSSHARRLLVEAAWHYRRAPRVSLTLKRRQAGQPPAAIDTAWRAQLRLHRRWAHLDGARAKKRTTVAVAVARELACFVWEIGQQPG

SEQ ID NO: 171260 - protein, 467 aa, unidentified
MGNGKKHKNKKHKKLDTSQLEQLNINAAGIDIGSEFHYVAVPIGRDPEGQEVRHFSTFTVDLYKLADWLTQCKIDTIAMESTGIYWIPLFEILDSKGFDVRLVNPRSIKNVPGRKTDVLDCQWIQQLHTYGLLHSSFRPEDQICELRAYLRQRAMLISYASHHIQHMQKALEQMNVKLNQVLSDITGVTGMKIIRAIISGERKPATLAKMRNPRCNNSETIIAKALRGNWRSEHIFALKQAVELYDFYKEQIIECESRIQEHLESFDDRSNGTPLEKPFRRSGGSSNKFNFDARSYLYRITGVDLTRIEGIDAPSALKIIGEIGIDMSPWPTDKHFASWLGLCPGSKITGGKVLSSKTKPSANRAAHAFRLAAYSLQRSKSAIGAFFRRKKAQIGAPKAITATAHKIARIFYNMLKNGTEYFDLGQEYYEQRYQERVIANLKRKAKQFGFDLVNIKEHELLTETPAS

SEQ ID NO: 171261 - protein, 414 aa, unidentified
MLSPEIRCVVGIDVAKQAHVVCAVEAPSGAIRHKPSRIDASAEGFALLCSWLATWGAPQQIVMGLEATGPLWEPLYEHLTHAGYTVLVLNPRQTASWAASLGLRAKTDGIDAHTLARGLLAGLARASTLPSESVQALRTLTRARRDLIQNRTATRQRLHDDLVTLFPEFVGFLPTLPGRHDLGTPAVLTLLSQYSSAQALAQVALDELTTTLDHLSGGRWGVAQAQALQTLAQQSTASSRALPARSLVARTLAQQLQELALHVTEIEAAIAALLHDDADGQRLQEIPGIGPQTAATIRAELGDVARFACVDEVVAYAGLDPRTYHSRAFIGQTHLSKRGPGALRHALYLAAFVAARCAPEWHERYQRLLDRGRAKKEAFTILARALLRVIFHLLRTGDAYDPAVLKPPSAPTAA

SEQ ID NO: 171262 - protein, 318 aa, unidentified
MTNVTTWIGIDVSQATLDVAVRPTGDVWQTDRTPAGLSSLVDQVRALTPERIVLEATGGYEVVVAAALASSHQPVVVVNPRQVRDFARATGQLAKTDRIDAQVLAHFAEAIRPEVRPMPAATTRALSALVARRRQLQEMLTAEQNRLMAAAVQDAPAPLREQLGEHIDWLRRQLKQLDDDLNQQIQSSPVWREREELLRSIPGIGPIVSATLLSQLPELGHLDRKAIAKLVGVAPLNHDSGTMQGRRTIWGGRSAVRAALYMAALVATRHNPQIQAFYQRLLASGKPKKLALVACMHKLLLQCNAVLRTHTPWSPVHP

SEQ ID NO: 171263 - protein, 341 aa, unidentified
MNEITLIGIDLRKHVFHLHAQDAKGHEVFRKKLSRVQLLPFFSNLKAVTIVMEACAGSHWLARKLNAMGHEAKLISAQYVRPFVKSNKNDYIDAEAICEAACRPSMRFVEPRTEAQQLLAAMHRAREGLVAERTATINRIHGILLEFGIVVPLSKATLRRLPDVLAVHDLPPRLIQLVHRLHAHYRYLDQQVDDLERDLTVQLREDENAARLLSIPGIGTITASLLASEVGNVAQFEGSRNFAASIGLVPRQHSTGGRSVLCGISKRGDKHLRHLLVQGARAVIQRVEKRTDRLGEWIRSMLTRRHSNVVACAVANKLARIAWAVLTRHTTYDPARLKLAD

SEQ ID NO: 171264 - protein, 342 aa, unidentified
MKITTIGIDLAKHVFQVHGVDQRGKTVLKKQLKREQMAAFFANLPPCLIGMEACGSAHHWARKLQGFGHTVRLMAPQFVKPYVKTNKNDAADAQAICEAVARPHMRFVAIKNVGQQAVLALHRVRQGFVKSRTAQANQIRGLLGEYGLIIPQGIAHIAKRVPALIEDASNELPGAFRVLVDRLMDHLKVLDQQVAELEAQIKAWHRENDASRRLEQIPGIGPITASALVASIGEARSFDNGRQVAAWLGLVPRQHSSGGKPTLLGISKRGDSYLRTLLIHGARSVILAARRKTDRGGWLQELLKRRNPNVAAVALANKNARIAWALLAHQRQYRADYAAAAA

SEQ ID NO: 171265 - protein, 408 aa, unidentified
MNAVGIDVSKGKSMVAALRPMGEVALLPQEFLHTEVGLEQMAYAIIALGEDTRVIMEATGRYHEPVAAALHEYGIYVCVLNPLFIKQSGGGSIRKVKTDKADAMKIAKYGLDNWVDLREYTPMDTVRQQLKLCSRQYNLYMKTVVSLQNNLISLTDKTFPGVNELFSSPERADGHQKWVDFVMTFYHCDCICRVSENAFAERYQKWCKRKGYHFSAEKAQDVYLGSCGHFTTLPKNDNTKLLITTAAQQLLAGKMTLAALRTEMTRLAKQLPEYDIVRAMYGVGETTAVQLMAEIGDVRRFPRRSSIVGFAGVDPAVDQSGKHSTKSVPTTKRGSPHLRKTLYQIVCTYLKKSPVDEPVYQFLDKKRSEGKPYFVYMTAAQNKFLRIYYARVKECLEAFDAQQDTSQR

SEQ ID NO: 171266 - protein, 408 aa, unidentified
MTVVGIDVSKGKSMVAAMKPGGELVAAPYEVRHSDIELSHLALDVLCMEPDTRVVMEATGRYHEPVAALLHSEGIFVSILNPLLIKQSGAGSLRKVKSDPKDALKIAKYGLDNWSTLREYTPMEAIRQQLKLCARQCDLYNKNIVMLTNNLISLSDKTFPGVNELFSSPEKADGHLKWVDFYRSFWHCDCINRMSPDAFEERYKKWCKRKGYHFSTDAADALYAASCGSYTTLPRDNNAKLLVTVAADQLIALRENQSKLEAEMLNLCKQLPEYETVMAMYGVGKSTGPHLMAELGDVRRFPHRSSIVAFAGVDPGVVGSGKMQLSSVTTSKRGSPQLRKALFQVVSTYVKCKPENEAVYQFYTKKRDEGKPFFVCTTAAANKFLRIYYARVKECLNATESATQAEEG

SEQ ID NO: 171267 - protein, 345 aa, unidentified
MPIVGGLDIHRKQITFDYLDTVTGQVQRGQVSPADREHLRAWLARFAGREDVAFAVEGCAGWRYVAGELAAAGATAHLAEPADTAARRGRKRHAKTDKTDARHLRMLLAEGRLPECWIPPGHILECRALLETYHDLRREHTAWVQRIHAVLFHQGAPALGVGTLRTGQGVAALRAAADDCLSPAGQLQVATALEVIEALEARMHVVRHQLTDAARHLTGAKVLAARLYGVGPFAALALTCWLAGAGRFSSSRKAVRFAGLDVTVWSSDRKGPPGKLSRQGPPVLRWALYEAGKTHARASAPDHAYYAQVKDRKNSKRAALSEARKILRQAHHILAELGDDALAAA

SEQ ID NO: 171268 - protein, 402 aa, unidentified
MYNAVGIDVSKGKSTVAVLQPAGVIIRKPFNVNHTSSELDELAKYIGSLEGETRVVLECTGRYHEPVVKTLSEAGLFVSAVNPHLIKNFGNNSIRKVKSDPADAKKIARYTLDNWIELRQYSSMDNTRTQLKTLNSQFSFFMKQKVAAKANLIALLDNTYPGVNKLFDSPVRDDGSEKWVDYAYSFWHVDCVRKIGLKTFTERYQAFCKKHHYNFQPAKPAELFLASKDLIAVFPKEASYKLLIQQSIQQLNLASSHVEELRSKMNELASTLPEYTTVMGMYGVGKTFGPQLIAEIGDISNFSHREALTAFAGVDPGVDQSGTHNSKSNKASKCGSNRLRKTLFQIMSTLLQTAPEDDKVYQFLVKKRAEGKPYYVYMTAGANKFLRIYYGKVKECIRNLEQ

SEQ ID NO: 171269 - protein, 387 aa, unidentified
MVQINDLSRSLAAFDPISTLVVVVEMSKASWLVSGAVPGVERQPLKKLEPDATALLRLIERWRNEAVRAGRPISRIALAYEAGRDGFWLARWLIARGIEAHVIHSASVAVSRERKRAKTDRLDAAMLIRVFLGWLRGERGHCGMVAIPTMEEEDARRPNRERESLVNERSRIVNRMKSALARLGIRGFKPHLRKAPERLAGLRTAEGTGLPANIIEEFRRDMARLALVREQISSIEKTRAERLERAPDTGPHAMVRLLARVIGIGIETADMLVREILSRNLRDRRALARYAGLTGSPDESGLKSREKGLAKAGNARVRRGLIQLAWRFLMFQKDSALARWYRTRTEGPSGARKTTMIVALARKLLIALWRLVTTGEVPDGVELRPAA

SEQ ID NO: 171270 - protein, 303 aa, unidentified
MPYGRRRAAADGVDAHIERSRAVLDRQFIAGPGGYAAALAWARQEAGEAGLAWAIEGTRHYGLGLARYLTAAGEHAGEIDASKHAGKRRNGKSDALDAVRAAREMLARPVAAQMRAAGDREALRLLMCDRDNAVASAKTARTLLTSVIVTAPATVREQLRHLSRDRRATVCASLTSPPGADRQTRVLYQTLARLGQRITTLARTAADLQKQISALVEDMTPGLVAAEAGLGALTAAQLLLSYSHHGRIRSEAAFGMLPGTAPVPVSSGRTDRHRLNRLGDRQLNRALQVIAVARMRSHPPTQA

SEQ ID NO: 171271 - protein, 307 aa, unidentified
MSDRKDGMHSMTQQDRLVIGGVDAHADTHHAAALDDRGALLGTQQFPVSTPGYRQLLGWLRRFGGVDAIAVESTGAYAAGLVRYLRRRGVRVLEVNQPDAHTRRRRGKDDPIDAEMAARLALAGKATTIPKRTDGIVESIRQLRVARESAVKARTAALVQLGELIITAPQELRDQLSTRKTLRGKATLCRRLRPAARELGTPTQAAKFALRSISYRIGLLDQEIATLDQQLRPLVRTAAPRTTQLLGISTQHAGQLLVTVGENIERLRSEPSYAALCGTNPIPASSGKTRRHRLNYRGNRDANRTCT

SEQ ID NO: 171272 - protein, 351 aa, unidentified
MPRATSSTNVIATIGIDIGKNTFHVIGLDDKGAIILRHKLSRGQVYARFANIPPCLIGMEACVGAHHLGRELSALGHHTRLMPARYVRPYSKGQKNDFRDAEAIAEAVQRPTMKFVAIKTVEQLDLQGLHRIRERLVCQRTSVINQIRAFLLERGIAVRQGLRTLRTEMPIALAKTDKLSPRMIHMIEDLCTDWRHLDKRIETVSKEIETLSEQDDGAKRLMTVPGIGPIISTATVAAIGTGEVFSKGRDFGAWLGLVPKQMSTGGRTILGPISKRGNRYLRMLFVQAARAVLLRPQSWQKHGLKLWIEAAARRLNRFKLAIALANKIARIAWGVLHGGRNFEVRPINQAA

SEQ ID NO: 171273 - protein, 387 aa, unidentified
MPQPNDLSRSLTALDQDSTLIVIIEMSQASWLVGAIVPGIERHPLKKLAPDAEELLQVLQRWGREAAKAGRTVKRIAVAFEAGRDGFWLARWLRAHGVEPHVIHASSVAVSREHRRAKTDRLDVELLKRAFLGWLRGEGDHCKMAAIPTLELEDARRPSRERETLVGERTRIINRMKSTLARLGIRNFRPNLRNAPERLAALRTPEGVALPTNTRAELQRDMARLRLVKEQIREIEQTRLRRFAQPPADAPHAMLVLLARVIGVGIETADMLVNEVFVRNLRDRRAVARYAGLTGAPDESGARRREKGLARAGSARVRRGMLQLAWRFLMFQKDSALAQWFQARTADRRSGTRKTMIVALARKLLIALWRLATTGEVPQGVALRAAV

SEQ ID NO: 171274 - protein, 369 aa, unidentified
MADRITYVGLDVHKESIVVAVASGGLRGEVREYGRIANTATALDRLLRKLGGEGMTLRFCYEAGPCGYGIQRRLSTQGHECVVVAPSLIPKRAGDRVKTDRRDAASLAKLHRAGELTAVWVPDARHEAMRDLVRARLDAVHSLRRARQQLSGFLLRQGCHYGRPAWTKLHRRWLAGLTFDQAVHHLVLEDYIAAVEAAMARRDRLTVQIEAMLPDWTLAPVVAALQTMRGMALVNAATLIAELGDLSRFTNPRQLMAYLGLVPSEHSSGASVKRGGITKAGNGAARRLLIEAAWSYRFPARLSRELLLRQENQPRPIRDIAWKGQVRLCARYRRLTGAAKPANVVTTAIARELSGFVWAIARHVTMPAG

SEQ ID NO: 171275 - protein, 343 aa, unidentified
MDNNIYDHYIAIDWSITNMAIARMTKKSSGVKVVDIPSDILELQFYLKNLKGTKILTIEETTTSQWLYTELKEYVDRIIICDPHRNRLLSEGPKTDKIDAAKLVRLLKANILKEVYHSNDKFLYLRRVTSGYEDLVKAGVRLKCQRYSLLRACGKSGSRKGDSKLQSRGEQFVLERIDRQIKVYEEEKELYEEEFNRLARENPEIRHQKGLPGIGTINAVKIVARIVSPDRFPDKGHFLSYSGLIKLDKVSGGKSYGKKKSRYSRQLKSVYKSGVMAAIGGNNPINDYYEHLIQEKGYSNHNARQKACRNLAVLSLGVFKSGHKYQPFRRNNIESGKEMKAGL

SEQ ID NO: 171276 - protein, 321 aa, unidentified
MEKFSLYVGIDVSKTWLDIAIVSQENQLQKLDRIDNTVSAIRNYVRTLSPQTAGILFCLENTGKYGNAFLEVTAIMQLNTWVEHPLQIKRSQGMTRGKTDQQDAVRIAQYAIRFQDKLSLWKPEEKIISQLKELQSKRELLIKSYRMLKQSVTGNDSDLQKPIKALQKSIDNIDSKIEALITTDLKLFSQYKLLQSVPGIGKVVATRLLITTKAFTHLTDPRKLACYMGIAPFPYQSGSSIKYKNRVSKLGDQKLKSLLTLSAWNALRSVPTLKSYFERKIAQGKHKMSVMNAIRNKLVAMLLSVIRRNQPFTKDYSLRMS

SEQ ID NO: 171277 - protein, 411 aa, unidentified
MIEPLVKCCAGLDVHRVTVVGTIIKEGEAGEIHRVTREFSCYRKGLLELASWLSSMGVELAVMESTSVYWKPVYEILEEKIAKVYVVNSRHVKNVPGRKTDVKDSEWLAELARCGLLKSSFIPPKDFREIRFLTRYLLTLAGYIASEKNRLHKILDDCGIKLGCVVSNMGGLTARAIIEALIEGKMTPEEMAELAKTHLRNKKEELRMSLHQDLSDRHRYLLRCIQNHEKWLVMQRQEIQCQVVAAMEPYKKEWELLQTIPGFDELSAAVLMAEIGTDMSRFGQSDRLTSWAGVCPGSHESAGKNKSGRARKGNRYVRQILCEASNSARKTESQFKYLYQGLVIRRGHNRAILAIGRKLLEVAFVILSKKEPYKDPKVDFEKLLVMRNAPRWISKLRKYGYLPVYFEKQAA

SEQ ID NO: 171278 - protein, 403 aa, unidentified
MSDMITNHADIDVFIGIDVGKHNHHAVALDRDGKQLLSKALPQNETKLRALLDRLRKHGTLLVVVDQPATIGALPVAVAQAESITVAYLPGLAMRRIADLHPGEAKTDARDAAIIAEAARTMPHTLRGIRVADENVAELSMLCGYDDDLAKQATATSNRIRGLLTQIHPGLETVIGPHLDHPAMLALLAKYPTPKALRHAGKHRVETLLRKQAPRAWKRWATAIFTALDGQTVVVSGTDAAGLVLPQLATSLAQTRQSRDEVFARIEELVEAHPLFELLTSMPAVGVRTAARILTEVVGKDFESAGHLASYAGLAPVTWRSGTSIRGDHSSRRGNKILKRALFLSAFAALKDPLSRAYYDKKRAEHKKHNQALIALARRRCNVLYAMLRDGAYFHTPEATTAA

SEQ ID NO: 171279 - protein, 312 aa, unidentified
MTMFCAAGIDVGRDFFDVGLAPSGQVFRTANGSKGVEAVVARLRRAGVVRVVLESIGGYAARLVRALAEAGFEVGVIDPKRIRALRIAEGKKAKTDRLDAKLIARFALIMQDAARPVPSAKAFEIRALSTRRRQLVEMAAMEKVRLKQTLDEAVATSCRQIIAILTEERAKVEDLLQAELLAAADGAARSRLLQTIPGVGPAVSMTLMADLPELGSLDRKAVASLAGLAPHPNQSGTRTGQAHISGGRPCVRAALYMAAISATRSDKGFRREYLAMRHAGKPAKVALIAIARKIAVAANSMLKANQPWSKPA

SEQ ID NO: 171280 - protein, 415 aa, unidentified
MEVLYPRCAGLDVHKDSVVAGTRLADGGPARTEARTFDTTTPGLLALSAWLAEQGCTHVAMEATGVYWKPVWHVLSDGEFTLILANAAHVRNVPGRKTDVADALWLADLLAHGLIRPSFVPEAPTQELRALLRTRKQLVREQASHVQRIQKTLEDANLKLGSVLTQIMGVSGRAILQALIGGEVDPDKLLTLVQRGVKAPPEKLRAALQGRITERHRFLLRLHLRQVDALDAAIAEIDAEVDHDLDPFRDAVRLLRGIPGVSDLTAQVIVSEIGTDMARFPTAGHLISWAGLCPRNDESAGKRRSTRLRKGAPWLKTTLVQCAWAAARKKESYLQAQFRRLRHRRGPKKAICAVAASILTAAYHMLRDGTLYHELGADHFRRASPQDQAIRLARQIAKLGFTCTLAPLEETAVSV

SEQ ID NO: 171281 - protein, 438 aa, unidentified
MSNKVIFNLDDLFISVGIDVGADFSWMSIALPNQQFVGKPYKILHNSIDSLTTAVSKIKEAEELYSLESRIFLESTGIYHYPLFCYLRDKGFNCSVINPIITKNSTNINIRKVHNDRFDSKKAALVGLKPDLKVSLMPSDLALNCRNLCREYYDLMDNRSAYVNKLQGELRMAFPQYLGIFSKVTINTSLTLLETYTSPSAFLKADKQEIIDIIKSTARFGLTYAQNKYNAIIQAATDANQFGYIIDSNIKRIRLYISFIRKYDEEINSILESLHELVDANEDSDFVKQIHLIETFKGAGFLSAVSIMGEIGDFSAFSKPKQLFAYFGLDPAVKQSGKFEGTKVQMSKRGSAIARRVIHTLTLQSISISRNREAKNPVLREYYLKKCDSKPKLVAMGAVSHKVCNMIFAILRDNKPFKIIAPQEHIKQYNAAKCDIAA

SEQ ID NO: 171282 - protein, 298 aa, unidentified
MRYFAGFDVSLEETAIGIVDETGRLVREGKVATEPEALDAYMRAGGLPIERVGLEAGPLSTWLHGELTAGGWTMVCIETRRLRAVTRAMPVKSDRKDAEAIAQAMRTSWYRAVHVKSAESQRIRVLLRNRKILQAKRLDIDNEIRGTLKAFGLKLGKVGRAGFAGRVRELVAGEAVLEAIMPPMLQARSALIAAFDKLHRQVLAIVRQDPVCRLLMTAPGIGAVTALGYKTAVDDPHRFRHSADVGPHFGLTPRRYQSGETDYSGRISKCGDAMVRALLFEAAMAVLYRVKAASRLKT

SEQ ID NO: 171283 - protein, 341 aa, unidentified
MENISIIGLDLAKSVFQVHGAAADGSVVLRKKLTRSRVLSFFGGLPKCVVAMEACASSHYWAREIGRLGHEVRLIAPVYVKPFVKRNKNDAADAEAIVEAALRPTMRFVAPKSEEQQAAGMAFKTRDLFVRQRTQTINALRGHLAEYGVIAPKGKAHLGQLVSVIRDPDSGLPASVAELGRMLIERIEELGARIDELSEEVRNRARSDDTVSRLLTIPGIGPICAAAMVALAPPAQTFSKGRDFAAWLGLTPRQHSSGGKERLGRTSKMGQRDLRRLLVSGAMAMVYWTRRNGAPAGSWLARMIARKPAMLVAVALANRIARVAWALMARGGVYRAPEPAA

SEQ ID NO: 171284 - protein, 338 aa, unidentified
MHKSDHSGIEVSSEQLLVALRRDGQTLPLKAFPNTPAGHRAVAAYLARKGRVVRVCMESTGVYGLDLALLLHRQAGLEVMVANPRAVRHFAQALMQRSKTDALDAGMLLEFAARMEFQPWRPPSRAVLHRCALARRLAAITELCVAEKNRLHAARAAQALPAVIRQDLDRSIAFHQRAAARLTRQARKLIEADPLLRERFEQLDSVPGIAETSAIPLLAELGMLSPDLDVRQWVASAGLDPREYSSGRSVHKKVRISKTGNRHLRRALYMPALVAVQHDPHLRAFYEHLLARGKMKMQALVAVMRKLLHAIFGMFKHHQLYDGARLFHRPAQTSAQAA

SEQ ID NO: 171285 - protein, 356 aa, unidentified
MEQINKLDFSGQSIYVGLDVHKKSWSVSIFSKQCEHKTFTQPPEADKLVHYLKHNFPGASYQAVYEAGFSGFWAHDQLQEQGVNCIVTNPADVPTTDKERKNKRDPSDCRKLGRSLRNGELKGIYVPSRPKLEDRSLVRTRQSMVRKQTRCKNQIKALLYFYGINLPEEVVDSHWSQKFIRCLENLPMERSSGAMALKVHLDELHHLKRIIASLNRSIILLSREAEYGEMVRLLKTVPGISTLTAMIFLTELCELARFASLDKLASYVGLIPDIESSGETEHIKNLTHRRNPQLRALLIEAAWVAARKDPVLLLAFNEYCQRMKKTRAIIKIARKLLNRIRFVLKNQVEYVPGVVQ

SEQ ID NO: 171286 - protein, 410 aa, unidentified
MSLVGALFFVGIDWAAKTHAVCVLDATGKTVAAFTIEHTAAGFTGLVRRLAKLGDPAGAPVAIERPDGRLVDALLAAGHPVVPVKPNAIKTWREGEVISGAKSDPGDAHVIAEYLRLRAHHLRPATPLTEHTNALRTVSRTRSELVEARVAAANQLCALLDNLWPGARAVFADAASAISLAFLTRYPSPAHAATLGEKRMAAFLTKHGYPGRRSAAELLARLRTAPAGTTSPTVSEALRDAVTAMVGVLTALNTAIKDLDRSAAAHLHEHPDGAIFTSFPRAGLVNAAQIRAELAEHSAYTGPEAISALAGLVPVTRASGKHHAVSFRWACNKRLRVAITTFADNSRHASPWAADIYNRARASNKDHPHAVRILARAWVRVIWRCWIDQRPYDPTRHGGAVQLLEPHAAA

SEQ ID NO: 171287 - protein, 371 aa, unidentified
MKKNSTRSQSPKRATAREKGPITIGMDLGDKSSRYCVLGDSGEKVSEGSVGTTRKAMMEKFSGMRRCRVAVEVGTHSPWVSRLLSQLGFEVIVANARQVQLISASSRKNDRMDAQLLARLARVDPQLLRPIRHRSEQAQADLMTIRVRAALVEARTSLVNAARGFAKAQGDRLPSCDADTMGVEKMEGLPEPMQERLRPLLEQVESLTEQIHQLDTTIEQIAGTQYPETKLLRQVSGVGTLIALTFVLTVEDPNRFQKSRDVGCYVGLRPRQSESGQSQPQLRISKEGDRYLRQLLVQGAHCVVSRRGPDTDLKRWGLKLAERGGKNAKKRAIVAVARKLAILLHRLWVNGEVYEPLRNRPAPRTRKRVAA

SEQ ID NO: 171288 - protein, 347 aa, unidentified
MRFYTKQHRYYCGIDLHARSMYVCVLDSQGEILMHRNMTCSPELFLKAIGPYREDVAIAVECIFTWYWLADLCARENIAFVLGHALYMKAIHGGKAKNDKIDAHKIAVLLRGGMLPMAYVYPAGMRSTRDLLRRRMHLMRKRSELLTHIQNTNSQYCLPQFGKKIAYKRNRHDLPEHFTDSSVRRSIEMDLSLIDHYDKLLAEVELYITQNAKVHDVNAFNRLRSVHGIGKILALVMLYEIHDIKRFPTVQDFVSYARLVKCSRESAGKRHGFSGAKIGNVHLKWAFSEASVLFLRANPKGQRFLDKLSSKHGKAKALSILAHKLARAVYYMLQRDKAFDMNKFFNS

SEQ ID NO: 171289 - protein, 347 aa, unidentified
MIVVGIDPHSRLHAAAAVDEQGRLLEGIQVGSGPGELARLQAWIERLPRPRLVAIENARGYGLAIVRLLLAQGEELVDVPATLTSNGRRGSGQRGKTDQGDALVVARIGLRDQDRLPRLDATLLDDELKLLADTRDQLIVEAGRWRNRAHALLRVSSPGYQSKTGALASAGSVRRARTIAKRSVAEDPVRGRLAVQALDRLASLERDAGKLEREIRELLRVRGCTRLLAIRGVGPIVAATILGETRGIGRFRSAAAFAAHSGTAPVPASSGRTQRHRLNRGGNRQLNRALYTIAMVQARWDPAARAYLDRKLAEGKSAAEARRCLKRHLANVIYRALTADTEAATLT

SEQ ID NO: 171290 - protein, 412 aa, unidentified
MKDLLEISCGLDVHKEKIVACILTGPLGKPTRSEIREFSTLIPDMIALRNWIVSKNCHHVAMESTGIYWMPIYEILEDAFYGDITLLVVNARHMKNVPGKKTDMRDSEWISTLLRAGLLNGSFIPEKRIREFRDLNRYRKSVIRDITSQKNRIEKFLQSSGFRLSSFISDIFGTSGRNIILHLIEHGQIDKTALDSCLKTKTRNRIDEILMSVNGTLSEHQKAFLRILMTHYDSLKKHLAEIETSLEEDMAPFTLQVEQLNSIYGISTTASCAIIAEIGIDMKPFKTAEHICSWAGLCPGNNESAGKRKSTSVTKGNPYIKSMLCEIAWVIAGKRNTYLSAWYWRIKQKKGAKKAIVALARKLLVIIYTMLKQGTLFDESCFETRRKHCEQKQLSRYIRELEKHGYHVEAQS

SEQ ID NO: 171291 - protein, 402 aa, unidentified
MNAVGIDVSKGKSMIAVMRPFGEIVASPFEVNHTTEELSKLAEMLRNLDGETKIVMECTGAYHLPIAYALNESELFVSTVNPIITHNYDNNSIRKSRNDKSDAIKIANYTLTNWLKLQQFIPEEDIRHMLKVYSRQYNKYKKILVALKNNLISLLDSTFPGANELFTSPPRKSDGHEKWVDFVAHFWHCKCISSLSEKAFIERYRKWCKRAGYNFNQAKAEDLYIDALGHFFIIPMTKTTKRLITQATSQINTISETINTLASEMKALAASLPEYPVVIEFRGVGEILAPQLIAEIGDIYRYFQKSSLVRYAGLEPVENQSGKFRGGESISKQGSPHLRKTLFQVMDGLLKHAPADDPIFQFLDRKRAEGKHYRSYMCAGAAKFLRVYYARVREYLEKHFVE

SEQ ID NO: 171292 - protein, 360 aa, unidentified
MINVGIDVHKKRCQTCLKDEKGRLIEELSIPNTTEGAEQLARILTTYGEAKIVLESTGNLWTRLYDTLNQHAPTFKVVLANPNKTRIIAEAKIKNDRMDARVLADLVRADLVAESYVPNQEIREQRALLRQRRSLVNDTVAVKNRIHNQLDKYDLRCEYSDVFGKQGLEWLRNLQLPPIERTILDVNLKQLQNLEESIHALTVKIAQEAINRPDVKLLMGFTGIDYYSAMLLLSEIGPITRFPSAKKLVSYAGLAPGIRQSADHTIHGRITRDGNRYIRWILIEAAQNASRFDPKLRPFYLRVAARRGHQKAITAVARKMLVSIYHVLKRQETYHGQRDELLERKINRLQRTVDTSLQAE

SEQ ID NO: 171293 - protein, 376 aa, unidentified
MNNVRFVGLDVHAETIAVAVAEADGEVRSLGVIPNRAESVGRLVRKLGKPESLRACYEAGPTGYVLYWQLSELGVKCEVVAPTLIPVKAGDRVKTDRRDAQKLARCYRAGDLTAVWVPDAAHEALRDLVRARLAAKRDQLRARHRLGKFLLRHGRRALEGTSAWTEKYLVWVKTQHFEHTAQETTLLDYLHEVEHAAERIARLERAIDAAIETLPVKLRAVIEALQSLRGIAQLSAVSIMAELGELSRFEHPRQLMGYSGAVSREHSSGERIRRGAISKAGNAHLRRIVIEAAWAYRHRPAVGKTLAARQRHCSAAITAMAWKAQHRLHQRYARLMARGKCKQQTVTAVGRELLGFIWAIGVHAEREMAVPLRQAA

SEQ ID NO: 171294 - protein, 317 aa, unidentified
MVEISTTVAGIDTAKDKLDVAVHSHALRWRVENTLSGWRRLHSELTKAGVARVGIEATGGYERGVVRYLRAAGFTVLVLQPIQVRAFARVHLRRAKNDALDAALVAACTAAIDGPRIVPDARLAALADQLTFVEQIEEDIARFKTRLEHIDDRRVRRLVTTDIARLKARRTAELLRIVKAVRDHEDLARRLDLVLSIPGIGERTALALIIRMPELGRISREQAAALAGLAPFDDDSGKHKGQRHIAGGRGRLRRSLYAAALPASFRWNKALIGLYARLTARGKAHNAALVACARKLLIYANTVVQRGTPWVEKSAET

SEQ ID NO: 171295 - protein, 422 aa, unidentified
MVQVGTTNQKKEGKKMISIGIDIAKEKFTACALEQGSKIIWKPFDIHLNKTKVEEFLQKLDSLNEEVKIIMEATGRYHLPILYELKDKGYFVTVINPLKMKQFCRVLNFRKSKNDNIDAIQIAEYGLMYWKELQEYKVDSESFRVLKELNRSYQHYMDLRINQMNFIDQTINQTFPGIKKLIPHGSNDFSKDKLLDFLEIWWHKNLVLEKTEEKFIEDFKNWAKEKRYHPNADKAKSIYKLAEESISTHPSSSSYIKTSIQEGIELIKHINQILHTILSQMIEISEPLEEYQEAKKFSGISDKLAVQIIAEFGDLSKFKNKKSLISFVGIDSPPYESGNFKADQRKITKRGNAILRKVGYQAMKCMMSAKDPENDIYQYMVKKEKDGKAKKVCKFAGLNKFLRIYYAKVMALKQEKMLLKAA

SEQ ID NO: 171296 - protein, 410 aa, unidentified
MEVIWGCCAGLDVHKDSVEACVRRMSAGGKVEHEVRHWGTTTRELMAMAEWLGSMGVTQVAMESTGVYWKPIFNILEARFEILLANAHHLKNVPGRKTDIRDCQWIAQLLQHGLLKGSFVPPRPQRELRDLTRQRTQLIDEGSRISNRIQKVLEDANVKLGSVASNVIGASGRLMLEAMVAGEDDPARLADLAQRRMRSKIPQLEQALYGKLTEHHRWMLKLLLDQLRTTEQFIARLDERIVELTRPQQPVLEKLDAIPGVDRRVAEVLMAEIGPDMTPFPSDAHLASWAGISPGNNESAGKKRSGKTTKGSRWLRQALVQAAWAASHKKDSYFQAHARNLMHRRGRKRGLVAVAHSLLTVVYHMLKEDTAYRDLGSQFLDRLRARHLIRFHVRRLQNLGLQVTIAPQVA

SEQ ID NO: 171297 - protein, 344 aa, unidentified
MEPSMTEITRIAIDTSKSVFTLHGTDDVGRAVLRRNVRRRDLIRFFERLPPIEVVLEACGGSHHWGRTLTALGHRVRLIPPQYVKPFVKRSKNDRNDAEAISEAASRPGMQAVPVKSTEVQAAAMLLSVRELLVRQRTQLVNALRGHAAEFGMVAAKGNKGLAELRSEIAADEALPEAAGHALQLLGQEIDKIEARLAQIEKTLIAQHKTNAQSRRLAEIPGVGPMSALSFSLRVDASQFQSGRHFAAWLGLVPKERSTAGKQRMGAISRAGNERLRQLLVLGATAVIRFAKPGRPGVSAWLIALLGRKPRKLAAVALANKMARIIWAMLTSAEPYRHPAPIAS

SEQ ID NO: 171298 - protein, 395 aa, unidentified
MKHWIGFDVGKRFHWLCVLDEEGLVLLSRRVDATEERLEAACSEIAALGNAEDRMIGIDLVGGTDTLLETILLERGERVRYIPGTAVNKVRDAYSGGEHKSDPKDAFVIADQLRLRWRSLREVRVREENALELKTLVSYRKDLVQDQRRRVCRLRELLSQVFPGLEAALPDLAEKGALLTVAKVARPSDARKLGKSRLTRWLKSRGSRKSEALAERALVAAKAQHRELPAARVKAALVSEIAWEIIRTKERIAELERRLEELVETDPKGEIVRSMPGMGLVLTAEFLAEVDEIGRYGSPDRFAAAAGIAPVLRASGSLSYQRRAKKGNRALKRVFYQSAYCAIGHHQKSRDYYRRKRAEGKAHHQAVIALARRRVNVLWAMLRDGATYQEAPLAA

SEQ ID NO: 171299 - protein, 480 aa, unidentified
MNVKTNKTKKQANVENQAVNLLSKEELCKRIEGVEKELKSYTWRELKTNGKFAKNDKLSFITDDMLIVGCDIGSETHYIRAIDIRGRELSRKAFEFGNTAEGFEAAKAWMLELAVQNRKSQIVLGLEPTGHYWFTLAAWLITAGISVVQVNPYAVKQSKEIEDNSQLKDDRKDPKLIANLVKDGNFGMPYLPEETYADMRKLSMFRDQLTEDRIRNINRLHRELKIYFLEYMDAFGKIDGTFALEVLKVSCIPSEITELGTEGLRNIWHEAKLRGRGYSRASEIVEYAEKSVGLKDGSSVGRETVKWFAKEIMKLDEQLAWIENTLHKKCMEIPYAENILEIKGVGENILAGIVAEMGDISRFDDVKEIQKLSGMSLVAYSSGKHKGQTKISHRGRKRLRYWLFQAARSAVSHAEEFKELHVYYTTRADNPLKKMQSLIVIACKILRVIYTILKTGKDYDPQKMLKDIKRPKAALAAKAA

SEQ ID NO: 171300 - protein, 361 aa, unidentified
MNATMTWVGLDVHARSTHAVAIDPTTGELRRARFGPGSEEVVKWLVGLEQPARAFYEAGPTGFALYRASRAAGLEIEVIAPGKTARPRSDRVKTDRKDAELLARLGLAGQLRPIAVPSEFVESARHLMRAREQLRGDILRARHRVSKLLLQHGRVYPQPTTWNKRHRLWLGRQRFDHEPTELAFIDLLAAVDGMVARKEALDEHLSPLATDERLWPTVVRLRAFRGVGTLTALALHLELGGEWERFSSPRKLFSWLGLTPSLEQSGESKAQGSITKTGSHYARRLLVEAAWHYSRRPAIGVTLQNRQQGQPDHVLAIAWRAQHRLHRLRNRLKERGKPANVATVAVARELSGFLWAAATAP

SEQ ID NO: 171301 - protein, 344 aa, unidentified
MYKADRTRRRVVVHGVFMSMSTMAYLGIDVAKRKVDVALLRPDGKVRSKAVLNTTAGAAELLAWVARYHEGPVHACLEATGTYGLALAEALADAGYVVSLVNPARIAAYARSRLTRSKTDAVDARLIAEFCAKETPPRWVPPSPEIRALQAWVRRLDALDQMRTQELNRLAAEPADAAVRASIQHVVDPLEDEMQTLRARIHDHFDAHPGLRAQRDLLTSIPGIGQATAAVLLAEFGGLTQFRHAAACAAYAGLVPQHRESGTSVRHKPVLSKLGVPLLRKALFYPAMVALRFNPIIVAFGERLRQKGKHKMVVIGAAMHKLVHLAYGVLKTGKAFDPKYRLVP

SEQ ID NO: 171302 - protein, 347 aa, unidentified
MMKYSLGLDVSNKDIHCCISAIDIYQNVTVKASRKILNTQKGFRDLDDWIKRNHKQTTIPFVICMEATGVYYENCAMYLHKAGYNVSVILPNKAKKYLQASGQKSKNDKIDAKGLAQMGAEKSLRLWEPMGEYFYQLRELTRHDQSLQEMKTVISNRLHATERGMYVNQDVVKQLRSQLRLLEKQLEASGKLIDMHITANDEVCVKVTKICTIKGLGIKTVATLTAETNGFLLFDNARQLASFAGYDTVENQSGRQIGKTRISKKGNSHIRRILHMPALSVVRHNVQPFMGLYDRTLAKHGIKMKSYVAVQKKLLTIVFALWKRNEAFDETYIKKYTEEKESALQLG

SEQ ID NO: 171303 - protein, 411 aa, unidentified
MSRHVEVEVLHTRCAGLDISKRDAKVTIRVFPSEGKRAILTRFVSGATAPAIAKLRQRLVKEGVTCVVIEATSSYWKPFYYGLEDAGIDLILVNPKDVKALRGRKTDRLDADFLSKVGALGMAKPSFVPAPEVRALRGLTRERTRLVEERTRQLNHLEKVLEDTCLKLTAVSSKTLNVSTRAILDAICQNETDPGILAGLGSRLKARTEVLQEALTGRIEPWHVSVIALALRSIDRFDKEIEDLEHLIDQHAEPFQPEIGLLCTIPGVSTTTAIGMIAEMGPDMSVFPTSKHFAAWAGVAPGSNQSAGVVRSAKCRRGNKHFKRVLGTVVRAHLNRSSQDTFLCARYRRLKGRKGKKVAQVAVMRSLATAIYHMLLNKTSYVDIGADHYDERDRERAIEWHKSRLAFLTTA

SEQ ID NO: 171304 - protein, 380 aa, unidentified
MIVIGADTHKRTHALAAVDEGTGQVRGGREIEADDSGHLAAVRWARGLDAERVWAIEDCRHVSRRLEQALIAAGERVVRVPPHRMGASRRGQREPGKSDEIDALAIARAVVKDGVERFPAAHLDERALKIRLLADHRTALVAERTRAQNRLRWHLLERCHELEASLKKRSLAEKRTLDRIDRRLRRMPAGARVRVAREQLVQIRALTRQANALEAELLTLVKAQRPQLLAETGCGALTAAILIGRTAGTERFATDASLARQSGVAPIPCSSGNRQRHRPHRGGDRQLNHALHIIALTRARHDPATRDYLARKQAEGKTKKGPLRCLKRHLARRFHRLLSLPAQPDQERGTVIELPPHPHRSNSPDTTTTGAAPTPMPRPT

SEQ ID NO: 171305 - protein, 319 aa, unidentified
MPTKTAVAYVGVDVAKATLQVHLQGQQQEFENTPEALRRLRQRLQKLPGAHVVCEATGGYERALVKVLHEAQTPVSVCNPAQVRAAAQAQGKRAKTDQIDAAGLTDYGQRYQPEPTPPTSATQDELVALTQWLKQLVGGLALAKTQAEHHNEPFVRRQHAKLLRHLESQIEAVEKQIQALVKQDALLQQRVQCLDEIKGVGPRTAWMVLAHMPELGQLNRHEAAALAGLAPWTRESGTMKGKRCIGGGRPEVRLALYMAALSAARSNPVLRELYKHLRAKGKLAKVALTAVMRRLLIYMNIQLKALEAQAAKEIETLKK

SEQ ID NO: 171306 - protein, 355 aa, unidentified
MERYLGLDVHAASCTLAVISQTGKRLKDLPVETNGQALVEAVRMIPGRKHLAFEEGLQSAWLYETLSRHVDEIVVAGITESRGPKSDKRDAYGLAEKLRVGDLGKTVFKAPRQFTRLRELSRIHMTLVGDVVRVQARIKSLYRSRGVLVTGVDVYGPRRREQWQKQLCSSAQTRATRLYDHLDFLLEQKKQAEADLLREAKGHAIVRILETAPGFGPIRAARLVPIVVTPYRFRTRRQFWSYCGLGIVTRSSSDWVQTADGSWIKARVPQTRGLSRQHNRVLKSIFKGAATTVITQRNKDPIHARYQRLLDGGTKPTLAKLSLARMIAATVLRMWKDEEEYDPGRAGPPTEIREG

SEQ ID NO: 171307 - protein, 331 aa, unidentified
MNYNTVYVGMDVHKESFSLCAYTIEAEKASHYQRTEADYKKVLNYLEFLRTIYGDDANFICGYEAGCFGYTLYHQLTANNVKCIILAPTTMLEQRSKKRIKTDRRDAEIIAKCLAQHNYSPVHIPTAKDEETKEFLRMRDDHKLALKKVKQQILAFCLRHNYRYDGKSHWTAAHLKWLKALTPEALYKEILDEYLLTYQTLSDKIERLDKRIEELATQDEYKEAVKKLCCFIGVKTHTALSVLVEVGDFKRFASAQHFASYLGLVPGEDSSGDDQNRLGITKAGNRHVRLLLTEASQCYARGQVGFKSKELKSRQGIHLQSSLMLTKLTSV

SEQ ID NO: 171308 - protein, 394 aa, unidentified
MKLIGIDIGKNKHFFCVMDQQTGEIISQPVSFSNDKEGFDFLVQKIESYPKDSILIGMEDTGHYHFALLKYLLDLQYTVALINPKTTDFNRKMQGGITKNDKLDTINICDVLDTPERKKQYRITKVNSFDLYEQKQLTRHHHNLKEEENVYKNRLQKCIDIVFPEFNKLFNSKYGIVYMNILKMFGSAENIANTDIRTIRKCFEIKGRGNRISLTPERLKECASSSIGISSSAEVIQIKHLTAQIELIEEQLTEIDKKIEEFSIQNNSPILSIPGISHFSGTSILAELGDISNYSKPSQIIKFAGVAPLHYESSQFNAQHTAITKKGSKYLRKTLYQIILPVIRHNPVFNKYYQLKISQGKGHRCAQGHCVRKLLRIIYHLLKTNQQFDPQLLR

SEQ ID NO: 171309 - protein, 367 aa, unidentified
MKKQTSAATETQLKGKNIIDFTGKTIYVGIDVHLKDYQVAKVYNGLCLGNHRMSSDGQGLIDHLGNHYPGAVFECVYESGAWGFTLQRQLTAAGMKCMVVHAADVSTTDKERKRKTDKVDALKLARMLASGDLKAIHVPDETIQKQRNLIRYRKRLVGDLNRSKNRLKSLLKFQGIVIPEPYQKNNWSRDFMKWVEQQLPSQDPLADSVTLMLEQINLLRQLLLKTERKLRQLRKDQYEQEATLVMSVPGIGPTTAMLFLLEVGDINRFHGFDALNDFVGFCPDTDSSGETDRDRGITTRRHNELRSALIEAAWQAIRIDPALLESYQLLTKRMKGSQAIVRIARKLLRRLRTVLLKQTVYEKGVVA

SEQ ID NO: 171310 - protein, 467 aa, unidentified
MPRVRPHPHRRERAVTLPPELHQVNLNAAGIDIGAESHYVAVPEGRAPDGHDVRTFGAFTADLAALAEWLTRCGIETVAMESTGVYWIPLFELLTERGFEVKLVDPRQLKHVPGRKTDVLDCQWIQQLHTFGLLAAAFRPADQICVLRSYLRQRGMLVRYAAHHIQHMQKALEQMNLKLTHVVSDIAGLTGLAIIRAMLAGERNPRVLAQLRDRRCKADEATIARALEGTWRREHLFELRQAVELFDVYRGQIAACEAEIEAQLGQFEDKSGGQPLGGAAGGRKAGRGALRFDARQHLQRLTGVDLTRIDGIDAPTALKLVAEIGLDMTRWPTEKHFASWLGLAPGSKVTGGKQLSGRTKPCANRAATALRLAAHALHHSRSALGAFYRRLKGRLGAPKAITATAHKLARLIYRMLRFGTEYVDRGQDYYEQRYQSRVVAHLMRRAQELGYQLIKNENFSVATSSPA

SEQ ID NO: 171311 - protein, 378 aa, unidentified
MKREKEKNCCLSFVIQTVRNVSSFLPVFKILNSSLGIEPVFRIDKIKTLTNTQGIMENKFIGIDISKQTFDAAFQLCNKWYFFSLDNKIEGYKALAKHLNSGDVLVMEASGPYYLLLANYFYSKGFKVVVVNPLVIKRYSQMRLYRAKTDKKDAQTIAEYAASNELTSWKPEEEQISKLKQLQTAIEGLQKASHQISRQLEAMRTTGYLSKELEKDLSQTIASLKKKIQKLEKRQLQIATKYYNQTLTRLQTIPGIGRKTAVMLITITNDFRKFDNYKKLIAYVGFSPRIYQSGSSINGKGHICKMGKAQIRKLLYMCSWSAKHKNKACIEMYERLRAKGKPERVIKVAIANKLIKQAFALIKNNQPYQENYQSKPCF

SEQ ID NO: 171312 - protein, 328 aa, unidentified
MTMIPTQCQFKHVVAFEVSKHDLVIHVLPGEQTSTICNKPKAIRTFLAKEKRRNAKVDLGPMLVVCEATGGYERHVLEICGELELAAHKAHGKRVRDFANDLGVLAKTDPVDARVLALYGLKTDDLRLYALPNAKEQALKDLKARRDEIQQMLIAENNRLEHARHASVHKSVTVHVASLRRAFATIEAEIARVITSCEHLARKAQLMRSLKGIGPVTVATLLACLPELGTMSKGEAAALAGLAPINRDSGKTSAPRHIMAGRNAIRRSLYMAALVARQSNPVIKDFARQLTQRGKPFKVVIVAVMRKLLITLNAILKTEQPWRHAKPA

SEQ ID NO: 171313 - protein, 346 aa, unidentified
MQYHAGIDVSLEQSSVCVVDATGKIVKEVKVTTDPHVLVTFFKGLGFPVTRIGLEAGPLSQWLYAGLTQAGFDVVLLETRHVKAALSAMVVKTDRKDARGIAQLIRMGWFRAVHAKSASSQEIRALLTARRLLLDKLRDVELSVRGILRGFGLKLGKVTQRGFETRVHELVANHPMLQQITRSMLLARATLQREHNMLHKALLKIIRGDKVCRQFMTAPGVGPIVAITYKTAIDDPHRIKKSKGAGPLFGLTPKRYQSGETDVIGGISRIGDAMVRAMLYEAANVLLSRTTRFSALKQWGLGIAKRRGMKRAKVAVARKIAMILHRMWIDGTSFRWSNKEKVAAHA

SEQ ID NO: 171314 - protein, 342 aa, unidentified
MSEVTMIGIDLAKRVFQLHGACANGTVVFRKKLTRVQILAFMSQQPECIVAMEACATAHCWGREIEKLGHTVRLIAPIYVKPFVKRQKNDFADAEAVVEAASRPTMRFVALKSEAQQARAMLFRTRQMFIGQRTQTINALRGHLAEHGVVAPKGAIHVKRLADAVLDETVGLPDGVRELAHVYLAQIEGLNVQIAALDQKMKGAAKEAEAARRAQTMPGVGPVTALAIETFAPDLNCFRRGRNFAAWLGLVPKQNSTGGKPRLGKTSKMGQRDIRRLLVSGAMAVLQAVERFGTPHNSWLTKMLARKPRMLVAIALANKMARGLWAMITKQEDYRILAATMA

SEQ ID NO: 171315 - protein, 408 aa, unidentified
MERYYLGVDWADKFHQVWVSDAQGQKVAENKVVENMEGLGEFSRWLNESRARGIELWAAIEKPQGRIVDFLLDHGVVVYPVNPKALDRARDRFRMSQSKSDSFDAHVLAEFLRTDHGHLRALEPNSDDAQELKLLTRDQHRLGRQKTRLLNQIRVTLKEYYPRPLEVFSDLEAQIARDFLKQYPTPRALSDLTQRKWNRFAKREHHLGEGRCKELWEKLNQPQLQVPDHVVRAKAQLLLVLLAQLEASSDAVQTYNERVKHFFASMPAAKLVKTLPGAKTGTIVAMLWAELGDSNNRWESFHHLQAEAGVVPVTKASGKSHVVHFRFSCNKVMRHASYWLAFVSLNQSEWANHYYRDQRAKGHNHHQALRALGAKWLKIIFVMWRDHKPYDENYHLANITRQKMRQAA

SEQ ID NO: 171316 - protein, 351 aa, unidentified
MKTQSRYLGVDVAKDLLVVAFERNRWQFANSKEGYRKLIAQIRKESGSMHVVCEATGPYHLAMCLALQEAAIAVTVSNPARIKYFGRSEGVLAKNDPIDAALIERFASAKRPEPDPPISREQIALNELVNHRAQLVASRKGLLAARQQLLDASVRKEIDRAIAALDRCIASAERRLKQRVDSHPLWKEKIARLSSVKGVGFLTAVVLMAKMPELGSLSRGQCAALAGLAPFDNESGARNGKRSIQGGRCDVRSALYMAALSATTSNLVLRQFYQRLIDGKKPFKVAITAVMRKLLVYLNSLLKALVQPSSAHRRLDLSIIAPVRPDARMPGTGTPRRSSRTNRIKAIVGKS

SEQ ID NO: 171317 - protein, 400 aa, unidentified
MDLDTSRTPVGIDLAKDSFAAAVSDGDSEVVRAFPLSREGLADLIRFLEPYGPFPDAFVFGLEASGPYTEPLLSWLLQRNARVFQLNPLLISRFRRAQSLRRTKTDAIDARTILHFIGQLPPSVQPCEPGDDLQALAAEYEQITQQVARLKTQIRQQVHALFPELAGSSTLFSQRILRLLLAFPSAHAIARATPAQLEAACKDLPSGRRSRITAQYLYNSACASIGCSTPQREAVLQSKIRQLQHLLQESCTMRNALIQAVRAAHPTPWRLLLSIPGLGPITTALFLAQIRSLSRFPSHRQLSAFIGIDPTTYESGQFKAQGHISKRGSPHLRRTLYLMAQSVARYSVTFRLYMDQLRARGKAYRVAVIACANKLLRVVMALLRSLTPFTDSSLQEVSHS

SEQ ID NO: 171318 - protein, 423 aa, unidentified
MMKLKYPICCGLDVHKNVIVATIVITNRDGVSEYRQKSFSTINSDIQKFHNWLIENNCYHVCMESTGKYWIPIFNYLEKDIEVCLTHPKYVKAIKGKKTDKKDSKWIADLYKFDLVRCSFIPPKDFRQLRELARYRFKLVCMKSSEKNRIQNCMTVSNVGIASVLSDPFGKTATEIMSYLLEHTADSIDEKAVRKLIKKGAKAKSDEIIEAIRGCNIETDQAKKLELALGHLEYLDGMITQTEVELYVRIKPYYEFVEFVSTMPGMTELSSTIVLAETGVDMNIFDDAKHLCSWCGLSPSNNESAGKKKSVRIAKAGAYLKPMMVQCALAAIKNKKQPYFAIKYGRIKKRRGHKKAIISIARMMMVCIYHMVSEKKPFTPADYEELMKPQNHVERVVLNENNVFAYLESLGYDSSKLVKRNDN

SEQ ID NO: 171319 - protein, 322 aa, unidentified
MSQPNPLCVGIDVSKATLDIAASSDVAQFTVSNDSDGFNAIITALRRHSVALVLMEATGGLEVAVACSLQAEGFEVAVVNPRQARDFARAMGYLAKTDRIDARVLTQMAEVINRHPERKRFIRALPDAERQALAAMVVRRRQLIAMLVAERNRLHPSHPQNKKSINTIIKALEDELVRLEKEMDSHIRNHFKEIAERLSSIKGVGTMTVSAMLAEIPELGTLSRREISALIGVAPVNRDSGTMRGRRTIFGGRAGLRSALYMAALVATRFNPVIKTFYVRLLAAGKAKKVALVACMRKLLTILNAMLRKNEEWDESYHHVAP

SEQ ID NO: 171320 - protein, 450 aa, unidentified
MSNKAKNTQSLPVLNPNSAGIDIGASFHVVAVPPDRCSEPVQTFKAFTCDLHRLADWLVSNGITTVAMESTGVYWVPVYEILEDRGLEVVLSNARDTRSVPGRKTDVNDAQWIQRLHACGLLKASFRPESLIVELRSYLRVRERLLDYAAAHIQHMQKALTFMNIQLNLVVADITGVTGMRIIRAITEGERSPARLAEFRDNRCKSSKETIQSALEGNYQSEHVFALRQAVVMYDAYQQQVDECDVEIEKVLNVLQTKSRKPETPLPKPKHRTKQPNCVNFDVRASLYQIVGSDLTQIHGVGPYLALRLISECGTDMSRWPTAKHFTSWLTLCPGSKISGGKVLSAHSRKSNNRIVAHLRLAATTVGRSQTALGAFYRRLSARIGKAKAVTATARKIAVLFYNTMRYGMKYVDPGVEQYENNYRDRVLKNLQRKAEAFGMTLQQKEVCVS

SEQ ID NO: 171321 - protein, 345 aa, unidentified
MGYFAGLDVSLEETAICVVDAAGQIVREARVASEPEALVAFFEACGMAMERIGLEACSLSAWLHAGLTQAGLPAICIEARQAKAAMGAMPNKTDRNDARGIAQIMRTGWYRAVHVKSPSCRSWRALLTARRLVLNKRRDVENGVRALLREAGLKLGTPSRKDFSARVRELAGDDPVLAGLSQSLLSVIEIMTQEVDRLTKRVLDEVKVEPTCRHLMTVPGVGPLTALAFRATIDQPGRFRKSRDVGAHLGLTPRRYQSGETDVQGRISRCGDELARTALYEAAHSLLIRSNKWSALRAWGMNVAKRRGMARARVAVARKLAVILHRMWADGSEFRWGKQATTAAA

SEQ ID NO: 171322 - protein, 317 aa, unidentified
MTQTSITTAGIDTSKAKLDIALYGRTERWQVANALPGWRALAARLTKAHVTRVGIEATGGYERGVVEYLRAAGLVVLVLQPIQVKAFGRVHLRRAKNDVLDAVLIAACAAALDQVRIKPDQRLAELAQHLTFLEQIEEDIRRCKTRLEHIDELRLRRLVLGDIARLKARRLAEIRRIAKQLRSHPDLAARLDLVLSIPGIGERTALALLIRMPELGCISREEAAALAGLAPFDNDSGQHKGQRRIAGGRARLRRSLFAAALPAAFRWNKALIALYGRLTATGKAHNAALVACARKLLIYANTVVQRGTPWTERSLRV

SEQ ID NO: 171323 - protein, 370 aa, unidentified
MKETITSFIGLDVHKDSIAIAVAQAGRQAPRFVGTVAPELASLCKALRRVANAKCTLVVYEAGPCGYGLARHLNAHGYTCEVIAPARIARSPAEQRIKTDRRDALLLARESRAGNLVPVVMPDERDEAIRDLSRTREDACTARLRARQQLKAMLLRHGRAYQGKSSWTLAHERHLSTIGFTYPAQDIAFAEYRQAVKDSHERLERLTEALRAQSSQWRMNPLVQALMSLRGFDFVAAVTFVAEIGDPRRFAHPRALMAYLGLVPSEASTGQTRHQGSITKTGNKHARRILIEAAWNYRHAARISRVLEVRQQGQPKIVRDISWRAQLRLTKRFRHLAMGRRLPRNKVNVAIARELAGFVWDIARQVKPLA

SEQ ID NO: 171324 - protein, 375 aa, unidentified
MAQGTRWVGLDAARVSALVAVEASNDGLVKGEAAGRLPIVMGLDQHRAQITAEWIDLSTGEISRGRVVPADRASVRKFLKRFAGRDLEVALEATTGWRFVAEELERVGAGVHLAEPAETSGLRGPKKRPKTDWADARHLRELLLIGRLPESWIPPDHILDLRARVRCRHTLSHQRTEWQQRIQSVLYHHGCPQRRQLMTGEGREWLDAQPLPAAAREQITVAVAMINALDVQVAPLTARLYDYAKRQTGCKALIAAYYGIGGLTAVTILAELGDTRRFENSRDVVRYGGLDITVKQSDQHRAPGHLSRQGPPALRWALYEAAQQARHPRSPDREYYLQAAERIGGNRACLALARKLLKRCYHTLRDLGEDALTPA

SEQ ID NO: 171325 - protein, 356 aa, unidentified
MTASLTSTQPTIIGGIDAHKDTHHAVVLDDRGVRLADQGFPATTAGYRCLLDWMTGFGRLDRVGIESTGSYAAGLTRFLQEHGTEVIEVNQPHPHTRARRGKDDAIDAEAAARKALSGEASTRPKTTTGVIESIRLLRIARESAVRARTTALVQLQDVLITAPAELREQITATSGRSMATQCARLRPDASRLAEPAQAAKLALRTLARRVDELEAEITEIDDHLGALVRHAAPTLTSRLGIGTIHASQLLVTAGQNIDRLTSEAAFARLCGVAPIPVSSGKTHRMRLHRGGDRQANRALHLIAVCRLRYDQRTRDYAARRLAEGLSKKDILRCLKRFIAREVYNDLRHDLTALDDL

SEQ ID NO: 171326 - protein, 421 aa, unidentified
MESDYRIYVGIDWASEAHQACVLHHERGIVAERSFAHAGKAIVEFAQWLSGLTDDPGQVAIAIEIPRGAVVETLVERGFHVYAINPKQLDRFRDRYSVGGAKDDRRDAFVLADSLRTDQPCFRRVELDDPQVIQLRERSRVDEDLQREGNQLANRLRDQLHRFYVQALQLCPAADEPWLWTLLELAPSPSVAQRLRPKRVERLLRAHRIRRLKADDVVSALRVPALQVAPGVVEAATEHIALLLPRLRLVHSQRQRCGARIEALLDELRAAGEEDDKPGEHSDVAILRSLPGVGRIVAATIIAEAGAALTERNYDALRAHAGIAPITKQSGKHRTVLMRYACNGRLRHALYHCARVAVMGDLPSKTYYTAQRQRGHSHGRALRAVADRLLRILVAMLTTGTLFDCSKARPPQVSNRSEKVA

SEQ ID NO: 171327 - protein, 441 aa, unidentified
MDDAEVLELEQRVEQVERVAAIDVAKASGMVCTRLPSGSNPARRVQKTWAVAATTEEITALGDHLVCQGVELVVMEATGVFWKPWFYLLEDRGLRVWLVNARDVKNVPGRPKTDKLDAIWLAKLAERGMLRASFVPPEPVRRLRDLTRLRRTLVEERTRYRQRVGDVLQDACLKLADPKQGLTDLFGVSGRAILGALIAGQRDPKALVALAHPRLKSKAGYLEAALTGRFTAHHAYLTGKLLDLHDRLEADIAELSARIQALIAEIDPTPPPDDGHPDRLPLLARLDEIPGLSPQTAADIIGEIGVDMSCFPTPGHLASWAKLTPRTIQSGNKNTHGKTGKGNRWIKGPLGQAAVAAGKTPTFLGARYKRIVKHAPKKKAQTAIARNILEIIWVLTADPDARYTDLGPDWHTRHTNTARKTRQAVRDLEQLGYTVTLAKAA

SEQ ID NO: 171328 - protein, 360 aa, unidentified
MMIIGCDFHPSGQQVLAIDDQSGEVVSERWLNHAGDEVEQFYASLPAGAVVGVESSGNMLWFERLLSRHGHRLRIGDAAQIRSKDTRKQKHDERDAQLLARLLMENNFPDLKWVPSLAERDQRQLLMHRHKLVRMRAQVKNQLQHIAMNQGIRKKQSLWSEAGRRILLDRKLDRWTARRRDDLLDLLDRLEDHCQKLDLAVEQAARDNADARLLMLHPGIGPVISLAFVLTLGDVSRFESSRQVVSYLGLNPAEYSSGEHRRLGRISKQGNVFMRMLLVQGAQTAVRGDEALARQYRRLAAKKNRATAKVMVARKLAVRMFWILKTKAQYPEVVRMQGSSSHSVVNITDRLCERPASQQS

SEQ ID NO: 171329 - protein, 401 aa, unidentified
MQQDQQHDSVDVFVGVDVGKGQHHAVALDRNGKRLYNKAMPNDEAKLRALISELRAHGRLLFVVDQPATIGALPVAIARDEGVMVAYLPGLAMRRIADLHAGEAKTDARDAAIIAEAARSMPHTLRSLRLADEPLAELTMLCGFDDDLAAQITQTSNRIRGLLTQIHPALERVLGPRLDHPAVLDLLERYPSPATLAAASEKTLANRLTKLAPRMGKNLAAEIVQALNEQAVIVPGTQAATIVMPRLAQQLAALRKQRDEVASEVERLVLAHPLWPVLTSMPGVGVRTAARLLTEVAHKAFASAAHLAAYAGLAPVTRRSGSSIRGEHPSRRGNKVLKRALFLSAFAALRDPISRAYYTRKVEQGKRHNQALIALARRRCDVLFAMLRDGTIYQPKAAANA

SEQ ID NO: 171330 - protein, 312 aa, unidentified
MISHTIGIDVSKDTLDAHCLDDGKSRQFTNTNAGLSALLRWLDESQVDLVAFEPTGPYHRKLEQALVDAKQPYTKVNPLRARRFAEGCGMLAKTDRIDAGILARMAALLDLKPQPRTEEKITELRDLNVARGALIKDRTAAKNRQKNLTQPLLKRHNSERLAQIKRQLDAIEKAIAEIFASNRELQRRLEIVTSIPGISAVTAFTLLIEMPELGTLEARQAASLAGLAPVTRQSGRWKGRAHIHGGRANLRHALYMPALVAARFNQPMKTKYQALIAAGKPGKVALTAIMRSLIVLANALLRDNRKWTHTRA

SEQ ID NO: 171331 - protein, 319 aa, unidentified
MFVGIDVAKAELVVGVRPTGTGWTAVNDAQGVRDLVTRIQALGPTLIVLEATGGSELLCAAALAAAGLSVVVVNPRQVRDFARATGQLAKTDRIDAEILARFADTVRPEIRTLPTVEAQALDALLTRRRHLLEMLGAERNRLGQVCGSGKKPVKKSLTTHITFLERAVARADAALDAAIVRSAIWKAQDALLRSVPGVGPILSRTLLADVPEPGRLSRREIARLAGVAPLSRDDGTIRGRRFVQGGRAPVRAVLYMVAIMAARRTPLITAFSARLVAAGKPKKLALVACMRKLLTVFDVMVRTTTPWNPEFAAMSVATA

SEQ ID NO: 171332 - protein, 347 aa, unidentified
MLYVGVDLHKDQLTVVGKNAPGEEVLKTRIPCRCVRRVQAFFEGLPRPFKVAVEAVGFYEWFWDLVEPLADQMILANATEVRHRSPAEPKTDYRDARRLAELLRQGLFDLDHHLRCYVPDRELRHLRHLTRRRNNLTRRLVAEKNSFRRITLRHNLAGPEKLDSLSGARWTETYTEPLPDDERDLPRQLVDAMAMFERHRTDLERRIAQLVKTRPDGQQTAQTLGSLPGFGPVVTWTLLAEIGHFARFDRPEELVNYVGLDPRVFQSDATIRHGRITKTGPRDARWVLIQAAWVAAAHDPRCQTLFRRIAKRAGRKKAAVALARKLLVWAWYLIRSGQSYQTNRRSA

SEQ ID NO: 171333 - protein, 424 aa, unidentified
MKKDISKTTKTQKQGNGKRRQLRETKRNVAALKTAKKRKAKRSEVEREVKEDASHAGEEGQAVVEFKAGEGEGYTIGIDLGDKRSRYCILDKEGKIVRESSVATLPASLKTVFSKLAGCRLAMEVGTHSPWVSRLLTALGHEVIVANAREVPLIYKSRRKNDKLDAEKLARLARLDPKLLKGIRHRGAEGQGDLLLIRARAQVVETRTGLMNMVRGLVKSRGERLPGCTSEGFVVELLEGVDEAAVRALKPVMVLIEQMTATIKEYDKQVEEMGKKHAEIARLDEIKGVGPLIAATYVLTIEDPERFGRSRDVGGYLGLEPGQSDSGESQPQKRITKAGDGYMRYLLVQGEHYILGPNGPDTELRRWGLKLGSSGGDRGKKRAVVAVARKLAILLLVLWKTGAKYEPLRNSDKQEKQDKQKVAA

SEQ ID NO: 171334 - protein, 424 aa, unidentified
MQNTAAMKRKQVPEGYLVVGVDPHKKRHAAVAITQDFTTQAKFKFDNTRGGLETMLDRAKVEMVKSGCRGVMFAIETGGHYWRNVAYFLDEQGIPFRFINQFTLKRRREGKDLNRRKNDYRDSEVAAQLLCTGEFTESKLPQGVYAELRTAHNAYRRLVKERTRITNLLKGLLDALFPEFTHVFKDPCALTALSVLSTCSIPKVIAGMTEDEFVAAIEAQHKGRRLMRKKLRALHYSAKTSIGIDAGARSLSSEIAFLVEKLKLIRGHICTIERTLVRLVDETEEGKYLLSIRGLNYIAVAGLLAELGCFKAYRSARQMIKMAGTNPTESESAGKKRARTPMSKQGRPVLRYCAWTSVIPMLRFNEDFRAWAKQRRERPVHANPLGGREVVGAALNRLLRLAFAMVKNQTYYQVSKSELTLVAV

SEQ ID NO: 171335 - protein, 395 aa, unidentified
MEVLHARCCGIDLHKRSITVCVLIRESGRKEQKHLREFATTTSEILNCADWLQSLGVTHVAMESTGVYWRPVWNLLEGQFDLLLANATHMRNVPGRKTDIKDSEWIAQLLQHGLLKPSFVPDTVLRDLRELSRDRTSLVAERSRLKNRIQKILEEANIKLGSVASDVLGKSGRAMLAAMIDGKENPQQLADLALGQLRLKIPQLVEALRGRVRAVHRFRLKQQLARVDFIEAQIAQLEAEMEKQNEPFEEAVSLLAEIPGFDRTTAWSVIAEIGINMDQFPSADHLASRAGVCPGNNESGGKRLSGKTRKGSRWLRQKLCQSAWCASRCKNGYFTAFFQRIAAHRGRKRAIVAVSHSLLVAAITCSNADVIFTTWGSVTSISTITKNLPAISSNG

SEQ ID NO: 171336 - protein, 348 aa, unidentified
MKKVVAGMDLHSNNVVIGVMDLDGKRVASGKVLCDLKEVVKFLAPYKQRLEQVAVESTYNWYWLVDGLQARKYPVVLANPAGMAQYSGIKHADDTNDAFFLAELVRLKILPTGHIYDAKLRPVRDLLRRRLMLVHHRTALMLSFKSLYTRTTGQEMTLSELKAMEIKEAQNLYEHPANQMIAGMQIKHIEQLSESIEKIEKAVLASARELPCYAKLATLPGVGRILGMTITMEVGDIKRFAEPGNFASYCRTVAAHRVSNSKKKGENNSKCGNKYLAWAFVEAANFARRYDEQCRKWHDRKTAKTSSVIATKALACKLAKAAWHLMSQGVDYDSRRVFGEPGKAKAKQ

SEQ ID NO: 171337 - protein, 420 aa, unidentified
MRNAGIHANSLLEVRRMYNAVGIDVSKGKSTVAVLQPGGTVIRKPFDVSHTSQNLNELADYLSSLDGTTKIVMECTGRYHEPMVKALSEAGLFVSIVNPHLIKNFGNNSLRKVKSDPADARKIARYTLDNWTELRQYSGMDNTRTQLKTLNSQFSFFMKQKVAAKANLIALLDNTYPGVNKLFDSPTREDGSEKWVDYAYSFWHADCVRKIGLKAFTERYKSFCKKHHYIFQQDKPEKLFNASKELVAVFLKEKTYKLLIQQSIQQSNLASEHVERLRREMNELASTLPEYSTVMGIYGVGKTYGPQLIAEIGDVSRFTHREALTAFAGVDPGVDESGQHKSKSNRASKVGSARLRKTLFQIMTTLLQNAPEADPVYRFLDKKRSQGKPYYVYMTAGANKFLRIYYGKVKECLRNLEQTE

SEQ ID NO: 171338 - protein, 424 aa, unidentified
MATRRRTNKVDINALVDLYERCAGIDVHKETVTVCVIRPGTDGSAQGEMATYGTTTRELRQLSQWLQECGVTHAVMESTGVYWRPVWQILETGGFRLFLANAKQVRNMPGRKTDQADAVWLATLLRKGLIKGSFIAPPQIRALRDLCRSRASLVHDRTRVVQRIEKVLEEANIKLDTVASDLMGVGSRMMLEELIQGETDTTKIAELALGRMRSKIPQLVGALEGYFRPHQTFLLKQLLSQFDDLCRRIERFEQQIEEYSRPFDKQVARLDSVPGIDRLSAAAILSETGVDMDPFPTPQQFCRWATIAPGNNKTAGKQRSGKIGRGNRWLRGSLTQCAWAATHDKNSYFAAQYHRLLHRGKRRALVGVGHSMIAAIWHMLRRDVEYRELGADYFEKQNLEGLKKTYLKKLERLGFKVSLEPVAA

SEQ ID NO: 171339 - protein, 360 aa, unidentified
MKKVSRELPKMEAGCAKPEMTVGLDMGDRYSHYCLLNADGQVVEEGRMQSTEAALRRHFEAEPCLRIALECGTHSPWVSRLLIELGHQVIVANARKIPAITGSESKNDRNDAEKLARFAAYDPKLLSPLEHRSEQRQVDLNLIHARGTLVRARTMIVNALRGLVKSAGGRLPCCSTESLPDRAGTAIPSALTAVATPLVEQIALLNAQIGGMDKQVEKLAVKYPEIGLLRTVPGVGPIVAAAYVLTLDRPDAASNRSAGAFVGLRPGQSQSGDSDPQRRISKTGDSCLRSLLVQSAQYILGRFGPDSELRRWGLKLAAAGGKRGKKRAIVAVARKLAVVLHSMWRSGQRFQPFPQAAMAA

SEQ ID NO: 171340 - protein, 300 aa, unidentified
MLDTTTFVGLDVHARSIKAVSLDVMTGEVRAATFGYDAGAVAEWVRSVDPKARCVYESGVTGFDLQKRLSGLGVGCVVGAVSKMIKPSADRRRKNDRNDAEFLARMLSVGNVVEVWVPDDECEAARDLTRALEDARDDLSRAKQRLSKFLLRHGLAFDERTPTGRRKGNWTRAHWSWIESIRFAEGADNDVLAYYVDAVRRAAEEKARLEGLVEAEARKPRWRRRVDSLRCLKGVDTASAADLVFEAGEFSRFGNARSFAAWVGLTPSEHSSGESDRRGAITKAGNKHLRKALVEARGTT

SEQ ID NO: 171341 - protein, 410 aa, unidentified
MRIVGMDIHRVAAEAVALLDGKLVKLGRIPMLRERLEEFARTQLTHDDHVIVEATGNAAAVVEVLAPHVDRVVIANPKQVRLIAHAKVKTDAIDAAVLAKLYASGFLPEVWVPDEATLALRRQVARRTQLIRQRVRLKNLIQSILHAHLIPPCPHGNLTGISGRKWIAAQRLPDDERAAVQRHLAQIDLIEGSLKDVEADIAKVAMADPAIRRLMTLPGVDMTVASGVAAAIGDVRRFDDPTKLVGYLGLNPSTRQSGEGRAYHGRITKQGRGQARGMLVEAAWAAARSPGPLRAFFQRVAAKRGKPIAAVATARKLAMIIWHMLTKGEDYIWVRPALLARKFRSIELKAGLPPEHSKRGAAYDYNIPEKRAAERVRVEAAEEEYAGFTSRWRAKPRNRPQREKKMPAPA

SEQ ID NO: 171342 - protein, 394 aa, unidentified
MFYLGIDIGKRTHVASVMNEEGKVVLKGFSFPNTTEGGEKLLTKLQSFSPSIDDFTVGMEATGHYWLAIYSFLHDRHLLIHVLNPIQTDGWRKGTEIRKRKNDIIDSVLIADLIRYGAFIETSLSDENIFSLKQLSRYRTYLVGTSSDFKRKIIAVLDQVFPEYDSVFSKIGIFGKASKEILLEYSSPEKLHKVPADTLAELLSEASRSRLGMEKAESLKQAASHSFGIKFAQGAFTFQLRSMIEQLKFLETQIKETEMEIKKIMHTLHSVIETVPGIGPINGASILGEIGDIHKFSNPAKLVAYAGLDASVTQSGEYEATHNVMSKRGSPYLRKSLFSAALVASQHDPVLKDFYQKKRSEGKHHLTAVGAVARKLCYIIHAILKKNEPYEIRQ

SEQ ID NO: 171343 - protein, 323 aa, unidentified
MNKDIKYFGIDISHLVFDVTDSDGNYHQFKNNEFGFKKFTKLLDGKSHCVMEATGYYHYQLAYHLLESGIKVSVENPLSVKRFIQMGLSKIKTDKSDSRLICAYAQQVELKLWKGNSKEEIECLQIVRALSVYTKQSTMLKNKLHGEAILGEPSKLVVRSLKRSLKQLEKEIKTLEDRLLLLVKQVHQDLLSRLETIPGIGSKTALMLVVLTGGFERFSSASELCSYAGLTPIIRQSGSSVNGRARISKIGNQKLRNLLFMCSFNACKYNKGCRDLYERIVAKGKSKKLALIAVCNKLLKQAFAIAKSGLVYDDGYRSTLVKN

SEQ ID NO: 171344 - protein, 408 aa, unidentified
MARKRTLSTLDTSIAYEAVGLDLAKEDTAIAAFGPDHEGPYLIDRMPYDKLYELLADMAPTLVAMEPCSGAHQIAEQIQELGHEVMMISGRHVQAWVKDHCNGQKTDLNDAFAILNLAYDRWLTPIRGKTREECRLLALQSSYRQLKGQRTKTMVHVEATLHAWGFPIRTGSFNQKALHELIDANREAFGDEVVETLHLMINRVHDLDHDIATMLKLLTEATQRDPRASLLRSIPGFGVLTTSRWCAVVGDIARFDSPKQTMAFIGLVPNNRITGHHTETSSGREARGQGKMSKRGDKMLRSLCILGAGALCLMVRNDRLPDCPFVASIKERLASPRPWFKVLVYVAAKLVRIATALLKYGETFSFEKAGISKAVLKQWELEQAKAAKALTARKRIVRPQARLIHEMP

SEQ ID NO: 171345 - protein, 351 aa, unidentified
MMIIGVDYHPSFQTIAFLMEETGECGEQELNHSDGQAEKFYRDLKQRGISVRVGMEATGYSRWFERLLAELGFELWIGDPAEIKAKRVKKQKFDREDARLLLRLLRENNFPQIWVPDPENRDLRQLLWHRHRLVQMRTRIMNQLHALAMNEGYRWKKKLFSEQGRMQLEKLRLAPWASRRRQELLELLDRMNPTIAELTAAVEREARKRPEAVWLMTHPGVGPLTALAYVLIIGTPTRFQRGKQIGTYVGMIPCEESSARKQRLGHISKQGNSLLRFLLVEAAQAAARIHPDWRRRYIHLAMRRHKSIAKVAMGRRLAVRLYWMWRNGCEYSSSLEFGSYAGQLGTGDGVK

SEQ ID NO: 171346 - protein, 330 aa, unidentified
MEENKKSESKGIVSVGIDVSKAKLDIALFRSDRSHVAAGFANNSDGITQLIVLLKQQRTAVTVPCVMESTGDYHLLSALMITKEGFRVNCINPLITKKYQRASIRGTKTDTIDAARLAEIGLLEDNLPLFSAENQPLVNKKVISYLSLLEKTKQQLKAGFKQLERVSQDILGVQLDLSTSQQALKELDKQMKVLKHYLVEHGPKEVKELSTIRGVSENQAAVLLSGLGDKTFSHKDQLVAFVGLDIRQRQSGQWIGKQKLSKRGSGYLRKVLFQVAWGLKQNNDTYKEYYDRLRKEGKHYTTVLLAVARKFLRFLFAFYWKKSVILQPTA

SEQ ID NO: 171347 - protein, 414 aa, unidentified
MFAVGVDVSNGRSTVAVLQTKTSTLMKPFEIPHTAEGFASLAGKLAGLDGEVRIVMEHTGRYYESFARAMHSAGFFVSAINPLAIKNYQDGINIRKVKTDKADAMKIARFALDKWEILPQYTPMDTIRYDLKTMHRQFQLSSKTKTALSNNLVALLEQSYPGANRYFDSPARPDGSQKWVDYVDAFWHVDCVAKVSQSAFVERYRKWCKRHGYHFSQQTAIDLHTDARQKFALVPKSDTCKLLVREAVSQLNAVSRTVETYRTEMDRLASQLPEYETVMAMTGVGKSMGPQLMAEIGDIRRFPHQKSIVGFAGTDPIKDDSGDKVSDSKPSSKRGSPHLRKTLFVIMSILLQLHPQDDPVYQFLDKKRSEGKPYYVYMTAGMTKFLRIYYGKVRDCLKEQGLWEQTPDAPGMAD

SEQ ID NO: 171348 - protein, 462 aa, unidentified
MKHRKREREAKKERDSISLLERIQPDAAGIDCGQNSHFVAVPPERDSQPVREFRTFTGELYRLADWLAQCGVKTVAMESTGVYWIPLYEILEQRGFQVVLVNARDVHNVPGRKSDVQDCEWLRELHSVGLLRASFRPSAAIVPLRAYLRQRETLVQETSTRILRMQKALTEMNLMLHVVVTDITGQTGLRIVRSILAGERDPERLAQHRDPRCRASHAEIVAALTGNYRAEHLFALKQNFAAYEFLLQQITECDSEIEALLSKLADRQPPPTAPLPDARSKQVSKHTPAFDVRSPLHRLTGGTDLSQIDSIGPHAALQLIAEIGTDMRRWPSEKHFTSWLTLAPSNKISGGRLLSSKTRPSANRAAVILRRCAMSLTRSATALGAFYRRLAARVGKPVAITATARKLAVIVYRVLSGNLVYNDPGATAYHQLHSARELKSLRKRARLLGFHLVDQTTGEVSV

SEQ ID NO: 171349 - protein, 385 aa, unidentified
MSLKQFVPLDFDVFAGLDVDGSGISVTYLNHQGFIRSLRIPYSADNLVNYVRKHFPGQRVAFAYESGPTGYGLYDDLTRNGYFCIIACAARIPRVPGLEIKTNKRDSRKIAESLRGGQLNSIHIPSPEYRNLRHLVQLRDTYKKQITANKSRIRMLLLFEGIKLDTPEHTTPWTKSFLTTLETIPCSTVVRFKLNSLLSNIYYNKEQLLCTMRQIRPFCKENPEINHNVDLLITIPGIGFTTAVELLARIGDWRLISNARQIACFLGLVPRESSTGDTIRKGPITCAGSSRTRNKLIQGAWAAIRKDAELNDFYTRISSSGNRDYAKKKAIVGVARKLSTRVFSVLHNQKPYVIRKTVQTEPNIKTNPPQGTARNVIEQNVCFTR

SEQ ID NO: 171350 - protein, 317 aa, unidentified
MAQKGTIVGIDVAKGKIDAAIRFGAEASFANSAEGRRELLAWLKEHGVCKAVMEASGGYEKSWATLLRGAAVEVVITDPNRVRHFAKSAGQLAKNDPIDARMIAWFGEVFGHASRQPHDDERQELDQIVTARLGIGRLKEQIENWGEHEQPKAVQKAQQALLKAVAIQLAKLETIIAAKIDKTERFAQRAEIIQSVPGLAGTAAAGLIAFLPELGLVDRQAAAALLGVAPFDADSGKRRGERHIQGGRHKLRKLLFMPVLSAATQHNPVLKACYQRLIAKGKKAKVALIACMRKLIGILNTMLARGEKWDPARHAIA

SEQ ID NO: 171351 - protein, 410 aa, unidentified
MPENIAGIDVHKKLLVVIIADPAKPDVVLQSRRFGTGSAELQHLSAWLCQYGVVQAVMESTAQYWKPVWMELEPHMQLHLAQAQSNKAPKGRKSDLADAKRLVRRFVAGELMLSFIPEPEQRAWRMVTRGRLQLVRERVQLQNQIESLLEEGRVKLSSVITDLLGASGRRILRAMAKGESRPETLAAMGDKSLKCGLPALVDALTGSMGDIHRQLLAQHLDRIELIDRQIEELNKLAAARMQQYQDAVTRLIEIPGIGAEAAQEILAEIGPEAAAFPSAQQLASWIGVCPGSNESAGENHSGRSAKGNRFLRRLLCQAAQAAARTNGSHLQSVFKRLVVRLGYVKAVWAIAHRICKIVWNILRKGARFTEFSEARNPKAIQRAIHHHLKALRRLGYSIPLVSQPAVTPEA

SEQ ID NO: 171352 - protein, 421 aa, unidentified
MSYRVAAIDIHKKVLMVVVASGADQVEDAAGEALEFECRRFGTGNAERRHMVSWLKERGVREVVMESTAQYWKPVWLELEPHFEKLHLAQAYSNKAPKGRKSDYRDAKRLARRLLADELLLSFVPEPEQRLWRTLSRSKHQLVRDRIRLQNQLEALLEEARIKLSSVISDLLGVSGRRILAALAKGTTDPAKLAELGDVHLKCSQQELMDALTGSPEPLHLQVLQLFLDRLELLDQQIQSLDALLAGELKRHEAAVIRVAQIPGFGVDSAQQIITEVGVDAETFPSAAQFSSWAGTCPGSEESAGQNQSSRSPKGNRFVRRILTQAAQAAVKKKGCHFQTVFRRLSPKLGYKGAIWAIAHRLGRLLWKILHDHISYLEQGQETNPKAKKRRAQKLAQALRKLGYQVSLTPINPQLRLEAQA

SEQ ID NO: 171353 - protein, 391 aa, unidentified
MQHYDVYAGIDVGKSFHWEYATDADGKRLVSKRVDQDEHQLDAVFTHLREGNKSVLVVVDQPKNIGALTLACAKRAGCDTMFLPGLAMRRAAGLLPGDAKTDARDAEVIAMTARTVPDALRPVSTADPDRAELDALVAWDADCLQDTTREINRLHALLVDCNPMFEKALHKNLDSPFVLALLRRFGGPWGMRKAGEKTIRSWATRQHRVPTNILTTAIQTAWAMDHKPAGTDTRESGPIPACCARITDLDAQRKHIETLINTHLKTNSDYHNLLTMPGVGIHTAASMVTMVDITRFPTCDQLASYAGIAPHTTQSGTSIKGETAARAGNKALKNALYLSAFASLKNDPTARAYYDTKRAAGKQHNTALFNLARRRLKIMFAILRDKVPYHT

SEQ ID NO: 171354 - protein, 354 aa, unidentified
MIVIAADPHKSTHTAAAVDPLTGELRGSETVSATAAGHGRLLDWGRSLDSQRVWAIEDCRHVSGSLERFLVAGGERVVRVAPKLMAGARRSLRQRGKSDQIDALAVARAAIREGLDSLPAAQLDERALEVKLLLDHREDLVGQRSDDQRRLRWHLHDLWPELSIPAGALDRECWLQKLARRLSRAPRSARVRVSRELMRSIRQRTRRERELEREIVALVSQQAPSLLEIPGCGALSAAKLLAEAAGFDRFASDAQFARLAGVAPIPASSGRTDRHRLDRGGNRQLNCALHRIAVTQGRVDADARAFLAKKAAEGKGRMEALRCLKRHLARRVWKAMRAPQKATAGRAPDTLVLT

SEQ ID NO: 171355 - protein, 373 aa, unidentified
MNNNTVYVGMDVHKESFSLCCYTNEKELAEYPQKVDAHFSKVINYIEAMRFHYGDDALFICGYEAGCLGFTLYHQLTNHGIKCVILAPTTMLLQRGKKKVKTDKRDAALIARCLAHHDYSPVHIPTDQDEQTKEYLRMRDDHKLALKKIKQQILSFCLRHNYRYDAARSHWTQAHLAWLRSLKPEGIYKEILDEYLLTFDQLSDKLERLDQRIEELASGDAYRENVHKLTCFMGIKTITALAVLTEVGDFKRFSSARNFASYIGLTPGEDSSGDDQNHLGITKAGNRHVRTLLIESAQCYTRGHIGFKSKALKARQQGNDSAVIAYADKANERLRRRYYKMVLNNNKKPNVAKTAIARELACFMWGMVTGATA

SEQ ID NO: 171356 - protein, 393 aa, unidentified
MGSDKREFTSLVHTPDAIDEWAGTLRQRFAGHPVAVCLELNNGPLVYALRTYELLSWFPVNPLSLAKYREAFTPSHAKDDPTDAELMLELLLTQRDTLPPLNPQSPEMRALAQLVDHRRRLVGDTGRLTHRLTRALKNYFPHVLHWFDDKGTTIFCDFLAQWPTLKAVQLARRAPLERFCRNHHVRDADVLDQRIQAIKSATPLTTDEGLIAPTALLVQALVSQLRVTLRAIEDFDKAIAPRAQSHPDFPFFAALPGAGAVFAPRLLVAFGEQRARDTSADELPKYAGIAPVTERRGNTCWGHWRLQCPTCLRQTFVEWAAESTRHSFWAGAYDQQQRAKGKSHQAAVRALACKWLRILFRCWQNRTPYDESVYLRAWKRRGSPLIHNLAHSA

SEQ ID NO: 171357 - protein, 424 aa, unidentified
MNCTQNERINQVSEQTLVIGVDIASELNYARAFNWRGIEKGKVFKFFNNLEGFQAFNEWAHQVMSANKLTNLMVAAEPTGHYWFGLADYLKDEKLKLVLVNPFHVNRAKELDDNHPSKTDAKDPKTIAKLVIEGRYMEPYIPEGVYADLRIMYNCRQKVTKAMISLENQLKRWFRIYFPEYLSVFGNISGQGSMAVLEKAVLPEDIISLGVDGINKLWRERKLRAVGMKRAESLYEAAVKSIGRREGSVGGRAEFRMLWEDYCHKMEQMEKLNIELESLLHKVPQAEEVLKMKGIGVVSVAGFFAEVGDLRRFESPKQIQKLAGLAIRENSSGKHKGQTTISKRGRARLRAVLFNAAITLVGRNGAFKSIHEYYIGRKANPLKKKQSIVAVSCKLIRIIYAICRHKEAYDEAKMLRDIRREQLA

SEQ ID NO: 171358 - protein, 343 aa, unidentified
MQAVKTIGLDIAKSGFQVHGVDADGQVVFRRQLKRRNVLAFFQKVPSCLVGMEACATSHHWSRELQALGHTVRLMPPAYVKPYVKRQKNDATDAEAICEAVTRANMRFVATKTPEQQSGLMLHRTRHLFIRQQTAVINAIRAHLAEFGIVAPVGRNGLEQLLNVVADAGDKRLPEVARTCLMALGTHLRALKAKLLELDRMITAWHRSNETSKRLDAIPGVGHVLATALVASIADPKVFRSGRDFSAWIGLVPKQHSSGGKDRLGSISKQGDRYLRSLFTAGALAVIRYAKIYGTKHRPWLTALLARRPTKVAAIALANKLARMAWAMMSRGERYKEPVALAA

SEQ ID NO: 171359 - protein, 387 aa, unidentified
MPQPNDLSRSLVALDQDSTIIAVVEMSQSSWLVAGVLPGIERQPRKKLEPNAERLLGLLHRWRDEAVRAGKKITRIALAFEAGRDGFWLARWLRARGVEAHVIHPSSVAVSREHRRAKTDRLDTELLKRGFLGWLRGERGHCSMARVPTIAEEDAKRPNRERECLVGERTRIVNRMKATLARLGIRNFKPTLRQTAERLATVHIPEGMPLPPNVSAELQRDMARLRFVVSQIREIEEARQKRLEQEPETGSHAMVQLLARVVGVGIETADMLVHEVLSRPMRDWKAVARYAGLTGSPDESGAKRREQGLARAGNARVRRGMIQLAWRFLRFQKQSALALWYQARTADSRPGTRKTMIVALARKLLIALWRLVTTGETLEGVILRPAG

SEQ ID NO: 171360 - protein, 344 aa, unidentified
MTYYAGLDVSLRTVNICVINDQGEFIAETKVDSEVTDVVAYFDGLDLDILSVGLEAGTMTQFLTYGLQSAGFEVVCMEARQVKAALSAMRNKTDKNDARGIAQLLRSGWYSPVHIKSMASHRIRLLLSSRKAVLSKCIDLENEIRGLFKVFGIKLPPKLGHGSFDPAVRDIIETDVTLSESLLPLLDARLVLYHCFRKLDNRTRHMAHADVVCQLLMSAPGVGFVTALTYKAGVDDPTRFKHSRTVAAHFGLTPRRFQSGEIDIEGHISRCGDRDVRSTLYTAANALMTRSSKWSSLKVWGMQLAKTRGHRRAVIAVARKLAVILHRMWIDDTQFQWGSEGARS

SEQ ID NO: 171361 - protein, 431 aa, unidentified
MRSRDTQGADHTGATSLKIPWGGGERPALWQSEVAHPPTPEAIMQIAAVRPQAPTAIRTDLGAIFVSLELSRSTWLITSLAPGGGEKMSKHSVRGGDVAGLLERFVQLHEKARARTRQCFRIIVIHEAGLDGFWIHRVLQAEGIESHVVDPASIATSRRRRRAKTDKIDGEALVRALLAYKRGEPRVCAMVKVLTPEEEDRRRLCRERKVLTAERVRHVNRVKGLLFAQGITGYEPRRRDRRERLEELQTGDGRRLPEHLKAQVRRELDRLELLLEQIKAVEVERDVLLAAEYTVTPAPAAMLLDIKGIGPEFAAILWSEGLFRHFDNRRQVAAYAGLAPTPWQSGSVNREQGVSKAGNPRLRTTLIQVAWLWLRHQPDSALTHWFHERVRLNGGRLRKTTIVALARKLLVALWKYVTAGVVIEGAVMKTA

SEQ ID NO: 171362 - protein, 426 aa, unidentified
MNYKQNEKIIQVTEKTLVVGVDIAKELHYARAFNFRRIELDKVISFRNDLNGFKNFKGWIEKVMIENGLDKVIIGFEPTGHYWYNLAEYCRNNDLKYVMVNPFHVKRSKELDDNSQTKNDRKDPKTIAKLVTDGRYFETYVATGIYAELRNVVKVYEHVTGCKSVVDNKITQWLDNYFPEFTTVFGDWEGKTAMITLNSFPLPSMIVELGEIKVLETWKKEIKQGVGKKRAHKLFEMAKDSVGCTEGLKMAVRELKYLLSEYKMYLEQLEEIKVEMEELLNQVSGAKEVLGIKGIGIVSAASIIAEIGDISRFEDARQIQKYAGLSLIENSSGKHRGQTTISKRGRKRLRSVLFRVILPMVSNNQEFKELHLYYTTRKDNPLKKKQSLILLCCKLIRIIFVMIKKQIPYDGNKLMKDIKRPAKIAA

SEQ ID NO: 171363 - protein, 316 aa, unidentified
MSKVERAVGIDVSKGPLDVAILPEGEVWSVTNDEEGITQVVKRLKSLRPRLVVLEATGGMEKAVVGAAATARLPVVVVNPRQVRDFAKSVGALAKTDAIDARVLARFAEAVRSEVRPFKDKEASQFSALLARRRQLVEMLTAEKNRLGTAPQAIHPSIEEHIEWLEQRLTDINGKLKKTIKQSPVWRAKEQLLRTAPGVGPVLSATLVAGLPELGALNRKQIAALVGVAPFNRDSGKYRGRRCIWGGRGSIRAVLYMATLAATRFNPVIRAFYLRLCAAGKERKVALTACMRKLLTILNAMAKTGTPWQLRCEQTT

SEQ ID NO: 171364 - protein, 467 aa, unidentified
MSTKVRQRRRVRRAAKQAEDGQPILNTTLHPDAAGIDIGAEELVAAVPPGRCAGDTVRSFSSFTSGVFALRDWLLECGVTTAALESTGNYWITTYSVLEDAGIEVCLVNARHVKGVPGKKTDVQDAQWLQQLHAAGLLRKSFRPAKDIVPLRYLMRHRAELVGESARQIHLMQKVLMEMNLHIQHVFSDIDGASAQRIIESILAGERDAAKLAKLRDDRCRSSEATIIEALKGDYREEYLFVLKQCKTRWEQTLQAIAECDIQIAVLSARVAVGTEALGTLPAPQRKKQHSRGKNSTAAPVFSEAWRFYGVDLSSVPGVGAGTLAILMSELGTGEQLKKSFRSAEAFASWLGLCPDNRISGGKVLKAKTRRINSRVAAALRMAGQAVRNSQNKLGEYCRRMKSRLGKAEGITAVAHKLARILFALITRRVPYDENEAFKQTPATQKRRMNNLQKQASQMGLRLVPAS

SEQ ID NO: 171365 - protein, 309 aa, unidentified
MKEQLVYLGVDVAKAYLDTMIGKKKRRLPNNALGHRELIQWIKQSGAPVQVICEPSGGYERGLIRALVRGQIPVSLVPANRVRQFARAAGILAKTDRIDAGVLCAFGQAMKPAILTGSRLEQEKLRELESQRRHLSRLLVMEQNRGARLSDASVLRLNRSLVNQIKKQTEKLDLLIKNKINQSPELSTKEKKLTAISGVGARTAALLLAQMPELGQLNRREVAALVGVAPFNRDSGRMRGKRAIYGGRRFVRHGLYMAALVAARHNPTLRAFYQRLRAAGKPAKLALTATMRKLLIVLNSALKSDLTYA

SEQ ID NO: 171366 - protein, 419 aa, unidentified
MSLKIVHKICCGIDVHKTFVVACIATTNDKGVTTYKRHRFSTYTAGLRELLKWLLENNCRDVCMESTGKYWIPIYNILEKECHVVLAHPKYLKAIKGKKTDKKDAKWIADLFKHDLLEGSFMPPPDIRNLRDLMRYRYKLTCFSSSEKNRLQNSLTVSNIQLASVVSDTFGKSSQNILTKILEDPSITSFELEPLIHGSMKKKLPELELAIDGFIDKHQAGKIKVIKHHYEDLSARKKDLEELILNLSIPYQTYIDLIKSMPSVKDVFTAITIISEIGVDMSQFPTSKHLCSWAGLTPTNNESAGKKKSVRISKAGCYIKPLLVQCANAVVKSEKNPEFRNRYLRIKRRRGHKKAIIAIARMILTAIYHMFKNGEIYNPEQYRKADVLPVEREITIEQAILLAQSQGYRISNHAVQSTG

SEQ ID NO: 171367 - protein, 407 aa, unidentified
MQEATQHDAVDVFVDVDVDVGVDVGKGQHHAVALDRNGKRLYNKALPNDEVKLRALIAELKTHRRLLFVVDQPSTIGALPVAVARAEGVLVAYLPGLAMRRIADLHAGEAKTDARDAAIIAEAARSMPHTLRSLRLADEQLAELTMLCGFDDDLAAQLTQTSNRIRGLLTQIHPALERVLGPRLDHPAVLDLLERYPSPSALAAANEKTLANRLTKLAPRMGKNLAAEIVQALSEQAVTVPGTQAATIVMPRLAQQLAALRKQRDEIAAEVERLVLAHPFWPVLTSMPGVGVRTAARRLTEAAPKAFATAAHLAAYVGLAPVTRRSGSSIRGEHPSRRGNKVLNRALFLSAFAALRDPVSRAYSSCKIQQGKRHNQALIALARRRCDVLFAMLRDGTIYPPKSAPNA

SEQ ID NO: 171368 - protein, 319 aa, unidentified
MATEPNQAHNQITFVGVDISKETLDVSAGGNHRTFKNSPAGFRDLLKWVRKSQAETFQIICEATGGYERSLVQALHVENVPVSVVQPARVRSLARSLGAFAKTDKIDAALLVRFGEITTPKAFTAPDRATKALTELVDFRQQILDQISVLKNQQEHLTPGPLARSSNRILRAYQAEIKLLEKTIDELMKANQGLWENFQRLVQVKGVGRYTALGVLAYFPEIGKLSRKQAAALAGLAPYNKDSGNRKGHRSIHGGRTKLRGALYMAALTAAHKNPVLSQFYTKLKANGKASKAALTAVMRKLIVLLNHLIKHPEFSLAS

SEQ ID NO: 171369 - protein, 409 aa, unidentified
MEGLIERCAGVDVHQATMVVTVRVPDGHGGRRVETHTFGAMTVDLLTLRDWLQAFGVTHVAMESTGVYWKPLYYLLEDGFRVLLVNMQHLKQVPGRKSDVRDSEWLAQLLECGLLRGSLVPPAPIRDLRDLTRYRKKQIEDRAQEVNRLHRVLEEAGLKLATVLSDVMGRSGRLMLDALLGGTTDPTVVADLARGRLRAKIPALRLALQSQFRAHHAFLIGQILAKIDFLEELIATLTEEVDRHVRPFEPVIERLMTIPGVQRRNAVTLFAETGGDMARFATAGHLCSWGAMCPGQNESAGKRRSGKTRAGNRFLRGALIESGLATTRAKETALRARYLRVKRHRGHKKAVVAVGHQILEIAYYIMRNGTTYQELGPNYFARCDRQRTVRRSVRQLEALGYRVTIEEAA

SEQ ID NO: 171370 - protein, 315 aa, unidentified
MANGVCIGIDVSKASLDVAFGSQGEVRSVANESGAIEQLAAELKQLQPDRVVMEASGGYERLLAGLLWDAGLKVVIANPRQLRQFREGMGQHAKSDRLDARMIALWAEHKRPEVRPLPDAEARELSELLGRRRQLIEMLVAERQRLASALSRPLRKELKASVGSLERRLKQLESEIETRIGKSDLWRRTRELLESVPGVSKATSFMLIAELPELGSIDRRRLASLIGLAPFVRQSGQWRGRQMIGGGRAKVRNVLYMAALSAAHWNPTLRVFYQRLLQRGAAKKKALIAVARKLLVILNAIVRDRTPWRPPCPAV

SEQ ID NO: 171371 - protein, 482 aa, unidentified
MKAKTQEKTSKDSCGPEPGHWHEMNRKQRRETMRKIQSDDLSLEVVHPDAAGIDIGNESHYVAVPPTRDSQPVRRFGCTTAELKAMAQWLKQCGIRTVAMQSTGVYWIAVYDILEAAGFEVYLVNARETKNLPGRKSDVQESQWLMKLHTYGLLRNSFRPSQEIRTMRTYWRQRNDLVQAAGRHIQRMQKALTQMNIQLANVLSDVSGMTGQAIIQAILAGERDPDKLAEFRDPRVKASKHEIARSLEGNWEEDLLFVLKQEQDGYEFCQKQMVECDRQVEQYLQQREDRSKGTPLPEEKRKGRLKKKKGNAPQFDLRGELFRMTGTDLTQIDSIDVMTATTILSEVGWDMGKWETENHFVSWLRLCPDNRISGDKIIGKGRLPTKNRVSIALKMAASTLRRSNTYLGAQFRRFRTKLGSPIAIKAMAAKLARLVYRMLRYGMKYVDQGAKFYETQHRILQVKQLKWKAAKLGFQVVQVPAA

SEQ ID NO: 171372 - protein, 426 aa, unidentified
MNCNTQNAKIASITEKTLIVGIDVGSETHYARAFDWRNYEYTKRPLEFSNTEAGFQTLKAWMEELAEKHGKTAVIPGMEPTGHYWFALGKFLQNNGMKPVHVNPHHVKKSKELDDNNPNKNDRKDPKTIAALVNEGRFSYPYMPSGIYAEIRGLSNLRVQTQEELTRIKNRLARWFAIYFPEYKDVYGDLKAVSGRMVLKAAPLPEDIIRLGAEGVNQIWRDAKLRGAGMKRARTLVSAAEHSVGSKEGPEAARMELKNLLNDIDVYTSRMEELLQRIEEKLKEIPYIDNLLAIKGIGMVTVSGFIAEVGDIERFDNPKQLQKLAGYAIVANDSGKHSGESRISYRGRKRLRYVLYEAAVSLVGKNAEFRQIHEYYRTRKENPLKKMQSVVAVACKVLRIFYAILTKGVEHDPEKLLGDIRRPQAA

SEQ ID NO: 171373 - protein, 421 aa, unidentified
MKGLRAKRVRTVKEGTLIATVDIGVANNTGYCTTLGGRSTKPFRFDNTKEGFEKFWCMTIASKNRFGCDEVLVGYESTGPYAEPLIHYLANKQVKIVQVNPMHTKKMKEVNDNSPLKTDNKDPRVIADIIRLGGALSIVVLEGDAAYLRRLNNARERNVGEQTALLNQLQQLVFLIFPEFKTVLKNMKGKAAQHILKRYTTPERIGTLSKEALGEEMRKRSIGKFGIKEAESLIGLARETVGIKEGLAGIFMDIRHILMQLEAEVRFISEIEAEMGATLERIPYSVRLLSIKGLGTVSVAGLIGEVGDFSKFSTQSEIMKLAGLDLYEISLGKRKGQRRISKRGRSLLRKILFYAAIQMIRRNGIMYDYYARLTGRGMERMRALIAVSRKLLRIIHAIVRDNRDYVGQYQTPERRVIKMAA

SEQ ID NO: 171374 - protein, 348 aa, unidentified
MKNKSFVGIDISKNVIDVSIFREDTNIKMFPHEVFNNTRKGFGDMCSWLKKSRVVLSQALFGMEFTGCYSLDLEKFLTSKNYSFCMLSTRIVKHHPMGTIDKRDKNDSAKIADFLYRYDDTECAKPYKLPSKAMQQLKQLVNERKFLVEQWTNFMNRMQMFETKEDSAMYESYIKKLNHDIEKIDQEECELMSKEEDVFDTFQNLLTIPGIGFVNATNIIAITRNFTAFDTARQYARYVGVAPCSHTSGTSVKWRARPSAHCNGQVKADLSMAALRAVEYDVEMQMFYNRKLGGRKDSDTKRKALNAVKFKLIRRMFAIGKQKRKWEVLNTSDDRKNLHIEKSKASEL

SEQ ID NO: 171375 - protein, 321 aa, unidentified
MSKIKQIIGIDVSKLTLDVYDESYGHSSYSNDVNGFKQILKRYDSNSHYVMEATGCYHQQFAMFLYNHDRSVSVVNPLIIKRFIQMKLQKLKTDKSDAKMICCYGLEQGLELWQPSPEYLNKSKRNYSAINLYLKQTTAIKNTLHSLVASGVLKGKIVQSLNRQLKSLKKEISLLELEITTLIKEFDSHLFTSLKSIPGIGNKTALLLIIHTNGFKDFESYKQVISYFGLAPMERSSGTSVRGRSRINKSGEGTLRNHLFMCSFTACTSNPQCKALYDRLVNKGKSKKLALIAVCNKLIKQAFGIAKSGLVYDKNYRSVLS

SEQ ID NO: 171376 - protein, 407 aa, unidentified
MISVGIDISKEKITVCALGQGSKIIWKPFNVSLKKTEVEKFLEKLEKIKEEVKITMEATGKYHLPILYELKEKDYFVTVINPLKMKQFCRALNFRKAKNDKIDAKQIAEYGLMYWKELEEYKIDEANYRILKELNRSYQHYMELRIDQMNYIDQTIHQTFPGIKKLIPHNSGDFSKDKLLDFLEKWWHKDLVLEKTEEEFVEEYKTWAKEKRYHPNANKAKTIYKIAEDSISTQPSHNSKLETNIREGINLIKQINQILNRILSQMIEISEPLEEYKEAKKFSGISEKLAVQIVAEFGDLSKFKNKKSLISFIGIDAPPYESGNFKADQRKISKRGNAILRKVGYQAMKCMMSAKNQENEIYKYMIKKEKEGKAKKVCKFAGLNKFLRIYYARVMESKAEKKELKVA

SEQ ID NO: 171377 - protein, 344 aa, unidentified
MEHYAGLDVSLELTSVCIVDAQGGIVCETKVASEPETLIRLLSDQELEIVRVGLEAGPLSQWLHAGLITAGFDAVLLETRHVKAALSAMTVKTDRRDARGIAQLLRLGWYRSVHAKSANAQEVRAVLTARKLIQAKLLDLESGIRGVLRGFGLKVGAVSRGRFAARILELVDGNAILETAIGSMLAARTALETEFKRLHRELLTLVRDDAVCRQLMSVPGVGAIVAITFKSGVDDPSRFRRSRDVGPHFGLTPRKYQSGELDVTGSISKVGDRMVRTALYEAASVMLTRTVRMSPLKSWAMGVAKRRGTKKARVALARKLGVILHRMWVDGTSFRWSNDAAVTA

SEQ ID NO: 171378 - protein, 318 aa, unidentified
MNTASNQNIYISVDTGKAQLDIYVRPTAHFFSVPNTDKGIKDALKIIKPYQPERIIIEATGRLEMPFVIACIEANLPIVRANPVHIKRFAGAIGRRAKNDRLDAELIAHYGDAIKPEITIIKAENIRLMSDLVIRRNQLLSMQTMEKNRLQILPKTLHSTIKPMLTAIKNQITNIEQKLVKLIEVCPEYQTKNTLLQSVPGIGSIAAASIISNVPELGYITNKQAASLIGVAPVTKESGRYKGKRVIQGGRAQVRTVLYMAMMSAMQCNPVFKATYTRLVAAGKPKKVAIIACVRKMVVILNSMLRDGVMWDKNLAKI

SEQ ID NO: 171379 - protein, 338 aa, unidentified
MIVVGLDVHKHSLTAVAIDELGRPVAEHASAAHGEAVVEWARSLDEKRLWAVEDCRHVTRNLERTLIEAGEWLVRVPPRLTAPQRRRGRVRGKSDRIDALAVARAALQEPDLDRPRAGEETLRELKLLVDHRDDLVAERRRCQQRLRWHLHELDPTLTVPLGALDRAVWLDRLGRQLARRERSTQVRVARDLVGRCKTLTRSVASLDRELEARTKTLAPRLLELAGCGALSAAKLLCEIGPIDRFASDAQLARHVGVAPLDASSGKHQRHRLDRGGNRQLNCALHRIAVTQGRVHPPARAYLERKQSEGKTRREAIRCLKRQLARTVYTTLKNEVLLT

SEQ ID NO: 171380 - protein, 347 aa, unidentified
MARSTVHAVTAIGIDMGKTTLHMVGLDSRGAIVAREKVSRGRIASRLANLPPCLIGIEAGMATHYVARELAALGHDVKQVPPTYAKPFRQGHKNDFRDAHAVAEAVQRPTTRFVPVKTDEQLDLQALHRVRSRLVSERTAVINQMRGFLLERGIIVRQGLRFLRQLLPDILAKRTDVLSPRMIRIVIDLAGDWRQLDERIETVTDEIETLAKSDDSCRRVMTVPGIGPIISSAMVAAIGSGAAFAKGRDYSAWLGLVPKQMSTGDRTILGHISKRGNGYLRMLFIQAARVILVRPANWPKHDFGAWLVRAAQRLHPNVLAVALANKLARIAWTVLAQERSYEARVMK

SEQ ID NO: 171381 - protein, 413 aa, unidentified
MEQGLITAVGVDVSKGKSMVAVRRPGGQIVMLPIQVNHTAEELAGLAERLQGFGGDIRIIMEHTGMYWRPIAHSLKEAGFFVSVVNAILIHNFSDNSLRKVKTDKADALKIANYGLTFWTELRDFSDEDETRQMLKMQCRLYERTQKTSVELRNGLISLLDQTFPGINEILPAHYCTKRGHYKWVDVSKRFWHKDCVKKLSESAFTNTYQKWCKKEGYRFSRIEAEKIYSAAQNTVATFPQNESTKTLIVQAVDCLNAVYESMAVLRTEMKRLASLLPEYEVVMAMQGAGDVTGPKLMAEIGDVRRFTNKNALVAFAGVDAPPFQSGSFEAKSRHVSKRGSPHLRRTLFQVMSVVLQRSSTDNPIYSFMDKKRAEGKHFYVYTVAGAAKFLRVYYARVKEYLLALETKQETAA

SEQ ID NO: 171382 - protein, 344 aa, unidentified
MTNRSQVVVEVFAGLDVSAREISVARRQGKEEKPVVASFANNASGHKALLAYLLEGTERVRVCLEASGNYSLDLALALHAHRQVEVSLVNPRRARRFAESLGERSKTDPVDARVLCEYAARMPWVTWQPPSSLALRLRAITRAIEALGVMHTQEKNREHALASSQALPVMVIQEMQRHQRYLEHRMERLRREARRLIARDRELDRRFRLMLTVPGIGETSALQILGELVVLSDSLDARQWVAFSGIDPSQFSSGTSVEKRPRISRGGSRHLRRALYMPALVALRREPHLRAFYQRLLSRGKARLQAVVAVMRKLLHALFAMFRFNQSYDGSKLCPIELTTNVAA

SEQ ID NO: 171383 - protein, 394 aa, unidentified
MSQKFSSAIAVVGIDIGKNSFHVVGHDRRAAIVPRQKWSRGQVEARLANPPPCLIGLEAYVGAHHLSRKLRVLGHNARLMPAKYVRPCSKGQKNDFRDAEAIDEAVQRPTMKFLATKSADQLDLQALHRVRERLVSQRTGIINQIRAFLLQRRIAVRQWLRFLRAELPSILATRTDVLSSHILRLVEDLAGDWRRLDARIEVLSCEIETFARQGQHCDRLMTVPGIGPIISSAMAAAIGTGDMFSKGRDFGAWLGLVPKQISTGDRTTVPGWCSWHSALRMRSGSSGHSLRRNRRLPRKRFNGLRCSTPMRIASAVCPAAHRAAVRQTDTRPLIEDFKSWFKARLLEVSKKSGRGKDIRYTLNHWGGLIDDGRIETDSKTVERSIKPIGLGRKN

SEQ ID NO: 171384 - protein, 323 aa, unidentified
MCKVIGIDISKASFDVSFQEKGEKFSFFKFENKAQGFKKFSNLIEEGDHCIMEATGPYYLSLAHYLFEKGVKISVVNPLQVKHFVRMRMVKAKTDKKDAQMIAMYGQSEQPGLWHPDEKYVTQLQQNHTAIEGLQKQLTMLNNQLEAFSQIPDADKEVMKALKSLQKTIRLKIATLEKRMLEIVKKHYGATFSSLNTIPGIGPKTAIMLIAITNNFKKFNDIKKLSAYVGLAPRVYESGSSVKGKGHVTKMGNKYLRKLLYMCTWTAKKYNAQCKQMHERLSAKGKPEKVIKIAMANKLLRQAFAIGTNLGQYEKNYQKILVF

SEQ ID NO: 171385 - protein, 411 aa, unidentified
MDKLFVGLDVSKNDYKVCLMDGEGERIGKSFVLKNNADGSQVLAERIIAAAAKIKAEKLLIGYESTSVYGWHLQYFLADAPELRPFSPTIICFNPEVIDNHKKSLGDLPKNDHMDAFAIADRLRGRLPRSISADFRYLALQRLTRHRFHIVECIVREKNYYLSNLFLKCSGLCQSGVFSNNFGAAATGLVDELENFEQIADMPLEELAAWLVEKSREKFDDPEETAKKLQAAVKSSYRVHASMDHSLNLVLRSCLENLKSLEKQKKTIEKSIKEQVKFFENEYLCLKSVKGIGEVIAAGLIAEIAGISRFEDDDALAKFAGIYWNARQSADFTADESNLRRRGNKYLRYYFTQAADHMRIWLPEYRDFYSRKFKESKTHHHKRALILTSRKAVRLVFALLHDSKLYSPAHQ

SEQ ID NO: 171386 - protein, 416 aa, unidentified
MNPDDYAALVALDWGETEHAFALQLGEGSIEKGTIPASAETLHGWLEQLHERTGGCLVALALESGKSAVVHALFAHDWLVIYPVHPSTSERFRTAFTPSGAKDDVPDAVVLLTILTKHRDQLRPLRLDSAATRKLAALVAARRKAVDHRTQLSVELGSILKSYYPQALALCDELTSAVALDLLARWPELERLQAARPSTVQAFYAAHNSRRTEVIAGRVAFIAQARPLTTDRAVIEPAILQVQLLVAVLRTLQKHIVELEQHVAAAFAAHPEANLFRALPGAGPTLAPRLLVAFGTDRARYPSASSLQKYAGIAPVKQKSGRQLWVHWRWNAPKFLRQSFVEWAGQSVPKCAWAKAYYRQQRAAGKHHQATLRALAFKWIRILWRCWQDRVPYDEARYLAALQQRKSPLAPSLNRP

SEQ ID NO: 171387 - protein, 304 aa, unidentified
MKVFYLGVDVSKKKLDLCLRSNGKDILYDVIPNDLSSIKSWLTRTFEKFFLSEDSLVVCAEHTGQYTYPLVCATKSIGVYLCLEDAAKIKYCHGIPRGKNDKIDACRIAMYAERYNDCLQPYTASELIIQKLKNLSTERSMLVADRAKYQSQLKDQVDYMEHSIYIAKCNRVEGIINTFTDYIAQIDLEIKELINQVPVIAHQMDLLMSVDGVGERVALKMIMETDAFTSFTDPRKFCCHAGVVPFVYVSGSSQRSKNRVSNRADKSIKHLLHMAALSVSQVKNSPLKKYYDRKVEEGKIRCRF

SEQ ID NO: 171388 - protein, 346 aa, unidentified
MLYVGLDLSRRRLDFDVLLPDGGCLERGAVPPDVDGLASLVQRLDDANEPVCAAIESMSGARFVHDRLELFGWDVRIADAFKVKGLAPLACKTDKIDSWVLAELGRLSLVPEIWLPDPSVRAERERARFRLHLVRHRTALKNRVHSTLITHGVPNPTSDLFGTSGRELLARLCLPEPWRSTTQASLALIDLLDAEISGIERELRALGVEHRYIPLLITCPGIAWVLAFTITSELGDISRFPTPTKFVGYTGLCPKVDQSGERDWRGPLRKNGPNYLRWALVEAAQTALRHPSYQPTLARQTARHGRKRGRKIAAIEVGRKLAEAIWYMLSRNQPFAPAGAKQVLTA

SEQ ID NO: 171389 - protein, 357 aa, unidentified
MKSQDSNYVGIDCGKKNLEVIRINSEGSYERQQFSTTEIGISKLINWLNPNDVVGLEAGSQSFRIAKSILNKGIQVIVLNPGDLATIYQSLKKTDKEDSLKIARLIQRFPIEELPVVPIPNDEEEDNRRLCSEQENWTRQLTQSKNRLHSLFTQAGLTHITKKHLRTKANRETSVALLPSRYQKEAERILKVLDLVEQNLKLIEEEIKEALKKNQAYTQTIMSMPGIGMITSLAIMSYMGDCKRFSSAKQAAYYVGLVPRVDISGDSAYYGRIVNRGCHSIRRVIVQAAWSLVRCQHGGKIKEFYQRLYPKKGAKKSIIATSRKMIEVLYSMIRTETLFDSMPEEVLNRKLAQYGLM

SEQ ID NO: 171390 - protein, 401 aa, unidentified
MIDKEAPVLAFDVSKGSSHCQGYLSFGKPSSKPIKAAHSRSGMAAAEGISEALERKTGRKPKVVMECTGVYSKPVIRWAESSGMEVYLISPLESAKVRKSRLRPTKTDALDCGVIAEVAYTRDVRKLTAASSLYSQLYSLSRRRAAIVDRLVASKNQYRKSLDAVWPLLDETCDPFSGYAMWAVGRYRHPEALAKAKEGSIVTGLERAKVRTGAISKAAATSKLFAYAKDAISGCPADGGEVDSLLSALDDVIRDTRALDEITDRLLSLAKELPHFALIASIDGIGDALAALLCAEIGEPSRFACRNGIVAYAGLDPTILQSGKNDGLHYSITRKGNSFLRKYLYLAVGNMVMSKADNAITRFYSKKKSSGLCHKAAATAACRKLLVTIWGMLRSGSFFER

SEQ ID NO: 171391 - protein, 345 aa, unidentified
MFRPALYVGVDIGSETFTASIGKFEEKEGWRISAKPMTFGNNFDALNQFLSWLNENKAEAHNCVVCMEATGVYGEALAYFMSTNGYKMVIEAPLKVKRTFDPKGHKSDPVDSRQIAEYAYRFFDELRPWQPKKEAIEQLKTLLAVREQLVEQRTAHKNANKAIKRKVVRTPLVENVHEKSIEELTEHIKAVEKEIKRLIDDDPSSRDLHNLIVSVPGVGSILATFFVLTFYSAPEPFNPKALAAYIGICPYENTSGISRNKKSTSRRYGPSTMRRLLHLAAMSARTHCPKFKKYFLRKQAEGKPKQLILNNIKNKLVKVVCAIARTKTPYIEGHRSIHPQLLKAK

SEQ ID NO: 171392 - protein, 422 aa, unidentified
MRKHNYRSIDVKRIDRENLSMMVEGEDIVIGVDIAKEDMHAVLVDTRHQVKLTIKWKHPSETRYFVDLVSGLPARKLEAAMEPSGTYGDSLRYQFLEAGLDVFRVSPKRCHDAAEVYDGVPSYHDAKSAAIIAKLHLDGASEPWPFRPEHQRGLTAAISVMDLYEDQFHRNLNRLEALLARHWPELTEHLSLNKATLLVLLSKFGSPGKVAEHMDKARTLMRKVGGYLLAQEKIELVLKSAQNTVGVPLIEEERKALKELAGEARRAQTEAGKAKRKVEKLSCQEPAVTNMSQVVGKATAAVLVSSAGDPGRHSCASSYVKSLGLNLKERSSGKHKGRLKITKRGPSDVRRYLYLAVLRLIQEDAVFKAWYIRKVKRDGGMKMKAIIALMRKLAKALWHVSQGKTFDSSLLFNVHRLRLAAA

SEQ ID NO: 171393 - protein, 346 aa, unidentified
MREVCTIGLDIAKNKFQIHGEDNQGKKVFNKQLSRSGVLPFFANLPICLVGLEACGGAHYWAREIRKLGHEVRLIPPRQVKPFVINNKTDAADAQAICEVVRRPATRFVQIKSVEQQHLAGLHRVRERYVGNRTALVNQLRGLLQEEGVILPQGINHIRKELATILDEKTKLIVASRCLFEDLLAELRMWDEKIEEIEGRLKQMAKSDANCTRLLKIPGVGLLTATAIVAHFGDAKQFKNGRQFAACLGLTPREYSSGGKQKLLGISKRGNTYLRKLLIQGARILCTWWGRTIATPDQWRKIWLQQVIQRRGKFVAAVGQANKTARIIWNVLAKGIEYSKALPQQI

SEQ ID NO: 171394 - protein, 425 aa, unidentified
MNYKQNEKINQVKESTLVVGIDIGSTTQYARAFDWRGIELGKVFTFSNSREGFEAFKAWMQHLQDKYRKSDVIVGIEPTGHYWFDLGAYLEDEGILLVMVNPYAVKQTKELDDNSQSKNDRKDPKVIAKLVTEGRYSAPYTPDGVYADLRIMVANRKRLIREMTQIKNRFARWFAIYFPEYTDVFGDYEAQSSMLLLKKVCTPEAIVELGAEKINQIWRDARLRAVGMKRATTLCETAKRSIGLKKGSSAARYEMKLLLEDYEYKKAQLDAVMEEIEKLCRKIPESEQMLAIKGIGVITVAGFLAEVGDVRRFESPRQIQKLAGLSLRENSSGKHKGQTTISKRGRSKLRAVLFNAAIPLIAKNPEFKSLHEYYTTRANNPLKKKQSVIAISCKLIRVFYAILANGVTYDSQKLLSDIHRQPQVA

SEQ ID NO: 171395 - protein, 321 aa, unidentified
MTYVGIDVSKATFVVAYSSAKSSETKTFKNTTKGIREFIRTISPEENHCVLEATGNYSMLLVYLLSKAGFTVSMENPLKIKNFARVMLSVVKTDEIDARLIALYGERMQPAPFKLRSDSLLLLKQKRTVLRQLKKQLTANRNLEGSLKVLPFIDSKCKKVLEKTIKFLEKQIEEMEEELTSLAEIEYKKQMDLLTSIKGIGATLAAALIIATGGFTYFDNAKQLTRYLGLSPTYQQSGTSVNVKGHINRNGDAYLRSQLYIGAMASLRCNTECKACFNRLRSNGKPGKVAIVAVANKLIRQAFAVVTHEKKYIDGYKSVKP

SEQ ID NO: 171396 - protein, 326 aa, unidentified
MNIIGIDVSKQKLDCGYFRDLEAGKVKTKVWPNTPQGHQELQIWATRNLGVGLSQLTFVMEATGVYHEALAYALHEAGAQVVIVNPAQVRDYAKSLAIRTKNDRRDSVVLARFGATQPWRAWQPEPPEVRELRALLARLTALEKDLQREHNRQEKAQISAASDRVLQSIELVVEALEQEKQRLDRLIDDHIDRHPQLKQDRRLLESIPGVGRVLSRHMIAAFRSRSFSSARQMAAYLGVIPVEHTSGSSVRQRPRLSKMGSAVLRAKLYLPAVVALKYNPHAKALYERLIAQGKAKKSAIGAVMRKLVHICFGVLKHQQAYMPPVG

SEQ ID NO: 171397 - protein, 301 aa, unidentified
MPRASTVHAVIAIGIDMGKSTLHMIGLDSCGAIVLREKVSRGRIASRLANLPPCLIGIEAGMATHYVARELTALGHDVKQVPATYAKPFRQGHKNDFRDAHAVAEAVQRPTTRFVPAKTDEQLDLQALHRVRSRLVSERTAVINQIRGFLLERGIIVRQGLRFLRQLLPDILAKRADVLSPRMIRIVAELAGDWRRLDERIETVTDEIVALAKSDDSCRRVMTVPGIGPIISSAMVAAIGNGVAFARGRDFSAWLGLVPKQMSTGDRTILGRISKRGNGYLRMLFMHAGSPGYSVAASELA

SEQ ID NO: 171398 - protein, 358 aa, unidentified
MSEKKFSTNVKVLEAWARTHPKDYVYAMEAGTPTKQLFWALKEMGREVHMAHPAEVRRMMGTKKKTDRADSAFLADLLRMGRLPKAYVPDPEANEERQLLRFRMDLAKKTIVVKNQVHSVLTSAGVTTSEFSDLFGRGGSEMLRKVKLHGHQQYILDGHLKQIELLTAQIEDVERALAKLAQKNPVARTLMQMKGIDFYSALVILNEIGDVTRFPSAKHLTSYAGLVPRNYQSGDVARTGHIHKEGPKALRAIMGQCANAAVKGAGKFQRIYKRLEKRIGHQKAVIAVARRMLSVIFVLLTRGCDYEERDDANVSRKMRRMERMAKALPDVEVDRTFAGLPENARQILRGERSITDAG

SEQ ID NO: 171399 - protein, 311 aa, unidentified
MTNDTIGIDISKDHLDAHRMRDGERRRFANDKAGHGALIGWLGQPGARIVYEPTGPYHRALERRLAEIGFGLVKVNPREARRFAEATGRLAKTDRLDAAMLARMGMLLDLEARPARSAVLNDLKDLAMARAALVKNRTAAKTRAKSLILAILRRHNAEQLRQIERQIAAVEVEIMALVKADPDLARRFDILVSIPGVSATTACALIIDMPELGTLENGQAASLAGLAPVARQSGNWTGRAFIRGGRANVRQALYMPALVATRFNPDLKAKYDQLKAAGKASKLAITAIMRKLIVLANALLKDGRKWSQSLP

SEQ ID NO: 171400 - protein, 333 aa, unidentified
MTREYIGVDLQKRFFQACAISLTGDRRWEQRFPRTADGVGRCSARVSGDRALAVEAMGPTWAFVDAVVPTGAAVCVVDPRKTKLKAGHAAKTDRLEARRLADALRRDSVVRIDIPPPEIRARREVCRGRHQLVRVRTRLAQMIRAWLWRCDAGEPPGTTLYAARALAWLTMVQLSPEATSQWRRLERLYRAVHADALAADAAVKTYAAGDPIACALATITGVGPVVGLTLRAEIGDATRFPGGPALASYAGLVPRVESSGEHVYHGRITRQGSPWIRWAVVEAARYATRRPDARRRWARRLAVTKGLAKARVAMARVLCDEVIATWRGVPRNA

SEQ ID NO: 171401 - protein, 412 aa, unidentified
MRRVIGIDIHRTFGEVVFWEEGRLRHGGRIDMTRTALEGFGKALLAMDEVVIEATGNCMAVCRVLSPFVKRVVIANPLQVKAIAYARVKTDKVDAGTLASLYAAGYLPEIWVPDGGTERMRRLIARRYQVVRHRTRIKNEIHAILHAHLIAKCPHADLFNGRGRDWLARQPVPDDERLAIERHVRELDRLAEDLAILDRQIAENALDDSAIGRLLTITGVNLTVATGLMAAIGDITRFKSPEKLVSYFGLNPRVRQSGVGAAHHGRISKVGRSHARAMMVEAAWAAAKTPGPLHAFFVRIRARRGHQVAAVALARKLTVLCWHLLSKKEDYLWARPALVANKTRAMELQAGKPPAKGNRRGPAYAYNVKALRDQEMRVAEQAERSYEQFVTNWKPRPSKDRARGPLNPARLE

SEQ ID NO: 171402 - protein, 441 aa, unidentified
MAMRRRDEELVFPNSAGIDVGASSHWVAVPRDATEDPVREFGPMTDDLNAMADWLLASGVDTVALESTGVYWIPVFEVLEQRGLKVWLVDARQMKYVPGRKSDIQDCQWLQKLMSLGFLRAAWRPEGDVCVVRAVARQREILLAEQASWVQRMQKSLVQMNIQLTEVLTDVMGTTGQAIIRAIVAGERDPRALAKHRDRRVKASAEKVTKALTGNWRDEHLFVLSQALAMYDDIARHLTECDAKLQALLRALGQRNVDLGKAPRTGSKLREQFDARQILANWAGVDLTRINGLGLTAVMKILSELGPDLSRFATVKHFCSWLGLCPGTKISGGKVLSANTKRSANRVRQALKMAAMSLSRSDSALGAFYRRLCSRMDKPRANTATAHKLARMVYFMLTRGEDFVDQGQQRYEEQQRQRSIAALKRRAASLGFDINPTPVPA

SEQ ID NO: 171403 - protein, 343 aa, unidentified
MKIIRVGVDLAKSVFQVHGVDRCEKVVWRKKLGRAEWLGALLEKIEPGCEIGMEACGGAYHWARQLQKRGFTVKLIAPQFVKPYVKSNKNDANDAEAICEAMSRPNMRFVAIKSVEQQDLQAIHRIRAELCNQRRAKGNQIRGLCSEYGLVAPREMIQLRAAVPCWLEDMENGLTLRFRRMLRGLWLDLMNLELRVKELDQEIEIAAATDPVAARLQQLRGVGPIIATAIVANVGDAKQFSSGRQMAASLGLTPRQNSSGGKERLLGITKRGDAQLRTLLIHGARSVLRTAASKNDRMSRWVTHIAQTRHHNIAAVALANKTARIAWAMMTKGTDYQPGPVAV

SEQ ID NO: 171404 - protein, 343 aa, unidentified
MQAVKTIGLDIAKSVFQVHGVDADGQVVIRRKLKRRYLLAFFEKLPACLVGIEACATSHHWSRQLQALGHRVRLMPPAYVKPYVKRQKNDVADAEAICEAVTRANMRFVETKTVEQQSCLMLHRTRHLFIREQTAVINVIRAHLAEFGIVAPVGRKGVEELLRVIADPADRRIPEIARACLAALGTQLQRLKEQLLEFDRMIMAWHRSDETSRRLDEAPGIGPMLATAVVATVADPKAFRSGRNFSAWVGLVPKQHSSGGQDRLGHISKQGDRYLRGLFVAGALAVIRYAKIYGTRHRPWLTALLARRPTKVAAIALANKIARMTWAMMVKGERYKEPVALAA

SEQ ID NO: 171405 - protein, 485 aa, unidentified
MAKVKLSAFDRLRLGARLNRKERRDVEQRLSATDPGLEIVNRDAAGIDVGNESHYVAVPRGRDAQPVREFGSWTAALVEMAQWLMHCGIRTVVMQSTGVYWIAVHDVLQKHGLEVNLVDARGTKNVPGRKSDVQECQWLMRLHTYGLLRSCFLPAPEIHGIRTMWRLRDQHVKDAARCIQHMQKSLIAMNVQLHNALSDISGRSGQAIIRALLAGQRDAKTLAALRDPRCMASEEEIVHSLQGDWKADVLFELQQAVDAYDFYRQQMAKCDEQLKQHMALLPARKVETVVSSAEPAATTDRSKTSRSGKPRKPKGNQPAFDLEAELERILGVNATTIDGINVITVQTVLAEVGPDLSAWKTEAHWSSWLNLAPKRDVSGGRVIRHIREHRTNRAGNAFRMAAQTLLHSHSYLGARCRYLRAKLGGLKAVKAMARVLACLYYRLVTKGQRWVDQGIEEFNRRSEQRELAVLQRKAHKHGMQLVPTS

SEQ ID NO: 171406 - protein, 415 aa, unidentified
MSRCWNQSKIFIKGGIKMIAIGIDVSKLKSTISIIKDGVIYSKPFTIEHTIEGFHFFLNKTSSLDKENIKIVMESTGIYHLPLLSKLLENNYFVCVENPYLLKKYFDVYLRKSKNDNLDSLKIAKYCQEKWNSLKQFNIQNSTYQELNFLSRQYDQFMTLKTKSKIQLSNLLDMIFPKFSNIFNEDKNQYLLMLDILEKFYHPSLILKYTKEDFSEKILKLAQKRRVRTSVKISTYLYSLAQNILSALPQNQSTKLIIKTCIDTLRGLEIATENILTQMNKIATSLPEFEVVSSMTGVGKKTCPRLIAEIGDVNRFYSSNSLIAYAGIDVPEYQSGNFKATERHITKRGNKHLRKCGYEIIRSIKCHSNAKDTTVYNFILKKELEGKPKNVAKIAGLNKFLRIYYGKVKEVYKKI

SEQ ID NO: 171407 - protein, 403 aa, unidentified
MNAVGIDVSKGKSMVTILRPFGEIVSSPFEIKHTSSDIHSLIKLIHSIEGESRVVMEHTGRYYEALAHQLSAADLFVSAVNPKLVKDFNNDSLRKIKSDKADSVKIARYALDKWQSLEPYSITDELRAQLKVMNRQFHFYVKQKTAMKNNLIGLIDQTYPNANTYFNSPTRSDGSQKWVDFVSTYWHVDCIRKMSLNAFVEHYQNWCKRKKYAFNKSKAEEIYTKTKELVPVFPKNEITRHIIRQAIDQLNSTSVTVETIRTLMNETASKLPEYSIVMQFKGIGPSLGPQLMAEIGDVTRFTHKGALTAFAGVDPGVNESGSYAQKSVPTSKRGSSNLRKTLFQVMDVLIKTMPQDDPVYQFMDRKRTQGKPYYVYMTAGANKFLRIYYGRVKEYLSVLPDPS

SEQ ID NO: 171408 - protein, 328 aa, unidentified
MAFIGIDVGKEKLDVLWLRQSVPQKVKTRVFRNHRPQLQDVAQWLIKQTGKVPGEIHVVMEATSIYHENLAYALHGVGFRVYVANPARVKEFARSEGVLNKTDKKDSLVLALYAQEKHTRLTAWQPEAKEIRQLRSLMARLEALEKDLQREKNRHEKALATDTSERVMASIEDMIAALEAEIRKLKDDIDNHINGHPRLKDDRELLKSIPGVAEVCSVQLLALLRSRDFVSARECAAFIGVVPVQVESGSSIRRQARISKAGRSAIRQKLYMAAVTACQHNPDISALKRRMQAKGKAGMTIVVAAMRKLVHIAYGVLKHQQGYIPQAA

SEQ ID NO: 171409 - protein, 425 aa, unidentified
MNYKQNEKINQVKESTLVVGIDIGSTKQYARAFDWRGIELGKVFPFSNSREGFESFKAWMQHLQDKYKKLDAIVGIEPTGHYWFGLGAYLEDEGILLVMVNPYAVKQTKELDDNSQSKNDRKDPKVIAKLVTEGRYSAPYTPDGVYADLRIMVANRKRLIREMTQIKNRFARWFAIYFPEYTDVFGDYEAQSSMLLLKKVCTPEAIVELGAEKINQIWRDAKLRAVGMKRATTLCETAKRSIGLKKGSSAARYEMKLLLEDYEYKKAQLDAVMEEIEKLCRKIPESEQMLAIKGIGVITAAGFLAEVGDVRRFESPRQIQKLAGLSLRENSSGKHKGQTTISKRGRSNLRAVLFNAAIPLIATNREFKSLHEYYTTRANNPLKKKQSVIAISCKLIRVFYAILANGVTYDPQKMLSDIHRQPQAA

SEQ ID NO: 171410 - protein, 392 aa, unidentified
MYIIGIDIGKNHHEASIVSPEGKQIGHSLRFATTHKGADSLMNFIFKNIGNSPCVFGMEATGHYWYPIYSFLKARGYTIYVINPIQSDSLRKMYIRQTKNDSIDSFLIAEVIRFGQFTTTSMADENILAMRQLCRYRDSVISSRTEIKLRISTIIEQIFPEYEKQFSSLWLSTSMGILEKYLTPENIENAPIDELFEIIKDKSHNRLTKAKAISIKEAAADTFGIKIAQDTFSFQLKQLIDRMNFLDKQIEALDIEIMKYYEQFDCYLHTIPGIGIIGAATILAEIGDISRFKNSSALVAFAGIDPTIRQSGEFNSTHNHMSKRGSPYLRHAIFLAATTCSFHNSPLNAYYKKKRDQGKHHLTATGAVARNLTTVIYAVLRDSKPYEPKKFC

SEQ ID NO: 171411 - protein, 358 aa, unidentified
MKNEILKLSLGVDVSKETLAVCLCRLTARLTKEFEDPFEVSNDLSGFKKLVKWLLKNASSPEDIVVVMESTGIYHEALVYHLYGEGFPVSVMQSGRVKRYAQSLDQRSKTDALDSRMLAMLGCERELALWSPPDPILRQLKGLSRERSFLLKEKQMERNRLHALEHSVYKSKRELKRYGQRLKLIEKQLIEIEKEMEILVKNDPQMHQRIKHLESIPGISFKSAATVVGETLGFTGFTNAKQLTSYAGFDVVLKESGAYKGKTRISKKGNKHIRSALYMPAMSAIQWNPTLRKFYERVQPTKVKPMIALVAVERKLLVLMYSLWKNEIDYDPEHEQKKTARTEVLAAQDRSNLTLTSS

SEQ ID NO: 171412 - protein, 352 aa, unidentified
MLSIGCDAHKRYSQFEVQDQQGHVHGQTRVNHQRGAIREYLSQFPEGTAVALESVGNWYWIADEIEAAGCVPLLTHAAKAKVMMGHVNKTDKLDAAGLATLLRNGTLPSVWLPPGSVRDERELPRTRMALSGMRTAFKNRIHATLAKYALSPKDEEVSDLFSKKGRTWLEGAAKSLPPQTSRCLAQELELVDDFNDQIQVLESRMREQIQTTVNMQLLKTLPGIGDILATVIEREVGSVDRFHSPEQLASYSGTTPKVSASGGKVHYGRMRQEANHYLKWAFIEAGNVIALNHAKTSWKRKHVSRLYERIQRKKGHSVAIGAVARHLSEATFWVLTKQEPYEEPKSARPRQG

SEQ ID NO: 171413 - protein, 338 aa, unidentified
MERQYVAIDLHLNRSVVVRENEAGEKVGVTRIDNDPLALAEAIREAGEAPEVAIEATYGWYWAVDILEELGANVHLVNPSGLAWENRRVKNDYRDCCDLLDRMRLGKLPEAWIAPHEVRELRELVRFRARLVMLRTGLKAQLKAVLAKHGLRPPVKDLWGLSGPIWLDQLDLPRAYTTRIESIRDLVEVYDREIDMLEREIHRQLKDHAGYKAIQAIPGVGQTIGAIMVAEIGDVTRFANPQALCSWAGLTPKHHESDTKVRRGRITKAGSKLVRWAAIEAVSNGRGGPKLKADYHRIAERRPKNVARVAMARKLVIMVYYGLRDGHIRCLAPDQQAR

SEQ ID NO: 171414 - protein, 290 aa, unidentified
MQIKHFIGIDVSKDTLDLSVVVDGENIQHYCIKNITKEIKSTVNKIMKAFGATVDDTIFCMEHTGMYNLPLVKWLESQQGKMWLESGVHIRKTLGMVRGKNDKVDSARIAMYAFTNRHQIRLWKAPRKVIERIAALLSQRSRLIKAKKQLNTANQEQRKFLDKDIMSSLNKYTSKTVVVIVKQLEAIENEILGLLEEDEKLNRMYKIITSVNGIGFVTASYILVTTNEFININNPKKYACYSGVAPFEHSSGSSVRGRTRVSQMANKNIKKLLHMAAFSTNQMQGNLQEY

SEQ ID NO: 171415 - protein, 337 aa, unidentified
MNEIIRIGIDTSKHIFQVHGVNAAEQPVLRKTLRRGQLERFFTSLPPTLIGLEACGASHHWARLLQSLGHEVRLLPPQYVKPYVKRGKNDAADAEAICEALSRPSMRFVPVRSTQNQAELMLLTARDLLLKQKTMLINAIRGHAAEFGVTGRKGANNIAALHELIASNDAVPELAREILGQLFEQVQSLEQQARTLERKLVAWHRSNKCSRRLATIPGVGPIGATAMVMKVSDPRIFKSARHFAAWLGLTPKDHSTAGRHRLGVITRAGDEMLRRLLVNGATAVIQCARPGRSSPWLLNLLARKPKKLVAVALANKIARIAWVLMTRDEDYRHSLAA

SEQ ID NO: 171416 - protein, 356 aa, unidentified
MYNLSKLDFTGQHIYAGIDVHLKSWKVNIMTEHSSYKSFSQPPNPAVLSNYLQRNFPGATYHAAYEAGYCGFWIYDRLKELGIGCIVVNPADIPTKDKERSGKTDKVDCRKLARCLRNGELDGIYVPARANIEDRGLLRTRRSMVKKQVRCKAQIKSMLAFYGIHLPEDMIHRNRSSKFIHWIESIQMERASGNYVFKVYLYELSQLRQLVTALNRQIRILARRKEYKTNVQLLKTVPGIHTLTAMTLLTELFNIDRFPSLDKLASYIGLVPDTDSSGEKDAKKGMTNRKNRFLRFLIIEDAWAAVRQDPALLMAYERLTKKMKKTRAIIHIARKLLNRIRYVLKNQKEYVPAVVQ

SEQ ID NO: 171417 - protein, 342 aa, unidentified
MLYVGIDVAKNKHDVTALNVPGKTVLKPLTFSNNKAGFELLDLSLRQLNQDYLIALEDTGHYAFNLLNFLHEQGYKVYTYTPLLIKEFAKSLSLRKTKTDKKDAHGIALKLLSDPNREQFQHDNRQVELKILARHIHRLKKKQSDWKVQYTRCLDIIFPELDKIVGKHSEYTYQLLTCYPNPQKRLEAGFDKLIEIKRLTASKIQDILSVAPRSIGTTSPAREFEIIEIIKHYKRLIDKAETCVNDLMAEFNSVITTVTGIGGRLGAVILAEIRNIHAFDNPAQLQAFAGLDSSIYQSGQIDLAGRMIKRGSPHLRWVLIQAAKACARFSPAFKAYLKTKLE

SEQ ID NO: 171418 - protein, 342 aa, unidentified
MSIVYVGLDLGSSNFQQVALNHDGVSRVNRDFSTSEANLVKAFSDLKGEIQVHLEAGELAPWAAAVIAPLVTRVVCSHPQSNAWIAKDADKCDRIDAYKLAELLRLNRFKEVHYAPDQPRRNFKQLVQHYDEMTAQQARLKTKLKARLRMQGVIVTGERLFSATGRKEVLARVESCDLRTAITQLYSVLDQSVAAQAEARLLMLRAAQAFPEIKLFRTAPGVGPIGACRFSAYIHTPSRFSTTRKLWKYCRLSVSHRSSNGKPLRRPRLDRSGCGRLKDVSRKAFDVAVRSRHDNGFKRAYQRALETTHDATHARLTVQRKIVSTLRAMWLNQTPYCDELMR

SEQ ID NO: 171419 - protein, 487 aa, unidentified
MLPNESVHIGVDIGKFKHVAGFVSKTLLERHQHFEHCPAFTFEQSREGFRAFVERIGAYCPLEQCFILMEQTGHYHKALQQYLLELDLPVYVMHVQRRECGMIKTDKRDALGLANQLYNQLELGVQVTDKLQVVHRAIPPSGAAAQLKSFMRHRYELVNEATQRKNKLTAICDEVFPELTQVFKNPNLTVALELREKFPTPQAVATASLMELREVRKRNRPSEAEFALLQQLALQSIGTKDVARQRGLILEQTLLIKELRLIQEHLERLEEEICQIVEHCREGKILLSIPPISPLAAATILAAIGHIANFEDAGHLKSSFGWAPKRAQTGVSFDHTSLTKGGSREMKKIMYLVAWHAIKDETEWAKLYKRLVPRLCTYDERTQTYRGRGKAVGHVIGRLITLIYALRHRKMTKRSAILLLEHSHQSQSSMIQNCTGTIAPVTTNRSEKACQRTGSYKFSLEGLYVGGRRPSLLELPRRSPQPPLCRR

SEQ ID NO: 171420 - protein, 362 aa, unidentified
MTDAVLGIDVSKNTFDTNLGAGTKARSKSFANSPAGWHHLIAWLGEHKIGQVHACLEATGRHGLGIALALHEAGHVVSVVNPAQIRDFARTKLGRNKTDQVDAVHIREYAELFKPRPWTPPSPAMRRLCELQTIRAGTVAGLTEWKNRRRSGIMDDLALSLAKTTIQHFTSQLEAVDQAIAETIDNDVELSAKRDLLVSVNGVGEALAGVVLAELPGPDILGSSAAVTAYAGLNPQQHQSGISVNRPVRISKIGNAALRTALYMPALSAMRYNPAVAALVDRLKAQGRLKGKQIVIAAMRKLLVLCFGVLKTGKEFDPAMAMGKWPGVPRHSLASIAWSAQVGAGGGGQAPQPVGARISARA

SEQ ID NO: 171421 - protein, 355 aa, unidentified
MHKTECDVPKVTVGLDVGDKYSHFCFLDHDGVKVEEGRVRTTPRGIGHKFADVSRMLVVLEVGTHSPWVSRLLEDCGHEVLVANSRKLQMIYGNDQKTDSVDAEMLARVGRLDPKLLYPIRHRGAEAQADLGLIRSRDALVRARVQLVNHVRGSVKAFGGRLPSCSTPAFAHKARGHIPEELVSTLGPVLETIARLTSEIKSYDRKIGQMAREHYPETGSLSQVSGVGDLTALCFVLTLEDATRFRRSRSVGPYLGLTRRKRESGERQPQLGISKAGDEMLRRLLVGSAHYILGPFGSDCDLRRWGQQLAARGGKNGKRRAVVAVARRLAVLLHSLWVSGEVYEPLRQARLDEAA

SEQ ID NO: 171422 - protein, 476 aa, unidentified
MATPDEKPDKPTNPDKPTKPNPSRKRSLPVPVPVSAAALDVINPDAAGIDVHSDMHMVCVPADRDANPVRQFGANTADLQEIVAWLKKCRVRTIALGSTGVYWIPLFELLESEGFEVNLVEPGQLSRCGARPKTDVLDAQWIQRLHSYGLLRASFRPPDSVLALRAYWRQRQMQVRYAASHVQHMQKALEQMNVKLTEVVSDITGLTGMAIIGAILEGQRDPIQLARLRHERCHHSEEQIALALEGTWRPEHLFELRQAHELYQFHHRQITECDQQVQAELAHFPNRAGAKTHTVKPRKRGRKSNDVRFEATGPLFQALGVDLTLIEGIDVGTALVILAEIGVDVSRFPTEKHFASWLRLCPPQDESNKTKKRRGHRKGTNPVTLALRMCARSLGKTMTPLGLFYRRIRSRIGGLGAVKATAHKLACLVYRMLKYGQEYVKQSMEEYEAKMEANVLKALKRKAAAMGFELSPLPPQ

SEQ ID NO: 171423 - protein, 346 aa, unidentified
MLYAGLDLSRKRLDFHLLDGEGATIELGTAPPDADGLLGLTRRLDRHREPIRAAIESMNGARFVHDRLELAGWQVEIADAQKVKGLAPLACKTDRIDAWVLAELTRRDLVPAIWLPDPMVRAERERARWRLHLVRHRSSLKQRVHAVLLTHGKPCPVSDLFGVRGRQLLARLGLPAPWQATIEASLRLIDELEREITDSERELRRLGADHRYVPLLLTVPGIGWVLAYTIAAEIGDIGRFPSPRKLAGYTGLCPRVYQSGERDLRGPLAKQGPKYLRWALVEAATHACTAAVYRDRYQQTKARIGKQRGAKVAQIDLARRLSEAIWHMLSRDQPFAPKGATDPLAA

SEQ ID NO: 171424 - protein, 437 aa, unidentified
MENIKTLFVGMDISLYGFNIEYLDIDSNSYSSKKNKYFLNNPTGLNSFIDELYFIALKNNFTKIKIGFEATNNYGFHLPFYLSESPLLKKLKLDIYQINPKIIKNARKSYSEIPKTDYYDAYVIAERLKNGKLPPYTRFDPHYLALRFLTRARFDIIKKLVSLKSRFISMLFIKASSFTQNKIFSNTLGITSLNLLTFFDSTETIANMDINELVSFIIKYSKNHFKHPEKIAEKIKYIARESYTLNRIMHDSISYSLLTLFNQIKFLTRELKQTDKQIEKTIVTFKNDFDILNSIRGIGKVFAAGIIAELGDLSDFTSQCAIAKFSGLMWRIRQSSKYKSEETELTKTGNKYLRYYLVEAAQSVVTHNPDFQPYYQKKYNESTKHKHKRAILFVARKLIRVIYSLLKNNKLYQTPNYISNYYSTLAIKPDLYMSKSI

SEQ ID NO: 171425 - protein, 415 aa, unidentified
MEVLVDRAAGLDVHKDTVTACVRIPKPAGGRDQQVREFRTFTHDLRRLRLWLSEQRVTHVAMEATGVYWRPVWHILEDLPGVELLLVNAHHVKNVPGRKTDVSDAAWLAQLLERGLLRGSFVPPPVIARLRDLTRYRKKLVEARASETQRIQKLLEDAGIKLDSVVSDVLGKSAREMLDALIAGVRDPAKLAGMARTRMRPKIPELRLALEGRFSEHHALMLEMHLAHVDHLTASIGRIDDQVDEVMSPFGDEAQRLQTIPGVGKRTAEVIVAEIGVDMSRFPTAGHLASWAGMCPGNHQSAGKRRSGKARKGDQALRAALCEAAWAAARTKDTYLSAQFRHLRRRFGKKGDNKAVFAVGHSILVIAWHLLANECDYHDLGGDYFAQRNDADARKRYLIRQLEAMGQRVTVESAS

SEQ ID NO: 171426 - protein, 407 aa, unidentified
MLKINPLSTLYVGIDVSSKSNYVCALDFYKNKYINSSFANNQPGAEELALKILECLKEHPDITTIVAALESTSVYSIHIANYLSSCEELMRFKPYVFVLNPKCTANYKKSYIGLGKSDPIDAFVIADYARAGNIESEPWRGSQFLALKRLTRHRLHLVECMTREKTYLVSNLYLKFSELQMLEGDDQPFCDIYGATSSSVLMEYFSPEEILDSSEEDLIAFLAKKSRNRIKDISKTADLLKKAARDSYRLDKALYEPLNVSIASSFNCIETFKREIKVIDNAIEKEIKGLNPNAFIILQSIDGIGPVFAGGIIAEIGDITAFHSSDALAKYAGLTWKSNQSGDFDGEDTPMIKAGNRYLRYYLGEAANSMRKHNVEYGTYYRKKYNEVPKHQHKRACLLYTSPSPRD

SEQ ID NO: 171427 - protein, 329 aa, unidentified
MVDIADPGGTVVTVLGIDIGKADFHCALLSADGTVRAHSFPNSRAGFVRLAKWLVNRKTTRVHACLEATGGWSEELAFYLHERAHVVSIVNPLAIKAFGQSLLSRTKTDKADAELIARYCSAMKPAAWKPPSPTQRRLQQLVRRRVALSDMLVQEQNRLESPGADEIAKSIEQTIAFLQDQIAEIDDEIRSLIDDDPTLRQRRDLLESIPGIGERTAATILGEIPNITEFRSAKAIAAFAGLCPRIRRSGTSVAASWLSKVGNRAVRRALYLPAISAMRWNPLLAAWAKELRARGKRPKQIIAAVMRRLLVLAYGVLRSGKAFDVAYRA

SEQ ID NO: 171428 - protein, 360 aa, unidentified
MAKAKLVNSPSVVGGVDTHKDLHVAAVVDQNNRVLGSEFFATTRQGYRQMLAWMASFGTVERIGIECTGSYGAGLLRYLQSAEIEVLEVTAPDKMERRKRGKSDTIDAESAAHAAFSRIRTVTPKTRSGMIEALRVLKVCRKTAVAARRIALQMIQMNIVSAPDELRDQIRHLTRMQLIRTLAAWRPDVTAYRNVQDAYRIALKSLARRYLELHDEIADLDVMITSIVDELAPELIRRKAVGYECASQLLITAGDNPQRLTSESGFAALCGVSPVPVSSGKTNRHRLNRGGDRAANSALHIIAIGRLRTDTKTQEYVAKRVAEGHSKMEALRCLKRYISREVYTLLRNQNRQINSTQITT

SEQ ID NO: 171429 - protein, 343 aa, unidentified
MQMITTIGLDIAKSVFQVHGVDAAGEVVIRRQLKRRYVLAFFQKLSPCLVGIEACASSHYWSRELQALGHSVRLMPPAYVKPYVKRQKNDMADAEAICEAVTRANMRFVPTKTPEQQSCLMLHRTRHLFIRQQTAVINSIRAHLAEFGIVAPVGRKGVTELLHVVADPSDRRVPEVARACLAALGTQLLRLKQQILEFDRLIMAWHRSNQTSKRLHYIPGVGPMLATALVASVADPRTFRSGRNFSAWVGLVPKQHSSGGKDRLGSISKQGDRYLRSLFVAGALAVIRYAKIHGTKHRPWLTALLGRRPTKVAAIALANKIARMAWAMMAKGERYKQPVALAA

SEQ ID NO: 171430 - protein, 322 aa, unidentified
MDKDRKIFGVDISKDVFDVVDYCGSHHRYSNDAKGFSRFSKTLCAESLVVMEATGYYHYLLAQYLSNRGHDCAVVNPLSIKRYIQMNLSKVKTDKADAMAIRDYAVTNEVSLYSPQDSAQAECLQLFRLLENYKKQLTAVKNKQHGEEALGRPSKAVYHSLNRTRKHLEGELSMLEGRLLELVRAEYQEQITLLKSIPGLGMKTILFLIVTTGGFSKFENASQLCSYAGITPTERTSGSSIRGRARISKVGNKRLRNLLFMCSFTACQHNTACKNQYERIVAKGKSKKLALLAVSNKLLRQAFAIIETGVPYHPEYRSVLAR

SEQ ID NO: 171431 - protein, 366 aa, unidentified
MKKVSTVAARQTKNFSDWKLTIGLDLGDRSSWYCVLDEAGEVLLEQKVGTTPKAMQEVFGGMPRSRIALETGMHSPWVSRLLSELGHEVIVAHARNVRLIGESRRKDDRLDARTLARLARIDPQLLAPVKHRSAQAQSHLTVIRARAGLVRARTSLINTARGLTKSYGERLRGCNPRNMNPEKAQGLSPELHAALAPLLAGIESLSEQIREYNEQIEQLAQTSYPEVALLKQVKGVGTLIALTYLLTLEDPHRFRKSRDVGCYVGLQPGRRNSGQSEPQLHISKEGDPYLRTLLVQGAHHILGPFGADSDLRRWGLKLAERGGKNGKKRAVIAVARKLAVLLHRLWVSGEVYEALRNSNRALPAAA

SEQ ID NO: 171432 - protein, 262 aa, unidentified
MFPVGIDVSKNTLDLCMLYDGIKGRIKTRNIQNNRHSVENILRWLRLQHCSPEDVHVVMEATGVYHERLATELHDAGFQVSLANPHRSREFARGMGIMTKTDKVDAYMLACYAFLKKPHRWEPPAPEIRYLGALLRRRDVLLGDALREENRLEKYLSTDTPADIISSCRRMAQLLREEVSNIERQIKAHIKASPALRRDYTLLTSIKSVGPQLGMHMLVVLRSHNFASAEQAAAFLGVVPIEKRSGTSVRSRPRMSKIGPLS

SEQ ID NO: 171433 - protein, 488 aa, unidentified
MDEVEDEPLFADRVAGLDIGKAGVEVTVRVPGDTAGGRRRQETRTFGTTRRELLDLAAWLARWEVVKAGMEATGDYWKPVFFLLESRGLECELYNAGQVKALPGRPKTDRADSIWLAKITERGMISSSFVPPEPIRRLRTHTRYRRHLTQARTAEKQRVEKLLEDGHLKLSSVISDIHGVSGRDMLDALATGQRDPKALAQLARGSMRGKMGRLEEALDCSFFTDQHAAVLAMMLAAIDYHSTQIAALTATIETLIAPYLHQVEQIDAVHGIGRISAQDIIAEIGTDMTVFPTTAHLVSWARWSPQVKQSAGKRKGSNSTGRGNPTSARPSAKQPWAPRSSPSPAARRRALPSASAGVGEGLGRHCNDLLHLVDFGRVPSRASSPRGSWRNRGPAGGRLLARAFFLSQLVQHAGDHDLPCRAAAAAARCLWPDTHWGEAQSGCGPRAHDSAELLGIMVLGLPTGSTCAGGRRPAVHPIGRPLRRRRRR

SEQ ID NO: 171434 - protein, 400 aa, unidentified
MPVPGNRGIEYSKKPFKFSNTEAGFATFKEWILELKERHEKDKVVPGMEPTGHYWFNLGKFLQDNEMKPVLVNPHHVKKSKELDDNNPTKNDRKDPKVIAGLVREGCYMIPYLPEGVYADLRTASNIRFQLQAELTRIQNRISRWFNIYFPEYKTVYGKPDAKSGMLILKAAPLPEDILTLGIDGVNQIWRDAKLRAVGKARAKTLIEAAEHSVGSKEGAVAARMEIRMLLEDYESRNTRLQEVMVLIEELVRKIPMAEKLLEIKGVGIRTVSGFLAEVGDISRFNNPKELQKLAGLALVENSSGKHKGETTISRRGRKRLRYLLFEVAMSLVSKNQEFRELHNYYTTRRLNPLKKMQSLMAIAAKLIRVFYAMLTKGVDYDPKKMVSDIKRPAVYLQAA

SEQ ID NO: 171435 - protein, 430 aa, unidentified
MHNKNYISVGIDVGSAFSFMTILAPDETVILKPFKITHNNKGSLERAVSEIKKAEELYSLESRTFLESTGIYHFPLFCYLVDCGFNASIINPIITHSTKNGNIRKVKNDKIDSKGIAKLGLSKDIPVSQFPAKLVLELRSLTRKYYDLTDERSAHINKLKGDLHTVFPQYLDVFCDVTGKTSTMILRQYGTPDKILRGHKKTMIEKISKASRKGLAKASERYEKLCAAANAAKTFGCQIDSIYFNIFLTLDLVEKLDSALDSILNRIRQLITFNKNEKFIQQIKLLNTIPGVGFLTAVTIMCEIGDFSAFRNPKQLFAYFGLDPEVNESGKFVGTQLHMSKRGSRIARRAIFAVALASIRTKRNGEGINPYLRKYYELKSGQKPKMVAIGAVMHKVCNIVFAVLRDEKAFELRSPEEHCKQYQRPALAAA

SEQ ID NO: 171436 - protein, 349 aa, unidentified
MRTTPKPDAAAYGIDIGKKAFHVVALDAKGQPIQRVKFSRETLLKFFEAADTALIGMEACAGSQWLARKLAVLGHDARIIPAKFVKPYVKSNKSDMIDAEAIAEAVTRPTMRFVQVRSEAQVDLQALHRIRDRLIRNRTGLMNQARAFCIEYGLAMRTGAGGFHADIRRHLDNEENDLSTAMRGLLTELLDDLAYLEGRIGNLTGQIEAIAHSDETVRRLLTIPGIGPLGATALVAAAGDGRQFRKARDMAAWLGLVPAERSSGGKQTLLGISKRGNGYVRRLIIHGARSCLLHLHRESHALGRWLSALEERTHRNKAVVALANKLTRIAWAILTRPGENYLRTKGAAA

SEQ ID NO: 171437 - protein, 371 aa, unidentified
MKSILSVGMDVHKNSFSLCAYDGYTGEIVSESTFASDVKLVIKFIETLKSRYENDVEIKCGYEAGCLGYSLYKSLTARGVDCVILAPTTMQVSAKNKMVKNDRMDALNIAKNLASGSYKSVYVPDEEDVEIKEYIRMIHDFKKELKRVKQEICAFVLRHGYQYDGKSKWTIRYMNWIRELEMSEIQRETLNEYIAEMENLNDKINRFMNCIDEMYQSERYHEKVSKLRCFKGIETFAAMTIQVETADFERFPSAKAYASYTGLTTGEHSSGDKNNRIGITKQGNTVIRKTLVECAQSLVKGNVYAKKSQGLKSRQKGMDVNIIAYADKATERLKKKYQKLIERNVPRNKAIVAVARELACFIWGMETGNIH

SEQ ID NO: 171438 - protein, 476 aa, unidentified
MKRSITYKSVPVKNVSLRFLKNVARRSTIYVGIDIGKYKLYVTVRWTPPRSKAVVYEHPWFVENTREIPALVAKLRKIANKNKLIVGIESTGSYGDPLRQALADAEIVVHQVRTKVTHDYAEVFDGVPSQHDGKDAAIIAELVSQGKSTIWSYESQSETENEIRYQVKKMIDIHKEIKRMQGKLEGLLARYWPEITSILALTSITLLKLLRYYGGPGTLHQDKESAQKIRQFSNSRINEEKSKDIRNAAKQTCGVRQGTWDMQTCKDIAIRMLELHKQSGSCKKRLKTLVEQSCTQLQRLSKILGVGTASVVWCHIGDPRRYHCSDAWIKAMGLNLVERSSGEYQSEVRISKRGDSETRRWLYMSALRWIQQSPVKQWYQRKKLQTGKKIPGEKNKLTGGKAVVAVMRKLLKGLWYAIVHDIPFDGEKLFFKEGSRRKDAIPRKAGRRPRRKKTKKVSRSDGVKVGFLRNGQKSTK

SEQ ID NO: 171439 - protein, 380 aa, unidentified
MASIGDDVRSNTTVYAAIELSKKSWVVAIAHPDRDRPSIHRIAGGNVADLIGRLRKAAGKNQRIVVCYEAGYDGFWLARSLANIGIDCRVLDPASIQVNRRARRVKTDRIDSLALLRALIAVDRGERHVCAVVRVPTVEEEDARRSHRERQRLIRERTGHINRIKGLLFAQGIRAIEPKRRRTRIDFGQMTTAEGRPLGERLRRELEREYQRLELIESQLRIVEKERDTVDAQDPAVERKRELLCALHGVGGASAAILVREVFARPFASRRHLGSYLGLTPSAYDSGSTTRCQGISKAGNSWARRVLIEIAWLWRKYQPASPLSEWYARKTADQSPRIRRIMLIALARKLAISLWRYVETGLVPDGAVLAKKAPHQTAAT

SEQ ID NO: 171440 - protein, 361 aa, unidentified
MFIERTSVGLDVHARSVVAEAVDWDTGQVFSERLVPASEQVVAWVGRLPGPVAVSYEAGPTGFGLARAFERAGVRCLVVAPSKLERPGGDRVKTDRRDARRLARLLHIGELPGVRVPTVAEETARDLVRAREDTRGDLMRARHRVSKLLLRQGIVYCGGTAWTAVHETWLRSQHFEQAGLRVAYREALDAVMACADRRDRLDAAIAEMAYQQPWAETVARLECVRGIATLTAFGLTVEIGDWLRFTGATIGAYLGLVPSEFSTGASRSQGPITKAGNTHARRLLVEAAWHHRRPTSGPSRTLRARRAAVTPAIRARARAADARLHQRWVAMQARKKRPTVTAVAIARELAGWCWSLAVMDP

SEQ ID NO: 171441 - protein, 419 aa, unidentified
MKSLNIPPFTAYVGIDWADTKHDICLQAAHSSQREFDCIPHRVPLIDDWAKALYQRFGGPIAIALELAKGPIVYALQKYDFFVLYPINPLTLARYREAFQPSRAKDDPTDAELALDLLLRHPERLIPIQPQSVAMRTLLSLTEYRRGAVADKIRLTNRLINTLKQYYPLALECFEHRDTPLFCDFLTRWPTLAQLKQARQTTLRTFFHAHNSNRPKLIEARLQSIKAAVALTEDPGVIVPNRFQVLGLVDQLRATLQAIDRFDRAIAELAPTLPDYSLFASLPGAGPHLAPRLLTAFGEQRERFPKAEDLQEYAGIAPVIERSGKKCWVHWRWQCPRFLRQTFVEWAGQTINKSFWAGAYYRQQRAKGATHQAAIRALAFKWIRILHSCWKTRTTYDETRYLNSLRKRGSPLLNNPTPS

SEQ ID NO: 171442 - protein, 330 aa, unidentified
MTNVSELTTEALFVGIDVSKDTLEVALGENAKTQTFGNDQAGVAALLGQFKPVAHRIAVVLLEATGGLEHAAAAALCAHGFAVIVVNPRQAHAFAKALGHLSKTDSIDAKALAQFARTLHNSDKRERLLYRLPTPAQELLLAMVTRRAQLISMRVAESNRLASAHVSQRKSIERHIKILDKQIGQIDDDAQRHLRSHFQDKLALLKGLKGVGVGTQTMLMAALPELGSLKQREISKLVGVAPLNCDSGKFKGKRITWGGRSNVRAALYMAALTASRHDPVIKAFYERLTLAGKPKKVALVACMHKLLTIMNAVIKSAQPWQASYPQPNNV

SEQ ID NO: 171443 - protein, 329 aa, unidentified
MSNVTTVGIDLAKSSFSIHGVDAAGAVVLRKTVSRTRLTARVAQLPPSLIGLEACSGAHEWARRFQSFGHTVRLMAPRFVAPYRKNSKNDGNDAEAICEAVSRPSMRFVPIKTTEQQAVLCLHRVRQGFIEERTATINRLRGLLAEFGFVLPQSAAQVRCGVATLLERLPPHAARALGDLREHLRTLDARVREYERAIEAHAREHRAAQLAQQRQGIGPLTASAIVASVGDLREFKNGRQFSAWLGLVPRQHSTGGKQRLGHITGRGDPYLRTLLVMGARSVLQRAVGKDDPLSRWALAVRARRGYHRACIAVAAKNARVVWAMLNNGN

SEQ ID NO: 171444 - protein, 417 aa, unidentified
MEVLVTRCAGLDVHKKSVMAAVRAPGPDGKRLQVVREFPTFTRNLVQLRNWLVSQGVTEVAMEATGVYWQPVWHVLEDMPGVELKLVNAEHVKNVPGRKTDVSDAAWLAQLLECGLLRGSFIPEPAMARLRDLTRYRKKLVEERAREVQRIQKLLETAGIKLDSVATDILGKSSRRMVEALIAGERDPDALAELALTRMRAKLPALRLALEGRFSEHHALMARLYLDHIDHLSEAIDRLDAQVVSETAPFAQQIDRLCTIPGMGRRVAEVVIAEIGVDMSRFPTAGHLASWAGMCPGNHESAGKRRSGRARRGNDDLRTALCEAAWAASHTKDTYLSAQYRRFVARFGKSNGGETKAIFAVGHTMLVIIWHVLAHSGNYEELGFDYFEKRNETEAYKRRLVHQLEKLGLKVTVEPAA

SEQ ID NO: 171445 - protein, 361 aa, unidentified
MYENGSKIESVFGVLTPELDKLRDLLVSHHVCEVALESTSIYWIPIWNILSVDFSLKLVNPYFIKQLPGRKSDVKDAEWIATVLQKGLIRGSYVPDRMIQCLRQYERRNHELSKNIVHAEQRMDMILQRCNIRISNYVSCISCKGYQKVVNAIISGESNPKVLVTLIHKRTLNKHGRQVVEDSLNGFVSDTDRDILRQYRDERMQMEQHKSENKAKMQAICEAHYCEELELLQTLPGIKEESAANIIAEIGVDMKMFLTASAIVGWAGLKPRNDQSAGKIKSRKITHGNKYLRKILVEAAWSAARTKDSRFMKMYQRLLARGKSKQKALIAVARKLLVLIWNMLSKKEAFNPEYKRRIQAA

SEQ ID NO: 171446 - protein, 444 aa, unidentified
MEVIYPRCAGLDVHKKTVVACAMHTKKNGHKEQETRTFGTTTGELQELRVWLQEKGCTRVAMESTGVYWKPVYNILEDHITVLLVNARHVKNVPGRKTDVSDAEWLADLLRHGLLRGSFVPPREQRNLRDLTRQRSKLVEERSRQVNRLHKVLEDANIKLTSVATDVMGVSGRAMLEALIKGEANATLMAELARGRMRTKREALAKALTGRVKEHHRFLLEQHLIHIDFLDEQIDLFSRQIAAQIDRLSEMPEYQVPAPSSATGASEQSPQPLTYARAIELLDTIPGINRWLAEVLLAEMGIDMSRFASDKHLASWAGVAPGNNESAGKRRSGKTPPGNRHLRKGLVQGARGASRKKDTYLKSKYHRIAARRGKKKAIVAVWHSILVSAYHMLSRNEPYCDLGGNYFDQFKRDHVANHLVRRLEKLGFEVLIEDQQPLTGNLVG

SEQ ID NO: 171447 - protein, 366 aa, unidentified
MKKNSKDCLPLQVARGGAKPVIIGIDLGDKQSQYCVLNGKGEVTEEGALRTTPEGFRQWLKGRKPCRIVVEAGGHSPWVSRLLETEGYPVLVANPCRLPMIYASQNKNDRMDARKLAQLARVDASLLAPIRHRSAQAQADLSVIRARESLVEARTKLINAVRGLVKTSGARVKKCASRSFPKQAAGQVPEILRPAVEPLLETIEGLSEQIKHYDQLLEEMAERRYPETELMTQVPGVGTLTALTFRLTLDDAERFRRSRDVGGYLGLRPRQQDSGEQTPQLRITKAGDRYLRSTLVNCAHHILGPFGADTDLRRWGLKLCARGGKNAKKRAIVAVARKLAVLLHHLWVCAEVYEPLRNQPVESVAA

SEQ ID NO: 171448 - protein, 349 aa, unidentified
MKKRITQTIGLDLGDKISTFCVLDEATGDVIERGEVRTDQVMMELFFACRPAARVVMEVGCHSPWVSRIAERYCAKVYVANSRRLKFIYANERKSDVVDAEALARVGRMDARLLMPVRHRGPKAQKDLALIRCRAQLIETRTELVSSLRGQIKAQGARLPSMDAASIGFRTQERLPLELRDLFKPVLLAIESVTDSIHEYDERIEAVAKKDYPEIDLLTQVWGVATLTALTFVLTLEDPDRFLRSRTVGAFLGLVPGRDQSGAVDKEKRITKRGDSYLRTLLIQCAGVILMKHAPDTDLKRHGERIARDGSKVSKRKAKVAVARKLAVLLLTLWRRGEEYESLRNRQAA

SEQ ID NO: 171449 - protein, 321 aa, unidentified
MTAILGIDVSKNKFDVALLRNGKYKSKSFENKHFGFETLSSWLKQHDVVTLHACLEATGSYGEALARFLFEGGHVVSVVNPARIKAFGECELLRTKNDKMDAKLIARFCETMRPVSWQPDPPEVEHLRMLGRRRDALISMRTQEVNRAGVVDPAVNASIQKVISFLEDEIEQISKLIREHINNHPGLKMKRDLLKTIPGVGDVTIEAILSEINAFEGFETVEKVVAYMGLSPKEKTSGTSVKGKSSLCKIGSARLRKILYMPALTAIQYNPLVRALYNRLKTKSKNGIIIACACMKKLVHIIYGVIKNGKPFDPAYNMKTV

SEQ ID NO: 171450 - protein, 406 aa, unidentified
MLTSVMVNNSLTGYAGGGEASEAKPRAKRSEASRADTSRRREFDRALALEAVTEREPRRHCGTNPNSRLNRPSGASSHLQVREKTMSEPIYSEPVEPIYVGIDVAKETFHVASCPNILKTSLPNAPDGHRQLCSMLKEQTIVLVVLEATGGYEKPIVAELLDAGLPVVVANPRQVRDFAKGLGQWAKTDHIDAQMLAKFAQIVQPAPKTHSTPQTAELAELVRRRRQLADLRCQESNRLLMLHHPKVKRSIKKMLKTLDFQINEIDQLIREYIDADDNFKSKDRILQSTPGVGPQTSAMLIANLPELGKLNRQEIAALAGLAPYDCSSGKYDGRSHIWGGRKDVRSVLYMAAFTACRFNPAIHALAERLRQNGKAYKVVITACMRKLLVILNTMIRNQSLWTPKKI

SEQ ID NO: 171451 - protein, 356 aa, unidentified
MLNDAKYIGLDVHQATISVAILDSAGKLVMEAILETKAETILQFIHGLHGSLHVTFEEGTCAAWLHDLLKPHVTQVLVCDPRKNALIKAGNKNDRSDARKLAELLYLEKLHPVFHGETGIRALKELARSYLAMTRDTTRVMNRLKALYRSWAIPCAGQRVYAPRYRSEWLAKITEVGVRRRAEIYYQQLDALRSLREQVRRDLLAEGRKHSAMKLLRQIPSIGPIRAVLLIALMQTPHRFRTKRQLWAYIGLALKTSTSGEYRIVKGQLKRSKKLLAIRGLNANHNHDLKNIFKGTATRAAAVPGPFQDFHAALVARGMKPTMARLTLARKIAAITLIVWKKGVGFDAEHLKQQAA

SEQ ID NO: 171452 - protein, 424 aa, unidentified
MNQNQSFAAFIGLDKSDKKINVTLQRCSTARSQRSIIQGSAEALHAWVAALCARFLHQPVAICVEQPAAGLIHALMGYDFVVLFPINPVTLARYREAFTPSRAKDDPTDADLLCELVAQHREQLKVWQPDDICTRKLRHLTQARRSSVNMRTRLSNQLKALLKGYFPQALELCGEDLTTPLACAFLQKWSSLQQLKKARPETIRRFYYAQNARRGDVIEKRLTLIAQAIALTNDPALIESSIVTAQALTLGLRAAHTAIARFDREIARTFTQHPDASLFAALPGSGTVYSARLLAAFGSRRERFESAEALLNFSGIAPVVKRSGQATKIHRRYARPIFLHQSFIEYANESIRHSLWARAFYQMHKAAQQSHWVIIRALAYKWIRILFRCWQERTPYDELRYLKSLQKHGSPLLQYLAQPNTQTV

SEQ ID NO: 171453 - protein, 354 aa, unidentified
MTSTKYIGMDVHKESISIAVMNAAGKIVMECVIETKANMILQCIDGLRGDLHVTFEEGTSAAWLYDLLKPHVTELIVCDPRKNASMREDSQNDKIDARRLAELLRIDHLSPVYHGEHGLRTLKELVRSYLTVTKDLVRVKTRVKAIYRSWAIPCNGKEVYAACHRAEWLGKITESGVRRRAEFYYQQLDALRVLRQGVRRELLAESKKQKAWKRLCQIPAIGPIRAAVLLGILQTPHRFRTKRPLWKYSGLAIETCSSADHRSIHGQLQRSKKNSVRGLNQNCNHDLKNLFKGAAVIASSKPGPFQEFYAALLAKGLRPEMARLTLARKLATIVLIVWKKGVCFDAQHLKPQTA

SEQ ID NO: 171454 - protein, 371 aa, unidentified
MNEFADFNRLATALKGYGRPVRVAFEATGTYHRALAYYLATAGFEIKLVSSVALARTREALNNSWDKNDPKDAQVILHMMEIGNEQYYHDPLVCGTNDIQELSKTHDIVSKSKTELWHRVLTHYLPLYFPEAGRFYRSSRSDWFFAFLERYPSPHLIAAMGKAAFTTDAWDVIGRKVAKERLLADIYETAKSSVGLPVAPDSDAIRMFRLVLGEGRSLIAQRNQIEDRAVALLKDLPDYQLLTSIPGIGPINALTILAEAGDLRRFGHHRQFLKFCGMDLATIQSGTFRGQTKLSKYGNARLRRTLWMAGQVAILQRTNSFRDKFERYIAKDRHNSHLRRKAYTAIAATLSGHCCAIPCRAVNGPHSSRDH

SEQ ID NO: 171455 - protein, 369 aa, unidentified
MDNGSTVVGLDVHKATVVAAVLPPGADRTRETVTIENSPTAIARLVTRLAARGPVAFVYEAGPCGYEVQRQLTALGQPCAVVAPALTPVRPGDRVKTDRRDAEKLARLYRAGELTPIRIPTRAEEAARDVVRVREDVLADRLRARQRLGKFLLRQGRVHRETKAWGVAHRAWLHSQRFEWPALQQTFAAYLRALEEVEAHLAVLDQQVVDLAQQAPYRTLVQALRCLKGIDTLSAVTLAVEAQEFRRFPRARAFMSYTGAVSMERSSGGTVRRGSITKAGNAHLRRILVEAAWSARHGTGVSRALSERRQGCPPEVVRIARKAQTRLHRTFWRLTCRTKPAQVAVVAVARELAGFVWAIAHQVPEGGPA

SEQ ID NO: 171456 - protein, 408 aa, unidentified
MDFDENQYLTSSFSNNQPGAVELTNAISDCMRKHPDLNTIVVVLESTSVYSIHIASFLSTCEELLPYKPYVFCVNPKMTANYRKTYIGMDKTDPMDAYLIADFARVGRIKKLKPWRGAQYLALKRLTRHRLHLAECITREKTYMVSNLYLKCSELQLLDSDDQPFSNIYGATASAVITEFFSLQDIIDASEEDLLTFLAEKSRNRITDISKASELLKKAARDSYRLDKCMYEPINISLASSFNCIQTYQKEIKLIDQAIEKCINGMHPNALTILKSIPGIGPVWAAGILSEIGDITAFHSSDALAKYAGLTWKKNDSGDFVSEDNNLTKAGNTYLRYYLGEAANSVRRFNPEYKDFYAKEYAEITKHQHKRALALTSRKLVRLVFGLLVKNQLYTGEKLDTEFNTESE

SEQ ID NO: 171457 - protein, 394 aa, unidentified
MVVCVLVTQSDGTVQKQIRTFATMTADLLALDEWLRGQQVEQIAMESTGVYWHPIWNLLEEGRQILLANPQHLKAVPGRKTDVKDAEWLADLHRHGLLKASFIPPKPVRVLRELTRYRKTLVQERAQEVNRLQKVLEGANIKLAAVATDVLGKSGRQMIEALVGGAQDAQALAELARGRLRAKLPDLRLALEGRVQPHHRFLLERILAHIDFLEQSIAQVQQEIEQHLAPFEEAVRLAQSVPGIQATAAAAIVAEIGTDMSRFPSDKHLASWAGVSPGNKQSGGKRLSGATTSGNPYLRAILGEVAWTIAHTSDNYLSAFYHRIARRRGKQKAIMALAHKVLIILYHVLRDKKPYTDLGADYFDKLDSRRIERHHVRRLEQLGSTVALTPKEAA

SEQ ID NO: 171458 - protein, 456 aa, unidentified
MAGAIAVQQHDDVVNLSTISHKKTRYRFAFGKYVIQVYLWHLFGERSSISNQPYLYKRGSTSVAHNKRENLATFHALHRSAIGIDVHSNLIVATYQNCEYGSSSLFNENRGSGASKPELDAFASWCKAKEAEVLIMESTGVYWQSLYESLENVGFTNKQIVVVNARDVKNKRGSKTDLADAIHLAEVARQETYRASFVPAKEFRQLRCLWRSFFTLKISRKRFLNIMHKQLCQVGCRASSVFSDIRGKKATKIIDCLINGEHGETLYNHIIEITSCKQDKLKATPQQIYDALQADMESEVWFAIRQNMEHIKFLDAQIAESEANLRDKLKPYTHPMKLLTSIPGIKDITAMGIICELGDDISQFTSIRRFCKWIGLAPGNNESAGKKYSGRTTPSNKYLKVLLVEAVSGIVLMKKGFLHEVLQRFKERRGTKKSNVALAHKMCRIIFSVLTHGTAY

SEQ ID NO: 171459 - protein, 390 aa, unidentified
MIYVGIDVAKDKHDCCILGPDTEELFQVFTIRNNSDGYGELFHKIESVSKDKSQIKIGLEATGHYSYNILGSLLDHGYHTFVINPLHTNLYRKGQSLRKTKTDKVDARSIAEMLVTDKTLKPYTGTSYHSEELKSLTRYRFELVKERAKMKTSVSRLVNILFPELESLVPTLHMNSVYRLLQELPGAYFIASSNLTHLKALLADASKGRYGREKAIVIRETAKSSIGSLMPAKSMELRQTIRRIDTLTSDIKEVEQSIQKIMDECGSPITTIPGIKYRMGAMILAEIGDFTRFSNADQVLAYAGLSPSTYQSGQLISSYARMEKRGSKYLRYALFNAAIYVSGWDERFRLYLSKKRAEGKHYYVAISHVIKKLVRTIFRMEITHTSYQPL

SEQ ID NO: 171460 - protein, 355 aa, unidentified
MSQEKYIGMDVHQATISVAVMDAQGKLIMECLLETKASTIVEFVQGLHGTLSLTFEEGTSAAWLHDLLKPHVSRLVVCDPRKNALLKDGNKSDRIDARKLAELLRGNQLHPVYHGEHGVRTLKELGRSYLTITQDVTRVMNRIQALYRSWAIPCAGTTVYAPRHRAEWLAKITEPGVRVRAERLYQQLDLLQPVRLEARRELLAESHKHSGVKLLRQIPSIGPIRSALLVALLQTPHRFRTKRQLWAYSGFAVETHDSGEYRSVRGKLQRNRERMTVRGLNDNHNRDLKNLFKSAAVSVSTRPGPLRDFYLARVEKGMRPTMARLTLARKIAAITLTMWKRGVSFDSKQLQRQTA

SEQ ID NO: 171461 - protein, 345 aa, unidentified
MEHSAGLDVSVKETSVCIVDETGKIVREVKVASEPDALLAVLTNPAYRFKRIGLEAGPLSQWLFSVLAEAGLPVICVETRHMRAALKAQINKTDRNDARGIAQMMRAGLYRPVHVKTLRSQKLRMLLTHRKLLQSKAIAVENDLRGTLRNFGLKVGMVGAAKFEARIRELVETIPDLATLVEPLLIVRRVLREQIAILHRRLLAIVRDDEVCRRLMTVPGVGPVVALTYRATVDVPARFRKSKSVGAVFGLTCSKYQSGEIDRSGRISRCGDEMMRAMLYEAAHIMLVRSTKWSWLKAWAMQVARHRGLKKAIVALARRLAVIMHRIWVDGTEFRWTRQQVAAAA

SEQ ID NO: 171462 - protein, 385 aa, unidentified
MQVMIEGQSHLQPFGLPYWGFENLNKGVGSMTACYDYHIGVDYHKSYSHLVVQDSSGKTLRSGRVKNDRQSLGGFLERYRENSHAVVEATRNWMAMYDWLDDICDDVVLAHPLKVKAIADAKIKTDKIDATVLAHMLRADLVPEAWAPSEKSRDLRVALRERMFYVRLRTMTKNRIVTVFDRYPEQTAQLKTLGDLFGKAGRVQLAQVNVSEIDRIQVDRGLAFIADIDVRVKQSEATIRAMTKANTNVKLLKTIPGIGEFFARLIDAEIDDIKRFRNAKKLAAYAGLVPSTYSSGGKTFHGKIIRQGNKWLRWAFVEAVAPALASDPQLRAQYEHLKSRGVNKARVAIARKLLTIAFQILRDQRPYERRGGRSEDCASTISRLS

SEQ ID NO: 171463 - protein, 371 aa, unidentified
MNDLIRIGMDTSKSVFVLHGVDAAEQPVLRRKLRRRQVVEFFDKLPAMKVGIEACGGAHHWARELGALGHQVLLLPPQRVKPYVARNKNDAADADAICEAMSRPRMRFVPMKTTEQQAALMLVGVRDQLVARRTELSNSIRGYAAEFGLVAAKGLDKIEPLLERLAMDRTVPALAQELFATLGEDYAQVKLKLRTIEAKLMAWHRQNELSRRLAEIPGIGPIGASLLAMKVPDPKAFRCGRDFAAWIGLTPKDHSTAGKTRLGVITRAGDEALRSVLVVGATSVIKQARGQKGHPSPWLVALLKRKPAKLAAVALANKTARIAWKLMVSGQRYNPHLAPKTRFVPPTGSVAPCARRQGRFAPPAAVACGQP

SEQ ID NO: 171464 - protein, 541 aa, unidentified
MVGTLAQSHLTGLISPKLKEVAIMAKSKRQHIQKVKGRRFTDEIRNLNLEKVLVIPIECGKNSHKALVANYFGDILYDSFEFANSNTGVKMLDSIIQDISSSVNAQKIVVGIESTGHYYENLYRNLITLSYDVAIVNPSSVYSQRTGQLNWCKTDEIDLCAIGQVLIDNQATETKLSDGLYYNLKHLARLRRDEVNKRARLKIQIKVLCDHIFPGLQKAEVFSDFWGKASVLLLENYPTPASIISLGVNRLARFFKKHNTKLGLTTAQRLVNLAKNSLTTDASNIYAHLFNLKFKIQDLKMADEKIRKLNIELASCLIKTPGLLLLSIRKINVASAAEFIAEVGPLSQAGNAKKIISRAGLNPSRFQTAEYERTDNPITKHGSNHLRNISLTIAHNLVGDDPHLVNQPANPYFRNFFDHLVIEEGKDKRVAKVACANKFIRVACAMMIQKMLFCPPTWKQDLVADDPLIKLSKFLQDNDAKDMFDDIVHIAKEQLPDDYGSYVKQKESDIDSLVSSLTNDTERDPDNFLGPMPLEFVEVKG

SEQ ID NO: 171465 - protein, 432 aa, unidentified
MNPISVSSPPSKVAAWVGLDWADQQHLVCLYDVGTGQTELSCLEQKPEALQSWLGQLRQRFGGQPVAVVLEQARGAVIYALLSADFLVLYPVNPQSLASYRKAYVTSGAKSDSADAVLLMEMVRNSPQRFRSWTPDDADTRSLQLLTQNRRQLVDQCTAFTNQLTGWLKSYYPQALELAGELDSLQACDFLEKWPTLEALQQARPAQIRKLYLDYGKPRPESLEQRLEQIRRARPLTTDLAAVLSGTMMVRALIELIRPLRATLERFDQQIAALFRKHPDRLLFESFPGAGAVLAPRLVAAFGTDRDRFESAQDMQQLSGIAPVTEQSGKQRWVHWRWACSKFLRQSFHEFADHSRKWCDWAKALYQRLKRTGKGHHAALRMLAFKWIRILFHCWKTRTCYDEQVYLKSLEKRNPTLWAETQALPPRKKKAA

SEQ ID NO: 171466 - protein, 374 aa, unidentified
MKQVTTIGLDLAKAVFQVHGVDAFGAVTLRRAVRRRQVLVFFAKVPRCLVGMEACATAHYWAREIAKLGHDVRLIPPAYAKAYVRRNKNDPADAAAICEAVSRPSMRFVTIKTEAQQAAAGIHKVREMLMKQRTMLINTLRGLMAEFGIVVADGPHHVGELVAILADPADRRIPTPLHEGLLAIVESLRGLERRIEIVDKQIVGWGRGNQTCRHLITIPGYGPILSSAMAAIAVDPASFGSGRHFSASLGLVPRQDGPGGKVKLGPISKRGNGYLRRLLVNGAMSVLCSKQATQDPWRARQQDGAHRLGGDGAAGGLPQPATRSAVPRPGRAWRRARRRQDRCARACGGGLRPVLTAAARGATQEPGRDEETAL

SEQ ID NO: 171467 - protein, 460 aa, unidentified
MTLLGKLGSELPRRYYLSIDVGYKEHVAGVISLQAFVRGDDRWKRARCVHFPSTQAGLRKLQGYLDRFSIDHSEFFGLSEPTGGHYGATVFQYLLDREYNMNLVENATVSHMREKIFPGLPKTDEMDTRVMNRIGYLHEAVGEEFTLRPLELPDPDSKHLLALCRDSWKLSTITTRARNQFAQLMAVVFPELKTFFTSSVSTVVPVRLVAAYPSPALLAEATTGEVKDVLWQAGSYQHAHRASELLALARDSSGLLPDSGRAWRLEWLTNFLLDNFQYQAQLDKRIKKLLAQRGDYALIAKVPYSGPNSLGTILAVTNNADRFSNYRKYVAYTGYFAGLRKSQTIDRTKMSNRGNRDLKRAYFQIAAPLVWFDKGENPYKTLFQDRMAAGREWYKAMPFVCAALARHIYHCLKFNDPYDVEKAFRGTSLQPASEEEWLDLGANLEEKFEVMEAHLCQIEG

SEQ ID NO: 171468 - protein, 394 aa, unidentified
MRFAGIDIASETHVVAVVHEDNTPIVDPTSFREDAAGYARLRELLGSPQDVLIAIEATGHYWQNLFAFLAAEGFTLALLNPLRTRRFAGEDLERTKTDAIDALGIARFAAQKRPVPTRLPDSTTQELRELVRLRARLKQDFDDRVRQLHRLVDLGFPEFTRYVHSLDSELAAALLHDYPTAAAFQGVSPRRLAALRYDGRHKVGDELARTLLEAARSSVGRHHGPAYRVQVRYFCEDLDLLRRRLRELDHDIERTLREHEVGSLLTTIEGIGPSTAARIVGTVGDPAQFRSAAALASYVGVVPGKRDSGKRQGRRAPLSPIGNAALRRALWMPTLTAVRKNPWLRAYYERLRADGKPAKVALVAAMRKLLVAVYTVAKHRKPFVPHLCRLEVRV

SEQ ID NO: 171469 - protein, 407 aa, unidentified
MNAVGIDVSKGKSMVAALRPMGEVAFLPREFLHTEVGLEQMAYAILALGEDTRVIMEATGRYHEPVAAALHEYGIYVCVLNPLFIKQSGGGSIRKVKTDKADAIKIAKYGLDNWVDLREYTPMDTVRQQLKLCSRQYDLYMKTVISLQNNLISLTDKTFPGVNELFSSPERADGHQKWVDFVITFWHCDCICRVSEKAFTERYQKWCKRKGYHFSVKKALEVYAGSCGHFTTLPKNDNTKLLIISAAQQLLAGKMTLAALRAEMTRLARQLPEYDTVRAMYGVGDKTAPALMAEIGDVRRFPRRSSIVGFAGIDPGVDESGKHSAKSVPTTKRGSPHLRKTLYQIVCTYLKKSPADEPVYQFLDKKRSEGKPYFVYMTAAQNKFLRIYYARVKECLEAFDVQTTEQK

SEQ ID NO: 171470 - protein, 423 aa, unidentified
MSYKIAGIDVHKKMLAVVVSDVEVDGEYQFERVRYSSSPEHLRLLAEWLIVQQVEEVVMESTAQYWKPVWGALERYWKPSCQEREGAGPKSGTLHLAQAQSNRGRRGRKKDFPDAERLVKRLVADELVLSFVPDTEQRLWRAVTRRKYQLTRNHVRLQNQLEGLLEECHIKLSSLVSDLLGASARRMLKALAEGETNPVALAVMADKNLRATQAQLCDALGACTELKPIYRRLLKMFLEELQFIDQQISKLDQELANLLSRHHDAIVHLAEIPGLGVDSAQQIIAEVGAAAATFSSAKQLSSWVGACPGEEESAEVSKSHRSPKGNRHMRRILNQAANAAAKSKGTIFEIVYRRLVSRLGHNQTIGAIAHRLCRLIWIILHRGVRYEERGPSVSAKTRRHRTNRMIRELRNLGYRVEPLVTTV

SEQ ID NO: 171471 - protein, 344 aa, unidentified
MEQYAGLDVSLEATSVCVVDATGRVLREAKAPSEPEALVAWFAGQDGAMVRIGLEAGPLSQWLFAGMADAGLPVELLETRHVRSALKTMTIKTDRKDARGIAHLMRMGWFRPVHCKSTSAQEVRALLTARKLLQAKRHDIEMSLRGVLRGFGLKVGPTTPKTFEARIRDLVEGNDTLTGVAEALLAARATLLRGFRSLESRLLAQARRDVRTRLLMTTPGVGALTALTFAAAIDDPARFRSSRMVGAHFGLTPTKYQSGETDVTGRISKVGDHGVRVALYEAANVILTRPVKGSALKSWAHAIARRAGMKKAKVALARKLAVVLHRMLRTGEAFAHDGRPAAAA

SEQ ID NO: 171472 - protein, 392 aa, unidentified
MYYIGIDIGKNHHEASIVDQFGNQVCRSLRFPSTHKGAVKLLDYIQTNTKSNNLVFGLEATGHYWYTIYSFLKERKYTIYVINPIQSDCFRNFYIRQVKNDSKDSFLIAEVLRFGRFTTTDLADEDILSLRQLCRYREAMMSARTEIKLRIHTILEQIFPEYEHLFCEIWGSSSMALLSKYLLPENIANASLDELHAILLKNSHNRFSLNKAIEIKDAAMNTFGIKIAQEAFAFQLKMLLERLKLLNEQLKELDEMIISLYNQFDCYLHTIPSITPISAACILAEIGDIRRFKSSSSLVAYAGIDPTVRQSGEYCSTHNRMSKRGSSHLRHTLFLAASCCVFHSSPFNEYYLKKRSQGKHHLVAVGAVSRKLTTVVYAILKSGKPYEPVKFV

SEQ ID NO: 171473 - protein, 322 aa, unidentified
MSVTVLGIDIAKQKLDAALLVDGKTKHKTCKNSAEGFETLMVWLEKQGIQKVHACLEATGNYGEDLAIYLHEAGHIVSIVNPARIKGFGQSELIRTKTDKIDAALIGRFCLAMKPGPWIPPTPAIRSLRALVRRVDSLIDMRSQEKNRISTAHESVIFLIKEHIAYLNQEIEKIRQQIADLIGQDPNLKRKHDLLDSIPGIGKATIPHILAELDDLEKFDHVRQLVAFIGLAPKETLSGSSIKGKPRLCKIGHARLRKALYMPALVSIQCNPVMIAFYNRLKDKGKNGKVIVCAIMRKLVHVIFGVLKSGKKYDPNYKPAFA

SEQ ID NO: 171474 - protein, 341 aa, unidentified
MKKFIRIGVDLAKNYFQVHALVSDVGPRVTRKLRRSKMHEFFSQIEPSLIGMEACGSAHYWARELKAMGHEVLLMPPAYTKPYVKRGKNDAVDADACCEAMSRPGMRFVPVKSAEQQATLMLHKTRELLVKQRTMSVNALRGHLSEFGIIAAKGIGRVDELLDLVESDTTLPNAARASAKVLAHALEGLDKAIDDLEDEITNAQAQNEMTRLLYKVPGIGKIIASVIAASVPDPSVFKSGRDFTAWLGLTPRQNSSGGKQALGAITKQGNRYIRKLLVLGATSLLNVVGKRKGALRDWIVGLLAKKPARLVTVALANKLARILWAMMKTGESFRAEIFAKA

SEQ ID NO: 171475 - protein, 317 aa, unidentified
MTASDFFVGIDISKNRLDVALIPGDQTFNCPNNEAGIQKLVRRLQKLHPRIILLEATGGYEFLIVAALREAELPACFINPKLVRNFARGAGIAAKTDRLDAKVLALFASRMQPQVRPLPEARQQELKHLMTRRRQLLEMIQMEKNRLDPTPLPRIAQSIQHTIKSLEDQLAALNREIDDFFQQHPRWVELEQQLTSVLGIGHLSALLLIAYLPELGRLNRKEIAALAGVAPFNRDSGQWRGQRHIEGGRSRLRQALYMATLVATRFNPVIQAYYQRLLAKGKAKKVALIACMRKLLTILNAMVKKSQPWCTSAPITY

SEQ ID NO: 171476 - protein, 401 aa, unidentified
MQETTQHDAVDVFVGVDVGKGQHHAVALDRNGKRLYNKALPNDEVKLRALIAELKTHRRLLFVVDQPSTIGALPVAVARAEGVLVAYLPGLAMRRIADLHAGEAKTDARDAAIIAEAARSMPHTLRSLRLADEQLAELTMLRGFDDDLAAQLTQTSNRIRGLLTQIHPALERVLGPRLDHPAVLDLLERYPSPSALAAANEKTLANRLTKLAPRMGKNWAAEIVQALNEQAVIVPGTQAAAIVMPRLAQQLAALRKQRDEIAAEVERLVLAHPLWPVLTSMPGVGVRTAARRLTEATQKAFATAAHLAAYAGLAPVTRRSGSSIRGEHPSRRGNKVLKRALFLSAFAALRDPVSRAYYSRKIQQGKRHNQALIALARRRCDVLFAMLRDGTIYPPKSAPDA

SEQ ID NO: 171477 - protein, 365 aa, unidentified
MQTAVRSQTLFVGVDVHKDRHTAVGLSPLGEQLFELTIANQERDFLSLVERSQAEATRFGLTPQFGLEDVHSWGERLSSFLVEAGLPVIPVAPVLVDHVRRKATHPEKNDSLDAAGVAEVMIRRIDRLPRYTITPAAQKAKQIRELSLDREWLVKERARLKNQLHALLYRIHNSAYQTRFTDPFSQKALRYWLHSVPKGADPILVRRMKRAVHRLRDLRLEIRELESALATLLDEHGCTLPTASGCGTVIAAELVGEIGDVTRFPTPGALAKYAGCAPREHSSGKTVRWRKTRSGNRRLNRSFHRMALCQISRSGNDAARAYFRRKVAEGKTKAQAVVCLRRQLVNVVWMMMKHHTSYRYPQPTD

SEQ ID NO: 171478 - protein, 399 aa, unidentified
MLTSQSLQLRVGVDVGTQSHSVAVGLTDGSLLEAFEIPHTAAGFEDFFTRIERHARRYPDPIAVAMEGYNGHVRPLDSLVKVRGWQLFNVNNLKLARFKEIFPAAAKSDRIDSAKTLELFQLRDHLPMARDVLQEVMATPAENDTLKRLSRRRRRLVDERTRVIGSLHADLQAVAPGLLQITRYAGNLWFLSFLTSRKDIRKLARLRRVSLLKLTGVGATYADRIQAWQRNAYFGPDALLVGNMIRQDAERILELNRQIKALEDEMACVATTSTIACQLASIPGYGLVCSAELAGEIGTIERFQSEASLALYLGMATLDNSSGKFRGSKPPKHVNGRAKAAMMAAVDHHRKRVPQSQHYYERKRAEGKRHNQAIRALGRHLCRVIFKMLAQERLYRIDP

SEQ ID NO: 171479 - protein, 323 aa, unidentified
MQGKVSLERSAATRVYVGIDVCKAWLDIHVHPTGQSFRVPNTPHGLKQLKRRLAKVDVALITMEATGKFHRQAHRNLHASGFAVAVVNPLRSRLFAEAIGMLAKTDAVDARMLALLAATIEPKAKAPPPETLENLQEIVRGREACVAQRTALLNQLGTAKTTCLRQQIRHQLKTVERAVERLQAEIKRIIEADPALARRFAILTSIPGIGNIAAVTLLANFPELGTCTGKQAAMIAGLAPIACDSGDVRGERHIRGGRAGLRTGIYMAALAAARFNADLKAFYVRLLGNGKQPKVALTAVMRKLVALANTLIREDRLWQPVHP

SEQ ID NO: 171480 - protein, 374 aa, unidentified
MGNVIEAFVAFDTSKLRNAVAIAEAGRAGEVRFLGEIENTAVAVAKLVRKLAGKYGRLTFCYEAGPTGYGLYRQIEGLGYECLVAAPSLILKKPGERVKTNRRDAVSLVKQLRAGDLTAVWVPDPHHEAMRELTRARETAVEDLRRKRQQVSAFLLRQGLHYPGERAWTKTHRDWLASQKLEYAEHRTAFEEMLLAIRQAQERIERLEQAIRLAVPDWSLAEVVTALMALRGIDFISASAFLAEIGDLSRFRTPRELMAYLGLVPSEASTGDTVKRGAITKAGNRRARRILVESSWSYQHPPRVGKEKQEKLAAAPPAVREIAWKAQCRLSARYRALTRKGKLKTVAVTAVARELSAFIWAINRQIANSRAAAR

SEQ ID NO: 171481 - protein, 391 aa, unidentified
MVCVGIDVAKDKHDCCILDSDGMVRADCFTIPNNMDGFKQLLQTIRNCTKKSDKIKVGLEATGHYSYNILGFLLDNGLPTYVINPLHTNLYRKSLSLRKTKTDRVDARTIATMLLSDVDLKPYTDIAYHNEELKSLTRYRFDKVQERAKLKQSVSRLATILFPELEGLVSSIHGTSIYALLSEYPGTKQISEVHLTKLTNLLTTASKGRYGKEKAIQIREAARASIGSVMPAKSLELKHTIKLIQELASEINEIEDSIQKIIDELNPPILSIPGMGVNSAAVILAEIGDFSNFSSPDKILAYAGCSPSTYQSGKLTNCYAHMEKRGSRYLRHALYNATKYVCYWNPVFAEYLAKKRAEGKHYNVALSHAMKKLVRLIYALQKSGKAYLAAA

SEQ ID NO: 171482 - protein, 431 aa, unidentified
MKNRTNQRLEEITVNTLIVGVDVAKSLQWARFVDYRGIELGKTISFRNDKNGFETIVAKINEICNIKCLKNPINKVIVGMEPTGHYWKTLANYLMQRSYKVVGVNPYHTKKSKELDDNSPTKCDKKDAITIARLVKDGRFFDPYLPQDVYAELRVLSNARISVMKRNNALKNTIIAVLDEYFPEITSVFKNPLKGKASRQVLRDCPFPKEILKLGEIGVLAVIKKAVRKTVGIKKVKQLIAVANDSIGVEYGQLSTKLKLVGMLDELELIEKQLETLEKSMEEMLETTGYAEQILSIKGIGIVTAATFIGEIGDPMRFSHARQISNLAGYNLAEDSSGKNKSGTAISKRGRKQLRNVLYQMAFTMVGQNAEMKELYNYLKTRKENPLKKKQALVVISKKIITVIYNLIRKQETYKPELVLGKVRKEMLIAA

SEQ ID NO: 171483 - protein, 402 aa, unidentified
MNCVGIDVSKGKSTIAVMRPFGEVVVSPFEVRHTASELSELARLLKNLDGETRVVMESTGNYHAPVAWLLHGAGVYVSVVNAMLVHDYGNNSLRRGKTDKKDAVKLANYGFDHWLTLPRYVPEEDARLMLKTCYRQYQQYSKVQTMLKNNLISLLDTAFPDANRLFTSPPRADGSEKWVDFVATFWHCECVCGLSKKAFTAKYQKWCRKHGYNFSQDKALDIYASACGHFGVMPKTDTAKLLVEQAISQLQTTSAALAALKQEMQSLAASLPEYPVVMEMFGVGPTLGPQLIAEIGDVRRFHSKKALVAFAGIDSPPYQSGQMDVHSRSISKRGSASLRRTLFLVMGVLLQCAPMDEPVYQFMNKKRSEGKPYRVYMMASANKFLRIYYASVKAYLDSLEHD

SEQ ID NO: 171484 - protein, 315 aa, unidentified
MNSKEVFIGIDVSKDHLDIGVHPMGKTWQLVHDGGGKEQLCQELRKLKPDLIVMEASGGMESALAVKLQEAKLPAVVVNPRQVRDFAKAQGILAKTDRIDAQVLARFAERIRPEVRPLPDEAQRALEGLMVRRRQLVIMMTAEKNRLRRASQEVAQGIQEHIEWLKRQLEGVDRDISRRIQRNDVWKRKEKLLKSTPGVGPVVSRSFLSGLPELGTINGKKISALVGVAPFNCDSGKFKGRRRIWGGREHIRSILYMGTVAAVRWNPIIRSFFLRLVGAGKSKKVALTACMRKLLVMLNAIIASNEPWKYGKVVY

SEQ ID NO: 171485 - protein, 343 aa, unidentified
MKQYVGLDVSLEQTAVCIVDEHGKALWRGKCASTPEAIAAVVKARAPHVERIGLESGPLSTWHWHELKKRGLPVICLDARHAKAALSLQVNKTDPNDALGLAQIVRTGWYREVTVKSLDSQVIRSFLSSRARLVEVRVDLINQIRGMLKPFGLVAGKGGRQPFIDRVRELVADGPLKDAVEALLSALQEVSRQIGILSRRLMALARQDQAARRLMTAPGVGSLVALAYISVIDAPERFSKSSSVGAYLGLTPRRYQSGEVDRSGRISKCGDPLLRTYLFEAAGIILNRVSRWSALKAWGMRLARKVGGKKAMVAVARKLSVILHRMWHDGTDFRWSNKEGLPA

SEQ ID NO: 171486 - protein, 416 aa, unidentified
MNYVGIDIAKTFHVVTIIDENEVKVFKKAFRVENEIDGYLNFIKKLDTVSIDKSNFIIGIEATGIYGENLLEFLKAQGYNVKLLNPFQTSRYREQTTMKKVKNDNIDSLMIALFLKDGKYSSGYVTDDEYQSLRTLYRNRTTIQNDMKDVKKRILTNLAVTFPEFEYITNPFTNIGLALLDKYPTAHHYKHSSIDRIVKVFRHIKGNNFNNEKAQLILSASQNSVYSGKAKDARAIAIRSSIRLLKLYLEEIDILEQEIFLLLEKQNISSDEFESNMKADEKTTTLIDNLKSIPGVAEKTIAAIISECGDLTRFPTTAKFIGYLGLFPTENSSGNYQSTGHLSKRGSSIAKHALYMSSVSCMLHNSELKQLYDTKKSQGKSKKEALIAVSRKLATIIYAIFKYNTPYNPNRVFAKS

SEQ ID NO: 171487 - protein, 461 aa, unidentified
MKKIPKRRQPSKLHRASQLSVLQANVAGIDIGSREMFVCGPADENEQREMRVFGTTTEQIRECVGWLKRQKVTSVAMESTGVYWIPVLEIMESSGWEVVLVDTRPLARVPGRKTDAEDCQWLQTLPSHGLLQGVYRPGEQISEVRRMVRQKTVLVRQQADLLRRMQQCLDQMNVRIHPAVKPLQGATGMAMLRAIVAGERDPQKLAKLGDAGCQKSASEMVKLLTGHGRSDHLFNLGQLLRQYDFLSEQIAQYEQEIERRLQELTPLERPHLTVPPLANREKRQTMQKRHQEAKRQVRYRMIGADLTAIDGIGVETAEVFVSAYGPDLSKFATEGEFVKHIGLAPHRPVSGGKVLKKRRQEKGTRTAEVLRNAASALKASRSALGAYYRRMARRKDSAIAVFATARKLAQAIFRLLRHGQAYLDIGQAEYERRYEAAHLRALQARAKQSGYALVQLEPATA

SEQ ID NO: 171488 - protein, 355 aa, unidentified
MERYIGMDVHAASCTLAVISEKGRKLKDFPVETNGQALVEAIRMIPGHKHLVMEEGLQSAWLYETLSPHVDELVVAGITQSRGSKSDKRDAYGLAEKLRVGNLDKHVFKAPRQFTQLREFSRTHMTLVTDVVRTQARIKSVYRSRGVLVTGVDVYSSRRREEWLKQLPSSTKIRATRLYDHLDFLLEQKKQAEGDLLREGKKHPIVKILETAPGFGPIRAARLVPIVITPHRFRTKRQFWSYCGLGLVTRSSSDWVQTADGAWIKSRVPLTRGLSRQHNHFLKSIFKGAATTVVTQRNKDPIHARYERLLDGGTKPTLAKLSLARMIAATVLRMWKNEEEYDPGRAGLPTQTRKG

SEQ ID NO: 171489 - protein, 330 aa, unidentified
MKSWNFTLGVDVSKITLDISCAELNEHIKIVNGSEGFTVFLKWCKSLKIDLDKSFLVMEYTGGYEFKLIQFCDSRNIKYARIPGLAIKNSLGITRGKNDKIDSFRIAQYGEEKHKSLIPQKPVSPVIIKLKELLSFRKRIVRENAGYQASIKEREHMFGENRKDIIVKTLKAKLKSNQKYIEVIEVELMNILHQDEKINLNYSLITSIKGIGKINGLMTIAYTENFTSFSNPRSYAVYVGVVPFDHTSGTSIRGRKRVSHIANKELKQELNQAARSALEWDKEMKNYGDRMMKRKCYKIVLNNIKFKLILRMFAVVRNGEMYVDYYKNVA

SEQ ID NO: 171490 - protein, 347 aa, unidentified
MIVAEAFEWVVGVDTHARTHTFCVTDARTGAVIAGATFPNTRPGHSRALSWIRRHCLASNVLAAVEGTSSYGAGITTALRAAGIQVTEARSVGRRDRAGKSDVIDAELAARSVLGINRDRIPVPRQSGEREDLRILLAARRILDQQRTANRNALTALLRTVDLGVDARKPLHDNQIREIAAWRFNQKSAATNNHAVARREARRLARAVLEHTTQLQDNHQQLRTLAADAAPGLQELSGVGPVTAAIIICAYSHRGRIRSEAAFAALGGVAPLPASSGNTTRHRLSRAGDRQLNRAFDIIVRSRMASDPTTRAYVARRTAEGMSTRETRRCLKRYVCRSVFRHLQSAA

SEQ ID NO: 171491 - protein, 399 aa, unidentified
MYDTSGIGVFLGLDVGKGEHHAHGLTPAGKKVFDKRLPNTEPRLRAVFDKLTEKFGTVLVIVDQPADIGALPLTVARHCGCQVAYLPGLAMRRAAEMYEGEAKTDARDAFVIADVARTNPRTLRQITVADETQAELTMLVGFDDDLAGESTRTSNRLRGLLAQIHPSLERVLGPRIQHEAVLELLGRLGSPEQLRKAGTSQIAKVLKPKAPRMAERLAAEITEALAEQTVVVPGTKASAIIVPSLARQLAEILEQRRMLKGQLEALLEAHPLSRLLTSMPGIGVRTAATLLVTVGDGSTFPDADHLASYAGLSPVTKSSGSSIKGEHAPRRGNRQLKRAMFLSAFAALRHPASRAYYDRHRAAGKTHTQALLRLARRRITVLFAMLRDSAFYQPGTATA

SEQ ID NO: 171492 - protein, 353 aa, unidentified
MQQDNEISAVAGVDIGDKRCFVRLTDLDGESLEECQVPTRPEALDHWFRRWPRLRIVIETGTHSNWIRRRLAALAHDVLVADARQLRLISQSDSKNDRNDAYWLAELGRTNPALLNPVAPRELETEQQRTLLRAREAVLECRTKLKGSLRGMAKSHGIRLGRCAQTQWVERVREACPEVLHAALLGVVMQIESLGATIREYDKQIIELGKRYAAVKRLRTIGGVGPLTALTFVLALDNDPGRVKRSRQVGALVGLRPKQRQSGERSPRLGVTKSGDPLLRRTLIQCAHWVLGPFGTDSTLRRWGLGLAARGGGHQKKRAVVAVARKLAVLMHVLWVKQENYDPLHGLVETVSP

SEQ ID NO: 171493 - protein, 412 aa, unidentified
MDVVHPRCAGVDVSKRDAKVCVRVAGAGRAKARSTVTTWGSVTNQVLALRDHLIGEEVTLVVMEATSDYWKPFYYLLEDGPFEVMLVNARHVKNLPGRKTDVSDAAWLADLGAHGLVRVSFVPPAPIRQLRDLTRARTMITRDRAREIQRLEKLLEDAGIKLSSVASDISGVSGRLMLAALIEGERDPVVLADLAKRRLRSKIPELTEALTGRFGEHHAFLARVHLDLIDQHTSAIDELTARIEEVIEPFRGARDLIVTIPGISTGVADVIIAETGADMTRFPSAGHLASWAGTCPGSNESAGRIKSTHTRPGNPYLKGALGIAAMSAARSKGTYLAVKYRRIAARRGPVKAIVAIEHAMLIAIWNMLSTGTLYNDPGADFYTQLNPDKAKNRALDQLRKMGYDVTLNPTAA

SEQ ID NO: 171494 - protein, 384 aa, unidentified
MVVQRTSVGLDVHARSVVASALDGVTGEVTERRLTPAYADVAAWLGGLSGPVKVTYEAGPTGFGLARFLRAAGVEVEVAAPSKLLRPSGDRVKTDVRDARHLARLLHAGQIVAVAVPDEATEAARDLVRAREDARGDLMSARHRVSKLLLRQGIIWSGGKAWTGVHDRWLRAQRFECAPLQLTYDTAYETMLAALGRRDRLDEAIAALAADSAFTPVVHRLSCLRGVATLTAFGLAVEIGDWHRFTGRSIGAYLGLVPTESSSGASRSQGGITKTGNAHARRLLIEAAWHTTAPPTAFPARTCAGAGSTPALRRRTGADAPTTGFTPGGCTSTPAPSAPSWRTLRSPASSPAGAGPWPPSRTRSRADPRPARTVSAGHNTSGRR

SEQ ID NO: 171495 - protein, 416 aa, unidentified
MRTCGLDVHKSFIVAYIFDVFFEKDDNGKPVVKAKDVALGRFERTWEGLDKLVEFLEKNETKKVVMESSGPYSYMVYMALDNTGFDVWMAHPRDNKTNNQLKTDKRDAERLVKRFVVGEIRAYKLPTDPKIIRLKRLTRFRMKMVSRLISVKNEIRKTLDEVGIDLKKAFSTLGKGAIAIVSGLVRGLSVDAIISSNQSLAKKRDVIDEILKSRGKLDDALIFEIKSLLRLLREIERQRESTEKRIENALSDLEEETKLLTTIPGVGLQSAAIILAEIGGISRFPSPKNLASYAGLVPSVYQSGDEIVYGKLRKDCNRRLRYILYQVALKAIKYSPRLRKFYERLRSRGKKHKQAVIAVARKIAMAIWHILTRRTHWSENLKRGYVPRRRRFKRITMKQALKILRELGYEVLAWVC

SEQ ID NO: 171496 - protein, 367 aa, unidentified
MEKSSKVYVGMDVHKESIDVTLAEAGGEVRRLGQIGGDRGSLRKMVRKQQSKGGERVFVYEAGPCGFWIHRELAALGERCMVVSPALVPKRAGDHVKTDRRDSERLASLARAGELEAIHVPDIRDEAIRDLVRGRDDAVIAQRRVRQQLKALLLRNDIRYVGKTSWTGAHRRWLSELKLPEPAQQIVFEEYVDAIAVATGRIERLTRAIETEVLTWRFAPVVAALQAMRGIQFVHAVTLIAELGDLTRFGSARQLMGYLGLVPREDSSGEHRRQGSITKAGNSYARRALIEAAWAYRHPARVTRIIATRQTGLPKAACDIAWRAQLRLSAKYRRLSARHLHHNKIVVALARELSGFVWAIGQSVKPH

SEQ ID NO: 171497 - protein, 377 aa, unidentified
MKKVRFLGLDVHAETIAVAIAEPDGEVRSLGFIPNREESVRKLIKKLGPPEQLQACYEAGPTGYVLYWQLTGLGVKCEVVAPTLVPVKAGDRVKTDRRDARKLARSYRAGDLTAVWVPDEAHEALRDLVRAREAAKQDQLRARHRLSKFLLRHGRRPAAGVKPWTLKYMDWVRQQVQFEQPAQDFTRLDYLHEVEHANDRVQRLEAAIGEAVKLAPSQMREVIQALQAMRGIAEISAVTIVSELGQISRFNGARQLMGYSGAVASEDSSGERVRRGAITKTGNAHLRRVVIEAAWAYRHKPAIGAALHKRQQGVSEEVKEIAWKAQHRLHKRYRSLAAAGKNQQKIATAVGRELLGFIWAIGVKVESNRSQKTPLAA

SEQ ID NO: 171498 - protein, 402 aa, unidentified
MNCVGIDVSKGKSMIAVMRPFGEVVVSPFEVRHTASELSELARLLKNLDGETRVVMESTGNYHAPVAWLLHDAGLYVSVVNAMLVHDYGNNSLRRAKTDKKDAVKLANYGLDHWLTLLRYVPEEDTRLLLKNCYRQYQQYSKVQTMLKNNLISLLDAVFPEVNRLFNSSPRADGSEKWVDFVSTFWHCRCVSTLSLKSFSARYLKWCRKHGYYFSQEKAFEIHSKAQSCIGVMPRNETTKLLVQQAIAQLKATSAALAALKQEMQSLAAALPEYPVVMKMFGVGSTLGPQLMAEIGDVRRFHSKKALVAFAGIDAPPCQSGQMDIHSRSISKRGSAALRRTLFLVMGIYLQSAPLDEPVYQFMDKKRSEGKPYKVYMMASANKFLRIYYASVTAYLNALAQS

SEQ ID NO: 171499 - protein, 371 aa, unidentified
MNESSKPLYVGLDVHKDSIAVAYAPEDRGAEVLSLGAIGTRQCDIDKLIRKLQAKGATLVFVYEAGPCGYGLYRYLTGKGLACHVVAPSLIPRKPGDRVKTDRRDAITLARLMRSGDLSSIYVPGIEDEALRDLSRGRDDAMQDLKRSKRRLKSFLLRQDIRYEGRATWNAAHLRWLSEVVCATPPQQIVFQEYVRAVSEQQERRQRVECELHEAVKGWRLYPVVEAIQALRGVELTGAVILMTELGDITRFETPRQLMSYLGLTPSEYSSGARRHQGGITKAGNRHARRALVEGAWAYRYPAKVSRHLQLRLEKLPAEVQAISWKAQVRLCRRYRQLTARGKHVNQVVVAIAREMAAFAWAIARIVPLAS

SEQ ID NO: 171500 - protein, 322 aa, unidentified
MEAVLECCCGLDVHRDNVVACVLKGTNDQKPERTIKTFSSLPDGLKKLRTWLEEENCRHVAMESTGVYWQPVYNVLEEAFDGTMVAMVVNARHMRNVPGKKTDMKDAEWIAQLLRSGLLDASFIPSKPVRELRELTRYRKTMVEEITAQKNRVEKFLQSTGFKLSTFCSDVFGVSGKAIMEHLARHGSISPSQVESLLKGRLRVKKEDIALATAGSLTELQQDFLSMILKHLYQLESNIPEIDRKIDQVATKFQQQIEQLDGIPGIDIVASQSVLAEIGTDMSKFKTAAHICSWAGLSPGNNESAGKKSPFAPPKETPTSRE

SEQ ID NO: 171501 - protein, 405 aa, unidentified
MEIFCGIDWSETAHDVAVVDETGRLLARRRIADDAAGFTALTELLAGYAGRPERVDVAIETGRGLLVAALRAAGHRVFAINPKAVDRYRDRHGVAGAKSDPGDARVLADILRTDRDRHRPLPADSDLAAAVGVLARAHQDAVWARVQDANRLRSLLREFFPAALTAFADLTTNTALAVLAAAPTPTAAARLSRANLTDLLRVAGRGTRPTEAARLAEIFTVDQLRQPPVVEAAMGQAVRAIVRTLTAANQSISDLEAALAAAFDQHPDGEILRSLPGLGPILAARVLSEFGDDPTRFPDPASRRAYAGTAPITRASGRSRVVLARHVRNKRLADACYLWAFAAPNRSPGARAYYDTRRAAGDRHNAALRRLASKLLGQLHHCLTTSRPYDEALAWPQPDTTPAAA

SEQ ID NO: 171502 - protein, 348 aa, unidentified
MEHICRIGMDTSKHFFQLYGVNAAEEPVLRKKLRRKDMVAFFEKLAPTVVAIEACGGSHHWARLLSSFGHQVKLIAPQLVKPYVKRGKNDAADAEALCEAMSRPTMRFVPVKTAEQQAAVMLVGVRDRLIRNRTQLANSIRGYASEFGLTAAKGMAHLDPLIERIQADESLPDLARELFAAQAKEYEQLQAQIDEVDVKLKAWHHADECGRRLAQIPGVGPIGAALLMMKTPAPEMFRSGRQFAAWIGLTPKDHSTGGKVRLGVITRAGDEALRSVLVVGATALLRFVANGKSKSALSPWLGQLLKRKPAKLVAVALANKLARIAWKLMVTGQSYVRKSTPTTVAGAA

SEQ ID NO: 171503 - protein, 392 aa, unidentified
MGRSRSKTEMAHYRLAVASPLSLLTNEMVSLTETAHRLTLTGPFPFFKGAIMADAKLIGIDLGKYSFFVHAQDARGQQLWRRKFTRHQLIMMLAQHPPCTVAMEACAGAHWLARKLQSFGHQPRLITPQFVKPFVKGNKTDFGDAQAICETASRPSMRFVAIKTPEQQTLLALHRVREALVSERTATSNQIHAFLLEFGISLPTGARAIARLPALLDEPAHELPPRLIATLLRLHRRYGQLGNEIAEIETDLKAQLAEDEAAQRLLTIPGIGPITASSLIAVIGDAHAFRHARDFAASLGLVPRQHSTGGRATLLGISKRGNAQLRSLLVQGARAVMRYIERRHDALGTWVQSLLRRRHSNVVACALANKMARIAWAILARGGEYRAQPSPA

SEQ ID NO: 171504 - protein, 401 aa, unidentified
MAPTAGIDWASEAHEVCVSEEGRVNERFSATHDERGIAAVAGKLVRLGVCRVAIERPDGILVERLLAAGLEVLAIHPNQVKAARARFAVAHGKSDRFDAYVLAELARTDAHRFRALVPDGEQTKALRALTRAREDLVGVRVDLANQLRAQLEAFWPGALLFAALDSPISLAFIERYPSPGDAKGLGAGRMAAFLARERYSGRTDPAELLARMKAAPQGTAGPEEQRARRAVVLGLVAALSPLVAEIAALDAQIRERLASHPDAAIFAPLFRDPKTTICPATLIAEIGDARGRYPTDAAMAADAGMSPVALESGKLRVATFRRACDKRLRVAMATLADSTRHWHPWAKEVYRRARARGQDHPHAIRTLGRAWIRVLWRCWRDEVPYDPTRHGNFGRLQAAGG

SEQ ID NO: 171505 - protein, 356 aa, unidentified
MSRDTKYIGMDVHKEAIVIAVLNDSGKLVMESIVETQASSILQFIHGLRGELHVTWEEGTWAAWLYDLLKPHVHEVLVCNPRRNALLKEGSKSDKVDARKLADLLRTGMLRPVYHGENGLRTLRELARSYQTISKDLNRVMNRLKALYRGWGIACSGTQVYAARYREEWLHKIPHAGVHRRAEVLYQQLDGLQALRRTLRPELLAESRKHKAAKLLRQIPCIGPIRAARLLALMQTPHRFRSKRQLWTYSGLGIETHESAQYRYVRGQLQRSKKPQQIRGLNQNHNHEMKEIFKGAATRASCGVGPLRDFYVALLDKGMRPEMARLTLARKIAAIALTLWKKEERFDAEQLKPQAA

SEQ ID NO: 171506 - protein, 328 aa, unidentified
MAKPITICAGIDTGKRKLDVALDGSKEQLQVENTAEGHKVLLTWLHQHRVKRVGIEASGGYEQPVVSELRRKHIVVVVFQPAQVRAYAKFQLQRAKNDKIDAALIAACTAAVRKIHAAPDPRLQPFAEQLTMIDQIGEDIARLKNRSESCRDAQINKLWKADIARLEKREKAALKALVTSIRKHPDLARRLDLINSVEGIGLPTAVAILVRLPEIGRITREQAAALAGLAPYDDDSGEHVGVRHIEGGRKRLRRALYTASLAASFRWNPQLIALYQRLTAAGKQHKRALVACARKLLIFANTVVARGTPWCSQPPAAKASPTTASSVS

SEQ ID NO: 171507 - protein, 432 aa, unidentified
MSQFLNDFVVGIDVSSEFSIVAMLAPTGELIRKPFRIDHNPAGFHKLLDILKKEEERLKRKPIYFVESTGIFHLPLFFFLKSNDLRGFVLNPLCVHSTKNFDLRKVKNDNKDSEAIARLAKYQDVKVSMMPEPQILVLRMMTREYYAVSDMLTEMKNRLCTDLYLLFPGYLNVFSGPFGKTALAVLKSYPSPRAIRDADTDLLTLLISKTSRKSSEWASNKVALLRDCAQLASSMPSEFSLLDTKIKFHIDGIEHMQASLNGIEAQVHTMIDSPQFSAKARRNVELLDEIPGVGFFTAATLIAEIGDFSLFNSPKALTAFFGLDPSVNQSGKFNGDRNKISKRGTRIGRRVLFTVAMASIRRTRNGKEINPVLRDFYTSKCISKKKKVALVAVMHKLLHYIFAVLRDQKSFEFRRPEDHQSWRKAKLQPAAA

SEQ ID NO: 171508 - protein, 399 aa, unidentified
MRKIIGIDVSKSTAKLSVAIDAKTVYEGDITLDMIGFTSLKAIIDSYGGAEVVFEATGVYSRRLERYLLDESITYHILNPLVAKKRLDDGSRTRKNDVRDARGLAITEFAKHPKPFKPSFYDPVYRELMDISRYYDQQTEDLKRTKNRIHRLIQLSFPGIEEELDLRKPSALHTLTLFSHPAELTGLSFENIKTQILDMHLKGVGAVRSSNLARALWRSRARSYPAVSGNSFVVQAVKHETQKALKLLSEREETVQAMVSLAERTPEYVILLSIPNIAENTAVRLIAELGDIRRFETRAKLNSFIGLDLREIQSGDYTAQRKITKHGDAHTRKLLYWTVINMVSSGAQPSHIRDFYAKRQATASRRKPLLVACMDRLLKTIHYLVNTNQLYSYELACSR

SEQ ID NO: 171509 - protein, 364 aa, unidentified
MKERKTLTRYVGIDLGKRTYEMAVVGKGGKVTKSNGKTYPFARQGLYNKLRPGDKVALESCRLAFIMAKEMEASVGCQVYVLNPGRLSIIYKSMKKTDKEDALKLAHILEDFSEDRLPVVTVPSDKEMGRRKILANYRRADQNRTRNINLLHALFVSQGITTIKKTELETGEARNKTIQILVGMERDEAEYLAKCLDLIEERKEKLDRMINEEAANDEEMKRLQEVPGVGPKVSFAFVSHVGAARFENASQLSNYLGLVPRVFMSGDTVRYGSITKRGNSYVRAMLVQAAWATVRAKKGGKLKEMFEYMTIEKSKGKKKAIVAVARRIAELLYLLMRDEVRYVSRPFISPEKKKEAEKVQLLSA

SEQ ID NO: 171510 - protein, 359 aa, unidentified
MELEEALMQIVSALDVHRRQITYKTLDRETGEVRRGRIAPAARSDVRGWLARFAGCEAEFVLEGTTGWRFVVEEIERAGHTAHLADPAETAAKRGRKRRAKTDNADCDLQLRLLLAGELPESWIPPAHILELRTRVRMRKTLVDQRSAWQQRLQAQLFHQGTAAGLRPRTRAGRKALARVELSAAGRELVALALRMLDVIDQELAPLDEGLGSFARRQPGCRALIAQLYGVGVVTATAILAELGDCRRFTSSDDAVRHTGLDVTVHQSDSKRAPGHLSHEGPAVLRWALFEAAQSAARRSSPDHAYFCQVRERIDYNRACLSVARKLCRRAYHILRELGEQALAPVEFDQAEEAIEAAA

SEQ ID NO: 171511 - protein, 424 aa, unidentified
MKTTTTNPQSQNNSMAILAFDVSKDRLNLAACIAGRLSDHEFANRTPVIEEQLKTWQRRAQMAGHDRVLVVCEPTGCYHEPLLQTARRLGLETAWVSGEAVFKMRAIETNDAGKTDIKDPHVISTLAQMGKTLICRHYDEPYSLLREWHGLYDQADVGVVRAKCLIASQIKTLFPDYDFQKDFLYSKSGSALLAQYGANPYRIVRTGKTRFAKVMRKHAPRIRQSTIDRLYAQAESSVKNQLSPRLNHIMERRLVQSWEDYLHYEKRKQEAQEQMEALYQEARQLDPQLPAAEKGVITAFHLARILAETGPISDFASLRKFMRYAGLNIREKQSGKFKGKNKLSKKGRSLLRKALSQMVLPLVKKTGLFGPYYHGKKAHGMSGTKAMAAVMRKFLKLFYGWYKSGGAFDRARVFACESQYGLAA

SEQ ID NO: 171512 - protein, 441 aa, unidentified
MEAVYRRCAGLDVHKDVIEVCVLPPAGQSGSPQRRRFATFTSDLIRLRMWLVSLKATEVAMESTGLYWVPVWRQLEGHIGKRLLCNPQQVKALAGRKSDRRDGQRIAEFLQDGRLDPSFVPPKEIQQLRELLRMRVSLVQEHNRLSNRVEKLLQSYGVKLSSVASDILGKTGQRILTALAAGQTDPDQLSWKAVGSLREKEAQLRRALRADFDEHSCWMLGVLLGQLKENEQWREQLEQRITEGMKPYEPIVIRLMTIPGVDRLTAWSMVAELGTDMSVFPDQRHCASWAGVCPGTNESAGKQHSTRTRRGNRYLRRILTQSAWATSRCKRGYLRAAFHRIAQRRGHKKAVVTIAHKILVAAYFIIRDKTTYLELGEDYFDLLHPERTARRLARRLERIGYQVTLTKAAATAPQSSEGQQPKKRGRPCKCAERGIDCKHKR

SEQ ID NO: 171513 - protein, 344 aa, unidentified
MDHFAGLDVSVKETSVCIVDDAGKIVREVKVVSEPDALLSVLSNPAYHFKRIGLEAGPLSQWLFSALAEAGLPVICVETRHMQAVLKAQINKTDRNDARGIAQMMRVGLYRPVHVKTLRSQKLRMLLTHRKLLQSKAIAIENDLRGTLRNFGLKVGIVGKVKFEARIKELVENLPDLAALVEPLLIVRRVLREQIIILHRRLLAIVRDDEVCRRLMTTPGVGPVVALTYRATVDVPARFRRSKAVGAVFGLTCSKYQSGEIDRNGRISRCGDEMMRVMLYEAAQSMLRSKKWSWLKAWAMQIARRRGMKKAIVALARRLAVIMHRMWVDGTEFRWTREQAAAAA

SEQ ID NO: 171514 - protein, 406 aa, unidentified
MLFVGDDWAEDHHDVEVQDETGRRLAKARLPEGISGIARLHALVGRFLPEDDNAAAVKIGIETDRGPWVAALVASGYQVYAVNPLQSARARQGNGVSGAKSDAGDAHVLADLVRTGCHQLRTIAGDSEQAGAVKVLTRMHQTLIWDRTRQVLRLRSSLREFFPAALEAYEDLASPDVLELLTKAPEPHSAAALTRAQITAVLKRARRRDRDAKTTAILAALRAEHLTQPSLIAAAYGATVRALAAMITTSNDQITALEGPVEASFGQHPDAEIYLSQPGLGPILGARVLAEFGDDPTRYTGARARKNYAGTSPITRASGKKKVVLARYVRNKRLADALHRQAFCALRRSPGARAYYDALRDRDIGYNAALRQLGNRLVGILHGCLKTHTLYDEAVAWNELAQQVAA

SEQ ID NO: 171515 - protein, 361 aa, unidentified
MNKKKLNHLGIDVGKRICRVALKDDMGKILDEFFFGNSYQGILELIKRIQDHGTKKCNAVLESTGNMWMRIHDTLEDNGIDTILANPYKTKIIAQAKIKSDKLDARILSDLLRSGLISESYVPVKEFREKRSLVRHRIALSRTKTKLANKVHAILDKYEYRTELADIFGKSGINWLKSLSVSPIDKIILNTTLSSIESIDNQIEIVSKEIAKYAWKDSQDVTILLSMTGIDIFSAMLISTEIVDITRFSTPWKLVSYAGLVPSTRESSGKIKTGRITKQGSPLLRWILVQCSLSAIRHDHHMRTFYERIKQRKGHGKAIVATAKEMLVIIWYMLTRHQLYKYINRSRYDQKLESLKKIGSQ

SEQ ID NO: 171516 - protein, 350 aa, unidentified
MTMVGGLDVHRHQITFDYVDDDGLVHWGQIRPATRHTLRVWLGERCPQRDAEFALEGCTGWRYVSDELAAAGVGVHLGDPAEIAALRGPKKRAKTDRADARLLRTLLLEGRFPESWIPPAHMLEIRTLGRLYCTLMDQRRAWQQRIHAQLFHQGCPPIRALLSAAGREALAGAELSAVGRQYVDAALWRIDELSAEIEPLRTQIVNFARRQAGCRALQTHYGIGWLCAAIIWAEIGDARRFTSSDQLVRYAGMDVTVYSSDNKRAPGHLSRQGSPELRWAAFEAAKCAARRGSPDYAYYRRLAAKHERHNGKNPTLAVERKILRRCYHTLRELGAPALALPDTSSQQAAA

SEQ ID NO: 171517 - protein, 431 aa, unidentified
MLELGEDLSIGLGSGEYFGRKKSLAPAALSSFCRVAPCPWTINVGRFRGIADIGNRRPGPIYDGVDAPPTASMCQSGGVEHHLREASVSEVSIIGLDIAKHVFHAHGADERGRAILSKRISRGKLLDFFAAQPRCMVALEACGGAHHWARQLTQLGHKVRLIPPAYVKPFVKRQKNDAIDAEAICEAAQRPSMRFVAVKSEQQQAAGLVFRTRDLLVRQRTQLINAIRGHLTEYGWVAPKGPSHVAMLADLLEKEEMVNSLPEAARAMFRVMLDLLAGLNSKIADLDKEIARRAREDEVSRRLMTVPGIGPISATAIAALAPPAETFAKGRDFAAWLGLTPLQRSTGGKQKLGATSKMGERTLRRLLIIGSSAVVKQASKRGAPRGSWLEQMLARKSRMLVTVALANKMARIVWALLVKQENYRAPVAAKA

SEQ ID NO: 171518 - protein, 362 aa, unidentified
MAESTTFVAFDQHAATTMAAVLLPGQRTPALHPMTSDLGELRRFVRRLRASGDLRCCYEAGPCGFELQRALATDGVPCDVIAPALIPRRPGDRIKTDRRDARQLAVLYRAGALTPIHIPTEQEEAARDLLRCREDLRADLLRARHRLSKFLLRHGRRFTGTKKAWSKRHETWLRAQTWALPALDQTHRAYLRAVEEAVARLRAVEADLQALLTLEPLRARVERLRCFRGIDDLTALTIAAEFGDLRRFPTAPSTMAFVGLVPSEHSSGGKRAQGAITKTGNAHLRRVLVEAAWHYRHHPFVGRALQRRQANAPPDVVARAWTAQQRLHRKYARLAARGKAKQHVVTAVARELTGFVWAVLTQ

SEQ ID NO: 171519 - protein, 455 aa, unidentified
MSDRSRRRLSRGDRRRNEKLGLLREIVTRETAVLAFDLAADKQVCALTDPDSRVLARRTVRVKAWQLSEAVAWGLARAAEAGFESVVVGCEPTGHRWRVLDQLAAEAGVRLVCVQPLLVARAREAEDFTRNKNDDVDATIIARLVTELRCYLPERADPSWARLRHLGARRARLVTAAGAARQQVRDLLECAWPAVLGAASKPLVSASWLAAVAVATDWVDASGDLGVLARRGFDAFAAAVRAELGPTRWYSAIVRAVFAAATDPAHAAVGVAGQRAGALERVRFALDDLAHARAELARVEARMIGVLDTLGLTELVETIPGLSAVGAAAILAETGDPTRFASARSLVKHAGLCPRDNASGTYQGKTGISGRGRPELRLAAWRAVFTALQHNPVLAARHRHLTGRADNPLTDTQARVAVAASLLRQLHAVVVTRTGWNSTIAAGLDRDERGTAAAA

SEQ ID NO: 171520 - protein, 372 aa, unidentified
MTQSNILFIGMDVHKESIVISLADDDRSEVRRYGTIGGTSDDFKKTLRKLVATGKELFFCYEAGPTGYELYRLIVSQGHQCIVVAPSLIPKKPGDKIKTDKRDADNLTRLLRSGDLTAVYVPNAEDEAMRDLSRAREDAVIVLKQAKQRLKSFLLRYNIRFDGSANWSEKHLHWLAESVNMPYPEQKIVYQEYLNSVTEANTRVKRFDKEILFHTKQWRLYPIVESLMALRGVRMVVAVTIIAELGDLTRFTNPKQLMCFLGLTPSEHSSGDKKKKGAITKTGNQHARRVLVEAGWAYRFHAKVSKEMQKRQDGTPLKVRDIAWKAQLRLTKRFRMMANNGKPRNVIVVAMAREIVAFMWAIAQEIPIAPRK

SEQ ID NO: 171521 - protein, 458 aa, unidentified
MYRELFPLRQALSAELKANLSPAVPGIDSEHLLQSYLDRLTMYVGCDVADQILTFFAVDTAGDELGHLSAANDPPGFELAWDWLEDLRSRHGLRIMLLAMETTGVYYWACWDFLAQRPNLARVLYNPRTTEHMTEVLSKKVRNELVDAYALAEQVRLGSTPEVVLSEDPDLLTARFCSRAARDLAGQINRKKNQLRALLRAYNPAISQVFPGSKFHHQAVYALLQQYVFPDECVDAGVEAITAILEVHCRTAFDRQHAQRLVARCRDTLSRPIRREEIRQRVHHLIDDITTCQKRKTYFNKAGYRLIENRPETPLLRDATGAGISNTLALVSEIGDVQRFKSGEHLASFLGLTTSKHISGTTVFVSKHITKQGSPNGRYAAVNIAQHMSQRVPKYQRMYERIKNRKPPRKGHYVALVAVARDFVTNVLYDMWRYQRPFFREVEDYRAYRRKNPRTDEE

SEQ ID NO: 171522 - protein, 424 aa, unidentified
MLAVGIDWAEAFHLVALGRPGEGVIGVRRVEHTPAAVAALLADIAALEPDPAEVRVVLETRHGVLVERLVDAGFVVLPVNPDLIARRRGPARKKDDAEDARLACLLALDRYTSLRPLLPHGELAAELRAIARDDERAARDQRRLLNRLRQDLLSTFPAALQLAGEELGAPTILKLLARWPTAAALGTATRHELVAFARGAHHGWPERLADQVAAALATDQFTPRDYLVRAKADTIRLAATQLLAIATQRRVWERRMGTLLLGAPRRGRANTPRQDELDQGQAFPGGEVYLSFPGLGDRLAARVAGEIGDHPQQFQSPNALACYAGKAPVTRRSGKSELVVACRLACNRYLAGAVQQWAFCSLRESGWARAFYDAQRARGKTHQAALRALGNRWLEVLWHCLRKGVRYDEATHVANRNRALGKAA

SEQ ID NO: 171523 - protein, 399 aa, unidentified
MNPVIGLDVSKGESHAQAFTDRGKPHGKIFQFEHNLEGLASFLNFLQDLECITGLRPAVVLEATGHYHSSVIQFLDEHQYLYIVINPLISHQAKKTSLRKVKTDIADAYQLGELFYKEELEPYKKRGQFMMNLRYLTRQHDSLTDMYVKAKLQFQAVLDQVFPEYRGVFGDLYSKVSLRFLALHPTSSAVLTKSLNGITATIQSLSGRSNSAWVLERALKLTAAAERNPFKETAFSSHLISLELLINLLLQYQEHLTNLDQSIDALAAELHEYELIQSIPGIGTRIAATILAEVGEIDRFDHAKKLVAFAGVDPSVFSSGKFTATRNRITKRGSRRLRTTLYLAVRCGLRSSRNQKLRDFYDKKRAEGKPFKVAVIACVNKLIHWIFAILTNKEAFRLT

SEQ ID NO: 171524 - protein, 406 aa, unidentified
MNIHDSPHIQVAVDIGSREHYVAIGLSEGGILDEFSITHTPAGFEYFFSRIECQERLYSLPVDVAMEGYNGWARPLDSQVQKHGYQLYNVNNLKLARFKEIFPAPAKSDSIDAHKMLELFQLQDHLPLAKGVLQAVLPVPDANRRLKRLTRRRRQLINEKVALQNRIQPDLQATCPTLLAMTGSIDNLWFLHFLTCRDDLTKLMRLQTKSLLAIQGVGRNYLNLILDWQKQAEFSNEIEEVGPMIQEDARRLLALMASIKTMDAKIDSQIQKSAYAQHIDSIPGFGLVCSAELAGEIGTLDRFPKQSSFSIYIGMAPLDNQSGGYQGTKSPKHVNTRARKAMMTAVCRHMAYVPESRAYYDKKRSEGKTHNKAVRALGRHISRVIWSMLHHDRDYIELANINEKAA

SEQ ID NO: 171525 - protein, 357 aa, unidentified
MNAVGIDVSKGKSMMMALQPMNQIVLKPREYPHTEVGLEQMAHDILRLGEDTRVIMEATGRYHEPVVAVLHEHGIRVTVMNPLFIKQSGGGSIRKVKTDKADARRIAKYGLDNWTDLREYTPMEAIREQLKLISRQYDLYMKNVVALQNNLISLTDKVFPGVNEMFSSPDRADGSQKWVDFIMTFWHCECIALISEAAFTERYRKWCKRKGYHFSGSKAADLYIDSIGHITTLPKNSNTKLMAEIGDVRRFPRRSSIVSFAGVDPAVDDSGKHISKSNPTTKRGSPHLRKTLYQIVCTYLRKAPADEPVYQFLDKKRAEGKPYFVYMTAAENKFLRIYYARVKEYLIAADSKELSED

SEQ ID NO: 171526 - protein, 357 aa, unidentified
MLFVGVDVHKDTHTAVGLSPFGEKIFEMTIGNEPEDFISLIEKTKVESEKTGLVPYFGLEDVHSWGERLSSFLVEEGLPVRAVAPILVDHRRQKTTHPEKSDSLDAHGVAEVMIQRIDSLPLYKLTEEAQKAKQIRELSLEREWLVKERARLKNQLHILLHRIHNSGYRAKFKDPFSKKALRYWMRSAPHNTDAILEQRMKRAVRRLLDLREEIQEIEEELVLTMKENSQTLSTASGCGVVIAAEIIGEIGDISRFHSPGALAKYAGCAPREYSSGKTIRWKKTKGGNRRLNRAFHRMALSQISRSGNDAARAYFKRKISEGKTKAQALVCLRRQLVNVVWMMLKHKTEYVYPQKIA

SEQ ID NO: 171527 - protein, 343 aa, unidentified
MKILKQSVGIDVSKSDFKVCLGKLDEQLSVAFSFQRAYDNNLKGVTVFLKEVSRLFTADVPVQFILEASGVYHELLANKIYQHGYEVSIILPSKSKAFFRSITQKVKTDKVDARLLSQLALERQLDNWVPADPIYAQMRSLTRERESNMKEKTVIINKIHAQQSAYQIAKSTLRRSKQRLKLLQKQIISIDSELKTLVESSEMLSSKVNRITKVKGLSLLTVATVIAETNGFGIIRNRRQLVGYAGLDVIINQSGQKSSKGRLSKKGNPHIRKALFMPALSSSRSNELMKIIYQQLNQRQAAKKQGVMVVAKKLLLLIYALWKNSTEYDPQKNIESRLVLATV

SEQ ID NO: 171528 - protein, 372 aa, unidentified
MKSIFYVGMDVHKEYYIVCIYRAETDLVEYYQKVEADYRQVLKYLEEIRRRSKEEIEFVCGYEAGCLGYTLYHQLTSCGIRCEILAPTSMGIVNTNRVKTDKRDAGNIAKCLAFHTYSAVHIPTEEDESVKEYMRMRDDQKKALKIIKQQLLSLVLRQGHHFTDGTKYWTGKHLKWLHGLELKTAVLQETLVEYLLSYQYLTDKLQRLDERIEELASGERYQKNVKKLSCFLGVKTHTALAVLVETGDFSRFSGAEKYAAYLGLVPSENSSGGKQSRGGITKAGNSHLRRLLVESAQAYTRGQIGYKSADLGRRQKGNEAEVIAYANKANERLRRKFYKMVLRQNKKRNIAATAIARELACFMWGIMTDNIA

SEQ ID NO: 171529 - protein, 326 aa, unidentified
MFFIGIDVSKAKLDCSLLLDVASSKRRAKTVANSKAGVSELLAWCVKQHASPYELHAILEGTGVYHEPAALALADAGVTVSIVNPAQVKDFGRSLGVRTKTDGVDSRVLARYGALLKPRAWTPPSLEARTLQALLARREAIAKDLQREHNRLEKADVTDTPALIRQSLVESIAFLEQQLTKLQQEIDNHINKHPGLKADRDLLTSIPAVGPQVGNHLLAVMHNHDFHSAEQLAAYLGLVPVERQSGSSVLGRPRLSKAGPARIRAVLYMAAIVGTQHNPHIKALYQRLQERGKTKMSALGAAMRKLVHLCFGVLKTRQPYQPNYAI

SEQ ID NO: 171530 - protein, 347 aa, unidentified
MRKIIVGIDISKEKLNVCLLEGVNIVHEDEIENTVTSLHKWFGQMRKSLRCRMDEVLLCAEFTGRYIYPLTVACHEEEAFLWMEDPSRIKNSFGLVRGKSDPVDARRIAEYAFRHLDKAVAYKLPDKELASIRILMSSRELILSDRKKYEAQIRDQRRFMSKEDYAMQAKIWKSIVRELQRRLDDVDKKVDELVAANERASHQVELLKSVDGVGQRIAVAMVVCTDCFTRFENARQFNCYAGMAPFTYTSGKSIYSKAKVSQRANKHMKALLHLAAVCVATHMKSGEYKEYYDRRIAEGKHPMCVLNIIRAKLVSRMFAVIKRDEMYSRDYNRNYLAKNLATPLQIP

SEQ ID NO: 171531 - protein, 341 aa, unidentified
MSEVTTIGLDIAKQVFHAHGADAQGATVFSRRVTRAKLIQFFASQPRCVVAMEACGGAHHWGRELQRLGHQVRLIPPAYVKPFVKRQKNDAADAQAICEAAQRPNMRFVAVKSEQQQASAAVFRARDLFVRQRTQFINALRGLLAEHGWVAPKGVFHARSMMAQIEDPSCSLPQGARDAFLAMIASIKALDEQIVLLDREIAQRAKEDPAARRLMTIPGIGPITATAILALAPPAESFRKGRDFAAWLGLTPRQRSTGGKQKLGAISKMGDRTLRRLIIIGSSAVVLHAARRGAPKGSWLEQMMARKPRMLVTVALANKTARIVWAVLARGEDYKAPVAAA

SEQ ID NO: 171532 - protein, 354 aa, unidentified
MYAAKVTPRRTKGKPASDGKNGPYAQFDHLVSLDWAIAVMAVAHLTRSMTVPQVFERPASLQVLKDYLKSLHGSIAVTFEETTTSHWLYLELRDCVDRIVVCNPYRNHLLSDGPKTDKIDAAKLVLLMRAGLLKEVFHADDELYDLRLLVSAYTDLIQAGVRFKNQRSALERGHGDESTHAAFIIEHLEKFIALYGESKKDYVQKFTAFCRRNKHLRHLLAIHGIDVLGAVKILALVVDARRFPRTGHFLSYSGLVRNEKFSGGRRYGKQKPQFSRTLKSVFKTAALAALRGHNPIREYYDHLLARGMSEEHARHEIARYLATCTYGVLKTGTPYDPYRWRNNSTVALRISMAG

SEQ ID NO: 171533 - protein, 345 aa, unidentified
MKEVSIIGVDLAKQVFQLHGATEEGEVVFRKQLSRKQFLAFLQKQPACLVAMEACATAHHWARTLASFGHEVRLIAPKFVRPYVKNQKNDMADAEAIAEAASRPTMRFVEVKTPEQQGLGMIFRLRDLLVGQRTQTINALRGHLAEFGLVAGKGRENVDKLRAALQPGQEGVEDLPPVVLHMTQLFFDQIDDLSRRIAELDGRIAAASRGSRFSARLQRMPGIGPITALALAAFAPPMESFRQGRDFSAWLGLVPRQHSSGGKQRLGRTSKSGQRDIRRLLIIGAMAVISGTKARPPSESSWLGRIMSRKPRMLVAIALANKMARMLWAMITKDEEFRGGPLLAN

SEQ ID NO: 171534 - protein, 346 aa, unidentified
MTIVGGFDVHRQQITFDYVDTDTGRVRWGQIRPATRHTLRAWLAEHCPGGDAEIAVEGCTGWRYVVEELTAAGAAARLADPAETAGLRGPKKRAKTDRADARLLRTLLLEGRLPLSWIPPEQVLEARTLGRLYCALMDERRAWQQRIHAQLFHQGCPPITGLLTVAGRDGLARAELSVAGRQYVDTALRTIDSLTVEIDSLRAQLVSFAHRQPGCRALQADHYGVGWLCAVIIWAEIGDARRFRSSDQVVRFAGLDITVYSSDGKRSPGHLSRQGSPELRWAAFEAARCAARRGSPDYAYYHKVAAVLDGKRPALAVERKLLRRCYHTLRELGEVAMAPVMEREVA

SEQ ID NO: 171535 - protein, 353 aa, unidentified
MKYVGLDWAYRTAQWCALAPGGEIAGEGRIAADRDGLARLVLELGDEVTACLEMMSGALWVHDQLVDCGWQVEVADARKVKTVAPLAAKTDKVDARLLAELSRRELVPALWLPSLDERALRERLRRRMHLVRLRTSAKGRIFGLQTQWGVRVSLARLRRADGLTLLERAGVPEVWRRSVGECLALIDFLDARLEPLDAELRPFAKADPRAVLLDTIPGIAELLALTIAVEVGEISRFASPEKLVSYGRLAPRVRQSGQARPRSGPLSKSGSRLLGWAAVEAAQQAWRESNPWHGLYLDVSARSGNRNSAKAAVARKILIAVWHMLSRNEPFNPAPRSTRGDSVPASSRLALAA

SEQ ID NO: 171536 - protein, 416 aa, unidentified
MADPEKSSTFERYLAIDAHRHYVVVGGLNAQLEVVLPAQRMEMERYSEWAKENLTRKDMVVIEASTNTWDLYDITAAVAGKVVVAHPLAVKLIAHARVKTDKQDVFRLARLLAGGLIPEVWVPPVPVRELRSLIAHRRRLIQMRSMTRNRLHSLAQRHNLILPEGGAFTDKNQGWWKRLSLSPVEKLDLQQNLALLEFLEPEVKAVDAELAQLSTCEPWKEAVPYLIQLPGFGLIVTMTVLSAIGDIQRFPTSKQLVGYSGLGASLHQSGETNYSGRITKQGRRDLRFALVEAAWTVISSSPYWREQYQKLSHRMPTNKAIVAIARRLLVAVWHVLTERTIDRRADPDMIAAKLMIWSWKLNDAQRGGLTSRQFVRYGLMRLKIGQEIDRIKRKGNRPIASVEEVLERVSELNLSI

SEQ ID NO: 171537 - protein, 412 aa, unidentified
MEAIIERCCGLDVHQKTVVACVLIGAPGVHPTKEVRTFRTVTRDLEALRDWLQELGVTHVGMESTGVYWRPVYAVLEGCFELIVGNARHIRNVPERKTDVKDSEWIADLVRHGLIAKSFVPPRPLRELRELLRYRRKLVESQAAERNRLLKLLETANIKLASVASDVFGVSGRAMLRALIAGETSAEAMADLARGLLRRKRADLILALDGRLEEHHRFLLAMQLRRLEAIEADIAALDLRIDERLEPYRAPHTLLMQIPGVDWVVAAVLIAEIGVDMSVFVSVYHLSAWAGVCPGNHESAGRQKSGRARKGNIHLRTILVSAAISASRVKGSYLKDKFHRLKARRGGLRAALAIAHKILVAAYHMLVKNLPYRDLGEAYLDQISQTRTVANLKRRLERLGYRVVLEPNAQAT

SEQ ID NO: 171538 - protein, 424 aa, unidentified
MKVTYLTCCGVDVHKSFLVATIVKTTGGIEPSYQKKRFSTFNHSILEFKQWLLENDCHDVCMESTGKYWVPAFNLLEDEINVTIANPKWVKAVKGNKDDTKDSKWIGDLFRLGLVKGSYIPCKKIRILREYTRYRYKLVSCRSSEKNRYQNALTVCNVALDSVVSDIFGKSSTSIIDYLLEQADNSINHEEIASKLLRRLKSKEDAVIESIEGYQMTDSQKYRIRLVRAHMDYITAEINDVDSMIESMISSDPDYENAIQFLMTIPGVKRDSAITIISETGIDMSQFCSSKRLCCWAGLVPGSNESGGKKKSVRIARAGVYLKPALVQCAHAAVKSEKSPYYKKKYESLMKRRGKKRAIVAVARMILTAIYQMLSTGEAWNPSDLYKIDMPEALLEKQKTKAIKQAMKLLQREGLYPPPEPIAS

SEQ ID NO: 171539 - protein, 480 aa, unidentified
MIPGIQYTEKGGFKMKPFYMGVDVSKGYADFMILNSKKQPVAQAFQLDDTFEGHQSLYKILGRFLTDHPESALFAGMESTGGYENNWYKSLIEFQGSLNIQTTRLNPLGVMHNSKADLKKNTTDKISAQNIAEYLIAHPEKVVYQQEDQLAGLRKQWSFIKMLTKQSTQFLNQLNMLLYTANPELLSYCQDGMPDWMLKLLVKYPSAARLKNAHAKTVATIPYVSRMRAQKVIADAKRSVASATDTTTEQLIVATTRQILHLKKTITEQTKRMINECPISEIELLKTFPGIGDTSAIGLIIEIQTVKRFTGVKKLVSFFGVHPVYKISGDGVGGFKMSKQGRKEPRQILYMVTLSAIRYNPLIRKIYEKHQKRGKHNMAAIGICMHKILRILYGMLKHNKPFNPQIDIRNRQRSVRVKSDVPVKDTNRRFQDYDLKAPVTRRQRKKRLERERPHNATNIKSGVTAPVPLADIIANILPQL

SEQ ID NO: 171540 - protein, 359 aa, unidentified
MQRQSNQLNFEGQNIFVGIDVHKKSWTVCIFSEHLEHKKFSQPPTVEALKTYLHRNFPGATYHSAYEAGFCGFHVHYSLLQAGVNNIVVNAADVPTTHKEKTNKTDKRDSRKLGRSLRAGELEGIYIPTRKTQEDRSLMRLRYSVRKDLTRVKLRIKSMLNFYGIDHPEQFASETKHWSQRYMKWLKTISMEEESGRAVLQTLIFEVEEMRKILLDVTRKIRTLSVTASYEKDYKLLFGIPGIGLITGMTFLTEIEDISRFSSTNHFASYVGLVPTCHNTGDKENDGDITGRAKKILRDLIVESAWSASRKDPALLMAFGKLCKRMEPNNALIRIARKLLNRIYYVLKTKNEYVCGTVE

SEQ ID NO: 171541 - protein, 313 aa, unidentified
MATERVHIGVDVSKGSLDVFIPGGKTFRTKNTAPAVRRLVRRIKAEQPSAMFCCESTGGYERTLLDACREEGQPVCLMNALQVRRYAEHRGTLEKTDRIDASVISMAADDKNPAPLVHPDERQRKLKELWTLRTQLTGARDAERNRLEHLREKKAVAAIRKIIAVYDKQIAELERLCRESVSQDEASRALTERLQLVKGVGPLTALALAALLPELLFLEDKRLAKLAGVAPICDQSGTLDGPRHIMKGRTLVRRSLYWAAVTASRHNRILSAVYARLVKAGKAKKVALVAVMRKLLCLMRRIAQNPDFVPAST

SEQ ID NO: 171542 - protein, 357 aa, unidentified
MLSSNVKYIGLDVHKEAIAIAVVNGAGKLVMESIVENKSSTVLDFLHGLRGELHVTLEEGTWAAWLYDVLKPHVREMVVCNPRRNALLKEGSKSDKIDARKLAELLRAGLLRAVYHGENGLQTLRELARSYLTISKDLKRVKNRLKALYHSWGICCAGKQVYAARHGEQWLSKIAQVGVHRRAELFYQQLDGLLVLRNTVRGELLAESQKHQAVKILRQVPSIGPLRAALLLALMQTPHRFRSKRQLWTYSGLAVVTHDSAQHRYVDGQLQRSKKPQQIRGLNQNHNHAMKEIFKSAALNASRCAGPLQDFYARLLAKGMKPDMARLTLARKIAAITLALWKKGGSFDAEQLKSQAA

SEQ ID NO: 171543 - protein, 411 aa, unidentified
MLKIVYPVCCGIDVHKKFIVTCIVSTDAKGIPTYKSSRFSTFTKGLKALKDWLSANACTDVCMESTGKYWIPVFNILEDTCKITLAHPKYVKAIRGKKTDKKDAKWIADLFKHNLVAASFMPPLAIRQLRDLMRYRFKLINMRSSESKRTQNCLTVSNIQLSNVVSDTFGKSSMAIIDKILENPFVTNFDVAPLIHGSMRSKIPELQLAIDGLITPEQAFKLGVIRQHYDSINECKNKLEAFIRTLALPYSAELNLILTVPGIREFSAVAIISEIGVDMSAFPSAKHLCSWAGLTPTNNESAGKKHSVRISCAGVYIKPLLVQCANAVVTSKRHPEIRNRYLAIKKRRGHKKAIIAIARMMLTAVYHILAKKEAYNPIFYAKMNLSSPSREITPEQALVFAERQGFIIKVS

SEQ ID NO: 171544 - protein, 355 aa, unidentified
MYGLKHQKEKRSMEHFAGLDVSVKETSICIVDDTGRIVREVKVASEPEALLAVLKSSTYRFKRIGLEAGPLSQWLFSALAEAGLSVICVETRHMRAVLKAQINKTDRNDARGIAQMMRAGLYRPVHVKTLRSQKLRMLLTHRKLLQSKAIAVENDLRGTLRNFGLKVGIVGKLKFEARINELIENLPDLAVLVEPLLVVRRVLREQLGILHRRVLAIVQDDEVCRRLMTTPGVGPVVALTFRATVDVPARFRNSKAVGAVLGLTPSRYQSGEINRTGAISKCGDEMMRVMLYEAAQSMLVRSAKWSWLKAWAMQIARRRGVKKAIVALARRLAVIMHRIWVDGAEFRWSKNAVAA

SEQ ID NO: 171545 - protein, 343 aa, unidentified
MNIKTKQHYFVGLDVHLRFTAVCILNANGKIVKEQSVRGHSPEVCKFLRETIVSRFDVVFEACDGYGIWHERLCKFARRVVVAHPNHLKAIWNTKRKTDRIDARKLARLLMLDLIPTIHIPSIDVRDWRMLIQHRKTLVQKRTAVKNKLRAILRRNHIKAPKNLWSKKNQRWLIEAQLPSDGEALQRDMLQADMEHHDKQIYRVEMELNSRAHAHPGVLLLKTIPWIGNRTSEAVVAWIDDVSRFSRTKQIGAYFGLVVSEDSSGGKQRQGRITREGPGIVRQLLVEAIWRMYRYDPTVRGWVNRIMHGQPKRKHIAVVAAAHKLARSMFAMLQTGEIWNPAA

SEQ ID NO: 171546 - protein, 405 aa, unidentified
MERVFVGHDWAETHHDVHVADADGKRLAKARLPEGVEGVSGFHELVAPFVEEPDEVVIATETDRGLFVGALVAAGYQVLAVNPMSTSRYRERFSTSGAKSDPGDAFVLAELARNDRHNHRPVAGDSEEAQAIKALARAHQSMIWTRQRQVNQLRSTLREFYPGFLGAFDDLDAGDALAVLEVAPTPALGRALSRSKIASALRRGGRQRRIEERTVEIQTALRADDLEAPAPVAEAMGASVRALGAVISELVVQIHGLEGELTARFEQHPDAKVIQSLPGLGMILGARVLGEFGDDPNRYCDAKSRKNYAGTSPITRASGKHRVVLARYAPNKHLADAAYLWAFCAITASPGAPAFYKERRCHGDTHNRALRALSNRLVGILHGCLRYGTLYDEHTAWGHRITAAA

SEQ ID NO: 171547 - protein, 351 aa, unidentified
METQQTASAKLFIGIDIHKRSWKVHCSTDLFAGKSFSMPPDALQLRTFVHKHFPDHEVSTAYEAGCCGYSAHCSFISFGWNSLVVNPADIHRKGKERFTKTDRIDAQLISRELKDGRLESIEVPDTHREALRSLFRRRNDLVKDFIRIKSYIKMQLLYFGIKVPEHFDNDHWSHDYRKWLDEMVFEYPIAKASLESRMRYFRFVDEDLRLVSCQLLAYCRKHFKKDYYLLKSIPGIGGIVACGILSELGDLRRFSSVKHLAGYVGLAPGVYQSAETYRVMGMTPRAHRLLRSYFIEASWQAIRTDPVMQAYYRKHYGKNVKSIIVKVARKLLSRTLAVIKTETPYQIGVIE

SEQ ID NO: 171548 - protein, 402 aa, unidentified
MRVIGLDVHRSFAQVAILDNGQLADRGRIPMLREEVLAFARGLTLSDEVVLEATGNTAVIAGLLKPYVHRVVIANPLQVKAIAWAKVKTDKIDAGVLAKLHASGFLPEVWMPDECTQTRRRCIASRTQIVSQMTRLKNRIQSVLHANLIPRESGKLYTKTGRGRLERLALPADQKRNVLRHLEELDRLAAELAILDKELAAEALKNADVKRLMTIGGVNAIVAMSVLAAIGDISRFSTPEKLVSYLGLNPSVHQSGDHPAYHGHISKQGRGQARAMLVETIWSIANMPGPLRAFFLRVSAKRGKQVAAIATARKLTVLIWHMLTKGQDYAWVRPALLQWKFRELELKAGNPSRRGGNRPGPAREYSLQTVRDKERAWLGMAEDEYRRFVASWKPKPPRGAAG

SEQ ID NO: 171549 - protein, 333 aa, unidentified
MQGRAKEGESTEEKMDEEKVYAGVDVAKDSMDIAIHVSGEHRSFANDEEGIDQAVVYLKELAPTLVVLEATGGIELPLAAALAAVRVPVAVVNPRQVRDFAKSTGKLAKTDILDARALAYFAAAIRPQPRPLADAQTQELGAIVSRRRQLIGMLVAEKNRFRSARGKVRQHIQEHIAWLEKDLANIDSELKQKVQESPVWQEKDKLLRSVPGIGRVLSATLLAKLPELGTLNRREIAALVGVAPLNRDSGTFRGKRTVWGGRAPVRATLYMAALVSTRHNPVIKRFYQRLCAAGKAKKVALTACMRKLLTILNAMIKGHVPWNAPATILGPCH

SEQ ID NO: 171550 - protein, 367 aa, unidentified
MKKHTTMNKPVSATDVSVCTTVAVDLAKKVFQVAGEDAQGQLAYEQRIKSREAFQVFLQKLPEGVTVLMETGPGAQAWARLLQAQGNPVRILPAQRVAEHRSGAKNDRNDAHAILRAGRDSSIASVPVKSVALLAMQAWHRVRRGYVRRRTAMGNQIRGLLLEQGIALAQGDVGLKQGVTRVLEDARQPLPDLLRELIDEMLNEWQRLGERIAALTGRLEACAAADPTAKRLMTVRGIGPITATALLAKQVEPERFANARQFAAYFGIVPDQHSSGQKVRLGKMTKRGDAYVRSLMVVGSHAVLKQLRPDSEHPDDRRLQRWLQRLGRKGAAVRLANRNLRIAWVLLCSEQTYQRKPNACREMEMSH

SEQ ID NO: 171551 - protein, 354 aa, unidentified
MSQKLNSKVAVIGIDIGKNSFHIVGQDRRGALVLRQKWSRGQVEARLANLPPCLIGMEACTGAHHLSRKLQALGHDARLMPAKYVRPYSKGEKNDYRDAEAIAEAVQRPTMKFVATKTAEQLDLQALHRVRERLVSQRTGIINQIRAFLLERGVAVRQGLRFLRAALPGILAAPPDVLSPRMVRVIEDLAVDWRRLDERIEGLSSEIEAIARQDSGCERLMSVPGIGPIISSAMVAAIGAGDAFAKGRDFAAWLGLVPRQMSTGDRTILGKISKRGNRYLRVLFVQAAWVVLIKPKIWERHGLKPWIEAAKKRLHYNVLAIALANKLARIAWSVLARGRNFEVRKIDEAAAQTA

SEQ ID NO: 171552 - protein, 349 aa, unidentified
MSAKFDSEIAVIGIDIGKNSFHVVGLDRRGAIVLRQKWSRGQVEVRLSNLPPCLIGMEACVGAHHLSRKLTSLGHDARLMPAKYVRPYSRGQKNDFRDAEAIAEAVQRPTMKFVATKTAEQLDLQALHRVRERLVSQRTGIINQIRAFLLERGVAVRQGLRFLRAELPRILARPCKALSPRMLRVIEDLAGDWRRLDERIDGLSTEIEVLARQDAGCERLMSVPGIGPIISSAIVAAIGGGDAFSKGRDFAAWLGLVPKQSSTGDRTILGKISKRGNRYLRVLFVQAAWAVLIKPKSWARHGLKPWLEAAKKRLHHNVVAVALANKLARIAWSVLAHGRVFEATRIRAA

SEQ ID NO: 171553 - protein, 316 aa, unidentified
MVNVIVGIDVGKWRLDVSVSQGPVRSFANTPAGIVALVDWVASLGASEAVCEPTGGYEREVVRRLRESGMPVHVAHPNKVRHFARAAGREAKTDVLDAQVLSHYGEVFPMADSQPGDGDNQELKDLLKRRKDLVDERVRESNRLEKGLRGGARRSTERHIGWLNKEIERIEKEYRKALSENARLSEAAALYRSVPGVGELTAASLVAYLPELGKLEGKELTALVGLAPWSRDSGAQRGYRSIRGGRGAVRRVLYLAALSAVRCNEELGQFYRRLQNRGKTGKVALVAVMRKLLVLLNAVARRGTAFNNSPPAAQAA

SEQ ID NO: 171554 - protein, 339 aa, unidentified
MFYSGIDQHKRDSFITTYGPHGEVVNQKRVPNSAMLIQRYFSQLPGPHKAVVESTGSWYWLADLLEAQGVELTLAHTTRLKAISAAKVKTNKIDSDVLAMLLRADVIPEAHMISPEMRGPRDLMRTRLRLVEKCASCRNSIERLLEKFNLHDVTELDELYRLQAACHKAQIELLHDQINTLEAALHPHLIPNQDIQRLLWIPGIGKLNAFTIYTEIDGIERFPSANQFFSYCRLVPGAANTGTRTRHRSGSKQGNRYLKLAFGHAAVRAIQYYPEIRAFYRAKRRKKPERIARTLVALEIARIVYHVLSRQEHFNGLFKGKPLSRTKQSRWPRLASPSA

SEQ ID NO: 171555 - protein, 418 aa, unidentified
MGQREAAYWVGVDWGHEEHVVCVLDAQGTPVLRFRVAHCPEGLQELVARLREYEPLGGIAVESNRSVLIDALLQANFAVYPINPKLSSKWRKAWSVSGAKDDGRDALVLAHGLIHQRQWLKPLKPDSESARELALLCEDEARFIGMQTCMVQQLKDTLRQYYPAALGWFKDWTTQSAWDFVLSFPTPESIATASKKKVYGFLRSHGIGLSAKRREMVEARGSATEWPSDKAATKAKSLLALSLAKQLRALAPTLKEYRRRIEEQFEAHEDKEVFESLPGAARKLAPRFACALGTDRTRFDSARSVQQLSGTAPVTSQSGKRKEVRMRRACQKDFRCALHLFAFQTLQRSRWSRAYYDLARARGQSHALALRNLANKWLKILYRMWQNRETYDEQRYIRQLVKKNSPVAYQLGLLKTRG

SEQ ID NO: 171556 - protein, 343 aa, unidentified
MELYVGLDVSLKETSICVVDGKGEIVCEGTVFSEPEAIAEFVKTKAPHAKRVGLETGPTSTWLWHELRALGLPVICIDARHAKAALSMQINKSDRNDAVGLARIMQCGWYKEVLVKSLPCHEIRAVLNSRALLVKIKRDLENQIRGLLKNLGLRIGKAGGNVFRHRVEELVVEHPLLQEAVRPLLGVREIVRREIAGLTRRLLAMARDNDESRRLMTVPGIGAINALAFCAAIDDPSRFRRSRSVGAYFGLTPRRHASGEVDWTGRISKCGDAMVRTYLFEAAGVLMTRVPHWCRLKAWGLRLAKRIGFKKARVAVARKLAVILHRMWCDGTDFIWSSKEAAA

SEQ ID NO: 171557 - protein, 414 aa, unidentified
MNTPVSNVSMSGTLIALDISKKHHDAKIRYPDGRTSYLRIENTLEGFNRLLALTASPHDSIIAAFEPTSDYHRNIAWWLHQQGVKCHLVSSVRCARAREMLFKTWDKNDRKDASVIMYLLEQGLSSPFYDPLANGVIDIQEISNTYHQVTLARTRCLNSLVNHYLTLYFPEAEQFLHMSRAEWFCQFLLQFPTPSCITLMDRHLFVKQSWDVVGRKQYKQQFLEHLYDVAANSIALPLPDDSLAVTTFRLQLHRYVELSAQRLKLEKQAENYLQERSDYRHLRTIPGIGAVIALMIIAESGDLTRFAHYRQYLNFCGFNLSASQSGQKHSGYRLSKRGNARLRYAFWLAATVAVRTRENSFRYKYERYIRENGDKPDQKRKAMTVVATKVARVAHAIVKQDIDYKGYYEISHGT

SEQ ID NO: 171558 - protein, 339 aa, unidentified
MKDIKILGVDIAKDVFQLCGIDEWGKVIYTRRVKRAQYVSTVASLKVGCVVMEACGGANHWYRTFMGMGIPTQLISPQHVKPYVKSNKNDRNDAQAIAEAASRASMRFVRGKTVEQQDVQALLKIRDRLVKSRTALINEIRGLLQEYGLTMARGAKRFYEELPLILASEAVGLTPRMKRVLNCLYTELLNRDEAIGDYEEELKAVAKANEDCQRVQSIPGVGYLTALSVYASMGDIHQFHPSRQLSAFIGLVPRQHSSGNKEVLLGISKRGNVMLRTLLIHGARALLRHVKNKTDKKSLWLKALIERRGMNRACVALANKNAPIIWALLTRQETYRCGA

SEQ ID NO: 171559 - protein, 323 aa, unidentified
MSRIVVGIDVSKAKLDVCLLREDGTEQYHQVANSAAGHQQLHRWLRQQTGQAVPVCLEATGIYGDAVACFLHQQGYPVSVVNPAPVKAFAAAMMKRHKTDKSDAQVLAHFRAHSRPTPWQPPSPNQIRLHDLKRLADDLQADRTRVKNRLEGSRAGSPARRYLEDQIAYLDKQLAQVQQEMQQQVEEDDKLDNQSRLLTSIIGIGLVSARQVLAELPDLTRFSSADELVAYAGLCPHQAQSGSQLKRSWLSKQGSAALRKALYFPALTAKQHNPHLRQFAERLSQTKKAKMVVVAAVMRKLLVLIYAILKSGHPYDPHYGFST

SEQ ID NO: 171560 - protein, 320 aa, unidentified
MASRESLFIGIDVSKQTLDVAFGADPHAPRETIPSTDEGVQLLVTRLQRLQPTLIVLEATGGLERMVFAQLLQAGLPTARVQPRRVRALAHAEGRQAKTDRLDARLLARFAERVRPPHHQATDEQRASLRDLLVRREQVIQMRTAEINRLTAAAPNLRPGIQQHIDWLDQEIRALEQERDNEAERTDEVRRKRELRESVPGIGAITALNLLLRLPELGTIKRTEAAAFVGVAPYANQSGAQHKPRHISGGRRDVRSVLYMATLAATRRRLVRRAFDQRLCQAGKPRKVAIVAAMRKLLTILGAILRQQKPWDPAVHTSAP

SEQ ID NO: 171561 - protein, 350 aa, unidentified
MTDTATSPIVIGGVDTHKDLHVAAVVDAHDRVIATEAFSTTRAGYRAMLRWMRTHGDIARVGIECTGSYGAGVMRHLDQAGIEVLEATAGDKADRRKRGKDDTIDAEQAAHAAYARRRTVTPRAHDGMVESLRALKIARSTAVKARRVALQMIHALIISAPEELRDQLRSMTRMQLIRTIASWRPDATGYRDPVTATKMSLKSLARRYLELHDEIADLEIAMHALVDELAPDLLARPGVGYESATQLLITAGDNPDRLASEGSFAMLCGTAPLPASSGKTTRHRLNRGGDRAANSALHMIAVSRWRIDPATKEYVARKKAEGHSNPEILRLLKRYIARETYYLLRNLFCV

SEQ ID NO: 171562 - protein, 333 aa, unidentified
MKKYLFYVGIDVSKAKLDINILDSSTLKSEHFIIENNVRCILIFIKKLDRKIDKESTLFCCENTGVYTNHLSGILVKLNLDLWIVPAIEIKKSKGISRGKNDKTDAKDISYYSYRNIDKLKLFTFASIDIQKLKILYTEREKMLKALLLIQATKESKAFTDKIIFKEVSQINQTLVKSIKNSIHKIESKIKEVIKANDQLTKQAQLIKSIPGLGEQTSVYLIIATKGFTAFKSWRQFACYSGVVPFEHSSGSSVKGRTRVNHMADKKMKSLLQMCAMTTLRYDPQLKEYYNKKKLEGKNSMLVLNNIRCKLISRVFAVINRETPYINTYKFAS

SEQ ID NO: 171563 - protein, 392 aa, unidentified
MVCVGIDVSKDTHDCFILSSEGEVLTDVFTIANNREGFETLLQRIQSCTRSTDQIKVGLEATGHYSYNILGFLLDKGLATFVLNPLHTNLFRKSLSLRKTKTDRIDARTIVSMLMSDMDLKSYTNTAYHNEELKSLTRYRFEKVQQRARLKTAVSRLVNILFPELESLVSELHLASVYAMLSELPGAKQIAGVHLTHLKTILTNASQGRYGREKAVEIREAARRSIGSVMPAKSLELQHTIRLIRELDEEIDEIEAAIKEIVDAMSPPILSIPGIGYRMGAMILAEIGDFSRFDSPDKILAYAGLSPSTYESGKLKATGAYSHMEKRGSRYLRYALYNATKGVCLNDPSFAAYLAKKRAEGKHYNVALSHATKKLLRLIFALQTTGKDFQAA

SEQ ID NO: 171564 - protein, 362 aa, unidentified
MGWSAQYNLRIRHFATKETPIHTTTLGIDIGKRWFHVIGLDTAGIVVRREKLNRAQLYELFATHSPCLIGMETCCGAQHLARLAASHGHDVRLLPAQHVRPFVKSQKNDFNDATAIAEVVRLPSMRAVPLRSLEQIDIQALHRARQRLVEQRTGMTNQIRGLLLDRGLPIPQGLNPLRNAVPEILEDATNGLTPLFRSLLARLLSMWQQTDSAIEELTDEIQSVARASDQCRRLQSIPGVGPLVATALVSAVGNAGTFRSSRDLAAWVGLVPRQHTTGGKPKLLGLSKRGNSHLRRLFVQGARALWVWKEKRNDPLHQWMRRLAQRMHPHKAVCALANKLIRICWALLRNDQMIFRNAAAAA

SEQ ID NO: 171565 - protein, 354 aa, unidentified
MASKSKRTTLTFASVGIDIGKEVFHLVGFDTDGKITLRRKIKRMALINEFEKLPPCIVGMEACLSAHFVSRTLRKLGFEPRIIPAFYVKPFVKGQKNDYNDAEAIAEAALRPNLQPVTEKTQDQLDLQALHRVRSRLVSRRTATINQIRAFLIEQGITVRTGAHSLRNSLFAILDNRADEISPRMNNLIVDLHEDWVGLDKRIEAITGEIEIISKGEENCQRLMSVPGIGPIISTAVVAAIGNGDAFGRGRDFGAWLGLVPRQYSTGGKTVLGRISKRGSKYLRTLFIQAAHVILMRPHNWEKFSFGPWLTEAATRLQRNKLATALANKLARIAWSVLANEKAFDTHKQEITAI

SEQ ID NO: 171566 - protein, 359 aa, unidentified
MSILADTVDGVIGVDTHRDTLAAAALSPVGGILAQTATRADATGYQELLEFADTQTLRDPARRCWAVEGTGSYGAGLTAFLHTHGERVIEVARPKRPARRTGAKTDAIDAVRAARETLGHQHQTLPRRRGDREALRVLLTTRRHATSSRVAAINQLKALIVGAPEELRAELRGVATKGQIDRCVGLRDRPARPLEHRMTVCALRTTAGRIRALQAEIDDLTAALDPLVASIAPWLVELPGVGPITAAQILVSWSYAWRLRSEAAFAALAGTNPIPASSGQVTRHRLNRSGDRQLNAALHTIALTRLRYDPETRAYAARRTTQGKTRRDVKRCLKRSIARQLFKLLERYDQPGVEIIRAA

SEQ ID NO: 171567 - protein, 354 aa, unidentified
MTEILKSMIAAIGIDIGKSSFHVVGLDGRGAVALRQKWSRGQLEARLANMPACLIGMEACVGAHHLSRRLRLLGHDARLMPAKYVRAYSKGQKNDFRDAEAIAEAVQRPTMKFVATKTADQLDLQALHRVRERLVSQRTGVINQIRAFLLERGVAVRQGRHFLRAELPGILATGCEVLSGRMVHLIADLAGDWRRLDERIEGLSGEIAALARQDAGCERLMSVPGIGPIISSAMVAAIGAGDTFTKGRDFAAWLGLVPKQFSTGDRTVLGKISKRGNRYLRALFVQAAWVVLIRSKNWERYGLKPWIEAAKRRLHRNVLAIALANKLARIAWSVLAHGRSFAAGKLVEAASLPA

SEQ ID NO: 171568 - protein, 349 aa, unidentified
MNYRVYCGVDFHARQQTICSLTTEDGVVSTHELKHHNKAELRSFYAQFSGPVLVGLEASGYSPWFEYLLEELGHEVWLGDATEIRRRARRRQKNDRRDAELILDLLIHDEFPRIHRPTPTSREILRMLRYRHKLVKMRTTIKNSLQALAIQSGLSLRAHLFTQVGLQQLRSVSMSPVMQFQRDQWLQALEPLNQRIVESVTWLKQQATDDERILRLRTHPGIGLLTALGIVHTLEPVSRFGNQRKVAAYGGFDPCERSSGEQKRYLGISKAGSRLLRFLVVEASHAAVKGDPELKRFYLRLQHRHGRSKARVAVARKLLIRSYILLRDGIDYAEFCRRAVVARSAPGVT

SEQ ID NO: 171569 - protein, 346 aa, unidentified
MDKISVIGLDLAKNVFQVHGANAQGKKVLSRRLKRAEVLEFFAALPPCQVGMEACGGAHEWARRIEALGHTVKLMAPQYVKAYVQGNKTDARDAAAICEAAAREGVPAVAIRSRDSQQMQALHRVREGWIKQRTATANQIRGLLAEFGQVITPGMRHLRTEVGIWQDKARPELAMLCAVVDELLAHLTQLEERIAKVDQQIMQAHKDNAACRLIESIPGVGVMTATAIFSSFGRADMFADGRKFACALGLTPRERSSGGKQVLLGISKRGNGYVRKLLVHGARAVLRARMGKSAYANDWAVKLAQRRGHNIAVCALAAKNARRIWAMLQSGEVFRADYAQTKGVCA

SEQ ID NO: 171570 - protein, 340 aa, unidentified
MDTIGLDLHKRESQLCVLTQAGEIVERRIVTSRERFTAVLGNQPSARILVEASTESEWVARHLESLGHEVIVADPNFAPMYATRRRGVKTDRRDARTLAEACRLGTYRPAHRASDEQRHVRAELAVRDALIRTRTRYIALTKALVRRDGLRLPSGAPAHTDAKLAALPLPPALAAELAPLRALWEPVNTQIAAADARLAHVAAADPVVVQLMTAPGIGPVTAVAFVATLDDVTRFASAHQVEAYLGLTPREYSSGEQQRRGRISKTGNARMRYLLVEAAWRVLRSTAPAAAALRAWAEGIAQRRGRSIAAVALARRLAGILYAMWRDGKDYRAPSSAAGA

SEQ ID NO: 171571 - protein, 414 aa, unidentified
MQMELSAFTAVIGIDWADKKHDVCVQAAGSDERQFSRIPHQVDKIDEWAQTMYLRHGGQMAVALELAKGPIVSALQKYHFFVIYPINPTTLAKYRQTFNPSGAKDDPTDAELALDLLFNHPHHFKPLNPQSVEMRTLMALVEQRRRLMNDRVRITNRLRNALKQYYPQALDWFDHIDTPLFCAFIRQWPSLTQAKRARRTTLEKFFHQHNLYRKPLLERRIKAIKSAMPLTRDEAVIVPHRLQTLVLLNQLEVALQSIGMYDNEIAALAPRHPDYALFSGLPGAGPHLAPRLLVAFGEQRERFASAAEVQKYAGIAPVTERSGQKSWIHWRWQCPTFLRQTFVEWAAQTINKSYWAGLYYYQQRAKGCSYQAAVRSLAFKWIRILYRCWVTRTPYDEAKYLKVLKERGSPLLSA

SEQ ID NO: 171572 - protein, 405 aa, unidentified
MMVIGVDTHKRSHALSAVDEGTGRVRGSREIKADEAGHQAAVRWARGLDSERVWAIEDCRHVSRRLEQALLAAGERVIRVAPNMMGASRRSQRERGKSDEIDAQSVARAVVKDGVESFPAAYLDERAMEIRLLFDHREDLVRERTRMQNRLRWHLLELCPEVEAKLKRGALSQLRALERLDRRLRQLSPCVRLRIAREELGHIRALTRQADQLERELLELIRAYRPALLDEQGCGALTAALLIGRTAGAERFRSDACFGRQSGTAPIPCSSGQQTQHRLDRGGDRQLNRALHTIAITRAQRDPATKEYLARKEADGKTRKGALRCLKRYLARRFHRLLSEPPLPAQPTITGEQVPQPAQALDAPACDASRDMSRTVQPSVVAERPAPKPETQRINAAPNPMICIA

SEQ ID NO: 171573 - protein, 412 aa, unidentified
MQDILTCAMGLDIHRDVIVACLAKGELGTDPEIEIRSFSTLIPEMRKLRDWVLEAECHYVAMESTGIYWQPIYEMLEPCFDGQISILVVNARHMKNVPGRKTDMRDAQWIATLLRAGLLKGSFIPDKTFRELRHLTRYRKSIVHDITAQKNRIDKFLQSSGFRFTAFLSDAFGASGRNIIRHLMKYGNISREALDRCLKTQTRKRIDEILVALNGSLSEHQRGFLRMIFGHLEALEQHRHTVEDAITKEITKHEEALSLLCSIPGIDVTAAAAIIAEIGTDMSAFPDSQHICSWAGLSPGNNESAGKRKSAHINKGNPYLKSMLCEVGWVISGKRTLYLSGWYWRIKQRKGAKRATIALARKLLALIYTMLKTGSPYNEECFETRRKQSERKRANRMVNELQKLGYFVVAPD

SEQ ID NO: 171574 - protein, 342 aa, unidentified
MGEVSTIGLDIAKSIFQIHGVDADGVVMIRKRIRRAKLLEFFAALPACLVGIEACPTAHYWSRRLQILGHTVKLMPPSYVKAYLKRNKNDANDAAAICEAVTRPSMRFVATKSEEQQCGLMLHRSRQLLVCQRTMLSNAIRGHMAELGIICAKGRNGTAELLRIIADEYDDRIPAVARLSLDVLARQYTVVRAEIVAIEKRIHAWHRSCEESRRLEEIPGVGPIVATALVAEVGDWKEFTSGRSLAAWIGLVPRQHSSGGKQRLGRISKQGNRHLRWLLVAGAMAVIRYARQHGTKRLWLARLMERRPIKVAAVALANKIARMAWAMMVRGERFKEPKLLPA

SEQ ID NO: 171575 - protein, 439 aa, unidentified
MGTDIDDVDTDGEEEEMVERVGAIDVAKASGKVCVRLPGRQRRVTRVFDVSATTNAIMALADELTELGIERVVVESTSDYWRPFFYLLEARGLLVWLVNARDVKQVPGRPKTDKLDAVWLAKLNERGMLRPSFVPPREIRELRDYTRLRAELIEERSRHKQRLEKLLEDALIKLSTVATDLFGKSGRAMLEALIAGERDPEVLADLALGKMRPKRAALKEALTGRFDAHHAELARMLLDQIDALGEKIETLTDRVDQLVGQLPEAQAPRADGGTESGLSVLERLDEIPGVGPRAAQIIVAEIGLDMAQFPTAAHLVSWAKLSPRTIQSGPRTRSGRTGRGNPYLKGALGEVAAAAARTDTFLGHRYRRLVRRKGHQRALVAVARSTLVIVWHLLADPSARFVDLGSDFYEHRINKDRRTQDLIRQLQALGHQVTLSSAA

SEQ ID NO: 171576 - protein, 367 aa, unidentified
MNNIIYCGVDFHARQQTICCLKTETGELAFHELKHDDKDELRKFYSQFRGPVIIGLEASGYSPWFEQLLEELGHEVWLGDATEIRRRARRRQKNDRRDAELILELLLHDEFPRLHRPTPESREILRMLRYRQKLVKVRTIMKNSLQSLSLQAGLSLQARLFTRAGEQQLLATAMSPVMTEQRKQWLALLQQLNQRISETEWWLKQQALKDPRISLLRTHPGVGLLSSLGIVHTLIPVSRFPNTRKVAAYGGFDPMERSSADKKRYLGISKAGSRLLRFLLIEATQTAVKGDADLKRFYRRLEQRRGRPKAKVAVARKLLIRSYIMLRDEINYAEFQQRAVAARLARENARVNIPGPLIGQSASSAKG

SEQ ID NO: 171577 - protein, 427 aa, unidentified
MEVVHSRCAGLDVSKKDAKACIRVQGQGRRATSTTVTTWGSTTTEILALREHLIAERVSRVVIESTSDYWKPFYYLLEDQLDVMLANAQAARNVPGRKTDVSDAAWLAELGAHGLLRASFVPPEPIRVLRDLTRARTVITRSRTKEVQRLEKLLEDAGIKLSAVASNIVGVSGRAMLEALIAGQRDPAVLADLAKQRLRDKIPALTEALRGRFTEHHAFMARLYLDRIDAHNADIARLDARIEEAIAPFQAVRELLMSIPGWSRLVADVFIAETGADMSVFPTAGHLASWAGVVPGCNESAGRVKSAATRPGNRYLKAALGIAALSAARSKDTYYSVRYRRIAGRRPVQIRRNKNRCNSGPAQIALVGLEHKMLIDAWNMLVNGSFYQDPGPDYYARYQPEKAKAKAIKQLERLGYHVTLEPRTEAA

SEQ ID NO: 171578 - protein, 385 aa, unidentified
MYAWERCLKPKFRTFFQETPAMLYLGIDQHKRQLTVNLRSEDGNIMLKRQVSTQWEKVRAFFAELAEKATPQGGFLAILEVCGMNPWLLEMLKEYGCREIVVIQPTERAKQKTDRRDAGELAHLLWVHRQQFLEGQHPLGLRRIQPPTPQEADDRQLTTLRARLTRKRTAVLNAIHKILRKHNLEQAQPTKKFQTQKVRAWLSEIELPALDRMELNLLVPQWELLDEQMEAVEAKIAERAAADEQVKLLESVPGMGHYSAVAISSRIGSIERFKHADSLANYFGLTPGCSNSGEATKRLGSITKRGSKMVRYLLNQAVVKILRYDGAMRAWFKRIKKRRGAKIARVAVMRRLATILWHMLKKKQKYRYDSPIKRHQEFEAYAGTA

SEQ ID NO: 171579 - protein, 333 aa, unidentified
MTRMICGVDIASSSLAARIGRDGIAAIFANTTDGIAQLAAFCHSHQVELVAMEATGGYEQRSFAQLSEHGLPVAVLNPRAVRQFAQSMGALEKTDAIDAGMIAWYAETKQSQPLCLAPATQLELRARVTRLRQLTEVRTAQSNQQRLVTNAAVRKGFSAMLKFLDEQIEELEQAIAALIDADPLWRQLNRVFRTIKGVADRTVSRLMAEMPEIGTLSNKTISKLAGLAPLANDSGKRQGRRAVRGGRSAIREILFIVGSVVARYEPDFIAFQQRLRAAGKPPKVVRIAVAHKLLVRLNAKARQVRQQIKNLAGIESTALSSSYSSPELPVLCL

SEQ ID NO: 171580 - protein, 462 aa, unidentified
MPRRKLKTTTRPRQVRLVYRADAPTLQVQNPHAAGIDVHTDNHVVCVGPGLVQTFGAYTADLQAIADYLRQAGVTTVALESTGVYWIPLFEHLQALGFECYLIEPGQLRGCGARPKTDALDCQWMQRLHTYGLLKASFRPPESVRALRAYHRQRQMVIRHAAAHVQHMQKALEQMNVKLTEVLSDITGVTGLRIIRAILAGERDPHTLAGLASPICAKSRDEFALALQGLWQPEHLFELRQAHDLFQTYQRLVDECDRQIKAELAGQPDRAGDKPGPGPRPRRSRKKNDLRFEATGPLFRALGVDLTEIEGIDVGTALVVLAEIGVDVSRFPTEKHFAAWLGLCPNTARSNRREKRQSPRQGASRLKQALRMCAQSVGRTQTPLGMFYRRIKSRIGGMGACTATAHKLARLVYRLLKYGRAYVKQGMDEYAAKMHTNAERILRKKAAALGYELTPRAAGATT

SEQ ID NO: 171581 - protein, 419 aa, unidentified
MTYRIAGIDVHKRLLAVVVADVAVDGEYQFERRTFGTAPEQLRQLAEWFVAVGVDEVVMESTAQYWRPVWDTLERQWAPARRSPPGAPPTAGLLHLAQAQSNRGPLGRKKDFPDAERLVRRLVAGELILSFVPDAEQRLWRTVTRRKYQLTCNRVQLQNRLEALLEEMHLKLSSLVSDLFGPSARRMLDAIAEGATDPAAVAALASQRLRATPEALTDALGACADLHPVYRRLLQLALTERRGIEAQIEALNLEMGGLLRRHQEAVQRLAAVPGLGVDSAQQIIAEVGPEAAAFPAPKQMASWGGVCPGAEESAGVSYSRRSPKGNRQMRRLLAAAANAAVKTKGSIFELVYRRLVPRLGHQQAIGAIAHRLCRLIWKILHDKVSYNERGPAVTRERLRARTAKMIRELKTLGYRVEPA

SEQ ID NO: 171582 - protein, 376 aa, unidentified
MGNQTFTPRDYDVFAGLDVDKRSISVTFTDHQGLLKSLRMPYSVEHLVNHVRKHFPDQKVAFAYEAGPTGYGRYDGLVAQDFRCLIASASMIPKAPGQRVKTNRLDSQGLSENLRGGQLKSIHVPTAVYRELRHLTQLRDTVVSEMVGMKQRIKSLLLMEGMEFPPAPAGSQWSFMVKNKLRKLPCSSIVRFKLDQLLDSLEFNEKQVLKTTREIRRFCQNDPELSQCIKYMMSVSGIGWIVASQLLARIGDWRQLTNIRQLGGFLGLVPTEHSTGERTDRGSITHTGDGRLRSKMIQASWSAIRKDEELREFFRSVCHRHPRRQGPRVAIVAVARKLSVRISVVLMKQRPYVVRGKVHSAPLTQEETSPQGTTRR

SEQ ID NO: 171583 - protein, 391 aa, unidentified
MSLFFVGIDISKYKHDCCIISSADQQVVSKFTFKNNKDGFSELLTTLHSLSNPKNIRIGFESTSHYALNLELFLEKAHHSFMEVNPVLISQYKKSTTLRRTKTDRIDCESIACWLMTVEYKPHPKGFYHAYSLKSLTRLRDKLIRQRSFYLVKITNVLDHTFPEFKPFFNEHFSKTALYLLENYGSAEKMAHMNTASYERLYSLSRGKFSPQQFLELKSLATNTIGVNNSIFEMELNTLLTLYKAIAEQICILEAQITELIEEIHPHYMSIPGIGPISAAVIYAEYGDISNFSKPSQMLAFAGLEPGVNDSGTESHGGRMVKRGSSQLRYVLMNCALPLIRFDVIFAAYYAKKRSEGKPHRVALSHVVKKLVRVIFALERQNTDFIPQSLR

SEQ ID NO: 171584 - protein, 347 aa, unidentified
MKKHTNQTMPQIIGIDLGDQRSHYCVVAPNGEIVQQASFRNQPADLRRHFAGAACRIALEAGAQSAWITRELEALGHEVIVAHPRQLKWITRSDAKNDPADARKLALLLRADARLLHPIEHRSAEQQRELAVIRARDAAVRARTLLVNAARSTAKGFGLRLPKSITARFGQRALAAAPQLEQILGILLNQIDALSAAITAYEKQIEQIARTHPEVERLSQIPGVGTLTALTFVLRLGRADRFAHSRDAASYLGLRPRQRQSGERDPQLGISKCGDPYLRKLLVQCAHWMLGPFGCDSALRQWGLAKGEGGGQRSKLRAVVAVARKLAVLLHRLWRTGEVYKPFPSMA

SEQ ID NO: 171585 - protein, 364 aa, unidentified
MKKLTTAATNWIGKQERLTIGLDLGDRSSHYCVLDESGRIVTESKTATSPKAMEAVFGGMTRSRIALETGMHSPWVSRLLSQHGHEVIVAHARNVRLIGESRKKDDRLDAQTLARLARIDPELLCPVKHRSAKAQADLSLIRARAGLVRARTALVNTARGLAKSYGQWLRGCNVRNMNPEKAEALSPELQVALQPLLAGIEAVSEQIGEYNERIEKLAQESYPEVKLLKQVKGVGTLIALTFLLTLEDQHRFSKSRDVGCYLGLQPGRRNSGQSEPQMHISKEGDPYLRTLLVQGAQHILGPFGPDCDLRRWGLKLAERGGRNGKKRAIIATARKLAVLLHHLWVSGEVYEPLHNNRTAIAVAA

SEQ ID NO: 171586 - protein, 344 aa, unidentified
MEKLIRIGMDTSKQFFQLHGIDAAEQPALRKQLRRREVLPFFSRLEPTLIVLEACGGSHYWARELACLGHEVKLIAPQRVKPYVPRGKNDAADAAGLCEAASRPTMRFVPVKTAEQQAALMLAGVRDRLVRNRAQLANTIRGYAAEFGLVAAKGMARIEGLLSSAQTDETLPVLARELFAGLGREYARLDAELAAIEAKLLAWHRASELSRRLAAVPTIGPVIASLLVMKTPDPHAFSSGRQFAAWLGLTPKDHSTAGKQKLGAITRAGDETLRSLLVVGATAVIWQVRRGKGRNPSPWLVELLDRKAPKLAAVALANKTARIAWKLMATGQTYKQAAAKQAAA

SEQ ID NO: 171587 - protein, 336 aa, unidentified
MSHYCGIDLHSNNHVAVVIDDEDKRLYEKRLTNDLSQTIEALAPYKDTLKGVAVESTFNWYRLVDGLQEAGFDLQLVNTVAVKQYDGLKYSDDAHDAFWLAHLMRLGLLPTGYIYPKAQRAVRDLLRRRAFLVRGASSQIISIQNQIWRSTGIRVSCNTIRKADFEAVLVDGYTRQAVDAGLAVLRTLQAECQGLERSALDAVKLSDNFRILQSIKGIGPILGLTIMLEVGDIHRFASAGQFASYCRCVDARRMSNGKKKGTGNAKAGNKYLSWAFSEAAHFAVRFEPLAQRFYERKRARTNGIIAIRAVARKLARASWMMLKHQTPYEAQIMFPG

SEQ ID NO: 171588 - protein, 416 aa, unidentified
MTKERRWYAGVDWASESHHVVLMDDAGSKLGEKIFKHGGEGLAEMAAWLMATSGAGDPGQIHVAIEVPHGPVVETLIERRFNVYAINPKQMDRFRDRFTLAGAKDDSRDAETMASARRTDPHCFRPLAAMDPIVIELREWSRIAEDLGAERVRLTNRLREQLWRYYPAMLELESNLAAPWLLDLWEAVPTPDRAGRVRETTVARVLKQNRIRGLDAGQVLKVLRQEPVVVADGTTAAAQAHVTMLIARIRLLHQQIGDAHRRLDRLTAELAGSQEGEPGQVKQHDAEILASLPGVGRIVLATLLAEAWEALQRRDYAALRSLTGVAPVTKRSGKSLIVIRRQACHPRLANAVYHWARVAVQRDRTSRAKYAALRARGHSHGRALRSVADRLLNVACAMLKTGTTFNPALATEKAPC

SEQ ID NO: 171589 - protein, 376 aa, unidentified
MERGSLMLNTTTFVGLDVHARSIKAVALDAMTGEVRSATFGYDAAEVAGWVSSVDPSAKCVYESGVTGFDLQKRLSSMGIDCVVGAVSKMIKPSADRRRKNDRNDAEFLARMLSVGNVVEVWVPDDECEAARDLTRALDDAREDLKRCKQRLSKFLLRHGLVFSETNAKGQRKKNWTAAHWAWIRSISFPDKADDEVLAYYIDAARQAMEDKKRLERLVEAEASKPRWKKRVDSLRCLKGVDTMTAADIVFEAGEFSRFKSARSFAAWLGLTPSEHSSGESVRQGGITKAGNKHLRRVLVESAWHYLGCSPHSKDLAKGQAPDPGARRHAAKGVRRLVGRRAAMLERGVHKNKANVATARELACWCWAIGCMVESA

SEQ ID NO: 171590 - protein, 412 aa, unidentified
MKNIKEVRLLISVGVDVSKGKSTVCILKPYGEVIMSPNDYEHTLSDLKKLADQMDSFEDEIHVTMEATGNYHFPIATYFKKRDYDVRIINPLEMKRYRCQGIRNPKTDSIDAFMIAQYGIDFWFRPFQDYVVGDKRIELKTLGMQYFKTMKTRQDRYLVLESVIDRALPGIGGVLNGYDKSTGKDKKSDFVYDFYHAKKITVYSENRFCDRYESWSTKKGYRYSEKEARQLYSIAKDSIPTLPSSENTKLMVQDAVKILREVDAALHDILTRMNETAKCLPEYTTVMDMKGVGVSIGPRLIAEIGDPRRFHSAKALIAFAGIDAPPYQSGKFTGTERHMSKRGSRVMRKIGFELMDTINKHQKLYAGDPVCEYFLAKRAEGKKYRVAMFAAYNKFLRIYHSRVSAVLNGNVK

SEQ ID NO: 171591 - protein, 339 aa, unidentified
MKLYTAADLHSNNHFLSIIDEQDKRILEKRLPNDLSVTLKALEPYRVDIVGVAVESTFNWYWLVDGLMEAGYPVMLVNTSKVKQYEGLKHTDDKHDAFWLAHLMRLGILPAGYIYPKEQRAVRDLLRERRRLVQQRATHVLSTQSTVWRHTAVRLPSKAILGTNKMPWPELANRNVALGIRAHRAAIKTLSTLIARIEDTVTKALKPMPEYKSLLSVPGIGPVIAWTIVLETGELKRFENVGHFASYCRRVDSKKTSNGKKKGEGNIKNGNQYLAWAFFEAAHFAIQYLPAAKYFYEKKAAQRHPILAMKALSHKIARACYYVMRDQVPSMRTACFLEV

SEQ ID NO: 171592 - protein, 455 aa, unidentified
MPKRKPSRKPHWSPSARRLEPHAAGVDIGATEIYVAVPADRDPHPVRRFGTFTRELEQLADWLKPCGIETVAMESTGVFWIPLFQILEDRGFRVGLVNARHVKNVPGRKTDVADCQWLQDLHAVGLLRASHRPPQTIGALRSLWRHRESLVQMAAVHIQHVQKALDQMNIQLHHVISDITGTTGLAIVEAVLAGERNPKQLARLRDPRIVASEETVAEALIGDYRPEHLFVLRQSLQAYRQYQGWMADWDREIERLLGKLESRLEPDQKLLSSPKDRHKPRRNEPRFDLRTYLYRIFGVDLTEVPGVNSLTAHTLLTEVGPDLHKFPPAAAFASWLGLCPDNRISGGQILSVRTRKVVNRLAGALRMAAQSLHRSQSYLGQYFRRLRTRLGTPAAITAAAHKLARVLYHIVTTRQPYDQSVFAVMEARARHRQFIRLKKQAVAFGFQLMPLARVP

SEQ ID NO: 171593 - protein, 397 aa, unidentified
MIAVGIDVSKSKSTVAILNEDGSIRAKPFDVHHTTDELQALISYIKGISEVPTILMEPTSHYHYPILKAFQDAALPVCLVNPYQLKKYGDAALRKAKTDKKDAIKIAQYALEKSYTLTPYTPQDQKYDDLRFLSRQYNQRMSTLTANKVQLIRLLDETMPGITTILPLKSRDPENCVLLKFIKRFKSFDSVKKMGKNRFLDSYQVLVNKTKDRYAASKGLAIYEMALNSVTTRGDNSLTFMTQNQCVDLISASQNAVDDINLQMRTIAETIPEYRVLRSMAGVGDRLGPIILAEIGDIRRFHSGKALNAYAGNDAPPYQSGQFESRNRHISKRGNPALRKACFEVMQALKLTKPQDDPVYLFLLKKEQEGKPYNVAKMAAVNKFLRIYFARAMEVYK

SEQ ID NO: 171594 - protein, 404 aa, unidentified
MWYAGLDWADTHHDVEVMDETGKRVDAQRFAHSHKGLNELKQFLLSIASSPEHLACIVETNHGLLITFLLEAGIPVYPVNPKMANQLRKTAGAKTDQIDAHLLAKMGRLDLTEMRRLEPDSPIVAELKTLTRDQDALIQMQTRLVNQLTACLKEYYPAALHLFAKLQQRSTLLFLQAYPTPQAAQAASVEEIAATLQTGKHTRSTQVAPKIFEEMRRPQLVGSPVIVRAKSRLMLSLVKQLLVVIEDIATYDEAISTLFLTHADQQMWRSLPRAGKRLAPRMLAEWGDDRSRYADASSVQTLAGTAPVPFQSGNFAKAHKRFACLKPLRNALHQFAWQSTLQEEWALAYYQRKRAGGKTHSMAVRALANVWVRIIYRMWVSQTSYRTTTFEAAQLAHAPRQHAA

SEQ ID NO: 171595 - protein, 341 aa, unidentified
MVHVGLDLSRTRLDVHVMDEAGAALAVTTAVPDNGGLAVLASRIAGFDEPVYAAIESMNGARFVHDQLELAGWQVEIADAQKVKGLAPLACKTDKIDAWVLAELSRRDLVPAIWLPTPTVRAERERARWRLHLVRHRTALKNRIHATLLAFGHPCPVSDLFGVGGRELLHRLELPEPWAADTTAALQLIDQLDTEITAGERALRRLGADHRYVPLLMTTPGVGWVLGYTIAAEIGDITRFATPTKLAGYTGLCPRVYQSGGKDHRGPLSKNGPKYLRWALIEAATHACRHPIYAERYRRTKTRLGRQRGPKIAQVDLARRLSEAIWHMLSTNRPFAPAGAA

SEQ ID NO: 171596 - protein, 351 aa, unidentified
MRIVGALDLHRQQITYKWIDQESGELGRGRITPAAREPLRAWLERFHGLNAHFALEGTTGWRFVVEELERAGLVAHLAEPAETAARRGRKRAKTDKSDCDHICELLRLGHLPESWIAPAHILELRTLARLRTTLLDERTAWQQRLQAQLFQQGAPPGLKLRSSAGRARLSELDLSPAGRQLLNTGLRRIDDLDGELAPLDRQLSTIARCQAGCRALTAALFGVGPLISVAIVAELGDCRRFANADQAVGYSGLDITVYASDSKRAPGHLSHQGPSLLRWALFEAAVCASRRTSPDHAYYQTVANRIDHNRACLAVARKLCRRAYHLLRELGADAIAPAEITRQSEPLPHAA

SEQ ID NO: 171597 - protein, 352 aa, unidentified
MKIVALDLGKFNSVACIYQAEDGVHEFRTIKSDPAAIHDVLLASEAKRVVIEVGATSGWVKDLAEAMGLEVEVANVNAESWQWKKRKRKTDRDDALKLAVLSARGELPKVYVPCRQVRQWRSLIGYRQDLVVRRTAIKNRIRALLTQEARVQPGGKKGWTDQAVEKLKGEARGIAQCSTDELWRGILQMELVQFDAVEGLIGEVEKKLEALSKERAEVKLLETIPGVGPRLSEVVVAVIDDPRRFNNRKQVGCYAGLTPRQFESGTMIRQGRISCQGNRLLRALLVEVSWLMRRWNDQFWKIFQTVSKGSKQRRKAAIVAVARRLLVTCWAMLRDNKPWRPAAGLTGEALAA

SEQ ID NO: 171598 - protein, 343 aa, unidentified
MNISRIGIDLAKNVFQLHGVDRHGKAVWKRRLKRDQWLKAVLSQAEPGCEIGMEACAGAHHWARELESRGYTVKVIAPQFVKPYVKSNKNDANDAEAICEAMSRPNMRFVTVKSIEQQDIQATHRIRSELMSQRTAKANQIRGLVAEYGLVAPQTMCALRAAIPCWLEDAENGLTDHFRSLLHGVWTDLVALDDRVRELDRGIQKLANSNEVTQRLQQLRGVGPLVATALVATVGDARQYHRSRQMAAAIGLTPRQHSSGGKDRLLGISKRGDVYLRSMLIHGARAVVSQAKHRDDRLSRWVIGIATRRHPNVAAVALANKTARMAWAMLRNETDYDPDFAIS

SEQ ID NO: 171599 - protein, 351 aa, unidentified
MSHKAAATAAHTIGIDTGKNTLHLIGLDDKGAIVLREKIARGRIAARFANVPRCLIGIEAGMATHYVARELIALGHDVRQVPPAYAKPFRQGHKNDFRDAHAIAEAVQRPSTRGVPVKTDDQLDLQALHRVRSRLVGQRTAVINQIRGFLLEHGIAVRQGLRFLRQQLPDILAKRGDVLSPRMTRIIEDLSGDWRRLDERIQHITEEIEVLAHGSESCRQLMTAPGIGPLIASAMVAAIGNGTAFTKGRDFAAWLGLVPKQMSTGDRTILGRISKRGNRYLRTLIMQGARVILLRPANWAKHSFGMWLTAAAQRLHHNVLATALANKLARIAWTVLAQGRSYEARVEPKVA

SEQ ID NO: 171600 - protein, 394 aa, unidentified
MSFIFAFDVSKGESYKVLYHNQHCLSEGKVSHNQEGFRQLLEEITAFPETPEIVFEATGVYSRPLEKFCQDNRLAYCLLNPLEAKKQLEEGTLRSWKTDKIDAHRLAQTHWKNTRLPKIHQAEVFQELRDLARFYQELEDKISRVRMDLHQALQLTFPELENFFSSRVTPYALSLIEAFPHPMFVLASTRTKIKNRLVKSTRKHISDNRAWQKADQLFAYAQTSYPVVDSSSIHCQKTCYYARLLQDLLEQKERLMAQMIQSAQALEEFEIYQSIPGIGAPTAALLIGELGDIRRFPTANQLNAFVGIDIRRFQSGNYVGKDHINKRGNPKGRKILYFAIRNMIRQQHAAPNHLVDYYYKLKKQPVPKKEGSIISSVGGKQFCFLLTLFFCKKR

SEQ ID NO: 171601 - protein, 424 aa, unidentified
MKVTYLTCCGVDVHKSFLVATIVKTTGGIEPSYQKKRFSTFNHSILEFKQWLLENDCHDVCMESTGKYWIPAFNLLEDEINVTIANPKWVKAVKGNKDDTKDSKWIGDLFRLGLVKGSYIPCKKIRILREYTRYRYKLVSCRSSEKNRYQNALTVCNVALDSVVSDIFGKSSTSIIDYLLEQADNSINHEEIASKLLRRLKSKEDAVIESIEGYQMTDSQKYRMRLVRAHMDYITAEINDVDSMIESMISSDPDYENAIQFLMTIPGVKRDSAITIISETGIDMSQFCSSKRLCCWAGLVPGSNESGGKKKSVRIARAGVYLKPALVQCAHAAVKSEKSPYYKKKYESLMKRRGKKRAIVAIARMILTAIYQMLSTGEAWNPSDLYKIDMPEALLEKQKTKAIKQAMKLLQREGLYPPPEPIAS

SEQ ID NO: 171602 - protein, 413 aa, unidentified
MDVWHSRCCGLDVHKSSISACILLGEAGRVQKHQRRFGAMTQELQELAEWLRQFGVSQVAMESSGVYWKPVWNILEGQFTVVLANAQHIKNVPGRKTDQKDAEWIAQLLQYGLLRPSYVPCETIRDLRDLTRMRASLSQEVSRISSRIQKVLEDANVKLASVATNVLGKSGRAMLEDIICGEDDPEHLAALALGHLRVKIPQLRLALEGKIRSHHRFLLRRLVDQIQFAEHEIALLDERLEDIGRQRPELAQAVARWDTIPGIDRVAAWALLAEIGDNMSQFPTAEHLASWAALCPGNHESAGKRLRGTTRQGSPWLCRMACQCAWAAARTKNTYLSSQFRRLAARRGKKRASIAMAHTIIVIGYHLQKNQSNYEDLGGNYFDRIHSDGLKRYLVKRLQQLGHKVTLEPMEAA

SEQ ID NO: 171603 - protein, 387 aa, unidentified
MARKRTLSTLDTSIAYEAVGLDLAKTDVALAAFDSDHKEPYLIDRIPYDKLYELLADMAPTLVAMEPCSGAHQIAEQIQELGHEVMMISGRHVQAWVKDHCNGQKTDLNDAFAILNLAYDRWLTPIRGKTREECRLLALQASYRQLKGQRTKTMVHVKATLHAWGFPIRAGSFNQKVLHELIDANREAFGDEVVETLHLMINRVRDLDHDIATVLKLLTEATQRDPRASLLRSIPGFGVLTTSRWCAVVGDIARFDSPKQTMAFIGLVPNNRITGHHTETSSGREARGQGKMSKRGDKMLRSLCILGAGALCLMVRNDRLPDCPFVASIKERLASPRPWFKVLVYVAAKLVRIATALLKYGETFSFEKAGISKAVLKQWELEQAKAA

SEQ ID NO: 171604 - protein, 469 aa, unidentified
MAVDEGKADGTGGSSGDGAEVAEDSTQVVEYAAAIDVAKGSGMVCTRVPGSRPDRRRQKVWQAGATYGEVTALMDHLRCEGIQRLVLESTSDYWRIWYYLAEAAGLEVWLVNARDVKHLPGRGKSDKADCVWLCKLNERGMLRRSFVPPQPVRDLRALTRTRARLAQDQARHQARVEKILEDALLKISVVISDLFGASGRRFLDALVAGERSPAALAALGDPRLKATRQQLEDALTGRFRDIHAFEISTHLRIIDVINDEITRLDEKIGQQLTLIPGTAPACAACGLAGGGHAPGCADQDVEVLGLAERLDEITGVGTVNGRALIAELGTDPSQFPTPGHAAGWARLTPRSHQSGETAKPGRTGKGNRYIRGALGQAAMTAARTDTRLGAMYRRIARKRGKQKAIVAVSRVICELAWILICDPSARYRELGPDYYQPLSPARQTRAKIREIERLNPGKKVILADAGAAA

SEQ ID NO: 171605 - protein, 312 aa, unidentified
MFTLGFDVAKNYHDVALANANGTLKQRWHIANTMPAVVNLLKDVKAKHPKLCVGCKATGIYHYTVLQACLQLSIPCRLINPLTTKQFTSSTIRGRKTDADDALSIARLVMRGEGITVTSSLLSPARDYARLATKISQHVHALKLEARYLSDRGLPIDPIFVTSIDNLESLCKRLRNQALGYVDKRSYDLLTSLTGIGPAIAVSLAAEINDIHRFKTAKQLVAYAGLDPRVRQSGTVLHRNTKLTKRGSAELRHSLFLAANIARQHDKQLKAYYQKKRLEGRTYTEATVATARKVCDRVFAVLTRGTPYVKST

SEQ ID NO: 171606 - protein, 359 aa, unidentified
MNKNSMLYVGLDLGDKLSYITIVDQDGVLIEESRLPTTRASFQRKFATLQPCRVAMEVGAHSRWASHLIQDLGHDVLVANARKLRAIYNNPRKGDRADAETLARLARLDPALLSPIHHRSPQAQTDLAVLRSRDAIVRSRTLLINHARSIVKSTGARLPACSADSFAHKAAPDIPILLRPALAPILDTIASLTQQIKSYDQKVEELCSQRYPETSHLREISGVGPLTSLGFILTLEDPDRFPRSRQVGPALGLVPRRDQSGDQDPQLRITKTGDPYLRRLLVGSAQYILGPFGPDCDLRRWGLKLAERGGKNAKKRAVIAVARKLAVLLHHLWKTGEIYDPSYQSPPLANEPVGTLAAA

SEQ ID NO: 171607 - protein, 406 aa, unidentified
MLFVGDDWAEDHHDVEIQDETGRRLAKARLPEGISGMARLHGLVGRFLPEDGDAAGVKIGIETDRGPWVAALVASGYQVYAINALQSARARQSQGVSGAKSDAGDAHVLADLVRTHSHQLPTVAGDSEHAGAVKVLTRMHQTLIWDRTRQVLRLRSSLREFFPAALEAYEDLAFPDVLELLTKAPEPNSAARLTRAQITAALTRAHRRDREAKTTAIMAALAAEHLTQPPLIAAAYGATVRALAALIGTSNEQITALQGQVEACFGQHPDAEIYLSQPGLGLVLGARVLAEFGDDPTRYDGARARKNYAGTSPITRASGKKKVVLARYVRNNRLADALHQQAFSALSGSPGARAYYDALRDRDISYNAALRQLGNRLVGILHGCIKTHTPYDEATAWNQHTQQAAA

SEQ ID NO: 171608 - protein, 358 aa, unidentified
MGEGTTVGLDVHAKSVAGFVIDEVSGEVATCRAPHRVEDLVGWVAGLAAPVRCAYEAGPTGFGLARALAAAGVGCLVAAPSRIPRAPGDRVKSDRRDAERLARLLRAGELVAVDVPTLALEAARDLVRAREDARADLMRARHRLSKMLLRHGRVYEAGAWTVAHDAWLRRQRLEEAASQAALVDYYDAVLQAKLRRDRLDAAIAELAERPDLAPVVGRLVCLRGVGVLSAVGLAAEIGDWRRLSGATIGAYLGLTPSESQSGARHSRGPITKTGNGHARRLLVEAAWHQRHPRSRSLALERRRAGVRPEVRARAEAAGARLQRRWAHLERRGLRRTIIAVAVARELAGWCWSLAVMDD

SEQ ID NO: 171609 - protein, 412 aa, unidentified
MDVIHARCAGLDISKKDAKVCVRINGAGRRKTSETVTTFGATTRQIVALRDHIAAQQVTCVVMEATGDYWKPFYYLLEDLAGVEVMLVNARHVKNLPGRKTDVADATWLAQLGAHGLVRGSFVPPEPIRHLRDLTRTRTAITRERTREIQRLEKLLEDAGIKLSSVAADLNGVSSRAMLQALLAGQTDPAAIADLAKKRMRVKIPQLTEALYGRFTEHHAFLTRTHLNLIDQHTAAIEALTDRIEVVMEPFRGFRDLICTIPGIGGFTADVVVAETGADMTKFPTAQHLASWAGTTPGNNESAGKVKSRRTRPGNPYLQGALGTAAMSISHTRDTYLAAKYRRIAVRRGPMRANVAVQRALLVAIWNIATTNTPYHDPGGDYFTRLNPQKARSNAVRQLEAMGYHVTLQEAS

SEQ ID NO: 171610 - protein, 387 aa, unidentified
MTARTVSNPPATSHDEAVRCLFAIELSKDSWIVAYSTPLSDKISRYTLKPCDWKGLLELIERVRSRVVHELQRPVEVISCYEAGYDGFWLHRLLQAHGVHSHVIDPASLQVNRRARRAKTDRIDAEQLLRSLMAYLRGEPKVWSVVRVPSVAEEDARRLHRERDRLITERVSHVNRIKGLCAIHGIYDYNPLRSDRLQQLDHLRTVQGQPLPQALKAELWRELLRLELLLKMIAGVEKERDAIVTDNGSAHHNASKIKELCRLRAIGPEFASVLVGEVFYRSFNNRRQVGSYIGMPPSPFSSGNTVREQGISKAGNPKARKTMIELAWLWLRYQPDSALSIWFCQRVGTTKGRIRRIMIVAMARKLAVALWRYLETGMIPQGAVLKG

SEQ ID NO: 171611 - protein, 312 aa, unidentified
MPASRPEIGIDAAKDNLVIHHQGLNQTLTIDNTPQAIRQWLATLPEGCDIAIEATSTYHMDLTERAHAKGHRVYVVDGYRLSHYRKGVGGRAKTDLADAQLLARHLHKEKDELRPWSPPPKAYRMLQSLLRRRAALVKARTALRQSLSGEPELKAPLRALIAKMDRIDTLIQKRLKSAVSAAGLQTQVQRCDAIDGVGEITATALVMAFLRGDFKNSDAFVAFLGLDVRVRDSGKLTGKRKLTKQGDTEVRRLLHCAAMSASRHPVWRAFYQHYRDRGLHTTQALVILARKIARTAFALMKQQQEYCPAKLF

SEQ ID NO: 171612 - protein, 350 aa, unidentified
MTMVGGLDVHRQQITFDYVDNDGLVHWGQIRPATRKTLRGWLAEHCPDGDTEFALEGCTGWRYVSEELAAAGLGVHLGDPAEIAALRGPKKRAKTDRADARLLRTLLVEGRFPESWIPPAHVVEVRTLGRLYCTLMDERRAWQQRIHAQVFHQGCPPIRALLTRAGREALAGAELSAAGRQYVDTALRRIDELSAEIDPLRTQLIGFARRQPGCRALQRHYGVGWLCAVIIWAEIGDARRFSSSDQLVRFAGLDVTVYSSAAKRAPGHLSRQGSPELRWAAFEAAKSAARRGSPDHGYYHKLAAKHDGHNGKNPTLAVERKILRRCYHTLRELGDAALALPDIRPQEVAA

SEQ ID NO: 171613 - protein, 338 aa, unidentified
MKIVRVGIDIAKSVFQVHGVNSTEKVIVKKTLRRNKVLTYFSNLEPCLIGIEACGGAHYWARELEKQGHEVKLMAPQFVKPYIKGNKTDANDAEGICEAVGRPSMRFVSVKSIEQQDILILHRIRQKAVKSRTALSNQTRGLLAEYGVVVNKGIKTLRRELPCMLEDADNCLSSFARKHFHHLYEKRIILDDEIAGYDKEIKAIAKESDECRRLLTIPGVGVVTATALVAMIGNVSCFKNGRELSAYFGLVPRQHSSGGKTHLQGISKRGDTYIRTLLIHGARSVVKVAHKKTDSHSQWINELEARRGHNKAAVAQANKAARQVWAVLSKGEDYKVAA

SEQ ID NO: 171614 - protein, 396 aa, unidentified
MTATHGSDSTLLSAPVLYLSLELGARTWKLAFTIGRGQKPRLRTIAAQSTEGLWAEIKAAKTRFRLPEDAPVVSCYEAGRDGFWIARFLEAHGVQNIVVDSSSIEVNRRQRRAKSDRLDAEKLVTMLIRWHNGERKVWAVVRVPSADDEDRRQWHRELIELKGERTAHVNAIQGMLAGLGLQASVDDAFCQRLDNLRQWDDAAVPTALRQRLGREFERWQLHERQIGELETQRAEQIKKGQTAEAEKVRQLLTLRGIGVNGAWLLVGEFFAWRQFRNRRELGSLAGLTPTPYTSGETRREQGISKAGNRRVRWMMVQLAWGWLQYQPTSTLSQWYERRFGQGNARQRKIGIVALARKLLIALWKYLETGAVPEGAELIAWDKKHKFLPAEPQRMAS

SEQ ID NO: 171615 - protein, 367 aa, unidentified
MSNVRYVGLDVHKDSIVISVADSGNAEAKVLGMFPNDINKVLKQLKKLSPDLSLLRVCYEAGPTGFGLSRRLKKEGIHCIVVAPSLVPQKSGLRIKTDRKDARKLAHYLRSGDLTEVWVPDEQTEALRDLERTRDDAKNAERRARHQLSKFLLRHDRAYRDGKEWTGKHMTWVRQQKFDDACLQCVMDDYVKAVEDATARVKQLMTHIETFVDGHVLQPLVKGLMSFRGIQILSATVIAAEIGDLRRFKTARQFMAFLGLVPSESSSGNSVKRGSLTKTGNGHVRRILIEAAQHYRHRPVLSAALRKRQEGISKEVRDISWKAQQRLCSRLTHFTNSGKPRNKAIVALARELAGFIWSLGQVSQVLV

SEQ ID NO: 171616 - protein, 322 aa, unidentified
MLSMNKSTLFFGIDISKDSFDVYSDKMGYSSYSNTKDGFKAFLKVLNRTSHCVMEATGCYHHKLAMFLHEKGIIVSVVNPLVIKRFIQMKLRRLKTDKSDAFMIYSYASEQSVEEWQPEKEYIERGKELLSLIQTYLRQATALKNKLHASESKGQTKGVIISSMKRQLRNLKRERQFLEQELESLIKTHEAKLFTRLTSIPGIGKKTAVLMMVSTSNFNSFNSYKQVSSYLGLAPNERSSGSSIRGKSRISKTGDGLLRNHLFMCSFTASVHNPQCKALFDRIVAKGKSKKLALIAVCNKLIKQAFAIAKSGLPYDSNYAVK

SEQ ID NO: 171617 - protein, 343 aa, unidentified
MQITTIGLDLAKRIFQVHAVDASGEVVIRKALRRSQVLPFFTNLPPCLVGMEACGTSHHWARELTKLGHEVRLMPPAYVKPYVKRGKNDAVDAEAICEAVTRPTMRFVAMKSTEQQAALSLHRTRNLLVKQRTQVVNMMRGLLAEFGIDIPEGLERALGLARKIAAGQVTPDVPEMAMQILEHLSGQVLDTHARLQAIDRSILALQRTDAVARRLSTIPGIGPVGATALAASVADPGQFRSGREFAAWLGLTPSQNSSGGKDRLGRITKMGDRYLRKLLVVGATSLIRRAKYKPETADPRLVALLARKPARVASVAMANKMARVVWAIMARGETYRARHVPSL

SEQ ID NO: 171618 - protein, 460 aa, unidentified
MKKKPAGQQKGSAQRKVDWKALDIVHPEAAGIDVGGSEHWVAISPDRDPEPVRRFGCFTADLREMARWLIDKGVRSVAMQSTGVYWMPVYEVLEQHGLEVYLVNARHTKNLPGRKSDVQECQWLLKLHTFGLLNNSFQPTNEIRIARTLWRHRGNLVAEAGSAIQRMQKVLTEMNIQLSNVLSDLSGVSGMKIIGAILEGERDAWELAALARPEVKATPQDIAKSLEGNWREELLFVLEQEVELYGFYQEKIVDCDLQLRKHLESFGSTVDIQAQPIGPKPKGKKGSRNAPQFDLRTELYRITGIDWAQINGIDVLTAQTVIAEAGADLSAFPNEKQFASWLGLCPTNEQSGGKILNRRTRKVVNRATVAFRNAAATLLRSQSYLGAQYRRLRTRLGAPKAITAMARKLACLFYRLIKHGQQYVDKGTEYYEARYREQQIRSLAKRAQKLGLQLVIPKTA

SEQ ID NO: 171619 - protein, 366 aa, unidentified
MKKTSTIRVNGNMIFKGHKLTIGLDLGDRWSFYCVLDEAGQIILEQKLPTTPEAMKKTFESTPRSLIALETGTHSPWVSRLLRELGHEVLVAHAQKVQLISKSNRKDDRHDARTLARLARIDPELLGPVRHRSAKAQIHLTVIRARAELVSARTALVNAARGLAKSYGERLRKCGTQQVSRELAAELSVELREVLAPLLQEVESLNERIKEYDARMEKIAKESYPQVELLKQVKGVGTQIALTYVLTLEDPQRFPKSREVGCFLGLRPGRRDSGESQPQMHISKEGDPYLRTMLVQGAHYILGPFGQDSDLRRWGLKLAARGGKNAKKRAIIAVARKLAVLLHRLWVGGEVYEPLRNSHKAMRAVA

SEQ ID NO: 171620 - protein, 377 aa, unidentified
MNLVNLIVDKQFLTKKQKLMKSKGKQLDFQGQNIYVGIDAHLKNWRVTILLEEISHKTFSMDPNAEVLYNYLNRNFPGASYYSAYEAGFCGYSIHRNLEKLSIKNIVVNPADIPTTDKERKQKDDIRDSRKIARSLRNGELEGIHIPFQDTVELRGLVRYRKTLVKEISRNKTRIKSFLYFYGIEIPQELDSASRYWSSNFSKWLDAVRLTTEFGHTVLSSTLETVHHLRKILLKVNKELRTIAKNDEYAKKLKHLTSIPGVGLIVSMTILSELEDINRFKSLDKLCSYIGLVPTTNSSGDKEKTGGITPRSNKPLRGILIESAWMATRNDPALALAYSNLCKRMKPSKAIIRIAKKLLNRIRYVLKNETQYEYAIV

SEQ ID NO: 171621 - protein, 450 aa, unidentified
MSPLALDVVTKTDKTPVLGRMLSKYVGRKTSSIENGITKARNHSRQRGNIMRVVFGIDVSKASSEVAILVNGEKIHGYTIPNDAIGFNRLLGDLKTVHQPEIVFEATGVYSRRLQAFFEDNSYTYTRLNPLESKKQLDSLRVRKTDKIDAEKLAMSQFILNRKPSYVQEALYQELRDLSRFYQNLTEDIVCAKNRLHKVLQITFPELENILSAPTGEQYWNLVITFPCNSFVLESDDATLTAIIRQSTAKRISEKRVTYLVDKLTKLANQSYCAVKKTSPVIEEVKYYAGELLRLSEHRQGVVEEMVTLAQSLPEYEILLSIPGIAETTATSIIGELGDIRRFHSANQINAFIGIDLRHYESGNFLAKEHITKRGNPYARKILFKCIHNIASASHTNPCHIADFYEKRKRQSQVTSTKPHTIASIHRLIRTMYYLITHNKLYDYTSIQNR

SEQ ID NO: 171622 - protein, 379 aa, unidentified
MIAVNFSQPHIIIGLDVHSQLIRAIAKDEQFNTVYDRIVKQDRKDFEDFYQSVTLISENKTIFWGREASVYSTWIDDFLFKKGHDILNVDTKLVKKWRQGINVEKSDYIDCEAIVSAVRFESKKVRQLTLEFEDDYYKELRSLTRERLKLSYDIMRVKSELHHALFKSLSPKYKTFFKNKSMFGDAWIKEALEYFAPFDDMHSFLIIRKLKKLKAYEQDADDLDILLKKIANKEIKALCKIKGINLVLASGIVGEIGNIDRFETPDKLARWGGIAPLEDSSATDKDDKDKAPTHRLDLRGNGYFDHYIYHVSVTQTRDGKSGYAPAQKYFAKKGGLSKNKKTKKDARRKHKRKLVNVIFRTIKQARLLPEAKFSKRIRN

SEQ ID NO: 171623 - protein, 403 aa, unidentified
MSIDGAPVKAASVVAVDVGKNTVTLSVTDAARRRLLGPVDFAMTAPAVAVVLERVCAVLPAAPVKVGVEAAGHYHRPLLGSGVWPAGWELLELSPARVAEQRRVQGRRRVKTDAIDLEAITELVLAGHGVPVTARSAAVTELTGWAMHRSRRVQTRTATKNQLLAQLDRCFPGVTLALPDVLGTKIGRLVAAEFADPHRLAALGVTRFVRFAANRGLRVRHSAADRLVAAARAGLPTPEAAVARQVLADDLVLLADLDAQIAAAEAKMAGLMPDTPFAPLLTVPGWGTVRAGNYAAAVGDPQRWPGARQLYRASGLSPAQYEAAGRRRDGTISREGSVALRRALIDLGIGLWHADPAAKSYGQALRARGKKGGVIGCAMAHRANKIAYAMVRDQTGYDPTRWA

SEQ ID NO: 171624 - protein, 421 aa, unidentified
MSKVIVGMDPHKNSATIEVMAGDEVVVGGGRYGTDAAGYAAMLASVRRWPDRIWAIEGCRGIGRHLASRLVAGGEQVVDVPPKLSARTRVFTAGQGRKTDATDAHSVALAATRMRGLHLVTDDAQLEVLRVLADRRRALGEDHTRMICQLHRLLLELIPGGAKRSLSAAQARALLARIRPRDLAGQARRRVAAELIADLERVHQRKKAADKELAAALKATGTTLMQLEGIGPSGAARLLVEVADITRFPDRGHFASWNGTAPIDASSGDHVRHRLSRAGNRQINRVLHIMAVVQLRHPSKGRAYYDRKVAAGKTPMEAMRALKRRLSDVVFRQMAADARAARTGPGGHTGAATSSSAAGSDPDAGSSDKSLPGPATSDPTPASHPIPPVTPAASNRRRTAAAVKRAVLDGGEDRRTLARRE

SEQ ID NO: 171625 - protein, 466 aa, unidentified
MARKQKSNKSKKHKRPIQSLETIQPNAAGIDLGSREHWVAGPPQEDKVPNVERFGTTTPELLRLADWLTQQGVKSVAMESTGVYWIPLFEILDSKGFEVLLANARQVTHVPGRKTDMLDCQWLQLLHACGLLRGSFRPSDDICRLRALFRERNTMVDQRSDWVRRMQKSLDQMNICVHHAVSDITGVTGMRIIRAIVDGERDPQALARMRDRRCRKSEQQIAAELTGNWRSEHLFNLHQALKMYDQLCTVVADYDSEILSYIQTLQPEDNNDTAVPPPSTKAKAGGIAKRGQEPLRQALYRFSGFDMTTIDGIGVDTASVVISELGLDYTMFPEEGNFVSYLRLAPNLSISAGKKVPSKSKASTCTRVASALRMAALTLRNSKTALGASYRRVAWRKGASVAVFATARKLAQLIYRLVRYGQAYVDAGAKAYETRFNQRRLKFYTKALNDMGYNVEPLTAAEANSG

SEQ ID NO: 171626 - protein, 427 aa, unidentified
MNSTQNIKISQITEDILIVGIDVGCFTHYARAFDWRGMEASYVFKFTNCRDQFERFLCWVRKAAHENGKKKILVGLEPTGHYWFALAQFLEENNIGISMVNPYHVKQTKELDDNNQTKNDRKDPKVIAKLVTEGRYSYPYVPMGIYADLRNFHNMYLDCTKDHIKVKNKLARWFNIWFPEYGEVFKDMGAKSSLLLLEKARTPDAVITLGAEGINAIWREAKLRAVGMKKAQRIVDAAKRSIGRKAGRRSASFELEMLLADYCKIKIQLDKVMAELEGLCEEIPAAKQMLAIKGIGLKTVVGFLAEVGDIGRFQTPKQIQKLAGLALKENSSGKHKGETSISRRGRKRLRTVLFTAAISLLGKNKAYQKLHQHYTQRLKNPLKKKQSVVAIGCKLIRIFFTLLSKGVAYDEEKMLNDIVWEEEAIAA

SEQ ID NO: 171627 - protein, 348 aa, unidentified
MKIIGCDFHPSYQQIALVDTETGELWEGRLEHKEGEARRFYQALHGQRVRVGMEAVGNSQWFEKMLAEMGHELWIGDAAQIRRLVVRQQKTDRRDAQHILNLLLDGRFPRLWVPSAEVRDLRQLLRHRQKLVELRRQVKNQLQHLALNQGVQRKRRLWSREGRAVLEQLPLEGWTARRRAELLAMLDQLEGQVGELDQAVCTEALRRPEVRLLMTHPGVGPVVGLAYVLTIGPPQRFPRGKQVASYLGLIPREHSSGGRQKLGSISKQGNTMMRTLLVEAAQTAARCDEELRRDYRRLAARQHRALAKVMVARKLAVRMYWMLRENRPYPQPPVAQMQGRPSHSVVAG

SEQ ID NO: 171628 - protein, 345 aa, unidentified
MEQHAGIDVSLKLSSVCIVDASGKIVKEAKVASEPEALVGFFKGLGFPVARIGLEAGPLSQWLHASLIRAGFETVLLETRHVKAALSAMSVKTDRNDARGIAQLMRMGWFRPVHAKSVGSREVRALLVARKQLLSKLMDLEASMRGILRGFGLKMGAVTRKGFEARVRELSTGQAMLERITTAMLEARAALSREFEQLHREMLRIVREDEICRRLMTIPGVGPLVAITFKSAIDDPGRIAKSKTVGALFGLVPKKYQSGERDVSGGITRTGDESVRTALYEAANVMLTRTTRFSSLKRWALEVAKRRGLKRARVALARKLAVVLHRIWVDGTTFRWTKPNPAIAG

SEQ ID NO: 171629 - protein, 350 aa, unidentified
MEYIAFDAHKHYTVASVERPTGEVLRETRLAHHRGVIRDFLQQWTPGSPVAVETVGNWYWLVDEIEEAGMVPRLVHARKAKLMSGMINKTDKLDVRGLNRLQRTGTLPTVWIPHAEIRDQRDLPRTRMVLVRARTRLKNRIHATLAKYALTVTDVSDLFGKQGRIILSDKLAQLPPHSRFSTEHLLEQLTALDAHIAEFEVRIRKVFKKTPALEWVMSLPGVGLILGIVILLEVGDIHRFPDAEHLAAYAGTTPRVSGTGGKIRFGRLRTDVNHYLKWAYTEAAEVICQHRADWSHRHVSQLYTRVRHRKNHQKAIGAVARHLAEATYWILTKRESYQEPKRRSDASTKA

SEQ ID NO: 171630 - protein, 405 aa, unidentified
MVTVGIDIGGSTHVVACCRDGMARADREILRVGQNRAGFGLLLDWLTALDEPVSRVMMESSGHYWMALASFLRRAGVPVAVVNPLQPKYFAKSRLGRTKSDPADARVLAELAMQEAPSDRDPLEGVELRQAARFAMTLVDGQATVTQRLLRLVELGFPELGELFEDPLGRLGREVLRVAPTAQRASHRRTATLADTNKGPGRRRLGPARAERLKAAAADTIAVPELEPEVAFEVGLLLDQYDLLERQIAAADAHVASLLDSELSRRLRTIPGVGPSIAATLISEIGDIFRFDDFDQLLAYAGVHPAERSSGHKGANPETSWHMSKAGNSHLRAAAYRMALVGISHNPVIRAHYARKRAAGKSRMNAVGHCMSKALSLVWGVWRGGKPFDAAHGSAAKTPQTAPEA

SEQ ID NO: 171631 - protein, 434 aa, unidentified
MEPQFAALIAIDWADQKHVWAMKIPGQTKPQMGSLSHTPEAVDAWAAELAGRFGGQSNAVALEQSRGPLVFMLTKYPHLIIYPVHCSTLANYGKSLRPSGAKDDPIDAKLILDILARHSDKLRPLRTDTVETRTIQFLVEEQRKLVDQKTACTNRLTAHLKMYFPQALEWFGELGSPIAVAILERWPTLSDVPKSRPATIRKFYTSHNSRTDGDYLDKRIDEIRTAISATHDEAVIAGYSVAVLAWAGLLKQLLLAIKDYDQRIELLANKHPDYALMKSFAGVGPVIAPRLIAALGSQRDRYESAYEIQCYSGVAPVVSSSGKKHHVHCRWACPTFLRQTFHEWAQHSMVSSQWAREYYLHQRKAGKGHNTAVRALAFKWIRILFRCWKNNVNYSELVYTNAAALKKPKPKSASPVEIKWETKMGMSKFTRLAT

SEQ ID NO: 171632 - protein, 330 aa, unidentified
MKKRHIFGIDVSKHTLDVVHHSTGRHIQISNDESGFTELLKWFKPLKATKSNSWVIFEYTGMYTQALLVFCEANKIAYTQVPGLMIKLSSGIKRGKNDKIDAGTIARFAYEKRDSLGLSASPNKITERLKSLMNLREKMVIQRAGYKAVIKELKSVLKLQDTDILVSTQTALIQVLNKEIKAIEQEVKELIGSCDDIQKNYDLLISIKGVGFVLAAYTLVYTANFTKFTDARKFACYCGTAPFDNSSGKSQKPRPKVHSLANKRMKSLLDQSARCAIYWDKEIKAYYERRTEGKANKMSTINIVRNKMIYRMFAVVKRQTPFVENYKKAA

SEQ ID NO: 171633 - protein, 341 aa, unidentified
MDIAVLGIDLGKNSCSMVGLDGSGKVILRRRMQRKTIVAVAAKLSPCIIAMEACCGAHHLGRVLAAQGHTIRLMSPEYVRPYVKAQKNDDRDAEAIAEAATRPTMRFVALKSEEQLDMQILHRVRDRAVGERTSLMNQLRAVLLERGVIVPQGRAKLRLRVTELLQQGAGELSSRIQLLIEDMLTRWLTLDERIAAFDAEFAAEAKRDEAARRLTSIPGIGALNATALVAAVGDAETFARGRNLAAWLGLVPRQATTGGKPRLLGITKRGSKYLRKMLIQGARAALPTLSRSNTRLGQWLRGLLARAHSNTVVVALAAKMARIVWALLRYGTTFEPRAIAI

SEQ ID NO: 171634 - protein, 387 aa, unidentified
MNRSDLNQSYAAFDQASTMACVIELSSKSWLLAGTVPGLKRQPRKKLSANEHQLLAQIERWRAEAVKAGHAIKRIVVAFEAGRDGFWLAHWLRERGIEVYVIHAASIPVPREHKRPKSDRIDTEMLMRALLGWLRGEPRHCRMVEIPTLEQEDAKRPSREHDNLVRDQTSLVNRMKSTLVMLGIAGFNIKLRYARQKLAALRTPNGEPIPPNTLQELYRDLERLELIKKQIKAIEQARVQRLKAKPNHGTNPLVLILAQVLGLGLETADLLVHEVLMRNLRDQRAVGRYGGLTGSPDESGKTRREQGLAKAGNWRVRHSSLQLAWRWLKFQKDSALAQWYRQRTADGGAITRKKMIVALARKILIALWRYVTTGKLPAGVVLKPAAI

SEQ ID NO: 171635 - protein, 357 aa, unidentified
MKERRDYILRNENVFVGLEDSKKTWSLCVRSSGMVVHETSMPARYEALRNYFNNKFPECHIRVMYEAGFRGFELHDQLVADGWEGVVTPPHTVTDEKCQRKKNDRTDCRRLARNLENGDYRKCFVPDKALREDRQVSRTCGQVQADIKRVLNRIRRMLEFHGLDNGLPAGRWSGAAYTRLRQHLAEIEISDSLRLSFEVMFRELEQVRQLKRELLLQMRKLARSDRYKESVRLLMSAPGIGMLTAIRLTLEWGDMSRFGRKEEFASFLGLVPSDYSSGDQEHRGHITKQGNRSVRGWLTESAWVAIRYDPVLLDKFRRVLRNCGSKKKAIVAVARKLALRLRMVLLSGEPYVLGVVE

SEQ ID NO: 171636 - protein, 359 aa, unidentified
MEPVYRCVAGIDVHKKMLAVIVRRDQDGQPQYEKRKFGTTRKEILALAAWLQHGQVSEVVMESTAQYWRPVWYGLEPHFQLHLSHPLKTRAPRGRKRDYRDAQRLADRWWAGDLEDSFIPGAEQRGWRWLTRTRTHLKRKMGVVRNQVEGLLEQGGIKLTAVVSDALGVSGWAMLERIAKGETDVEVLAGEARGALRKKKAQLQEALAGQLDPICRLLLRQHMEQVKLFRQQVEEINQALAVAMQAHTPTLVRLGKIPGVDLYAAQELLAEIGPGAVAFPSAGQFASWVGVCPGSQESAGVCYSHRSAKGTATCGVYCAKLPGRPFTPKTRSSPLCSPACFPESKARAPPGRWPIELLR

SEQ ID NO: 171637 - protein, 342 aa, unidentified
MLYVGIDVAKNKHDVTALNVPGKTVLKPLTFSNNKAGFELLDLSFRQLNQDCLIALEDTGHYAFNLLNFLHEQGYKVYTYTPLLIKEFAKSLSLRKTKTDKKDAHGIALKLLSDPNREQFQHDNRQVELKILARHIHRLKKKQSDWKVQYTRCLDIIFPELDKIVGKHSEYTYQLLTCYPNPQKRLETGFDKLIEIKRLTASKIQDILSVAPRSIGTTSPAREFEIIEIIKHYKRLIDKAETCVNDLMAEFNSVITTVTGIGGRLGAVILAEIRNIHAFDNPAQLQAFAGLDSSIYQSGQIDLAGRMIKRGSPHLRWALIQAAKACARFSPAFKAYLKTKLE

SEQ ID NO: 171638 - protein, 315 aa, unidentified
MIIGIDISKQTFDVAWMSAEQGHHQSYDYNEKGIGALLKDAPSTAHYVMEATGVYHTRLALMLYQSGRQVSVVNPLVIKRFAQMQLSRVKSDKADAELIRSYGEQHAVSPWSPASTDVIELQQAHGWLDDLIRERTRLQNRQEAHAHQATASAYVKKQMKTQLRHLDKQIKDCEHHLEVIVKKSFADVYARLLTIPSIGSKTAIELIVVTDGFYRFEDVKALCAYIGVSPTTFRSGTSVKGKGGIAKMGQGRMRQLLYLCSWTARSCNPACRELYLRLKATGKPSKVISIAIAHKLLRQAFAVATKGMPYSESYA

SEQ ID NO: 171639 - protein, 377 aa, unidentified
MKSINFVGLDVHAETIAVAVAQQGGEVRSLGVIPNREESVRKLVKKLGPVEQLRFCYEAGPTGYVVYWQLTALGAKCEVVAPTLVPVKSGERVKTDRRDALKLARTYRAGELTAVWVPDAKHEALRDLVRAREAAKKDQLRAKHRLGKFLLRHGRRPPTGVKPWTLKYLTWVKQGVHFEQPAQEATLLDYLHEVEHAEARIARLDLAIEEAVKSMPPEMKAVIEGLQALRGIAQVAAVTIVAELGEISRFSRARQLMGYGGIVASEHSSGESNWRGGITKTGNAHLRRVVVEAAWAYRHRPNVGAALRQRQELVSEEVREIAWKAQHRLYMRYRKLMARDKDKGKVITAIGRELLGFIWAIGVKVEAVQKTPERRAA

SEQ ID NO: 171640 - protein, 330 aa, unidentified
MKQPIHAGIDVSAATLDVAIERGRGAVWTGSFQNTAAGHQRLIRALSKQGRVVRVCLEATGVYHLDAALAMRERGIEVMVANPRATKDFARAQMQRSKTDQTDARSLLEFVRRMEFQVWEPPPREILELRALSRHLAALATMRAQEKNRRHAIDQVAGLGDPVREAIEEHIEYLDGAIRELQAKALEVVASSPVLEVAFAHLVSVKGIAAASAVAILAELAVLPQDMSAREWVAHAGLDPRRHESGTSVKGPVRISKVGNRHLRRALYMPTIVAVQHEPRIKALYEKLLLRGKKPMQANVAVMRKLLHAIHGMLRNDQHFDGERFFATEA

SEQ ID NO: 171641 - protein, 339 aa, unidentified
MGIVGGLDLHRRQITYDWLDTTNGETKQGVIRPATRQSLREWLAELARTDGAFALEATTGWRFVVEELQRAGLEAHVAEPADTRALRGKKRRAKTDRADARHLRVLLLAGSLPESWIPTEFIADLRTQVRLRKSLIDQRSGWIRRVRAQCFHHGLADPPNVQTAAGLAWLARAELPAVARQVVAVALTMIEAIDVHIQALEAELCAVARHQKGCLALQSQWGVGPLSAVALVAELGDVTRLSSSRKAVRFAGLDITVSESDIKRSRGYLSRQGPPVLRRTLYEAATSAWRKASPDHEYYLQTKGRLGTKRARLSVARRMLRRSYHLLANLGEAAIEPAR

SEQ ID NO: 171642 - protein, 452 aa, unidentified
MDVLYSHVAGIDVHKKQVTVTARTPDPRRADRREQTRTFRTFYADLLAMGSWLVECGVTRVAMESTGPYWWPVYSALREVGGPGLSIDVVNAAHVKAVPGRKTDVKDSQWLAQLLEVGLLRGSFLPPDDIREIRDLTRYQTKLTEERSREKQRLLKVLEAAGIKLDVVASDTFGVSGRCMLDALVAGQRDPVVLAGLARGVLRNKTDDLRLALAGRFTVHHGQMIGLHLARLDHLDQMIGQVKEKIGHCGTPGTSRRAPTGPVGLVAVFAEQIQLLTSIPGIGERVATVIVSEIGVDMSRFPSAKHLAAWAGLAPGNNESAGRRRRARHRNGNTHVQSILIEAALAASRTRTRLGARFHRLHRRFGGKANKTAGKKAAFAVAHTLIKVIWVVLSTGRVYADLGHDYYTRGVNPETHARRLIAQLEALSGKKIILVDHDDGGPPDGVSREAAA

SEQ ID NO: 171643 - protein, 351 aa, unidentified
MSHKTAATVAQTIGIDTGKNTLHLIGLDDKGAIVLREKIARGRITARLANVPRCLIGIEAGMATHYVARELSALGHDVKQVPPAYAKPFRQGHKNDFRDAHAIAEAVQRPSTRCVPVKTDDQLDLQALHRVRSRLVGQRTAVINQIRGFLLEHGIAVRQGLRFLRQQLPDILAKRGDVLSPRMTRIIEDLSGDWRRLDERIKHITEEIEVLAHSSESCRQLMTAPGIGPLIASAMVAAIGNGTAFAKGRDFAAWLGLVPKQMSTGDRTILGRISKRGNRYLRTLIMQGARVILLRPANWAKHSFGLWLTAAAQRLHHNVLATALANKLARIAWTVLAQGRSYEARVEPKVA

SEQ ID NO: 171644 - protein, 410 aa, unidentified
MEVLFERVAGLDIGKASVTVCVRIPGPGGRRVSETRTFKTTTRALGVMRDWLLERGVTIAAMESTSTYWKASFYCLEEFMEVWLLNAAHMKAVPGRKTDVKDAEWIAQLLEHGLLRPSFVPPPDIRRLRMLTRYRVQLMGDRTREATRLEGMLEDASIKLSVVASSLTTVSARAMLAALIDGERDPRVLADLAKGKMRAKIPELTEALIGHFDAGHAQLARSILGRLDAVEADLAELDAVIAAACQPWAHHLELLQTIPGVGPKVAQVILAETGGDMSRFPSAAHLAAWAGVAPAVYESAGKRSPTGARHGNKWLTTMLVEAAAATARMKGTNYLSTQHARLTARRGTGRAQVAVAHSILVSAYYMLKNDEPYRDLGPDWLARRNTEAHTRRLVAQLEKLGHTVVLDPAA

SEQ ID NO: 171645 - protein, 366 aa, unidentified
MLIIGCDYHPSVQQIAWADTETGECGEKRLMHSDGEAERFYRELKQRGVQVRVGMEATGHARWFERLLAELGFELWVGDPAEIRATRVRKKKNDREDARLMRKLLLENRFPRIWVPSPENRDVRQLLLHRHRLVGMRTRVMNQLQAIAMNEGLRRKSGLWSKKGRARLESLSLAPWASRRRQELLDLLDRLNPMIDELSKAIEQEAERRPEVQLLMTHPGVGPITALAFVLIIGTPERFHCGRQIASYLGVIPCEDSSADHWRLGHISKQGNALMRFLLVEAAQTVARCESEWRQHYFHLLLRRGRAIAKVALARKLAVRLFWMWRKGQDYQQVKKFGSDAGQPETPNGVKSITVKLMERPAPSMA

SEQ ID NO: 171646 - protein, 421 aa, unidentified
MKIVHEICCGIDVHKTFLVATIVTATDTRHLTYKKERFSTFNKELRRLKKWLIQNNCFDVCMESTGKYWVPVLNVLEPELRVMVVNPKWVAAIKGNKDDVKDSKWIAELFCFGIPYGSFIPEKPIRILREFTRYRYKLTNMKSSEKNRFQNGFTVCNIALDSVVSDMFGKSASAITDYLLTTPAPDPEHCRDLLHRSLKKKADAVVDSIEGFQLTEEQSWRMLQVRKHLEYLENDIAEVDAKIDELVRPYEPAIQFLCTIPGMKRESAITVISEIGTDMTQFGSSKRLCSWAGLAPGNNQSAGKKKSVRITRAGVYIKPMLVQVAHAAVKCTSQPYYKIKYERIMRRRGKKRAIIAIARMILTAIYHMFLTGEMFNPSDLHQIDMPEKLKEQQQKRAVTNAIALLQKEGLLPSSFSVESCA

SEQ ID NO: 171647 - protein, 363 aa, unidentified
MMSSPVAGIDPHQDTYTIGIVDPNGVELAHAAFPNSAAGYLDGIELLNAHGVQLVGIEGSAGWGSHVAIALCAAGFDCREVPAQRTAAQRRARRLDKTDHVDAVAAARAVLAEPTLGPVQALEVYDPLVAKIEAVLERRRMLVAVRTLVLHHVQDQISKLPVEIRDQLSATGKIEGRLRRLEQVDTGIVTTLAGEYRLSWLLPLVDQDRIARHQIRELERDIDALLDEHGTTLREEPGIGPIAAATLLAEVGDPFRFARESKFARWCGTGAVALSSGEGDGQPVKHRLDFGGNRRINSTLYIASITQHRDLDEARTYIDRKLAEGKTRREARRAHKRHLANRVIRSMWKDESRRQDHPAQHAA

SEQ ID NO: 171648 - protein, 391 aa, unidentified
MIYVGIDVAKDKHDCFITNADGEVLFKAFTISNNLDGFSELYQKIESVMDDVTKIKVGLEATGHYSYNLLGYLIDKGLPAYVINPLHTNLYRKSLSLRQTKTDKVDARTIASMLMSDVNLKSYSDTSYHNEELKSLTRYRFDKVKERAKLKTSISRLVCILFPELEKLVPQLHMASVYAMLSEFPGAKQIANAHLTRLTNLLSESSKGHYGKETAITFRDAARASIGSNMPAKSLELKHTIKLIQELDSEIDEIENEIKIIMDKINSPILSIPGISYRMGAMIIAEIGDFSRFDSPDKILAYAGFSPSTYQSGQLDGAYAHMEKRGSRYLRYALYNATKYVCHWDPTFAAYLAKKRAEGKHYNVAISHAAKKLVRVIYHLEKTKQQYIKAA

SEQ ID NO: 171649 - protein, 352 aa, unidentified
MEMIALDCHKHYSVASVETPGGDCLAERRIEHRRGSIEAFLGPYSAGCPVAIETIGNWYWIVDEIERAGKVPRLVHARKAKLMLGSINKTDKLDVRGLNRLQRSGTLPLVWIPPGGIRDPRELPRTRMVLATMRTRLKNRIHSVLDKYGLQEEVPQVRDLFVIGVRTSLQECLAQLPAQAAYTTGLLLRQLDRVQATIGTLEKRMARVFRPTPEVQWLQTLPGVGRILSVVIASEIGDIGRFACAERLASYAGTVPRVHSSGGKTQYGRTRSDVNHYLKWAYTEAANVVAVHHRQRPDLHVSQLYSRIRHRRGHASAVGAVARHLAEATYSMLSKKEPYRERGVPEVSSQQG

SEQ ID NO: 171650 - protein, 341 aa, unidentified
MKGRLFGGIDVHKSRSTIFLIDDQGNKVKAKTIITNQEFFEEFFRPYANGEHEIEIAVEAGNLAFWLCNILHRFGIKTYVVNVLENKSISHSAKKTDKRDARVLALQLLKGYLPERVYEPNLRERELRGLVQHRYQIVRDRTRIVNRAYCLLTRAGILLSKKNLADYDRYWQDVLDEKIRDQESSLYFEFQFYFDQYRLQSKQLNEIEKKLAKKAKELFPEEHSLLLSIQGVGEVTATALLAYAGDMSRFKNARKFASYMGLVPFIRESGGKRNQSSGRITKKGVSILRGYLTQGIIALLTTKSRAKNSPQPLVEFYEHIKTKKGWRKARSAMARKLCHII

SEQ ID NO: 171651 - protein, 394 aa, unidentified
MIYAGVDIAKTDHVIGAVDERGAEMCRPMPFKNTEAGLERAAAWLEGLAGSPSDVVVGMEATGHYWMACYSFLVARGYSVAVINPMQVKAVRKLKGLDKVKNDRVDAGLIAEALRIGQYDETRLATDEVASLRSLSRYLQSLRGMIAELKTQCVCLMDAHFPEYAGIFSDMFGAGSRAVLSKSPLPFELARRRADSLARDIAEASRRGGKSAGYAARIKAAARSSIGVRLGQEAASFQVKSLIRQIEFADSECAKVEARVRALLDEVEPLVLTIPGVSYVTGAQIVSEIGDVSRFRNASALVSYAGLNSSVSQSGQFDSGGGPITKHGSPYLRRALWLAANRARQYDPGLRAFYDKKRAEGKPHRVAVTAVARKLCHIVFAVMRDQVPYDPGRE

SEQ ID NO: 171652 - protein, 423 aa, unidentified
MTKLTSTPAGAVLVAIDMSKNRQEVLIERPEGGRRRRMTVMATKEDYDGFVEQLAAIGRPIIVGFEATGNYHRTLAHRLLTAGFELRLISSVALARTREALHNGWDKNDPKDAQVILHMLRIGATQRYVDPLAAGINDLQELSKTHETISRMKTQTWHRILTHYLPLYFPEIARFAGNSRSDWFLALIEQFPTPATITALDREAFSAAAWPLIGRKVSKARLINDIYETASASTALPVPEDSAAITMFRMVIAQGRSLIHQRDEIERLAHARLTDDVDYQLLRNIPGIGPINALTILAEAGDLRRFNHHRQFLKFCGLDLATCQSGTFRGRTKLSKYGNARLRRTFWMAAQVAARQRDNSFRDKLGRYTAGHADDADRRRKAMTALTAKMARVAHAVVKTGTEYRPFLERSDARWKDPSLQVP

SEQ ID NO: 171653 - protein, 422 aa, unidentified
MDSDASEVDYAAFIGLDWGSEKHSVAFQAAGSKEIETYELKQTPEELHGWLIGLRDRFGGRPVAVAIEQTKGAVIHALLGYDFVHVFRINPLSLSSYRKAFSPGGAKDDAPDADLLIEWVKLHRDRIKPWVPDDAETRALQKLVEFRRDVVNQRVAFTNQLTQALREYFPQALDWAGDLDREMACDFLSKWPTLEKIKRAKPDTIRAFYRQHGCRSRERIEERLAAIHTARPLTEDPAVIATSVSMVQTTIRVLRPTIESIQRLDREIAQRFHAHPDAEIFDSLPGAGSALAPRLLAAMGSDRSRFESAAEVQKYSGIAPVTQRSGKHKWIHRRFACPKFLRQTFHEFAGQSIKLCTWARGYYDMKRSKGMGHHAAVRALAYKWIRIIFRCWQDRVPYSDEMYLQALRKKGSDVLNFVSKAA

SEQ ID NO: 171654 - protein, 313 aa, unidentified
MTVKCEYIGIDVSKATLDVASQTGKEYKQFSNTAQGINALIKWLASIDPELIVMEATGGLELPCVAELAHTKMPVAIVNPRRIREFARSIGQLAKTDKLDAKVIAHFGEATHPEPRKLPTEQEEKLTALLTRRRQIVEMLTAERNRVHSARFAMQERVEIHIQWLNQELMDLDKEISDFIHQSSLWKEKNDLLQSVPGVGKVTSATMLAMLPELGTLNRQKIAALVGVAPVNKDSGRRQRKRRVFGGRANVRSVLYMAALSASKHNPKIKAFYNHLIDMGKEKKVALTACMRKLLVILNAMVRANQPFEATMA

SEQ ID NO: 171655 - protein, 358 aa, unidentified
MSRCIPTDAATITLGVDTHKDAHVGVALDGLGRHLGALSVPTTPEGYKKLVDWASEFGPLEHAGVEGTGSFGAGLARFLKGRGIRVSEVIRPKRRDQYRTGKSDPIDAESAARSVLAGTAIGQPKDADGEVEMIRTLRITRRSAVKARAQAANQIQALLVTAPEGLKSELCGLSTGRLVEKASRLRPGATPSDVEAATKFALRSVARRYQHLSEEIGRLDEQLNRLVTEVAPELVAVEGIGTDTAASLLIAAGDNPERLRDEAAFAHLCGAAPIPASSGKSVRHRLNRHGNRDANRALYVIAVCRMSRDERTRAYVAKRTAEGKSKKEIIRCLKRYIAREVYRILASPSLHSPSISGP

SEQ ID NO: 171656 - protein, 312 aa, unidentified
MTHACAAGVDVGRDFFDVGLAPSGQVFRTANGPGGVLALVERLKRAGVSKVVLESIGGYAARLVRALAEAGFEVGVIDPKRIRALRIAEGKRAKTDRLDAKLIARFALIMQDAARPVPDAKAFEIRALSTRRRQLVEMAAMEKVRLKQTLDEAVADSCRQMIAILSEERARVEGRLQAELLATAERAGHAKLLQTIPGVGPAVSMTLLADLPELGRLDRKAIASLAGLAPHPNQSGTRTAQAHIAGGRPCVRAALYIAAVSAARTDKGFKAEYQAMRQAGKPAKVALVAIARKIVVAANSMLKSNQPWIKAS

SEQ ID NO: 171657 - protein, 358 aa, unidentified
MEQITRGERGRVVVRVGVDLAKRVIQVHAVDAAGRLVTGRALARDRFIAWCAQLPGGCVVAMEASSSAHHWARKLSSLGLDARIIAAHLVKPYRKQGSSGKNDANDAAAICEAASRPSMHFVPIKSVEQQSMLCVHRLREGIKEERTACINRVRGLLAEFGLVFAQSPKVLRLALADTIEDASNEMGTLARLTLQRAYAQWCELDEHMAWCDERIAEHACTNEQVKTATALLGVGPVTASAVVATVGDFRQFRNGAQFGAWVGLTPKQHSSGGKARLGRITKRGDTYLRTLLIQAAKSAVLTAHRRSDRISNWLCMLRERSGWQIAAVALANKNARILWALMTKGAAFNANHLSAKPA

SEQ ID NO: 171658 - protein, 352 aa, unidentified
MSKITITGIDLAKNIFHLHAVDSTGRQVKAIKLSRLRLSEYLHRSEPVTVAMEACASAHHWGRLCQLLGHEVRLISPQFVKPFVKSNKNDRNDARAICEAAQRPDMHFVPVKTVEQQAVLSLHRVREMLIGQRTATINQLRGLLTEFGLTAPAGRRALHNTIPAMLEDLMKISPTFLVSCIRQQWEHIGELDQCIDNVTSQIEMHARQSDVTRRLQTIPGIGPITASALEAYVGNATQFRAGRQLAAWLGLVPRQHSTGGKPVLLGTSKRGDGYLRRLLVHGARAVVATVRSSPNVQKQDKTIMGWVARKHMNVAVVAMANRNARIAWAVITQKRNFDRNFRDQLANQLAAT

SEQ ID NO: 171659 - protein, 399 aa, unidentified
MVAEHAEQQRVVIGMDPHKRSVTIEVMTGDEAILGGGRYATDEAGFAAMRHDVRQFGDRVWAIEGCRGIGRHVAQRLLAAGEEIVDVPPKLSAEVRVYATGQGRKTDATDAHSIALVGTRVAGLRPVVADADLDVLRLLADRRRSLGEEHSRKVSQLHALLLELIPGGAKKDLSAAQAKALLAKVRPRDVAGKTRRRLAAELTADLERIYARKKAADKELRELVTATGTGLLDLHGIGPSGAARLLVEVGDITRFPDRNHFASWTGTAPIDASSGDHVRHRLSRGGNRQINRALHMMATVQLRNATDGRAYYDRKKNSGKSSMEAMRCLKRRLSDTVYRTMLADLAPHHTADQVTGPGGQRGNDSDSSATGSQPQHRHFGQATPGPVNDHPKPALPKVP

SEQ ID NO: 171660 - protein, 433 aa, unidentified
MPTTHPYDLVIGLDRSDRKADLHLIDTRTGNVQKQTVATSPEALHDWLVQLRRDHPQARVALCLEQPAANLIVFLETYSWITLYPINPISLQKFREAFVTSRAKDDGKDAQYLAELLLSHPDKLKAWQPDDSQTRQLQQLVLHRRAVVDQRTGLTNRLKALLKQYFPQALDLCGEDLWRPLATAFLLKWPTLQSLKKARKESLKQFYYLQGSRSQTLIEQRLERIDKAVPLSDELALLQSYTLRVQLLCKELQLLLKTLQQFDQQIAKVFQQHTDRPIFEAFPGAGPVLAPRLLASMGSERERFAQPENLQSFSGLAPVTKQSGGTCSIHRRYLCPKFLKQSFHEYAKESILHSRWAAAYYGQQPNKGCGHHTAVRALAYKWQRIIWKCWQTRTIYKEAIYEAALKKNKSPLIGLLDQIELGKSPVKSRAKKS

SEQ ID NO: 171661 - protein, 353 aa, unidentified
MNYVGIDIHKRYSVLVAVDERGRELTRGRISGNSAFGFAQFFGALSGPSKAVLEACWNWGRIYDVLSEIEEIEEVVLAHPLKTRLIAEAQIKTDVLDALSLATLLRGSLIALAHVPARETRLRKEELRQRLYWARLRTRIRNRVHALLDRQAELQMPQCSDLFGRKGFNALSKLNLPEPDAALLCEDLELLQLIDRQIKAQEARIVEFNSSDQSTLYLQSLPGMGKNLAAVAAAEIDCIERFSSAAKLCAYAGLVPTTYASGGKAYQGHLLKSRNTWLQWAFIEAAWVAIGCSSYFGAIYRYHRARGKKANVAITIIARRMCQIAFTLLKERRNFQEHNFPGRSVRRLTAAAA

SEQ ID NO: 171662 - protein, 334 aa, unidentified
MSKNSTNEAEADYYLGVDVAKSKLDVSLLESRSGRELTHRIVANSTEAISSLLEDCLVDYGGSLQCVAEATGTYHFNLLYAAEGLGIPVRVYNPIITKSGIKASVRGKKTDRTDALLIARMGLRGEGRIHTPEGYKTVKYYARGCQKLSIMDSAFSKYKTHFTELLEGEVTPEFTALLSGVRQAITEARAQLYKDTATSAQGKSFRLLQTIPGIGPYIAASIIGEVQDIKRFDSSKALVAYAGLDPKIRQSGKALNSTGRLTKRGSSYLRRSLFIAANVARMHDPQLKTLYEKKKSEGKTHKEATCVVARKLVRIVWSVWRNGKDYTVPEETKA

SEQ ID NO: 171663 - protein, 348 aa, unidentified
MLHAGLDLSRKRLDVCLLSDQGELVEEFQAPTGADGVAGLARHVLDYGEPVRGVIESMTGARFVHDMLERFGWDVLIADAQKVKGLAPLACKTDKIDARVLAVLSERCLVPEVWLPDPSVRAERELARFRLHLVKHRSMLKNRIHSTLISFGKPCPVSDLFGVAGRELLERLELPEPWRETVDASIGLIDELERQITEINKQLRSAGADHPYVPLLLTVPGIGQVLAYTIAAEIGNIDRFASPSKLTGYTGLCPRVRQSGDSDRRGPLSKHGPKYLRWALLEATMHALRHPAYSERYQRNKQRLGRQRGAKVAQIDIARKLIEAIWHMLTNNQTFSPAPGGAIFRLAA

SEQ ID NO: 171664 - protein, 409 aa, unidentified
MLHDHPSVGPTAILTQFGAIFVSLELSRSKWVVTSLSPGNGERMSQYSLTAGDIGGLLARFADFKRKARERTGSDYPVITIHEAGLDGFWVHRVLRNEGIESHVVDAASIATSRRRRRAKTDKIDGEALLRALLAFKRGEPRVCAMVVAPSPEEEDRRRLCRERQTLIAERIIHVNRIKGLLFAQGISDYAPLRRDRRKRLEGLRTGDRRSLPVHLKTQVSRELDRLELLLEQIGKVEAEQEALLAVESKVASGQEPCNREPCNREPRNREPRNREPCNAVTMLLAVKGIGEHSAAILWSEGLYRQFANRRQVAAYAGLAATPWRSGAVVHEQGLSKAGNPQLRTTMVQLAWLWLRHQPQSALARWFRARGERGRKGSIVALARKLLVALWKYVTHGVIIEGAVMKPAA

SEQ ID NO: 171665 - protein, 411 aa, unidentified
MDAIRKCCAGLDVHQESITACILNSPLDRKPKPLIKNFGTTTRELLQLQDWLAENQCTEVAMESTGVYWKSVWNILESSCKLTLANPAHIKNMPGRKTDIKDAQWIAQLHRCGLIQASMVPPQDIRDLRDRTRYRQKLIHMITSEKNRIHKTLQDANIKLTTFISDLFGVSGRALLEKLMDGEVLDEEQIRSLVKTKLKRKVPQILDALNGKVRVHHREMIRMHMNSILFLEEQVEQLEQSIQELLKPYQKEVELLDSIPGIDLDAAASILAEVGPDMDLFETEAHLASWAGICPGNNESAGVKKKSKSRQGNKQLKSMLCQSAWAINAKKDCRITSFFHRVKRRRGEKKAAMATAHLFLRIIYRILSDKVGYQELGSHYIQDKKERTVDQLKKQIERMGYVIQLDRIQAS

SEQ ID NO: 171666 - protein, 377 aa, unidentified
MLGTKCLLAGVVAPIRWKYGLTIGTGPKHQMEATVNQYIGLDVSLKETAISIRQEGKRIWRGRCPSDPKLLSEMIRRHAPHAKRVVFETGPLSTWFYHALTAEGVPAICIEARHAQKILDETLNKTDANDADGLAHLAEAGFYKAVRVKAFDSMLTRTLVTARNQLLSISTQLSNQIRGLMKTFGLIVPKGRGRIFDGNVRQFLDGNDALAKIILPLLDAWCDIRRRAAGLDHQLLAAARGSQETKLLMTIPGVGAVTAISYVAAIEDPDNFKKSRSVGAWLGLTTRRYQSGEVDYDGHISRRGDNRLRGLLYEAAMVLLTRTSARTECSLKNWGLKLRDRLGFKRAAVAVARKLSVIMHSMLKTGEMFNALAGAPV

SEQ ID NO: 171667 - protein, 406 aa, unidentified
MNVIYERCAGLDVHKKTVTACVLLAQPTGRPVKMVQTFATMTADLRALRAWLQQQQVSHVAMESTGVYWKPVWNLLEDAFTLLLVNPAHMKAVPGRKTDVKDAEWIADLLQHGLLRASFVPKRDDRDLRELTRYRASLVRERSAEVNRLQKTLEGANIKLGDVVSDVTGVSARAMLDALVEGQTDPEVLADLAVRQLRKKREVLAAALTGELRPHQQFMLAQHLHLIDAFDTQIAALNEEIGQRLAPFEAQVTLLDGITGIGRWTAEGILAEIGTDMSRFPSASHLSSWAGMCPGHHESAGKQTSGKTRKGSPWLKVLLTEAAYAAGRSKDTYLSQVYHRLIARRGKKKTAIAVGRMILETCYHVLSTGEPYDETRLRRIEPVAPELKLVRQLEKLGHRVILEPAA

SEQ ID NO: 171668 - protein, 435 aa, unidentified
MKITQIREHTAGIDIGSEHIFIGLDDDSVHQFGTFTCEFRAAIELLTARGVQSIAIESTGVYGVVLHEMLQEAGFDVWLVNPAHLRYVPGRKSDVADCQWLQQLHSYGLLANSFLPDPAIKALRAYLRLRERYISESAKAVLHMQKTLTLMNIRLHQVISQIHGASGMRVLRAILDGERDPEALVALCDKRIQANKHDQVVASLEGHYRPEYLYELADAIDCYEFFQGKLNECDRQIDGELSQLADRQPVPNEYGKAKPIRHNKPAINQLHQKVVRAAGGINVNELPGLTDYSALRLMGEIGVDLSPFPKEGHFTSWLKLAPGKKQSGKHIRKHKYKSAPRAAEIFKQAAQSLLESKNHALGAFGRRIRARRGPGIAIKAVARKLAILYYRAMTQGMDYVEQGVEAYEKQYHQRRLHMLHKQAIQLGYALVELNE

SEQ ID NO: 171669 - protein, 349 aa, unidentified
MTKVISASGANFLLPVFAGLDVGAQELVLALRMDGCPQDGGSFPNSPAGIRSLVKRLKALKRPVFACMEATGVYFLQAAKALAAAEGISVMVANPRTIKDFARAMNRRSKTDKVDARVIALYAQKADFVAWAPASDNHHHLRLISRRIDERVRQQAADKNRLHSLRAGGSCPRCVQQDVLANIKHHQRSIKRMRQAAVAIIKSEEALLGRYQLMLSIPGVGAATAVRLLAELCVMPDCLTARQWTAYAGLDPVHNESGTSVRTPSRISRAGNSRLRNALFFAAMVACRTDPHVRAFTEKLVQRGKKKIQAIVAVMRKLLHAIWGMFKTKTTFNGSLLFPQLTPEPLTSQ

SEQ ID NO: 171670 - protein, 412 aa, unidentified
MLKIVYPICCGMDVHKSFVVACIATTNDHGVTNYKSKRFSTFTGDLRRCADWLSENNCKDVCMESTGKYWIPIYNILEHTCNIVLAHPKYVKAIRGKKTDKRDAKWIADIFKHDLVSGSFIPPADIRQLRDLVRYHWKLTNFNVGEKNRAQNCLTVSNIKLDDVFSDVFGKAASAITTRLLESNEPFDVKPYLTKNIKKPIEQIQAAVDGEMCAEQAEKLRIIRSHMDSLELCKLNLESLILSTAEKYIPQLNLVMTAPGIQSFAAIGIISEIGVDMSVFPTSKHLCSWAGLTPQNNESAGKKKTTRISRAGAYIKPLLVQCALCAIRAKRFPEVRSRYLALKKRRGHKKAIIAIARMLLTAIYNMLKKNEPYNPELYRKGDRPPAHREVSVEEAIFILQRQGYLVTAPTTA

SEQ ID NO: 171671 - protein, 416 aa, unidentified
MNAVGIDVSSRKSTVAVLRPLGEVVCLPFDVTHDIAGLASLVEKLKALDGETRVVMEHTGRYYEAVEKALHEAGLFVCAVNPLLIKEYGANSLRRVKTDKADAVKIARYALDNWADLRDFTPMDAIRYDLKTLNRQFQLASKQRTASANNLIALLEQSFPGIRKCFDSPVRSDGTQKWVDFAHSFWHVDCVRKQPFPAFCERYRKWCKRHAYLFKLSNAEEVYALAKRAVVLTPKSKVVKVLVQEAANQLSSISRSVEVYRAEMDRLAAMLPEYPVVMAMYGVGKSYGPQLMAEIGDVRRFERKQALVAFAGIDPMPNQSGDKNVRSNKSSKRGSPYLRKTLFNVIRTYLQCAPQDEPVFQFLNRKRAEGKPFYVYMLAAANKFLRRYYAKLRDYFASLNPLQPVAPIPTILKATL

SEQ ID NO: 171672 - protein, 315 aa, unidentified
MQKLLNIGVDVAKDAVVVGCDEQGSAVRSIPNQRTALTAWLASLPGPSRIGMEATGCYHELLADLAYQRGHTVFVLNPKDTRHYAQAVGLRAKTDRVDALLIARLIAHEHARLHPYLPATPEQRQLGRLLRRRAQLVKLKGALKQSMKGVIGLARDTSALVARMDALIAKLEQRMDGLIASMPGTQEDRRRLETIDGVGAVVSIALIEPLTRLPFRSADAFVAFTGLDPRPRDSGHKIGKRRLSKRGPAELRRLLFNAAMAAARTCVWKPIYEHYRARGLPTTAALVVIARKIARIAWSIHRYHTSFDPQRLKAP

SEQ ID NO: 171673 - protein, 391 aa, unidentified
MWTVPHPAISTTEASMENDSTLYVGLDVHKDSITVAYALGTGEVELLGKIGTTKTDIDRLCKRLQSKARRVCVVYEAGPCGYGLYRQLTEKGFDCMVCTPSLIPKKPGERVKTDRRDAIKLVRALRAGDLSAVYVPGVEDEAFRDLARAWAAAKDDLKQARQRLKSFLLLHGVRYTGSANWGPAHQHWLSTHSFANEWQQFAFEEHRRTIEDRLTQCERLEKALREAAVNWRFYPAILGLQAMRGIQFTTAVGMIAELGDLSRFEHPRQLMAWLGVTPSEHSSGNKRRQGSITKNGNSYARKLLVEAAWSYRHLARVSPEIQRRHEGIPKPIVDRAWDAQVRLCRRYRKLVARGKQKNIAVVAVARELSGFIWDISRLAMSLAIPREELTA

SEQ ID NO: 171674 - protein, 407 aa, unidentified
MIFVGDDWAEAHHDVHVMDGSGRRLASRRLSEGLAGVREFHELVAEYSDDPSGVVVGIETDRGLWVEALIAVGYRVYAVNPLAVSRYRDRHSLAGGKSDAGDAKVLADLVRTDRHNHRPIAGDTPGVEAVKVLARAHQNLIWDRNGHTNQLRSALREYYPSALEAFDDLDDRDTLAVLERAPDPAVGARLTVTQIRSVLKRAGRQRNLDRRAREIQAGLRSEQLVASDPVSAAFSATTSATVRILKEVNRQLEELEAKLAEHFRQHPDADIYLSIPGLGDVLGARALGEFGDDPNRYATAKSRKNYAGTSPITVASGKKRAVLARHVKNRRLYDAIDQWAFCSLTQSPGCKTYYDQRRAAGDLHHQALRALGNRLVGILHGCLKYHTHYNEHTAWAHRQTTPANQAA

SEQ ID NO: 171675 - protein, 391 aa, unidentified
MSVYFVGIDISKYKHDCCIISAADQQVVSKFTFKNNKDGFSELLTALHSLSSPEDIRIGFESTAHYALNLELFLEKAHHSFMEVNPVLISEYKKSTTLRRTKTDRVDCESIARWLMTVEYKPHSKGFYHAYSLKSLTRLRDKLIRQRSFYLVKITNVLDHTFPEFKPFFNKRFSKTALYLLENYGSAEKIARMNSASYEKLRSLSRGKFSPQQFLTLKSLAANTVGINNSIFDTELNSLLTLYKATAEQICILETQITELIEEVHPHYMSIPGIGPISAAVIYAEYGDISNFSTPSQMLAFAGLEPGVNDSGTESHGGRMVKRGSSQLRYVLMNCALPLIRFDMTFAAYYARKRAEGKPHRVALSHVVKKLVRVIFALERQNTDFVAQALR

SEQ ID NO: 171676 - protein, 392 aa, unidentified
MTVVVGIDVAKDKHDCFILNSEGVVLEDVFTIPNTLEGFTRLLSKIQSHTTPQDKIKVGLEATGHYSYNLLGFLLNNGLTTYVLNPLQTNLYRKSLTLRKTKTDRVDARMIASMLLSDVGLKPYTDTAYHNEELKSLTRYRLDKVQDRAKLKSSVSRLVCILFPELEKLVSTLHMASIYALLEEFPGAKQIANANLTHLKNLLATASKGHYGREKAVEIRDTARASIGSHMPAKSLELRHTIHLIRELDREINDIEAEIQKIMDELDSPITTIPGVGLQMGAMILAEVGDFYNFDSPDKVLAYAGLSPSTYQSGQLKNCYPHMEKRGSRYLRYALFNAAKYVCIWNPTFAAYLAKKRSEGKHYFVAVSHAAKKLVRLIFALERSGQSYRQAA

SEQ ID NO: 171677 - protein, 346 aa, unidentified
MKILALDLGKYKTVGCDYESESGAHQFKRGFTTPAGLARMVQDVKPDRVVIEVCSIAGWVCDLLRGMGIEVQVANTSDDAWRWRKVKQKDDRRDALKAARLSAVNQLREVYIPQIEVRQWRALITYRQQLVRRRTKIKNHLRDLLLREGQILARGSKCWNKLGLELLTSMARPLSEVGLAELWRGELYEELQQLQLTQARIVTVEEKLNAIGAADGRVQLLRTVPGVGPRLAEAIVALLDKPQRFRKASQVSGYIGMVPKALDSGETERRGRITRQGSRLVRSLLVEVAWAGLRHNAWVRQTYQRLSGGKKARKKIAIVAVGRKLLVKCWAMLRDNRAWDWQPQIT

SEQ ID NO: 171678 - protein, 350 aa, unidentified
MKYIGCDFHPSFQQIAMLDQETGEVVERRLLHTEEARAFYEGLQGPVLVGVEASGNMHWFESLLASCRHRLWIGDAAAIARQEGRKQKHDRRAAALILKLMLENRFPRIWVPTVEERDLRQLLMHRQQLVRMRTRVKNQLQHIALNQGWQKKRKLWSEAGLELLRNLKLGPWTQLRRDTLLELLEELEEKIRPLDQAVAKEAEQREAARRLATHPGVGAVISLATVLTMGDVHRFADSRSWVSYLGLNPSEQSSGQRRRLGSISKQGNPFLRQLLVEGAATAARGDKDLARMYARLKAKKHHGVAKVAVARKLAVRLYWIARTKKSYPEVVRTQGSQSHPVVERKGRSLE

SEQ ID NO: 171679 - protein, 375 aa, unidentified
MTGVDSRHRPRRDRKPAVASESKPRMSLELRSLVPYPNSCLGTSPHQQERDTKMATVSFCGIDVAKDRLDVVVLPEQRCWSVCNDAAGWAELAKQLGSFSIAAIGLEASGGYERGVMRVLLAADMPVHQINPFKLRQFAKASGVLAKSDRLDARVIASFIAIMPTRRAQRPSPAIERLTEILSVRRQLTDQKIAAQNASAMLQDAMLLRLSRRRIGRLAADIDMLDRSLVEIVRTDAALAHRYRLLTSMPGVGPVLACTLIALLPELGSMSRKQVAALVGVAPYTFESGKLKGKRCIWGGRAPVRHVLYLAAMSASNWNPVLKAFHSRLKIAGKLHKVAIVAVMRKMITMLNAMVRDDVAWAGHLGGRQILPTAR

SEQ ID NO: 171680 - protein, 356 aa, unidentified
MSNISKLDFSGQHIYVGMDVHRKSWSICILTHQFEHKTFTQPPDPLVLVNYLHRNFPGATYHAVYEAGYSGFWIHDQLREKGIECIVVNPADVPTKDKERAGKRDKVDCRKLARSLRNGELEGIYVPTRIKIEDRSLLRTRRSMVKKQTRCKNQIKSMLAFYGIHLPTDIVHHNWSSKFIKWLEEIRMEKASGNVAFKVHLDELRYVRGIIVELNRNVRALSRTDEYRVNAQLLKKVTGISTLTAMTFLTELYNIERFGSLDKLASYVGLIPNTDSSGEKDTTTGITNRRNQTLRHLIIESSWIAVRKDPALLMAFEHLCKKMPKTRAIVPIARKLLNRIRYVLKNQKEYVHAVIQ

SEQ ID NO: 171681 - protein, 322 aa, unidentified
MIGVDTHKFVHVAAAFDDFGAVLDTGTFQADRAGYAELIEWASHPGHILTFAIEGTGSYGAGLTAAVRRSDIGVVEVMRTDRRDRRLRGKSDFLDAENAARAVLGSHATATPKTADDTVDMIRQIKIAKNIAVKARSAAMISLKTVIVNAPDELREQLQPLSKMALIRRYAGLRPAGISTVEAATKHTLRSIARRWQHLNEEITEHEKLLAQLVTEIAPELTAAFGIGADTAAEMLIVAGDNPDRIRIEAAWTKLCGVCPIPASTGKTVRHLLNWAPGSCRSPAPRRTCPAASANSGRANRCHIPAAPRRTTRSTRQRRRAS

SEQ ID NO: 171682 - protein, 411 aa, unidentified
MENVFPCCAGLDIHKKSVEACVRRLEPTGQMHHQTRHWGTMTRDLLAMADWMAAQGVTHVAMESTGVYWKPIYNILESRFTVLLVNARHLKQVPGHKSDVRDCQWIAQLLQHGLLKGSFIPPRAQRELRDLTRHRTQRVEEKTRTVNRLHKVLEDGNIKLASVATDILGVSGRAMLEALMEGQEDPVQLADLAQRQMRGKIPELEKALEGHLTEHHRFLLRLLWKELAQQEELIAELDRKIEEHTRPFANEIERLDAVPGVDRRVAEVVLAEVGSDVKPFPTHFHVASWAGMSPGNEESAGKRRRGRITPGNRWLKRTLVQAAWAASHTKNTYLASQYRRLAGRRGKKRALVAVGHSMLVIFYHMLKERTTYKNLGGDFFDRLEPERLTRYYVKRLKDLGHKVTLEPGVAA

SEQ ID NO: 171683 - protein, 346 aa, unidentified
MKKNFIGIDFSKEKFDATLIKAEGLKECAPSMHEVFDNKTSGFRRLVKWVKAQSESASVDTWLFCGENTGGYSIGLSNYLYASGYDMWLECAYKIKHSAGIQRVKNDKADSRTIVEYAMRNYDKMILYKPQSASLTCLREVFLYRHSLVRQKVALTIRRDEKRLTQEKSDVRAFMSFTSKHLITEVNKAIGKCDQKIKDIIAANDDLREIFDIITSMPGIGVQNATCLMVYTDNFQKFDLNARKIGCYYGIAPFGRQSGTSVNSRPQVSPFANRMIKSLLSQAALAAIKFDMNVYNYYQRLKERGKHPLLVHNNIKNKMLHILVAMVRDRVKYNPDYVHRANKEIA

SEQ ID NO: 171684 - protein, 461 aa, unidentified
MRKARRSRRKPGKKIVDVTAGLEVLRPHAAGIDVGNAEHYVAVPPGRSDPSVQTFGSFTADLHRMAQWLQACRIETVVMQATGVYWMALYQVLESYGFQVYVVNAKYTKTLPGRKTDVLECQWLQKLHSFGLLNNSFLPPEKIRVLRTYLRQRENLVAAAGTCIQQMQKVLTQMNVQLANVLSDLSGTTGMKMVQAILEGQRDPQRLAALADPRVQASRKEIAQSLEGHWREDLLFVLQQVHDLYFTYLESITACDRRIEAHLKTLEAKADVATQPLPETPRLPRRKHIPQTNLREELYRITGVDLTRIDGIQVQTAQVVISEVGVDMTRWPDEHHFASWLGLCPNNRITGGKVIRRGTKKVLNRAATALRLAAQSLHRSKSYLGAKYRRFRARLDGPVAITAMAHLLARLIYRLLRYGTQYHDKGVEHYERKYRETQMKWLQKQATLFNMQLIPVPGVAK

SEQ ID NO: 171685 - protein, 357 aa, unidentified
MGEGSWVGLDVHARSVVAVVLDGVSGELRSLRAPVVGDETVVWLLQLPAPVRVAYEAGPTGYGLARACAAAGISCVVAAPSKIPRAPGDRVKTDRRDAERLARLLRLGELVAVRVPEPQVEAARDLVRAREDARGDLMRARQRLSKLLLRHGLVYDASAWTLAHDAWLRRQRFERRPLALAFDESYGAVLQAKTRRDALDRAIAELASEPPFAEVVARLVCLRGVSTLTALALTVELGDWSRFRPQSLGPFLGLTPSEDSTGERRRLGAITKTGNSHARRLLVEAAWHQRRPLRASVALERRRQGQPAAVRARADASGRRLHARWEALEGRGKRRTIVAVAVARELAGHCWALATMA

SEQ ID NO: 171686 - protein, 449 aa, unidentified
MSRPQVIDDREHERIYDKVAAVDVAKDSGMVCTRLPHPSRPGARRSTIWTVQARKNAIAALGRKLARDGIEIVTLESTSDYWRIWFFVLEACGLTVQLVSASQARNLPGRPKTDKLDAQWLARLTEMGLLRASFVPPRAIRDLRDYTRARTRLVQDRTRCWQRLEKLLEGALIKLSAVASTLATVSAGDMLRAMIAGQRDPRVLAGLARTRMKARHDDLVEALDGMFDDHHGQLAGLLLDRIAFLDAQISQLTTRIGQAVTAIPAAWGISADGSTGPDAGTGPDAAALPAAARLAEIPGMSEDLARSVIAETGLDMTRFPTAAHLVSWAGLCPAARQSGARTRAGSKGRGNGYLRGYLGQAATGAARTSTFLGERHARIARRRGKAKAQVAVARSILVIIWHLLADPAARYHDLGPGYHAARLDQDRKVRNHVRQLQALGFDVTITKAA

SEQ ID NO: 171687 - protein, 432 aa, unidentified
MACLHYETSEGCAGLADAEPHSQGTTMQEISKVFVGLDISKLKISVALAEEGRQGEVRFLGDIDNTPDAMKRLVRKLSGKYLQLLFCYEAGPTGYGLHRQITALGHDCSVIAPSLIPKRSGEHVKTNRRDSLTLARLHRAGELTTIWVPDLGHEAIRDLVRAREAAMEDLREKRQQLQSFLLRHGRLYPGLRSWTLVHARWLSSLIFEHPAQYLVLREYRQAIEDAEARLKRLTQQVADVVSTWSMAPVVEAYQAMRGVAFLTAVTFVAEIGDVRRFETPRQLMAYLGLVPSERSTGEQVRRGSITKAGNPRARRVLIEGAWTYRYPARLSRPLQVRQESLPEVVRAIAWKAQVRLCARYRRLMAAGKRQTLITRRSHARWRLSYGRSAMRCSRALHKLGEVTFVEEGVVSTWIDICCCAELETEPRWGILV

SEQ ID NO: 171688 - protein, 410 aa, unidentified
MLKIVYPICCGIDVHKNFVVACIASTDDRGVTSYRSNRFSTFTSGLGKLSEWLLSNLCRHVCMESTGKYWIPVYNILEDICRITLAHPKYVKAIRGKKTDKKDARWIADLFKHDLVAASFMPPLCIRQLRDLMRYRTKLTNFGSSEKNRMQNCLTVSNIQLASVVSDTFGKSSMKIIDHLLENPDDRDLDFIPLLHGSMKSKADSISLALDGIITAEQQQKMKIILCHYSEIKKCKDSLESVILSLSEPFARQCSLVLTVPGIKNPFSAIAIISEIGVDMSVFLTAKHLCSWAGLTPQNNESAGKRHSVRISRAGVYIKPLLVQCANAVIKSEKHPEIRGRYLSIKKRRGHKRAIIAIARMLLTAIYHILSKDEPYNPELYRKVEILPKTRSITVDQAILFARRYGYSVA

SEQ ID NO: 171689 - protein, 453 aa, unidentified
MTLPPPAPRGQKTGNRGMRQRAPVSDRPAAVLLTEVSLPCTTRSEGASVFIGIDWAAQTHAVCVLDQAGKRVTAFEIAHTAEGFDQLTTRLRRLGDPAELPVAIERPDGRLVDHLLEAGHPVVPVSPNQIKAWRDAEVLSGAKTDTSDAMVIAEYLRLRRHRLRVLEPFSTQTRALRAVVRTRTDLVDQRVAASNQLSACLEAFWPGALAVFADIESEIALAFLERYPTPQAAAHLGEARMRAFCVKHGYCGRRPAAELVARLRTAPAGLADTTEADARRDAVLAMVRVLRALNAAIKDLDRSVAAHLGEHPDAPIFTSLPRSGQINAAQVLAEWGDCRPAYDSPDAVAALAGAAPVTKQSGKHHAVHFRWACNKRFRAAITTLADNSRHASPWAAKVYADARARGCDHPHAIRILARAWIRVIWACWINQTPYDPAKHGNATRLTEMAASAA

SEQ ID NO: 171690 - protein, 315 aa, unidentified
MEYLGIDWSYRRAAWCSLSDAGVIVGEGAVPADADGLARLVIERGLDVRAVVEMMSGAIWVRDQLAAASWRVQIAHARKVRDVAPLACKTDKVDARVLAELARRDLVPELWVPSLDDRALRERLRRRTPLVRMRASAMNRIFGLQTQWGLRISLQRLRAPDAMTVLERQGMPAVWRRSIAEALDVIELLDARITPIDHELRPLARADARVILLDTIPGIGDLLGLTLASEIGDVARFGSPRKLIGYAGLAPKINQSGDRSRTGALSKAGCGRCVGPPSKPPNTPGDPPTPGTRSTATSPSAPARTRPRPPSPERS

SEQ ID NO: 171691 - protein, 341 aa, unidentified
MNQYAGIDVSLECSSVCVVDASGKILREVRVASEPEALIGWFRLQGFCLERIGLEAGPLSQWLFAAMRQAGLAVELLETRHVRKAFEAMPVKSDRNDARGIAQLMRLGWFRPVHCKSISAQETRSLLTARKLVQSKLRDVENSLRGILRGFGLKVGKTTEQGFAARIEDLVAGHPHLQMIAKALLSVRTALRSEFAAFQKQARKMAQSDARTRLLMSTPAVGPIVALTYASAIDDPRRFSSSKQVGAHFGLTPKKHQSGETDYTGRISKIGDGSVRTVLYEAAHVMLTRPVKGCSQLKSWAMRIARRAGISKAKVALARRLAVIMHRMLADGTAFNAAAAA

SEQ ID NO: 171692 - protein, 347 aa, unidentified
MRFYTQQHPFYCGIDLHARTMYLCILDQAGETLLHRNMTATPEALLKAIAPYRDQIVLAAECMFTWYWLADLCADHGIPFVLGHALYMKAIHGGKAKNDKIDAHKIAVLLRGGMLPQAYVYPAEMRATRDLLRRRMHLARKRGELLAHVQNTNSQYNLPAIGKNIAYKTNRDGVAERFADPAVQKSIEVDLALITSYDELLRDVELTIVKTAKHHDANTLYLLQTVPGIGKILSLVLLYEIHQIDRFPRVQDFASYCRLVKCAKESAGKRSGTSGTKIGNAHLKWAFSEAAVLFLRDNPAGQKFLARLEKKHSKGKALTILAHKLARAVYYMLQHKTAFDMPKFLNS

SEQ ID NO: 171693 - protein, 315 aa, unidentified
MDVTHSEPRFVGIDVGKAHIDVHVRPSGEAFRLTRDPAGLAELVARLNPLTPALIVLEATGGVERVVTAALCGVGLPVAVVNPRQIRDFARATGRLAKTDRVDPKVIAHFADAVRPDQRPQPDAAARELADLITRRRQVVAMISSETMRSHQARLPAVRRRLAAHLDWMNQELRQLDADLDTAVRANPAWQERATLLVSVPGVGDATTRTLLAELPELGTLGRRQIAALAGLAPVAHDSGQHRGTRHIRGGRGTVRAALYMAAWIGSRWNPTLKDIYQRLRAAGKPRKVALVACMRRLLTILNAMIRDKTPWRAA

SEQ ID NO: 171694 - protein, 342 aa, unidentified
MKITTIGIDLAKNVFQVHGVDQRGRTVLKKQLKREQMTMFFANLPPCLVGMEACGSAHHWARKLQGFGHSVRLMAPQFVKPYVKANKNDAADAQAICEAVARPHMRFVAIKNVGQQAVLALHRVRQGFVKSRTAQANQIRGLLGEYGLILPQGIAHIAKRVPELIEDASNELPGAFRVLVDRLMDHLKALDQQVAQLEAQIKAWHRENDASRKLEQIPGIGPITASALVASMGEAKNFDNGRQVAAWLGLVPRQHSSGGKPTLLGISKRGDSYLRTLLIHGARSVILAAGRKANLGGWLQELLKRRNPNVAAVALANKNARIAWALLAHQRNYRADYAAAAA

SEQ ID NO: 171695 - protein, 313 aa, unidentified
MTIALRCVGIDVSKHFLDIFDEATGASERIANATQAITRLVARWRCDALVVFEATGIYDLELREALRQAGIRFARINPARARDFARASGKLAKTDPIDARMLAAFGRAMQPATEQVATPARDALARLAKRRDQLVLMRAMEKNRRSEADDRAMAERIGRLIEFFDGEIEEIEADIRALIKAEQEISDDAQLMRSLPGIGPVACMQLIAQMPELGHVGPKQIAALAGLAPFNVDSGTYRGKRKIGGGRKRVRDALYMAALNAVRRAEPFKAFYARLRQAGKPAKLALIAVARKLLTVLNAMMRDRKPYKLASAT

SEQ ID NO: 171696 - protein, 360 aa, unidentified
MVNKNNISPSFNNQDFYIGLDVHKKQWTVSIITMNMLIKNHLSIDPSPSILLKYMQRHYPDGNYHAAYESGFSGFWAAREMNGLGIDCMVIHAPDVPSSQKERMNKNDRVDSRKIARSLSNGELKPLYIPEKVAEEYRYLNRHRLRTIKDQTRLKNRIKSTLHQFGIHIPLQYQDRRWSGCFIDWLLSINFETEYARFAYTDLVDQLIQTRTRITTHLKKMRAMAQEQEPFITLIPLLLTIPGIGFITAMTLATEIIDMNRFLTLEKLACYVGLIPSIQSSDQTEINYGLTPRRNKHLRTMLIEAAWKAVKKDPALTMKFNQLSRRMNHNKAIVRIAKILLNRIRYVWKNQKPYVLSVVK

SEQ ID NO: 171697 - protein, 428 aa, unidentified
MNRKDRSRLEAFRQLGREIRGSREYLIVGIDVAKDRHHAFFGTATGQTLFRRLVFENNREGFERLVVQTEALQVAHDLGKVVYGMEPTADYHKPLGEYLIRGAYQVVLVSGRSVKRNRELLDGRWDKHDMKDSANVADLISQGKCLYYEYPDDKLRDLRGLLSLKRRLKKQEHGLSVRIRNHLLAQYFPELDRYFGQSGPEGLAIVRWCLSPSRIAELGYDEFVQMVAPGRRHLSQQRRLRAIWEKASISVGCKGGEGVSFEARVMVEELRRIREVIKETDQEIETICDGFSEYPYLLTIPGFGPDVSSKVLGAIGDPFRFEKAPQVLKTAGLDLSANRSGTRSDHVVPVISKNGKSDLRYALYQAAFIASTKNRDFIMWFTHKLQGRQREKGIRTKMRVKLAAKMLVIAWTLMKKKEPFSPNYLNLQ

SEQ ID NO: 171698 - protein, 344 aa, unidentified
MKHYVGLDVSLKETAICVVDENGVVIREGKALSEPEAIVAWLNESGLHITKIGIEIGGLARWLYSELRAAGLHAVCIDPRRLRGVTKTMPVKTDRNDARAIAQVMRVGWYTVVHIKGDVSQELRMLLNNRKTLLIKQIDIENEIRGVLRVFGLKLSGRISQATFEQQTNELTDGHPRLAVMLRPMLVARAALREQYGVLHKMVLEIVRREPTCQRLMTIPGVGALTAITFLTTIDDPDRFQRSRDVGAHLGLTPRKYASGETDRNGAISRCGDVMLRTTLYQAALALLTRTQRWSALKAWGVSVAKRRGLRRAVVAVARKLAIVMHRIWADGSEFRWTREEAIA

SEQ ID NO: 171699 - protein, 428 aa, unidentified
MNEVDRNRLEEFRQLRQEVRHSEEYLIVGIDIAKDRHHAFFGTATGKTLLRRLVFSNDHEGFRRLLDQAEALRVRHGLKKVVYGMEPTANYHKPLGEYLITQGRRVVLVSGVTVKRNRESLDGRWDKHDVKDSANVADLISQGKCLYYEYPSAELRGLRGLLSLQKRLKKQEQGYRIRIRNHLIAQYFPEMDRDYKRLGAEGLSIVRWCLPASQIAELDVDPFIERVTSRRMRMEKRRRLEAIWEKAGESIGCDAVPGVDHEAKVMVEGLKQIREMIKETEEKIQDLCKQFPEYPYVLTIPGFGPDVSAKVLGAIGDPDRFQNGKQVLKMGGLDLSADRSGKDSDKAIPEISKRGKADLRYALYQAALIASVKNRDVMIYYTNKIRGREREKGIHIKMRVKLAAKLLLIAWTLMKKKEAFNPAYLNAE

SEQ ID NO: 171700 - protein, 343 aa, unidentified
MMIIRVGVDLAKSVFQVHGIDRDEKPVWKRKLNRGEWIKVLLEKIEPGCVVGMEACGGAHHWARLLQAQGYTVKLIAPQFVKPYVKSNKNDANDAEAICEATGRPNMRFVPIKTVAQQDIQAVHRIRTGLMEQRTAKVNQIRGLVSEYGLVAPKQVSHLRSAIPEWLEDAENGLTSLFRKLLNGLWSDLQSLDLRVKELDREIVVITAADPVATRLQQLRGVGPIGATAMLASVGDASQFQNGRQMASSLGLTPKQNSSGGKDKLLGISKRGDAYVRSILIHGARSVVNASKGKDDRLSQWVTRIATTRHPNIAAVAMANKTARIAWAMIRNGSDYQPELAAA

SEQ ID NO: 171701 - protein, 344 aa, unidentified
MKKVLIGIDFSKEKFDVAIIVKSTSMQVHAVFDNKVSGYRKMIKWIKSVVEEKTCSSWLFCGETTSGYSCMMSDWLYAQGYDVWIENALTIKRTFPLKRIKNDAVDAFMIAEYALRFEDKAQLYEPLSPALSGLRELFLYRHHLVRHRCSFQVRRIEKRFTQEKSPIKNTISQSARHIITEINKEIAKCDEKIKEYIESDDQLSSIFAIVTSMPGIGTINAVSLMVYTNNFTKFAYNPRKIACYYGIAPFGRDSGTSVHTDPRVGFIANKMLKSLLTQAALAAVRTCPQIAKYYQRLIERGKKPMVALNNVKNKMIAIITAMVRNGCMYQSDNICVATPSVNVK

SEQ ID NO: 171702 - protein, 321 aa, unidentified
MNYHAFVGIDIGKYEFVAAEYNAKKTHTYQNNESGWSDFFSDHFNLIKNGLVILETTGGYESGLLTFLVEKNIASHRADTRRVKNFIRSFGQKAKTDSIDAQALAYYGHERHAKLKLFIPENNKQSTLKILEERRQDLKQMLVKEKNRFKAPLNGPVLENIQMMINYLQIQIENITSKIDELITADPELVKKQEILKGIPGIGDITSRALLALLPELGHLDNKRIASLCGVAPHARQSGTKIWYSRTFGGRRNLRSILFMAAMSARKSKKTTLSEFYERLVSSGKKKMVALVAVMRKIIVIANARLRDFMSASANTDAPLT

SEQ ID NO: 171703 - protein, 387 aa, unidentified
MSQPNDLSRSLAALEQDSTLIVVIEMSLSSWLVAGIVPGIERHPTKKLEPDEAALLQLLRRWSDEATKAGRVIARTVVAFEAGRDGFWLARWLLARGIEAHVIHPTSVAVSREHRRAKTDRLDTELLKRAFLGWLRGERDHCSMAAIPTLAEEDAKRPNRERESLVGERSRIVNRMKGALARLGIRGFKPTLRKAPEQLERLRTPEGAPLPPNTLAELRRDTARLRFVADQIREIEATRLALLEQQPEEGAHAMVRLLARVIGVGIETADMLVHEVLSRNLRDRRAVARYAGLTGSPDESGIRRREKGLARAGNARVRRGMIQLAWRFLIFQKDSALAQWFRTRTADARIGTRKTMIVALARKLLVALWRMVTVGEMPEGVVLRTPT

SEQ ID NO: 171704 - protein, 369 aa, unidentified
MKNVTTYVGIDAHKKDLFIAMLVGQEKTPVTWTVPNEPSAIRRLVRKLERDAAGPVRACYEAGPCGYALQRRLTTPRVSCQVIAPALIPRKPGERIKTNPRDARKLVELLRADLLTEVHPPTPEDEAVRDLCRARDDAREDLQRCRHRLGKLLLRRGLHYTAGRHWTQGHRRWIGSLEWTHAAERSVVDDYLLAIDQVEARLKELDHRLTEVAETEPYKERVGWLRCFRGIETLTAMFILAELHDFRRFHSARALMAYLGLVPGEDSSGEKHRRGRITRTGNALVRRVLVEMAWHYQHRPGVGGALARRRRGQPSRIIAIADKAQQRLCRRFRLLALQHKPGPKIAVAVARELAGFLWAALQPAAPPQA

SEQ ID NO: 171705 - protein, 305 aa, unidentified
MKNYIGIDVSKLHLDIHHDGLASRIPNSEKAIVGFLKTLPPDALLVCESSGGYEAQLISLAHVAHRPIARVNARQARDFAKAKGRLAKTDSLDAKTIAEFAQAFHPTPLCLPDPLQHDLAALVKIRSHLLLQITQNNNLKESLRDKPALAILNSTIASLKKQEAKIQTLIAAKIKLSPALTSRVTRLQEVQGIGFVTAFSLVSFMPELGTLSDTQAASLAGVAPFNHDSGQFRGQRHIRGGRSPVRSALYMAALVAARHNPILKALYQRLLAAGKPKKLALTVLMRKLIVLANRLLKNPSFALAT

SEQ ID NO: 171706 - protein, 381 aa, unidentified
MTTTATHSEQRNTIAATLFVAFELSEKTWKLGFTTGHGQKPRERTVTARHQERVLDEIAQAKRRMGLPDTAPVVSCYEAGREGFWLHRFLQAHGITNQVVDSSSIEVNRRRRRAKSDGLDVRKLLSMLMRYHHGERQVWQVVKVPSVEAEDQRHLHRDLETLKQERASTMTRIEGLLSSQGLRVPSLTKLPEQLEALRLWDGAPLPPGLRRRVLRVYAHYTFLSEQIAAVEAERRALLQTSPEASIDKVRQLMQLKGIGINGAWLLVMEFFAWRAFTNRREVGGLAGFTPTPYQSGESAREQGITKAGNRHVRWMTTELAWSWLRFQPDSALSVWFRERFGNGGKRLRRIGIVAVARKLLIALWRFLETGVLPAGAVLKEG

SEQ ID NO: 171707 - protein, 395 aa, unidentified
MFIVGIDVAKRSHEVCMITSDGQTVQRPFSIRNNCTGYNLMLEKIRKHTNIKSQIVFAMEATAHYWLALFTRLRKDGYHVILLNPIQTSAMRDMFIRKIKTDAKDSFIIAELIRFGRYAESNVAQDRLLALKELCRNRFYLVDMAGDLKRKLIALIDRVFPEYEAQFDTIFCKSSVALLKKYPTPQKLSNAHLDKLTGLLWNSSNGHFGEWKARELKELARNSFGVEDCDGAYSTLILLMLDQIQSLSGKADALEKEISRLFQSFDTTVTTIPGVGPIIGAVILSEVGDISRFSSADKLAAYIGVDPSVNQSGEFQAAHAHMSKRGSPYLRRCIWMASQVAVQRDPMFRAYYEKKAAEGLKYMTIIGHVTRKMTAVVFAILRDHKVYEPILPTAA

SEQ ID NO: 171708 - protein, 348 aa, unidentified
MAMTIVEITRLVTGGVDTHLDVHVAAAVDAGGGVLGVESFATTSAGFAQLHDWLTTFGTVARVGVEGTGAYGAGLARYLRSCDVEVIEVDRPNRQVRRRAGKSDTLDAVEAARAALSGRASGIAKTADGNTEAIRVLLIAKRSARDTRIMCLNQIRHLGFTGPDELRERLRGVARRRLAHTAAALRPTAGTDVVTHATKVALHTLGRRVLDLDATTGRIDHELELLVRASAPGLVALDGVGIDTAAILLVAAGDNPQRLRSEAAFAHLCGVAPIEASSGKTIRRRLNRGGNRQANHALWRIVFTRMSSDERTRKYVARRLAEGRSKPEIIRILKRYVAREVYKQLRRA

SEQ ID NO: 171709 - protein, 361 aa, unidentified
MTGTMTWAGLDVHARSTHAAAINVMSGELVRARFGAGLEEPLAWLAALPGPVKACYEAGPTGYGLYRAAQAAGVEMVVIAPGKTPRGPSDRVKTDQKDAELLARLLLAGSLTAVKVPPPELEAARDLMRAHDACRRDLMDARHRVSKLLLRHGRVYPEKATWTVRHRGWLGRQQFTEIGTELAFVDALACVDAITARKVALALKLSELALDERWWPTVARLRSFHGIDTLTAFALHLELGGDWRRFERAPQLASWLGLTPTLSQSGESSRQGHITKTGSTLARRLLVEAAWHYARTPGPGVALAAREAGQPAHVLQISHRARQRVHRTHRKMRARGKPGNVCVVACARELSCFLWAAAVAP

SEQ ID NO: 171710 - protein, 351 aa, unidentified
MNKVSTLAANGNVENIPTVIGIDLAKNVFALHAVNCHGKPVLVKPQIRRDQLLELLAQLPPCIIGMEACSGAHHWAREMIALGHTPKLMAPKFVIPYRIQGKRGKNDANDAAAICEAVTRPNMRFVPIKTVDAQSILTLHRVRQGFIEERTATINRIRGLMSEFGIVLPQRAEVVRKQAQLAAEKMPSWAASAMYDLLAHLVTLDMRVAEYDEHLKRMANRDERCKRLMALTGIAHITATALVASIGNGHDFKNGRQLAAWLGLVPGQYSSGGKVKLGHITKAGDRYLRTLLILGARAMLANAVRKSDRISRWAVALQARAGYGKALVAIAAKNARIAWALLAKGEAFEPA

SEQ ID NO: 171711 - protein, 315 aa, unidentified
MEPKVFVGIDVSKKHLDVSIKPAEDFFRVNNDDASIAGLVQRLVGLNPRLILLEASGGYEILAAAALRQAGLAAQIINPRQVREFARSTGRLAKTDKIDAGVLAQFAQLLQPPLRPWPEAQQQELAALMTRRRQLVEMVVMEKNRLGTAWTPKVRRSLQVHLQVLQEQLKELEQDLHDFIRRSPLYVEKDQLLQSVPGVGALTSQSLMAWLPELGTLNRKQIAALVGVAPFNRDSGNRRGRRTVWGGRKQVRPALYMATISACRYNPTIRNFYQRLLQAGKRKKVALTACMRKLLTILNAVLKHQQPWRLDTLCP

SEQ ID NO: 171712 - protein, 354 aa, unidentified
MSEKLNIAIAVIGIDIGKNSFHVVGLDQRGAIALRQRWSRGQVETRLANLPPCLIGMEACVGAHHLSRRLKLLGHDARLMPARYVRAYSKGQKNDFRDAEAIAEAVQRPTMRFVATKTAEQLDLQALHRVRERLVGQRTGIINQIRAFLLERGVAVRQGIRFLRAELPTILATRTDALSPRMLRMIEDLAGDWRRLDERIESLSAEIAGLADQDAACKRLMTVPGVGPIISSAMVAAIGSGDVFSKGRDFGAWLGLVPKQISTGDRTILGKISKRGNRYLRVLFVQAAWVVLIKPKSWERHGLKPWIEAAKKRLHHNVLAIALANKLARIAWAVLNKERNFECIRTDKMASRPA

SEQ ID NO: 171713 - protein, 346 aa, unidentified
MKQISTIGLDLAKNVFQIHGADAEGAPIFNRKLRRAEVLRFFEKLPPCLVGLEACGGSHYWAREIAALGHDVRLIPPVYVKPFVKRGKTDAADAEAISEAVTRKTMRFVPIKSADQQAAVMVLKTRALLVRQQTQAINALRGHLSELGVIAGVGVTKVKALIEIVRDEADDCLPKAARLALTEIADQIEALTRQIDKLERGIVAEAKRDEDMRLLTTIPGVGAITAATVKALVPDPDGFKSGRHFAAWLGLTPKSHSSGGKERLGGISKMGNPTLRSLLVCGATSVLRRVKGNDKAPQWLIGLLARRPFKVVAVALANKMARIIWALLTKGGAYRNTGAASSASSA

SEQ ID NO: 171714 - protein, 373 aa, unidentified
MQSVTKYIGLDVSKESIAVAIADAGREEPRFYGMITNSEKTLLSCLSRLGGEGIHLEVCYEAGPTGYAIFRWLQKEGISCSVIAPSLIPRKPGDRVKTDRKDALRLAQLLRAGELTSIYVPNEEDEALRDLVRGREDTKEDLLRAKHRILKFLMRHHIVAPKGKKWTKKYMNWLNTLTFANGNHQIVFQEYLRAMQEEEMRLKRLEEQIAREAKEGHRAVLIQALQVLKGVALLTAVTLVAEIGTFLRFPKASNFMGYTGLVPSEYSTGQTTRKGKTTKAGNKHVRRIVVESAWSYRYRPAVKGEILKRQENQPAEIQQIAWHCQHRLHSKYLKMVRNRGMHKNKVITAVARELSAFIWEIACVIERRELLKA

SEQ ID NO: 171715 - protein, 338 aa, unidentified
MSLKLLAIDLGKRSFHCYGIDDDGVVISRKTSRAKLLETIQELGPETIAMEACASAHFCGRCFLADGHRVLLINPRFVKPFVKGSKNDAADAEGIYEAALRPTMRFVPVKSIEQQDLQSLHRARERVVCARTALINHMRGLLGEYGVVLPQGAWRFLAQAQDAIAAAELSNLTRELFADMLDELRALDLRLDKLDRQLLALCRTNEACRRLSKLPGVGPVIATAIVAAVDDGRHFHSGRELAAWIGLVPRQYTTGGKPRLGGIGRRANHYLRRQMIHGARAVMFRLAKREDRRSLWLKELTARRGFNRAIVALANKTARTAWALLTRKEDYAAADINA

SEQ ID NO: 171716 - protein, 331 aa, unidentified
MDTTDGLGIDIAKDSFQATLLQTQRTYRRTFKNTHEGFGQLAKWLTKHKVTQVHACMEATGTYGNALAEWLHEAGHRVSVVNPMAIHAYAKSQLARNKTDALDADLIARFCLKEQPPAWEPDPPEIRELEAFVRRLHALQITHTQEVNRLKSGVSSAVVQISIQDMLAFLEQQMTTINALIRQHIDTHPDLKRQDALLQSIPGIGPASSAVLLTVQLTTYRSANAVAAYAGLNPAVVQSGVFRGQTRLSKLGDAALRAALYFPALAAIRFNPIIADLARRMAAHHKSSMAIIGAAMHKLIRLAYGVLKSGLPFDPNYSSNSCHPRRVQAAA

SEQ ID NO: 171717 - protein, 410 aa, unidentified
MEVLYPHCAGLDVHKETVVACVRHMAEGKVTTHVKTFKTTTQELMSLSDWLAGEGATHIAMEATGVYWKPVWHILGDGQFQLVLANAAHVKNVPGRKTDVNDAAWLADLMAHGLIKASFVPDEPTQQMRDLLRTRKQLVRERASHIQRVQKALEDANIKLDCVVTDILGLSGRHILEALIAGQTMPQALAALAHRRIHASTDQLQAALRGRVTPHHRFLLKLHLDQIDALAAAIARIDEEVSANVAPFRVAIEQLSAIPGFSPLAAQVLVSEIGIDMSRFETAAHLISWAGLCPRNDQSAGKRRSTRMKKGAPWLKTVLVQCAWAASRTKGSYFQAQFHQIRARRGSKKAVCAVAASLLTTAYHMLKNGTLYQDLGANHFHQNDSARQVIRLINRLDKLGFSVQIAPKAA

SEQ ID NO: 171718 - protein, 452 aa, unidentified
MKKKNLALEIVNPHAAGIDVGSRSHYAAIGQGINDVKEFGVYAEELKELAGWLIDNNIETVAMESTGTYWQNLYSTLQEAGLKVILVNGKFTKNIQGKKTDVKDCQWIQKLHSIGLLTGSFLPDYATEQLRTYCRHRNNLIDTAADTTRRMQKYLRLLNLRLDVVIKDITGLTGLKIIHAVCNGEVNPEKLASLRNGNCKKSEEEIAKALQSNGRRDFLFALQQEFDMYKTLQKKITGCDEAISKLLNEQINNDENKKVLKAETKAHKRINKNAPKNMDINQLAYQHFNGIDLMNIEGVSHNTVITLMSEVGYDGIKKFEAAKQFTSWLRLSPNNKISGGRILSNRIAKGSNRLKIALRNAANAIGNLKDTHLSNFFKRVCFRRGRPAAISATARKLAVIIWNMIVKNIPYQPPTIYEFLDQKRKRKVQEIKKLIHKFDIKTDELGLQLSSL

SEQ ID NO: 171719 - protein, 356 aa, unidentified
MNKKLINYIVKNKRFFVGLEDSKRTWKVSVRCEGREIHYSSMQARYDILISFLRNKFPECTIKLIYEAGFKGFNLYDKLQNDGIECVVTPPCKVTQEKCNKVKTDKVDARRLATVLEKDDYKVCAVPDIERREDRQLCRAMIQVQQEITRTKNRIRKFFDFNGNAETFAAGTWTEKDYAYARTIELSPVLKKTLAIYFELLDHLKKHRKEIHKEIMTIAKKDRYKSALKILVSVAGVGKLTALRLILEWGEDMATRFKSGNSLACFAGLTQSEYSTGDTVRKGRITGQGRGYIRAGLIQCAWVCLRRDPAMLDAFNRIAKNTGSKKKAIVAIARKLVVRMWTCLHNQQEYVVGVLA

SEQ ID NO: 171720 - protein, 354 aa, unidentified
MLIIGCDYHPSFQQIALVDTDTGELQERRLDHREEAEKFYRELAAQGVKVRVGMEASGQARWFERLLGELKFELWIGDATEIARKRERKQKTDRQDAQHILKLMLKDDFPQIWVPSWENRDLRQLLWHRHRMVQARTRIMNQLQAVALNEGVRCNQRLWREKGREQLESFRLAPWASRRRHDLLEWLDRLNPTIGALSQAIEQEVEKCPEAQRLRTHPGVGPLTALAFVLIIGKPDRFQCGKQIASYLGLVPLEDSSGNRRRLGHITKQGNSLLRFLLVEAAQVTVRSLPEWRSKYVHLTIRRGRKIAKVAMARKLAVRLYWMMRKEWDYEQLKKFGSHAGQPGNRDGVKQNIE

SEQ ID NO: 171721 - protein, 336 aa, unidentified
MKKVTVFVGLDYHQSGVQVCAMARDGKVLLNTRCQNDWQQIAQRVGTVGDRVQAAIESCSGAANLAEELVSQGGWSVDLAHPGYVSRMKQSPDKSDYSDARMLADLVRVGYLPRVWLAPEPIRELRQLVRYRQQLVNDRRNVKLRMGALLREQRVFFKLVRPWTRAWMAWLRATGDLSPYSRWVMDRHLRRLASLEEEMTEVETYLTEATRDDATVKHLLSLPGIGPATAWVLRAEIGRFDRFRTGKQLARFCGLSPRNASSGERQADSGLIRAANGQLRATLIQAGHRLVRHDRRWSGLASRLLKAGKPRTVVVAAVANRWMRWLFHQMQRPVAA

SEQ ID NO: 171722 - protein, 402 aa, unidentified
MHHSTPCFAGIDWAMRSHVVCVIDTAGETVEHFEVAHDSAGLHTLSRRFGRLGVVQVAIERPDGPVVDHLVESGFEVVVVPSRSVKALRARYSLAGNKSDGADAYMLADVLRTDGHRLRPLRPDSAATQALRSVVRTRKDLVGHRVALVQQLEAHLERAFPGGTRVFADTASPIALRFLRRFPTQAKADWLSPARLAAWLAANAYSGRKDPGVLFERLDSAPDGPRGDDAELLGVVTLTLVSAIEAMRERIAELEARIAERLVLHPLGHVFCSLPRSGSVRAAALLAEIGDCKERFPTPEALAALAGVVPSTRASGQHTAVVHRHICNKPLKDALCDFAQDSRFASPWAADIYNRARASGKRHPHAVRIVARSWCQVIWRCWQDEAPYDPLRHTGAQRLRAA

SEQ ID NO: 171723 - protein, 341 aa, unidentified
MKEVSIVGLDLAKRVFQLHAAGADGSLLFRKKLARVHVLAFFSELPRCIVAMEACATAHYWAREIGKLGHEVRLLPPAYVKPFVKRQKNDAADAEAIVEAAIRPSMRFVVPKTEKQQATAMIFRTRDLFVRQRTQLINALRAHLAEQGFIAPQGIASLDALRGIVEDDSGLELLVVETARIYLVQIDLLTSRISNLEKVLKSEAQQAVNTARLMSMPGVGPITAMAIEAFAPTMTTFQKGRDFAAWLGLVPKQHSSGGKQVLGRTSKMGQRDIRRLLIIGAMTVIRWACRKPPSEHSWLGRMLMRKPRMLVAIALANKMARSVWAMMTKNENYKDSGLANA

SEQ ID NO: 171724 - protein, 362 aa, unidentified
MPMLAELIDAVVGVDTHRDTHEVELALPTGTPIGIRKISNDNSGFAELLAWILDHSPGPRVVVSIEGTRSFGVGLARAVAAAGLTVIECEQPNRKARRGKGKSDPIDAHLAVLAALRLDADRLPVPRADGDREALRILLGTRHELTVVTTAQTNRLRALLLGGKDSERDLARATLTDPVLLAMVRRREPPQASREQAVRHGEIRRLAHAIRAGRHALAANRAQLQAIVDQIAPELTERRGIGAVTAAQAIVSFSHPGRCRSDAAFAALSGTSPLQASSGKMVRHRLNRGGDRALNSAIHTIAITRMRCCPTTKNYVARRTAEGKSSREIQRCLKRYIARELYRALNASTTLTTQTSAAPTPA

SEQ ID NO: 171725 - protein, 405 aa, unidentified
MARKASSKKEVWTVINPHAAGLDIGAREIWACVPADRDETPVRCFGTFTPDLEALAAWLVACGVTTVAMESTGVYWIPIYELLEERSVQARLVNARHIKNVPGRKSDVQDNQWIQRLHSYGLLSASFRPEAEMVVLRSYLRHRAMLIEHRAAHIQHMQKALHQMNVQLTQTGHYRAEHVFALKQALALYDAYTAQLVECDHQIEQQYSAFKPLFDPDDPAAPLGPDLKVNSHSKNAPDFDVRRQLFRLTGIDLTQVDGLDDSSVQQLLAETGTDMSKWRTVKHFASWLGLAPHNDITGGRVVRSRTLKNHNRAGQVLRLAAQSVGRGKSALGAYFRRMRARLGTEQATTATAHKLARIIYHMLKEHQPYRPQSATAYDQQQRQRELKRLQRQAANLGFMLQPRPN

SEQ ID NO: 171726 - protein, 355 aa, unidentified
MNDVKYIGLDVHQATISVAVRDCTGKLVMEAILETKAETILQCFRGLRGSLHVNFEEGTWAAWLYDLLQPRVTRVVVSDPRKNALLKDGNKNDRIDARKLAELLYLNKFNSVYHGEHGLRTLKELARSYLTLTRDLTRVMARIKAIYRGWGIPCAGQQVYAPGHRAEWLGKLSEAGVRCRGEFYYQQFDALALLRQQARRELLAESRKHSAVKLLRQIPSIGPIRAALLVALLQTPYRFRTKRQLWAYIGLALQTHTSGEYRFERGQLKRSKKALAIRGLNRNHNHDLKNIFKGAATWAAANSGPFKNFYEACVARGTKPHMARLTLARKIAAITLLVWKKGVCFDAAYLKPQAA

SEQ ID NO: 171727 - protein, 399 aa, unidentified
MASCLGTGLVVGKPSALGERFLCRFLKGGLAMQRVIMAGGDVHDKTILVKVAIGRGKVEKRCFQNTVRGRKELVLWLQSMGREACGDRIVFAYEASGLGFGLYDELTERGLECFVLAPTKIARSVKHRSSKTDERDAERILELLRGHLLAGNDLPSVWVPDKETRDDREVVRARLDAGDKRTGLKAQVRCLLKRTGVRKPRGVGKGWTAGYRSWLDSLCMAGSELPWGARTALASLLRQMESVEQEIVGLEKAVQALSETARYAETVAVLRRRGGVGLLTAMVFLTEMGDLSRFSNRKQVGSYLGLVPRSNDSGERDCKGHITRQGSGHIRKVLCQAGWNVVRLDPVEKPVFDRLVQRNPKAKKIALVACMRRLGIWMWHRGLEAQRAAGAFARQEPAA

SEQ ID NO: 171728 - protein, 367 aa, unidentified
MREKLRFLGLDVHAETIAVAVAEPDGEVRSLGTIANREDSIRKLIKKLGSPEQLRACYEAGPTGFVLYWQLAQLGVECAVVAPSLVPKKPGDRVKTDRRDALKLARSHRSGDLTAVWVPDENSEALRDLVRQREAAKQDQLRAKHRLTKFLLRTGRRPPQGMKAWTARYMEWLQQVRYTLPAQEATLVDCLNEVEHMSARVKRLEEAILEVVKLAPASVQEVIRGLQALRGIAHISAVTIAAELGNITSRFESARKLMGYSGAFPSEDSSGNRIRKGAMTKTGNAHLRRIIVESAWSYAVANPPCSLANKRRFNPARIFPDYSSSLQKRKSLQQSATPRSLLASEGKRHSVKLIGHHAQHRSFDGIV

SEQ ID NO: 171729 - protein, 340 aa, unidentified
MTITTIGIDIAKSVFQLHGIDEAGKVVIRKKLRRSAVLDTLRKLEPCLVGMEACATAHYWAREISALGHEVKLMPPAYVKPYLKRQKNDMADAEAICEAVTRPTMRFVPIKSAERQGVLVLHRTRDLLMRQRTMLLNAARGHLAEFGLIAPQGPRRMLDLIAQMREGAHADLPDIARMALLGIGGQLDALARQIHALERQLLAWHRRDATSQRLETIPGVGIITATALAASVPDPSVFRSGRQFAAFLGLTPRQNSSGGKDRLGRISKMGDGYLRRLLVVGATSVIRRAETNPSATGAWVRSLLTRKPRRLTTVAMANKTARIAWAVLARGETYRAPAIA

SEQ ID NO: 171730 - protein, 431 aa, unidentified
MQENLLGKTKTSKEKGKAMNQKIFVGIDLAKDSSRIAAVDEEANKALGAFSITNTTDGMEKLLSKLKGYEKDKVLCGMEASSNYWENIYSYLKEHGISCLLLNPYQVKKYRQALGLKIKTDSIDAESIAVLLKDRKYDSLYISDDSAIELKELVRMKFCFARRVKDLKKSVLSLLNLVFPEYTKIIFHPFSKVSMEILSKYPTSIHMKEKSSVSKLIKIFNKYQGCHFRADKAKELITAAKNSFYSGKAHRARGISISMQIDEISSLSAKIEDIENEIMLILNPSDPNGSPSSFEILNSIKGVGIGTISAFMGTVGNISRFSSSDKLVSYIGFYPKIFESGKYKKKNPEIQKAGPRELRYMLYISSVAAIKHNICLKQYYHDLVSAGMPAKKALIKVAVKIVRMMYSMIKYRTFYDPSRLFMQQQLYSLAA

SEQ ID NO: 171731 - protein, 315 aa, unidentified
MKTAGIDTAKAKLDVAIHGCTTRIQVENTASGWRKLAAELGKLGVGRVGIEASGGYERGVVEHLRAAGFTVLVLQPMQVKAYARMHLRRAKNDAIDAVLIAACAAMMEEPSIAPDPRLTELASHLTFIEQTEEDIARLKVRLEHVEDARLRRMVVADIKRATDRRAAELRRIVKRLRGHDDLAHRLDLVESIPGIGERTALALVIRMPELGRLSREQAAALAGLAPFDDDSGQRAGERHIAGGRGRLRRSVYAAALPAAQQWNPALVALYARLIARGKAHKEALIACARKLVVYANAVVQRGTPWVKSTATVSGP

SEQ ID NO: 171732 - protein, 317 aa, unidentified
MDVAFKSFVGIDIAKRTLDVHVLPERTSLKPPNDSKGRGQLREKLPPPGECLIVVEATGGYERALVAELIDAGHQVAVVNPRQVRDFAKACGILAKTDRIDAVVLARFGQAVVPRTQTKIPEKQLELQDLVVRRRQLVELRTAEMNRKENVASKFVKKSLQESVDALTKQIRRFEKRIAALVQSDDEWKQKAEIVQSAPGIGPGTSATLIAEVPELGQLSRRKISALVGLAPFNRDSGEFRGRRAIRGGRSSVRCSLYMATLSARRSNPVIRAFSDRLKALGKKPKVIITACMRKLLVILNTMVKNNTHWNPAISTT

SEQ ID NO: 171733 - protein, 343 aa, unidentified
MAIVILGIDLGKNICSLVGVNEDGAVVLRRRMRRQTVLTFAAKLPSCVVAMEACCGAHHLGRLLTAQGHTVKLMSPEYVRPYVKAQKNDDRDAEGIAEAASRPTMRFVDLKSQEQLDLQSLHRVRSRLVGVRRTLLNQLRAILLERGHIFPQGRRKFEAAIDTLVADPAYEISSRIRQLVIDIRSEWQALDSRIEALNGEFVAIARHDETARRLVTIPGVGVLNATALVAAVGDGAAFRRGRDLGAWLGLVPKQHTTGGKPKLLGISKRGNKYLRMLFIHGARAAMPSLSASQSPLGEWLRGLPARTHRNIAIVALANKLARIAWATLRRKTSFDLRHLAVAG

SEQ ID NO: 171734 - protein, 368 aa, unidentified
MPRYYVGLDVHSKNSVFAIQDEAGRTLSQGSVSTTPEGLLGLRNRYALPPGTPVGLETGTVAFYVARMLSRMELAPIVIDAHEVRLKAHRPLQKSDRRDALEICEGLRRNSYRSIVHVPPESITTLRDSLSRRRHFVRLQTSEVNAVKRLLRAAGWERSSRPSLRTEAGWDRLLAALTIDPTLRAYVEQHRAVWSCARQQITALETLLVVQQQEFAAEVERLQTVPGVGPIVALTAIAVWSEVKRFPTAKHAASYVGLVPSTDQSGDRDAHGRITRHGSNELRAMLCEAAHHASRPTHPLHPYFVSLAVRRGYKMAVVSVAHRLARILWSMLRHGSNFDVSKLGVEVGPFEKTSVRLYRLKRAAVVPA

SEQ ID NO: 171735 - protein, 366 aa, unidentified
MKKTSTVQALKNEIFKGRKLTIGLDLGDRWSFYCVMDEAGQILLEQTLPTIPEAMKQTFGKIPRSLIALETGTHSPWVSRLLTQLGHEVIVAHAQKVQWITKSSRKDDRHDARTLARLARIDPELLGPVRHRSVQAQLHLTVIRARAELVSARTALVNAARGLVKSYGQRLPKCGTYQVSRELAAALSTELRDVLEPLFKEIESLNEHIKEYDERVEKIAKEVYPEVSLLKQVKGVGTQIALTYVLTIEDPYRFPKSRQVGCFLGLRPGRRNSGESEPQKGISKEGDRYLRTMMVQGAHYILGPFGEDSDLRRWGRKLAERGGKNAKKRAVVAVARKLAVLLHRLWVSGEVYEPLRNSQKAMRAAA

SEQ ID NO: 171736 - protein, 527 aa, unidentified
MRWFSPPRKDTTQMIPAVRDKCAGIDVGKKIIAVTVMTGPAMDEPKVETRMFGTFVRDLEQMRAWVVDEQGCTDAAMESTGSYWIPVYNILEGSIQVTLANALHVKGLKGHKTDVEDSIWLAHLHRHGLIKASFVPDRPIRELRELTRRRKRLLGAAASERNRIQKILECANVKLGSVLSNVFGISGQEMLHALLCNQAGPEQIAELAKGRLRVKMTEIAAAVDGHLMSEQQRVLVRQAAKHVEYLEGDVEKLDAQIAEKIQPYRQQFDLLLTVPGVKEITAAVILAEIGPDMRQFGSHRRLCSWAGVCPGNHLSAGKRKGSKINRGNPWLMGALIEASWGAVAKQGTVFKKRFYRHMARMGRKKAVVAEARSLLVAIFHVLNDGVPYRAPDEGAIGERERQHLIAHHRRCLQRLGIVVPEACMTAAPSGAKKKKARASAPVEAPPLPACVGVGESAQIPPLPSSLNQGKKSRAKATPASQRQDCPHPGADPARPPKAARTAVSGAAANSAPKMPRMRRGKLGIRAR

SEQ ID NO: 171737 - protein, 352 aa, unidentified
MQYLGLDWAYRRAAWCAVGEGGAVSGEGVVAADEDGLARLVLAVGVEVRACVEMMSGAVWVRDRLEAAGWEVQVAHPRKVRDVAPLACKTDKVDARVLAELCRRDLVPALWIPSIDDRALRERLRRRMHLVRMRASAQNRIFGLLTQWGLRVSLKRLREPDAMAMLEARGVPEAWRASIAEALAVIDLLDARAAPFERELRALAAADRRVMLLRTIPGIGDLLGLTIASEIGDVSRFSSPRKLIGYAGLAPRVSQSGDRSRTGALSKAGSRTLRWAAVEAAHQSWRPTNPWHELYSDITKRAGKNPAKSAVARKVLIAAWHVLSREQPFKPARPRTNDSTNVSASSRCFLAA

SEQ ID NO: 171738 - protein, 428 aa, unidentified
MSHSFLSVGIDVGADFSLMAVALPTQEIAGRPYKILHSSPNSLHGAVSRIRALETQHGLSAKVFMESTGIYHYPLYYRLKDEGLDVFVLNPLITHANSNINVRGVHNDKFDAQKIAVLGLKPKLKTSVVPSDDVAAVKTLMREYHTMKKECTQYICRLTSQLRQMFPQYLPLFSKVNGKASLEILCRYPTPEAIMNAEKNEIIAILKRHSRGKVNAEEKYGRLVQAASEAALFGHSNAGNVYLIRHFVEMIRLIDAQTDKLLAQIRESVNGQPDSLMARQVGLLQTIPGVGFLSAVTLVCEIGDFNAFRRPKQLYAYFGLDPKVRQSGKYVGSELKMSKRGSSYARRSIYILALQSVSLRKNGEPKNPVLRAFYLEKCKTKAKMTALGAVMHKVCNIVFAVLRDEKPFSFITPEEHRVLFAALTEDAA

SEQ ID NO: 171739 - protein, 314 aa, unidentified
MDAVIVGIDVAKDKLDVAVRPSGERFVVSRAEAGLEELTNRLGALGVAVVSLEATGGYETVVAASLSAAGLPVVVVNPAQVRAFAHALGKRAKTDPIDAAVIAHFVEATKPMVRPLPDEATRQLSDLVGRRSQILAMIVAEEQRKKHHPNKRMLASIERLLGALRKELSDLDGQIREAIKASPVWREKDELLQSVPSVGPAISSRLLAEMPELGSLDRRQIAALGGLAPWTRQSGQWKGKSFIGGGRAGVRSALFMGALVAVKHNPVLKAFYDRLIATGKQKMVALIAVARKLLTILNAILRDGQPWREPEVHA

SEQ ID NO: 171740 - protein, 370 aa, unidentified
MAEVTTYVGVDAHKKDLFIAMLVGGQATPVTWQLANEPTAVRRLVRKLERDAPGPVQMCYEAGPCGYALQRQVATPRVTCQVIAPALVPRKPGDRIKTNRRDARKLAELLRAGLLTAVRPPTLEEEAVRDLCRARDDAREDLQRCRHRLGKLLLRRGLHFSGKNWTHAHRRWVDTLEWVHGAERAVVDDCLLAIDQTEARLVELDARLAEIAQADPYREPVGWLRCFRGIDTITAITLLAELHDFRRFRSPRQLMAYLGLVPSEYSSGPRQQRGGITHAGNRHVRRPLIEAAWHYRHQPWVGVGLAQRRHGQPATVIALADKAQLRLCRRCRRMERRGKHPTNIVVAVARELVGYLWAALTPATIARVTT

SEQ ID NO: 171741 - protein, 313 aa, unidentified
MSDNLPQTIGIDISKASLDCHVHPVGAERQFANTAKGHKALIAWARQWPVERIAYEATATYHRALEAALADWPCVKLNPERARRFAQATGTLAKTDRIDAMLLARMAATLQPPVRPARSAQQAQMAELINARDGLVRDRTACLNREKNLTIALLKRQCRQRIKQIEQHIKALDTEIATFIAADAELARRHQILTSIAGIGDLTANQLIATMPELGTLDGEQAASLAGLAPVARQSGQWKGKSFIRGGRANVRQALYMPALVAARFNPDLKAKYQQLVTAGKPAKIAITAVMRKLVITANALLKANRLWQQSPA

SEQ ID NO: 171742 - protein, 354 aa, unidentified
MSSDKYIALDVHQATTVTSVMNAAGRELDQSVIATQARPILSYLEGLSGPLHVTFEEGTYATWLYDLLEGRVAERVVCDPRHNALLKEGSKTDRNDARKLADLLRTGMLRPVYHGRQSLRPLQELVHSYEALVEDMTRAMNRIKALYRSRGIDCAGRGVYTQKQRTSWLEKLPAGATRLRAELLHQQLDHTRSLRRQARRALLKESRKQQVSPRLGDIPGFGPLRVARLIAWIQTPHRFRSLRHFWSYVGLGLVVFGSGEYRLVGGRIVRRAQAAKIRGLNRNHQPRLKEIFKSAALTAIRRPGPFKDYYDVRLAQGRDPALLRLSVARKLAALVLSLWKKGGRYRAQGVHAQA

SEQ ID NO: 171743 - protein, 338 aa, unidentified
MAESPVRRARAAPADRLPDRRHRRVEFVIGVDPHPQTHTASALDRNGEVSGTIEVENTEEGLEVLGEWAERFPERRWAIEGATNPFVAPWVAKLLADGEEVTNVAPSLTSQYRSRRGAKKNDAVDAQNVARALLANPRLPAHLPHPGQRRLQVLSRTRARLSRQLKANRMAMAELPEDSEERAILEGVAGFLAEKVKRLGEMLAEAVAEVMPEVLEIRGVGPVLGATILAEVGDVGRFADADCFVSYCGGPVERSSGKSARVRVNPGGNRTMNWVVHMIAQVRLRTDGGRSRALVERKVREGKTLRAALRVLKTYVARELYRTLEAIRGRREGGLAVT

SEQ ID NO: 171744 - protein, 355 aa, unidentified
MDSVKYIGMDVHRESISIAVRNGAGKIVMECVIETKANIILDFLHGLRGELHVTFEEGTWAAWLYDLLKPQVTKLVVCDPRKNASMREGNQSDKIDALRLAELLRLNHLSPVYHGEHGLRRLKELVRSYLTITKDLGRVMSRVKAIYRSWGIACTGKQVYAPRHRAEWLGKISEPGVRRRAEFYYQQLDALRALRQEVRRDLLVESKKHQAWKQLCQIPSIGPIRAAVLLGVLQTPHRFRTKRQLWTYSGLGIETQSSADHRSVNGQLQRVKKPSSIRGLNRNCNHDLKNLFKGAAIVASSKPGPFQEFYTALLTKGLRPEMARLTLARKIATIVLIVWKRGASFDAQHLKPQTA

SEQ ID NO: 171745 - protein, 408 aa, unidentified
MEVYYPRCAGLDVHKDTVVAAVRCVSHPVHHQVVSFETTTHGLVALADWIESHSCTHVAMESTGVYWKPVWHVLERRFELVLANAQHIRNVPGRKTDVNDAMWIADLLAHGLIRSSFVPPVQIQELRDLTRTRKQLVREISQHTLRIQKILEDANIKVASVLSNILGRSGRAMLAAIVAGEDDPKRLADLAQGAARRKSAALVEALHGRVTDHHRRMLKLHLGIVGSLEAALREIDGTLGEALVPIQEKARLLMTIPGVREIVAQVILAEVGADMSRFPSAAHLVSWAGLCPRNDESAGKRRSTRVRKSGTWLKTTLVTAAWSAIKVKDSYLRVQFVRIKTRRGAKKAILAVAASMLTASYYMLRDDVEYRDLGPAYLDRHDRTKTANRLVRRLRDLGYNVEIDKNAA

SEQ ID NO: 171746 - protein, 354 aa, unidentified
MSSFIRFRKGLFSMKKNAFYIGLDISKADFAASIYQTPGQAMITKEAIPNDPKGFTLFLSWLKEHHITKSNCRICMEATGVYSQAIAYYLLFAGFPVSIEPPLKVKRAFDPIGHKTDPVDSKQIAEYAYRFQDELTAWKPKEEILEKIRQLLSVREQFTKQKTALKNAIHAYSLQSVQVALIHKAHRETLAQIEKQIARIDKELAKLINQDPDTFQKVSNLKSIPGYGMLLAAHLLVMTDNFTKIQQYKRLAAFIGIVPYQHQSGTSVGKRAKIRHFGPMPSRKLLRLAAQSVATHDMTFRRYYLRKVAQGKAKALVLNNISNKLLKVACTIIRNNTRYIKDYRSMHPMYVKSA

SEQ ID NO: 171747 - protein, 318 aa, unidentified
MEPINRFVGIDVSGAHVDVFVRPDGHARRFDRDGEREALLEYLKPLKPTLIVMEATGGLEVPVAAAIATAKLPVVVINPRQARDFAKATGRLAKTDAIDAAVLAHFADALRPEVRPLPDEASRELEALVVRRRQLVDMLVAERHRLRVCASNATKAGLKKHIEWLQKQIKELDDDIGRSVRKSPIWREKDDLLQSVPGIGPVVSSTLLASLPELGTLDRKKISALVGLAPLNRDSGTMRGKRTIWGGRASVRAVLYMTATVAAQHNPTIKAFYARLLAVGKPKKVALTACMHKVLIMVNAILRTGRSWQQGLVLAHAT

SEQ ID NO: 171748 - protein, 455 aa, unidentified
MMAKKIPKRPTMETVNSNAAAVDIGSRMHMAAVNPDVTDAPIRAFGTFTHDLHDLADWFKSHGVTSIAMESTGVYWIPAYEILEQHGFEVILVNARYAKNVPGRKTDVSDASWLRQLHSYGLLRGSFRPTAQIATLRAYLRQRERLVEYAAAHIQHMQKALMEMNLQLHHVVSDITGVTGMRIIRALVAGERDLDVLASYRDVRCHASVETIKAALNGNDRAEHIFALTQSLDLYDFYKTKMLECDRNLEAVLDVLAADQEHDPSQLPRARTKTKQVGTPSFDVRAALFGVLRIDLTQIHGLGPSLSLKLVGECGTDLRAWPSAKHFTSWLCLAPGNKISGGKILSSRTRRSSSRAATLLRLAAVTIGRSDTALGAFYRRLAARAGKAKAVTATARKIAVLFYNTLRHSMTYKDPGASHYEERYRSRVLGNLKRRAKSLGYDLQQLSVEADMAVS

SEQ ID NO: 171749 - protein, 413 aa, unidentified
MLWGSGGEGVDTLERRDHAMEHPMSQSFDASRSLTAFEQDSTLVAVIEMSQSKWLVAAVIPGVGRQPLKKLDANADALLKLLQRWQDEARKAGRTVRRIVCAYEAGRDGFWLARWLQARAIETYVIHAASIAVSREHRRAKSDRIDTELLMRSFLGWLRGEKRHCSMVAIPTMAEEDARRPSRERESLVGEQTRIVNRIKAVLALFGIGGFNPRLRKAAQKLETLHTAEGTPLPENVHAELRRDLERLRLVHDHIHIIESERLRRLALAPAATTGPHAMVRLIARVFGVGIETADMLVNEALARTLRDRRAVARYAGLTGAPDESGKRRREKGLARAGNGRVRRGMIQLAWRFLIFQKDSRLVRWFRERTADGRSTTRKTMIVALARKLLIALWRLATTGEITEGLRLRPAGT

SEQ ID NO: 171750 - protein, 354 aa, unidentified
MIIIGADYHPGFQQIAYVDSETGELQERRLEHREEAEKFYRELAAQQRKVRVGMEASGHARWFERLLSELQFELWIGDAAEIRTKRVRKQKTDRQDAQLILKLMLEDRFPQIWVPSWENRDLRQLLWHRHRMVQARTRIMNQLQAVALNEGLRSKKRLWREAGREQLAAIRLAPWATRRRQDLLELLDRLNPTIGELTKAVEEEAEKCPEAQRLMTHPGVGPLTALAFVLVIGTAERFGCGKQIASYLGLAPEEDSSGERRRLGHISKQGNSLLRFLLVEAAQVTVRSNQEWRSKFFHLAMRRGRKIAKVAMARRLAIRLYWMWRKGWNYEQLTQFGAHAGQPGNPMVCSKSPS

SEQ ID NO: 171751 - protein, 338 aa, unidentified
MNSHVLGIDVAKDTLAIALLPVEKPVSVKKEIPKKLNVPNSEDGFLLLQKWLCEHNVIQLHVCLEATSTYGDAVARFLCGCNHQVSVINPLLTRRHSDSEGLRGKTDPMDAASIARYCREKVPRPWCPPTPELRKLVSLTRHIEHLKKLGKMESTAQKTPGLDEMEIASFEIIIAAINKQIYLVNAAIKKHVSAHSVLAEKVKLLTSIPGIGESTAWIIIAEVGNRDNVCTSRQLAAYAGLTPEPWQSGTSINGKPHLSKKGNMRLRNALFYPAMTAMRCNPIVKSFAQRLRDNGKSKMSALGAAMHKLLKIAVAILKSGKPFNPNIMAEHQQKCEAM

SEQ ID NO: 171752 - protein, 356 aa, unidentified
MPTVTLGVDAHKRSHTVVAVDAVGKKLAAKTVPSTSIGHAAALSWARVQFGVDLVWGGIEDCRSMTARLERDLMAANQIVVRVPPHLMSRSRASSREPGGKSDPIDALAVARAVLREPDLPRAAHDETSFSLKLLVDRRDDLVTIRRGMISRLLDRVHALDPTHVNPPTNWDRAKVRADLHTWLAQHTGLIAELARAELDDIDRLTAQIVALTERLTHLINQVAPRLLAKPGGVGPLSAAKIVAETAGVERFKSEAAFARYVGAAPTPNWSGGGQTPTGRRLQPSRRGNRQLNSALHRIAVVQIRLKDCPGRDYVERRVAEGDTKSQAIRSLKRRLARVVYQALIEDRALTNQVAA

SEQ ID NO: 171753 - protein, 311 aa, unidentified
MNDTIGIDISKDMLDTYWLSKRMHKQFSNNKAGLRSLIRWVQQAEVSLIIFEATGVYHRLLEVSLAVHEFPFARVNPRQARRFAEGTGTLAKTDRVDASMLARMGSLLELQADKPKSEMFYNLKGMTTARQALIKDRTAAMARLATATHPLLRKQATLRLRQVERDIAQIDVTIETTISADKTLSEKANILISIPGIAKITAFAMLIEMPELGSLSGKQAASLAGLAPISRQSGKWQGKERIQGGRACLRRAIYLPAVVATRFNPDMKAKYHELIAKGKCKKLAITAVMRKLVVMANALLRDGRKWTETRA

SEQ ID NO: 171754 - protein, 374 aa, unidentified
MHVAVGQPTQEVKETPMNSVGLDVHKTRCVACVKTQEGRILEEFAFQNTPHGHEELITHLKTYPETQVAIESTGNLWIPIYNRLEDEQIHTILTNPKKTRLIAEAKIKTDKLDARILADLLRANLLSASYVPPPEIREQRSIIRERARLTQLRTIIKNRIHTLLDKHAYKSPFTDLFGKHGLEWLAKLELPAGDRILLEVNLEQLSSLNHSIHRLNETIATSAVENPEVKLLMGFTGIDYYSAMFLINEIGPIARFSSPKKLVSYAGLAPSTRQSGNHTTHGPITKEGNSHIRWILIEAAHQAARHDPRLSQFYLRIMKRRGHNRALVAVARKMLVTIYHVLNHHHEYRGLRPELYTNKIRRLERITNSSLQTA

SEQ ID NO: 171755 - protein, 355 aa, unidentified
MNDEKYIGLDVHQATISVAVMDATCKVVMESILETKAATILEFFAGLRGTLWVTFEEGTWSVWLYDLLNPHVDKLVVCNPRKNALLKDGNKSDRIDARKLAELLRGNQLKPVYHGETGVRMLRELSRSYLTIVKDLSRVMNRLKAVYRSWAIPCAGRDVYYTRHRAQWLAKIREAGVRRRAERLYEQLDMLQHLRQQARRELLAEGRKHAITARLRQIPYLGPIRSVLAVALMQTPHRFRNKRQLWAYSGLALETRTSADYRYVEGQLRRSKKLVSIRGLNKNHNHDLKGLFKGAATMASVRPGPFQDFYQASLAKGIKPTMARLTLARKMAAITLTLWKKGENFDAEKLKSQAA

SEQ ID NO: 171756 - protein, 315 aa, unidentified
MAMSVSVSKPIVGVDVAKNELVIYQAELDLLETISNDKAAIKKWLKALPAPVDLAIESTNIYHLAFADLAHEAGCTIYMVGGYELSHYRKGVNVRAKTDALDAKLLARYLKNEYGELHPWIPPSPLYRRLLSLFRRRAALVQARVGLVQSWKNEPLLKNAFAEQVASMQRLETLVEKMINEQLKEAGLLAQLTRCTKVEGVGFLTGARLIVAFERGDFRNADAFIAFLGMDLRVSQSGQKDGRRSLTKRGDPEARRLLHNAAMSASRTPAWKGFYEEQRARGFSTTQALVILARKLARVVFALLKGQSEYQPKVG

SEQ ID NO: 171757 - protein, 392 aa, unidentified
MQKLNDLSRSLIPLEPDGTLIAVVEMSLSSWLVAGIVPGVERQPLKKLAVDESALLKLLHRWREEAEKAGQRIKRITVAFEAGRDGFWLARWLTARNVEAYVIHSSSVAVSREHRRAKTDRLDTELLKRSFLGWLRGERDHCKIVAIPTIKDEDAKRPSRERESLVGEQNRIINRMKATLIRLGIRGFNPKLKKAAERLEGLRTPEGEPIPPNTLAELHRDMVRRRLVNDQIRQIEDDRLERLEQTLEDGPHAMVRLLARVIGVGIETADMLVQEVLSRSIRDRRAVARYAGLTGAPDESGRKRREKGLARSGNARVRRGMIQLAWRFLMFQKGSALAQWFRARTENARGTRKTMIVALARKLLIALWRLVREGVVPEGIVLRPGTMKDGGR

SEQ ID NO: 171758 - protein, 359 aa, unidentified
MVKEYHIGVDLHKRFSQVAVIDGKGEEIENKRLENNAFEVSEYFSSFPKETPVSFESTIGYEWLADTLAENGFTNLHMAHPYKVRLIAEATIKTDKVDAATLAHLERTNFLPLSYLPPVAVRETRELLRHRLKLVTIRAQLKNRIHAVLAKRGIFSYPVTDLFGKAGRQFLSNLTLPAVYQKEITNYLLLLDQIAKIVSTLEKDIKRQVKEDYPQAGLLLTIPGISYFSALLLMAEIGDIERFPSSKRLASHAGLVPATRETADKLHQGHIKKDSNKYIRWILLEAVDILIRKDPGLAFIYRKLVCRKGKNRARVAVAHRVLVSIFYMLKKNEPYRTHLLKHYTVSGKPVLDTGPYMRP

SEQ ID NO: 171759 - protein, 351 aa, unidentified
MRTSQKITGIVTTIGIDIGKNTFHLVGFDQRGAIILRQKVSRSQLERRVANIPRCLIGMEACSGSHHIGRQLAEIGHDVRLIPAQYVKPFLKGHKNDYRDAEAIAEAVQRPTMHFVTIKTPEQMDLLALHRVRSRLVGRRTGVINQIRGFLIERGITVRQGPMPLRKALSEILSSDTGALSPRMVGLIADLAQDWRRLDERIAAVSAEIEALAEQDHSCQRLMTVPGVGPIISSAVVAAIGNGTGFKQGRDFGAWLGLVPKQESTGDRTILGKISKRGNKYLRTLFVQAAHVVLERRPSAAMRGLWPWVEQASKRLHRNMLAIALANKLARIAWAVLARGGTYQPRITHAA

SEQ ID NO: 171760 - protein, 355 aa, unidentified
MTAIRAEKQVATTVVVAGVDTHQRTHHVAVLTESGALLGDREFSVSKAGYQQLLDWVAGHGLIARIGVESTGSYGAGLTVHLLVAGVEVVEVNRPDKVTRARRGKSDAIDAESAARAVLNGTATARPKIKTGVVEAIRVIKVPRDRAVKDRTAAFGQLRDLVTTAPDAIHDELIGLTGRRRVARALGYRPDLSRLHDPVQATKHALRTLARRIQALDAEIKPADQALATLTKQAAPSLLAMHQVGVQTTAQIIITAGQNIDRLRSEASFARLCGVAPIPASSGHTSSGRVRLNPGGDRDANCALYLIATGRMGTHPATQAYVERRIAEGKTTAETIRCLKRHLARSIYRALKQTS

SEQ ID NO: 171761 - protein, 319 aa, unidentified
MELWDGIHEEEVPNEKGLKTLKKLLKKRYGGEWNQAVRFIYEPTGPYSNYLRAFAAEHEVQVVEVNPKKSANFAKVVGNRSKTDTVDAKMLSTFHALLAEEDFGVPEIDEIAEQLGAYLGGYEMIQKTRTMLSNHLQSLEYKSGVTRKLKDSLERELGHLGAMEDQLEKEMEAYAEDHEETREDLHNLLSMNGTLVISAMGLLYLFRKYPGANRNEITALAGLDPGGRQSGSSLNGGRKISRAGDPMLRKVLYLACMNSIQHNECIRTFYKHLVSDNHKKPKVALVACMRKLLLIAHHLYVTKSPYRTIEHDANPCLTS

SEQ ID NO: 171762 - protein, 346 aa, unidentified
MSEGYDGRQYVGIDLHRRRSVLVRMTKAGETLETVRIVNDRERLAAVMARAGERPEVVLEATYGWYWAADELAELGAVVHLAHPLGVKAFSYRRVKNDERDAADLADLLRMGRLPEAWIAPPATRELRELVRHRAKLVHLRTNLRCQVHAVLAGQGIGVPVSDLFGVGGTALLDRLELTPAAGLRIASLRRLIEAFDTEIDEAGKVTAARLRADPGYRAVQTIPGVGPVLGAVFVAEIGDVTRFPGPTRLTSWAGLTPKHHESDTAVHRGRITKQGSRLVRWAAVEAVQRAGKDSRLGAHRDRVAARRGRNIGTVAAARELVELVYYALRDHTVRRLTSDEAVSAA

SEQ ID NO: 171763 - protein, 461 aa, unidentified
MKSKKPAGKRKESARPKVDWKALEIVHPNAAGIDVGGSEHWVAVSPERDPEPVRSFGCFTADLRAMAQWLIEKGVRSVALQSTGVYWMPVFEILEQHGLEVYLVNAQHTKNVPGRKSDVQECQWLLKLHTFGLLNNSFQPTDEIRIARALWRQRGNLVADASSAIQRMQKVLIEMNLQLSNVLSDISGVSGMNIIQAILDGERDPWELAALATPGVKATPEDIVKSLEGNWRAELLFVLRQQVELYRTYQEKIRDCDLELRRHLKSLGSKVDLEAQPLGPKPKGKKSGRNTPQFDLRTELYRITGIDWTQVNGMDVVTAQTVIAECGADLSAFPSEKQFTSWLGLVPSNEQSGGKILKRRTRKVVNRAATAFRNAASTLVRSQSYLGAQYRRLRTRLGAPKAITAMARKLACLFYRLIKHGQQYVDKGMEYYEARHRGQQIRSLMKRAQKLGFQVVVSKTA

SEQ ID NO: 171764 - protein, 402 aa, unidentified
MNFSVGLDWASQAHGVCVIDGTGRVRWKESVEHSAKGLAELLRQLARFGPPASIPIALERPSGLVVDTLLDAGHPVVPIHPNALKASRPRYSAAGGKSDPGDAFILGDLLRTDGHRFRPLQPLSDETRALRALVRGRDDLVAERVALANQLRALLDRFWPGAAAIFADVDSPIALAFLSRYPTPHSAERLGEKRLARFLVQHAYCGRRPAAELLARLRSAPITQTSELEAEASGEIVRALVTVLLPLVTQIQQLSTAIAAALPQHPDGPLLQSFPRSGSVNAAQILAELGDDRSRFATDEQLAAEGGVAPVTRESGKHRGVAFRRACNKRLRQALTSFADHSRHASPWAAAIYAAARRRGCHHPHAIRVLARAWVRVLWRCWQDRRPYDLTLHRAAQRVAAA

SEQ ID NO: 171765 - protein, 382 aa, unidentified
MNAVGIDVSKGKSMVCVMRPFGEVVLEPFEVLHTAQNLHDLAEKLKALDGETRVVLEATGNYHKPVAFVLHDAGLFVSVVNPVLIHDYDNNSLRRVKTDRKDAVKIANYTLDKWTRLRQYLPEDDTRLALKNCYRQYQQAVAIRTMLKNNLISSLDLTFPDANKLFTSPAKSNGCEKWVDFIGDFWHSECISSLSANAFAKKYLKWCQKHGYVFTRSKSDEIYACAVNSASLPKSPTSKLLIQQQVAQLKAVSQSVAAFRQEMLRLSQQLPEFDTVMEMYGVGPSLGPQLMAEIGDVRRFSSKKSLIAFAGIEPQPNDSGKVVGNDKGISKVGSAVLRRTLFLIMTVILQTQPQDEPVFQFMNKKRSEGKPYKVYMLSLIHI

SEQ ID NO: 171766 - protein, 422 aa, unidentified
MLEQTHDEQEIIQRVAALDIGKAELVCCVRVPDPKGGSRRMEEVTTYSTMTRSLQLMADRLLDLGVTRVVMEATSDYWRSPFYLLEAHGFQTWLVNAKDVKHLPGRPKTDRLDAVWLCKVAERQMLRPSFVPPVPIRRLRDVTRYRIALVSDRTREKNRVEKLLEDAQIKLSVVASDIFGMSGRDMMAALIAGERNPQALAQLARSRMRGKIPQLEEAFVGYFTEHHRFLLAKMLTRIDALNADIDELETEIESQLAPFASPVARLDEIPGVGATAAAVIIAEVGVDMTRFPTPAHLSSWARFAPGVKESAGRKKGNGSTGHGDPYLARILGEAAVGASRTNTFLGERYRRIARRRGKKKAIVAVGRSILVIVWSILSDPETRYYDLGPGFYDSRINPDRKKRNHIRELEALGYKVTLEPAA

SEQ ID NO: 171767 - protein, 429 aa, unidentified
MNSTQNKKIEQVKETTMIVGIDVGSEKHYFRAFNWRGIELTRKPVAFSNSMEGFNSFYNTIVELMQKSELEEALVGIEPTGHYWFDLGQFMGEKSIKFVMVNPHHVHKTKELDDNSPSKNDRKDPRVIAGLVRDGRYFYSYMPTGVYAELRNASNRRFVLVEEQTRAKNRLQKWIAVYFPEYKGIYTHIDAKGGLLVLKQAPTPEEIVKLGEEGIIKIWKDAKLRRNGNKKALKILNAAMRSIGLRTGLTEARMEIQDLIEDYELQTKRLERVNDLIKELCQQIRYADKLLEIKGIGITTVAGFIAEVGDITRFDSTKELQKLAGLELVADSSGKHNGKTKISKRGRKRLRYLLFEAAISVVGKNEEFKEIHRYYTTREKNPLKKMQSLIAVACKLIRVFHVILTKGISYDASKMLKDIRHQGEQLKAA

SEQ ID NO: 171768 - protein, 343 aa, unidentified
MDHFAGLDVSVKETSVCIVDDAGRIVREVRVASEPEALLQVLANNTYRFKRIGLEAGPLSQWLFSALAEAGLPVICVETRHMRAVLKAQINKTDRNDARGIAQMMRVGLYRPVHVKTLRSQKLRMLLTHRKLLQSKAIAVENDLRASLRNFGLKVGMIGTVKFEARIRELVENLPDLAVLVEPLLIVRRVLREQLGILHRRVLAVVRDDDVCRRLMTIPGVGPVVALTYRVTVDVPARLRNSKAVGAVFGLTPAKYQSGENDRTGAISRYGDEMMRMMLYEAAQSMLVRSTKWSWLKAWAMKIARHRGMKKAIVALARRLAVIMHRIWIDGTDFRWTREVAAA

SEQ ID NO: 171769 - protein, 370 aa, unidentified
MESIIYVGMDVHKETYSLCCYDPRTDRYLYEHKMKAATGNVLKYLESVRKQMKEATFICGYEAGPTGFGLCRDLLRRDIACVVMAPTSLRRPANHRVKNDKTDARLLAKDLFTHSYSPVHLSSEKEEAVKEFCRMRRSIMTELKAAKQVLCAFLLRQGKHFEGKTHWTKGHREWLRKLTFEQPYLQESFDEYVISVNALEERLKRIEKRLEEIACDEEVGTKVKKLVCFCGIDTLTAVSIVSEVGDFSRFARAWDFANFVGLSVGEHSSGQKERHLGITKSGNCYLRRLLTESAKSIKKTSVRFRKSKKLLKRQEGNDPAVIAYADKCRYRLRHKMMSLENRGKPANVASTAAARELACFVWGMLTDHIA

SEQ ID NO: 171770 - protein, 379 aa, unidentified
MTTTDAAAEARETVYVAIELSKKTWVLGIAHPDRDRPSIHRVSGGNIAELVSRLRVAARNNRRILVCYEAGYDGFWLARALAKMGIECRVLDPASIQVNRRARRVKTDRIDVLALLRALIATDRGERHVCAIVRVPSVEEEDARRSHRERQRLVRERTGHINRIKGLLFAQGIRDIKPKLRRTRIDFAALETAEGHPLPDRLRRELEREYARLSLIATQLREVEKERDTADAQDPVVEQKRQLLVALHGVGATSAAILAREVFARSFASRRQLGSYLGLTPSAYDSGSTTRCQGISKAGNSWARRILIEVAWLWQKYQPASPLSHWYIQRTAGQSSRIRRIMLIALARKLAISLWRYVETGLVPEGVAIARAEPRCAPA

SEQ ID NO: 171771 - protein, 438 aa, unidentified
MSNKVFFNLDDLFISVGIDVGADFSWMSIALPNQQFVGKPYKILHNSIDSLTTAVSKIKEAEELYSLESRIFLESTGIYHYPLFCYLRDKGFNCSVINPIITKNSTNINIRKVHNDRFDSKKAALVGLKPDLKVSLMPSDLALNCRNLCREYYDLIDNHSAYVNKLQGELRMVFPQYLGIFSKVTINTSLTLLETYTSPSAFLKADKQEIIDIIKSTARFGLTYAQNKYNAIIQAATDANQFGYIIDSNIKRIRLYISFIRKYDEEINNILESLHELVDANEDADFVKQIHLIETFKGAGFLSAVSIMGEIGDFSAFSKPKQLFAYFGLDPAVKQSGKFEGTKVQMSKRGSAIARRVIHTLTLQSISISRNGEAKNPVLREYYLKKCDSKPKLVAMGAVSHKVCNMIFAILRDNKPFKIIAPQEHIKQYNAAKCDIAA

SEQ ID NO: 171772 - protein, 343 aa, unidentified
MYYIGLDVHKKTISYCMKDATGHVHREGKIGSTRRELDAWIQTLPQPRMMAMEATIFTGWIYDYLLPHAEKVKVAHPLMLRAIAASKKKNDRIDAGKIADCLRCDFLPECHMASTEIRDRRRTLRYRHLVVRQVVQMKNRISGLLMESGVSYDKQRLHKMGYFTELFSTNEEISDSIRPLLRLGREHILRGQRLDRALISSLERDPLLSERLRRLRTIPGVGAITALTWALEIGDYTRFPSVKQAISYCGLCGEEKSSGDKVMRTPISKQRNKHIQHVLVEAAKLAPRYSHELALLRDKEIQRGNKNRATLAVARKLVAYMLAVDRRKQDFVSTEELAAKAVA

SEQ ID NO: 171773 - protein, 399 aa, unidentified
MKKYTSYVGLDVHANSISVAVAPADGGAVQSLGVVTHDLKALRKILKKAGDIRKMLICYEAGPCGYPLYWELKGLGAEVMVVAPSLIPQKSGDKVKTDRKDAEKLARLLRAGELTAVWVPTQEHEASRNLVRARDAVRKDLRRAQQRVEKLLLREGRRAPLTKKGKNAGKSRVKSFGTAYMTWLKTQSFEHKGTQQTFDNYKTEVEHQMLRLQLVDKQILEVIAQAPSPLREVVQALQALRGVAQTTAAVLAIEVGDFSRFDKPTKLMAWAGLVPSEYSSGGPGKSRRYGITKSGNRHIRRVLTESAWLYRHKPNASAAINKRRLGLTAPVIAIAEKAEKRLCARYHRLSEAGKEKNKVTTAIARELLGFVWATAREVEQATINQPKEAARKYLLKKDA

SEQ ID NO: 171774 - protein, 347 aa, unidentified
MNQYIGIDLHKAKSFVTRVDQRGRVLEQIELRHAAGELQRYLEKVPGDTRIVVEATGNWMWLYELIEDRHPDLVLAHPLKTKAIASARIKTDKIDATTLAHLLRADLVPAAYVPPRAVRDTREVLRYRASLVRVRTQIKNKIAAILSKNGLVTPTKTAFGVKSRQFLATVGVRPCYRLALDGYLRQLAHLTDEITQVAQTIDAQAQADPQAQLLCTMPGIGAYSALLILSEIGDVHRFPDSRHLCSYAGLVPSVHASGGKTRLGRLTKQGSTWLRWILIELSMHAIKGAPQFQQLYQRVARKHGRNAGRTAVARAMLKTIYAMLKRQEAFRPIEQGSTGQRLRAMAG

SEQ ID NO: 171775 - protein, 349 aa, unidentified
MIRNKPRGATVYGIDLGKNIFHVVGTDPAGNVVQRVKFRRDTLRAFFERAERAVVGMEACPGSQWLARKLQAMGHTVRIIPAQFVKPYVKSHKNDTIDAAAIAEAVTRPTMRFVQVKQPEQVDLQSLHRIRDQMVGSRTRLICQMRAFCLEYGVAIRQGAGLFKSDLPRVIADECNDLTPTMRRLLNELFEDLMRLEKRIAEVTREIEALAASDEKARRLMTIPGIGPLGATALLAAAGNGQQFKKARDLAAWLGLVPQQYSTGGKPQMFGISKRGNRYLRRLLIHGARSCVMHLDRSRDRLGAWLRQLHSRMHVIKVTVALAAKIARIAWVVLNRPGAIYERRDPALA

SEQ ID NO: 171776 - protein, 344 aa, unidentified
MEYYVGLDISLRSCALCIVDSKGEVYLERELPCEIEDIANFLAAFEHPVERIGFEAGALSQHLYFGLQSKGFDVVCMEARQVSAALSAMRNKTDKTDAKGIAQILRTGWFSPVHMKSREAHGVRALLSTRKALLKKTMDLANEVRGLLKIFGVRLPRTVKHGSFDALVRPMIEMDDVLAHAIIPLLDARVVLFQHYLELDRRVKRAASQDEVCMRMMTVPVVGPIAALTFKAAIDDPTRFKRSRTVAAHFGLTPRRFQSGEHDNPGRISKAGDRNVRATLYAAANALLLRTMVGSQIKSWGMRLMPTKGRPPAVVAVARKLAVLLHRMWIDGSEFRQDQVGGTA

SEQ ID NO: 171777 - protein, 341 aa, unidentified
MYYIGLDVHKKTISYCVKDVSGHVQQRGTMAATRTELDNWMKTLPQPWIVAMEASIFTGWVYDHLLPHAAQVKVAHPLMLRAIAVAKKKNDRIDASKIADCLRCDFLPECHMACTAIRDRRRTLRYRHLLVRQMVQMKNRVSGLLLETGVSHNKERLHQVKYFQELLTDKEVTESIRPLLRLSHEAIRRLDKTETALIRSLERDPVLAERIKNLKTIPGIGVITALTWALEMDDVSRFRSVKQAISYCGLCGDERNSAEKVLRTPISKQRNKHIQSVLVEAAKFAPQQSHELALVYEKEKQKGNSNRATLAVARKLVAYLLAVDRERRPFKPAEEFGRAVA

SEQ ID NO: 171778 - protein, 360 aa, unidentified
MRCERTFVGLDVHAWSVTGHGLDAVTGEVWQRKLTPDPVDVERWLRTLPQPVAVTYEAGPTGFGLARYLRDAGIRCPVAAPSKLSRPWGDRVKTDTRDAELLARLLKLDEVVEVVVPSVAQEAARDLVRAREDVRGDLMRARHRLSKLLLRQGMVWTGGKAWTGRHDVWLQSQRFDQPSRQLAFDAAYETMLLTVQRRDRLDQAITAMAEDSEYTDLVRRLGCLRGISTLTGFGLAVEIGDWTRFSGNSIGAFLGLVPTEHSSGQSRSQGSITKTGNRHARRLLIEAAWHHRKTYRNPGLIMRTRWELAPPAARARGHAGNRRLHQRWQSFTVRRKRPVVANVAIARELAGWIWSLAVLE

SEQ ID NO: 171779 - protein, 354 aa, unidentified
MRRLKRHRHKVTDDDLFVGIDLHKARWHVTICNKDVELFCGSIPGEWKALRRLLDRYEGNRIQAVYEAGCFGFWLYDRLIEHGVECLVTPPSLVLQEYGNRVKTDRRDSRKLSSLLAKGLLKRVWVPSQEERYHRQVVRRRRQLVRDRVRTQNRIKSELQFYGISLPAPKGKWTQIYLDNLGRIRFGNRWMQESFNRLLEQYELVSKLIDKQTKVLKELAKTANYRERVEILSSIPGIGVVTAMEILLELQDVARFRRSDQLAAYVGLTPSQYTSADKVRMGRITGIGKDSVRSSLVESSWWLIRKDRAMRIKYEKIKARAGAKRAIVAVARILLLRIRRMILDGQGYTFAQAC

SEQ ID NO: 171780 - protein, 331 aa, unidentified
MNYSHFVGLDVGKKTFDASLMSAAEKELSHKSFDNTPEGIQSLLDWIAGYHLSLSKLLFCAENMGSYVTELSVSSVSMGFSLALVCPLTIKKSIGLQRGKNDRIDAKRIANYAVLHYRKLELYKLPDKDLVRLRGWIIIRDNLVKQKVSNIKLLETFSQMAKLADVTESISFLEEQLKSIKERILEVEEDMEQLIAASTSLYTNYLLLRSIKGIGIINAIVLLCVTDNFQRFDNPRKFACYCGVAPFEHTSGISIRGKTQTSSLANKEVKVYLTRAAITAISWDPQMKAYYKRKIAEGKHKSSVINAVRAKIIARSFAVIRRQTPFVTLAV

SEQ ID NO: 171781 - protein, 360 aa, unidentified
MRTVSCAQSEAVARIATRMQLTLTYPIKISVSQRKDFSMIFVGIDISKLTFDVAVLIDGKYLSRQFENKQSGFLKLSQWIKSFKNPAYFCSEATGIYGLALAKHLYQTNQKVIVANPLQTHAFAKMEMARNKTDKADAMSIARYCQYLFNRGEIDKGLFIPRSAAFERVQFLVTRLDQLSKMKSQENNRSGVSLDKAAARSIQSVLTFIDKQIVVIKKEITMIIKQDEQLTVQLKLLVSINGIGDKTAWALLAYIGDISLFENSKQISSYAGLNPSIDQSGTSLNRSSLSKTGSTRLRKSLYMPAMVAVRYNPLMLAFYNKLLTKGKPKKVALIAVMRKLLVLAFGVLKSGKPFDVNYQH

SEQ ID NO: 171782 - protein, 353 aa, unidentified
MNQYVGLDVSLEETKIHVLDEAGGRVWRGKCASHPDELETTICKHAPGAVRIGLETGPLTTWLWTELSKRRLPMVCLDARQAQRALDMRANKTDANDADGLAHLVRAGWYKEVRVKSRDAMLSKAVSAARRQLLDISTNLSNQVRGLMKTFGLVVPKGKGRIFEANVRRLLDEEHALAAVVLPLLEAWCAIRNRAAELDRLLLRKVRDDANCRRLMTAPGIGAVVAASYVAAIESPANFKHARDVGAWVGLTPRRFQSGEMDYDGHISRRGDERLRALLYEAATVILTRVRSASALRSWALALKKRLGFKRAAVALARKLAVVLHVMWKTRKNFDPNHRLVPERDRRSHDLIT

SEQ ID NO: 171783 - protein, 318 aa, unidentified
MQVILHNCCGLDVHKNSVVACILKTKNLTSDNKSEVFEKEIRTFETFPDTLKQLKAWLELEDCHHVAMESTGVYWHPVYDALESAFEGDIEILVVNARHMKNVPGKKTDVKDAEWIAKLLRAGLLSGSFIPPHDVRELRQLTRYRKNVVQDISKQKNRIEKTLQTAGFKLSTFLSDIFGVSGRNLINVLINQGKISHHDVETETRHISAEKKAEIKRAVNGRLSVHQRNFIKLQISLLDDQLAHLDIIEQSISELSVNFHDDIERLDTIPGIATTAATAIVAEIGTDMSKFPTSEHFCSWAGLTPGDHMSAGKKKTHE

SEQ ID NO: 171784 - protein, 358 aa, unidentified
MNKQSNRISFKGQNIYIGIDVHLKTWSVTILSEHSVLKKMSQGADPDALHRFLTSNYPEADYYSVYEAGFCGFWIHDRLTELGVHSIVVNPADVPTMSSEKLRKTDAVDSKKLAVGLRAKQLKGIYTPDRETQEIRSLIRLRYTITKDMTRQKNRIKSLLRYMGVAIPAEYLEPSSNWSKRFLNWLKQLDMKTPSGRQALDLLIMQYEDLRKQKAEMTSKLRALSRTERFEKTLNLLMTIPGIGQTTGLALLAEISDVTRFANAEQLAAYVGMIPMCHSSGEHEGVGDITIRKHAILRNNIIEAAWVAVRLDNSMQCYFQNNCNRMPPSKAIVKVARKLVNRIYFVLKRNQQYVKGMA

SEQ ID NO: 171785 - protein, 423 aa, unidentified
MDVMFERVAGLDVHKAMVVATVRVVSDGKVKRECRTFETTTAGLLELLGWLTESRCTHVAMEATGVYWKPVWSILSDGEFELVLANAAHIKNVPGRKTDVNDATWIADLMACGLIKASFVPDEEIQNLRSLQRARKQLTHEQTRHTQRIQKTLEEANIKLDSVVSDILGVSGRKMIEAMIAGVRNPAKLAALADRRLKASRKELYDALHGRLTDHHRFMLKLYLGHYDAVEKSIIEIDQEVAAAIERMDGEVEAGHATFRSLISLLSTIPGISTLSATTILAEIGTDMSRFATAGHLVAWAGLCPGQNESAGKRKSSRLRKGAPWLKTALVQAAWSAVKKKDSYYRAQFHRLKARGGAKKAICAVAASMLTAIYHMLKDGVEHHDLGADHFDRRSTDVKAKRLVAQLTKLGFDVALQPLKKAA

SEQ ID NO: 171786 - protein, 464 aa, unidentified
MKGNKRRRQMKQRRISSHLEQVNLFAAGIDIGSQSHYVAVPEELDSEPVREFSCFTGDLNRMADWLVEIGIQTVAMESTGVYWFPAFEILEERGLVVLLVNARHVKNVPGRKSDVQDCQWLQQLHTYGLLEGAFRPPEATVALRAYTRQREMLVQRASDHIRHMQKALRQMNLLLDNVVSDINGMTGMKIIRAILAGERDPAVLAQFRDNRCKHDDKTIAASLEGHYREEHLFALKQSVELYDVYQQQIANCDETIQAQLDRMESRGDKDDLPSTKKRKTKSSPDFDLRGELYRMTGVDLTRIDGLNETSVLKVLSETGVDITPWPTEKHFASWLGLSPGNKITGGKILTSKTKPSANRAAAAFRVAAYGLFNSKSALGAYYRRQRARLGSPKAITATAHKLARTFYSMLKNGTEYVDQGQDYYETQYRDRVTKNLKKRAASLGFDLVPNKEDENMPDTVLSTA

SEQ ID NO: 171787 - protein, 341 aa, unidentified
MEQVSTIGLDIAKHVFQLHGADGAGHVLFRKRITRAKLLSFLAAQTRCVVAMEACAGAHYWAREIAKLGHHVRLIAPTYVKPFIKRQKNDAADAEAICEAAQRPSMRFVPVKAEEQQANGIVFRARDLLVRQRTQCVNALRGHLSEYGYVFPKGITHVEALVAVVEDLQSSLSDSVRAILKLLVDTFTALEAQIAVLDAEINQRSKSDPTARRLMTIPGVGPITATAITALVPAAEGFPAGRDFAAWLGLTPLQKSTGGKPKLGAVSKRGERTIRRLLIIGASAVVQQASRRGAPKGSWLAQMLARKPKMLVTVALANKIARIIWALLVKGGNYKTPTAAA

SEQ ID NO: 171788 - protein, 408 aa, unidentified
MNTLYVGIDVSSKSNVVYLMLPNGDKHSNFSVANSHEGSTQLVKRIHSALTSHSLDTVLIGLEATSVYGDNLVYFLREDATLAPFNRKIHVLNPKQVKKFHDAYNDLPKNDYVDSFVIADCLRFGRINKEVYMGDYRYKALQNLTRARFFAVQNLVKEKQRFMNVLFKKYSTMTQEKVFSDTFSTTALAVYDEFESAEALANMDLHELTDFIIEKGKNRFPDPDAVAKAIQKAARSSYRLPKTVNDSVNQVLSISITSMKALESQIKEFDKAIKAQMELLPNVLISIPGIGPVYSAGIMAEIGDINRFDNQASLAKYAGLAWKQHQSGGFEAEVTRLIPSGNRFLKYYLCEAAFSLVRCDKEYSDFYHLKYKEVNRCQHKRALALTARKFVRLVFRLLKDNRLYCPAK

SEQ ID NO: 171789 - protein, 348 aa, unidentified
MVRFVGIDISKTKCRAAIMDRAGVILEEFTFTNNHEGIEGLTSRLTMHDRVVMESTGSVWTNLYNHLDDRHIPVTLANPLKTKAIASAKIKSDKVDARILAHLLRSNLVAESYVPPKHLREIRTLIRHRLAIVKIRTMVKNEVHALIDKHGFACPCSDIFGKAGLEWLRSLQLPALDRLILDNHLTHLESLNQQTDRVDDEIQSKAVEDLDVRLLLSMTGLNVYSALLVKSEIGSITRFPHYKKLASWTGIAPSLHQSGSMEYHGSITKQGSRTLRWVMVEAARVAVNHDPRMRAFYERVKHRRGDQKAIIAVANKMLKIIWFMLTRREPYESRNEKRYQRKLNSITD

SEQ ID NO: 171790 - protein, 364 aa, unidentified
MALKNDIMEKRLKQSLGIDVSKLGLSLSLGFLTDKLGKEFISHPDVPNDLSGYKEVLKWLKTSVDGTVDLVVVMEATGVYHQGIAHYLYSHGHAVSVMQSGRVKRYAQSLDQRSKTDALDSRMLSMLGLERSLRPWRPPSEELWELKALSRERSSLLKDKVMETNRQGAIDSGVHGNTKALKRHRDRLKLLNRQIAMVEEEMKEIVSKNEVLGRKIGFMMSIPGISFISAATVVGETLGFESITSAKQLTSYAGYDVVLRESGSFKGKTRISKKGNSHIRAVMHMPSMTCVRCNPTLKKFYNRLKPKKAKPLVALIAVQRKLLILMYTLWKSEKFYDAAYETKKQQKRKALAAQDNNLINQLVS

SEQ ID NO: 171791 - protein, 384 aa, unidentified
MGNDQGYQSGTEEVVLAVSLELGVSKWKVALHDGRRERPAVHTVAQPQATARLQAVLALIDAHRDRWSLPADVRVVVCYAAGPDAFWIWRALQARGIECYVLDPASIPVERHKRRAKTDRLDAIRLVISLRAWLRGERDRMHVVHVPSAQDEASRHLMRDRGQLQKEVLQHLDRMRKLLATLGCWDKVDHRDFAGRLARDEVRCHDGTPLPPELRERLLRECERLALATQQLATLEKTRQASVPAPARARSDALARLKGIGEVSASRLALELYWRDFHNRRQVGACVGLVPQPYDSGESQTDQGISKQGNGRVRGLLVEMAWTCLRYQPGSALTQWFNRRTQGTGPNRRARRIAIIAVARRLAIALWRYLKDGVIPDGAQLKSS

SEQ ID NO: 171792 - protein, 343 aa, unidentified
MDEYDGRQFVGIDLHRRRSVIVRQSESGEQLSAVRIVNDPVALGLQLEQAGSDPEVVLEATYGWYWAVDVLQAGGARVHLAHPLGVKGFRYRRVKNDVRDAADLADLLRMGRLPEAWIAPPETRELRELVRYRAKLVAIRSGLKAQIHAVLAKAGVLIAVSDLFGVTGRQRLAKVPLGPAYAERIRSLLQLIDILDGHEARFAAMIAERLRTHRGYQAIQQVPGIGPVLAAVFVAEIGDVHRFTDPAHLCSWAGLTPTHRESDTVVRRGHITKQGSKLVRWAAVEAIQRQPDTTKIALDRQRIEARRGRNIAKIAAARKLLTLVYYGLRDGHIRAVAHRQVAA

SEQ ID NO: 171793 - protein, 386 aa, unidentified
MDEYDGRQFVGIDLHRQRSVIVRQSESGEQLSAVRIVNDPVALELQLEQAGTDPEVVLEATYGWYWAVDVLQACGAQVHLAHPLGVKGFRYRRVKNDVRDAADLADLLRMGRLPEAWIAPKHTRELRELVRYRAKLVATRSGLKAQIHAVLAKAGVLIAVSDLFGVTGRQRLAKVPLAPAYTERIRSLLELIDILDGHEARFAALIAQRLDTHAGYQAIQQVPGIGPTLAAVFVAEIGDVHRFTDAAHLCSWAGLTPRHRESDTVVHRGHITKQGSKAVRWAAIEAVQRHPTTAKIAADKQRIEARRGKNIAKVAAARKLLTLVYYGLRDGHIRALTAPGRREPSGRNPRAAAVLSDPRTIGVVVRLIDPACCHRTAPCPHSWAKG

SEQ ID NO: 171794 - protein, 368 aa, unidentified
MDETITGFVGLDVHAESTAIGVAEAGRSAPRFVGTVSAKYSELSKALAKLGDPAKLLIVYEAGPCGYALARELKRTGYRCDLVAPSKIPRRPGERVKTDRRDALTLAGLARAGELTFVVIPDERDEAMRDLSRARIDAVRAGLKVRQQLKALLLRHGRRYTGKTSWTAAHERYLAEVSFAHRAQDIAYVEYRQAVSEAHARVERLSEALTEELENWRMRPLVRALMTLRGVDQLVATTLVTELGELRRFAHPRELMGYLGLVPAEHTSGERRRLGAITKTGNCHARRILIEAAWSYRFPPRITLPLQKRQERQPAAIRAIAWRAQLRLTHRYRRLSARGLPQNKVCVAIARELAGFIWSIGQQILIAS

SEQ ID NO: 171795 - protein, 363 aa, unidentified
MFKLDRRRYRVGEPEPAYCREADLDKPDVCGIDVSAKELVVMVERGGRREGARHFSNTAGGHQQLRDYLAAPGRPVRVCLEATGLYGLDVALGLERDARFQVMVANPRAVKNFAQALFQRSKNDRLDAGVLLEYAARMPFQAWQPPSRAALQLTAVTRRLQTLTEQATAEKNRGHALAATAASSTVVVADVKRSLRAIEKAQARLARAAEKIIADDEPLQRRYQLLRTVPGVGETSALQLLGELVLVPANADVRQWVAYAGLDPREYSSGSSLKKRTRISKVGNRHVRRVLYMPALTAAHHSPVFRAYYQHLLAAGKCKMVALIAVMRKLLHAVFGMFKHNAAFDETKVYPGLAPELAASFAS

SEQ ID NO: 171796 - protein, 364 aa, unidentified
MLIIGCDYHPSVQQIAFVDTDTGELSEGRLGHREQAEQFYRELKQRNLVVRLGMESSGHSGWFERLLRELQFELWIGDAAEIRTKRVRKQKTDRQDAQLLLQLMLENRFPRIWVPDAENRDLRQLLWHRHRLVQMRTRVMNQLQVVALNEGMRRKKALWRPAGRAELESIALAPWATRRRQDLLDLLDQLTPKIEELTRALEKEVEKRPVTRRLMTHPGVGPLTALAYELVIGTPERFHCGKQIASYLGLVPEERSSGERRRLGHISKQGNVLLRFLLVEAAQVTVRTHQQWRNKFFHLAMRRGRKIAKVAMARKLAVHLYWMWRQGCDYGSWQKLGSYVGEPGHPDGVQSITAVMIGHPAPGK

SEQ ID NO: 171797 - protein, 344 aa, unidentified
MKIKRIGVDLAKNVFQLHGVDCHEQVVLQRRLKRANWLKALLDKTEPGCEIGMEACTGAHHWGRLLQSKGYRVKLIAPQFVKPYVKSNKNDANDAEAICEAMSRPNMRFVEVKSVEQQDIQATHRVRSELISHRTAKGNQIRGLVSEYGLVAVQQMQALRMAIPQWLEDGDNGLTFRFRSLLNGLWEDLKALDHRVDELVREIKSIALNGPVAVRLQTLRVVGPMVATALVAAVGNGQQFANGRQMAASLGLTPRQCSSGNKERLLGITKRGDSYLRSLLVHGARSTVYTARNKEDRLSQWVTGLVARRHTNVATVALANKTVRMAWAMLRNNTEYDPDWSYNH

SEQ ID NO: 171798 - protein, 426 aa, unidentified
MAKGKIDPEPEFAAFVGIDWADRKHVWCLQAAGSKKRETGELEHKVEAVEAWVAELCRRFGHRPIAVAVEQVKGALVFLLNKNECLHIFPVPSTMTARMREALYPSGAKDDPRDADLLLDLLGQHRDKLHRLSPDDEATRRVQNLVEERRKLTAEKTAQSNRLTSYLKIYFPQMVEWFEKLDMPLVCDLLERWPTLEDLQKVSTEELRTFFCQHHCHRGLRERRILAIGGAIPAKGDRAVIEAKSAVVKVIVQLIRSLLEGIAELDRRIAEAAAEHRDFFIFASLPGAGAVMAPRLLAAFGSQRDRYSCADELQTYSGIAPVTERSGKRKWVHFRWACPKFLRQSFHEWAGHSIAQSLWARAYYHQQRDRGSDHHAAVRALAFKWIRIVFRCWKDRVAYDENKYLAALAKRGSPLGKLVVVGMASF

SEQ ID NO: 171799 - protein, 434 aa, unidentified
MKIIHPICCGVDVHKKLIVATIAATEKNNITRYLTETFSTLNHDLFRFRTWLTENNCLHVCMESTGKYWIPIFNILEKAGINVLLTHPMYVRAIKGKKTDKKDSKWIADLFKHDLVRSSFIPPPEIRALREIARYRYKLVCMRSSERNRYQDCMTISNIGLASVLSDPFGKTATDIMNHVISSDVLDEKRCEKLIYKSAKKKTELILESIRDCKIESDQRFKMSEVSGHMAYLDRAIFRTEAELYTRIQPFMPVVEHLATQLPGISKLSAALIIAEIGVDMAIFESAKHLVSWAGLAPTNNQSAGKKKSVRISKAGQFLKPLLVQCALAAVKCKKETYFAVKYQRIKKRRGHKKAIIAIARMMMVCMHRLISTGENLCPSDYEEINKPSPRKQVLNDKNVFAYLAAQGYNIASLEKLELAVPLSVTAHLVPDSA

SEQ ID NO: 171800 - protein, 391 aa, unidentified
MSFFVGIDVSKEKFDACCIGEQGEKIFSLTCSMDRGGFEKFIVQLPEDKTSFLLGMESTASYHIALFSYLTAQGYRVFIINPLLINNFAKRSLRKTKTDRKDALTIAQFLMHEQETLSTQTSSHLTTELKDLARRREKLADHVTSLKGNMKRILSVTFPELEHLTGVFTKTILRLLAEYPSAHALREASCSAVTDIVMTRSRGPKPQASVKALMAAAASSIGVASRAKELVLKQEASLLLHVQEQMKETTKLLMSLLNERMKQDMEILCSMKGIGENTAMNFLIEMGTDVGMYENDKKLIAASGLDPSTYQSGKYEGRSRISKRGNRHLRRVIWLMATKVIINNNLFRTYFFKRRKEGLPYKKAVLATAHKLIRVMFAMLSRKTCFVEGGN

SEQ ID NO: 171801 - protein, 352 aa, unidentified
MKITTIGLDLAKNAFQVHGVDERGKAVLKKQLKRAQVLPFFADLEPCLVGMEACGGAHYWARKLAELGHTVKLVAPQFVKPYVKSNKHDAADAEAICEAVARPNMRFVPVKTVEQQAILALHRARQGFVKARTAQANQIRGLVAEFGIILPQGLHSVAQRIPDILEDGENGLPGMMRQLIERRSVNLKELSRQADECEARIQAWHRENEASRRLADIPGIGPITASALVASVGDAKCFANGRQLAAWLGLVPRQSSTGGKQKLLSISKRGDTYLRTLLVHGARSVIRVAERKADKHQNWLHRVMGRRHKNIAAVALANKNARTVWALLAYDRPYQFNYQAALASEEITGSIE

SEQ ID NO: 171802 - protein, 312 aa, unidentified
MINVGIDVSKETLEVAIRPAGQRFRVNNDEKGHAEVCKRLAKVRPERVVLEPTGGYEQAIVQALVRAKLPVVVVNARQVRDFAKAAGRLAKTDQIDADVLAHFGEALQPEIRALPDEAHRHLEALVNRRRQLVDIRSAEMKRKQTAPAVVQPSIEILIDVLNRQIDDVDRDLHDLIRRTPAWREADDLLQSVPGVGRVLSCTLTALVPELGKLNRKQIASLVGVAPFNRDSGLGERKRVTWGGRAPVRAVLYMAASVARRFNPAIRRFYDRLIQAGKPAPVALVASMRKLLTVLNALARDRRPWNPQLVEQG

SEQ ID NO: 171803 - protein, 288 aa, unidentified
MKLRTIGIDLGKTSFHLIGMDEHGNVLLRRRFSRTALITYISKLDTCLIGMEACSGSNILGRALRAQGHTVRLIPAQFVRPFVKSNKNDYNDAEAIAEAVQKPNMRFVPIKTEDQLDLQAIHRTRERFVSERARVINQIRAYLLERGIVLRTGRLYLQRQMASILEDGEQRLSGLVRRLLNVLCQEWKHLDVQIAELQQQIETIAEHDEACQRLMEIPGIGPLASTLMIATVGNGAAFRRGRDFSAWLGIVPAQATTGGKPVCWVSASEATNTSVSFLCMAHAPVKRI

SEQ ID NO: 171804 - protein, 340 aa, unidentified
MHATIIGLDLAKNVFQLHAEDRSGTVLWKRRLRREELEAFLRKQPPALIGMEACGSAHHWARVFTAMGHEVRLMHAKYVKAYVKRGKSDVRDAEAICEAVQRSSMRFVPIKSVEQQIDRSLERARDLLVKQRTQLMNATRALLAELGVVACAGLRGFTTLADKIAAGDAVIPRPSLTALKPLVEQWRALQASIDQLEARLVARAHSDERMRRLMKIPGVGPLTAHAVVTAIGDPKRFSTGRDFAAWAGLTPLTDSSAEKTRIGHISRQGDHSLRRLMVLGAVNMARHARAKPCEANAWLNGVIARRPVKVAMVAQAAKTARIAWALLCSGENYRGRTAAA

SEQ ID NO: 171805 - protein, 439 aa, unidentified
MILIREVADAPVIMGISKSAGLKFPCGEVRIVNPLFVGIDVSSKSNVAYLMNPDGSKHSIFSVQNNLGGAKLLSERIVSALSSMRLNDVVIGLEATSIYGNNLVYALREDGSLGRFQRKIHVLNPKQVKKFKESYPDLPKNDFVDAFVIADHLRFGRIAKEVYMDDYRYQALRTLTRARFDVIQNLTREKQRFANYLFLKCSGMAQDKNIPNTSATTIALMEHFETVDDLANADLDELTAFIAKTGRGRFADPDVVAKAIQTAAKGSYRLPKTVNDTVNQAMSVSIASMRALKEQVKVLDKAIEQQFEIIPNTLTSIPGIGKVYSAGIIAEIGDIHRFNSQASVAKFAGLVWHKNQSGGFEAEHSQMIKSGNRYLRYYLLEAANSVRRCDSEFRRYYDLKFKEVNKFQHKRALVLTARKLVRLVFRLLKDNRLYIPPEG

SEQ ID NO: 171806 - protein, 367 aa, unidentified
MDALHRASAAPAIASNQWEKNKVFVIGIDSHKDTLAACLVDHLGAAVEHRSIANTAEGHRELVDWAHTRHPVRVAVEGSGTFGRPVAVAALGAGLDVREVPPQLTAQVRRRGRTQTKSDRVDALVIARIALTDDTLAAPTWWEDTEDLRVLVSYRCELVEDRTAQANRLHADLGKLRPGYQQNIRRLTSRKALDAAMRLLRGDMSPHARIAKRRIRTLRELDRRIGDLTSQIEGLVAGTGTSLCEIYGVGTLVAAVILAEVGNPHRYTTKAKFAMANGTAPLEASSGRVVRHRLNRGGNRRLNQAIHTVALTQIARPNTEGRRYYQKLIARGKTNREALRVLKRRISDRIWTHLQHLPTPSTAPDLT

SEQ ID NO: 171807 - protein, 340 aa, unidentified
MQITTIGLDIAKNVFQVHGIDAAEKVVVSKQLRRGQMMKFFAALPPCLIGMEACASAHYWARELTKLGHEVRLMPAKDVKAYVKRNKNDAADAEAICEAVGRPRMRLVRAKSAEQQGRLMQHRARDLLLRQQTQVINALRAHMAELGIVAAQGREGLKQLLKNIADEKDARLPIDARASLIVLAAQLQALHTMIGSIERRIVVQHRANEASKRLECIHGIGVIGASAITATVNDPGAFRSGRDFAAWIGLVPRQDSTGGKQKLGPISKQGDRYLRRILVVGAISVLRRAKLNPEKYPWLTQLLARRPFKVVAIALANKMARIAWALLANGSHYRPRLATT

SEQ ID NO: 171808 - protein, 382 aa, unidentified
MGLASDEMDSSRGSNGINVPESPCAPEAPGEEESEMHSTTIAVDLAKSVFEVAVSERPGRVTEQRRFSRGQFSRFLADRAPATIVMEACGTAHFWGREAQARGHRVVLLPPHAVRPYVLRNKTDGADAKGLLEALRNDDLHPVPVKSVDQHVLASLHRMRSAWMATRTARLNTLRGLLRELGFSIPVGARQVVPQVWALVSDADSGLPDALRPVLAEAAREIGELEARTREIERSLESMARVSEVVVRLRTIPGVGLLTATALVAFVGDVQRFPSGRHLASYLGLTPRESSSGLRRRLGAISKRGDPYVRMLLIHGARSVLLHAKKKAAGEQDRLRAWALDRERARGHNKAAVALANKMTRIVWAVWRREHVFGVPSLQGAA

SEQ ID NO: 171809 - protein, 419 aa, unidentified
MKILRSQNTKNVNGQTLVVAVDIGKSVHYGYFRAPIGEEVKPFPFSNTHRGFQEFWQKLSQFQRQQGLKECVIGFESTGPYAEPLFHYLRNQPVKLVQINPMHTKRLKELTGNSPNKTDRKDPRVIADVISLGHALSLVVPEGASAQLRRLTHARERAMKRRIALLNQLHYLMAVVFPEFLEVMKKISTKTAIYLIKHHPTPQHIVAMGPGSLSKVLKKRSRGQVTEQRAQKLFEVAQESIGIHEGQQSMLLEIQYLIFAVEQENGFIADLERQMIFSLNQIPYSHSILSIKGIGKITAAGLIGEVGDFGKFKTIAEITKLAGLDLYEISSGKHKGQHRISKRGRSLMRKLLYFAVVNMIRSDGLMHQPWHQRVQRGMPPMKAMVALSCKLLRLIFALARDNTVYKENYTQTNTYKLAA

SEQ ID NO: 171810 - protein, 323 aa, unidentified
MSKIIGIDISKDTFDVSYLEKDKWQHKVFKNQSKGFEQFKKLINSVDWIVMEASGPYYVQLATFLNLGNYKVCVLNPLIIRRYSQTRLYRAKTDKKDAKTIAEYGAQYELKRWYPESNHCIEIKQLYTALELLKKQKHQTKRQLESFEVTGLLSNNLKKELKQLLLLLARRIIKFEKQIEKLGELAYKDTIQRLRTIPGVGIKTAIMMSVITDNFTKFENYKQLTAFVGFSPRLYQSGTSVKGKGHICKMGKPQIRKLLYLCSWSAKRVNKTCMEMYKRLKEKGKPERVIKVAIANKLIKQIFAVAKNEQYYNENYQSLYCAK

SEQ ID NO: 171811 - protein, 311 aa, unidentified
MNYIGIDIGKTINVACRLGKPSALLKFNNDSKGINIFQKWLPKYGSTKILVEATGGYQNKLVWHLQKMKYDVLLINPILARRKKIVSLRKIKTDDHDAEVLAELARDGKGTKWIANPEQFRHRLLAKMYDKISHRLIQETIQQKRLRELWEETNYPFPEWLDENLLVPLQGLKKKLSLHLEKFEDPLIERLSTIPGISRRGASMIVAEVGSFDRFNRVSQFIAYIGLDPSIKQSGGQKQKYGHISKRGSTVLRTVFFHAGMTTWRKAFKELYDKQREKGRSYIETVLIIARKVARISYSLAKSNNAIFIDS

SEQ ID NO: 171812 - protein, 302 aa, unidentified
MKKTYRVQDYVARGKEIFVGLEDSKRTWKVAVRSEKMVIHQVAMEAKYPVLIGYLRNKFPDCTIHLMYEASFKGFNLYDQLTADGIDCVLIPPHLVTEPKVNRIKTDKRDARRLALMLEHHDFKESCYVPDKERREDRQVSRTLIAVQKDIIRTRNRVHRFLEFHGIEVSFPDRWGREEFRALKQLELSEPLRISLDILLTQLEELWVHQVALRAALKKLCKKERYHKAYTLARSLPGIGWLTGIRFVLELGEDLTRFTSGKKIASFVGLTSSEYSTGERMQKGHITGMGPGFIRATLIENS

SEQ ID NO: 171813 - protein, 427 aa, unidentified
MSERKSLEVRVSVDVGSRRHSVAIGLSDGQVLEEFEIAHRPEGFQEFFSRIARHEKVHGCEVAVAMEGYNGWARPLDSLVRQHGYRLYNINNLKLARFKEIFPGAAKKDRIDARKGLELFQLRDHLALAKDVLQEVTGTPKENEILKRVTRRRRRLVNERVRVVNNLQADLHAVCPGLLEMTSDAGNQWFLNFLVSADTVPQLARLRKSTLLKIRAVGRKYAGLIAQWQKQAHFSDQAEWVSEMIQEDARRCLELDEKIKTLEIKIKEIARNSTMATLLSSIPGFGAVCTSELAGEIGTVDRFSKEASLALYLGMSHLDNSSGKYQGTKQAKHVNTRAKAAMMTAIDRHRKYVPQSQKYYEKKRAEGKSHNQAIRALGRHLCRIIFTMLKEQRAYQLRPETGDTQGRVSSVACVKTALQRSKIFVNN

SEQ ID NO: 171814 - protein, 346 aa, unidentified
MSEISIIGLDLAKQVFQVHGADKAGRCLLRKQLKRREVLAFLAKLSPCMVAMEACGTAHHWAREIAKLGHEVRLIPPAYVKAYVKRGKNDAIDAEAIGEAASRPSMRFVPVRTVEQQSLAMLHRARDLLIKNRTRLVNALRSHLAEFGFIAAKGIGKLPDLIKIVSEAPKEALPDMVRAALSGFLDTIAALNLQRAAIEKRLMAWRKSDAQSKRLDTVPGIGLIAATALSALVPDASLFKNGRHLAAWLGLVPRQDSTGGKTRLKRISKAGNGYLRRLLALGATSLLRSLKNKATPLALWVQGLLARRSKRATTVALANKLARIASNRLACLTLSLAGIGWPIPAR

SEQ ID NO: 171815 - protein, 345 aa, unidentified
MPIVGGLDIHRKQITFDYLDTETGQVQRGQISPADREHLRAWLARFADCEDVAFAVEGCTGWRYVVEELAAAGVAAHLAEPADTAFARGRKRHAKTDKTDCRHLRMLLAEGRLPECWIPPGHILECRALLETYHDLRREHTAWAQRIHAVLFHQGAPALGEGTLRTGPGVAALRAAAAAHLSPAGQLQIATALDMTDMLDTRLHELRHQLLDAARHLAGAKVLAARLYGVGPVTALAMTCWLGGKDRFSSSRKAVRFAGLDVTVRSSDRKGPPGRLSRQGPPVLRWAVYEAGKTHARSSAPDYRYYAQVKDRCNGKRAALSEARKILRQACHILAELGDDALSAA

SEQ ID NO: 171816 - protein, 389 aa, unidentified
MKIFVGIDIAKLNHFAAAISSDGEILIEPFKFTNDADGFQLLVSKLESFDKNSIIIGLESTAHYGDNLVRYLVAEFYQVCVLNPIKTCQMRKNNVRKTKTDKVDTFVIAKTLMMQDDLRFITFFDLDMMDLKALGRFRQKTIKQRTRLKIQLTTYVDQVFPEIQYFFKSVLHQNAVYALLKEAPSPKEIASMHMTHLANLLKVNSHGHFTKEQAKELRVLAQKSVGANDSAISIQITQTIQQIELLDSQLEKIEAEMTDIMKFNDSVIMTIPGIGYINGGMILGEIGDIHRFSNPNKLLAFAGLDPSVYQSGNFQAKTTRMSKRGSRVLRYALVNAAWNVVRNNATFEAYYNAKRAEGRSHYNALGHCAGKLVRVIWKMLTDEVDFNLE

SEQ ID NO: 171817 - protein, 361 aa, unidentified
MTSMTHEDPEITGGVDTHGLTHHAAVIDRLGRHLADREFPATVHGYRDLLEWMRSHGTLGAVGVEGTGAYGAELARVLTAAGVAVLDVDRPDRKVRRLRGKSDPVDAYAAATAVASGRATGVPKSRDGAVEAVRVLRVTRRSAVKARTQATNQIRGLLVSAPAALREQVAGLNRTALIRTLTRLRPGADLPTPMAATKAALRRLARRHQVLDEEIAELDAVIGSLVRHAAPELLALFGVGPETTGQLLASAGDNPERMRSEGAFAHLAGVAPIPASSGRTHRHRLNRGGDRAANNALHTIVLVRMRYDERTRAYVARRTKEGLSKKDITRCLKRFVAREVYRALTHTPVGHITKIDLAPAA

SEQ ID NO: 171818 - protein, 348 aa, unidentified
MQITTLGIDLAKSVFCVHGCDANGKAVLRKQLARRQLLSFMANLPQCMVAMEACASAHYWAREIEKLGHQVRLIAPRFVRPYVKANKNDASDAEAICEAATRPSMRFVAVKSAAQLDIQAVHRVRQQLVKTRTGLANQVRGLLAEHGIVIARGFAPLRRAIPVILEDRDNGLSAVMRELLREIGERLRFIDGRLRQYDLTIQQLFRQDERCQRVAAVEGVGPLTATALVAAVGNATEFRSGRELAAYLGLVPSHRASGGRTVLLGISKRGNRYLRTLLIHGARSSLYRIERQRGARAIWAARLKLRRGANVAAVALANKNARVLWALLSKGQSYRPAPFPARVPQAGS

SEQ ID NO: 171819 - protein, 330 aa, unidentified
MEKQSEIWAGVDVSKVRLDVGYTGEAEIWSVENNAAGIEMIVKRFMEIQPQLVVVESTGGLERQLVRELYAAGIPLAMVNRHRVREFAKAIGLLAKTDGLDARLLARFGQATKPDPTRLPSEKEQLLAALILRRRQLIDDRTAEKNRLGTAHPATHSNIEAHLKWLNEQIAELDRQIEQLIQDDPGFKAKDEILQSVPGVGPATSAIMIAALPELGCTDRKKISALVGVAPMNRDSGYYRGKRRIQGGRSDIRTVLYMATITATRFNPVIHDFYQRLLKAGKLKKVAIVACMRKLLTILNAMLRDSVAWQPSQVCADLQNERRELVIAYA

SEQ ID NO: 171820 - protein, 357 aa, unidentified
MGKFIGNSGVVTRVGLDLGKNAFQVHAVGGKGEIVIARKLARGRLVAFFAQLPPCLVAMEACGSAHHWGRQLAALGHEVRLIPPAHVKPYVRRNKSDAADAAAICEAAGRPGQRFVPLRSIDNQAALMRHRARELLAGQRTALLNALRGHMAEIGLVAPQGAQHAYELKRLAADGFDENGEIVVPDCVRGALSRLVDHIDALDEAILAIDQELAASVKADATAKRLTTIPGVGPVTASAIVATIQDMSAFASGRDFAAFLGLTPRQSSTGGKPRLGRITKMGDRYLRKLLVVGACAVLGRRKGHKDALRLWASALLDRKTVKYKFKLTAVALANKLARVVYVLMTRGGEYDGRPVAA

SEQ ID NO: 171821 - protein, 404 aa, unidentified
MHNDLGFDIWCGLDVGKQAHHACALDAAGKKVFDKPLPQDQSKLEDLFTRLSEHGRVLVIVDQPNTIGALPIAVARSMGIQVAYLPGLAMRRAADLYPGNAKTDARDAFVIADAARTMPHTLRRVDLGEETLAELKVLVGFDEDLAAEATRLSNRIRGLLTQIHPALERVVGPRLATRQGLAVIEQLGGPQGMTAASKSKLLRVITKANPRHAQNFADAITQALSEQTVVVAGTAAAEQVLPKLAASLPQTWDQRCELAAQVEKVVDAHPLAEVLTSMPGVGVRTAARILLDVGDASLFPTAGHLAAYAGLAPVTHRSGTSIRGEFPARSGNKHLKRALFLSSFAALRSDPVSRAYYDRKRAQGKKHNAALICLSRRRVDVLFAMLKNREPYRAPNPTPQPLAA

SEQ ID NO: 171822 - protein, 379 aa, unidentified
MTRFAAVTTPKHTLHAALELSKNSWLLAIQFPDRDNPSLYPIRGGNAEGLMAKLDAARKRLAKVSGQTPKVTLCYEAGYDGFWLSRLLEQRGIECLVMEPASLQVNRRARRVKTDRIDVEKLLHTLIAWCRGERHVCSMVVIPSVEEEDLRRSHRERDRLVRERTAQINRIKGLLFGQGIRGINVKKYYKTLAPAELVTGDGRPLPKRLGREITREIQRLALVQEQLVEVERERDLAPTPCQATERKRHELLRLKGIGPTFAAVLSREVYYRHFANRRQVANYIGLAPSPYDSGDSRRSQGISKAGNSLVRYTMIQAAWLWIRHQPNSALTQWFRRRTEGESKRMRCVMIVALARKLAIALWRYVELGLIPQGATLSAR

SEQ ID NO: 171823 - protein, 440 aa, unidentified
MRIMYERCCGLDIHKASIAACALISEKGKPQEETRRFGTMTADLRELAGWLQQKGIRHVAMESTGVYWKPVWNILEPAGFELLLANAQEVKVVPGRKTDQKDSQWIADLHKHGLLRNSFVPPRAIRDLRDLTRTRAILTQEHTSICNRIQKVLEDANIKLGSVASDVFGVSGRAILRALMKEENDAEALADLSKGLLRKKIPQLRRALEGQVTAHHRSLLTGQWSRMEFLEREIVDLETQIAEGMKPTPEETALTLPNTAEDAPAPLSPREEAIQLWMEIPGVGWTAACSMVAELGVNMDQFPSAAHVASWAALCPGNNESAGKRLSGKTRKGNVWLRRTMCEVAWAASHTKDTYFAAQFHRIASRRGNKRALMAVAHSILVTAYHMLKHKRHYQELGADFFDAINRDKVRDRLVQRLAKLGFDVTLKSKDSIASDSQKN

SEQ ID NO: 171824 - protein, 355 aa, unidentified
MQGTLYVGVDAHKKRSHVAVMDRGGTVLKSVDIPSSRSGVAGALGRYKRPIKAVLEASYAWEPMHDWLEEFADEVVLAHPLKVRAIADARIKTDKLDARVLAHLLRADLIPPAYVPNRDTRRVKRVLRQRCFLIRVRTMVKNRIAALLAWNSVQRPDVSTLYGKVGRAFLSSVNLPEVDRSLLDEDLELFDAIQQRVAATEDLIAKLSKGDPIIEWLSSLPGIGDFFAVLLRYEIDEISRFRTPKKLASYVGIVPSVYQSANRCFHGRLTKQGNKHLRWAMIEAVTPAVRSSRYFRRYFERIKRSSGTGDARVATARKLLEMAWIVWTERRYYEEREPITTGTGLPSYRPGHRGP

SEQ ID NO: 171825 - protein, 410 aa, unidentified
MHLYCGIDWATEHHDVAVVDDGGRVVARCRVSNDAAGFAQLLTVLAEAGDTAADPIPVGIETDRGLWVAALHETGRVIYPINPLAASRYRSRYAVSGAKSDATDAVLLANIVRTDAAAHRPLPADTELAGAIRVLARAQQDAVWARQQIGNQIRDLLKDFYPAAIAAFDVLPSGGLTRPDARTILAAAPTPAQAAKLTPARLRRLLTKAGRRRDLDRDIERLRQVFTDTYLHQPPRIENAMGIQLTTLLRQFDAACAAADELAEAASAHFEQHPDAAIITSFPGLGNLTGARVLAEIGDDRTRFADARGLKAFAGSAPITRASGKKTVVLHRHIKNRRLAAVGSMWALTSLRASPGARRHFDARRTAGDWNRQAQRHLFNKFLGQLHHCLQTGQLYNEHRAFPPPLPLAA

SEQ ID NO: 171826 - protein, 367 aa, unidentified
MKNTIVHHEGAASLEAVGSKVKPRGGQIKIGLDMHARLYVAVAQYDHLLPKAARRLSPNEFVPWVEALLGQGHSVHVVYEACGFGFTLYRQLIATGAHCYIIAPCKLDEQCSRVKTDPRDATTLCQRLSRYLEGNTRELAVIRVPSQEEERARHVSRQRTQLVCHRQKLEAQGRSLLISHALPAPAHWWKEQTWRRLSKHLPAWITLRLGMARPALLSLQEQINALTSELEASAPSTLPRGLGKLTSVVLTREICDWHRFNNRRAISSYTGLCPGERSSGSKRVPGSVTKRGNPRVRAALVECAWRMVRFQPQYPPVQKRLAVLAKGSRALGAVRKKAIVAVARRLAVDLWRVHTGRRTAAELGLSI

SEQ ID NO: 171827 - protein, 414 aa, unidentified
MSSKRIALDRTLVVGVDVASEEHVALIRGPGGLEVGPFPFANDRSGFRLLASKVSEARAASGVEEVALALEPTGPYGEALAWWARERGWRVLGVLGAHTKRAKELWGNSPLKSDLKDARVICDLAIEGKWVTFSLREGAYAELKGLAVYRQQLVRKQTALKHQTRALMYVLFPEFLGVVGRGLFKKSGLMLMERFPTPRSYATTDEDQLALLLRGCSRGRLGKERAQQLLRAARESVGVTAGLKTRSWVLRRAVRRLRALEREILAVEARMERWLRRIPYAACLLSMPGVGVVTAASLLGECGDLRDYPGAGEILKFSGLNLVSWSSGKRRSRNRISKRGSGLVRHQLYLLAGRLVKQDALWRSDYDRLRGRGATRKEALIALSRKALRVLFAMARDGASYAAPVLETNLKKAA

SEQ ID NO: 171828 - protein, 403 aa, unidentified
MNAVGIDVSKGKSMVAILRPFGEIVYSPFEIKHTSHDINSLVDLIHSVNGESRVVMEHTGRYYEVLAHQLSEADIFVSTINPKLIKDFDNDSLRKVKSDKADAVKIARYALDKWLNLKQYSLMDELRNQLKTMNRQFGFYMKHKTAMKNNLIGILDQTYPGVNTYFDSPARSDGSQKWVDFASTYWHVDCVRKMSLNAFTDRYESWCKRKKYNFSKSKAEEIYGKAKELVPVLPKDEITKRIIRQAVDQLNSASSTVEELRTLMNDTASKLPEYPIVMAMNGVGPSLGPQLIAEIGDVTRFTHKGAITAFAGVDPGVNESGAFSQKSVPTSKRGSADLRKTLFLVMDVLIKTMPQDDPVYQFLDKKRSQGKPYYVYMTAGANKFLRIYYGRVKEYLASLPQSE

SEQ ID NO: 171829 - protein, 368 aa, unidentified
MTSMTRDRRPVTALPASIELVGPVTGGVDTHGQTHHAAVIDLVGRLVGDREFDTTPAGYRALSLWLRSHGVPLDRVGVEGSGAYGAGLARHLRTEGVTLVEVDRPDRSTRRSKGKSDPIDAYAAARAALSGTATGAPKTRDGRVEAIRTLRLAKRSAIKARTQAMNQLHAALLTGPAELREQLRAHTGQRLVGTCARLRQPVTGHDLAAMPDPIPAATKSTLRRLARRHQQLSDEISDIDADLLPLVAVAAPALLALNGVGVEVAAQLLVTAGDNPDRLRSEAAFAHLCGVAPLPTSSGRTDRHRLNRGGDRAANSALHTITLCRMRWDPRTRAYVTRRTAQGLSKKEIIRCLMRYIARDIHTALLAP

SEQ ID NO: 171830 - protein, 503 aa, unidentified
MSLLIADQSLLAPKPPPVRLNLRFLRNYIVAKNESYFSHGSGLVWVHTRGTEGVTQRETVRPNPRKVSADEEASVLKGGCQSGRPCRAARSIHQVDSLISDAPRARDIFPASYEREAVFEGATQYKGRPFWSRVWVLAQTIQKGTPFMTSSVKYIGMDVHKESISIAVMNSVGKVVMESVIETKASMILQFIDGLRGDMQVTFEEGTSAAWLYDLLKPHVTKLVVCDPRKNKSMREGNQNDKIDARRLAELLRLDHLTPVYHGEHGLRTLKELVRSYLTITKDLGRVMSRVKAIYRSWAIPCTGKQVYAPRHRAEWLAKINEPGVRRRAEFYYQQLDALRVVRQQVRRDLLAESKKHKAWKHLCEIPSIGPIRAAVLLGILQTPHRFRTKRPLWNYGGLAIEMHSSADHRSVDGQLQRSRKNVLVRGLNRNCNHDLKNLFKGAAAVASSKPGPFQEFYTALLAKGMRPEMARLTLARKIATIVLLVWKKGVCFDAQYLKPQTA

SEQ ID NO: 171831 - protein, 343 aa, unidentified
MQTITTIGLDIAKSVFQVHGIDAAGEVVIRRQLKRRSVLAFFQKLPPCLVGIEACASSHHWSRELQALGHTVRLMPPAYVKPYVKRQKNDMADAEAICEAVTRANMRFVPTKTPEQQSCLMLHRTRHLFIRQQTAVINSIRAHLAELGIVAPVGRKGVTELLHVVADPSDKRVPEIARVCLAALGTQLLSLKKQIVEFDRMILAWHRSNQTSKRLHYIPGVGPMLATALVASVADPRTFRSGRNFSAWIGLVPRQHSSGGKDRLGSISKQGDRYLRSLFVAGALAVIRYAKIHGTGHRPWLTALLGRRPTKVAAIALANKIARMAWAMMAKGERYKQPVALAA

SEQ ID NO: 171832 - protein, 501 aa, unidentified
MMNSPYRAARGVPSVRLLGMPSATIRFGDGQRSSARLQIISVTGGLLRVLKPLSPGAVVELMFSSHIGPVLAMAELLSPCSAAPIGLQPFRFIAMDKAELRKLRAAIASSQKMEAESPSASPWLSCLNAKSSEERVVYKKLNSTGTLIQRTTTEAPQGHMYYIGLDVHKKTISYCVKDASGQVHQEGQVGATRWELDGWMKTLPQPWTVAMEATIFTGWIYDHLLPHAQQVKVAHPLMLRAIAAAKKKNDRIDAGKIADCLRCDFLPECHMASTQIRDRRRTLRYRHLLVRQMVQMKNRISGLLMETGVSHNKRRLHKVGYFRELLASNEEVNESIRPLLRVSRDTIVRLQKTEYALVSSLQRDPLLAERIKRLRTVPGVGPITALTWALEMGEVSRFPSIREAISYCGLCGDEKSSADKVIRTPLSKQRNRHIQRVLVEAAKLAPRQDHDLALVYEREKQKGNANRATLAVARKMVAYLLAVDRGQRDFVAFADPQSAAA

SEQ ID NO: 171833 - protein, 353 aa, unidentified
MTVYVAVDFHAREQTVSYCDLADGEIHRRKLRHQHDDVRAFYQQFTGAVIVAFEASGYSAWFEQMLAELGHPVWLGNPAEIRRKAPRRQKNDRRDADLMLDLLLKGDFPKVHGFSEESRTVLRQLRYRHKLVKVRTIAKNSLHAIGINAGLPLKRRLLTEQGIAQLQALSLSPVLTQQRDEWLQLIALMNQRIATVEAQLQQRAKDDAGIALLQTHPGIGLLTSLALRYTLLPTSRFSTTRQVTAYVGLDCMEDQSAERRRMGSISKAGSKLLRFLLNEAGHTAARHDPELKKFYRRLLHRRDKPKAKVAVARKLLVRSFIMLRDQIDYAEFVRRGVAARVAREAHSLPMTDL

SEQ ID NO: 171834 - protein, 354 aa, unidentified
MNAKYIGFDIDSKKTVACVVQQGQKDRYRTLVTDLQPMQQYLQQQRQDASELHLTFEISGEAGLRYDALRTYVDTLTVSNPHKMTWVYRTSKKNDRIDARKQAVLLSIGEVPPVHIPQRQIRQWRATIQQRRGIVNRIVSVKNRIRALLKANGLSRPPYPGSLWKVANIQWMRQEARTWSEACAERLWRVHLTDLLEEFKLLAEQLKGVTCYLDRYLADHGGGKLLMSIPGVGPRTAEAILAYTDEVQRFARSKQYAAYFGLTPKLDESGQMRRLGHISKEGPAVVRWLLVESVWRAIQKSPAIKAFYEQIVGGQNQRKKVAVVATARKLLTIMRAMLKTGELFNEELVSGKRE

SEQ ID NO: 171835 - protein, 356 aa, unidentified
MSRDIKYIGMDVHKEATVIAVLNDGGKLVMESIVATKASSILQFIHGLRGELHVTWEEGTWAAWLYDLLKPQVQQVLVCDPRRNALLKEGNKNDKIDARKLADLLRSGMLRPVYHGEHGLRTLRELGRSYQTISQDLNRGMNRIKALYRGWSIPGAGTQVYAPRYREEWRQKIEHAGVRRRAELLYQQLDGLQTLRRTLRPELLAESRKHKASKLLRQIPCIGPIRAARLIALMQTPHRFRSKRQLWTYSGLGIETRDSAQYRYGHGQLQRTKKPQQIRGLNQNHNHEMKEIFKGAATRASCGVGPLRDFYVAWLEKGMKPEMARLTLARKIAAMALTLWKKEERFDAEQLKLQAA

SEQ ID NO: 171836 - protein, 343 aa, unidentified
MQVVRIGLDLAKYVFEVHGVDGQGNVVIRKTLRRGSVSTFFANLPPCLIGMEASNGAHYWARVLTSLGHKVRLISPQFVAPYVKSNKNDRNDAEAICEAVGRPTMRFVPPKSPEQLAIQGLHRIRQRLVRSRTKLVNQIRGILAEHGIVIARDIWRLRRALAEITGHATDDLNPLVRVLVVEVQAEFIELDRRIASYDRQIRELYRTSELCQRLGAIEGIGPVTATALVAAVGDRSCFKNGRQFAAWLGLVPKQRSSGGRNRLFGISKRGDRYLRTLMIHGARAVLGKTSGKQDPRSRWLASLRQRRHPNVAAVALANKNARIVWAMLAGNVSYEPARSVQAA

SEQ ID NO: 171837 - protein, 339 aa, unidentified
MPKFTVGLDIAKSVFQVHVIDRSGQAVIQRKLRRNGVLKFFAGLEPSVVGIEACHSSHYWGRELIKLGHTVRLLPTQYVKPFVVGGKNDANDAAAICMAVSRRDIHTVPVKSAEQQSLQSLHRMREKAIQERTAKSNQIRSMFSEEGHIFPAGLPSLRKGIITLMDDGEAGLTSILKRLGQMYLEQMAVLKAWLNELDAMIDDNFKNHETCQRLATIPGIGPVIATAMVGLVGDPAQFKNGRRFAAWLGLTPRQHSSGGKTRLSGITKRGDGYMRKLLVQGARAVIYNVHRKTDARAEWIKALLARRPANIVAIALANKIARIAWAVFMRGEKFISATS

SEQ ID NO: 171838 - protein, 314 aa, unidentified
MDVSKSSLDICIDESKPVKKYSNDVRGQKELIDELNSLNDCHVVMEATGGYEQKVFESLCEAGIKSSIVNPRCVRYFAKSRNILAKTDGIDTRVIKKFGEINSPRVTSQVSKNEQILKGLCRRREQLIELIKREKQNLELAEGYPEEDIKKSLESLKNRLKKIEEEVEETINCVEKIAEKSELLKSFKGVGDVAALVLICDLPELGKLTPKEISALVGLAPFNRDSGNLNGKRIIYGGRSRARCSLYMCALSAKRHNPQIKKMYDRLIANGKTKKTALIACAHKIIVVLNAMLRTQTQWDPEHLVKTTGYATIL

SEQ ID NO: 171839 - protein, 343 aa, unidentified
MQTIRTIGLDIAKSVFQVHGIDAEGNVVLRRQLKRRYVLAFFEKLPACLVGIEACASAHHWSRELQVLGHTVRLMPPAYVKPYVKRHKNDVTDAEAICEAVTRPNMRFVATKTPEQQSCLTLHRTRHLFIRQQTAVINAIRAHLAEFGIVAPVGRHGVEQLLGIAADINDKRLPEVARACVAALGAQLRALKEQILQFDRMIMAWHRSSEASRRLDDIPGVGPALATALVASIADPKAFRSGRDFSAWIGLVPKQNSSGGKDRLGNISKRGDRYLRSLFTTGALAVIRYAKIHGTTHRPWLTALLTRRPTKVAAIALANKIARMAWAMMAKSERYKEPAALAA

SEQ ID NO: 171840 - protein, 343 aa, unidentified
MQVVTTIGLDIAKSVFQVHGVDAAGQVLIRRQLKRRAVLAFFQKLPVCLVGIEACASSHYWSRELQALGHSVRLMPPAYVKPYVKRQKNDATDAEAICEAVTRANMRFVPTKTPEQQSCLMLHRTRHLFIRQQTAVINAIRAHLAEFGIVAPVGRKGVTELLHVVADPSDGRVPEVARACLAALGTQLLGLKEQIVEFDRLIMAWYRSNETSKRLHYIPGVGPLLATALAASVADPQTFRSGRNFSAWIGLVPKQHSSGGKDRLGSISKQGDRYLRSLFVAGALSVIRYAKIHGTKHRPWLTALLARRPTKVAAIALANKLARMAWAMMARGERYRNPVALAA

SEQ ID NO: 171841 - protein, 402 aa, unidentified
MPSVPLCVLCSSAVLYLPKMSERPQNRGRRGTSIAFGAGSSSQSRRPARSRLAPKLEQLPEALRRPRIQDRARAQAFRRAEMPGFWGIDVAQAELVIAEAGTTTSRTQPNTVAGCHALAQQFAQVATAPVQLIVLEATGGYERNVVAALGAVGLPVVVINPRQVRDFAKATGRLAKTDAIDAHVLADFGARVQPERRPLPTTEQEELRAVLARADQVQQMLVAEKARLLQALGRRDRQPLRKKIKRHIAFLERELHELDADLDDQLRQSPLWREQDDLLQSVPGIGSKTARALLAFLPELGTVSAAEIAKLAGLAPLNRDSGMWRGKRRIAGGRARIRAALYMATLAAVRCNPMIRTVYARLVQSGKPKMVALVACMRKLLVVMNAMLKTKTRWRAIPVPTA

SEQ ID NO: 171842 - protein, 393 aa, unidentified
MICVGIDVAKDKHDCFILSSEGEVLADVFTIPNNRDGFETLLQRIRSCAFPADKIKVGLEATGHYSYNILGFLLDCGLATYVINPLHTNLYRKSLSLRKTKTDRIDARTIAAMLMSDVDLKSYTDTAYHNEELKSLTRYRFDKVRQRAKLKQSVSRLVNILFPELETIVPTLHMASVYALLSEFPGAQQIADTHLTHLKTLLDDASKGRYDREKAVEIREAARRSIGSRMPAKSLELRHTIQLIRELDKEIAEVEDSIEEIMNSIQSPITTIPGMGLRMGAMILAEVGDFANFDSPDKILAYAGLSPSTYESGKLSLAGSYSHMEKRGSRYLRYAIFNATKYVCHWDSTFAAYLAKKRAEGKHYNVAISHAAKKLVRVIYSLQKSGQAYQTAA

SEQ ID NO: 171843 - protein, 351 aa, unidentified
MMIIGVDYHPSSQTIAFLDQETGECGERQLNHSDGEAEKFYRELKQRGVSVRVGMEATGHSRWFERLLAELGFELWIGDAAEIKTKRVRKQKTDREDARLMLKLLLENRFPRIWVPSPENRDLRQLLWHRHRLVQMRTRIMNQLQAVAMNEGYRWKKKLFSEKGRGLLEKLPLAPWASRRRKELLELLDQLDPKIAELTAAVEQEAKKRPEVLLLMTHPGVGPLTGLVYVLVIGTPKRFPCGKQIGSYTGLIPCEDSSAGRQRLGHISKQGNTLLRFLLVEAAQAAARCNPDWRRKYLHLMIRREKRIAKVAMARKLAVRLYWMWRNHWQYSQLVEFGSNAGKLVLVHGVK

SEQ ID NO: 171844 - protein, 426 aa, unidentified
MAYRIAGIDVHKKMLAVVVADVEVEGEYEFARQRFGSHPEELRRLSAWLSQQGVEEVVMASTAQYWQPVWGALERSGKPVCHRREGAGGMSGGLPLAQAQSNRGRKGGKKDFPDAERLVKRLVAQELILSFVPEAEQRLWRAVTRRKYQLTRNRVQLPNRLESLLEEAHSKLSSLVSDLLGVSAPALAEGETNPLALAALADQRLRASEAQLTDALGACTELHPVYRRLLPMALPELPFLEQPRDQREQEIAALLRQHEDAVQRLAEVPGLGVDSAQQIIAEVGATAATFASAQTLASWVGACPGDEESAEVSKSHRSPKGSRHMRRLLNQAANAAVRTKGSIFQIVYRRLVPRLGHHHTIGAIAHRLGRLIWLILHRGVRYEERGPAVSQRSLRQRTRKMIRELQKLGYRVERLSVVANAPAPAQ

SEQ ID NO: 171845 - protein, 311 aa, unidentified
MTIIGFDVSKDELVGVKINKRGEVKEQYSIPNTRQAITLFLSNLKNVTIGCEATAEYHNLLCLCCIDMNIPCLVLNPIVTKQFTRATVRKRKTDLSDAEVIAKCILQGEGEPVTQGSFCVSKRLLRTSSELTRLSVSVSHMRKTFKEHWGDTPGIQSVLNELEGHIAVAVKAVREQGVRAIDEESKGLLCSIPGIGETLAATILAEIGDARRFPNASTLVAYAGLDPRVRQSGISLHRNAKLTKRGSPYLRRALYIAASIAQRYDPILKAYYARKRSEGKRYKEATVANARHMVYRVHAVLKRGTPYVMHR

SEQ ID NO: 171846 - protein, 341 aa, unidentified
MYYIGLDVHKKTISYCVKDASGLVHQEGKIGATRRELDSWIKALPQPRIVAMEATIFTGWIYDHLLPHAAQVKVAHPLMLRAIAAAKKKNDRIDAGKIADCLRCDFLPECHMAPIEIRDRRRTLRYRQLLVRQMVQMKNRISGLLMETGVEYNKRRLHKVGYFGELLSTNEEVKESIRPLLKLSRETIVRLQKTEYALVSSLQRDPLLAERIRRLRTVPGVGPITALTWALEMGDVSRFRSVKQAISYCGLCGDEKSSADKVMRTPLSKQRNKHIQRVLVEAAKLAPREDHKLALVYEAEKQKGNANRATLAVARKMVSYLLAVDRGARSFVPAEEHSTAA

SEQ ID NO: 171847 - protein, 366 aa, unidentified
MKKQAKQAIRLKKLCKGVTRILNLGLDEHYWQVTVAMQEDGGRIKVVGKMSHEAFLGWVKKKVAEGWEIRSCYEAGACGYWLHRELEKLGVKNLVVTPRAMGKTGQQQKTDKRDAVELCDTLDRYLRGQHRALSVVKVPTPEEEAKRALIRHHRQIMKDRCRGEARGKGLLCAQGIRVRGCWWKDQSWQELSTDPRLKEWLKQQLEHWRSQILSAQEKQLSLREEITALAPARLPKGVGAYSAAVLHYELRGFERFKNRRQISSITGLCPGVHQSNGHGKEGSINRCGIGAVRWVLVEMVWRLMIWQPQYPPVRRLAAGLVKSRRAKKRLVVEAARRLAIDLWRLSTGQTTPEKLGLIMQDHSQSH

SEQ ID NO: 171848 - protein, 429 aa, unidentified
MNNTQNKKIEQVKETTMIVGIDVGSEKHYFRAFNWRGIELTRKPVAFSNSMDGFNSFYNTIVELMQKSELEEALVGIEPTGHYWFDLGQFMGEKNIKFVMVNPHHVHKTKELDDNSPSKNDRKDPRVIAGLVRDGRYFYSYMPTGLYAELRNASNRRFVLVEEQTRAKNRLQKWIAVYFPEYKGIYTHIDAKGGMLVLKKAPTPEEIVRLGVEGIIKIWKDAKLRGNGHKKAMLILAAAMRSIGLKAGLTEARMEIQDLIEDYELQTKRLERVNDLIKGLCQQVRYADKLLEIKGIGITTVAGFIAEVGDITRFDSTKELQKLAGLELVADSSGKHNGKTKISKRGRKRLRYLLFEAAISVVGKNEEFKEIHRYYTTREKNPLKKMQSLIVVACKLIRVFHAILTKGIRYDASKMLKDIRHPGEQLKAA

SEQ ID NO: 171849 - protein, 330 aa, unidentified
MKSWNFTLRVDVSKITLDISCAELNEHIKIVNGSEGFTVFLKWCKSLKIDLDKSFLVMEYTGGYEYKLIQFCDSRNIKYARIPGLAIKNSLGITRGKNDKIDSFRIAQYGEEKHKSLIPQKPVSPVIIKLKELLSFRKRIVRENAGYQSSIKEREHMYGENRKDIIVKTLKAKLQSNQKYIEVIEVELMNIVHQDEKINLNYSLITSIKGIGKINGLMTIAYTENFTSFSNPRSYAVYVGVVPFDHTSGTSIRGRKRVSHIANKELKQELNQAARSALEWDKEMKNYGDRMMKRKCYKIVLNNIKFKLILRMFAVVRNGEMYVDYYKNVA

SEQ ID NO: 171850 - protein, 324 aa, unidentified
MAIVCVGIDLAKNVFALHGVDEAGKPALVRPTVPRAKLLEAIAALPPCLVAMEACSGAHHWAREFQALGHTVKLIAPKFVIPYRLSGKRGKNDAADAAAICEAAQRPSMRFVPAKSLEQQGQLCLHRVRQGFIEQRTALINRIRGLLSEFGIVLPLKAATVRREALLHLEDLPGWANLAVGDCLSEVGRLDERVHEYDRHLAHLARENEAAKRLMRLSGVGETTATALTAAIGNGHDFQCGRQFAAWLGLTPGQYSSGGKTRLGRITKAGDAYLRSLLVLGARAVLAAAKNKTDPISRWVRNVEERRGYWKAVVAMAAKNARLY

SEQ ID NO: 171851 - protein, 350 aa, unidentified
MQEFIVKDNRIFVGLEDSKKTWKLCVRSEGMIVHQTSMPTKYENLRNYLTHRYPGCRVKVIYEAGFQGFWLHDLLKEDGFECIVTPPNKVVQEKDNRVKTDKIDASRLAKNLEHGDYRSCHVPDKELREDRQISRTLDQIQKDIKRTKSRLRMMLYYHGLHTDLPDETWKPSDYERLREISLGDSLKIAFDATLDLLEKLGALRNRLMKAMQRLCKKERYEKSAALKASSPGIGWLSAIRFTLEWGDMSRFANGKKMGSFSGLTSGEYSTGDTVRRGRITKQSSPRVRAWLIECAWRAIKLDPVLLHKYRQVWKHSGSKKKAIVAVARKLAVRMRIVEVRQTPYCIGVSE

SEQ ID NO: 171852 - protein, 350 aa, unidentified
MRIIGCDYHPGFQQIAFMDTETGELQERRLQHPEEAEKFYRELAAQGVKVRVGMEASGHARWFERLLAELNIELWIGDAAEIRTRRVRKQKTDRQDAQLILRLMLKDDFPQIWVPDWENRDLRQLLWHRHRMVQARTRVMNQLQAVALNEGLRCKKRLWREAGREQLEAFPLAPWASRRRRDLLELLDRLSPTIAELTQTIEQEAEKCPAARRLRTHPGVGSLTALAFVLIIGRAERFQCGKQIASYLGLVPSEDSSGDRRRLGHISKPGNTLLRFLLVEAAQVTVRSLPEWRSKYFHLAMRRGRKIAKVAMARKLAIQLYWMMRKEWDYEQVRRFGPHAGQPEHRRGVQ

SEQ ID NO: 171853 - protein, 425 aa, unidentified
MNTQKTSREDELAAVIGLDWAKKEHVCCLLHGEAPARYERVKNEPGQLRQWALRLQERFGGKAVGICMEDSCARVVETLEEYSHIRLYLVNPATAAKYRKMFTPSGDKSDERDGASLADLLLKHREKAREHRPPDPKVRELDLLNRERRRAVDERTRHAARMHELLQRAYPVAAAMLENDLTSSMALALLKRWPSQRQLLKARQSTVLQFLHQHNCRSSKLNAERLETLARARELSHPACPSQALEWAIAQEVAMIDRLNESIATFDKAISEAMKDFSSAQLFRSFPGSGKCMAPRLLVEFHIREPHGAPQLSTATGVAPIRVQSGNMHRTFMRRYCSKFRRQSLIEFAGSSIQFSPWAKAYYQYQTKVMKKRSQCVKRSLALKWIRILYACWKNNTCYDEQLYLRSLAKSNSPILQFLNSPQNP

SEQ ID NO: 171854 - protein, 418 aa, unidentified
MTDTTRRQWFAGVDWASDKHDVVLTGDSDEIVGHRIFEHSGAGLAQMADWLLSETKAAAQDIHVAIETPHGAVVETLLERGFKVYSINPKQLDRFRDRFTVAGAKDDRRDGHVLASSLRTDARAFRLLTPADPEIVELREFSRIVEELGHDLRRHMNRLHDQLRRYFPAFLRLGGDADALWKLELLALAPTPAMARSLPRAKVARLVKTHRVRCHDADGLLAVLRAPAPAVSEATVAAAKVHVLVLLKQIRLAAEQLGEAKATLGRLVDALAEPGDSAPGQTVQRDAAILHSSPGMGRIILATLLAEAPQAVRERDYHALRTHGGIAPVTRQSGKSRYVVRRLACNKRLRNALYHWARVAIQKDARYRAKYEALHARGKSWGRALRTIADRLLYVACAMLEAGTLYDANHGAEATKSP

SEQ ID NO: 171855 - protein, 474 aa, unidentified
MADNTRARTSQMQRLTRKQRRELGRRIWSEHPGLEVVHRDAAGIDIGSEQHYVAVGPDRDAEPVRTFGCFTEDLHRLARWLKECGIRTVVMQSTGVYWIPVYDVLEQYGFDVWLVNAQDTRNLPGRKSDVQESQWLLKLHTYGLLRKSFRPEPNIRALRTCWRERAEYVQQAGTCIQRMQKALTEMNVQLANVISDLSGVTGMAILRAIVGGERNPQRLAELKNERIQASREEIARSLEGDWREELLFVVEQSLQMYDTYHQKIVACDGRIEAQLKSMDAKVDVVAQPIPEPRRVKWPRKHQPQYDLRGELYRVTGVDLTQTDGLDVGTVQTVISEVGVDMSPWKTEHHFSSWLGLSPDNRISGGKVLKRGTRKVVNRAATALRLAAWSLLRSQSALGANFRRLRARLGAPKAITAMAHKLARLVYRMVKYGKEYVDKGMAYYEAKYRQHQIKWLTKQAAALNLQLVPATAVVR

SEQ ID NO: 171856 - protein, 412 aa, unidentified
MKDLLEISCGLDVHKDKIVACILTGPLGKPTNSEIREFTTLIPDMIALRDWITSQNCHHVAMESTGIYWMPIYEILEEAFSGNITLLVVNARHMKNVPGKKTDMRDSEWISTLLRAGLLNGSFIPEKTIREFRDLNRYRKSVIRDITSQKNRVEKFLQSSGFRLSSFISDIFGASGRNIIIHLIEHGQIDRTALDSCLKTKTRNRIDEILMSVNGTLSEHQKAFLKILMGHYDSLKEHLAEIEKNLEADMTPFALQVEQLSSIYGISTTASCAIIAEIGIDMKPFKTAEHICSWAGLCPGNNESAGKRKSASVTKGNPYIKSMLCEIAWVIAGKRNTYLSAWYWRIKQKKGAKKAIVALARKLLVIIYTMLKQGTLFDESCFEARRKNCEQKQLSRYIRELEKHGYHVEVQA

SEQ ID NO: 171857 - protein, 344 aa, unidentified
MNYYAALDVSLRSVHLCVIDDGGEIQAEGQVDSEAAAIDLFLRKLNLPITSIGLEAGTLTQYLTYGLRDAGYHVVCMEARQVSVALSAMRNKTDKNDARGIAQLLRTGWYSPVYIKSIESHQIRALLSSRKAVLTKCVDLENEIRGLFKVFGIKLPSKLGHGSFDGAVRETIETDLALCHALLPLLDARLVLYHTFRELDNRTRHMAHEDPVCQRLMTAPGVGFVTALTFKAAVDDPTRFKRSRTVAAHFGLTPRRFQSGEMDNPGHISRAGDPNVRCTLYVAANAMMTRSSRWSPLKVWGMRLAKQRGHKRAVVAVARKLAVILHRMWLDGTTYRWSAEGASP

SEQ ID NO: 171858 - protein, 321 aa, unidentified
MTYVGIDVSKATFVVAYSSAKSSETKTFKNTTKGIREFIRTISPEENHCVLEATGNYRMLLVYLLSKAGFTVSMENPLKIKNFARVMLSVVKTDKLDARLIALYGERMQPAPFKLRSESLLLLKQKRTVLRQLKKQLTANRNLEGSLKILPFIDSKCKKVLEKTIKFLEKQIEEMEEELTSLAEIEYKKQMDLLTSIKGIGATLAAALIIATGGFTYFDNAKQLTRYLGLSPTYQQSGTSVNVKGHINRNGDAYLRSQLYIGAMASLRCNTECKACFDRLRSNGKPGKLAIIAVANKLIRQAFAVVTHEKKYIDGYKSVKP

SEQ ID NO: 171859 - protein, 391 aa, unidentified
MSMYFVGIDISKYKHDCCIISAVDQQIVSKFTITNDKDGFEQLLISLNSLSNPEDIKIGFESTAHYALNLELFLENANHSFMEVNPVLIKEYKKSTTLRRTKTDSVDCESIARWLMTVEYKPHSKGFYHAYSLKSLTRLRDRLIRQRSFYLVKITNVLDHTFPEFKPFFNERLSKTAIYLLENYGSAEKMAHMNSASYDKLRCISRGKFSIQQFLHLKELAANTVGVNNSIFDIELNSLLTLYNSLCKEIKNLEAEITRLIEEVHPHYMSVPGIGPLSAAVIYSEYGDISNFTNPGQMLAFAGIEPGINESGTESHGGKMVKRGSSKLRYTLINCCLPLIRFDMTFATYYAKKRGEGKPHRVAITHVAKKLIRVIYALERQDIDFNAQKLR

SEQ ID NO: 171860 - protein, 423 aa, unidentified
MKPVEYAALIGLDWADQKHDVCLLVPGQSAPERLTLPNTPEAIAEWLQKLRQRFGGRPVALALEKTRSGLIHALMQCEFVVLYPLNAEAVARYRQTFATSRAKDDPTDAELLLDLLAKHRDEFRPWQPDTATTRELTALVEARRQAVNHRARLACRLISTLKSYYRQALELIGEDVYSPLALDFLTKWPSLPALQRARIETVRRFYYAHNSRRADVVEERLKLIAAATPLTTDPAIVEPARLTVQMLVEQLRVLAVAIHRYETRQAQLFAAHEDAPIFQSFPGAGAIFAPRLLAAFGSDRTRYASALAIQQYSGIAPVTERSGNRCWVHWRWGCPKFVRQSFHEYANESIRHSLWARAFYASQQQAGKSHQAIIRALAFKWQRVMWRCWQDRQPYNEVYYLMQLQQRGSKLLKLIAEPAEKVA

SEQ ID NO: 171861 - protein, 340 aa, unidentified
MIATTNFFIGIDVSKPHFDVALMAVVNHVKQEIGTARFDNTAPGIKLFEKWLKSQKTTFNEDSLIVMENTGIYHRLIWTFCSNINLPIHIGNAAHIKWSFGIARGKNDKIDSIRLCNYAFKEADDLKATAALDPELMLLKDLISARTKLLKQRSGISVSVKELGNVNGKEHQKLIEKALKNAIEGIAKSIKNLEDQIKKIITGNQDFKQNYKLLLSIPGIGHVTAVYLIGCTGNFAGRPSGKELACYAGVVPFEHSSGISIKGKTRVHRMANKELKRLLHMCALSLIQHNQEFKIYYNRKKNEGKHSMSIINAVRNKIALRVAAVIKNQTSYKNNYNIAA

SEQ ID NO: 171862 - protein, 394 aa, unidentified
MHKDAHCAVVIDCWMNKLGEVNFENRPSRFPAFVEDVRKICGIKEIVFGLEDTRGFGRNLAAYLVGRKFEVKHVNPAYTSTVRLANPIIYKDDSYDAYCVARVLRDMVDTLQDAKHEDIFWTIRQMVKRRDLLVKSNVMNKNQLHSQLAYSYPSYRKFFAMIDSKSALCFWENYPSPEYIWKTTPEEIYQTIKPVHQALKIQRIHEIISMIERDGDTRKDYQPERDFIVRNIVKDIRHNKELIAEIDDELRKLIPLTGYKLHTMPGIDLVTEAQIISEIGDINRFPDSDKLARFMGLAPVQFSSAGKGKDQRCRNGNRALNAIFHFLAIQMVAVSASGKPRHPVFREYFEQKVKEGKNKPQALVCVARRLVRIIYGMMKTKTEYRPYEKVDDKN

SEQ ID NO: 171863 - protein, 342 aa, unidentified
MPIFAGLDVSQARTTVCIVDERGLVTWRGSCVTSPAAIAQTLTAQASLLERVGLESGPLAPWLVHELRALALPVVCLDARHARAALSMQINKSDANDADGLAQIVRTGWYREVEVKSIESHLVRATLGVRKQLVGMRTEMINQIRGLMKIFGLILPKGSGARFEAGVRARFAEKAELGVVVEPLLAAWRALDDQVAALEQQLVRRARRHEVCHRLMTVPGVGPLTALAFVTTVDDPTRFRRSASVGAYLGLTPRRYQSGERDVSGRISRCGDRLTRSYLFEAANVLLTRVERWSSLKAWAIKLAKRSGAKKAKVALARKLAALLHRLWQDGTTFRWTAEATA

SEQ ID NO: 171864 - protein, 334 aa, unidentified
MYVGLDVHKRVCYGTLTDQDGNVLKRERFSSSPEGLRAFMEGVDEAKIAMEAGYCWQPLYDALKEKGYDVRLAHPKRVKAIAEAKVKTDKVDSETLAHLLRANLLPESYVPPMDIRELREMVRRRSFLVGMRTKLKNRIHAELAKRGIDLETPLFTRRGRELLRSLSLEAVDQLLPVMDALDVQIICISGSLRRMSGEDERARLLTTIPGVGYYVAMLIISEIGDVNRFPSAEKLCGYSGLVPRVRNSGDSVRHGGITRDGSRWLRWALTQAVLVHVRWAEESELSGFYRRLAARKTKQEAVIATARKMLKVVFWMLRDGEPYHSGGLEPALGG

SEQ ID NO: 171865 - protein, 426 aa, unidentified
MLNSQINKIQAITSDTLIVGVDIAKNIQWAQFINFRGIEVSKHICFENNYSGFNSIMEKIEEIKSKNNFLSVIVGMEPTGHYWKTFATFLHNNGIKVVQVNPYHTKKAKELDDNSQTKSDKKDALVIAKLIKDGRYSAIYFPEGEYANLRNLSNTRLEVSRLLNICKNRIHACVDEYFPEFETVFKSFIKGKVALHILKRIPFPTDILELTLEDIISVIREAAKKSVGKKKAEELIRAAKVSIGVKVGLEGARIRLNNLLEEYELYHNQLEKIEKEMAQELEKTGYKDILTSIPGIGIISAASFIGEIGDPKRFSNPQQIIRLAGYNLVEDSSGKHKSKTMISKRGRKILRTILYKISLIVVSKNQEIKLLYKYLITRKENPLKKKQALIVISGKMVKIMYSLIKKEEVYDKEKVLGIYRKQQIVA

SEQ ID NO: 171866 - protein, 340 aa, unidentified
MRIVGVTGGVDTHADTHVAAAVDHNGGLLGIESFPADQSGFEELLGWLVGFGPVARIGVEGTGSWGVGLSRFLHDQEVMVVEVDRPNRQQRRKQGKSDPTDAVSAARAALSGTATVTPKSRNGRVEEMRVLLVARRSARQQRIQSLNQLRHLVFCAPEEIRTRFMDRPKTGLVSEAANMRPHKGSDPIIYQTNLVIRNLARRVKSLHAEMRVIDETLRSLIEETAPGLVALHGVGTDTAASLLVTAGDNPDRIHNERSWAHLCGVTPIPASSGKTTRHRLNRGGDRQANAALYRIVLTRMSSHDETRRYVKRRRQEGLNTAEIMRCLKRYIARQTFKHLT

SEQ ID NO: 171867 - protein, 438 aa, unidentified
MRKKKSKASKSVQLQGLPLIHPNAAGIDVGAKEHVAAVPFERDPQPVRTFPAFTPDLHELAAWLKRCGIETVALESTGIYWISLYEVLEQQGFEVRVVNARHVKNVPGRTKTDVLDCQWIQKLHSFGLLKGSFRPDQQIRKLRTYMRLRDNLVVERTQAVHHMQKALFEMNVQLSNVLSDITGESGLRIIEAILAGERDPEQIAALCGTRIKASRQTVAKSLHGNWDEALLFCLKTALESYRFSENKIQDCDQCIERQLATFENRAPLPNARQTLRTQLHQVCGVDLTKIPGIKEQAAQIIISEVGLDMAPWNTEKQFSSFLGLCPNNVITGGKILHRATRKVYNRAADTLRLCAQSLTHSKSALGAKYRRLRARLGAPKAIVAMAHHLARLVYRMLRYGETYVEKGMEHYEQKFRLQRIKWLKKEARSLNLQLVAAQ

SEQ ID NO: 171868 - protein, 409 aa, unidentified
MSTNACSNVFAGLDWAVHTHAVCVIDTTGAVLERFEIAHDREGLAQLMRRLARFGASVRIAIERPSGLIVDALVEAGHHVFPIHPNAVKASRPRYRSHGAKSDASDAYLLADLLRTDGHRWRELSPQSDSIRALRAQVRSRDDLVATRVALGNQLRSTLETFWPGAACIFCDITSLIGLAFLKRYPSAVSAARLSESALGRFCRSQHYSGRRSPAELLVRLNSAATGLAGPLTNQAAGQLVRSMVAVLQPLVEQIAELTRRIERFVESLPDGQIIMSFPRAGHVCAAQILAELGDVRERFPTLDQLVAEAGAVPVTYQSGKTRSVAFRWACNHRLRQAITCLADNSRHANHWARGIYAAARARGCDHPHAIRILARAWLRVIWRAWTDRTPYDPERHLGALKLASREAG

SEQ ID NO: 171869 - protein, 347 aa, unidentified
MGKKQNLVSAIKVIGVDLAKSVVSVHAVDAQGKTVVRKRMSPANFRKWMASVPTCLVGMEACGGAHHMAREVMQHGHDVRLMAPQFVKPYVKSHKSDALDAEAICEAVQRPTMRFVAVKTRDQQDMQALHRVRDLAVSRRTALGNQIRGLLLEHGIAVPQRIYNLRRELALLVDEAELGREFRWLLRELHGELVRLDEQVAAYDERLKAQLAQDETAQRLATIPGIGVLGATMLPAAIGDAAIFRNGRQCSAWLGLVPHQHSTGGKTRMLGITKRGNEYMRRLLVHGARAVLAAAERFHKMDALSCWARAVSQRRGKNRAVVALANKLARMAWALMAGGGRYEPQTA

SEQ ID NO: 171870 - protein, 335 aa, unidentified
MAKNVIQVHGVDERGKTVLKRQLKRDQVASFFANMPACLVGMEACGSAHHWARKLQSLGHEVKLMAPQFVKPYVKTNKNDVADAEAICEAVARPNMRFVPIKTAEQQSVLSLHRARQAFVKARTAQGNQIRGLLNEYGIVIPQGIGHVTRRLAEIVEDGENELPGRLRRLLQRLADNLKEIDRQVDELEREIKTWHRESEASRKLEKIPGIGALTASALTASIGDASCFTSGRQMAAWLGLVPRQRSTGGKATLLGISKRGDTYLRMLLIHGARAVIRVCERKPDPDRWLKGLMGRRNKNVAAVALANKNARIAWALLRYDKEYASDYAPAFAAE

SEQ ID NO: 171871 - protein, 365 aa, unidentified
MSDGKGSVARNAAGVMSARLAGAIIAGFDVHLRQITFDCLDSETGEVTRGRIASEPAAVEDWVGQFCGREVHVAMEACTGWLFVARAVERAGGVAHLAETVETRALRGRKRRAKTDRQDALWLRELLAEGRLPEAWIAPEHVRQWRSRLHLRKALIDERTQWLLRIRSVLYHHGISAGAPARIARTDGRDFLERLDLPTDARERITVALFMVDTLDRQIHKLNRELRRVARHQTGCQALMTQFGVGELIALTFLSELGDASRMTSSRKAVRFAGLDIGVHRSDQTSRVGRLTRQGSSPLRWALYEAAQSATRRQSPDYAHYHALRASGLTHTRASLTIARKIARRSYHLLNNLGPDARAPIPDIT

SEQ ID NO: 171872 - protein, 319 aa, unidentified
MLSLGLDVAKLKLDCALRLENGKYRAKVVENTPAGFAKLEAWVAGHTDGQPHVCMEATGVYWEAVALFFANKGYRVSVVNPAQIKAFSQAQLVRTKTDSVDAKLIADFCALHRPEAWQAPSRNEQQLKAMVLRLDALMVMRTQEANRLQVADQSMQPNIQRHIDWLDEQIKQFRQKIRDHIDDDPDLRGRRELLDSIPGVGEATIALLLAYGIHPGRFRNGRQAAAFAGLDPRQHESGSSVRQQPRMSKIGHAHLRKSLYMPAMVTLYRTTWGRQFQSRLEAAGKPAKLVIGAMMRKLIHVAYGVLKSGKPFNQELQTA

SEQ ID NO: 171873 - protein, 414 aa, unidentified
MIVTEEPTAKRVCAGVDWAKDDHAVCVVGPEGEALQRFMIKHDRAGLKDMVRRLLRAGVDEVGLERPDGPIVDALLQAGLTVLVIPPGQVKNLRSRYGSAGNKDDRFDAYVLADVVRTDRHRLRPLELDTAATTALRTTVRARRDMVIHRVATANQLRAHLQIVFPAAAGLFEAIDSDVSLRFLERFNTQGQADWLSVKRLGSWLASIGYTGRTDPAVIYARITAAPRGTTGPEADILAASTRSYIAVLRTLNTQIRTLATSIAEQLDVHPDAKIFTSLPRSGSVRAARLLAEIGDARGRFPTASSLACLAGVAPSTRQSGKVKAVTFRWGANKELRDALCDFAGDSRRANPWAADLYDRARARKCDHPHAVRILARAWANIIWRCWQDNTPYDPAEHGGLQRILNQDQQPAAA

SEQ ID NO: 171874 - protein, 348 aa, unidentified
MKHYAGLDVSVKETSVCIVDESGKLCRERKVVSHPEDLVAILSDPAFSLERVGVEAGPLSQWLFEGLAKAGFPVFCIETRHTKASLDALQQNKSDRNDARGIAHMMRVGLFKDVHVKTLTSQKRRALLTARSLLQEKAIDLENEMRGLLRNFGLKVGHASGGMFERRILELVDHDVELAEIMEPLLAGRRKLREGLAKLDKRVRAETKQDDACRRLMTVPGVGPIVSLAYVSTIDIPSRFRHSRSVGAILGLTPVLKQSGEVSRVGHVSLRGDAMMRRLLYEAAQSTMTRVVKWCWLKAWAMNIAKRHGSKKAKVALARRLAVVMHRMWVDGSEFRWTKDENIANAAA

SEQ ID NO: 171875 - protein, 415 aa, unidentified
MDVVVQRCAGLDVHRDNVVATVRVPGTGRRRVDQQTQTFSATLTGLAALAEWLAQFGVTLVGMEATGVYWKTVFQALEDRFECWLLNAHHLRNVPGRKTDVKDSEWICQLVQHGLVRPSFVPPPEIRRLRDLTRLRKAQANERARSIQRLEKVLQDAGIKLSSVASTTYSKSARAMLDALLGGINDPEQLAELAKARMRQKIPQLREALASRFQIEHHGVMVAQLLAHIDTLDSAIANLSDRIAAVLAPHQDVIERLCTIPGVHVHAAQVLIAECGLDMTRFPTVKHFASWAGACPGHHESAGRRRSGRTRPGPRWLTDMLTECARAAVRTKGTYVAAHYVQLRGRRGEPIALGAIRHDLLVAYYHVVRDRVPYQDLGADWQHKRYSPEHRARRLQRQLEALGYKVELEQLEPAA

SEQ ID NO: 171876 - protein, 357 aa, unidentified
MVMIGADSHKRTHTVVAVNDVGRRLGTKTVRTNSEGHLALVEWATQFADHDDAGVRFALEDCRHLTRRLESDLLAAGQRVTRVPTRLMAGARKASREPGKSDPIDAEAVAVAALRHPDLPVAELDGPAREVKLLSDHRRDLVVQRTRIAAQVRWHLHELDPDLQVPSRGLRRQRVVRELLVELDRFDGVVARLARQLLDRCQELNTQITMLEKELRGLVRVLAPSLLEVPGCGVLSAAVIVGETAGVHRFRDKDAFARFTGTAPVPVWSGSSKGKVRLNRGGNRAVNCALHMIAVTQARGIGPGRDYLDKQLARGKDRVAALRLLRRRLSDVVFTAQRADQRTTLAQGPAGPMPHAA

SEQ ID NO: 171877 - protein, 372 aa, unidentified
MNNTTVYVGMDVHKESFTLCAYTLEEEKGSYSRRTPADYKEVLKYLEFLRTVYGNDTIFVCGYEAGCLGYTLYHQLTDRHVDCVILAPTTMLEQRGKKRIKTDKRDAEIIGRCLAQHNYSPVHVPTASDEEVKEFLRMRDDHKLALKKVKQQILAFCLRHNYRFDGNSHWTAAHINWLKSLTPEALYKEILDEYLLTYTTLSDKLERLDKRIEELAAKDEYKEAVRKLCCFIGVKTHTALSVIVEVGDFKRFASAEKFASYIGLVPGEESSGDGQTRLGITKAGNRHVRMLLTEASQCYSRGQIGYKSKALKARQDGNTPQVIAYADKANERLRRRYYKMVLSKCKKHNVAKTAIARELACFMWGMMTDNIA

SEQ ID NO: 171878 - protein, 343 aa, unidentified
MQSTTIAVDLAKNVFEIAVSRKPGKVAERHRLSRARFLAFFAERQPAIVLLEATESAHHWGRELRQLGHRPVLLPPRAVKRYRDGNKTDRTDTKSLLEASRNEEVRPVPLKTVAQQTLTSLHRLRSGWMATRTARINTVRGLLRELGLTIPLGARKVVPLVMGLLADPDSAVPLALRPLLGEACEEIHELEARIRSTERQLEALAKEIPAVRYLRSIPGIGMLTATALFAFVGDVRRFPTARHFASYLGLTPREHSSGNQRRLGRISKRGDAYLRTLLTHGARAVLRAAHVADSPTRLHSWALAVQQRRGHNIAAIALANKLARIAWAVWRQERCFEATPAVA

SEQ ID NO: 171879 - protein, 434 aa, unidentified
MTLINFVAANQKYYAFNLLSVFIMVFWSVQYLLQHLLVQTQLSAQLLQPLILILQLPQPPQFRYARPGKFFLPVNGMDYLLPLRLTVRNVLTRRITMNIVFLGIDLAKNVFQLCGLNQAGKPVYTKRTGRKELLQTLANIPACLIGIEASTGAFYWQREFEKLGHKVKVISPQYVKPFVRGQKNDGNDAQAIAVALMQPTMQFVPPKSPEQQDIQALHRARQRIVNHRTATVCQIRGLLLDRGIPIGSAVSRARRAIPLILEDAENGLSSRMRRTIAELYDLFNDLGRRIHFFDKEIETVFRQSEACQRIAKVKGIGPETATAVVAAIGKGTEFKNGRHFAAWLGLVPRQHSSGDRQVLMNMTKKGDKHLRTLFIHGARAVVRVATNNNDGHMNQWVNQLKERRGFNKTTVAVANKNARIIWSMLRNETGYQVV

SEQ ID NO: 171880 - protein, 345 aa, unidentified
MSNSNVIGIDLAKNVVQVCKLNIASGEVVYNKAINSNKLAELLAKEKPAIVAMEGCGGAHFWARKAQSFGHDARIIPPKTVKAFLQGQKTDANDAMAIAIAAIQIGTTFSRIKSETQHTLQSIESSRRFLIRSITALSNHIRAFMYEYGINTPQGYKGLTTKVLNTLDADNDQLPSCLKGTLSIMWHQLQTTKQQLKQLENEKAALVQHIEPCKRLMKLEGVGVVAASMLYASLGDGSNFKNGRAAAVYLGLTPKQHSSGGKTYLTGISKTACDRPLRSVLYQGALAVIQWLPSTPRTQKEAWLIALVARVGIKRACIALANKTVRTAWAMLSRDESYRASPLIN

SEQ ID NO: 171881 - protein, 481 aa, unidentified
MKTRVYAGVDLGGAFHQVQVTDAGGRRLGKSFRIGRGKAGLAALQDGVRRVAGDDVEPVYTIEATQNYWLELVHPLQRAGTTVYLVSPSKSTALRTFYRRHTKNDAIDAESLSRLPVIDPKLRVATASAPKWDMLRRLVRQSWLLKMQMSNRKRRIMGRVLMVYPGYENVFRDRYCGASLLFCRRYLDPVKARRLGRRRLGVLLRKRAMGKFDDARVERLGQVIDNAPELDVCYEDLQLLVTQDLDLLEAEERSQRTLRERIAELYGELDPATRLTSVPGLGDYLAAAIMAYIGEPGRFTNADQVVALSGLCSRLKSSAGMDTANQSITQHGDPVLRGCAYLAAEICRHYDPELRAFHRRLTARGKHYKQASCALAAKLLRRCFAILREQRDYQVAHQQEMLRARHEEGKTVRRSVHEVAERLNDVSGMPSPAAENRAMNGPRQAPASSSEERPRSEPVEPRSTLAMAPDPSPINAERTLL

SEQ ID NO: 171882 - protein, 334 aa, unidentified
MALELLAIDLGKRAFHIYGIDTDGVILSRKVSRAKLAEVVGNLAPTAIAMEACASAHYWGRCWLAAGRQVRLINPRFVRPFVKGSKNDAVDAEAIFEAAMRPTMRFVPVKSTDQQDLQSLHRARDRLICQRTALINHTRGLLAEYGIVLRQGRWHFATQASAAIAGADLSDLARAIFGELMDQLDGLDRRIKKLDAMIVTLCRTNETCRRLAKLPGVGPVVATAIVAAVNDGRQFRSGREMAAWIGLVPRQYTTGGKPRLGGIGRRANHYLRRQLIHGARAVVSRLPKHDDPRSTWLKALLARRGFNRTIVALANKTARIAWALLSRKEEYAIA

SEQ ID NO: 171883 - protein, 367 aa, unidentified
MDEITYVGLDAHAETTAIAVAEAGGAAPRFVGTAGARFAELTKVLGKLGKPGQLRVVYEAGPCGFAMVRQLRQAGYHCEVVAPSKIPRKPGDRVKTDRRDALSLAGLARAAQLSLVSVPYERDEAMRDLSRARIDAVRARLKVRQQLKALLLRHDRRYSGKTSWSAAHERYLADQVSFVHRAQEIAFVEYRRGVGEAQARVELLTQALSQELEGWRMRPLVQALMTLRGVDELSATSLVAELGEMKRFAHPRELMGYLGLVPSEYSSGQKRTLGAITKTGNSHARRLLIEAAWNYRFPARISLPLQKRQEGQPAAIRDIAWRAQLRLTLRYRRLSARGLQHNKVCVAIARELAGFVWSIGQQVTVGS

SEQ ID NO: 171884 - protein, 316 aa, unidentified
MTQTNITAGIDTSKAKLDVAAHGRPERWQVENTAAGWRRLACAFAKLGVTLVGIEASGGYERGVVGYLREQGFRVLVLQPLQVKAYARVQLRRAKNDALDAALIAAAAGFIEQPTIEPDARLMEMADHLTFVEQIEEDVARIKVRMEHVAEPRLRRLMMTDITRLKMRRAAELARLVRQLRAHDDLGRRLDLVLSIPGIGERTALALIIRMPELGRVSREQAAALAGLAPFDDDSGQHKGQRHIAGGRARLRRSLFAAALPAAFRWNKALVALYARLTARGKAHNAALIACARKLLIYANTVVARGTPWTEIPLAT

SEQ ID NO: 171885 - protein, 387 aa, unidentified
MAQVNDLSRSLAVFDPISTLVVVVEMGKASWLVRSVVPGVERQPLKKLEPDATALLRLIERWRSEAVRAGRPISRVALAYEAGRDGFWLARWLTARGIEAHVIHSASVAVSRERKRAKTDRLDTAMLMRVFLGWLRGERGHCGMVAIPTMEEEDARRPSRERESLVNERSRVINRMKSALARLGIRGFKPHLRRAPERLACLQTAEGTSLPANIVEELRRDMARLALVREQINSIEKTRAERLERAPDTGPHAMVRLLSRVIGIGIETADMLVREILSRKLRDRRAVARYAGLTGSPDESGLKSREKGLAKAGNARVRRGLIQLAWRFLMFQKDSALARWYRIRTEGPNGARKTTMIVALARKLLIALWRLVTTGEIPDGVELRPAA

SEQ ID NO: 171886 - protein, 370 aa, unidentified
MHQSRTLYIGMDVHKESMAVAYVAQDHYAEVISLGAIGTRQCDIDHLIRKMQSKGKHLIFVYEAGPCGYWLYRSLTPKGHICWVVAPSLIPKKPGDRVKTNRRDAIQLARLMRSGDLTPVHVPQVEDKAIRDLCRARADAIRALQAAKFRLQAFLLRQDMRYTGRATWGPAHLRWLSEVVCPTPAQQIVFQEYVRAVTEHTERLTRLEQELHTQGQTWRLAPVVDALQALRGVQFTVAVTTVAELGDLTRFDHPRQLVHYLGLTPSEYSTGERRRQGGITQTGNTHARRALVEGAWAYRYPAKVSRHLQLRLEKLPKPIQDISWKAQVRLCRRYRQLSARGKNANQVVVVIARELSALMWAIAQQVPITP

SEQ ID NO: 171887 - protein, 453 aa, unidentified
MKTSKELKAPTESFKQIHFSQGLPVTNFHAAGIDVGDSKNDVAVSDGKNGFIVREYSTFTADLINMVKWLVSLAITTVAMESTGVYWLNLYLLLEEAGIEPYLVNAKHVKNVTGRKKDDTDAIWLQKLHSCGLLQKSFQPEGEIRVLRTYVRQRKNLIKISADSVRRMQKALELMNIKLHTVISDILGKTGLQMVHSILEGERDPEELIKLKDPRIEASDEDIKKSLVGIWKDEYLFMLKQAYDEYYFYQLQLDACDENIMTLLQSQAAKVLVGEIIDCPVKKKGIKNQFHYTIRPVLKAIIGVDLCEIEGINEIASLELLSEIGTDMSKWTSIKHFAAWLNVAPNTKITGGKIISSKMQKKKNHAGQTLRMSASSLSMNKSPMGEYYRKMKSRLGKKEAVVATAHKMARIIYIMIKEKKSYNQETIAKNQLEWKEKKIKYLEKQLYQLKNAV

SEQ ID NO: 171888 - protein, 397 aa, unidentified
MYIVGIDIAKRKHEAAVIDGEGAVIIKPFSFTNNCSGYNRLLAMLTKAKLPLDEVSFAMEATGHYWLALFTRLQKEGFRVQVINPVQTNSIRSFYIRQAKTDPRDALLIAEVIRFGHFSESTLHPENIYELRELCRGRHAIVSMQADVKRKVIALLDQVFPEYETAFTNMFSDTSMAILQNCPTPKELSEMPLEELCHLIEVSSHKRFRMAKARELQELARDSFGFAMAGDVFSTMIRLYAKHLDFLKQQVREMDRKIAEIMDTLDTPITTITGIGPTLGAYILSEIGDINRFSSAAKLAAYAGIDPTMRQSGEYNGVRNRMSKRGSPYLRHAIWLATSSAVLHDPALKLYFQKKRDEGKPYMASVGHACRKMFSIIYAVMRDNKAYTPCIPSEISA

SEQ ID NO: 171889 - protein, 335 aa, unidentified
MHYLYYVGLDVSKETFDASLVAFEDANEMAHRKFANSRKGICSCLHWVEKRHGIRLDDVIFCAEDMGSYISEMAVCASDRTLNFNFSLISPLVIKYSMGIARGKTDRVDARRIAEYAITHYRKIALYLPAEKELCQLRTWLILRAYLAKQRVAKLVLLEKLDYKEKFADVSIQRSMLQEEIAYAETHMKTIEREMKELIAADSNICRNYKLLTSIKGVGPITAIVMLCSTLNFTKITDHRKFACYCGLAPFEHSSGTSVRGGCHTSSMANRDIKVQLNRSALIAIRCDPQLKAYYERKVAEGKHKFSVLNAVRAKIAARCFAIVRRGTPYVALQI

SEQ ID NO: 171890 - protein, 405 aa, unidentified
MATIVALDVSKGKSFYVMYQEMTCLYEGEITHTKSGFQELHALIKNLPEVPEIVFESTGIYSRPVETFCQKNQLIHYVLNPLQAKQQMEKESLRKWKTDKRDAHRLAQTHWNNSRTKSVSAEPLYKELRDLSRFYQEIMDEIGRMRMHLHNAIQLTFPELEQVLSNRLTPYGLTMIAQYPHPSFVLKQSRTIIKNRLMASTAKKISENRARNKADELIAYAKDSYPAVSETAIPVAKTRYYAEQLQALLNQKERLANQMIETAKQLEEFSVIASFPGIGELSAAQFIGELGDLRRFSDPRKANAYIGIDIRRYQSGNYLAQDHINKRGNPKGRKILFFIVKNMIKAQHAAPNHIVDYYYKLKKQPLPKKEKVAIVACMNKLLKCLHAMIRNGTKYDYSYTVSTDH

SEQ ID NO: 171891 - protein, 323 aa, unidentified
MQGKVMPESSAQAPVYVGVDVCKDRLDVYVHPAGRRLQVANTGDGLKALKRALGRLTAGLVVLEATGKYHRRAQRTLSQAGYAVAVVNPLRARLFAESAGALAKTDGVDAKMLAIMGAALDPEARPAAPQAVEELAELVRARSAALTDRTALANRLSASQTAFLKAEIKRRISAADRHIARLEAEIARRIAADAGLARRYAILLSIPGVGPVAASALLADLAELGAITGKAATSLAGLAPWPDDSGDKTGPRHIRGGRSAPRRALYMAALSAARYNPDLTRFYKRLREAGKKPKVALVAVMRKLIVLANTLLKEDRLWTPHRP

SEQ ID NO: 171892 - protein, 453 aa, unidentified
MARRSTSGTKKKKHNGIFERINQNAAGIDAGAEHHWVAVPEDRATPSVRKFSTLTSGLYQLADWLVEVNVDTVAVEATGVYCVPLMEVLEARGIKVLLAKPSSLKSVNDHQKTDMSDSQWLQLLHTCALLRPSFRPTQLVAVFRSYSRQRRMLIESASTSIEHMKKALTQMNVRVDQAVTDVTGVTGMSIIRAILDGKRDPQYLASLRDPRCAMSEEGIAEALHGKYSEEHLFALDQAVRTWDHYQVLITECNRRIEDHSETFEKKASRQDIPKPRRVEHLRKNVLPFDARSLFFELLGQDLTQIDGLSTGTVCTFIAEVGTSLDGFSSVKKFTSWLRLCPGSNTTGGKNKSGKNRSTTNRLTTALQVAAQSLERSKSANGAFFRRKKAQLGPEKAITATAHRLARMIFYTLKDQRPYLDPGPDYYLTRHREKVFRSLQKRAKELGFMLVEAA

SEQ ID NO: 171893 - protein, 413 aa, unidentified
MEDVVEYCAGLDVHRDTVVATVRYPEGGRRSSTTRTFGTDTAELIALGDWLLSRKVTRVGLESTGVYWKPVFYLLEERFPQVWLLNATHLKNVPGRKTDVADSAWIAQLVEHGLVRPSFVPPPQIRQLRDFTRHRRVLSEERTRMVQRLEKVLQDAGIKLTSVASTVLSKSGRAMLEAMLAGQSDPVVLAELAKGRMRSKIPQLIDALRGNFRIDHHGVLVAQILAHVDFLDGQLTDLDEQITTLVADLEPIIERVQTIPGVARRCAIGMIAEIGVDMTVFPTPAHLASWAGICPGNNASGGKARSGHTRRGPVALKTVLTEAAQAAGRTKNTYLGARYHAIRARRGTFKAVGAIRHDILIAYWHIVSEGDMTYHDLGPDWVVRRRSPEYQIAALAKQIEKLGATVTVTLPAA

SEQ ID NO: 171894 - protein, 365 aa, unidentified
MEKIYIGVDFHARQQTICYLKTETGELVISELKHQDKEQVRAFYQQFPGPVIVGLEASGYSSWFEALLEQLGCEVWLGHATKIRRRARGRHKNDRRDAELIWDLMVHDEFPRLHRPAIQSREVLRMLRYRQKLIKLRTMAKNSLQAIALQAGLAKGQQLFSAAGLEQFRATALSPVLHWQREHWFALLQPMNQQLLETMVWFKAQSQDDPGVTRLRTHPGIGLLNALCLVHTLQPVSRFRNTRKVTAYAGFDPVERSSAARQCFLGISKAGSRLLRYLLVEAAQTAVRYDQDLKRFYKRLAQRRGRPKAKVAVARKLLIRAYIMMRDEIDYAEFRRRAVAARLARTGQRPNVPEVLIGQPASPEQ

SEQ ID NO: 171895 - protein, 366 aa, unidentified
MKKISTRAIEGIEIFKPNQLTIGLDLGDRTSRYCILNEAGEVILEQELATTPKGFEQVFSKIPRSRVALETGTHSPWISRQLTELGHEVLVAHARNVQLISQSTRKDDRLDARTLARLARIDPSLLGPVRHRSAKAQIHLTVIRARAVLVSTRTALVNAARGLTKSYGARLPKCGTEQMTREITKNLKPELRDALDPLLAEIESLNERIAEYDTRIEQIAKQVYPEVAQLKQVKGVGPLIALTYVLTLDNPYRFRRSRDVGCFVGLRPGRRNSGMSEPQLHISKEGDRYLRTLLVQGAHYILGPFGQDSDLRRWGLKLSKRGGKNAKKRAVVAVARKLAVLLHKLWVSKEVYEPLRNNRQAMAQVA

SEQ ID NO: 171896 - protein, 343 aa, unidentified
MSEVITIGVDLAKNVFQAHGVDAEGAVIFRRQLRRGQMLPFFNKQPACLVGMEACVTSHHWGREIKALGHRVRLMPPGYVKPYVKRNKNDMADAEAICEAVTRPTMRFVEIKTPQQQSVLMLHRTRHLFVRQRTTLINALRAHLAEFGIVAGVGRKGLERLLTVIEDGEDDRVPPTARECLLALRDQLEMVKGQILDADRRILAWHRSSEVSQRLDDIPGIGPLIATALVASVPDPHAFKSGRDLAAWIGLVPRQNSTGGKDRLGHISKAGNRYLRMQLVVGALSVIRRAQQVGYTRRPWLTKLLQRRSTKVAAIALANKNARTAWAMMAHGTYYQEPVSQAA

SEQ ID NO: 171897 - protein, 330 aa, unidentified
MEEVQRFVGIDVAKAALDVCIGSDGTAFSLVNDALAIRELLKQLTPADSVIVEATGGLEMPVASGLAAAGIAVAIVNPRQVRDFARATGRLAKTDRLDAQILARFGETVRPRPRPLATEQAQALEALVTRRRQLIEMLTAEKNRRSMAPKVLHRSLDEHIRWLEKRLSGLDEELGSMIRETPLWRERDELLRSVPGVGKVLSSTLLAQLPELGMPNRKQIAALAGLAPFNRDSGALRGSRCIWGGRAEIRRVLYMATVAGIRSNPIIRTFYLQLRARGKHAKRALTACMRKLLVILNAMLRTKTHWQAPALATTLSISPVAGAVSEHGCC

SEQ ID NO: 171898 - protein, 283 aa, unidentified
MANLKKSKSVVNVGVDVGKASLDIYIYEKDIYWQEDNTVEGIKRLLKRLSYYQVERLVMEATGRYEFMLAEMAYNKGLPVCIAKPLSVRRYAGAIDQLAKTDKIDAALIAQFAAIVQPRVTPQKSKNLISIKNLISRRRQLINLRTQEVNRMQNMGKAFESSCKRIIRTLDTEIKRMEVRLASHVEQQAEWSEKQTLLKSAPGVGDTLIYTLLADLPELGTLNNREISALVGVAPFNRDSGKMRGKRRIRGGRAAIRTVLYMATLVYGNTQCDTMQSSHQSVL

SEQ ID NO: 171899 - protein, 387 aa, unidentified
MARKRTLSTLDTSVLYKAVGLDLAKEDVALAAFDSEHKEPYLIDRISYDKLYELLADMAPTLVAMEPCSGAHQICEQIEALGHEVLMISGRHVQAWVKDHCNGQKTDLNDAFAILNLAYDRWLTPIRGKTREECRLLALQASYRQLKGQRTKTLVHVKATLHAWGFPIRTGSFNQKVLHELIDANREAFGDEMAETLHLMINRVRDLDHDIATVLKLLTEATKRDPRASLLRSIPGFGVLTTSRWCAVIGDIARFDSPKQTMAFIGLVPNNRITGHRTETSSGREARGQGKMSKRGDKMLRSLCILGAASLCLMVRNDRLPDCPFVASIKERLASPRPWFKVLVYVAAKLVRIATALLKYGETFSYEKAGISKAVLKQWELEQAKAA

SEQ ID NO: 171900 - protein, 415 aa, unidentified
MPDFLTASVALFHVGIDWAAETHAVCVLDDAGKVKSTFAITHTADGFADLIGRLGKLGDRADVSVGIERPDGRLVDALLEAGHPVVPVSPNAIKAWRDGEVVSGAKSDAGDALVIAEYLRLRQHKLRVAVPFSDQTKALRTTVRTRTDLVEMRVAATNQLAALLDMHWPGAKAIFADVESPIALKFLTRYPTPASAARLGEKRIAAFCAANGYSGRRPAGELLARLRGAPAGTTSPALTDALKHAILAMVTVLTALNTAIKDLDKTVVTHLGEHPDSEIFTSLPRSGQINAAQMLAEWGDCRGAYEGADAVAALAGLTPVTKESGKHRAVSFRWACNTRFRVAMTTFADNSRHASPWAADIYDRARANGKDHPHAIRILARSWTRVIYRCWHDHKPYDVANHGAVQRLGQPPQTA

SEQ ID NO: 171901 - protein, 386 aa, unidentified
MLAIDESVIIYIGVDVHKESYSYCSYLPSSQAFLFETTSKADDKSAIRYIEKVLKEARKATEENYIARIGYEAGPTGYGLKRKLEAAGYDCRIMAPTTIAETKGGNRVKTDRNDARKLSRALCWNAYKEVVPLSPEKESTRSYVRARNSASTKLKQAKQQLKSFLLAQDIHYPGLADNWTGAYNKWLKQLKFELNNNQEAFNYYISEVSEYVQKVEEMDKKIERISQQEEYKKDVGRLRCFAGIDTHTALSLIVEIGDFNRFKKAKDFSAFIGLCPGQHSSGEKTLSTGITKAGNSLIRKLLMESVNSISKSHVYSKSKRLKSRQSGLSQDVIDYADRGSKRIKNKMRKLRNKGKASNVAKAACARELACFVWGMMTNDIYGEIKD

SEQ ID NO: 171902 - protein, 432 aa, unidentified
MNIKTLELKRQFILNKIVIGIDPAKRKHQVAILDENGIQQGKSFAFENSSEGYNNLWNKLTLRGIEVNEKNMVFAVETSCNLWQNITFYLFSKGFHVVLVSPLRTKYSRPVINNDFSRTDPKDAHIVACNAHNGHFDFYRDFSSEIKAMHHYSITYNKLKDNLVQNKTRIRALVERIFPEFINVLSLDTDTALYLLKSYFLPQDFLEIDTEEVSKEIMKISQKQHGKETLRKLKEAAGTSIGIKIKEEEILSYRISLDSWLILLEQIKNQMKIIMKELIRLVRQTPYFETLKSLKGISDKLAALFIAECRDLSLFRHYKKLEKYAGYNLRIANSGDFIGMRIISHIGNRRLSWIIYKMTEETVRYVPEVRMKFIRRQLRYKKYRKNIIASSSVLLRLIISLIKSGRVYEYREIDLEKMAYLEEKYKREKRVA

SEQ ID NO: 171903 - protein, 320 aa, unidentified
MAIIGVDVSKLSLVAVRTSSTGIVKESFEIPNTAVEIDTWLDKLQSKHKYLLVVSEATAEYHNILAKACLSKAIKFRLLNPILTKQFNRATIRKRKTDLTDAEIIAKLVIQGEGSVVTPASLSPAKVVHRTAIRLVKVEQTLESMCRRFNESLPEEKAVNQQLLDCMQLLKTSCEVLRGRARESTDPKLTKLLTSIPGVGERIVVTLINEIEDIHRFPSPKSLVAYAGLDPRVRQSGTSLKRNTHITKRGSIYLRRDLYIAATIAARWDSEIHEYCEKKLGEGKRYREAMMACSRKLLNRVYAVWKRGTPYERRLITVGA

SEQ ID NO: 171904 - protein, 344 aa, unidentified
MNHSTIAVDLAKSVFEIAVSNQPGHVSEHHRLSRPRFELFFAEHQPATVLFEACGSAHHWARELRCLGHTVILLPPHTVRPYAVRNKTDRADAKALLEAFRNKDIHPVPIKSIDQQVMASLHRYRSAYIANRTARINTTRGVLREIGIFIPQGSSRVIPAVRALIEDPESSIPPALRPTLHEASAEILHFDTRIRDIVHEIQALAAEDPIIRRLRTVPGIGILTATALVAFIGDIHRFPSGRHFASFLGLTPREHSSGLIRRLGSISKRGDPYLRMLLIHGARSVLWAAKRREHPSHLQVWALERQCACGHNKAAVALANKLARIAWAVWSKDRNFDIIEEDTE

SEQ ID NO: 171905 - protein, 411 aa, unidentified
MEVMHARCAGMDISKKDAKVCVRVAGAGRRRTTETVSTWGSTTNQVLALREHLVAEQVSCVVMEATGDYWKPFYYLLEDAGFEVLLVNARQVKNLPGRKTDVSDATWLAQLGAHGLVRGSFVPPEPIRQLRDLTRTRTAITRERGREIQRLEKLLEDAGIKLSSVASEITGVSGRAMLEALIAGERDPDALANLARRRLRSKIPALTEALTGRFTEHHAFLARVHLDLIDRHTHAIEEIAERIEVVIEPFQGFRQLICTIPGIGPGTADVIVAETGADMTRFPTAGHLASWAGTCPGSNESAGRVKSSKTRPGNPYLQGALGAAAMACAQNPSTYLGARYRRIASRRGPQKANVAIQHSMLTAIWHMGRTGTLYDDPGADYFTRLHPDRAKNRALHQLEAMGYRVTLDRTG

SEQ ID NO: 171906 - protein, 418 aa, unidentified
MRVDSDEPEIIERVAALDVAKGEVVCCARVPGPGRQRMQEVRTVSTMTAALLGLGDWLAELGVTRVVMEATSDYWRAPFYLLEDRFETWLVNAHDVKHLPGRPKTDRLDAVWLCKVAERQMLRPSFVPPPAIRALRDLTRYRVDLLAVRTAEKQRVEKPLEDALIKLSVVVSDPFGASGRAIMAALIAGERDPVILANLARGSLRSKTARLIEALTGRFTEHHAFLLTQMLHRVDAVTADIATVQARIDEQVGELASAVAKLDAIPGVGPVAAQMILAEIGTDMTRFPTPAHLASWARFAPGVNESAGRPTGKVASGKGNRYLARVLGEAAVSAARTDTFLGERYRRIARRRGKKRAIVAIGRSILVIIWALLSDEEAQFVDLGPDYYASRNNPERKVRHHIRELQELGYRVTLNPAA

SEQ ID NO: 171907 - protein, 391 aa, unidentified
MIYIGIDVAKDKHDCFITNSDSEVLFKAFTIFNNLDGFNDLYQKIESVMDDVTKVKVGLEATGHYSYNLLGYLIDKGLPTYVINPLHTNLYRKSLSLRQTKTDKVDARTIASMLMSDVNLKSYSDTSYHNEELKSLTRYRFDKVKERAKLKTSVSRLVCILFPELEKLVPTLHIASVYAMLSEFPGAKQVANAHLTRFTNLLSEASKGRYGKETAIAFRDAARTSIGSNMPAKSLELKHTIKLIQELTSEIDEIEHEIKLIMDELNSPILSIPGINYRMGAMIIAEIGDFTRFDSPDKILAYAGFSPSTYQSGQLDGAYSHIEKRGSRYLRYALYNAAKYVCIWDPTFAEYLAKKRSEGKHYTVAISHAVKKLVRVIYHLEKTNQQYIKAA

SEQ ID NO: 171908 - protein, 386 aa, unidentified
MMTKQLQYPTFIARDYDIFGGLDVDKKSMAVTFRDHGIMRKSFRLAYSASQLLSYTRKHFPGQRVAFVYEAGPTGFGLHDELTAASHPCLVVSPSMVPTVQRKRVKTNRLDSLKLAEGLRGGQLRGIHVPPPSYRELRHLVQLRDTQVGQLRATKCRIKSLLLYEGIPFPAANGKWSAPALRELEALPCNATVRFKLDQLIDALQFHFLAAAKVQKQIRYFCQNDPELRGCISFLVSLPGVGTITATHALARLGDWRQIKDVRQIAGFLGLVSSEHSTGDKENRGEITRIGDSRLRNKLIQCAWTAIRKDPELRAFYRRIYERQPKKVAARKAIVAVARKLTTRMYAVLKEQRPFVIRADSSIAPLTAEETGGPRERLDAAQNKQP

SEQ ID NO: 171909 - protein, 391 aa, unidentified
METFVGIDIAKEVHWVVALDAHGKELLNRRLLNAPADMMKLVDQLAAFPQPVLVGIDVLGGIAAFAQAVLLDAGVALVHVPGLAVNRARQGTVGGESKSDPRDARVIAEQVLRRNDLRRVEACSELDIELRLLVSRRADLVQEQTRRLARMHDLLVGIFPELEKLLDLTRKSALLLLSVAATPTALRKCRQATLAKALGTLAQRAYGQRLIEDACAAAKRQQLSVPGEAFTGRLIQELATEALATVDRLNLLDAELEERLARHPDAALIRSLPGMGALMTAEFIAEAGNIDRFRSPDALAAAAGLAPVLKQSGKTRWLKRPLGGNKGLKRVFYQSAFASLRSADSKAFYARKRSEGKRHHQAIIALARRRINVLWAILKKRQCFVSTVVVA

SEQ ID NO: 171910 - protein, 354 aa, unidentified
MQNVIMIGCDLHDKNMLLKIAVNRDTSVQKVVANTPEDRKKMIEELQALARKARTQDILFAYEASGLGYQLHDELRAAGIDCRVLAPTKMAQSHKQKSNKTDAKDAEHILEIVRAHKLAGTKLPEVTVPGVQQHDDQEIVRARHDLSSKQTRLKAQIKGLLKRHAIARPSEAGASWTKKWCAFLKRLCSGKTLGMGARIALKTLLSQFNNVVEEIAFLDAEVRKLGQTERHQKQVKALTAMSGVGVFTALTFLTEMGDLTRFKNRRQVGSYTGLSPTSHESGNIADRKGHITRQGPSRLRRVLCQAVWARVRSDPQEGACYERIKAKNAGKAKIGIVAVMRRLAIKMWHVALAA

SEQ ID NO: 171911 - protein, 421 aa, unidentified
MSYRVAAIDIHKKVLMVVVASAADQVEDASGEALEFECRRFGAGNGERRHVVSWLKQRSVTEVVMESTAQYWKPVWLDLEPHLEKLHLAQAYSNWAPKGRKNDFRDAKRLARRLLADELILSFVPDAEQRMWRTLTRSKHQLVRDRVRLQNQMEALLEEMRIKLSSVISDLLGVSGRRILTALAAGTTDPIQLAELGDDRLQCSQQELIDALQGAPGPIQLEVLRLFLERLELLDQQIQTLDMLVARTLKQHEEAVIRVDHMPGFGVDSAQQILAEVGVDAEAFPSASQFCSWAGTCPGSEESAEQNHSSRSPKGNRFVRRILTQAAQAAVKKKGCHFQAVFRRLLPRLGYKGAIWAVAHRLGRLLWKILHDGVTYLEQGQETNPKAKKRRAQKLAQALRKLGYQVSLTPINPEPLVEGQG

SEQ ID NO: 171912 - protein, 349 aa, unidentified
MRFYTSQHRHYCGIDLHAKTMYVCILDRDGQVLVHKNLPSNPEAFLEVIAPYRDDLVVAAECIFTWYWLADLCAAEGIAFVLGHALYMKAIHGGKAKNDKIDAHKIAMLLRSGMLPQAYVYPAGMRATRDLLRRRLHLVRKRGQLLAHIQMTNQQYNLPAFAKRIAYPSNREGVADHFEDRVVRKNVAVDLALLDRYDTLLVDLESYLVRQAKQHDPQAFQLLRSIPGVGKVLALTILYEIQDVTRLERVQQFASYARLVKCARESAGKKHGTSGAKMGNVHLKWAFSEAAVLFVRHNEPGKKLLAKLEKRVGKGKALSILAHKLGRAAYYMLLRGKAFEIERFVATAN

SEQ ID NO: 171913 - protein, 338 aa, unidentified
MTECKSSAWIGLDVGKKTFSAAIDLPVDGRRRKLTDIPCREFARTPKGVEDFFAWTEKTATGLPAGIVMETTGCYSQHLADWIGKSRPSIPVTIENARALHAFIQSLNLPHKTDRLDAQAIARFGTERRPAPSVRPSPAILALRELSRERAALIKARTELRNRRDSLSTEVARRHNARTLAALTTQIEMLDDEIKACVVEDEELLAEVHVMTTMPGVKFVSAYSILAEIGSLKQYSAKELSAISGLCPRILDSGTSVHSSYMSRRSSARLRQILYLDSVIATRKIPVLSEFYSRLVSKGKKKMTARCACMRKMLLMLRAMVVAATPYSENFEKISASA

SEQ ID NO: 171914 - protein, 332 aa, unidentified
MNKASIQEMNTIGIDVSKAKIDCAWLREEGKLKFKVFPNTLLGCNDLIKWSLKNTGLEINQLHFIMEATGIYHEQLAMQLYNADTMVSVANPAQVKFYAQGLGVRTKNDKKDSAVLARYGLKETPKLWQPEPVEIRTLKALIARLDGIEKDLQREKNREEKAIISKAPDEVLNSVKQMIGLLETEQKRLDKLIEEHINKHKNLKENKALLKSIPGVGKVVATRMLMLMGSREFKSASQCAAYLGLVPVERLSGTSVKGRSRLSKAGNPAIRAKLYMAAVVATRYNPDIQAQYERLTKKGKSKMSALGAAMRKLVQICFGVLKHQKTYQPQVG

SEQ ID NO: 171915 - protein, 388 aa, unidentified
MQLPESQEKNGERTVIGIDPCSQFLQLAILTPNKQTEFKKLPLSPNITEEIARSTDPATTQIAIESYGSYGKLFVYDLLRRGYDIREVNPQISKKMAGLFNEEHSDQKDAESLAKALQLIPGLPRVSITDKKQWLAKLTRTRRKLVKDLNGYLNRLHIALTESYGVVYKSLFKTLFAKKALLFFEEYPTINDCLSDGDAKKRLGEEKWELLAQAGSWKDDYYLETLRTEIRGLIGIIRSVNNTKISIEENTREIADQVEEMQILQTFPGIGGIAGATLLSEIGEIERFGQESALSAYCGVSPVIWQSGTGKIRTKRRKRYSRRLKGILYFIALSQMRINPESRAYYDRKIKEGKTHWQAMNALSRQLIKIIYYMLKHKQPYQRNTLVN

SEQ ID NO: 171916 - protein, 463 aa, unidentified
MIEQLTPTAPKVAELLEVAEPDLLAFYAFPAEHWTKLRSTNPLERVNREIGRRTDVVGIFPNDAALIRLAGMLLIEQNDCHEGRQGRRRGGSVLPAPNTRCCSGQPLRREEEDVQYLGIDWGTRRAAWCALTRAGELQEGMISADEDGLLRLVARLGPDVYGCIEMMSGAAWVREQLARCGWEIEIADSRKVKAIAPLACKTDKVDARVLADLARRDLVPTVWVPSLDDRAIRERLRRRAHLIRLRTSAINRTFGIQTQWGQRRGITALRKLGALDELAEHGVPEVWLQSIRTLLGVIDDLDRQLAPLERELRPLARRDERAKLLMTIPGVAELLALTLAAEIGDISRFPSPRKLVGYAGLAPRVKQSGQSSHTGRLSKAGPATLRWAAVEASQHAWRPTNPWHGLYTDIKRRHGKANPAKSAVARKVLIASWHILSLNEPFKPSASSATDPVPASSSIRLAA

SEQ ID NO: 171917 - protein, 356 aa, unidentified
MRMKYHASTTKFNCGIDLHARQMYVCVMDRDGQKLVHTNIKNNDFAYFLKLVAPYRHDLTVCAECMFGWYWLADACQDAGIHFVLAHALYLKAIHGGKNKNDRIDSEKIAHLLRTNLIPPGYVYPAAKRPLRALLRQRLLYVWNRSELLARLQSHQLAHNRPTHRQTLYNRESWSEQLLTAEPDPVRQLALQNDLALIGHYDTQLATLEKELLKLTRQTAGRDFTLLQTTPGIGDYLGLTILHEIGDIARFPTVKDFLSYCRLVKGTVASAGKLKGLRGAKLGNPYLRWAFGEAAVVAKRDPLVIGPLAQRLEARLNNKFKANTVLAIKLARAVYFMLKTKTVFDPERLVAALSKN

SEQ ID NO: 171918 - protein, 383 aa, unidentified
MASRRRGPGPSSVLITPDCAGNVVGVDPHKRTVSASVADPRGGIVASEHFRVSGDGHRALQVWAAQFGPVARWGVEGASSWGRHTAIFLIARGYDVRDVCANRTPRSDRARQRGKSDQLDSERIARETLAHPLLPKAFKRAGDDRGPDEQHELLALRHTQRRSILTSRQHLINEAEHLLSSLPLELREQLPDSTAVRPRLAALAHRNRRRRYDPPTTLRLRLLDDYRAQIAKLDAQDKQVTAELAALVKASGSTLGELCGLSTVLVSELLVEVGDPRRFTIGGFARFNASAPLAASTAEGPGEPVRHRYNPGGNRRVNRVLHLMAITQLRCEPRAQALYDNARKRGHTKKEARRILKRHLSDVIYRHMIRDLASHTAQSLLAA

SEQ ID NO: 171919 - protein, 346 aa, unidentified
MEYYTERHQHTCGVDLHGRNLYLCVLDPDREIVIHRRVDCDEEKLLRALAPYRKDLVIGVECMFKWYWLSDICDDQDIPFVLGHALEMKAVHGRKSGNDRKDAERIARLLESGMFPVAYVYPNKMRSTRDLMRRRSFLVNQRSALINHIQVTNLQYNLPELGRISNPDNREGIIERFEDPSVRETIAADMSVIEVLDVVIKRLERVIVKAARGHDHNAFALLKSVHGIGDVIGLTLLYEIHDIRRFDSLGGFLSYCRLIKCDKTSDGKKKGTGGRRQGNHHLKWAFSEAAALFLRANPEGQKLHSRLLKKHCKAKSLGILAAKLARSVYYMLHHNTPFDMKRFMGT

SEQ ID NO: 171920 - protein, 379 aa, unidentified
MDHAITGTPTETILYGALELSKNSWLLALQLPDRAQPSLYPIKGGDTEGLMAKVMAARDRWAKISGKAPSIMLCYEAGYDAFWLARFLKARGIECLVVDAASMQVNRRARRAKTDRIDVGMLLRALIKWCQGDRHVWSVVRVPSVDEEDLRRSHRERDRLVRERTAHINRIKGLLFGQGIRGIRVKSKYKTLQIDKLVTGDGRPLPPRLASEITREIARLALIQEQLAALERERDQAPTPCKAIEKKRVQLMSLSGIGPGIAAVMTREVYYRQFDNRRQVAGFLGLATSPHDSGDVERSQGISRAGRGHVRGTIIQAAWLWLKHQPKSAITRWFLQRTAGQSGRIRRIMIVAVARKLAIALWRFLEQGLVPQGACLVSR

SEQ ID NO: 171921 - protein, 407 aa, unidentified
MLFVGDDWAEGHHDVELMDVAGRKLVKARLPEGVAGIARLHAMIGEQLGEDAEDADQVLIGIETDRGPWVQALIAAGYTVFAINPLQAARYRDRLGVSGAKSDAADAHMLADMVRTQSHQLRPVAGDTVEAEAVKVVTRMHKTLIWERTRCTQRLRHALREYFPAALEAFEDLDAADTLELLAKAADPESAARLTTGQISAALKRARRRDIPNKAERIRAVLRAEHLGQPPVVTAAYAASVRALIAVLGTLNEQVKVLQGQVEAHFGSHPDAEIILSQPGLGPILGARVLAEFGDDHDRYASAKARKNYAGTSPITRASGKKKVVAARFIHNDRLIDALMTQAFASLNNSPGARAYYDRQRARGTDYNAALRQLANRLVGILHGCLKTGRPYDEATAWSHHLTEAAA

SEQ ID NO: 171922 - protein, 453 aa, unidentified
MSRKRKNNKKKVSAPTLYCLNPNAAGVDVGATEIYIAVPVDRDPQPVRHFSTFTGDLHAAATWLKSCQIETVAMESTGVYWIPLFQILEARGFTVLLVNARHVKNVPGRKSDVSDCQWLQYLHSVGLLRGSFRPEQAVCAVRSILRHRDSLVQMASSHVQHMQKALDQMNLQLHHVISDITGVTGMTIIKAILAGERNPHTLAALRDGRVKATADTIAKSLVGDYRREHLFTLDQSLTAFRHYQELIEACDREIAQLLEAFESKADPPEGSLPESPDGQKPSGGEPRFDLQNHLYRIFGVDLTRIPGINVLTTQTLLAEIGPDLSCFACAPAFTSWLGLCPDNRVSGGKVLSVKTRKVKNRAATALRMAAQSLHRSQSDLGHFYRRMRAKLGAPKAITATAHKLARIIYHMVTTGHDYDETICVKNEMKNRQRLEARVRKQARELGFQLVAAS

SEQ ID NO: 171923 - protein, 419 aa, unidentified
MNPSPTAAAFSHYAGFDWSKHHHNVVIVDAQGRIVADFQFPHSAAGWADFRQRIAAFPRVAVAIETSHGAAIEQLLASGVTVFPVHPKSAKSYRARQAPSGTKTDHLDAWSLADALRTDGHAWRALAPADPLVERLRLLCRDEITLIEQRTALVNQLQQALQEYYPAALEAFDDWCLPAAWSFVAAFPTPQALQAAGQRKWDKFLHVHRLARSQTYAKRLEIFGRATAFCSGPSVTAAKSELAIALVKILRTVEGQLEHYRAEIERLFREHPDHELFGSLPGAGPKLRARLLGEVLSRPDAQGDPTALRALAGTAPVNVQSGKVRYARLRHQCNDVLRHTVHLWADQARRYCTWAGVYYQAHRDRGHSHATALRCLGNRLLKILSRMIMTHTVYDPELHARNQQRHGSWVLQLQTANNG

SEQ ID NO: 171924 - protein, 402 aa, unidentified
MQYYLGIDIGKYYHQAILCDSEGKPMTASLRFPSSYNGYQQFSVYLGKQVAVAEFSKIHAGMEATGPYWLSLYEHFKKLDIRTTVLNPLQVKSYRNENIRGSKTDSIDCLLIVKILRFGDYKPSDLPDEDLLSLRQLTRLRADLVKLSSGLKMKLLSIFEQIFPEYPKLFTDMFGPGAQVVLSEAIDPESIAAIPTEKLTAILKKESHGWFGEKKAKEIKQAARESIGVTLGLDAFTLSAQILLTQIKHLDDQVKNLNEEIAKRLKARDQSLTTIPGVGEVTAAAIISEIGNFDRFASDKDGAEKLVALAGIDPKLKNSGENRGKSVMSKRGSPYLRNAVRHAAFIAAAVKKDPMFTGIYQKKIKEGKHFEVALSHVENKLLHVVFSLLKSGRQYQPYGVAN

SEQ ID NO: 171925 - protein, 307 aa, unidentified
MGSNVGIDVSKHSLEWCEGGLGTIQHVRNEPRPIASLVRRLVSLDPARIVVESTGGYERRLVLKLAEAGLPVVVVNPRRVRSFGQALGILAKTDAIDARLLALFGEKVEPPIRPILQGTDRLLADLIARRRQLTAIVVAEKNRRDTAAEPVRRTIDALLRTLATQVREIDRKLEKLLLQDAERAELSDLLQTVPGVGPGVARTLLIDLPELGHLGRRQISSLVGVAPFSRDSGTIRGVRRIRGGRASVRTALYLAAMTASRFNPVLKELYDRLRQAGKPPKLAFVAVARKLLTILNAMARERTAWQA

SEQ ID NO: 171926 - protein, 426 aa, unidentified
MQNCLFIGVDVALKGNQFCVMNFDQHIYFNLKFPNNPEGNDMVINKIKDIENKFFFEKIIVVMESTGMYSFHPACYLSSNEYLNKFHTEVYQINACDFDKYKKSFHDLEKEDGIDAYILADYARVGRTKALYPFRGSQYIALQRLTRQRYHICKELIREKAYVLTNLYLSFSGLMSLDKNELPFSDLFGATSSAFLEEFESPDQIAKSSVEELINFITEKSKNHSSNLDEKVTALNKAMRASYRLDQAAYEPINIAIACSLNTIKFYQQQLKNIDKAILNAALGLDSNTYHILLSIRGIGKVYAAGIMAEIGNIDRFSHNSKLAKYSGLYWKRNQSGEYDSQDKKSSKKSNKYLRYYLVEATASCVRQNFPFIKDYYSLKYKEVTKHQHKRALVLSARKLERLIFGLLRKNQYYKPINSVQNSNIG

SEQ ID NO: 171927 - protein, 341 aa, unidentified
MSIMTIGIDLAKNVFAVHGVDENGKAVLVKPKVTRDQLLPLIAQIPPCLIGMEACTGAHHWARLFRQYGHTIRLMAPKFVTPYRMSGKRGKNDAADAAAICEAVTRPSMRFVPIKEEHQQNILCLHRTRQGFIEERTATYNRLRGLIAEFGIVLPQKVTLLRQGIYLHLEDLPGWTNRCVGDLLVHADQLDARIAEYDKAIATIAKEDVRSKRLMQLRGIGPTTASALLASLGIGHDFDSGRQVAAWIGLTPGQYSSGGKSRLGRITKAGDGYLRSLLVLGARAVLNSLGNKQDRFSRWARALVERRGYWKAAVAIAAKNARLAWAVLKYGEDFRMIESAA

SEQ ID NO: 171928 - protein, 357 aa, unidentified
MKYIGCDFHPSFQQIAMLEKETGELVERRLLHTEEARRFYQGLQGPVVVGIEASGNTHWFESLLADCQHELWIGDAAAIARQEGRKQKHDRRAAALILKLMVENRFPRIWVPTVGERDLRQLLIHRQPLVRMRTRIKNQLQHIALNQGWQKKRKLWTESGLELLRSLKLEPWGQQRRDTLLEMLAELEEKIRPLELAVAREAEACEAARRLGTHPGVGPVISLATVLTMGDVQRFTDSRSWVSYLGLNPAEESSGQRRRLGAISKQGNPFLRYLLVEGAISAARGDKSLARMYARLKAKKHHGVAKVAVARKLAVRLYWMARTEKSYPEVVRTQGSQSHSVAAVEADRLSRPPVSHP

SEQ ID NO: 171929 - protein, 354 aa, unidentified
MSQILNTAIAVIGIDIGKNSFHVVGLDARGAIVLRQKWSRGQVETRLANMPPCLIGMEACVGAHHLSRRLKLLGHDARLMPAKYVRPYNKGQKNDFRDAEAIAEAVQRPTMKFVATKTAEQLDLQALHRVRARLVSQRTGVINQIRAFLLERGVAVRQGLRFLRAELAGILATRTDVLSPRMVRVIEDLAGDWHRLDERIEGLSSEIATLAHQDTACARLMTVPGIGPIISSAMVAAIGNGDVFSKGRDFGAWLGLVPKQMSTGDRTILGKISRRGNRYLRVLFVQAAWVVLIKPKSWERYGLKPWIEAAKKRLHHNVLAIALANKLARIAWAVLNKERNFEYVRRNAMASRPA

SEQ ID NO: 171930 - protein, 423 aa, unidentified
MMKLKYSICCGLDVHKNVIVATIVTTNKDGISEYLQKSFSTINSDIQRFHNWLIENNCYHVCMESTGKYWIPIFNYLENDIDVCLTHPKYVKAIKGKKTDKKDSKWIADLYKFDLVRCSFIPPKDFRQLRELSRYRFKLVCMKSSEKNRIQNCMTISNVGIASVLSDPFGKTATEIISYLLEHTADSMDEKAVRKFIKKGAKSKSDEIIEAIKGYTIETDQAKKLELARGHLEYLDDMITQTEVELYVRIKPYYEFVEFVSTMPGMTELSSTIVLAETGVDMDIFDDAKHLCSWCGLSPANNESAGKKKSVRIAKAGDYLKPMMVQCALAAIKSKKQPYFAIKYGRIKKRRGHKKAIIAIARMMMVCIYHMVSEKKPFTPTDYEELMDPQNHVESVVLNENNVFAYLESLGYDSSKLVKRNDN

SEQ ID NO: 171931 - protein, 370 aa, unidentified
MTKSSTIFVGLDVHKDSIAVAYVPEDRQADVIYLGPIGTRQCDIDKMIRRLQSKGHKLVFTYEAGPCGYSLYRYLKRKGLECIVVAPSLIPKKSGDRVKTDRKDAVHLARQMRSGDLTPVFVPEIEDEAIRDLCRAREGFMRDLKACKFRLKSFLLRHDIRYSGKANWGPAHLRWLSEITCHTQAQQIVFQEYIRAIEDHKQRLTRIETELKEQVATWRLSPFVEAFQALRGVQFTVAVTTVAEVGDLNRFHNPRQLTAYLGLSPSEHTSGDKRRQGGITKSGNTHARRVLVEGAWSYRYTAKVSRIIQVRQENLPQSIKDISWKAQVRLCKRYRRLVSRGKNPNVAVVAIARELASFMWAIAQEIKTAA

SEQ ID NO: 171932 - protein, 336 aa, unidentified
MSHYCGIDLHSNNHVVVVIDERDKRVFDKRLNNDLSSTLEVLSPYQETLKGIAVESTFNWYWLVDGLQDHGFSVQLVNTAAVKQYDGLKYSGDHQDGFHLAHLMRLGILPTGYIYPKEQRAIRDLLRRRMSLVRSASTQLISVQSQIWRSTGMRIPSGQLRKLEFIPPMMDKYTLQAVHAGLMVYQAIQQEISVLEKSAFEAIKLTQSFKILQTITGIGKILGLTIMLETGDIHRFAGAGNFASYCRCVDSSRTSNGKKKGVGNAKAGNKYLSWAFSEAAHFAVRFEPLAQRFYERKKAKTNGIIAIRAVARKLARATWMMLKHQVPYDAKLMFPN

SEQ ID NO: 171933 - protein, 312 aa, unidentified
MDNEIIIDKGCGLDVHKETVVACVMGSGIKKEIRTFSTKTNDLLRLKEWLSGLGITHIAMESTGPYWKPVFNVLEDGFTVILANARHIKNVPGRKTDVKDSEWICRLLRSGLLSASFVPPQAIRELRDLTRYRRKLTQALSAEKNRIQKALEDANVKISSVLSDTFGASGSQIIEAIMEGKLNEAEMADLAKGKLKSKKEELREALVGYFQDHHRFMIKASLEHIKYLEKLISDLDQETKKKLAQYQKEYELLQTIPGVKEQGAAAIIAEIGANMDIFPSEGHLATWAGMSPGNNESAGKKKAERQTTAIRI

SEQ ID NO: 171934 - protein, 380 aa, unidentified
MGDHIAAFVAFDTSKLRNAVAIAEAGRLGEVRFFGEIDNTAEATAKLVKKLAAKYERLAFCYEAGPTGYGLYRQITELGQECMVAAPSLVPKKPGDRVKTNRRDALDLAKLLRAGQLTAVWVPDARHEAMRDLTRARGAAVQDVRMKGQQVSAFLLRLGRHYAGKTAWTKAHMTWLASQQFEHAEQRIAFEEMLLAVRQARERIARLEEAIRTAVPDWSLAEVVEALIAMRGIDMVTATAFLAEIGDLSRFRTPRELMGYLGLVPSERSTGERIARGPITKAGNRRARRLLIESAWAYRHPPRVGKDKQAKVAAAPRAVREIAWKAQHRLYSRYRALTRNGKLKTVAITAMARELAAFIWAVSREITNAGRAAAQQGIRG

SEQ ID NO: 171935 - protein, 416 aa, unidentified
MNAVGIDVSSRKSTVAVLRPLGEVVCLPFDVSHDADGLASLAEKLKALDGETRVVMEHTGRYYEAVAKALHEAGFFVCAVNPLLIKEYGANSLRRVKTDKADAIKIARYVLDNWADLRDFTPMDAIRYDLKTLNRQFQLASKQRTASANNLIALLEQSFPGIRKCFDSPVRSDGTQKWVDFAHSFWHVDCVRKQPFAAFCERYRKWCKRHAYFFKLRNAEKVYALAKSAVVLTPKAKVVKVLVQEAANQLISISRSVEVYRAEMDRLAAMLPEYPVVMAMYGVGKSYGPQLMAEIGDVRRFERKQALVAFAGIDPMPNQSGDKNVRSNKSSKRGSPYLRKTLFNVIRTYLQCAPQDEPVFQFLNRKRAEGKPFYVYMLAAANKFLRRYYAKLRDYFASLDTLQPAAPIPTILKAAL

SEQ ID NO: 171936 - protein, 360 aa, unidentified
MNAVGIDVSKGKSTVTIRRPGDVVLMQPCDVPHTQSAISALIEQIKSLDGETKACMEHTGRYYEPVANWLSDAGIFVSAVNPILIRDFGDDSLRTPKTDKADSKKIARYALDRWAKLKQYGSMDKTRNQLKTMNRQFGFYMDQKTAMKNNLISLLDQTYPGANDFFDSPARSDGTQKWVDFVYTYWHVDCVRGKSLQAFTEHYRKWCKRNGYNFSASKAEKIYQSFSDLIAVFPKDDSTKTLIRQAVTMLNTASQTVEALRIKMDQTAATLPEYPVVMAMNGVDPGKNDSGKHSQKSVRTSKKGSPSLRKTLFQIMDGLIKRSPADDPVYAFMDKKRSEGKPYYVYMTVSAKYSCGFPDP

SEQ ID NO: 171937 - protein, 403 aa, unidentified
MPAAVPSGVNLGKGQVVAVVMIGVDPHKGSHTAVAAGGDEAPLGQVRVRAPAAQAQRLLAWAAAWPERTWAVEGAGGLGHLLAQELVAAGERVLDVQPKLAARVRLLAAGAVNKNDPSDARSAAIAALRSPSCLPVRLDDRAAVLKIWAKRHHDLSRGRNQVACRLHAVLCELVPGGLAKEISAAQADQILAGAGPRGAVQQARAELAAELVADLRRADALPRETKKKLATAVRASGTSQTGLFGVGPVIAATVIGDVRDVSRFASRDRFAAYDGTAPIEVSPGNRKVHRLSLRGNRRLNHAIHMAAITQIRYKHSEGRAYYDKKTAEGKTPEEALRAVKRQISDAIYRCLKAGRGPHRRSQRPGPGRARGERLCRQRGRLTPRAPALRPSHSRTCHHPTAPS

SEQ ID NO: 171938 - protein, 360 aa, unidentified
MTVSFELGDRSWKLSCSDGVRSPSRYSVNAGDQVTVLDCLDKARARCGLDPQAKVHTCYEAGRDGWWLHRWLREQGIDNIVVDSSSIEVNRRAKRAKTDRLDADKLLALLLRFHRGERRVWSVVHEPTAKQEDARRTHREIGRLIHERIAHTNRIGSLLVMHNLRPGRIGGRTWQGWWEGHCKQVPPLLRAEIEREYARLVLAKQQLNALETERRHEVAEGAHPVVALLAKLRAIGPRGAWILDKELFGWRRFANRRELAGCLGLAPTPYASGTSEGEQGISKAGNKRSRALLVELAWRWLKFQPDSALSQWFHLRFGIAGKRSRRIGIVALARRLAIALWRYIECGEIPAGATLKTVEA

SEQ ID NO: 171939 - protein, 357 aa, unidentified
MEQRNKISFKGQNIYIGLDVHLKSWSVTILSETSVLKKYRQDASPEALHKTLTTNYPDAEYHSVYEAGFCGFWIHDRLTELGIHNIVVNPADVPTMSSEKLRKTDAVDSKKLAVCLRAKQLRGIYTPDAEALEIRSLIRLKNSITKDTTRQKNRIKSQLRYLGIDIPREYLEPNSNWSKRFIAWLKDVQMKTTSGRQTLDLQIRQFEDLRRQKLEITRALRKLSHSEKFEDTLRLLMTVPGIGQTTGLALMAEIVDVTRFANAEQLAAYVGMIPMCHSSGEHEGVGDITLRKHAILRSNIIEAAWVAIRKDEAMQLCYLNNCKKMVPSKAIVKVARKLVNRIYFVLKRRQPYVNAVA

SEQ ID NO: 171940 - protein, 366 aa, unidentified
MIVIGTDTHKATHTCGAVDARTGQLCGEKTARACQPGFRELLDWGRGLADERIWAIEDCRHVSGSFERFLVAQGERVVRVPPKLMGQSRKGERARGKSDPIDALAIARAALREGPETLPAAHLDERALEIKLLCDHREDLVRTRSEEQQRLRWHLHDLWPELELPAGCLGRAVWLERIARKLARAEQGARVRVGRDLVRSIRERSRRAAELEREIAALVETQAPDLLALPGCGALSAARILAETAGVERFASDAKLARLAGVAPIPASSGNRRRHRLDRKGNRQLNCALHRIAVTQGRVHEPARAFLARKQAEGKSRIEALRCLKRHLARAVWQALRASRDRESINSLSLIDEVPKLRPVEGLALT

SEQ ID NO: 171941 - protein, 400 aa, unidentified
MNDGYGVYLGLDVGKGDHHAVGLAPDGRRLHDAALPNTEARLRQLIDKLARHGRVLVVVDQPASIGALPVAVARACGHQVAYLPGLAMRRIADLHPGSAKTDARDAYVIADAARTLPHTLRRVDTGDEALAELEVLVGFDDDLAGEATRMSNRIRGLLTQIHPALERVLGPKVHHKAVLELLSRCGGPAGLRKAGRRKLLSIAVAHAPRIGQQLVAQIMTALDEQSVTVPGTQAAETILPRLADSLRDVLRQRDQVATQVEGMLDAHPLAPVLTSMPGIGVRTAARILLEVGDGTAFATPGHLAAYAGLAPVTRRSGSSIRGEHPPRGGNKHLKRAFFLAAFAALADPVSRAYHDRKRAEGKRHNAALICLARRRCDVLFAMLRDKIPYQPRPIVAVTPG

SEQ ID NO: 171942 - protein, 309 aa, unidentified
MKQSVVYIGIDVAKAHLDVAWAGTFRRLPNERSGHAALLRWIKQSTTPVQLICEASGGYEQALLESLEKSELKVTLVQAVRVRQYARAAGILAKTDRIDAKVLAAFGSAMQPQPTSPLSAEQKRLRQYEAQRRQLSRILVAEENRLAQLSCTELRTLSRSLISKIKTQIKTLDRGISDLIAQDQTLCVKAQKLTAISGVGVRTAALLLAQMPELGQLNRRQAAALAGLAPFNHDSGSVRGKRAIFGGRPALRSGLYMAALSAARFNPILSSFYQRLRTKGKPHKLALTAVMRKLLLALNQTLKPLPCST

SEQ ID NO: 171943 - protein, 463 aa, unidentified
MMKRRKLASKAEKPRREKVDWKTLEIVHPDAAGIDIGGREHWVAISPDRDEDPVRRFDCFTADLEQMAKWLVEKGVCSVAMQSTGVYWMPVYEVLEQSGLEVYLVNARHTKNLPGRKSDVQECQWLLKLHTFGLLNNSFQPTDEIRVARTMWRHRSSLVAQAGGAIQRMQKTLTEMNVQIHNVLSELSGVSGMAILKAILKGERDPWQLAAFANPAVKASPADIAKSLHGNWREELLLVLRHEMELYQTYQDKIAECDHQLRKHLQSLASRVDLQAQPLGARPKGKKAPRGNTPKFDLRSELYRITGIDWSQVNGIDVQIAQTVITEVGVDLSSFPSERHFASWLGLCPMNEQSGGKILNRRTPKVVNRATVAFRLAAQGLLRSQSYLGAQYRRLRTRLGAPKAITAMARKLACLFYRLLRHGQPYVDKGAQYYESRYREQQIRSLTKRAHKLALELVEPKPA

SEQ ID NO: 171944 - protein, 466 aa, unidentified
MENNYILYVGMDSSKGKADAAILKVCDRRSVKPKFLRKKLSFKFVKSEVTSFLETVRSYSDDNCTSICFALEVTGIYSTNVYNFIKDSLNDNESIRFLNTDFVNQWRNAHNIAKSDPLDAQTISTIIGTDSDVQYVNDNVFENKNGYQDLKALVHRHYQIKKIYSQEINRLIAQCDCLFPELQYVFEPKSAAFIAVLSSYPTTHDIINASRLEVFNIVYKATKHRCSMDKIDKLFELCHDTLVPDNISSYGRSIILDLVENIKTIKGQLKMIERYIRDVASLNPAYKLLLSITGCGPLTAATVIAETGDIKRFKNADCFVSYSGTSPRNKRSGTSVETLGKISKKGSRYLRHAIYMIAEFARRHNPVLKHQFERIKNGNKKRHKLANIAIANKIARYIYSIMKNKSSFVILHEHIMRLPEETRYAFFNSISLDFPKNTRKQIYQYSDINGEVHKFVYTKLEETMII

SEQ ID NO: 171945 - protein, 320 aa, unidentified
MASRESLFIGIDVSKQTLDVAFGADPHAPRETIPSTDEGVQLLVTRLQRLQPTLIVLEATGGLERMVFAQLLQAGVPTARVQPRRVRALAHAEGRQAKTDRLDARLLARFAERVRPPHHQATDEQRASLRDLLVRREQVIQMRTAEINRLTAAAPNLRPGIQQHIDWLDQEIRALEQERDNEAERTDEVRRKRELRDSVPGIGAITALNLLLRLPELGTIKRTEAAAVVGVAPYANQSGAQHKPRHSSGGRRDVRSVLYMATLAATRRRLVRRAFDQRLCQAGKPRKVAIVAAMRKLLTILGAILRQQKPWDPAVHTSAP

SEQ ID NO: 171946 - protein, 394 aa, unidentified
MKLVGIDVGKNSHHFCVMDKETGELNVTPSSFSNNKEGFDFLINSLKPYSKKSILLGMEDTGHYHVALLKFLLSNGYTVALINPKTTDLTRKMEGGITKNDKLDTITICDVLDTPERKKQYRITKVDRFDLYEQRQLTRHHHNLKEELNVYCNRLQKSIDLVFPEFNTLFSSKYGIVYMNLLKTFGSAEAIASTDIRTIRKCFEIKGRGNRISLTPEKLKECAKNSIGISSEVETIQIKHLVSQITLIKEQIAEIDKKIEEFSITNNSPILSIPGISHFSGTSILAELGDIGNYSKPSQIIKFAGVAPYHYESSQYNAQHTAITKKGSKYLRKTLYQIILPVINNNPVFKKYYLLKISQGKGHRCAQGHCIRKLLRIIYHLLETGQSFDPALLR

SEQ ID NO: 171947 - protein, 352 aa, unidentified
MSSEVITVGVDAHKAVHVAIALDEAGHRFGEWSGGNTVSEWARFGDWLRSLGGARQVGIEGAGSYGRGLAVSLVHAGEVVYDVNGRLTALGRRHARRRGKSDSLDAEAVAHTVRREADALPRVVCNDDARILSHLSEERETLVHEATRVRNRLHAVLLELDPEYKQWASLLSSQGLSALEALPSDPEDDALRQALRASVRRHAAHLTMLMRDINELAKEIETRAQPYAALTEITGVAPLTAGTLAGIIGSHAPFANDAQLAAYAGVAPLEASSAGNGRHRLNRGGNRRLNAIIYRIAIAQLRHPGQGRAFLDKKLCQGHTKKEAIRSLKRYIVRAIWRHWRRCPPQTSFACL

SEQ ID NO: 171948 - protein, 390 aa, unidentified
MANIIYIGLDVHKEKIQACAFLAAYGFGEDRVLANIELGGNYQEIIKFASTLKKKFGKETRFVCGYEAGCLGYSLCRHLQRCDIECHIMAPTTMSKEPGVRIKTDRRDAEMIARCLAYNTYKGVHLLDEEDESVRDYIRMRDDFKQMLKVVKQKILALLLRLGIRCDTCKTPWTQKHLQWLKNVDMGKGLNRETLDEYLKELDHLKDRIDNFDTRIHELCDTERYKENVKKLICFPGIKEHTALSFISEIGDFTRFGKAKNFAAFLGLVPGEQSSGSKVHRTALTKSGNIHLRRLTTEAAQAAIRSSPSYKSKALKARQEGAPEEVIAYADRARDRIIRKYKKMIRGEDLLGGHKAHNVVVAAVAREMSCFICGMMNGWYDGADSDKLQT

SEQ ID NO: 171949 - protein, 410 aa, unidentified
MERLIERGAGLDVHRDSVAVCVRVPGPGGDRVQHVRTFGTTTEALITLRDWLDAHGVTHVAMESTGVYWKAVYYMLEENCVCLLVNAAHIKQVPGRKTDVKDCVWIADLLEHGLLRGSFVPPPFIRDLRDLTRYRRGLIEERTRQANRLHKLLQEAGIKLASVASDILGVSGRAMLDALAQGTTDADVLADLARGKLRRKLPALRQALTGRFRPHHAFLASQLLAHLDYLDETLETVTARIGEVLAPFAVVIDRLDTIPGYSRQTAEEVIAEVGFDMSVFPTDRHLSSWAGLCPGNNESAGKHRSGRTRKGNRWLRQTLVRAAHAARYRKDTALAARYHRVARHRGEKKALVAVAHALLVTAYHVINEQTTYRELGFDYHDRRDAEQARRRALAVLARQGYRVTLERAAA

SEQ ID NO: 171950 - protein, 343 aa, unidentified
MSEVSIIGLDIAKNVFQAHGADARGKALFSRRLTRGKVLEFFAAQPACTIAMEACGGAHHWARELQRQGHEVRLIPPSYVKPFLKRQKNDAVDAEAICEAAQRPNMRFVAVKSEEHQASGLVFRTRDLLVKQRTQLMNAIRGHLTEYGWVAPKGPSWVRMLADLLEDKMGESLPKAARSMLRVMHEMLTFLDARVDELDKEIGRRAREDEVCRRLMTIPGVGPIIATAVAALAPVAETFRRGRDFAAWLGLTPLQHSTGGKTKRGRITKMGDRTLRRLMVNGSSAVVLHAAKRGAPAGSWLEGMLARKPRMLVTVALANKMARVVWALLVSKQDYRAPGVAVA

SEQ ID NO: 171951 - protein, 417 aa, unidentified
MQYGSTVLAAEPVNGVTCGIDWARDDHAAAIVDAGGREVHRSTIEHSSAGLRTLVELLTHAGVAEVAIERPDGPVVDALLGAGITVVVISPHQLKNLRSRYGSAGNKDDRFDAFVLADTLRTDRARLRPLVPDGQSTVALRALCRARKDLVAHRVRVANQLREHLNRVFPGAVGLFTKLDSPISLRFLARFDCQDRADWLTPRRLESWLKSMGYCGRTDPAAVYARLSAAPRGLCADAGAAQVPITRALVAALGSLVEQITMLSDQIGQQLEAHADSHIFTSLPHAGTVRAARLLAEIGDCRARFPTPESLACLAGVAPSTRQSGKMRSVGFRWACDKQLRDAVCDFADGSRRANPWAAQLYGRSRARGHDHPHAVRVLARAWVYIIWACWQTNTAYDPGRHRALQALLKQPEQPAA

SEQ ID NO: 171952 - protein, 490 aa, unidentified
MFPRRPPGSLVLLVYEESAAAMAAGMADGTGAPGRGGDGAEVAEDSTQVVEYAAAIDVAKGSGMVCTRVPGLRAGRRRQRTWRVEATFNEVTALMDHLRAEGIQRLIPESAIECWRIWYYLAEAAGLEVWLVNARDVKHLPGRGKSDTADCVWLCKLNERGMLRRSFVPPQPVRDLRALTRTRARLAQDQARHQARVEKILEDALLKISVVISDLSGASGRRFPGALVAGERSPAALAALGDKRLRATRARLAEVLTGRFRDIYAFEIAVHLRLIDAICAEITALDEQIGQQLALVPGTAPACATCGLAGAGHAPGCEDQDVALLPLAGRLDEITGVGAVNGRAIIAELGTDPSQFPTPGHAAGWARLTPRSHQSGQTARPGRTGKGNRYLRGAPGQAAMTAARTDTRLGAMYRRIARKRGRQKAIVAVSRVICEIAWILICDPSARYTELGPDYYHPLSAARQTQTKIREIERLNPGKKVILADAGAAA

SEQ ID NO: 171953 - protein, 343 aa, unidentified
MYYIGLDVHKRTISYCVKDAAGHVHQEGKIGSTRRELDAWIKTLPQPRTIAMEATIFTGWIYDHLLPHAEKVKVAHPLMLRAIAAAKKKNDRIDAGKIADCLRCDFLPECYMTSTEIRDRRRTLRYRNLVLKQMVQMKNRISGLLMETGVSYNKQRLHKLGYFTELMSGNEEVDESIRPLLKLSRETIVRSQRLDYALVSSLERDPLLAERLKRLRTIPGVGPITALTWALEIGDVSRFQSVKQAISYCGLCSAERSSADKLVRMPISKQRNKHIQQTLVEAAKLAPRYSPELALVSERERQRGNKNRATLAVARKMVAYMLAVERRKQNFVLKGEFSGTAAA

SEQ ID NO: 171954 - protein, 357 aa, unidentified
MTTQQKQSCLFIGIDVHKDTHTAVGISPYGEKLFEIMVGNYKNDFENLTNKVEEMKGTLSPFFGLEDVRGYGERLAGFLYEKYPVYHVPSILVDRQRQNATHPEKSDSLDALGVAKVMIQSIDTLLPYTISKESEKAKQIKEISIDREDLVLERTRLKNQVHTLLYRIYNTEYEQKFKDPFSIKALRFWSKAKPKCDPYLLKTMKRKIRRLLDIHTEVVDLEKDMDKLLTEGEYTIQTASGCGVVIASTIIGEIGDITRFTSPGALSKYAGCSPRERSSGKKTRHVKSRSGNRRLNCAFHRMALSQISRMGNDRARAYFKKKISEGKSKSQALVCLRRQMVNIIWMMLKHKTIYKNA

SEQ ID NO: 171955 - protein, 333 aa, unidentified
MVEGTKGSHHKEGSTKMSKTSTVVAGIDVAKEHLDIVVRGCSKVWQVANAREGFLELTRLMREHRVTRIGLEATGGYERDVVEHLRAEGFAVVVLQPLQVRAYAQMKLRRAKTDGIDAALIADFTADHATVREVPDARLAAIAEHLTWLEQTEEDMARIKIRLEHVRSPEAQRTWKDDLARLKQRRASMIAKLSATLRQHDDLATRLKLLLSIEGIGPRTAIALLIRMPELGRLSRGEAAALAGLAPFNNDSGKRVRQRSIAGGRTRLRTSLYAAALPAAFRWNAGLVALYNRLRAAGQPHKIALVACARKLLSYANTVLARGTPWIKSATPA

SEQ ID NO: 171956 - protein, 321 aa, unidentified
MTAKLFIGIDICKARLDIADDTEALAWSVAHDDAGITSLVARLQPLHPTLIVMEATGGLETFLYAALTTAGLPAVVINPRQVRDFAKALGTLAKTDALDARILARFGAAIQPTVRPMKDATTQELTALVTRRRQLLTMLTAEKTRLQQAAKWIRPDITAHIASLEKRLKKIEGHIAKLIHTTPGWKETDSLLRGVPGVGIVLSINLLSSLTELGTLNRREIATLVGVAPLNRDSGTWRGRRRIWGGRAQIRAALYMAALSASRHNPVIKPFYQRLIAKGKKPKVALTACMRKLLVILNTMVKTQTAWNPGHFSPLDFNHGC

SEQ ID NO: 171957 - protein, 378 aa, unidentified
MICVGIDVSKRKSTVCFMAPGDKIIRRPFDVKHTKEELQPLVDEIRVQAKYDEIKVVMESTGVYHLSIAYFLQQNGIFVSVVNAMKVANFNKAENFRHTKTDSIDSTNIARYGIAYWAKLPQFDLNGDKYFLLKRLCDAYLNFSEERSRILLQLQSQLEQTMPGIFDLFGGFDINSGKDKLLDFLERYCHIEDIIAKSEAEFVASYREWAKEKGYRSNESKAATIYAQAKNGIPSIPNNPIVRETIMWYVGLLRRADEALMASLTRMEDIAKDLPEYELVGEMGGVGRVTRVALIAQIGDVRRFKNKHSLICFAGLTPSIHESGKFRASQNHIVKKGPARLRKVLYQVMMSLVMHKIPKDDAVYRFIKKKEAEGKYKK

SEQ ID NO: 171958 - protein, 339 aa, unidentified
MRLYSAFDVHGKNNFLGIIDEDGKRIFRGKLSNDPQGIREILEPYKEQMVGIVVESTYNWYWIVDALMEEGYRVHLANPSAIQQYSGLKHADDEHDSFWLAELLRLGILPEGYIYPREERPIRDLLRKRGHLVRLRTSLIISLQNIVSRNCGMKVNVNDVKRLKEDRMGPLLAGHEDLALAGGVSKESIDFLTHQIRRIERAVEWRVELKEPYGYLLTLPGVGKVLGLTIMLETGPIGRFPKVGNYVSYCRKVSSQWMSNGKLKGRGNKKNGNRYLAWAYSEAAELARRYDPESRAYYQRKMQRTNFMVVHSALAHKLARAGYYIMRDQVPFQSEKLFR

SEQ ID NO: 171959 - protein, 371 aa, unidentified
MKKDSTIKFIGLDVHSKTISVAIADEGRKGEVRHYGTIENTFEGIDKVIKSLTATGVELRFIYEAGPCGFTLYRYLTGNGFTCIVTSPAMIPRRKNVRIKNDRRDAMTLARLYRAGELTGIYVPEPEDEAVRDLGRARDDARVAERKAKQRLNSFLLRHNLIYQGKTKWNRTYFNWLGSVGMKYPAQKVALQEYIEAVSECTGRVARLSEQIGLAVEEWRMGPMVKALQALRGVSLICATITVAELGDLSRFQNPKELMAYLGLVPSEHSSGETIRRGGITKTGNGHARRVLVEGAWTYKHHARVTPPLIKRQRDLPKSICDISWKAQLRLCARYRKMVARKKPNNVVVIAIARELAAFMWAIAREVKAAA

SEQ ID NO: 171960 - protein, 358 aa, unidentified
MRQQSNEISFKGQNIYVGIDVHLKSWSVTILSETSVLKKMSQGADPDALHRFLTSHYPEAEYYSVYEAGFCGFWIHDRLTELGIHNIVVNPADVPTMSSEKLRKTDAVDSRKLAVSLRAKQLKGIYTPDSEALEIRSLIRLKNSITKDMTRQKNRIKSQLRYLGIEIPTEYLEPHSNWSKRFLNWLREVEMRTPSGRQTLDILIMQFEALRKQKAEMTRRLRALSHTDRFEEMLGLLMTVPGIGQTTGLALMAEIVDITRFDNAEQLAAYVGMIPMCHSSGEHEGVGDITLRKHAILRSNVIEAAWVAIRKDEAMQLCYLNNCKRMVPSKAIVKVARKLVNRIYFVLKRHQPYVNAVA

SEQ ID NO: 171961 - protein, 341 aa, unidentified
MQNDTRIAVDLAKAVFEVAISERPGRISRRERLPRARFLNFFAQQRSATVVMEACGSAHFWGRRIEGLGHRVVLLPPHHVRPYVRRNKTDRADAKGILEASRNEDIRPVPVKTVAQQVLTSLHRLRSGWMCERTARINTLRGLLREFGFFIPVGARQVVPAVWALIEDADADVPDALRPFLAELCHEIRALEARILRVEQQLTAISKQLPVVAQLLTIPGIGLLTATAMLAFIGDIRRFPSARHFASYLGLTPREYSSGLTRRLGHISKRGDGYLRTLLIHGARSVLLHARTSQTDRLRAWANQLAQTHVHNKVAVAVANKMARIVWATWSRSQPYRPLAA

SEQ ID NO: 171962 - protein, 360 aa, unidentified
MTATMTYVGLDVHARSTQAAAIDVASGELRRARFGGDSAELVAWLDALPQPLRACYEAGPTGFALQRQAAAAGIDLCVVAPSKTPRAAGDRIKTDRKDAELLARLLLAGQLRPIAVPSPSLEAARHLCRAREQLRGDLMRCRHRVSKLLLLHGRVYPGATAWNGLHRKWLSRQRFEEPASELAYLDSLAAVDGLVARRQALDERLSRLALAGEWAPTVARLRCFRGIDTLSALLLGLEIGDFGRFDSPRELAAWLGLVPTLDQSGESRRQGAITKTGSGYARRLLVEAAWHYRREPRIGVSLRNRQQGQPAHVLQIAWRAQDRLYRLQRRLRARGKPANVATVAVARELACFLWAAAVAV

SEQ ID NO: 171963 - protein, 311 aa, unidentified
MEHSHFVGIDVSKNHLDVHVRPTGDSFRVRDDDAGLVTLVAHLRPLAPVVLVLEATGGYEVTVAATLASAALPVAVVNPRQVRDFARATGQLAKTDTLDARVLALFAEAVRPAARPVPDAQAAALGELIARRRQLVDMLGAEHNRRRLLRDRRLQRHLDAHIAWLEEALRRLDQDLTTLIRSTPVWRETDDLLRSVPGIGPVTACTLIADLPELGRLDRRRIAALAGLAPIARDSGAFRGRRMIMGGRPHIRRVLYMATLTAIKHNPAIRAFHQRLVAAGRPGKVALTAAMRKLLTILNAMLRDRRPWQPA

SEQ ID NO: 171964 - protein, 325 aa, unidentified
MEKVFIGIDISKLTLDIYVKSYSSAQHYQIENNTKAIAKFFKSFNNTSNIIVAMENTGRYNFSLYAVLSTMNISLYVLNPLHLKRSIGLLRGKNDKLDSQRICGFIEKYYMDLEPWKSSSLAIQKLSVLRAERRHRIKIKSGLMAQQKDKELLKDIVDKEMIKLNKAMITLIDKQIKVIEEKMMSIINASIELKDQYKRLQSIPGVGKVLATLMIIKTKGFTEIKSARKMACYSGIAPFEHQSGSSIYYKPRVSTMADMELKKILHLAAMSAIRLKNDLAVYYHRKVQEGKNKMAVLNAVRNKIIHRIYAIIKNNSVYENNLLLS

SEQ ID NO: 171965 - protein, 402 aa, unidentified
MKASKQYLRFCGIDMAKQKHVACIIDQDGRYLLRPKSIRNDADGYQQILNCLKQSGRTKSILTGMEATGHYWYSLHDFLTRQGYTVAVLNPIQTSQQTKQAIRKCKTDKYDAFHIANLLRTGQYKAAVVPGELAMTCRQLTRLRYRIVKQAAMIKQLINSRLHPAWPEYEGLFSNKFGTTSIKLLQTASTPKELMELDQDDLGELIRKASRGRFGPAHTQKILHSAKNSVGMQRGHYGISTGIKFLLEQIVALEPVCKKLDVEIEKLAAKLPEYLFTLPGATELTIVSLYGEVDPIETFKRPSQLTAFAGLDPKVFQSGQYDAPRRHVSKRGSPYLRRTLWQMAYRAVCNEGDLRDFWRRKHRQNKHHLVAVTAAANKLCHIVWRIMTDRRDYIKKGYNPKS

SEQ ID NO: 171966 - protein, 350 aa, unidentified
MKHLGLDVHTNWTVLAWVDSESGEVADPYRLDNTELLAHVAALARGGRVALETGSRSIFLARQLKSLELDVLVVDAARLQPYLAARRTAKTDRNDALSMTQLLASGELDALAVYVPDEATEELRNLTRTRLHFSGQATATSNTLRSLVRSQGLDLPGVMSTKRTREWLDAWEPTLSEHNRLVVQELRQDWADLQARLKRLDAPLKVIARRDARVARLMTLPGVAELTAVTLVAEIGDIARFPAAKHLRSYARLVPQVQQSGERMYTGPLVKRGNRHLSRALVLMAQHVSWWQGLYGTTLKSRYRRCRDKHGANPAKVALARDLCDIVYAMLREGTEFDASRLPRTRPRPI

SEQ ID NO: 171967 - protein, 353 aa, unidentified
MIHLGIDQHKKYLQVHAMNDNGEVVFKGRLNNNMDEFIKLRNQLGDDQIQSVVEASRTWVVYDLLEKLQFNPKVANPLKTKAIAEAQIKTDSIDAQILSCLLKGDLIPEVKVAPYEVRRVKNIIRQRMWLVKFQTAMKNRIHHILDRNHISFGTGISDLFGVQGRKWMKTVSKELPKSEGELLNENLELLEGVELHVKNIKGLLREHLNMKREVEICKSLPGVGDVFGPLIALEIWDINRFSSESKLVAYAGLTPTTYSSGGKTFHGKLLPQSNKLLRYAFCEAAWAAIKSSPYFGSYYQRLRERLNPQKAIVGVARKMCEITWYCLQEQRVYEERVYKRWEGKEKSKVCQTR

SEQ ID NO: 171968 - protein, 353 aa, unidentified
MPVYVAVDFHAREQTISWCDTADGEVHRTKLRHQHDDVRKFYEQFSGEVIVAFEASGYSAWFEQMLAELGHTVWLGNAAEIRRKAPRKQKNDRRDADLMLELMLKSDFPRVHTFSAESRTVLRQLRYRHKLVKIRTIAKNSVHAIGINAGLPLRGRLLTQTGLEQLQALPLSPVLSQQRDEWLALIRLMNKQIGAVEESLAQRAQADEAVELLRTHPGIGLLTALALRYTLDPVSRFTSTRCVVGYAGLDCVEEQSSERRRMGSISKQGSRLLRFLLNEAGQTAARQDPQLKQFYRRLLRRRDKPKAKVAVARKLLVRSFIMLRDQIDYAEFVRRGVAARVARETHSPKVTDL

SEQ ID NO: 171969 - protein, 409 aa, unidentified
MQVMHPRCAGLDLGKDVLAAAVRVQDADGVKQECRTYGTTSHWLGELSAWLHSRGVTHVVMEATGSYWKSVWHALEGQFELTLANPVQIRNVPGRKSDVNDATWMADLLAHGLIRGSFVPSAEIGALRELTRARKQFGREIARHTLRIQKILDIANLKVTGTISQILGVSGRAILKALIAGETDPEKLADLAHPRVRVSRARLVESLRGHLTAQQRQLLKMHMTLIEALEASIEQLDRDIAKAVTPFRQTVQRLKGVPGLSDINVPAMLGEIGVDMTRFKTHRHLVSWARLCPRLDESAGKIHSTRTMKGAAWIKTLMIQAAWCAIRVKDSYPRAQFLRLRARRGTKKAIVAVAASLLTAVYYMVRDETPYKDLGIGYFEKHDRSRVARRFVARLQQLGFNVHLTEAVA

SEQ ID NO: 171970 - protein, 420 aa, unidentified
MNAQDTKPAAFIGIDWADQKHDISIHPADKSTPLHEVIESKPEAVQEWILKVRDRYAVDGSKIYVCIEQSKGAFIYQLMAYDFFVLFPINPKSLASFREAFSTSGAKGDPTDADLLAEIVELHSHRLKAWRPDDEQTRKLAAFCKKRRDAVQAKVRLVQQVKAELKNYYPFALELLDERLDTPLACDFLTRWPTFESLQRAKAPTLRRFFYARHCRDIDRLNNALARLASAVNPTKDSAIIDPAAANVRMLARQLRAILPAIDEFDKEIGALYKSHPNAEIFASFPGAGEQLAPRLLTGFGTDPSRIESAVQMSVISGIAPVREASGKTCVIHRRWACPKFLRQSFHEFAACSLRSSSCQWAKAYYDDQRKKGKRHHTAVRSLAFKWIRILFACWKSHTPYSDALYNEKLRSRGSAFACA

SEQ ID NO: 171971 - protein, 410 aa, unidentified
MLKIVYPICCGIDVHKSFVVACIASTNEQLVTTYKSKRFSTFTGDLRRLADWLDQNNCRNVCMESTGKYWIPVHNILELNCDVVLAHPKYIKAIKGKKTDKRDAKWIADIFKHDLIQGSFVPPHEIRQLRDLVRYRTKLTGYKTGEKNRAQNCLTVSNIKLDDVFSDVFGKSASAITDRLLESDEPFDVTPFVDRRCKTPIEVIQNAVDGSMCANQAEKLRIIRSHMDSLELCKLNLESEILAIAEKFLPQINLVSTVPGIQAFSAISIIGEIGVDMSVFETSRHLCSWAGLAPQNDNSAGKKKTTRISRAGVYIKPLLVQCALAAIKSNKHTEVRNRYNSIKKRRGHKKAIIAIARMLLTAIYNILKKNEPYSAELYLAANKPPVAREITVEQAIYIIQRQGYLVINSA

SEQ ID NO: 171972 - protein, 535 aa, unidentified
MPQLKVRYVGLDVHKDSITLAVAEAGRDPARHVETIPADFHSLQKRLRRLAKGYRLQLCYEAGPTGFELYRRLTEAGYACEVIAPSLIPTKPGQRIKTDRRDAVHLAACLRSGDLTAVRVPDAETEALRDLERARTAAKAAELTAKHQLGKFLLRHGRTWTKSNWTRSHLAWVRRQQFEQEAQQRVLRDYLNALEAATERVAELTRDIEELIAQSTLAPLAIALQAMRGIATISAVIIAAEIGDLRRFRTAKAFMAFVGLVPSESSSGQRTQRGSITKTGNRHVRRILVEAAWHAFRAAQTSKALRARRAKVSDPVARIAEKAQRRLARKFYRLVYEKGKSPQVAVVAVARELAGFLWAIGQQEQLLASDGPALGAHPQRPPQADEPSLSPRRQSPAAGERPTSGSDEGPPAGRRRMKKTKMKAKSNVEQPSPSTPATGSELEPSRGKTPRRATAKRGKMESHSKTTSKSKARSHAEAKSHSETTSNGKTKSVSETNEHREISSRQTKQPTRRASRTGIGNGSRTQAGGARGSSG

SEQ ID NO: 171973 - protein, 354 aa, unidentified
MIIIGVDFHPEFQQIALLNTTTGEVEEKRLAHPEEAEKFYRALAGAGETVRIGMEASGHARWFERLVAELQFDLWIGDAAEIRTKRVRKQKTDRQDAQLILSLLLEDRFPKIWVPSWENRDLRQLLWHRHRMVQARTRVMNQLQAVALNEGLRCKKKLWRERGRQQLESFGLAPWASRRRRDLLELLDRFNPAIAELTQAMEREVENCPAAQRLRTHPGVGVLTALAFVLILGDAERFHCGKQVASYLGLVPLEDSSGNRRRLGHITKQGSSILRFLLVEAAQVAVRSLPEWRSKYFHLVLRRGRKIAKVAMARRLAVQLFWMMRKEWNYEQLKKFGSHAGQPGNRHGVQSNTE

SEQ ID NO: 171974 - protein, 358 aa, unidentified
MTDNVTGATVVGGVDTHKDLHVAAIVDQNNKVLGTQYFPATRQGYRQMLAWMTSFGALKRIGVECTGTYGSGLLRYFQNAGLEVLEVTAPDRMERRKRGKSDTIDAECAAHAAFSGIRTVTPKTRDGMIESLRVLKTCRKTAIAARRVALQIIHSNIISAPDELREQLRNMTRMQLIRTLGTCRPDASEYHNVTNVYRIALKSLARRYLELHDEIADLDVMIAAIVDELAPELIKRNAIGYESASQLLITAGDNPQRLRSESGFAALCGVSPVPVSSGKTNRYRLNRGGDRAANSALHIIAIGRLRTDAKTKEYVTRRVSEGHTKMEAIRCLKRYISREVYTLLRNQNRQINSTPLTA

SEQ ID NO: 171975 - protein, 400 aa, unidentified
MLSIGIDVSKGKSTVCGMKPGGEIVYAPFEVQHTREGMLELVSLLRSSGEEVRAVLESTGSYHCPVVAALLENGIFVSVVNSLRMKRFCSQSIRKVKTDRIDAMQIALYGLAYWQELQPARLPEDTYRELQLLARQYYQMTSMLIKAKVDFNALCDQVLPGMQELMSDHAGRHKLSDFVLWYRHTTHILEMGETRFRKDYCKWAEKKGYRNCERMAVLIFATAQNGIPVLPNAPSTQIVITEAIRVLHTVEASRDAILTQMQALAKTLPEYSLVREMPCIGDTLAPRLIAEIGDVRRFHSKRALIAYAGIDAPPYQSGKFCANNRHISKRGNRYLRKTGYEVMQSYVMHKPANDPIFTFIEKKRGEGKSGKLAMVAGLNKFLRVYYGKVTELYRSLPAIE

SEQ ID NO: 171976 - protein, 359 aa, unidentified
MDIRDQAKRHVVGGVDTHKDLHVAAVVDERDRVLGSQSFATTRQGYRQMLAWMGSFGEVQRIGIESTGSYGAGLLRFVQTVGIEVLEVTTPDRHDRRRRGKNDDLDAQNAAHAAFAGQRTVTPRRRDGLVESLRVLSACRKTAVAARRVALQLIQNTIVCAPDGLRDVLRSMTRMQLIRTLAAWRPDLTAYRDVEAAYRITFKSLARRYLELHDEIADLDIMIGAIVDELAPDLVARNSIGHVGAAQLLLAAGDNPDRLRSEASFAALCGTSPVPASSGKTIRHRLNRGGDRHANSALHIIAIGRLRTDPKTKTYVAKRIAEGHSKLEAIRALKRYIAREVFTLIMRRHKAINQTQIAA

SEQ ID NO: 171977 - protein, 406 aa, unidentified
MDQLYVGIDVGSRGNVAYIMRPDGELFSTFAIGNTLGGYWDVSKRIVAAMDKLGLDTVQIGMEATSIYGDGLVHAIREDGSLGRFQRKIHVLNPKQVSKFKESYNDLPKTDWVDAFVIADALRFGRIKNEVYCDDYRYEALKTLTRARFYAVQNLAREKQRFGNLLFKKCSGLAQSSDVINTASSTFALMESFETVDDLANAELENISAFLHAASRGRFANPDETAKIIQAAARGSYRLPKTVNDSVNQAMSVSIAGIRALQGQIKELEAAIQKQFEIIPNTIISVPGIGKVYSAGIIAEIGDIRRFQSHASVAKYAGLVWNKHQSGIFDAEDTRLIKSGNRFLRYYLLEAANSVRGCDSEFQRYYNLKYKEVRHHQHKRALALTARKLVRLLFRLMKDNRLYIPA

SEQ ID NO: 171978 - protein, 395 aa, unidentified
MFFVGIDIAKRSHEACIIGSDGAFLVKPFKFTNDFKGFNKLLDALKTVGEDISSFEFGMEATGHYWLNLYCKLLDQSAVVRVINPVQSDALRGLYIRPHKSDSKDAFIIAELLRFGRYSDTVLAEPDLIALRELTRQRTYLVDCASDAKRKVITLIDKVFPEYEQLFTDMFGSTSLQLLETYVTPDEIANLDTETLTDFLAAASRGRFGRDKAEQVQSFTRNTFGSFIFADSAGFAIKQFLEQIRLLERQVQELESFIADYLAKFNSSLSTVKGVGSTLAAVFVAEIGDVSRFPSPDKLAAFAGLEPRMNQSGEFTGTQNHMSKRGSPYLRRAFYQAAVACNMHNPALHAVYEKKRAQGKHHNVALSAVARKLVNIIYTVMKTNKPYVMIMPDVN

SEQ ID NO: 171979 - protein, 387 aa, unidentified
MQASTMDTRTAGHCGTIFVAIELSQRSWLVTLRSPDKDKMSRHKLEGGDHAELLALVGRVRERAARALGAVPAVVSCYEAGYDGFWLHRLLLAAGITNYVFDPASIAVDQRARRVKTDRIDGEKMLRTLMAYLRGEPQVVRIVRVPAPEQEDARRASRERGRLIKEQTAHTTRIKALLRLLGMAVGNPRRRDWLNWLAAQRDWQGQAVPPQMLAEIKYEHARLMLVREQLEGLAQASAQADPAPAAAQMTERSELLLRLKCLGPAFATTLASEVFYKDFRNRREVASYFGLTPSPWQSGGIDRDQGISKAGNPRARCAAIELSWLWLRHQPESALTRWFRSRTLNNASKRNKRIAIVALARKLMVALWRYLTTGLVPEGALLKAVKA

SEQ ID NO: 171980 - protein, 311 aa, unidentified
MVGIDVAKDTLAVCLWPAGQEAPSWERTYPNSKVGLRRLLRDTPPEEPWVLEPTGPYSLGVVEAALEAGRKPRQADPYAAKRYLESHSSRAKSDRIDARGLARLGLDRELPPYRLKDPHLQRLWELLLVRRGLSKALATLRQQHHVLAQVKSSLQELMAGLQQHLQGLDREITAAGRKLDLFRRLLKVPGLGEMNAAALTVRLSSIPFATDDAFVAYVGLDVRLRTSGTYRGRRRLTKQGDAMLRWLLYLAARATLRSTKHLGFKHLYQRKRAEGCTSTGALCILARKLARLAWALAHNGEEYDPTRVFAQ

SEQ ID NO: 171981 - protein, 419 aa, unidentified
MEKSKTKKLKTVNEKTMIVAIDIGKSIHHGYFRGSDGQDIKAFPFYNSQKSYDEFWVKVLHFKQQKNLEEVVVGFESTGPYAEPLMNFLAKKPVKLVQVNPMHTKRLKELTGNSPNKTDREDPRVIADVIFLGHALTVVVPKGPAAELRRLTQARQRASKNRTAMVNQLHHLVFVVFPEFMQIIKKITSKSSLYLLKHHPFPEDIIDLGFERLQAFLKKISFGQLKQSQVKALFEAAGNTAGINEGKESILTEIRHLVSCIERESEFMDHLEEQMSQYLKQIPYSQSILSIKGLGEVTVAGLIGEVGDFKQFTTISEIMKLAGLDLYEISSGKHRGQRHISKRGRSYLRKLLFFVAINTIRTNGIMHENYIRMVNRGMPKIKAVVAITRKLLRIIFAMVRNHTTYRENYEQQYHKKLAA

SEQ ID NO: 171982 - protein, 436 aa, unidentified
MRGCRCSVIMGFTKPIEHSNLQRKVVITMNTTLYVGIDVSSRSNVVYLMLPNGDKHSNFSVANSHEGSTQLVKRIHSALTSNSLDTVLIGLESTSVYGDNLVYFLREDATLAPFNRKIHVLNPRQVKKFHDTYNDLPKNDYVDSFVIADCLRFGRINKEVYMGDYHYKALQNLTRARYFAVQNLVKEKQRFMNVLFKKYSTMTQEKVFSDTFSTTALAVYDEFESAEALANMDLHELTDFIIEKGKNRFPDPDTVAKAIQKAARSSYRLPKTVNDSVNQVLSISITSMKALESQIKEFDKAINAQMELLSNVLISIPGIGPVYSAGIMAEIGDINRFGNQAKLAKYAGLAWKQYQSGGFEAETTKLIPSGNRFLKYYLCEAALSLVRCDKGYSNFYHLKYKEVNRYQHKRALVLTARKLVRLVFRLLKDNRLYSSV

SEQ ID NO: 171983 - protein, 344 aa, unidentified
MNKLNRIGIDLAKNVFQLHGTDRHGKVMWKRRLSRSKWIKALQEVATTDCKIGMEACGGSHHWARVLQSYGYTVKLIPPQFVKPYVKSNKNDANDAEAICEAMSRPHMRFVAVKTVEQQDIQALHRIRAGLMSDRTGLANRMRGLVAEYGVVAPQTLSALQRSIPDWLEEADNGLSDRFRSLLHDLWEDLKYLTQRIGELDKAIRLLADESAVTQRLQQLRGVGPLVATALIATVGSGQQYAKGKQMAAAIGLTPRQHSSGNKDRLLGISKRGDAYLRTILIHGARAVVSQAKHRDDRLSRWCTDIARRRHPNVAAVALANKTVRMAWAMMKDETDYDPEFASN

SEQ ID NO: 171984 - protein, 349 aa, unidentified
MNITTIGLDLAKLVFQVHGVDARGKVCLHKQLKRAEMMKFFTKLSPCLIGMEACGSAHHWARQLSGLGHTVKLMAPQFVKPYVKTNKNDAADAEAICEAVGRPNMRFVPVKNTAQMSLLSLHRARQQFVAARTAQANQIRGLMAEFGLVMNKGIASIERRVPEMLEEADNGLPGQSRALFARLFEHLRSLDRQVKELDAEIKACHAEDAASQRLAAIPGIGPLTATALVASIGDAKTFHNGRQLAAWLGLVPRQNSTGGKTTLLGISKRGDMYLRTLLILGARSVLIKLKSHPERADGWLGTLAARRNTNIAAVALANKNARTVWALLAHDRDYQRDYQSDFRFAGSAA

SEQ ID NO: 171985 - protein, 337 aa, unidentified
MKYCGIDLHGNNNWVVILDDQDRVLYSRRHANDLSRLLPVLAPHRAELSGIVVESTFNWYWLVDGLQEAGYRVLLANTAAIKQYEGLKHRGDESDARQLAHLLRLGLLAEGYIMPKAMRAVRDLARKRMQLVQQRTAQILSIESSLSRHCGWKLSSNRIKCLCQADLDEMKLEALPLQGVQANVAVLQALQMQIDSLDEVLADYCRGEAGYRLLRTVHGIGEVLATVILLETGNIGRFADAGHYASYCRCVGSAYLSNGKKKGEGNTKNGNRYLAWAFVEAANFAVRHCEPARRFYQRKKAKRNSIVAIKAVAHKLARACYHMLKLKQPFCVERCFA

SEQ ID NO: 171986 - protein, 428 aa, unidentified
MTVRDCTSAKDFLQFKKEIRESKSHLIIGIDIAKDDHHAFFGTAYGKTLLKRFTFKNSIEGFESLLERMTEVKTKHGLSEVVLGLEPTANYHKPLGDFLIGCGHRVVLVSGVSVKRNRELLDGRWDKNDTKDSANVADLISQGKCLFYEYAPVLVRELRNLLSLKRRLKKQEHGLRIRIRNNLLAQYFPELDRYFNKWEPEMLSVVRWCLDPSVIAGLEYDQFVSLVYPGSKNLRQQGRLEWIWKKAVDSIGCAAGEAAEFEAQVLVEELRHIREVIKETDAKIKDVCLRIPEYDYLLTIPGFGPDVSSKVLAAIGNPFRFNSASQVLKMAGMDLNAERSGKRSNTAVPVISKKGSGHLRYALYQAAFIASCRHKHFKKYYANILVGREKEKGIKTKMRVKLAAKLLVIAWTLMKKREPFDLEYLKIG

SEQ ID NO: 171987 - protein, 348 aa, unidentified
MSQIPHTVTVIGIDLGKNSFHVVGLDRDGAPVLRQKWSRGQVEARLANMPPCLIGMEACVGAHHLSRKLKTLGHDARLMPAKYVRPYSKGQKNDFRDAEAIAEAVQRPTMKFVATKTAEQLDLQALHRVRERLVSQRTGIINQIRAFLLERGVAVRQGLRFLCAELPRILAAPPEVLSPRMIRIIGGLAEDWRRLDERIDCLSGEITALARQDAGCERLVSVPGIGPIISSAMVAAIGTGEAFSKGRDFAAWLGMVPKQFSTGDRTILGKISKRGNRYLRVLFVQAAWVVLIKPQSWERHGLKRWIEAAKKRLHRNVLAIALANKLARIAWSVLARSRIFEASKLQVV

SEQ ID NO: 171988 - protein, 339 aa, unidentified
MKYTPVGVDIAKHLIQVHFIDENTGDVVDKQLRRRDFLEYFSNRESCLIGMEACGGSQHWARELTKLGHKVRLLQARFVKAFVMGNKNDVMDARAIWMAVQQPGKEIAVKTEEQQSVLVLHRSRRQLVKFRTMQINSLHGTLLEFGETIHKGRAAMEREFPEALERMKERLPPYLITVLENQYNRLNELDSLIEDIEKQLTSVAKQNETCKRLLDIPGVGPLIAMAAVATMGEASAFKSGREFAAYVGLVPRQTGSGGKIRLLGISKRGDTYLRTLFIHGARAAALLTKEPGLWITELKKRRPVGVATVAMANKLARTVWAIAAHGRKYDKEYVSIRSY

SEQ ID NO: 171989 - protein, 432 aa, unidentified
MQPPESTVPNPAIAAYVGIDWADQKHDVILCAQAEPTVVEHQEITHSPESLLDWVGNIQQRFGTKGKILVCLEQSRGALIYHLMGYECFELYPINPNQLANYRASFKPSGAKDDRPDAELLCELVRCHRDRLIVWKPDTELTRKLATLNEGRRQAVDRRSRLANEIKSTLKIYFPLALQVLENDTTTALAADLLLGWPSLEALQKQSPSKLRKFFYGHNCRSEQKMLERLKLIKEARALTHDGAVIEPAALRVQMLAEQLKSLLPYIARYEKQIAQLFGSHPDSFLFRDLPGAGSALAPRLFTAFGSDRSRFQCAQQISSLSGIAPVRRASGRKSGKKGDMKASIHFRQACPKFLRQSFHEFAACSIRYCSWAERFYDDQRSRGKTHHVAVRALAFKWIRILFTCWKERRPYDEKLYLQALLNRGSAHAQSR

SEQ ID NO: 171990 - protein, 428 aa, unidentified
MLKQNTEPDPAPDFAAFLALDWADEKHAFRLQVVGQSKIETGTLEQKPEVLGPWLAKLRERLGGRPIAVGLEQSRGALIHALMAYDFLVLYPIHPTTVAKYREAFKSSGAKSDPLDAGQILEILTKHQDRLHRLNPDTVETRLLGRLVEDRRKAVDLRTSHIQALGANLKEYYPQALELTNNNLSSRLAGDLLIKWPTFEDFQQAKPSTLKRFYYGHNVRSPEVIERVLALADKSQALTTDAAIVESGRRLTQMYARLIEQLNPVIKDYEQRIQRVFAAHPEVKIFTGLPGAGPALAPRLLAFFGTDRSRFAAALNVQSFTGIAPVTKSSGKSKVVYARAACPKFDRQTFHEFSRLSVSKCQWARNYVDYYTDQGKKYHTIIRALAYKWIRILFKCWQERTPYNEDKYMATLKLRGSIFATWHLQNKS

SEQ ID NO: 171991 - protein, 345 aa, unidentified
MQIVSVGIDLGKTTFHLVALGAAGKVLVRKKFTQRQLLTYTANMQTSLIGMEACSGAHFLGRALRKQGHDVRLIAAQFVKAFVKSNKNDFVDAEAIAEAVERKNMRFVPIKTDDQLDLQAIHRVRDRLISRRTAVINQLRAFLLERGLVFARTPAKLRAALPDILENADLDLTPQMRNLIELLWKEWKTVEDQIKGLSLELERISAADPGCTRIRQIPGIGPIVATAIVAAIGNGAAFRKGRDFAAWLGVVPRQYSTGGKARLFGISKRGNVYLRKILIHGARAAVLRIKRDRAPIGAWLDALDARAPKNVVVVAMANKLARIAWAVLSSGEDYRPHSNLAAAWT

SEQ ID NO: 171992 - protein, 355 aa, unidentified
MVMLAENYDFVIGGDPDRDTIDLAVLDTSAGRVQAHLADSADGPGYDRMLTWAGEHAPGRRIWALEGTGSFAAGLVVFLLDAGETVVEVGALKRARGAKNDRIDAIRAGRQALARDEQGSPRAGGLREALRMVFACREGVLGSRTKAINELKSLIVVAPEQLRAELRGRSLAVQLTRIEALQAPPAAPVELRLSVFSLQSITARIRFLSTQLAELDPQLLSLITQHPAGPALLAEAGVGPIAAAQLLISWSHHGRVRDEAAFASLAGVSPIETSSGQRSRHRLNRGGDRALNRALHTVAITRLRCHPESIAYEIKRTAQGKTHRDIRRSVKRALARRLYRRIEAANRLENTSAAA

SEQ ID NO: 171993 - protein, 313 aa, unidentified
MSLPIVQYIGLDVAKRSLDVDLLGSPLHLAHDGAGCKTLVAKLRALPHPVHVVCEATGGWERPVVGALHAAGITVSVVNPRQVRDYARGIGKLAKTDKIDAKVLSAFGASVKDLHPTSPPQAQQSELAAWVTRREQLQSMLQAEVRRQIPGMPKPVAKHLQASIARLQKELKSVAQKMAKIIEANESMAAAAKRLQAFQGVGPGTAATLLGHLPELGTLEDNAIAALIGVAPINNDSGPKTGKRFIRGGRSSVRSALYMAAVCACRCNPVLKHFYKRLRDKGKPFKVALIATARKLLIALNTALKNPQFQPVQ

SEQ ID NO: 171994 - protein, 326 aa, unidentified
MQQEWIGIDVSKAELAVCVMNEQREVQQATFANGTKGFRSLANYLKKRVAVGSAVCMEATGSYGDALAAYLHERKYRVSVVNPLRIKHYAESQLRRNKTDRLDAEIIADFCRTQDVPQWTPPDPAWVELRALVRLLDDLIQMEVQERQRLQTTPSPTVQAHLQDHLRYLATQIEQVLAQIKQHIDQDPDLKHQQTLLNSIPGISDKTSSRLLAEIRDITAFETVGQLVAFAGLNPRQRQSGRYRGQVKISKMGNAALRAALFMPARCAKRHNPLVRDLVMRMEAQGYCPNAVTVAVMRKLLHYVFGVLKSGQPFDPHYLTKPALPS

SEQ ID NO: 171995 - protein, 317 aa, unidentified
MDHFAGLDVSVKETNVCIVDDTGSIVREVKVVSEPEALLQVLGNPIHRLKRIGLEAGPLSQWLFSALAEAGLPAICVETRHMRAVLQAQINKTDRNDARGMAQMMRAGLYRPVHVKTLRSQKLRMLLTHRKLLQSKAIAIDNDGTLRNFGLEARIKELVEDLPDLAELVEPLLIVRRTVREQIGILHRRLLTVVWNDEVCRRLMTVPGVDPVVALTYRATVDVPARFRNSKAVGAVFGLTPSRYQSGEINRPGAISKCGDEMMRVMLYEAAQIMPVRSTKWFWLKAWAMKIARHRGMKEGDRGAAAPVGGDHAPHLG

SEQ ID NO: 171996 - protein, 345 aa, unidentified
MDHFAGLDVSVKETSVCIVNDTGRIVREVKVASEPEALLAVLKNPAYHFERIGLEAGPLSQWLFSALAEAELPVVCVETRHMQAVLKAQINKTDRNDARGIAQMIRVGLYRPVHVKTLRSQKLRMLLTHRKLLQSKAIAIENDLRGTLRNFGLKVGMVGKVRFEARIQELVENLPDLAELAEPLLIVRRALREQIVILHRRLLAIVRDDEVCRRLMTTPGVGPVVALTYRATVDVPARFRKSKSVGAVFGLTCSKYQSGEIDRSGSISRCGDEMMRVMLYEAAQSMLRSKKWSWLKAWAMQIARRRGMKKAIVALARRLAVIMHRIWVDGTEFRWTREQAAVAAA

SEQ ID NO: 171997 - protein, 412 aa, unidentified
MVLLLQKALPVTTLVVAIDPGKAVNRVWLSRDDGGLVVEPLSLSVLRPGLEELDRLVRQHAGAGLPIFAIESTGALHRAWVSELGRRFPGAVRVFAPSETAAARAQLGSRRFKTDDRDCAALTYLARQGHGRAVAGDQHEALLATVRARRALVQERKVAQQRLHDQVNTLCPGLSAPPGHGRKLDLFGVAGQAVLDCLIAFDARPVAARSLIARAPGRLTQADAVFWASRWKDCLPPPADVTARVERLERSVARWRALSADIEIVDADIAVLLADTEGQVLTSLPGVKTARAAAFAAFSMPIARFPTPERLYCATGLAPSAYQSSTIERRRAISRQGLPEHRDALMNMAWGLSMHCAPFIHRHEELAARGMKPMQIRVALARHVCRLAHAMMTTQDEFDEQRYRQNRHQTGR

SEQ ID NO: 171998 - protein, 362 aa, unidentified
MDSNGFDDLLKTITSHCEDLSMVIVAMESTGCYHINLFSFLTSQGIRTLVVNPLLIANFSKLSLRKTKTDKKDAMTIARFLMGHHEEVSQLSLTQDHQDLRDFSRERESLCHLMAATKVEIKRVLRTTFPELESIGDIYTGVMLRFIQEYPSARLVRAAKPKAIAKVLKQPYVGNKLTYSAEDILRAAKASIGMVSPAKEIIVQGKIATLLHLQGRLEEVTKLLTDLCKATRVDDLKILRSIKGVGPKTAAPFLAEMGEVENYASHKKLIAFTGIDPSLHQSGNYIGMSKLSKRGNRHLRRAVYLMTMAVVSKNPFFKAYFLRRKREGLPPQKALFATAHKLLRTIFAMLTNRTLFKVKEAI

SEQ ID NO: 171999 - protein, 346 aa, unidentified
MMIIGCDFHPSWQQVSWLNTETGECSEKKLVHALGEAKEFYQQLAAPVLIGTEATGNSQWFIELVQDMGHEIWIGDAAQIRASYVRKQKTDKRDAAHILKLVVEGRFPKLWTPDREQRDLRQLVLHRHKLVEIRSRVKNELQHLSLNKGMQRQAKLWSAAGQKLLRELPLKPWAGCRREDLLGLLGMLNEQVGKLDQAVQQAAEKHAQARLLMTQPGVGPNTALAYVLSIGDVSRFPRGKQVASYLGLIPSEESSGGRQKLGAITKQGNRLVRSLLVEAAQIAVRFDLGMKKQYLHRCHQKPKGVAKVAAARRLAVRLYWMLRTEKPYPEIVRIESSPRVPLVGAS

SEQ ID NO: 172000 - protein, 430 aa, unidentified
MNESVSEQPLSPKVAAFVGIDWADQKHDVVLRSVGDPAKSEYQIIKSEINALADWIAQMHERFGAKGKVLVCLEQSRGALIYQLMAYELFELYPINPSQLANYRKTFFSSGAKDDRPDADLLSELVMCHRDRLKAWKPDDQLTRELTSLNEGRRNAVDRRTELANEIKSQLKLYFPVALQILENDITTALAADLLVQWPTLAELQKVSPGKLRKFFYGHNSRQEKKILERLALIKEAKPLTTDAAIIRPTALRVKLLAQQLKSLLPFIAEYERRIAELFGSHPDRFLFDNLPGAGPALAPRLLTAFGTDRDRFEVAGDLLNLSGVAPVRIASGKKTGKSASVHCRRACPKFLRQSFHEFGECSIRYCPWAQACYQAQRDRGKGHHAAVRAVTFKWIRILFACWKQRTPYDPQRYFQALQTRGSDYAQTTA

SEQ ID NO: 172001 - protein, 433 aa, unidentified
MFHPPDDYPRRAMEEHILEQITPFAALLGIDWSDHKHDVCLVDAATGCRELSVISHTPETLDEWAGGLRARFGGAKVAICLEQSRGPLIYALLKYDFLVLYPINPQTLSKFRAAFTPSGAKDDPTDAEYLVELLVHHRERLKAWTPDDEKTRTLQLLVEHRRRLVGDQTRISNRLTALLKGYFPQVLQWFPDIRTTLVCDFLLRWSSLDALKGVRRTALERFFREHNSHRKEAVERRLAAIKEAVPLTTDKAVIASSVLMARTLAMQMQTVLAAVKEFDREIEALCQSHEDYELFTSLPGAGKVYASRLLTAMGSNRERWRSADELLRFSGVAPLNDRSGKSSWTRWRYFCPKFIRQAFVEYAGESVRHSEWAKAFYVSQKAKGKSHQAAVRALAFKWIRIIWKCWQRREKYSEARYVECLRKKGSALVLAAP

SEQ ID NO: 172002 - protein, 484 aa, unidentified
MHLQITNKLTLAFDAFRFNFESAGALELPDEYSGLASEAAPILPSQSSGMHVPLHKLAQWSGMMNQLTDTQYTAYVGIDWAAAKHDICVQAGDDGRREFACISSQPEGIEAWAQDLYRRFGGPIAVALELSKGPIVSALQKYDFFVLYPINPSTLAKYREAFTPSGAKDDPTDAELAVDLMTRHAERFSPLKPQSVDMRKLIGLVEQRDKFVSDQGRLVNRLGHALKQYYPQVLEWFSEHNTVVFCDFLSQWPTLTQVKRARKASLERFFKRHHVNSAELIERRITAIKAAMPLTLDAAVIEPHRLQVEMLIEQLRITIRALKRFDEEIAATAHKLPDYDLLFSPLPGAAKVLAPRLLAAFGEDRQRYPRADALQKYSGIAPVTKRSGKTTWVHWRWQCPTFVRQTFVDWAAQTINKSAWAGAYYRQQRAKGCSYQVAVRALAFKWIRILHCCWQKRIPYDESKYLEALRRKGSPLLKYLAEAA

SEQ ID NO: 172003 - protein, 367 aa, unidentified
MEKSTKVFVGMDVHKESIDITVAEQGGAVRRLGQIGGDRGSLLKMVRKQQSQGGERVFVYEAGPCGFWIYREITALGERCMVVSPALIPKRAGDHVKTDRRDSERLASLARAGELEAIHVPDIRDEAIRDLVRGRDDAVIAQRRVRQQLKALLLRNDIRYVGRTSWTGAHRRWLSELKLPEPAQQITFEEYVDAIAVATGRIERLTRAIETEVITWRFAPVVAALQALRGIQFVHAVTLIAELGDLTRFGSARQLMGYLGLVPRENSSGEHRRQGSITKAGNSYARRALVEAAWAYRHPARVTRIIATRQTGLPKAACDIAWRAQLRLSAKYRRMNARHLNHNKIVVALARELSGFVWAIGQSVKPQ

SEQ ID NO: 172004 - protein, 418 aa, unidentified
MVMKIVRFNCCGMDVHKNLVVATIGITDRKSNITEYFQRSFSTLNSDLYRLKDWLRSHHCSDVCMESTGKYWIPIFNILEDETNVHLTHPKYVKAIKGKKTDKKDSKWICDLFKHDLIKFSFIPPKEIREMREIARYRYKLVCMRSSERNRYQNCMTVSNVGLASVVSDPFGKTASNIMKEVMKSNVIDDDKILKLVHKNCKNKDKILDSLHGYHIESDQRFKMEKSLDHMEYLDQLIDSCEVELIKRAYPFRRSFQHITQIKGISALSAILIISEIGIDMSQFESDKQLVSWAGLSPANNESAGKKKSVRISKAGQYLKPLLVQCALSAIKDKTSYFGRKYSNIKKRRGHKKAIIAIARMMMVSIYRMILTGEEFNPCDHESFMDPKPNANPSLTVEKALNFLKQSGIDISSIPVNL

SEQ ID NO: 172005 - protein, 411 aa, unidentified
MRRVIGLDVHRTFAEVVFWEDGRLRPAGRVDMTRSGLEGFGRTLAQTDEVVVEATGNAMAVVRVLSPYVARVIMANPLQVRAIAHARIKTDKIDAGVLAQLRAADFLPEVWLPDAETERRRRLVTRRNQVVRHRTRVKNEVHSILHAHLIPPCPHADLFGGLGRTWLGKQTLPEDEVAAIARHLRELDRLGEDLAVLDREIAQATADDPSVRRLLTITGVNLTVAAGLVAAIGDVKRFSEPDKLVSYFGLNPRVRQSGLGLAQHGRISKHGRAHARALLVEAAWAASKAPGPLRAFFLRIRAKRGHQIAAVAVARKLTVICWHLLTKETEYLWQRPALVAHKVRSMELQAGQPKRKGNQRGPSHAYHVKELRDREIEIARQAERAYEHAVRNWQPSRPGKGRTGAAKEERP

SEQ ID NO: 172006 - protein, 471 aa, unidentified
MGHDHSRIDQQGGKKRKIVSPSLLKRINRNAAGIDCGSETHYVAVPPEKDPEPVRSFRTFTTDLNRLADWLEGCGIKSVAMEATGVYWIPIFEILEQRGFEVVLVNARHLKNVPGRKSDVMDCQWIQELHSVGLLRASFRPAAEIASLRAYLRHREKLVQGAASHIHRMQKALVQMNLQLHHVISDIMGVTGMRILRDIVAGVSDPKALAAHRDNHCRASAEQIAASLTGNYRPEHLFALRQNLEMFDAFQRQIQACDAEVESVLNALAAVSKRRPNAPPPAPRCKPRFSDNEPRFEIRDPLFRLSGADITQIDGIGPYTALQLIAEIGTDMTRWRTHKHFTAWLTLAPRNKVSGDRLISSKTQPSANRAAVLLRMCAMVLGRTSTALGAYYRRIAYRIGKPKAITATARKLAVLVYRVLSGELNYADPGAQAYEESHRTRTLQNLRNRARTLGFGLVDLETGEAIRGTVS

SEQ ID NO: 172007 - protein, 339 aa, unidentified
MEKNQAKQSKLIAVGIDVAMETLAICLRYADKDKFQEIANSKTEIKKLARKLNKDKFKGKIVMESTGRHHLQTALTLTENNLDVRVINPLIAKKYSSSSIRKVKTDKRDSQILAEIAIKEEKLPEKFHLGKNELIIKKKVSLIAFLDKEIQKMNASMNEYINNANELGLKLSKADKQIKKTIDLLKKQKEELEREVEKMIDDSKCNSNEIKKYSSIPGVSRYTASVSSLFFSGDYNLSPKQWIAFAGIDISVRESGRWRGKGKLTKRGNGYLRKRLFQAAWGAKMHNDDFKRYYDHLRDKGKSYVETLMIIARKIVVIMFNLSKNNECYNASKLSFLTV

SEQ ID NO: 172008 - protein, 324 aa, unidentified
MTKDRNYFGIDVSKDVIDICDDNGNHYQFKNSITGFKSLVNLLKENTVCVMEATGYYHLKLAYFLLEQNHHVSVVNPLKIKRYIQMQLSKIKTDKSDSKMIQAYGVSCRPSLWFGQSKTQQDSLQLSRLLTIYVKQTTQLKNKIHGEEVLGFPSKEVVRSLNRQLKSLKKEIKLLEAKLLKNVKLEHQESLTLLKTIPGIGDKTALMLLVFTDGFNRFESSKELCSYAGITPVIRQSGTSVNGRSRMSKIGNPKLRNLLFMCSFNACKYNKACKALFDRIVAKGKSKKLALIAVCNKLLKQAFSIVKNGVPYNDEHRSTLAINN

SEQ ID NO: 172009 - protein, 346 aa, unidentified
MKKIFIGIDFSKEKFDATVIKAEGVEERAERQHEVFDNKVSGFRRLLRWVKSATEELDTGLWLFCGENTGGYSRALCNYLYGCGYDMWLENAMSIKRSSALQRSKSDKADAGIIAEYAMRNYDQMHLYKPLDKNLERLREVFLYRHNLVKLKAALTVRKGEKRLTQEKSDISRFMAMSSKHLINEFNKKIAECDMRIEKIIGEDEELRRNFEIITSVPGVGTQNAVCLMVYTDNFSRFDYNSRKIACYYGVAPFGRQSGTSVNTPPHVSPFANKIIKALLTQAALASINFCPQMAAYYHRLVEVGKKKPVAVNNVKNKLLHIITAMVRKEEKYNPDHDFHAALKAA

SEQ ID NO: 172010 - protein, 334 aa, unidentified
MQNITLIGIDLGKHSFHIHCQDKSGKALLRKKFTRTKLMQFLATCPPSVVVMEACAGAHFMARRISDFGYETKLISPQFVRPFVKSNKNDFVDAEAICEAASRPSMRFVQPRTEPLQAMRALHRVRESLIRDKVKTTNQIHGFLLEFGISLPTGDAVIKRLSLVLAEHEIPEYLSRLLVRLHTHYLYLVEQIAELESELSQSINADDTAQRIMTIPGVGPITASLLSSQPGDGKQFSCSRDFAASTGLVPRQYSTGGKSTLLGISKRGDKNLRRLLVQCARSFMMRLERQHGKLAEWVREQLNKKHSNVVACALANKLARIAWVITTQQKEYQA

SEQ ID NO: 172011 - protein, 343 aa, unidentified
MQEITTIGLDIAKSVFQVHGIDASGAVIVRRQLRRSQVLPFFRKLPACVIGIEACATSHHWARELEKVGHEVRLMPARYVKPYVKRNKNDAADAEAICEAVTRPTMRFVAVKTCEQQSVLMLHRTRQLFVRQRTTLINALRAHMAEFGIVAGIGRNGVEKLLEIITGGEDDRIPPTARACLMALAAQLAMVKRQIVEADRWVLAWHRTSKTSKRLEAIPGVGPLIATALVASIPDPSVFRSGRDLSAWIGLVPKQNSTGGKERLGSISKAGNRYLRSLLVVGALSVIRRAKQLGYTRHPWLVRLMERRSVKIAAIALANKIARIAWAMMARNESYRTPLSASA

SEQ ID NO: 172012 - protein, 360 aa, unidentified
MLRQNTTLNFDGQPIYIGIDVHLKSWNVAIYSKELFLKSIHQESNVEVLVNHLWKNYPGASYHSVYEAGFCGFWIHRELQAHGVNNIVVNPADVPSTQKELLHKSDPIDSKKLGRALRAGVLRGVYVPTVHCEQDRSLMRLRHRTVKDTCRFKNRLKSFLYLNGIEYPEIFRFSGSHWSRRFMEWLKQDIKLSGKYAQKTLELLIQKVEHNRELLLQINRELRQMMREPRHAQNYELLRSVPGIGPVTAMSLLVELEDITRFENNDQLASFIGIVPTKHSSGERDSNGELTFRRHSILRRMLVEAAWTAVRNDPVLGLCFSKSCMRMKKNLAIIKTARKLVNRIAYVLKTKTYYVNGIVE

SEQ ID NO: 172013 - protein, 407 aa, unidentified
MEVFVDRGAGIDVHKNTVTVCVMTTEGREVVKTLQTFTTFHDDLEAMRDWLLEMKVTHVAMEATGEYWKPVYEVLEGLVEQVVANAQHVKNVPGRKTDPKDAEWLARLLRHGLLQASFVPPAPIRDLRDLTRLRRKTIELSARIENRAQKVLEACGVKLGSVMSDVFGVTGRAILEQLSNNKTNPKALAQLAQGSLKKKKPEIIRALQGSFTTHDAALLKHQLLLHDQLQQRRTAIEAELSVEVTPYEKLIARLDEMPGINRDAAIEILGEIGDDMSRWATHRRIAAWAGLCPGNHESAGKRKKVKVRKGNPFLKSILVQAATAAVKTKGTFYQAKFRRLCKRRGYKRAIVAIAHAMLIAIYHLIKNDMPYRELGATIFAERSAESKKKSLVEQLERLGYTVELRSA

SEQ ID NO: 172014 - protein, 387 aa, unidentified
MQKPHDNSKASPAAFMQDNTLIAVIELSLSNWLVAGLIPGVSREPLKKLEPNPEDLLKLLHGWRDEAIKAGRPITRIAVAYETGRDSFWLARWLRERGIDAHVIHATSVAVSREHRRAKTDRLDTAMLKRGFLGWLRGERGHCTVAIVPTMEEEDAKRPHREREGLVHEQTRTVNRMKSALIQYGVRNFNPKLRKASVKLETVRTPEGKSLPPNTIAALRRDMERLKIIKEQIKAIEQARLQQFEQKPEALANRMVYLLVRIYGLGLETADLLAHELLARTLRDRKAVARYAGLTGSPDESGSKRREKGLSRSGNARVRKIMIQLAWRMVKFQPDSALVQWFKQRTETAKGSRKPMIVALARKLIIALWRYANDGVIPEGFRLHSAA

SEQ ID NO: 172015 - protein, 365 aa, unidentified
MSKLAKVDRFFKNVNLTSDDEVFVGVDVHKKSYHVALCLNDTPAIDFRMNAEPKQLNKKLGAMAGSIKDIVYESGPTGYGLARDLRKNKLPANVVATSRIPCPAGAADKTDRLDSIKLAQYAAKGLLSPIVIPTPKQEADRQLYRMRHRQALQFAKVKVQIKSFLLMHGIDEPDGLANWSVASVGGLRDMKLLKTLRLSLDELLSDYDYFDNRVKVLNKVLADNLDKGVLGRRIDLLKTHPGVGPVIACQFATELYHYDDFNSTRQLYKYLGLSPRISQSGERSSSGPINKAANGRLRNNLIQGAWSWVRTDIEAKKCFWRIYENCGSIKQKAIVAMARKMSGHLWAMLMNDQPYDKNKAKCRHN

SEQ ID NO: 172016 - protein, 315 aa, unidentified
MEEKETIFAGIDVGKYNVDMAFGGQGEVKRFKNDDDGIGQILGLLKGRQVGRIVLEASGGYQRQLLAALLGAGWPAVAVNPRQARDFAKALGRLEKTDKVDAHVLALFAEKIRPPVRALPDETLQAVVDWLTRRRQLVEILMAEKNRSHQAQGAVRRDIEQHIDWLKKRIHDNERDLPKLLADCPAWNARVQLLDDQKGIGRVSALTLVACLPELGTLSRKGIAKLVGIAPLSRDSGTLRGKRCCWGGRSAVRACLYMVTLVASRHHPVIRDFYERLVARGKLKMVAIVAAMRKYLTILNALTRDHLKAIAVQAK

SEQ ID NO: 172017 - protein, 333 aa, unidentified
MYYIGIDISKKSFTVSILDEEGEALTKSFTYSCNREGMQKLIDKISSLKLEKDKVVIGIEATGNLWENLYSFLKGYKVIILNPYQTRKYHQVLSKKAKTDKVDSLVIAGLLRSKEALASYVPEDEVQVLRELVRLRHYLKKNKKNYLRKAYTLLNLVFPEYTDLVKSPFKKVSSMILKEYPTAVHMKKAKRAKLVKMARRIQGNNYSSELADKLIQAAKESIYSGKASEARGMVLRILIEEIQSFEDKIKEIGEKIDEILSSNDPPSPQKRLLSIHGVGPKTVAAFLGEVGDNVNRFSSANKLIGFIGWHPKISESGESKNLHPKMSKKGLLP

SEQ ID NO: 172018 - protein, 430 aa, unidentified
MRSEVKLGKQEPQFAAFVSIDWADKKHVWCLQAAGSEQRESGELEHTPEAVEAWVGQLCQRFADRDIAVALEQSRGSLVFMLSKYEPLHIFPVPSTMSANMRKALYPSGSKDDPRDADLLLELLLKHRDNLRRLSPDTEATRRVQNLVEERRKLVDEKTAQTNRLTGDLKIYFPQVLNCFEHLDTELVCDLLARWPTLEELQKVPPAKLRTFFRKHHCWSEELIENRLRAIRQAIPAIRDRAVIETKSMVVRVIVRLIASLLEGIADLDKKIAEAAAGHPDFFIFDSLPGAGAVMAPRLLAAFGSQRERFDSAGEVQTYTGIAPVMEKSGKKKWVHFRWACPKFLRQSFHEWAGHSIAQSVWARSYYQQQRSRGKGHHAAVRALAFKWIRILFRCWKDRVAYDENKYLAALARRGSPLALVNVAVAGKGL

SEQ ID NO: 172019 - protein, 336 aa, unidentified
MLYAGIDIHKRVFQAVVLDPETGELSESRFEPSRERLDEWMDDWDGKLAAVAIEATTGWRWVVRELERRGFEVHLVDPGRASALRGRRRQPKTDRLDARWLALVLARQLLSECEAWLPPAEIQSLRDRTRLRKALVDSRTGWAQRLHALLAHEGWPCARGHLLTPAGRRSVIGIQLDPVVRAQVDVMLAVISALDQQLQEVESELRRFARADRRCRALQSIFGVGPIFACHLLAEIGEARRFKRSRQLVRASGLDPAVLESADSKRRGRLSRQGSHHLRWALVEAANHSSRQTSPDHALYMSTAARCGRGRARLTVARKIGRRAYHLLAAVEAQAA

SEQ ID NO: 172020 - protein, 345 aa, unidentified
MEHYAGIDVSLESASVCVVDATGRIVREAKVASEPEVLIEWFRRLGFAVARIGLEAGPLSQWLYAGIREAGLAVELLETRHVRDAFKAMPVKTDRKDARGIAQLMRLGWFRPVHCKSLPAQEMRALLTARKLLQTKNHDVEMSVRGVLRGFGLKVGPTTPRTFAGRIRELVAGHTTLSTVAEALLAARSTLFEQWQKLEKGLRSLAREDRRVRLLMTAPGVGPIVALTYASAIDDPGRFKSSKAVGALFGLTPRKYQSGETDVTGRISKIGDGGVRTALYEAANIILTRPVKGSTLKSWGMRLAARAGMRKAKVALARKLAVVLHRMLADGTSFLADKAAAAATR

SEQ ID NO: 172021 - protein, 330 aa, unidentified
MKAFIGIDVGKEKLDISWLRDVVKSKKKTKIFKNNPQGYQELVAWLIKNTNLEAQDIVITTEPTGVYSEPLMYFLYEQGFILLHVNPGKAKQYASSLGLVHKTDKSDATMLARYGHDQQHSLLSWQPEPVEARELKVMTRRLEALEQDLRREENRYEAVGFSGASTRVTQSIEDMIAVLKTEMGKLKNDIDEHIDRHPQLKKNRQLLQSIKGVGEVISRMMVSLMACKQFKNAKQLACYLGLIPKLNESGKRAGKTTLSKEGPGYIRAKLYMAAVVAVQHNPDIKAQNKRLVEQGKTSSRVRLLPHPSHRTVRTGLVYGSCILLSLRLIF

SEQ ID NO: 172022 - protein, 360 aa, unidentified
MEHYVGLDVSLKLTAICIVDRTGKIQREGVVPSDPEAIAAFIESHAPHVTRIGLETGATSTWLWTELNRLGLPVICIDARHAKAALKMQINKSDRNDAVGIARIMQCGWYKEVRVKALDSHAVKALLVSRALLVKIKRDLENQIRGLLKNLGLVIGPAKMNVFALRAAELTADRPELAAAVTPLLNARVGIAQQIADLDRKVMKLARNNAQVQQFMTAPGIGPVTALCFLATIDEPRRFRRSRSVGAYVGLTTRRFASGEIDWTGRISKCGDKMLRSYLYEAANVLLTRVAKWSALKAWGIRLAKRSGLRKAKVAVARKLAVILHRMWIAGTEFCWTKEGDAMQPELCGILGDEIDQAAW

SEQ ID NO: 172023 - protein, 370 aa, unidentified
MGVAGIDPHKRTFTAAVLDERGGLHGVASFDTSEQGLAVALAWLGEVGFDLDRVGVEGSAWLGHQVAASLAAAGYDVREVQASRTAERRRRRRRAKTDAEDAQAIARETLAHPDLPPAGKQHAPDPDWEELVALRNQRRSLIAQRRRLLNEAESVLVGLPLVVRAVLPDTSQVRPRLRALAQGAADQLELTGADRVHLAWLAASAADIGRLDQRIGQLDQRIPAVLARHCCTLTEEVGIAAVGAMELLVEVGDPTRFTTEARFARWCGAAPVAVSSGEGDGEPERHRLDLGGNRRVNSVLHTMHITQARCHQPAKDYLGGKRAEHKTAREARRAHKRLLANVIIRRMWADHQRRRSPTLNLSNPTTPNAA

SEQ ID NO: 172024 - protein, 347 aa, unidentified
MNFYTRQHKHYCGIDLHAKAMYVCILDQHGTKLFHKNLPTTPDAFLRAIAPYREDLVVGVECIFTWYWLADLCQQEGITFVLGHALYMKAIHGGKAKNDKIDAYKIAVLLRGGMVPQAYVYPAEMRATRDLLRRRCHLVRKRAELLAHIHNTNSQYNLPEIEKRLAYKANREGVADHFPDPSVRKTIEVDVSLINHYDQLLSEVELYITRSAKAHDVQTFARLQSVPGIGQILALVLLYEIQDIARFPRVQDFVSYCRLVKCAKESNGKRLGTSGKKIGNVHLRWAFAEAAVLFIRQSQPGKAYFTTLERKHGKAKALTVLAHKLGRAVYYMLTREQVFDLTRFVTA

SEQ ID NO: 172025 - protein, 356 aa, unidentified
MQTQVTKKIDFSGKDLFIGLDVHKKSWSVTIVINGIEHRTFTQPPDPEALNNYLQRMFPGGSYNSAYEAGFCGYGIHRELNSLGIRNIVINAADIPTTQKDKLQKRDPIDSRKIARGLENGSLRGIHIFNRDMEELRSLNRTRFYLMRDLRRSKNRIKSFLQYYGEPLPVEFDNNQWTLKFISWLKQVQMKTLSGQDAFTHLIKSYENNRQQMLILSRIIRLRIREYDNELYSLLKTISGIGPLTSSALITELGDINRFPHIDDLGSFVGLIPRVRESGETVHTGGITFRCNTFLRTLLIESSWQAIRKDPSLMQYYQRHVINNKGHKVIIKVARKLLNRIRYVMKNRQPYVTGVA

SEQ ID NO: 172026 - protein, 412 aa, unidentified
MSRGLWAGVDAGKFHHHCVVVDGEGKELLSKRVANTEQELRELIKTVIGLDGGAGLTWATDQSRGGAALLIAVLLDCGQRVIYLPSGSFHHAAAALPGENKTDARDAYIIANHTRTRTDLRPLQSADEIAVQVRLLSARRRQLVADKTKALNRLQGTLLEYSPALGAAFDYAHSQGALLLLTMYPTPEAIRAAGPAEIERDLRRAGARRSAQLAARATEAAADQSIRLPGEQLAAAIAVELAQTTLNLFAAVATIEKSIRAAFLKHRHAEILLSMPGLGQTLGAELLAATGGNMQMYVTANRFASVCGLAPVARDSGRITQNHRRPKRFDRRLLRVCYLSAYRAIRDDDRARKYYDRKRSEGKTHIQAILALARRRSDVLWAMLRDNQLYQPLARTERPSIHPEGPATPRPR

SEQ ID NO: 172027 - protein, 345 aa, unidentified
MGNMYYIGLDVHKKTISYCVKDGSGRIHTEGTIPATRLALDIWMKTLPQPWTAAMEATIFTSWIYDHLLPHAAAVKVAHPLMLRAIAAAKKKNDRIDANKIADCLRCDFLPECYMASTEIRERRRTLRYRNLLVRQAVQMKNKIAVLLMEAGVSYNKQKLHKVGYFRELLATNQDIDEGLKPLLRLCRETVVRLGKTESALVRSLERDSLLVERVERLMTIPAVGPITALTWALEIGDVQRFSSIKKAISYCGLCGAEKSSANITMRMPLSKQRNKHLQTVLIEAAKMAPRNSPELAMVYDQEKQKGNANRATLAVARKMVAYLVAVDRRQKGFLVVENKNRTAA

SEQ ID NO: 172028 - protein, 435 aa, unidentified
MRIPHDNRPRIVVGVDTHKHLHVAVAVDQLGALLGSTTVTVNRAGYSGLRDWVGELAGDNDDVPVVFGIEGTGSYGAGLVSFLRRAGDQVIEVNRGDRTVRHLRGKDDTIDAETAARSVLSGTATAVPKTREGVVEMIRQVKIAKDTATKARTQAIVTLKTVLVNAPAELREALEPLGDRELLDACRALRYQSMDGPEDAARYTLRALADRHRSLDYEARRHERVLDTLTDRAAPTLTSHFGIAADSAAELLIVVGDNPERVHSEAALAKLCGACPIPASSGKTSRHRLNRGGHRQANAALHRILVVRMRFHEPTIAYVERRSHEGRTKKEILRCLKRHLVREIYRASSHHIRRRNNCLSSLDNYRSINALAESFFSSMQVELLDRQPWRTRQDLANGIFEWIEAFYNPLRRHSGLDYLSPVDYEQAHTPAADAA

SEQ ID NO: 172029 - protein, 415 aa, unidentified
MDVVHQRCAALDVSKTDAKLCLRVPGKRKGTFTREVTTWGATTGQVLALREFLLAADVTLVVMEATSVYWKPFYYVLEDGLNVMLVNARAAKNMPGRKTDVSDAQWLAQLGAHGLVRGSFVPPPPIRVLRDLTRTRTRLTAERSREVQRLEKFLEDTGIKLSSVASDIMGVSGRLMLEALISGVEDPAVLADLAKRRLRNKIPELVEALNGRFTEHHGFLVRLHLDQIDRITAALDALTARIEVVITPFRPALTLLATIPGVDCRLAEVIIAETGADMAVFPTAGHLASWAGVTPGHNESAGKSKSAKTRPGNSYLKGALGLAAFGAAQSNGTYLQSRYRRLTARRGPMRALVAIEHSILIAVWHMLTTGMPYTDLGGDYFTRLDPERATRRAVGTLEGLGYTVTLDRAELEPAA

SEQ ID NO: 172030 - protein, 345 aa, unidentified
MFTEKISTKDRIINNDKYNYYIAIDWSQRNMAIATLRKDSNKPRITDVDSDVKLLKTYLSSLKGSKIVTIEETTSTHWLYVELYDYADKVLICDPYKNKLLSDGAKTDKLDAVKLCKLLRGGLLYEVFHNLGKTYELRQLVSDYEQLVKFGTRVKNEKSAIYRSAGKSYKHLEKIDDKTLDWIIRLKDRRIELYESQKTEYEKIFNEKIKQSKDLKHLKGVNGIGIIGAVKILSSVIDANRFENAGKYLSYCGLVQHQKMSGGRSYGKRKTRYSRRLKSVYKTAAMSVINGNNSLREYYDSLLKKGTSQDNARHRISRRIAIITYGILKTGTKYEPYKWRESSAK

SEQ ID NO: 172031 - protein, 344 aa, unidentified
MHKTIVGVDLAKNVIQVCIYRNKKVQSNTEMTPDEFLSWLVTSKAVLIVFEACGMSNYWKQRATDKGHDARLISAKLVSAVRQNQKTDKNDALAIVQASLLPEVRFIFGKSVKQQQLQSIKRLRELAIKHRDALKKQIVALLLELNIRVPNGSARLINKIDYILEDAENELSIEFRKALHVAQQQLNAAMKSVLIYDDCSEKSIQAHPECKKLLKIEGVGPINAINLYIALGCADLGTFNKGKDASACIGVTPAQHSSGGKVKIGTIGKIKNSTLRSQLISGAMSVVKQVVKREARTKKEAWLKSLIERRGNKCAAVALANKTVRTAFAMLTQGTEYKAELLAA

SEQ ID NO: 172032 - protein, 416 aa, unidentified
MKIVRPICCGMDVHKNIIVATIGITNKKTRITEYIQETFSTLNPDLLNLKQWLINHKCFDACMESTGKYWIPVFNILEDEINIYLTHPKYVKAIKGKKTDKKDSKWICDLFKHDLIKFSFIPPKEIRALREISRYRYKLVGMRSSERNRYQNCMTVSNIGIGSVFSDPFGKSAQAIMKEVLESDIIEDEKILKCIHGSCKNKDKILDSIKHCNIETDQRFKMNESMIHMEELQVHINNCEIEIMKRAAPMFDQFMHITQLPGISTLSAILIISEIGIDMKQFESDKQLTCWAGLAPANNESANKKKSVRISKAGQYLKPLLVQCALGAIKDKEGYFGIKYSRIKKRRGHKKAIIAIARMMLVSIYHMILTGETFNPSDYESFRNPKPPIKQQDLTEESAIEFLKKSGFDVSKLTKP

SEQ ID NO: 172033 - protein, 335 aa, unidentified
MGLDQHRAQITADWIDTASGEVERARIAPADRAGVRRFLGRFRGLPLEAALEATTGWRFVAEELRAIGAEVHLAEPAETSARRGSKKRAKTDRADARHLRELLLVGRLPESWIAPDHLLDLRARVRLRHALVNQRGEWQQRIHSVLYHHGLPQRRELLTRDNRAWVEQAPLPATAREQITVALALIDALHAQVDPITRALRAYAPRQPGCRALMGHYGIGALTAVAILAELGDARRFSSSREAVRYAGLDITVHQSDQRRAPGHLSRQGPPTLRWALFEAAQAAARRIGSPDRAYYEQAAARLGGNRACLAVARRLLKRSYHTLRELGEEALTPA

SEQ ID NO: 172034 - protein, 353 aa, unidentified
MREKGWAMTIVEAGRTVIGGVDTHLDVHVAAALDPIGGLLGVESFVAVPQGYKAMLEWMGAFGTVSKVGVEGTGAYGAGLGRFLRRSGIEVIEVDRPNRQVRRSKGKSDFVDAVEAARAVLSGRAAGAPKSRDGNVEAIRALLVAKRSARHARSRALAQMRQLSYTGPDQLRSQFKGLSITDLVDQAAALRPRASGDPVLYATKVSLAALGRRVLALEDEMAAVDELLTDLVTQCAPQMLGLFGVGVDTAATLLVTAGDNPERLRSEAAWAHLCGVAPIEASSGKVTRHRLNRGGDRHANQALWRIVMTRLAWDPRTRGYLERRTKEGRSKREVIRVLKRYVAREVFKHLPRG

SEQ ID NO: 172035 - protein, 344 aa, unidentified
MDQVTVIGIDLAKNVFQLAFVNATGQVVAERRVRRAGLEAAVAACPGAVVAMEACGGAHHWARTFQAAGHPVRLMAPKRVKAYQDPGRKDDRRDARAIAEAASRPHVPGLRIKSPGEQDAQSRQRIHRKRVQLRTGKINVLRGLLMEYGIALPQGEAGLKRYAELADVPAWQAISPEMRAEFDELYAEIGRDGQAIAASKARLVEAAQDDTRVQRLRTIPGVGPMIAAATVGAIGDGSDYACGRKFATSLGLTPRLNSSGERVRLGRISLIGDGQLRALYVNGAQALLMQAKRDRPSADALILWARRLLKRKRWNEVVVALANKLARVAWAVLRSGDTYRPRAA

SEQ ID NO: 172036 - protein, 423 aa, unidentified
MDILYERVAGLDVHKDTIVACVRNVVEGKTKRECLSFATTTEQLAELRAWLEECRCTHVAMEATGVYWTPVFRILGEGKFELVVANAAHIKNVPGRKTDMNDAMWIADLLACGLIKASFVPPEEMQELRSLTRTRKQLVREQTRHVQRIGKTLAEANIKLDSVISDVMGASGRRIIEAMIAGVHQPRKLADLASKQIKATPKELYDALHGRLTDHHRFLLELHLRQWDGLDETIRKIDQEIDQRITRMSTTAETYKIPFRTLIELLHTVPGISAVAAPAILSEIGRDMSRFPTAGHLVAWAGLCPGQNESAGRRKSSRLRKGAPWLKTMLVQCAWAAKRKKDSYYRAQFFRLQSKRGPQKAICAVAASILTAIYHILKDGSEHHDLGVGYFDRRPAEVKANHLVIRLKKLGFAVQLQPLAEAV

SEQ ID NO: 172037 - protein, 345 aa, unidentified
MHYCGLDVAMKTSYIYVADSLGRKSTSGEIPTSKQELKRQLRPYVKRGLKVAIEAGNQAVWIYEVLEGMGAEVTVVNPTKVKAIAESRRKTDKIDAKVLCELLRLDGLPHPVHMPGSETRELRGMLVARRQLISARTKLCNVIRGMLRQEGIRLPMRALSSRVGWDRLLGRRYRLTHIRPTIESYARSFAALSESIKELDCQLRERERNDERIERLKTIPNVGSISSLTLVAAVDDVHRFSSSRKIVSYSGLAPTVNASGERVVYGPISREGRSELRAVWVQVAHRMAHDRSAAARPLRRWFNRVALRRGKKTATVALARKLLTIAYQMLKEGEDYKPARIGAAA

SEQ ID NO: 172038 - protein, 373 aa, unidentified
MENNITIVGLDAHKNSIELVTAETAGNQEVRHYGKIGGDMTSLDKAIRKLRSARSNGAELRFVYEAGPCGYEIYRHLTKQGFQCMVVAPSMIPKKSGNRIKNDHRDAENLARLERAGELTKVYVPREEDEAMRDLTRAREDAVKAQRVARQLLSAFLLRHGHRYPGKQSWTPAYMRWLSDITMQHPAQQITLQEYIHAITENTGRVTRLTDQIQQLLPEWHMEPVVKALQALRGVAPVVATTSVAEIGDMNRFERPRQFMTYLGLIPSEHSSGESIKRGSITKTGNGHVRRALVEAAQAYSFPARVSRHLLKRQEGLPQSVREIAWKAQVRLCGRFRRLMARGKQRNKVVTAIARELAGFMWAIAREVQVPGV

SEQ ID NO: 172039 - protein, 375 aa, unidentified
MDSDKEIVCGADIHKDFLIATMISRSGLKLQERFNMNQDGLLAFRSWIINHRCQRLAVESTGGFWYPIFTILEGHVEFILANAYQIRNIEHKKTDKLDSERIAIYCLNNLITPSRIYPKDYRDLRSITRARETLVNARSKIKNQIHQSLSTCCIKLSSVISDSFGKSGRYIIDRLLEGKTIDQIISGIPSKRIRKKEDELREAIKNGLDPVQVFLIKANLDVIDDISKKIKILEAEIAEKVKPFEDDLKIILSVPGVGFISAATIIAEMGDYRDFPSADKMAKYFGIVPSVYQSAGKLRTGKITKTGSKHMRRILVEVAKAISRTKKNSRLMRFFQRILARCGKKNIATVALARKVLCIIYHLLMNHENYPCVFG

SEQ ID NO: 172040 - protein, 391 aa, unidentified
MTYFIGIDIAKYKHDCFIMDQDGSVIRDSFSFSNDSAGFCLFLSVLDSLDPSYEKRIGFESTGHYGLNLKCFLEEHDISFMEINPILIKRFSSATTLRRTKTDKADAALIASYLTTVEYITYPIQSYHIHNLKSLTRSRDALVKLRSGQLVMITNVMDKIFPEFKPFFNKSLKSSTAMYLLRNYTVPSKMASMNSESYRKMSSKLKKTISYARFSKLRELAKNTVGREDPCLTFELNTYLDIYQSLDFKIKEMEAHIEEEFKKIHSHIQTIKGIGWMSAACIYSEYGGIENFQTPNQMLAYAGLDPSRSESGEHAYKGHMVKHGSSHLRYVLLNCAEMVILHNPVFYDYYRKKREEGKHHRVALSHVARKLVRIIFFLEKNNVDYDPKKMR

SEQ ID NO: 172041 - protein, 354 aa, unidentified
MSKHSIKLFIGMDLGDKKDQICVIDHDGSIVDSTSIPNTIMGLIQFFDRFDTPQEVLVAMETGTHSPWISHLLNARGFRVLVGNARKLRAIWDTDNKYDDRDAEMLARIARFDPELLYPISHRSRAAHMDLAVIKARDALVRCRSKLINFLRGISKTAGERLPSCSAEAFDRTVVDHIPEDLLPAAVPCLNMIHELNSQIRQFNRQIEKICAESYPEAMELRKIVGVGPITALSYVLTLEDPHRISKSRNVGAYLGLTPKRDQSGQTDKPLSITKAGNSYLRCLLINSAHYILGPFGPDCHLRRYGMRIASRGGKISKRKAAVAVARKLAVLMHRLWISGETYNPWYQYCKKAA

SEQ ID NO: 172042 - protein, 343 aa, unidentified
MDHFAGLDLSVKETSLCIVDDTGRIVREVKVASEPEALLHVLLNPAYHFKRIGLEAGPLSQWLFGALAEAGLPVICVETRHMRAVLKAQINKTDRNDARGMAQMMRVGLYRPVHVKTLRSQKLRMLLTHRKLLQSKAIAIDNDLRATLRNFGLKVGVVGTVKFEARIKELVEDLPDLVVLVEPLLIVRRVLREQVGILHSRLLAVVRDDDVCRRLMTVPGVGPVVALTYRATVDVPARFRNSKAVGAVFGLTPCKHQSGEVDRTGAISRCGDEMMRMMLYEAAQIVLVRSTKWSWVKAWAMKIARHRGMKKAIVALARRLAVIMHRIWVDGTEFRWTRDVAAA

SEQ ID NO: 172043 - protein, 342 aa, unidentified
MTVIIGVDPHKATHTAVAIDWTEVELGRIRVRATRNQVPQLLAWAEPLGVRTWAIESAAGLGYLLAQQLVDAGETVLDVPATLASRVRVLGTGRSDKNDPNDALSVAIAALRTPALRLVRGADHGEVLRLLAKRNIDIGSHRTRVVCRLHNALMELAPGGIAKELNASDAVALLASIEPATPVEQTRHDLARELLAEVQRLDGQLKESHRRILIAVKASATTLTDLFGVGPVIACYLIGFTGDVRRFASRDQFASYNGTAPVERSSGGRVVHRLSQRGNRRLNHAVHLAAVCQIRQRHSDGRAYFDRKLAEGKTKKEALRALKRHVSNAVYHQLLIDAGAAR

SEQ ID NO: 172044 - protein, 355 aa, unidentified
MKYYTSTTQYNCGIDLHARQMYVCVMDRQGKKLVHTNVKNNDFGFFLKLVEPYKHDLTVCCECMFGWYWLADACQAAGLTFVLAHALYVKAIHGGKNKNDRIDSEKLTHLLRSNLIPPSYVYPSEKRPLRALLRQRLFYVWRRAELLARIYSHQLAHNRTPAKQTRRVRDSWEEQLLAAEDNPLRQLALKNDLAMIKHFDHQISQLEEELQRQTKKVAAREYALLQTVPGIGESLGLTILYEVGDIERFPTVKDFLSYCRLVKGTVASAGKIKGLRGAKLGNPYLRWAFGEAAVIAKRDHFLIRPLAQRLEQQMGGNKFKANTVVAIKMARAVYFMLKNKTVFDPERLVAALAKK

SEQ ID NO: 172045 - protein, 273 aa, unidentified
MKLYAGIDLHSNNSVVAVIDEQDHVVVQKRLPNDLERILVLLAGVKQWLVGVVVESTYNWYWLVDGLMQAGYAVHLANPAAIVQYQGLKYSGDAHDARWLAHLLRLGILREGYIYPREARAVRDLMRRRMQLVQTRSAQVTAMQTQFMRSTAQRPSSNELKGMRAEDIKARLSEANVASGVLANAAVVQTLNSEIARLEHEVLSQVKLAAQFEPLLSVAGVGRILALAIMLETGAIERFAKVGNFASYARAVEAKRLSNDKKKGQGNSKCGNK

SEQ ID NO: 172046 - protein, 409 aa, unidentified
MEVIYPRCCGLDIHKESISACVLVKESGKREKHLARFGTMTSDLLKLGDWLRSWGVKRVAMESTGVYWKPIWNILEDEFELELINAQHIKQVPGRKTDTKDCEWIAELLQHGLVRASFVPAQAQRDLRELTRYRATLCEDKVRVANRIQKVLEDANVKLACVASDILGASGRAMLEALVAGERDAAHLAGIAKQRLREKLAQLERALEGRVREHHRFLLRQLLDELYFIEGKITQVEQRLEQQMGSFRQAVTLWQTIPGVNEITAWSLVAEMGVDLSQFERVEKLTAWAGVCPGNNESGGRRLSGTSRKGNRWLRRVLTQAAWAAVRKGDTYLGARFRRLASRRGRKRALLAIAHKILVIAYWMLKTGQQFRDLGADYFDRLKSTDLTRSLVRRLERLGYKVALEHVAS

SEQ ID NO: 172047 - protein, 347 aa, unidentified
MKNYVGLDVSLTNCAVCVLQEDGTRVFEGECSTDPDEIIKTIYLHAGCVERIVHESGPLSIWLSRELDHRGVPVVCIDTRAAHKALSARMNKSDRSDAEALAQLARTGWYREVHIKSENSDRLRLLLSARERLVRIRMDIEGQARGILKTFGVRLGVVRKGRSRRDFRDELSEIVSGDPILEVVFASLIKVHETVCHNTTDLDAEIQKYAKDCPLARRLTSVPGVGPIVALSFIATIDDATRFRRAVDVGAYLGLTPRRYQSGETDWSGRISKRGDRSMRKLLYEAANILIQRVAKFSPLKGWAMRLVQRKGLKKATVATARKMAVILTRLWRDGTEFAWTKEALPA

SEQ ID NO: 172048 - protein, 412 aa, unidentified
MIYCGIDWAEKTHDVALVDDTGQLLAKRHITDDAAGYKLLLDLLAEYGDSDEEPIPIAIETSRGLLVAVLRTGKRQVFAINPMAAARYRDRHAVSRKKSDPGDALVLANILRTDMHAHRPLPKDSDLARAIAVLARAQQDATWNRQQMANQLRSLLREYYPAALAAVAPWQNGLCRPEARELLKLAPTPARAARLTRAQITAALKRAGRKRGIEAETERLREVLREDWAHQPALVEDALGKQMLALLGQLEAACTAVDDLAAAVEDAFPQDPDADVLLSFPGLGLQLAARVLAEIGDDRARFADARGLKAYASSSPVTRASGKKSSITRRLVKNDRLNHAGYLWAFSAPNGSPGARAHYRRRRDEHGDWHAAALRNLFNRMIGQLYHCLQQNKLFDEHMAFPAPPELAVSAA

SEQ ID NO: 172049 - protein, 353 aa, unidentified
METAYDGRQVVGMDLHRRRSVLVRMTEDGQRLGVARITNSPAGLCRVIAQAGASPRVVLEGTYGWYWAADTLAAAGAEVHLAHPLGVKAFTYRRVKNDERDAADLADLLRMGRLPEAWIAPPGVRELRELTRYRHKLVGLRTSCRNQVHGVLGKLGVPVTCSDVFGVAGSVWLDELRLPQPYAGKVTSLRQLAGELTTEITMLSEVIADLLAGHRDYQVIQQLPGIGPALAAVIVAEIGEVRRFGSAAQLCSWAGLTPRHRESDTKITRGHVTKQGSRLLRWALIEAVQHVPAGSLPGTVKQRIIARRGKQAKNIAKVAAARRLLTLVYYGMRDGQVRCLSQNPAGSPPARAA

SEQ ID NO: 172050 - protein, 429 aa, unidentified
MNYNTQNAKIASITEKTLIVGIDVGSETHYARAFNWRNYEYSKKPFAFSNDEAGFSSFKDWMDDIAEKHGMKVVIPGMEPTGHYWLNVGAYLQEQGMKPVHVNPHHVKKSKELDDNNPSKNDRKDPKTIAGLVNEGRFSYPYIPTGIYAEIRNLSNLRIQTQEEITRIKNRIARWFSIYFPEIKDVYRNPDAVSGLMVIKQAPLPCDIKELGVDGVNKIWRDARLKGAGIKRATTLVTAAEHSIGNTEAPRSARKEIRNLLNDYEIYKNRMDELMEEIKETLSEIPYIDKLMEINGIGIKTVSCVIAEVGDIGRFDNPKQVQKLAGYAIVADSSGKHNGESRISHRGRKRLRYALYEAAISVIGKNKEFKEIHSYYRTREKNPLKKMQSVIAVACKLIRIFYTILTKGVDYDGQRMLADIVRPEMQLAA

SEQ ID NO: 172051 - protein, 426 aa, unidentified
MRVLYERVAGIDVHKDMIKVGVRTPGHRAWTRTSEVLEYRTFYGVLQTMARDLRKRGVTHVVMEASGVYTEPVYYALMEQDFEQVAVINPAHAKALEGHKTDAKDALRLAELFECGLLRGSYIPSQALKDLRDLTRYRTKTVQARTSEIQRLAKALESAGIKLYSVVSDLTGKSAGLMIEALIDGERRGQVLADLAIGRMRTAGKLADLSQALAGRFTDHHAVLCRLHLDRIAVFNTAVTGLEEKIAVKAAPYQREADLLKSIPGFGDAVACAWLAEIGPAPHEYFASHEKLASWVTLCPGNHMSAGKRRHGHTGDAGTYIKPMLVQAAWSAIKSQGRLQARFHKLVRRFGGQKNPAAVKKAIIAIAHTLLKIAYQVLRSGKPYEDLGADFYTQRESPEQRRAYLLRQLEKLSPGCTITITPAEAA

SEQ ID NO: 172052 - protein, 346 aa, unidentified
MGMDISVLGVDLGKNVCSVVGLDASGAIVMRRKVRRETLIALAEKLAPCVVGMEACCGAHHLGRVFAAHGHDVRLMSPEYVHPYIKAQKNDDRDAEGIAEAATRPTMRFVELKSQDQLDMQTLHRSRDRLVGERTALINQLRAILLERGMVAPQGKRKLEQFLSVLMDEQGGAGLSQRMIVLVADARAQWAELDRRIAAFDAEFVRWVKDNEEACRLTTIPGIGAIVASALIAAVGQAESFDRGRDLAAWLGLVPRQFTTGGRPKLLGISKRGNKYLRRQLIHGARAALPYVAERDTPLGRWAKELMSRTHRNVAVVAFANKLARIAWAVLRRQERFAATGMPMAA

SEQ ID NO: 172053 - protein, 321 aa, unidentified
MTYVGIDVSKATFVVAYSSAKSSETKTFKNTTKGIREFIRTISPEENHCVLEATGNYSMLLVYLLSKAGFTVSMENPLKIKNFARVMLSVVKTDEIDARLIALYGERMQPSPFKLRGGSLLLLKQKRTVLRQLKKQLTANRNLEGSLKILPFIDSKCKKVLEKTIKFLEKQIEEMEEELTSLAEIEYKKQMDLLTSIKGIGATLAAALIIATGGFTYFDNAKQLTRYLGLSPTYQQSGTSVNVKGHINRNGDAYLRSQLYVGAMAALRCNTECKACFDRLRSNGKPGKVAIVAVANKLIRQAFAVVTHEKKYIDGYKSVKP

SEQ ID NO: 172054 - protein, 343 aa, unidentified
MECYVGGDVSLKQTSICVVDQAGLVVREGVVDADPEAISVYVRSKAPEAVRIGLETGPTSTWLWTELKRLGLPVICIDARHAKAVLKMQINKNDRNDAIGIARIMQTGWFKEVHVKDIDSHSVRALLASRALLVKIKRDLENHVRGLLKNLGLVIGRATFNVFAVRAEELIEDRPDLVAAVRPLLEARNAVEQQVSELDRKVMKLARRDAQVQRFMTVPGVGPITALAFKATIDDPARFARSRSVGAYVGLTSRRHASGEIDWSGRISKCGDAMLRSYLFEAAGVLLTRVPKWSTLKAWGTRLAKRNGLRKAKVAVARKLAVILHRMWIDGTEFNWSKKEIAA

SEQ ID NO: 172055 - protein, 334 aa, unidentified
MGVDIAKNVMQLHYIDAETGEIVNKPVRRGAFLEHFANLAPCLIGMEACGGSQHWARKLTTMGHEVKLMPGKFVKAFVMGNKNDAADAKAIWLAVQHAGKSVAVKTETQQAVLGLHRMREQLVKFRTMQINGLRGLLAEYGEVTGKGRAALDKAIPGVLERLVDRLPALLIDTLREQWNGLAELDKQIASIERRLQTWMREDKASKAIAAIPGVGLLTATAAVATIGDAKTFKSGREFAAWIGLVPRQTGTGDKVHLHGISKRGDIYLRKLLIHGARSVLCLAKEPGPWAEGIKKRRPLNVAIVAQANRIARTIWAILAHDRQYERGYVSVKPV

SEQ ID NO: 172056 - protein, 372 aa, unidentified
MRQDSKIYVGLDTSKLKISVAVAEAGRDGDVRFTGEIDSAPDAVERLVTKLAKRHRDLAFCYEAGPTGYGLHRQITRLGYDCIVVAPSLIPKRPGERVKTNRRDALTLAKLHRAGELTAVWVPDPEHEAVRELVRAREAAMEDLRRARQHLQSFLLRHGRVFTGRQGWTRAHTRWLCEQRFEHPAQYLVLAEYRQAIEAAEIRLKRLDEQVAEAVNSWSMAPVIAAYQALRGVAFLTAVTFVTEIGDVRRFDSPRQLMAYLGLVPCENSTGERIRRGGITKAGNGRARRVLIEGAWTYRFPARMSRLLQERQAGLTKAVCDIAWKAQVRLCARYRKLMARGKRQAVVTVAIAREMAAFLWAIGREVEPHSAT

SEQ ID NO: 172057 - protein, 355 aa, unidentified
MIIIGVDFHPEFQQIAWVDTDSGEFQEQRLRHREEAETFYRKLAGQVVKVRVGMEASGHARWFERLLGELQFELWIGDAAEIRTKRVRKQKTDRQDAQLILQLLLENRFPRIWVPSWENRDLRQLLWHRHRMVQARTRIMNQLQAVALNEGLRCKKRLWRERGRQQLESFHLAPWASRRRRDLLELMDRLNPTIAELTQTIEQEVEKCPEARRLMTHPGVGALTALAFVLIIGKAERFGCGKQVASYLGLVPLEESSGNRRRLGHITKQGSSMMRFLLVEAAQVTVRSLPEWRSKYFHLMLRRGRKTAKVAMARRLAIRLYWMWRQAWDYEQFVKFGSQGRKLCSHTVVTKGSTR

SEQ ID NO: 172058 - protein, 345 aa, unidentified
MIIGCDFHPSWQQVSWLDTETGETGEQKLVHASGDAKSFYARLPRPVLIGMEATGNSQWFIEVVQDLGHEIWIGDAAQIRASYVRKQKTDKRDAAHILKLVVEGRFPKLWTPDREQRDLRQLVLHRHKLVEIRSRVKNELQHLSLNRGLQRQAKLWSQAGQKLLRELPLHRWAACRREDLLGLLAMLHQQIGKLDEAVQQAAEEHPQAKLLMTQPGVGPNTALAFVLTMGEVSRFPRGKQVASYLGLIPREESSGGRQKLGAITKQGNGLVRSLLVEAAQIAVRFDPGMTKQYWHRCHQKPKGVAKVAAARRLAVRLYWMLRTQKPYPEIVRIESSPRVPLVGAS

SEQ ID NO: 172059 - protein, 344 aa, unidentified
MATHYIGADVHAATTELAFEHNQRIVKCLRVPTTIPAVREALASVAGTKILAIEEGPMADWLWRNLKEDVQQLVVCDPRRNHLISDDGDKDDRIDCGKLAQLLRGGFLREVHHPDSAERAELKRWVALYHDRVRQAVREVNKLRMLGRQYGLRVPGRVLKDRKAQRIWLGQLPSLTLAKQISVLLRGYQAMRQQVAVVRKELGRLAAGQEVVGGWKELPGVGLIRAVTLLAYLDTPWRFQTLRKLWKYCGVGLERSSSGTDKNGKPKPPQLQLAWRVNRRLKDAVFGATMSAIRQKDTPFARMYERLLRDGLTASNARHAVARKLLAVLWGMWKNGSRYQPDRV

SEQ ID NO: 172060 - protein, 458 aa, unidentified
MLSFDPSLHYVGLDVHKHVVVACILDAHGQVLSRHRFPCTRVGLERFAHQHLRPTDKVVLEATTNTWEVVTLLKPFVAEVVVSNPLRTKAIAEAKIKTDKVDALVLAQLLRCDFLPRVWEPGPDTQSLRRLTARRASLVMDKTAIKNRIHALLHQRLIAAPMNDVFSGPGRAWLTTLPLDRDGQAALASDLRLLDLVEAEIAQQEKGLAQLGYADPQVKLLMTLPGVDLTVAQTLLATLGDVTRFRDGAQAASYLGLVPSTKQSAATCYHGSITRQGNGHARAMLVQAAQRVGTHPGPVGAFFRRLIKRKNRSVAVVATARKLVVIAWHMLRNNEPYRYAQPATTQLKFARLRLKATGEKQKCGARPGTARAVTYGSGEHTRPVPALSQVLRDSALPPAKSVPQLSRGELRMLKQSKTFSFVEQIQLPHRQVIKKATQSKEARTVKSGKSGRGDFTRS

SEQ ID NO: 172061 - protein, 346 aa, unidentified
MNQIIRIGMDTSKHIFQLHGVDGAEQPVLRKRLRRKEVLAFFIKLPPTVIGIEACGASHYWARELEQLGHEVKLLAPQLVKPYVKRNKNDGRDAEALCEAMSRPSMRFVPVKTAEQQAALMLAGIRERLVARRTRLSNAIRGYAAEFGVTAAKGLDKIEPLLAQVAEDESVPMLARELFAMQGREYAQLQVELKAIEVRLMAWHRANTCSRRLAQIPGIGPIGATMLVMKTPDPGAFPSGRHFAAWLGLTPKDHSTAGKTRLGKITRAGDEVLRSLLVTGATAVIQQVRHGRGRLSPWLVALLKRKPPKLAAVALANKIARIAWKLMTTGESYDGACMPGASAFAA

SEQ ID NO: 172062 - protein, 333 aa, unidentified
MQDLSTKQHFVGCDVSKDTLDLALYQPKTDYRKFEHVQISNDTEGFKQLLQWLKARKIKKNEVAIAFEHTGAYSIALAEWLHKKKITFSMLHPLDVKNACSRGRNKTDEVDAKFIADYAYTMREKLAPSGPEPKNIKHLRELRNERDLCVRCRASYLCQIKVQTEAQTIARMHKMVDFMTVQIHRIEEEIKKIIAADETIATNYHLLISIPGIGMVNAVNTIVATGNFTRFQTSRQYAKFCSVSPMAVQSGTSVHSGNHVCKKGHNELKATLSEAARSAIIHDPQLRHYYQRKRSQGKSHGCVMNAVKFKLICRMFAVIKRQQPYVNTECYRG

SEQ ID NO: 172063 - protein, 339 aa, unidentified
MVAVGVDTHKERHYAAALDQLGQLLGERTFAASAAGYAELQRWAESTAAGHELAFGVEGVGSWGAGLRQHLQHGGHAVVEVERPRRRDRRAGKSDRIDALTAAKCALNNENVSIPRRRGALTAIRALLIARRSAVAERTRLLNQLQALNATAPIALRERIGEGTGKQLERRILSMRARPGADVETRTVFAVMRDTAARSRALEADARRYKNEIAQLVRSLDPTLLDEPGIGPISAAKLFACDPARFKHEAAFARCNGTAPIPASSGKTVRHRLSRGGDRQVNNAIHTIAIIRAKHQPETRAYLDRRIAEGKTKREALRALKRHISRDVFKRLNEIPLTS

SEQ ID NO: 172064 - protein, 478 aa, unidentified
MFPLGRFILHDVDQAPGAETNKRKQDAPMKSLPVINPKAAAIDVGSEQLHLSIAGDAPVVFGTVTDEVYRLRDYLKEHSADSVAMEATGVYWLYAYSVLEAAGLEVVVVNGRHVRNLPGRKTDMADCQWLATLHAHGLQRGGFVPSAAIRRLQDYQRLRSDHIIGAGSQLQKMQQALERMNIKFHDVISDLDGVSGLKVVRAILAGERNPLVLLLLCDPQIQKKKGERVIQSLRGTWAAEHLFALKQGLATWEFYQKLLVECDQQIEAVLKEMAGPEPQSGEPPAKGKPQSKGTPQIEQLHQLLMRICGGRDVTAIAGIGDNLLLQLLAETGPDLKAWPSEKHFTAWAGLAPGSSQSGKRKGNIKRQRNRAGRLFCAGARSLVNSVDKALGGFYRRMAARKGGLAAMKALARKLAELYYRVLRHGLAYAEQGLQAYELKYAENQRRLLSKLAAKQGYRLVSIGSDALMKKCPPKDITG

SEQ ID NO: 172065 - protein, 311 aa, unidentified
MTETNIGIDISKDHLDVHRLPGDERRRFDNSKAGHKALIRWIGDTPARVVYEPTGYYHRALERALAAAGMPIAKVNPRQARRFAEATGNLAKTDALDAAMLTRMGAVLSLEARPVPSAIINDLRDLRTARNALIKDQVAALTRAKAITLPLLKRQNAARLKQIEAQREAVDAEINALIQGDPDLAQRFAILCSIPGIAEVSAAMLLIEMPELGSLDEKQVAALAGLAPIARQSGNWKGKSFIRGGRQQVRQGLYMPALVAIRFNADLKTKYEQLIKAGKAPKQAITAVMRKLIILANALLKKDRKWQTRVA

SEQ ID NO: 172066 - protein, 343 aa, unidentified
MEIHTIGIDLGKSLFHLVGVDSSGSVVVRKRCSRSQLLAYTANLRVQRIGMEACSGSHFLGRALRDQGHDVRLMPAQYVKPYVKTNKSDYIDAEAIAEAVQRPTMRFVPIKTEDQLDLQAVHRVRERWVMRRTAVVNQIRGLLLERGLTLPKGRCYVDQALPDILEDATLRLSDSFRLLLAQLKLELDQLTARIEQMDAVLQHTAKDNEACQRLTTIPGIGPVTATALIAAIGNGSGFRRGRDLAAWVGMVPREYTTGGKQKLLGISKRGNSYLRKLFVQGARAVMQRRHNQAPELSAWLAQLLVRTHQNVAIVALANKLLRMAWAVLCKNETYRPPALVPSS

SEQ ID NO: 172067 - protein, 269 aa, unidentified
MTLTDGFDAITDELRKYPVVLVLIEATGGLEAAVACLFQAEGFDVAVVNPRQARDFARTMGYLAKTDRIDARVLAQMAEVINRHPGRERFIRAMLDAELQVLAAMVVRRRQLTAMLIAERNRLYPVHPQSRKSINIIIKELAARLSSIKGVGTMTVAALLVEVSDLGSLSRRAISALVGVALINRDSGTMRGRRTIFGGRGGVRTALYIAALVATRFNPVIKAFYTRLLAAGKAKKVALVACMRKLLTILNAMLRKNEEWDESYHHVSL

SEQ ID NO: 172068 - protein, 359 aa, unidentified
MKKLSKVARKTAGLDLGDRYSQVLVLDEQGETVEESRLATREEALRRRFGGCPRMRIALETGTHSPWVSRVLEECGHEVIVANSRKLRLIYENPSKDDKVDAMYLARLARVEPALLSPVRHRSVSSQKDLALLRSRDVLVAARTQLINHVRGHVKSFGGRLPACATSAFGQKISQHVPDSLRPALGPVLEEIVSLNDRIRALNRQIEVLAEQSYPQTKLLRQVRGVGAITSLAFVLTLEDPDRFNKSRTLGPYLGLVPGRKQSGDSDPQRRITRHGDRDLRRLLVNAAHYILGPFGEDCDLRRFGQRIASRGGKIARKKAIIAVARKLAILLHHLWLHKEVYDPLYYQTHKTSRREKTA

SEQ ID NO: 172069 - protein, 333 aa, unidentified
MEQYIGVDLHKQFFQACSITSTGARAWEMRFPRTEGGLALFCARCGPQTAVAVEACGPTWAFVDAIAPTGTTVCVVDPRKTRLKAGFAAKTDRLDARRLADALRRDSVVSVYVPPPAIRELREVCRGRHQVIRLRTRLAQMIRALLLRSGGPDVPVRRVFSPRGLAWLEEVQLPPDAAASLTRLRHVLTAIQAEAAAAESVVAARAAADPIARALDTMVGIGPVLALTLRAEVGDGWRFPRGAALASYAGLVPRVDASADRYWSGRITREGSPWLRWALVEVAMHAIRRQDPVGRWARQLAIRKGGYKARVALARRLCDDIVQVWRQAGSQDA

SEQ ID NO: 172070 - protein, 345 aa, unidentified
MQIASIGIDLGKTTFHLVALGERSKVLVRKKFSRTQLLAYTANLPASLIGLEACAGAHFVGAALREQGHQVRLIPAQFVKPYRKSNKNDFLDAEAIAEAVTKQNMRFAQLKTQEQLDWQALHRVRDRLVQRRTALINEIRGFLLERGITFAAQPIHLRKSLPGVIEDAEQNLSPRLRWLLDRMWQEWKQIENEVEAISEEIERISKDDARCRQLRQIPGFGPMVSTATVAAIGNGSAFRRGRDFAAWVGVVPRQHSTGGKQKLYGISKRGNVYLRRMLIHGARSVLFRVKYDTGGFGQWVRRLAQRAPRNKVVVAIANKLARIAWAVLSSGRDYRHQPVPQLAAA

SEQ ID NO: 172071 - protein, 310 aa, unidentified
MEQSFIGIDVSKDRLDVYVRPSEVSFAAARDAKGLADLVERLRPLDPCLVVLEATGGFEQTVAAALVAAGMPLSVVNPRQIRDFARATGQLAKTDALDAKAIALFAEKVRPEPRPVPDAQARALGELIARRRQLIEMITAERNRRAQLSSRRLVKGIDQLLALMQKQLSELDREVGDSIRGTPAWRERDELLRSVPGVGDIVARTLIADLPELGRLDRKQIAALVGVAPLNRDSGKMRGRRTTWGGRAKIRCVLYMAALVASRRNPVLAAFYQRLLRAGKAKKLALTAVMRKLLTILNAMVRDNRQWQNA

SEQ ID NO: 172072 - protein, 317 aa, unidentified
MSVANEVFVGIDVSKAELEVCWLPQLGRLQVARDEGGLVRLVERLKELGPSLVVLEASGGYEMPVAMALAGASLPCVVVNARQVRDFAKASGKLAKTDRIDAQVIAEFAQAIRPQVRALPDAAAAHLIALVARRRQLVEMLTAEQNRLALSHAAVREDLKQNIAWLKSRLQDLDGELARAVRSSPLWRENDKLMQQVPGVGRVVSAVLLALLPELGRLSPKKIAALVGVCPFNRESGRWNGKRAIFGGRAGVRSVLYMAIVSAIRWNPLIKTFYQRLLAAGKPKKLAMTACMRKLLVILNAMMRDRSDWNPNGTLAT

SEQ ID NO: 172073 - protein, 420 aa, unidentified
MKVVYQTCCGVDVHKSFLVATIIKTISGVEPSYQKKRFSTFNNSILQFKNWLIENQCRDVCMESTGKYWVPVFNLLEDDINVTIANPKWVKAVKGNKDDTKDSKWIGDLFRLGLVPGSYIPCKPIRILREFTRYRYKLTSCRTSEKNRYQNALTVCNVALDSVVSDIFGKSATSVIDYLIERSDNSINHEEIASRLLRSLKKKSDSVIESIEGYQMTDSQKYRMRLVRAHMDYITSMINDIDTMLDSLIAPYENAVQLLCTIPGVDRNSAITVISEIGTDMTPFSNSKRLCCWAGLTPGNNESAGKKKSVRITRAGVYLKPALVQVAHAAVKSDKSPYYKQKYERIMKRRGKKRAIIAIARMILTAIYQMLSTGEAWNPTDLYKIDIPEPLKEKQKEKAIKQAKKLLIREGILSESQLAS

SEQ ID NO: 172074 - protein, 409 aa, unidentified
MEILYPRCAGLDVHKETVSVCVLTPGPKAEPNQEIRQVGTTTAELRGLRDWLRERGVTHAAMESTGVYWKPVFNILESACQIILVNARHVKQVPGRKTDKADCAWIASLLRHGLLQASFVPDLEVRQLRDLCRMRTTLVRECVQVGNRLRKVLEDANIKLDSVASDALGVSGRDMIMALVQGRDDPAELAELARGRLRAKLPELERALEGQVTEHHRFLLRELMRQLTFLEGQVERFEEEIQRHMSPFEWAAERLMTMPGVDRTAACALIAEIGVDMSHFASSRHLASWAGLCPGNNESAGKRRSGKSHRGNRWIKGVMTEIAWAATRTKDSYSATQYRKLAGHRGKKRALVAVANSLLQAAWHMLSKRQSYIELGAQYLDRLNQKQLERTLIRRLEKLGHKVILEPVA

SEQ ID NO: 172075 - protein, 333 aa, unidentified
MIDALGRHLVDRAFPATGAGYRNLEAWLRSYGTGAAVGVEGTRAHGAELARNLTRSGLEVVEFDRSDRKTRRLRGTSDPIDAYAAASAVASGRATGTPKRRDGIAEAIRALRVPLRSALEARTQAINQARQLLVAAPEAPQAPLRDRSWFALAHACARLRPTDLSDPIGATKAALRHLGRRILNLSHEVEAPNTALQELTARAAPELLALQRVGPDVAGQLLATTGDNPDRLRSDAAFAHLCGVAPIPASTGRKDRHRLNGGGDRAANRALHTIVLTRMSWDPRTRAYVERRTQQGLSKKEIMRCLERYVAREVYQTLTTPPNTAGPKPAMPA

SEQ ID NO: 172076 - protein, 385 aa, unidentified
MDVAVSPTTQNGDKHMKTLDKYIGLDVHKDTTVIAVAEGTREGEVRPYGAIPSDLQALERVLRKLGGEGVRLHVVYEAGPTGFVVYRRLRQLEIECIVVAPSKIPLPKGPRQKTDRRDAEQLARLHRAGELTAIHVPDAVDESIRDLTRARADAVHDLTRAKQRLKAFLLRQGYRYPGKADWSEAHQRYLRKLVLPLPALGSVLEEQLLAIDQGTQRVNRLDELLEVQVPRWRYYPAVQAVMCLRGFRLTAATVIVAELGDVRRFAHPRHLMAFLGLVPRENTTGDTRRLGAITKAGNAQARWCLIESIQKVLLPPKVSAQLAQRQAGQPAQYRELAWKVQLRLHKRGWHLLHRGVMKAKVNVALARELAGFLWDLLRQVPVPQS

SEQ ID NO: 172077 - protein, 392 aa, unidentified
MYIVGIDIGKNHHEASIVSPEGKQIGPSLRFATTHKGADSLMSFIFKNIGNSPCVFGMEATGHYWYPIYSFLKAKGYTIYVINPIQSDSLRKMYIRQTKNDSIDSFLIAEVIRFGQFGTTSMADENILAMRQLCRYRDSVISSRTEIKLRIGTIMEQIFPEYEKQFSSLWVSTSMGILEKYLTPEHIENAPIDELFEIIKDKSHNRLTKAKAISIKEAAADTFGIKIAQDAFSFQLKQLIDRMNFLDKQIEALDIEIMKYYEQFDCYLHTIPGIGIIGAATILAEIGDISRFKNSSALVAFAGIDPTVRQSGEFNSTHNHMSKRGSPYLRHAIFLAATTCSFHNSPLNAYYKKKRDQGKHHLTATGAVARKLTTVIYAVLRDSKPYEPKSFC

SEQ ID NO: 172078 - protein, 418 aa, unidentified
MSNKVTRAASPWSEQYQKLLPRTKGGVMVFVGIDVAKDKHDCYICDSDGLELYSPFIIANNREGFEELMERIRCVSDDLSKVKVGLEATGHYSYNILGYLISHGTPISLINPLHTNLFRKSLSLRQTKTDKVDARTICMMLSSGMDLSSYSESSYHMEELKSLTRYRFGKVGERAQLKQSLSRLVTILFPELETLVPTLHMKSVYALLSEFPGAIYVANAHLTRLKHLLADSSKGRYGKEFAETIRDTARKSIGSDMPAKSLELKHTIALIHVLTEEIDEIEFSIQKIMDTLEAPILGIPGINYRMGSMILAELGDLRRFSSPDKILAYAGMSPSTYQSGQLISSYAHMEKRGSRYLRYALFNATRYVCMWDPTFKSYLAKKRAEGKHYYVAISHAAKKLVRLIYHLQMTGEAYCPQT

SEQ ID NO: 172079 - protein, 453 aa, unidentified
MKKLSMEIVNPKAAGIDIGSRFHMVAVNQNVDDVKEFGVYTEEHEAMIIWLKENSITTIAMESTGSYWQTLFSALQRAGFEVILVNGQHTKNLKGRKTDVQDCMWIQKLHSLGLLNGSCLPGEYVERLRTYYNHRQHLIEHCSKYVNKMQKALRLMNIRLDVVLNDITGKSGRAILDAILSGEREPMVLASLANIWVKKSKEEIAKSLHGNWREDLMFELQECLSLYDIYCEKLALCDKEFDKVLQSVKSIDMRLPIAVPSGRVVRDRSKHAPVFNVRELAYMHLGVDLFDIKGVSHNTVLCVMSNMSREEIKKFPTVKNFTSWLRLAPNNKKTGGKIISSRTPKGKNQIALALRQAANSIGNQKDHPLTHFFNRVAYKKGRVAAITATARKLAVIIYHMITKQQAYQPINSEEIITRIKKHQISNIKQRLNKLNLLPDELNDIVRSVSLSAN

SEQ ID NO: 172080 - protein, 343 aa, unidentified
MQAVTTIGLDIAKSVFQVHGIDAEGRVIIRRQLKRRYVLGFFQKLPPCLVGIEACATSHHWSRELRALGHTVRLMPPAYVKPYVKRQKNDAADAEAICEAVTRANMRFVETKTPEQQSCLMLHRTRQLFIRQQTSVINAIRAHMAEFGIVAAVGRKGVEQLLAIVTDAGDERVPEVARACLAALGAQLRMLKAQILEFDRRIMAWHRSNETSRRLDAIPGVGPALATALVASVADPKAFRSGRNFSAWIGLVPKQHASGGKDKLGSITKQGDRYLRSLFTAGALAVIRYAKINGTQHRPWLAALLARRPTKVAAIALANKIARMAWAMMARGERYKEPVALAA

SEQ ID NO: 172081 - protein, 349 aa, unidentified
MKKLSKVPKPVGETVGIDLGDKISRYCVVDQNGDVVEEGSFRNQASSIDKHFAGEPRRIALEAGAQSAWISGELKLLGHEVIVANPRELKWITSSDTKNDPVDARKLALLARADVRLLAPVEHRSAEQQAELAVIRARDAILRARTLLINSARSIAKGFGLRLPKSITGTFGERALEALPEFLHTALTGLLEQIDAISQEIAGYDQNIGELAAKHPELTRLESIPGVGRLTAMTFVLTLGRVERFAHSRDVAGFLGLRPKQRQSGARDPQLGISKSGDPYMRKLLVQCAHHILGHYGKDSALRQWGLTKGEGGKKATLRAIVAVARKLSVLLHRLWASGEFYKPFPKMA

SEQ ID NO: 172082 - protein, 415 aa, unidentified
MEQIFMIKENYIYVGIDLHKETHTAVMIDCYNQKLGEITFPNRPADFPKLVAKVKKCNTDGKTIVFGLENAYGYGRPLAVWLIDKGYFVKDVNTAISHRQAKHRGAMYRKSDSDDAEAIALATLNMLDKLPDACPNDAYWSLGQLVHRRDNIMKQRTRLVNQLHEQLCIAYPSYKSFFNDISRPTALYFWEHYPSKKYLKGKSVEDLRAELVPVSHNKCSTKTCEKILDAVASDKVKNNAYQDARDMVTLSIVSDLQHYDSQLAEVDKMLEQMYKMLGCTLTTIPGVNVITAVKILAEIGDIKRFSNANKLAQFAGIAPLHLSSSGKGKDLATKQGNRRLQATIYFLAIQMVQISSKGTPRNPVVRAYYEKRKAEGKTSQQALICISRRLISIIYGMLKHGTEYRMPVVESAGEK

SEQ ID NO: 172083 - protein, 412 aa, unidentified
MEGETVIAGVDTHKDVHVLCLLDGLGRKIRSGSFRADPEGYDRLAEAIGDPGGCLVVGVEGTASYGAGLTRRLVELGYNVVEVLRPKRDKARPGEGKSDPLDAERAARKAASGKGCSVPKSQDGWVEAVRQLYVARRLAVATSTSCVACAKSMLTTAPGALRERFRGRERPKDLMPLLARGRKAGDALEESVLASLRSVAAVWKEARSQVESCDARIRALLEANAPALLGVEGCGTTTAAALVVAAGDNPGRLKGEAAFSMLCGTSPIPASSGKTERHRLNRGGNRQANWALYEIAIKRMAYDERTKRYVARRTSEGKSRREAIRCLKRYIAREVYRVLMDPNPDGAAPEGPELAKMRKAMRVTQKQAAAGLGMSAAALGHLERGTRRSTRLERMYYELLCELQGALPQTAS

SEQ ID NO: 172084 - protein, 497 aa, unidentified
MPSTDVAAKATIVGAMKRKSIFKNNSQNIDAAFIEAGLPEKVLLVPLDFAKSTHYACFCDGLGRYLRQAFTVKNTKEGLDYLVERIEATRKSRAIGNKRHVIIGGEDSASYTRNFMQRLNELGYLAVRLSSCEVHRQAESVDSSTDRTALRAIAKTMLNRDARPIDGHDVYTELRGLTRQRRRIVHLSTAVKNRIHTHADRLFPGFLAKDSVLTPFSRASLELMSKPAFGAVSISQKNEKALGQLLKRAGTARSAEIAPALKQQARDSIPADKDAARLSAYILAGELQLFRSLASNLEALDQGCARLLARTPEAFIASIKGIGITLAASICAESGSLTQITRTDGLNAYAGIVPKVKQTGGPESEAKIRGRRRSFNRVLKDYTMQAGNHLYLHGPEELMQDAVRRKLAGKAVDTAMARRFLRIARALCKNHLTYLPSHLRGQNASSRERAQHILDTWPALLVKWKRLGLHEEAFAAENPLGQWRLIMQEIHDIDLPL

SEQ ID NO: 172085 - protein, 345 aa, unidentified
MPNIEIGVDFMVKENFIYVGIDLHKETHTAVMIDCYNQKLGEITFPNRPAAFPKLVTKVKKCNTDGKEVVYGLENAYGYGRALAVWLIDKGYLVKDVNTAISHRQAKQRGAMYRKSDSDDAEAIALATLNMLDKLPDAYPNDAYWSLGQLVHRRDNIMKQRTRLVNQLHEQLCIAYPSYKQFFNDISRPTALYFWEHYPSRKYLKGKSVEDLRTELVPVSHNRCSTKNCEKILDAVASDKVKNNAYQDARDMVTLSIVSDLQHYDSQLAEVDKMLEQMYKMLGCTLTTIPGVNVITAVKILAEIGDIKRFSNANKLAQFAGIAPLHLSSSGKGKDVATKQGNRRL

SEQ ID NO: 172086 - protein, 403 aa, unidentified
MTAFFAGLDWASQSHAVCIIDDHGNVRERVDIAHSAAGLTQLQRSLVRDERPPIAIERPSGIVVDTLLDAGFTVIPIHPNAVKATRPRYRSHGAKSDASDAYLLADLLRTDGHRFAPLPAQSDDIRALRALVRGRDDVVAARTQLANQLRSLLASFWPGAAEVFADVDSPIALAFVERYPTPESAHRLGPKRMAAFCAQHAYSGRRSAQDLLARLQQAPAGVCAEMEMEAKGELARSLARALSQLVEQIRLLSSRIEHHVESLDDGRIVMSFPRAGRICAAQILAEFGSVRERFANEARLAAEAGIGPVTYPSGKSRTVTFRCACNHRLRAALTCLADNSRHASAWAAHVYNRARARGCHHPHAVRVLARAWVRVIWRAWTDRKPYDPTRHGAPQLLAKSAGG

SEQ ID NO: 172087 - protein, 338 aa, unidentified
MVYGAIDLHMRYSQIRIVDAEGRVLREQRVPTTAERLVKAFDGHGTMRILLETGTESEWVAQALETAGHEVIVADPNYAPMYGEIRRKVKTDRRDVAALAEANRRGWYRATHRVSSGQRAVRQVLRCRRQLVQMRAGTIALIRSLLRQEGYRLPTSSSTRVPARLAALALPLRLQETVAPLTRMIEALTTEIAGVDAELATCAQADPIVERLQSVPGVGPVVALTFRAFVDDVGRFGSAAQVSAAIGLVPREDSSAERRHRGHITKAGPRELRSLLVQAAWACWRSKASGTLRAWVERLAGRRGKRIAVVALARRLSRILFAVWRDQSVFAAATIATA

SEQ ID NO: 172088 - protein, 319 aa, unidentified
MLGIDTSKATLQCALRDPVTRGLLWEDSFSNSAAGVASLLKRAPAEAPWVIEPTGRYSTGVVVAAQQAGRSVLLAPPRKAKAFLASLQSRAKTDKLDSKGLALYGLSQPLAPYPVKEAVVEKIDQLLSARKGLSHSASRLQLQAKELPEAQELLLATVSDLKTRIKALDKTLATLTAQEPKMAIAKQLRQVPGIGAVTATAVASRLTDKAFAHPDQFVAYVGLDIDVRQSGKKKGTRGLTHQGDAELRRLLYCCAQASLRAKDSPFKAHYERERAKGLATTAAICSVARKMAKLCWSLHKHNAVYDPDRVYQAPKRPAN

SEQ ID NO: 172089 - protein, 477 aa, unidentified
MEGERRLVGIDLGISSAHTVRVLAGDGTEVCRRRCVPTVESLEVIEHAALAGAAEGTRLEVVMEPTGPAWLPVAVFFSRRQHTVYRVSSAKAADLRRFLSRHTKSNGIDADTLARLPLVDPRGLIPLELPDTDRAELARRVRATDRLTRQASEHKTRIRDLVRQLLPISPLGAELGKGDLAVLTRTGGHPGRLVEMGWGALSELVREASMGHLGAERAQQWLDAARGALALYGDHPAFAADALADEVQTEIRLLAAIEKELSVHATAREAAYQEVDPGALARSLPGVAEVGGPALVALMGRPGRFRTAAHFRSFTGLTPKTSETGDTDRKGQAMSKAGPGLLRTTLVRSADIARMQDPQLARLYYVQMVERGANHIKACCVVGAHLAERALAVMQRGEPYVVRDTEGRPVDRAAAKALILERWTVPEEVRRRRRSRKARKAPQKVLMGHVETRRPSSPDMVAPAPVDINLALSAQRR

SEQ ID NO: 172090 - protein, 345 aa, unidentified
MSNVPVFVGLDYHQDSIQVCVLNQEGDVLLNRSSANDCQEVARIVQPLGKVMRVGIEACCGAADLGEQLVQRLGWNVSLGHPAYIAKIKSSPDKSDYSDSRLIADLTRVGYLPRVWLAPANIRELRQLVNHRQRLVNRGRALKLQVGAILREQRVKIEKDRGSRWSKAWAASVQDNARLSKHGRWIVNDLLEDLKYTNGKIAKVELQLREATEGDRVIEKLMQQPGVGEVTAWILRAYVGDFSRFKTAKQLARYCGMSPCNASSGKKVADAGLIDGCNQLLRLTIVQAAHRLVRTTKRWGELADSMKARGKAACVIVGAVGNRWLRNLHHAMKPTTVEQGAITVN

SEQ ID NO: 172091 - protein, 413 aa, unidentified
MALKIVYPICCGIDVHKTFVVACIASTNTGVTTYKGHRFSTYTKGLKELSQWLCNNNCKDVCMESTGKYWIPVFNVLEDSCNITLAHPKYVKAIRGKKTDKKDAKWIADLFKHDLITGSFMPPLAIRQLRDLMRYRFKLTNFMSSEKNRLQNSLTVSNIQLGNVVSDTFGKSSMNIINKLLENPLDNSFDIEPLIYGSMKDKLPELELAIDGFITPEQAEKLKVIKQHYEDLKSRKADLEKIILSLSAPYAEEINLILTVPSFKNIFSAITVVSEIGVNMDVFPTAKHLCSWAGLTPTNNESAGKKKSVRISRAGCYIKPLLVQCATAVVKSEKHPEIRNRYLRLKQRRGHKKAIIAIARMLLTAIYNILKKKESYNAELYRKSDVLPVNREITVEQAIILARTQGYRIRAAS

SEQ ID NO: 172092 - protein, 347 aa, unidentified
MQILSLDLGKNKTVGCDYERESGKHRFKTAFSTRAGLAQLVQEVKPDRVVIEVCSIAGWVCDLLREMGIEVQVANTSDDAWRWRKVKKKNDRCDALKAAQLSAVNQIREVHIPTIDVRQWRALIAFRQQLVQRRTRVKNHVRDLLLREGQILPGGGKCWTRLGMAGLEAMAQPLSEVGMNELWRGELAIELRQLRAVQEEIEVAEEKLDAIGAADPRVRLLRTIPGVGPRLAEAIVALLDRPERFRKGSEVSAYIGMVPKELDSGETQRRGKITRHGSRLVRSLLVEVAWAGLRHNPWVRETYQRISGGKKSRKKIAIVAVGRRLLVRCWAMLRDGTSWQSPATKVA

SEQ ID NO: 172093 - protein, 448 aa, unidentified
MKQDPEEITDAEHELVLNRVCAIDVAKASGKVCVRVDSRDGRRVSKVWDVDATSRAVGELADHLVDAGIEKVTVESTSDYWRIWFYLLEAAGLDVQLVNARDVKNAPGRPKTDKLDAVWLAKLTEKGLLRPSFVPPASIRELRDYTRLRIDLTRDRAKYWQRLEKLLEDALIKVSSVASRIDTLSVRDMLEALIAGERDPRRLADLARGKMKPKRAALIEALTGRFDDHHAELARMMLDQIDVFSTKIAILTTRIEELLAAMEAGPGTGTDTPDRGAGPGSDSAAELTTIERLDEIPGIGPGAAQVILAEIGLDMSRFPTAEHLVSWAKLCPRTIQSGPVLRSGKAGKGNPYLKGALGEAAAAAAKTNTFLGERYRRIVKRRGKLKALVAVARSILVIVWNLLKDPTARFHDLGVDFHTTRANIERRTRNHVAQLAALGYRVTLEPAA

SEQ ID NO: 172094 - protein, 350 aa, unidentified
MVTLGGDSHKRTHTLVAVDQNGRQLAQKTLLATKAGHLEALQWAARWAERKWALEDCRHVSRRFEADLLAAGELVVRVPSKLTGGARKVARTSGKSDPIDALAVARAALREPDLPVAKLEGAGREVRLLLDHREDLVGERTRIQNRLRWHLHELEPEAVIPARMLSRYHTLAELEGRLRSQHGVVVEIAIELVVRIRELTRCINRLEADIAGRVSGLAPTLMQLTGCGALCAAKVVGEAAGVSRFRSKAAFAMNNGTAPVPASSGNQMRHRLNRGGNRQLNAAMHRIAVTQLSRPGPAKDYVARRLANGNTKTEAVRALKRRISDEVYRRLLHDERAVLASPSGSVEVAA

SEQ ID NO: 172095 - protein, 367 aa, unidentified
MSSVASPEGPIHLGMDTSKNTIVVATLLPGEENPVTDRVFNEEEAIRRLVGRFPDRSVLRAWYEAGPGGYDLYRLLTSMGVACQVVAPSLIPKGGSDKVKTDKRDSRRLARLGRAGELTPVRVPSPAEEAVRDLARARAVVLDDRKRARQRLTAVLMRHGRIWRGASYWTAAHRAWIAAQRFGEPALAAAVGHYRAALEVREAELAAIEAELAPWAAREPLAGPVARLGCYRGIAELGGLTLAAEVVDWRRFPAARAFMSYTGLVPAEYSSGERTRRGHITKAGSEPVRTALTEAACAYRHAPAIGAGLRRRQHGAAPETLARSWKAQRRLHARYVHLLHAGGKAAPEAVVAVARELAGFVWAEMTA

SEQ ID NO: 172096 - protein, 464 aa, unidentified
MFTLGIDVAKKTSRYLLLSPEGRRVKSFTLENSPEGFQNLLQRLQELSIPPADLLIGMEATGNFWENLYSHLKEKGFSVVLLNPYPVKKYREALAKKAKTDDLDALVIAQFLRTGEYVQSQVAEESIQSLREITRLRYELLTEKKNYQRQACSLLALVFPEHAQTALKNPFSVSALTIFQRFPTARDLAQAKPKQIEKIIRSIPGNSFGPDDIQNLITIAQKSIYSGRAKEARAVSLRILLGHIANLLSSIELLDQEISKMLSPQGLQDSFPGENLLTIPGIGDKTVAAVLSYLGTDGANFSSSTRAVGYVGYFPKIYESGQTKRQNKISKRGPKLLRWALYMAAVASLKHNAEMRALYHRKISQGKTQKQALIYLAKKLFQIMLAMLKSAEPYNPLMVFVHAKKVNTLWITFSPCPPFFTWFLIGCLFQREESFGKIRRKIQPFPFWNRPPSHPSSPVGEREG

SEQ ID NO: 172097 - protein, 325 aa, unidentified
MKTIYLGIDVSANTLDICVKEEEFSHFVIENKAKSIKTFLKPFEKKGSLVIAMENTGIYNYELYSVLEKQQHRAYVICPIHMSKSFGLTRGKSDKVDAQRICQFIIKNQDELAEWKPTPDKIKELKILVTERDFLMKEKRSLLTRKAYYKRLVKLDHSKKLSKLNDKRLKALDQQVIEIEALIKDLVKADQELKEQQALITSIPGVGEVLAWTMLIKTEGFTRFSNPRKFACYSGVAPFGRASGTSYHRRPRVSSYADKSVKSLLHMSAMSAIRYNKDLKKYYERKILEGKNKMATLNAVRNKLIHRMFAVIKNQKPYQNDLVLS

SEQ ID NO: 172098 - protein, 368 aa, unidentified
MNDLIRIGIDTSKSVFVLHGVNAGEQPVLLRKLRRRQMGEFFAKLPPVQIGIEACGAAHYWARELAALGHEVRLLPAQYVKPYVQRGKNDAADASAICEAMSRPRMRFVPVKTAEQQAALMLVGVRDQLVARRTQLSNMIRGYAAEFGVTAAKGLDKIEPLLVRIAREPGVPEKAKALFALLGEEFVALKPKLRKLEAQLQSWHRHNELSRRLVEIPAIGPIGSALLTMKVTNPHAFRCGRDFAAWVGLTPKDHSTAGKQRLGVITRAGDETLRRVLVVGATALIQQARKGRGNPSPWLIGLMRRKPPKLVAVALANKTARIAWKLMVSGERYDRARSGFVPPAGSLAPGARRQGRVAPPAAVACGQP

SEQ ID NO: 172099 - protein, 410 aa, unidentified
MSPEHSIDIFLGLDVGKSEHHACALDRDGNKVFDKPLPQLESELAGVFHQLQKLGTVLVIVDQPNTIGALPIAVARDCGCEVGYLPGLAMRKAADLYPGRAKTDKRDAFIIADTARTMPHTLRAVDRNDEVLSALKMLSGFDDDIARDCTRTVNRLRSVLTQIYPSLERVFAGSTLTRTPILELLIHYKGPQGLKRAGYQRVLNWMIKRTRKDPTPLVDDIFTALKAQTVTVPGSDAAELVIPQLAANIQALKEQRNTIAEQVEEMLADFPLCEVLMSMPGVGIKTAAQILLAIGDGSDFASAGHLAAYAGIAPVTRRSGSSIRGEFPARSGNKRLKNALFYSAFAVIRSHEPSRRYYQRKRAEGKRHNAAVICLARRRCNVIYAMLKNKEFFREIPPRPVTRWPAPRHA

SEQ ID NO: 172100 - protein, 407 aa, unidentified
MNEKKNYVLAIDVAKRKSMFYILSIHGEVILDAIEYEHTFSHFKMIDQMIRKEEIKDDLVVFMESTSTYHYPVMRYFIEQDYDVIVVNPNLVKKSSTTFRRTKTDRLDVIKIAETYFKEEIKSNAIKTGRLYDDLQAAHKQLISLEKALTAIKNRYTRLLDICVPEHELFYSDKSDKYSLKYITLFEYFPHSEFIQKKRVDHIASILNLTFNRSFKTRLTKEATQLKNISKDAYPGVSITSNEVDNLKQTIIILKEFMGHYELAKERLIHLGKQTKEYKYISSIPGIGDQSASQLIAEIGEFSRFRSYKQINAYCDIEPSVYQSGKTFYNGKITKSGNPFARKVLYSVIMNIIQSSRSNYPEHPINIYYTSKKEKENKSTKESVIASSTKLIRILFSLCKYERTFTK

SEQ ID NO: 172101 - protein, 386 aa, unidentified
MHHATTLPVPEETCIRGDCATLFVSLELSRSTWVATALAPGSRKMSKHTLVGGDGRKLLDLLARLKTRAEQRIAAPVKVVTIHEVGLDGFWIHRLLEANGVESHVVDPASIAVPRRHRRAKTDAIDGETLLRTLMAWQRGEPRVCSMTVPPSPSEEDRRRISRERATLLRERIQHTNRIRGLLFGQGVTNYNPLHKNRRVCLEELRTGDGRSMPAHLKSEILREIDRLELVLRQISEVEAERDEMLQPAEASSPAALLMRLKGIGAEFATVLYLEGLFRHFENRRQLAAYAGLAPSPWKSGTIDQEQGISKAGNPRLRTTMVELAWMWVRYQPASALSCWFRQRVGSERGRTRRISIVALARKLLIALSRYVTHGEIPAGAVVKAV

SEQ ID NO: 172102 - protein, 397 aa, unidentified
MYIVGIDIAKRKHEAAVIDGEGTVIIKPFSFTNNCSGYNRLLAMLTKAKLPLDEVSFAMEATGHYWLALFTRLQKEGFRVQVINPVQTNSIRSFYIRQAKTDPRDALLIAEVIRFGHFSESTLHPENIYELRELCRGRHAIVSMQADVKRKVVALLDQVFPEYETAFTNMFSDTSMAILQTCPTPKELSEMPLEELCHLIEVSSHKRFRMAKAQELQELARNSFGFAMAGDVFSTMIRLYAKHLDFLKQQVKEMDRKITEIMDTLDTPITTITGIGPTLGAYILSEIGDISRFSSAAKLAAYAGIDPTMRQSGEYNGVRNRMSKRGSPYLRHAIWLAASSAVLHDPALKLYFQKKRDEGKPYMASVGHACRKMVSIIYAVMRDNKAYTPYIPNEISA

SEQ ID NO: 172103 - protein, 315 aa, unidentified
MAEEVYVGIDVSKAELVMAVRPSGERAQLANNASGIKQLVARLRELQPRLVVVEATGGLQRQVVAALWAAQIAVAVVNPAWVRHFAKGRELRGKTDSIDADLLALYAERERPEPRPPADAETAALQALVMRREQLVEMVVAEEHRLQRATASLRKEIRHHISYLKGRIKDLEEDLDQTVRRSQSWRRKREVMGSAPGVGKVMCSMLLAKMPELGTLNRKQAGALVGVAPVPDDSGKRRGYRAIAGGRFEVRNKLYMCALSAIRANPDLKDLYERLLARGKTKKVALVAVMRKLIVMLNAMIKTDTLWRSPCQTPA

SEQ ID NO: 172104 - protein, 351 aa, unidentified
MIIIGVDYHPSFQQISFMDQETGECGERRLNHGDGEAERFYKELKERGVSVRVGLEATGYSRWFERLLAELGFEVWIGDAAEIQRQRGRKQKTDRRDAELLLKLLLENRFPRIWVPSPENRDLRQLLWHRHRLVQMRTRIMNQLQAVAMNEGYRWKKKLFSEKGRALLEKLSLAPWASRRRKELLELLDQLDPKIAELTRAVEQEAQKWPAVVQLMTHPGVGPITGLVYILVIGTTERFPSGKKLGSYTGLIPSEDSSAGQQRLGHISKQGNSLLRFLLGEAAQAAARCNPDWRRRYVHLTMRRGKRIAKVAMARKLAVRLYWMWRNGWQYSQLVEFGSHAGKLGTGHGVK

SEQ ID NO: 172105 - protein, 456 aa, unidentified
MPRARRRLTRAATPPVVHPHAAGIDVGATELYVCVPVERDPRPIRRFGTFTEDLLALAAWLKEVGVTSVAMESTGVYWIPLFQILDTQGFEVCLVNARHVKNVPGRKTDVQDCQWLQYLHSVGLLRGSFRPPDAVCAVRTVLRHRARLVQLAAVHTQHMQKALTQMNLQLHHVLSDLTGVTGLAILDALLAGERDPAVLAQHRDPRLKASRETLAKALVGDYRPEHLFTLRQALASFRHYQRLVAECDTEIQTLLDAFPSTVDPAAAPLLPDPRPHRRRSAVQVELRTERSRILGVDLTRVEGFATLPLALFAELGPTLAAFPSSKHFASWLGVCPDNRISGGKLLAVQTRHVKHRVAQALRTAAQSLHHSQSALGAYFRRMRAKLGAPKAITATAHRLARILYHLLTTRQPYDETQVAAAEERYNRRSEARLRAHARALGYHLVPAAPSSAGGVS

SEQ ID NO: 172106 - protein, 343 aa, unidentified
MQTVTTIGLDIAKSVFQVHSVDAAGQVVIRRQLKRRYVLAFFQKLPSCLVGIEACASSHYWSRELQALGHNVRLMPPAYVKPYVKRQKNDMADAEAICEAVTRANMRFVPTKTPEQQSGLVLHRTRHLLICQQTSVINAIRAHLAEFGIVAPVGRRGVEELLGVIADPSDNRLPELVRSCLAALGSQLLGLKKQILAFDRMILAWHRCNQTSKRLNCIPGVGPLLATALVASVGDPKSFPSARNFSAWIGLVPKQHSSGGRERLGSISKQGDRYLRKLFVAGALAVIRHAKLHGSKHRPWVTALLARRPTKVAAIALANKLARMAWALMARGGRYNYPVALRP

SEQ ID NO: 172107 - protein, 408 aa, unidentified
MIYCGIDWAEKTHDVALVDDTGRLVAKRHITDDATGYQLLLELLAEYGDSEENPIPVAIETSRGLLVAVLRTGKRKVYAINPMAAARYRDRHSVSRKKSDPGDALVLANILRTDMHAHRPLPNDSDLGRAIAILARAQQDSLWNRQQLANQLRSLLREYYPAVLDAVATWANGLCRPEVRALLKAAPTHTQAARLTRTQLQAALKRAGRKRGIEAEADRLRDIFRARCAHQPPLVEDALGKQMLALLTQLEAACTAADQLAEAVEEVFPQHPDAEILLSFPGLGIQLAARILAEIGDDRARFADARSLKAYAGASPVTRASGKKSSITRRWVKNDRLNHAGYLWAFSALRHSPGAGAHYRRRREVGDWHAAAQRNLFNRMIGQLYHCLQHGKLFDENTAFPSELAAAA

SEQ ID NO: 172108 - protein, 448 aa, unidentified
MRTRKPPRPRKMKLPKHLQHINPHAAGIDIGGRSHFVAVPEGSCEQPVREFTSFTDDLHRMADWLLACAVSTVAMESTGIYWIPVFEILESRGLEVRLVNARHVKNVPGRKSDVLDCQWLQRLHSYGLLQGAFRPTEQECTLRAYVRQRMNLVRYAASHIQHMQKALAQMNLQLANVVADITGGTGMRIIKAVLAGERDPLVLAQLRDVRCKSNEATIARSLQGNFRPEHLFSLKQAVDLYEFYQGQIGECDRQILDQLSSFDGADASGNGPPESLDEALQRMTGVDLTQIDGINSNSALKVISEIGTDMSRWKSAKHFASWLGLCPGTKISGGKLLSAKSKPVANRAAGTLRMAAFSLFNSKSALGAYLRRQRSRLGAPKAITATAHKLARLVYSMLKHGTAYVDVGQKRYEERYRTRVVENLKRKAHDLGYALVEVSGKQPQPVAS

SEQ ID NO: 172109 - protein, 348 aa, unidentified
MTIVAEHFDYVVGIDTHARTHTYAIVNTRTGARDGCQTFPVSAAGIHRAVAWIQRHTSGAILAAVEGTRSYGATITHALTANNITVVEVKPPGKRQRAGVGKSDDIDATTAAMTVLPHEVSALLQPRSEGLRAALSVLVASRERIDTQRTRNRNALNALLRQIDLGIDARRALTDRQLAEIRSWRVRSTDTVEQHYARAEAVLLATAITDADRALQDNKQQLAELNEQLAPTLQDQFGFGAVTVAWILIAYSHPGRIHSEAAFAALAGVAPLQASSGNTVRHRLNRHGDRLLNKALDVIAKTRMRFDETTKRYVEKRTAQELSYREIKRALKRYLARSIFRQLQVLMH

SEQ ID NO: 172110 - protein, 464 aa, unidentified
MTARSRRSKRSTRNLQVLNPRSAGVDIGSRFHVAAVSPDLSDSPVRRFDSFTANLREMVEWFAACGVTTVAMESTGIYWIPLFELLMASGIEAVLVNARYAKNVPGRKTDINDAQWLQKLHSHGLLRASFRPDEQLAALRSYVRQRDMLVRRRASHIQHAQKALMQMNLQLHHVVADIMGVTGRFIIDAILGGERDPAKLAMLRDRRCKNSAAIIAAALDGNYQDEHLFELKVAITMFDAYGEQIQACERLIEEQLASIAQAGAQEGACHSVTPDRLPQSARLRKRSCSFDPRPMIRAMDCHRILEIPGIGPSSLLTIISECGLDMTKWPSAKHFTSWLGLAPHNKVSGGKVLSSSTNRGARQASSAFWTAALVLSRTSTALGAFHRRVAIRIGKAKAVVATARKLATIYYQVLRYDVSGKDPGVESYKASQQQRLMSGLERRAKQLGMGLVPLERTLSMTGVS

SEQ ID NO: 172111 - protein, 327 aa, unidentified
MERTRLGLDIAKGVFQAVLVAERSRLVWKRRWRRPQVLSELARLEPTMVLMEACGSAHYWAREIEALGHTVWLLPAQHVCAYRQGQKDDVTDALALVEASYRAELHPVPIKSEAQQELKLVYQVRRRLIQARTTLANQTRGELSEFGIVLPQGLNVLRRQLPTLLSRLRPRVAELMNQQYDELVALDQQIAAVTRTLERLAAEREDCRRLMQLPGIGPITAVLLVAHCCPHAYRNGRSYAAVLGLVPRHDNSADRVRLSRLTKHGQRELRTLLIHGGRSVLKYAARHDDRLSRWALEVAARRGKNRAAVAVANKLARYAWAELKRAA

SEQ ID NO: 172112 - protein, 314 aa, unidentified
METQLNNITFEQVIERGCGIDVHKSVVVATIRGVGIKEETRTFNAFTVSLEALRDWLKENHITHIAMESTGVYWKPVYNILEEDFVILLVNARHIKNVPGQKTDKKDSTWIAKLLLSGLLKGSFVPPRHIRDLRDLTRYKRKVIEQISSEKNRIHKLLEDANIKLSSVVSNLSGATATKIIDAMIAGEEDIKELVKLRHGKMQCTIEELAASLKGKLRPHHRFMLQTYKDSIKSKEAIIEKLDKQIDEQLKENELLLDAELLATIPGVGKEGAAYILAEIGNNMEQFPSEQHLASWAGMSPGSNESAGKKKVHE

SEQ ID NO: 172113 - protein, 481 aa, unidentified
MSQEKQDSKSLDEGKIAAGKGKRGRKRKGMCLEDRPILEANAAGIDIGAREIFVAVPPGRDEHPVRVFSTFTEDLEKMAEWLVSCGITTVAMESTGVYWIPLYDVVEQHGVKACLVDARGMKNVPGRRTDWHECQWLQFLHSVGLLRAAFRPDGDVCAVRSMMRHRTELVEMTSQHIQHMHKALTQMNVQIHHVISDLTGVTGLAIIDAIIAGERNPAVLAKLRDPHIKASEETIRKSLVGNWRAEHLFTLQQSRLSYQHYQEQIRTCDEEIEKMVLAFVARVDPAEKPLPPDRKRKQRGRKKKNVNPKTGFDLRTESYKLFGVDLTQIPGLMAMVLMLFSEVGRDMSRWPTAGHFVSWLALCPDNDISGGRVLWRGMRRVHNRAGDLFRMAAYALHHDQTPLGDYLRRMKSKLGPAGATTATAHKIAIIFYTMVKKQVEYDATLWAERDAEREKRFDAKLKRQAQQRGYKLVPIEEKPAA

SEQ ID NO: 172114 - protein, 415 aa, unidentified
MRGVRTKRITMLREGTLMATVDIGMASNTGYCATTDGRDIKSFKFNNTREGFDTFWDMIVINKNRFACGEVVVGYESILVHYLRSKPVKIVQVNPMHTKRMKEVNDNSPLKTDDKDPRVIADIIRLGHALTVVVPEGDAAYLRRLNNARERHIRERTALLNQLQQLVFLIFPEFKTVIKDIKIKTARYILRSYTTPQSMGVLNKETLGEEMRKKSMGKFGIKDAEALIGLAQGTVGIKEGITGLDLDVKHILIQLETVESFITEIESKMEGTLSEISCSIKLLSIKGLGVVSVAGIIGEVGDFMKFGTQSEIMKLAGLDLYEISSGKRKGERRISKRGRSLLRKILYYAAIQTIRKNGIMCEYYVNLTSRGMKRIMALVAIARKLLRIIYAIVRDDSEYKADYGLLKRKVIKKAA

SEQ ID NO: 172115 - protein, 424 aa, unidentified
MGKTIPICCGVDVHKKFLVATILTGDYLIPQCKQKHFGTSFRNLLAFKQWLLDNNCKDVCMESTGKYWVPVWNILEGVVNVVIANPKWVSAVKGNKDDKKDSKWIGNLFRMGLVPSSYIPGKNIRILREFTRYRSKLVAMRASEKNRYQNAFTVCNLTLDAVVSDMFGKSAMAIENYLLDTDAVDPEICVSFLQRSLKKKSAEIIEAVEGFNMTQEQKERVRIVQGHFADIDKRISQIDEIIGRLTAEHEGTISLLCTIPGIDRRLAITIISEIGTDMSEFGSSRRLCSWAGLVPGNNQSAGKKKSVKITRAGVYLKPALVEAAHAAVKASEKSPYFRIKFEKIMKRRGKKRAIIAIARMILTAIFAMVSTGEVFNPSDLQRFDMPEELQKKRTIAEAKDAVKLLVSLGVVPEGSISLEALLAS

SEQ ID NO: 172116 - protein, 428 aa, unidentified
MSITQNAKIRRVTDSTLVVGADIAKKVHVARASDARGIELGKPLSFDNTRDGFERLLSWLETLMVEYGFDNVILGVEPTGHYWMNLAQFLRHHGVGLVLVNPMHVKKTKELDDNNPTKNDRKDARVISQLVKDGRYSVPNIPEDIYAEIRVGMNQRGRLIEDLKRVQGRVHNWLDRFFPEFTSVFKDWEGQAALVCLHTFPLPVDVGSTTEVEIVRAWRDGGISRGVGVSRARQLLSAASTSIGITEGLQMARRELQILLGQYDLLHAQLEELLTEIEQLVGQIPGATQMMSMPGIGLVTAAGFIAEVGDISSYAHPRQIQKLAGLNLKENSSGSHNGRRQITKRGRPKLRALLFRCVIPLIAKNAEFKSLHRYYTERPENPLKKVQSIIALCCKLIRVMFVLWKRQVPYDPIQMLGPIHAERLQDAA

SEQ ID NO: 172117 - protein, 408 aa, unidentified
MKTLHRRCAGLDVHSDSVVACVRLTVRTKVSHEVRRFSTTTRDLLELRDWLAAQGVTPVAMEATGVYWKPIWHILEGRFELVLANAAHIRNVPGRKSDVNDAVWISDLLAHGLIRASFVPPSPIQEVRDLTRTRTQLTREVAQHIQRIQKTLEDANIKLVSMISDIMGMSGRRILKAMIAGETNAMRLSELGSARLKCSRSDPAVALDGRVTAHHRFLIDHHLGLIEELERRIAAFDARIEELLAPFRDAIERLITIPGVGRVAAEVILAEIGPDMTPFLTAGHLLSWAGVVPRLDQSADKRRSTRVRHGAPWLKPVLVQCAWGAVRAKGTYLQAQFFRLKARRGPKKAAIAVAASILTAVYHMLKDGTFYQDLGSDYLVKRDAAKTAAKLARRIKDLGFDVQYRAAA

SEQ ID NO: 172118 - protein, 347 aa, unidentified
MDYYAGIDVSLEASSVCVMDASGKIIREAKVLSEPENLIGWFRDLGFEMTRIGLEAGPLSQWLYAAMKKEGLAVELLETRHVHDAFKAMPVKSDRNDARGIAQLMRLGWFRPVHCKSMPAQEVRALLTARKLVQSKLFDIEMSLRGILRGFGLKIGRTTPNRFGLRVEELVAGHPTLEIIGKALLAAHEVLLREFNGFEKRVRQQARQDKRVRLVMSAPGVGPIVGLTYVAAIDDPARFKSSKQVGPHFGLTPKRYQSGETDYSGRVSKIGDASVRTALYEAANVILTKPLKGATALKSWGMKLAKRAGMAKAKVALARKLGVILHRMWVDGRKFADKGISPMPVTA

SEQ ID NO: 172119 - protein, 433 aa, unidentified
MQEVTGEPLYRDRVCGIDIGKAELYATIRVPSDKNPARRASETRRFATTRRGVLALADWLRCWQVPAVVMEATSTYWMGPFFRLEAEGFECVLADAKQVKNLPGRPKRDPSDSGWLAQCFERGAVRPCFVATAQFRVIRLHTRYRRDLIEDRTREKNRAEKLLESAAIKLSSVVTDLHGVTGRDIMNQLIGGHRDPKALAQLARGRARRKISELEHALEGAEFFTDHHARLLKTMLERIDRIDAEITRLSEVIETLLTPYEEQLQQAESMPGRGRRSAEDAVAETGPDMSRFPTPAHLASWAGRTPLDHQSGKRVGRARHKKGNRYLGGVLGETAVCAGRTQTREGARYRKLARSRGKNKACVAVGNTQLKVYHKLLSTPGMRYADLGPDYYQRRAQTRRTIDYHVRELQALGLEVTLCRLPEPGQAATTPAA

SEQ ID NO: 172120 - protein, 391 aa, unidentified
MIFVGIDVAKDKHDCFILNSEGTVLADVFTIANNRIGFETLLSRIQSCSQGESKIKVGLEATGHYSYNLLGFLLDSGLATYVINPLHTNLYRKSLSLRRTKTDRIDARTIAMMLMSDVDLKSYSNTAYHNEELKSLTRYRFDKVKERAKLKSSVARLVNILFPELEKLVSSLHIAVVYALLSNYPGASYIANANTEELAEILCTASKGRYTKSKTAEIQVAAGVSIGSKMPAKSMELKHTIALIRELDKEISEVESAIDKITSQMDSPIFTIPGIGRHMGAMILAEVGDFSNFASADKLLAYAGLSPSTYQSGQLQNCYAHMEKRGSRYLRYALFNAAKYVCLWCPTFSAYLEKKRSEGKHYNVAISHASKKLVRLIFAMQRSGKAFLADY

SEQ ID NO: 172121 - protein, 407 aa, unidentified
MEVIIERACGMDVHKDSITACIMTPKGKEIQTFSTKTVFLLQLIDWIKEHGCTHVAMESTGVFWKPIVNLLEAESIEFLVVNAQHMKAVPGRKTDVKDAEWIAKLLRHGLLKASFIPDRNQRELRELVRYRRSIIEERARQHNRIQKVLEGANIKLGSVVSDIMGVSALDMLRAIADGEDDPEKLAGFARRSMKKKKAELELALRGYINQHQRLMIKTILTHIDFLSEQVELLNQEVASRLSSHQEDIERLDSIPGIATRMAEQIIAEVGTDVEKQFPSAAHLCSWAGLTPGHNESAGKRKSTNMKKGNKYLKSALIEAAHSVKGSKTYLGALYRRTASRKGKKRAGVTVAHAILRISYYLLTRKEMYVDLGEDYFDKQKEQSIVRYSVRRLENLGYNVTITEPNAS

SEQ ID NO: 172122 - protein, 335 aa, unidentified
MYTHFLGFDVSKDTLDVALLSPQCQVLAQTQLANTPTALTRWLKAVGKQVPGLVLTTTLACLEHTGLYCRPALTALGELSVPTWLEHAAQIKLSMGQVRGKTDKADAVRIGQYAARYRDRVRLWQPARPVLVALDRLSARRARLVGVRQQLRAPLTGSEGFFSAAEQRAETQAMAPTLTALTKAIKAVEMQMQQLIAADLDLAALYECLVSVPGVGPVLATEVLLTTGEFQTRSDAKRYASYAGVVPFERSSGQHRGRARVSHHANKRVKALLHLAALSAVRWCAPLKAYYDRKVAEGKPKLLVLNNVRNKLVHLLFACAQQKRKYDENYAPALA

SEQ ID NO: 172123 - protein, 343 aa, unidentified
MNISRIGIDLAKNVFQLHGVDRHGKAVWKRRLKRDQWLKVLLDQAGPGCEIGMEACSGAHHWARELESRGYTVRLMAPQFVKPYVKSNKNDANDAEAIVEAMSRPNMRFVTVKSIVQQDIQATHRIRSELMTQRKAKANQIRGLMAEYGLVAPQTLRALQATIPDWLEDAENGLSDYFRSLLHGLWSDLSNLNDRVLELDQTILKLANSNEVTRRLQQLRGVGPMVATALIATFGDAQQYHKGRQMAAAIGLTPRQHSSGGKNRLLGISKRGDVYLRSLLVHGARAVVSQAKHRDDRLSRWVIGIAQRRHPNVAAVALANKTARMAWAMLRNETDYDPDFTTS

SEQ ID NO: 172124 - protein, 415 aa, unidentified
MAKVMEAIFRCCAGFDVHSKTVAVCVRRMNDQGEIHAEVRTFGTMTRNLLALCDWLLAEGVTHVAMESTGVFWKPIYNILEGQFEILLVNARHVQKVPGRKTDVKDCEWLAQLLQCGLLRGSYIPPRQQRDLRDLTRMRTQLTHEMVSVANRIHKVLEDTNIKLGLVATDVLGVSGRKIIKALIDGETNTVKMADMARGRLRDKIESLEQALVGKVTEHHRFLLKALMDHYTYMESQIERFNQRIDEAARPFEKAITALIPMPGFDRVSAQSVIAEIGPDMKTFPSAEDLCSWAKICCGNNETGGKRKSGATGHGDRWLRSMLVQVAWAASRKKDSYFQSQYRRLAGRRGKKKAIVAVAHSILATTYYILKYDRTYKDLGADHFDRIARDKIRRYHVKRLESLGYTVELTEKKAA

SEQ ID NO: 172125 - protein, 329 aa, unidentified
MVFLGIDIAKAGVDCAILGGPGGKPLGRRSFPNSAEGVDRAVRRAARVSGTEVAETHVVVEATAAYHEPAAHRLAAAGMRVSIVNPARVRSFARALGILGKTDRIDAQLLARYGQLVKPKLWSPPAKALLDLRSPIARLDDLEADFRREENRLEQARTRGCPELVQRSLLASIAALEAQAGDLRRGIAAHVAADAALQADLERLMTIPAVGPKTAARMLLMLRSRTFDTARQAAAFLGLVPVERTSGTSVRGRPTLSRAGNPRLRAALYMAAVVGIRENPDLGAQYGRLLARGKCKMAAPGAAMRKLAHLCFGVLKSEGGYRPAAAIKA

SEQ ID NO: 172126 - protein, 343 aa, unidentified
MQTITTIGLDIAKSVFQVHGVDAEGHVIVRRQLKRRYVLAFFQKLPRCLIGIEACASSHYWSRELQALGHAVRLMPPAYVRPYVKRHKNDSTDAEAICEAVTRPNMRFVATKTPEQQSCLTLHRTRHLFIRQQTSVINAIRAHLAEFGIVAPIGRNGVEQLLSVVAAGTDKRLPEVARACVAALGTQLRMLKAQILQFDRRITAWHRSNEASKRLDEIPGVGPVLATALVASVADPKAFRSGRDFSAWIGLVPKQNSSAGKDRLGSISKRGDRYLRSLFTAGALAVIRYAKIHGTMHRPWLTALLTRRPTKVAAIALANKIARMAWAIMTKGERYKEPAALAA

SEQ ID NO: 172127 - protein, 350 aa, unidentified
MIIIGADYHPGFQQIAFVDTDTGELQERRLAHREEAETFYRGLAQPGRTVRVGMEASGHARWFERLLAELQFELWIGDAAEIRTKRVRKQKTDRQDAQLILQLLLEERFPRIWVPSGENRDLRQLLWHRHRMVQARTRIMNQLQAVALNEGLRCKKRLWRDSGREQLESFLLAPWASRRRHDLLELLDRLSPTIAELTQAIEQEVEKCPEAQRLRTHPGVGALTALAFVLTIGRTDRFRCGKQIACYLGLVPVEESSGERRRLGHITKQGNSLLRFLLVEAAQVTVRSDQEWRSKFFHLALRRGRKIAKVAMARRLAVRLYWMWRKGWDYEQFKKFGSHAGQPGHRHGVH

SEQ ID NO: 172128 - protein, 362 aa, unidentified
MSKSTTIIAFDQHAATTVAAVLLAGQRTPALHSLSSDAATILRFVERVRRTGAVQCCYEAGPCGFELQRALTTHGVPCDVIAPALIPRRPGDRIKTDRRDATQLAILFRAGALTAIHIPTEQEEAARDLLRCREDICVDLLRARHRLSKFLLRHGRRFTLTKKAWTKRHAAWLQAQRWPLPALEQTHRAYVRAVDEAVARLQAVDAELRDLLTIEPLRARVERLRCFRGIDDLTALTIAAELGDARRFPSASRVMAFTGLVPSEHSSGAKQVHGSITKTGNAHLRRVLVESAWHYRHHPFLGRSLRLRQRGAPPDVIDRAWHAQWRLHRRYRRLAARGKPKQHIVTAIARELSGFLWAALTR

SEQ ID NO: 172129 - protein, 327 aa, unidentified
MPVMIGVDPHKTSHTVAALDDHGQLLGQQCIPASLDGYRQLRQWAGRWPQRCWAVEGAHGIGRALAQRLVDGEQVLDVPAKLAARVRVLSVGHGRKSDPDDAVSVAVAARNAPSLRQVAVEDQAVVLHLLTKRRQDLVAARTQTINRLHRLLMDLIPGGARRNLTARRAAGLLAAVTPVGRPAVIRWQLATELVADIRQLDQQIAAVEARIKAAVAQANTSLVELFGVGPVLAARFLGEVGDIGRFPTKHHFAAPTGTAPLEASSGQVIRHRLSRAGDRKLHHALYMMAMVQVRRPSAGQAYYQRKLAEGKAPKEALRCFIGRVSVV

SEQ ID NO: 172130 - protein, 381 aa, unidentified
MDIAVLGIDLGKTVCSLAGLDATGAVVFRKRLQRFRLLDFLSTLSPCVVAMEACGGAHHIGRFCLEEGHEPRLMSPLYVRPYVKVHKTDDRDAEGIAEAATRPTMSFVTVKSEEQLDLQALHRARERLVRNRTRLINQARGLLMERGIRIGTGRHVFQKTVRKILEDPAIDLSPRILLLIEDMIAELDVNNEQVAGFDAEIKALAESDEDMKRLTGIPGIGPMIASALVAAIGDGRTFAKARDLSAWLGLVPRQITTGGKARMIGISKQGNSYLRKLFIHGARTVLYLVKDRETPLARWIDQLKERSHGNVAAVAMANKLVRIAWAVLTKKEKFKQSALIGALQQRKVKISGICERRRDGPTTDWRFVSLGQDHGLRVPAK

SEQ ID NO: 172131 - protein, 321 aa, unidentified
MSKIKQIIGIDVSKLTLDVYDESYGHSSYSNDVNGFKQILKRYDSNSHYVMEATGCYHQQFAMFLYNHDRSVSVVNPLIIKRFIQMKLQKLKTDKSDAKMICCYGLEQGLELWQPSPEYLNKSKRNYSAINLYIKQTTAIKNTLHSLVASGVLKGKIVQSLNRQLKSLKKEISLLELEITTLIKEFDSHLFTSLKSIPGIGNKTALLLIIHTNGFKDFESYKQVISYFGLAPMERSSGTSVRGRSRINKSGEGTLRNHLFMCSFTACTSNPQCKALYDRLVNKGKSKKLALIAVCNKLIKQAFGIAKSGLVYDKNYRSVLS

SEQ ID NO: 172132 - protein, 342 aa, unidentified
MDHYAGIDVSLECSSVCVVEESGKIVREAKVASEPDALMSWFAGLGLRLSRIGLEAGPLSQWLYGGLRQAGLAVELLETRHVRAAFKTMPVKSDRNDARGIAQLMRLGWFRPVHCKSLGAQEVRALLTARKLIQAKLHDVENSLRGILRGFGLKVGKTTKRSFAGRIRELVAGHDSLTVIGQAVLGVHAVLLREFNGLETRVRDLARRDGKARLLMTVPGVGPIVALTYASAIDDPARFRSSKATGAHFGLTPTRYQSGERDVSGRISKVGDAAVRSGLYEAANIILIKPIKGCTELKSWATRIARRAGPRKAKVALARKLAVILHRMLADGQPFDPAAAAA

SEQ ID NO: 172133 - protein, 343 aa, unidentified
MQIRSVGIDLGKTTFHLVALGDNGKVLLKKKFTQKQLIAFTANLQTSLIGMEACSGAHFLGRALREQGHEVKLIPAQFVRPFVKSNKNDFIDAEAIAEAVDRQNMRFVPIKTDDQLDLQALHRVRDRLITRRTSVINQLRAFLLERGLVFAKSPAKLRERMPEILENADEDLTPRMRNLLALLWNEWKDLEQQVIDLNHEVELIASSDAACQRLRQIPGIGPLIATAIVASIGNGAAFHKGREFAAWLGLVPKQYSTGGKAKLYGISKRGNNYLRKILIHGARAVVLRSKRERIAMGAWMTSLETRAPRNVLIVAAANKLARIAWAVLSSGQDYRAVQEPVAA

SEQ ID NO: 172134 - protein, 359 aa, unidentified
MDAQEGAVRRIVGGVDTHKDLHVAAVVDEQDRVLGTQSFASTRQGYRQMLAWMRSFGEVQRVGVESTGSYGAGLLRFLQQAGVTVLEVTTPDRQDRRRRGKNDDFDAQNAAHAAFAGIRTVTPKSRDGMIEALRVLSACRKTAVTARRIALQMIQNTIVCAPESLREMLRRMTRMQLVRTLAAWRPDLTAYRDVEAAYRISLKSLARRYLELHDEIADLDAMIAAIVDELAPNLVARNSIGHRGAAQLLLTAGDNPERLRSEAGFAALCGVSPVPASSGKTARHRLNRGGDRAANSALHIIAIGRLRTDARTQAYVAKRIGEGHSKLEAIRCLKRYIAREVFTLIKQRQREINQTRIAA

SEQ ID NO: 172135 - protein, 384 aa, unidentified
MNKHNILFIGLDTHKEFVEVAYIEDQRGAKPVHFGRISSAKVAIKKLARQFESKYPSATLHFVYEAGPCGYWIYRLLTSLGHCCYVVAPSLIPKKPGDKVKTDKRDALNLAKLLKSEDLTAIYVPESEDEAVRDLSRARETAMKDLKDAKYQLKALLLRNNINYSGTANWSLKHLRWLTELILPHPAQHIVLQEYLQTINERIARLKRLDNELEHHVRNWRYYPVVKAIQAMRGVRLLVATGVIAELGDLTRFDHPRKFMSYLGLVSSEHSSGGKQRQGSITKCGNGRARRLLVEGAHSYRYQANISTDLQKRQEGLPKEIIDIAWQAQLRLCRRYQRLIFKGKHYNVAVTAIAREMIAYIWAISREVVLTPVNPKLRIARVPA

SEQ ID NO: 172136 - protein, 344 aa, unidentified
MDHYAGIDVSLECSSVCVVNASGKIVREAKVVSEPEALIGWFASLGLELARIGLEAGPLSQWLYAAIKQAGLAVELLETRHVSDAFKAMPVKSDRNDARKIAQLMRLGWFRPVHCKSIAAQEIRAMLTARKLVQSKLLDLENSLRGILRGFGLKVGKTTRTKFSERIEELVHEHPNLQTIGQALLRVRAVLLTEFNALEKRVRAMSRLHEKARLLMSTPAVGTIISLTFACAIDDPSRFTSTKQVGPYLGLTPKKYQSGETNYTGRISKHGDASAREALYEAAHLILTKPIKGCSELKSWAMRVSRRAGANKAKVALARKLAVIMLRMLKDNVPFNPAAKAAAV

SEQ ID NO: 172137 - protein, 344 aa, unidentified
MHFIGIDLHKHIFTACVLDDNEKVVDELVDIETDEKGLDFLMSRYPADDCRIVFENLTRAHFAFHYLYDHGYAVSVAHTGHGALREIADTNLKTDRVDAYKLALVCKDMWAGRRFIRRTHISSDENMRMKAVIRMCNELSCIRDEMKLRIMEYMNLHNIPEHPRYKDVAGMRYREYLLGLGDPALTRMVNMMSAAIEEIEASAKEIEAYAKRCEDARLLMSMKGISALTAVTVVTAIDGIYRFETPETLVSYFGLAVRTSESAGKRRKGCITKEGDPLVRKYLANVVKNHAMRCPDSDLARFYRRKSDEMPHWKAVTAAMRKLTCQIWHMLTYKEQYRPNVAGH

SEQ ID NO: 172138 - protein, 392 aa, unidentified
MRYVGIDIASEKHFVAVVDDGSEVLLKSTPVGEDEAGYWKLFQLLGESSETLVAMEATGHYWKNLYAALAARGFAVALLNPVRTRRFAEEDLQRTKTDAIDALGIARFAAQKHPPASRMPDSATEELRELVRHRDRLVQEFGDKTRQLHRLVDLGFPEFKRYVRQLDSALATAILADYPTAQAFAQARPRGLANLKYDGHHLVGLELATTLIEAAKHSVGAHHGYAYRLQVKHACQDLDLLRQRLRDIERDIEAKLDEHEIGSLLTTIDGIGPTTAAKLIAELGNPADFTSPAALAAYVGVVPATRQSGKSLRVRAGISPMGHAELRHALWMPVLTAVRRNPWLRQHYRRLRANGKPAKVALIAAMRKLLHAVYAVARDRQPFSPRLAGAPA

SEQ ID NO: 172139 - protein, 343 aa, unidentified
MGVTVLGIDLGKNSCSIVALDETGRVVLRRRMRRDGVVRFAERLSPCTVAMEACCGAHHLGRELAGFGHAVRLMSPEYVRPYVKAHKNDDRDAEAIAEAATRPTMRFVELKSEEQLDLQTLHRSRSRLVSERTALINQLRAILLERGIVIAQGRRKLEQRLAEMLADGEVLCISARMRILIEDMQAQWRELDRRIAVFDDEFARHARENAAARRLASIPGVGVMNATALVAAIGNAETFARGRDLAAWLGLVPRQATTGGKPRLLGISKRGNIYLRMLLIHGARAAMPSLSKSATPLGEWLRALLARCHPNTATVALANKLARIAWAVLRRECSFRMVPAPAA

SEQ ID NO: 172140 - protein, 326 aa, unidentified
MEHELHYIGIDTAKEKLDVDVLRPDGRHRTKKFANTTKGHDELVSWLKGHKIDHAHICIEATGTYMEPVAECLYDAGYIVSVINPALGKAFAQSEGLRNKTDTVDARMLAEFCRQKRPAAREAPHPLERALRALVVRHQALTDMHTQELNRTETAREVQRPSIDAHLLWLEAELKRLEKQIKDLTDDDPDMKHRRKLLESIPGIGEKTSAVLLAYIGLKDRFAHARQFAAFAGLTPRRYESGSSVRGASWMSKAGHVSLRRALYMPAMVATSKTEWGRAFRDRLAANGKKGKVILGAMMRKLAQVAYGVLKSGVPFDASRHNPVAA

SEQ ID NO: 172141 - protein, 369 aa, unidentified
MEVRHIFVGIDLGDKNSVARLAVDREKSERFGFVNNRQGRARLFGEAKRRAAEAGGAEIVMAYEASACGFVLSDEAEGQQIRCWVLAPTKMEKSVEQRKQKNDDRDADDVVEKLRGHVLAGNRLPVVWAPDRQTRDDRELIRTRLELSEKQTKLKSQIQMVLKRHGLEKPSGLGSGWTIPYRAWLEALSECAALGWGTRQALASLLRQLKFIEGEIDGLEKLVEQLAREARHKPFVEELTRERGVGTLTALVYRTEIGHAGRFRRGRQVGKFVGLTPTSHESGQQNDRKGHISRQGPPRLRKMLCQASWSHIGHDPEARKRYQQLVERNPKKKKIAVVAVMRHLAVKLWHRMRKVELELAGAECTELSR

SEQ ID NO: 172142 - protein, 352 aa, unidentified
MARQKEKMVDKEELFIGIDLHKQRWHVTIRTFDVEVFSASIPGTWEALQRILARYHDHPRQAVYEAGYFGFRLHDRLVDHGIPCMVTPPSLVPKEYGNRVKTDRRDSRKLAHLLAKGLLKRVWVPSEEELYHRQVIRRRRQLVRDRVRTQSRIKAELRFYGIHLEEPRGGWTRMYVEALRSVEFGNRWIQESFSRLLEQYEFLTAQIDKQTKLLQELSETAMYRERMEILRSIPGIGVISAMELLLELQDVSRFRRAEQLAAYVGLTPSQYSSADKVRMGRITGIGKNTLRSLLVEASWTLIRRDQPMREKYDRIKIRSGGKRAIVAIARTLLLRMRRMLLDKQAYVLDLAA

SEQ ID NO: 172143 - protein, 355 aa, unidentified
MIIIGVDFHPEFQQIACMDSDTGEFQERRLAHREEAEKFYRALAATDQKVRVGMEASGHARWFERLLAELQFELWIGDAAEIQSKRARKQKTDRQDAQHILKLMLKDDFPQIWVPSWENRDLRQLLWHRHRLVQARTRIMNQLQAVAINEGLRCKKRLWRAGGRQQLESFRLAPWASRRRRDLLELLDRLNPTIAELSQAIEQEAEKHPEARRLMTHPGVGALTALAFVLIVGNAERFQRGKQVAAYLGLVPLEKSSGNRRRLGHITKQGSSLLRFLLVEAAQVTVRSLPEWRSQYFHLLMRRGRKTAKVAMARRLAIRLYWMWRQGLDYQQWRSSVRTQDRPEIAMVCSRTPRN

SEQ ID NO: 172144 - protein, 318 aa, unidentified
MKSDIVHIGVDVSKEKLDVYNPITGEVSELPNDAAGFREVRAMARRGKAVVCCEPTGGCELDMVLFLQRFGVPVAYCDGYRVRHYALSTGEFSKNDRVDARMIARFADCTPVRTLAKKDLAHLELRRRWKLYQTLVDIHVVLAQKASSEQVAEMRSMLRAESARMERKAAKALRSCVELAKGDERMSYLLGRFVEIDGVAEKTAIAVIAGVPEIGSIGDAALSKLVGLVPMDNQSGANDHAKKIRGGRKDVRRALYLATLPAVQHNHILAAYYKEVKKRIPSKRAAKWAFVPVMRKLIHLMNRLARDPEFRLQKKQSA

SEQ ID NO: 172145 - protein, 418 aa, unidentified
MKNIKTKRLKAVNGKTLIVTVDVSKGKHTGYSRCPDGTEMKPFDFFNNGRGFGEFWDRISKTKKDHNLEEIVFGFESTGPYAEPLLQYLRKKSVRIVQVNPMHTKRLKELQGNSPNKTDYKDPKVIADIIELGHALTVVVPKGVAAELRRLTQARERSMQRRIVLLNQLHDLAYLLFPEFLQVMKDIKTKTAQYLLRHYPTPQRLVQYGLGELTKTLKKVSRGKLGKGRAEALYEAGRTSVGIIEGQRSMVLEAKEILTHIEASEQFIDSIEKEMAHNLKQIPYSRFILSLKGIGDVTAAGLIGEVGDFSKFTTIAEIEKLAGLDLFEISSGRHKGTRRISKRGRSLMRKLLFFASLNVVRKGGVLHEAYQRLLKGGKPKLKALIAMARKLLRIIFALVRNHSVYVTDYCKPHLKMAA

SEQ ID NO: 172146 - protein, 283 aa, unidentified
MHTVTTIGLDIAKSVFQVHGIDAQGKVVIRRQLRRRYVLAFFQKLPPCLVGIEACASSHHWSRELQALGHTVRLMPAAYVKPYVKRQKNDATDAEAICEAVTRANMRFVKTKTAEQQSYLMLHRTRHLFIRQQTAVINAIRAHLAEFGIVAPVGRNGVEELLEVVADPSDKRVPEVARACLAALGAQLRLLKLRILGFDRMINAWHRSSETSRRLDEIPGIGPALATALVAGVADPKAFRSARDFSAWIGLVPKQRSSGGREKLGNISKQGDRYLRGLFSPHC

SEQ ID NO: 172147 - protein, 351 aa, unidentified
MDRFVGVDGHSRSCTFGIVSAAGRRLESRVVETNGRALLEAIRLIPGRVHVCLEEGTQSAWLYELFKPHVAEIVVSVPSKAKGAKDDKRDAFARAEELRVGAVETRVFKAPNHLAALRTAVRAYNFAVTDVVRAKNRLKAVFLGRGIVADGGVYDPERRDGWLARLSGPYRQLAETLARQLDLVVPARDEAERWLLTESKSHPIIRKLLTAPGMGPIRTAQVVAIVAVPDRFRTRQQFWSYCGLGIVTRSSADWRPGRKGGLERSQNVSTRGLSRKRQPLLKSVFKGAAMTVITQLPDDPLHAHYQRMIEKGIKPPLARLTVARRIAATVLSMWKNQEVYDSKRHAVVKQP

SEQ ID NO: 172148 - protein, 424 aa, unidentified
MCFAPAFGDEEVSMGKINERCGGIDVGKRFLLCCALSGAAHEEPRSQTRRFDTTVADLVRLRDWLAAERIMHVVMESTGSYWVSVFNILEDHFTIVLANPEEVKNRKGHKTDRKDAEHLADLLRHDHVRASYIPPKPIWDLRDLTRRRLQLIQDGTRERNRVEKLLEHVNVKIGNVLSDVFGVSGQGMLLALLEGKAAAEEIARLAHGQAKRKVPQLTEALEGHGMRDHERFIIRSCLRHLACLEEEVEQVDCEILQRMQGPPFARAFLLLQTIPGVGQLAAASILAETGVDLATFPTAEKMASWAGLCPGNRESAGIQKGSQTTQGNSYLRTTLVQCAWAATRKKGSKFQTRFRELAPRRGQKRAIVAIAHQMQRNDVFYLRVENPPKQRHRQRRAHHHLRCLRRLGVAVKVLGPSEFIPQIE

SEQ ID NO: 172149 - protein, 350 aa, unidentified
MLIIGCDFHTRYQQIAMMDEATGELVERRLEHENGEAHSFYRGLPEPVRVGVEATGPLHWFERLLGELGHELWIGDSGKIRASEVRKQKTDQRDAALILDLMLANRFPRIWVPTAAERDLRQLLWHRHKMVRMRTMLGNQLHFLAMSQGLCRKKKLFTRHGRAELSGLALGPWASRRREELLHLLDQLTPAIDELDRAVMQEAQRREDAVRLMTHPGIGPVNALAFVLTIGPVTRFARSKQIASYLGLNPSEHSSGGKRRLGAISKQGNTMVRWLLIEAVHQVVRLDPEFRQDYQRLKSRRGNAVAKVAIARKLAVRMYWMLRSGADYARLVRMQASPGATLVDASSSLG

SEQ ID NO: 172150 - protein, 406 aa, unidentified
MIERGAGLDVHKKTVTACVRVPGPAGGRRQEVQTFGTTAAALLALRDWLHAHGVTHVAMESTGVYWKPVYYVLEELFTCLLVNAAHVSKVPGRKTDVRDCEWLAQWLAHGLLRGSFVPPVAIRELRDLTRYRAVLVQDRSREANRLHKVLTDAGIQLASVATNVLGKSGRAMLAALVEGTTDPGVLADLAQGKLRRKLPALREALVGRFRKHHSLLVSHLLAHLDYLDEALEDLTAQIEEALRPFAAEAARLDTIPGIGPRTAEVVIAELGVDMRQFPTARHLASWAGLCPGTHESAGKRRAVRTTKGHRWLRATLIQAALAAVNVRDSALAGRYRRLVPRCGPKKAIVAIAHKLLTTAYLLLADERTYHDLGAGYYDARRKDRDVRRALHALERHGYRVSLEPAA

SEQ ID NO: 172151 - protein, 353 aa, unidentified
MKFIYFIGMDFGKETFDASIMTEEKQELDNKTFANSEEGFNALIKLVVSYKIPLKDALFCAENMGVEVAGIARFSLKKKLNLALACPIDIKKTGGMQRGKTDKQDALRIAQYALIKQANLRLYEKPSSVILSLRDCLNIRNSYIKTRVRLSQELKALRVDGDRQALQQLEESLNNFIKSCEAEVKLIEQEINRLLKLYEEIYQNYLLLKSITGISLINIVTMICHTENFTKFESARQYACYGGVAPFEYSSGISVRGRTRVSHYANKQVKQLLTRAALAAIVHDPELRAYYKRKKAEGKHSNVVINAVRFKLIQRCFAVVKRKTPYVFAFNLEFILNQRSPSRQGEILFSDNL

SEQ ID NO: 172152 - protein, 389 aa, unidentified
MSQPFDARKSLTALEQHNTIIAVIEMSQSKWLVAAVVPGIKRQPLKKLDADQEALLKLLLRWRKEAEQAGHPIKRVVVAYEAGRDGFWLARWLRSRGVEAYVIHPTSIAVSREHRRAKTDRLDTELLLRALLGWLRGEKRHCSMVAIPTIEEEDARRPNRERASLVTEQTRIVNQIKAILIRFGIRSFRPKLRKAEEQLKQVRTAEGSPLPDNTRAELCRRLACLRVVRDQIQAIEKARLQKLTADHGRRKGPNAMVRLIARVLGVGVETADMLVTEVFSRQFRDRKAVARYAGLTGSPHESGKRRREKGLARAGNARVRTGMIQFAWRFLRFQKDSALAQWFQSRAGDGRGGTRKTMIVALARKLLISLWRLVTTGELSDGIVLRSAS

SEQ ID NO: 172153 - protein, 361 aa, unidentified
MHDSITWVGMDVHKESIVVAVVNGAGGTAARWETPNTAKGKERLAKRLSEFGTIRCAYEAGPCGYDLRRFLEAKGIPCDVIAPSLIPKKPGDRVKTDKKDAEKIARMHRMGELTAICVPTPAQEALRDLLRAREDANEDLVRRRHRLQKFLLRQGRRHEGKNWTRDHWRWIRAQKFEDRNSETVLSEYTAAIDQEIERIGRLDAQIEQESKNPEIAPSIARLKALRGVQTLTAMTILSELIDLNRFPSARKLMDFVGLVPGEYSSGQKQWRGSITKSGNSHVRRVLVEAAWHYRHSPRKTGEAIRKRREGQPPEVIETARKAELRLYKKFTRMVMRGKKTTVAATAVARELAGFVWAIGRI

SEQ ID NO: 172154 - protein, 340 aa, unidentified
MRIIGCDLHTAKQTIAMLDRDTGEVSEQTLIHDGETVREFYAAIPKPAMVGIEATGSMGWFVRLMEELGVTCRVGHPAAIRTAEPRRQKHDRRDAQLLLRLLLEDRFPAIWMPTAAQRDLRALLLHRHQWVRMRTRVQHALQAIALGQGVRRGGTLWSIQGQAVLAALPLLPHATDRRDALQALYQQLDAHVERLDEQVGAIAQQRASATVLMTHPGVGPVTALATEVFLGDPSRFPNGKALASYVGLIPSEYSSGARQRLGHLTKQGNPFLRFLWGEAVLGAVRRDPELQRFFRRKLAQKGLGKARVAAARKLGIRLWIMLRDQITYNEFCRRRQRRPT

SEQ ID NO: 172155 - protein, 453 aa, unidentified
MAQGSGLTRGDRNRNRRVDALRGAVRLDRAVLAIDLGEDKQVAVVLDHEGRALARRVVKAKAHQLAGLLGWASERAVKAGFSGLTVACEPTGHRWKALMGLADSAGQGFVCVQSLAVTRAREGDDYTRDKTDHRDAYLIGKLVIRLDCYLPERADEARARLRHLGARRFAQVADVTSCMQQAGDLLGCAWPAPLAAAARPLESVSWLAGMAVITARCCGQPGRLRKMGYEKFLAAVRRELPRWGGKFVRHLIVKGLWEALADAGGVAAQRPGALERLHLLLEDWRLLRARLAGTEARMTGLLDELGLAELVASIDGVSALSGAVMLAETGDPARFTSGRAVVKHAGLNPCEHTSATINGQARISRRGRPALRSAAWRAVWGALRHNKVLAAKHAHLTGRDTSRLADGQARIACAAALLRWLWAVITSGQARDARIAAGEIHAPGRAMTCPAAA

SEQ ID NO: 172156 - protein, 345 aa, unidentified
MPQPNDLSRSLVALDQDSTIIAVVEMSQSSWLVAGMLPGIERQPRKKLEPSAERLLGLLNRWRDEAVKAGRQITRIALAFEAGRDGFWLARWLRAHGVEAHVIHPSSVAVSREHRRAKTDRLDTELLKRGFLGWLRGERGHCTMARIPTIAEEDAKRPNRERECLVRERTRIVNRMKGTLARLGIRNFKPTLRKAAERVTTLHTPEGSALPPNVSAELQRNMARLGFVVSQIKEIEAARQKRLEQEPETEPHAMVRHLARVVGVGVETADILVNEVLSRPMRDRKAVARYAGLTGSPDESGAKRREQGLAKAGNARVRRGMIQLAWLSAVSEGERIGIVVPRPNC

SEQ ID NO: 172157 - protein, 388 aa, unidentified
MNVGADKSEPLTAIHTDLGAIFVSLELSRSSWLITSLSPGGGEKMSKHSVPGGDFARLMERFAQLQEKARLRTGQSFRIIVVQEAGLDGFWIHRALQNEGIESHVVDAASIATSRRRRRAKTDKIDGETLVRALLAYKRGEPRVCAMVKAPTPGEEDRRHLCRERKALTAERVRHVNRIKGLLFSQGISGYQPLRRDRRQRLEELQTGDGRAFPQHLKALVNRELDRLELLLKQIKTVEAARDALLAVGQTAKPAPAAMLLDIRGIGPEFAAILWSEGLFRHFENRRQIAAYAGLAPTPWQSGAVDREQGVSKAGNPRLRTTLIQLAWLWLRNQPRSALSVWFHERVSRNSGRLRKTTIVALARKLLVALWKYVTAGVVIEGVTMKVA

SEQ ID NO: 172158 - protein, 344 aa, unidentified
MKITTIGIDLAKNVFQAHGVNEHGKTEKKKQLKRGQVAEFFANLPPCLIGMEACGSAHYWARKLEGFGHTVKLIAPQFVKPYVKTNKNDAADAEAICEAVARPNMRFVPIKNVEQQAVLSLHRVRQGFVKARTAQANQIRGLLGEFGIIIPQGITNIAKRVPELIEDASNDLPGSFRLLVQRLMDHLNELDKQLDELEAQIKAWHRESAASCKLEKIPGIGPITASALVASIGNAKNFDDGRQLAAWLGLVPKQHSTGGKSKLLGISKRGDSYLRTLLIHGARSVILSASKKLDKSRWLRKLMERRNPNVAAVALANKNARIVWALLANEREFRSDYTPALTVA

SEQ ID NO: 172159 - protein, 341 aa, unidentified
MQITTIGLDIAKNVFQVHGIDAAEKVVVRKQLRRGQVMKFFAALPPCLIGMEACASAHYWARELRKLGHQVRLMPAKDVKAYVKRSKNDAADAEAICEAVRRPTMRFVEVKSAAQQGRLMQHRTRDLLLRQRTQVINALRAHMAELGIVAAQGREGLKSLLTIIADEKDERLPVDARASLIVLAAQLQALQTMIGSIEKRIIVQHRASEESKRVATVPGIGTLGASAITATVTDPSAFRSGGDFAAWIGLVPRQDSTGGKQKLGPISKQGDRYLRRILVVGAHSMLRRAKQNPEKYPWLTQLLARRPFKVVAIALANKMARVAWALLARGGIYRAPRLAAA

SEQ ID NO: 172160 - protein, 403 aa, unidentified
MSTERRFDQPAAIRTQLGAVFVSLELSRSTWLVTSLSPGAGERMSRRGLAAGDTAGLLAHLAALGRKSEADGGGRCPIVAIQEAGLDGFWLHRVLEREGIESHVVDAASIAAARRRRRAKTDRLDGEALLRALMAYKRGEPRVCSMARAPTPEEEDRRRASREREVLIAERVRCVNRIKGLLFAQGVRDYRPMRRDRRRALEDLRTGDGRELPTHLKAQLVRALDRLELTLDQIAAVETARDALLAEPAAATSQAARRGAAPGRQEVGAMLLRLRSIGPEVAAVLSTEGLGRDFANRRQVASYAGLASTPWRSGAIAREQGVSKAGNPRLRTTMIQLAWLWLRHQPQSALAQWFRRRAAEAGKDRRKTSIVALARKLLVALWKYVADGVAIKGALLKDQLRPA

SEQ ID NO: 172161 - protein, 350 aa, unidentified
MKKICIGIDVSKETLDVTVIHIESYELVEKLGYSKFDNRPSGFRSMTAWVRKVIKSRGQMDEALFCMETTGSYDLPLCHWLHKNGLNVWRESALQIHCSKGFQRGKSDKEDSEVIAQYAARHQSRYTAFVPDAEAIADLKELICYRDSLVERRKECKVRLANKKETLVNRNSKAWKCIERLSKAEIKRLDKVIGECDEEIRNLMKEDEEMEKNYQHLTSIVGIGLINGAALIAYTGNFKKITTPNKMSCYCGCFTFYEDSGTSVHRKSPYRNACCKMLKGYLRMAAKSAMLVNTELRKYSERLREKGKPYAVILNNVANKLLHIMFSLVKHDYDYEYNHEMVRRMEREIA

SEQ ID NO: 172162 - protein, 405 aa, unidentified
MLYLGIDLHRKQMTVSLRKEDGDVLLRRQVSTQWPKLEEFREQLREFAAGDEKYVAIVEVCGFQDWLVRWLPRDERCHMLLVVQPLGRSPVKTDRRDAHALSELLWINRERLLRGDRVHGVRTVYQPGAEQQADRQLTRLRERLVWRRTQTLNQIHKILRRRNLEWERPTKTFQTRKVIEWLKTLELDAMDRLALNQLLLQWKLWEQQLVAVDTRIAQRFLASRDAQLLATMPGVNTYTALAIVCRIAPVGRFPHGRSLANFLGLTPGCRSSGDTERPGSITKVGSRMVRCLLAEVVLHLLRRDGTVRTWYQRIKRRRGSKIARVALMRRTATIVWRMLSTGEPWRPGKAASETSSPASEAKPVRPRRGRRAVLSALVAKETEAGCMSTGSSSLLTGEEVTRCQA

SEQ ID NO: 172163 - protein, 321 aa, unidentified
MTKNKQIYGVDISKDVFDVVDSNGKHLQFENDPKGFKALLKTLSSEALVVMEATGYYHYRLAQFLYEQEVKVSVVNPLSVKRYIQMKLSKVKTDKSDAKAICEYATVNEVPLYTARNKNQAECLQLLRLIDVYIKQSTALKNKLHGEKVLGKPSKTVYHSLNRALKNVQAEIKVLEARLTEIVKEEQQQQLTLLKSIPGMGNKTAILLIVLTDGFSNFENARQLCCYTGITPTIRESGKSVRGKSRISKVGNSKLRNLLFMCSFTACKHNKACKEIYERIIAKGKSKKLALIAVCNKLLKQAFAIAKSGLPYDENFVSKMG

SEQ ID NO: 172164 - protein, 381 aa, unidentified
MTTLATRNTQEHTTEGTLFVAFELSEKTWKLGFTTGHGQKPRERTVTARQQERVLDDIAHAKRRMGLPDTAPVVSCYEAGREGFWLHRFLQGHGITNHVVDSSSIEVNRRRRRAKSDGLDVRKLLSMLLRYAHGERQVWQVVKVPSVEAEDQRHLHRDLETLKQERASTMTRIEGLLSSQGLRVTSLTKLPEQLEALRLWDGSPMPPGLRRRVMRVYAHYTFLSEQIAAVEVERRAQLQTSADASIDKIRQLMQLKGIGINGAWLLVMEFFGWRAFKNRREVGGLAGFTPTPYQSGESAREQGITKSGNRHVRWMTTELAWSWLRFQPDSALSVWFRERFGSGGKRLRRIGIVAVARKFLIALWRFLETGVLPAGAVLKEA

SEQ ID NO: 172165 - protein, 408 aa, unidentified
MEVVYRCCCGIDVHKKIIVACLNQGGEQSLREFGTTTSEIKSLATWLTESGCEILAMESTGVFWKPLYNLFELMDLDAIVVNAAHMKALPGRKTDVKDAEWIADLLRHGLLKASYIPSREQRELREITRYRKSLTEERCRETNRLQKILEGANIKLDSVVKDINGKSARKLLEKIIEDDVPTSEEEISKMIHGRMRSKLGQLVTAIEGITTPLQRKLLAQVIDHIDDLNRRIADLDKLVQDYMDEYEAAITALCDIPGIARRSAEVILAEIGLDMSRFPSAAHLCSWAGVCPGNCQSAGRRKHGKTTKGNKPLKTILTQCAKSARSVKGSYFSAQYQRIAARRGKNRATLAVAHSMLIAIYHMLRNNVPFRDLGSDYYDSFNRDRKIHGYLKRLKALGWEPDALPGSA

SEQ ID NO: 172166 - protein, 421 aa, unidentified
MRKADTRKVRGVKDDTLIVAIDVGMEMNRGYCTTPDGRDTKPFKFDNTRDGMDTLWSMVIASKNRFKCNEVIVGYESTGPYGEPLVHYLMQKPVKVVQVNPMHTKKVKEINDNSPLKTDDKDPRVIADIIKLGRALSIVIPEGDAAYLRRLNNSRERHVRERTALVNQLQQLVFLLFPEFKKVIKDIKCRTPLYLLKKYPTPEAISVLDNHVLGEEMRKKSRGKFREHHADMLINLARNTIGIREGVSGLSMDIRHILVQLEMLKDLIAEIEGEMEIALGRIPYSSKLLSIKGFGVVSVAGIIGEIGDFKKFGTQPEIMKLAGLDLYEISSGKMKGQRRISKRGRGLLRKILYYAAIQTIRKNGILHDYYTRLTDRGMKKMMALVAVSRKLLGIIYAIVRDNSEYSVNFESMKRQVIKKAA

SEQ ID NO: 172167 - protein, 382 aa, unidentified
MSTSTVTARLQGSASSPALLLAFELGETGWLLGFSTGFGQRVLRRKIASRDTKALLEQIEWARRKLGLAEGVPVISCYEAGRDGFWLYRFLVAHGIESFIIDSSSIEVNRRKRRAKTDRLDVVKLVGLLIRYLAGEDDAFSVVSVPSVAEEDLRQIGRELKLLKKDRTRVSHRMKGLLANQGQVQDLGEQLERMRLWNGEPLPPHLRERLERYAADFAYHTGRIRDLEQTRRDLMRAGESPAVEKTWRLFSLCGLGIESAWMYGTEFFGWRRFENGKQVGSLAGLTPMPFGSGMLEREQGIGKDGSRWVRGVAIEQAWAWLRFQPESALSRWYERRFGHGSKRLRKIGIVALARKLLIALWHWVEHGVLPEGAVLKTNLRLA

SEQ ID NO: 172168 - protein, 344 aa, unidentified
MITEPTIVGIDLGKNWFHLIGLDARGAIVLRRKMNRIQLAQYAVTAPQCVVAMESCPGSQYWGRAFIKAGHEVRLLPAQFVKPYLKANKNDFNDAEAIAEAGGRASMRCVPLKTNEQLELQALHRFRRRFIIERTAVVNQMRALLLEHGIVIPLGRALFARRLPGIFEDAENGLSPRLIGLLHRLRQRWLAIDVEVEQATRDLTQWAEQSELCRRAATVPGIGPMIATAVVAAVGDGRMFARGRGMAAWLGLVPRQYSTGGKPTLGGISKRGNTYLRQLFIQGANALYLHMKRDRSYLGEWLRQVEGRSHRNVAVVALANKMVRICWKVLTSEQVYEPYPARVA

SEQ ID NO: 172169 - protein, 369 aa, unidentified
MKQDTIYVGIDDSKRKLVIGTLGPDDAQPLVRTIANEPRAIRRFIQRLKRQGLLRACYEAGPSGYDLHRQLTALGVACQVVAPSLTPRRPGERIKTDRRDALKLVHLFRAGELSPIRVPDEAEEAVRDFVRCRGNTQKEALRWRQRLVKFLDRHGRVYREGSHWTQAHWRWLHAQDFTQPTLQFTLDTYRFTLEQALLRQAEMEREIGALAQSEPYKEPVGWLRCFRGIDTLSAMILMAEIQDFKRFPTAPDLMGYLGLVPSEHSTGERVRRGPLTKTGNGHARRILIEAAWHYQHRARLSKSLAARTKGQPPEVVAHAWKTQVRLHRRYYRLLARGKRPSVAVAAVSRELTGFIWAAMTQTACARKAA

SEQ ID NO: 172170 - protein, 349 aa, unidentified
MSQNLNSAVSVIGIDIGKNSFHVVGLDERGAIVLRQKWSRGQIEARLANMPPCLIGMEACVGAHHLSRKLQALGHDARLMPAKYVRPYSKGQKNDFRDAEAIAEAVQRPTMKFVATKTADQLDLQALHRVRERLVSQRTGIINQIRAFLLERGVAVRQGLRFLRAELPRILAAPPDVLSARMVRIISDLAEDWRRLDERMDQLSSEIGVLARQDAGCERLMSVPGIGPIISSAMVAAIGTGEAFSKGRDFAAWMGLVPKQISTGDRTILGKISKRGNRYLRVLFVQAAWVVLIKPRSWERHGLKHWIEAARKRLHRNVLAIALANKLARIAWGVLAGSRTFEASKLQAA

SEQ ID NO: 172171 - protein, 349 aa, unidentified
MNATTIAVDLAKTVFQLAEADADWQIVRTHRLTRRQFERFFANRQVKLVIMEACGSAHFWARWLAGLGIAVRLLPPRHVRRYLLGNKTDAADCAALLEAARNTKIRSVRVKGVEQQALQALHRLRSQWMATRTQRINGLRGFCREFGLAVPVGARVGLRTIAALVADGASAIPAMLRSEMFATLQEVRELEARIAQLERELAAMVRNIPACQLLMTIPGIGLLTATALVAAVGTDVRHFHDARRFACWFGLTPKEHSSGESRRLGRISKAGPRYLRMLLTHGARSVLQAAARARSNGRECTGLHHWALQLDQRTHRNKATCALANKLARICFASLRSQQPFDAQRAVAC

SEQ ID NO: 172172 - protein, 445 aa, unidentified
MQFHRTIGIDLAIRGDHVAQIFDNGRPVGRPIRFRHTAESLGTFIEAARAGLPPDVTVTAVMEPTGISWFPVASWLARAGIAPIRVKGQRVKALRRYLSEHAKTDATDAHVLGALPSFGGPTLDPVYVPTPAQHALQRLTKQREGYQADACAAKRRLLDLIRWACPALEVVLPDLLTRLALALLAEWFDPHRVLAARPRTLVAFVSRKAAGNHPHSGPVVDKLVEQLRHAARATLALHGAAVDFALLQFEVGLEIARLRLLLTQMDELEQHIETLYAELHPTDALRTIPGVGIHLAPVLLGVLHDGGRFRSQRHARGFCGLFPTRSESGGQARPGQHLTKSGNDRLKKALYLAADAARRVDPGLAEVYWRLMVRKGHHHKQALCAVATRLVNRIHAVLKSGRPYVLRDIDGRPIDLSEGRRIVAERFSVPEEIRRARRRQPQLAA

SEQ ID NO: 172173 - protein, 410 aa, unidentified
MQKRENYLYVGMDLHKDTHTAVMVNCWNEKLDVIVIENKPSEFSKLAKKVDKAALRLNLSPIYGLENAYGYGRSLAVWLIEKGYVVKDVNPSLAYDQRKSAPMMKKNDEHDAYCVATVLINQLHTLPDAKPEDNHWTLSQLVNRRDTLVKDGIRLKNALHQQVAVVYPSYRKFFCEIDRKSALYFWKTYPSPGYLKGKSAEELMAELKAVSANYTINKAEMILECVQNYGNTIRDYQQSRDFITQSLVRDLEHQVVELAQIDTEIEKMLKNFDYKLTTMPGVGNTVASKLIAEIGDIRRFPNTDKLASFAGIAPKSFSSAGKGRDESNKQGNRELHGLFYFLAVTMVSVSTKGKPYNPIFRTYFLRKISEGKTKSQALVCIMRRLVNIIYGMMKNKTKYRPYVLSEDKAI

SEQ ID NO: 172174 - protein, 492 aa, unidentified
MWSRSVPGVPLVRVRPYASLVGGVVVTVLGPWIVASCTSIRLFRRSLTPSWAWLCWTVEQEVVGVDVLHPRCCGMDISKTDAKVCVRVQEGARVATQVTTWGATSSQILALGEHLVAERVSLVVMEATGDYWKPFLSLLCDAGLEVMLVNARSARQIPGRKTDVADAQWLAELGAHGLVRGSFVPPGHVRVLKDLVRTRTVVVRLRGEEAQRLDKVLESAGVKMSTRISDITGVSGRRMLDALVAGQRDPAVLASLADPRVKASPEDLREALTGRFGDHHAFLAKVHLDLVDQYTVQVEALDARIEACFVADDHDDEQTQQTKTGMAAARDLLATVPGISTTTAEKVLAEIGPDMSVFPTAKHLTSWAGVAPGANESAGKVRSTRCRPGSTYLKGALGIAALAASRTKDTFLAARYRRVRSRRGHTRALVAVERSMLVAVWTVLTTGQPYTDLGGDYYTRRRPGRAIANAVAQLRAAGVDVTFTSTNEAMVT

SEQ ID NO: 172175 - protein, 351 aa, unidentified
MRNLAALESDRRFGRKLTMVGVHPDGSTLTPEGIAMQSRLDLGADVDSRYVMVACAAGSFKTQRIVNEAKAIRAWLRTVPRGSRLAMESTGSYHELLADLAHQADLQVFIVNARDMRRYGQGIGRRGKTDRIDAEVIARYIAREHEELHAYVPLTDEQRLLARLISRRAKLVQAKDSIRQSLGGVPALQSKARRLIGQVDQVIVSLDLLMKRTVKKMPSVGEAAGHIATIPGFGELTSAFLGHCFTRVPYSTSDAVVAAAGLDPRPDDSGLREGRRRLSKRGPAEARRLLFNCARSAAQMTLWRPYYEAQLAKGLSKTAAAMVLARKMLRVAFAVYKHRQPFNPLLVGGRT

SEQ ID NO: 172176 - protein, 384 aa, unidentified
MINTSIVFVGLDTHKEFVEVAYVEDSRQSRPVHIGRVPNTKASIIKLTRQFQSKHPQATLHFVYEAGPCGYWVYRLLTSMGLPCYVVAPSLIPKKPGQRVKTDKRDAMKLAVLLRVGDLDPIYVPEPEDEAIRDLSRARETAMKDLKDAKYQLKALLLRNNIKPPVTDNWSLKHLRWLTELVLPYPSQQIVLQEYLQTINERIKRLERLDNELLHHVKKWRYYPVVKAIQAMRGVRLLVAVGVIAELGDLTRFDHPRKLMSYLGLVPSEHSSGGHRRQGSITKCGNGRARRLLIEGAHSYRYSANISTDLQKRQEALSKEIVDIGWQAQLRLCRRYQRLMKRGKHYNVVVTAIAREMIAYIWAISREVVLSPVDPAKRLSRVPA

SEQ ID NO: 172177 - protein, 371 aa, unidentified
MKRLPDPVQKINAWVLGLDLHKQMTVWVLLDRRGRFVAEGEIRSRPGAFKALYKKLIGRKKAHVAFEAGGSSGWAFDTCEELLQDTARIHVAHAKSVKAIANTTQKNDYNDAWWLAHLTYEQRLPEVWWPRGKYRELRTACREREAYVNERTRIVKRIHAHMRQVGTPLPKGALKNGSERKALRDHLPQLSTVLRMAIEQELTHYELLTAHIQAWKREIEQMVAGWDDVAVLEKQMPGVGTTLAAVIVAESGPIRRFRSAKAYGCYSGLTPTEHSSAGRTRFGKISREGNAHLRWALTQAASACTRTKRGPGVAVGNWVWAREARLGSRKKAITAAARKLAEAVWRLYELGECFDIERMFGRIPWEARRSA

SEQ ID NO: 172178 - protein, 388 aa, unidentified
MHPTGPCPEQDPPRDRHHQATLYASLELSRSTWLVTSLAPGDRKMSKHSVAAGDGAALLALLARLRGRVERSVGGPAEVVVVQEAGRDGFWLHRLLEAEGVESHVVDPASIAVPRRQRRAKTDAIDGETLLRTLLAWRRGEPRVCAMVVPPTPGEEDRRRLTRERGTLLEERTRHTNRIKGLLAGQGIYDFEPLRPDRLERLGALVTGDGRPLPDRLRAELRRELERLELLRRQIAEVEAERDAAAAAESEAGPSPVALLAGLKAIGPQTAAVLYHEGLYRSFANRREVAAYAGLAPTPWRSGKVAREQGISKAGNPRLRHAMVELAWLWVRHQPESAPSRWFRARVGQERGRVRRVAIVALARRLLVALWRYLAHGEVPEGAVLKAA

SEQ ID NO: 172179 - protein, 401 aa, unidentified
MFFIGIDIGKRHHEVALIDEKGNVIGKTIRITNTKHGSEKLTDFFNKHNLTPNNTLIGMEATGHYWLSVYSFLNKLDFSVTAFNPIQSDVLRDFYIRKTKTDTVDAVLIAQVIRLAMPEKTTLPTEDTFRLKQLERFRYSLVDSASDLKRKIIACLDQVFPEYDKIFSNIFGNSSKQVLLHAPLPEDVLQLDTRLLSETINLASNKRLGSARSEEKATQLKELAENSFGISIAQDVFKLEIQIMLEQIQLIECQIEKVEKEIHELITKQNNYLTTITGIGDIIAAVIIGEVGNIDRFSRPNQLLAFAGLDASVHQSGDFTGTKNKLSKRGSPYLRRAIWQAAFIAAFNDPALSQYYQKLRTRGKSHGTAIGAVARKLVNIIFAIWKQQKPYEIHLPKESSN

SEQ ID NO: 172180 - protein, 320 aa, unidentified
MSVSSVVAGIDVAKAHVDVDVVGVEFAPKRFDNEADGHSAIASSLKALDVGLVVMEATGGYETSLACALQGAGLAVAVVNPKQPRKFAEAMGYLAKTDRIDARVLAEFGQTLARRADLSRFLRPMDDVDQQWLAALVTRRRQLVAMMTSERQRLQITPKKLHPSIEAIVKAIKAQLDDVEGQMVGHVKEHFGRLDAILQSVTGIGPVASATLIAELPELGKLNRRQIASLVGVAPFAKDSGTTKGRRRVQGGRFDIRRVLYMATLTAAFRNPVFKAYYQRLTAAGKLPKVALVACMRKLLTTLNAMVKAGSKWNPEHQGA

SEQ ID NO: 172181 - protein, 404 aa, unidentified
MIFVGDDWSEDHHDVCLMDQAGKRLASRRLPEGLTGIRQLHELIAEHAEEPDQVVIGIETDRGLWAGALAAAGYQVCAVNPLAVARYRDRHHVSGGKSDASDAKLLADLVRTDRHNHRPIAGDSLDAEAIKVLARAHQSLIWARTRHTNAMRSALREYYPAALLAFEDLAHGDALGVLGRAPTPEQGAHLDLPAIQSALKRGGRKRNIAARARQIRAALRSEQLAAPAPVAAAFGATTRAAVGIIVELNRQIAELEAELATHFEAHPDADIYRSLPGLGVILGARVLGEFGDDPNRYTSAKSRRNYAGTSPLTVASGKKRAVLARHVRNRRLYDAIDHWALCALTSSPGARAYYDHHRAAGDVHHQALRALGNRLVGILHGCLRHHTTYSEHTAWAHRQITQAA

SEQ ID NO: 172182 - protein, 312 aa, unidentified
MTDITIGADISKDHIDLHMLPDGQILKVANDRKGFAAIVRWIGTKSVARIVYEPTGPYHKAFERFMMVQGLALSKVNPRSARRFAEATGRLAKTDSIDAALLARYGTLLEPRILEVNRQIHNDLKELHMARLALIKDRTAAKNRSKNLSNLLLKRQNTDRLRQIERQIKAVDEAIMSLIAEDVALKARFDILVSIPGISQITAFTLLIEMPELGELEEKAAAALSGLAPMSHQSGRWTGRAFIAGGRAIVRQALYMPALVACRFNPDLKAKYEQLKAAGKPPKVAITAVMRKLIVLANALLKNNRKWEPKPA

SEQ ID NO: 172183 - protein, 388 aa, unidentified
MQVIGDRPEAASAIRTNLGAIFVSLELSQSTWLITSLSPGSGEKMSKQVVHGGDIAGLLARFARLQEKARARTGRNFPIIVIHEAGLDGFWIDRVLKNEGIESHVVDPASVATSRRRRRAKTDKIDGEALVRTLLAYKRGEPRVCAMVKAPTPEEEDRRRLCRERKVLITERVKHVNRLKGLLFSQGVCGYEPLRRNRRRRLDELRTGDGRPLPKHLKAQISRELDRLELLLEQIKVVETERDALLAAQQIAAPTSAAMLLAIKGIGPDFAAILWSEGLFRHFDNRRQIASYAGLAPTPWKSGSIDREQGVSKAGNPRLRTTLIQLAWLWLRHQPQSALALWFEERVVRNGGRLKKVTIVALARKLLVALWKYVTAGVVIEGAVMKVA

SEQ ID NO: 172184 - protein, 430 aa, unidentified
MNGGNEEYALLVGLDWADQTHDLACLSAADGQRSRLRIGSSPESIREWLAEVAGQFPGGRIAVCLEQSRGAVAYALGVHASVDLYPVAPSALDSYRRAFRPSGAKDDPGDAALCLDLLVNHRNSLARLVPDTEATRKLRLFCEVRRKTVGRRTRVTNELVSTLKQYYPQALKLVGDNRHSELACALLARWPQFGSIAGASPDALRKFYYAHHCRSERRIRERLELVASGCPLTTDPAVVEPLAMQVGQLVAEIRTLNRAVGQYDRRIAEVFAAHPDAAVFRSFPGAGAQMGPRLLAAFGTDREAYRNAEGLSAYSGVAPVVERSGKSQWTHWRWHCPKFVRQSFVEFAAKSIGQCQWADAHYHRQLDGGKGHHAALRSLAFKWQRIMFRCWQEREPYDDRRYLAALARHGSWIAGQSPDGKQTTQGSVST

SEQ ID NO: 172185 - protein, 314 aa, unidentified
MGDCIGVDVSKHHLDWAAGGEGSVERVANTPAGVRRLVAAIRKLAAELIVVESTGGYERSLTVALSEANLPVVLVNPWRVRRFGEGLGILAKTDPLDARVLALFGERARPEQRPVPGPRQRQMADLVRRRRQLIAMVVAEKNRLDTASAVVRRDIQALVKVLERRVAKVDERIDAAIASDAEKAENWERLQSAPCVGPGVARALIVDLPELGALSRREITSLVGLAPFAKDSGKKTGYRRIRAGRSGPRTALYLAAMNGARFNPVLKVMYERLIAAGKPPKVAFIALARKLLTILNAMVRDGTTWQEVAQSVRS

SEQ ID NO: 172186 - protein, 353 aa, unidentified
MRYLGLDVHAKATVWCLLAQDAEVLGRGKVSSTEPELTALVDGLRESDELLAGQEIGTQSYFVHDVLTAAGVKLLSFNAQQLRMLASSRKKTDKRDAYWIAKALQTEMMPHPVYIPSGQVRQLRQLLSQRETLKRDQKRWLVRARSSVRAAGHQSPPGARTPGALRVALLAKADGLDQQLDEALARCDRMHDALSHELVQVAATIRREAHDIEAIKRLQTIPAVGEWTALTIHAWVGDVSRFPNARRLAAYAGLVPSVWRSGESERCGGITKLGSPALRSILTQAGHVLLWRCSSAEAAPLKALATRVLTARTRRKIAVVAAARHILRIAYYVLRDGTSYDPARLAAVQPAVE

SEQ ID NO: 172187 - protein, 335 aa, unidentified
MNQARMHVGVDVGKDSLDICYPNGDKEHIRNTKRCRATLIKKARALGAVVSFEATGPYDEALESECVASGVPAVRLDAWKTRKYAESQGMLEKTDSIDCEMIRDYAASLRPDQLHFVRERSAGYRKLKRAVSVRRNLLKAKALIASQLEGDLDAEIKSAIARAVASIDRQVERMDAVCVAAIRSDERMGAIAARLGQVVGIGPVLISTALASCPDIGSFTSKGIAKFAGVAPLENRSCTITKKPRPRRGRRDLRCALYMAAVSACRSNHRLRRTYEGLVARGIPKRAALIALARHIIVLMNYIAKYPDFNPEVDPKKAAQMALPKRRPGRPRKNP

SEQ ID NO: 172188 - protein, 360 aa, unidentified
MFAERTSVGLDVHARSVVAAAIDGVTGELFQRRLIPSHEQIRSWLDDLPGPVAVAYEAGPTGFGLARWLNAEGIRCEVVAPSKLHRPSGDRVKTDVKDALHLARLLRLGEFTPVSVPTVDQEAARDLVRAREDCRGDLMRARHRLSKLLLRQGIVYSGGRAWTDAHDAWLRRQRFGSLALQTTFESDYDAVLTVKARRDRLDVAIAAMAADSQFTPLVRRLGCLRGVGALTGLALAVEIGDWNRFTGNTIGSFVGLVPSEYSSGQSRVQGSITKTGNTHVRRLLIEAAWHHRARYTVGKTMRDRWQLASPAARARGDAGNRRLHQRWVRFIERHKRHVIANVAIARELAGWCWSLAVLEE

SEQ ID NO: 172189 - protein, 343 aa, unidentified
MFIVGIDIAKRSHEAIIIAEDGQVVRKAFSFRNNCTGYNLLLEQVRRLTLVKSQIVFAMESTAHYWLALYARLLKDGYTVMVLNPIQSHSLRELYIRKTKTDAIDSLIIADLVRFDRCKASNVPQDKILALRELCRSRAYLVDMAADLKRKLIALLDRIFPEYESLFDSVFSKASIAVLRKYSTPQKVKNAHLGKLTDILMESSNGHFGEWKAHQLKEAACSSFGIDDSGGVYSTLLGMFLEQILSLTAQADSLEKQISVFFQEFNNPLTSIPGVGTVLAATILSEIGDITRFSSADKLLAYAGLDPSVKQSGEFKSNQNRMSKRGSPYLRRAIWLASTVAVH

SEQ ID NO: 172190 - protein, 364 aa, unidentified
MVELSKESWLVGGIIPGVERQPLKKLKSDENELLKLLEQWRKEAERAGHKIDRIAVAFEAGRDGFWLARWLRAHGIEAHVIHAASVAVSREHRRPKSDRLDTKGLKRVFLGWLRGEREHCKMCAIPTAAEEDAKRPHRERETLVGEQTTIINRIKSTLARLGIRSFNPKLKKSPERLEHLRTPEGEPIPPNTLAELQRDLARKQLVAEQICQIEKARLEQLEQAPKARPNLMVHVLMRVIGIGIETADMLVREILSRNLRDRRAVARYGGLTGSPDESGKTRREKGLARAGNARVRRGMIQLAWRFLDYQKDSALAKWFEARTENARKSRKKMIVALARKLLIALWHFVHDGVVPEGVVLRPAH

SEQ ID NO: 172191 - protein, 380 aa, unidentified
MEYCTTIGADVSDRTTKICVMTKAEGGERRIVVETTCATTKAGFEEALSKFDRSWPVVFETGTHCRWMDRLFKEMGFKTIVGNPGKIPSITKSNTKNDRNDARELARLAIADPAMLHPVFLRDEVYQQMLRFHHARNMLISQRTQTINQIRGFAKSMGHRIECSSTEKFHELGKADWPRELEECAWPLMGVLKTVNLKIKAYDRLIERLAERPEFKPMVERVRVVYGVGVIGSTVFVAAIGGRPDRFDHARDIGAYLGMIPKQDQSGDDDKQLHITHAGADIVRATLVECAGVVMMSNAKDTDLKLKGLRIAMHGGGIAKKKAKVAVARARAVTMLALLKDPEREYVPLSEEGRKGFGRYRAEMEYLVMSKATKRGKKVA

SEQ ID NO: 172192 - protein, 524 aa, unidentified
MPSLKPRTSKRRSARRGGLIHKPHGVLQPRVQKVGPEHFGIVCVDCAKVRSRWLLCNFYGTVLVPPTDVAHSKYDFLAMETRLRQALAEHDIQDLVVAIERTGNYHLPVKRALSRANFECRIVHPFATKQLRQPADPGNKTDDTDLAAIFRAASTGFGLLEQPLSPLDEQLRLLVRHRRDLIYKRSALCCQMREHLEATLPGFAACFENLWDSAVGLYLACAFSSPEAIRQAGTEGLAQRLRESKLRFQTPMLGKIATWAGRAAAPHSQAAIHHQILLGLEADRTQKTAHIEALECQLAGLLVQTPYVLLLSFPGIHVVSAAELAGELGPIEHYANARAITGRSGLYPARYQSDQVDRDGALIRCANRRLRAALLMVADNLAKCNPHFHALAAIWKTNRKDPRRTRIKIASRFSRIAYQMVAGRQVCRHPAIRQRSLILDKLLQFHREHATPPAQTTRDLQAAIEHLPVSERAVEAVPLAQQLEQTRTARRRGPQPLADVLPLVLAKLGAGALQLSPSGDRDPS

SEQ ID NO: 172193 - protein, 347 aa, unidentified
MDKISVVGLDLAKNVFQVHAVNAQGRVVERKQLRRSEVLSWFAKIEPCRIGLEACGGMHYWARKLSELGHTVRPMAARFIKPYLKSNKSDMLDAEAICEAVQRPGMRFVSVKSAQQQAVLHLHHSRRLLVEQRTALINHIRGMLLEFGIVIAVGPSALRKRLPELLEDTGDELPPMCRDLAAVLRDQLSALDERIALLEHRIQQWHVSNEASQRLAGIPGVGVISATAITAAIGDARAFTNGRQFAAWLGLVPRQASSGGRQRLLGISKRGDRYLRTLMIHGARAVIRHLRARQQAGKPPGNAWIAQLLARCHPNVATVALANHNARVAWALLAKNETYRARYAAEA

SEQ ID NO: 172194 - protein, 330 aa, unidentified
MGKRVAELGATRFVGIDWAAEEHAVSVLDESGRAVVAFTIAHSREGLETLVNRLAKLGPPAAVPVGVERGDGRLVDRLLEAGHPVVKVSPKAIKAWREAEVASGAKSDAADAEVIAEYLRQHRLSVVEPFSEATRALRAVVRARDDLVGQRVATANRLEACLDAYWPGAKRLFCDIESNIALAFLEDYPTPASAARLGERRMAAFLHRHGYSGKRSPGELVERLRAAPAGIAAGPEAEARRAAMLGYVAVLRALNRSIKELEGAIAARLGEHPDAVVFTSLPRSGRLNAAQMLAEWGDCRQAYDGPDAVAALAGATPVTRLSGKHREVAF

SEQ ID NO: 172195 - protein, 347 aa, unidentified
MSNHIENGQVRVLGIDLGKSVFQLHGVDARGKSVLKKRLKRDELLEYMAQLPPCLVGMEASSGAHHWARKFQGYGHDVRLMAPQYVKPYVKRHKNDSVDAEAICEAVQRPNMRFVGIKSVAQQEILALHRVRSLAVKNRTALVNQIRGLLAEYGIVFPKSIKQARRAIVLILSDESSEMSANFRVILEDERDELAHLDERIGKYEREIEALAKAEPQCRLLMTIPGVGPITATALLASVGDVRAFKNGRELSAWIGLVPNQHSTGGKAWLTGISKRGNGYLRTLLIHGARAALRVCENKPDRRSQWAVSVSERRGANKAVVALANRMARSAWAMLVKQEAYGASAAV

SEQ ID NO: 172196 - protein, 348 aa, unidentified
MTKQVMAGIDLHSNNLVIGIIDQNGERIKHQKLPCNLQMVDDFLMPYKKRLKSIAVESTYNWYWLVDGLRARKYPVELANPAKMDQYGGIKHAGDTNDAYFLAELQRLNILPTGHIYDPALRPVRDLLRRRMSLVHQRTSLMLSFKSLYTRTTGLNMTLGYLKGLTVAQTKDLYTHPANCLVAKIQKEHIEKLNESIGLIERTVLRQARALPCYERLSTLPGIGRILAMTMTMEMGPVSRYKTAGNFASYCRTVQAQKISNNKKKGDNNQKCGNKYLGWAFVEAANFAKRYDDLCRKWFERKAAKAGTVIATKALACKLAKAAWHVASQGSVYDPGRMFPRPAKPSSV

SEQ ID NO: 172197 - protein, 427 aa, unidentified
MSYRIAGIDVHKRMLHVVVSDVQVDGEYDFTRRIFGSLPEALRSLAAWLLEQQVQEVVMESTAQYWKPVWGTLERYWKQICQTREGALATSGTLHLAQAQSNRGRRGRKKDFRDAERLVKRLVAHELVLSFVPDVEQRLWRTVVRTKYQLTRNRVQLQNRLEALLEETHIKLSSLVSDLLGASARRMLHAIADGETNRETLAALADRGLRATQEQLQDALGVCQELNPVYRRLIRMVLDEVASIDKRIEQLNQEMANLLRPHEDQVKRLAEVPGLGVDSAQQVIAEVGATAATFPSEKHLSSWVGACPGDEESAEVNYSRRSPQGNRHMRRILNQAANAAVKHKGSIFEILYRRYVPRLGHNQTIGIIAHKLCRLVWKILHRGIRYEERGPEVSKASKQKRTRKMIQALRRLGYRIEPSPSQSAITA

SEQ ID NO: 172198 - protein, 353 aa, unidentified
MKDYYVGMDVHKASIVIAVQNAAGKVVMQSIIETKAQTVRDFVKGLHGTVRLTFEEGVHAAWLYDLTHSLVAEVVVCDPRKNKLLLSGHKSDRVDAQKLAHLLRAGLLQAVYHGEQGTRSLKELAHSYDSLVQDCTRVMNRLRAMYRGRAIECPEQSIYDSAGRAQWLAQLDDKGARLRAENMYKQLDALAALRDEARAQMVNEAAAHPASRILQRVPMIGPVRAAQIIATVNTPHRFRTKRQFWAYCGLAVVTKASAEYGFTKGELQKKAKKNSTRGLTNNFNRRLKEVFKSAAVTAGVRGQFKPYYEGLLAKGMSPEAARLTLARKIAATTLAVWKKGEAFDPQRITQQAA

SEQ ID NO: 172199 - protein, 344 aa, unidentified
MQTIPVTVYAGVDVAKATLQLHLQGRQAEFTNQAAGLLQLCQQLKTIPHVHVVCEATGGYERLLVQAMHQAQIPVSVTNPAQVRAAAQAQGQRAKTDRIDAALLTDYGQRYQPKPTSPTTASQDQLVALTQWLMQLVQAQALAKTQAEHHEAAFVCGRHTKLMAHYQSQIVAVEKQIRALLAQDAQLQQRVDCLDEIKGVGARTAWLVLAHMPELGQINRQQVAALAGLAPWTRESGTMKGMRCIGGGRPEVRLALYMAALSAARCNSVLKPFYQRLRAKEKPAKVALTAVMRRLLVYMNHQLKALQATQTDTKLQNAGLRAGIPFGILLQRCPSGITLVAWLR

SEQ ID NO: 172200 - protein, 322 aa, unidentified
MVSSANVYVGVDVSKARLDVASRPTGGLFEVADDQAGIDSLVGRLQRSSAPPALVVLEATGGLERPVAATLAAAQIPVAVVNPRQARDFARATGGLAKTDRMDAEILARFGEAVRPEPRPIPDQEAQQFGAILTRRRQIIEMITAENNRLGSTTSRPVKKRIEAHVKWLEKELKRADDDLDETIQKSETWRENEALLRGVPGVGPVLARTLLAELPELGGGELSPKQLAALVGVAPLNRDSGTLRGRRTTWGGRERVRAVLYMGAPVATRYNPTIKEFYERLCARGKPKMVALVACMRKLLTILNAILKNRTPWRSSHALTP

SEQ ID NO: 172201 - protein, 327 aa, unidentified
MFFIGIDVSKAKLDCTLLTAEADKRKTKVVVTTAAGVQALLAWCAKHGAQPAQLHAILEPTGLYHEQAATALHDAQVRVSLVNPAQARDFAKALAMRSKNDALDSYVLARYGQTLSPALWHPAPLHARQLRALLTRREALGKDLLRELNRKEKSQFSPSAPLVDGSIDKAIAFLREQIKQIERAIDQHIDNHPDLKQDRELLNSIPAIGPQAGNAILAVMHNRRIDSAQTLAAYLGVVPVQRQSGSSLNSCARLSKAGPSQVRATLYMAALVGTRHNPHIRALYQRLLKAGKSKKAALGAAMRKLVHLCFGVLKNRIPYQPNYAMNA

SEQ ID NO: 172202 - protein, 461 aa, unidentified
MEVLYPRCGGLDVHQKSVTACVLLSSADPGPPRKDVRVFSTMTDGLLALSDWLAGQGVTHAALESTGVYWKPVWNVLEGNIALLLVNAHHVKQVPGRKTDVKDSEWLADLLRHGLLKASFVPDQDQRELRELTRLRTQRVRMRAAEINRLHKTLEAANVKLASVATDVLGVSGREILAALVGGQTDPAALADLARGRLRTKLPELERALDGRFAAHQRFLVAEHLATIDELEAGAARLGAEIAARLAPPAAPPSATDPAPPAAPGPTRRREVKVVTAAPGPPVVVDRATGEVLDEAALRADPVARLDTIPGIGRAAAEAILAEVGTTVDRFPSAAHLASWAGLCPGHDESAGKRRSGKTRQGAPWLRTLLVEAALGAARTKDTHLAARYHRIAARRGAKKAAVAVAHTILVIAYHILRDGTTYRELGANHFDERDREAVRRRSVRRLERLGYAVTLAPQLP

SEQ ID NO: 172203 - protein, 356 aa, unidentified
MSRDIKYIGMDVHKEAIVIAVLNGSGKLVMESIVETKASSILEFIHGLRGELHVTWEEGTWASWLYDLLQPQVEQVLVCNPRRNALLKEGSKSDKLDARKLAELLRTGMLRPVYHGENGLRTLRELARSYQSISKDLNRVMNRLKALYRGWGIACAGTQVYALRYREEWMNKIPHAGVRRRAELLYQQLDGLQGLRRTLRPELLAESRKHKAVKLLRQIPCIGPIRAARLMALMQTPHRFRSKRQLWTYSGLGIETHDSAQYRYVGGQLQRSKKPQQIRGLNQNHNHEMKEIFKGAATRASCGRGPFHDFYAALLAKGMKPEMARLTLARKIAAITLTLWKTGGRFDAEQLKAQAA

SEQ ID NO: 172204 - protein, 418 aa, unidentified
MSLTGVLVRLFVGDDWAEDHHDVEVMDEAGKVLAKRRLPEGVGGIAQLHGLIGRHLGENADAAEVIVGIETDRGPWVAALIAAGYTVFPVNPLQACRYRERHGVSGAKSDAGDAHMLADMVRTDSHQLRRAAGDSPEAEGVKVLARTHKTLIWERTRAVQRLRHQLREYFPAALAAFEDLDAPDVLELLGKAPDPARAARLTRAQVSAALKRAHRRNITDKATAILAALRGEQLGQPPAVTAAYAVTARSLIAVITVLNEQVKTLQGQVDADFGRHPDAEIYRSQPGMGAILGARVLGEFGDDPHRYADGKARRNYAATSPITRASGKKKLVAARFIHNDRLVDALNAQAFAALNASPGARVFYDALRTRGIEHNDALRLLANRLVGILHGCLKTRTCYDETTAWSHRENLPQSSVAA

SEQ ID NO: 172205 - protein, 341 aa, unidentified
MELLHRRCCGLDVHKETVVACLRLVSDGKVTTEVRTFQTTTADLLRLSVWLAENDCTHVAMEATGVYWKPVWHILDDGEFVLVLANAAHVKNVPGRKTDVNDAMWLAELLAHGLLRASFVPDTQTQEMRSLMRTRKQLVREQTSHVLRVQKTLEDANIKLDSVLSDLMGKSGRAMLEALIAGETDPAKLASLASRRMKASPEELREALRGRVTKHHRFLLRLHLNQIDALDAAMATLDAQVEADLGPFRTAVELITSIPGVKNLGAHVIVSEVGIDMHRFPSAAHLISWTGICPRNDESAGKRRSNRLRKGAPWLKTMLVQCAWAAVRTKDSYLQAPILPH

SEQ ID NO: 172206 - protein, 428 aa, unidentified
MKNDFLSTLFVGVDVSSKDNVFCALDYSGTVVFHSQKPNNQPGSNNIVALISNAMNELKLKFLVIALEATSFYSTHIANFLSCHEDLLPYGVLVYILNPKTTSSYRKSFVDMDKNDFLDAYVIADFARCGRITSSPWKGSQFLALQRLTRHRLHLIDSLTCEKNYVLSNIYLKFSELTRLKKEDKPFSNMFGASSKAVLSELSLDDIAYSSLEDLSSFLVDKGKNRFDDPSLNAKILKKAARDSYRLDKVLYEPINVSIASSFNVIKTLEKEIKAVDSGIEKAFLGLNPTEYKVLLSIPGIGPVYASGILSEIGTISNFENNDKLAKYAGITWRETQSGSFSSDNTRMTKTGNKYLRYYLIEATSSVIRHVPTFNSYYQKKYDESSTHQHKRALALTTRKFIRMIFGKLKQKSTLFRRKSRIEQFNPF

SEQ ID NO: 172207 - protein, 439 aa, unidentified
MTTSNVRYVGLDVHKRVVEACFVDQAGNVVHRERFALNRRTLQTFATKILRPTDQVALEATTNCWAVADALRPHVARVLVSNPMATKAIAQAKVKTDKVDAHVLAQLLRCDFLPEVWQPDEATRRLRELTGRRSALVSQRTMMRNRVHSVLAMRLIEAPLRLFNAEGIEWLTRVEIDDQGRLLIDSDLRQLAFLQKEIDALDQELANRGYARADVKLLMTLPGVDVTTAEAMLAAWGDATRFPDGDHAASYLGLVPSTKQSANQCYHGPITKRGNSHARWMLIEAAQHLDKHPGPLGHFFRRLLKKKNRNVAVVAGARKLAAIGWRMLITGEPYRYAVPKTTEAKLAKLRVKATRARRKGGSAKGTKCQAKLPGGSRTIKSLAAACQSEGLPLPRPLSPGEQRTIEQTECATFVAQIAAHQVVPRAPKRRKPEEVAAHD

SEQ ID NO: 172208 - protein, 387 aa, unidentified
MSQPNDLSRSLIPFEHTTTLVAVIELSQSSWLIAGTIPGIERQPLKKIVPDETELLRALHRWRDEAVRKGRTITRIAVAFEAGRDGSWLARWLTGHGIEAHVIHSSSVAVSREHKRAKTDRLDTAMLMRVFLGWLRGERGHCGMVAIPTIEEEDAKRPCRERENLVGERTRIINRLKSTLVRLGIRGFKPQLRKAPQLLASLRTPEDSPIPPNTLDEMQRDLTRLALIREQIKAIEQARLTRLEQAPQTGPNAMIRMLASIRGVGIETAEMLVQEVLTRNLRDRRAVARYAGLTGAPDESGSKRREKGLAKSGNARVRRGLIQLAWRFLLFQEDSALAQWFRSRTEGVKGARKTKMIVALARKLLIALWRMVTTGEVPHGVVLRQAI

SEQ ID NO: 172209 - protein, 410 aa, unidentified
MTRTTTDVQYTTTPIVAQSRLFLALDVSSTSWACGFTDGGPKVRLRSVDRKDVAQARIALRAEIALALEVFGLTPETPVVACYEAGRDGFWIARWLELVGVACVVVDPSSIEVSRRAKHAKTDAIDATKLALLLVRHQRGEAVMRTVAVPSAADEDARELDRTIYRLQGKRQQMTSTIESLLFKHGIDRQLDSLLLVELDLLRTGDGAPLGSNLRQQIRLLAADVALLEAQLDELQQQRARAIAEPHTKAEKIAHDLDAMTGVGPVGAWVLAQELFGTRTFASPKKVGAFLGLTPTPWASGKMAQDQGISKAGPGRVRALMIQLAWAWLRYQPESALAKWYQERFGATAKRSRRVGIVALARKLAVALWRYAVKGVVPDGATMKPEASRTRPRTRARRAYTRKSTMLQVA

SEQ ID NO: 172210 - protein, 328 aa, unidentified
MEIIGIDVSKLTLDVFIHSLEHHYVVSNNPAGFSRLLQVIWKKLPKRKDDIFFCFEDTGKYSLPLCIFLNGEKLSFAMVPGLDIKRSIGMVRGKSDKKDASTIALYAWRKRDEIKPTVFPAGSIVRIKQLLALRNKLVKHKKAYKTGMHDVQDYFKEGDSKFYLDVNKRVIKSLTSEIASIEKEIETIIKSDPEVQNNYKILKTVPGIGKIIAFYLIAYTHNFTKFENARKFCCYCGIAPFENSSGTSLKGRTKVNHMANKMIKSLLNMGAMAAMRSHPEFKNYYNNRVEKGYNKMSTLNIIRNKIVLRAFSVVKRGSPYVNLHKFAA

SEQ ID NO: 172211 - protein, 382 aa, unidentified
MARQETVGSPRTVYAAIELSKKSWVLGIARPDRDRPSIHRLTGGDIGALVSRLRGATVQDHRIVVCYEAGYDGFWLARSLAKLGIECRVLDPASMQVNRRARRVKTDRIDALALLRALIAIDRGERHVCAVVRVPSVEEEDARRSHRERQRLVRERTGHINRIKGLLFAQGIRGIEPKLRRTRIDFAALITAEGRHLPQRLRQELQREYQRLELVEAQIKIVEQERDTADAQDPIVDSKRRLLCALHGIGPASAAILSREVFARSFASRRQLGSYLGLTPSAYDSGSTTRCQGISKAGNSWARRILIEIAWFWRKYQPDSPLSRWYAKKTADQSPRIRRIMLVALARKLAISLWRYVETGLIPEGVVMARAAPQGGRNVTST

SEQ ID NO: 172212 - protein, 337 aa, unidentified
MDITTIGIDLAKSVFQLHGIDANENVVLQKTLRRGRVLAFLTKIPPCLIGMEACATAHYWAREITSLGHKVRLIPPAYVKPYVKRQKNDAADAEAICEAVTRPNMHFVPVKTKEQQGVLVLHRSRDLLMRQRTMLLNAVRAHLSEFGYITAQGPKRTLDLLQRLEEGDDIELPDTVITALLSLGEQLSTLQRAITGIEKRLMIWHRQNTASQRLETIPGIGLITATALAASVPDPTVFKSARQFSAWLGLVPRQNSSGGKTRLGRISKMGNGYLRKLLVVGATSVTRRAANNETRTGAWVRSLLERKPTRLVTVAIANKTARTAWALMIKGEVYKAY

SEQ ID NO: 172213 - protein, 369 aa, unidentified
MTASVVYVGMDVHKDSIVIAVAREGREPAETWKTIPHDGVQLRKALKSLTQKGEVLRICYEAGPTGFGLCRSLRNAGLDWVVVAPSLVPGKPGDRVKTDRRDARKLAHFLRSGDLTEVQVPEEAVEAIRDLERARDDAKCAERAARHQLSKFLLRHGRRWEGLTWTQKHRDWIRTQQFAFPAQQRVLEDYLKTVEDLAERVERLTTALGELVQDTVLAPLVKALQAFRGVSMVSAVTIAAEVGDLRRFATAGQFMSYIGLVPSEDSTGQSRRQGRITRCGNGHVRRILVEAAWHYRHFPVMSKELRRRNQGVATGVQRIAWKAQKRLNQRLLHLIKAGKSVQKAVIAVARELAGFIWAVGQEETLLAPP

SEQ ID NO: 172214 - protein, 363 aa, unidentified
MSHYRVGCDAHRRYSQFAVLDQDGQLCEQTRVDHEPGAIQGFLENLPEGTPVALETVGNWYWIADEIEAAGCLPLLTHAAKAKILMGNVNKTDKLDAKGLAKLLHLDSLPTVWLPPGEIRDERELHRTRMALSKLRTSLKNRIHATLAKYGITSTEHSDIFAGTGRVWLEATLSRLPPETGRCVAQEIEVLDGLQLQITQLEERIRERIALTLSIQLLKTLPGVGDILAIVVDREIGSIDRFSTAGQFTSYAGLVPTVHASGGKTRFGHMRKPSNQYLKWAFIEAANVVVRHRHHPAWKTKYVCQIYDQVCQRKGHAIAVGAVARHLAEGAFWILKRQQPYRPPAIRQAPPKQVQGRAELVST

SEQ ID NO: 172215 - protein, 326 aa, unidentified
MTAPKLGIDISKKTFDVALIRDPETMKVKQRQFSNTPDGFQALQTWLAKQGVRQVHAVMEATGAYGDALAECLHGAGHLVSIVNPAQIKAFGQSELQRNKTDRADAALIARFGWLHNPAPWTPPEPEQQELQSLVRHLDDLIEQRTQVSNRLSEGRLTKLVRESWEEILQALNERIAEVKRQINQHFDDHPTLKRQRELLDSIPGIGPETAARLLAEMPQLGEFDSARAAAAHTGLTPKRHQSGTSINAPARISKIGNPRVCYALYMPAMAALRSSKEFKELAARLTERGKKKMQIIAAAMHKLVRIAYGVLKNQQAYDSNYGSAV

SEQ ID NO: 172216 - protein, 395 aa, unidentified
MNKIVHYIGLDVHKETIAVSIAPQNSTEVRRYGIIGGTLDAVDKLVKKLAQDHIELHVVYEAGPCGFVLCRHLRSRGIHCEVIAPSLIPKKASDRVKTDRRDADQLARLYRAGELTAIHVPDQEDEAIRDLVRARTAAMTDQRQARNRLKGFLLRLGFRYTGKSSWNDAHKRYLSGLVMPQGPQQIAFQEYIHAINDATDRLERLATAVEDALPGWKWEPVARALMSLRGVQVLTAMTLVAEVGDFSRFEDPRSLMHFFGLTPSEHSSSDKRVQGGITRCGNTHCRRVLTEAAWHYRLPPKVSETIQKRQEGQSKPVRLIAWKAQERLHKRFKQLSAKKKSVVAATAVARELVAFVWAIACAVKPAAQPAAPEIIRTCRGKVYRLDPEKKFQKNK

SEQ ID NO: 172217 - protein, 331 aa, unidentified
MKEQQIIIGIDVSKLTLDACVWDGQAFHSRRIDNSLKSIASLLKQLQKKFKDHPINIAIENTGYYNWPFYEAVKLLQANVYVLNPLHLHKSLGMVRGKNDQLDAQRIAKYLMLHIHDLKPTVLSRTQIRHLQALVAQRKRLMDIRTKLMVPAKELQLLGNKTITEQVMKSTKQAVKSIDAQIAVVEKQIDSLIASDEDMQQQFRYITSVQGVGKVLAWAMIIKTNEFKSINNPRKLACFAGVVPFEYSSGTSIHRRPKVSYMADKTLKKLLHLAAMRAIQLNGDMRNYYLRKVEEGKNKMSALNAVRNKIVARICSCVNNNKFYVPDLNLS

SEQ ID NO: 172218 - protein, 391 aa, unidentified
MIYVGIDVAKDKHDCFITNSDGEVLFKPFTITNNLDGFNELYQKIESVTEDATKVKVGLEATGHYSYNLLGYLIDKGLAAYVINPLHTNLYRKSLSLRQTKTDKVDARTIASMLMSDVNLKSYSDISYHNEELKSLTRYRFDKVKERAKLKSSVSRLVCILFPELEKLVPTLHMASVYSMLSEFPGAKHVASAHLTRLTNLLSEASKGRYSKDTAITFREAARASIGSNMPAKSLELKHTIKLIQELDSEIDEIENEIKVIMDEINSPILSIPGINYRMGAMIIAEIGDFSRFDSPDKILAYAGFSPSTYQSGQLDGAYAHMEKRGSRYLRYALYNAAKYVCHWDPIFAGYLAKKRAEGKHYNVAISHAVKKLVRVIYHLEKTKQQYIKVA

SEQ ID NO: 172219 - protein, 337 aa, unidentified
MYHVGLGIHTKRIALCALDEKGQVVRRSQVRNIEEMLRTLKELRDRFEVSYEASCGYGHYHDLLQPLATRVLVAHPGRLRLIFRSKDKNDRRDAERLAKLLYLGETPTVHVPSVVVRTWRELINCRSQVIAKRTRAKNTVRALLRSAGVIPPKQPSLWTKSGLAWLRKRELPTASQQLRRDLLLEEIETLNRQVRRIEQQLNQQARQTAAVAQLRSMPGVGIRTAEAVAAFLDDPQRFADAKAVGRYFGLVPSQDQSGEKNRLGHITREGAPVVRQLVAEAAWQAQRRSPTVRAYFERVQRGDPQRKKIALVATAHYLVRVMWALLKHGTTWKEKAA

SEQ ID NO: 172220 - protein, 357 aa, unidentified
MLSSNVKYIGLDVHKEAIAVAVLNGAGKLVAESIVETKASTLLDFLHGQRGELHVTLEEGRWAAWLYDLLKPHVREVVVCNPRRNALLKEGSKSDKVDARKLAELLRSGMLRAVYHGENGLRALRELARTYQVVSKDLKRVMNRLKALYRSWGIPCTGTRVYSQRHREQWLKKIGEAGVRRRAELFYQQLDALQALRHTVRGELLAESRKHQGVKILRQIPSIGPLRAAQLVAVMQTPHRFRSKRQLWTYSGLAVETHDSSQYRFVDGQLQRSKKPQQVRGLNQNHNHAMKEIFKSAALSATRRAGPFQDFYEGLLAKGMKPELACLTLARKIAATTLTLWKKGECFDARYVKPQAA

SEQ ID NO: 172221 - protein, 410 aa, unidentified
MNEGRCAGVDWAKDTHDVVVQDADGEQVWAGTVTHTESGIDGLCRTLIRLGVARVSLERPDGLLVERLLDAGLRVIPMHPNQVAAARPRFRASGGKSDRFDATVLCELARTDSHRFRVLSPDSDQTKALRAMTRGRQDLVEQRVVLCNQLRAELERFWPAATLLFNELDSPISLAFLKRYPSSVDARGLGEKRLAQFLARHHYCGRKTAGELLARIKDAPAGRAGELETEARRGLVLALAATLEVIVEQIRLITSEIAGAIRAHPDGHVFLSFFKSPDSVICAATLLAEIGDDRNRYPTAEHLAADAGMSPVAVESGRKKVACFRRGCDHRLRHATCTLADATRHWHPWAQDKYAAARARGQDHSRAIRTVGRGWTRVLWKCWQDGVPYDPTLHRGHQNHLKIVIPDLGG

SEQ ID NO: 172222 - protein, 368 aa, unidentified
MKEPITYVGIDAHARELHLAMLRWDTSEPSEWSSPNEPRAIERLRRRLEREAPGPIECCYEAGPTGYGLQRRLTAGRVQCRVIAPSLIPEKTGDRIKTDRRDARKLAQLLRADLLTTIQPPSEEAEAVRDVIRARDDARVDLMRSRHRLSKLLLRRGHLYPRTPWTGAYRTWLRRLEWPHAAEQHVVRDYQLAIDHLEARLAELDRVIADLARTPRYQAAVAALRCFRGIDTLIAMALLAELYDVRRFPHPRALMAFVGLVPSEHSTGERQQRGGLTRTGNTLVRRLLIQAAWQYHHHPRLGRALRQRREGQPASTLAIAIKAEQRLCHRYRRLCARQKPKPLVIAAVARELVGFIWATLQLPVTHHA

SEQ ID NO: 172223 - protein, 386 aa, unidentified
MQAPTATTPITDRINTIFVAIELSQKTWLVTMHSPDKDKISRHKVQGGDHPGLLALIDRVRDRAARTLGAVPAVASCYEAGYDGFWLHRLLMAAGITNYVFDPSSIAVDQRARRVKTDRIDGEKILRTLMAYLRGEPRVVRIVRVPTPEQEDARRDTRERGRLIKEQTGHTNRIKALLRLHGFAVGQPRRCDWLSWLAAQRDWQGHGVPPRVLSEIEHEHARLMLVRKQLDAQARTPAAADPAPAVAEMVRRGELLQRLKSLGPVFATTLTQEAFYKDFRNRREVASYFGLAPSPWQSGGTDRDQGISKAGNPRARCSAVELSWLWLRHQPGSELSQWFRQRTLNASKRTRRIAIVALARKLVVALWRYLTTGLVPAGAVLKSAKA

SEQ ID NO: 172224 - protein, 342 aa, unidentified
MKFYCGIDLSARDCHVCVIDEQLKVVVQQKLRNELPKICQLLAPYKADLKIVVESTFNWYWLIDGLQAEGYEVVLAHTLGLYLITGAKVKTDRRDAYSLAKLLLVGAVPVAYIYPVETRPVRDLLRRRMHLVQVRAGEYGSLRRLLLRQGILSSKQQEIKTATEAELEQWFEHPLVRLHASQELRRIELYSEQIAELEKSILALAKNAPSYELLLQLRGVGQTIALTILYEVGELTRFANVKVFSSYCRVVPGIAQSGNVSRRGRASKQGNHYLKAAFSQAAVHAVRCYPKVRRYYERQLQRHRGRGRQMICYNIIAHKLAQAAFHVLKEQTEYREELLFGR

SEQ ID NO: 172225 - protein, 435 aa, unidentified
MEDVRDEPLYRSRVCGVDVGKAELYATIRVPSDGNPARRASETRRFATTRRGVLELADWLRCWQVPAIVMEATGDYWKGPFYRLEAEGFDCVLADARQVKNLPGRPKRDPSDSAWLAACFERGAVTACFVAAPEFRLIRLHTRYRRDLTDERTREKNRAEKLLESAAIKLSSVLTDLHGVTGRDIMGHLIAGERDPKALARLARGRARAKLSELAAALEGAEFFTPEHAALLATMLDRIDQNNTQIARLSEAIERLLAPWEEQLQQAESMPGWRRRSAEDALAETGPDMSKFPTGAHLASWAGRTPLDNSSGQRKGKARSKKGNRYLAAVTGETSVAAGKTATREGARYRRLARRRGKAKAQVALGNTQMKVYHALLCRPGTRYQDLGPDYYERQRDTRRQISHHVGKLGALGFQVTLARIPGPEPDEAAATGAA

SEQ ID NO: 172226 - protein, 319 aa, unidentified
MHCIGVDVSKQELVTYDGVSERVFANTPGLAAFRRFVGSASEAIIVFEPTSTYSRRLETFCRAESIACCQLNPRVVPHYRQVGKGRSKSDKTDAALLYRYGIERGQEEAEQLTSDTMAQAVAAHLACYRVVQKARVAYQGLLDALEHDPATGKALLDGLRREIEELKTRETRRIAQAQAIVVKDEDAARRLDALLSIPGIGPITALTLVALFRKYPNVNRQQLVALGGLDPIQVQLGTSVHGKSRISKRGNREVRKRLYEATLSAARYNPNIQAIYRRLKEQGKPNKVARIAAARKLLLLAHAIYESGDPFRLPAEEVT

SEQ ID NO: 172227 - protein, 383 aa, unidentified
MNDLIRIGVDTSKSVFQLHGVNAAEQPVLRKKLRRRQVIEFFQKLPATRVGIEACGASHHWGRELSALGHEVVLLPPQRVKPYVERNKNDAADAEAICEAMSRPRMSFVPVKTAEQQAALMLVGVRDQLVGRRTQLSNAIRGYAAEFGLVAAKGTDKIEPLLVRIASDENLPPLAKGLFATLGNEYVRLKPELRKIEARLMAWHRGNELSRRLAEIPSVGPIGATLSVMKVGNPHAFRSGRDFSAWLGMTPKDHSTAGKVRLGAITKAGDEALRSVLVAGATSVIQQVRKGRGRPSPWLVALVKRKPPKLAAVALANKTARIIWKLMVSGERYNPQRAPQRFVPPTDSLAPGTRRQGQAACGGDLRSALTAPALRAPSAPPSA

SEQ ID NO: 172228 - protein, 591 aa, unidentified
MSQTLALPSILEGNTMSLATTAAIGVGFDTARYGHHVTFLRDDLQPACPPFEFVESRQGYDRLLQQLQQFHEGSPGVHFHMRLDAAGQYACNLEAFLRGLPFTKTITVGEPARNQHYRKALFPKRKADPVESLCAARFALLEKPAASHATTAGHHALREIVQRLEGQCRQSTRLTNQLHNLLARVFPELALLVADLQARWVLQLLNKYPTPLTLGRARQTTLVALPFLTEDKAQKIHAAAAQTVASFTGDTAAALVRALVAQLQDSLTAENQLKELMTAVYEKLPEPNHLDSIPGIGTATAAVLTAKMVDCKRFSTPAHLVSYFGIFPQEDASGMDKDGQAKPGRHSHMSRQGNDLVRKYLWNAAKSAIVHNPAVRPLYKRLRCRATRGDVALGHCMRKLLHLVLAVWKTGKPFDPEHYPWDTVKPANVPEKTAGHNQDASPERPVVTTVDSTVTEDATPDKAGLASASPPVADTREPSTGGIDYAALRQQVSMEQILAHLGCLSKLKGTGVQRRGPCPLHDSQDPRKRSFSVNLDKKVFHCFHPPCGAHGNVLDLWAVVHRLPLYQAAQHLAQTFHLQVTSPSGTAKRNP

SEQ ID NO: 172229 - protein, 313 aa, unidentified
MALVDHEGNLLAKRRMGDNLTGYRLLLDLLAEHGDSPDAPIPVAIETSSGPLAAVLRTGTRKIFAVNPLAAARYRDRHGVSRKKSDPGDALVLANILRTGMHAHRPLPDDSEPARAITVPDRAQQDAVWARQRIANQVRSLLRDHYPVALDAFLAKQGGLTRPEARTVLTLAPTPTAGARLILQRQRTALKRAGRSRGIDVQAERIKTALRAEQAHQPTLVEDEKAQQLRALIAQLDAARKAVDDLTEAVNASFHQQPDAEILLGFPGMGVQLGARVIAETGDDRTRFADARSLKAYAGSAPITWASGKKRFV

SEQ ID NO: 172230 - protein, 322 aa, unidentified
MSENSEEIMMVGVDVAKDKLDIAFANEQVLTIKNEASVFKKLLKNRVVQSLCFVMEATGGYEKPLVSFLLTENIKVAVVNAKRVRDFANAMGAYAKNDRIDATMIRYYAETAYAKGRMQWREPRSEVEQRIEALVKRRHQVVEQRAVEQQHQATAYDKDAVRSIKRVIKQLDEETRTIEAKIQTDIDNDDGLKQKVARLLTVNGIGIVNAMTLVSMLPELGNVSNKEIAALVGVAPYSKDSGKKTGKRTIFGGRALIRSALYMAILSAKRFNKPIKTFYQRLIASGKLEKVAITACMRKLLVTLNSMVKNQSEWNPDFAGFA

SEQ ID NO: 172231 - protein, 336 aa, unidentified
MFQLGIDVSKKTLDLCLLREGVKGRVKTRKLKNDVDAACSVIDWLRRQRCEPADVHIIMEATGVYHESLAYGLHTAGARVSLANPHRSREFARGMGIMTKNDSVDAWVLACYGALKEPAPWEPPPENVRYLSALLRHRDALVTDCTHEKNRLEKCRATDTPDAIIESIGNVLQSLSAETDHLDNLIREHLEQYPELKKDFDLLTSIKSVGFQLGLNMLVILRGHRFDTAEQAAAFLGVVPVEKFSGTSVRGKPRMSKIGPPEIRAKLYLAALCGLRFNPVMKAMYERLCLSGKAKMCAIGALMRKLVHWCYGVLKTQKPFDAEYLSSDARSACQAA

SEQ ID NO: 172232 - protein, 378 aa, unidentified
MVRLATNKSDRPSLRSGTAVPSLKHLREGMTMTTLEATRGITGGVDTHRDVHVAAALDPLGGVLGSESFPTDLAGYQALLGWLETFGDVVKIGVEGTGSYGSGLAGYLRRAGVEVIEVDRPDRQKRRRTGKSDPLDAVEAARAAQSGRATGSPKSRDGAVEAIRVLVVAKRSARQARVKALIQMRHLGFTAPEQLRCRFKGLSVEALIAEGIKLRPTRSGDPVTSATKASLSSLAHRISALDDELAELDERIETLLVATVPELLGLFGVGPDCAAALVMAAGDNPERLHSEAAWAHLCGVSPIPKGSGKSSGRVKVHDGGDRQANSALWRIVVVRMAHDPETKLYVERRLKEGKNKYEVIRILKRYVAREVYRHLPRG

SEQ ID NO: 172233 - protein, 354 aa, unidentified
MSQTPNTAIAVIGIDIGKNSFHVVGHDARGAIVLRQKWSRGQVEARLANIPPCLIGMEACVGAHHLSRKLASLGHDARLMPAKYVRPYSKGQKNDFNDAEAIAEAVQRPTMKFVATKTAEQLDLQALHRVRERLVSQRTGIINQIRAFMLERGIAVRQGIGFLRMELPTILATRTDALSPRMLRVIEELAGDWRRLDQRIDGLSGEIEALARQDQACSRLMTVPGIGPIISSAMVAAIGTGDVFSKGRDFGAWLGLVPKQISTGDRTILGKISRRGNRYLRVLFVQAAWVVLVRIKNWERYGLKSWIEAAKRRLHHNVLAIALANKLARIAWAVLAKGRAFELTRTDDAGVRPA

SEQ ID NO: 172234 - protein, 337 aa, unidentified
MQTYQNFIGIDVSKAHLDVALIQNAKRVSHTQIKNNIEAISVYLEELKEQIDLSETLFCLESTGHYINFLVTTLVSFDCSIWIENALQIKKSMGATREKNDEIDSERIGLYAFRFQDQVRLYSPVNENITVLKTLQTLRKKHVVHRQELETYAKETKAFSKKVVNEVIDQHTKMLLEQLTLQIETIEKQMLEIIQNDKELKEIYQLATSVTGVGKVTAIHLIVMSEGFTKFDTAKQLACYAGVVPFERSSGSFKGKARVSNRANKTLKTALHMCALSASRAKGELNDYFIRKVAEGKNKMSVINAIRNKIIQRVFACVKNKIPYDKNGLNFNNFSKG

SEQ ID NO: 172235 - protein, 465 aa, unidentified
MIGDLEEDRVVRRLVGVDLGIASCHTVRVLDGEGRDVCRRRCEPTVESLGRVEAAALAGTPAGTVLEVVMEPTGPAWLPVAVFFTARGHLVFRASSAKAADLRRFLSRHAKSNGIDADTLARLPLVDPAGLHPLELPGEQAAALDRRVRATDRLTMLAAQHKTRIKDLVRQLMPCSPLTGDLGLADMAVLERWADPRALLAAAPARLTRLIGTASHGHQGADRAAQWRQAAANAVALYAGHPAAAFADLADEVRTEVRLLRATQAELAGHAAERETAYRYTDVGGLARSLPGLATVGGPVLVAVMGRPGRFATAAAFKSFTGLAPKASETGNTDRKGQPMSKAGSALLRTTLIRAADTARKQDPQLARIYHTQMVDRGAEHLKALCVVAGALAERGWAVMNRQMPYVICDIDGHPVTPQQAKRIIAEQYTVPEEVRRRRRSSKTARRAPAQAQRGRPLSKPPAAA

SEQ ID NO: 172236 - protein, 420 aa, unidentified
MGIFCGIDWAEDHHDIALVDQDGQVLARQRITDDAAGLARLLELLAGHGDVPDDPVPVAIETPRGLLVACLRATGRKVYPVNPMAVARYRDRHSVAGRKSDKGDAAVLANVLRTDMHAHRPLPADSELAQAIAVLARAQQDAVWDRTTACNKLRSHLREYYPGFLAAFAPARGGIMRPEARAVLAAAPTPAAAAGLTLAQLRALLKKAGRSRGIDAEAQRLRGALGKEQMRQLPLVEEAMGRQALALLRQLEAACASADDLEQAATESFNQHPDAGVITSFPGIGALTGARVLAEIGDDWSRFQDARGLKAYAGSAPVTRASGKTRSVTHRRIKNNRLAAAGYTWAFAALTASPGARAHYDRRKDAGDRHGAAQRNLFNRLLGCLHHCLATGQHYDEATAFPRPGINASGSLTQKCPPAA

SEQ ID NO: 172237 - protein, 411 aa, unidentified
METVLNCCAGLDVHKESVEACVRRQEANRPLHKQTRHWGTMTGDLRAMADWMAAQGVTHVAMESTGVYWKPIYNILESRFTVLLVNARHLKQVPGRKTDIRDCEWIAQLLQHGLLKGSFIPPRPQRELRDLTRHRTQLVEEKGRTINRLQKVLEDANIKLAVVASDILGASGRAMLQALLQGEEDPLRLAALAQRSLRGKIPELEKALAGHVTEHHRFMLQLLWKQLAQQEELLAELDRRIEEQTRPFAEQIERLDDVPGVDRRVTEVLLSEVGADLKPFPTDGNLASWSGICPGNDVSAGKRRRRGITPGNHWLKRALVQAAWAASHTKNTYLAALYRRLAGRRGKKRALVAVAHSILVIYYHMLKNGTTYSDLGGDFFDRLQAQGLTRYYVRRLQALGHKVTLESAAAA

SEQ ID NO: 172238 - protein, 470 aa, unidentified
MNVDEKDVLLMSLTGLVSLDSQEDVVVKGIGLSRGDKRRNGRLARLRVLVPAENAILGIDLADTKQAVVVTDHDSQVLARGPVTAKAWELGPVLDWARKVAHAHGFADVTVGCEPTGHRWRVLDQLAAQHDMALVCVQPLLTGQARQAEDYTSDKRDDKDAVLIARLRDQYHCYAPERAEETWAQLRQLGARRDELVTQAIRCVQQLRDLLECAWPAVLGAAGSPFDSTNWCAALAVVLERCDGDPRRLARRGPERFTAAVRRELPRWGGQRLWRGIVGAVFTTLTDPAGVIAQRRGALQRAGWVLDDWRLIKIRLAEVETQMAAILDELDLTKLVTSIPGVSAVGAAAILAETGDPTRFDSPRALVKHAGLCPRENTSGTYTGRSRISGRGRPRLRSAAWRAVWGALPSNPVMITRYRHLTTRKANPLKDGQARAAIAAALLRWIHVIVTKGVTWDAALAGASELATAA

SEQ ID NO: 172239 - protein, 417 aa, unidentified
MSETLSVPVALFYVGIDWAAESHAVCVLDDTGDKQSSFTITHTADGFADLIRRLGKLGDRADVSVGIERPDGRLVDALLEAGHPVVPVRPNAIKTWRDGEVVSGAKSDAGDARVIAEYLRLRQHKLRVATPFSDQTKALRTTVRTRDDLVDLRVAATNQLAALLDAHWPGAKAIFADVESPIALKFLTRYPTPAAAARLGKKRIAAFCAANGYSGRRPADQLLARLRNAPAGTTNPALTDAVRHTVLAMVTVLTALNTAIKDLDRAVTTQLGEHPDAKIFTSLPRSGQINAAQMLAEWGDCRPAYDSPDAIAALAGLTPVTKESGKHRTVSFRWACNTRFRVAMTTFADNSRHASPWAASIYTRARAAGKDHPHAIRILARAWTRIIYRCWLDHTPYNPGLHGATQRLNQTQQPATG

SEQ ID NO: 172240 - protein, 425 aa, unidentified
MKITRIAEKINLNQVMDISVDVHKDILNFFFTSAGKEYTDLCSNRTDVIQRRIIKYKKIAKEHGMSNLRIICEPTGQYQNSLLRTARRNGCLTCYVNAESVKKFRVVETNDTGKTDIKDPRVISTLAILNKVIRHRMIGEDYLMLRKLGKIYDETDVEIVRLKGRLNKLMVELFCDYSFKKDFLYSNSGLALIKKYRCNPYRIIKSGFNRFEKTMRHAAPRIQSNTLKRLFEDAQSSVLNELPTGYIEVLQIRFYQLFRDYLNQQKRKEEIIEKMIEILDRLREKDPNIPPPTPGVISAKNIARLLGETGPISDFSSYRKLMRYFGLNIRMRQSGKYHGQNKITKKGRPLGRKVVDNIVLPLVKKDCLYGDYYRVKKEKEKRPGNKAMTIIMRNFLKKFYGWYKSGKAFDEKRFFHSESQYLKAA

SEQ ID NO: 172241 - protein, 369 aa, unidentified
MVEYSEAFIGIDAAKSRNAIAIAEAGREGEIRYLGEVEATPQSMRKVVTRLAAKYQRLHFCYEAGPTGYGLYRQLTALGHDCIVVAPSLIPRKPGVRVKTNRRDAIALARLLRAGELTPVWVPDEAHEALRDLVRARDAAVEDLRRKRQSVTSLMLRHGRIFPGKTPWGARHARWLQEQHFEHPAHQIVLQELVLAIQHAHERLERIEAAIAEFVPGWSLAPAVEALQALRGVNLISAVTFLVEVGDLRRFETPRQLMGYLGLVPGERSTGDTVRKDGITKAGNSRARRTLVESAWTYRYPPRIGKVKLYHLQRVTPAIRDIAWKAQSRLCARFRALAARGKKSTVAVTAVARELAAFMWAIVRAVPAT

SEQ ID NO: 172242 - protein, 352 aa, unidentified
MNQRYEKCRQYVGIDLHRRRSVVLRMDGEGEVVDCVRIDNSVSNLVAEVAKAGPGAEVAVEATYGWYWAVDALSEAGFAVTLAHPRGIASMQNRRAKTDQLDAKELADLLRIGRLASAWIAPPGVRELRELVRYRHKLVRTRAGVKASVHAVLGKCGVIPEIADIFGPIGTKMLNTLVLPDPYASRLASQRRILAVLTAEITLVEVETASRLKDSREYRSLLSIDGIGPVMASIFVAEIGDVHRFTSPDQLACWAGLTTRVDSSDAKTRRGHVSKQGSRLLRWAAVEGCQRAREPYLAERRRAIVARRGKGAQHIATVAAARHLMRVVFYTMRDGHARCLDGSLAPTVPALR

SEQ ID NO: 172243 - protein, 400 aa, unidentified
MRTVFGINVSKTSSEVAILVNGEKVHGYTMPNDIIGFSHLLKDLKTVSNPEIIFEATSVYSRRLQAFLEENSYDYTRLNPLEAKKQLDSLRVRKTDKIDAEKLASSQFVLNRKPTYVQEEVYQNLHDLSRFYQNLTEDIVRTKNRLHKVLQVAFPEIENLLSTPTGEQYWNLVSIFPTKHWVLELSEVELKETIRNSTSKRISENRVGNLAEKLVGLAKQSYSAISKTSPMIEEVKYNAQELIRLTNRREQVLQQLIALAEPLPEYEILLSIPGIAETTATSIIGELGDIRRFKSANQINAFIGIDLKHYESGDFLGQEHITKRGNPYARKIMYKCIHNIASASHTNPCHIADFYEKRKRQSQTTSTKPHTIASIHRLIRTMYYLIMHNKLYDYTLAKSH

SEQ ID NO: 172244 - protein, 400 aa, unidentified
MLSIGIDVSKGKSTVCGMKPGGEIVYAPFEVQHTREGMSELVSLLRSSGEEVRAVLESTGSYHCPVVTALLENGIFVSVVNSLRMKRFCSQSIRKVKTDRIDAMQIALYGLAYWQDLQPTKLPEDTYRELQLLARQYYQMTSMLIKAKVDFNAICDQVLPGMQELMNDHAGRHKLSDFVLRYRHTTHILEMGETRFQKDYCKWAEKKGYRNCERMAALIFATAQNGIPVLPNAPSTQIVITEAIRVLHTVEASRDAILTQMQALAKTLPEYSLVREMPCIGDTLAPRLIAEIGDVRRFHSKRALIAYAGIDAPPYQSGKFRANNRHISKRGNRYLRKTGYEVMQSYVMHKPANDPIFTFIEKKRGEGKSGKLAMVAGLNKFLRVYYGKVTELYRSLPAIE

SEQ ID NO: 172245 - protein, 355 aa, unidentified
MGTYYVGMDVHSATIVMVVLNGAGKQVMESIIETSAESVRSFLKQPRLRGEVYATFEEGNQAAWLYDVVRPLVSNVVVCDPRHNKLLQAGNKSDRVDARKLAQLLRNGSLHAVYHGNKGVRTLKELVRNYDSLVSDATRVMNRMKAIYRGRAILCRGPEIYRGDRREKWLNKLSEPGARQRASSLYAQLAELNRLRQEAKKEMLKEARRHPAYQLLLSMPWLGPISVAQIIAVVGTPFRFRSKRQFWTYVGLAVVTKTSAEYVMVDGLVRRSLRPVTTRGLNRNHNHLLKRVFKQAATSACADGPFKSAFEARLAQGMDPSLARLAIARKLAATTLAIWKRGEQFSPERMKQQVA

SEQ ID NO: 172246 - protein, 430 aa, unidentified
MKSNTQNAKIEAITEKTLILGIDVGNETHYARAFDYRGIEYSRKPFKFSNTEAGFVTFKEWILDLKERHEKDKVVPGMEPTGHYWFNLGKFLQDNEMKPVLVNPHHVKKSKELDDNNPTKNDRKDPKVIAGLVREGRYMIPYLPDGVYADLRTASNIRFQLQAELTRIQNRISRWFNIYFPEYKTVYGKPDAKSGILILKAAPLPEDILTLGIDGVNQIWRDAKLRAVGKARAKTLIEAAGHSVGSKEGAVSARMEIRMLLEDYESRNTRLQEVMVLIEELVKGIPMAEKLLEIKGVGIRTVSGFLAEVGDISRFNNPKELQKLAGLALVENSSGKHKGETTISRRGRKRLRYLLFEVAMSLVSKNQEFRELHNYYTTRRLNPLKKMQSLMAIAAKLIRVFYAMLTKGVDYDPKKMVSDIKRPAVYLQAA

SEQ ID NO: 172247 - protein, 375 aa, unidentified
MGKNTRFVGLDVHAETIAVAVAEGRNQVRSLGTIANRPEAVRRLLGKLGKLTELRVCYEAGPTGYALYWQLTQLGVQCEVIAPSLVPMKSGDRIKTDRRDAERLARSYQAGDLTAVWVPDAKHEALRDLVRAREATKEDQLRAKHRLLKYLLRYGQRPADDCRSWTAAWWQWVRALQFPHAEQNTTLVELVLEVDHQAQRVERFDAAIDRAVDAAPEQLRAIVDALQALRGVAKVTAVTLATEFGCFSRFEKAGQVMSYTGMVPSEHSSGPKTRRGAITKTGNSHLRRVLVESAWHYRHRPRLCKRQKDMQTSLPPKIATIAWAAQERLHRRYWALSSKSKPSAKIVTALARELAGFVWTIGVETERSLKTAKAA

SEQ ID NO: 172248 - protein, 356 aa, unidentified
MTQVSKLDFTGQRIYTSLDTHKKSWKVSIFTDHFEHKTFTQPPDTEVLVHYLQRNFPGADHQVVYEAGFCGFWIHDRLREKGINCIVVNPADVPTTDKEKKTKSDPVDSRKMARSLRNGELKGIYVPLREKVEDRSLVRTRQAMVKKQTRCKNQIKSSLFFYGIVIPEELGEGRWSRKFINWLNEIQMTRASGNTSLKTLLSELLYLRQTISDLTKEIRRLARTQEYAENHRLMKSVVGISTLTAMTFLTELADINRFKNLDTLASYIGLIPDVHGSGEKEANTGITSRRNPQLRGILIEAAWIAARKDPALMMAYHQFMTKVSRKIAIIKIARKLLNRIRYVLKNKQEYVTAVVQ

SEQ ID NO: 172249 - protein, 381 aa, unidentified
MQVLGVDPHKGSHTAAAVAPDGTVLGRTKVPSSRRQVHRLLAWAAPWPERVWAVEGATGVGRLLAQQLVAAGETVLDVPAALATRVRVLSGQSGRKTDAHDAVAVATAAIHHPRLRAVQAEDHNAVLRLLSVRRSQLNASRTQAVARLHGLLAELIPGGAPRNLSADRAAALLRSTRPVTSVDATRKALARDLVEDVRRIDRKLDANEADIVEAVKASGTTLTEIQGVGEITAAKILGQTGRITRFEDRAHYASYAGVAPIEASSGAVSRHRLSRRGNRQLNSAMHGIAITQSTHPGRGREFYQRKRDEGKTEGEARRALKRHIIDLVFATITADTERAQRSPGRQVGATRESSAAGQSPTANTSERSVPGLRNQATTDAA

SEQ ID NO: 172250 - protein, 411 aa, unidentified
MEVIHARCAGLDISKKDAKVCVRVAGAGRRKTVETVTTWGSMTSQILALREHLIAERITCAVMEATGDYWKPFYYLLEGAGFEVLLVNARHVKNLPGRKTDVADATWLAQLGAHGLVRGSLVPPEPIRQLRDLTRARTAITRERSREVQRLEKLLEDAGIKLSAVTSDILGVSGRAMLESLIAGNRDPAALADLAKRRLRSKIPALTEALTGRFTDHHAFLARVHLNLIDQHTAAVADITARIEATIKPFHWFRDLICTIPGISTLTADVIIAETGADMTRFPTAGHLASWAGTTPGNNESAGKVKSSRTRPGNPYLQGALGAAAMACAQNPVTYLGARYRRIAARRGPQKANVAIQHSMLIATWHMATNGCLYHDPGADYFNQLHPERAEKRAISQLEAMGYHVTLTRAS

SEQ ID NO: 172251 - protein, 459 aa, unidentified
MVKSKCSVQGVGPSTKTTAQHCVRATYRSAIGVDVHAKQLVCCYQSSDGVDPLTHQPILKEQHAEFGTLRSELNEFAAWCLELKPEIILMESTGVLWRSPYEALEDVGFTTQELMLVNARDVKGIIGRKTDREDAVRLAQIARMGIIKASFVPPRIFREMRLIARRYQTLKKTTANLTNVYQKLLNAAGLRASSVFSDVRGLAATAILEAKLNDAPDFAETVIERSVRLKARPETIIDALDFEISDTMRAQILDEKLLIKRTQTHADAAMNRLRQLQEPYAKQVKLLMSIPGIKEDSARLIFAELCSDLKQQFPNSEKFCSWLGICPGNNISANKSHSGRSPKGNKWLRRTITECSQGIGLSHLCLRSRFEAFKLRRGKKRAVVAIGHLLCRIIYSVLVNGRMFKSVNEGDNLKNILVQRLKSNIKNLRRQTPLVMCGNEMIERDTGVIICEMPAVFDP

SEQ ID NO: 172252 - protein, 384 aa, unidentified
MDTAAARTRKYSVEGPVLYLAFELGNKEWKLGFSVGLGQRPRVITIQARDLEGLQREFKLAKMRFGLPETASVMSCYEAGRDGFWLHRYLVEAGVENLVVDSSSIEVNRRFRRAKTDRMDVAKLLDLLMRYGRGEKKVWRVVRVPGVGAEDRRHLHRELEDLKAERTQHINRIKGLLVGQGVRLEEIGSGFPDQLNAIRLWDGQPIPEGLKARLQKEYERLQFIQGQIHELEAERVEAIRRSESPEVEMVRQLLRLKGIGLNSAWVDTMEFFAWREFRNGKEVGGLAGLTPTPYQSGDSSRERGMSKAGNRHVRALAIEIAWGWLRYQPESELSQWYQRRFGDGSSRVRRIGIVALARKLLVALWRYLETGLIPQGAVLKTRLI

SEQ ID NO: 172253 - protein, 429 aa, unidentified
MNYNTQNAKIASITEKTLIVGIDVGSETHYARAFSWRNYEYSKKPFAFSNDEDGFASFKAWMDDIAEKHEMEKVIPGMEPTGHYWLNLGAYLQGQGMRPVHVNPHHVKKSKELDDNNPNKNDRKDPKTIAGLVNEGRFSYPYIPTGIYAEIRNLSNLRIQTQEEITRIKNRIARWFSIYFPEIKDVYRNPDAVSGLMVIKQAPLPCDIKGLGVDGVNKIWRDARLKGAGIKRAKTLVTAAEHSIGNTEAPRSARKEIRNLLNDYEIYKSRMDELMEEIEELLSEIPYIDKLMGISGIGIKTVSCFIAEVGDIERFDNPKQVQKLAGYAIVADSSGKHNGESRISHRGRKRLRYALYEAAVSVIGKNKEFKEIHHYYRTREKNPLKKMQSVIAVACKLIRIFYAILTKGIDYDGQKMLRDIVRPGMQSAA

SEQ ID NO: 172254 - protein, 450 aa, unidentified
MIETVIHAFVIAFVFAGRAIHMRSYHSVGRIGNEKSVDLSITNSVIGEIFMNAVGIDVSKGKSTVAVIQPFGVVIAEPFDVFHTDSGLKELVNFIKSLSGETKVVMEYTGTYYEPVANALHNAGLFVSVVNPLLIDDYDTNRVRKVKTDKIDALKIASYALDRWMNLRKYEPTETVRKTLKIMNRQCIKLNKILVMQKNSLIALLDCFFPNENTLFTSPRRESDGHEKWVDFVARFPHVDSVTKLSISAFATKYQSWCKKEHYNYSKSKAEQIHAYARTIVSTLPLTDAVKKLVSDAAKLLNSTLEALGTLHSEMDTLASQLPEYETVMNLYGVGKVFCSQLIAEIGDVTKLKSGKSLVALAGIDPPPNQSGKDDPKSRRISKRGSPALRKTLFLIMSIYLQRQPADEPVYQFLDKKRTEGKLYKVYMIAAARKFLRIYYARVKEVMSKE

SEQ ID NO: 172255 - protein, 423 aa, unidentified
MRFIGLDVHRDFCEVAIAEAGAVRSAGRVKTEPAALLLFAQSLGADDQVALEATGNALGIARIIEPHVRRVVLANPKAVKGITRAGAKTDRIDARTLAQLLAGGFLPAVWLPDEQTRVLRRRISARAQLVRQRTRAKNQVHATLVRNLKGRPPVSDLFGVRGRRWLADQELPADEQETVAACLRQIAFLDGEIGQVERALAEQVLASAEMRRLLTLPGVNFVTAAALLAAVGAIGRFPTARQLVSYLGLDPRVNQSGSEPARHGRISKQGPGETRHVLVEAAWHASRTPGPLRAFHQRVAGRRGRNVATVAVARKLAVVAWHMLSRGEDYAFARPSLTREKLRRLELMTGAERQKGKRISVWVTREQHQLDKELAAQAELAYRRLAQDWQPANRGTGAAPGCASRRPSSGQAARQETAPPPAL

SEQ ID NO: 172256 - protein, 362 aa, unidentified
MSGLNWVIAFNTPLSEKISRRTLTGCKWKRLLELIEEVRARVGRETGRAVEVISCYEAGYDGFWLHRQLSAHGISNYVIDPASLQVDRRARRVKTDRIDAERLLRSLMAYLRGEPKVWSVVRVPSVAEEDARRLHRERDRLVSERVQHVNRIKGLCALQGIYDYNPLRPQAMARLEQLRTTQGGALPPRLKSEIKRELQRLELVVEMIATLETERDAIVKDEASTHVNAKKIQNLHKLKAIGPEFAAVLVGEVFHRDFTNRRQVASYVGFAPSPFQSGSVAHDQGISKAGNRKGRTTGIELAWLWLRYQPDSDLSVWFRARVGTTKGRIRRIAIVALARKLLVALWRYLETGVVPRGAVLKG

SEQ ID NO: 172257 - protein, 356 aa, unidentified
MSRDIKYIGMDVHKEAVVIAVLNGSGKLVMESIVETKASSILQFIHGLQGELHVTWEEGGWAAWLYDLLKPHVHEVLVCNPRRNALLKEGNKSDQVDARKLADLLRTGMLRPVYHGEHGLRTLRELGRSYQTISKDLNRVMNRIKALYRGWSIPCAGTQVYAPRYREEWLSKIEHAGVRRRAELLYQQLDGLQGLRRTLRPELLAESRKHKAAKVLRQIPYIGPIRAARLIGLMQTPHRFRSKRQLWTYSGLGIETRDSAQYRWVHGQLQRSKKPQQIRGLNQNHNHEMKEIFKGAATRASCGVGPLRDFYVALLAKGMKPEMARLTLARKIAAIALTLWKKEECFDAEQLKPQAA

SEQ ID NO: 172258 - protein, 396 aa, unidentified
MRLDEGGGIDVHKETFKVAACHENEAPQERTFGTFTKDIYAMRDFLLEQKIKHVVAESTGVYWKPMYRILSAAGIEVSILNPTRVKQMPMEKTDKKDARWLAKLLMNDMIKKSFVPDEQQEQLREFSRMHTKYIRQMTRVKNQVVRLLESCNFKIRSIVSDISTQTAQKLINAISNGQTDTDLLIALCHHSVRKRQGDERLKLALEGRFTKYMQQQLRMLLDDLHYFEKQKMQTENVLKELFTNEQMEKIKKLDEVEGVSQQQAEIIMAEIGAGIDSFSQADQAAKYAGLTAGQRETADQQKPVRAVPGNKHLRVVMVQIAWSAVKVKNGYWKAEYQHLKKRIGAKKAILAIARKMFKAIYKVLTTEHRYEKWDAKKFYDNRIKTIEFKKRLSIAG

SEQ ID NO: 172259 - protein, 456 aa, unidentified
MYRELQPLRQALSVELKADLPPAPPGIEPEHLLQTYLDRVTMYVGCDVADQTFTLLAVDAAGEELGHLSDVPNNPFGFEQACEWLERLRCQHHLRIIVLAMETSGIYYWAWWDFLAGRPNLARVLYNPRTTEHMTEVLSKRVRNELVDAYALAEQVRLGSTPEVVLMEDTDLLTARLCSRAARDLAQQINDKKNQLRALLRAYNPALCQVFPQAKLHHRAVYALLQHYVLPDEFIAAGPTPITAILTDHCRTAFGREQAEQLIALCRQTLTHPIGRKVIAYRVRQLTQDISTAQEHKQYFLKTGYGLIEDRTETRLLRLVKGAGVSNTLALVSETGDVHRFPDGPHLASFLGLTTSKHISGTTLFQSKHITKQGSPNARYAAVNLAGHLKQYVPKYQQMYQRIKNRKSQGGHFIALVAIARDFVTNVLYDMWRYQRPFFLEVEDYRAYRRAHPRAD

SEQ ID NO: 172260 - protein, 315 aa, unidentified
MDRESGTGTFVGIDVAKERLDVFVRPSDEAFVVPRDDKGLAELVERLGRYDIALVVLEATGGLQLRVAAVLAEAGLPVAVVNPRQVRDFARASGRLAKTDRLDAEANARFGEALRPAPRPLGDAEQRRLAALVARRRQLIEMRVAEKNRRQRLAEAHLRRKLDEHLAWLAKAIAEIDQDLDGAVRDSPLWRVEEDLLQSVPGVGPVLSRTLLAELPELGRLNRRQIAALVGVAPFNRDSGTLRGRRSIWGGRAQVRASLYMATLAATRANPAIAATYQRLIKAGKPAKVALTACMRKLLTILNAICRDQKPWKTA

SEQ ID NO: 172261 - protein, 339 aa, unidentified
MKKFLFIGIDFSKSKFDVSVLEDIDQKNYKQAVFENTKQGYKDCLKWLPKQSKIKRENWLFCGEHTGFYSRGLTHFLVKKNLFIWLENPLQIKASSGIKRAKTDSVDACSIANYACRYQDKAVAYKLADKEIDTLQLLISYRKRLLKNKVALEVAAKEMRSVIKPDATARFIYQNSTKEVKRIKRQISDIEQKMHKTIMESKLKENYLLVTSIKGIGMQTAVEMMIHTNNFTAFENARQLASYCGCAPFANQSGTIDKGNRISHLANKELKVLLTQCAVSAIQYNKELAAYFQRKVAKGKPKRLVINNVRNKLIQRICAVVKNKIPYQENYLNQFELCA

SEQ ID NO: 172262 - protein, 463 aa, unidentified
MTQRKEKPDLKTIVPVDNLRQINLHAAGLDIGAEEIYACVPADRDEQFVRVFLTFTADLHALADWLTSCGIKSVAMESTGVYWIPVYEILEAKGFEVCLVNARHLKNVAQKKTDVLDCQWLQQLHTYGLLHGSFRPAEEICALRALARHRENLVRYRSAHIQHMQKALQMMNLRLTGVVSDITGLTGLRIIRTILAGEHDPHRLASLRDPKCAKCEEEIARALQGNYKAEHLFVLKQALAQYDFYDGQIRECDAEMEKLYASFTPTEKDDQGESSPPAAKRHKPRKNEAHFDLATALYRTVGVDLTAIPGIDALTAQKVISEIGLDMSPWPTVKHFTSWLGLAPNTKKSGGKVLSSHTNKTQNRANTALRIAAQTLSHSHSALGGFYRRMRAKVGAAQANVATAHKLARIIYHLLKYRKAYADPGEDYYEQRYQEHAIRNLKRKAAAFGLELVPAAPQPSLVS

SEQ ID NO: 172263 - protein, 387 aa, unidentified
MYFVGIDVSKFKHDCAIIDELGNVITPSWSFQNDYEGFSFLRELLDALDGKKKIGLEATGHYGQNLKLFLENNSFSFMEFNPLLINRFVRSKSLRKTKTDSIDALMIAQYLMTVEYKPYPPSFYTLEKLKSLTRFRDSLIRQQSRQLVELTNILDKVFPEFKPFFKGRFSATALYILSHYASPEKISNMNSKSYESLRRLSRGKFSMLDFVELKTLARNTVGSTSDYLLQEMEIIIDIYSQLQSKVEEVEQQINECVLGLDPPILTVPGIGALSAAVILSEFGDLSKFNSPSKLLSFAGLEPGYFQSGTSENTGKMVKHGSSHLRYAIMNCAQTIVNNEPTFAAYYAKKRAEGKDHRVALTHVAKKLLRVIYALQTKEISYNPDLIR

SEQ ID NO: 172264 - protein, 419 aa, unidentified
MFHLGIDWASMSHAVCITDQDGAVVKQCKIDDDYDGYLTLLAVLRNLPAETREILFSIEDKNLKLVDFLLSHSFSGFFVPPASMESYRKRYSQNHAKSDASDAFILSDLLRTDRANLKPIVKDSAFIRELSALLKDRDAFVKDCSRLTLRLISTLKEYYPEFLKLFKDPARDTALDFLLKFPTFQDASKLSFPRLYKFCTKRHFCQTESIKKIFSILKAKPTPVDEVVMKTKSIKAVATAKQIKELLVVISSYEEKISALFNSHPDAKIFSSLPRSGTITAAGLLTIFGDNKDKFASSDEVQMAVGTAPVTIQSGKFRIVKFRHGCNHFHRSVLHYFSMNSTRESIWAKNYLQTKLNQGKSFSCALRCLGYRWNRIIFSMWKNNTVYDENVLLANFAKQSIAADLSKNLSRGAGFPATA

SEQ ID NO: 172265 - protein, 357 aa, unidentified
MDTETVWVGLDLGLTRTHVCVVDHVGVPLHELDCETKLQELRSALSDYPADHIGMIAVEAAGFTGIIRKLRGAGLPVVMFESRKASKFLALRRSKTDASDARGLADLGRLGRNTVSQVYLKSPECERLRRLLSMRRRLVKMLIAGEGALRTLLNVRSFKQSRRPESLRRQVEPLLAQLRIEEDFDPSSDVEPLLEMCERLRVHLKKLNAELESQAKASEVCRLLMEVPGVGPLCSLHFYCAVEDPNRFRRASDIGAYLGLVPRRYQSGEVSRTLGITKTGNKFARTHLVTAATTFGRHAPDCALKDWYIALRARLGSKRARVAMARKLAVILITMWKNGARFRIEPSQQLPKTESVI

SEQ ID NO: 172266 - protein, 339 aa, unidentified
MKINVLGIDLGKSSFHLFGVDEHGQVVLRQKMTRGKLREFMVNLPPCLVGMEACGGAHYWARVFEGHGHQVRLMSPQFVKPYVKSNKNDFLDAEAICEAVTRPTMRFVPIKRVEQQDIQSLHRARELAISHRNAQANQRRGLLLEYGLVVPQGIGKLRQRLPEILEDAENGLSDATRSLLAALGEELVRLDARVGEFDPQIKALSQGHEVCRRLMSIPGIGPLIATALLAAVGDASVFKSGREMAAWLGIVPRQRTTGGRAVLLGISKRGDTYLRTLLIHGARAVLRVAHKRDDKRSRWVAALQGRRGPNVAAVALANKNVRTAWALLTRGTTFEVQAA

SEQ ID NO: 172267 - protein, 462 aa, unidentified
MANEDQKGRPECSKAIDEGFPVLRGNVAGIDVGSEEHWVCAPARTGRGREVAVFAATTPGVEQLAAWLKDRDVTSVALESTGVYWIVPHEMLEAHSFDVVLVDSRWLGRVPGRKKTDRRDCEWIQRLHSCGLLRGAYRPVEQVCMLRTLVRDRGTLIAERADWVRRMQKTLDQMNVRVHRAVANVDGATGMAILRAIVAGERDPHQLATLRDPRCRKSEAQIAEQLTGHWRDDHLFSLRQALKMYDALSDTIAAYEREILRYLETMTSVDRRDDQAPPPTSPTKAQAIKSRGQDPLRHALYRMSGVDLTTIDAVGVETVSVVLSEYGPNLSQFPTEKQFVSHVGLAPHAPRSGGKVVKKKKKPGSASARVGAALRMAATSLRHSQTALGAYYRQVARRAGADVAVFATARKLAQHIYRVLRWGQPYVDEGAAAYDKRYQLARAKRLAATAKDLGYKLIPVEA

SEQ ID NO: 172268 - protein, 325 aa, unidentified
MFYLGVDVSKKNLDCMLLDSTTGKVKSKSIPNTNAGFRQLLEWLAKNKAPNANVVMEPTGVYHEPAALALTDAGLMLSLVNPAQLRQFAQGLGVKTKTDKADSTVLARYGATQQPRAWQPPSKSARRLKALLARRDAVADDLQRERNRQEAIDFGQSPEEVKKSIAQSIAFLDAELQRLEQMIEEHIDSDPDLRNKKDLLETVPGVGERVSSNLTALFAAKTFNSAEQLAAYLGLVPVQWESGSSVRGRPRMSKAGPAQLRKLLYMPAVVARRWNPHIKAFGDRLLAKGKTKMAVIGACMRKLAHLCFGVVHTGKPYDPNYALQA

SEQ ID NO: 172269 - protein, 386 aa, unidentified
MLQPKNDLRKSLIPFEQQKTVLAVVELSLRTWLVGGIVPGVHREPLKKLAADENALLRLVQRWRDEAVKAGHTITRIVVTYEAGRDGFWLARWLRRHGIEVHVIHPTSVAVSREHRRAKSDRLDIGQLKRSSLGWLRGEEAHCTMVAIPTLEEEDAKRPHREREHLVGRCTSITNRLKATLVRLGVRGFNPTLRKAPERLGELRTPEGELIPPNTVAELQRDMAHLRFLKDHIKQIEDAREEELKQAPQEPINSKVLHLRRVRSIGVETADMLVHEVFWRELRDQRAVSRYAGLTGSPDESGARRREKGLSKAGNARVRRGMIQLAWRFRNHQKHSALAQWFEARVTAGKRRKTMIVALARKLLIALWRFVTAGEVPEGVVLRPAL

SEQ ID NO: 172270 - protein, 400 aa, unidentified
MRVVGLDIHRSFAQAAIFEDGRVIQEARVELVRERFLKFARSLRNDDEVVVETTGNSAAIERLLRPYVGRVVVANSRLVKAIAWARVKTDKVDAVTLAKLHAGGLLPEVWVADDTTVARRRQIAERMGVLAQLVRTKGRIQATLHANLIPKYEGHLFGPDGRRWLAALPLADDERRLLARYLDELERVSMQLAELDKILAQQSLDDPRARRLMTIPGVSSVVASTILASIGEIGRFPTPEKLSSYFGLTPRIRQSGDHPARHGRITKQGNRDARRMLVEAAWSAKTAPGPLRAFFTRVQNKRGAPTAAVATARKLAVLIWHVLSTDQDYAYARPAFTAMKLRKVALKAGAPRAYGKAGPGRDYWIREIREREALYVERAERAYERMVAAWQATPPKPVGK

SEQ ID NO: 172271 - protein, 371 aa, unidentified
MTSIIYIGMDVHKENYTLCCYSFESDKLEYRQTLPSDYRMVLKYLERIRRQWGDEVELVCGYEAGSLGYSLYHQLTSHGVNCVILAPTTMGITNNNGIKNDKRDAGNIAKCLAFGTYSAVYVPTAEDETVKEYIRMRDSQKKALKAVKQQILALVLRQGKRFDLGKNYWTLKHVGWLRTLDLGGLLQEALEEYLITYDYLTNKIERLDMRIEELAGTEHYQEKVKKLSCLIGVKTHTALSVIVEIGDFKRFAKADKLAGYLGLVPGEDSSGGRQRNTGITKAGNSHVRRLLVEAAQSYTRGAVGHKSQALKKRQMCNTPEVIAYADKANERLRRKFYRMVLKNKTQRNVAATAIARELACFMWGMMTDNAA

SEQ ID NO: 172272 - protein, 362 aa, unidentified
MVYLGVDLHRKVSHVVALDEAGETLLSRRFEHSPDAFRRVFGELEPEPVSVAFEATYGWGWFADLLADAGIEAHMAHPLATKAIGAGRVKNDAVDAATLAHLLRTNLLPEAWIAPPEVRELRRLVRMRASLVRIRSRLKCQVHALCADAGIPVPASDLFGRKGREHLATLTLPPISASRLAAHLRLIDDLAREIIAADREIVVAFKGDDRVRRLLPIPGIGILNAATIVAEVWDVGRFPSADHLASWAGLTPTERSSADHVRRGHISKQGSRWLRWAMVEAATKIGSSRSAKLHRFADPIAERRGTKIARVALARRILVLAFYALRDERGCRDYPPLPRPSRRPVTARSLPVMASPDGRRSD

SEQ ID NO: 172273 - protein, 318 aa, unidentified
MAQNRTIVGIDVAKDKVDVALRSAGVEATFANTPSGRRQLVKWVKQHQVGKAVLEASGGYERSWARLLQDAGLEVWIVDPKRVRRFAQSAGQLAKTDRIDARMIAWFAETFADGIGRQPDAAREELDRLVSARTDLMDLRARFAHLGEDDQPDEVRRCYRKIEKTMTEQVSVLEAAIEAAIEADARFAERARLIRSVPNMGKISAAGVVAFLPELGLVSNKQACALVGVAPYEDSSGKHHGRRFIQGGRRKLRNLLYLPIVGAATRGNLVLKAYYKRLREKGKEPKVALIACMRKLIVILNTMVARGQTWDPQKHAIA

SEQ ID NO: 172274 - protein, 428 aa, unidentified
MKQDDLIRVEQFRQLRKQIRGSENYLIVGIDVAKHKHHAFFGTATGKTLFKRLVFDNGREGFDRLLIQTEAIKVQHGLEEAVFGLEPTANYHKPLGEFLIKRGHSVGLISSVAVKRNRELLDGRWDKHDTKDAANVADLISQGKFLFYELPCQELRDLRSLLSLKRKLKKLEHGLRIRIRNHLVAQYFPELDRLYGQRESENLAIVRWCLNPAVIGALGYEKFFQLVTTRDRGISQHKRLRAIWEKAAASIGCDVGEAVEFEAEVLVETLKGLREAIKTTDYRIKNIGCSLPEFNYLLTIPGFGPDVSAKVIAAIGNPFRFYSAKQVIKLAGFDLSADRSGNRSDAAIPVISKRGKTYLRYALYQAAFIASIRDRHFIVYYTNTLRGRERERGIRTKMRVKLAAKMLVIAWTLMKKKEPFDPDYLNIG

SEQ ID NO: 172275 - protein, 442 aa, unidentified
MEESREDHDDGTVARVAVIDIAEASGMVCLRVPHDPIEGRRVQRVWTVASTTNAIPELGDRLVCQGVERVVMEATGSYRRPFFYVPETRGLDCRLVNARDVKNVPDRPKTDKLDAVRPAKLAERGMVRASFVPPKAVRQLRDPTRTRAVFARERTRHRHRVDKALQDAQIKLSGVVSDLFGMSGRAMLDAMVAGERNPRALAGLAKGSPVKKKPALVEGLTGQFEDHHARLLRVLPGTVDHLTAQIRELDRLIAHTPEEITTPHDDSPAADPSVGGVSARAPAEKPDAVPGIGPATAQIILAGIGADMSRFPTPEHLVSWAKLCPRTIQSGARNTAGPAGQGNPRLKGALGEAANAAARTDTFLGARYRRIVKRRGHAKALVAVARSILVVTWHLINEPNISYRELGSDWHQRHLNPARKTRDLVRRLQALGHQVTLEPTAA

SEQ ID NO: 172276 - protein, 349 aa, unidentified
MIWIGVDAHKKLHQAFALGESGPRAEHTIANTPEQWAALLTWARQWPERVWAIEGAWHLGRGLAQYLAEQGERVHEVNGRWTARRRRGMRRPGKSDRLDARSVAALLREEADTLPRVLPETDPAATVQLWSRQQAELTKDLTRVVNRLHNLLLVCDPEYQRKLPELTTKAGIDATLVYSAPGVGPLARERERMVRQNAAQLALLWEQDRELRSKLERASQAHFSPLRRIEGIGPLIACSLVAELGRPRPGFGERQLAAEAGLCPLEASSAGGIRHRLNRLGNRRLNMLFHQIVLTQARIYPPAKTYLLRRQVEGRTAREARRALKRLVVRRVHRAWRECFDIDIGAVAA

SEQ ID NO: 172277 - protein, 319 aa, unidentified
MAQNDLVVAGIDVAKDKVDVCVRSLSLKRTFASTAEGRRELTSWLRRHKVGKAVMEASGGYEREWAKALRAAKIEVRIVDPKRVRSFAQSAGRLAKNDTIDAEMIAWFAETFDEARGQAYDAAREQLHQMVNARQALKDMQAKLENQGEHALPATVQRIHARIIKTIAVELVKIEAAISAMVQATPRFTELAEIIESVPGIGRTTSAALIAAMPELGQANNKIVAALLGVAPYDDDSGRRRGERHIKGGRRRTRNVFYMACLGAATQHNPVLKAFYNRLVAKGKEKKVALIACMRKLISILNIMIERRQKWDANRYAVS

SEQ ID NO: 172278 - protein, 414 aa, unidentified
MQDLLEVCCGLDVHKETIVACLLKGSVNDEKPEKTIRTFSTLLKDLEELKTWLETENCHHVAMESTGIYWQPVYNVLESAFDGNISIIVANAKHMKNVPGKKTDMKDAEWIATLLRAGLLSGSFIPPQEIRELRNLTRYRKSIIEEISSQKNRIEKHLQSCGFKLSNFLTDIFGVSGRAIIDHIAEHGSITAKEVENYVRGRARNKIEDIKLSINGRMNKHQREFLKLLLKHLDETYKHLYEIEESINAEIEKYKRQIEQLDGIPGIDVTAAAAIIAEIGTDMDKFKTAEHICSWAGLSPGNNESAGKKKSTRVTKGNTYIKRILCEVAWSITRIRDSYLATWYWKVKQRRGTKKAVVALARKILVIIYTMLKNNTDYDERIFDEVRKKQEIIRVKRIINEARKLGLEVTVSQI

SEQ ID NO: 172279 - protein, 348 aa, unidentified
MAMTMLEARRVTGGVDTHLDVHVAAALDALGGLLGTESFEVNPAGYQSLLSWLESFGAVGKVGVEGTGSYGAGLARFLRQHGVSLIEVDRPNRAERRRSGKSDPLDAVEAARAALSGRAKSLPKSRDGAVEAIRVLLVAKRSARQARVKAVTQVRHLVITAPEELRRRMKGLSVSALVEEGAKLRPSRSTDPVVAATKAAISSLAHRIQALESELDELAEMINALLVATAPDLLAMFGVGPDTAAALLVCAGDNPERLRSEASFAHLCGAAPIPASSGKSIGRYRLDSGGDRQANSALWRIVMVRIAHDPETTAYFERRVKEGRTKRDVIRILKRYVAREVYHHLPRG

SEQ ID NO: 172280 - protein, 407 aa, unidentified
MAPELPVARKMGWLVLGLRPAGDRGVRSDSKEVWKQGPKSECPSRANGRGSTETEVRALMKVLIGVDPHKASVAVAAVDEAKGELLERASFLQNRAGLRALERWAKRFPERRWAVENAGGLGRHLAGRLAAAGESVVDVPPKLSARVRLLSSGNARKNDGLDALATALAASRNGRLAAVDPEVGSEVLRLLSERREDLVAERTRALNRLHGLLRDLVPGGVAGTLSAPRAARILRGLLRPQEGASARLRRRLASEVLHDVRTLDRKIADLNGRIEAEVGASGTTLTEIFGIGPILAARIIGTVGNVARFPTKAHFASYAGTAPVEASSGEVVRHRLSLAGNRKLNYAMHMVAVCQARSDARGGRYYRKKIAEGKSRKEALRCLKRRVSDAVFKSLVADSQAPSRSAA

SEQ ID NO: 172281 - protein, 420 aa, unidentified
MGKRRYGSVEFKRVDWSGLAEGLGGGRAVLAVDVAKQDFVAAVLGPDAGVRVTFNWQHPGQRAEVLGCLGQLAREVVLEVVLEPSGTYGDALIEQLGGWGIAVYRVSPKRVHDAAEGYDGVPSLHDAKAAELIGRLHLQGISRLWEAPSEERRELNAWLTRLGVSKARHQAGLNRLEAHLSRHWPEVLSLLELGSATLNELVVAYGSPAAVAADLVQAGALMRRVGRAGLGEETIAAVLTSARTSIGLPCVAGEGALLQWLAADSNATRRELRRIEQDIERRVAASAGPARLAGVIGKVSAAVLVAALGEPQAYPDAGSYTKAMGLNLKEHSSGKHKGQIKITKRGPAVARFYLYYAALRLIARDPEVRRWYDRHSARPGALKGKTIVALMRKLAQALWHVGRGATFEVKRLFAPPPLPA

SEQ ID NO: 172282 - protein, 312 aa, unidentified
MTSEAFVGIDVSKRWLEVRVHGAAESKKIGNDPDGFTSLVGEMKAVQPQLIVFEATGGYESRAVKALSEAGFAVAVANPTRVRRFAEALGILAKTDKIDAQVIAHFASVVQPAANGRQTPLEEQLAAFVERRRQLLVELVAEKNRLSTCSACVREGIEEHIAWIEERVDDLEAKIHACILQKADWRARAEIIDSAPGVGPVTASTLVAELPELGQLSHKKIAALVGVAPFNKDSGPKRGKRRIFGGRSGVRRTLFMATLSATKHNPVIRAFYETLLKRGKEKKVALVACMRKLLVFINAMVRKGETWRFSPA

SEQ ID NO: 172283 - protein, 377 aa, unidentified
MQKPSTIDIDPVIYLAIELSASTWLVASKIPTSEKTGLHRMEAGDSQVLLTLIADLRKKVAAKLGVEASVMSCFEAGRDGFWLHRLLSEHGVINHVVEPTSILVNRRARRAKTDRLDAQGLLRILAAHAKGDHDVCSVVRVPTIEEEDAKRQHREREHLVQERVRIENRIAALLTTQGIRKRPSLRSWEKDMEEMRTGDGRPIPSLLRAEVNRLRRRLVMTLEMIRELEAEREQALQTQDDMASRMIRALCRIRGIGDNFAAVLTREVFYRPFQNRRQIASYLGLTPTPFQSGGMDRDRRISRAGNARARKTLIQLAWLWLRYQPDSSLACWFRERVGNLQGRTRRIAIVAMARKLLIAIWRYATHGIVPEGAQISI

SEQ ID NO: 172284 - protein, 1018 aa, unidentified
MIPIKLRLSGFTSYREPVELDFTGFDLACISGANGAGKSSLLDAITWAVFGKARGRDEMIIHSRKDVAEVILDFDYEDRRYRVQRSKERNKSVQLNFYIQDDQGRWVTQTESTLRGTEAAITKLLHLDYETFVNASFFLQGKADSFAQQRPADRKRILINILGLEIWEEYRTRAVERRKQAEGDLRFLDAQLKEIDEELSQEESRKIRLKELEKDLHHLSEARQSQEKLLEGLRITVASFEEQKRMVDLQGEQAANARKRADQTGDLLAERKSELEREMKLVDEAEEIQAAYTAWQKSVSDLEHWNEVGRSFHEVEKKRRIPMEVITTERGRLEGECQALLKQEKQALQIEKQLPDKIVHLERLQQEYQTVQDRLRNRGTLEEQITFTKEQIAGWNVENARLKQDMEELKKRMDQLEEVTGAECPLCGQPLDASARVRLLGELQADGTRMGDCYRENQLLIQEAQKTIQTLEEALDSLRAAEVELTRLEKQRAEVAAQKEQLELSLSSWQESGAVQLAEVTHRLGTEDYAADARADLAVVDAELKSLGYDATAHDMVRREEQAGRASQERMRQLETARARMEPLTREIAGLENQLADVEKETAALVSIYETARKKYEEESANLPDLPAAERDLRLLREQENQARDAVGGARNEVEVLTQVRTNKVNLSQDRTQVAERIGRLKQLEVAFGKNGIPALFIDEAMHDLEEQGYSIELAVETTGNARHFKNRMESECFAVKVVNTNRFKVITMSTKKTDTNDAATLAFYLMKEMLPEAHICSQTSEEIRRLLKTRSVLVQSMVKIKNQIHGMMLGYGIETKSAQLQSKKKRQELINDLADHDYSAYTASSLKVMLKILDDLSSEIKEVEKHLKEMVADNEDVELLMTVPGIGINTATTIAAYTEELDRFEGNYKKFAAYVGIVPSVRNSNESKHYGRITKHGPQELRTAFVQAALGMIRLTKVTSDWRIIKDYQRRKGEKGSGRAIIALARKITRIVFVMLSKREGFNPELMCCEETLQQTA

SEQ ID NO: 172285 - protein, 412 aa, unidentified
MEGETVIAGVDTHKDVHVLCLLDGLGRKIWSGSFGADPEGYDRLAEVIGDPGSCMVVGVEGTASYGAGLTRRLVELGYNVVEVLRPKRDKARPGEGKSDPLDAERAARKAASGRGCSVPKSQDGWVEAVRQLYVARRLAVATSTSCVACAKSMLTTAPGALRERFRGRERPKDLMPLLARGRKAGDALEESVLASLRSVAAVWKEARSQVESLDERIRALLEANAPALLGVEGCGTTTAAALVVAAGDNPGRLKGEAAFSMMCGASPIPASSGKTDRHRLNRGGNRQANWALYEIAIKRMAYDERTRRYVARRTSEGKSRREAVRCLKRYIAREVYHVLMDPNPDGAAPEGPELAKMRKAMRVAQKKAAAELGLSAATLGHLERGKRRSTKLERRYYELLCELERALPQTAS

SEQ ID NO: 172286 - protein, 361 aa, unidentified
MDDGNKGRPKMTAGLDLGDRYSHLCLIDTRSGEVVEEGRLRTSPEAMRRRFASQERPMRIAIETGTHSPWISRLLEECGHEVLVANARKLRLIYANKRKTDEVDAENLARLARLDPKLLYPIRHRGEGAQAHMAMIRSRQALIGSRTQLVNHVRGAVKSFGARLPKCPARSFHKRVAEHIPEALRPALGPILEQIGSLTEGIKDYDRKLQEISEEHYPETALLRQVEGVGPLTALAFVLTVEDPYRFEKSRSVGAYLGLVPARDQSGDRDPQKRISKEGDEMLRRLLVSGAHYVLGPFGSDSDLRRHGEKIASRGGKNAKKRAVVAVARKLSVLLHSLWVSGEVYDPLRNTHRRERREEAA

SEQ ID NO: 172287 - protein, 230 aa, unidentified
MVYRGIDISKSSFVAAYPSTNGNPTKTFPNTTAGMRELIGTLAVAEHHCVMEATSNYGCCCTCYIRTVLPSVLPPPKKQIKHFSRMMMPVTKTDEKDAYMIAMYGEKMNPPIYKMPSQATIRILTTEGFTYFDNAKQLSRFIGICPTYQQSRTSVNIREHINRNDDERLRSLLYIAFWTALRYNSRECYIRLKANEKPFKVALIAVTNKLVRPVLTITTINSIYRWICPG

SEQ ID NO: 172288 - protein, 330 aa, unidentified
MYLVKPRTAERVMNSNNKVESTEPVSYVSLDVSKARLDYAIAGQKCRKVPNTAAGIATLITAIQPLPGVRVVCEATGGYERRLLEMMHQARVPVCRLQPGRVRHFAQAEGTLAKTDRIDVGVIYRYACSMHPRVEKPPLPEVIALRELLDYRRQLVDQVTETTNRLETAGTTLQALLVTQREQLNTALAKADKLVREHLKAHPALQAKAERMQQLQGVGPVLATTLLAYLPELGEEDDKRIAALVGVAPHAHDSGETSRPRHARGGRVEVRNVLYMAAVSASQHNPVLSVFYQRLIAAGKPANVCLLAVMRKMIVVLNRMLKDPHFTLVS

SEQ ID NO: 172289 - protein, 351 aa, unidentified
MEQHNTMTIGIDLGDRFSFLAVLNDAGEVVEEQRLVTHTDSFERTFAAIPAARIVIEASTHSRWVSSLLAELGHEVLVANPRRLALIYGQDRKNDKRDAELLARVGRLDPELLCPVWHRSNQAHADLSLVRMRNHLVELRTKLISSVRGMVKSHGQRLPACSTETFHDKVAEHIPELLKAVAASALRTLAQLSEEVRALDRQIESLGRTRYPETTALRQVAGVGPVTALTFVLTLERPERFRHSREVGAYLGLVPRQDQSGDTDKQLRITKAGNVYLRKLLVQCAHYVLGAFGPDTDLRRWGLALAERGGRNAKKRAIVAVARRLAVLLHRLWRSGQVYVPLGYPSVARAA

SEQ ID NO: 172290 - protein, 350 aa, unidentified
MQYLGIDWGTRRAAWCSLTRAGELQEGMISADEDGLARLVARLGPEVYGCIEMMSGAAWVRDRLAECGWGIEIADARKVKAIAPLACKTDKVDARVLADLARRDLVPALWVPSLDDRAIRERLRRRAHLIRLRTSAINRTFGIQTQFGLRRGITVLRKPGAVDELAEDGMPEVWLQSIRTLLGVIDDLDRQLAPLERELRPLARRDDRAKLLMTIPGVAELLALTLAAEIGDISRFPSARKLVGYAGLGPRIKQSGQSSHTGRLSKAGPATLRWAAVEASQHAWRATNPWHHLYSDIKRRHGKANPAKSAVARKVLIAAWHVLSLDQPFKPSASSATESVPASSPIRLAA

SEQ ID NO: 172291 - protein, 356 aa, unidentified
MTSVTDPRDLRQVVDVVIGVDTHVHTHSAAVVDARTGGVLDEITVEATADGYVQLVEFADQHAALRAWAIEGTGGHGAGLTRHLERREEVVIELDRPERAKRRNGAKSDPLDAIRTAREALSRAKLGTPRGGGDRQALSVLLATRRSAVNAATDAQRQLFSLVIAAPEPIRERFRGQKLPAMIKTAASMSLNPAWDVETTTTVTILRSLAKRARSLSEEAAEHEKAIRAIVRSWRPDLLAQPGVGPIVAATVLCAWSHSGRIHSEAAFAMLAGAAPIPANSGQVTTRHRLNRYGDRQLNRALHTIALSRIRYDEATRRYVARRTSEGKTSREIKRCLKRYIARDLYRLLEHAPIRA

SEQ ID NO: 172292 - protein, 340 aa, unidentified
MSSVSRFVGLDYHQDSVQVCVLDSEGELLSNGSVANDAATIARAATRHGRPKRMAIEACCGAANLAEELRTECRLPVQLGHPGYVARMKRSPDKTDWGDAHLLADLVRVNYLPAVWLAPEPIRQLRRLVRYRTQLVRRRTEVKLRTRAVLRENRIRYSESRPWTKAWLAWLTQTSQLSESDRWLMDEHLAELKSLNERIEAVEKKLVAITADDAVVTRLRRFPGVGLVTAVTLRAEVGCFERFRTGKELARFCGVTPRNASSGARQADAGLIRAGNPDLRKVLVELAHRMMWQTDGPWAKLAQRMLSRGKPRNVVVAAVANRWVRWLHHELRREEATELN

SEQ ID NO: 172293 - protein, 320 aa, unidentified
MSEPYYVGIDVSIDRLDVAIRPGGRGFCVTNDAAGWAELVARLPQGAIAAIGLEPSGGYERGIVRVLLAAGFSVRRINPNKLRQFARAAGALAKNDRIDARLIADYVAVIPTRVVERNPALERLAETVTMRRQLCDEHIAVESQASHLEDALLQRIAKRRLTRIKADIVLLDKRLAELVAAQPDLVQRFRLLCSMPGVGATLAYTLLALLPELGQIGRKQIAALVGLAPYAFDSGRFRGQRHIYGGRTAVRNTLYMPALAAFRFNPALRTFHHRLVAAGKKPKVAIVAVMRKMLTTLNAMLRDGNSWTDGHTGRHTVLAI

SEQ ID NO: 172294 - protein, 312 aa, unidentified
MTATFVGIDVSKDRLDVFIRPNNEPMQVGNDDESIDRLVQRIKPYRPALIVMEATGAYHRLLLARLVAANLPAIAVNPRQARDFAKAMGRLAKTDAIDAATLADFADKVRPEIRPVPEHTTEQLEALCTRRRQLVTMMAAEKNRVQVGPAGIRVRIRKHIEWLEQQILELEEDLNQQIRSTTAWREKDDLLRSFKGIGPTTSHTLLAALPELGFLNRCQIAALVGVAPFSRDSGKYRGQRHIQGGRRDVRCVLYMATLTAIRWNPIIRAFHLRLIAAGKAKKVAITACMRKLLTIVNAMLRNRTSWSPDFGS

SEQ ID NO: 172295 - protein, 394 aa, unidentified
MEVMFDRVAGLDVGKDSVTVCVRTPGPRGGRRSETRTFKTMFGSLRVMRDWLLEAGVSIAAMESTSTYWKPPFYCLEEVMVVWLLNAAHMKAVPGRKSDVRDAEWIAQLLEHGLLAPSFVPPPEIRRLRMLTRYRVQLMGDRRRDIVRLELMLEDASIKLSSVASSLKTVSARAMLTAMINGESDPLRLADLAKGRMRRKIPDLAQALTGHFDANHARLARSMLRRLDLVEQALAELDAVIAEACQPWRHQIELLQTIPGVGAKVAETIVAETGADMTRFPTAAHLAAWAGVAPAMNESAGRESPAGKRHGNKWLTAMLVEAAGSVGRMHGKNYLAAQHARLTRRRGMGRAQVAVAHSILVTSYWMLKPDEAHTRRLIAQLERLGHTVIIDPAA

SEQ ID NO: 172296 - protein, 346 aa, unidentified
MEYGAIDLHLRRSQFRIVREDGTIVKEGKFDTTRAELTRIFGGRERLCILLESSTDSEWVAQQLETFGHDVIVADPNYAPMYGRRVRKVKTDGRDTAALTDACRLGIFRRAHRVSAAQRARRQQLRIRRQLVRMRSGSVSLLRAIVRQEGWRLPSGTAEAIEARLGRLALPTALTAILEPLRTWLGELNRLIATADEEVAQTAKREAIATQLMTAPGVGPVVALTFQAVLDDAARFGGDAGRASAFLGLVPSEDSSADRRHTGHITKTGPTDLRALLVQASWVIWRGRSAEGAALRRWAHALADRRGRRIAVVALARRLSRILFAMWRDHTDFRGEARSAARPATA

SEQ ID NO: 172297 - protein, 367 aa, unidentified
MKKKNYLRLCVGIDVSNLRIDVAISAIDEQILPHVIATTHFDNNPSGHARLEEWIERKRIKDVPLQIVLEATGVYHERLAYHLVNVGYELAIVLPNRIKNYCNSTNVRSVTDKISAKQIAEFGLLKKPKNWQKPQPIIRNLKLLTREKNALMEEKTAISNQLHAYDKRFNEDKSAIRRSLNRIQMIDDQIKEIEKEIKAIIKNKDNEWLNEKIKKICTVPGLGFSTVVSVVAETDGFNLFRSSRQLVCYSGYDIVFKESGTSVKKKARISHRGNKYIRKALFFPALTAKSCNPKMTAFFDRLYERQQVKMQSYTAIQRKLLVLIYTLWKKDEVYNPNFVWTGKAETGSGGNQPVRNSLSDWNGPREG

SEQ ID NO: 172298 - protein, 423 aa, unidentified
MEVIHKRVAGLDVHKATVVACVRLMANRKVSRECRTFATTTEGLLALLAWLTECRCTHVAMEATGVYWTPVWKILSEGASELIVANAAHIKQVPGRKTDMNDAMWIADLLACGLIRASFVPEEEIQELRSLMRTRKQVVREQTRQVQRIQKTLAEANIRLDTVISDIVGVSGRRMIEAMIAGVRNPHQLAALAHRGIKASPKELYDALHGRLTDHHRFLLQLHLAQWDAANASIQHIDREVDGRIERMDAAEEDGQVPFRQLILLLCSIPGVSVLSATTILAEIGRDMSRFPTAGHLVAWAGLCPGQNESAGKRKSSRLRKGAPWLKTMLVQCAWAAKRQKNSYYAAQFHRLKGRRGPQKAICAVAASILTAVYHMLNNGTFHQDLGADYFDRRSPEAKARRLVAQLSRLGFEVQLQPLAQAA

SEQ ID NO: 172299 - protein, 399 aa, unidentified
MNRNRTVAGLDVHKDSIYLCIMGHDEAIIFEKTYGVLTPDLRQMCQDMVERGVTEAAMESTAVYWVPVWNELCESMELKLVNPYFIKQLPGRKSDVKDAQWIAECLLKNLIRGSFVPEPIVQDMRKLNRRIFDLQEDITYCTNKLDAALHRCGFRLSNYVSKITCKSYREAVASIAEGKTDPETILKCIHGRVINKHGRDTLLAAVTASFSETDITVIRQYWELIAVYLRQSEECQSQLTALCESNFSTEYKRLQTIPGVKERAATAIIAETGVDMKMFATAAALVGWCGLKPRNDVSNGRYKSRKITHGNKYLRHILIEISWTASRTRNCFFSNFSYIQVTQKHKSKMKIQVAIARKILVAVWHMLSKEEDFIDIYLRRLEQQRLMEQKLKSFESKMA

SEQ ID NO: 172300 - protein, 357 aa, unidentified
MVMIGTDSHKRTHTFVAIDEIGRRLGVTTVRANSDGHLALLQWAAQFAGQDAAGVRFAVEDCRHLTRRLESDLLRAGQRVIRVPVRLMARTRRSAREPGKSDPIDAEAVAVAALRYRDLPVAELEGPAREVKLLSDHRRDLVKQRTRIAAQVRWHLHELDPDLQVPSRGLRHQHVLRELLTQVDDFEGIVARLTRGLLERCAELNSQIAAQERELRVLVRALAPSLLAIPGCGVLSAAVIVGETAGVHRFRTKDAFARFTGTAPVPVWSGSSLGKVRLNRGGNRSMNWALHMIAVTQARGVGPGRDYLDKQHQRGKDTAAALRLLRRRLSDVAFTALRADQLAAIRDQEPSLLAQAA

SEQ ID NO: 172301 - protein, 375 aa, unidentified
MKEKVRFLGLDVHAETITVAIAEPNGEVRNLGTIPNRGESVRKLIRKLGPADPLRACYEAGPTGYVLYWQLTGLGVECAVVAPTLVPVKAGDRVKTDRRDALKLARCHRAGDLTAVWVPDEGTEALRDLVRAREAAKQDQLRARHRLSKFLLRTGQRPASGIKAWTQRYMAWVRQLVYAQPAQAAALLDYVHEVEHMAARVLRLEQSISEAVKLASPRMQEVVRALQALRGIAEISAVTIVSELGQISRFESARQLMGYSGAVPGENSSGQSVRRGPITKTGNAHLRRIAVEAAWSYRLRPGVGPKLRQRQQGVPDEIKEIAWKAQIRLSKRYARLAAAGKDQRKIVTAVARELLGFIWAIGVRTEAAAQQPMAA

SEQ ID NO: 172302 - protein, 266 aa, unidentified
MVHITTITAGIDTSKAKLDIAIHGQSEVCPVENNLLGWQKLAVRMREAEVQRIGIEATGGYERGVTRHLEAQGFTVTVLQPLQVKAFARLHLKRAKNDQLDAILIAACTHFQDASSKMAPDARFDELSDHLTYIEQIEEVMVRLQTRMEHITDKRRRSAVKADLARLDTRRGSELLLLTKNLRLHVDLSRRLDLVLSVRGIGLCTALAIVVRMHELGQVSREQAAPLAGLAPFVRQSGQHQGETHIGGGRERLRRSLYAAALAGAF

SEQ ID NO: 172303 - protein, 345 aa, unidentified
MALYVGLDVSLRMTSICVVEADGSSVWEGKAESEPVPLVKVLSPWRDKIALVGIEACPLSEWLYGALVESGFQIICIETRHAQRFLSSRPNKTDRSDARGIAEMMRLGHYRSVHVKSKASQLLRTTLIARKKFVDHMLAIEDTIRGLMKVHGLKLGAVHRSRFAARVETLLADAPDLGMAIEPLLEARNMMRKHKALMDRQLSQMARKDDVCKRLMTVSGVGPLVSLSFKATIDDPNRFKDSKAVAAHLGLTPRVYQSGEIDRSGNISKCGDKLMRHALYEAANSHMRISKKWSTLRAWGVKLAKRIGSRKACVAVARKLAIIMHRMWVEETDFRFGKPPVTQPT

SEQ ID NO: 172304 - protein, 358 aa, unidentified
MNDVKSSRLDFTGQPIYIGLDVHKKSWSVSIFSNYGEYKTFSQPPEVDKLLHYLRHHFPGGEYRSVYEAGYCGFWIHDQLREKGIQCLVVNPADIPTKNKERRTKRDRIDCRKLARSLHNGEIEGIYVPSRSRLEDRTLIRTRQSMVRKQTRCKNQIKGMLLFYGVVIPEEREMGHWSRRFIQWIEGIGMERASGDIALKAHLEELSHLRQLIASLNRAILCLARTQEYRPLVRLLKTVPGISTLTAMILLTELGEITRFPSLDELSCYVGLIPDTQESGEKEYVGSMTQRRHSQLRWLLIEASWVAIRKDPALLMAFEEYCKRMRKTKAIVKIARKLLNRIRYVLKNQAEYVPCVIQ

SEQ ID NO: 172305 - protein, 356 aa, unidentified
MSRDIKYIGMDVHEEAIVIAVLNSSGKLIMETILETKASSILQFLHGLRGELHVTWEEGTWAAWLYDLLQPQVEEVVVCNPRRNALLKEGSKCDKVDARKLADLLRTGMLRPVYHGENGLRTLRELARSYQTLSKDLTRVMNRLKALYRGWGIPCAGTQVYAPRYRKEWLNKIPQAGVCRRAELLYQQLDGLQALRRNLRPELLAESRKHKAAKLLRQIPCIGPIRAARLIALMQTPHRFRSKRQLWTSSGLGIETHDSAQYRYVGGQVQRSKKPQQLRGLNQNHNHEMKEIFKSTATRASCGGGPFHDFYAALLAKGMKPEMARLTLARKIAAITLTLWKKEERFDAEQLKTQAA

SEQ ID NO: 172306 - protein, 424 aa, unidentified
MGKNINSTNRKKQDSAAKNGKAIGIEKTKNPHRERVKHQAGNDPGRQQRLAVLGLLQKLERAKHAPKENPLPEPSVEYYIGIDLGDKKSHYFILDKNGNVAADGSMNTASTDFEAHFKAIPRSRIALEVGTHSPWVSALLEAIGHEVYVANPRKMDGGKRKNRKKNDPADAERLARQVKSDPKLLYPIRHRSQEARRALVLLRARHALVGARTKLICSVRGLVKSDGARLPRCSADSFHKMPRTNVPQELRDSLEPVFEQIGLLTERIQKYEATVKRVCRDAYPEAEIFRQVDGVGLLTSFAYRLTIEDPERFAKSRDVGPYVGLVPKQRDSGDSHPELRITKTGDRMLRDLLVECAQHMLSRRGKDSDLRRQGLKLAARGKKNAKKRAVVAVARKTAVLLHCLWVTGEVYEPLRNSLRAEKVA

SEQ ID NO: 172307 - protein, 435 aa, unidentified
MYGVDDIRLEQFLQMKKEIRGSEKHLIVGIDAAKEKHNAFFGTARGKTLVKNLVFDNTLEGFQKLLAYVERIKVQYSLTVLVFGIEPTANYHKPLAEHLIKCGYMVVLVGGVAVKNNRPLLDGRWDKHDVKDAANVADLISQGKCLFYEYPLMTLRNVRILNALKRRLKKREHGLSACIRNQLLAQYFPELDQHYGPSETLAVVRECLDPSEIAGMEYDDFCRTVAPGKMTLAKNRRVGTIWRAAVDSIGCTMGEAASFEAQVMVDSLKQIKQTIKSVEDKLEDACMEFPDYTFLLSIPGFGPDISAKVLGAIGNPHRFTSAKQVLKMAGLDLCANRSGKKSNSAIPVISKQGKADLRYGLYQAALIASLKNKDFITYFTNKLKGRAKEKGIGTKMRVKLAAKLLVIAWTLMRKKEFFDPKYLKQVDQETLKKAA

SEQ ID NO: 172308 - protein, 449 aa, unidentified
MASKMELEVINPRCAGIDVGSRSHFVAIGQDLNDVKEFGVYADDLTAICLWLKENGITSVAMESTGPYWQNLYVELAKHGFELVLTNGKFTKQAHGKKTDVKDCQWIQKLHTLGLLTSSFLPDETTEQLRTYCRQRTNWLNLSAEASSKMQKYLKLLNLRLDVVVKDICGLTGLAIIADICSGNLDPKKLAEHRHYSCKKSKEEIAKALIGNNRQDYLFGLKQEYESYLFFQSKITDCDKEIEVFMKTEIGVDQVKKKLKTTDKKYKKANKNAPAFDLNQLAFQYFGGVDFMAIEGVSHATILTLISEIGPDGFNKFPTAKHFASWLRLAPNNKISGGRVLSHHTPKGSNRLKIGLRQSANAIGNLKDTHLSDFFRRIAFRKGRPAAISATARKLAIIIWNMQVKKVPYLPAKEYLFLDQKRHLKLVTRIRKQITKFEIKPEQLGFATN

SEQ ID NO: 172309 - protein, 340 aa, unidentified
MQKYQKNYVGIDVSKPYFDASLLMVIEHEKQELKTARFSNNVEGLKSFQKWLKENKVSMDNHTLCVMENTGVYHRLLWQFCGDNHITIHIGNATHMKWSFGIARGKNDVIDSKRICQYAFKHADELKATPILNPVFLKLKDLMTARTKLLEQKNSIKKYLNELKLSNDKGTQKILERSFKASLEGIKKSILLMEKEIDKIVAEDEKIQHNYNLMTTVPGIGKFTALYILCCTNNFATKISGKQLASYAGVVPFEHSSGISVRGGNHVHKMANKELKKLLHLCAISSIKYYPEFRTYFDRKKVEGKNGMSVLNAIKNKIVLRVVAVVNNQRAYVNNYHQAA

SEQ ID NO: 172310 - protein, 429 aa, unidentified
MAEVESVKQEPQFAAFIGIDWADQKHVWCMQAVGSEKRESGELVHTPEAVEAWVGQLCQRFANRPIAVAVEQTRGALAFMLSKYEPLHLFPVPSTMAANMRKALYPSGSKDDPRDADLLLDLLLQHRDKLRRLSPDTEATRRVQNLVEERRKLVDEKTAQSNRLTSHLKIYFPQMLDWFEHLDTELVCALLERWPTLEELQKVPPAKLRTFFCKHHCRDQELIERRMLAIRQAMPAIGDRAVIEAKSMVVKVSVQLIRSLLEGIADLDEKIEEAAAVHPDFFIFDSLPGAGAVMAPRLLAAFGSQRERYGSADEVQTYTGIAPVMESSGKKQWVHFRWAAPKFLRQSFHEWAGHSIAHSVWARSYYQQQRSKGNGHHAAVRALAFKWIRIVFRCWKDAVAYDESKYLAALARRGSPLLTINVAAVGKAL

SEQ ID NO: 172311 - protein, 420 aa, unidentified
MKFKQSVKQNQRIERITNHHLIIGIDIAKFKHVARATDYRGIERGSYLVFSNDLEGYEKLYQWMQALMLQFNKTDVIFGVEPTGHYWFNLAFWLKERLLELVLVNPFQVKRNKENRDNSPTKNDVKDALVIADMVKNGYYSETHIHAEPYRALRQLVGTRDFVTKQVSSVVNQMYRWTDMYFPEFQQVFKDITSKTALATLAEFAHPSDLRHLTVEDVIAGWRKRLKRAGSRKVSAALIHAAQRTAAIPNCVEEAKLSISLLLQQLQMYNDQLNQLEEKMSQLLRSIPTAKLLRTIKGMNDITLATLYSEAGDLGGFTHGNQVLRLAGLHLSENSSGTYKGEVKITKRGRPGLRKLLFMTVFHMVSINPEFRALHQYNKQVKNMKGMKSIMKLCGKLARMLVAMAKKHSVYDINKVTVAA

SEQ ID NO: 172312 - protein, 400 aa, unidentified
MRVVFGIDVSKVSSEVAILVNGEKVHGYTMPNDAIGFSRLLGDLKTVHKPEIIFEATGVYSRRLQTFLEDNGYAYTRLNPLEAKKQLDSLRVRKTDQIDAEKLAHSQFVLNRKPTYVQEEVYQNLRDLSRFYQNLTEDIVRAKNRLHKVLQVTFPELETILSTPTGEQYWNLVIAFPCKDFVLELSKDKLSESIRQSTSKRISDKRVAYLAEKLIALANQSYCAVKKTSPMLEEVRYYTKELLRLSEQRQAVLDEMVELAQPLPEYDILLSIPGIAETTATSIIGELGDIRRFQSANQINAFIGIDLRHYESGNFIAKEHIAKRGNPYARKILFKCIHNIASASHTNPCHIADFYEKRKRQSQTTSTKPHTIASIHRLIRTMYYLITHNKLYDYTSTQNR

SEQ ID NO: 172313 - protein, 427 aa, unidentified
MSYRVAAVDVHKKMLAVVVADVAGEGEYQFERSKFGTTPDQLQVLAQWLVRREVEEVVMESTAQYWKPVWAALEQYWQPARQQRDGAGKMSGRLHLCQAKSNRGPRGRKNDFADGERMVKRLVAEELVLSFVPDPEQRLWRTVTRRRHQITRDKVRFQNQLEALLEQAHIKLSSLVSDLLGLSARRMLKAIAEGETDPTALAELADSRLRATPEQLCHALGACTQLNGVYRRLLKMALEELKLMEEQIEQLDEEASNLLQQHQDTVQRVAEVPGFGVGSAVQMIAEVGATAATFDSGGKLSSWVGVCPGSEESAGESKSTRSPKGNSTMRRLLNQAAQSAVKVQGSIFDITFRKLLPRLGYKQAIWAIAHRLCRLLWMILHQGIRYEERGPAVSAKSQRTRAARMIKELKKLGYRVEAGPLPVGTLA

SEQ ID NO: 172314 - protein, 358 aa, unidentified
MSTYYIGADVHSNSTELAIEKRGEIVARYSVPTSIPAIINVLDSIQGKKYLAVEEGPMSGWLYRNLNSKLDQFISSDPRRNKLIASEGDKDDKIDSAKLASLLRGGFLREVYHSDDDGRAELKHWVSLYHDRVRDAVRSINKIRARCRMHGVTISRAVLRDPASRLKWLLKTKHNPLANQLKMLWIGYDATVQQVKFAKRQLNTLSRKYTIIEQWSLLPGIGLIRATTIFAFLDTPWRFKKKNKLWKYCGVGLQRTTSGTDKKGRPKPARLQLPWAVNRTLKNAVLGAALSAINQKDNVFKDYYERMLKDGIITSNARHAVARKMLTVMWAMWKTNSRFDEKIVCNELNRPTVQVLSR

SEQ ID NO: 172315 - protein, 405 aa, unidentified
MNYTCGIDWASEHHDVSIVNRLGMEVKGFRIEDDMDGYRELLKVLRSFGDDIPIAIECKEHLVISFLINEGYKIYAINPKSSNRYKDRFKVSGTKTDEIDAFSLANILRTDIHNHRPLAYSSKNIQKLQILCGEYEKLLKDKNLLENQLFDVVSKYYPLVLTLFEKNSCKILYRLIQYYPTYKKLKETSYEEFKIFLKKSHYLNPKHSERLYRRIQESDYYENNIFDEIFSHTAKALSRLLLILTEELEGIKKEMALITKNHELGKVFYSLPGSGDVMSAKLLAVMGDNKELYRSSAEVQAYTGIAPIVKRSGKSFRVIFRKACNRAYRDTLTWFAFCSMPYCSWARKYYDRKREEGKRHYESLRFLAFKWLRIIYELWKSGELYNEALYLNNLKRFEEKKLKIA

SEQ ID NO: 172316 - protein, 323 aa, unidentified
MYKVIGIDISKASFDVSYEKTKGKFYHSKFDNNARGFAKFRNIIDTVDHCIMEATGPYYLMLACYLYDNGVKVSVVNPLQVKHFVRMRMTKAKTDKKDAAMIALYGQSENPDLWQPDEVQVMQLQQMHTAVEGLQKQSTMLKNQLEAFSQLPVKEKNVMGTLKALLKTIKAKIAKLEDKMLEIANNYYRDTFFLLQTIPGIGPKTAIVLITITNNFKKFDDTKKLSAYVGLSPRVYQSGTSINGKGHITKMGNKYVRKLLYLCAWSAKRHNEQCKVMYDRLKEKKKPERVIKIAIANKLLRQAFAIATNCRVYDKNYEYKFGF

SEQ ID NO: 172317 - protein, 388 aa, unidentified
MSFTIDPGVRTETTIRPDHATVFVSLELSRSKWLITALLPCSDKMSKYCVDSGDGTALLDRLARLRARAEPRIDTAVHMVVIQEAGLDGFWIHRLLESNGMESHVVEPASIAVPRRHRRAKTDVIDGEMLVRTLMAFKRGERRVCSMVVAPSPVEEDRRRVSRERRTLIRERIEHANRIKGLLATQGIVGLEPMRKDFRDRVEGLQTGEGQPLRPHLKAEIIRELDRIDLVVRQVGVVEAERDALVKSDNIDTTAPAALLMKLRGIGPEFAAVLWLEGLFRNFANRRQLAAYAGLAPSPWKSGSIDREQGISKSGNPRLRTTMVELAWLWLRYQPGSALSAWYRERAGSERGRSRRIMIVALARKLLVALWRYTTLGELPKGAALKIA

SEQ ID NO: 172318 - protein, 448 aa, unidentified
MRMAQTIITRMPTPSLPVLDPTAAAIDVGSEQLHVSVAGGPPKVFGTTTGQLHELRDWLKGQGVKSVAMEATGVYWLCPYEVLEKAGLQVVVVNGKYVKNLPGRKTDMKDCQWQATLHAHGLLKPGFVPPEHIRRLQDYLRVRTDHITMAASHEQHMQKALDRMNLKIHEVISDLTGMSGLKMVEAIIAGQRNPVALLALCDPQVQKNKAGQLRAALEGTWKDEHLFALRQAHELWQFYQKKIGECDEAIAKVLQEIAGPEDPAHPAPPAAKRGGVNTPEIAGLHSLLWRLCGHKDPTSLPGVADYVLLLLLAEVGTDLTRWKSEKHFTAWLGVAPGSRQSGKRRGSQKRGRNRAGRLFCVIARSVGRSVDKALGGFYRRLKGRRGGLVANLALARKLAELFWRLMVHGISYVEQGLKKYEEKVAQTEQRLLQKLARKYNMVLQPKAA

SEQ ID NO: 172319 - protein, 504 aa, unidentified
MNTLHYIGFDVHKKTISFCVKTAAGEIVEEGVVAAQRAGLRQWAAARPQTWRGAMEATLFSGWIYDTLQPYSEQLEMAHPAKMKAISAGKKKSDTLDARTIADLVRCNLLPACYVAPPRIRELRRLLRYRNLVVSEAVRMKNKMAGLLMETGALYVKEKLHRKKYFASLLEELEEVPESVIDLLRWSRGALEMFESTQKRLVRELLADSELAERVERLMTIPAVGEITALTWALEVGDPQRFHSNSDAMSYCGLTAALKSSAGKQQRGPISKQRNRWLQTTLIEAAKLAPRWNPQLAALHARELERGHRNRATLAVARKLVAYLLAVDKSRQPFQVRALGSADTKSCLRSRTFEPSGDPPAVPRHLGDWAEEFLLPMLLTVCIEVGRSTLTHTSWTGPTHGSRKWMSGQAAALASTQDRTPFANLSAPHPLRGPTLPSARRPPSPLDFYLSWMSPSSLSPSSLRPQVLLSVPKFSSQVLFQPASGPYCLIWCSRTYFSRSTGSW

SEQ ID NO: 172320 - protein, 330 aa, unidentified
MCVVDADGGIVREAKILSEPDALIAWFGAHGVAMERIGLEAGPLSQWLHAGMAKAGLCVELIETRHVRAAFKTMPVKTDKKDARGIAQLMRLGWFRPVPCKSLAAQEVRALLTARKLIQGKLHDIEMSIRGILRGFGLKVGPTTRRTYVGRIRELVAGHSTLQAIAASLLKVRDALVQEFAGFERQLRAIARQDKNAQRLMTTPGVGVLVALTFVAAVDAPERFRSSRAVGPHFGLTPKKYQSGETDHSGRISKIGDGSVRTALYEAANVILTRPVKGSDLKGWALAVARRAGPRKAGVALARKLAVVLHCLLRDRTNFIPHKRAPALAA

SEQ ID NO: 172321 - protein, 348 aa, unidentified
MKQDNKKGDVKVLGIDLAKTSYQLHGEADSGQTVVNKKFNRKNLTAFVARLPPCIIGLEACGGAHYWARVFKAFGHEVKIMAPQFVKPFVKSNKNDAIDAQAICEAVQRPSMRFVPEKSVEQQDIQSLHRIRSQLISRRTAQSNQIRGLLLEYGIVIPKGISYVRKQIPWVLEDGESGLSSLFREALGELYQELVHLDQRVTTLEKKLQRISDQNEDCQRLLTIPGIGLLSATALVSAIGNINAFKSGRELAAWMGLVPRQHSTGGKPTLLGISKRGDTYLRTLLIHGGRSVVRFAHKYKDRRNQWVSRMEKRRGKNITAVAVANKNARVVWALLSQQTDYRLQAIDS

SEQ ID NO: 172322 - protein, 343 aa, unidentified
MSISMIGLDTAKSVFQIHGVNETGKVVLRRKLRRSELIAFFEKQESCTVVMEACGAAHHWARMLTGLGHTVKLIAPEAVKPFVKKGKKNDAADAAAICEAASRPNVKFVPVKNLEQQGILALHAARSLLVKQQTMLANAMRGLATEFGITVPKGMQKLDELMTLVNTDESIPKQAKQAITGLHDYGKELNEGIETFEAEIVAHARHDETARRLATIPGIGPITASLIAATVVDISLFKTARPFAAWLGLVPRQNSTGGKTRLGRITKAGNREIRKLLVLGATSMVGRADGWNSAVGAWLRDILQRRPARLVTVALANKMARIAWAVMTRKEVYRPKGGIAVAA

SEQ ID NO: 172323 - protein, 355 aa, unidentified
MKYYTSTTEFNCGIDLHARQMYVCLMDRDGRKLVHTNIRNNDFNFFLKLVAPYRHDLTVCAECMFGWYWLADACQAAGLHFVLAHALYLKAIHGGKNKNDRIDSEKIAHLLRTNLIPPAYVYPAEQRPLRALLRQRILYVWRRSELLCRIQSHQLAHNRSPIKQTRPNRDPWEAGLLAQEDNPIRQLALQNDLALIRHYDTQITALEEQLQKLTKATHWRDYTLLQTVPGIGEHLGLTLLYEIGDIQRFPTVKDFVSYCRLVKGTVASAGKIKGLRGAKLGNPYLRWAFGEAAVIAKRDPATIGPLAQRLEAKMGGNKFKANTVLAIKLARAVYFMLRSGTVFDPERLVAALTHK

SEQ ID NO: 172324 - protein, 315 aa, unidentified
MTQTNILTAGIDTSKAKLDVAVHSRTERWQVANALPGWRALAANLAKIGVTRIGIEATGGYERGVVEHLRAAGFTVQVLQPIQVKAFGRAHLRRAKNDALDAALIAACTAAIDQPKISPDPRLAELAANLTFLEQLEEDIARFKTRLEHIDEPGLRRLVNSDITRLKARKAAQIRYLAKRLRDHDDLAKRLALVLSIPGIGERTALALIIRMPELGQISREEAASLAGLAPFDDDSGLHRGQRHIAGGRGRLRKSLFAAALPAAFRWNEALIALYARLTAKGKVHNAALIACARKLLIYANTVVQRGTPWTEKAA

SEQ ID NO: 172325 - protein, 430 aa, unidentified
MLLAVVGKRKNGFLSEVRGVIRTLFGTVTSQLHALRDWLLAQGVHSVAMEATGVYWLPLYGVLESAGLEVRMVNGRQTRNLPGRKTDMADSQWGATLHMHGLLHAGFVPPADIRRLQDYLRLRADHVAAAAGCVQLMQKAFERMNIKLHDVISSLAGVSGMAVTRAIVAGERSPEALVALCDVQIRRKKEQAVIEALRGTWADEHIFALGQALQSWDHYQKLIADCDNRITVVLPPYDEAQAPLPRSTRQTGVNAPEISRLREILAQMCGGRDLTKLPALSNYGVLQLIGEVGTDLSVWPTEKHFTAWTGLAPGSSDSGKRKKHVKRGRNRTGQLVCMMAQSLVRSKNIALGGFYRRLAARRGGLVATKALARKLAAWFWRVMVKGDDYVEKGLARYEEQVRKTREHALKRLARELGRQLVPVPGVSEAV

SEQ ID NO: 172326 - protein, 377 aa, unidentified
MDQYAGIDVSLELSSVCIVDAQGKIVKEAKVASEPEALVTFFETLGFAVKRIGLEAGPLSQWLHAGLKRAGFEAVLLETRHVKAALSAMTVKTDRKDARGIAQLIRMGWFRPVHAKSMGSQEVRALLVARKQLLGRLIDVELSIRGILRGFGLKVGPVTRKSFEARIRELVTGQATLERIATAMLSARAALKAEYAKLHKAVLTIVRDDAVCRRLMTVPSVGPLVAIIYKSAIDDPHRIAKSKAAGALFGLTPKKYQSGEKDVTGGITLAGDEMVRTALYEAANVLLSRITRFSKLKRWGMDVAKRRGSKQANVALARKLAVILHRIWVDSTTYRWAAAPPSRRRDFGHWTSVQPSCVLNLLHVFYAAIGSAASAHR

SEQ ID NO: 172327 - protein, 327 aa, unidentified
MAKRTTICAGIDTGKRKLDIALDGSSEQLQIGNTPEGYKTLSDWLRRHRVKRIGIEASGGYEQAVVAELRRKGFVVVVFQPAQVRAYAKFHLQRAKNDKIDAALIAACTAAVKTIHAPPDARLLPFAEHLTMIDQIGEDIARLKNRLETCRNPRFRQTWKEDIARLEKREKIELKALVAAIREHRDLAERLDLIESVDGIGLPTAVAILVRLPEIGRISREQAAALAGVAPYDDDSGEQFGVRHIEGGRQRLRRALYTAALPASLRWNPQLIALYQRLIAAGKEHKRALIACARKLLIFANTVVARGIPWDHERPPIASMTAVPHTG

SEQ ID NO: 172328 - protein, 324 aa, unidentified
MSTVVGIDIAKHTFDIATLQANGKHRTKAKLSNAPKGFEVLLQWLARHAEPQAWIVMEATGIYHEALAEWLYEHDYKICVLNPAQIALYARSQLQRVKTDKVDAKLIADYGHLHQHKLRAWKPERPEIKRLKALNHRLKDLQELERMEQNRLDVTSDVKVAASIRSVLEHIRQQIAETLKAIKQHFDDNDDLRGQRDLLKSIDGIADRTATLLLAELGDMQRFGDSRDVTAFAGLNPKLQDSGKHKGHVRISRMGSSVLRAGLYLPAVVSLTHNAAIRAMAKRLKARGKAGKQIVCAAMRKLLCIAYGVLKSGKPFDPQLAIAN

SEQ ID NO: 172329 - protein, 354 aa, unidentified
MTGTGEMDLVVGVDTHLGTHTAAICDARGRAVSQLEVATTATGYAQLLEWVQAAPAGRPVPWAVEGPRHYGLGLARYLVSQGQQVAEIDATRHVGKRRAGKSDPIDAVRAARELLARPHPGQMRADGDREALRLLMIDRDNAVTSAKTARTALASVLVTAPAPLRDQLRHIPPERRARACAQLTCPARTDRLTRVVHQTLIRLGQRAVALTEIADDLEGQITSIVEDMAPGLVAATYGLGALTAAQILLSFSHAGRIRSEAAFAMLSGTAPVPVSSGRTDRHRLNRLGDRQLNRALHTIAVSRMRNHPPTLAYAQRRRTEGKTDREIRRCIKRYLARHLWRTLSSHPNPRPETT

SEQ ID NO: 172330 - protein, 343 aa, unidentified
MEHFAGLDVSVKDTSVCIVDEIGKIIREVKVASEPDALLQVLRNAGYHFKRIGLEAGPLSQWLFSALGEANLPVICVETRHMRAVLEAQINKTDRNDARGIAQMMRVGLYRPVHVKTLRSQKLRMLLTHRKLLQSKAIAIENDLRSTLRNFGLKVGMVGTAKFETRIKELIENLPDLILLVEPLLVVRRVLREQLDLLHRRLLAVVRDDAICRRLMTVPGVGPVVALTYRATVDMPARFRKSKSVGAVFGLTCSRDQSGERDRPGAISRRGDEMMRAMLYEAAQAMLLRSAKWSWLKAWAMQIARRRGMKRAIVALARRLAVILHRIWVDGTEFRWTREAAAA

SEQ ID NO: 172331 - protein, 347 aa, unidentified
MLIIGCDFHPGFQQIAIFDNRTGEVQEKRLQHRAEAEQFYRSLAGQEVRVGMEACGHYPWFERLLQELGFELWFGDAAQVRASVVRKQKTDRRDAEHLMDLLIEDRFPRIWVPSLEVRDVRQLLVHRHKQVQARTRTKNQLQAMALSHGVQKKYKLWTEAGRAELEQLPLLPYAAERRKKLLQVLDGLEAEIVELNRRVEEEVKQRPEAVRLMTHPGVGPVTALAMVLTLGPAERFESAKQVGSYFGLIPSEESSGGKQRLGRISKQGSSFLRFLLVEAGQTAARYDPQLKRFYRRLATRKNRGVAKVAVARKLATRMYLMLREGWTYAQLNQAVMSVSPSHSVAGE

SEQ ID NO: 172332 - protein, 352 aa, unidentified
MVDLIWVGLDVGDYQTHICIIDNDGRPISETNVETAPHVISDILAQHPIDRFGRIVMEAGLPCTGICRHLRALGYPAAIYDARRIHRFLSMAANKTDVNDARGIAQVARIGSNALREVHIKSAEIERLRGEIVLRDSLVRQRVAAETSMKSMLRACGIRIKPTSSARVFRERVEEGLTSLGTEGAALLTRIRPLLELSESLRSYVAHQDDNLRKEAERIDATRRFLEIPSIGPICALSFYTAIEDPFRFKRASNVGAYLGLSPRLMQSGKVRRMGRITRFGSTMTRSHLFLAARTLNRKTTTAVCDVRTWGETVAERAGKAKARVAIARKLAMIMLAMWRDGTSFVAVRERT

SEQ ID NO: 172333 - protein, 405 aa, unidentified
MGRVFVGHDWAEAHHDVHVEDGEGRRLGGGRLREGVEGVARFHELVASHIEDPADVVIATETDRGLFVGALVAAGYTVLAVNPMSTSRYRERHSTSGAKSDPGDARVLAGLARTDSHLHRPVAGDSDLAEALKVLARGHQSLIWTRQRQVNQLRSTLREYYPAALEAFGELAHPDALAVLAVAPTPSLGRQLSRSKIAAALRRGGRQRRIDERAVEIQTALRTDQLAAPDLVAEAMGSTVAALVAVAVELGTQIARLETDLADRFDSHPDAKIIRSLPGLGMTLGARVLAEFGDDPNRYADAKSRKNYAGTSPITRASGTRRVVLARYARNRRLADACYLWAFAALTASPGARAFYDERRAAGDTHHRALRALANRLVGILHGCLRHGTPYDEHTAWSHRVTIAA

SEQ ID NO: 172334 - protein, 312 aa, unidentified
MTDQIFVGVDVAKDWLDIHHASQGATRINNSHAAIRSFAARCGKEGAWVVFEASGGYDHQLRDALESAQVRFSRINPRQARDFARAMGIIGKTDRVDARMLAELGARLTPAPTQPLPPERRALQAQATRRRQLVEMRKQEATRLQQTADPVARADIRGVIAMFDRRIAKIEARMTDLVTADPELAAIERRLRTAPGVGPIVAATLIVELPELGQIDRRSIAALAGLAPIARDSGRRSGPRSIGDGRPIVRTILYLAALQASRRSLQFIHFRERLQAVGKSVKTAIIATARKLVVTLNAMLASGTDYRPIAVV

SEQ ID NO: 172335 - protein, 330 aa, unidentified
MTEVTTVGIDLAKNVFSVHGIDAEGAVMLRRSVGRTKLLELIAQLPPSLIGMEACSGAHEWARRFSRLGHRVRLMAPKFVAPYRKSGKNDGNDAEAICEAVSRPSMRFVPVKSLEQQADLCLHRARQGFIEERTATINRLRGLLAEFGHVVPQRAVEVRRQVPALLEQLPARAARCIADLLQHVRELEVKIAAFEREIETHARHSALAQRAQARQGIGPITASAFVASVGDAKEFSNGRQFAAWLGLVPRQYSTGGKTRLGHITRRGDGYLRMLLVMGARSVLQRASRARDPLSRWALAVRGRRGYHRACVAIAAKNARVLWALLSKGPT

SEQ ID NO: 172336 - protein, 450 aa, unidentified
MSKKQMTLEIVNPNSAGIDIGSRSHWVAIGQNAEDVREFGVYSEDAINLCKWLNENHITSVAMESTGTYWQNLFSALVVNGFEVILVNGKYTKNKSGKKTDIKDCQWIQKLHAMGLLSSSFLPDSTTDIIRTYSRHRQNLIYQSADTTRKIQKYLRLMNLRLDVVVNDIMGETGTKIIDAIVGGELDGKVLSQNRHYNCRKPIEEIEKALQFNGRTDYMFALKQEWKTYLHLHKQISETDQEIKKLLKNIINKDDNKKQFVAPKKPYKRINKNAIKNMDMNKIAYQYFEGVDLMAIEGINDATVMSIISEVGLEGLKRFESAKQFSAWLRLAPNNKISGGKVLSHSVPKGSNRLKIALRNAANVIGNLKDTHLANFFKRVAFKRGRASAVSATARKLAVIIWNMVVKGMPYNPPTKYLCLEEKRRLGLAKRIKKQITRFELTNEELGIVT

SEQ ID NO: 172337 - protein, 328 aa, unidentified
MAKHTMICAGIDAAKLKLDAALECCSERLRVDNTPAGHKALLDWLRRHQVTRVGIEASGGYEQAVVAELRRNGFVVIVFQPGRVRAYAMFHLKRAKNDNIDADLIAICTAAVKKIHAPPDPRLAPFAEHLTMIDQIVEDIARHKNRLETCRDARIRQVWKEEIARLEKHRKIELKSLVAAIRRHQDLAVRLDLINSVDGIGLPTAVAILVRVPEIGRLTREQVAALVGLAPYDDDSGGRSGTRHIAGGRKRPRSALYAAALPASMRWNAQLIALYQRLIAAGKLHKVALVACARKLLIFVNTVVARGTPWQRHQNPRPSAIPHAATAR

SEQ ID NO: 172338 - protein, 438 aa, unidentified
MSNKVIFNLDELFISVGIDVGADFSWMSVALPNQQFVGKPFKILHNSMNSLTAAVSKIKEAEELYSLESRIFLESTGIYHYPLFCYLRDKGFNVSVINPIITKNSTNINIRKVHNDRFDSKKAALVGLKPDLKVSLMPSDLALNCRNLCREYYDLMDNRSAYVNKLQGELRMAFPQYLGIFSKVTVNTSLTLLETYTSPAAFIEADRQEIIDAIKSTARFGLTYALNKYNAIIQAANEANEFGYIIDSNIKRIRLYIGFIRKYDEEIKGILGSMHELVDANEATDFVRQIHLIETFKGAGFLSAVSLMGEIGDFSAFSKPKQLFAYFGLDPAVKQSGKFEGTKTQMSKRGSAIARRVVHTLALQSIGTSRTGEAKNPVLRDYYLKKCESKPKLVAMGAVSHKVCNMIFAILRDNKPFEIITPQEHIKKHNAAKCDIAA

SEQ ID NO: 172339 - protein, 482 aa, unidentified
MAKRKMSTFERLRSGRMNRQERKDWQQRLYAEDAGLEVVHPDAAGIDVGSASHFVAVPPDREELPVREFGSWTADLRRMAEWLKRCGIRTVAMQSTGVYWVALQEILEREGFEVCLVNARGTKNLPGRKSDVQECQWLMKLHTYGLLRNSFHPPEQIRAVRTIWRQRDRLVKEAGREVQQMQKALTTMNVQLANAISDVSGLTGQAIIRAILRGERDPQQLAKLRDYRIAASEAEIAHSLEGNWREDVLFELQQVVDAYDFHQKQIAACDVQLQRYLSALPVRHGPGAGEPSAAEVPAEKPKKRRQHRLQKNQPTFDLAAELQRTMGVDVTAIDGVDVMTTQVILSELGPDLSASFPSENHFTSWLELAPRRDVSGGKVLRQKSRKSNNRVATALRMAAQSLWRSDSYLGARYRHLRARLGGQKAVKAMARYLACLIYRLLTKGKAYVDRGAAHFQSKRTERELLALRRKAAELGMELVATS

SEQ ID NO: 172340 - protein, 367 aa, unidentified
MSIHVPPHVRVLAMDVHAHTISTGLLEPSSDSPLMDKVSADDESVRRLIARFEDPRGVWACYEAGPTGYELARALRSAGIHCEVIAPSLTPTRPGDRVKTDRRDARRLALLFRAGQLSSVRAPTPAEEAVRDLCRARADMVIDRTRARHRLGKFLLRHGRVWRGGDNWTLRHEAWIRAQRFEERALNETLAHYQATLDAREAAVDAIDADLAQWCVRAPFADAVARLADYRGLTELGGLTLAGEVCDWRRFPTAGMFMAFTGLVPSEDSGERTRRGGVTRAGNGHLRAQLVESAWAYRAKAQVGAVLRRRQEGLDPAVVARAWAAQLRLCGKFRRLDARKGNRKAVGRRRGPRTRRVRLGRDDRLGR

SEQ ID NO: 172341 - protein, 331 aa, unidentified
MKKRSAKQAFLYVGIDLAKDSFDAALAPELPDLEKWAALPHRHFDGRYDDPATIAQLRAWYESVSGRPAPALVVVESTGRMSGRFACALAPWAVAIVNPKRIKDFASSLGQKHKSDRVDAAMIALYAARRAAEDEELRAATRLRETLVAEITAWKSRLGETDDPVLREMIEATIAHLEKQRDTLEERARKIVDRSKRLAKQIAAIQKIPGIKRVVAPTLTAELGDLASYDRGALCAAAGLFPVENQSGSVRRRSRLAKGAGGRARRVLHMGARSLFRSKGPLREHIEWHLSHGKTKACVLGIMMRKLLLIARAVMVNGGVYDPAQISFARA

SEQ ID NO: 172342 - protein, 318 aa, unidentified
MDSSGQWVGVDVSKTHLDVFVGGRHRRFRIADQFDEAVSWVSESRPRGIVLEATGGYEQRIAKALEAIHCVAVVNPLHVRNFAKSRGRLAKTDKLDARLLAEFGEVNQPRATRTLSDVEVRLRAAVQRRDQVADLRQVAKQHLEHTDDLTMLRHARKIVAMLDKEVRGLDAVVAKIVNEDAALKARAKRMRTMPGIGAIIAAALLVYLPELGSITKGQVAALAGLAPMNCDSGMMRGQRHIRGGRFRVRKALFIAATVNQRCKISRFKDQFLALTARAKPPKVARIAVARKILVALNSMLKNGTDYAHASPSQSEKAA

SEQ ID NO: 172343 - protein, 436 aa, unidentified
MDIVHPRVAGIDVHKKVIWVAVRLPGKAPGHREVTVRRFKTFWRSLQEMAAWLAELGVTDAAMESTGVYWWPVYHALAGAGIEVCVCNAAHMRNVPGRKTDLRDCQWIAELHEYGLLRASFIPAAEVAALRQRTRYRKKLIGQRSSELQRLSKVLEDGGVKIDSVASTLTTASARDMIEALIAGQRDPAVLAQLARGVMRKKIPELQMACDGRFTDSHAQMCRLHLDAYDHLAAKIAELDLLVAKAAEPFAAVITHLITIPGIGQRTAQVIVAETGADMARFASPARLAAWAGLAPGDNESAGKRKKAAARQGDRHLRAAMVEAAWTVSRTATRPGARFRRLARRFGRGNEKKAAVAVAHTLTCIAWAVMRYDRDYAEAGADYYDHRDARNRDHLVRHYQQALARLGYQVTLTPPGDGHSPSAATTTPATPPGQAA

SEQ ID NO: 172344 - protein, 345 aa, unidentified
MELHTIGIDLGKTVFHLVGLNPHGEVVVRKKFSRTQLLRFTANVHVQLIGMEACGGAHFLGRALREQGHEVRLIPAQYVKPYVKTNKSDYIDAEAIAEAVARPTMRFVPIKTDDQLDLQSLHRVRERWVMRRTAVINQIRGLLLERGITLRKGRCHVGGALPGILEDADARLSGALRMLLAQLKLELDHLDLRIDEADALIKKTACENEACQRLVAIPGIGPVTATALIAAIGNGGAFRKGREFAAWMGVVPREHSTGGKQKLLGISKRGNSYLRRLFVQGARAVMQQRTKQSSGLNRWLTQLTSRTHRNVAGVALANKMARMAWAVLAKNEPYRPPVLADVAAA

SEQ ID NO: 172345 - protein, 381 aa, unidentified
MDHHAIAGTPSTKAVLYGALELSKNTWLLALQLPDRAQPSLYPIRGGDTEGLMAKLMVARDRWAKMSGKAPSIVLCYEAGYDAFWLARFLKARGIECLVVDAASMQVNRRARRAKTDRIDVGMLLRALIKWGQGDHHVWSVVRVPGVDEEDLRRSHRERDRLVCERTAHINRIKGLLFGQGIRDIKVKSKYKTLQIDKLVTGDGRPLPPRLASEITREIARLGLIQEQLAALDRERDQAPTPCKAIEKKRVQLMNLTGIGPAIAAVMTREVYYRQFDNRRQVASFLGLATSPHDSGDVERSQGISRAGRGQVRGTIIQAAWLWLKHQPKSAITRWFVQRTTGQSGRLRRIMIVAVARKLAIALWRFLEQGLVPQGATLASR

SEQ ID NO: 172346 - protein, 348 aa, unidentified
MDVYIGFDISMQSTHACVVDADGGLVREGVERSEIDALDGWLRRHGEEWNIKRIVFETGQLSAYLYHGLRPSWPVVCIDARHAHGTLKAQRVKNDKNDARGLAQIARTGWYKAVNVKSEEGQALRALVGSRKQLVTMRLSLENHIRGTLKGLGIRIGNVTTAAFTPKVKGAIAGKDALFGQVMLTMLDARDELLAQQRSLDKRCAAIARSNPVCKRLMTVPGVGVITALTFRAEIDDPLRFKKSRDVGVHVGLTPKRYASGETDRSGGISKCGNAALRTLLFEASVTMLTRSSKWSRLKAWGVRRARRNGFKAASVAMARKLAVVMHRMWIDGTDFAYGEPPPVLKAA

SEQ ID NO: 172347 - protein, 404 aa, unidentified
MKGPIVSIDVSKGKSDYQAFKNLNVKYTGSRSIKHTKEGFDEIVNLVREMEKKLETEVCVVYEATGVYHRVLKKVLEDNNIKQFIINPLLSAKTRKNDSLRSPKTDKLDPKSIAKTYYSHSLHNSHKPETIYHELRELSRYYEDILVHIRKDKVAFRAQLDIVFPGYDALYDDLYGPVALAVIEKYPHPEMLQKKKINTVSKVIQNKTCHRQAVSDTMADKAIEYSKTIYSGCDKDDIEVLILQRIIKKLKEDMAEAERTIGEMVKLAQELPDFSIIKSIPGIGDNLAARIIAELGDMTRFKKKNELVAFAGLDPRISESGKNDGDHMHITKKGNKRLRCLLYLAVTCSIRLKRDDNSIKDFYIKKKQQSNPMCSKAAKTACASKLVRIIYSMCKTGELYQYNK

SEQ ID NO: 172348 - protein, 361 aa, unidentified
MKAHPVGIDVSAKELVVTSDRSRDARFDNDAAGHKKLIRFLTKGGRAARVVLEATGVYSLDLALALHRAPRIEVMVANPRAVANFAKAYLQRSKTDPLDAEVLLEFARRMPFTLWVPPAPEHLDLRALSRRIAALTKTSQQEKNRLHAASRCSEMTPLVRRDIEVNIRHLERRIEHLRHQALALIEEHAPLQEAFDHLVSIKGIADASAISILGELVTLPADMTVRQWVAHAGLDPRHVQSGSSIHKPARISKAGNKYLRAALYMPALVAIQHEPNVAAFYDKLVARGKTKMQANIAVMRKLLHAIFGMLKHGADFDGEKFYVINARRRREYLTARRSAARPADWPRAKRPSFNAKRYHRS

SEQ ID NO: 172349 - protein, 397 aa, unidentified
MKTSLRYLGLDVHQASITLAVADAGRGPAEVLATIPNDYQKLLQLLDKLGPKERLRLCYEAGPTGYGLARRLNELGYCCEVISPSLVPVQRGRRVKTDRRDARKLAHFLRSGDLTAVAIPEAQTEAMRDLERSRDDAKRAERVARQQLDKFMLRHGRIWSGVTKWTQTHLAWLREQEFAEPLLRHVRDDYLLALDQATARVERLTKDIENFVEQWAAKDLVLAFEALRGVQVVSAVVLAAEIGDFARFAEPAKLMSFIGLVPSESSSGGSRRQGSITRTGNGHVRRILVEAAWHYRIRPRGSKAIEARRRRVSPEVRAIAEKAEQRLSRRFERLIRRGKKSQQAVTAVARELLGFVWAIAREQARQAAAKSNATVANSNSPRRRTPQAMATIGFSEA

SEQ ID NO: 172350 - protein, 343 aa, unidentified
MQTITTIGLDIAKSVFQVHGVDAGGQAVIRRQLKRRSVLTFFQKLPPSLVGIEACASAHHWSRELQALGHTVRLMPPAYVKPYVKRQKNDATDAEAICEAVTRANMRFVPTKTPEQQSGLVLHRARHLFIRQQTSVINAIRGHLAEFGIVAPIGRQGVDELLNVVADPNDKRVPEIARACLSAFGAQLRMIKERILEFDRLIRAWHRSSEMSMRLDEAPGVGPVLATALVAAVADPKSFRSGRNFSAWIGIVPKQHSSGGKNRLGNISKQGDRYLRGLFVAGALAVIRYAKIHGTKHRPWLTALLARRPTKVAAIALANKIARMVWAMMARGERYKEPVALAR

SEQ ID NO: 172351 - protein, 344 aa, unidentified
MDAAYDGRQFVGIDLHRRRSVIVRMSEAGERLEAVRIDNDPVVLGLEIAKAGESPEVVLEATYGWYWAADVLAEAGAVVHLAHPLGVKGFAYRRVKNDIRDAADLADLLRMGRLPEAWIAPPAVRQLRELVRHRAKLVALRSGLKASVHAVLAKQGLHIGVSDLFGVGGRELLARAPLDGAFRGRVDSLCRLIEAVDFEIDAIAKPVKARLAGHPGFTAIQTIPGIGAVLAAVFVAEIGQVDRFARPEQLASWAGLTPRHRESDITVHRGRITKQGATLVRWAAVEAAHCAARTGWQATTRSRIGERRGRNIATVAVARKLLTLVYYGLRDGHIRALRPAKAAA

SEQ ID NO: 172352 - protein, 477 aa, unidentified
MVAARPSALTRKQRKDLARRLWTQDPGLDIVHPHAAGIDIGNSTHYVAVRPDRDPDSVRRFECFTADLHRLADWLQHCGVTTVAMQSTGVYWIPLYEILDARGIEVYLVNARHTKNLPGRKTDVQESQWLLKLHTYGLLRNSFHPSAAIRVVRTYWRQRGDHVQAVSTCIQRMQKVLTQMNIQLANVISDLSGWTGQRIIRAILDGERDPAALAALSHPGIRATRDMIAKSLEGTWQTDLLFVLQQEVAMYDAYQQRIAECDHALEQHLKGFADKVTDAPLDGEPSATTGARLRSGPKRRRKAGSHAPQFDLGRELHRISGVDLTRIDGIDVGVAQAVISEVGLDMTRWKTEAHFASWLGLCPDNRITGGKVIRKGTRHVVNRAATALRLAATTLLRSQSYLGGQYRRLRARLGAPKAITAMAHKLARLVYRMLKWGHEYVDKGLQYYENRHREQQVQLLKKRAAKLGLQIVEPDAA

SEQ ID NO: 172353 - protein, 344 aa, unidentified
MKTTEALNQVCCGMDLHSSNVYICVMRKDGTISYSKRLKNDLPSILDALKTCEGLKHIAVESTFNWYWLVDGLMEHDYKVHLANPAQLADCAAPKVTGDRHDAARLAYLLQRGELPEGYIYPKEVRPVRDVLRRRLMLVRQRTQTILSLQGMYARTTGKQISGSKLKKWTLLDVEKTFEQDADQFCAAELLATIQGLEKRVKKMDDYVRKFLKSYPDYQRILGVPGIGLALSLTILLETGPVERFACPGQYASYCRAVPSKRISNGKSKGQNNRKNGNKFLGWAYVEAAQFAQQHHPRIHSWFQKKQRRTCRNVALKSLAAKLSKATYIMLRDQSDFNEQLLFG

SEQ ID NO: 172354 - protein, 387 aa, unidentified
MTVRKVNNLPAAAHGETVRCLFAIELSKQSWVIGFTTPLSAKISRRILSGGDWKGLLELIEEVRARVSREIGRPVEVTSCYEAGWDGFWLHRQLEAHGVRNYVIDPASLQVDRRMRRAKTDRIDTERLLRSLMAYLRGEPKVWSVVQVPSVAAEDARRLHRERDRLISERVQHVNRIKGLCALQGIYDYHPLHPQAMARLEQLRTVQGIALPPRLKSEIKRELHRLTLVVEMIATLEAERDAIVENEASTHVNAEKIQALHKLKAIGSEFATVLVGEIFHRDFNNRRQLASYVGYAPSPFQSGNVAHDQGISKAGNRKGRTTGIELAWLWLRYQPDSDLSAWFRARVGTVKGRIRRIAIVALARKLLVALWRYLETGLVPRGAVFKS

SEQ ID NO: 172355 - protein, 381 aa, unidentified
MEKDTRHVGLDVHADTIAAAVAEPDGEVRPLGIIPNRPEQVRKLMKRLGSTAHLKVCYEAGPTGYVLYWQLTGMKIHCDVIAPTLVPVRAGDRVKTDRRDAVKLARSYRSGDLTPVWVPDAAHEALRDLVRAREAAKGDHLRARHRLQKFLLRHGRRPPEKIRPWTERHLEWVRREVRFEALAQQAVLTDYLAEVEHARERIGRLERSIDDAVEGAPTTQRAVIEALQALRGIAKVSAVTIVAEVGQLSRFARPRQLMSYAGVVSREDSSGGRIRRGAITKTGNAHLRRIVGEAAWACRHKPSVCRALRVRQQNLPETVKEIAWKAQHRLHSRYRRLLGKGKPKQQVVTAVARELLGFIWAIGVHVERTMVATDGKKRPAA

SEQ ID NO: 172356 - protein, 344 aa, unidentified
MGVAVGVDSHKESVAAATVDELGRTLEGRRFANDSTGHDEVLAWVQSNPDVTRIGIEGSGVYGAALARVLMAAGEDVREVPPTLTFRERRRNGSHGKSDPVDAVAIARVVVREGALSSPRRTAVWDDLKLLVDYRDQLVRVRTQLSNRIHRDLVVVHPGYQKHVPDLRSKKNVAQAAKLLRGDRSVRAELTRRRISQLRRFDQELTANKTEIASTVARSETTLTELPGIGVLIAAKILAETGDVTKIRSQSAFAMLAGTAPLQASSGATSRHRLNRGGNRQLNHALHYMALVQYRSHPAARAYIERKRAEGKSFKEAMRCLKRQLAKVVYRRLLQDALGLENAA

SEQ ID NO: 172357 - protein, 370 aa, unidentified
MDEYREAFVGIDVAKLKNAIAIAEGERDGEVRYFGEVDASLVNMTRVVKRIASKYDRVHFCYEAGPTGYGLYRLICELGHHCTVVAPSLIPRKPGDRVKTNRRDATGLARLLRAGELTAVWVPDAGHEAMRDLVRARAAAVETLRAQRQQVSAFLLKHGRYYPGKTTWGARYLRWLQAQRFEHMVQQMVLHEAIDAVRVAGERVRRLEHTIEEFVPSWSLAPVVLALQALRGVDLVVAVTFVAEIGDLRRFSNPRQLMGFLGLVPGERSTGETIRRFGITKAGNGRVRRLPVESAWTYRHPPRVGTAKLHKLEQVSPKVREIAWKAQTRLTARYRALSRRGKKMTVVCTAIARELVGFMWSVASEVQPIV

SEQ ID NO: 172358 - protein, 404 aa, unidentified
MPAKSRFRQLRFRLPITPFSGNFGTHLSDKWDEQVLQIGETVLMKKPTQHLIAEVPRSSSKVEMTIGIDLGDVWSHYCTLNQDGEVVDRGRFRTTPASVDKWFTDLPRTRIAMEAGAHSIWISEQLQELGHEVLVANVRELRAISHSDRKSDQADAEKLARFARMDPKILRPISHRTIAQQEALTLIRARNLLVRLRTAAVNAVRGLAKPCGYRLPASSTLCFAKRCVEVLPPGLVQALGPVLEQIASLTVKIKHYDRLVKQLTETDYIETQALIKVYGVGDLTALTYVLTLGNKQRFKRSRDVGCYLGLRPRRSQSGDRDPQLGITKAGNVYLRSLLVECGNHVLGPRGKDSTLRRWGLHLAERGGKQSRNRAIVAVARKLAVLLHRIWVTQEPYVPFYAEAA

SEQ ID NO: 172359 - protein, 407 aa, unidentified
MDVVYPRCAGLDVHASSVTACARIAAGHEVTYQHRTVATTTAGLLDLAEWLSAAGCTHVAMEATGVYWKPVWHVLEGQFTLVLANAMHIRNVPGRKSDVNDATWIADLLAHGLIRSSFVPPAPIQELRDLTRTRKQLVGEIVRHTQRIQKALEDANLKLTRVVSDILGTSGRAILRALIAGETDPERLADLTTGRLKASRAQLVEALHGRVTAHHCFLIELHLTQIETLEAAVEKIERHLGDALAPFRAAVDLLTTMPGLSETAARVLVAEIGTDMTRFPTAGHLVSWAGLCPRLDTSAGKRHSTRIRHATPWLKTTLIQGAWAATRKKDSYLHAQFVRLKSRRGPKKAIVAVAASMLTAAYFMLRDGVEYADLGGAYFAHRDVEETKKRLLRRLRDLGVVVEVKAA

SEQ ID NO: 172360 - protein, 389 aa, unidentified
MFYLGIDIGKNTHVASLIDSKKKVLFKAFSFSNSIDGAESLICKLEPFKNQLEIGMEATGHYWLSLYSYLSEKNFTVRVINPIQTDGWRQGIEIRKRKTDIIDSLLIADLLRYGDFVETSLSNEDYLSLRNLSRFRSYLISSIGDLKRKTIALLDQVFPEYASSFSNIFAKTSKEILANFSSPSDFEDINSEDLQSFLDNVTMKKFAARKLEELSKKASKSFGVNFCMDSFGLQIKMLIGQISFIQNQVLDVEKEIKSLLEKLNSPITTIPGIGAVNAATILGEIGDIKRFSNPSKLVAYAGLDSTVSQSGNFESTSNHMTKRGSPYLRRALFQSALRAEFCDPVFSDYYQKKITEGKHHLVATNAVARKLVHTIFAVLTKDEPYQVQS

SEQ ID NO: 172361 - protein, 439 aa, unidentified
MIHTTQKEETEFAAFLGIDWADQTHAWALQIPTHSGVEHGEVAHTPEALEAWAAELAHRFGGRPIAVAVEQSRGALLFQLTKYAHLVLFPVHPATLASYRKGFRPSGAKSDPSDADLVVDLLVHHREKLRRLNPDSEETRTLQFLVEGRRKFVDDKTRYSNRLTAYLKIYFPQALDWFFEVSSQIAGDFLECWPTLRQAQKARAETLRRFFKQHNSSKSDSIERRVEEIRNAVPAIQDAAVIDSCSTAVLAWVRMLRELRETIAAYDQKIESLARQHPEFAIVDSLPGVGPVLAPRLIAALGTQRDRYRSASELQSYSGIAPVLASSGKQHWVHWRWACPKFLRQTFHEWALHSLPYSAWAKAYYDQQRGKGKPRNTVLRALAFKWIRILFRCWKDRKPYCEEIYRQALHRRKQMTTSSPVQLQWKTCAGFSKIAGLTS

SEQ ID NO: 172362 - protein, 388 aa, unidentified
MANCLMIGCDLHDQTMLLKIAVDRPPPQMRSWGTDATARQKMIADLQTRAAADQTQRIVFAYEACGFGFRLHDELVAAGIECYVLAPSKMPRSASQRQRKTDERDAQMILNIVRSFVLAGVELPAVWIPDLATRDDRQLIRRRLTVAQEAAKTQTRIRRQLKGLDVTAPGTLKNTHWTKAYEAWLEELETPQLPARNGHGAAAARARLRRHLTWLRAEVKLLDQQVEALAQTPRYPALVTALCQHTGIGVLTALVYLTEMGDLTRFENRQQVGSYLGLTPASHATGQDGDRKSHIPRQGPTRVRQVLCPAVWVRLGHVAKEQLAYEALVARNPKHKKIAVVARMRVLGITLWHTGVEVLHAQRAKGKSAHAAPPEPAPAQQTPAVRAA

SEQ ID NO: 172363 - protein, 345 aa, unidentified
MEPMYYIGLDVHKRKISYCVKDSGGKVYSEGSLTATRLDLDVWMKTLPQPWSAAMEATMFTGWIYDHLKPHAAALKVAHPLMLRAIAAAKKKNDRIDANKICDCLRCDFLPECYMAPTAIRERRRTLRYRNLLVRQMVQMKIKISSLLMEAGVSYNKQRLHKAGYFRELLATNPDINEGLKPLLQLCRETVVRLQKTESAMVRSLERDSLLMDRVERLMTIPAVGPITALTWTLEVGDVQRFSSIKKAISYCGLCGAEKSSGSTVQRTPLSKQRNKHLQTTLIEAAKMAPRNSPELAMLYDKEKQKGNANRATLAVARKLVAYLVAVDRRQKEFLTVERENRNAA

SEQ ID NO: 172364 - protein, 299 aa, unidentified
MLQAHTLSVGMEGPTEAIAVASVAQEQGADVIALGTLGTRPGASDPLIRPLQSQSTPRVCVDDAGPCGAGLSRSLTQTGAVGWVVAPSVRPTKAGDRVTTDRRDARPLARRMRSGDLTPVAVPAVHEAAIRDLRRAREATLRDLQAAQVRLTACWRRQDSRSTGQAPWSPAPRRWRSAGGCPTPAPPMVWQEAVQTVTAPTARWPRREHARHAQVPPWRCAPVVEALQALRGVQCPVAVPPVAALGDLTRCETPRHLRHDLGLTPAESSRGARRPQGRMPQTGQTHARRALVAGAWASR

SEQ ID NO: 172365 - protein, 311 aa, unidentified
MTITLETPQPRLIVGVDTHQRAHHAVIIDTTGRRVADAEFAASAAGYREVMDWAAGYGQVEAFGVESTGSYGAGLTRQLLAEGMDVFEVNRPDKTTRARQGKSDAIDAEHAARAVLAGTATGRPKVSTGVVEAVRALLVARSGAVKARTAAVSQLRDLVTTAPEELRELLLPLTTPARVVKAAALRPDLTRLHEPAHAARHALRALARRIQALDKEMKDAEKALAPLVATAVPTLVARPQIGTLTAAQLLVTAGQNLDRFRSEAAFAKLTGTAPLPASSGKTRRMRLNRGGDRQANKALHLIAVGRLKTDP

SEQ ID NO: 172366 - protein, 358 aa, unidentified
MGKSREDFSKVTRVGLDLAKSVFQVHAVDAAGGVVATRQLRRGGIAEFFGRLAPCLVAMEACASAHHWGREIAALGHEVRLIPPAHVKPYVRRNKTDAADAAAICEAAMRPGQRFVPLRGMENQAELMRHRVRELLSGQRTALLNALRGHLSEIGIVAPQGAQHAYRLKRLLADGADENGEIVVAASVREALAPLEAEIEALDAAIGEIDDELAAKAKADERARRLMTIPGIGPVIATAIVATVRDVEGFAGGREFSAFLGLTPRQRSSGGKARSGRISKMGDRYLRKLFVVGATAALCHAGGHDDALRRWAKDTLKRKAGLKYAFKLTAVALANKLARIAFALLRSGAVYDDRPVAA

SEQ ID NO: 172367 - protein, 418 aa, unidentified
MAMKIVRFNCCGMDVHKNLVVATIGITDRKTNVTEYFQRSFSTLNSDLYRLKDWLRSHHCSDVCMESTGKYWIPIFNILEDEINVHLTHPKYVKAIKGKKTDKKDSKWICDLFKHDLIKFSFIPPKEIRELREIARYRYKLVCMRSSERNRYQNCMTVSNVGLASVVSDPFGKTASNIMKEVMKSNVIDDDKILKLVHKNCKNKDKILDSLHGYHIESDQRFKMEKSLDHMEYLDQLIDSCEVELIKRAYPLRRSFQHITQIKGISALSAILIISEIGIDMSQFESDKQLVSWAGLSPANNESAGKKKSVRISKAGQYLKPLLVQCALSAIKDKASYFGRKYSNIKKRRGHKKAIIAIARMMLVSIYHMILTGEEFNPSDYESFMDPKPNADRSLTVEKALNFLKRSGIDISSIPVNL

SEQ ID NO: 172368 - protein, 369 aa, unidentified
MNKNILFIGMDVHKESIEIAIAEGSSQEARRYGEIGGTRDAMRKTLHKLVSSGKSLHFCYEAGPCGYELYRYLVSEGHDCWVVAPSLIPKKSGNKVKTDKRDAVQLARLFRAGELTPVYVPDREDEAIRDLSRAREDAMLVQKSARQRLKSFLLRHDIRYQGKTSWTEAHLRWLAEEVRCPSAAQQVVFQEYVNTVTEAQHRLRRLDEQIEVFVKQWRLYPVVEALMSMRGVKMIVAVTVVSELGDLSRFDNPKQLMSFLGLTPSEHSSGPRRSQGRITKTGNGHVRRILIEAAWCYRYPAKVSREIQLRQERLPLVIRDIAWRAQLRLTQRYQHMQRKGKPHNVTVVALARELAGFMWAIADEVKYPR

SEQ ID NO: 172369 - protein, 419 aa, unidentified
MNKIKTRKEEIVNPRTLIATVDIGKASNMGYCRCPHGREIKPFEFSNNAGGFQKFWDRICWTKAEHHLEEVVVGFESTGVYGEPLVNFLKEKPVKLVQINPMHTKRMKDLEGNSPGKTDRKDPKVIADVIELGHALSVVIPEGAAANLRRLSVARERALQRRTVFYNQLQDLVFLLFPEFLQVMNDIKTRSALYLLGHCPTPEEMVSRGLEALTRILRKVSRGKLGKERAEALYEGARTSVGLQEGRKGILLEIREIVSQLEACKQFIGKLEQEMSRDLKEIPYSNSLLSIKGIGEVTVAGLIGEVGDFRQFHTLSEITKLAGLDLFEISSGKQRGNRHISKRGRPLLRKLLYFAALNTVRKKGVMHACYQAYLKRGMLKGKALIAIARKLLRILFALVRDHSQFVQGFSQAELLDLAA

SEQ ID NO: 172370 - protein, 412 aa, unidentified
MEVVHVRCAGLDVHKKRILACVRIVGKGGSVEKQVKTFGTTTGDLMVLSDWLRACSVTHVAMESTGIFWKPVYAILEGSFTLLVVNAAHMKAVPGRKTDVRDCEWIADLLAHGLLRGGFVPSVEVRDLRDLTRYRTSLVNERTREVNRVHKLLETANIKLTSVATDVMGVSAQAMLKALLDGTTDPDILADLAKGKLRQKLPELKKALEGRFTAHHRLLLGTILAHIDFLDETIAGIGKEVTLSMAPFQKEAEMLDAVTGISVRVAETIISEIGVNMDSFPTEKHLASWAAVCPGNNESAGKHKSGKTRKGNAYLKRALTEAAHACCNAKDSYLGARYQRLIKRKGRKKTIVAVAHTILVIAYHILKYKTPYRDIGSDHFDKLNKQHLMRYHQKRLQSLGFKVTIEALEEAA

SEQ ID NO: 172371 - protein, 270 aa, unidentified
METMYYIGLDVDKKLISYCVKDVSGRMHAQGKIPATRYDLDLWMKTLPQPWTVAMEATIFTAWIYDHLRPHAAAVKVAHPLMLRAIAVAKKKNDRIDAKKIADCLRCDFLPECYMASTEIRERRRTLRYRNLLVRQAVQMKNKIAVLLMEAGVSYNKQRLHKAGYFRELLATNQDIDEGLKPLLRLCRETVVRLGKTESALVRSLERDSLLVERVERLMTIPAVGPITALTWALEVGDVQRFSSIKKAISYCGLCGAEKSSANITQRTPL

SEQ ID NO: 172372 - protein, 316 aa, unidentified
MAKEVTEITLGVDVSKDTLVICEWDSGELTELANDPESLPGWLRGLTGPVRLAIEPTSSYHLALVDAAQRRGCTVYLVNPRQLAHYRQAVNARNKTDPADAWLLARYLAHEGEQLRPFEPASGQARELWALLSRRAVVVQSRNQLTQSFRDSGFSTQRLMSEIKRVVRRLDERLLALVRALGWEGDYRRALSIPGIGPLNAVALVATFHRGAFASADAFVAYLGLDVRIRESGTYKGKRKLTKRGPAELRRLLYCAAKPARTYEPFADYHQNQLDKGLSKIAANCILARKLARIAFTLIARQQTFQKQEIAYSQAP

SEQ ID NO: 172373 - protein, 417 aa, unidentified
MIRKVMEVIHQCVGGLDVHKKTVMACRRRMLGDGQVESEVREFGTSTLQMCGLSKWLSEWGCTQVAMESTGVLWIPVWNVLEADFKLLLTNAQQLKKVPGRKRDVGDAEWIAQLMQCGLLKPSFVPSREIRHWRTLTRQRMKLVDQHTSVVNRMHKVLQQGNIKLSSVATDVMGVSGRAMILAMIEGESDPEALASLAKGRLKSKHEQLVESLEGRLNQDDRWVMKELWEQMEYLEEEIVRYDDQIKEKMSPYEESLRRLMTIDLIERRSAENILAEIGPDMSFFPSDDNLVSWAGLCPGSDESAKKNRSGKTPKGNQWLRRALVEPAWGAARRKDGYLGAMYRGIAVRRGEKRAVIAVARTILQAAWHVLSKGVEYKERGGDYFDRQNSEQTKIKLIKRLERLGYEVDLKPKQATV

SEQ ID NO: 172374 - protein, 343 aa, unidentified
MKLHVLGIDLGKTVFHLVGLDSTGRVVIRKKCSRTQLLAFTANLQVQLIGMESCSGSHFLGRALRQQGHEVRLMPAQYVKPYVQTNKSDFLDAEAIAEAVQRPRMRFVPIKTEEQLDLQALHRVRERWVMRRTAVVNQIRSLLLERGLTLPKGRRHVDERLPRILEDAELRLSGAFRVLLAQLQVELEQLTARIEQMDAVIQKTAKEDEACQRLTAIPGVGPVTATALIAAVGNGSAFRKGRDLAAWVGMVPRECSTGGKQKLLGISKRGNRYLRRLFVQGARSVLQQRSQQAPGLSVWLAQLLARTHQNVVVVALANKLIRMAWAVLCKNERYRAPVLAVST

SEQ ID NO: 172375 - protein, 341 aa, unidentified
MQITTIGLDIAKNVFQVHGIDAAEKVVVRKQLRRSQVLKFFEALPPCLVGMEACATAHYWARELRKLGHQVRLMPAKDVKAYVKRNKNDAADAEAICEAVRRPTMRFVEVKSAAQQGRLMQHRTRDLLLRQRTQAINALRAHMAELGIVAAQGREGLKKLLTIIADEKDERLPVDARASLIVLAAQLQALQTMIGSIEKRIIAQHRASEESKRVATVPGIGTLGASAITATVTDPTAFRSGRDFAAWIGLVPRQDSTGGKQKLGPISKQGDRYLRRILVVGAHSVLRRAKQSPQKYPWLTELLARRPFKVVAIALANKMARVAWALLVRGGTYRVPALAAA

SEQ ID NO: 172376 - protein, 426 aa, unidentified
MSDSEVLGQELQFSAFVGIDWADQKHAWCLQAADTTRRENGEVEHTPEAIEAWVGQLCRRFDNRPIAVAVEQVKGALVFMLSKYGSLHLFPVPPTMSAKMREALYPSGSKDDPRDADLLLELLLQHRDKLRRLSPDSEATRRVQNLVDERRNLVDEKTAQINRLTHQLKIYFPQMLEWFEQLDTELVCTLLERWPTLEELQKVPPERLRTFFHKQRCRYPELIERRLIGIRQAIPAIQDRAVIEAKSTVVKVSAQVIRSLVRGIADVDRKIEEAAAAHPDFFIFESLPGAGAVLAPRLLAAFGSQRERYASAEEVQTYSGIAPVMKRSGKKKWVHFRWACPKFVRQSFHEWAGHSIAHSQWARSYYQQQRERGKGHHAAVRGLAFKWIRIVFRCWKDRAAYDESRYLMTLAKRNSPLATFPGGAML

SEQ ID NO: 172377 - protein, 343 aa, unidentified
MKVTAIGVDLAKNLIQLHGVDAQGKVALKKQLKRNQVLSFFANLSPCVIGMEACAGAHHWARKLESFGHRVKLMAPQFVKPYVKTNKNDAADAEAICEAVTRPSMRFVPTKNIEQQAVLALHRARQGFVKARTAQANQIRGLLAEYGIVIPQGLSHISKRVPMVVEDGESELPGVFRQLLQRLVEHLKEIDRQVLELEARIQLWHRQNEASRKLAQIPGIGPITASALVASIGDAKSFANGRQLAAWLGLVPRQHSSGGKQVLLGISKRGDVYLRTLLILGARAVLRILEQRTDCTQAWLKRLLARRNSNVAAVALANKNARIVWALLAHGREYDAAYAAALK

SEQ ID NO: 172378 - protein, 302 aa, unidentified
MQTQVTKKIDFKGKDLFIGLDVHKKSWSVTILVEGMEHKTFTQPPDPQALYNYLQKMFPGGTYYSAYEAGFCGYGIHRELNDLGIKNIVINAADIPASQKDQLQKRDPVDSRKIARALEKGLLRAIHIFDRDMEELRSLNRTRFYLMRDLRRSKNRIKSFLQYYGISIPLEYDNNLWTLKYIDWLKQIQMKTLSGQDAFSNLIRSYEYHREQILTLSRQIRLSIREYDNELYSLLKTISGIGPLTSSALITELGDINRFPHLNHLSSFVGLVPRVKQSGETTYTGGITFRCNSYLSVYSEIN

SEQ ID NO: 172379 - protein, 341 aa, unidentified
MAELECTRSIRNSEPVLLIDESERSLRLFLGIDISKRDFHAALLAGDLPTVKSFPNNSRGFSQLASWLRKGNASGVHACMEATGVYWESLAAFLHAEQHDVSVTNPSQIKAFASSELLRVKTDSVDAALIARFCRANRPGYWAPPGPGVRELQTLVRRLEALKGDRHQQISRCADAKREPEIRALIRSFDRAIKETERKIRLSIRNNDKMREQSDLLCSIPGVAEKTAAVLMAEVFLRSDFSGAKQVVAYAGLAPRIRRSGTSLRTKSGLSKSGNSRVRKCLFFPAIVGSTRNPALKAFAARLAAKGKPKMSVVGALMRKLLVLCYGVVKSGVRFNAALAA

SEQ ID NO: 172380 - protein, 343 aa, unidentified
MYYIGLDVHKRTISYCVKDAAGRVHSEGKIRSTRQELDAWVRTLPQPRMIALEATIFTGWIYDYLLPHAEKVKVAHPLMLRAIAAAKKKNDRIDASKIADCLRCDFLPECHMASTAIRDRRRVLRYRNLEIKQSVQMKNRVSGLLMETGVSYNKQRLHKVGYFRDLLCRNEEVSDSIRPLLKICREQIERSQKLDYALVSRLERDPLLKDRLERLRTVPGVGSITALTWALEIGDFTRFASIKEAISYCGLCGEEKSSADKVMRTAISKQRNKHIQSVLIEAAKLAPRDSHELAMVYDKERLRGNANRATLAVARKMVAYMLAVERRQQDFVPAEEFRPTAAA

SEQ ID NO: 172381 - protein, 323 aa, unidentified
MSTKATKKRRSFIGIDVSKKLLEVGVHQSDYHFRCPNDPKNFPALITELISLRPARILLEATGGLERALLQALHAAGLPVVVVNPRQVRDFAKALGLLAKTDRLDARVLAHFAAATQPAIRPVKAQEETELDALMGRRTQLSDMLAQEKNRRGSAATKGTRDDIEAHIEWLEERLQELDEKLKEQLKCSAVWQQKDKILQSVKGIGFVTSMSLLADCPELGQLNRHQIAKLVGVAPLNRDSGQQRGARHIWGGRAQVRGKLYMATLAATRFNPVLKSFYQRLLAKNKLKKVAIVACMRKLLTIINVMVRENKLWNVKAQPVSA

SEQ ID NO: 172382 - protein, 341 aa, unidentified
MNEVTTIGLDLAKNVFQIHGVDASGRIVVRRQLRRSQVLPFFEKQAPCLVGIEACATSHHWARQIAKFGHEVRLMPARYVKPYVKRNKNDAADAEAICEAVTRPTMRFVEVKTEEQQSVLMLHRTRQLFVRQRTTLINAIRAHMAEFGIVAGIGRNGVERLLRLIDEGSDGRVPAVARECLQALRAQLVLVKRQILEADRRILAWHRSNELSRRLETIPGVGPLIALVASIPDPHAFGSARDVPAWIGLVPKQNSTGGKARLGSISKAGNRYLRSMLVVGALSVIRRAKQVGYTRRAWLAELMARRPTKIAVIALANKIARIAWALMVSGTRYREPAPQAI

SEQ ID NO: 172383 - protein, 405 aa, unidentified
MSIAAHRSEAPSAVRVDLSAIFISIELSQSKWLITSLSPGGGEKLSKFTLPASDVAGMLTRFAELQRKAKVRTGQAFPLVVIQEAGLDGFWVHRVLEGEGIESHVVDPASIAVSRRKRRVKTDRIDGEMLVRTLLAYKRGEPRVCAMVRAPTPEEEDRRRVSRERKALTIERTRHVNRIKGLLFGQGVNGYRPLRQDRRKRLDELTTGDGRPLPAQLKAQINRELDRLELVMQQIKACEETRDALLAAAHPAAMTDASNLASAAEQSAPAPSVPAMLLQLKGIGPEIASVLWLEGLSRQFDNRRQVAAYAGLAPSHWQSGKIDHDQGVSNAGNPRLRTTLIQLAWLWVRHQPDSALTVWFKTRVAQNGGRLKKTTIVALARKLLVTLWKYVNAGVVIEGAVVQPA

SEQ ID NO: 172384 - protein, 350 aa, unidentified
MSATRFVYCEQTIKSVFQVHAVDESGKAEVRRKLRRSELRAFFEKQEACTVVMEACGAAHHWARVLIGLGHDVKLLAPEAVRPFVKKGKKNDAADAAALCEAASRPDTRFVPVKSLEQQGVLALHSARALLVKQRTMLANAMRGLATEFGLVVPKGMGRLEELVTLVEEDGTFPEQARGVFAGLLEQCRATAERIEALEAEIVAHARGDDTARRLATVPGIGPITASLIAATVGGNIRAFRSARHFAAWLGLVPRQRSTGGKTRLGRITKAGDREIRTLLVLGATSMVYRAAQWDSAAGAWTRGLLARRPVRLATVALANKMARIAWALMTREEIYRATGHAAAASAATA

SEQ ID NO: 172385 - protein, 400 aa, unidentified
MISVGIDVSKGKSTVCLLKPYGEIVCKPFEVQHTEKDLEELANLLQKLDGEIKIVMEATGIYHLPILTFLLEKGFFVSVINPLMMKRFSKDNSLRGAKNDRLDSVMIANYGIEKWYKLKKYEVNDRIYAELRLLGRQYYRFMQTHVKHVQELTHLLDYTVPGLKAMFNSWNEHSNRDKLSDFVERFWHFDLITSLSREEFVEQYLLWAKEKKYHQSRSKAEKVYDLASNGIPTLSSHTPSTQLMIQGAINVLRIVNNSLYHILSRMKELAKSLPEYATVRSMGGVGDSLAPRLIAEIGNVKRLRNGHSLVALAGIDPPPYESGQFVGTHRRISKRGSPILRKIGFEVMRMLKSHKEPEDNAVYNYILKKEAEGKNKKLSKIAGLNKFLRIYYVRVMEVYQ

SEQ ID NO: 172386 - protein, 470 aa, unidentified
MAARKDKADGAGVPGHGGDGAEVAEELTQVVEYAAAIDVAKGSGMACTRVPGSRPDRRRQKVWQVGATFGEVTALMDHLRCEGIQRLVLESTSDYWRIWYYLAEAAGLEVWLVNARDVKHLPGRGKSDTADCVWHCKLNERGMLRRSFVPPEAVRDLRMLTRTRTRLAQDQARHQARVEKILEDALLKISVVISDLFGVSGRRFLDALVAGERSPAALAALGDYRLKASQAKLEEALTGRFRDIHATEIALHLRLIDAINAEITALDEQIGQQLAAVPGTAPVCTACGLAGGGHAPDCDDLGILLLGLADRLDEVTGIGAVNGRAIIAELGTDPSQFPTPGHAAGWARLTPRSRQSGETARPGRTGKGNRYIRGALGQAVMTAAKTDTRLGAMYRRIARKRGKQKAIVAVARVICEIAWILICDPSARYQELGPDYYTPRSPARQTQARIREIERLNPGKKVILADDDAA

SEQ ID NO: 172387 - protein, 460 aa, unidentified
MPRRPKAPLASNASLSLPAQLQHLNLHAAGIDIGSTAHFVAVPPDSDPQPVRQFGTFTADLHRLADWLTACGVETVVMESTAVYWIPLFELLEERGFHVLLVNARHVKNVSGRKSDVLDCQWLQQLHTFGLLSGAFRPADEIVVLRSYLRQRTTLVQGASAHIQHMQKALQQMNLVLHHVVADVTGVTGMTIIRAILAGERDPQVLAQNRDPRCKNSAEVIAQSLVGNYRAEHLFALQQAVTLYEVYQAQIAACDEQIDRYLATFTPVCEEPPPTPAKPRQRSGNPFHFDAHAQLYRMTGVDLTRIDGINSVTALTVLGEIGTDMSRWKTVKHFTSWLGLCPGTKVSGGKVLGSKTKPTANRAAAALRVAAASLSRSQSALGAYLRRMSARLGKPQAVTATAHKLARLVYSMLKHGTEYVDAGQDYYERQYKERVVQNITRRAKELGFVLMPEPAETAVT

SEQ ID NO: 172388 - protein, 456 aa, unidentified
MAEKKRKRGKSSGQLSTINEHAAGLDVGSTFHVVAVRSDQDDEPVRTFRSFSGDLHAMATWLKSVGIKTVAMESTGVYWIPVFEILEADGFEVRLVNARDVKNVPGRKTDVNDAQWLQQLHQHGLLRGSFRPREGVACLREYLRHRQGLVEYAASHIQHMQKALMQMNVQLHHVVSDITGLTGLKVIRAIVAGNRAPEELAKHRDPRCAASEATIREALTGNYRPEHVFALKQALELWDVYQAKIAECDVAIEAALKSLNDNRPPPPETTLPRRRKSNVKHEPDFDVRTALYRMLGVDLSQIDGFAPYTVLRLVGECGDDMTKWPTEKHFTSWLSLAPGNKISGGRVLSSRTRRSSNRTAALLRLIAVSVGKTQTALGAFYRRLGARIGKAKAVTATARKLAILFYRALRFGMTYADPGAKYYEERYKRRVIENLGRRARTLGFQLVKTIAAEGVS

SEQ ID NO: 172389 - protein, 348 aa, unidentified
MHKRIAVDLAKSVYQVAESVHVGQVSQRKRLSREAFQRYIQEQIEPVEWVMEACGTAHYWGRLAQSLGHRVILLHARYVRPYRRRNKTDRNDCDAILEAGRCKGIHPVPVKSHEQQQVQQLHGLRETWKKSRTQRINLLRGILREAGIEAPAATAAFLRAAQELVDRPEVAPLSGQLHIVLAEINLYEQCMIECEQQLKRWHADDEIVHKLDEVSGIGLLTASALKAAVGQPERFASGRQLSAWLGMTPREYSSGNSRKLGHISRQGNTYVRTLLIHGARAALLAAQRCQAKTPERLTALQRWATQTAARIGHNKATVALANKMVRICWAVWCHERRFSGNWQSKQPA

SEQ ID NO: 172390 - protein, 339 aa, unidentified
MTMIGIDPHKATHTAVAIDDDEGVIDLLTLQACPGQADRLVAWADGFTDRVWAIEAANGLGRLVARELVARGETVVDVPPVLASRVRLMGSGRSQKNDPNDARSVAVAALRSDHLARVTADDAVTVLRLLVKRHRDLAQSKAKTANRLHALLIELVPGGIVGKINVRNASSLLDDITRLDEPTRIRVLVAREIIADMQRLDDASKTSKRRIAEAVATAGTTLTDIAGIGPIGAATIIGYTTDITRFPTKGHYATYNGTAPIEASSGARTRHRLNPRGNRIINHAIHIAAVTQLRPDTNGRTYYQRKLAEGKTSKEAIRALKRRISDAVYRQLTIDAANS

SEQ ID NO: 172391 - protein, 340 aa, unidentified
MKQYGAIDLHSTNNVTVVIDEQDRVVYQKRLPNDLALILKELSVYQSELQGIVVESTYNWYWLVDGLMEQGYRVHLANTAAIQQYEGLKYTDDHSDARWLAHLLRLDVLPEGYIYPRAERAVRDLLRKRSQMVRQRTTNLLSIQNLLTRNTGSSLSAHQIKGLDVQQVDQLLAEPDLALAVKANLSVMSSADQQVELLEQTVVQRVKLRAQFSYLKTVPGIGEILALTIMLETGDIGRFFSVGNFASYCRCVGSQKISNGKKKGQGNTKNGNKYLAWAFIEAAHFAVRYNAKIKSFYERKKAKTKIVVALKAVAHKLCRACYYVMRDRVAFDTSKAFGQN

SEQ ID NO: 172392 - protein, 339 aa, unidentified
MNLTPVGIDIAKSVFQLHYVDAETGEIVNRPIKRSRFLEYFANRAPCLIGMEACGGAQHWARELIKMGHQIKLMPAEFAKAFNIRNKNDAADARAVWLAVQQPSKAVAIKTEAQQAVLALHRMRQQLVKFRTMQVNSLRGLLTEYGEVMGRGRAALDKAIPAVLARISDRLPMVLIDTLREQWDGLTKLDEHISVIERRLRQWMLEDKAVKAITAIPGVGVLTATAAVATMGDAKSFRSGREFAAWIGLVPKQTGSGGKVTLLGISKRGDTYLRTLLIHGARSVLHHVKEPGPWVEQIRKRRPPNVVIVALANKMARTIWAILAHDRPYQKGYVSAKPA

SEQ ID NO: 172393 - protein, 338 aa, unidentified
MQIKVVGLDIAKQVFQVHAADIEGRPVAKLRLRRAQVLEYFRSLPPCLVGIEACATAHHWARELMALGHDVRLMPPGYVKPYVKRNKTDAADAEAIAEAVTRPTMRFVPVKSAENQAMLMLHRTRELLVRQRTMLATALRAHLAEFGIIAAQGIHRVEKLAAHVHEPSVPPLAREALMQIVDELASIWRRIDAVEERLVALHRTNPVSRRLVSIPGVGPITAMAIANTVTDPSAFRSGRQFAAWLGLTPKGHSSGGKDRLGRITKRGDRYIRHLLYVGAGNVIRFARARAATGEAWIRSLQERRPPKVVIIALANKMARVAWALMAHGESFRPSVAVA

SEQ ID NO: 172394 - protein, 342 aa, unidentified
MQITTIGLDIAKNVFQVHGIDAAEKVVVRKQLRRSQVLGFFKALPPCLIGLEACATAHYWARELTKLGHQVRLMPAKDVKAYVKRNKNDAADAEAICEAVRRPTMRFVQIKSAEQQGRLMLHRTRDLLMRQRTQVINALRAHLAELGTTSAQGREGLKELLKIVASDADERLPADAHASLVVLAAELQAMQTLIGSIEKRIVTQHRENKASKRLLTIPGIGIIGATAIADTVTDPKAFRSGRDFAAWIGLVPRQDSTGGKQKLGPISKQGDRYLRRILVVGAHSVLRRAKLNPKKHPWLTQLLARRPFKVVAVALANKMARMAWALLAKGGAYRAPALAATA

SEQ ID NO: 172395 - protein, 264 aa, unidentified
MAAGDTAELLECIAEAKRRCELAQEAKVHSCYEAGRDGFWLHRWLLERGIVNIVVDSASIEVNRRARRTKTDRLDGDKLLAMLIRYRAGERRVWSVLRVPTAQQEDERRVHRELERLVQERTAHINRIRALLVMQNLRVKYVGGRLWQRWWSAHAGELVPGVRAEIEREGERLSLVRAQMRAIEAQQHQAVVGGREPQVARLAQLGAIGVGSGWVLVKELFGWRQFRNRREVGGCLGLVPSPYASGQSQTEQGISKAGNRRVPR

SEQ ID NO: 172396 - protein, 332 aa, unidentified
MYLGIDVHKRYAQVAVMDEAGKIVEEVRVENANLDELAQRYAGAQAVLEATSNYYHIHDTLSEHLDVTVAHPKKINQIADTDKKTDRVDAKELARMLRLNSVPESYVPTEEVREARALVRGRQTLVENRTKYANKVHGLLSDHGITEDVKPLTVEGRESLRGLSIPTPFDTLLESYLDLIESLTEEIQKLDETIEERAGSLKETQLLMTIPGVSYYTALTIYAELGGIDRFDGDKEVVSYVGLNPVIRESGDSRIEGGISKRGSGRVRWLLVQAANTAVHTSNDEYLSRFYDRLASRKNSQKAIVAAARKMLVSIYHMLDRGEAYDPPGVTA

SEQ ID NO: 172397 - protein, 404 aa, unidentified
MTDRNVCPCIFLCVTIYEITMVLLKVFLPCCAAGQERRGADRVCPGPAEFSRPSVAGSPLGFSYSPEQSPEPYSHTRSYYKEGQTRMNQQVHYIVAGIDVSKATLDLAIANQRDAYHIRYDDEGLALIIEQCFCANVSLVILEATGGLERKLVAALANANLVFHIANPRQVRNLAKATGQLAKTDKIDARVLVDYGLKLQPLPHRLPSKNKLKLHDLSVRHQQLVQMQTAERNRLHASQEPVVADMIEQHLALIDQQIKQVANVMDQLIEQRDELKRKAAVLESACGVGSLTARRLIAELDELGQRSPKQIAKLVGLAPLNRDSGTLRGKRTISGGRRHVRKALYMPTIAAIRHNPVIKRYYQNLITAGKAKKVAINACMRKLLIYLNAMIRENKMWTELAINN

SEQ ID NO: 172398 - protein, 347 aa, unidentified
MDHIGIDVHKKESQICILAEGGEVLEQRIRTEPARFAAVLGARPRGRIVLESSTESEWVARCLEGLGHEVVVADPNFAPMYATRTRKVKTDRRDARALADACLLGAYRPAHRLSDPQRHVRARLLVRDAIVRTRTRYISLIRALLRQHGYRMPSGSAEGFLGRVRAVALPGPLRSQIAPLLAVMCHLNRQLAYSDATIERIAAQDPRVQRLRSVPSVGPVTAAAFVATIDDVQRFHHAHQVEAYLGLVPRESSSGESQYRGHITKVGHARMRWLLIQVAVSILRRRPPEADALRAWALRIAVRRGKHVAVVALARRLAGILYALLRDGSVFTPRAAPHPDAVAAAPA

SEQ ID NO: 172399 - protein, 347 aa, unidentified
MRFYTNQHPFYCGVDLHARSMYVCIVSHDGEILLHRNMKAAPEPFLKAIAPYRDGLVVAVECIFTWYWLADLCATEGIAFVLGHALYMKAIHGGKAKNDKIDSQKIAALLRGGMLPQAYVYPAEMRATRDLLRRRTHLMRKRSELLAHVQNTNSQYNLPEIGKKIAYKANRNGVAERFDDPAVQKNIEVDLGLITYYDALLTDLELSIVKTAKHHDAHTFYRLRSIPGVGKILALVMLYEIHDIHRFPSVQDFVSYCRLVKCARESAGKRYGTSGKKIGNAHLKWAFSEAAVLFLRNNPVGQQHLARLENKHGKGKALTILAHKLARTVYYMLKRDTVFDMDKFFHG

SEQ ID NO: 172400 - protein, 351 aa, unidentified
MESRVTALPKLFIGIDIHKRSWKIHCSTDLFAGKSFTMPPEPEKLYAYVQKHFPDYQVTTAYEAGCCGYSAHRSFEAYGWKSLVVNPADIHRKGKERYTKTDRIDAQLISRELKDGRLDSIIIPNIEREELRSLFRRRNELVKDLRRIKCMIKMQLLYFGIKVPEEFDNDHWSHAFRHWIDSRQFNYPTAQETMASKMRNFRFIDKELRDVSNQLRAYCRKHFKKDYYLLRSVPGIGGIVAVGILSELGDLRRFNNLKHLAGYVGLAPGLYESGATSKSLGMNPRCHRLIRSYFVEAAWQAIRTDPVIQGYYRKHLGKDVKKIIVKVAHKLLSRTLAVIKTETPYEIGVIA

SEQ ID NO: 172401 - protein, 339 aa, unidentified
MKLYAGIDLHANNSVLVIADEADKVVYERRHPNELPVILAQLSPYRKRIQAVAVESTYNWYWLVDGLMEAGYEVKLVNTAAVKVYEGLKYTGDEHDARHLAHLLRLGVLPTGYIHPKADRAVRDLLRKRSQLVRCRTTQILSIQSMVSRNRGKGISTAEVRKLDDATISQYCGGDINRILAIKSNLSVLLCLDEQIAGVEETVLKQAKLKPEFKKLLTVDGIWNILGMTIMYEAGDMERFAKVGHFASYARCVSSSRWSNGKKKGEGNRKNGNKYLAWAFIEAAHYAVRYNERIRGFYQRKKAKTNNIVAAKAVAHKLARACYHVLKEQTPFDEARAFA

SEQ ID NO: 172402 - protein, 367 aa, unidentified
MLYLGIDQHKSQLTVNLRDEQGDVILKRQVSTRWEKVREFFADLADKARPEGGFFAILEVCGMNPWLLDMLEEYDCREIVVIQPTERSVQKTDRRDADKLCHLLWVHRRQFLEGKHPFGLRRVQPPTPQEADDRQITALRARLTKKRTAVLNGIHKILRKHNLEQECPTKVFQTQKVRRWLEEMNLPTIDRLEMDLLLPQWELLDEQLKVVELKIAERAAAEEQARLLETMPGIGHYSAVAIASRIGDIERFKRPDSLANYFGLTPGCRNSGEATQRLGSITKRGSRIVRHLLGQAVVKVLRFDGVMRAWFKRIKKRRGSKIARVAVMRRMTTIMWHMLKKKQKYRYELSLKKHQEFVEFEGVVEAA

SEQ ID NO: 172403 - protein, 341 aa, unidentified
MTEVTIIGLDLAKNVFQVHGMHADGSVGFRIKLVRSKVLSFFSKQPACTVAMEACASAHHWARSIGELGHDVKMIPPIYVKPFVKRQKNDMADAEAIAEAASRPTMRFVAVKTEEKQAAGMAFRTRDLFVRQKTQTINALRGHLAEYGVVAPKGVAHLGRLLRVVEDPCNGLVAPVVALARMLLDQIAELQAKIAELEKEIRQQVRRDDVTSRLMTVPGIGPISAAAIVAFSPPPETFARGRDFAAWVGLTPLQHSSGGKDRLERTSKMGQRDLRRLLITGAMAVVRWAVRRGAPEGSWLARMLQRKPRMLVAVALANKMARIAWALMAKGGVYRDPAVAA

SEQ ID NO: 172404 - protein, 433 aa, unidentified
MNPNRLQVGIDFSHKRADVCLLDPEGQILVDHQAFANSQQGYQQVRQVLLESVRRHAFAGVDVSGEATSYYWFPYFWQLAHDAELAAYDLSLFLLNPRQVRWFKQSLPPDDKADQTDPFYIAERTRTRRPKAAWDPQDDWLPLRFYTRLRFHLAQALTREKNYYLVHLFLLHSAYRRNQPFSDPFGVTSQKVLGGERSLAELAKLPLEELAEQLDEWSAGKLDDPLETAAQLQQVAQESFPLEEPLLSPVQHLLELTGEHIRFLEAQMQQVEGWFAAEVEHHHPEVLFLATVPGVGLVLAAGIAAEIGDLERFFQTPKWDKKHKRYRSKTLREVEDAVAKLAGLWWPRSDSGDFVAEDRRLAKTGNRYLRYYFVQAANGMRRHIPAYARFYGLKFRQATRHKHKRALVLTARKSIGLFVGLLHRKEAYRSKEG

SEQ ID NO: 172405 - protein, 357 aa, unidentified
MVESKTEAKSSEVGVTNPYRRTEHCGKIHACRCDKEVGVIGIDISKDHLITSRGRVRKYKNNKEGYEEILEMKPCTIVLEPTGVYAIRPSQYFKERGIKVLQVSPNVLSREKEFRGKKTDFYDAEKLENMVDKAKEYEYNPLRELVTLYLFLKDIEVKYKNRLKRALFLVSDNDRISKDRLERLAKGDFTQEELYNLEYTPIVLEEIKVLAKTLLEMQEKLKEVRRMIEEQVPDNHVLLTIPAIGRLAAGIIIGVVGDIRRFPKPESFVAYCGLDPLVERSGKAVISRGISKRGNKYLRSLFYFLAGRNYSRNPTLLKFYEAHKDRLQGKKLFTALARKLARVVWSVWYNNRPYEPK

SEQ ID NO: 172406 - protein, 414 aa, unidentified
MESSYRIAGIDVHKKMLAVVVTDLTQGTEFHFERRKFGALDSDLCALAEWLNEQQVREIVMESTAQYWKPVWRHLEPEYKLYLAQAQSNRAPRGRKRDFTDAERLVRRHVAGELILSFVPDPEQRLWRIATRTKNQLTGDRVRLQNQLEALLEDSRIKLGSCVSDLLGLSSRRMLKALADGERDAAKLAAMAEPELRASQEQLQDALRAAGTLNDLHGQILRLFLERLELIEQQMAQLDQSIAAALHTHQSAVQRLAAVPGYGVDSAQQVIAEIGPQAATFPSPAQLASWVGVCPGREESAEVSKSNRCPKGNRQMRRILAQVAQAAARTKGSIFQGLYRRLLPRLGHGKAIWALAHRLCRLTWKILHQGVEYKELGQQMNPKLVRQRTNKLTRQLRALGYDVQLTVLSSNAQA

SEQ ID NO: 172407 - protein, 354 aa, unidentified
MSQKFESAIAVIGIDIGKNSFHIVGRGARGAIVLRQKWSRGQVEARLTNIPPCLIGMEACVGAHHLSRKLASLGHDARLMPAKYVRPYSKGQKNDFNDAEAIAEAVQRPTMKFVATKTAEQLDLQALHRVRERLVSQRTGIINQIRAFMLERGIAVRQGIGFLRTELPTILATRTDALSPRMLRVIEELAGDWRRLDQRIDDLSGEIEALARQDQACSRLMTVPGIGPIISSAMVAAIGTGDVFSKGRDFGAWLGLVPKQISTGDRTILGKISRRGNRYLRVLFVQAAWVMLVRIKNWERYGLKSWIEAAKRRMHHNVLAIALANKLARIAWAVLAKGRSFELTRTDDAGVRPA

SEQ ID NO: 172408 - protein, 339 aa, unidentified
MKYTPVGVDIAKHLMQVHFIDEHTGEVIDKQIKRAALLEYFSNREPCLIGMEACGGSQHWARELEKLGHKVRLLQGKFVKAFVMGNKNDVMDARAIWMAVQQPAKAVAVKTGEQQAVLSLHKMRRQLVKFRTAQINALHGLLLEFGETVRKGRASLDKAMPEVLERLKEKLPPFLIYQIEDQYRRLSDLDMQIDGIEKQLAAWAKQNEACQRIMDIPGVGPLVATAAVAIMGDAETFRSGREFAAYIGLVPKQTGTGGKVRLLGISKRGDAYMRTLFIHGARAATLLAKDPNPWVTELLKRRPTSVAVVGMANKIARTVWALVAHNRKYDRKHVSVRPF

SEQ ID NO: 172409 - protein, 475 aa, unidentified
MLSGEETFASKTNLMAKVKKTDTLTPNQKKSASRLSIVNPHAAGIDIGDTIHAVAVPPQAAEESVRIFTTMTCDHTTISDWLRECGVNTVAMESTGVYWKPLFSHLVRAGFEVFLVNSRNVKNVSGRKTDEGDAVWIQKLHSYGLLRSSYLPDDEQEALRTLVRFRKVLLSDSSRCVLRMQKSLELMNIKLHTVISDITGQTGTAIVTAIIGGERNANAFLPLVGHRIKADSEMIRKSLQGNWRTEHLFTLSESYDLYRYYQQRITVCDQQIEEQLRNYEAQRNDGAIETSAKDTVNRQDKKLKQKNAPRFNVRGYLDRILGVDVLAIYGLSETGGLQILAETGTDMTKWENEKHFASWLNLCPNNKLSGGKLISSKVKKGRPSIAGQAFRAAANAVQRSDHWLADYFRRMKSIGGNKYAIVATANKLSTIYYKMVRYQAEFAPVNPQEYNAKRNEHKIKYLERKLNELKAIKNG

SEQ ID NO: 172410 - protein, 371 aa, unidentified
MRNFKGKTVFLGIDVHKSTYSVTAVCEGVVIKQDTFAADPEILVKYSKRAFQGAIIKSAYEAGFCGFVLHHFLLQHNIENIVVHPASIEVESRNLKKNDKRDSKKIAIQLSAGRLQCVFIPTQEAENRRFIARLREVFVKQRTRTSIQLKSLLNVNGIIPFNKKIKISKKFLKELISIDFDLSLKFCLEKLAKTWLYFTSELTEIEKKLDYLTPAEEVIYNSYRKIIGFGPTIARILLHELGDTMQFSNEEKLFAFCGLTPSEHSSGEHKRLGHITRQGKPILRKVLVQAAWVAVRKDPYFSEYYKNLSLRRGACRAIIAVARKLIGRARCAIKNKDTFLAVKANNKVVLQEDFVAASSSSLVGHLNNEAT

SEQ ID NO: 172411 - protein, 455 aa, unidentified
MAAKHSKKKKQTSLAPEPKPDAAGIDIGSSEMWVAIDPDRDERPIRCYGSFTEDLHELADWLKDRNIRTVAMESTGVYWIPLFQILESRGFEVCLVNAHYPKFAPGRKSDVIDCQWLQYLHSVGLLSGSFRPPQSICEVRAILRHRENLIALAASHVQRIQKSLNQMNLLLHNVISDIVGKTGLAILDAILDGQRDPRTLAKLRDRRIKASEENIMKSLVGDYRAEHLFTLKQSLSTYRHHLLQIDEADVEIKKRMAALDSRCLPAPSVEEVPVKRGPGRPKGSKSADSQLRTELHRIIGTDLTLIPGIDVTTVQTLLSEVGPDLSAFRSAPAFVSWLRLCPNNQITGGKVIATKTQPTKNRLSHALRMGAQSLVHSQSALGGIHRRFRARLGPPDAITASAHRLARIIYHLVSTRKTFDDSVFNELEKQDSQRKEQRLKAQARAGGFKLVPLEA

SEQ ID NO: 172412 - protein, 342 aa, unidentified
MQITTIGLDIAKNVFQVHGIDANEKVVVRKQLRRSQVIAFFKALPPCLIGMEACATAHYWARELTKLGHQVRLMPAKDVKAYLKRNKNDAADAAAICEAVRRPTMRFVRIKSAEQQGQLMQHRTRDVLIRQRTQIINALRAHLAELGIVAAKGDAGVNELLAIVADEADTRLPIDARASVIVLAAQLEALQTLIGSIEKRIKMQHRSNETSQRVETIPGIGVVGATAIVATAADPTVFRSGRDFAAWIGLVPRQDSTGGKQKLGPISKQGDRYLRRILIVGAIAVLRRAQENPGKYPWLTQLLARRPFKVVAVALANKMARTAWALMVHGGTYRAPELVEAA

SEQ ID NO: 172413 - protein, 344 aa, unidentified
MLQLYFKSIKIKIMKFKEVIGIDVGKLSNDAIIHSNQHSFVFSNTKDGFKTLLRTVLKRVKCESTEILFVFEHTGIYSYPLSLFLQENGLSFVLVPGLEIKRSMGIQRGKNDKVDAKRIALYAYRRLNELKPSELPSETIVSLKRLLALRDHLVVQRASYKRNIVESGKFLKKTENKIFFQVQEKMMKELTTQISKVDKELEAIIQSDEKLAKQFELITSIRAVGKQTAMYMIAYTNGFTLFSDWRKFASYAGTAPFPYQSGISVHGRTKVNHLANKKFKSLLNLCAISSLTCNSEIKAYYDRKKLEGKNGMSIVNAIRNKILARIFAVIHRGTIYQQDYVYAA

SEQ ID NO: 172414 - protein, 345 aa, unidentified
MELHTIGIDLGKTVFHLVGLNLWGEVVVRKKFSRKQLLHFTANLQVKLIGMEACGGSHFLGRALREQGHEVRLMPAQYVKPYVKTNKSDYIDAEAIAEAVGRPKMRFVPIKTDDQLDLQSLHRVRERWVMRRTAVINQIRGLLLERGITLRQGRGHVDAALPGILEDASALLSGALRLLLAQLKLELDHLQMRIDEADAMIKKAAGDNEACRRLVAIPGIGPVTATAIIAAIGNGAAFKKGRGFSAWLGIVPGEYTTGGKQKLLGISKRGNSYLRRLFVQGARAVLQQRAKQSSGLSAWLAQLTTRTHSNVATVALANKLARMAWAVLAKNEPYRPPMLVGAATA

SEQ ID NO: 172415 - protein, 418 aa, unidentified
MFKIFRKNCCGLDVHKTWIYACIGITDANSRTEYFQARFSAFSKGLQELSHWLDKYNCKEVCMESAGKFWIPVFNILEKTCLVTLAHPKYTKPQKGNKTDRKDAKWICDLFMCDMIKPSFIPPPAIRHLRDLVRYRGKLTNMLTGEKNRAQNCLTVSNLKLDDVFADVFGKSARSITEYILAHPGEPFDVAQFVDRRCKSPLSEIQAAVDGAVSPEQAVKLRQCLDHIDQLRLLRQRLEQEILRICEPFADILQLLRTVPGLGNDPMTAIAVLSEIGGDMSVFPTAKNLCSWAGCCPRNDQSGAKVKSTRISRAGSYLKPLLVQVANALIHSRKHPEFAERYRRIKARRGHKKAIIAVCKMLLTAIWNILSKLVPYSPAGFLSASHDLPPSKSLTVAQGLSLLRRRGFILTDDPLSAP

SEQ ID NO: 172416 - protein, 425 aa, unidentified
MNLLILKGVPMSLKIVYKICCGIDVHKTFVVACIASTNDIGVTSYESHRFSTYTSGLKTLLQWLLNRNCKDVCMESTGKYWIPVYNILENDCSIVLAHPKYVKAIRGKKTDKKDAKWIADLFKHDLVAGSFMPPADIRQLRDLMRYRFKLTCFQSSEKNRLQNCLTVSNIQLGNVVSDTFGKSAQAILDKLLENPADTSFDLEPLVYKSLKKKLPQLRDAIDGYITPEQAGKLKVIKSHYENLESRKAELEELILALAAPYQQELAILQTAPGIRSDFTAIGIISEIGTNMEAFPSAKHLCSWAGLTPTNNESAGKKKSVRVSKAGCYIKPLLVQCANAVVTSKKHPEIRNRYLRLKKRRGHKKAIIAIARMLLTALYHMLKNGENYNAELYRKSYLPPANREITVEQAIIIARNQGYKIKSATA

SEQ ID NO: 172417 - protein, 403 aa, unidentified
MNMNAVGIDVSKGKSMIAILRPYGEIVSSPFVINHTSSNIQSLIEQIKSIEGESRIVMEHTGRYYEPLARELSLAGLFVTAVNPKLIKDFGDNSLRKVKSDKADAVKIARYTLDSWTELKQYSLMDEIRNQLKTMNRQFGFYMKHKTAMKNNFIGVLDQTYPGVNTYFDSPARDDGSQKWVDFATTYWHVDCVRKMSLNAFIDHYQKWCKRRKYNFSKIKAEEIYGASKELVPVLPKDDLTKLIVKQAVEQLNTASMTVEELRTLMNETAAKLPEYPVVMEMKGVGPSLGPQLIAEVGDVTRFTHKGAITAFAGVDPGVNESGTYEQKSVHTSKRGSAVLRKTLFQVMDCLVKTKPQNDPVYAFIDKKRSQGKPYYVYMTAGANKFLRIYYGRVKEYLLSLPE

SEQ ID NO: 172418 - protein, 355 aa, unidentified
MQSNKISFKGQNIYVGIDVHLKTWHVTTLTESGCKYSFAQHADAKELFDRLNKKFPEAHYKSAYETGFCGFSVHYALTELGFENIVVNPADIPTTGKEKAMKTDAVDSEKIAWSLKRGELTGIYVKDKRYMDDTNLMRLRQRFIRDLSRQKNRTKHLLYTQGVVYPERFSKKGTHWSRNFMKWLREDVELLSEEKRTLMLLCNQVEHIRKDILTITREIRRLSTTDKYKENFSLLSSVPGFGLITSMSVLTELDNDPIRFPNERKFVAILGLIPTCHDSGEKKSNGVKTFRGNKQIGPLIVEASWVAIHRDYQLGCYYTNCCQSMNPQKAIVKVARKLACKAYAVMKTKKAYVQS

SEQ ID NO: 172419 - protein, 338 aa, unidentified
MNIFKQSIGIDVSMDSIDVRYGYIDFNQNISLSTSKTFKNTSVGHKGFLKWALKNKLSESLPTTFVMETTGTYHENLAHFLHKNKQQVSVVLPNKIRNYAKSLETKSKTDPIDSAAITRFALERKQTLWLPPNPQLKAIRDLTREHNSIKTMISEVKNQIHAKDYAFKANKDTIKRKVKLIAFLDKQVDAICNEIKEIIESIPGLYDKINKLDTIKGVGFITIVTVLAETNCFENVASAKQLASYAGVDVVFNDSGKRKGKTSISKKGNKFIRKAIFMPALSASRHNHHLKELYNRLVNKGKNKRLALIAVARKLLLLIYFIWKNDTVYLPNYNFSQT

SEQ ID NO: 172420 - protein, 390 aa, unidentified
MTLQLNHGFIPRNYDIFSGLDVDKTSMSVNFLDHGEMIKSMRIPHNAEHLLNYVRRHFPTKRVAFAYEAGPTGYGLYDRLTTQGYTCLVVSPSMIPTAPGQMVKTNRLDSKKIAENLRGGQLKSIHIPSDSYRQLRHLIQLRDTFVRQATAAKCRIKALLLFEGIPFPEAPANSQWSKIVITELEGLACNKAVHFKLNHLLSSLEFAHKQVLETTREMHRFCLEDTELNTCIRYLMSIPGVGYISASHFLARIGDWRQIKNSRQISSFLGLVPRENSTGDSVDRGSITRSGDAYLRNKLVQCAWSAIRKDPELREFYRRIHQRHPRAIAARKAIVAVTHKLATRMFAVLREQKSYVVQQTVESRPLTEEETALPKEETRQQAESGTLSEF

SEQ ID NO: 172421 - protein, 347 aa, unidentified
MLYVGLDLSRKRLDWHAVLADGERAGAGACPPDRDGLAHLVHRLGREQGRVLAAIESMTGARFVHDQLEFAGWDVRIADAQRAKGLAPLACKTDRIDAWVLAELARRDLVPEIWLPDPEVRAERERARFRLHLVHKRTSLKNRVHAILFQHGLRAPVTDLFGAGGRRFLERCELPEPWRSTVEASLYLIDVLERQIDEIERELRRLGAEHRYLPLLLSVPGIGWVLGYTIAAEIGDIGRFSSPAKLIGYTGLCPRVRQSGEVDRRGALSKHGPPHLRWALIEAAHNAIRAHPPYRALLERQRVRLGRQRGGSVAAITVGRRLAEAIWWMLTRNQPFAPAGARVPLTA

SEQ ID NO: 172422 - protein, 311 aa, unidentified
MEHSAVVGIDVAKDHLDVHLRPTDEAFRVSYDDAGLVTLLTRLRALTPTVIVFEATGGYEVPLAATLASAGLPVAIVNPRQIRHYGRAIGQLAKTDRLDARLIAHFAEAVRPAARPVPDEQARALSELIARRRQLTEMLVTEQNRRRLLRDRRVQRQLDAHIAWLEEALRRLDHDLTTLVRSTPAWRQADDLLRSVPGIGPVTACTLIADLPELGRLDRRRIAALVGLAPFARDSGAFQGIRMITGGRPHIRRVLYMATLSAIKCNPAIRGFHHRLVAAGRPGKVAVTAAMRKLLTILNAMLRDRRPWQPA

SEQ ID NO: 172423 - protein, 321 aa, unidentified
MNIVSYAFSRFVGIDVSKETLDIASADGQSATIGNTRKAINTWINSLLETANTIVVMEATGGYESLLVKLLHETKIALAVVNPRQVRDFAKGIGKNARTDAIDAQVIARFGEVVRPAPHVAQSEDEIKLGALVQRRRQLLDLMNQEQNWIQQTVDRDICKSIETVVGSLKKQLKVIEGQIETAVQADEPNARKVEILNSVKGVGPVTVSTLVAELPELGQLNRQEIAKLVGVAPMNNDSGKSVGKRKTIGGRSTVRTVLYMATLTATRWNSTIKTFYQRLLAKEKPKKVALTAAMRKLLTNLNALVKSNQLWRVPTLCPVK

SEQ ID NO: 172424 - protein, 358 aa, unidentified
MQRNKISFNGQKIFIGIDVHKKNWEVAIAPEIGNVKRHSQKASALELFDFLKKHYPDGDYQAVYESGFSGFSTYYALKEAGINCMVIHAADVPTTQYEEIMKTDKVDSVKLVRSLKAGLLKGIYIREKENIDDRSVIRIRKTILRDLNGYKSRVKHLLHCNGVILPDRFDKPGSHWSKAFIKWLKEDVELLSSSRNSLDILIHQVETIRMTLLEATRMVRCLSKTERYKHDFDLLRTIPGIGVIVSMCILTEIYDVKRFHNEREFAAYLGLIPTSHSSGEKIVHGEKTFRGNKQLGPMIVEAAWIAIYRDAGLGSLYLHYKERMKPQEAIVRIARKLSNIIFAILKTKKEYVPYCADS

SEQ ID NO: 172425 - protein, 447 aa, unidentified
MNHLLRIMYKRVAGLDVHKKTVVATRMQVTEEGRLEWETETFGTTTPELLELYDWLAEWGCTHVAMESTGDYWKPVYNLLEDDFEVLLVNAQHVKHVPGRKTDVLDSEWLAELLLHGLLKPSFIPPKPQRALRDLTRYRTKLVQERVRVVNRVQKLLEGANIKLASVATDVMGVSARAMLAEIAAGQTDPKLMADLARGRMRNKIPELEKALTGLVNPHHRFLLTKQLAHIDFLDEQIDDIGGEIARWFETQSQRPGEGGNGSGRESGTETPSSEEEAPLTWEEAVALLDTIPGVNRKTAEDMLAEMGLDMGQYPTDKHLASWAGLAPGNRQSGGKRYSGRTRKGNRTLSSVTVQAAWSAVRTKDTFLKARYHRLAARRGKKRAIVAVAHSILTSAWHMLTYRQPYQELGSDYFDQRRKEAKVNYLTRQLEKLTGGAVRIELQVATV

SEQ ID NO: 172426 - protein, 338 aa, unidentified
MTHITTIGLDLAKNVFHLVGCNSHGKVIIKKRLRRVQLTRFIVNLSPCLIGMEACSGAHHWARQFRAMGHQCKLMPAQYVKAFVRGNKNDYNDALGISEAVRQPEMRFVAIKTEAQQDTQALYRLREQRIKERTGLGNQLRGLLAEHGIVVGRGINVLRRQLPELLGATDNGLSPLFRELLNQGYQQLQQLDKHIIDYTKILTRLSQQNEACQRLQTIPGFGPINASVFASVVGNGSAYRCGRDVSASLGIVPGQHSTGGKNTLLGISKRGDSYLRCLLIHGARAVVIQAATKTDRLSLWINRIRAERGYNKATMALANKMARMGWAILRNETTYQIA

SEQ ID NO: 172427 - protein, 342 aa, unidentified
MEHYAGIDVSLECSSVCVVNASGKILREARVASEPEALIAWFGSCGLELERVGLEAGPLSQWLFAAMRQAGLAVQLLETRHVRKAFEAMPVKSDRNDARGIAQLMRLGWFRPVHCKSMSAQETRTLLTARKLVQSKLRDMENSLRGILRGFGLKVGKTTEREFARRIEELVVGHPHLQVITKALLAVRAVLRREFAAFEKQARKMARSDKRARLLMSTPAVGPIVSLTYASAIDDPGRFKSSKQAGAHFGLTPKKHQSGETDYTGRISKIGDSSVRTALYEAAHIMLTKPLKGCSQLKSWAMRIARRAGMSKAKVALARRLAVIMHRMLADETTFNAAAAAA

SEQ ID NO: 172428 - protein, 343 aa, unidentified
MAEYVALDVSLRSTSVHIVDQQGRRLWRGTCPTDATALVDTIRRHAPAVERVGLETGMLSTWLCHELAEAGLPVVCMDARQAEAALSCRINETDANDAEGLAQLLRTGFFRQVRVEAKGTMLVRTLLSARRQLVRTGLDLADQIRGLPRIFGLLPPRGGGRAFEAAVRERLAGQAQLATVIMPLLQAWRAVREQVLALDRQAYATAKRDARCRLLLSAPGVGTITALAYVAAVERPEEFRNGRAVSAWVGLTPARHRSGQVDYSGRISRQGDVHLRTYLYEAANAVLTRSRPDTALKRWGLGLKARLGHKRAVVAVARKLAVVLHAMWSKGEPFETDAVAAAA

SEQ ID NO: 172429 - protein, 363 aa, unidentified
MNEGINFFVGLDVHKDSIAVAVCESGREPSRFVGTLSADAQGVIKTLRKYGAPKDVSVVYEAGPTGYGLHRALSERGYHCEIIAPSLIPHRAGERIKTDRRDCVRLAELSWAGELKAIWVPDEAHEAMRNLWRAREDALGQRLRARQQLKSFLMRMDRRFTGKTSWTRAHHHWLADQRFNHVAEQIALTEYLLAEQLAGERVVRLTTALQQATQDWRFGGVVAALRALRGIDTVSAIGLVCEIGDIGRFASARQLMGYLGLVPSERSSGASLRRGSITKTGNSHARRLLTEAAWNYRFPAHMSKELQARSEALAPDMGPQSTKPSCVRHASAAHAPSRIQMSQSRSTQVLGLRKSASAAFTSR

SEQ ID NO: 172430 - protein, 328 aa, unidentified
MPMYQLGIDVSKNTLDLCLLREGIKGRIKTRKLKNTADAAKVVTEWLKKQSCELGEVHIIMEATGVYHEPLAYGLHFAGARISLANPHRTREFARGMNILTKNDKVDAWTLACYGSLKEPEAWTPPPESVRYLRALLRRRDALVADSTREKNRLEKSIFTDSPDAVRASIEHMLQELNNEIEHLDVLIQEHIETHPELNQDFRLLTSIKSVGYLLGLNMLAILKSHSFESAEQAAAFLGVVPVERRSGTSVKGKPKLSKIGPPEIRTKLYLAALCGLRFNPVMKQMYTKLCQRGKSKMCAIGALMRKLVHWCYGVLKTQLPFDAEYNQ

SEQ ID NO: 172431 - protein, 438 aa, unidentified
MTTIIGIDPHKATHTAVAIGCNEAELATVTVRATSQQTDKLLSWAEPFKERTWAIESAGGLGYLLAQQLVDAGEHVLDVPATLASRVRVLGRGRSDKNDPNDARSVAIAALRSPGLRSVYAADHAEVLRLLAKRNRGIGALRTKLVCRLHALIAGLEAGGIAKELNASDADGLLRSFEGSSPAEHTRHQLALELLEDIRHLDHQLSESHKRIKLAVQASGTSVTEVFGIGAVIACSLIGYTGDVSRFTSRDQFAAYNGTAPIEVSSGGRVAHRLSRRGNRQLNHAIHMAAISQIRQTHSEGRAYFERKVAEGKTKREAIRSLKRQISNTVYRHLVLDAQKWGPGGQAGTTRSLRDRLCTLTAGSSAKSLPDPPNLSQSRPSTAGCAPGRWSSTAGWRRSARAAPTSRPGPSSCRSSSANATMPGSTTRRTAPSSSTAS

SEQ ID NO: 172432 - protein, 355 aa, unidentified
MKYYISTTEYNCGIDLHARQMYVCVMDRQGKKLVHTNVKDNDFDYFLKLIAPYKHSLTVCCECMFGWYWLADACQAAGLNFVLAHALYVRAIHGGKNKNDRVDSEKLTHLLRSNLIPPAYVYPTQQRPLRALLRQRIFYVWRRSELLARIHSHQLAHNRVPAKQSRWSRDPWEEELLKAEVDPLRQLALSNDLAMIRHFDHQIFEVEKALQRQTKQVAAREYALLQTVPGIGEHLGLTILYEIGDIQRFPTVKDFLSYCRLVKGTVASAGKIKGLRGAKLGNPYLRWAFGEAAVIAKRDHFRIRPLAQRLEARMEGNKFKANTVLAIKLARCVYFMLKNQTVFDPDRLVAALSRN

SEQ ID NO: 172433 - protein, 332 aa, unidentified
MMAQDDVVVVGIDVAKDKVDACIRALSQRQTFPSAAEGRRALIRWLRKHKVGQAAMEASGGYERDWAKALREAGIEVRIVDPKRVRNFARSAGRLAKNDAIDAAMIAWFAETFTDAPGQVFDATREKLVQIVNARQNLLDMQTSLQNQSEHSTPEIVQKMQACLLRNIAREVAKLEVAIAAIIKATPHLAELAEIIESVPGLGKASSAGLVAAMPELGQVSNKIAAALLGVAPYDDDSGQRRGNRHIKGGRRKVRNLFYMACLGAATRHNPVIKAFYDRLIDKGKEKKVALTACMRKLIGILNTMIARRQKWDATRDKASDPARPLPSACPA

SEQ ID NO: 172434 - protein, 518 aa, unidentified
MTNTQRWARGCKLDNRRWLDTATGGMCVTGHSIGIDLSINGAHDCTVLDATGQLVQRFTFDSSSAGLQKLEQCVRATDPSYGAPVVIMEPTGLAWFLPCLCLRAEHPEVKVVRIKTSKVAALRRYLKQDAKSDRLDSLTLAKMPLVDPEKLYAVDLPPAAVQGLDRMTRQRARLVASLTGRKNRLQALVGGYLPGLMAVAGKPWEPVFRAMLAVSLNPFTLTDQGTTALRKSLQDKRSREALPEARLPRLRIACEQLTRLYRPIIEAGLLTEAFFDDVQDEVARELRLMDVEEQEVKELEAAIARRYQEIVPEDHLRTIKGLGAVTAPTILAAVGTPQRFHSQAAFRGWTGVVAHASQSADSDAKGLPMTKAGPRRVKLALYQAAEIARQWDPQLAKIYYDQMVHKGKPHYKAIGAVMSHLASRIHAVLSEQRDYVLRDTDGREVTPQEARAIILTRYRVPAEIRAERRTRKRRKPDVSTGSHRGSTKRSSRRSSTSSHLHSTRSQEAHQTGAVAITQ

SEQ ID NO: 172435 - protein, 410 aa, unidentified
MQTLVERGCGLDVHQATVVACLLIVLQNGKVQKQIRTFGTTTRELQSLREWLLSEGCTHIAMESTGVYWKPVYAILEGALEIVVANAQHVKKVPGRKTDVKDAEWIADLLCHGLLRSSFVPPKPIRELRDLTRYRRKLVESQTAERNRLLKLLETANIKLASVATDVFGVSGRLMLEALVEGKATPQEMAELAKGRLRQKIDELGPALEGKLEEHHRFLLRLQLDRLEAAEKDLAVLEQRLQEKLKPYAEQLTLLDEIPGVDWTLAAVIIAELGVDMSVFGSVSQLASWAGVCPGNNESAGKRKSSRIPKGNVYLKTALVEAANSAAKAKGTYLRDKFYRLKARRGYKRAAVAVAHKILVAIYHMFSDRVCYNELGDVYLDKLNKHHLTRNLVHRLERLGYTVTLEQKAA

SEQ ID NO: 172436 - protein, 326 aa, unidentified
MKFTHVIGIDVASEKLDIFDALLGKASVIANGPRELRAFIKGICDPQQTLVICEATGAYEHYLVDALHEANIHVCVANPRQVRDFAKGHGFLEKTDRIDARMIAVFGQQVDVNLTQPRSDAEKKLIALVRRRSQLLQLLGQENNRLRLCFEGEVRQLLRKSISYLEKQQKQLDARIETALKEFGKADPRIDVIASMPGVGVVTTATVICELPEIGKLSRTEISKLVGVAPLAKQSGKSEGKRPVRGGRSQVRKVLYMASLVATQRNPTIKAFYRRLLKRGKPKKLALVACMRKLITILNDMVRHKQAWIDPTTAQQEKRAAVPSLN

SEQ ID NO: 172437 - protein, 339 aa, unidentified
MNVMIGIDPHKASHTAVAIDSAEDHLSSLKVRATHRQVDQLMDWAQSFEKRTWAIESVGGMGYLLAQQLVARGEDVLDVPATLASRIRVLATDRSNKNDPNDARSIAIAALRAPRLRIVEPANHVEVLRLLAKRNMDIGNQRQRIVCRLHSLLSELAPGGIAKELYVSDADTLMARLDPQTPTQQMRFDLVLELLDDVRRLDTQIKESHRRIKVAIKASGTSVIEVYGVGPIHAAALIGYSGDITRFADRDAYASYNGTAPIEWSSGGRVVHRVSRRGNRKLNHALHMAAITQLRNPGTLGRIYFERKVAEGKTKKEAVRSLKRQISNSVYRQLLLDAR

SEQ ID NO: 172438 - protein, 343 aa, unidentified
MYYIGLDVHKKTISYCVKDAAGRVHQEGRIGSTRRELDAWITTLPQPRTMAMEATIFTGWIYDHLLPHAAAVKVAHPLMLRAIAAAKKKNDRIDAGKIADCLRCDFLPECHMAPTAIRERRRILRYRTLVMRQAVQMKNRISGLLMETGVSYNKLRLHRMGYFEQLLATSEEISDSIRPLLKLSREHIDRSIRMDAALLRSLERDPLLEERLRRLRTVPGVGPITALTWALEIGDTSRFRSIKQVIIYCGLCSAEKSSADKAMRTPISKQRNKHIQQVLVEAARLAPRYSEELALLYERERQRGNTNRATLAVARKLVTFMLAVERRQTDFVAAEELRRTAAA

SEQ ID NO: 172439 - protein, 355 aa, unidentified
MNSVRYVGLDVHRDTISAAVLNESGRMIQQSILATRAAAILDFIGGMRGTLHVTFEEGTHSAWLYDLLVRRVFRLVVCNPRKNALMKSGNKSDAIDARKLAELLRADLLSPVYHGEKSAMEVQHLARSYALLTEDTTRTMARIKAVFRGQAISCAGQKLYGKKHRDEYLAQLGACALRRRAELLYQELEAVQQLRRQAKREMILECRKYPETKLLCSVPFLGPVRAAILIGRVQTPHRFRTKRQFWAYCGLALEMRDSGEYRMVDGQVERRKKPAQIRGLNWNHNHELKNLFKAAATTASFSNGVFREFYLGLLKKNMQPEMARLTLARKIAAITLKIWKKGESFDEGYLKLQAA

SEQ ID NO: 172440 - protein, 348 aa, unidentified
MKRIVKQVAGIDVAQNELVVCLGRMYDDWTPELYASKTFANTAKGFAALTLWVEKLAEKPSAVRYVMEATGVYHESLAYFLEGKEFEVSIVLPNKISNYFRTLEVKTITDKTASEAIARFGLERKLDEWKRPAEIFRKLKQKTRERDQLVGERTLVKNQLHAEQTEAYPGKESITRMKARISLLSKQVAQIKEEMNVLVKGDNEVKKSVELITSIPGVGTLTAVTVLAETNGFELIRNKRQLTSFAGLDVKEKLSGTSIKGKPRISKKGNRYLRKAMHMPALAAIRYDGRFKVLFTRLVCRHGIKMKAAVAVQRKLLEMIYTLYKTNTAFDRNYLKEEVFALSDSDLK

SEQ ID NO: 172441 - protein, 342 aa, unidentified
MVQPITVGLDIAKNVFHAYGVDAQGEKVFSRKLRRAQVEAFFAKLEPCLIGIEACATAHHWARTIEKLGHQVRLMPPAYVKPYVKTQKNDEADAEAICEAVTRPNMRFADTKTVEQQSVLVLHRTRAMLIKHRTRMGNTIRAHLAEFGITESIGRIGLSRLIDIIVSGEDDRITDVTRRALMTLVDQCRLLQDQILELDRQVMAWHRSNEASKRLATIPGIGPLAASALVASVGDASNFKNGRSFAAFIGLVPKQSSSGGKERLGKISKRGDHYLRWLLVVGGLAVIRYAQRHGTRRPWLLKLLQRRTTKIAAVALANKMARIAWVLMARGGAYREPMAQAA

SEQ ID NO: 172442 - protein, 407 aa, unidentified
MEAIVERCAGLDVHQATVVACLKVGAAGAKPRKELRTFGTTLPELEELRDWLKTNGCTLVTMESTGVYWMPVYAVLEDHFEMVVGNAHHIKNVPGRKTDIRDCDWISELARHGLIAKSFVPPRPIRELRDLTRYRRKLVQSTASERNRLLKLLESANIKLSSVASDVFGVSGWAMLQALVEGTQSPAEMAQLARRRMRRKLPELERALQGRLEEHHRFLLGVQMRRIETMEADVAELDKRLREKLAPYSKPMRRLMQIPGVDWVIAEIGVDMSVFVNAAHLASWASLCPGNHESAGKQRSGKTRKGNVHLKTALVTAAVAASKAKGTYLADKYRRLKSRRGALRAAVAIGHKILVIAYRMLADDSDYQELGDGYLDQLNTRRNASNMVRRLRQMGYDVQISRKEEAA

SEQ ID NO: 172443 - protein, 313 aa, unidentified
MPMLAEQFDYVIGGDPDRDTIDLAVLDTAGAGVRAHLSEVADAAGYARMLAWARKHAAGLRVWALEGTGNYGAGLASFLVEAGEDVVEIDRVKRARRGQKNDRIDAVRAAREALSREIQLHPRQRGLREALRVVLTTRHAVLVSRTKAINELKALIVTAPEHLRTMLRGCSLSTQLTRIEHLHTGQASTLEHRMTILALCSVTARIRFLTEQVDQLDPQLTQLVQTHPAGPTLLSEPGVGPVVAAQLLISYSHPGRVRNESAFAALAGVSPLEASSGQRTRHRLNRGGDRALNRALHTVDVPSVARTPPVWGQ

SEQ ID NO: 172444 - protein, 389 aa, unidentified
MEILHRVCAGLDVHKKTVAACLRGPGPNGTRAEEIRTFGTTTRELLQLAEWLAAAGCTHAAMESTGVYWRPVYQMLEGRFELLLVNAQPIKTVPGRKTDVKDGQWIARLLEHGWLRASFVPPAPVRELRELTRFRRQLVEDRARDANRVQKVLETATITLAAVATDVLGASGRAMLKALIAGERDAEHLAALARGVLRKKQAQPREALVGRVTDHHAFMLQALLSHIEFLDQQIALFDARIEAQTRPFAAAVARLDTIPGVARRSAEPILAELGDDMSRFPAAANAASWTGIGPGNNESAGKRQSGRTRKDHRWLRATVVECARGAVRARHDYLAAPYHRIARRRGDKKAITAVGRVRFAWRRIRALGTGPGSSDQAVNLSGEQVAAGR

SEQ ID NO: 172445 - protein, 459 aa, unidentified
MAQRKPKSSRSKPTLPPQLAAVNLHAAGIDIGAEAHWVAVPPSDDLQPVRCFGACTADLEALADWLATCGITTIALESTGVYWIPLFELLETRGFAVLLVDPQQVQKIKGRPKSDRHDCQWIQRLHTFGLLAGAFRPADQICVLRSYLRQRAMLLTSAAQHIQHMQKALTQMNLKLQHVVSDITGVTGLAILRAILAGERDPAKLAQLRDYRCKHDEATIARALQGNWRDEHLFALAQAVALYDVYHQKITECDQHIEAYLQTFADRSDGQPLPPPARPRKRGGNQPAFAVREPLHRISGVDLTQIEGIDETTSLVILSEIGLDMSRWPTVKHFTSWLGLCPHHRVSGGKVLSRRTKPCANRAATALRLAAACLHHSQSALGAFFRRMKARLGTPKAITATAHKLARLVYSMLKHGTAYVRQGMEEYEQQYRDRMVQNMTRRAKALGYTLVKATEGTPV

SEQ ID NO: 172446 - protein, 398 aa, unidentified
MKRILRIGMDVHSTNYTLCAMEPVIGEDDRIFANIQVTPDYKNILMFIENLKMKLGLDAEYDIQCGYEAGCLGYSLYNQLTAAGVKCVILAPTTMLTPQGQRVKTDARDALMIAQCLSYGGYHAVYIPTEEDDSVKEYLRMRDDHKTALKKIKQQINALCLRHGYHYEGTKWTIKHAAWLRKLELSPLYRETLDEYMASYDEQTAKLERFDKRIGELASQSSYEEKAKRLGCFLGIKTHTALSLLVETGDLSRFAKGSTYAAFLGLAPGENSSGETINRRGITKAGNRHLGQLLIEAARGICKGAIGHKSRELRARQSGNTAEVIAYADRANTRLRSRYYKLIRHGKKKNVAVAAIARELACFVWGMMTDNTGMKMAERNSKDSCQSRALCTAGAAGP

SEQ ID NO: 172447 - protein, 413 aa, unidentified
MEQIHERVAGLDVHRDSVSACARLPDLRGGAMVDKARFATTTAGLAELAEWLADREVTVVGMEATGVYWKAPYYALEGRFEVWLCNAQHVQNVPGRKTDLADAEWLADVVAHGMVRPSFVPPPPIRELRDLTRYRKRQVDVHAAEVQRLEKVLQDAGIKLTSVASEVLSMSGRHMVEALITGQQDPATLAQMAIGRMRNKLPELKEALTGHFGAHHAAVARQILDHIDFLDARIAAISEEVAVRILPFDAAMQRLIDVPGISQISAEVSIAETGGDMSRFPTPAHLASWAGLAPGNHESAGKRRRVGTRPGDRWLRRVLIEAARAAARTKGSYFGAQYRHIAQRRGPNKAAVAVAHSLLDLVWHLLSTSEQFEDLGADYFQKRHDPEREARRLVRQLERLGHRVSLTPAPSTA

SEQ ID NO: 172448 - protein, 331 aa, unidentified
MVFLHYVGIDISKETLDVAVYPAKDKKTDYLQVVNTKKGLKEMLSWLKRKGTQLDGLVICAEHTGAYTNELIEFADAHNVALSLNSPLDIKRSMGIARGKNDIVDAARIAEFAYARRDRLRLYDKPSEGIMTLQYLLTERRQYIRQRTALLNFNDALNKYETPAARNRNHSATKELEKLIKKTEEQMRSVLSDHPDLRKSYDLVSSVKGIGLINALNTIVYTNNFKAFETPRQYACYIGVAPFDHTSGTSVRGRTQVSKICRTQQKSELSMAARSAIVYDPGLRRYYQRKMKEKGGGKDAHGIVLNAVKFKLILRMFAVVKSGIPYKIMNY

SEQ ID NO: 172449 - protein, 451 aa, unidentified
MSATSTSRADWDQLPVLHAHAAGIDIGSAEIWVAVPPPDDPQPVRKFGTYTPDLQGLADWLAQCQITTVAMESTGVYWIPLFELLEARGFQVAVVNARHLKHVSGRKSDWQDCQWIQRLHTFGLLNDSFHPAAEMRVLRTYLRQRAMLLEHRAAHIQHMQKALLQMNIQLTQVLSDITGKSGLAILRAIVAGERNPQVLAQLRDERCEKSESEIAKALTGNYRAEHLFSLQQALTLYDAYTEQVRVCDTEIEKQFQILKPARDEPLPPLERSDKRDSHSKNAPSYDARQLLYELVGVDLVAISGLNVLTVQTILSEVGTDMSKFPSEKHFSSWLSLAPHNEISGGKVLRSRVPKTNPRAGQAFRMAAQSVSRKQDGFGEYYRRQRARLGPQQAIVATAHKLARVFYHVLKEHTAFKPLTQDEYTQQVRVREIANLKKKAARLGLTLAEASA

SEQ ID NO: 172450 - protein, 373 aa, unidentified
MTKNLRYLGLDVHAETIAVALAEPGGEVRSLGIIPNEPSAVAKLVRKLGGREQLRACYEAGPCGYVLYWQLTKLGVACDVVAPTLVPTKPGDRVKTDRRDAEKLARCHRAGDLTAVWVPDAAHEALRDLVRAREAAKADQLRARHRVSKFLLRHGRRAPGDVKPWTQRHRRWLDTVTFAPVAQQTTLADYIHEVDHAGARLERLENALDLAIAAAPPAMQAIMRALQCLRGVRQLTAATIVSEIGPLSRFAHPRQLMGYSGTVPSEYSSGSSVHRGAITKTGNAHLRRVLVEAAWAYRFPPKCGDALRTRQRGQPPGITAIAWKAQQRLHTRYRRLLGRGKPVPHVITAVARELVGFIWAIGIAAEREVAIAA

SEQ ID NO: 172451 - protein, 321 aa, unidentified
MQSNNAVVYAGVDVAKATLQLHLQGQQSEFSNTPKGLHQWCAQLKKVPRVHVVCEATGGYERALVKLLHQEQIPVSVTNPARVRAAAQGQGQRAKTDRIDARVLTDYGQRYQPKATPPTSATQDQLVAQTQWLKQLIHGRALAKTQAEHHQDPFVRRQHAKLMTHLQSQIEAVEKQIEALLEQDAALQQRVNCLDEIQGVGPRTAWMVLAHMPELGRLNRHEVAALAGLAPWTRESGTMKGRRCIGGGRPEVRLALYMAALSAARCNPVLRTLYKRLRAKGKLSKVALTAVMRRLLTYMNQRIKALLSETATAQTEVLQKA

SEQ ID NO: 172452 - protein, 356 aa, unidentified
MSHDVKYIGMDVHKEAIVIAVQNESGKLVMESVIETKASSILQFLHGLRGELHVTWEEGTWAAWLYDLLQPHVQHIVVCNPRRNALLKEGNKSDKVDAGKLADLLRTGMLRPVYHGENGLRTLRELGRSYQTISKDLTRVMNRLKALYRGWGIPCAGTQVYAARSREEWLSKIPHTGVRRRAELLYQQLDGLQALRRNVRPELLAESRKHKAAKLLRQISCIGPIRAARLLGLMQTPHRFRSKRQLWTYSGLGIETHDSAQYCFVRGQVQRSKKPQQVRGLNRNHNHEMKEIFKSAATRASCGRGPFHDFYTGLLAKGMKPEMARLTLARKIAAITLTLWKKEERFDVEQLKTQAA

SEQ ID NO: 172453 - protein, 359 aa, unidentified
MTTMTQQASEITGGVDTHKDTHTAAAADAAGRILGSAQFPATATGYAALLAWLRTFGNLVLVGVEGTGVYGAGLARHLTAHGVAMVEIDRPDRKTRRWQGKSDPVDAEAAARAALAARRTGIPKQRDGQVEALRALRVARRSAVSQRANTQRQMKALVVTAPETLRAALRGLSDRQLLQTCAAARPDPARAGDPATATRLALRALARRHQQLTAEIADLDTLIEPLVEAINPALLALNGVGPDVAGQLLVTAGQNPDRLRSEAAFAMLCGAAPLPASSGRTHRHRLNRGGDRHANAALYRIVLCRLRWDQRTRTYAARRTTEGMSKKEIIRCLKRYIAREIYNALNPPSTPAKTTPGTA

SEQ ID NO: 172454 - protein, 365 aa, unidentified
MQQDKVTKVRFDGQHVHVGIDVARKSWKVCIYVGQSYHKRFSQVPDPEALVDHLHHHFPGAVYHTVYEAGYFGFWIHRSLTKLGVHSMVINPADVPTTDKERHTKTDRIDAAKLAWALATGGLRAIYVPERAAEEDRSLVRMRASFICKQTRTKCQIKAMLRYYGEQVPDEIGDRYWSRAYIAWLESRMFEHESGRAAFQALVQELLTLRATLAALTKQIRLLSRTERYQQPSELLLTVTGISLTAAMTFLTEIVTLDRFKDLSHLLSYVGLVPGQHSTGDAEDDTGLIPRRNAALRYMLIECAWIAQREDPALLQAFTEYCKRMPKSQAIIHIARKLVARMRYVLKHEEPYVTGVLSSGRPWAA

SEQ ID NO: 172455 - protein, 412 aa, unidentified
MQTIVERPAALDVHKAQVTACARVPGRRGGREQHVAEFPSTVRGLLALRDWLAGQAVTQVVMEATGVYWKAPWAILEDEFECLLVNARHVKQVPGRKTGVSDAAWLCQLAEAGLLKANFVPPKPIRQLRNLTRYRKTQIQERAREVNRLHKALEDAGIKLDTVAADILGKSGRDMLDALVAGETDPAVLAELARRQMRKKIPALREALAGHFDAHHRLWVGAILRHIDFLDEQIEQLTGMIEEQIRPFAPAVELVCTMTGIQRRGAECIIGEIGTDMSCFATARHLASWAGRCPGNDKSAGKRRSGKTRNGSKWLDFALEEAAMAAIRVKGHYLEAQYRRLKPRRGHKRALGAVKHTMICAIWHILATGETYRDLGGDYFTNRDPERQTRRLVAQLERLGHHVTLTEEAAAA

SEQ ID NO: 172456 - protein, 438 aa, unidentified
MSNKVIFNLDELFISVGIDVGADFSWMSIALPNQQFVGKPYKILHNSIDSLTTAVSKIKEAEELYSLESRIFLESTGIYHYPLFCYLRDKGFNCSVINPIITKNSTNINIRKVHNDRFDSKKAALVGLKPDLKVSLMPSDLALNCRNLCREYYDLMDNRSAYVNKLQGELRMAFPQYLGIFSKVTINTSLTLLETYTSPSAFLKADKQEIIDIIKSTARFGLTYAQNKYNAIIQAATDANQFGYIIDSNIKRIRLYTSFIRKYDEEINSILESLHELVDANEDSDFVKQIHLIETFKGAGFLSAVSIMGEIGDFSAFSKPKQLFAYFGLDPAVKQSGKFEGTKVQMSKRGSAIARRVIHTLTLQSISISRNREAKNPVLREYYLKKCDSKPKLVAMGAVSHKVCNMIFAILRDNKPFKIIAPQEHIQQYNSAKCDIAA

SEQ ID NO: 172457 - protein, 343 aa, unidentified
MLAIGLDVHQKQTVVATLDTESGELSHRKVVTDRLVAHVAALPEPKCAGLETGAQSLFLARKLMSSGVEVMVLDAFKTHRRAEGMHTAKTDALDATALARMVAEGGGDAVVWVIGEPLDELRTLSRTHRHHVQAGTKLRNQIRAFLRHEGQTCPFSNLVGKKAGLWLDEFEAPLGRGKRVAFQALRRSLSANVAEIRELQAMMRELAEDHETVRQLRTVCGCGLVLAVALAAEIGDIRRFPAPKNLRGYSGLVPRISQSGDHTRVGPLVRKGNPYLRHALILAAQHVAQSKQLLGTRLRRFYSRQLARHGANPAKVALGRKLCDMIFAMLRDGTNFDLQRLAA

SEQ ID NO: 172458 - protein, 410 aa, unidentified
MRYYLGVDWADQTHAVWVVDESGMKITARAVPHTAEGLNEWGRELDEWRAQGIDLWAAIERPDGRVVDSLLDHGVVVYPVNPKALDRARDRFRQSGAKSDPFDARVLADFLRTDHGHLHALQPSSEAAQELKLLTEDCQRLIRQQTRLVNQLTATLKAYYPRALEVAELTSALAREFLPAYPTPAALTALTERQWQRWARAHRLPEARTGELWAVLRQPQLPVPAHVVRAKARLMQTLMEQLLPVVAAVAQYRKAIDDFFASMPAAQWARTLPIGKHGITAPTLWARLGDAPGRWESFRHLQAHAGAVPVTKRSGKQQRVVQFRFACDKALRYVVDQVAFLSLLSSAWARAYYEQQRARGHSHRQALRALGAKWLKIIFVMWERHVPYDEQYHLATMTRQQLRPRQKQIA

SEQ ID NO: 172459 - protein, 375 aa, unidentified
MISLNERSVVVGVDVHKYSHTAVAMDSWGKEKDRLEFSNDNLPIYTTWLNSFGPKEDLFVGLEDVNCYGTHLVEELRREGFHIRYVPAILTERERKSSTKRQKSDYVDAKRVGKVILTKFEETLPAKESIADEAELKTAQALDLLLMERRDLVKEKTALKNQLHALLHQYYGDHYADDFKKPFNQDAIDFYLENLENPKEKHILATSIVRRLKRLVLLEEHIGSISEELAVIGKKSDEVMALTNTIHGCGMVTACSIMAELTTIKRFAGKDNLASYAGVAPTEHSSGRKNKLHTNPFGNRRLNRALHTIALSQIACKGDPRGKEYYQKKLKEGKTKLWALRCLKHQIAKRVFRVLREVLKNPVRSKENEAQNCSR

SEQ ID NO: 172460 - protein, 352 aa, unidentified
MRRPKHQMTGGEDLFVGIDLHKHRWHVSIRTVDVEVFNASIPGTWEALQRVLARYAGHPLQAVYEAGYFGFRLHDRLVDHGIPCLVTPPSLVPQEYGNRVKTDRRDSSKLAHLLAKGLLKRVWVPSEEELYHRQVIRRRRQLVRDRVRTQSRIKAELRFYGVHLEEPRGRWTQIYFETLRRVRFGNRWMQESFDRLLEQYEFLSVQIDKQTQLLRELSETELYRERVEILQSIPGIGVISAMEVLLELQDVSRFRRAEQLAAYVGLTPSQYSSADKVRMGRITGIGKSTLRSLLVEASWTLIRKDQAMREKYDRIKIRSGGKRAIVAIARTLLLRMRRMLLDKQAYALDLAA

SEQ ID NO: 172461 - protein, 442 aa, unidentified
MAMRKREDSPEVFPNAAGIDVGASSHWVAVPRSAVEEPVREFGAMTDDLHAMADWLLACGVDTVALESTGVYWIPVFEVLERRGLTVWLVDARQMKYVPGRKSDVMDCQWLQKLMSLGLLRAAWRPGDEVCVVRAIVRQREVLLAEQADWVRRMQKALVQMNIQLTEVLSDIMGLTGQAIIRAIVAGERNPKVLARHRNARVKAGAEEIERALTGNWRDEHVFVLGQALAIYDSLAQRMLECDAKIEALLTPLARRNVDLDGPGKRHTRNAPQFDARAALARWAGVDLTRINGLSVSTVMTILSEIGPDLSHFANVKHFCSWLGLCPGTKISGGKVLSARVKRSANRARPALKMAAMSLSRNDSALGAFYRRLCARMDKPRANTAVAHKLARMVYFMLTRGETFVDQGQQRYEEQQRERSISALKRRAKALGFRVEPQTAAS

SEQ ID NO: 172462 - protein, 322 aa, unidentified
MMSSSSPTNIGIDVSKETLDIAVHETETHWTSKHEFTEFPQLVKSLSALQPTRIIIEASGGVENLLVSYLAAAGLPVIVVNPRQVRDFARATGQLAKTDRLDALVLARFGATIEPDIRQLKSAETQELEALVARRTQLVNMLTAERVRLQQAQQQRRQSIISDLKAHIIWLEKRLDKCEGDLSQLLRSSPIWRASEERLRSVPGVGPVTALVLIAELPELGQLPDKQIVALCGLAPHARDSGKWHGKRTTRGGRARVRTALYMAALVATKHNLVIKTFYRRLLRAGKEKKVALTACMRKLLVILNAMFRNQSSWRPRLQDLI

SEQ ID NO: 172463 - protein, 473 aa, unidentified
MSPSLSLTLGAASGSCIVAVEHEGQILRFPSVPAGSHVRSVASDGVVVVDEVHEQDRFVERVAAIDVGKNELKVCVRLPGGRSGRRRQEVRTYSSRTRSILDLSDWLRCEQVELVVMEATGEYWKPPFYLLEDSVECWLLDARQVKHLPGRPKTDREDAIWLARVAERGMARPSFVPPKPIRQLRDLTRYRRALTQDRTRNKQRLEKTLEDAQIKLSSAISDIYGVSGRAMIEALISGQRDPKVLAQLARGSMRGKITVLEEALTGHFSDHHALICVMMLSTIDALSIQIKQLTTRIEELIGPFQRRVEQLDEITGIGRICAQDIIAEIGVDMSVFATAAHLVSWAKFCPQVQQSGGKAPRNGATGHGDPWLASALGEAAAGAARTRSFLGERSRRIARRRGKKKALVAVGNSMLTIIWNLLSDPEAHYRDLGPDFYETHVNQRRRERTLINQLEQITGKQVTLQARPEQPAA

SEQ ID NO: 172464 - protein, 337 aa, unidentified
MNKSELNFVPCGIEVSSETLLVARGSKAPREFPNTAAGHQALLRFLEQGGGRVRVCLEATGRYGLDLALALHAARLPVMVANPRAVRHFASALMERSKTDPLDARVLAEYAARMPFQSWQPPSPTVLKLVGVVRRLQALTEMRAAEKNRLHAASLSEALSGYVRLEIAHHLRTLEHSVQRLTRAAEQFIGDDWALAERYQLLQSIPGFGPTSALHVLAELSLLGADLEVRQWVAAAGLDPRHYSSGSSVHQKTRISKLGNARLRRGLYMPALVAIQHEPHLAAFYRKLLGRGKAKMQALVAVMRKLLHAIYGMFKHHQTYDGSKIHALTPLPEALCV

SEQ ID NO: 172465 - protein, 355 aa, unidentified
MSQEKYIGMDVHQATISVAVLDSKGKLIMECILETKAATMLEFIQGVRGTLAVTFEEGTCAAWLHDLLKPHVSRLVVCDPRKNALLQDGSKSDRIDARKLAELLRGNQLSAVYHGDHGVRTLKELGRSYLTITKDLTRVMSRIKALYRSWAIPCSGTTVYAARYRSEWLAKISQPGVRLRAERFYQQLDMLRALHQEARRDFVVESHRHPAVKLLRQIPSIGPIRAALLVALLQTPQRFRTKRQLWAYSGFAVETHDSGEYRYVRGKLLRNRERISVRGLRDNYNRDLKNLFKSTAISASTRPGPLRDFYLALLAKGMRPTMARLTLARKIAAITLAVWKKGVDFDAKQLDQQAA

SEQ ID NO: 172466 - protein, 344 aa, unidentified
MNKLSRVGIDLAKNVFQLHGVDRHGKAVWRQRLARNNWLKVLIKTAGSDCEIGMEACAGAHHWARQLQAQGFTVKLIAPQFVKPYVKSNKNDANDAEAVCEAMSRPNMRFVAVKTVAQQDIQAAHRIRSELISQRTAKANQIRGLVAEYGLVASQQLARLRAVVPVWLEDAENGLTDRFRRLLSGLWNDLKTLDRRVAELDHEIKMIAQSDPVAKRLQQLRGVGPLVATALLATVGNAEQFANGRQMAASLGLTPKQHSSGGKDRLLSITKRGDAHLRSILIHGARSVIRTAKPKDDRLSRWVTSLAERRHPNVAAVALANKTARIAWAMLRHGTDYEPDYITA

SEQ ID NO: 172467 - protein, 343 aa, unidentified
MQVSTIGVDLAKNVFQVHGVDSVGKVVITRQLRRKQVIDFFSKIPACLVGMEACGTAHHWAREISKLGHHVRLMPPSYVKGYVKRSKNDAADAAAICEAVTRPSMRFVPIKSADQQALLMLHRTRDLLIRQRTQLINALRAHLAESGLVAETGREGLAQLAEIITDESNREALPSAMKQALQAIVDQLAALELQIGALDRAIHAHHRANDMSCRLETVPGIGVIAATAIASTVTDPSNFKSGRDFAAWIGLVPRQHSTGGKERLGGISKQGDRYLRRLLVIGATSVVQHARRHPQKYPWIIRLLARKPAKLVAVAVANKMARIAWAIMAKGGYYRRPELAAAT

SEQ ID NO: 172468 - protein, 354 aa, unidentified
MSDDKYIAFDVHQATTVTSVLNAAGREVNTSIIATKAQPILSFVEGLRGKLHLTFEEGMYSAWLYDLLAGRVAELVVCDPRHNALLKEGNKTDAGDARKLAELLRAGMLRAVYHGSRSLRSLQELACSYEALVQDTTRVMNRIKAFYRSRGIDCAGRGVYTRKQRASWLERLPAGASRLRGELLHDQLDHLRSLRRKARRALLEESRKHTVAARLGEIPGLGPMRVALLIARVQTPHRFRSRRNFWTYVGLGLVRRGSAEYGLVGGRVVRRARAVNPRGLNPNHRPELKEIFKPAALTAIRRLGPFKDYYDPRAQQGVDPAILRVTVARKLAALTLSLWKKGGHYRAEGLKPQA

SEQ ID NO: 172469 - protein, 363 aa, unidentified
MGEYIAFDSHKHYTLAEREDAATRAVRQERIEHQPGAIRAYLAEVAAGTMVAVEALGSWYWMVEEIEAAGCRPRLVHPRKAKLMMGMINKTDQLDVHGLNQLQRNGTLPAVWIPPRGLRELRELTRTRMVLSQQRTRLKNRITSNLAKYGLAVSCKDAFGRGGRAELARLRLRLPEQTAWATERLLVVLDCVQAEITAHEERLAALLQETEALALQQTLPGFGPILSAVVVLEAGDLGRFPDAAHLASYAGTTPRVHSSGGKTRYGSLRSDVNRYLKWAFVEAANVLARNHRRAPSRHVSQLYARLRQAKGHAKAVGALARHLAEATYQVQTRRQSYRDPALTGVNGRPMRDHAMSPAAGLAG

SEQ ID NO: 172470 - protein, 458 aa, unidentified
MNRKRSKSKIDRTMPMVHPNAAAIDVGATMHMAAVGADRTPEPVRSFGTFTTDLHRLVDWFIECGVETVVMESTSVYWIPIFELLDARGFTLFLVNARDAKHVPGRKTDVSDAQWLQRLHSYGLLRASFRPKGQIAELRSYVRQRERLLEYAASHIQHMQKALTEMNLQLHHVVADITGATGLRIIRAILAGEHDPKVLAQLRDYRCHASAETIEKALTGSYRAEHLFALKQALALYDAYHEKVSACDARIEAVLKELSIGRGRRSDSLLSPRRPRTDPVNGLAFDVRAALFALLGKDLTQIDGLGPYLSLKLIAECGDDLSAWASSKHFTSWLGLAPSNKISGGKVLSSRTRRCGSRAAALLRLAAVTVGRTDTALGAFYRRLSARIGKAKAVTATARKIAVLFYNAVRHGMEYVDPGASFYETRYRTRVIDNLHRRAKVFGFVLQPMEPTPGAAVS

SEQ ID NO: 172471 - protein, 343 aa, unidentified
MKLHVLGIDLGKTVFHLVGLDSTGRVVIRKRCSRTQLLAFTANLQVDLIGMESCSGSHFLGRALREQGHEVRLMPAQYVKPYVQTNKSDYLDAEAIAEAVQRPRMRFVPIKTEEQLDLQALHRVRERWVMRRTAVVNQIRSLLLERGLTLPKGRSHLDEQLPRILEDAELNLSDSFRVLLAQLKLELEQLAARIEEMDRVIQKTARENEACQRLTEIPGVGPVTATALIAAVGNASAFGKGRNLSAWMGIVPGEYTTGGKQKLLGISKRGNKYLRRLFVQGARSVLQQRHKQAPGLSSWLAQLLGRTHQNVVVVALANKLVRMAWAVLCKNERYRAPVFVGTT

SEQ ID NO: 172472 - protein, 309 aa, unidentified
MNIEEKVYCGVDVSKLHLDVMIKGRPDRFDNTIKGVESMKARIGNVHYVFESTGGYERLAAWLLMDAGADVSIVNPSRVRMFAMSIGQLAKTDPIDARVIAQFAAVTRPAPAEKPSDSQRMLSSLVDRRQQLKDMGTAETNRLATAGEPESQKMLKKHLRWLKKEIERVEAGIKETIEKNTAMQTKAQRIQSIKGLGKVCAATLLAHVPEIGELSRQEIAALCGLAPYNRDSGYTSKRRHIHGGRKRIRACLYMGAVSAIQHNSAMKTFYNRLVNENHRPKKVALTAVMRKLVIAANSAVKNPDFIVVT

SEQ ID NO: 172473 - protein, 361 aa, unidentified
MAQSMSLVGLDVHASQTHAAVLDTASGELRGVRLRMAPVRVVEFLATLPGPVRAVYEAGPTGFGLARAAIDRGVDVRVVAAGKVPRASGDRVKTDKRDAERLARLLAAGELRFAFVPSVADERFRDLVRAIEDCRGDLMRGRHRLSKFLLRRDIRWGGSATTGTREHMRWLRAQRFDDVCSQATFIDYLAAVEMLIARRAALIAALEQAVPDSSHAATIARLRCFRGIETLSAAGLCAEVGDWARFRPKHLSGFLGIVPSEHTSADKRRQGSITKAGSTHARRLVVEAAHHYRHRPAIGDALARRQHQQDPRVIEIAWRAQRRLHQRWQVLAGQRRKPAGVVAIACARELAAFCWEAATLI

SEQ ID NO: 172474 - protein, 373 aa, unidentified
MENSITYVAMDTHKKEHKVALHYPCHEEIVRFVVKNTARDIKKLVSKIKKQAPAEVKFCYEAGVCGFTLKRRIEALGCECAVIAPSLTPQKPGDRIKTDRRDATKLLTMFKAGLLTEVHAPDKKQEAGRELTRCRQVVQENLKRVRHQLEKFLTRHGYIYTDGFHWTQKHHRWLRSLEFEQLLLRDVFDSYFTEMQHCIQRLASLDKEVEKLAESESYKEVVGFLRCFHGIDTLTAITMITEIFDFGRFSSPGELMSYLGLTSSEDSSGPKERKGPITKTGNKRVRRLLVETSWHYRHPCNVSSTLKQRRKDQPQWVIDIADRAGQRLRKRYWYLVNKGKMPCKATVAIARELAGFIWSVFREYEARNRKEAA

SEQ ID NO: 172475 - protein, 347 aa, unidentified
MSISMIGLDTAKTVFQVHGVDESGRAEIRRKLRRNDLIAFFEKQAACTVVMEACGAAHHWARMLTGLGHSVKLIAPEAVKPFVKKGKKNDAADAAAICEAASRPDVKFVPAKSVEQQGILALHAARSLLVKQQTMLANAMRGLATEFGITVPKGIHKLDELMAVVDADEIMPQQAKQAITGLHDYCTNLSEGIETFEAEIVAHARRDETARRLATIPGIGPITASLIAATVGDITLFKTARQFAAWLGLVPRQSSTGGKTRLGRITKTGNREIRKLLVLGATSMVYRANGWNSAVGAWLRSVLERRPVRLVTVALANKMARIAWAVMTRKEVYRPKGGVAAVAQATA

SEQ ID NO: 172476 - protein, 346 aa, unidentified
MEHYVGLDVSLKQTAICIVDGTGKVQREGIVSSDPESIAAFIKSYAPNVVRIGLETGPTATWLWTELRKLGLPVICIDARHAKAALKMQLNKSDRNDAVGIARIMQCGWYKEVRVKDLDSHAIKAVLISRALLVKIKRDIENQIRGLLKNLGLVIGQAKMNLFATRAAELTKDRPELAAAVVPLLKAREAVGQQIADLDRQVMRRARDDAQVRRFMTAPGVGPITALCFLATIDDPTRFRKSRSVGAYIGLTARRYASGEVDWTGRISKCGDKMLRSYLYEAANVLLTRVAKWSALKAWGVRLAKRSGLRKAKVAVARKLAVILHRMWIDGSEFKWSSKQAASQSA

SEQ ID NO: 172477 - protein, 334 aa, unidentified
MWHVGIDLHRETVVIAAVNDAGEVIKPVTVRCEEAAAIVKVVESLGTFRAVIEASATYRWLYELLRPHSTVLLAHPFRLRAMVQRRTKTDKLDAQLLANLLRIDQIPLAYIPPEPYHQLRELARRRARLGRELAEAKIQLRALLARQNRQAPFRVPFGVRGLAWFRGQDFGWIENLTRDDLLARLTHYGQQATILDQHIERVAAAFPQVEALTEIHGIGLYSALLIVAEIGEPERFRTAKQVGAYAGLTPRVHQSGGHCYRGSITRQGSTWLRWILVEAAMKAVRRDAALKNFYTRVRKRSSAKIARVAVARKLAEICWKRLRRWQREHAKAAA

SEQ ID NO: 172478 - protein, 409 aa, unidentified
MTPAKNQMRRIIGVDLHPDSFAAAQVSGSTIAEMRIEKRFTKVPCSDWEKFLQKQIPPGSIIVCEAGCNSFEFMRIAERFGHQTFVLNSKSVAQLGKAYCKNDPHDALRCAKVYLCGLASHIWQPDEETVLRREIYSAYQQAVTDHTRANNRIKSFLTGHKIRLNKDQKLRKALTRQSVFEAYQWSESQRFVLQSLFLDLDRAAEKRREYLEFIGKTVLQYPMMTQLMQLCGIRLLTAYCIVAVIGDINRFESPKQLVAYLGLAPCVKASGNSTASCGMMDGGKTQAKSALVQAAHAILKSKNASGAALKEWGIKLKMRRSIHVAVGGVARKLAIATWYAMKGLLPDLLDTEDVIRNKFKKIAEELTEEVILKIGYKAVKDFVEEYTGLILLGRFTLFKENPHLSRQIV

SEQ ID NO: 172479 - protein, 348 aa, unidentified
MVVVGADVHKRTHTFVAVDEVGRQLGQIMVHADGKGHAKALRWARQSFPGERVWGIEDCRHLSARLERDLLTAGEPVVPVPPKLMAQSRASARTRGKSDPIDALAVARAVLREPDLPVAAHDETSRELKLLVDRREDLVAERTRMINRFRWHLHELDPHLDPSKASLDRAKTRTALAEQLACFEGLVAELARDILADIDRTTGVINALERKISHRVEEQAAGLIGLPGCGPLTAAKILGETAGVGRFRSEACYARHAGVAPIPVWSGNTAGRVRLTRSGNRQLNAALHRIAITQIRLDGAGRRYYRKRLMAGDSTTEALRCLKRRLARVVFQTLKTLPQPAAALNAAA

SEQ ID NO: 172480 - protein, 421 aa, unidentified
MSEPIYDVFCGIDVGKTSHHAVALAPDGKRLCGTDVPQDESRIRCLFEDLARYGRVLVVVDQPRNIGALPVAVARECGVDIAYLPGLRMRRIADLYPGRSKTDARDAFVIADAARTLPDTLLRIDAQNAAVEGLRLLAGFDADLASEENRLVNRIRSVLLSVHPALERTIGRQMHRPVGPGLLADFGGPEGFTAATRQALDESARAFAPRLWKKITDEIVDALGQQSVTVPGADKADFVIRTLARHLLEVRRARAELAEQFETELGKHPDGPILMSLPGVGCRTAVTMLVEISGIDRFANAGHLAVYAGVAPRTHRSGTSIKGEHHRHGGNSRLKRAMYLSAFAALRDPLSRAYYERKRSEGKNHRSALICLARRRSNVLYSMLANKSTYQVDAHRDPLDRANCAQSSPGRTLPKDVMESC

SEQ ID NO: 172481 - protein, 209 aa, unidentified
MNNSVTSIDLAKNVFQVCEFNQYHKPTSNKKVRRAKLLDSVRKLKPTRIVMEACYSANYWGREFKKMGCVVDLIPPHQVKPFVVGNKTDHNDALVIAEASFRSTTVFVPVKTIKQQDVQSLHRIRDRYIKSRTAVANKMRGLMKSNEDYHRICDVPGVGPIVGSAFISAVGNAKQFKNGRAMAAWIGLTPRLYASGDTLRMGGMSKRGN

SEQ ID NO: 172482 - protein, 367 aa, unidentified
MMGWMAPLRHRGAKLVFLKNHQEKEPSMSEITTIGLDLAKHVFQVHGVDAEGTTVVRKRLRRGQVLAFFSRIPRCVVGLEACATAHYWARELGALGHEVRLMPAQYVKAYIKRNKHDAADAEAICEAVSRPTMRFVPVKTAEQQATQLLHRGREQLVRQRTMLANALRAHLAEFGLVAAQGLRNVGELIAIVRDDSDKRLPAVARQVLQVLANQIEQTEAAIAALERQLLAWHKANAVSQRLASIPGIGPIIATAIATTVADPNVFRSGREFAAWLGLVPRQNSTGGKTRLGGITKRGNRYLRRLLINGASANLLRSKATKADPWVIGLRRRRPPLVVAVALANKTARIAWAVMLREREYQPRAVAT

SEQ ID NO: 172483 - protein, 341 aa, unidentified
MKKFIRIGVDLAKNYFQVHALESENGPAVTRKLKRSKMHEFFSQIEPCLIGMEACGSAHYWARELKAMGHEVLLMPPAYTKPYVKRGKNDAVDADAICEAMSRPGMRFVPIKSAEQQATLMLHKTRELLIKQRTMSVNALRSHLSEFGIVAAKGIGRVDELLDLAESDATLPAAARAGVKVLAQALEGLDKAIDDLQDEITSADAQNEMVRLLDKVPGIGKLIASVIAASVPDPSVFKSGRDFAAWLGLTPRQNSSGGKQTLGGITKQGNRYIRKLLILGGTSLLNVLGKRKGALRDWIVGLLAKKPARLVTVALANKLARILWAMMKTGECFRTEMFAKA

SEQ ID NO: 172484 - protein, 355 aa, unidentified
MNSVRYVGLDVHRDTISAAVLNESGRMIQQSILATRAAAILDFIGGLRGTLHVTFEEGTHSAWLYDLLSRRVAKLVVCNPRKNALMKSGNKSDAIDARKLAELLRADMLSPVYHGEKSAMEVQHLARSYALLTEDTTRVMARIKAVFRGQAIACAGKKLYGHKHRDEYLAELGAGALRRRAEFLYQELEAVQQLRRQAKRDMIVECRKYPETKLLCSVPFLGPVRAAVLIGRVQTPHRFRTKRQFWAYCGLALEMRDSGEYRVVDGQVERRKRPAQIRGLNWNHNHELKNLFKAAATSASISNGVFREFYLGLLNKNMQPEMARLTLARKIAAIALKIWKKGEAFDAEQVKLQAA

SEQ ID NO: 172485 - protein, 321 aa, unidentified
MTEDAVCVGVDVAKSTLDVAVSGCEETRQFANDHEGISQAIRHISGLKPAGIIVEATGNLEMPLATALQASHLPVVIVNPRQVRDFARAIGVLAKTDTIDARILALFGTRVKPDIRPLPDQKAREMARLLTRRRQLVEMLTAEHNRLLQASEDIRPGIETHIKWLEEALSEINDDLERRIRRSSSWCEKDNLLKSVPGVGKVVSSTLLIELPELGRLNRRKIAALVGVAPLNRDSGNMRGKRTVWGGRARLRAVLYMAALVASRRNPVISAFYQRLLDAGKAKKVALVACMRKLLTILNAMMHTMTIWQPETIIRGVSVEA

SEQ ID NO: 172486 - protein, 357 aa, unidentified
MEKASSQGWQEQYTSRRLTMTQFQSFVGVDMASATFVACVGTTPWKLIVKPVQFDNHEEGFLSFLEWMKEHKLTPERTVVCMEATGVYSEGLAYFLYANGYSVAVEPPLNIQRKFPVNASKTDELDCQYIAEYACRYVDKLSFWKPRAEILEQVKLLLTTRQHFSVQLTGHKNALHAIQRKKVASDLAKHVHQNMIEQISKHIEAVDQEIRRLIESDPTFKQTLLLLLSVPGIGLQLAAHLLIAMQDILDPKVLAAFIGICPLKHQSGSSVYSAPTSRHYGPPVLRKLLYLAACSVRTHKKPFQQYFFRKAAEGKHKKLILNNIQNKLLKIACAVVRSQKPYVSNYVSLNPLILKKA

SEQ ID NO: 172487 - protein, 343 aa, unidentified
MYFSGLDVHKKTISFCVKDAAGRVYQQGKVAATRRDLDGWVRTLPQPRTMAMEATMFTGWIYDYLLPHAEKVKVAHPLMLRAIAAAKKKNDKIDASKIADCLRCDFLPECHMASTEIRDRRRVLRYRNLVVKQMVQMKNRVSGLLMETGVSYNKQRLHKVGYFGELMSTNADISDAVRPLLNLSRGMIRRSGKLEYDLVSSLERDPLLKERLRRLRTVPGVGPITALTWALEVGDYTRFCSNKQAISYCGLCADENSSADKMMRMPLSKQRNKHIQRVLIEAAKLAPRESPELAMIRARELERGNPNRATLAVARKMVCYMLAVERRQQDFVPAGECMPTAAA

SEQ ID NO: 172488 - protein, 370 aa, unidentified
MSVRRILAKTINTDLEYEAIGIDLAKNCVSVALLTTDGEVVCIDRLDYSELEKSAQVLCPTTFAMEPCTEMNYLVQKLEAWGHRCLVIGGKNVQNYVENHFSGQKTDLNDAQALAFLAQDTQLRTIKAKDMEQQKYASLTTLREQYIKQYRQTIVSLKGICQAWGLNISKGISGKARLKDLIENHAAFPEELKESLVDMVTHAQTAQKALNKITKTLELLAKNDKVCQLIQTIPGLGPICSCRLRATIGDIRRFKNPKDFPAYYGLVPRSIATGHNEKKGKITHRGDKTMRSLMVQGAGSVINMATKGKLKSKQLTKWILKKQKEKMPWGKLVCAVAAKLLRIVRAVLISRKAYDPKLAGVAKCSLPKAT

SEQ ID NO: 172489 - protein, 381 aa, unidentified
MKTNSDTTRALYLGLDVHKEQTVIAILESGRDAEPRQYGSVNTSQHALERAIRRIAKQQNRCLSDLHVCYEASGCGFWIARRLLQMGVRCDVIAPSLIPQRSGDRVKTDKRDAAKLAKMLRSNDLVAVHIPDSVDEAIRDLCRARTDAVDDLRRARTRLLAMLRRLGFRYDGKTHWTQSHQNYLRGLQLPDAAHNRVLEDNITTIDFHEERIARLEDEMLQLLEDWQRKPLVEALMAFKGFQLVAAMVTISEIGTFSRFEHPKKLMAFLGLVPSENSSGGSRHQGGISKCGNPHARWLLVEQATHYRVPPKISPQLSERQRKTPRWIKELSWKTQTRLSHRFAVLRKRQMHHNKIKVSIARELTGFVWELGTRFESRQAQP

SEQ ID NO: 172490 - protein, 449 aa, unidentified
MKKHDLKQRGLPVIHDHAAGIDIGSRFHVVAVPADLAKDSVQTFQAFTSDLERLANWLVNLDITTVAMESTGVYWIPVYEILEAHGLQVVLANAREARAVPGRKTDVNDAQWIQRLHACGLLRASFHPDREISALRSYLRLRERHLDYAAAHIQHMQKALTHMNLQLHHVVTDITGVTGMRIIRAIVAGERSPSVLAAMSDTRCKAGIEVIQASLVGNYQPEHVFALTQALSMYDAYQAQLEVCDQQIAQTLITLSQEKTSPTEPLPKPRHRTRQPNALNFDVRTLLYQLVGVDLTQIHGIGPYLALRLVAECGTDLSRWRTCHHFTSWLTLAPGCRISGGKVLSAHTRKTKNRVTAHLRLAAVTVGRTNTALGAFYRRLAARIGKAKAVTATARKIAILFYNAMRFGMNYQDPGADHYEQKYRERVVKGLYRRAAELGFTLQPAEGVS

SEQ ID NO: 172491 - protein, 387 aa, unidentified
MSQPNDLSRSLVALDQDSTIIAVVEMSQSSWLVGGILPGIERQPRKKLEPNPERLLALLHRWRDESVRAGRTITRIAVAFEAGRDGFWLARWLEARGVETHVIHPSSVAVSREHRRAKTDRLDTELLKRGFLGWLRGERGHCSMARVPTIAEEDAKRPNRERECLVKERTRLVNRMKGTLARLGIRNFRLTLRNAAEHLAALSTPEGSPLPPNVAAELERDIARLRLVIGQIKQIEEARRQRLEEQPERGPHAMVRLLARVVGIGIETADMLVNEVMSRPLRDRRAVARYAGLTGAPDESGAKRREQGLAKAGNARVRRGMIQLAWRFLRFQNNSALAKWYQARTADHRGATRKTMIVALARKLLIALWRFVTIGEPLDGVTLRPAS

SEQ ID NO: 172492 - protein, 371 aa, unidentified
MDKSSRTVYVGLDIHKDAIAVAYAPEDRGAEVVSLGPIGTRQCDIDKLIRRLESKAATLVFTYEAGPCGYGLYRYLTGKGLACQVVAPSLIPRKAGDRVKTDRRDAMTLARLMRSGDLSAIYVPGIEDEALRDLSRGRDDAMQDLKRSKRRLKSFLLRQDIRYEGRATWNAAHLRWLAEVVCPTPPQQIVFQEYLRAVSEQQERRQRMEHELHEAVKGWRLYPVVEAIQALRGVELTSAIIVMAELGDLTRFENPRQLMSYLGLTPSEYSSGARRHQGGITKAGNSHARRALVEGAWAYRYPAKVSRHLQLRLETLPAEVQAISWKAQVRLCKRYRQLTARGKHVNQVVVAIAREMAAFAWATARLVPLAS

SEQ ID NO: 172493 - protein, 481 aa, unidentified
MTADTRNRKQRRDLARQLQAANPGLDVVHPRAAGIDIGNGTHYVAVRPDQDPEPVRRFECFTADLHRLADWLEACGVETIAMQSTGVYWIPLYEILEERGLEVYLVNARHTKNLPGRKSDVQESQWLLKLHTYGLLNNSFQPTAEIRVARTYWRQRGEHVRGASTCVQRMQKALTQMNIQLANVISDLSGLTGQTIVRAILAGERDSKKLAELSHPQIRASREEIAKSREGTWRPELLFLLKQEMEMYDTYQRRIAECDKELEAHLKSFADNIPSKITGEEPPLEPRQENHVGTSGKAKRTQTSKKAPGNRPQFDLRSELHRISGVDLTRIDSINVLVAQTVISEVGLDMSRWNTEAHFASWLGLCPDNRISGDKVLSKGTRHVVNRAATALRIAATTLLRSRTYLGAQFRRLRTKLGAPKAITAMAHRLARLVYRMLKYGQEYIDKGMEYYEERNRLQQLEHLRKKAAKLGFQIVEVQPA

SEQ ID NO: 172494 - protein, 426 aa, unidentified
MWDARRRVLKIKSLKHGIIQDKRGNIMRTVFGIDVSKASSEVAILVNGEKIHGYTMLNDAIGFNRLLNNLKTVHNPEIIFEATGVYSRRLRAFLEEYGYAYTQLNPLEAKKQLDSLRVRKTDKIDAEKLAHSQFILNRKPTYAQEEVYQHLRDLSRFYQNLTEDIVRAKNRLHKVLQVTFPELENLLSTPTGEQYWNLVMAFPCKEFVLNLSQNELCKIIRQSTFKRISEKRIAYLTDKLIKLAKQSFCAVKKISPMLEEVRYYAQELLRLSEHRQVVLDDMVALAQPLPEYDILRSIPGIAEITATSIIGELGDIRRFQSTNQINAFIGIDLRHYESGKFLAKEHITKRGNPYARKILFKCIHNIASASHTNPCHIADFYEKRKRQSTIASTKPHAIASIHRLIRTMYYLITHNKLYDYSLTQNR

SEQ ID NO: 172495 - protein, 339 aa, unidentified
MFYSGIDQHKLFSYITTVDSDGIVIKEAKLNNNNFDILNYFNSIGNEHIATVETTGGWYWMNDLLSSQGINLKLAHAKYVKAIAYAKVKTDKVDSHILAQLLRLNFIPEAYKISDDIRTLRDTLRARLRLSVKRTSCINFMHRMLEKFNISDPSLLNDFYKLQYQQFDIQAKLLKEQMLTLEKSIYPSLIPNQDIQRLLWIPGIGKMNAFTILLEVGDINRFASEKNFFSYCRLTPSARNSGGRVRQKSSSKDGNRYLKIVFSDAAVHALQYYPVIKRYHNSKLRKKKKQVAKAIISKEIARIVYYVLKYKSDFNNKFKGIDLEHKKSVQWPRITSPDV

SEQ ID NO: 172496 - protein, 408 aa, unidentified
MNAVGIDVSKGKSMVAALRPMGEVALLPQEFLHTEVGLEQMAYAIVALGEDTRVIMEATGRYHEPIAAALHEYGIYVCVLNPLFIKQSGGGSIRKVKTDKADAMKIAKYGLDNWVELREYTPMDTVRQQLKLCSRQYNLYMKTVVSLQNNLISLTDKTFPGVNELFSSPERADGHQKWVDFVMTFWHCDCICRVSEKAFTDRYQKWCKRKGYHFSTEKALDLYAGSCGHFTTLPKNDNTKLLITTAAQQLLAGKITLAALRAEMTRLAKQLPEYDTVRAMYGVGETTAAQLMAEIGDVRRFPRRSSIVGFAGVDPAVDQSGKHSAKSVPTTKRGSPHLRKTLYQIVCTYLKRSPADEPVYQFLDKKRAEGKPYFVYMTAAQNKFLRIYYARVKECLEAFDERQDTVQN

SEQ ID NO: 172497 - protein, 407 aa, unidentified
MIFVGVDWAEAHHDVCVMDDDGKVLGRKRIPDSLSGVSELHVLVADHTGEDDDASHVIVGIEKDRGLIVTALMAAGYQVFAINPLAAARYRERHHVSGAKSDPGDAKVLADLVRTDRHNHRPIAGDGSLVEAVKLLARAHQNAIWSRQRQVNALRSSLKDYYPGALDAFGTDLASVDAVAVLGIAPTPAIGRTLSRAKLVSAMKRAGRKRNLEEHAEKIQGVLRKEQLAQPAVLENAYGITTRVTVAVIVQLNETVAELEAALSEHFEQHPDAKIIHSLPGMGTVLGARVLGEFGDDPNRYRDAKSRRNYAGTSPITKASGRSKVVLARHSRNKRLADALDQWAFCSTNWSPGARAYYDELRARDKHHRKAIRQLANKWVGILHTCLERGCLYDENIAWPTTEELAA

SEQ ID NO: 172498 - protein, 341 aa, unidentified
MNVKTIGIDLAKNVFQIHGVDEHGKRLFNKQLRRAQMASFFANIPPCLIGMEACASAHFWANKLISMGHNVKLMAPQFVKPYVKTNKHDAADAEAICEAVTRPNMRFVPVKTAEQQAVLALHRSRQSFIKQRTAQANQIRGLLAEFGIVVPRGIQQLQRRLPELVEDADNPLPVLFRTQLSLLQHHMAYLFDVIATLDKQIEQCYRQNALCQRIGKIPGIGPVTSSALIATIGKANNFENGRQLAAWLGLVPRQHSSGGKQVLLGISKRGDTYLRTLLIHGARAVLQSAKHKQDAVSSWANQLMARRNNNIASVALANKNARTVWALLAKEREYCAPIISA

SEQ ID NO: 172499 - protein, 324 aa, unidentified
MSKIKKFFGIDISKDVFDVVDASDKHHQFKNDPSGFKEFSKLLNEKSHCVMEATGSYYQRLATWLYDSSIIVSVVNPLSVKRFIQMRLKTSKTDKLDAQMIRMYGESEQPKLWNPPSKRIIEATELHKLIELLVRQRAGLKNRLHALESKGITRSLVLTSVRRQIRNLSNEITDLELKLESVIKEYEPDLLTRLCSIPGVGKRTAIYLIVITQGFEKFESSRQLISYLGLNPIIRESGSSVRGKSRISKTGDNQVRKLLFMCAFTACEHNKACREIYQRLTAKGKSKKLALIAVANKLLKQSLAIAKSGLYYDENYRSVNVNLG

SEQ ID NO: 172500 - protein, 362 aa, unidentified
MTTLTAAETILAIDLGKYKSTACTGERDTAAARFETITTNRGELLRLLERTQPVVVLIEACALAGWIHDLCTELGLRCLVANTAAEAWKFKHTKRTTDKDDARRLVELYRLGQLPEVGMPPKQTREWRGLIAHRQHLVGLRVRVQNRIRAILVGQGLPAPRAAKAWSELGLQGIGQFAKDLASCAAAELWRGQLQQTLVLFRPYRDLFDQAEKRLDQLADADAGVQILVSTPGVGPRTAEAVVAYLHQPERFGTGKQVSAYGGLVPRQFQSGEVDRRGRITKRGPAILRKLLVQAAWAMLRYNPWARAVYARLSRGKARKKQAVVALARKLLVRLWAMLRDQRPWRGPAADSPPQPEARAAG

SEQ ID NO: 172501 - protein, 355 aa, unidentified
MKYYTSTTEYNCGIDLHARQMYVCVMDRQGKKLVHTNVRDNDFSFFLKLVEPYKHNLTVCCECMFGWYWLADACSAAGLSFVLAHALYLKAIHGGKNKNDRIDSEKLTHLLRSNLIPPAYVYPADKRPLRALLRQRIFYVWRRAELLARIHSHQLAHNRIPARQTRRVRDSWAEQLLSAEDHPLRQIALKNDLDMISQFDRQIARLELELRHQTKELAGRDFTLLQSVPGIGQSLGLTILYEIGEIDRFPTVKDFLSYCRLVKGTVASAGKIKGLRGAKLGNPYLRWAFGEAAVIAKRDHFSIGPLAQRLQQRLNGNKFKANTVVAIKLARAVYFMLKNKTVFDPERLVAALAKN

SEQ ID NO: 172502 - protein, 410 aa, unidentified
METIVARAAGLDVHKAQVTACVRLPGRGRRRQEELAEFPTTVRGLLALRDWLQAYRVTQVAMEATGVYWKPVWAILEDDFDCLLCNARHVKQVPGRKTDVSDAAWLCQLLEAGLLRRSFVPPKPIRALRNLTRYRKAQIGERQREANRLHKILEDTGIKLDCVATNILGVSGRAMLEALVRGTSDPEVLAELARGRLRAKIPALKEALEGRFDAQHALIVSAILAHLDFLEEQIDLLSEAIEEQLRPFAAAVELLCTIPGVQQRTAEAVIAEIGVDMSRFPSARQLASWAGQCPGNDRSAGRRRSGRTRHGSKWLDTALTEAAIAALRTQDVYLAAQYQRLRARRGHGRALGAVKHSILCACWHILTTGELYHDLGGDYFTRRNPERATRRLVAQLERLGHHVTLEAAAA

SEQ ID NO: 172503 - protein, 340 aa, unidentified
MNKLIKKKHFIGVDISKDTLDLALLEEETCITFIDKKIENSLRGFDRILEWLDKQNKKLEDCFFCMEHTGTYGLLFFAWLSQMEIDYCVEPGMQIKRSLGMTRGKNDKVDARRIAEYAYTNKAKLKTFTMPSTLVVQIKQLLTYREQTVRIRSSLKNSLKSHRQYQRVSGLKKITKQIADQIEQQDRLVKEIEKQIVELIETDPQMKKNFELATSVKGIGFVIAAFMLVTTNNFTSFENGRKYACYSGIAPFEYTSGASIKGRSKVSHLGNKTIKTLLSNGANSASKWDPQLKAYYKRKEAEGKDHKLIMNSISCKLVNRVFAVVKRQTPYTCIYEHNFA

SEQ ID NO: 172504 - protein, 392 aa, unidentified
MVISVGIDVSKDKHDCFIVSSEGEVLADVFTIPNTIEGFHCLLQRIQNCTNAQNKIKVGLEATGHYSYNLLGFLLDNGLPTYVLNPLRTNLYRKSLSLRKTKTDRVDARTIASMLLSDVGLKPYTNTVYHNEELKSFTRYRFDKVKERAKLKSSIARLVCILFPELEALVPSLHIASVYALLEEFPGAKQIAAAHLTRLKALLETASKGRYKRDMALEIRDTARNSIGSWMPAKSLELQHTIRLIRELDNEIAEIEEQIQAIMDELNSPITTIPGLGFRMAAMILAEVGDFTRFDSPDKLLAYAGMSPSTYQSGQLKNCYPHMEKRGSRYLRYALYNATKYVCHWDPIFAAYLAKKRAQGKHYNVALSHAAKKLVRLIFALEKSRQLYCAAD

SEQ ID NO: 172505 - protein, 347 aa, unidentified
MTLFVGLDVSVRETAVCVVDAVGQVVVEKKVATEPEDLIALLRQVGGDYGRIGLEAGPLSQWLVSGLAEAELPVVCVETRHMKALLKAQQVNKSDRNDARGIAQMMRVGLFKPVHVKTLASQERRMLLTSRKLLQKKLLDVEADLRGTLRNFGLKVGVIRTSGFEGRVRELVEDYPRLAAIVGPMLTVRRVLHEQFTVLHKMLLGLVRQDPVCRRLMTAPGVGPVVALTYRAAIDQPQRFAHSRAVGAQAGLTPKRVQSGETDYDVGISKTGDAMLRSTLYEAAQSLLTHGGAKWSWLRAWGMRVAQRRGMRRAIIAVARRLAVILHRMWVDQTDFRWTKAPAAMAT

SEQ ID NO: 172506 - protein, 321 aa, unidentified
MTYIGIDVSKDTFVVAYSPEKNSKTKTFKNTTRGIHEFIRTISKDEHHCVMEATGNYSALLVYLLSEAGITTSLENPLKVKNFARAMLSTVKTDEIDARLIALYGEKMQPAPYKLRSDAILTLKQKRTVIRQLKKQLIATRNLKGSMEVLPFFDAKCKKSIDKTIAFLEKQIKDLEEDLASLAKSEYKKQMDLLTSVKGIGITLAAALIMATGGFTYFDNAKQLTRHLGLSPTYQQSGTSVNFKGHINRNGDSSLRSQLYVAAFASLRCNTECRACYDRLRSNGKPGKVAVIAVANKLIRQAFAVVTQEKPYVDGYISSKK

SEQ ID NO: 172507 - protein, 319 aa, unidentified
MSTKSPVRHVGIDVSKERLDVCSLPDGGTFSVANDRAGIDELIARLLEGVRPELVVLEATGKYERPAAVAVAAAGIAVAVVNPRQARDFAKAAGRLAKTDRIDAQVLARFAGAVGPRPSVLPDEEARVLQDILLRRRQLLEMMVAEKNRLQMASEAVARRIAAHVRWLEKELCRVDRELDEAVRESETWRANEELLRSVPGVGPVLARTLLAELPELGTLPRRRLCALVGVAPFNRDSGTFRGKRQVWGGRAPVRAALYMGALVATRHNPLIREFYERLLAAGKPKKVALVACMRKLLSILNAVMRDRVPWHSAHLLTP

SEQ ID NO: 172508 - protein, 317 aa, unidentified
MMAEEQWIGIDVAKAWLDVASTTEMPVRRVANDEPGIAALVAELTARAPRLVVLEATGGHETLVAAALAGAGLPVAVVNPRQVRDFAKATGRLAKTDALDAQTLARFAQRIQPPVRPLPEETTQELASLLARRSQLLQMRTAEGNRRSRLSLRLHPALDEHLDWLTSQIAVLDADLERTLRDSPLWQAKATLLRSIPGIGPVVSTTLLGCLPELGTLSRQEVAALAGVAPLNCDSGARTGARHIWGGRAVVRTALYMAVVCGIRGNPVIRTLYQRLHQQAGKPKKVAIVACMRKLLTIANAVVRDGMPWRPQTAPAA

SEQ ID NO: 172509 - protein, 391 aa, unidentified
MPMYFVGIDISKYKHDCCIISAADQQIISKFTITNDKDGFEQLLTSLNSLSNPEDIKIGFESTAHYALNLELFLENAHHSFMEVNPVLIKEYKKSTTLRRTKTDSVDCESIARWLITVEYKPHSKGFYHAYSLKSLTRLRDRLIRQRSFYLVKITNVLDHTFPEFKPFFNERLSKTALYLLENYGSAEKMARMNSASYDKLRCISRGKFSIQQFLRLKELAANTVGVNNSIFDLELNTLLTLYKSLSDEINTLETEIIKLIEEVHPHYMSIPGIGPISSAVIYAEYGDISNFSNPGQMLAFAGIEPGINDSGTESHGGRMVKHGSSQLRYVLLNACLPLIRFDLTFATYYEKKRAEGKKHRVAITHVAKKLIRVIYALERQDVDFNAQKLR

SEQ ID NO: 172510 - protein, 377 aa, unidentified
MKRVKFVGLDVHAETIAVAVAEQNGEVRSLGVIPNREDSVRKLVRKLGPVEEPRFCYEAGPTGYVLYWQLTRMGAKCEVVAPTLVPVKSGDRVKTDRRDALKLARNYRAGELTPVWVPDAAHEALRDLVRAREAAKKDELRARHRLNKFLLRQGRRPPMGVKLWTIKYLEWVKREVHFEQMAQEATLLDYLHEVEHAAARIARLDGAIAEAVKLAPPKMRAVIEALQALRGIAHVAAVTVVAELGELSRFARAKQLMGYGGIVASEHSSGERTRRGGITKTGNAHLRRVVVEAAWTYRHRPAVGTSLRKRQEHVSEEVKEIAWKAQQRLHQRYKKLLANGKNKGVVVTAIGRELLGFIWAIGIKVEAAQKESLQRAA

SEQ ID NO: 172511 - protein, 310 aa, unidentified
MDAIYVGIDVSQARLDVHVLPSGEAFAVARDGKGLEELIERLRAFSPQLIAVEATGGFETIVAAALAGAGLPLVVVNPAQIRHFAHALGKRAKTDPIDAAVIAHFVEAVKPELRALPDEAQRLLAELVGRRRQIIEMMVAERQREKRAANVRVRKSILRHIRVLEKELPEIDEDIGTLVRGSPVWRKKEDLLVSFPGIGNTLARTLLAEVPELGELTRREIASLVGVAPFTRQSGRWKGKSMIAGGRGSARTALYLAALVASRHNPILKAFYMRLLAAGKPKMVALIAVARKILTTLNAMLRDKRKWQPA

SEQ ID NO: 172512 - protein, 323 aa, unidentified
MNKYNETFGIDISKDVFDCYGSKQGHLQFKNTEIGFKKFLEMLTQDSLVVMEATGYYHYRFAQFLYKKSIVVSVVNPLSVKRFIQMKLAKVKTDKSDAKAICDYGLTQEVPLYNALTDTQSECLQLFRLMDNLLKTRTATKNKLHGEEVLGIPSKWVYRCLNRNKKHLDKELRGIEQKLLSLVKKDQQNQLTLLQSIPGIGMKTALFLIVVTDGFKKFETASQLCSYVGITPTIRESGSSVRGRARISKVGNRKLRNLLFLCSFTACIHNKSCREIYQRIVNKGKSKKLALIAVSNKLLKQSFAIAKSGHPYDERYISVLASK

SEQ ID NO: 172513 - protein, 318 aa, unidentified
MSSAAPAFVGIDVAKAELVITIRPSGEHWTIANDVAGIHTLVQRVRGHAPTLIVLEATGGYERAAVAALAAAQLPVVVANPRQVRDFARATGQLAKTDRIDADILALFAERVRPAPRALPDDAAQALDALLTRRRQVLEMLIAERNRLEHAVPTVRRGITQHIRWLERQLADVDRDLDDTIQASPVWRATENLLRSTPGVGPVLSRTLIGELPELGTLPRKQIAALVGVAPLARDRGTLKHKRLVWGGRAPVRAALFMAALVGTRCNPVLRAFYRRLLEAGKPKNVALTACMRKLLTILNAMMRTNTAWRHIDLSPTT

SEQ ID NO: 172514 - protein, 458 aa, unidentified
MGKMEGKQKRAAPKVDWKGLEIMHPDAAGIDVGGSEHWVAISPDRDREPVRRFGCFTADLREMARWLVEKGIRSVVMQSTGVYWMPVLEVLEQHGLEVFLVNARHTKNVPGRKSDVEECQWLLKLHTFGLLNNSFQPTDEIRIARTLWRQRGNLVADASSAIQRMQKVLIEMNLQLSNVLSDISGLSGMSMIGAILEGERDPWVLAALVQPEVKATPQDIVKSLEGNWRKELLFVLRQEVELYRTYQEKIHDCDLQLREHLESFGSVVDLQAQPIGPKPKGKKDSKNSPGFDLRTELYRITGIDWAQVNGINVLTAQTVIAECGADLSAFPSEKQFTSWLGLVPTNEQSGGKILKRRTRKVVNRAAAALRNAATTLLRSQSYLGAQYRRLRTRLGAPKAITAMARKLACLFYRLIKHGQQYVDKGNEYYEMKYREQQLRSLAKRAQKLGIRLLIPEAS

SEQ ID NO: 172515 - protein, 310 aa, unidentified
MNTSSPVWVGIDVGSTELVVHHRPAACQLTVPNTFAGVRKLVATLQQLRPAKIVAEATGGYERRLMTACRDAALPLVIVNPRLTRRFAESLGRLEKTDAVDAADLALYAERQQPACRPLADDATLALQDLVVRRRQLVEMRAAERNRSRQASPAIRADHATHIRQLDARIIRLDRQLTAAIAAHPSWAQRAAMLQTAKGAGPVLAATLLALVPELGTLTRRQVAKLVGVAPLARDSGKRRGRRHCWGGRGAVRAVLYMCMGSAIQHNPTIRELYQRLIAKGKPENVARTACMRKFLVRLNAMIRDGQPWR

SEQ ID NO: 172516 - protein, 406 aa, unidentified
MRGPVITVDVSKGSCHYQPFLEKGKPFRKPKVLHDTIEGFADLNAIIEKTKEKSGEDTVPVIFEATGVYHRCLQKYLDDHEMPYYIISPLLSAAYRKTNLHGNKTDNLDCAHIAKAYYDEDSLLPYQRQSDLFVKLQKLNRYYEIELQHLRKRKVSFRSYLDIIYPCLDKCFKGRSSLYDPVPLEILKKYPHPSLLLKHREETIVKTIEKKTDHKPAFIREIVHKMYESALHCYSGADVNDLEAIKFPQIIEELQEQTLLCDSILQELIWEAKEIPYFPCIVSIAGIGENLAARLIAELGDMSRFKNRRALAAYAGLNPKILQSGDVDGTHLRISKKGNRHLRCLLYLGAARNYRLKKKDPLYLFNQKKRQQSISPLKSKAANIAAAHKLLTIIYALSKSGELYRS

SEQ ID NO: 172517 - protein, 347 aa, unidentified
MTEAYDGRQVVGIDLHRRRSVIVRMTEDGRKLETVRITNSPAALRAEIAKAGKNPRVVIEATYGWYWAVDVLEEAGAEVHLAHPLGVKAFSYRRVKNDERDACDLADLLRMGRLPEAWIAPPEIRELREITRYRHQLVKVRTSVKDQVHGVLAKLGVPVTCTDIFGAWGNTWLDGLGLPQPYAGKVASLRQLAGELGTEITLLDTVLGDLLAGHEGYAAIQQLPGIGPVLAAVIVAEIGDIRRFPGPGQLASWAGLTPRHYESDTKVIRGHVTKQGSRMLRWAVVEAIQRQPAGTRPRQVKDAIIARRGKEAKNIAKVAAARELLTLVFYGMRDGHARRALQRGQAA

SEQ ID NO: 172518 - protein, 376 aa, unidentified
MTASGEVFVGIDTAKARNAVAVAEGGREGELRYLGEFDNTPDAVAKLIRKLAGRYATLHICYEAGPTGYGLYRQILALGHDCVVVAPSLIPRRPGDRVKTNRRDALSLTRLLRAGELTAVWVPDETHEAVRDLVRTRAMAVEDYRRKRQHVTSFLLRHGRSYDGKTSWRGRHKRWLDAQNFAHPAQRLAFQEMLNAVQATVERLDRLEAALIEIVPDWTMAPVVSAFQAMRGVQFMTAVTMVSETGDLRRFDHPRQLMAFLGLVPSERSTGETRRQGGITKAGNSSARKALVEAAWTYRHSAGVGVAHQQRQADLPPQVRDIAWKAQTRLCARYRRLMAKGKRNTVVVVAIAREIAAFLWAIARHIAPMPPMAGTV

SEQ ID NO: 172519 - protein, 402 aa, unidentified
MTENQKRYVGLDGHKHYLMVGAVNATQEVVLPPRKVSLIEFEGWAKKHLRPTDEVVLEASTDAWYLYDLLEPLVARVVVGHPPLIKLIAAAVVKTDKKDTMTLAKLLAVGMIPAVWVPPTPVRELRALISHRKRLIAQQTRLKNRLRSLLQRHHLVPPGGELFALVNRPWWLKLDLSSSEKLRARQDLTLLDQLAPLIQEVETELNCLSLAEPWAEQVLYLLQLPGIGLITAMTILGAIGEIERFPTAKKLVGYAGLGAKVHSSSHTHRTGGITKLGRKELRAVLIEAAWIAVRYDQHWQEQFERLADHIGRQKAIVAIARKLLVVIWHVLTAKVADRRAEPQQVARYFIRWGRQLRVKTTLGIKASEFARQQLDRLELGQELERVPYGTVTYCLPPSTTAP

SEQ ID NO: 172520 - protein, 342 aa, unidentified
MSVYVGIDVHRKRSQVAVIDQCGEVVTNRNVPNGVEPILKVIGGLPLGTPAAFEAAFGTSWLVELLEDYGFTPHLVHPSRCKAIASARLKNDKVDAAILAQLLRADLLPEAWIAPPPVRALRALLRHRVALVRLRTLLRNRIHAIVADHGHDRPGGGYWTGPGRAWLAALDLPVVSRELVEDDLALIDALQERVDRLDWEIHQRARSDPRVKVLTQLPGVGPFTALVILAEVGDISRFGSARKLASWAGLTPTVRGSDRVAHYGHISKEGSVWLRWVLCEAAQTAKRHPQFAAAFQRIAQRRGKKIATTAIARKLLTRAWHLLTDAEHAAAPQPAAPQTAAR

SEQ ID NO: 172521 - protein, 309 aa, unidentified
MTIHHNYIGCDIAKAALDVFDPRSGRLLRIANEEAALGAFLAGLDPAADFVVFEATGPHDRLLRHGLAAAGIAHARLNPLRVRRFAEARGRLAKTDRIDARSLSQMGTALRPAPDQPPCPAQERLAMLARRRDQLVEARARETRQRAAAGDAFVIADIEAAIAHLSARIEALETEIDRQMKSHGDLAHKASLLASAPGIGAVTALTLIAHMPELGTLSPKAAASLAGLAPCNDDSGKRHGRRRIKGGRPRVRRALYMAALGAIRATARFRAFYTALAQRSGSKKAAIIAVARKLIITLNAMMRDKTSFA

SEQ ID NO: 172522 - protein, 370 aa, unidentified
MLDTTTFVGLDVHARSIKAVSLDVMTGEVRCATFGYDAGAVAEWVRSVDPKARCVYESGVTGFDLQKRLSGLGVDCVVGAVSKMIKPSADRRRKNDRNDAEFLARMLSVGNVVEVWVPDDECEAARDLTRALEDARDDLSRAKQRLSKFLLRHGLAFDERTPTGRRKGNWTRAHWSWIESIRFAEGADEDVLAYYVDAVRRAAEEKARLEGLVEAEARKPRWRRRVDSLRCLKGVDTATAADLVFEAGEFSRFRNARSFAAWVGLTPSEHSSGESDRRGAITKAGNKHLRKTLVEAAWHYLTCSGRPKDLAKGQAPDPGARRHAAKGVRRLVERREALLARGVHGNKANVATARELACWVWAVGLMAEEA

SEQ ID NO: 172523 - protein, 466 aa, unidentified
MRTDKKLWRNRKARKELARRLQSENPGLEVVHPHATGIDVGNGAHYVAVRPDRDPQPVRRFECFTTDLYRLADWLQSCGVRTVALQSTGVYWIPLYDILEERGFEVYLVNARHTKNLPGRKSDVQESQWLLKLHTYGLLNNSFQPPSKIRILRTYWRQRLQHVTGAATCVQRMQKALTQMNIQLANVISDLSGVTGQLIVRAIVAGERDPWKLAELSHPRIQASREEIAKSLEGNWRQELIFVLQQEIEMYDTYQRRVAECDQELQKHLRAFADTVPPPVKEALPPKKQKKQNKNNPHFHLADELQRITGVDLTRIDGVDVMVAQTLISEVGLDMSRWKTEAHFASWLGLCPDNRISGDKVLARGTRHVLNRAANALRLGASTLLKSQTYLGAQYRRLRSKLGAPKAITAMAHRIARLVYRMLKYGQHYVDKGAEYYEQRNRQQQIEFLRKKAARLGLQLAPAHPS

SEQ ID NO: 172524 - protein, 415 aa, unidentified
MSRFERRRRAQTARAVVGVDAGKYKHVLVVRPHDGPDSKPFTFDVSREGFDAAVQFIGAAAPDASPETTIVGIEFAGTYGFTFAHDLARQGFEVVTVLPAHSKRWKEVVHNQRLKTDAKDAIVITDLVAQGNFVAFAFLDPAYADLRSLVSARERLSVERRALIARIKSVLEGVWPEFERRFKNFGKRTPIALLEAYPSPKAFLDAPKRSVLRLLRKESRGHLGEKTYEELKVVAERSVALPFSEGAAKSEIPLLIERLRLCEEQIRTIECWMVETLGRIEASRSVLSVPGVAPVTAAVFLGSIGDPKAYETKEQVLKVAGLSLIESSSGTRAGEVHISKRGRPLLRRHAYMLALRLVQEGGIFRKEYEAYLERHGPKKKIPALVAISRRALALIYSVARDGRLWTPEPPSRRKT

SEQ ID NO: 172525 - protein, 391 aa, unidentified
MPMYFVGIDISKYKHDCCIISAADQQIISKFTITNDKDGFEQLLTALNSLSNPEDIKIGFESTAHYALNLELFLENAHHSFMEVNPVLIKEYKKSTTLRRTKTDSVDCESIARWLITVEYKPHSKGFYHAYSLKSITRLRDRLIRQRSFYLVKITNVLDHTFPEFKPFFNERLSKTALYLLENYGSAEKMARMNSASYDKLRCISRGKFSIQQFLRLKELAANTVGVNNSIFDLELNTLLTLYKSLSDEINTLETEIIKLIEEVHPHYMSIPGIGPISSAVIYAEYGDISNFSNPGQMLAFAGIEPGINDSGTESHGGRMVKHGSSQLRYVLLNACLPLIRFDLTFATYYEKKRAEGKKHRVAITHVAKKLIRVIYALERQDVDFNAQKLR

SEQ ID NO: 172526 - protein, 317 aa, unidentified
MTQTTTLTAGIDTSKDKLDIAIDDGTACWHDKNTAAGWRRVAARLAEAGVRRVGIEPTGGYERGVVKHLRERGFTVLVLQPTQVKAYAKMHLRRAKNDEIDAGLIAGCAAGLKPPAIPPDARLEALAGQLTFVEQIEEDMARLKTRLEHVGDARLSGIIKADIAALKMRRAAEMLRIIKALRAHTDLARRYHLVLSVPGIGERTAIAIIIRLPELGRISREEAAALAGLAPYDADSGKHKGQRHIAGGRARLRRSLYAAALPAAFRWNKALIELYARLIARGKCHKAALVACARKLLIYANTVVQRGTPWVESPAAA

SEQ ID NO: 172527 - protein, 323 aa, unidentified
MMFVGIDISKLTFDVAILHEGHYHHRQFSNNAGGFSDCLKWVKPFKSAALFCLEATGIYGLALAKFLCLQQQKVIVANPIQTHAFAKMEMSRNKTDKADAQCIARYCQHLYHQGLTDKALYTPKEPDFERIQFLVTRLDQLNKMRTQENNRLSVSLDKDAVKSVKEMCTFIDKQLVTTQRKIANIVKLNSSLLQQVQLLTSIRGLGDKTAWAILAYLGDVSLFNNAKQVSSYAGLNPSIEQSGSSINRSRLSKMGCSRLRKSLYMPALVAVRFNPQMMDLYDRLQARGKPKKVALVAVMRKLLVLAYGVLKSGKPFDENYSNA

SEQ ID NO: 172528 - protein, 456 aa, unidentified
MAGKQRGQRKKGAVLPMIQPDAAGVDVGAREIYVAVPPDRDEEAVRHFSTFTEDLHKIAGWLKQCRIKSVAMEATGVYWIPLYQVLEEAGLEVCLVNARHFQHVPGRKSDVADCQWLQYLHTVGLLRSSFRPAQEICALRTLWRHRESLVQMAAEHVQHMQKAMDQMNVQLHHVISDITGVTGLAIVEAIIRGERNPQKLAKLRQETIHASEEVIAKSLVGDYRDEHLMTLRQSLEFYRIYQKKIDEVDEEVCRRGRALPSKIDVEQHPLPPSAKKRRRRPQHNAPRFDMRGEFYRLLGTDLTQVPALDCSTIQTLFSEIGPDLSKFRSAAAFASWLTLCPNREVSGGKVLRSRTRKARNRAAIALRVAAQTLHHSRSFLGQFYRRMRTKLGAPKAITATAHKLARIIYRLVTKEEAYDESVFAYYEAAHRLRIEARLRRQAKRLGFQLLPIPTAA

SEQ ID NO: 172529 - protein, 349 aa, unidentified
MSMALASISVLGVDLGKNLCSVVGLDAFGKVVMRRKVRRETSIRLAEKLPPCVVGMEACCGAHHLARIFAAHGHEVRLMSPEYVRPYVKAQKNDDRDAEGIAEAATRPTMRFIDLKSQDQLDMQTLHRSRDRLVGERTALINQLRAVLLERGIVAPKGRRKLEEFLADFMDERGGAELSPRMILLVADARKQWAELDRRIAAFDTEFVQWAKENEEARRLTTIPGFGAIVASALIAAVGHAESFGRGRDMVAWLGLVPRQFTTGGKPKLLGISKRGNSYLRKQLIHGARAALPHVAERDTPLGRWAKALMMRAHHNVAVVAFANKLARIAWAVLRRGERFAATGVPSAA

SEQ ID NO: 172530 - protein, 370 aa, unidentified
MQTVRSFVGMDVHKETISVSVAEDGRNGPVRFIGVIPNQPDDIAKMAKRLAKHGELDFCYEAGGCGYNIYRQLTALGHSCTVAATSLIPRKPGERIKTDRRDSQKLAILHRSGDLTKVWVPDATHEALRDLVRARVDASMHLMRARQQLLAFLLRHGRSYPTGKHWTQRHRSWLAGQTFQQEVHRIVFQDYVETVWTAQERRDALIERIGAMTASWSLGPLVEALRGLPGIDLLSAATFICTTGDLSRFESPRMLMGYLGLVPSEHSSGGSVRRGGITKTGNREARRMLIEAAWSYRYPARVAKEKAEILVRLPKNIRDIAWKAQTRLCARYRTMIARGKKPTVVVTALARELAGFIWAIGQEMRTPMTT

SEQ ID NO: 172531 - protein, 425 aa, unidentified
MNEVQKKLLVHGDVIIVGIDVAKHNHWARIYNQIELDVVKPFKFHNSKEGYYRLVAKMEEAKEKARATKVVIGMEPTGHYWKPLAWFLQEQGYTVVIVNPYHVKRRKEEVGNSPTKNDRKDAGIIAKIVKDGNFLHCLLPKGKYAELRNLTVTRRQQRRKLNSALNQLQAILDEYFPELGQVFKNLLGKAAQWVLRNCPFPSLILAHKVEELAEQLKEASNHRVGMKRAQALYQTAQESIAVTEGLTGARHKLNACLDEIAFYQQQIEQTEAAMAEILAGIDIAGNLLSIPGIGLVTVAGFLGEIGDPQNYEHWKQIQKLAGLNLSEQSSGKKDGQSKISKRGRAELRNLLYQASLTLVAKNREFKALYHYFLTRRENPLKKKQALIAIAVKLLRVMYGLARKKENYDPDKVLGDYRRAQLQQAA

SEQ ID NO: 172532 - protein, 372 aa, unidentified
MNYNTVYVGMDVHKESFTFCAYTIDAEKGSHFQRTEADYKNVLKYLEFLRTVYGNDANFICGYEAGCLGYTLYHQLIEHHVNCVILAPTTMLEQCSRRRIKTDRRDAEIIAKCLAQHNYSPVHIPTATDEETKEFLRMRDDHKLALKKVKQQILAFCFRHNYRYDGNSHWTAAHIKWLKSLKPEALYKEILDEYLLTYTTLSDKLERLDKRIEELASKDEYRESVKKLCCFIGIKTHTALSVLIEVGDFQRFASAQKFASYLGLVPGEDSSGDEQTRLGITKAGNRHVRMLLTEASQCYARGQIGFKSKELKSRQAGNSPQVIAYADKANERLRRRYYKMVLGKSKKHNVAKTAIARELACFMWGMMTDHIT

SEQ ID NO: 172533 - protein, 413 aa, unidentified
MEKVVCVVGVDWGEGKHAYAVRSLEGVEYSGELKTDPETVHEWVRELRARHPEGTILVGLEQSRGPLMYALQRYDFLQLVPINPRAAKAYRDSLYLSGAKDDPVDAELIREFVFAHRSMLRPWRADDAMTRKLRLLVEGRRTLVDQRTSLTQALTAALKHFFPQILTWFGPANSRLTRAFLSRWPTLEAATAARRDAIERLVRANSRKKPAQIDELVDKVRAAVALTEDRAIIDAMSLLARSYVTLLDALEEPISRYDQEIAELWSQHPDHDVFSSFPGAGPVMSPRLAAAFGTDRDRYQDATEIQKYSGIAPVMERSGKQSWTHARWRCPKFLRQSFHEYAEASLPFSPWACAFYRQQRERGAGHHAAIRSLAFRWIRILFHCWKKNMPYDKQTHIDNLKRRHAPIVARFAA

SEQ ID NO: 172534 - protein, 341 aa, unidentified
MGQASTIGLDIAKRVFQAHGADATGRVVFRKRLVRAKVLEFFAGQPRCLVALEACGGAHYWARELGKLGHTVRLIPPAYVKPFVKRQKNDVADAEAICEAAQRPGMRFVPVKEEAQQANTVVFRARDLLVRQRTQCINALRGHLAEYGHVVPQGPAHVNRLVALVEDPKSAVPESARGILQVLIRTLNALEEQLKELDGEIARRAKADPVARRLMTIPGIGRIAATAITALVPAPEGFRAGRDFAAWLGLTPLQRSTGGKHKLGAISKMGERTIRRLLILGASAVVRWASRRGAAAGSWLARMLARKPRMLVTTALANKMARIVWALLVKGGTYRAPAVAA

SEQ ID NO: 172535 - protein, 348 aa, unidentified
MAVTIVLTRAITGGADTHAGTHVAAALDPVGGLLGVREFPVSAAGYAGLLGWLGGFGTVCLAGIEGTGSYGAGLTRHMSAAGVRVAGVDRSDRQDRRRQGKSGPLDAVSAARAAQSGGARGAPKGRDGAVEAVRALMVAKRSARSERTQAINQARALIVTGPDDLRTRFAAHATADLVTDLASLRPRPGAAVGCHTRIALRELGRRAEFLDSQPERLDALIVPLAAGHAPGLIALHGAGPDTAALLLAAAGDHPERLRSEAAWAHLCAVAPIPASSGKTVRRRLNPAGDRQANHALWRIVITRMSSHPPARAYAERRTAEGLSKKEIMRCLKRYVAREVYPCLRAAAD

SEQ ID NO: 172536 - protein, 341 aa, unidentified
MVKTPAITGGVDTHADAHAAAALDGIGGLLGVSEFPATPAGYARLLGWLNSFGTVCLVGIEGTGSYGAGLARHITAAGIRVVEVDRSDRQDRRRKGKSDPLDAVSAARAAQSGRASGAPRGRDGAVEAIRALMIAKRTARAQRTQAINQARALILTGPDDIRTRFTRHGPAELVAELAALRPRPGRMVRYHTLLSLRELGRRAQFLDDQLERLDLLITPLVTARAPGLLKLYGVGPDTAAMLLIAAGDHPGRLRSEAAWAHLCATAPIPASSGKVTRHRLNRGGDRQANHALWRIVITRMSCHPATRAYVQRRTAEGLSKKEIIRCLKRYAAREIYPHLPG

SEQ ID NO: 172537 - protein, 351 aa, unidentified
MPSRSTVRAVATIGIDMGKNTLHMVGLDSYGAIVLREKVSRGRIASRLANLPPCLIGIEAGMATHYVARELAALGHDVKQVPPTYAKPFRQGHKNDFRDALAVAEAVQRPTTRFVPPKSNEQLDLQALHRVRSRLVSQRTAVINQIRGFLLERGIIVRQGLRFLRQLLPDILAKRTDVLSPRMARIVSDLAGDWRQLDDRIETVTDEIETLAKNDDSCRRVMTVPGIGPIISSAMVAAIGNGSAFSRGRDYSAWLGLVPKQMSTGDRTILGRISKRGNSYLRMLFIQAARVILVRPANWPKHGFGAWLVRAIQRLHPNVLAAALANKLARIAWTVLAQERSYEARVTTVEA

SEQ ID NO: 172538 - protein, 425 aa, unidentified
MKKNILSTLFVGIDVSSKTNVLCALDFGGDKLLNLKALNNQPGAESILDSILGCLNSNGLEYVVIALESTSFYSTHIANFLASNELLLAYKPLVYCLNPKTIANYRKSFVDMDKTDPLDAYIIADFARCGRITSKPWRGAQFLALQRLTRHRLHLIGSIIREKAYMVSNIYLKFSELAVLDKDERPFSNTYGVTSAAILTEYLSLDDITYSSVEDLVAFVKQKGRNRFSDPEKTVHILKKAARDSYRLDKILYEPLNVAIASSFNVVKALEAEIKAIDKAIEKNIKGINPIEYQSLISIPGIGPVLASGILAEIGTITSFDSQDALAKYAGLTWRVNQSGDYSSDDTRMTKTGNKYLRYYLIEAANSVKNHIPEYREYYYKKYGEVTTHQHKRALALTSRKLVRLVFGLLTKNQIYSGNKVGETQ

SEQ ID NO: 172539 - protein, 393 aa, unidentified
MTNQTQVSVQANSFSPRDYDVFAGLDVDHHSIAARFTDHDRLMRSLRLSYSAAQLLNYVHKHFPGQRLAFVYEAGPTGFGLYDELMAAGHPCLVVAPPMVPRAPGARVKTNRLDSRKLSTALRGGELKSIHVPSVKYRELRHLVQLRDTQVQQLKATKCRIKALLLYEGIRFPADAGKEKQWPQRVLDELLELPCSEAVRFKLDQLIGTRHFNFNAAAAAHKQIRYYCQKDEELRQSIAWLKSLPGIGEIIATHLVARLGDPTLITNVRQIAGFLGLVSSEHSTGDKQNRGEITRAGDSRLRNKLIQSAWVTIRKDPELREFYNRVYQRHPQKVAARKLTTRIYAVLKEQRPFVLREVSTAPLTTEETAGPFYLEANASTVNRTNSNSWKIRA

SEQ ID NO: 172540 - protein, 350 aa, unidentified
MGIDCGKKSLEVVRIHSENSLKERRQFSTTETGINNLLKWLTQNDIVGLEAGTQSFRIAKSILNKGIQVIVLNPGDLATIYQSLKKTDKEDSLKIARLIQRYPMEELPVVPVPTDEEEDNRRLCTEQENWTRQLTQGKNRLHSLFTQAGLTEITKKHLRTKSSRETSVTLLPSRYQKEAERILQVLDLVEQNLKLIEEETKDALKKNPAYVQTIMSMPGIGMVTSLAIMSYMGDCKRFSSGKQAAYYAGLVPRVDISGDTVRYGKIVSRGCHSIRRVIVQAAWSLVRCQHGGKLKEFYERLYSKKGAKKSIIAVSRKMIEVLYSMIRTGALFDSMPENVLYRKLAQYGLM

SEQ ID NO: 172541 - protein, 357 aa, unidentified
MAKHNRGGQGRKAAAAGIDLGSRRSEVCLVDEAGEAVERRTLATTPAAFTKLFGGLPPLRATLEAGGQSNWAARLLAELGHEVIVADARQVRLIVETYSKSDRRDAALLAQITLRWPALLHPVRPRSLETQRGRALLRLRETLVEARTKLINAVRGVAKSFGERLPAVTGEAFARQAAGHIPAQLREAAVPALLALEALTAQIQVYDRRVAKLGERYRATRRLRSIPGVGPLTSLAFVLALDDDPRRLSSSRAAGAFVGLRPKRRDSGESSPELSVTRNGDRLLRRLLVQCAQYILGPFGQDSALRRWGLGLAARSGTRRGKRRAVVATARKLAVLLHALWRRDEDFDPLRGLPAPS

SEQ ID NO: 172542 - protein, 429 aa, unidentified
MSEEKSLELRVSVDVGYRRHSVAMGLSSGEVLEEFEIEHRPEGFQEFFSRIEAQRKKRNCAVSVAMEGYNGHARPLDSLVRERGYRLYNLNNLKFARFKEIFPGAAKSDRIDARKGLELFQLSDHLPLAKEVLQEVSGTAPENEILKRLTRRRRRLVNERVRVVNNLQADLQAVCPGLLEITGEASNQWFLNFLLSADTLPQLARLKRSTLLKIPSVGVKSAAIIEHWQKRAHFSQEVEWVSEMIQEDAKRCLELDEKIKRLQAKIAEVAKNSKIAKTLRSIPGFGAVCTSELAGEIGTIERFASEGSLSLYLGMSMLDNSSGKYQGTKAPKHVNTRAKAAMMIGVDRHRKYVPESQRYYEKKRSEGKKHNQAIRALGRHLGRIIYKMLKQEREYEIRPEKGDTKAKVGPRSFVKTKIRRPKISSKETK

SEQ ID NO: 172543 - protein, 328 aa, unidentified
MAFIGIDVSKAKLDVLWLRQSSPRKVKTRVFRNHQPSLKELTQWLLKQTGEAPQQIHVVMEATSIYHENLAYALHGAGMQVYVANPARVKEFARSEGVLNKADKQDSLVLALYGQEKHTRLTLWQPEAVEIRQLRSLMGRLEALEKDLQRERNRHEKALATDTNERVMSSIEEMIAALRAQIDQLKKDIDNHIDGHPSLKHDRELLKSIPGVAEVCSVQLLALLRSRDFVCARECAAFIGVVPVQAESGSSIRRQTRISKAGRSSIRQKLYMAAITACQHNPDIRALRRRMQDKGKAAMAIVVAAMRKLVHIAFGVLKHQQGYIPQTA

SEQ ID NO: 172544 - protein, 354 aa, unidentified
MIVADHFGFVVGIDTHAKTHTLAIINTANGEEIANETFPANATGGNRALSWILRCTDGNPEQVLLSMEGTGSYGAKLRQQASDAGFQVTEAPVPNQRLGRYQGKSDSIDATRAARATLSIPMDRLREPRSGQNHMALRILSNARRTMARERTAAINALTALLRVVDLGMDARKPLTVTQIQTIAAWRERDEEFGVQTCRREATRLAKQILTLQEQMAKNHSELEALVQQVQPALLNVYGIGPVLAAIILTAWSHTGRLRSEAAFAALAGTCPVPASSGSNTRFRLNRGGDRQLNKAIYTIALIRMNRDAATRDYVAKRTSQGRTKKEIIRSLKRYITRQIYRTLMAQEALLPAT

SEQ ID NO: 172545 - protein, 334 aa, unidentified
MLYAAIDIHKRMFQAAVLDVETGETVERRFGATREELSDWAMPLQGELAAVAIEATNGWRWVWRELSARGFDVRLVDPAQAKALRGRIKRAKTDRLDARWLCVLLAKEMLPESWLPPAEIQALRDQTRLRKALAEDRTRWAQRLHALLAHEGWPCQRARLLTVEGRRWVNALSLSPAARSQVERLLRLIEAVEDELRSLETELRRFARSDRRCIALQTIYGVGPILACHLLAELGEASRFRRARQAVRAAGLDPVVDESGETRRRGRLAKHGAPALRWALVEAAHHAKRANSPDRGLYTQAATRVGGKRAVLTVARKIGRRAYHVLNELERQAA

SEQ ID NO: 172546 - protein, 342 aa, unidentified
MDHIGIDVHKNASQVCIRTENGQLIERRIRTDRDSFAKWLGKRDKARILVESSTESEWVARCLEELGHEVIVADPNFAPMYAQRSRKVKTDRRDARALCEACELGAYRPAHRSSEASRALRAQVAVREALVQTRTRHISLIRALLRQHGYRMRSGSGATFAERVGELELPEALRDQMAPLLEVMRSVNAQLKAADKVLAEQAKSHEVAKRLCTAVGVGPVTAISFLATIDRVERFAHAKQVRAYLGLVPRELSSGEKQRRGHITKAGNRRMRALLVEASWLVLRSQRADTEALRTWANRIALRRGKRIAAVALARKLAGILFAMWRDGTDFGQTRTSAAHAA

SEQ ID NO: 172547 - protein, 410 aa, unidentified
MHVFCGIDWAEDHYDVAIVDQAGVVLTERRIDDDAIGYQLLLSLLAEHGDDQIEPIPVAIETPRGLVVACLRRTGRQVYAINPLSVARYRERHSVARTKSDRVDAQLLANILRTDRAAHRPLPADSELAQAIAVLARAQQDAVWNRQQVANQLRSLLHEYYPAFVEAFKDRRPGGLAHPDACAVLAIAPTPSQAARLTRPQLSAALRRAGRRRGIAAASVRLQAIFRRTSLRQLPMVEQAMGCQALALLKQLEAAAQAADDLAEATRLVFLQHPQMAIFTSFPGLGELPAARLLAEIGDDATRFADARGLKAYAGAAPVTRASGKKLLVLHRKVKNQRLAAVGYLWTFAALRLSTGARAHYDRRRVAGDRHTAAQRHLFNRFLGCLYYCLQTGQTYAEAQAFPMPHQIAA

SEQ ID NO: 172548 - protein, 334 aa, unidentified
MNHDFHVGIDVSKLTFDAFVWEKRAHESFRNDACGFEQFARWLKKQTHGAESVLVCFEHTGVYSLQLAIFMEREHLTYAMLPGLQIKQSLGITRGKNDLVDSMRIAEFAYRFSDKIAAMKLPSAEIRKIHSLLTLRARMMTDMQGYVVARNEIRRVVPTDGLLELFASYDRIISDLRAEIKRLEAEIKTVIDGNEALRKTFALITTVKGVGFVIAAFLIAYTHNFTRFTDWRKFACYAGIAPFGCQSGTSVHGKSQVCSIANLQAKKMLHLAAMTAVHFDTELREYYIRRQKDGKSKMAIINIVRNKVIARVFAVMKRGTPFVDVKKYAIRNSA

SEQ ID NO: 172549 - protein, 331 aa, unidentified
MKNSQIIGIDVSKSVLDIFIFSLDFHFTVQNSPVGFANLLEICCTRLSCRTESLYFCFENTGRYSRLLAVFFEQNSLSFSMVNALDVKQSKGLIRGKSDKKDAKTLALYAFRKWNELEPTVLHAPVVGKLRQLLQLRDKLVKHRTAYKNAIKDLQDCFIEGETKFIRQTNKRLIAQLDLEIKNVEREIDNIFESMPQWQVNYKLIQSVKGIGPILAKYLMIYTENFTRFSNPKKFACYAGIAPFEYSSGSSIKGKTRLHPCANKHLKSMLNIAAMSAIQLKGEYSNYYQRRNSEGKIKMSTLNIIRNKLVFRVFAVVKRQTPYVDLTTFAA

SEQ ID NO: 172550 - protein, 371 aa, unidentified
MKNYQMGIDISKEKLNICLKKGTQTIREEEIKNTVMAIKKCVKRIEKENCVANDDVLVCAEYTGRYIYPLVCVCEEMELFLWMEDPTRIKNSFGVTRGKDDRVDARRIAEYAFRFSDKAVAYEMPDRTLVSLKNLLSDRDTLLADRHKYEMQLHDQKGYMDAADYARKKRSWTAVVKTLDKQIALIDDEIQVLVESDEKLKHQTELLKTVDGVGDRIAVRMVVVTMAFTRFETPRQFNCYAGLAPFRYTSGKSIYSKSKVSQRANKQIKALLHLAAVSAATHMKSSEYRDYYERKTEEGKHPMCVLNVIRAKLVSRMFAVIKRDEAYQRNYKIFTPTEKTLKKSLSIHKNRYVFCKRNTKKPQKTRNLSRL

SEQ ID NO: 172551 - protein, 343 aa, unidentified
MHTITTIGLDIAKSVFQVHGTDAAGQVVIRRQLKRRAVLAFFQKLPPCLVGLEACASSHHWSRELQALGHAVRLMPPAYVKPYVKRQKNDMADAEAICEAVTRANMRFVPTKTPEQQGCLMLHRTRHLFIRQQTAVINSIRAHLAEFGIVAPVGRKGVMELLQVVADPSDKRVSEVTRACLTALGNQLLSLKEQILEFDRMIMAWHRSNEPSKRLRYIPGVGPMLATALVASVADPKTFRSGRNFSAWVGLVPKQHSSGGKDRLGSISKQGDRYLRSLFVAGALSVIRYAKIHGTKHRPWLTALLARKPTKVAAIALANKLARMAWAMMARGERYRNPVALAA

SEQ ID NO: 172552 - protein, 482 aa, unidentified
MKHKRHEKTKKAICGPTQGNWQQMNRKQRREMTRKIQSEDISLEVIHPDAAGIDIGNESHYVAVPPPRDSQPVQRFGCTTAELKDMAGWLKQCGIRTVAMQSTGVYWIAVYDILEEAGLEVYLVNARDTKNLPGHKSDVQESQWLMKLHTYGLLRNSFRPSQEIRTMRTYWRQRNDLVQSAGRHIQRMQKTLTQMNLQLANVLSDVSGVTGQAIIKAILAGEHDPDKLAEFRDPRVKARKGQIARSLEGNWQEDLLFVLQQEQDGYEFCQKQMTECDQRLEHYLQQRDDRSAGASLPEEKRKERRKKRKGNKPRFDLRTGLFRMTGTDVTRIDGIDVMTATTILSEVGWDMSKWETEDHFVSWLRLCPDNRTSGDKIIGKGRLPTNNRVSTALKMAASTLRTSQTYLGAQFRRLRSRLDTPVAIKAMAAKLARLVYRMLRYGMKYVDRGAEFYEAQHRQRQIKHLKSKASKLGFQIIQVPAA

SEQ ID NO: 172553 - protein, 435 aa, unidentified
MEEVTDEPLYRDRVCGIDIGKAGLAATIRVPSDRDPARRMQETRGFGTTRREVLALADWLRCWQVPAVVMEATGDYWKGPFYRLEAEGFECVLADAKQVKNLPGRPKRDPADSRWLAACFERGAITPCFVATPEFRIIRLHTRYRRDLTEERTREKQRAEKLLESAAIKVSSVVTDLHGVTGRDIMDHLIAGERNPKVLAQLARAAARRKISQLEEALEGAEFFTPAHAALLAKVLARIDRLSADIDDLSQVIEQLLAPYEEQLLQAESMPGWGRRAAQDAVAETGVDMSRFRTGGHLSSWAGRAPQDHQSGKRKGRAKAKKGNRYLGAITGETAVAAGRTQTREGARHRRLARKRGAAKACVATGNTQLKVYHKLLSNPGMRHQDLGPDYYDRQRDTRRQIAHHVGKLGSLGFEVTLCRIPEPDPDRSGPNPGA

SEQ ID NO: 172554 - protein, 355 aa, unidentified
MTGTKYIGMDVHKESISIAVMNGFGKVVMESVIETKASTILQFIDGLRGELCVTLEEGTWAAWLYDLLKPHVSKVVVCDPRRNALLKDGNKSDRIDARKLAELLYLDKLHPIYHGEHGLRTLKELVRSYLTLTKDLGRVMTRVKAIYRSWSISCTGKQVYAPRHRSEWLAKISEPAVRRRAEFYFEQLDALRTLRQQARRELLAESKKQPAWRRLCQIPSLGPIRAAVLMGIVQTPHRFRTKRPLWKYIGFGIETHSSADHRSVHGQLQRSRKKISVRGLNRNCNHDLKNLFKGAAIVASSKPGPFQEFYAALLAKGMRPEMARLTLARKIATIALIVWKKGASFDAQYLKPQTA

SEQ ID NO: 172555 - protein, 370 aa, unidentified
MKEPTTSYIGLDIHKESIAMAIADADRAAPRFIGTINPVPGELCKAMRRVCTKETTLVVYEAGPCGYGWVRYLRKQGWACDVIAPSKITRKPAEKRIKTDRRDALLLARESRAGNLTSIVVPDERDEAIRDLSRAREDACAARMRVRLQIHAMMLRHGRHYQGKRSWTQAHDRHLSTIRFEHPAQELAFNEYRLASKEACERVERFTQALRLQCEDWRMNPVVKALMCLKGFDFVAAATFVAEMGDLTRFAHPRALMAYLGLVPSEFSSGNTRRQGEITKSGNKHARRILVEAAWNNRFKAQVARTLEVRQEGQPTIIRDISWKAQLRLSKRWRSLSMGRKLAQNKICVAIARELAGFIWDVARHVKVNP

SEQ ID NO: 172556 - protein, 420 aa, unidentified
MYYVGIDIAKKFHIASVLDDNNNIIKKNYKIESELSDFTLFTSMLSSIDQDKQNFIIGMEATGLLFENLYLSLKTQGFNVVLLNPYQTNRFREMDTMKYVKNDNIDSQMIAALLKSGRYSKAYVSEELYQSIKSLYRHKATLMEEMKKAKRQVSTTLAIVFPEFEQIIKDPFSVSGMALLEKYPTAKHYKHASGERILKVFRNIKGNNFNIQKANKLLGLAITSIYQGNAKEERAYVILSNLRRIKFLKEEILQCEFQMTQLLDDTNKKIDKSFSKDDEVYISQLVDNLRTIDGVSDKTIFAILSECGDINRFKDAKAFIGFLGLYPTLYQSGNSTKYGKLAKRGARLAKMAIYQASIAAIRHNDELKKLYLDKKSSGRAAKECVIVVARKLAKIIYAIYKYNTPYDPIRVFSSKTSLSH

SEQ ID NO: 172557 - protein, 317 aa, unidentified
MNNPEAFVGIDVAKAWLDVAWLGGETLRIDYTDEAVTGVVERLRSQRPSLVVMEATGGLETALASALVAAGIAVAVVNPRQVRDYARACGRLAKTDRIDAMILAAFAAAIRPQVRELPDEHTRALSDLLARRRQLIDMRVQEKLRLQRASSVQRTSLREHIAWLDERIDRLDVELTHALRSSAAWRDKDDLLKAIPGVGSLTRATMLGLLPELGTLSRRQIAALVGVAPFNRDSGTQQGQRVIWGGRAQVRRTLYMATVAALRCTPVIRSFYDHLRTQGKPAKVALTACMRKLLVIMNAMLKHRSAWSPTLDMQHGC

SEQ ID NO: 172558 - protein, 428 aa, unidentified
MSYRIAGIDVHKKMLAVVVSDVEIESEYQFERRMFSSNPEQLRSLAAWLVEQKAEEIVMESTAQYWKPVWETLERYWKPLCEKREGARRRSGTLHLAQALSNRGRRGRKRDFVDAERLVKRLVARELTLSFVPDTEQRLWRTVTRKKYQLRRDLVRIHNQLEALLEEAHIKLSSLVSDLLGVSARRMLKALADGETNPAALAALAHERLRATPAQLCDALGACTELKPVYRRLLKMTLEHLQFLEQQIGQLDQELATLLHPHQDAVERLAEVPGFAVDSAQQIIAEVGPAAATFPSEKCLSSWVGACPGEEESAGVNYSHRSPKGNRHMRRLLNQTANAAVKAKGSIFEIIYRRCVPRLGHNQAIGVIAHRQCRLIWLILHQGTRYEERGPAVTKRSRYQRTWRMIRQLRTLGYRIELPNPDASQAQA

SEQ ID NO: 172559 - protein, 344 aa, unidentified
MGEVITIGLDTAKSVFQVHGVDAGGAVVIRKKVSRAKVLEFFSSLPPSLVGIEACPTAHHWSRKLQAQGHTVRLMPPSYVKAYVKRSKNDANDAAAICEAVTRPSMRFVPTKSEQQQSALMLHRSRQLLVRQRTMLSNAIRGHLAELGIISAKGRNGTAELIEILTNEKDDRIPAAARLSLTILARQYAAITTEIGAIEKHIHAWHRSCEESRRLEEVPGVGPIVATALVAEIGDWTAFSSGRSLAAWIGLVPRQHSTGGKERLGRISKQGNRHLRWLLVCGAMAVIRYARRHGTKRPWLIRLMGRRPTKVAAVALANKIARIAWAIMVRGERFKEMKLLSAAA

SEQ ID NO: 172560 - protein, 373 aa, unidentified
MKTNSKMTRPRKNAAQTTTTLLTRTVGIDLGDQMSHYCVLDEGDIVSEGMLRTTEAGFREQFQGMARAKIVMETGTHSPWVSRYLEKLGHEVLVANARQVRIIYDNDRKTDKIDSRTLARLARVDKSLLHPIRHRRAKAQADLAVLRARDQLVSVRTTLINCVRGMVKSVGGRLPSASGAYFATKVREQVPACISGALLPLLDEIEQLTVRIREYDKRIDELAKTKYPKTELMRQIPGVGVVTSLAFALTIDDPNRFRKSRDVGSYIGLRPKQSDSGSSKPQLSISKAGDHLVRRLLVNCAQYVLGHWGPDCDLRRWGLSLMVHGGKNAKKRAVVAVARKLAVLMHKLWVSGEVYEPLRKSMDAELNEAVPAA

SEQ ID NO: 172561 - protein, 357 aa, unidentified
MLSSNVKYIGLDVHKEAITVAVRNSAGKLVMESIVETKASTLLDFLHGLRGELHVTLEEGTWAAWLYDVLKPHVREIVVCNPRRNALLKEGSKNDRVDARKLSELLHGGLLRAVYHGEHGLRTLRELARSYEVISKDLKRVMNRIKALYRSWGIPCTGTQVYSRRHREQWLQKITEAGVHRRAELFYQQLDGLQALRRTVRGELLAESRKHQAVKVLRQIPFIGPLRAAQLVALMQTPHRFRSKRQLWTYSGLAVETHDSAQYRYVDGQLQRSKKPQQVRGLNQNHNHAMKEIFKSAALSATLRAGPFQDFYAGLLAKGMKPELARLTLARKIAAVTLTLWKKGADFDAEYVKPQAA

SEQ ID NO: 172562 - protein, 326 aa, unidentified
MNTSETALQQKHTRQARALYMAFELGEKNWKLALGDGARSPSRHTVAAGDTAELLECIAKAKRRCELAQEAKVHSCYEAGRDGFWLHRWLLERGIDNIVVDSASIEVNRRARRTKTDRLDGDKLLAMLIRYRAGERRVWSVLRVPTAQQEDERRVHRELERLVQERTAHINRIRALLVMQNLRVKYVGGRLWQRWWSAHGGELVPGVRAEIEREGERLSLVRAQMRAIEAQQHQAVVGGREPQVARLAQLGAIGVGSGWVLVKELFGWRQFRNRREVGGCLGLVPSPYASGPSQTEQGISKAGNRRVRALMVELACAGCAISRRAN

SEQ ID NO: 172563 - protein, 317 aa, unidentified
MSAPQSTVTFVGIDVSKKQWDVCLSSSAQAFKFMADELGLSRLRELLQPLGRCLVVVEASGGYEQRLAAELIDAGHDVALVNPRQVRDFARSLGRLAKTDRIDARVLALFAEKIQPRPSEKLLENQAELNALLTRRRQLTQMKAAEQTRLRQVSVREVRKSVSHMLDQLRDQVRLVDAEIARLIEDNDDWRARAERLASVPGVGEVTSRTLVVELPELGRLNRQEIAALVGVAPMNRDSGQFRGKRSIWGGRASIRAVLYMATLSARNHNPVIRRFADRLTQSGKPFKVVLTACMRKLLIILNTMLRNGTNWNPQTT

SEQ ID NO: 172564 - protein, 354 aa, unidentified
MDSAKYIGMDVHKESISIAVMNHSGKIVMESVIETKASMILQFIGGLRGDLRMTFEEGTWAAWLYDLPKPHVTEVVVCNPRKTALLKDGSKSDRIDARKLAELLYMNKLNPVYHGEHGIRTLKELARSYLTGSKDLTRVMNRLKALYRSWGIPCAGTEVYSPRHRAEWLRKITEIGVRRRAEHYYQQLDSLRLVRQQVRRDLLVESKKHKPWKLLGQIPGIGPIWAALLIALIQTPHRFRTKRQLWTYSGLGLETHDSAQYRVLGGQLQHSKTVTIRGLNKNHNHDLKAIFKGAALRATIAAGPLHNFYEGLLAKGKKPTMARLTLARKIAAITLIIWKKEVRFDAEHLKPQAA

SEQ ID NO: 172565 - protein, 536 aa, unidentified
MRRHNLAGELSCPDNQTACRLSSGPIKEIGVLEKEAPYQGRKHGRRARPILTEPEYFLKETTLIRSVGIDLSRTGSHQVRCLDEQARPCDSFSFDSTVEGLEKFEKRVFSNGDTPAIIFEPTGLAWIPMAVYLRARHPECQMVKARLQKVAALRRYLRNHTKSDRVDGLTLAKMPFIDAEQLDEAYLPPSEYHALQRLTRQRERLMKSITIRKNRIGSIVNGYLPDLRKAFSDEWSDRARLFYRQQLNPFTVVRDGKSALETFLVSVKEKGAVTESHRVYQACQKLAEFYEKSKPAGMIDEDFFDDLQNEIACELRLMETEEAEVERVSGRIEELYRHLHPSDHLRTIPGIGVRTAQVFLAIIGDPHRFRSQSAFANWTGVVPGARQSANSEGKGLRMTKAGPSMMKRALFQAGDIARRYDPQLADLYYREMVQHGKTHLQAMGAVMSHLGARIMAVLREGRPYELRDNQGKLITKKEAMELIRSAYKVPEETRQARRHRKSNVGRLASRGTREAAKAPQSRHTSTSPVTVYLAED

SEQ ID NO: 172566 - protein, 393 aa, unidentified
MSLDHHFAEPTAIRINLGAIFVSLELSRSAWLITSLSPGGGEKMSKHGVSAGNIAALLARLSELKQKAFARTGQSFQVIVIQEAGLDGFWIHRVLQSEGVESHVVDPASIATSRRRRRAKTDKIDGEALVRALLAYKRGEPRVCAMVRAPTPEDEDRRRLCRERKTLTNERVQHVNRIKGLLFCQGISGYEPLRRNRRQRLDELKTGDARPLPPHLKAQIARELDRLELLLEQIKAVETERDALISAIKPDGMNADAMRSPPAMLINLNGIGPEFAAVLWSEGLYRSFANRKQVAAYAGLAPTPWQSGSVTREQGVSKAGNPRLRTTLLQLAWLWLRHQPQSALARWFHERVRRNGGRLRKSTIVALARKLLVALWKYVTAGVVIDGAVVRAA

SEQ ID NO: 172567 - protein, 407 aa, unidentified
MDLLKTVFGIDVSSRKSNVCIMVNGQKVNDYAISNDMVGFNRLLGDLKQVTKPQIIFEATGVYSRRLQAFLDMHELRYVMMNPLEAKRKTKDDLHQNKTDKLDALYLAKLQSEHPQRLAYVQSKEYQELMANNRIYEQASHDLITNRNRLHKAIQLTFPEIEHLMVNPRGKNYWSIVLRFPHPDIVLETKEADIIDFLKGLTGIGKKRANDITQSLIRLAKVACPAVKKNSAHIRGLKMAINNILSAEEECQTALQEMAKLAPKRDLEILTSIPGIGENTALRIISELGDIRRFNNPSQLNAFVGVDPQVYESGNLTAHLSISKRGTAIGRKVLYLAINQIQSAKKAGNPCHIADYYEKRKRSSETASHKKAAIASIHKLLRTIFALIKNDQLYSYDVAKHNQRLLS

SEQ ID NO: 172568 - protein, 339 aa, unidentified
MREVSTIGLDLAKNVFQVHGVDAAGETVVRRVLRRGRVLVYFAQLPPCLIGMEACGTAHYWARELGKLGHRVKLIPPAYAKAYVRRNKNDAADAAAICEAVSRPSMRFVEIKSEAQQAAAGIHKVREMLMKQRTMLINALRGLMAEFGIVVGAGTRHVGELTAILVDPEEHRIPALLKDGLRRMAEMLRGLERQLQGIDKQIVDWGRANTTCRHLITAPGYGPILSSAMAAIVVNPAVFRSGRDFSASLGLVPRQDSTGGKVKLGSISKRGNGYLRRLLVNGAMSVLNSERAKQDPWLVKLLANKERKVAAVAVANKMARVGWAPMMRQEDFRATSTAA

SEQ ID NO: 172569 - protein, 402 aa, unidentified
MWFAGIDWADTHHDALVIDESGQQVGSLRVLHTKKGIDELKRFLLAIAEKPDQLACIVETSHGLLITALLEAGFTVYPVNPKTIDRRRNAAGVKTDAVDAYLLAKTGRSDLADLRKLQPDTPLVAELKLLTRDQDGLIQSQTRLVNQLTACLKTYYPVALTLFSKLHQPSTLVFLQRYPTPQTAMAASAQEIETLLRKEHHPHPPEAAQQLVELLHQPQLVADVVTTRAKSRLMLALVSQLLPLIQQIAQYDKEITALFLSHEDNEVFSSLPRAGKRLAPRLLAEIGEDRTRYADAASLQALAGTAPVAFQSGNYAKVHKRYACLKPLRNALYQFAWQSTLEEPWALDYYRRKRAEGKSHTMAVRALANVWVRIIYAMWFNRTCYDPATFAAAQRRHARLAA

SEQ ID NO: 172570 - protein, 418 aa, unidentified
MTATHSTPSTLLVAIDISKHRHEVLVGVPGKKRRRRITITNTLEDFRRLSAALASYDLPVRIGFEATGNYHRPLAHHLGQAGFELKLVSSVGLARTREALHNSWDKNDPKDAQVILHMLEIGAVQFFHDPLVTGAADIQELSKTHEIVSRSKTELWHRILTHYLPLYFPEAERFHRSSRTDWFLAFLEKYPTPQIITAMSQEAFIADAWPVVGRKVSKERLLSDIYATAVDSVGLPVHQDSDAVRMFRLVLAEGRSLVRQRDEIEARAVELLSDLPDYQLLTTIPGIGPINAMTILAEAGDLRRFRHHRQFLKFCGMDLATVQSGMFRGQSRISKYGNARLRRTLWMAGQTAVLKRTNSFRDKFERYISKDRHNAHLRRKAYTAIAAKMARTVHAVVKHGEPYRPFFEGVSPGGRTSF

SEQ ID NO: 172571 - protein, 469 aa, unidentified
MSEYAGQQFVGIDLHRRRSVIVRTTGSGEVLESVRILNDVESLDRVIERAGEDPEVVLEATYGWYWAVDALREAGARVHLAHPLGVKAFEYRRVKNDFRDAADLADLLRMGRLPEAWIAPPATRELRELVRHRAKLVALRSHCKAEIHAVLAKCGIQVSMSDLFGVAGTALLDRLQLAAPYAARIASLRRLMDDLDFEIEVFTNAAQGRLDADPGYLAVQQIPGIGAILGAVFVAEVGDVTRFDHAPQLACWAGLTPKHHESDTHVRRGRITKQGSRLVRWAAVESVKRVGPHTRIGALRDRVAERRGGNIGAGAARVLDLRGPDVRPLVGAPDMVAGPVALHPCAERTSRRRQFRTGPRLGPGVRAARSRRSPVASPQEPRAPGLTAPRRWRGVSSLSGDPTRERQREEEPLHLLHVDADQLVAGGQALLQPGRHDREARTVEGLGDCRELSHDVFAVPTLRCPGRPR

SEQ ID NO: 172572 - protein, 420 aa, unidentified
MLMNIPSQFPYRATVGLDWADQKHDVFVRFANGDSYRRKIDSRPEAIQEWLLELRSTCAEAKIAIALEQRRGALFYHLCTHLSWIDLYPINPHSLASFRQTFFSSRAKDDPVDSQLLEELLRTHPERLRSYQPEPTAERKLDQYCRHRRSLRDLATKTELKLISTLKQYFPLAVNLFADVGLKSEIALNFLSRWPTLEELHRAKAQTVRSFFYAHNSRSQSLIEKRLQLIAQAHPVTDDLALIEPLVLTSKCLVTQLRQFNQAISQFDQKIRELFKSHPDHFLFESLPGAGEQLAPRLFAVFGSNRSRWADATDIQKYSGIAPVVERSGKSLWVHRRLARPIFVCQTFHEFAQQSTHRCSWADQFYRRLRQRGKSHHSAIRALAFKWIRIIYACWKANKPYDESFYVQALEKRNFSVSTT

SEQ ID NO: 172573 - protein, 433 aa, unidentified
MQKVAPFDLVIGLDRSDQKADLYLVDLSTDKESQETLQTTPESLHRWIQQLRGKYPEARIAICLEQPAANLIAFLENYPFITLYAINPISLQKFREALVTSRAKDDRKDAEYLAELLLAHHDKLTVWKPEDPKTRLLQQLVVHRRAVVDERTGLTNRLKALLKQYFPQALELCGEDLWRPLATDFLLKWPTLQALKKLRAETLKSFFYLHGSRSQKLIDQRLEKIQEAVTLTDNTALLESYASRVKLVCKELQLVVLAIKNYDERIAEVFTDHPDRSIFESLPGAGAVLAPRLSASMGSRRERFADAASLQHYSGIAPVTKQSGGSRHVHRRYLCPKFLRQSFHEYAKESVLHCRWAAAYYKQQRDKGCQHHTAVRALAFKWQRIIWKCWQNRTVYREEIYEASLQKNGSPLVALFDAIELGRSPVKKMVKQS

SEQ ID NO: 172574 - protein, 331 aa, unidentified
MKKMVLVGIDISADELVVAVEREGESLPVTSFENDAAGHRKLIRWLTKSTRSVRVCLEATGVYGLDLSLALHRTKGIEVMVANPRAIKDFARAFLQRSKTDALDAAVILEFVKRMPFQVWQAPPVEIQQLRAISRRITALTKNKSMEKNRLHASDHSEELTKFTRDDMASHIEYLAQSIRRLGEEAVAMIRLSPELSREFDHLISVKGIAEASATQILAELAVLPGDMTSRQWVAHAGLDPRHHESGTSIHRPARVSKAGNKYLRSALYMPALVAVRHEPNVRAFYEKLLARGKKPLQAIVAVMRKLLHAIYGMFRHDRDFEGEKFFAMGA

SEQ ID NO: 172575 - protein, 313 aa, unidentified
MDHDSAFVGIDVSKNKLDSFVSTTGQVEQFFNTPEDIQRLAKHLKAQMPALVVLEATGGYERLAAAELCAAGLPVVVVNPRQVRDFAKATGRLAKTDALDAQVIAEFAQAVKPEIREMPDEHARELADLLTRRRQLIDMIVAEESRLKQAVFKALRRDIKAHIVWLQKRLKSTDDDLHEAIKASPAWKANYDLLREVSGVGNVLALSLLAMVPELGKVNRKQVAALVGVAPFNCDSGLYKGRRRIWGGRAEVRSVLYMAVLSSKSHNPVIERFYNRLLAAGKTKKVALVACMRKLLTILNAMVRDQKHFAEMA

SEQ ID NO: 172576 - protein, 472 aa, unidentified
MQFIGGGSQQEYVERTRRLDPSRCLAAGIDVGKYEALCLVADHRGEVVGQALTFPLNEPGVRVLEARLAAAVAARAALSVRIGVETAGHYHRTVVARLVAAGHDVVELNPAHVKAARAQQGSRRLKTDLRDAAAIVDLVISGSGRAPQQRTDALIEQLVWAGVRRRRVLARTALSNQLLGTLDLIFPGLDGCFDDLLASKVGPVLLHDLADPGRLHRLGVEGLQAFTARRGVRLQRRKAEQLHQAAADALRLPSAERACRATVLAADLAVLDLLNNQIGQAEQHLAKVLPNTPAGVLTTLPGVGVVRASNYGAALGDPARFANADRAYRASGLVPASYESAGRARRGQGISREGNAELRTAIIELGRGLAQRDPDFARYRAGVGARMKPLMAAIAVGHRAHRLAFALMRSGQPYDPARLAESVATNGERRTKRAGRPVKENSREATCRHDVTHPPVTTVPRTAAARKTLTRT

SEQ ID NO: 172577 - protein, 310 aa, unidentified
MDMITVGIDVSKDRLDVALRPSGEAFAVARNAAGLEQLTARLNVLSPYLIALEATGGFETIAAAALVGAGLPVVVVNPAQVRAFAKAIGRRAKTDPIDAAVIAHFAEATKPEPRPLPDEATRLLADLVARRRQIVDMMAAEGQRERRVTDKRLKKSIARLRKALEKELAELDSEIDDSVRGSPAWREKEDLLASVPGVGPTIARTLIAELPELGRLNRKEIAALAGLAPFTRQSGQWKGKSFIGGGRTAVRTVLFMGALVATRHNPVLKAFFDRLVAAGKPKMVALIAVARKLLTILNAILRDNRPWQNA

SEQ ID NO: 172578 - protein, 402 aa, unidentified
MNAVGIDVSKGKSMVAIMRPFGEIVSTPFEIKHTTSDINSLVELINSVEGESRIVMEHTGRYYEVLAHQLSNANLFVSAINPKLIKDFDNDSLRKVKSDKADAVKIARYALDKWQNLKQYSIMDELRNQLKTMNRQFGFYMKHKTAMKNNLIGILDQTYPGVNAYFDSPARSDGSQKWVDFASSYWHVDCVRKMSLNAFTCHYQNWCKRKKYNFSQSKAEEIYGKAKELVPVLPKDDITKLIIRQAVDQLNSASTTVESLRTLMNETASKLPEYPIVMAMKGVGSSLGPQLMAEIGDVSRFTHKGAITAFAGVDPGVNESGTYEQKSVPTSKRGSSDLRKTLFQVMDALIKTKPLDDPVYQFLDKKRAQGKPYYVYMTAGANKFLRIYYGRVKEYLASLPES

SEQ ID NO: 172579 - protein, 407 aa, unidentified
MDVIHDRCAGLDVHKDEVVACARVASGRKVVRTSARFPTTTRGLTSLSEWLSTHQCEIVSLEATGVYWKPVWHVLEATFPLVLANPGHVRAIPGRKSDMNDAAWLADLVAHGLIRGSFVPPAPIQELRDLTRTRKQLVRQMAQHSLRLQKTLEDANLKIASFVSDLLGVSGRAILQGLIDGETNADRLLARTTGLLRADPEQLRAALEGRVREHHRFLLRLHLTQIEGIEDGLRTVDARLDILLRPFTPVVERLSTIPGVGTLVAQTVIAEIGVDVHRFPTPGHLRSWVGLCPRLDESAGKRRSTRLRHGAPWLKTVLIQAAWAAVRRRDAYPHAQFQRLKAKRGPKKAIVAVAASLLTAVYFMLRDDVPYRDLGVHYFDRHDTTRAAARLTKRLEALGFKVALSAA

SEQ ID NO: 172580 - protein, 317 aa, unidentified
MEEVSFRQVVSRGCGIDVHQKIVVSTISGEGLRTQTREFSSITSSLTEMKDWLLDNGITHVAMESTGVYWKPVYNILEPSGIKVWIVNARHIKYVPGHKTDKKDSAWICKLLLAGLLKPSYVPPKAQRDLRDLTRYRNKLVQNIASEKNRIIRILEDCNIKLSSVISSTSGVTATKLIDKLCDGKIVSREDVEEVYHGKLQCSKDDLYEACQGFITDHHIFLLQTIKRDIESTESIISEISSRIKDSLLEYENAIEALRGIPGLNTKTVEDLIAEIGLDMSVFPTEKHLASWAGMSPGNNESAGKKKAEEPPTGTNR

SEQ ID NO: 172581 - protein, 284 aa, unidentified
MVVVGADVHKRTHTFVAVDEVGKKLGEKVVSATCSGHHQALRWARERFGAQVVWAIEDCRHLSARLERDLLTAGQKVVRVPSKLMAQTRASARTRGKSDPIDALAVARAFLREPDLPVASHDEVSRELKLLVDRREHLVGQRTSTINRLLWRVHELDPEHAPKPRSLHLLKHRTLLSQWLGTQRGLIAELARDELGDITRLSEMIEALAKRIGERVRKAAPALLALPGGAELTAAKLVGEAAGVARFKSEAAFARHAGVAPIPVWSGNTAGRELVEAPDAMRLG

SEQ ID NO: 172582 - protein, 359 aa, unidentified
MTSMLAGVVDYVIGVDTHRDSHTAAVVDGHTGGVIRHLTVATDAFGYRKLQSFADSAAPGKRVWAIEGTGSYGAGLTTSLLEHGEWVVEIDRPARPARRDGAKSDDLDAVRAAREALSRDHLAAPRSRGDREALRVLVSARQGAVVGRTKAIGQLKALIVNAAQSLRDQLRRGTTDEQLQRCARLRTSPSQSIEHRATVRAIRGTARRALALEAEASEYETEIEQLVVRICPALLERPGIGTITAAQFLISWSHPGRIRSEAAFASLGGAAPIPASSGAVTRFRLNRRGDRQLNRALHTVALTRLRIHEPTKAYAARRTLEGKSAREIKRCLKRAIAREVYRIMESEALGVERDLTAAA

SEQ ID NO: 172583 - protein, 343 aa, unidentified
MSITMIGLDTAKSVFQIHGVNETGKAELKRKVRRSDLIAFFEKQECCTVVMEACGAAHHWARVLTGLGHTVKLIAPAAVKPFVKKGKKNDAADAAAICEAAARPDIKFVPIKTVEQQGILALHTARALLTKQQTMLANAIRGLATEFGHVVAKGLHNLEPLVALVGADDAMPEQARQAIADLFKRFGELATGIQSCEAKIVKHARNDATARRLATIPGIGPITASLIAATVVDISQFKSARQFAAWLGLVPRQNSTGGKTRLGQITKAGNKEIRKLLVLGATSMLGHAEGWHSALGTWLRDILQRRPARLATVALANKMARIAWVVMTRNEVYRPAGGVAAKA

SEQ ID NO: 172584 - protein, 406 aa, unidentified
MLGKRNDLILFYLFEFEQNVRNTVNLYIQNIQPGDKTKGRFSLFSFSVHQIIDMKRIVKQVVGIDVAQKELVVSLGRMYDDWTPELYAGKAFANTQKGFEKLMQWVNKQTDEFVCIRYVMEATGVYHEPLAYFLDEKSQQISIVLPNKMSNYMRTLEVRTITDKTASEAIARFGLERKLDLWKKPKQIYRNMKQLTRERDQIVEERSMVKNHLHAEESEAYPNKSSVARIKDRIKFLNKQEKAIKNEIAALIASEKEVKGLVEKMTTIPGIGDLTAAIILAETNGFELIRNKRQLASYAGFDVKEKSSGTSVKGKARISKKGNRHLRKAMHLPAFSAIKYDERFKAIYARIVAKQGIKMKGAVAVQRKLLEMCYTIYKTNDLYDREYLKKREQKGTVVDLNQESGQ

SEQ ID NO: 172585 - protein, 428 aa, unidentified
MKNSTARKLRQVPKEYLVMGVDPHKKKHAAVAMTQDFTTHSKFKFNNSRQGFEVALERARAEMMRTGSRGVIFAIETGGHYWRNLVYFLDERGIPFRFINQFTLKRRREGKDLNRMKNDYRDSEVAAQLLCTGEFTDTKLQHGVYAELHAAYNAYRRLVKERTRITNLIKGLLDGIFPEFTQVFKDPCGLTALSVLSICPVPNIIAQMTEEEFVNAIRAKHQGRLMKKRLRALHYTARTSIGIQAGAWSVSSEISFLVEKLCLIRRQIRSIDETLARLVDETEEGKYLLSIIGLNYISVAGLLAELGSFRSYRSAKQLIKMAGSNPTESESGGKRSAHTPMSKKGRPVLRYCAWTAVIPMLRFNPDFRAWAKKLRERPVHANPLSGREVVGAALNKLLRLAFALVKKQTFYQVPQPEVAQVAIQEVKI

SEQ ID NO: 172586 - protein, 375 aa, unidentified
MDYCGIDVSKGKSEVCILDKDKNILFSDAIKHNLEDFQKLDAHLTKDTIIGMESTGTYSAAIYYYLSQRHTAVYYVDTLQMYTYARLRYLHIKSDRTDSRLIAEYLMTEFKRVIPIPMNDLKDVTRLYYKTCKYLCKYKKSFLSQLEIIFPELGQTMFVKKSMGIYQLLLKYPTPKDILEVDDEELLHIMNENMIKSHYTIKHINKIKEAAKTTVGVPNYPTTCFRQTIELLMIHQRVKEEIIDNIQILLGQTPYIKLLEKYGYGVISLAQVVGEVGDVRRFRGHKQFVKYCGFDVSQKQSGKMNSVHCFISKKGSKYLRAIFYQLVPSQLRSDKEDFYEFYNRLKGKGKNTRVCMVAVARKIAVRTYYDMLKCH

SEQ ID NO: 172587 - protein, 429 aa, unidentified
MTSIPSTTSPVVRVAIDIAKLIHQVLLELPSGKRRVMRVANTKTELDRFVAVLLALGHPCEVAFEPTGDYHRPLAYVLGQAGFRLSLVSSIAVARTREALYNSWDKNDPKDAQVILHLMKNGTTQRYLDPLVTGHQDLQEMANTYQQVSLRKVRLQHSLVTHHLPLYFPEAERYLHSSRAEWFTELLLFTPCPAAVRRYTKTAFVAAAREQIGGRKVDKARWLADFYETACSSAGLPVSEASETIRMFRVVLEEYRALCQLRKRLEAEVVTHLANQPDFVRLQTLPGIGPILAMIILAEARDVRRFGCARQFLKYCGFDLCTEQSGQFRGTTHLSKRGNARLRYAFWMAGTVAIRMQQNSFRRKFEDYIRPDPQNADRRRKGYTAVAAKMARVAYAVVTTGNDYRRFPEATRPGGKIPSPRAVEAHATS

SEQ ID NO: 172588 - protein, 343 aa, unidentified
MEKISTIGLDIAKTVFQIHGIDGSGEPVVRRQLKRRQVLSFFARLPACLVGLEACATSHHWARELEKLGHEVRLMPPRYVKPYVKRNKNDAADAEAICEAVQRPTMRFVPIKTPEQQSVLMIHRTRQLFVRQRTMLINAMRAHMAEFGIVAGIGRNGVETLLELITKGVDERLPSAARECLMALAAQLELVKRQILEADRRVRAWHRTSKTSKRLEAIPGVGPLVATALVASIPDPHVFRSGRDLSAWIGLVPKQSSTGGKERLGSISKAGNRYLRQLLVVGALSVIRRAKQLGYTRHPWLVRLMARRSTKVAAIALANKIARIAWAMMARNESYRTPLPASA

SEQ ID NO: 172589 - protein, 418 aa, unidentified
MNGEGNTRDSKRYVALDIHKHYCVVAAVDREGKVVLQPVRVEHQDLEGWLKKNLRASDHVVIESTTNAWHVYDLLSPLVERVVVANSFKVKQIANARVKTDVRDTLILARLLAANLVPDVWVPPQHVRELRQLLSQRRQLVEAHTQMVNRMHSVAHRHHLKHERGKRFNEKNTGWQKDKRLSKMEQFQLELEMENRAYLEKQTERIGKEVAKLSHQKPWTESMTYLMQMPGFGVITAMTVLAAIGEIQRFETGQHLASYSGLTPGLEQSGTKHRGKGITKEGRKELRWALVEVAQRAVKSDPYWKKRFDAMQKRMHRNQAIVAIARQILELVWNVLTRRQPYRHFSQERIAYKYLTWGWQMDEEARGGLTRQQFTRYYLMRLGIGQDLTRIALDPKHPRRIASEAEVLALRPELQRIE

SEQ ID NO: 172590 - protein, 346 aa, unidentified
MNYIGTDIHISTLDFKVVNEAGKMKKAQRVLTSANNFIEFVKSVPKPRQVIIEEGPLAAWLLEICVQNGERLVITDPKLNHWIGSSGKKEDAVDAEKLAQLARGGYIKEIHHPVGQRRRFREIMQAYHDTVRSVTRIKNKIKAKFLQNGIQCPGETVYMPEHRTKWREKLPQEPILLVIIDSLWQQLDKTQDIQEAILSEAKVQAKQYTEIKLLDEIPGVGFVNAATISAILETPHRFADKRKVWMYAGLGIDIKSSGSKIYSEKLGRNYNRLLKYTAKQAAQAAIRANSAFQRTYLEMTLQKGIAPHRAELTIARDILATAWAMWKKEEHYNPEIDKKVKTDVKA

SEQ ID NO: 172591 - protein, 419 aa, unidentified
MSKTRQAFAAYIGIDWADQKHDISLSTSVDGKVEYKRLSSTPEALSEWLSQLRQRFPEGKIAICLEQSRGSLVYQLMSYDFIVLYPVNPMTLAKYRKAFKTSGAKDDKPDADLLRELICVHRKHLRPWYPGDETSRSLALLAEARRKAVNDRAKYTNRLQAVLKTFFPQALELTGTRLYDKVSLAFLGKWERLEDIQRAQDKTIRKFYTCLGSRPIRLMEERLQLIRSATPLTKDEAIIASSIITVRMLVHQLVCLQESISEYDLALAEMFEQHPDKDIFSSFPGVGDVLKPRLIAAFGTDRDRFDKAENVQEYCGIAPVTKRSGKTSIVHRRLACSKFLLQTFHEFARCSLKKSVWAKAFYEMQRDKGKGHHAAIRSLAFKWIRIIYRCWRDRVCYDEVIYLKSLQRNQSPLLKYIAN

SEQ ID NO: 172592 - protein, 377 aa, unidentified
MTIVADSHAAVDVGELTLGVDTHAETHVAAVIDPLGRHLGHATFDTTVAGFKALLAWATDIGPVSVAGVEGTGAYGAGLARFLTAEGIRVVEVDRPDRKIRRDQGKSDPIDAYAAARAAASGRASGTPKTRTGDVESVRVLRVARSGAVRARAKALTQIKALIVTAPDALRAQLEGLDGAALVTTCARLRSARGDAPTPSPFAKRPPRPGRLVDPTAATKRSLASIAERVQALDTEIAALDDDLEAILAPIAPTLLGLQGVGYDVAGQLLVTAGDNPERIRNEAAFAHLCGVAPIPASSGKTTNRHRLNRGGDRAANAALYRIVLCRLRWDPTTRAYLERRTQQGKSKKDIIRSLKRYIAREVYAAIQTDLNPTIAP

SEQ ID NO: 172593 - protein, 387 aa, unidentified
MAQVDDLSRSLVTFDQQSTLVVIVEMSQTRWLIAGTVPGLDRRPLKKLEPNAPTLLHLVKRWADEATKAGRTITRIVLAYEAGRDGFWLARWLRARGIEAYIIHSTSVAVSREHRRAKTDRLDTEMLMRVFLGWLRGERRHCSMVAIPTLEEEDAKRPSRERESLVGERTRIINRMKATLARLGIRGFKPDLRKAPQRLDALRTPEGVPIPPNTCDEIRRDMARLAWIREQISAIEVARVKRLEQAPAQGPDAMVRLLARVIGVGIETADMLVREVLLRNLRDRRAIARYAGLTGSPNESGSKRRERGLAKTGNARVRRGLIQLAWRFLRFQKDSALVQWYRARTQAPEGARKTTMITALARKVLIALWRMVITGTVPEGIVLRSAA

SEQ ID NO: 172594 - protein, 343 aa, unidentified
MWIIGCDYHPRFQQIAFVNTEGGECGNRRLQHVAEAEQFYRALAGQVVRVGMEAGGHARWFERLLAELGFELWIGDPRKIRAAETRKQKTDARDADHLLELLLNGQFETKMRIWVPTPTERDARQLVLHRHRLVGMRTRVKNQLRAVALNEGLLGPKPGLWSQKGQAQFQALVLPPWSERRRQDNLELLAELVRRTDPLDQAVMAEAERRPEAVRLMTHPGIGPITALTFVLTVGDPFRFATSRKLTSYLGVIPAEHSSGGRQRLGHITKQGNALLRSLLVEAAHSAARREPDLGRCYRRLAMRKNPSIAAVAVARKLAVRLWWMWKRGLTYQQFRASGSHAG

SEQ ID NO: 172595 - protein, 365 aa, unidentified
MKKISTVRVNGNMIFKGHKLTIGVDLGDRWSCYCVLDEAGEILLEQKVATTPEAMKQIFEKIPRGLIAMETGTHSPWVSRLLKELGHAVLVAHAQKVQLITKSNRKDDRHDARTLARLARIDPQLLGPVRHRSAKAQIHLTVIRARAELVSARTGLANAARGLAKSYGERLRKCGTQQVSRELAAELSVELREVLEPLLKEIESLNERIKEYDVRMEQIARESYPQVELLKQVKGVGTQIALTYVLTLEDPQRFPKSREVGCFLGLRPGRRDSGESHPQMHISKEGDPYLRTMLVQGAHYILGPFGEDSDLRRWGLKLAARGGKSAKKRAVVAVARKLAVLHRLRVSGEVYEPLRNSQKAMRAAA

SEQ ID NO: 172596 - protein, 309 aa, unidentified
MNEELVYLGVDIAKAYLDAAIANEKRRFSNDAVGHRRLIQWLKQIKGPVQVICEPSGGYERALVRALVAAQIKVSLVPANRVRQFARAGGILAKTDRIDAKLLCAFGEAMKPGIISASQLEQEQLRELESQRRHLTHLLVMEQNRAARVSEVCVRKMNRRLITQIKKQIEQLDLLIQEQIAASRELATKAEKLTAISGVGARTAALLLAHMPELGQLNRREVAALVGVAPFNRDSGRMRGKRAIYGGRRSVRHGLYMAALVAARHNPILRGFYLRLRAAGKPAKVALTATMRKLLIALNSALKPNLNYA

SEQ ID NO: 172597 - protein, 335 aa, unidentified
MTKEDFIYVGIDLHKETHTAVMIDCYNNKLGEITFPNRPADFPKLVTKVKKCNTDAKEVVYGLENAYGYGRALAVWLIDKGYFVKDVNTAISHRQAKHRGAMYRKSDSDDAEAIALATLNMLDKLPDACPNDAYWSLGQLVHRRDNIMKQRTRLVNQLHEQLCIAYPSYKSFFNDISRPTALYFWEHYPSKKYLKGKSVEDLRAELVPVSHNKCSTKTCEKILDAVASDKVKNNAYQDARDMVTLSIVSDLQHYGSQLTEVDKMLEQMYKMLGCTLTTIPGVNVITAVKILAEIGDIKRFANANKLAQFAGIAPLHLSSSGKGKDVATKQGNRRL

SEQ ID NO: 172598 - protein, 249 aa, unidentified
MTQRNETCFVGVDVSETKLDVYRPDTKKLSQTDNTQEDTQELAKKLKRKRQRTIVVMEATGGYEKMLLHQLQQLGIDTAVVNPRRVRDFAKGIGIDAKTDSIDAAVISRYGQVVQPAPVACKSDHEKKHRALVDRRNQLLGLINQEKNRLKQTWDEDAKESIRVVLECWKKQLKQIDSDLAKMLKVDEVNQRFIEILGSIKCVGSVLISTLITSLPELGKLNREQIAKLVGVAPINRDSGSKSGKRFIG

SEQ ID NO: 172599 - protein, 343 aa, unidentified
MNIHAAGLDIGKYVFHFVGLNEAGEVVVKKRFSRAQLLSFTANLVIGVVGMEACSGAHFLARMLQAQGHQVRIIIPAQYVRPFVKSNKNDYIDAEAIAEAVQRPTMRFVPVKTDDQLDIQALHRARERWIARRTSLVNQLRAFLLERGIVVRQGPEFLRDYLPTFFGDTETTLSGCMRTILLELWHEWEELEGRIARANETMTAMVADHEACQRLQSIPGIGIVTATAIVAAIGNGAAFRKGRDFAAWLGLVPKQFSTGGKPRLLGISKRGNPYLRQLFVHGARAVFSRSKRDRHHFGSWLNELELRKKPSVSIVALANKLARIAWAVLTKEQLYQGVITSTT

SEQ ID NO: 172600 - protein, 342 aa, unidentified
MKDTMIGVDLAKSVFQLHGASLAGHLKFRKKVTRVQLRHFMAKHEPAVVVMEACGSASYWAREMVKLGHEVRLIAPQYVRPFVKRQKNDAADAEAIVVAAQRPEMRFVEPKSEDQQACAVLFRARERLLHQRTELVNALRSVLYEYGHVFPKGIAHLRRIEAVLTDPASDLPALVRDECQDLLEQISEQTARIEAKTAKTRGLAGTNDTARRLQTMPGVGPQTALAISGFAPPMDSFKRGRDFAAWLGLVPRQYSSGGKERLGRISKAGQTDIRYLLIIGAMSRLTVLARKSIQEGSWLARMLHRKPLMLVAIALANKMARAIWAMMTKKEDYRDPARAVST

SEQ ID NO: 172601 - protein, 336 aa, unidentified
MKTQILKEVKPPSVFCGVDIAKKTFVAALDSDGSRHADSATFPNDQTGFTRFLDWLLARMSGDSVARISMEATGAYWLCLAMRLHGHPRLVVCVHNPALVKKFIGSFGLRAKTDAIDAALLARFARERARVAWVPAPTAQAKLAALARAYDDIMGAECAFLTRSQQSQHKEADAHYRTVLKALDEELEKLAAEMKELVAGEATLAERSKLLQTIPGIAALSAAQILAELPVELLGDPRAMSAYAGIVPAVEQSGTSIHRSRLCRQGNPHLRRRIFRAATSTSRWCPEMRAFRERLIGKGKHKMRAIMAVAHKLLRAICSMLAHQTPFEPSKLLPVT

SEQ ID NO: 172602 - protein, 316 aa, unidentified
MATNVAARIVGIDISKAHLDVYVLSAGESARLDYTDEGLAELTGGLGDPADTLVVMEATGKLEARCAVHCAQAGFQVAVVNPRQVRDYARATGRLAKTDAIDAEMISRFAKAVDLQASPLRSEEEKHLDELVTRRRQIVDMITSKKNRLETTVVKTLRHRIEVHIRWLERELRSADGDISDVIEMSPVWRAKEALFKSVPGVGDVLARTLIAEVPELGSLNRREIAALVGVAPMNCDSGKMRGKQMIWGGRREVRRVLYMAALTASTYNADMSLFHQRLIADGKPWKVAITAVMRKLLIVLNTVAERGTPWEHRIA

SEQ ID NO: 172603 - protein, 389 aa, unidentified
MYFVGIDIAKYKHDCFITTETGNVILNDLTFSNTRDSFDELLSVLNSLDHNQEIRIGFEATGHYALNLKLFLEETHYSFMEFNAVLLSKFNHSQTLRKTKTDAIDCASIARWLMTVEYKPYPIGFYHMYSLKSLTRLRDSLVRQRSFYLVKITNVLDHTFPEFKPFFNNKFGKTALFILKKYASADRIASLNSRSYNDLHNISRGKFSVQKFIKLKELAKNTVGASNSIFESELTTLLYLHQNLDSEICKLESEIIKLVSVLERPTMTIPGIGPLSAAVILSEYGDICRFSGPASMLSFAGLEPGYYQSGISSHTGHMVKRGSSILRYTLMNCCLPLIQYNLTFAEFYHKKRLEGKPHRVALSHVAKKLIRVIYTLETSNTAFDSAKLI

SEQ ID NO: 172604 - protein, 343 aa, unidentified
MEHYVGLDVSLKQTSICVVNQAGAVLREGVVDSDPDAIGAFVRSNAPDVVRIGLETGPTATWLWTELKRLGLPVICIDARHAKAVLKMQINKSDRNDAAGIARIMQTGWFKEVRVKDIDSHSVRALLASRALLVKIKRDLENQIRGLLKNLGLVIGRAKFNVFAVRAEELIEDRPELMAAVRPLLEARKAIEQQVGDLDRKVLKLARHDVQVRRFMTAPGVGPITALCFKATIDDPTRFKRSRSVGAYVGLTTRRHASGEVDWSGRISKCGDAMLRTYLFEAANVLLTRVPKWSALKAWGMRLAKRNGLRKAKVAVARKLAVILHRMWIDGTEFNWSTKKAAA

SEQ ID NO: 172605 - protein, 319 aa, unidentified
MLIGIDVAKAELVVAVRPSGERWTVSNDERGVRTLVERFRREVPELIVLEATGGYELLCVAALAAVALPVVVVNPRQVRDFAKAIGQLAKTDRIDADILALFAERVRPAVRPLPDAEAQELDALLARRRQLIEMLQAERNRLGQVFGRGKRPVKKSLKSHITYLERELRIADTDLGAMVRTSPAWRERDDLLQSVPGVGRVLSLTLLADLPELGRLSRRAIAKLVGVAPLSHDSGTLRGHRFVQGGRASVRAMLYMGALVATRRNSVIRAFYQRLLAAGKAKKLALVACMRKLLTMLNTMVRTNQRWSADHVSAALISA

SEQ ID NO: 172606 - protein, 356 aa, unidentified
MSIYVGIDVHKHFCQAALMDEKGILLHEFRFDNTQEGAHNLVNLAKSINPHVKAVVEPSANYWIKVYDKLEDEGVEIKLSNPLRTKAIAEARIKTDRLDAKTLAYLLRGDLVAESYVPTRKNRERRALIRHRASLMRMRVEVKNRIHALLDKHELSYTYTDLFGKQGMEWLRSLQLPVPDQQILQSNLQVLETLNAEVRNADIQIARDATSEEQAKLLMTMPGVDYYAAMVLLSEIGDVKRFSSDEKLVSWVGLAPQTHQSGETHWTGHITRKGSKRARWILTQCAQSARQHDPRMREFYERIERKHGSSKAVVAVARKMLAIMYVMLIRNEPYRGENRELTEQKHKRLDTLANTT

SEQ ID NO: 172607 - protein, 326 aa, unidentified
MMIIGVDHHPSFQTIAFFVEETGECGEQELNHSDGQAEKFYRDLKQRGICVQVGMEATGYARWFERLLAELGFELWIGHPAEIKAKRVKKLKYDREDARLILRLMRENNFPRIWVPGPENRDLRQLLWHRHRLVQMRTRILNQLQALAMNEGYHWRKKLFSEQGRALLEKLSLAPWASRRRQELLELLDRLNPTIEELTAAVEREARKRPEALRLMTHPGVGPITALAYVLIIGTPARFECGKQIGTYVGMIPCEESSGGKQRLGHISKQGNSLLRYLLVEAAQAAAHLHPDWRRRYMHLAMRRHMSIAKVAMGRRLEYHIRTKRA

SEQ ID NO: 172608 - protein, 345 aa, unidentified
MHIASIGIDLGKTTFHLVALGERNKILLRRKFSRSQLLTYTANLPASLIGLEACAGSHFIGTVLREQGHQVRLIPAQFVKPYRKTNKNDFIDAEAIAEAVTKQNMRFVQIKTQEQLDWQAMHRVRDRLVQRRTALINEMRGFLLERGLVFAARPIQLRKNLPSVIEDAEQNLSPRLRWLLDRLWQEWKQTEIDIKTITDELERISNEDARCRRLRQIPGFGPLVSTATVAAIGNGAAFRRGRDFAAWLGVVPRQYSTGGKQKLFGMSKRGNVYLRRMLIHGARAVLFRVKYDSGGFGQWVHRLAQRAPRNKVVVAIANKLARIAWAVLSSGKDYRHQPLQQLAAA

SEQ ID NO: 172609 - protein, 320 aa, unidentified
MKTLHQRCAGLDVHKQDVVACLRLATKGRVHREVRRFPTTTRGLLELAAWLEAARCTIVAMEATGVYWKPVWHILDGRFELVLANAAHIKGVPGRKSDVNDATWIADLLAHGLIRASFVPPQPIQDLRDLTRTRKQLSREIVRHTQRLQAVLEEANVKLASVITDILGASGRRILKAMITGETDPTRLAELASRRLGCTRDTLVEALDGRVRDHHRFLLDQHLKTIEQMEETVAVFDARLEAALAPFRDTVERLRQVPGLSTRAAEVLIAEIGLDMSRFPTAGHLLSWAGLVPGLDESAGKRRSARVTKGAPWLKPVLVQ

SEQ ID NO: 172610 - protein, 364 aa, unidentified
MPSAESLAAVERAALAGAPEGATLAVVFEPTGPAWMPIAVFFARRGHAVFRVSSAKAADLRRFLRRHAKSNGIDAETLARMPLADPAGLQPLELPGADAAALDRRVRACARLTQAASEHKTRIKDLVRQLMPLTPLTGDLGKAGLAVLEHYGDPRALLAAGEAELTALITTTSGKQQGAERTGQWRAAAAAAVELYGEHPAVAYAELAAEVVTEVRLLRAIQAELTAHAAAREAHYRQADPGQLARSLPGFADISAPVLIAGMGRPGRFRDGTRFKSYTGLAPRASETGQTDRKGQPMSKAGPSLLRATFFRAADTARRQDPQLARIYYLQMTERGATHLKACCVSPATWPNGPGPSSTAAPPM

SEQ ID NO: 172611 - protein, 367 aa, unidentified
MKKVSIVAVKQSRNISQQKLTIGLDLGDRNSWYCVVDETGQIQLEQRVRTTAKALQEVFGAMPRSRIALEIGTHSPWISRLLGELGHEVIVANARKVRLIGESRNKDDRLDAQTLARLARIDPELLYPVKHRSAQAQADLMTIRARAGLVRARTGLVNTARGLAKSYGERLRGCNVRNLNPEKAESLSPELQAALEPLLHAIESLSERIVEYNDRIEALAQESYPQVALLKQIKGVGTLIALTFLLTLEDPHRFRKSRDVGGYLGLQPGRRKSGQSEPQLHISKEGDPYLRTLLVQGAQHILGPFGIDCDLRRWGLKLAERGGRNGKKRAIVATARKLAVLQHHLWVSGEVYEPLHNSNRITVAAAA

SEQ ID NO: 172612 - protein, 395 aa, unidentified
MFIVGIDIAKRSHEAIIITEDGQVVRKAFSFRNNCTGYNLLLEQVRRLTLVKSQIVFAMESTAHYWLALYARLLKDGYAVMVLNPIQSHSLRELYIRKAKTDARDSLIIADLVRFGRCKASNVPQDKILALRELCRSRAYLVDMAADLKRKLIALLDRIFPEYESLFDSVFSKASIAVLCKYSTPQKVKNANLRKLTDILMESSNGHFGEWKAHQLKEAACSSFGIDDSGGVYSTLLGMFLEQILSLTAQADSLEKQISVFFQEFNNPLTSIPGVGTVLAATILSEIGDITRFSSADKLLAYAGLDPSVKQSGEFKSNQNRMSKRGSPYLRRAIWLASTVAVHRDPMFQTYYEKKISEGLHYMNVIGHVSRKMTAVIFAVLRDGQPYQPILQSAG

SEQ ID NO: 172613 - protein, 411 aa, unidentified
MQYFIRKEGMPMLSIGIDVSKGKSTVCGMKPGGEIVYTPFEVQHTREGMSELVSLLRSSGEEVRAVLESTGSYHCPVVAALLENGIFVSVVNSLRMKRFCSQSIRKVKTDRIDAMQIALYGLAYWQELQPTKLPEDTYRELQLLARQYYQMTSMLIKAKVDFNALCDQVLPGMQELMSDHAGRHKLSDFVLRYHHTTHILEMGETRFRKDYCKWAEKKGYRNCERMAVLIFATAQNGIPVLPNAPSTQIVITEAIRVLHTVEASRDAILTQMQALAKTLPEYSLVREMPCIGDTLAPRLIAEIGDVRRFHSKRALIAYAGIDAPPYQSGKFCANNRHISKRGNRYLRKTGYEVMQSYVMHKPANDPIFTFIEKKRGEGKSGKLAMVAGLNKFLRVYYGKVTELYRSLPTIE

SEQ ID NO: 172614 - protein, 380 aa, unidentified
MHSMTSPAGCVTGGVDAHTDTHDAAALDERGRLLGTHTFSTTPDGNWALLAWLEAFGPIAVIGVESTGSYAAGLVRFLRSRDIAVVEVNQPHAHTRRRRGKSDPIDAEMAARTALSGHATAVPKLTDGIVEAIRQLRLARDSAVKARTAAFNQLTEVIVTVPDDLRQQLSARKTTRGKTTLCSRLRPDLKRIHEPAQAAKFALRSLARRIAELDREIALLDKQLEPLVATAAPRTTQLIAISTGHAGQLLVTAGENIERLRNDGSFAALCGASPIPVSSGRRDRYRINHGGDRDANRTLHMIAVCRMRYCPRTRAYAQRRIAEGKTKKEIIRCLKRYIARETYHTLRADLADINQPPARPTTAITINCGAGPTGRTRRRS

SEQ ID NO: 172615 - protein, 461 aa, unidentified
MRCRPRPVSIGIGHASSGAGVTTPRQYDLQPGPANPKHIMKTTDYAAYVALDWGDTQHAFALQMAANSEVETGQFDAGAEATHEWLKQLGIRCAHRPIALAVEAGCDALIAALLEHKWIVIYPVHSSMSARFRKALVPSGAKDDVPDAMVLLTLLLRHGEQLKPLQLDSAPTRELSALVLGRRGAVDRRSQVSNQLRSVLKGYFPQALKLVGDEMAGTLALDFLDRWPDLATLQKARAATVRSFYFQHSVRRPELVEARLRQIAQAQPLTQDPATIVPAVLQTQMLVAVLRTLQRHIAQFDACIAEKFAAHVESAFFRQLPGAGPQLAPRLLVAFGDCRDRYPDASSLQKYAGLAPVKEKSGRQLWVHWRWNAPIFLRQTFVEWAGQTVVYCDWAKAFYLHQKQAGKGHHAIIRALAFKWIRILWRCWQRQEPYDEARYLEALKRRRSPLFAALNPSPSQG

SEQ ID NO: 172616 - protein, 419 aa, unidentified
MLDTIQFQLMEETFMYNAVGIDASKLKSTITIIQPAGVVIRNPFDVLHTSDELNTLVTYLKSLVGETRAVIECTGRYHEPVVKSLSEAGIFISAVNPKLIKGQKQNTLRKVKSDPADARKIAKYALDNWAELREYSSMDTTREQLKTLNSQFTFFMKQKVAAKTNLISLLDNTYPGVNKLFDSPTRDDGSEKWVDYACSFWHVDCVRKIGLKAFTESYEAFCKKHHYNYQKNKPALLFEESKQLVAVFPKEKSYKLLIQQSIQQLRLASEHIEIIRKEMNELASTLPEYETVMSMYSVGETYGPQLIAEIGDVSRFTHREAITAFASVDPGVNESGQFKQRSNHASKNGSTRLRKTLFQVMSTYLQNKSVNEPVYQFLDRKRAEGKPYLVYMTAGANKFLRIYYGKVKECLRNLEQSQI

SEQ ID NO: 172617 - protein, 466 aa, unidentified
MQMTLGIDVACRAAHQASLADESGRFAWSGRRFRTAPADLQQLWDQIPAGASVTVVMEPTRNAWVPLAAWFRRHGARVIMVPPEQSADLRDYYSKHVKSDRLDSRLLARLPLLHPDGLRPAEGLGPADPLRRAVTLRGSLVKRRSVIAARLDSYLELLGPDWHAAFGGDLLLLTVLRFLAAGYADPHAVRRLGRARLTRLIWRWSHGAWGEDHASRILAAAAESLQLWDTELSYPDLAEDIAAEARLALALCTEIRDLDTKIAALLRQLDPAGIMTSVPGVGAVNGAQILARLGDPARFRSLAGARSFSGLVPSLTASGTSGRHGAPTKAGDASLREALFMAADQARRADPTLAARYHRLMVHEGKHHNSALCHIAPALLSRIIACWRTGTPYQIRDTDGTVLTAAQGRAVITARYQVSAELRARRRTSHTNTGTSRRYQESPGAPTPARPRPATLRRPAEPLDTH

SEQ ID NO: 172618 - protein, 356 aa, unidentified
MSRDTKYIGMDVHKEAIVIAVLNDSGKLVMESIVETQASSILQFIYGLRGELHVTWEEGTWAAWLYDLLKPHVHEVLVCNPRRNALLKEGSKSDKVDARKLADLLRTGMLRPVYHGENGLRTLRELARSYQTISKDLNRVMNRLKALYRGWGIACSGTQVYAARYREEWLHKIPHAGVHRRAEVLYQQLDGLQALRRTLRPELLAESRKHKAAKLLRQIPCIGPIRAARLLALMQTPHRFRSKRQLWTYSGLGIETHESAQYRYVRGQLQRSKKPQQIRGLNQNHNHEMKEIFKSAATRASCGVGPLRDFYVALLDKGMRPEMARLTLARKIAAITLTLWKKEERFDAEQLKTQAA

SEQ ID NO: 172619 - protein, 333 aa, unidentified
MVEGTLGSHHKEGSRKMSKYSMNCAGIDTGKRKLDVALDGRAERLQVDNNADGHKALSAWLRRHRAKRVGIEASGGYEQAVVAELRRDHFQVIVFQPVQVRAYAKFHLQRAKNDKIDAALIAACTAAAKKIYAPPDPRLAPFSEHLTMIEQITEDIARFKTRRESCRDLRIGRFWDEEVARLKRRLKIELEQLVAAIREHRDLAERLDLIASVDGVGERTAVAILVRMPEIGTLSREQAAALAGLAPYDDDSGDQVGVRHIDGGRERLRKSLYAAALAASFRWNAQLGAMYRRLLAAGKEHKLALVACARKLLIFVNTVVARGTPWTKKTAPV

SEQ ID NO: 172620 - protein, 323 aa, unidentified
MCKVIGIDISKGSFDVAFQKKDKKFVYFKFTNNIKGFKKLRRIVGEDDICVMEATGPYYLFLAYYLFEQGIRLSVVNPLQIKHFVRMRMVKAKTDKKDAKMIALYGEAEKPVKWQPNEDYIMQLQQIHTAIEGLNKHSTMINNQLEAFSQIPTNDKEVVKQLRALLKTIKKKILILEARMLDIVNQHCKETVNALKTIPGIGIKTSIILIVITNNFKKFDDVKKLSAYVGLAPRIFESGTSVKGKGHITKMGNKYLRKLLYLCAWSAKRYNKQCIEMHERLSLKGKPERVIKIAIANKLLRQAFAIGSSLSAYDKKYEKSLAF

SEQ ID NO: 172621 - protein, 324 aa, unidentified
MIDGVLGIDVSKNTLDASMSSCNRVRARSFANSPDGWRHLLDWLITQRVRRVHACLESTGRYSLGIAGALNEAGHVVSIVNPAQIRDFARTKLGRNKTDGVDASHIREYCELFKPQPWAPPSEAHRRLGELQTIRAGIIAGLTEWKNRKNSGMIDAVAQSLADVTISHFTSQLSAVDEAITQTINNDSVLRRKRDLLLSISGVGETLAGVVLAELPGPEVMHSSAEVVAYVGLNPRQHQSGTSIDRVTRISKIGNAVLRAALYMPAMSAMRYNPAIVALVARLKSQGRLKPKQIVVAAMRKLLVLCFGVLKTGKPFDPAIAMGC

SEQ ID NO: 172622 - protein, 335 aa, unidentified
MQSYGIDLAKEKFDVSFFDLTSKKVSNQPSHKVVKNNLKSIGRFLETLPSDAVLVAEHTGVYGDTLLKCCMDSNVKIAFVGGYVIHRYRATPDRAKTDVLDCALLREFGERYPDKLKYKTFPEEALYELRQLARHREMLVEQRKQLITADKSEDCRPVRSLAVKRSMDRIKEMLDTEIGETEKEMLKVINGHDSIHHNYELVKSVDGVGLITAVELLVKTENFTKITTARQYSAYAGTAPYEKSSGKMDKGAHISKIGNRRSKTLLYICAESARLHNKEIKLYYERRTLIDKKPRHYVLNAIANKLLRIIFTLVEKGEYYDANFIRQDPRVVKYN

SEQ ID NO: 172623 - protein, 418 aa, unidentified
MDTLIERCAGIDIGKDEVVACVRVPGLRGRVKTTRTFAAFTGSLEAMIEWFVEQGVTAVVMEATGSYWKPVWYLLEEHPGFELMLVNAHHVKILPGRKTDVLDAEWLAELLEHGLLRGSFVPPAAIRELRDLTRYRKRMVQAHTSECQRIQKTLEDAGIKLDSVASDVLGVSGRAMLAALVAGERDPVVLAELAKGPLRRKIPALRHALQGRFNEHHALMIGMALEHTSYLEASIARLDDAVDALFAARTREDGVPFTRARDHLDTITGVGKRAAETIIAEIGVDMTRFPTAAHLASWAGLAPGNNITGGKRRSGTTTKGDVWLVDVLHQCAWAASHTRDTYLAAQFWRLARRIGKKKAATAVAHSILVICWHLLANDCDYDDLGGDYFTRRNTDRQRDRLIRQLHNLGYRVTLEQPA

SEQ ID NO: 172624 - protein, 486 aa, unidentified
MAKPKKPTPKTVAKQQNPKKTGQGKRGRQGKGKRLEDRPLLEPNAAGIDIGAREIFVAVPPDRDPTPVRIYQTHTEDLELLAQWLVVCQITTVAMESTGVYWSPLADVLEGYGLKVCVVDARGMKNVPGRRTDWHECQWIQYLHAVGLLRAAFRPEAAVRAVRTLMRHRTEQVLMANQHIQHMHKALTQMNVQLHHRINDITGVTGMAIVDAIIGGERDAAVLAKLRMPNVKASEEEIRKSLEANWQEEHLFTLKQSRESLTHYQQQIAACDEEIEKLLMQFQPRVDPEKKPLPANRKPKPKGRKKQQQMKNPKTGFDMRQEAYQLFGVDLTQVPGLMLMVLTLFSEIGRDMSRWPTAGHFVSWLGLCPDNDITGGKVRWRGVRKVKSRAGTLFRLAAHSLHHEESAVGDYLRRMKSKLGPAGATTATAHKIAVIFYTMVKKQVEYDPTIWGQRDTQRVQRMEANLHRQARKMGYQLVRLEEKPAA

SEQ ID NO: 172625 - protein, 430 aa, unidentified
MKSNTQNTKIEAITETTLVLGIDVGSETHYARAFDYRGIEYSKKPLKFSNDEAGFVTFKAWILDIKEKHGKDKVVPGMEPTGHYWFNLGKFLQDNEMKPVLVNPHHVKKSKELDDNNPTKNDRKDPKVIAGLVREGRYMIPYLPEGVYADLRTASNMRFQLQAELTRIQNRISRWFNIYFPEYKTVYGQPDAKSGMLILKVAPLPEDILTLGIDGVNQIWRDAKVRAVGKARAKTLIEAAEHSVGSKEGEISARMEIRMLLDDYESRNTRLQEVVALIEELVKKIPMAEKLLEIKGVGIKTVSGFLAEVGDISRFNNPKELQKLAGLALVENSSGKHKGETTISRRGRKRLRYLLFEVAMSLVSKNPEFRELHSYYTTRKLNPLKKMQSLMAVAAKLLRVFFAMLTKGVDYDSKKLVGDIKRPEVYLQAA

SEQ ID NO: 172626 - protein, 480 aa, unidentified
MPIITKSRGRLKSQSAAPVTALASRDRVDVPTAKRRARRRSGPTEASSTTSVEAQNLSENRAILPPSGRIPDGTPTRSVTQLDGAQGRMTMRIVALDLGTKKTSFCELSQGQVVQRLTVSDVCSLEHLLGPDQPPANVAIEACREAWFVHDLLVKWGNEVVVIDTTRSKQLGIGQHGRKTDRIDAEVLARALESGRIPKAHVLTRKRREMRRVLLVRRSLVEARAQLVTTVRGLVREQGVKIPTCHTSSFVSRVRAQQLPVDISQLIEPLLILVQGIDAQLVSAGQQLDALCAQEPVVAALTTTPGVGTVVAACFVAVVDDAKRFRRAHQVESYVGLVPNENTSGGGKQRLGAISKHGNSYLRALLVQAAWTIVRSRDKSNPLYLWAAQLIERRGKRIAVVALARRLVGVLWAMWRDGTVYDTEHLAKQNVRGLRGAIQTLEQQSAALAQAAKKTSAKQPRIASTATPRRKTKTPAAKAA

SEQ ID NO: 172627 - protein, 475 aa, unidentified
MVKLKEIFLEKINEKKDLNKREKKLFVGVDIGRLKNQVAFLSKDRNAELRKREKIENSFWGFMKLLEYIEELIVQESITMENVIIGIESTGHYWKNLYNFFLEKNIEVVMVKNKTVKLKREIKYPYKGKNDSLDSVCIALSLKDDDYIRIRKSNENYDSLRILSKIKDERVKANTQNKNRIIKWLDKHNQIYLKTFVDPYCKTGMALLKCFPGEADIKEKTVEEIIEILRSNNNKNKLQYRKISEYYELLIDILNDIKEIPIGARKEIENLIRLFEDTENYLETLQKDIDELSNEMELPVERFSQLKGLGKNEILDLISEIGMIENYKTSKHLQAYCGLRVIAYKSGEYQIKKPKISKAGNRKARRILFYMALILIARNPDWRKLFAYYLSYNRENQKSKKEMLIAVASKLCRTIFGMLKNDTEFDRNLLFRGLDFSKCNKERFINEYVGEKRNWVITDEELEELFGKSNTKKLF

SEQ ID NO: 172628 - protein, 405 aa, unidentified
MRAIGLDIHRGFCEVAIAEDGVVRRARRIGTAPDDLEAFAASLGSDDVVTLEATGNASAIARIIEPHARVVLANPKATKAATRLRAKTDRIDARTLAQLLASGFLPDVWRPDDTTAVLRRQVSRRAHLVKQRTKAKNQVHAALIRNLVGRAPASDLFGRRGRGWLAGVELPADERDGIEASLRTIDFLDAEVARLDDVLAAAVLGSPDMRRLMTVPGVSATTAATLVAVIGDVGRFPAPGRLVAYLGLDPRVSQSGEDAARHGRISKQGASVARQVLVEAAWVATRTAGPLRAFGQRIAARRGWNVAIVAVARKLAVLVWHLLSREEEYAYGRPSRLRVKIRRLELRTGATPSKGRSIGIASSAAERRLEQERAEQAEAAYRHRVADRVSESGAGDASGARISRR

SEQ ID NO: 172629 - protein, 342 aa, unidentified
MENIGLDLHQRESQLCILTDEGEVIDRRIRTTPERLTAVLGPRAPARILLEASTESEWVARHLEALGHAVIVADPNYAPMYATRSGRVKTDRRDARTLAEALRLEAYRPAHRSGDAHRHVRAELAVRDTLVRTRTRYVALAKSLVRRDGFRLASGAAEHTRAKLAALPLPPTLTGELAPLVALLPALDREIAAADARLAQYLAGDPVVGRLATAPGIGPVTATAFVATLDDITRFATAHQVEAYLGLVPSERSSGERQRRGRITKAGNTRLRWLLVEAAWRVLRSSRADAAPLRTWAERIALRRGKRIAAVAVARRLAGVLYAMWRDGTGYQVRQSREAAAA

SEQ ID NO: 172630 - protein, 388 aa, unidentified
MIYVGIDIAKLNHYASAIDSDGVVLIEPFEFLNDNAGFYTLLSKLNSFELDDIIIGLESTAHYGNNLVSFLVTKGLHVCVINPIQTATLRKNNIRKTKTDKVDTLVIAKAIALMDHPRFVTLYDIALMQLKNLGRFRMNLVKQRSRTKIQLTAYLDQVFPELQYFFKSGIHQKTVYAILKEAPSAIQIASMHLTHLKNLLVSNSHGHFKNETALELRVLAQKSVGAADRSLSIQITQSIAQIELLDSQIDAVESEMKDIVTSLDSVIMTIPGIGPINGGMILGEIGDINRFSKPRKLLAFAGLDPSVYQSGNFTAKKTKMSKRGSSALRYALMNAAHNIVKYNQTFKEYYDSKRAEGRGHYNALGHCAGKLVRIIYKMLKDNVEFNLD

SEQ ID NO: 172631 - protein, 315 aa, unidentified
MSEIVVEKFVGIDVSKNTLDVCIAPPGETLHVTHDEAGIAQIAKRLKELSPTLIVMEATGGLEVRLASELAGQGLPVAVINPRQARDFAKATGQLAKTDAVDAAVLAAFARAIRPAVRPIKDADVRELDDLVTRRRQLIDIRVQETLRLGTASKVQKKSLNAHIAWLDKRITDLDGDLTRRLRTSDAWRAKDDLLRGIPGVGAVTTLTMLAKCPELGSLNRREIAKLAGVAPLADDSGKHRGKRFIWGGRADVRAVLYMATVSAIRCNSVIKAFAERLTQAGKPAKVVIVACMRKLLTIMNTMVKNNAPWNPKTA

SEQ ID NO: 172632 - protein, 400 aa, unidentified
MLSIGIDVSKGKSTVCGMKPGGEIVYAPFEVQHTREGMSELVSLLRSSGEEVRAVLESTGSYHCPVVAALLENGIFVSVVNSLRMKRFCSQSIRKVKTDRIDAMQIALYGLAYWQELQPTKLPEDTYRELQLLARQYYQMTSLLIKAKVDFNAICDQVLPGMQELMNDHAGRHKLSDFVLRYHHTTHILEMGETRFRKDYCKWAEKKGYRNCERMAALIFATAQNGIPVLPNAPSTQIVITEAIRVLHTVEASRDAILTQMQALAKTLPEYSLVREMPCIGDTLAPRLIAEIGDVRRFHSKRALIAYAGIDAPPYQSGKFCANNRHISKRGNRYLRKTGYEVMQSYVMHKPANDPIFTFIEKKRGEGKSGKLAMVAGLNKFLRVYYGKVTELYRSLPAIE

SEQ ID NO: 172633 - protein, 347 aa, unidentified
MPYHAQEEVQVFAGIDVSAGELNVACLRPEKDKETTATFTNTRSGHNALLAFLLRGNQRVRVCLEVTGNYSLDLALALQAHSQFEINVVNPRRARRFAESLGERSKTDPVDAHVLCEYALRMPWVPWQPPSSTALHLRAVMRAVEDLTSILTQEKNREHALAASHALPSLVLTELKRHQRYLKNRLTRLRREALRLVARDPQLSRRFQLMQTTPGIGENSALQILGELAVLPDTLDARQWVAFSGLDPRRFKSGTSVEQRPRISRAGSRHLRRALYMPALVALRHDPHLGSFYQHLLKHGKARLQAVVAVMRKLLHAFFAMFRSDQPYDGSRLCPFELANKPVDSCG

SEQ ID NO: 172634 - protein, 333 aa, unidentified
MTCFLGIDVSKLTLDIAVVKEGKMLHEEHIANDQKELRSFLKHLQKNLSILAQEIVVCMEHTGIYNYKALDVLCKAGISVCLEPAMQIKKSQGIVRGKDDKVDARRIAQYAYKNREELRFYHPDSKTAQKLKALLSCRERLINVKMQLEVPLQELVGYTDSDIVKTLKVTNNPLIQCAQKQLHKIELQIDELIKQDQGIRNQYEYVTSVVGIGKITGLNMMISTGFFQRITDHKKFACHSGVAPFRHESGTSIRGKMRVSKMANMNMKKLLHLAAMSAIRSSGELKEYYQRKVAEGKNKMSVINAVRNKLISRVFTCVNQQRLYQKNYQNAIV

SEQ ID NO: 172635 - protein, 340 aa, unidentified
MDITTLGIDLAKSVFQLHGVNAQGVIVLQKKLRRGAVVKFLSKLEPCLIGIEACATSHYWAREIAALGHDIKMIPPAYVKPYVKRQKNDAADAEAICEAVTRPNMRFVPVKTEEQQAVLVLHRSRDLLMRQRTMILNAIRSHCAEFGIIAAQGARKVSELVTKLRNDDTLGVPEVGVSALLSLASQLDCLEQEVRKIEHQLLAWHRQNAASQRLETIPGIGLITATALAASVPDPAVFKSGRQFAAYLGLVPRQNSSGGKDRLGRISKMGNGYLRRLLVVGATSVTRRAPTIDTRTGTWVRSLLEHKPTRVVTVAIANKTARTAWALLSKGESYKAVPAI

SEQ ID NO: 172636 - protein, 375 aa, unidentified
MKEKVRFLGLDVHAETIAVAIAEPDGEVRSLGTIANRAESIRKLVKKLGPVEHLKSCYEAGPTGYVLYWQLAELGVQCEVIAPTLAPMKAGDRVKTDRRDAERLARSYRSGDLTAVWVPDEGSEALRDLVRAREAAKQDQLRARHRLSKFLLRSGQRPAAGMKAWTLGYMAWVRQLRFKQVAQESTRLDYLHEVEHMAERVKRLEQAITEAVKLACPALQEVICGLQALRGVAQISAVTIAAELGNISRFHTPRQLMGYSGAVPTEDSSGQRTRRGSITKTGNAHLRRIAIEAAWSYRLRPGVGPALRKRQEGVAEEIKEIAWKAQHRLHKRYMRLAAAGKDQRKIITAVGRELLGFIWAIGIKAEAASKLRTAA

SEQ ID NO: 172637 - protein, 375 aa, unidentified
MTKSNILFIGMDVHKESIEIALADDGADGEVRRYGRIGGTLDALKKTLRKLVSEDKTLHFCYEAGPCGYELYRYLSDQGHVCIVVAPSLIPKKPGDKVKTDKRDAVQLVRLFRAGELTPVYVPDREDEAMRDLSRAREDAMIIQKAARQRLKSFLLRHNIRYPGRANWSEKHLRWLAAGVRLATPAQQVVFQEYVNTVTEAAGRMERLVKEIHHHVKTWRLYPVVQALMTMRGVRMIVAVTVIAELGDLTRFENPQQLMSYLGLTPCEYSSGARQRRGAITKTGNHHARRILIEAAWSYRFFPKVSREIQKRQEHQPLPIREIAWKAQLRLSKRYKTMIQRGKSPNVVVVAIARELAGFMWAIAQAVPISNTSST

SEQ ID NO: 172638 - protein, 373 aa, unidentified
MSIYVGMDVHRKRSQVAIVDDAGDQQRNRNLPNDPAKLVPVLGVLPPGTPVAFEAAYGWGWLVELLEELELEPHLVHPSRCKAIAAARLKNDKVDAATLAQLLRADLLPEAWIAPQGVRDLRALLRHRAALVRLSTSLKNRVHAVLADRGIGEDQILWTGPGRAWLASLELPPIPRAIIEDCCGLLDALATPIGRLERQIAGLAKPDPRVQALMALPGVGRLTAMTLVAEIGDIDRFPTARKLCAWAGLTPTVRNSDRKVRHGHITKQGSVWVRWILQEAAHTAKRSPQFAGTYGQLARRRGKQIATVAIARRLLARCFHILKEVQTATTTGEGQTGRARNTACACNTAVDLTEQPGPDAIVMRTPPRVRIVK

SEQ ID NO: 172639 - protein, 320 aa, unidentified
MFPHEVFNNTRKGFGDMCSWLKKSRVVLSQALFGMEFTGCYSLDLEKFLTSKNYSFCMLSTRIVKHHPMGTIDKRDKNDSAKIADFLYRYDGTECAKPYKLPSKAMQQLKQLVNERKFLVEQRTNFMNRMQMFETKEDSAMYESYIKKLNHDIEKIDQEECELMSKEEDVFDTFQNLLTIPGIGFVNATNIIAITRNFTAFDTARQYARYVGVAPCSHTSGTSVKWRARPSAHCNGQVKADLSMAALRAVEYDVEMQMFYNRKLGGRKDSDTKRKALNAVKFKLIRRMFAIGKQKRKWEVLNTSDDRKNLHIEKSKASEL

SEQ ID NO: 172640 - protein, 457 aa, unidentified
MSKRRQKSKLQSFNVQSLPKQLRHINLNAAGIDIGSERHMGAVPEGRDTVSVREFGTFTADLQALADWLQQCGVTTVAMESTGVYWIPLFELLERRGFEVKLVDARHVKNVSGRKSDVLDCQWIQQIHTYGLLTAAFRPPDDVCVLRSYLRQREMLIQTASMHIQHMQKALQQMNLLLHNVVSDITGVTGMKIIKAILAGERDPRVLARNRDGRCQHTSATIAKSLVGNYREEHLFALQQAVDLYETYQTKIADCDQAIIKHVEKQPNISDDGPPPAEKRTQRQVRIRNGVDVRELLFKKSGVDLFAIPGLAADTLLTLASEVGFDMSSWKTEKHFTSWLGLCPGTKISGGKVLDKKAKRNPNRATQAFRMAATTQARSKTALGAFYRRIKSRTGGKQAVTATAHKIARIYYALLTQGTSYVELGQQAYELKYKERRIDHLKTQAKSLGFQLVPCTT

SEQ ID NO: 172641 - protein, 450 aa, unidentified
MGNGSGVSRGDRNRNARLARLRMLVPPVNAIVGIDLADKKQMVVVTDHDSKVLARRTFRCRAWDLGVALDWAGKQAAAKGFAGATVACEPTGHRWRVLGQLAGERNMPFVCVQPMLSSWARRSEDLTFDKTDEKDAVIIARLTAQLRCYVPEPVDETWGRLRHLGARREQLLVEAGSQVQQIRALLECVWPAALQTARQPFRSLTWTAAMSVVVDRDGGDLSRTRRLGLVRLETAVRREVVRRGRQRPCLRIVRLVFAALTDPAGVIAHRVGALERVALLLGDWLETHRRLLDIEARMTTVLDELRLTDLVTSIPGLSAVGAAAILAETGDPKRFASARALVKHAGLAPREKLSGTFKGRTKLTGQGRPGLRLAAWRAVWGAQRANPVYAARFTHLTTRAQNKLAVTQAQAVIAAAILRQLHAVVTTGRAWDPAIATHGAEPRTVMPIAA

SEQ ID NO: 172642 - protein, 376 aa, unidentified
MKNYSKFVGLDVHKAEISVGTAKADRGEAGYYGTIENKPHAYLKLAKKLSKSGEEILFCYEAGPCGYDIYRQLTKAGYDCVVIAPSLIPKKAGDKVKTDRRDAVSLARLLRAGELTPIWVPDTEQEAMRDLTRAREDMKGMERHSRQRLGGFLLRHGKVYPGKSKWTKTYFGWLETLRFETAAQQIVLQEYIDMVKHARQRVSAMEEEMRKALDGWTLKPVVEGLMALRGVDLIAAVTIIAELGDITRFESPRQLMAHLGLVPSEHSSGERQKRGGITKTGNNHVRRVLVEASWCYRLPARKTAHLRRKAEKTSNAVQEIAWKAQKRLCSRYWYLINKGKLPVKSCIAVARELVGFIWAIACEVMGKGNISVVMNG

SEQ ID NO: 172643 - protein, 400 aa, unidentified
MMTPDDIDVWVGLDVGKSAHHAHALDHDGNTLYDKPLKQDEKAIRTMLGKLSKHGRVLLVVDQPNTIGSLPLTVARNMGIAVAYLPGTAMRRTAQLLPGDAKTDRRDAHVIAWAALKLPETLRDAGPDDETLAALKLLAGHDEDLAHESTRHVNRLRSLLLQTHPAFERALKGERITRDATLALLERYGGPMGVKRAGIEDVKDWAKSNGLRAGRIIDDMFKAIGEQTVTVPGTLMAETIIPSIAHDIKTIRDRRREVGRQVEKLLEDHPLLTVPASMPGIGVRTASNILLGIGGDIANFKSSAHLAAYAGISPVTGQSGTSIKGERPSRRGNKRLKNALWQTAFVASTKHPPSVAYYKRKREQGKHHNAAIICLARRRCDVIYSMLKNGTLYQEPALVA

SEQ ID NO: 172644 - protein, 439 aa, unidentified
MFSRSEERSLNKKGKQTPMKAAQTILHVGLDVHKDSIAVALAAQDGSLRRYGEIPGHIEAVDKLLKRLDRADQQIRLCYEAGPFGFVLCRHLRRKGYVCEVVAPSLIPKRAGDRVKTDARDAEQLARLFRAGELTAVRVPDEADEALRDLIRGRLSAVFEQHRARHRLKGFLLRLGFRYPGKTSWTPAQMNYLSKLKMSHPAQQIVLEEYIQAVQSATERLDRLTTQVHAQLPGWKWEPVVRALMCLRGVSVINGMTLVAEIGDIDRFESPRQLMSFLGLTPSEHTSGDKRHQGAITKAGNGACRRALVEAAHHYRIPPRISPTLRQRQHGQPEQVRQIAWKAQQRLYSRQRTLSLRRKKSVVVVTAVARELCGFVWAICRALKHPHPKAPTRTSEGSARVYVLKPDLKFKSSAGRSRLASSAAAPPARARKGPTSLAS

SEQ ID NO: 172645 - protein, 350 aa, unidentified
MAIVGGFDVHRKQITFDYVDNDGLVQWGQIRPATRKTLRSWLAKHCPEGAGEFALEGCTGRRYVSEELTAAGVGVHLGDPAEIAALRGPKKRAKTDRADARLLRTLLVEGRFPESWIPPAHVAEIRALGRLYCALMEERRGWQQRIHAQLFHQGCPPVKALLSEPGREVLVAAELSAAGRQYVDTALRRIDELTAEIDPLRMQLVRFARRQSGCRVLQRHYGVGWLCAAIIWAEVGDPRRFSSSDQLVRFAGLDVTVYSSDGKRAPGHLSRQGSPELRWAAFEAAKCAARRGSPDYAYYHNLAAKHEGRNGKNPTLAVERKILRRCYHTLRELGDAVLAMPIAEAEEVAA

SEQ ID NO: 172646 - protein, 310 aa, unidentified
MENIIVGIDVSKDRLDVGLRPSGERFAVERNSAGLDLLVPRLKDLSPHIVALEATGGFETVVAAVLAAAGFPVVIVNPANVRSFAKALGQRAKTDPIDAAVIAHFAEATKPEPRPLPDEATRLLADLTARRRQIIEMMVSERQRERRVTAPRLKKSITRLLKALQKELTSVDVDIDDAVRGSPAWREKEDLLTSVPGVGQIIARTLMAELPELGQLGRKEIAALAGLAPFTRQSGQWRGRSFIGGGRTVARTAVFMGAMVAKKHNPTLKVFFDRLVAAGKPKMVALIAVARKLLTILNAILRDNRPWQNA

SEQ ID NO: 172647 - protein, 482 aa, unidentified
MDEVNRNRLEEFRQLRKEIRHSEEYLIVGIDIAKDRHYAFFGTATGKTLLKRIVFSNDYEGFRKLLDQAEALRVQHGLKKVVYGMEPTANYHKPLGEYLIRLGRRVVLVSGVTVARNRESLDGRWDKHDGKDSANVADLISQGKCLYYEHPSAELRGLRGLLSLKRRLKKQEHGYHALRVIRIRNQLIAQYFPEMDRDYERLGAEGMAIVRGCLPASEIAQLDVDPFIDRVTSRRIRMEKRRRLEEVWEKAAESIGCDGVPGVDHEARVMVEGLKQIREMIKETEAKIEELCKQFPEYSSLLTIPGFGPDVSSKVLGAIGEADRFENGKQVLKLGGLDLSADRSGKDSDKAIPQISKRGKADLRYALYQAALIASTKNQYFMRYYTEKLRGREREKGIKTKLWVKLSAKMLLIAWTLMKKKEAFNPAYLNLEEEGAGRGSERKASWPCISSGARKKRGSPWVCKSSHADGTRSLSQKLKEEA

SEQ ID NO: 172648 - protein, 367 aa, unidentified
MITIIRKEPSMTTYYIGADVHSNSTELAIEKRNKIVARYSVPTTIPAISNVLDSLQGKKHMALEEGPMAGWLYRNLCRKVDKLIVADPRRNKLITSDGDKDDKIDAAKLAALLRGKYLRSVYHSDSDGRSELKHWVSLYHDRGKDAVRNINKIRARCRMHGLTIPRLALRDPSHRRQWLFKINQPVLARQLNMLWIGYDATAKQTRVAKQQLIQLSKNYPIIRFFKELPGIGLIRATTLFAYLDTPWRFKEKNKLWKYCGVGLQRTTSGTDKKGRPKPARLQLPWAVNRTLKNMILGAAISAINQKDNVFKAYYERMVKDGVIPSNARHAVARKMLTVMWGMWKTNSRFDEKRCQESNRPTASALSR

SEQ ID NO: 172649 - protein, 355 aa, unidentified
MEKMIKFIAKNKDIFVGLEDSKRSWKLCVRSEKIVIQETSMPAKYEALKSYFRNNFPGCKIKIIYEAGFKGFTLHDRLISDDFECVVTPPHTVTQEKDNRVKCDKIDARRLALNLENGDFKSCCVPDKELREDRQISRMLIQVQKDINKCKNRIRKFLDFHGYDEEFPAGTWYDREYKALEEFKFPEPLKAQMDIYLSTLKHFAETKKKLTELLKALTKKKRYARVFELFESAPGVGWYTAIRLILEWGTDIAQRFKTDKKIASFTGLTSSEFSTGETVKRGRITGQGNRTVRAWLIESAWTAYKRDPALLHKFQEVYKHTSSKKKAIVAVARKLAVRLRALVVTDTPYQIGVAR

SEQ ID NO: 172650 - protein, 357 aa, unidentified
MQIMNEDARRVIGGVDAHADTHHAAVLDERGGLLETKSFPVSARGYRELLAWLRSFGEIERIGVESTGSYAAGLTRYLVGEGVLVIEVNQPHPHTRRRRGKTDAIDAELAARHVLARSKPVIPKQTTGVVESIRQLRVARESAVKSRSAAVLQLGDLILTAPSELREQLTAPKTLRGKAGLCRRLRPDHGRLEDPVNAAKLALRSLARRILSLDNEIAELDGQLAPLVAGAAPRTTALLGVSTGHAGQLLLTAGQNIERLRSEAAFAALCGASPVPVASGKRGRYRLNPGGDRQANRALHMIAVCRLRYCPKTRAYLKRRTSEGKTKKEIIRCLKRYIAREVHASLRDDLRSLSLTP

SEQ ID NO: 172651 - protein, 343 aa, unidentified
MKHIGLDVHGTTTHISVISDRGRKIKGAVIPTQEADLVTFIANIAGPKQVALEESQLADFVTRILAPHVTKVVRCLPQHNRLISKSEQKYDEADADHIAELLYLDKLKAVHHAPWEYRQLREGVRAYWTVSRDLARAKSRLKAFCLFNGVHCVGEKVYSRKYRGGVYKEIGKRSGNAALLKQLYANMDFCREDKAAHVKILRELSKTFQKDIVCLKSHPGIGFIGACTLVSYLENGWRLNNKRKLWQYCGIGIRRHESAGTGRRGASRKGNRYLKNALMTATASIAARRNINNTLTRIWREKVQAGVSPKRMKRNLARKLAVLVHRSLRFKEEYDDARVMTAH

SEQ ID NO: 172652 - protein, 423 aa, unidentified
MTKRTFTPADAVLVAIDMSKHRQEVLIERPEGGRRRRMTVMATKADYDRLATDLGDIGRPIIVGFEATGNYHRTLAHRLLAAGFELRLISSVALARTREALHNGWDKNDSKDAQVILHMLRIGATQRYVDPLAAGINDLQEMSKTHEAISKAKTQTWHRLLTHYLPLYFPEIERFAGNSRSDWFLALLERFPTPASMTALGQEAFTREAWDLVGRKVSKARLLNDIYAAASASIALPVEEDSISIAMFRMVIAQARSLIRQRDEIERTAHAMLAENRDYQLLRMIPGIGPINALTILAEAGDLRRFGHHRQFLKFCGLDLATCQSGTFRGRTKLSKYGNARLRRTFWMATQVAIRQRDNSFRDKLGRYVAGHSNDPDRRRKAMTALTAKMARVAHAVIKTGTEYRPFVERADTRWKDPSPATL

SEQ ID NO: 172653 - protein, 350 aa, unidentified
MKTILAIDLGKRNSVFCKLNTSSLKPEYLTAKTDPQKFHDIFTKLDAESSIVLFEVGSQAGWLSDMLRAIGIKFKVANVNHSAWKWTNNPNKSDKTDAHRLAMMYHHGFFPEVYIPEKTVRQKRSLIYYRQKIVNRMTQVKNGIRALMTTVAIELPTGKNCWTKKHRKQLEQLALPFDGIEEACDLWRGQLHTELQQLDALQVCLEKTTAKLDELNKQKQPVKVLETIPGIGPRTAEAVVAVIDDPHRFKSCRQISNYVGFTPRRYQSGQMERSGRISKRGNPLLRALLVQASWSALRFDWAKHIYKRVCRGSAKRRKIAIIAVARHLLMRCWAMLRDNRPWHYKTEKAV

SEQ ID NO: 172654 - protein, 400 aa, unidentified
MRKPKQRQTKPRQSKQRKPNDLSRSLAALDLDRTLIAVIEMGASSWLVAGLVPGVERQPLKKLKTDEYALLALLERWRGEAVRSGYAITRIVVAYEAGRDGFWLARWLRAQGIEAHVIHAASVAVSREHRRAKTDRLDTEHLKRAFLGWLRGERDHCKMVAIPTVAEEDARRPGRERESLVGDATRIINRIKSALARLGIRTFNPTLKKAPVRLNDLRTPEGDPIPPNTLDEIKRDMERRHLICEQIRRIEQERVKRLEQAPDTGPNAMVHLLARVTGIGIETADTLVREVLTRNLRDRRAVARYGGLTGAPNQSGSFNREKGLARSGNPRVRRCMIGLAWRFVRLQKDSPLVKWFELRTANARGSRKTMIVALARKLLIALWGLVHEGVVPEGIVMRPA

SEQ ID NO: 172655 - protein, 398 aa, unidentified
MLSIGIDVSKGKSTVCGMKPRGEIVYTPFEVQHTREGMSELVSLLRSSGEEVRAVLESTGSYHCPVVAALLENGIFVSVVNSLRMKRFCSQSIRRVKTDQIDAMQIALYGLAYWQELQPTRLPENTYRELQLLARQYYQMTSMLIKAKVDFNAICDQVLPGMQELMSDHAGRHKLSDFVLRYRHTTHILKMGETRFRKDYCKWAEKKGYRNHERMAALIFATAQNGIPVLPDAPSTQIVITEAIRVLHTVEASRDAILTQMQALAKTLPEYSLVREMPCIGDTLAPRLIAEIGDVRRFHSKRALIAYAGIDAPPYQSGKFSANNRHISKRGNRYLRKTGYEVMQSYVMHKPANDPIFTFIEKKRSEGKSGKLAMVAGLNKFLRVYYGKVTELYRSLPQ

SEQ ID NO: 172656 - protein, 416 aa, unidentified
MTDQREWYAGVDWASESHHVFLTDADGRRIAERSFQHGGEGLAEMAAWLMATSGAAAAFQIQVAIEVPHGPVVETLIERAFKVHAINPKQMDRFRDRFTLAGAKDDSRDAEVMASALRTDPRCFRLLASADPGVVELREWSRIAEDLGAERNRLTNRLREQLWRYFPAMLELENDLGAEWLLDLWEAVPTPEKSARIRQTTIAKLLKRHRIRRFDAAHVLDVLRRPPVQVAAGTTEAASAHIATLIARIRLVNRQIKDAHQRLDTLTTRLIPTEEAGPGQKKQHDVEILASLPGVGRIVLATLLAEAFDVLQRRDYAALRSLTGVAPVTKRSGKSCIVIRRQACHDRLANAMYHWARVAVQHDVTSRAKYTALRSRGHSHGRALRSVADRLLNVACAMLKTGTTFNPSLAAQKTSC

SEQ ID NO: 172657 - protein, 375 aa, unidentified
MQKKVRFLGLDVHAETIAVAVAEQDGEVRSLGVIPNRAESVRKLIRKLCAGEHLRACYEAGPTGYVLYWQLTELGVECTVVAPTLVPVKAGDRVKTDRRDALKLARCHRAGELTAVWVPDASAEALRDLVRTREAAKQDQLRARHRLSKFLLRTGRRPVTCVKPWTAQYMAWVRQLRYEQAAQEWTRLDLLHEVEHMAERVKRLEDAIREAVKLAPAGMQEVIRGLQALRGIAEISAVTVVAELGQISRFETARQLMGYSGAVPSENSSGRRQQRGAITKTGNAHLRRIAIEAAWSYRLRPAVGPALRKRQEGVPEEIKEMAWKAQLRLHKRYARLAAAGKEQCKITTAVGRELLGFIWAIGVKTEAAASRAMAA

SEQ ID NO: 172658 - protein, 427 aa, unidentified
MSITEANRYEAYCQFRTSVRGNRHYLLVGIDVAKERHHAFFGTATGKTLLKRLIFDNNREGFEQLIERAEQLMVAHSCRYVAFGLEPTGNYHKPLANWLLEKKQLLVLVSNKAVADNRESLDGRWDKHDTKDSANVADLMAQGKCQFFEKPSAELSALRSLLSFRKRLKRDEHSLRMQIRNGLLVRHFPEMDRLWGKCLKENLAIVRSFLDPRTISAMPFNDFLRRVTDRDRGLRQVKRLQRIYDAAAVSIGCPTDAAARFEARQLVDRLDDLHERIERTEKRIARICQRFSSYRRLLTIPGFGPYVASQVIARIGDPHRFAGRKQLIRLAGYDLNAKRSGKRSDTAVPVISKRGNSELRYALYQAALIATYHNTGFRALFTRYLQGRQRERGIKTKMRVKLAVKMLVIAWCMMRDDTDFDPALLRV

SEQ ID NO: 172659 - protein, 457 aa, unidentified
MPVIHSHAAGIDVGATSHWVCVPEDAVAEGQSSVREFGAFTKDLDELVEWLLKCQVKTVAMESTSVYWIPLFQKLEAAHLEAVLVNARHVRHVPGRKTDCKDCQWLQRLHSYGLLNGSFRPSDDICCLRSLMRHRDNLSKACGQEVQHMQQALNYMNIHLHHAVSDLNGETGLRILDAILGGEREPKELVKLRDPQISRSTVEEMEAALRGDWREEHLFVLRQSLENYRHLLKQMEVCDGELEKVLAKVVVNPATVVEAERPKNPPAAEPKSKRQKRFKKLKAGTGLKRDLSAELTRICGVDLTRIIGLNVLGVLIVISEIGVDMSRWRNAKAFCAWLGLCPGNKISGGKVLSSHTVHVVNRVAILLRTVAPAVGRSDTWLGIFHRRMRARIGPAAANTATARKLACMIYHLLQYKEEYIDVDCLIYQEKIRKSRIAKLCKQAEELGFEVIKKQKAA

SEQ ID NO: 172660 - protein, 323 aa, unidentified
MNKDIKYFGLDISHLVFDVTDSQGNYYQFKNSISGFKKFVKLLDVNSHCVMEATGYYHYQLAYYLQEEGIKVSVENPLAVKRFIQMKLSKIKTDKSDSKLICEYAEHVELKLWKGNSKHQLECLQMTRLLSVYTKQSTMLKNKLHGEAVLGNPSKAVVSSLKRNLKQVQKEMKTMEDKLLVLVKAAHQEVLTRLKSIPGIGPKTALMLVVLTDGFDRFTSGSELCSYAGLTPVIRQSGSSVKGRPRISKIGNQKLRNLLFMCSFNACKYNHACKAIYERLVSKGKSKKLALIAVCNKLLKQAFAIAKSGLTYDNNYRSTLAIN

SEQ ID NO: 172661 - protein, 378 aa, unidentified
MVMSGVRCQDGTNVEVVLGVDTHLDFHVAVALDELGRYLGELRVPTTTKDYTRLVCWAEEFGVIRCAGVEGTSSYGAGLVRYLTSAGIAVAEVERPKRRHLRRNGKSDPLDAEAAARAVLAGETAGTPKSADGHVEMIRALRTARRSAVKARSQAANQLQALVVTAPDALRDRLRWLSTRRLVAVACRLRPGTQPETPQAATKLALRSVARRYEALSEEIAELDVQLDRLVAQAAPELLALPAVGTDHAATLLIVAGDNPQRLRSEASFASLCGVSPVEASSGKVVRHRLNRGGNRDANRDANRALHMICMVRMGMDGRTQQYVARRTAEGKSKREILRCLKRYVAREVYRVLVEAVEAPPLTTAYPAPTSKRISVMS

SEQ ID NO: 172662 - protein, 351 aa, unidentified
MSINHYIGFDVHKKSISYCVKAADGKIIEEGKLRATRQVLREWAQKRTEAWHGAMEATLFSGWIYDALKPFAAELQMGNPSMMKAIGAAKKKNDRLDARKIADLVRCNLLPVCYVAPPEMRELRRLLRYRNLVVGQAVQMKNRMSGLLMEVGAEYNKQRLHGAKYFSELVDQLEEVPESVKDLLRLSRGALETFETTQRQILDRLQKEPLLKKRVKLLQTIAGVGEVTSLTWALEVCDPRRFPSIVDAVSYCGLTSALDSSADQQKRGPISKQRNPHLQTVLIEAAKLAPRWNAQLAQVHERELKRGHRNRATLEVARKLVAYLLAVDKSGKPFEVRNQPAPKIGEETKVA

SEQ ID NO: 172663 - protein, 329 aa, unidentified
MKITAIMGMDVSKKTLDCHLFIQQKSLPPVSNDSKGFKTIKRWLLKELKTTEGLLVVMEYTGIYTYGIERFLEQQQIKFVKRAALDVKRSLGMVRGKSDKVDARFISKYGWMRKEELQPMSPLSDAQLELQQLMSHRDKLVSDKASYQSKLKELVSQMGQKVNEKMTASMKYVMEILAQEIKETEASIKELISADQPLQTNYDLVCSVTGIGFATSVHLLIATENFTRFSDVRKLICYCGIAPFEHSSGTSIRGKVRVSHLANKKIKSLLTLAAMSAIQHDPELKLKYEQKVKEGKPKMSVVNIIRAKLIERVFAVIKKQKPYELRVAA

SEQ ID NO: 172664 - protein, 361 aa, unidentified
MDKYIGFDIDSNKTSVCIVQKNKADKYTTIGPDAESAKRFLANEKKDGCRVHLVFEISGQAGFLYDSLVGCVDSITVANPDKMTWIYRTAKKNDRMDARKMAVLLSIGEIPAVHMPSKEVRQWRMIICHRKKLLAGAVTAKNRIRALFKSQGISKPGHKGKWWNIRNRSWMRGFCNESFDAENLWRIQLDNLLNELEMMEEHIASVTGYLDGYLEKQAGGKLLMSIRGVGPRTAEAVLAYTDDVERFEGGKEYCSYFGVTPKLDESGSSRRLGHISKKGPSVVRWVLVESSWKVIRYSPAFRAFYERVRAGQKGRKKIAIVAVARKLLSIMRAMQLTGEMFNEGLVSGLDYGKIEGLRKTA

SEQ ID NO: 172665 - protein, 314 aa, unidentified
MPAEMKVYVGIDVSKLHLDVAIEPREDSWRVSNDEAGISQLVKRLQQLGPERIVLEATAGFELPALAALGCADLPAVAVNPRQVRDFAKATGRLAKTDALDAQMLAQFAAAVKPAVRPLPDAATRELSGLLARRRQLVEMRTAESNRLVLAVERVRPDIQEHLRWLDKRIKELDRELHDRLRASPLWREKENLLRSIPGVGPVLSTTLLADVPELGTISHKHAAALIGVAPFNCDSGQWRGKRKIWGGRATVRAVLYMATTVAVRHNPVLRELYERLLAAGKLPKVALVACMHKLLSICNAVLKHSTPWRSQPA

SEQ ID NO: 172666 - protein, 391 aa, unidentified
MIYVGIDVAKDKHDCFITNSDGEALFKSFTIPNNRKGFETLFQKVQSVSDDLTKVKVGLEATGHYSYNLLGFLLDKGLPTYVINPLHTNLYRKSLSLRKTKTDKVDAHTIASMIMSDVNLKSYSDTSYHNEELKSLTRYRFDKVQERAKLKTSVSRLICILFPELEKLVPTIHMASVYALLSEFPSAHAVASAHLTRLTNLLSESSHGRYGKDTAVMFREAARNSIGSNMPAKSLELKHTIKLIQELTSEIDEIETEIKSIMDEVNSPILSIPGINYRMGAMIIAEIGDFSRFDSPDKILAYAGMSPSTYQSGQLDNCYSHMEKRGSRYLRYALYNATKYVCHWDESFGTYLAKKRAEGKHYNVALSHATKKLVRTIYAMEKTGQSYSSAS

SEQ ID NO: 172667 - protein, 436 aa, unidentified
MRGCRCSMIMGFTKPIEHFNLQRKKVITMNTLYVGIDVSSKSNVVYLMLPNGDKHSNFSVANSHEGSTLLVKKIYSALTSHSLDTVLIGLEATSVYGDNLVYFLREDATLAPFNRKIHVLNPKQVKKFHDTYNDLPKNDYVDSFVIADCLRFGRINKEVYMGDYRYKALQNLTRARFFAVQNLVKEKQRFMNVLFKKYSTMTQEKVFSDAFSTTALAVYDEFESAEALANMDLHELTDFIIEKGKNRFPDPDAVAKAIQKAARSSYRLPKTVNDSVNQVLSISITSMKALESQIKEFDKAIKALMELLPNVLISIPGIGPVYSAGIMAEIGDINRFDNQASLAKYAGLAWKQHQSGGFEAEVTRLIPSGNRFLKYYLCEAAFSLVRCDKEYSDFYHLKYKEVNRCQHKRALALTARKFVRLVFRLLKDSLLYCPAK

SEQ ID NO: 172668 - protein, 360 aa, unidentified
MYSIGVDFHKAYSHMTVLDAQGQLLKVGKVPNTAEAVRAFVAPYRDGGEAVLEATRNWTVMYDLLETELVAVHLAHPLKVRAIAEARIKTDRIDSRILAHLLRCDLLPTAYVRPREQRVSQQILRQRLFLVRVRTMVKNRVHVLIDRQAQVRETAGQFSDLFGQAGLAWLQRVELLPMERQLLNSELTLFDALQERIAASDTLVRSLATGDPRVRWVRTIPGLGRFFAVLVVHEIGTIHRFATPEKLCGYAGLVPSVHASGGKVFHGRLTKQGNKWLRWAMVEAVRPAVMTDPELRAYYERLRQRKGPNPAKVATARRLLTLVHRVLSQERPYRKPKCPGMSGMNRRPRTALMNPLPALG

SEQ ID NO: 172669 - protein, 429 aa, unidentified
MTQTHHKTEQPVLVAIDIAKHRNEVLIAAPGRQRRRRLTVRNVREDVDRLVETLAAFEMPVQVGFEPTGDYHRPLAWRLHQAGFELRLISSLSLARTREAMHNSWDKNDPKDAQVMLHMMQTGLTQIWHDPLVHGVNDIQELSKTHAVISQTKTEFWHRLRTHYLPLYFPEIERFMGNSRSDWFLAFLERFPTPGSITCMPEQAFIEAAWDVVGRKVAKARLLADMYATAADSIGLPVDTTMPAISMFRLVLNQGRELIAKRDQIEQQASDLLGTHPDFVRLRTIPGIGPINALTILAEAGDLRRFGHHRQFLKYCGFNLSTQQSGVFRGQTKLSKFGNARLRRTFWMAAQVAIRQRENGFRDKYERYIARDHSDPHLKRKALTAVAAKIARTAHSVIKTETDYRPFFEGRGPRRKDPALHVPLRHASS

SEQ ID NO: 172670 - protein, 346 aa, unidentified
MLYAGLDLSRQRLDVHVLDEEGRTVEVLAVHPDADALRTLANRILRHGQEVSAVIESMTGSRFVHDTLERFGWEVMIADAVKAKGVAPLAAKTDKIDAHVLAELGRRDLVPEIWLPDPAVRAERERARFRLHLVHHRSALKCRIHATLMTFGHTVPVTDLFGTSGRALLAGLALPEPWATTLATSLAMVDELDQRIDECGRELARLGADHPYIPLLLTVPGVGPLLAYTIASEIGDIARFASPKKLTGYTGLCPIVRQSGNRDFRGPLAKNGPKYLRWALVEAATHAARHPHYRDRYERNKKRLGRQRGAKVARIDIARQLAEAIWHVLTKNEPFAPVGPAILLVA

SEQ ID NO: 172671 - protein, 386 aa, unidentified
MNLKYSVGLDVSSKKINACFSIIDEKQKVVFKSSTVICNTLKGFLVLEDWISKHKKEVIPLVICMEATGIYHENCAYYLYEKGFDVSIILPNKAKKYLEAIGLKSKNDSIDAKGLSQMGAQQCLKLWEPMGTFFYELRLLTRQHQNVTELKTVLKNQLDALSFAMHHLDSVTNQLEQTITLFETQLKELNKEIKAHLKSNEEVNSKVENILQMKGLGVLTLSTVLAETNGFTLFKNYKQLVSYAGYDVVEAQSGKRVGKTKISKRGNSRIRRALHMPSLVVIQCQVRPFKELFERTYERHGIKMKSYVAVQKKLLTMIYHLWNKKEAYNVNYELNIQEEEQKFSLGQLASEKTQSQKNSLNVKIEATQGKHPVNYRKKLPLGVTNV

SEQ ID NO: 172672 - protein, 408 aa, unidentified
MDVIHDRCAGLDVHKDVIVACVRTADGKKVHQEVRSFGATTSELLALSDWLVEHGVTIVAMEATGIYWRPVWHVLDDVFELVLANAAHIKNVPGRKTDVNDATWISDLLAHGLIRASFVPETSIQELRALTRTRKQLVRERSSHVQRIQKTLEDGNIKLASVLSDVVGQSGRAMLKAMIDGESDPKVLVKLTHSRVAAPRVEIVEALRGRLSKTHRFLLKLHLDQIDALDAAIASLETEVGALLEPFHAKARALTKIPGVAMYSAQVIVSEIGVDMSRFPTSAHLVSWAGLCPKNDESAGKRRSTRIRKGAPWLKTALVTAAWGAVRKKDCYLRSQFNRIKSRRGSKKAIIAVAASILTAAFYILRDGVDYRELGGNYFDGLDRSKMIARLVRRLRDLGAQVDVRATA

SEQ ID NO: 172673 - protein, 368 aa, unidentified
MPYGLNEKVTPTLHASYAVGCLFLEAILQNVTLVGIDLGKHSFHLHGQDQYGKAVFRKKVSRKQLIEFFATFHACTLVMEACAGAHYMARQLTGFGHQVKLISPQFVRPFVKSNKNDFVDAEAICEAASRPSMRFVTPKTESQQTWSALHRVRESLVRDRTKAINQIHGFLLEFGISLPVGHAVITRLPAVLAEHPLPPRLIAILERLHAHFKYLSEQIGEIDKEMARQLADDDLGQRLLSIPGVGPITASVLASEMGDGKQYGCSRDFAASIGLVPRQYSTGGRANLLGISKRGDKNLRRLLVQCARAYMRRLERQSGRLADWVRAMLTRRHSNVVACALANKLARTAWALATRHTTFDAEASTMPA

SEQ ID NO: 172674 - protein, 450 aa, unidentified
MGHGTGVSRGDRNRNARLARLRVLVPVTNAIVGIDLADRKQMVVVCDHDSKVLARKTFRCRAWDLGSALDWARDRATAGGWAGVTVACEPTGHRWRVLGQLAADRSMPFVCVQPMVTSWSRRTEDLTSDKTDEKDAVLIARLTAQLRCYVPEPTDETWGRLRHLGARREQLITETGSQIQQVRDLLECVWPAALEAAQQPFRSRTWIASLWVVLGRDGADFDRTRRLGAARFEQAVRREITRRGGQKPCLRIARRIFAALADRAGVIAHRAGALERVQLLLTDWQLTKDRLADTETRMTAVLDELGLTGLVTSITGLSPVGVAAILAETGDPRRFATARALVKHAGLAPREKTSGAFTGRTKLTGQGRPGLRLAAWRAVWGAQRANGVYAARYQHLTTREHNKLTPTQAQTVIAAAILRHLHAVITTGKAWDPQIATHGTRPAKKTPAAA

SEQ ID NO: 172675 - protein, 354 aa, unidentified
MDHIAIDLGSRESQICIRTADGALVEEHRLPTMSLPAFLNKRSRGARVILESCAEAFAVADAARAAGHDPVVVPASLAPSLGVGHRGIKTDSRDGRNLSEASCRMSRLPSVHVPTQQSRERKAMCASREGLIEVRTKLINTSRGWMRSQGLGVIRSGSPTTLPHRLREHVRAKKHDLPPHIERVLLTIEQLTLQIVAADAELEAAAAADPTCQLLMTAPGVGPLTAVRFAAAIDAVERFPNAHELESYLGLTPGESSSSDRKRRTGLTKAGSTRVRWALIQASWAARRFYKEDPLIQWSQVVEKRRGKNVAVTALARRLAGVLYAMWRDKAPYDQNYRPRTEPTPVMPAAPAST

SEQ ID NO: 172676 - protein, 332 aa, unidentified
MEGETLAEGQLRTTQEDVREFFQALTVARVVIEVGTHSAWVQEVITEWGHEVLVANPRLMEGSKRRKRKSDRIDAYKLARLGRVDPQSLYPIGHRSREVRQDLVVLRARDALVSVRTELINTTRGLVKSLGTRLPKCSSRSFGHKVKDAIPEKVREALLPLVQLADALSACIKSYDQKMEELGSEKYGQTKLLRQVKGVGPITALAYVLTLENPEHFAKSRDVGPYVGLVPKQEDSGESQPQLGISKTGDTMLRKLLVGSAHYILGPFGPDTDLRRYGLRLCERGGKNAKKRAAVAVARKLAVLLHRLWVSGEVYEPLGYRVSGTIVQQAAA

SEQ ID NO: 172677 - protein, 334 aa, unidentified
MIHVGVDLHQRFCYMTALDSRGKQLNAQAVPNETAALQAYFRQFKKPVRAVVEACSFWPAFRQAVGQQVELRLAHSQQVKAIAAAKLKNDRIDSATLAHLLRCDLLPEAWMADETTRELRLQVRTRTTLVRQRTRLKNQVHAILHQHGFKPGVTDLFGKAGRNWLEQAPLSKKARRAVTTYLELIDGFTVHVRQQDQEVKEFVGTDPRAKWLMTIPGIGPYSAMLLLAEIGDIGRFADKGALSNYAGLVPWVRQSADKCRSGGITRVGSPWLRWIMVEAAQVAVRTSVPVRQYFERLRKRKHRNVAIVAVARKLLVAVWAMLQQGECFDEARFG

SEQ ID NO: 172678 - protein, 411 aa, unidentified
MHDQITAFVGMDVHKKTVRVALLPPGRREPVEWQEANESEAIRRLARRLVRESGGDLLACYEAGPTGYALQRQLRAAGVPCQVIAPSLTPRKPGERIKTDRRDARKLAELLRADLLTEVHPPSESEEALRDLCRCREDVREDLTRARHRTSKFLLRRHCLFTGTKRAWGTRHTAWLHTLHFDDPASQATFDCSLVTLDQLGERLRHLDEELAARGSEEPYRQPVAWLRCFRGIDTVTAVSLVAELHDFRRFPTPRSLMAFLGLVPREHSSGETKQRGSITRAGNSHARRLLVEAAWHHRHRPAISLPLRHRREGQPTRVIALADRTHERLHRRFLRLTLRGKPTQKAVVAVARELAGVPLGRPPPRRNPGPTTHARGRNLSKSEAEDGRHDPENVRVRCAIREDPFPNSRG

SEQ ID NO: 172679 - protein, 367 aa, unidentified
MNIYIGVDLHKAQFTCYVKNEFGKARLFKFLTDEKGYNRFLKLLDILKNKEKFKVSIAVESTGNTRYFKQKIENEIGIETKVINTMKFKVINESINKTDKRDAKTIADFLEKDMLPEAKICSVKSEQLKRITKSRSILVSTRIKIKNQIHGILLSIGITTKTGQFNSKIGRKKVIEIVKDISNKKLIQSLVNVLENTEDSIKELEKEMEDMTDDDRVVEILKTIPGTGKISAITVRAHIDDIARFSSSKKLSSYVGLVPWVRQSDKKEYIGHITKRGSKELRTAIVQMVMGMIRSKSEKDNIFMNQYNYLKTKKATGIAIIAVARRLTKLIWTLLTKNEEYNPLVSSSIEIIKKAESMRHQAEMNVA

SEQ ID NO: 172680 - protein, 345 aa, unidentified
MHIASIGIDLGKTTFHLVALGEGSKVVVRKKFSRTQLLAYTANLPCSLIGLEACAGAHFMGAALREQGHEVRLIPAQFVKPYRKSNKNDFIDGEAIAEAVTKQNMRFVQIKTQEQLDVQAMHRVRDRLVQRRTALINEIRGFLLERGIPFPAQPIHLRKNLPTGVEDAEQNLSPRLRWLLDRLWQEWKQTGIDIQTVTDEIERISNEDERCQRLRQIPGFGPLVSTATVAAIGNGAAFRRGRDFAAWVGVVPRQYSTGGKQRLFGMSKRGNIYLRRMLIHGARAVLFRIKYDTAGLGQWVHRLSQRAPRNKVVVAIANKLARIAGAVLSSGRDYRHQPLPQRAAA

SEQ ID NO: 172681 - protein, 360 aa, unidentified
MSVQGTSVGLDVHALSVVAHAVDEVTGEVSRARLCPDYGEIMCWLSQLRAPVRVVYEAGPTGFGLARALNDARVECLVAAPSKLQRPAGDRIKTDARDAAHLARLLRLGEITAVRVPDADIEAVRDLVRAREDARADLMRVRHRLSKLLLRHGIVYFGGTPWTDAHELWLRRQRFADIHLKAAFDHGFDAVLAATAARDRLDEQIAEVATSPRFADPVNRLGCLRGISALTGLALTVEIGDWSRFTGSSIGAYVGLVPSEYSSGNSRVQGSITKAGNTHVRRLLIEAAWHHRKSYSTSGPTLRARWAKVDPALRARGHAGNRRLNKRWRSFTDRGKNPLVANVAIARELAGWCWSLATMQ

SEQ ID NO: 172682 - protein, 345 aa, unidentified
MEQIGMDVHKFESQICGYTSEEQILEQRIRTTRERLVEVFGARPRARILIEASTESEWVARCLEELGHEVIVADPNYAPMYATLSRRVKTDRRDARALMEACRHGTYRPAHRLSEAQQRVRAQLAARDNLVHARVRLVGVMRALLRRQGLRVGAGSVESFGMRVQVVEKPAWLAETLEPLLAVLESIHQQMRGVDRKIYQLMKNDAAVGRLSSAPGVGPVTAAAFVATIDQVARFKSAREVRSYLGLVPSESSSAERQHRGAITKTGNRRMRSLLVEAAWCVLNSTRADAEALRSWGRRLAGRRGRQVAVVGLARRLAGILYAMWRDERPFLAEPRSAPCGGGSR

SEQ ID NO: 172683 - protein, 365 aa, unidentified
MASMPNRAHASERQPDGEVVLGVDTHRDTHVAAVVTPLGGVLATEAFPATSVGYRELLDWARSFGTLTRAGVEGTGSYGAALTRHLLARDVQVFDVNRPDRTAQRQQGKTDAVDAQAAARAVISGRATAQAKTGNGPVQIARMFKLAKDSAIKARTQAINQLKAVLVSADPALREQLTPLTNPALIRTCANLTSDPAYLGRDDVLDATVVTLQLLAERIQQLTAQIDELKRRLAGLVQSHARQLLERVGVGPDSAITLLITAGDNPERLADEASFAALCGASPVERSSGKQQRRRLNRGGDRQANAALYRIVQSRLRWDPRTQDYLKRRTSEGKTRREVIRCLKRYVAREIFSLLPRAGLTPVLA

SEQ ID NO: 172684 - protein, 392 aa, unidentified
MVVSVGIDVSKDKHDCFIVSSEGEVLADAFIIPNTMDGFHYLLQRIRHCTAPQDKIKVGLEATGHYSYNLLGFLLDNGLTTYVLNPLRTNLYRKSLSLRKTKTDRVDARTIASMLLSDAGLKPYTDTAYHNEELKSLTRYRFDKVKERAKLKSSIARLVCILFPELEKLVPSLHIASVYALLEAFPGAKQVANTHLTRLKALLETASNGHYKRDMALKIRNAAKNSIGSQMPAKSLELQHTIRLIRELDREIDEIEEQIQSIMDELHSPITTIPGLGFRMAAMILAEVGDFTRFDSPDKLLAYAGMSPSTYQSGQLKNCYPHMEKRGSRYLRYALYNATKYVCHWDPAFADYLAKKRAEGKHYNIAISHAAKKLVRLIFAMEKSRQPYRSAA

SEQ ID NO: 172685 - protein, 351 aa, unidentified
MIIVGCDFHTRFQQIAMLNPTTGELLERRLEHENGEAEKFYGTLPGPARVGIEATINAQWFERTLRRYHHELWVGDAAEIRAMRVRKQKTDSRDALHILDLLLTDRFPRIWIPSPAERDVRQLVRHRHKLVRIRTSVMNQLHALAIGQGLCRKQKLWSKVGRLELEALVLDRWASRRRHELLQLLDQLNPWIADLDRAVMQEVQSRPEALHLMREPGVGPVTALAFVLTIGPVVRFQRSKQVVSYLGLNPSEESSGGRQRLGSISKQGNSMVRHLLVEAAQAASKFDPELRRDYQRLKFRRGHSGVAKVAIARKLAVRLYWKLREAAQSNTAARMQGSPTNPVADESLSPK

SEQ ID NO: 172686 - protein, 414 aa, unidentified
MLKIVYPICCGMDVHKSFVVASIASTNEQGVTTYKIKRFSTFTGDLRRCATWLAENNCKDVCMESTGKYWIPIYNILEPTCNIVLAHPKYVKSIRGKKTDKRDARWIADIFKHDLVAGSFIPPADIRQLRDLVRYRWKLTSFTTGEKNRAQNCLTVSNFKLDDVFSDVFGKAASAITARILENPTEKITDISGFRTKGMKATNEQVLAAVDGEMCEEQAEKLRIIRSHIDSLELCKLNLESLILSTAEKYLPQLNLVMTVPGIQSFAAIGIISEIGVDMSVFPTSKHLCSWAGLTPQNNESAGKKKTTRISRAGAYIKPLLVQCALCAIRAKRFPEVRNRYLALKKRRGHKKAIIAIARMLLTAIYNMLKKNEPYNPELYRSADRPPAHREVSVEEAVFILQRQGYLVTAPPTA

SEQ ID NO: 172687 - protein, 428 aa, unidentified
MPDRIDRLQQFRNIRSTIRGSDSILIIGVDVAKDKHYAFFGTSNGRTLWKKLIFDNSIQGFNKLLSMTQDLSIQHSLNGRVFGLEPTASYHKPLAEHLVKKGEQVVYVSNVAAKNNRALLDGRWDKNDTKDAANVADLVGQGRCQYYDLAEDSLRELRSLLAYRAKLKKQEHALRMRIRNTLLAQYFPELDKQMPQGGQDGLILDIIAQDFAPARIAAMSFEAFRQQYQMEKRHLIQEQRLRTIWEISQSSVGCALPASAAWEGRMLVEQLRQVRQTKRELEKQLKDVGQSFPAYAYLLSIPGFGPIVSAMTLAAIGDAHRYTSRKQVLRLAGLDLSASRSGKSSSSAIPVISKQGKAGLRYALVQAAQIASYRDDVIRSYFTGLLKGRELERGIKLKMRVKLAAKMLVIAWTLMKRNEYFDSDYFRK

SEQ ID NO: 172688 - protein, 345 aa, unidentified
MTIIGLDAHSATFTMAFLSEQGKLSKCLTRDTSAENLIDLVSGVKGPTTLVVEESHIAQWIKETLTPFVDTLIICDPKENRWIARDEFIDDRKSAIKLAELHLSGNLKEIPHPDERDAILRSLFLHYYDITQQGVRFKNKLKGYFRQIGIKASGKAIYDKKNRGTWLVQLHPYPQLVTKAIHVYPIIDYLEEMRKKLMASMLRRARKNPAYFLLREIPGVGPLIACGYISMIYTPHRFSRINKLWRYANLGNVYHVSDGHVYKNKRSKSGNRVLKWIVFQHFQQAVNHCKQSNRFKRQYQELRARGLSHKVARRHVCRSILSVVRAIWMKEEHYKDTYQVVKNST

SEQ ID NO: 172689 - protein, 416 aa, unidentified
MKQTQNTRGYERYFAIDTHREYHLVGGQNEDQEWVVSPRRVSIEKFAEWAQQNFRAGDIVVLETTTNVWDTYDIVAPLASRVLVANAAAVGEIAGARVKTDKEDIKRLLKLLVGGIVPEVWVPPAHVRELRAFISYRNRLVKMATMIRNRLNSLLHKHSLMLPEEGILNQAWWDAQVSISTLEKMQIRQELGLLDEIKKRQAAVNEELEKQSTGELWGKQALQLMQLPGVGVIVAMTVLSAIGDITRFEDAKHLVGYAGIGAGVHDSGKTHKEKHITKKGRKELRWIMVEAAWRAVRMSPYWKDQYEKHLRRMRKPTQAIVAIARKLLVAIWHVLTKEETDIHASEDDLAYKMLLLSWSLKDNVRMGLTYKQFAKYALMKLGVENDITRFVRREVPRRLAPREEVLMRMTELGIAQ

SEQ ID NO: 172690 - protein, 376 aa, unidentified
MRTISAEIPETEVAVILGVDTHLDSHVGVAVDHLGRRLGEASVPTTAKGYEELLGWAEDFGPVRCAGVEGTSSYGAGLTRHLRARGIEVLEVERPEHRRRGSRRILKKSDPSDAEAAARAVLAGEASGVAKSGEGRVEMIRALRAARRSAIKARTQAANQLQGLRVTAPEELLKHLRGLSTKELVSVAARFRLGDGPTDVPSATKFALRSVARRYEALSREITELEAHLDRLVGQGAPELVCLPGIGTDNAAALLIVAGDNPQRLGSEASFASLCGVAPIEASSGKIVRHRLNRGGNREANRALYMICLSRMRRDQRTQEYVARRTAEGKSKREIIRCLKRYIAREVYGVLVSSGARSLPTGPKDEVRILSGSNAT

SEQ ID NO: 172691 - protein, 393 aa, unidentified
MVSIGIDVSKGKSSICFLKLHGEVLHKPFEVEHTESSLSHLVNLISLIGQDVRVVMEATGIYHLPVLDYLKSNNIFVSVVNPLIMHKYASLSIRRGKTDPLDAIRIANFGLDNWFKLTNYSPNEEIYDELKLLNRHYLNYISMRIKAKLTLTNLLDRTMPGIKTLLLNRSTEPDRDKLCDFVRKYWHFDNITKMSENAFIKSYNIWAKKKGYQTSEDKAHKIYTLASDGIPTLTSSLPSTKMLTLEAIESLHHIDTTIANILLQMKQLASTLKEYDVVMAMPGVGQILGPRIISEIGDATRFHSAKALVAYAGLDAPPFQSGNFTATKRSISKRGSASLRKTGYEIMKCLKTAKPKQDSAVYDFMIKKELEGKPLKVAKITALNKFYISITQE

SEQ ID NO: 172692 - protein, 373 aa, unidentified
MNNTTVYVGMDVHKNSFSLCCYTVRDDACSHYVKIDPDDRLVLEYIESMRGIYGDDSKFICGYEAGCLGYTLYHQLNDHGVECIILAPSTMAKSPVQKKKKTDKRDSEVIARCLAHHSYHKVHVHTSEEEQIKEFIRMRDDHKLALKKIKQQILAFCLRHGFIYNAGASHYPAAHLSWLRSLEPEGLYKEILSEYLLTYDKLTDTLERLDRRIEELADQDAYRESVRKLCCFLGIKTQTALAVIVEVGDFKRFQKAQQFASYIGLVPGEDSSGDGINRLPITKAGNTHVRRLLVEAAQSYGRGSIGFKSKALKARQEGNSPEVIAYADKANERLRRRYYRMTLKCGKKVNVVKTSIARELACFLWGMMTGETA

SEQ ID NO: 172693 - protein, 360 aa, unidentified
MNKDKYVAMDVDSANIVAGVYDHQGKTVMQCCIRNEGKAIQEFLRLLPGTVHVTFEEGTQAAWLYELMRPLVAEVIVCNPRENKLLKAGNKSDRIDVAKLGKLLRLGELQPVYQGPSAAQGLKQLVHSYAALVEDVTRVKNRLKALYRGRGLSCKGELIYGREQRQQWLGQLETKQMQTRAACLYEELDCVLRLRVEAEKIMCRAARNLEAYQWISSTPGLGAIRTAQILATAITPHRFRGKRQFWPYCGLAVVTRSSSDYEWVDGGTRRKRKPIQTRGLNQNYNRTMKAVFKGAALSALQQHPEFQEYYQRLCAKGTRPEMARLTVARKLAAIVLILWKKGELYDSKRLNQAAPGAGQQ

SEQ ID NO: 172694 - protein, 387 aa, unidentified
MYFVGIDISKFKHDCAIVDEFGDVITPSWSFQNDREGFSLLKELLDALDGEKKIGLEATGHYGQNLKLFLENNDFSFMEFNPLLINRFVHSKSLRKTKTDSIDALMIAQYLMTVEYKPYPPSFYTFEKLKSLTRFRDSLIRQRSRQLVELTNILDKVFPEFKPFFKGRFSATALYILSHYASPEKISNMNSKSYEPLRRLSRGRFSMVDFVELKTLVRNTVGSTSDYLLQEMEITIDIYNQLQSKVEEIELQIHDCVLALAPPILTIPGIGAASAAVILSEFGDLSKFNSPSKLLSFAGMEPGYFQSGTSESTGKMVKHGSSHLRYAMMNCAQTVINNEPTFAAYYAKKRAEGKEHRVALTHVAKKLLRVIYTLQTKELSYNPDLVR

SEQ ID NO: 172695 - protein, 356 aa, unidentified
MKQVKTLSFAGQDIYCGIDVHKKDWSVCIRDDERELSSFSQPPQPAVLTDFLGRNYPHANFHAVYEAGFCGYWIQQALSHQGIDCIVTHAADVPTSDKDRRQKTDAVDCRKLAKELSEGSLKGIYIPSRQIIEDRSLVRGREQLVQDQTRYKNRILSWLHFFGIIIPEGYKKNTHFSRRFISWLEQLQLNESTKLALQVKLGGLQCIRQQLLLANRNLRKLALSDRYQKQVELLRSIPGIGITNAMIFLTELDNIARFETFDHLCSYAGLKPDIYSSSDTIIIKGITHRCNSLVRESLVESAWKAVAKDPALLMAYKQYKKRMNYNNAIIRITKKLLSRIRYVLLHQTCYVTGVVG

SEQ ID NO: 172696 - protein, 404 aa, unidentified
MSEIRNKGSFSGFLGIDISKGAFDGCCIDRDGKVLFHVSLPMNRAGFEKLVTHVCAITLPRGSILIGMESTACYHVSLFSFLMALGYSVSVINPLLISNFVKLQLRKTKTDKKDATVIARFLSSHGDSLPQMMAESHIADLRELSRQRESLLHQMTALKCDIKRVLSMTFPELERTMGIFTRTTLRLLGRFPSARALAQATREEVAPLLHHSSRGRSTPVSVDTLLQVARSSVGTANPSREMILRQKASILAHLEEHLQEMTNTLIELCQSALERDVEILTSIRGIGEKTAASFLIEMGGEIQNFETHNKLIAMAGLDPSVYQSGKYEGYSRITKRGNRHLRRVIWLMTIRVIQFNDLFKSYYRKRIEDGLPFKKAVLATAHKLIRIIFVLLTRRTMFCHQVTS

SEQ ID NO: 172697 - protein, 420 aa, unidentified
MDVVVERCAGLDVHKDLVVACVRYPGQDGERKTEIASFSAFTADLLGLRDWLVSHGVTRVAMEATGVYWKPIFYVLEDAMECWLLNARHMRNVPGRKTDVGDAEWICQLTEHGLVRASFVPPPEIRDIRELTRYRRTLAEERTREAQRLDKVLQDAGVKLSSVASDVLGVSSRAMLAGLVAGTRDPEVLAELAKGKLRAKLPKLRAALEGRFGTRHGILVSEILSHLDYLDEAMGRMTSAIEESIAPFAEARDRLCSIPGVDRRIAEAIIGEIGVDMGRFPTAAHLASWAGMCPGQHESAGKQKKGTARHGDSWLQRYLAVAAMAAASSKGTYLQAQYRRLSPRRGKLRARKAVGHSILVACWHILANEDVTYLDLGPDWFDRRNAPVIRARRKLSELRALGCQLHTNDDGSTTVVLPAA

SEQ ID NO: 172698 - protein, 338 aa, unidentified
MATYAGIDLHSSNNYIGVINSKDKRLYGKRHDNNIKQVVRALSPFRRTLKGVVVESTYNWYWLVDGLQEAGFKVHLANPAAIQPYTGLKYTDDKWDSYWLAHLLRLKLLKDGYIYPKQERPVRDLLRRRLMFVRQRTTQILSLQSMITRQRGLNYPGSSIKAFRDDFVERLFDDPHLLLLAKNEMATIRHLGNVIKEIESAVTSQIALKNEYQLLLTTPGIGQVLGLTIMLEVGDIRRFKKAGNYSSYCRCVESRRMSNGKKKGVNNKKNGNRHLAWAYVEAAYHAARNNQRAQRFFQRKMSKNNRTLATKALANKLTKATYYIMRDQVAFDSEKLFR

SEQ ID NO: 172699 - protein, 372 aa, unidentified
MNYNTVYVGMDVHKESFTLCAYTIDAEKGSHFQRTEADYKNVLKYLEFLRTVYGNDANFICGYEAGCFGYTLYHQLTEHDVNCVILAPTTMLEQRSKRRIKTDRRDAEIIGKCLAQHNYSPVHIPTATDEETKEFLRMRDDHKLALKKVKQQILAFCLRHNYRYDGNSHWTAAHIKWLKSLNPEALYKEILDEYLLTYTTLSDKVERLDKRIEELASKDEYRESVKKLCCFIGIKTHTALSVLVEVGDFQRFASAQNFASYLGLVPGEDSSGDGQTMLGITKAGNRYVRMLLTEASQCYARGQIGFKSKELKSRQAGNSPQVIAYADKANERLRRRYYKMVLGKSKKHNVAKTAIARELACFMWGMMTEHIV

SEQ ID NO: 172700 - protein, 345 aa, unidentified
MTIVEARAITGGVDTHADVHVAAALDPIGGLLGVQEFPATAGGYARLLGWLGGFGTVALVGIEGTGSYGAGLARHMATAGVRVVEVDRSDRQDRRRQGKSDPLDAVSAARAAQSGRARGAPKGRDGAVEAIRALMVARRSAAGERTRTINQARALILTGPDDLRARFARHTAAALIAGLASLRPRPGDVAGHATRVAVRELGRRAVFLDGQLERLDELIIPLVSARAPGLLALYGIGPHTAALLLIAAGDHPGRLRSEAAWAHLCGAAPISASSGKVTRYRLNSGGDRQANHALWRIAFTRMGSDPATRAYAERRTAEGKSKAEIIRCLKRYVAREVYPYLRPAG

SEQ ID NO: 172701 - protein, 339 aa, unidentified
MKKIARIGLDLAKNVFQVHAVDNNDQIVHSKAIKRGKLLEYFSQREPCLVGMEACSGAHHWARELIKCGHDVRLIAAQFVTPYRKSGKNDANDAEAICEALSRPGMRFVPVKTVEQQAILSVHRSRSLLIGERTALVNHLRGLLAEFGLVIPRGIASARREIPFLLEDAENGLPELAREIFADGYRRLCQIDQRISEYDVRIKQIANNSEPAQRMMKIEGIGPLTATAITASIGDGSVFNNGRQFSAWLGLTPRQNSSGGKTRLGKITKRGDVYLRTLLIHGARSALLKTSSKQDKKSRWTEALKARRNQNVAAVALAAKNARIIWSMLVNNTDYRLSI

SEQ ID NO: 172702 - protein, 368 aa, unidentified
MKNITTYVGVDAHKKDLFIAMLIGDQTTPVTWTVPNEPNAVRRLVRKLEREAPGPVRVCYEAGPCGYALQRQMTTARVSCQVIAPALIPRKPGERIKTNRRDARKLAELLRAGLLTEVRPPTLEEEAVRDLCRARDDAREDLQRCRHRLGKLLLRRGLHYSGRNWTQGHRRWIESVTWEQPAERVVVDDYRLAIEQLEARLRDLDAQLADIAQTEPYRERVGWLRCFRGIDTLTAILMLAELHDFRRFQSPRALMAYVGLVPGEDSSGEKQRRGRITRTGNALVRRVLVETAWHYQHRPGVGVALTRRRKGQPARVIAIADKAQQRLCRRFRRLMEQHKPAPKVAVAIARELAGFLWAALQPAPVAAR

SEQ ID NO: 172703 - protein, 319 aa, unidentified
MSKSLGQVESFVGVDISERWLDVQLLPQDERARFSRDRRGIARLVAWLASKGRLLVVVEATGGLERGLRAALAQAVIALALVNPRQVRDFARAAGLLAKTDRLDAYALALYGERLRPGPRAPRSAADDALAALVLRRRQLAQLLEAERNRARRAEEPTVLASIEAHLGWLRQAVDELERAIEQRLEANPLWRERAVLLASVPGVGEVTVATLLGLLPELGQLDRRAIAALVGVAPFARDSGLLKGRRTIWGGRAQVRAVLYMAALVAVRHNPWLRAFYQRLVAAGKAKKLALVAAMRKLVVILNAMLRDATPWRAPQSA

SEQ ID NO: 172704 - protein, 484 aa, unidentified
MAKRKKSTFERLRSDQLNRKQRRDLGRRLVSDDPGLSIIHPDAGGIDVGNESHFVAVPPDRDAHPVQEFGCWTADLKRMAEWLRACRIDTVAMQATGVYWIALYDILAQHGIRVVVVNAQCTKNVPGRKSDVQESQWLMKLHTYGLLRDSFRLAENMESVRTIWRLRDRHVQEAGRAVQHMQKALTKMNIQLANVISDISGVSGQAIIAAILQGERDPYQLADLKHELVQASREEVARSLEGNWREDVLFELQQAVDSYQFAHRQMRECDRKLDRYLASLPTRVMAVPGQAARPQAAAPKKAKKTKKPKGNAPALDLQEELKRICGVDLTSIDGIHVMTAQTILSEIGTDMSAFQTENHFASWLGLTPSKDISGGKVIGPGRRKVQNRVAMALRMAATTLLRSASYLGGRYRHLRKQLPSKAAAVKAMARHLAVLVYRMLTKGEAWVDRGATKFEQKRTELELAYLKSKALAKGFQLTPITAVS

SEQ ID NO: 172705 - protein, 356 aa, unidentified
MSRDIKYIGMDVHQEAIVIAVLNGSGKLVMETIVETKASSILQFIHGLRGELHVTWEEGTWASWLYDLLQPQVEQVLVCNPRRNALLKEGSKSDKVDARKLAELLRTGMLRPVYHGENGLRTLRELARSYQTISKDLTRVMNRLKALYRGWGIACAGTQVYAPRYREEWLSKIAQAGVRRRAELLYQQLDGLQALRRNLRPEFLAESRKHKAAKLLRQIPCIGPIRAARLIALMQTPHRFRSKRQLWTYSGLGIETHDSAQYRYVGGQLQRSKKPQQLRGLNQNHNHEMKEIFKSTATRASCGRGPFHDFYAALLTKGMKPEMARLTLARKIAAITLTLRKKGGRFDAEQLKAQAA

SEQ ID NO: 172706 - protein, 323 aa, unidentified
MNKDIKFYGIDISYLVFDVTDHAGDHYQFKNTLTGFKKFAKLLDQDSHCVMEATGYYHYQLAYYLLEEGIKVSVENPLSVKRFIQMRLSKIKTDKSDSKLICEYAKQVELKLWRGNSKHQLECLQMTRLLAVYTKQSTALKNKLHGEAVLVNPSKMVVSSLKRSLRQVKKEMDMLEDKLQILVKEVHSEVLSRLKTIPGIGKKTALMLVVLTDGFDRFTSAAELCSYAGLTPVIRKSGSSVKGRSRISKIGNQKLRNLLFMCSFNACKYNKACREIYERIVAKGKSKKLALIAVCNKLLKQAFAIAKSGLIYDDSYRSTLVIK

SEQ ID NO: 172707 - protein, 432 aa, unidentified
MCRFDGGEAVVLEEDPQAEEIITRVAALDIGKAEVVCCVRVPHEGKPGRRLQEVATYSTMTRSLLGMADHLRCLGVTRVVLEATSDYWKPVFYLLEAQGLDPWLVNARDVKHLPGRPKTDKLDAVWLCKVAERQMIRPSFVPPPQIRRLRDVTRYRIDLVGVRTAEKQRVEKLLEDAQIKLSVVASDIFGVSGREMLAALIGGQTNPKALAQLARGRLRAKLGVLEEAFTGHFTDHHALLLAKMLARVDALDADIAELDAAIEEIIAPFAPVVEKLDEIPGVGTTAARVIIAEVGMDMSRFPTAAHLASWARFAPGVKESAGKKKGKGTTGHGNRYLARILGEAAVSAGKTDTFLGERYRRIARRRGKKRAIVAVGRSIVVIVWHLLSDPEARFIDLGPDFYDNRTSPERKKRNHIRQLEALGYKVTLEPAA

SEQ ID NO: 172708 - protein, 385 aa, unidentified
MLLDHLSDGPTAIRTQFGAIFVSLELSRSTWLVTSLSPGQGEKMSRHSVEADDVAELMKLFADLRRKAEVRTGLSYPIITIQEAGLDGFWLHRVLQREGIESHVVDPASIATPRRRRRAKTDRLDGETLLRTLLAYKRGEPRVCAMVVAPSVEEEDRRRPCRERRTLIAERIEHVNRIKGLLFAQGISDYAPLRRDRRARLKALRTGDGRELPSHLKAQISRELDRLELLLTQIEAVEAEQDALLAEGKQPATPDPASMLLALKGMGANFAAVLWSEAFYRQFANRRQVAAYAGLAATPWRSGRIEREQGVSKAGNPRLRTTMIQLAWLWVRHQPQSALAIWFKAHSQRGRKRTIVALARKLLVALWKHVTQGVVIEGAVMKSAA

SEQ ID NO: 172709 - protein, 348 aa, unidentified
MHATTVAIDLAKDVFELAYADDDHRIVARKRLSRRAFARALDNQGPLRVVMEACGSAHYWARRFVSQGHTLRLLPARDVRPYVRRNKTDRTDAAGLLEADRCPQIDAVPIKSPEQQGVEALHRIREQWKAQRTATINLMRGVLREFGVVIPLGAAKVRPAVFAALDDGENELPMALRHTLGEMLDRLAELTGAMNAIEQQLQACAHADPVCQRYQQAPGIGVLTATALRASAGPLERFRSGRHFAAWMGLAPREYSSGNQRRLGRIQQTRRWLSAHAADSRSARDAARSACSRAAPAITQPVANLGADAAATCRSQGCCRAGQQTRAAAVGDGTSPRRLRRQSRQRAA

SEQ ID NO: 172710 - protein, 371 aa, unidentified
MSSKKIVYVGLDVDDTAFHGAGLDFQTGECFEFKCKPDHGVLRKKLKELFSDRYTIRLCYEACYLGYSLCRFLRKSGIHCDIIAPSLIPVKTGSRVKTDRLDAAKLAEYYAKDLLTRIYVPDETDEEVRDILRSRGFLVKQRKMLKTHILSVCRRYDINFLEETGNKSKWTDRHISWLKQRVTTLQRPLCQVDIELLLVQYTSLSESIEKLDATMLRASEGERYKKASEALSTFRGIDTLSAMTVITELGDVRRFAHPRQLTSYVGLDVAEYSSGAKVHKKGITKTGNKHIRTILTECCQTASNPPIINKRIKQSRENQSTEIIDIADRCMNRLHKKSVRMLYAGKHKNKIKTACAREMLGFIWEMLRCVA

SEQ ID NO: 172711 - protein, 343 aa, unidentified
MQAITTIGLDIAKSVFQVHGVDAEGNVVLRRQLKRRYVLAFFQKLSSCLVCIEACASSHHWSRELQALGHTVRLMPPAYVKPYVKRHKNDATDAEAICEAVTRANMRFVATKTPEQQSCLTLHRTRHLFIRQQTSVINAIRAHLAEFGIVAPVGRHGVDQLLGVAADSNDKRLPEVARVCVAALGAQLRMLKAQILEFDRMIRAWHRSSETSRRLDDIPGVGPVLATALVASVADPMAFRSGRDFSAWIGLVPKQNSSGGKDRLGNISKRGDRYLRSLFTTGALAVIRYAKIHGIKHRPWLTALLTRRPTKVAAIALANKIARMAWAMMAKGERYKEPAALAA

SEQ ID NO: 172712 - protein, 334 aa, unidentified
MKIIGCDFHPGYQQIAMVDTETGEFTQMRLSHSNNGEEARKFYAGLAGPVRVGLEASGQSQWFERLLAELGQELWIGDAGKIRASSDRKQKTDRRDAELILQLLLEERFPRIWVPTPAERDVRQLLLHRAKLVRVRTQVKNQLQALALNQGVQRKRKLWSAVGRQQLENLPLLPWASRRRTELLKLLDELDGSIVALDGAVCEEAHRRPAVRRLMTHPGVGPVTALAFVLTLGPAERFRRGKQVGSYFGLIPSEHSSGGKQRLGHISKQGSSFVRGLLVEAAQSAVRFEPQLRREYQVSGAVVLDAARRPGLCAADPGFPCRAARVILWSWLRP

SEQ ID NO: 172713 - protein, 365 aa, unidentified
MTKDNKISFKGKSIYLGIDNHKNSVTVYFICENINHGCHTFKPSGKEIGRYLRRNFPDGNYYSAYEAGYCGYKLHEELQSEGIKNIVINPSDVPTNDKEKKRKNDAMDSYKIARGLKNGDLRAICIPSRMRQEDRSLVRLRSQLVKDQTRCKNRIKSTLSFLGLEIPDDILESHWSKRYIEYLKSMAEAKRTTDSETLLILIDDLLQKRASILRVTRKIRALSSTEPYAEMVDKLRSIPGISILTAMTILTEIIEIRKYGPEELSRYLKLDHLVSYVGLVPNEHSSGEKESRGPITKRGNNYLKKVIIEASWIASRKDPALLLALQNYSERKIIKTKAIIKIARKLLNRIRFILLNEFYYETMVN

SEQ ID NO: 172714 - protein, 314 aa, unidentified
MMYNVGIDVSKDSLDIAWLPAIRPAITLPNDPQGHQTLVDMLVRQQPQRIILEATGGYERMIMAALMEARLPVVLINPRQVRDFARAAGQLAKTDRIDAAILARYAQAMQPEVRSLPDEKTLELQDLMTRYRQLVTMKATENTRLKKTTIPRVRQSIEELIEAIQRQIDDLDGDLDDLIRSVPVWEQKAQQLQSVKGIGWTSARMLVARLPELGKLNRQQIAKLVGLAPINRDSGQLRGKRGIGGGRADVRSQLYMPMLNAIKHNPRIRQFYKHLLSQGKPPKVALVAAMRKMLTILNAMVRDNTTWKNTLAAA

SEQ ID NO: 172715 - protein, 347 aa, unidentified
MRFYNQQHNYYCGIDLHARILYVCILDATGNKILHKKIGADPDALLEILAPFQDEIVVGVECMHCWYWVSDLCLDYAFDFVLGHALYMKAIHGGKTKNDRIDSFKIASLIRGGNFPLAYVYPKAMRATRDLLRRRTKLVRHGAHLKAHVSNTFTQYNVPSPNLALRYPSSREDVRNRFNEPAINRNIDIDLNMIGFYTKELTQVECFIEKNAKQHSPKDYLLLQTVPGIGRILALTILYEIGNIQRFPSVQHFASYSRLVKCKAESAGKQYGTSGNKIGNAHLKWAFSEAAVLYLRGNEKAQKYLARLQKRMSKAKALSALAHKLGRCVYFMLRNNTVFDEHRFLPQ

SEQ ID NO: 172716 - protein, 362 aa, unidentified
MEVKKKMAVYVGIDVHKKYCQAALMNDHGHLLQELRFDNTSQGASSLVDLAKSVDSHVKAVVEPSANFWIRVYDKLEEEDVEVKLSNPLRTKAIAEARIKTDKIDAKTLAYLLRGDLVAESYVPSRKNRERRALIRHRASLMQMRVEVKNRIHALLDKHELSHEYTDLFGKQGLEWLRSLQLATPDHEILQSSLQVVETLNEQIRSMDIQIAKDATTEDKAKLLMTMPGVDYYAAMVLLSEIGDVKRFSSDEKLVSWVGLAPQVHQSGDSHWTGHISRKGSKRARWILGQCAQSARQHDPRMREFYERIERKHGSSKAIVAVARKMLAIMYVMLIRNEPYRGENRELTKQKHKRLDTLANTT

SEQ ID NO: 172717 - protein, 438 aa, unidentified
MRKKKNKANKRIHLQSLPLINPNAAGIDVGAKQHLVAVPPDRDPQPVRTFQAFTPDLHELARWLKRCGIETVALESTGIYWISLYEVLEQYGFEVRVVNARHVKNVPGRTKTDVLDCQWIQKLHSFGLLNGSFRPDHQIRKLRTYMRLRDNLVVERTQAIHHMQKALFEMNVQLSNVISDIVGETGLRIIEAILAGERDPEQLAAFCSTRIKSSRQTVAKSLHGNWDEALLFCLKTALETYRFNENKIQECDHCIERQLATFDSRAQLSQQGESLRSQLHRVCGVDLTKIPGIKEQAAQIIISEVGLDMGPWKTEKQFSSFLGLCPNNLITGGKVLRRATRKVYNRAADTLRLCAQSLTHSKSALGAKYRRLRARLGAPKAIVAMAHHLARLVYRMLRYGQNYVEKGIEHYEEKFRLQRIKWLKKEAQSLNLQLVATQ

SEQ ID NO: 172718 - protein, 336 aa, unidentified
MDLAKHVFQAHGVDECGVVAVRKRLRRGEVMEFFGGLAPCVVGIEACGSAHYWAREIAALGHRVKLMPPAYVKPYVKRGKNDAADAEAICEAVMRPTMRFVPVKSAQQQASGMVYKVRELLVRQRTQTVNALRSHLAEMGIVAAQGGGKLVGLIAVVREAGDARLPEAARLALEDLAGQIEALDARLARLDDEIVAQVRASEAGRRLTGIPGVGPITAGALLAMVPDPAGFRSARHFATWLGLAPRQNSSGGKQRLGRISKQGNRYLRTLLILGAANVLRFMRKNMAISAWLAALRERRPFKVAAVALAHKMARIVWALMVKGGVYRATVPAAATS

SEQ ID NO: 172719 - protein, 345 aa, unidentified
MNKISVIGLDLAKNVFQVHGIDLHGEVIVRKQLKRSQLRQFFAKLEPCLIGMEACGGAHYWSRELSGLGHTVRMMAPVFVKPYLKTNKNDRNDAEAICEAVQRPSMRFVQPKTPEQQAVLHLHHGRRLLVRQRIALSNHMRGVLSEYGIVMPQGAKAISQRLPALLEDADNDLPMLVRHLLAELKEEYDQLIERIERIEAWIKAWHANNSVSQRLASIPGIGVLTATALAATVGEGQDFSNGRQLAAYLGLVPRQASSVGKARLLGISKRGDGYLRGLLIHGARSVIYHIQRRLKTSQPGGNPWVEQLLLRCHPNEVAVALANKMARIAWVLLSKNETWCPARPV

SEQ ID NO: 172720 - protein, 323 aa, unidentified
MTGVICGVDVSCSTLEVRIGRQGATGSFPNTAAGIAALASFCRAHEVELVAMEATGGYEKQPFTVLAEQGLPVTILNPRAVRRFAEGMGLLEKTDTIDAGLIAWFAEVKKSQPRPVPSAGQQQLRALVTRLRQLTQIRTAQRNQRRLVSDPVVEASFDQLLAVVNGQIKQLETAIAALISQDPLWRELDPVFRSIKGVADRTIARIVADMPEIGTLSNKAISKLAGVAPMARDSGKHQGKRITRGGRAAVREILFIVASVAGRYEPDFVAFQQRLNAAGKPPKVIRIALAHKLLVRLNAKARQVRKQMEAARSPSPVLAFATN

SEQ ID NO: 172721 - protein, 373 aa, unidentified
MPKYSTAFGMDVHLRSTTVCALDADTGEAVTRRFPGNPWGEIAGWMDGFPGPSLAAYESGYLGFAPQRELAGLGVECVVAAVSKIPRSAADSASKNDRNDAARMAKAILAHDISPVWVPSPEVEGIRDLAGAYDGATARLATAKQRLLAFLARRGFVYGGTTPAGNPRKYWTYDFLRWLDKVRPEDDGGVRALAALRNEVEAAAEARADLLSEYRAAVDASPIAAEVAALQSIKGCAFALAAAFSAEVGDFTRFRSGRQVTAYFGLAPSQRSSGDSVRLGGISGAGNALVRKLAVEGSWCYAAARHQPKLMPRDTGVPLEIRMHGRKGSERLLRRREEMLARGVPAAKANAATAAELVRWLWALGMMCREGAE

SEQ ID NO: 172722 - protein, 368 aa, unidentified
MTKLYIGLDTHKENIVIGLAFEGKAEPEVYGKVPADLNRFITALRKLLKKYDLKKEDVSICYEAGPTGFVLVRRLLKLNFECHVIAPTSIPKSADNRIKTDRRDAKNMARLLRSGDLKFVHIPSPLDEVVRDVSRARTDIVNARKQAKQQLGGFLLRNGYHYTGKSRWSEAHMRYLRELVLPNPAQNIVLEESLQRIDILVAQEQRITDQMRKLTEDWYRKPLLSALMGFRGFQLVAATSVLSELGDLRRFGHPRQLMSYIGVVPSENSTGSRRQQGSITKCGNSHVRWILIEIINSYRLPPKVGRDLSKRQENLSREIKAISWRAQNRLCKKYYHLKKRGLHENKIKVAVARELLGFIWELGQVVEV

SEQ ID NO: 172723 - protein, 425 aa, unidentified
MTYRIAGIDVHKKVLAVVVAEIASEDDKPLERRTFAATPDPLRAMAQWFIEQEVQEVVMESTAQYWKPVWEALERHWKPVCEKQPGANPMSGSLHLAQAQSNRARGGRKNDFGDAERLIRRYVAQELVLSFVPSPEQRLWRTVTRRKQQCVRERVRLHNQLEAFLEEAHIKLSSLVSDLLGQSGRRMLEALSAGETDPANIARLADRGLRATPAQLCDALSAASELNPVYRTLLKLSLEELKLIEKQIRELDQEISGLLVQHQEAVQRLAEAPGLGPDSAQQIIAEIGPAAAAFPSAKDLASWVGVCPGDNISAGVSHSSRSPKGNRNMRRVLNQAAHAAVKVKGSIFEVVFQRLRRGLSYKEAIWAIAHRLCRLTWILLHRGVHYEERGPAVSAASKRVRASRMMRELRRMGYRVDPPTEFQHA

SEQ ID NO: 172724 - protein, 416 aa, unidentified
MNAAGIDVSSRKSTVAVLRPFGEVVKLPFDVRHSAEDLAALAAQLKSIDGETRVVMEHTGRYYESIAKVLHEAGLYVSAVNPLLIKEYGNNSLRKVKTDKADAMKIAKYALDNWTELRDYTPMDTIRYELKTLNRQFQLASKQKTATANNLIALQEQSFPGIRKLFDSPVRSDGTQKWVDFTHDFWHVDCVRSGSQNAFAERYRKWCKRNRYQFSMEKATEVYALAKSAVVLVQKTSVTKTLVQEAANQLTAISRSVETYRSEMNKLASQLPEYPVVMEMYGVGESLGPQLMAEIGDVRRFERKQSLVAFAGIDPAPSESGDYCSRSNKTTKRGSPYLRKTLFNIMTVHLQLAPADEPVFQFLGKKRAEGKPYYVYMTAAGNKFLRRYYGKVMAYFSTLEGLPPVDMDSTGLHHAE

SEQ ID NO: 172725 - protein, 443 aa, unidentified
MSPENQTHIRGERGQAFADQIRGLNQEQILCVSLDISKYFHVVMIHNALGEIVTPTFEIDIFKTGFEQLCQAIDAALIRTQARLVLLGMEPTGHYFENLARHLQQRPQPVTMINSYAVSLNRQQQLMRREKTDPIDVAAIGDLLRRGEGSPFRPLQGLYLELQHLDRVRLSKVKIQTMLKNQIIGHLDRIFPGLVLIGPEARARYTPLFVTDFWECQTLQHLIRVCPDPHRLAAMTPAELVTAFHAHHFKMGPKTATKIITYAQKVLLPDPELVAIRSELLHHDLILLDAVQQRLAAMEDRLVDLVAQTPYRIWTTLKGLSDLQVARLAAAIGDPAHYARAKQVFRRSGLVSGRNDSGVHQHQGKGCPVLKTGDVHLRRALMDAISTFILHQPVLFKYYAKLKLSKPDLVARVATARRTTGILWATLRDQHSITLVCKQGARM

SEQ ID NO: 172726 - protein, 427 aa, unidentified
MPYRIAGIDVHKKMLAVVIADVAVEGEYQFVRRLVGTSPSELRGLADWFVAQEVEEAVMESTAQYWRPVWDALERSWQPRRRQRAGAGPVSGTLHLAQAQSNQGPRGRKKDFPDAERLVKRLVAQELTLSFVPDAEQRLWRTVMRRKYQVTRNRVQVQNRLECLLEEAHLKVSSLVSDLLGLSARRMLQAIADGETDAAKVTALADYRLRATPAQLGDALGACVDLHPVYRRLIKMALEDVRVIDEQIDALDREMAGLLRPHQEAVQRLAAVPGLGVDSGQQIIAEVGPTAATFPSPKHLASWVGACPGDDESAGVSYSHRSPKGNRQMRRLLNQAANAAVKTKGSIFELVYRRLVPRLGHAQAIGAIAHRLCRLIWKILHQGVSYEERGPAVTRHRAQRRAAKMIRELRSLGYHVERGPSPSSSPA

SEQ ID NO: 172727 - protein, 344 aa, unidentified
MSAITVIGVDLAKNTFQLHGVDANGKVGLRRKLRRDQVANFFANLPECLVGLEACGTSAYWARVIESCGHTVRRIHPRFVKPYLVADKNDANDAAAICEAVQRPHMRFVPRKSQAQADIQSLHRVRQGFIHARTATINQVRGLLAENGIVFRQGANAVRNLLPVVIDDPNNEISGVMRQLIRSLYDTIVFLDVKIAEQDVALKAIVKTNEICQRLMRVPGVGIITATILLAEAGAINDFKNGRQFAAYLGLVPRQHSTGGKQRMLGISKRGDSYVRTLLIHGARSVLRSVAMGGSPFGNERWTGWLNELSERRGMNKASVALANKTARVVWSMMARGTEYGAAA

SEQ ID NO: 172728 - protein, 384 aa, unidentified
MPRPMKELAEVEHNVATLFASLELSQTSWLVTSLSPGSVTMSKHSISAGDGAALLGLLARLRTKAVSAAGVPVEIVVIQEAGLDGFWVHRLLEANRIESHVVDAASISVPRRRRRAKTDAIDGETLLRTLRAWKRGEPRVCAMVAPPSPEQEDQRRISRERAILLRERVRHVNRIKGLLASQGITDFEPLHKDRRVRLDALRTGDGRPLPPRLKAELLREIELIELLLLQIAEVETERDSAAEFDTAQNPSPIALLIRLRGIGSQIASVLYFEGLYRHFGNRREVAAYAGLAPTPWRSGTIDREQGISKAGNPRLRHIMVELAWLWVRHQPDSALARGFRARVGTETGRVRRIAIVALARKLLIALWRYVNLGEVPEGAVLKPA

SEQ ID NO: 172729 - protein, 354 aa, unidentified
MIIIGADYHPAFQQIAFVDTETGELQERRLEQAEGAEKFYRELAAQGKRVRVGMEASGHARWFERLLAELNIELWIGDAAEIRRKRERKQKTDRQDAQHILRLLLKDDFPRIWVPSWENRDLRQLLWHRHRMVQARTRMMNQLQAVALNEGLRCKKKLWREAGRKQLEAFRLAPWASRRRPDLLELLDRLNPTIAALSQAMEQEVEKCPEAQRLMTHPGVGPLTALAFVLIIERADRFQCGKQIASYLGLVPLEDSSGNRRRLGHITKQGNSLLRFLLVEAGQVTVRSLPEWRSKYVHLTMRRGRKIAKVAMARKLAVRLYWMMRQGWDYEQLKKFGSHSGQPGHRHGVKSNIE

SEQ ID NO: 172730 - protein, 341 aa, unidentified
MSVMIGIDPHKGSHAAVAVDTGEEALAEFEVQATRRQSGELLAWAERFPARRWAIESANGHGYLLAQQLIAAGEHVVDVPSTLSARVRVLDSTRSQKNDPNDARSVAIVALRQPGLRVVTAEDHVAVLRMLVKRHKQLSSLKTQSACRLHAVLATLIPGGLGKEMVVRQASQLLGRIRPATMVETERKNIARQLLGEVRRLETELKASKAQLQIAVEAAGTTLTDIYGVGPVVAGLLIGYTGDVSRFPTRHHYAAYNGTAPIEASSGQKKRHRLNPRGNRMLNHALHLIAITQLRYPNTEGRVFYERKLGEGKTKKEAIRALKRRLSDVVYRHLQTDQQPR

SEQ ID NO: 172731 - protein, 347 aa, unidentified
MNFYTLPHKHYCGVDLHSRTMYLCIVGRDGAVLLHRNLPCNRDRFLLAIAPYREDLVVAVECVYSWYWLADLCAKEGIPFVLGHALYMRLIHGAKAKSDRVDSEKTAVLLRGGLMPRAYAYPADMRATRDLMRRRLLFVRQRGSLLAHIQITHHQYNVDPPGKRITYRSNREGLGEGFEDSSVRHSIAADLALADHYAVTVGELELAVLRQARIHDPNALALLTSVPGIGKVLALTILYEIHDISRFPSVRDFASYSRLVKCERRSAGKSLGTAGNKIGNAYLKWAFSEAAVLFIAKSEQGRTVLKRLERKYGKPKALSVLAHKLGRAVYYMLARKQAFDPQRFATS

SEQ ID NO: 172732 - protein, 352 aa, unidentified
MAHTAPPRVTVGVDTHKDLHVAAARDQLGRRLATTTIGATSAGYAELLGWALGLGEVTAWGVEGTGSYGAGLARFLAAHGQRVLEVNRPDRAARRRHGKSDPVDADAAARAVQAGEATGVPKAAEGTVEMVRALRAARQTAVKARTQAINALKGLLVTAPTELREQLDGLSTPKLVGAAVVLEPGTLVTPTAATMLALRSLAGRYQHLDAEIKALTGKLDQLTAKTAPALRALHGVGPDSAAALLIAAGDNPGRLRSEAAFAALCGSSPVEASSGKTRRHRLNRGGDRQANAALYRVVLVRLRWHQPTRDYVARRTTEGKTSKEIIRCLKRYVAREVFAALRQIDQHPATAA

SEQ ID NO: 172733 - protein, 327 aa, unidentified
MLGIDVSKETLTVALLAESRRLCWEMTVPNTAQGIRRLLHRTPPTDSWVVEPTGVYSRRIVQEGQAAGRAVLLAQPKRAKAFLASVQPRAKTDRVDSRGLALYGLSAGLRPFPVKSEAMERIEQLLAARKGISESLARLRQQRTVLPHAAAPLAAAITALEEQQRTVDRQLSQARTVLPVVTTLQEIPGIGPVTAMAVAACLATKQFDHPDQFVAYIGLDTRVRESGQRASRRALTTQGDAELRRLLYLCAQANLRSRDPANPFKQQYEREKAKGLTTTGALCAVARKLARTCWSLERHGTRYEEARVNHQPTIRMTPRKVEESKTP

SEQ ID NO: 172734 - protein, 349 aa, unidentified
MTMVGGFDVHRKQITFDYVDDDGVVHSGEIRPATRKTLRGWLGKHCPSGDAEFALEGCTGWRYVVEELAMAGMVAHLGDPAEIAGLRGPKKRAKTDRADARLLRTLLVEGRFPESWIPPAHVVEVRTLGRLYCALMEQRRAWQQRIHAQLFHQGAPPVAALLSVAGRDALAGAELSGVGRQYVDTALRRIDELGAEIEPLRAQLVNFARHQQGCQALQARHYGIGWLCAVIIWAEIGDARRFSSSDQLVRFAGMDVTVYSSDTKRSPGHLSRQGSPELRWATFEAAKSAARRGSPDYGYYHQLAAKHDGHNGKNPTLAVERKILRRCYHTLRELGDAALSPPQPVQEAA

SEQ ID NO: 172735 - protein, 436 aa, unidentified
MEEVTDEPLYRDRVCGIDIGKAGLVATIRVPAEKDPARRAAETRSFGTTKREVLALADWLRCWQVPAVVMEATGDYWKGPLYRLEAEGFECVLADAKQVRHLPGRPKRDPADSRWLAACFERGAVTPCFVATEEFRVIRLHTRYRRDLTEERTREKQRAEKLLESAAIKVSSVLTDLHGVTGRDIMNHLIAGDRDPKVLAQLARTAARRKISQLEEALEGAEFFTPAHAALLTVMLARIDRLNADIDQLTEVIERLLAPHEEQLQQAESMPGWGRRAAQDSLAETGPDMTRFPTGAHLASWAGRTPLDHQSGKRQGRSKAKKGNRYLGAVTGETAVAAGRTQTREGARYRRLARRRGKPKAQVAVGNTQLKVYHKLLSNPGMRYADLGPDYYERQRGIRRQIAHHVGKLGDLGFEVTLVRLPSPDPEPGGTHNPAA

SEQ ID NO: 172736 - protein, 344 aa, unidentified
MKELTIGMDLGDRRHAVCVLNKAGEAIEERTVLNDRESIGEWICRYKGATVAMETGTHSPWISRFLEELGMKVYVANARKLRAISTSNTKSDKADARMLARLCRADVELLSPIRHRSEQCQRDLVRVKVRDALVRTRVNQMNSVRFLMKSLGVKIPSGCKASAFVKRVREELSEEYLELVEPLLVMLDAIEAKIREVDKQLEELAAKQYPETERLKQVPGVGPLTALTFILTLESPDRFPKARDVGPFLGLSPKRDQSGETDKQLRITKAGNGHMRRLLTNCSHYIIGPFGPPCDLREAGLRICERGGSIAKKKAVIAVARKLSVTLLALWRSGEDYCPVKEAA

SEQ ID NO: 172737 - protein, 374 aa, unidentified
MGDHSEAFVAFDTAKSRNCVAIAEAGRAGEVRFLGEFENDATTTAKLVRKLAGRHGRLTFCYEAGPTGYGLYRQIRRLGYDCVVAAPSLIPRRPGDRVKTNRRDAVSLAKLLRAGELTAVWVPDERHEAMRDLTRAREAAVADLRGKRQQVSAFLLRYELRYAGQRTWSKAYQAWLAGLKLAHLEQRIAFEEMLLAVRQAEERIRRLEQAIQAAVEDWSLREAVIALMAMRGIDLTSATAFLAEIGDLSRFRSPRELMAYLGLVPSEHSTGSTIKRGPITKAGNRRARRTLVECAWSYQHPPRVGKDKQVKVAAAPQAVREIAWKAQLRLCARYRAFIRKGKLKTVAVTAVARELAAFIWAINRAIVPTRTAAN

SEQ ID NO: 172738 - protein, 418 aa, unidentified
MIDDVQWFVGIDWATQSHRACLLDVEGRHVSERDFAHDGAGLTELRDWLLEKTKAAPGQIAVAIETPHGPVVEMLLDHAFLVFAINPKQLDRFRDRFTVAGAKDDSRDARVLGSALRTDRQAFRRLVVDDPVVIELREWSRMADELQQERTRLANRVRQQLWRYYPQATELTDDVADDWFLALWQQVSTPAAAAKVSEKTIARILKDHRIRRLDATTVLLTLRKTPLFVAPGTTEAACAHIRNLAARLHLVNQQIKEAHRALDGLCARLEAATESPSGQIREQHDVTILRSWPGIGRIVLATLLTEATEPLRRRDYHALRALAGTAPVTRRSGKQCFVIRRLACNKRLQNAVHHWSRVAIQHDTAARRRYDALRRRGHGHARALRTVGDRLLYALCTTLKRQTLYNPDCQAVQMTASL

SEQ ID NO: 172739 - protein, 359 aa, unidentified
MNQQNTNSESQSEKVLAKVILLGLDVHADSITVVRQIDGGMVQPAQKFSPARLLDWVRRQQEQAEAVWSCYEAGPFGYVLHRQLEALGVRNVVVCPQSWDELSTGVKTDSGDARALCLRLALYAAGNHRVFSVVRVPTPAEEQARAQTRLRDQLRRTRQRIEAQGRSLLLAQGHRVTGRWWQTTRWLQLRGTLPPWLVELLEPLRECIVTAHQKTEHLTRTVQAAHPAAPPFGLGALSSEIIAREIGDWTRFSNRRQVASYTGLCPGEHSSGATRRQGPITKHGNPRLRHVLIEAAWRLTRYQSGYRAVARYHAVLAAPNAPRPARKKAIVAVARQLAVDLWRIATGRVQPRDLGLIIN

SEQ ID NO: 172740 - protein, 377 aa, unidentified
MAPLSNQQFKAFVGIDWADTKHDICLQQVGDDRREFDCIPHQVTRINEWAKALHQRFGGPIAIALELARGPIVSVLQKHAFVTLFPINRLILAKNRDAFKPSRAKDDPTDAELALDLLLRHPERFSPLRPQSAGMRFLLSLIEQRRELVGDKTRFTNRLTNALKQYYPQALEWFDDIDTVLFCDFLTRWPTLPAVRRASRKTLETFFHAHNCRRAQLIEGRLESIRCAVSLTDDPGIVAPHRLLALMLVAQLRTALAAIDVFDKEIAAVARTLPDFDLFDSLPGAGPHLTPRLLAAFGEQRDRFKGADELQRYSGIAPVTERSGKKCWVHWRWQCPTFLRQTFVEWAGQTINRSFWAGAYYRQQRAKGSSYQAAVRA

SEQ ID NO: 172741 - protein, 407 aa, unidentified
MEVLYPRSAGLDVHKDVVVACVRCVSTPVHQEVRSFHTTTSGLLSLVDWLNSHGCTHVAMEATGVYWKPVWHMLEEDFELVLANAAHIKNVPGRKTDVNDATWIADLLAHGLIRSSFVPPAAIQELRDLTRTRKQLVREVSQHSLRIQKILEDANLKLGSVLSDVLGRSGLAMLEAIIQGEADPEKLADLAQGNAREKRGELVEALRGRVSAHHRTMLKFHLDVIRALKRTLGELDVAVGKALTPIRERAQLLTTMPGISDIAAQVLVAEIGVDMTRFPDQGHLISWAGLCPRNDESAGKRRSTRVRKGAPWLKTTLVTAAWAAVRTKNSYLQAQFLRIKSRRGAKKAILAVAASMLTAVFFMLRDGVAYQDLGTDHFSRHDKTKTIQRLLRRLSDLGCNVAIAQPA

SEQ ID NO: 172742 - protein, 327 aa, unidentified
MQGPVYAGIDVSQEWLDVALTSTAPVKRWANDESGIAATVTWLKEQQPTLVVLEATGGLEVPVVAALACDGIPTAVVNPRQVRDFAKALGKLAKTDRIDAQVIARFGLAVTPAAKALPDEQTQELKALVARRRQVLDMRTAELNRRHKALPVVRRRIERVLAVLEAEVADLDKELQDRLKASPLWREQEELLQSVPGVGKALTFTLLAGLPELGSLNRKQISTLVGVAPLNRDSGAFRGKRRVWGGRASLRATLYMAALVATRCNPVIRSFYQRLLAAGKAKKVALTACMHKLLIILNAMVKYHTRWDPSLAGGRAGATSRTAPGAA

SEQ ID NO: 172743 - protein, 383 aa, unidentified
MGQVSTIGVDIAKRVFQVHGVDAAGAVVFRRQLRRTEVLKFFAKQPPCLVGIEACGSAHYWGREIAALGHQVRLMPPTRVKPYVKWGRKNDKIDAAACCEAVSRPSMRFVPLKTVEQQAALIVHRARQLLVEQRTRLGNAIRAHLAEIGIVAGKGQAGLGALLAMLGNPEDQHVPRVIRPVLMPLVEQWRNAGAQIAALERQIVAWHKSNPDSQRLATIPQFGPILSSAMVATLGEAARFDSGRRCSAWIGLVPKQNSSGGRERLGGITKTGDRYLRQLLVVAASGLIGRARAHPEVAPWFAELLARMPAKQAAVALANKMARIAWAVLTKKTPYRATTAGPPVAEAAPRRAPAAGLALPANVTSRLSVDIRPCPDLASAPCR

SEQ ID NO: 172744 - protein, 323 aa, unidentified
MTAPYDYHIGVDYHKSYSHLIVQDSCGKTLRSGRVKNDRQSLGSFLERYRQNSHAVMEATRNWMVMYDWLDDICDDVVLAHPLKVKAIADAKIKTDKIDATVLAHLLRADLVPEAWAPGDRVRELRLALRERMFYVRLRTMTKNRVVTVFDRVQIDRGLEFIGDINERIKQSEATIRAMTKTNGKVKLLKTIPGIGEFFARLIDAEIDDISRFRNPKKLAAYAGLVPSTYSSGGKTYHGKIIKQGNKWLRWAFVEAVQPAIATDPQLRAQYEHLKFRGVNKARVAIARKLLTITFQILRDQRPYERRGTNSKEGPSSTISRLS

SEQ ID NO: 172745 - protein, 522 aa, unidentified
MGVGCHQPVRLPRANPHSARGTTACHFPRFRSLKFPSDFAGPAVHETFATLRRRRHRGRYSLGAIKPDLKLDPGFLEHLRLSPRAVIGPGARFLEFFFTGPYADDATQEEEEMELLHRRCCGLDVHKETVVACLRLVSDGQVTTEVRTFQTTTADLLRLSEWLAANECTHVAMEATGVYWKPVWHILDDGEFELVLANAAHVKNVPGRKTDVNDAMWLAELLAHGLIRASFVPDTQTQEMRNLLRTRKQLVREQSSHVLRVQKTLEDANIKLDSVLTDLMGKSGRAMMEALIAGETNPTKLASLADPRVKASHEEFREALRGRVTKHHRFLLRLHLNQIDALDAAMATLDAQVEANLGPFRTAVDLIMSIPGIKNLSAHVIISEIGIDMSRFPSDAHLISWAGICPGNDESAGKRRSNRLRKGAPWLKTTLVQCAWAAVKKKNSYLQAQFYRIKVRRGPKKAIMAVAASILTAIYHMLKDGTMYQDLGCNHFDRRSTDQQKNRLVKRLTDLGYAVEIKPLAA

SEQ ID NO: 172746 - protein, 369 aa, unidentified
MNDITYVGLDVHKATVCVAIAESGRGGEVRQVGVFDNRPDVLSKMAARLGKGGRRLNFCYEAGPCGYGLHRLLAGCGYACVVVAPSLIPMKASDRVKTDRRDALMLAKLHRAGELTPIWLPDAAHEAMRDLVRARATAVRVLSKARQHLQGFLLRHDRIYRGARAWTLAYRRWLTTLRFDHPAQQIVLQDYIHAVQDSEVRRDRLTRQIEELLPTWSMAPVAAALQAMRGVALVVAVTVVAEVGDFRRFTNARQLMAYLGLVPSEHSSGSNTRRGGITKAGNTLARRVLIEGAWTYRMPACVSRKLHDRLEPLSSAIRDIAWKGQVRLCARYRRLAATGKPKVVVTTAIAREMVGFIWAIARVAQPVFV

SEQ ID NO: 172747 - protein, 442 aa, unidentified
MAMRKREDSPEVFPKAAGIDIGGSSHWVAVPAAAAEEPVREFGTMTDDLHAMADWLLACGVDTVALESTGVYWIPVYEVLERRGLTVWLVDTRQLKYVPGRKSDVMDCQWLQKLMSLGLLRAAWRPGDAVCVVRAVARQREVLLAEQGSWVQRMQKALVQMNLQLTEVLTDVMGMTGQAIVRAIVAGERDPKALAQHRHGRVKASAAEIERALTGNWREEHLFVLAQALAMFDSLAQRILECDAKIEALLVPLGRHEVELAGPGKRLGKNAPQFDARAALARWAGVDLTRINGLSVTTVMTILSEIGPDLSRFASIKHFCSWLGLCPGTKISGGKVLSARTRRSANRVRQALKLAAMSLSRNDSALGAFYRRLCARMDKPRANTAVAHKLARMVYFMLTRGEAFVDQGQQHYEEQQRQRSIAALRRRASALGFQIIPDTKTA

SEQ ID NO: 172748 - protein, 357 aa, unidentified
MTSDKYVGLDVHQASTSIVVLDCNGKLICESVIRTRADAIRDFISGLSGTIHVTFEEGTQAAWLYEVIRRLVAELVVCDPRQNKVLAAGNKGDRIDAKKLAELLRAGMLKSVYHSNHDTKMLKQLTHNYDSFVSDTTRVMSRIKAVFRGQGIPCSGRDVYYKRNREQWMTRLAEPGLRTRAQFLFDELEPLKALRRAAKNVMLKEARRHQAFRILSEVPTLGPIRIAQIIAAVGAPHRFRTRRQFWAYCGFAVVTRSTDDYRFEENGPLRRSRPPATRGLNRNFNRRLKHVFKSAALQGASKEPFKSYYQARVAAGMRPEMARLTLARKIANITLTLWKNGGQFNEHKLSEQHDRAT

SEQ ID NO: 172749 - protein, 479 aa, unidentified
MKAAQVKKGGSQAGKNHPLRRNRKQRRELARKIQAGDMSLEVVHPDAAGIDVGNESHYVAVPPSRDDPSVRRFGCVTAELREMAAWLRKCGIRTVAMQSTGVYWIGVYDVLEEAGLEVYLVNARETKNLPGKKTDVQESQWLMKLHTYGLLRNSFRPAQEIRTLRTYWRQRKDLVSSAAQYIQRMQKALTQMNVQLANVISDLSGVTGQAMVQAILQGERDGRKLAALRDHRVKASEEEVARSLEGNWREDLLFVLRQEQEGYEFCRKQMAACDRCLEEYLRQVEDRSGGASLPVEKRPSRLQRKRGKAPRFDLREALFRMTGVDLTQIDGIDGVTAAVVVSEAGWDMSKWATENHFVSWLRLCPDNRISGEKVIGKGRLATTNRLTVALKIAAHSLRQSDTYLGAQFRRLRSRLGAPVAIKAMAARLARLVYRMLRYGMKYVDRGAEFYEQQHRQRQILFLKRKALSLGLQIVEPMVA

SEQ ID NO: 172750 - protein, 368 aa, unidentified
MTKTVYIGMDVHSTNYTLSSYTCEADNCFSTVKLGPDVKNILKYISRIKKDHGGDIEIITGYEAGCLGYTLYKSLEKEGIKCIIIAPTTLPKQKAGEIKTDKRDAQKISRALGTGTYKSVYVPDQEDDDVKQYIRMRDDHKLTLKKTKQQINAFCLRNGYTFTEGKSKWTQKHIKWLRSLEMTSMQREILDEYLITFDYYTLRIKQMDEKIEEISRQERYKENVDKLCCFAGMSTHKALCHIVETGDFSRFAKAPSYSAYLGTVPGEDSSSTSVNRLPITKAGNRHLRLLDIEAAHAIGRTSKQKSRVLLERQRGCSPEVVAYADKANARMRKMYREISERKNKNVAAAAVARELACFIWGMMTDHIS

SEQ ID NO: 172751 - protein, 351 aa, unidentified
MPRTSAVHAVTTFGIDMGKNTLHMIGLDTRGGTVLREKISRGRITSRLANLPPCLIGIEAGMATHYVARELAALGHHVKQVPPTYAKPFRQGHKNDFRDAHAVAEAVQRPTTRFVPAKTNEQLDLQALRRVRSRLVSERTAVINQIRGFVLERGIIVRQGLRFLRQALPDILAKRTDVLSPRMVRIVADLASDWRQLDERIEAVTDEIKTLAKSDDSCGSVMTVPGIGPIISSAMVAAIGNGAAFAKGRDFSAWIGLVPKQMSTGDRTILGRISKRGNGYLRMLFMQAARVILLRPASWPKHGFGVWLARAAQRLHPNVLAAALANKLARIAWTVLAQERSYEARVTKAAA

SEQ ID NO: 172752 - protein, 312 aa, unidentified
MKNICGVDISKAGLDACIEPGSIRGSFRNDAAGIAELVAFCRQHRVELVAMEATAGYERRAFLALWEQGLPCAVTNARHVRLYAEAMGVLEKTDAIDAHIIARFAQAKNLKPTPLPSQAQQRLKALVARLRQITDDLVVQKQRRSSLLDNAQMLASIDEVIALLKRQSRTLEGEIASMIDDDPLWACLSDTFRSIKGVADRTVAWIMADLPEIGAYSNKAIAKLVGVAPIANDSGKRRGKRPVRGGRAGVRSILFLVAAIAARHDKSLGDFRNRLLAAGKEKMVIRIALARKLLVRLNAKARDARAQYANAT

SEQ ID NO: 172753 - protein, 394 aa, unidentified
MNGDSMFYLGIDIGKNTHVASLIDEKGKTYFKAFSFSNSTDGADSLVSKLAPYVDDLRIGMEATGHYWLSLYSFLYEKGFKIHVINPIQTDGWRHGIEIRKRKTDKIDSLLIADLLRYGDFVETSLSSEDLMSLRNLSRFRSYLVSSIGDLKRKTIAVLDQVFPEYASSFSDVFGKTSKEILLSFPTSADFEDISASQLNKVLENIHHKKFATNKIDELSLKAKDSFGITFCLDSFSLQIKLLIEQIIFIEDQISTIEEEISILMEKMDSPITTIPGIGNVNGATILGEIGDIHRFSNASKLVAYAGLDASVSQSGEYESTTNKMSKRGSPYLRKALFQSALRAEFCDPVFSKYYQKKISEGKHHLVATNAVARKLCHTIYAILTNNTPYAVQL

SEQ ID NO: 172754 - protein, 340 aa, unidentified
MNVIIGVDPHKATHTAVAIGPDEDELDRAQVRATRRQTEQLLSWAAPFEKRTWAIESAGGLGYLLAQELVAVGEEVLDVPATLASRVRVLASGSSDKNDPNDARSVAVAALRAPGLRSVAAADHGEILRLLAKRNTDIGNQRTRVVCRLHAALAELSAGGIAKELNASDAERLLAKVSPVTPVEQIRHELAHELLGEVRVLDVQLKESHRRIREAIRASTTSVTELFGVGPIIACMAIGYSGDIRRFRNRDHYAAYNGTAPVEFSSGGRVVHRLSQRGNRQLNHAIHMAAVCQIRQPHSEGRAYFDRKVAEGKTKKEALRALKRHVSNAIYRQLILDANK

SEQ ID NO: 172755 - protein, 315 aa, unidentified
MVSYLGIDVSSLSLDAAVRPQGTRLHVSNDPAGFEALLDGLCGLSIKRVLLEATGGYERNILRFLQDAGYKVIRVNPRRARAFAESIGVKAKTDAIDAEVLAHYAEVIPDQPTLRISPERALLRELLQQRDRLVQQRDDDRRRLKQAQFSAVSDFLKANLQHFKSQIKLIEQAISQQTEALKDERVTQLVQVKGIGLVTAGKLITLLPELGRVESKEIASLVGVAPFNHDSEKSVGKRSISGGRFEARRSLYMSCLVAIKYNPALKARYEALRGRGKVAKVALVACMRVLIVRLNAMLRTGKPWLDLVLPQPMRT

SEQ ID NO: 172756 - protein, 342 aa, unidentified
MDHFAGLDVSVKETSICILDDTGRIVREVKVASEPEALLKVLGNPAYRFKRIGLEAGPLSQWLFSALAEAELPVVCVETRHMQAVLKAQINKTDRNDARGIAQMIRAGLYRPVHVKTLRSQKLRMLLTHRKLLQSKAIAIENDLRGTLRNFGLKVGMVGKVRFEARIEELVENFPDLAVLVEPLLIVRRALREQIVILHRRLLAIVRDDEVCRRLMTTPGVGPVVALTYRATVDMPARFRKSKAVGAVFGLTCARYQSGEIDWSGRISRCGDEMMRVMLYEAAQSMLRSKKWSWLKAWAMQIARRRGLKKAIVALARRLAVILHRIWVDGTEFRWTRETAAA

SEQ ID NO: 172757 - protein, 365 aa, unidentified
MQKISTMRVCGKNALKGQLTVGLDLGDRSSSYCVLNESGEIVLEHKLPTTQEAMKQVFARMPRSRMAMETGTHSPWISRLLVELGHEVIVAHAQKVRLIVKSRRKDDRLDARTLARLARIDPELLSPVKHRSAQAQLHLTEIRARAGLVGARTALVNAARGLVKSSGERLRKCGTQQFNREITNGLSAGMREALEPLLREVESLNERIREYDRRIERMAKETYPEAMLLKQVKGVGDLIATTYVLTIEDPQRFRKSRDAGCFVGLQPGRRNSGDSEPQMHISKEGDEYLRTLLVQGAHYILGPFGEDSDLRRWGLKLSARGGKNAKKRAVVAVARKLAVLLHRLWVSGEVYEPLRNSQKAMGAAA

SEQ ID NO: 172758 - protein, 451 aa, unidentified
MTKKKMELDIINANCAGIDVGSKLHFVAVGQALEDVKQFGVYADDLTAICLHLKEYGVTSVAMESTGNYWQNLYVELEKHQMEVTLCNGKFTKHAKGKKTDVKDCRWIQKLHALGLLTGSFLPDETTEQLRTYCRQRTNWIDLAAEASHKMQKYLKLLNFRLDVVVKDICGLTGLAIIADICKGNLDPEKLSLHRHGNCRKSEEEIAKALKGNNRTDFLFGLRQEYDSYLFFQKKIEACDTQINAFLKTQINSNPDKKKLKTDDKMHKRVNKNSIKGIDLNQAAYQYFGGIDLMKIEGLSHSTILTIMSEVGPEGFTKFESSKQFTSWLRLAPNNKISGGKILSNKIPKGSNRLKIALRHAANAIGNLKETHLSDFFKRVAYRKGRATAVSATARKLAVIIWNMISKRVEYKAPTEYLFLDQKRKFNVIQKIKKNIAKLELKPEDVGFVTA

SEQ ID NO: 172759 - protein, 427 aa, unidentified
MAVVMIGIDPHKASHTAVAINAAEQSLGQLRVRASAVQAERLLGWAQPWPERAWAVEGAGGIGHLLAQQLLSAGERVLDVPPKLAARVRLLATGDINKNDPNDARSVAVAALRSAEVREVRQDDHAAVLKVWSKRHQDLAQARTQVACRLHQVLCELIPGGVPGQITAGQAGQILAAITPAGAVAAARWELAAELTEDLRGVDTRIRETRKKTAAAVRAAGTSLTGLFGVGPVIAAAVIGDVRHVSRFPNRDHFAAYNGTAPIEVSSGGRKIYRLSRRGNRRLNHAIHMAAVTQIRYRHSPGRAYYDKKLAEGKTGKEALRCLKRQISDAIFACLQADARRAATAPEKSPGGQPGNHSSSRAAGSNPEHRRFGQATPGPATHPTTPTAPFPAPLPTRASGRPGQEPGAARPRSGARRASLRRPPGSR

SEQ ID NO: 172760 - protein, 374 aa, unidentified
MSKIARIGIDTSKGSFELHGVNEKDEVVLRRTVRRRQFLEFMAKLEPTVIGLEACGASHHWARELRRLGHRVMLIPPQAVKPYVSPGRKNDKNDAEAICEAMSRPRVRARLVPVKSVEQSASQMLMGVRDSLLKRRTQLCNTIRGHAAEFGLVAAKGLDKIEPLLVRIAGDEGLPALAREMFADLGQEHAELSKRIAQIDRKLAAFHRSNELSRRLMEIPIVGPVGAGLLITRIINPRGFRSGRLCAAWVGLTPKNHSTGGKQRLGGITRAGDESLRAVLVSGATAYIQQVRRGRIVPSPWLAALLERKPPKLAAVALANKTVRIAWKLMTSGGRYDPTHRVDREGPGASLYGGLRAEPLAPSPTAGHSHAVAA

SEQ ID NO: 172761 - protein, 345 aa, unidentified
MLYVGLDLSRKRLDWQALLPDGERAAVGAVPPDRDGLSKLVRRLGDGEGVLAVIESMSGARFVHDELERCGWDVRIADALKARAIAPLACKTDTIDTWVLAELARLELVPEIWLPDPEVRAERERARFRLHLVKHRSSLKNRIHAILFQHGVPNTSSDLFGSAGRALLASLRLPEPWASTVAASLELIDLLDERIAACERDLRRLGAEHRYVPLLMTCPGIGWVLAFTIASEIGEIGRFASPRKLVGYTGLCPKVEQSGERDRRGRLRKNGPSYLRWALVEAAHTANRHPSYRPVHERFLARHGRERGTKLAAVKIGRRLAEAIWHMLTTNEPFAPAGAPASLAA

SEQ ID NO: 172762 - protein, 348 aa, unidentified
MSQSNIHQYVGLDVSLKETSICVVDESGKIVWRGRTDSTPQAIAEAIKKHARHVVRIGLESGQLSTWLFHGLNERSLPVICIDARHAKAALSLKVNKTDANDALGLAQIMRVGWYREVTVKGLDSQAVRALLVARAQLVSQITTLKNCVRGILKTFGFVVRTGSRSQFSKHVREAIHANPALAAIIEPTLRVLEAARAQLLVYDRAVIQRARSDETARQLMSAPGIGAIVVLAYMTGVESPGRFRRSSSVAAYFGMTPARYQSGEVDRAGRVSKCGDGMVRGLLFEAAKVLLSRSARPCALQSWGQALAKRIGTKKATMAVARKLAVILHRMWATGATFRWPTPAPAA

SEQ ID NO: 172763 - protein, 343 aa, unidentified
MEHFAGLDVSVKETSICIVDDTGRIVREVKVASEPEALLAVLKSSTYRFKRIGLEAGPLSQWLFSALAEAGLSVICVETRHMRAVLKAQINKTDRNDARGIAQMMRAGLYRPVHVKTLRSQKLRMLLTHRKLLQSKAIAVENDLRGTLRNFGLKVGIVGKLKFEARINELIENLPDLAVLVEPLLVVRRVLREQLGILHRRVLAIVQDDEVCRRLMTTPGVGPVVALTFRATVDVPARFRNSKAVGAVLGLTPSRYQSGEINRTGAISKCGDEMMRVMLYEAAQSMLVRSAKWSWLKAWAMQIARRRGVKKAIVALARRLAVIMHRIWVDGAEFRWSKNAVAA

SEQ ID NO: 172764 - protein, 343 aa, unidentified
MKLSRVGIDLAKNVYQLHGVDRSGKTVWKRRLKRHQWLQALLDKTEPSCVIGMEACASAHHWGRELQSRGYTVRLIPPQFVKPYVKSNKNDAKDAEAICEAMSRPTMRFVTVKTVAQQDIQATHRIRAELITQRTAKANQIRGLVAEYGLVAAKYMSSLRAAIPCWLEDAENGLTGDFRALLHGVWNDLLVLDDRVREMDKLIKRLAANNEDCVRLQQLRGFGPMIATAMVATVGDARQYHKSRQMAAAIGITPKQNSSGDKHRLLGISKRGDVYLRTLMIHGARSVVASAKHKDDPLSRWVTNIANKKHPNVAAVALANKTARMAWAILRNKTDYDPDYAIS

SEQ ID NO: 172765 - protein, 446 aa, unidentified
MAASNTSIRKVRDRCAAIDIGAEEHWTCVDPGLAEKHIRRFGAFTADLEELRDWLLSLGVTSVAMEATGVYWRELYAVLEAAGIEVLLADPRRTRNPRGRKTDMQDCQWIWELHAHGLLDGAYVPPEMVQELRTYLRHRRTHVDAAGVSLKEMQRAYSLMNIKLQHVIADLGGVSGMAITEAIVKGQRDPAILAKLRDRRCQTPEATVIKALRGNWKKAHLFLLKQALADYQHHREAIARCDAEIEHVLAAMPQRRQDGDGDDFARKRPTGKNDFAFDAQQHVYRVTGVDLAAIDGIGPNAALSLIGEIGTDLTAWPTSKAFCCWLGLCPNPKRSGGKLLGNLPTTANRASQIIREAAMGLRGNKLNPLSKQYNKIAIRRGSGKALRAIAHRLARIIYALFTKRTAYDRDALEPKVTQKKKASMIARLQAQAAALGYVLSQPPKPA

SEQ ID NO: 172766 - protein, 453 aa, unidentified
MAKKAKKIHTSKGIELKIVNPNAAGIDIADYEMQVCVPADRDGENNRRFGCFTRDLNEICSWLCACKVDTVAMEATGIYWLPLYFKLKDSGIDVVLVNARDVKNISEKKTDEADAEWLMLLHTYGLLKASFQPENEARKVRNLARHRNNILKASSKEVLHMQKAMGQMNIKLSNVLSDIAGKSGIAIIEAILAGERDPRSLALLADSRCKRSKEEIALSLEGTWGEDHLFELKQAYDLYKYLQGQMAECDRMIENALTSYTAKIDTEMGRYVKSGKPVCKKNAVSFDVEQYGYAIWGVNAMEIPGMSASSLLQLVGELGHDFVEKFDTPEKFSKWCNLVPNNKVSGGKLISSRVPKRKNPVGQIFRLCANTLKSAKNSLGVYFRRIRSRSGYMQAIVATAHKMARILYVMVKSKTAYDETKVGLDEQELLMKKIERAKYALNRLNAKLCNSMG

SEQ ID NO: 172767 - protein, 370 aa, unidentified
MLDTTTFVGLDVHARSIKAVSLDVMTGEVRCATFGYDAGAVAEWVRSVDPKARCVYESGVTGFDLQKRLSGLGVDCVVGAVSKMIKPSADRRRKNDRNDAEFLARMLSVGNVVEVWVPDDECEAARDLTRALEDARDDLSRAKQRLSKFLLRHGLAFDERTPAGRRKGNWTRAHWSWIESIRFAEGADNDALAYYVDAVRRAAEEKARLEGLVEAEARKPRWRRRVDSLRCLKGVDTATAADLVFEAGEFSRFRNARSFAAWVGLTPSEHSSGESDRRGAITKAGNKHLRKALVEAAWHYLTCSGRPKDLAKGQAPDRVARRHAAKGVRRLVERREALLARGVHGNKANVATARELACWVWAVGLMAEEA
